United States Patent Application Publication US 2005/0244851 A1 - sequence listing, part 124

SEQ ID NO: 4838501 - DNA, 25 bp, Homo sapien
cctctccttgacttccgcaatgatt

SEQ ID NO: 4838502 - DNA, 25 bp, Homo sapien
agcctgactgtatcttttaggtagg

SEQ ID NO: 4838503 - DNA, 25 bp, Homo sapien
tgatgttgggtcactttttatccat

SEQ ID NO: 4838504 - DNA, 25 bp, Homo sapien
tatttgctatatgtctctggatgcg

SEQ ID NO: 4838505 - DNA, 25 bp, Homo sapien
ttattggactctatctctccatgta

SEQ ID NO: 4838506 - DNA, 25 bp, Homo sapien
aaccaacttttatcttgttgattct

SEQ ID NO: 4838507 - DNA, 25 bp, Homo sapien
ttcaatgagttcctatcaatgtacc

SEQ ID NO: 4838508 - DNA, 25 bp, Homo sapien
tcaatgagttcctatcaatgtacca

SEQ ID NO: 4838509 - DNA, 25 bp, Homo sapien
aatgagttcctatcaatgtaccatc

SEQ ID NO: 4838510 - DNA, 25 bp, Homo sapien
gagttcctatcaatgtaccatcatc

SEQ ID NO: 4838511 - DNA, 25 bp, Homo sapien
tgtgcttccctttctgcctgtgact

SEQ ID NO: 4838512 - DNA, 25 bp, Homo sapien
cctttctgcctgtgactgaatgggc

SEQ ID NO: 4838513 - DNA, 25 bp, Homo sapien
ttccctttctgcctgtgactgaatg

SEQ ID NO: 4838514 - DNA, 25 bp, Homo sapien
ctgtgcttccctttctgcctgtgac

SEQ ID NO: 4838515 - DNA, 25 bp, Homo sapien
ggcacagtcagccaggtctccttac

SEQ ID NO: 4838516 - DNA, 25 bp, Homo sapien
aattgagctttgagtgttctaagca

SEQ ID NO: 4838517 - DNA, 25 bp, Homo sapien
tgagtgttctaagcaggacaggtaa

SEQ ID NO: 4838518 - DNA, 25 bp, Homo sapien
taagatctgcgtctggcacagtcag

SEQ ID NO: 4838519 - DNA, 25 bp, Homo sapien
caagcacaacctctcccccatatta

SEQ ID NO: 4838520 - DNA, 25 bp, Homo sapien
agttttccctcacgtggcctattat

SEQ ID NO: 4838521 - DNA, 25 bp, Homo sapien
aagcacaacctctcccccatattat

SEQ ID NO: 4838522 - DNA, 25 bp, Homo sapien
cctcacgtggcctattatttttact

SEQ ID NO: 4838523 - DNA, 25 bp, Homo sapien
ggtgctgcggcaccaaggcagtctc

SEQ ID NO: 4838524 - DNA, 25 bp, Homo sapien
tggtttgaacccaagtgacggggca

SEQ ID NO: 4838525 - DNA, 25 bp, Homo sapien
caatagtggaatttccggtggtttg

SEQ ID NO: 4838526 - DNA, 25 bp, Homo sapien
acctcctttgtgtcttagttgctgt

SEQ ID NO: 4838527 - DNA, 25 bp, Homo sapien
gatcttttatgggtgtcgcgctggg

SEQ ID NO: 4838528 - DNA, 25 bp, Homo sapien
gcacagatcttttatgggtgtcgcg

SEQ ID NO: 4838529 - DNA, 25 bp, Homo sapien
cagatcttttatgggtgtcgcgctg

SEQ ID NO: 4838530 - DNA, 25 bp, Homo sapien
cacagatcttttatgggtgtcgcgc

SEQ ID NO: 4838531 - DNA, 25 bp, Homo sapien
ggaccggcgcttagcatgctaagga

SEQ ID NO: 4838532 - DNA, 25 bp, Homo sapien
ccggcgcttagcatgctaaggacct

SEQ ID NO: 4838533 - DNA, 25 bp, Homo sapien
aggggaccggcgcttagcatgctaa

SEQ ID NO: 4838534 - DNA, 25 bp, Homo sapien
gcgcttagcatgctaaggacctgca

SEQ ID NO: 4838535 - DNA, 25 bp, Homo sapien
tgctaacagacaagactccaggatt

SEQ ID NO: 4838536 - DNA, 25 bp, Homo sapien
cttaaacctggtgcctacagatgca

SEQ ID NO: 4838537 - DNA, 25 bp, Homo sapien
ttctactggatgcagacagaagctc

SEQ ID NO: 4838538 - DNA, 25 bp, Homo sapien
tacatccgggtgtgctggagcaaat

SEQ ID NO: 4838539 - DNA, 25 bp, Homo sapien
caacagtgtgtaagcccagaattct

SEQ ID NO: 4838540 - DNA, 25 bp, Homo sapien
gaaaggaatactggtaacgacaaga

SEQ ID NO: 4838541 - DNA, 25 bp, Homo sapien
agaattcttacataagcccatggag

SEQ ID NO: 4838542 - DNA, 25 bp, Homo sapien
tactggtaacgacaagattgaattc

SEQ ID NO: 4838543 - DNA, 25 bp, Homo sapien
agaaggttgatggatcatgagcagc

SEQ ID NO: 4838544 - DNA, 25 bp, Homo sapien
tgtgaggagggtcttgttatagcag

SEQ ID NO: 4838545 - DNA, 25 bp, Homo sapien
gttatagcaggtggcccaaagaagg

SEQ ID NO: 4838546 - DNA, 25 bp, Homo sapien
ggtcagtggaatgatgctgtgagga

SEQ ID NO: 4838547 - DNA, 25 bp, Homo sapien
tgtagttgagctgactgcaaggtgc

SEQ ID NO: 4838548 - DNA, 25 bp, Homo sapien
tctgcaacgaatcccaaaagtgtgt

SEQ ID NO: 4838549 - DNA, 25 bp, Homo sapien
tgcaaggtgcttgacacgcaagaga

SEQ ID NO: 4838550 - DNA, 25 bp, Homo sapien
ccaaaagtgtgtagttgagctgact

SEQ ID NO: 4838551 - DNA, 25 bp, Homo sapien
cacagagtcctttgtcgacgaatgt

SEQ ID NO: 4838552 - DNA, 25 bp, Homo sapien
aaggctgttgctctgatgcccacag

SEQ ID NO: 4838553 - DNA, 25 bp, Homo sapien
gattgatggagcttggacatgcacc

SEQ ID NO: 4838554 - DNA, 25 bp, Homo sapien
cagtgaacataggaatttagggatc

SEQ ID NO: 4838555 - DNA, 25 bp, Homo sapien
tgttcaacgatggttgaagctcatg

SEQ ID NO: 4838556 - DNA, 25 bp, Homo sapien
aaaatgttcaacgatggttgaagct

SEQ ID NO: 4838557 - DNA, 25 bp, Homo sapien
atgttcaacgatggttgaagctcat

SEQ ID NO: 4838558 - DNA, 25 bp, Homo sapien
aatgttcaacgatggttgaagctca

SEQ ID NO: 4838559 - DNA, 25 bp, Homo sapien
ccttttggtactccaagcagcacca

SEQ ID NO: 4838560 - DNA, 25 bp, Homo sapien
gccttttggtactccaagcagcacc

SEQ ID NO: 4838561 - DNA, 25 bp, Homo sapien
gtccattctctaagaaagatcagta

SEQ ID NO: 4838562 - DNA, 25 bp, Homo sapien
gttggtccattctctaagaaagatc

SEQ ID NO: 4838563 - DNA, 25 bp, Homo sapien
tattcaacgcttgattggctttaaa

SEQ ID NO: 4838564 - DNA, 25 bp, Homo sapien
tgcaattttattcaacgcttgattg

SEQ ID NO: 4838565 - DNA, 25 bp, Homo sapien
aaaacagcccaagttgcaattttat

SEQ ID NO: 4838566 - DNA, 25 bp, Homo sapien
caattttattcaacgcttgattggc

SEQ ID NO: 4838567 - DNA, 25 bp, Homo sapien
tcttccttggagatgcgcagtattt

SEQ ID NO: 4838568 - DNA, 25 bp, Homo sapien
ctgatgatgaatttcattgagcatc

SEQ ID NO: 4838569 - DNA, 25 bp, Homo sapien
tcttcgattctagccatgcttatgg

SEQ ID NO: 4838570 - DNA, 25 bp, Homo sapien
gcacaggtccacacaaaattttgta

SEQ ID NO: 4838571 - DNA, 25 bp, Homo sapien
taaatcctagctctaaaggcaccag

SEQ ID NO: 4838572 - DNA, 25 bp, Homo sapien
tcttgagcccagtagatgccatttg

SEQ ID NO: 4838573 - DNA, 25 bp, Homo sapien
gaaaaagatcctgagcccgaaagag

SEQ ID NO: 4838574 - DNA, 25 bp, Homo sapien
taaacaaatagatacctccctggag

SEQ ID NO: 4838575 - DNA, 25 bp, Homo sapien
caagtttgatgggaaacagagcacc

SEQ ID NO: 4838576 - DNA, 25 bp, Homo sapien
tccctgcagatgaagcatgagtgag

SEQ ID NO: 4838577 - DNA, 25 bp, Homo sapien
cctattctgaccaatcgtggtggaa

SEQ ID NO: 4838578 - DNA, 25 bp, Homo sapien
tgttccctgcttggtgatactcgag

SEQ ID NO: 4838579 - DNA, 25 bp, Homo sapien
gatctttacttctaagctgagtctg

SEQ ID NO: 4838580 - DNA, 25 bp, Homo sapien
tctttacttctaagctgagtctgaa

SEQ ID NO: 4838581 - DNA, 25 bp, Homo sapien
ggaggatctttacttctaagctgag

SEQ ID NO: 4838582 - DNA, 25 bp, Homo sapien
gagtctgaagttatctttctgggga

SEQ ID NO: 4838583 - DNA, 25 bp, Homo sapien
aactccactgaagggggcatcaacg

SEQ ID NO: 4838584 - DNA, 25 bp, Homo sapien
gcatcaacgggatgcactggggaca

SEQ ID NO: 4838585 - DNA, 25 bp, Homo sapien
acatgggttggagggtagttgaggc

SEQ ID NO: 4838586 - DNA, 25 bp, Homo sapien
attttaactccactgaagggggcat

SEQ ID NO: 4838587 - DNA, 25 bp, Homo sapien
gatctgctgatctcttgatccaccg

SEQ ID NO: 4838588 - DNA, 25 bp, Homo sapien
ggactccttagcttccataaccagg

SEQ ID NO: 4838589 - DNA, 25 bp, Homo sapien
tgttctgcaatcatagtcctatcac

SEQ ID NO: 4838590 - DNA, 25 bp, Homo sapien
gccccattgtgctttgtactaaccc

SEQ ID NO: 4838591 - DNA, 25 bp, Homo sapien
aaacttcctggtccaggtagtcact

SEQ ID NO: 4838592 - DNA, 25 bp, Homo sapien
cataaacttcctggtccaggtagtc

SEQ ID NO: 4838593 - DNA, 25 bp, Homo sapien
ctctggaacggtcgattggtcataa

SEQ ID NO: 4838594 - DNA, 25 bp, Homo sapien
tggaacggtcgattggtcataaact

SEQ ID NO: 4838595 - DNA, 25 bp, Homo sapien
ttccggggtgaaggacattggtgac

SEQ ID NO: 4838596 - DNA, 25 bp, Homo sapien
ctttccggggtgaaggacattggtg

SEQ ID NO: 4838597 - DNA, 25 bp, Homo sapien
tgcctttccggggtgaaggacattg

SEQ ID NO: 4838598 - DNA, 25 bp, Homo sapien
tgttgcctttccggggtgaaggaca

SEQ ID NO: 4838599 - DNA, 25 bp, Homo sapien
gagaatcatccaggcggcttgcttg

SEQ ID NO: 4838600 - DNA, 25 bp, Homo sapien
gattctactaactcaaccacgcatg

SEQ ID NO: 4838601 - DNA, 25 bp, Homo sapien
gagggttcgttcttttgcatcaggg

SEQ ID NO: 4838602 - DNA, 25 bp, Homo sapien
cttggtgtccgagagaaaagctact

SEQ ID NO: 4838603 - DNA, 25 bp, Homo sapien
gcaaaagctcgcaggtgattctcat

SEQ ID NO: 4838604 - DNA, 25 bp, Homo sapien
cgctaaacttgcaggaggaatccca

SEQ ID NO: 4838605 - DNA, 25 bp, Homo sapien
caagagacgaatacatttggagcca

SEQ ID NO: 4838606 - DNA, 25 bp, Homo sapien
tacaagctatgagaacctgggcagg

SEQ ID NO: 4838607 - DNA, 25 bp, Homo sapien
ctgcagatgaaagggaagccctcat

SEQ ID NO: 4838608 - DNA, 25 bp, Homo sapien
gccagacaagatggcaaagtgtgca

SEQ ID NO: 4838609 - DNA, 25 bp, Homo sapien
tggcaaagtgtgcagatggttgcaa

SEQ ID NO: 4838610 - DNA, 25 bp, Homo sapien
gcaaagtgtgcagatggttgcaaag

SEQ ID NO: 4838611 - DNA, 25 bp, Homo sapien
aagatggcaaagtgtgcagatggtt

SEQ ID NO: 4838612 - DNA, 25 bp, Homo sapien
ggtccctcagaacatcttcctggaa

SEQ ID NO: 4838613 - DNA, 25 bp, Homo sapien
ctggtccctcagaacatcttcctgg

SEQ ID NO: 4838614 - DNA, 25 bp, Homo sapien
aaggctgtcggcttaagttgcaagg

SEQ ID NO: 4838615 - DNA, 25 bp, Homo sapien
aacatcttcctggaagggcctggcc

SEQ ID NO: 4838616 - DNA, 25 bp, Homo sapien
actctgagggatggagcccgcaaat

SEQ ID NO: 4838617 - DNA, 25 bp, Homo sapien
cactctgagggatggagcccgcaaa

SEQ ID NO: 4838618 - DNA, 25 bp, Homo sapien
gccactctgagggatggagcccgca

SEQ ID NO: 4838619 - DNA, 25 bp, Homo sapien
tctgagggatggagcccgcaaatga

SEQ ID NO: 4838620 - DNA, 25 bp, Homo sapien
gctaaataacatatcacctcccaga

SEQ ID NO: 4838621 - DNA, 25 bp, Homo sapien
tgttgtcccatggatctcctgaact

SEQ ID NO: 4838622 - DNA, 25 bp, Homo sapien
taactataggtaccttgttgtccca

SEQ ID NO: 4838623 - DNA, 25 bp, Homo sapien
aattatgtacaagagggtatacaac

SEQ ID NO: 4838624 - DNA, 25 bp, Homo sapien
aatgaccgcgattgcctgggatgag

SEQ ID NO: 4838625 - DNA, 25 bp, Homo sapien
ggcatcccaggtagacagtggttga

SEQ ID NO: 4838626 - DNA, 25 bp, Homo sapien
cgacccgggcatgggaggcatccca

SEQ ID NO: 4838627 - DNA, 25 bp, Homo sapien
gcaggtttgggctggcgacccgggc

SEQ ID NO: 4838628 - DNA, 25 bp, Homo sapien
aggaagttggcattggtctcattgg

SEQ ID NO: 4838629 - DNA, 25 bp, Homo sapien
tgatgtgtggagtccggtgcctggt

SEQ ID NO: 4838630 - DNA, 25 bp, Homo sapien
gttgatgtgtggagtccggtgcctg

SEQ ID NO: 4838631 - DNA, 25 bp, Homo sapien
gatgtgtggagtccggtgcctggtt

SEQ ID NO: 4838632 - DNA, 25 bp, Homo sapien
ttgatgtgtggagtccggtgcctgg

SEQ ID NO: 4838633 - DNA, 25 bp, Homo sapien
ttttggaccatagagaaatgtcttc

SEQ ID NO: 4838634 - DNA, 25 bp, Homo sapien
ccagcaggctggatcttgatatgtg

SEQ ID NO: 4838635 - DNA, 25 bp, Homo sapien
ggccagcaggctggatcttgatatg

SEQ ID NO: 4838636 - DNA, 25 bp, Homo sapien
tcttagttggaaagattttggacca

SEQ ID NO: 4838637 - DNA, 25 bp, Homo sapien
aggaagaagacacggagcacattcc

SEQ ID NO: 4838638 - DNA, 25 bp, Homo sapien
aagacacggagcacattcctgttag

SEQ ID NO: 4838639 - DNA, 25 bp, Homo sapien
agaagacacggagcacattcctgtt

SEQ ID NO: 4838640 - DNA, 25 bp, Homo sapien
gcaggaagaagacacggagcacatt

SEQ ID NO: 4838641 - DNA, 25 bp, Homo sapien
ccgctggaacatcgtgggtctgccg

SEQ ID NO: 4838642 - DNA, 25 bp, Homo sapien
gtgggaaatggtaggatgttctccc

SEQ ID NO: 4838643 - DNA, 25 bp, Homo sapien
cgctggaacatcgtgggtctgccgt

SEQ ID NO: 4838644 - DNA, 25 bp, Homo sapien
gtaagtgggaaatggtaggatgttc

SEQ ID NO: 4838645 - DNA, 25 bp, Homo sapien
tagatatttccctggcaatgatctt

SEQ ID NO: 4838646 - DNA, 25 bp, Homo sapien
gaagctctctctgccgagatataga

SEQ ID NO: 4838647 - DNA, 25 bp, Homo sapien
cctgagacagggtgttttgaccaac

SEQ ID NO: 4838648 - DNA, 25 bp, Homo sapien
aacatctgatttttttgatttccat

SEQ ID NO: 4838649 - DNA, 25 bp, Homo sapien
gcctttattgaccgcttgtgaatga

SEQ ID NO: 4838650 - DNA, 25 bp, Homo sapien
ctttattgaccgcttgtgaatgatc

SEQ ID NO: 4838651 - DNA, 25 bp, Homo sapien
agcctttattgaccgcttgtgaatg

SEQ ID NO: 4838652 - DNA, 25 bp, Homo sapien
caagcctttattgaccgcttgtgaa

SEQ ID NO: 4838653 - DNA, 25 bp, Homo sapien
tccccgtccacgttaccgcattcag

SEQ ID NO: 4838654 - DNA, 25 bp, Homo sapien
tccacgttaccgcattcagagcttg

SEQ ID NO: 4838655 - DNA, 25 bp, Homo sapien
cgtccacgttaccgcattcagagct

SEQ ID NO: 4838656 - DNA, 25 bp, Homo sapien
tcttctccccgtccacgttaccgca

SEQ ID NO: 4838657 - DNA, 25 bp, Homo sapien
ccctggcgccaggcttggccaagcc

SEQ ID NO: 4838658 - DNA, 25 bp, Homo sapien
ttgaagttggtattttagcggcaac

SEQ ID NO: 4838659 - DNA, 25 bp, Homo sapien
cctgattctcccacgacgtccctgg

SEQ ID NO: 4838660 - DNA, 25 bp, Homo sapien
ttttagcggcaactccgaagggcgc

SEQ ID NO: 4838661 - DNA, 25 bp, Homo sapien
aagggcgcggagtgacagcgcgtga

SEQ ID NO: 4838662 - DNA, 25 bp, Homo sapien
tggaggggggaagcgcagaacccga

SEQ ID NO: 4838663 - DNA, 25 bp, Homo sapien
ctggaggggggaagcgcagaacccg

SEQ ID NO: 4838664 - DNA, 25 bp, Homo sapien
cccccagccgtggccagcccttccg

SEQ ID NO: 4838665 - DNA, 25 bp, Homo sapien
cgtccctcccgaagagaagaggctg

SEQ ID NO: 4838666 - DNA, 25 bp, Homo sapien
gctcgcgccgtatccttcctcttct

SEQ ID NO: 4838667 - DNA, 25 bp, Homo sapien
ggcagctccgaagccactggcaagc

SEQ ID NO: 4838668 - DNA, 25 bp, Homo sapien
aggaggtgcagggcctggccagagc

SEQ ID NO: 4838669 - DNA, 25 bp, Homo sapien
gaggaggtgcagggcctggccagag

SEQ ID NO: 4838670 - DNA, 25 bp, Homo sapien
ggtgcagggcctggccagagcgggt

SEQ ID NO: 4838671 - DNA, 25 bp, Homo sapien
gaggtgcagggcctggccagagcgg

SEQ ID NO: 4838672 - DNA, 25 bp, Homo sapien
cagggagaccatcggggtgcaacct

SEQ ID NO: 4838673 - DNA, 25 bp, Homo sapien
tccttgggcagggagaccatcgggg

SEQ ID NO: 4838674 - DNA, 25 bp, Homo sapien
gtggctgtggccgatgtccaccctc

SEQ ID NO: 4838675 - DNA, 25 bp, Homo sapien
taagagcaaagacaaggtggctgtg

SEQ ID NO: 4838676 - DNA, 25 bp, Homo sapien
ttacccaatgcccttccctagtctc

SEQ ID NO: 4838677 - DNA, 25 bp, Homo sapien
aaatgctgcgcatagcatttattta

SEQ ID NO: 4838678 - DNA, 25 bp, Homo sapien
ccgagataataagacagtacatgga

SEQ ID NO: 4838679 - DNA, 25 bp, Homo sapien
atgggattcaccgagataataagac

SEQ ID NO: 4838680 - DNA, 25 bp, Homo sapien
catggaaaatgctgcgcatagcatt

SEQ ID NO: 4838681 - DNA, 25 bp, Homo sapien
ccacgttgcagggattttccttctt

SEQ ID NO: 4838682 - DNA, 25 bp, Homo sapien
ggtgcatccacgttgcagggatttt

SEQ ID NO: 4838683 - DNA, 25 bp, Homo sapien
agaggtgcatccacgttgcagggat

SEQ ID NO: 4838684 - DNA, 25 bp, Homo sapien
catccacgttgcagggattttcctt

SEQ ID NO: 4838685 - DNA, 25 bp, Homo sapien
caagcctttattgaccgcttgtgaa

SEQ ID NO: 4838686 - DNA, 25 bp, Homo sapien
ctttattgaccgcttgtgaatgatc

SEQ ID NO: 4838687 - DNA, 25 bp, Homo sapien
gcctttattgaccgcttgtgaatga

SEQ ID NO: 4838688 - DNA, 25 bp, Homo sapien
agcctttattgaccgcttgtgaatg

SEQ ID NO: 4838689 - DNA, 25 bp, Homo sapien
tgtttctctccccaatctctttctg

SEQ ID NO: 4838690 - DNA, 25 bp, Homo sapien
catgtgccgtttccttggtggattg

SEQ ID NO: 4838691 - DNA, 25 bp, Homo sapien
tgtctccctttcttacggtctctct

SEQ ID NO: 4838692 - DNA, 25 bp, Homo sapien
tcgatgatgctcgatggcgggtttt

SEQ ID NO: 4838693 - DNA, 25 bp, Homo sapien
tattgagacgagagaatggtgatga

SEQ ID NO: 4838694 - DNA, 25 bp, Homo sapien
tggtttattgagacgagagaatggt

SEQ ID NO: 4838695 - DNA, 25 bp, Homo sapien
cttttaccaagtatactgcttgcca

SEQ ID NO: 4838696 - DNA, 25 bp, Homo sapien
gtttattgagacgagagaatggtga

SEQ ID NO: 4838697 - DNA, 25 bp, Homo sapien
ggcgcttaacataccaaggacctgt

SEQ ID NO: 4838698 - DNA, 25 bp, Homo sapien
gcgcttaacataccaaggacctgta

SEQ ID NO: 4838699 - DNA, 25 bp, Homo sapien
ttaacataccaaggacctgtactgg

SEQ ID NO: 4838700 - DNA, 25 bp, Homo sapien
gcttaacataccaaggacctgtact

SEQ ID NO: 4838701 - DNA, 25 bp, Homo sapien
agagaaggtttttgtgagttcctat

SEQ ID NO: 4838702 - DNA, 25 bp, Homo sapien
tgtgagttcctatgcatagtggaga

SEQ ID NO: 4838703 - DNA, 25 bp, Homo sapien
ttcctatgcatagtggagacctgtt

SEQ ID NO: 4838704 - DNA, 25 bp, Homo sapien
gtttttgtgagttcctatgcatagt

SEQ ID NO: 4838705 - DNA, 25 bp, Homo sapien
cacgcaagagattccacaaatggga

SEQ ID NO: 4838706 - DNA, 25 bp, Homo sapien
acgcaagagattccacaaatgggat

SEQ ID NO: 4838707 - DNA, 25 bp, Homo sapien
gtttcctctggagcggtcgattgat

SEQ ID NO: 4838708 - DNA, 25 bp, Homo sapien
tgtttcctctggagcggtcgattga

SEQ ID NO: 4838709 - DNA, 25 bp, Homo sapien
tcctctggagcggtcgattgatcat

SEQ ID NO: 4838710 - DNA, 25 bp, Homo sapien
tctggagcggtcgattgatcatgaa

SEQ ID NO: 4838711 - DNA, 25 bp, Homo sapien
tatgaagatgacatccattgtggtc

SEQ ID NO: 4838712 - DNA, 25 bp, Homo sapien
tacattttgttgcctttccgggatg

SEQ ID NO: 4838713 - DNA, 25 bp, Homo sapien
tgtacattttgttgcctttccggga

SEQ ID NO: 4838714 - DNA, 25 bp, Homo sapien
attttgttgcctttccgggatgaag

SEQ ID NO: 4838715 - DNA, 25 bp, Homo sapien
gaaatgtctttgagctgaaggtcat

SEQ ID NO: 4838716 - DNA, 25 bp, Homo sapien
caggtggaacgaagagggtgagcat

SEQ ID NO: 4838717 - DNA, 25 bp, Homo sapien
actggaaatgtctttgagctgaagg

SEQ ID NO: 4838718 - DNA, 25 bp, Homo sapien
tgaaggtcatgtgcaggtggaacga

SEQ ID NO: 4838719 - DNA, 25 bp, Homo sapien
tcccagctgacctggggaagtgcag

SEQ ID NO: 4838720 - DNA, 25 bp, Homo sapien
tctaatagttcctgcactagtggct

SEQ ID NO: 4838721 - DNA, 25 bp, Homo sapien
gggcttctaatagttcctgcactag

SEQ ID NO: 4838722 - DNA, 25 bp, Homo sapien
tcctgcactagtggcttttgagatg

SEQ ID NO: 4838723 - DNA, 25 bp, Homo sapien
ggcttgaaagcttgttggcttaagc

SEQ ID NO: 4838724 - DNA, 25 bp, Homo sapien
ttgttggcttaagctgcaaggtgta

SEQ ID NO: 4838725 - DNA, 25 bp, Homo sapien
tgaaagcttgttggcttaagctgca

SEQ ID NO: 4838726 - DNA, 25 bp, Homo sapien
gcttgttggcttaagctgcaaggtg

SEQ ID NO: 4838727 - DNA, 25 bp, Homo sapien
tacaaaacccagtgaggccggctgt

SEQ ID NO: 4838728 - DNA, 25 bp, Homo sapien
ttggcgctgccactctgagtgatgg

SEQ ID NO: 4838729 - DNA, 25 bp, Homo sapien
caaaacccagtgaggccggctgtct

SEQ ID NO: 4838730 - DNA, 25 bp, Homo sapien
gctgccactctgagtgatggagccc

SEQ ID NO: 4838731 - DNA, 25 bp, Homo sapien
gctcctggtcttgcaaactgtggtt

SEQ ID NO: 4838732 - DNA, 25 bp, Homo sapien
tgctcctggtcttgcaaactgtggt

SEQ ID NO: 4838733 - DNA, 25 bp, Homo sapien
tgatgtgtggagtccggtgcctggt

SEQ ID NO: 4838734 - DNA, 25 bp, Homo sapien
gttgatgtgtggagtccggtgcctg

SEQ ID NO: 4838735 - DNA, 25 bp, Homo sapien
gatgtgtggagtccggtgcctggtt

SEQ ID NO: 4838736 - DNA, 25 bp, Homo sapien
ttgatgtgtggagtccggtgcctgg

SEQ ID NO: 4838737 - DNA, 25 bp, Homo sapien
tcagggtccaggattccaggaagca

SEQ ID NO: 4838738 - DNA, 25 bp, Homo sapien
ggttcactcccacgctggggacctg

SEQ ID NO: 4838739 - DNA, 25 bp, Homo sapien
gcaggtggcccacccggttcactcc

SEQ ID NO: 4838740 - DNA, 25 bp, Homo sapien
atgtccccctggttctcagggtcca

SEQ ID NO: 4838741 - DNA, 25 bp, Homo sapien
gttattctcatcttggggctcctgc

SEQ ID NO: 4838742 - DNA, 25 bp, Homo sapien
tcctgcagagggattcctgcagagg

SEQ ID NO: 4838743 - DNA, 25 bp, Homo sapien
gaaggttattctcatcttggggctc

SEQ ID NO: 4838744 - DNA, 25 bp, Homo sapien
gggattcctgcagaggtgcatccac

SEQ ID NO: 4838745 - DNA, 25 bp, Homo sapien
acaatgcccgccagacacattcctc

SEQ ID NO: 4838746 - DNA, 25 bp, Homo sapien
gaaaagagggaatcttgattttcaa

SEQ ID NO: 4838747 - DNA, 25 bp, Homo sapien
ccccttgaaaagagggaatcttgat

SEQ ID NO: 4838748 - DNA, 25 bp, Homo sapien
tctgtatctgctcagtccagtggcc

SEQ ID NO: 4838749 - DNA, 25 bp, Homo sapien
aattcttgacagaaccaattgacat

SEQ ID NO: 4838750 - DNA, 25 bp, Homo sapien
aaattcttgacagaaccaattgaca

SEQ ID NO: 4838751 - DNA, 25 bp, Homo sapien
tgcgcagcagaacagtcgaatctca

SEQ ID NO: 4838752 - DNA, 25 bp, Homo sapien
gcggaggctgcgcagcagaacagtc

SEQ ID NO: 4838753 - DNA, 25 bp, Homo sapien
tacaaagtgccctgcggaggctgcg

SEQ ID NO: 4838754 - DNA, 25 bp, Homo sapien
ggctgcgcagcagaacagtcgaatc

SEQ ID NO: 4838755 - DNA, 25 bp, Homo sapien
aggtgattctggatatgcagtcgca

SEQ ID NO: 4838756 - DNA, 25 bp, Homo sapien
ggtgattctggatatgcagtcgcat

SEQ ID NO: 4838757 - DNA, 25 bp, Homo sapien
gtgattctggatatgcagtcgcata

SEQ ID NO: 4838758 - DNA, 25 bp, Homo sapien
ggacatctaatctcacagcagactc

SEQ ID NO: 4838759 - DNA, 25 bp, Homo sapien
gacatctaatctcacagcagactca

SEQ ID NO: 4838760 - DNA, 25 bp, Homo sapien
tctaatctcacagcagactcatctc

SEQ ID NO: 4838761 - DNA, 25 bp, Homo sapien
catctaatctcacagcagactcatc

SEQ ID NO: 4838762 - DNA, 25 bp, Homo sapien
ctgacttcagctgtggcactacccc

SEQ ID NO: 4838763 - DNA, 25 bp, Homo sapien
tggtgtcgtggcatcagtgatgtag

SEQ ID NO: 4838764 - DNA, 25 bp, Homo sapien
ccaggaatggtgtcgtggcatcagt

SEQ ID NO: 4838765 - DNA, 25 bp, Homo sapien
tgtcgtggcatcagtgatgtaggct

SEQ ID NO: 4838766 - DNA, 25 bp, Homo sapien
catgtatggaagacatgctcctgtg

SEQ ID NO: 4838767 - DNA, 25 bp, Homo sapien
tcttatgtgagctgcctgacacaga

SEQ ID NO: 4838768 - DNA, 25 bp, Homo sapien
tgtatggaagacatgctcctgtgat

SEQ ID NO: 4838769 - DNA, 25 bp, Homo sapien
cagagtcatctcttatgtgagctgc

SEQ ID NO: 4838770 - DNA, 25 bp, Homo sapien
actctctctgagaggatccagaact

SEQ ID NO: 4838771 - DNA, 25 bp, Homo sapien
gtccaagtcacacagagccacggaa

SEQ ID NO: 4838772 - DNA, 25 bp, Homo sapien
tcaaggtgtccaagtcacacagagc

SEQ ID NO: 4838773 - DNA, 25 bp, Homo sapien
ccaagtcacacagagccacggaatc

SEQ ID NO: 4838774 - DNA, 25 bp, Homo sapien
gtgtccaagtcacacagagccacgg

SEQ ID NO: 4838775 - DNA, 25 bp, Homo sapien
cctgatcaggaatcgaatgcgggca

SEQ ID NO: 4838776 - DNA, 25 bp, Homo sapien
gatcaggaatcgaatgcgggcagca

SEQ ID NO: 4838777 - DNA, 25 bp, Homo sapien
tcaggaatcgaatgcgggcagcagc

SEQ ID NO: 4838778 - DNA, 25 bp, Homo sapien
ttccctgatcaggaatcgaatgcgg

SEQ ID NO: 4838779 - DNA, 25 bp, Homo sapien
ggtttatattcatgctgccctagaa

SEQ ID NO: 4838780 - DNA, 25 bp, Homo sapien
taaacctgacatggtactgtgcatc

SEQ ID NO: 4838781 - DNA, 25 bp, Homo sapien
taaagggagaactcaattcagtacc

SEQ ID NO: 4838782 - DNA, 25 bp, Homo sapien
tatcacagttagatcaccatgctgc

SEQ ID NO: 4838783 - DNA, 25 bp, Homo sapien
gcccaagtttacaagagtagcgata

SEQ ID NO: 4838784 - DNA, 25 bp, Homo sapien
tgtgtcgaacctctacattgtgaag

SEQ ID NO: 4838785 - DNA, 25 bp, Homo sapien
tggaaacactgctcttgctgaactg

SEQ ID NO: 4838786 - DNA, 25 bp, Homo sapien
aagccatagagagcagaacttgccg

SEQ ID NO: 4838787 - DNA, 25 bp, Homo sapien
aaggtctgtggttgatacagttgga

SEQ ID NO: 4838788 - DNA, 25 bp, Homo sapien
tggttgatacagttggaggaaagcg

SEQ ID NO: 4838789 - DNA, 25 bp, Homo sapien
tctgtggttgatacagttggaggaa

SEQ ID NO: 4838790 - DNA, 25 bp, Homo sapien
cggacggaaggtctgtggttgatac

SEQ ID NO: 4838791 - DNA, 25 bp, Homo sapien
taagctggttggttccaagaacatg

SEQ ID NO: 4838792 - DNA, 25 bp, Homo sapien
tgtagccatgttctttagcgtgcct

SEQ ID NO: 4838793 - DNA, 25 bp, Homo sapien
tttcccatacctcagacagaactgg

SEQ ID NO: 4838794 - DNA, 25 bp, Homo sapien
tgccaacaacgtaaggtttctgctg

SEQ ID NO: 4838795 - DNA, 25 bp, Homo sapien
gtgcttgtagactcctttatcaaca

SEQ ID NO: 4838796 - DNA, 25 bp, Homo sapien
aagctgtgcttgtagactcctttat

SEQ ID NO: 4838797 - DNA, 25 bp, Homo sapien
aacatgtgcccatcagatgtcttca

SEQ ID NO: 4838798 - DNA, 25 bp, Homo sapien
tatcaacatgtgcccatcagatgtc

SEQ ID NO: 4838799 - DNA, 25 bp, Homo sapien
tacaacttgccatattgtgaagatg

SEQ ID NO: 4838800 - DNA, 25 bp, Homo sapien
gagtggaggagtatcatctcacaat

SEQ ID NO: 4838801 - DNA, 25 bp, Homo sapien
tatatggtaactagatgattaggca

SEQ ID NO: 4838802 - DNA, 25 bp, Homo sapien
aatctaggttcaatattttgagtgg

SEQ ID NO: 4838803 - DNA, 25 bp, Homo sapien
tgcagtagtgaactcctcgctggag

SEQ ID NO: 4838804 - DNA, 25 bp, Homo sapien
tcaaggatgctattggaagcacccc

SEQ ID NO: 4838805 - DNA, 25 bp, Homo sapien
cactgctgccgtaaagaaactgtat

SEQ ID NO: 4838806 - DNA, 25 bp, Homo sapien
tactagagcggagtctgtctcaagg

SEQ ID NO: 4838807 - DNA, 25 bp, Homo sapien
tcatctttcgggtcatcttttgtcc

SEQ ID NO: 4838808 - DNA, 25 bp, Homo sapien
agttcgaagcacaaaccccggagat

SEQ ID NO: 4838809 - DNA, 25 bp, Homo sapien
cccaagtgcttagtcatattgaact

SEQ ID NO: 4838810 - DNA, 25 bp, Homo sapien
ccttcgtgaggagtaggcaggtata

SEQ ID NO: 4838811 - DNA, 25 bp, Homo sapien
ggtgctgctcagacatcctactagg

SEQ ID NO: 4838812 - DNA, 25 bp, Homo sapien
ggtggtcccttgctacctggaaatg

SEQ ID NO: 4838813 - DNA, 25 bp, Homo sapien
tgctggtaccgacatctagtgggag

SEQ ID NO: 4838814 - DNA, 25 bp, Homo sapien
gggctgcctgatccatagttctctg

SEQ ID NO: 4838815 - DNA, 25 bp, Homo sapien
tgcctgcggagggaactccgcgccc

SEQ ID NO: 4838816 - DNA, 25 bp, Homo sapien
gctgcctgcggagggaactccgcgc

SEQ ID NO: 4838817 - DNA, 25 bp, Homo sapien
ccgctgcctgcggagggaactccgc

SEQ ID NO: 4838818 - DNA, 25 bp, Homo sapien
cctgcggagggaactccgcgcccgc

SEQ ID NO: 4838819 - DNA, 25 bp, Homo sapien
cccccctgctcgcgggccgcgtgcg

SEQ ID NO: 4838820 - DNA, 25 bp, Homo sapien
gagccagcttgggttgtagtaatac

SEQ ID NO: 4838821 - DNA, 25 bp, Homo sapien
gagttttaagcaagacgggcaagca

SEQ ID NO: 4838822 - DNA, 25 bp, Homo sapien
gaccttaaccagctgtaaggcagtg

SEQ ID NO: 4838823 - DNA, 25 bp, Homo sapien
tagtaatacggtgaccgccatgtga

SEQ ID NO: 4838824 - DNA, 25 bp, Homo sapien
tgcttcccatgccaaatgcttagga

SEQ ID NO: 4838825 - DNA, 25 bp, Homo sapien
tcaagggagtatgtggacatcagct

SEQ ID NO: 4838826 - DNA, 25 bp, Homo sapien
gcaacatgccattaagaacaaggat

SEQ ID NO: 4838827 - DNA, 25 bp, Homo sapien
gaggtgctccttggatctagctgca

SEQ ID NO: 4838828 - DNA, 25 bp, Homo sapien
tgtttggcactgaacttgtaggcca

SEQ ID NO: 4838829 - DNA, 25 bp, Homo sapien
tctatacaatttcatcccctggtca

SEQ ID NO: 4838830 - DNA, 25 bp, Homo sapien
ttcctggtcttgactgtgatctata

SEQ ID NO: 4838831 - DNA, 25 bp, Homo sapien
catcatgtctccttgtttggcactg

SEQ ID NO: 4838832 - DNA, 25 bp, Homo sapien
ccagaggtccggctttgttggatct

SEQ ID NO: 4838833 - DNA, 25 bp, Homo sapien
ccttggttaaaggatccatctcaag

SEQ ID NO: 4838834 - DNA, 25 bp, Homo sapien
tatcacgagaaccaagactgctggt

SEQ ID NO: 4838835 - DNA, 25 bp, Homo sapien
tgctggtccagaggtccggctttgt

SEQ ID NO: 4838836 - DNA, 25 bp, Homo sapien
catagtgtcccagccataatgttag

SEQ ID NO: 4838837 - DNA, 25 bp, Homo sapien
taatgttaggtagttagacattagc

SEQ ID NO: 4838838 - DNA, 25 bp, Homo sapien
gaacatagtgtcccagccataatgt

SEQ ID NO: 4838839 - DNA, 25 bp, Homo sapien
actacagtttttggcattactgcag

SEQ ID NO: 4838840 - DNA, 25 bp, Homo sapien
ttcttccccctcagcataatcagag

SEQ ID NO: 4838841 - DNA, 25 bp, Homo sapien
gcataatcagaggaggtgaccccaa

SEQ ID NO: 4838842 - DNA, 25 bp, Homo sapien
tggagacgtgttgaatttcttcccc

SEQ ID NO: 4838843 - DNA, 25 bp, Homo sapien
gagtgcccttccatgaacacatgtg

SEQ ID NO: 4838844 - DNA, 25 bp, Homo sapien
atccacaaaggctgctcttgctggt

SEQ ID NO: 4838845 - DNA, 25 bp, Homo sapien
gctttggtgcctgttgttaccgcta

SEQ ID NO: 4838846 - DNA, 25 bp, Homo sapien
tgttgttaccgctactgttgcccct

SEQ ID NO: 4838847 - DNA, 25 bp, Homo sapien
gccttgatgtgctggttccatgtcc

SEQ ID NO: 4838848 - DNA, 25 bp, Homo sapien
gaagctcctcctggcatgcaggacg

SEQ ID NO: 4838849 - DNA, 25 bp, Homo sapien
ctcctcctggcatgcaggacgtagc

SEQ ID NO: 4838850 - DNA, 25 bp, Homo sapien
agctcctcctggcatgcaggacgta

SEQ ID NO: 4838851 - DNA, 25 bp, Homo sapien
agaagctcctcctggcatgcaggac

SEQ ID NO: 4838852 - DNA, 25 bp, Homo sapien
gaggggtcctgccattaggccttta

SEQ ID NO: 4838853 - DNA, 25 bp, Homo sapien
cattcactcgcgtatccttcatcag

SEQ ID NO: 4838854 - DNA, 25 bp, Homo sapien
tcagcaaggcccagacgaggggtcc

SEQ ID NO: 4838855 - DNA, 25 bp, Homo sapien
cagcaggcttgccagtcatttccgc

SEQ ID NO: 4838856 - DNA, 25 bp, Homo sapien
cttcagccaaggagatcaacagagc

SEQ ID NO: 4838857 - DNA, 25 bp, Homo sapien
tggagctctagatcagcagtctcgg

SEQ ID NO: 4838858 - DNA, 25 bp, Homo sapien
tcttgagttgggatggacccttcag

SEQ ID NO: 4838859 - DNA, 25 bp, Homo sapien
gaaacaaagcttgttgaagcacagt

SEQ ID NO: 4838860 - DNA, 25 bp, Homo sapien
ttgctcagcgatgagtcggtcatgc

SEQ ID NO: 4838861 - DNA, 25 bp, Homo sapien
gctgctctcttgctcagcgatgagt

SEQ ID NO: 4838862 - DNA, 25 bp, Homo sapien
ctctcttgctcagcgatgagtcggt

SEQ ID NO: 4838863 - DNA, 25 bp, Homo sapien
tcttgctcagcgatgagtcggtcat

SEQ ID NO: 4838864 - DNA, 25 bp, Homo sapien
ttaaaggctgaactgagctttttct

SEQ ID NO: 4838865 - DNA, 25 bp, Homo sapien
gctttttcttggtccgagtcctcat

SEQ ID NO: 4838866 - DNA, 25 bp, Homo sapien
cctctttaaaggctgaactgagctt

SEQ ID NO: 4838867 - DNA, 25 bp, Homo sapien
ctgagctttttcttggtccgagtcc

SEQ ID NO: 4838868 - DNA, 25 bp, Homo sapien
tcttgcagttttcctgggtgcaaat

SEQ ID NO: 4838869 - DNA, 25 bp, Homo sapien
gagcaaatacagagggactcttgca

SEQ ID NO: 4838870 - DNA, 25 bp, Homo sapien
catagtagggtctggttcttacagg

SEQ ID NO: 4838871 - DNA, 25 bp, Homo sapien
catcagaggagcaaatacagaggga

SEQ ID NO: 4838872 - DNA, 25 bp, Homo sapien
tttgcatggtggagataatcagtga

SEQ ID NO: 4838873 - DNA, 25 bp, Homo sapien
tgcaggaaaagtacggccttttgta

SEQ ID NO: 4838874 - DNA, 25 bp, Homo sapien
gctgcaggaaaagtacggccttttg

SEQ ID NO: 4838875 - DNA, 25 bp, Homo sapien
cagtgacattgtaccctgtgctgca

SEQ ID NO: 4838876 - DNA, 25 bp, Homo sapien
tctttgtgtgtatagatttcttggt

SEQ ID NO: 4838877 - DNA, 25 bp, Homo sapien
gagtccttgcctagctcttaatgaa

SEQ ID NO: 4838878 - DNA, 25 bp, Homo sapien
atccaaattcctcttgctagagagc

SEQ ID NO: 4838879 - DNA, 25 bp, Homo sapien
ctagagagcgttgcattgggatgat

SEQ ID NO: 4838880 - DNA, 25 bp, Homo sapien
ggatttatgctttcctgtccaggaa

SEQ ID NO: 4838881 - DNA, 25 bp, Homo sapien
agtcctgcactaactcctccccaaa

SEQ ID NO: 4838882 - DNA, 25 bp, Homo sapien
tccccaaagcagagtaagtggtttc

SEQ ID NO: 4838883 - DNA, 25 bp, Homo sapien
tcccacctcggtccatgagggaagc

SEQ ID NO: 4838884 - DNA, 25 bp, Homo sapien
gtgaatgtgatgcaaactttctgta

SEQ ID NO: 4838885 - DNA, 25 bp, Homo sapien
gatgttgtagagtgaatgtgatgca

SEQ ID NO: 4838886 - DNA, 25 bp, Homo sapien
tagagtgaatgtgatgcaaactttc

SEQ ID NO: 4838887 - DNA, 25 bp, Homo sapien
ctttaaagatgttgtagagtgaatg

SEQ ID NO: 4838888 - DNA, 25 bp, Homo sapien
tcccgggaagcatctctgggtgttt

SEQ ID NO: 4838889 - DNA, 25 bp, Homo sapien
gcagcagcagaagattcccgggaag

SEQ ID NO: 4838890 - DNA, 25 bp, Homo sapien
aagagcctgtcaacacttcagcagc

SEQ ID NO: 4838891 - DNA, 25 bp, Homo sapien
taaggagtgcactcctggaacaaag

SEQ ID NO: 4838892 - DNA, 25 bp, Homo sapien
tatcgtaccataagggagaggaggc

SEQ ID NO: 4838893 - DNA, 25 bp, Homo sapien
caacaaatgtgctcaaacgctgtcg

SEQ ID NO: 4838894 - DNA, 25 bp, Homo sapien
gagaggaggctgcttcaacaaatgt

SEQ ID NO: 4838895 - DNA, 25 bp, Homo sapien
aacgctgtcgtcttcttctgtagta

SEQ ID NO: 4838896 - DNA, 25 bp, Homo sapien
aaatcacttcgggagttatcgttct

SEQ ID NO: 4838897 - DNA, 25 bp, Homo sapien
gagctgtacgcttaatgttggcacg

SEQ ID NO: 4838898 - DNA, 25 bp, Homo sapien
caaggtgccttataggagtgctggc

SEQ ID NO: 4838899 - DNA, 25 bp, Homo sapien
ggcacgtgtctatgttatgcttcat

SEQ ID NO: 4838900 - DNA, 25 bp, Homo sapien
aaactaggctctcatgaggcactgc

SEQ ID NO: 4838901 - DNA, 25 bp, Homo sapien
ggcacacgactatttatgacccaga

SEQ ID NO: 4838902 - DNA, 25 bp, Homo sapien
gaatattgagccaggtaccaaagag

SEQ ID NO: 4838903 - DNA, 25 bp, Homo sapien
gctctcaaaagacgtgcacaacaat

SEQ ID NO: 4838904 - DNA, 25 bp, Homo sapien
caagaagtttgtactgtgacttcat

SEQ ID NO: 4838905 - DNA, 25 bp, Homo sapien
ccaagaagtttgtactgtgacttca

SEQ ID NO: 4838906 - DNA, 25 bp, Homo sapien
cttcccaagaagtttgtactgtgac

SEQ ID NO: 4838907 - DNA, 25 bp, Homo sapien
tcccaagaagtttgtactgtgactt

SEQ ID NO: 4838908 - DNA, 25 bp, Homo sapien
gaaggagccaaaacctgagtcaggg

SEQ ID NO: 4838909 - DNA, 25 bp, Homo sapien
cactgtctccagaggtacaagttat

SEQ ID NO: 4838910 - DNA, 25 bp, Homo sapien
catgagctactatgagaaggagcca

SEQ ID NO: 4838911 - DNA, 25 bp, Homo sapien
gagcagctttgcaataaaaccaaga

SEQ ID NO: 4838912 - DNA, 25 bp, Homo sapien
aaccgcttaatcttctgtgccatgg

SEQ ID NO: 4838913 - DNA, 25 bp, Homo sapien
agcagctactagtttcttgaccaga

SEQ ID NO: 4838914 - DNA, 25 bp, Homo sapien
ttcagtttgtaaactaagattgacc

SEQ ID NO: 4838915 - DNA, 25 bp, Homo sapien
tagcctgcgtgtcttctcgcttcag

SEQ ID NO: 4838916 - DNA, 25 bp, Homo sapien
atctgggactgaagttggtaagggt

SEQ ID NO: 4838917 - DNA, 25 bp, Homo sapien
ctctgaatctgggactgaagttggt

SEQ ID NO: 4838918 - DNA, 25 bp, Homo sapien
ctgaatctgggactgaagttggtaa

SEQ ID NO: 4838919 - DNA, 25 bp, Homo sapien
ctgggactgaagttggtaagggtct

SEQ ID NO: 4838920 - DNA, 25 bp, Homo sapien
ttgttttccttgttggggctgacat

SEQ ID NO: 4838921 - DNA, 25 bp, Homo sapien
ggttctgtttcctgtatgatcttta

SEQ ID NO: 4838922 - DNA, 25 bp, Homo sapien
cattgttgtcctgtggttataatag

SEQ ID NO: 4838923 - DNA, 25 bp, Homo sapien
acattttctgtattggtttgaattg

SEQ ID NO: 4838924 - DNA, 25 bp, Homo sapien
aatgttttcttagctatcttatcac

SEQ ID NO: 4838925 - DNA, 25 bp, Homo sapien
tctacaggaatactctcacagctgt

SEQ ID NO: 4838926 - DNA, 25 bp, Homo sapien
tatcttatcactagcacaatccaac

SEQ ID NO: 4838927 - DNA, 25 bp, Homo sapien
tcacagctgtgagaatatggaggtg

SEQ ID NO: 4838928 - DNA, 25 bp, Homo sapien
ctttaatcctaaaaaactggatgag

SEQ ID NO: 4838929 - DNA, 25 bp, Homo sapien
cacaagagtcccaaactctttaatc

SEQ ID NO: 4838930 - DNA, 25 bp, Homo sapien
cctaaaaaactggatgagagtgcag

SEQ ID NO: 4838931 - DNA, 25 bp, Homo sapien
agagtgcaggcagataagggctcct

SEQ ID NO: 4838932 - DNA, 25 bp, Homo sapien
tctgtccctggatatattccttttt

SEQ ID NO: 4838933 - DNA, 25 bp, Homo sapien
attatctgtccctggatatattcct

SEQ ID NO: 4838934 - DNA, 25 bp, Homo sapien
gaggcttaattatctgtccctggat

SEQ ID NO: 4838935 - DNA, 25 bp, Homo sapien
tatctgtccctggatatattccttt

SEQ ID NO: 4838936 - DNA, 25 bp, Homo sapien
catccttcatgacggacacggacat

SEQ ID NO: 4838937 - DNA, 25 bp, Homo sapien
gactctattgcactcatctcggcat

SEQ ID NO: 4838938 - DNA, 25 bp, Homo sapien
tcatctcggcatccttcatgacgga

SEQ ID NO: 4838939 - DNA, 25 bp, Homo sapien
tccttcggggaagagactctattgc

SEQ ID NO: 4838940 - DNA, 25 bp, Homo sapien
tcctaatcatcactgtaccaaatat

SEQ ID NO: 4838941 - DNA, 25 bp, Homo sapien
ctgtaccaaatataacatgctcctc

SEQ ID NO: 4838942 - DNA, 25 bp, Homo sapien
cctaatcatcactgtaccaaatata

SEQ ID NO: 4838943 - DNA, 25 bp, Homo sapien
ctcctaatcatcactgtaccaaata

SEQ ID NO: 4838944 - DNA, 25 bp, Homo sapien
tgcaccagttcctcgggctgtttag

SEQ ID NO: 4838945 - DNA, 25 bp, Homo sapien
tgcagcttccccttttgtagtatat

SEQ ID NO: 4838946 - DNA, 25 bp, Homo sapien
tgtggtagaaacgtctgatttttgc

SEQ ID NO: 4838947 - DNA, 25 bp, Homo sapien
tagaaacgtctgatttttgcagctt

SEQ ID NO: 4838948 - DNA, 25 bp, Homo sapien
cttcctgagaagtggtgtggttctg

SEQ ID NO: 4838949 - DNA, 25 bp, Homo sapien
ttctcatcaggcagatggattcctg

SEQ ID NO: 4838950 - DNA, 25 bp, Homo sapien
ctatggtggccgcttctcatcaggc

SEQ ID NO: 4838951 - DNA, 25 bp, Homo sapien
tcatcaggcagatggattcctgttt

SEQ ID NO: 4838952 - DNA, 25 bp, Homo sapien
tcacctggcacattcttagactctg

SEQ ID NO: 4838953 - DNA, 25 bp, Homo sapien
gacatcaacacattcgaacctgagg

SEQ ID NO: 4838954 - DNA, 25 bp, Homo sapien
gatcccatgctctcatcttgcttga

SEQ ID NO: 4838955 - DNA, 25 bp, Homo sapien
tggtcttctcataaacctgcagatc

SEQ ID NO: 4838956 - DNA, 25 bp, Homo sapien
acctttccaagtcatcccatatttt

SEQ ID NO: 4838957 - DNA, 25 bp, Homo sapien
tttagctagtttagcatgataacat

SEQ ID NO: 4838958 - DNA, 25 bp, Homo sapien
ctttccaagtcatcccatatttttt

SEQ ID NO: 4838959 - DNA, 25 bp, Homo sapien
gttttagctagtttagcatgataac

SEQ ID NO: 4838960 - DNA, 25 bp, Homo sapien
cttgggtgacgacgacgcttggctt

SEQ ID NO: 4838961 - DNA, 25 bp, Homo sapien
agccccggacttcagcggaaatgcc

SEQ ID NO: 4838962 - DNA, 25 bp, Homo sapien
gacgacgacgcttggctttagcgcg

SEQ ID NO: 4838963 - DNA, 25 bp, Homo sapien
tgggtgacgacgacgcttggcttta

SEQ ID NO: 4838964 - DNA, 25 bp, Homo sapien
ttcctgcgtaggagaagacgccccg

SEQ ID NO: 4838965 - DNA, 25 bp, Homo sapien
ggtgcttcgctagcccttcttcccg

SEQ ID NO: 4838966 - DNA, 25 bp, Homo sapien
agagaagttgcagcgaggcgccccc

SEQ ID NO: 4838967 - DNA, 25 bp, Homo sapien
gctcgggctcagctgtccgggaacc

SEQ ID NO: 4838968 - DNA, 25 bp, Homo sapien
tgcaccaggtgtaacttccacccct

SEQ ID NO: 4838969 - DNA, 25 bp, Homo sapien
caccaggtgtaacttccaccccttg

SEQ ID NO: 4838970 - DNA, 25 bp, Homo sapien
ctgcaccaggtgtaacttccacccc

SEQ ID NO: 4838971 - DNA, 25 bp, Homo sapien
tttccgcacggtgtggcgactggca

SEQ ID NO: 4838972 - DNA, 25 bp, Homo sapien
attgtcagtgctccggtcgccggcg

SEQ ID NO: 4838973 - DNA, 25 bp, Homo sapien
ggcagcagctctcccgttgcgagta

SEQ ID NO: 4838974 - DNA, 25 bp, Homo sapien
tgcgagtagtcacagcgctgtcccg

SEQ ID NO: 4838975 - DNA, 25 bp, Homo sapien
atctagggcgcaacagaagcttctc

SEQ ID NO: 4838976 - DNA, 25 bp, Homo sapien
gccgaggcagcggatctagggcgca

SEQ ID NO: 4838977 - DNA, 25 bp, Homo sapien
ggcacgcgctagacgacctgtcgcg

SEQ ID NO: 4838978 - DNA, 25 bp, Homo sapien
agaagcttctctccgctcccctatg

SEQ ID NO: 4838979 - DNA, 25 bp, Homo sapien
ggctgtctcgcctgttttgatcgta

SEQ ID NO: 4838980 - DNA, 25 bp, Homo sapien
tgcaaggtaaacagccaccccgggc

SEQ ID NO: 4838981 - DNA, 25 bp, Homo sapien
tactgcatggctgtctcgcctgttt

SEQ ID NO: 4838982 - DNA, 25 bp, Homo sapien
cgcctgttttgatcgtattgcaagg

SEQ ID NO: 4838983 - DNA, 25 bp, Homo sapien
taaccaatgaccatctgagagccac

SEQ ID NO: 4838984 - DNA, 25 bp, Homo sapien
tatacacgcaaaaaggcacatttcc

SEQ ID NO: 4838985 - DNA, 25 bp, Homo sapien
tttaccctgtattctcagccagcca

SEQ ID NO: 4838986 - DNA, 25 bp, Homo sapien
ggcaccactcacaacactggacagt

SEQ ID NO: 4838987 - DNA, 25 bp, Homo sapien
ataaaaagctccatgtaaaaatata

SEQ ID NO: 4838988 - DNA, 25 bp, Homo sapien
catggtttagtgattactatttacc

SEQ ID NO: 4838989 - DNA, 25 bp, Homo sapien
ccagctgccagtatacatggtttag

SEQ ID NO: 4838990 - DNA, 25 bp, Homo sapien
taaatcataatactcagcggactgg

SEQ ID NO: 4838991 - DNA, 25 bp, Homo sapien
tactatgcccttttgtatcacagag

SEQ ID NO: 4838992 - DNA, 25 bp, Homo sapien
ccagagactaggatggatggaaacc

SEQ ID NO: 4838993 - DNA, 25 bp, Homo sapien
ggtagatttacaggcctctgtgagc

SEQ ID NO: 4838994 - DNA, 25 bp, Homo sapien
ggtagctagcactgtcccagagact

SEQ ID NO: 4838995 - DNA, 25 bp, Homo sapien
caataagaagaggaaggcacctgcc

SEQ ID NO: 4838996 - DNA, 25 bp, Homo sapien
gatgtaaatctgtaggaccgcccag

SEQ ID NO: 4838997 - DNA, 25 bp, Homo sapien
tctagatctgaacaacggagtccac

SEQ ID NO: 4838998 - DNA, 25 bp, Homo sapien
agtccacgtttaccaagaggccctg

SEQ ID NO: 4838999 - DNA, 25 bp, Homo sapien
gagggcgggactctgtaaacagcac

SEQ ID NO: 4839000 - DNA, 25 bp, Homo sapien
gggaccatgcctgttatcaagccat

SEQ ID NO: 4839001 - DNA, 25 bp, Homo sapien
tcacctagcgtatttgggaccatgc

SEQ ID NO: 4839002 - DNA, 25 bp, Homo sapien
acaccatagggagcctggaaggaca

SEQ ID NO: 4839003 - DNA, 25 bp, Homo sapien
gagttcagtgatctctgggcacggt

SEQ ID NO: 4839004 - DNA, 25 bp, Homo sapien
aaatgttcttttcgactggcactgg

SEQ ID NO: 4839005 - DNA, 25 bp, Homo sapien
ctggcactggcgtgaactgagttca

SEQ ID NO: 4839006 - DNA, 25 bp, Homo sapien
gacatctcactataatgctcaggct

SEQ ID NO: 4839007 - DNA, 25 bp, Homo sapien
tattaacatgggtgagcttaccagg

SEQ ID NO: 4839008 - DNA, 25 bp, Homo sapien
taactaaggtgtagcaagtaggcct

SEQ ID NO: 4839009 - DNA, 25 bp, Homo sapien
gccaacctgggcgactgaatgcagt

SEQ ID NO: 4839010 - DNA, 25 bp, Homo sapien
tatccacgcatacagattctgcagg

SEQ ID NO: 4839011 - DNA, 25 bp, Homo sapien
aagagggagagagctcagcccattc

SEQ ID NO: 4839012 - DNA, 25 bp, Homo sapien
agggagagagctcagcccattccac

SEQ ID NO: 4839013 - DNA, 25 bp, Homo sapien
ctgtaagagggagagagctcagccc

SEQ ID NO: 4839014 - DNA, 25 bp, Homo sapien
gcccattccacaccaccacgttccc

SEQ ID NO: 4839015 - DNA, 25 bp, Homo sapien
tcataggcctgccattcccccgcca

SEQ ID NO: 4839016 - DNA, 25 bp, Homo sapien
tgccattcccccgccagagggagtt

SEQ ID NO: 4839017 - DNA, 25 bp, Homo sapien
ttcctcataggcctgccattccccc

SEQ ID NO: 4839018 - DNA, 25 bp, Homo sapien
aggcctgccattcccccgccagagg

SEQ ID NO: 4839019 - DNA, 25 bp, Homo sapien
ttttggatgcagcactaggtcactc

SEQ ID NO: 4839020 - DNA, 25 bp, Homo sapien
taattcttaactcgacacaggcttg

SEQ ID NO: 4839021 - DNA, 25 bp, Homo sapien
tactgagaatctataggctgccaaa

SEQ ID NO: 4839022 - DNA, 25 bp, Homo sapien
tttatgcgaaagtcagggcattgcc

SEQ ID NO: 4839023 - DNA, 25 bp, Homo sapien
ttcttgtgttatggctgcacactgc

SEQ ID NO: 4839024 - DNA, 25 bp, Homo sapien
tgatttcttgtgttatggctgcaca

SEQ ID NO: 4839025 - DNA, 25 bp, Homo sapien
tcatcagtgttactcataggggtat

SEQ ID NO: 4839026 - DNA, 25 bp, Homo sapien
tgtgttatggctgcacactgctcta

SEQ ID NO: 4839027 - DNA, 25 bp, Homo sapien
cataactttctcaatgtgtaacgta

SEQ ID NO: 4839028 - DNA, 25 bp, Homo sapien
aatagtgcggtccttctcatgataa

SEQ ID NO: 4839029 - DNA, 25 bp, Homo sapien
tcttgtgtgagtctctgaaggaagc

SEQ ID NO: 4839030 - DNA, 25 bp, Homo sapien
gaaaacttgtaggagtgaaatgaaa

SEQ ID NO: 4839031 - DNA, 25 bp, Homo sapien
tgtgaatcacggcagtctccacctc

SEQ ID NO: 4839032 - DNA, 25 bp, Homo sapien
tgtctttgtgaatcacggcagtctc

SEQ ID NO: 4839033 - DNA, 25 bp, Homo sapien
ctttgtgaatcacggcagtctccac

SEQ ID NO: 4839034 - DNA, 25 bp, Homo sapien
tctttgtgaatcacggcagtctcca

SEQ ID NO: 4839035 - DNA, 25 bp, Homo sapien
agtcatcctgtgattacaggaaaat

SEQ ID NO: 4839036 - DNA, 25 bp, Homo sapien
catcctgtgattacaggaaaattac

SEQ ID NO: 4839037 - DNA, 25 bp, Homo sapien
gagtcatcctgtgattacaggaaaa

SEQ ID NO: 4839038 - DNA, 25 bp, Homo sapien
ctgagtcatcctgtgattacaggaa

SEQ ID NO: 4839039 - DNA, 25 bp, Homo sapien
taagtttgttgtccttcagatacca

SEQ ID NO: 4839040 - DNA, 25 bp, Homo sapien
caatatgcccaagtctagaacctac

SEQ ID NO: 4839041 - DNA, 25 bp, Homo sapien
tgtttaaatgaagttctcctgagct

SEQ ID NO: 4839042 - DNA, 25 bp, Homo sapien
gagcttcatgaccatctaagtttgt

SEQ ID NO: 4839043 - DNA, 25 bp, Homo sapien
gaaaaccggacagttttgcatccta

SEQ ID NO: 4839044 - DNA, 25 bp, Homo sapien
ttaatattgtgagcctagtggcaac

SEQ ID NO: 4839045 - DNA, 25 bp, Homo sapien
tagtggcaacttctacctacagtct

SEQ ID NO: 4839046 - DNA, 25 bp, Homo sapien
gaaatataacctctacactccctaa

SEQ ID NO: 4839047 - DNA, 25 bp, Homo sapien
tggcatgggcatatcaagactgtct

SEQ ID NO: 4839048 - DNA, 25 bp, Homo sapien
tgtttctcagcggtggcacattccc

SEQ ID NO: 4839049 - DNA, 25 bp, Homo sapien
gggacactacacctgcaaactggca

SEQ ID NO: 4839050 - DNA, 25 bp, Homo sapien
tacctctacagggatcacatagtcc

SEQ ID NO: 4839051 - DNA, 25 bp, Homo sapien
tctggagccagcaagactcagagtc

SEQ ID NO: 4839052 - DNA, 25 bp, Homo sapien
taagcaggagtgttgccccatagcc

SEQ ID NO: 4839053 - DNA, 25 bp, Homo sapien
cacagatgggaatgtgctaagtcgc

SEQ ID NO: 4839054 - DNA, 25 bp, Homo sapien
ctacttggtgttctagtgtactgtg

SEQ ID NO: 4839055 - DNA, 25 bp, Homo sapien
ctatgtcagcgatgaggctgcctgg

SEQ ID NO: 4839056 - DNA, 25 bp, Homo sapien
tgaatattctaggtactggcatgcc

SEQ ID NO: 4839057 - DNA, 25 bp, Homo sapien
ggtggaggatgtacacaaaggccct

SEQ ID NO: 4839058 - DNA, 25 bp, Homo sapien
gaaggtatttcatgctacacggccc

SEQ ID NO: 4839059 - DNA, 25 bp, Homo sapien
tacagacttacgactcataggtgca

SEQ ID NO: 4839060 - DNA, 25 bp, Homo sapien
aaatgccgtctagtgttcctgaaca

SEQ ID NO: 4839061 - DNA, 25 bp, Homo sapien
tgtgacctgaagcttacaggagcct

SEQ ID NO: 4839062 - DNA, 25 bp, Homo sapien
ttatagtgtgctggccgtgagccca

SEQ ID NO: 4839063 - DNA, 25 bp, Homo sapien
aaaatatttgagtcatctgagaccc

SEQ ID NO: 4839064 - DNA, 25 bp, Homo sapien
gatactctgagccttttaaccaacg

SEQ ID NO: 4839065 - DNA, 25 bp, Homo sapien
tttgttgccgaaccgtatcagtggg

SEQ ID NO: 4839066 - DNA, 25 bp, Homo sapien
gcgcctggcctatctgtagtgtaat

SEQ ID NO: 4839067 - DNA, 25 bp, Homo sapien
aagatcatacaagaagctaacagcg

SEQ ID NO: 4839068 - DNA, 25 bp, Homo sapien
cagctgatgactttagctaagtgga

SEQ ID NO: 4839069 - DNA, 25 bp, Homo sapien
tattgtctattcatcaaacagctga

SEQ ID NO: 4839070 - DNA, 25 bp, Homo sapien
gtcttttctcctgacatgcttccag

SEQ ID NO: 4839071 - DNA, 25 bp, Homo sapien
gcttccagtgccctagaactcttga

SEQ ID NO: 4839072 - DNA, 25 bp, Homo sapien
tagtatccgagagaccacgtgtagc

SEQ ID NO: 4839073 - DNA, 25 bp, Homo sapien
cacagggctcagtacactggcgcaa

SEQ ID NO: 4839074 - DNA, 25 bp, Homo sapien
tctatgggtccagtatacaactcag

SEQ ID NO: 4839075 - DNA, 25 bp, Homo sapien
caaggcacgttagctggtccaaggc

SEQ ID NO: 4839076 - DNA, 25 bp, Homo sapien
tcatttgtctcataacaagaaatat

SEQ ID NO: 4839077 - DNA, 25 bp, Homo sapien
catttgtctcataacaagaaatata

SEQ ID NO: 4839078 - DNA, 25 bp, Homo sapien
tatcctcaatggaaaatgtgaaata

SEQ ID NO: 4839079 - DNA, 25 bp, Homo sapien
tcctcaatggaaaatgtgaaatact

SEQ ID NO: 4839080 - DNA, 25 bp, Homo sapien
atcctcaatggaaaatgtgaaatac

SEQ ID NO: 4839081 - DNA, 25 bp, Homo sapien
ctatcctcaatggaaaatgtgaaat

SEQ ID NO: 4839082 - DNA, 25 bp, Homo sapien
ataagagaaaaacctgcgttacatg

SEQ ID NO: 4839083 - DNA, 25 bp, Homo sapien
cacggtatgtacctggctgttcact

SEQ ID NO: 4839084 - DNA, 25 bp, Homo sapien
acagtagtcacagcccacggtatgt

SEQ ID NO: 4839085 - DNA, 25 bp, Homo sapien
tattccgggcaatctctaccagtgg

SEQ ID NO: 4839086 - DNA, 25 bp, Homo sapien
ggcttcacatcctctattccgggca

SEQ ID NO: 4839087 - DNA, 25 bp, Homo sapien
aggggagattaaggttgtcacatac

SEQ ID NO: 4839088 - DNA, 25 bp, Homo sapien
taaaggggagattaaggttgtcaca

SEQ ID NO: 4839089 - DNA, 25 bp, Homo sapien
atgatggcatcgaagccctcatccc

SEQ ID NO: 4839090 - DNA, 25 bp, Homo sapien
gatggcatcgaagccctcatcccta

SEQ ID NO: 4839091 - DNA, 25 bp, Homo sapien
agggtgaatgtgtgatctggctgcc

SEQ ID NO: 4839092 - DNA, 25 bp, Homo sapien
caaagggtgaatgtgtgatctggct

SEQ ID NO: 4839093 - DNA, 25 bp, Homo sapien
tcatggcaaagggtgaatgtgtgat

SEQ ID NO: 4839094 - DNA, 25 bp, Homo sapien
tggcaaagggtgaatgtgtgatctg

SEQ ID NO: 4839095 - DNA, 25 bp, Homo sapien
gcagattggtccaggtgacatttgg

SEQ ID NO: 4839096 - DNA, 25 bp, Homo sapien
tggcagattggtccaggtgacattt

SEQ ID NO: 4839097 - DNA, 25 bp, Homo sapien
agtgagtggcagattggtccaggtg

SEQ ID NO: 4839098 - DNA, 25 bp, Homo sapien
cagtgagtggcagattggtccaggt

SEQ ID NO: 4839099 - DNA, 25 bp, Homo sapien
actttacgctaaacctgcggattct

SEQ ID NO: 4839100 - DNA, 25 bp, Homo sapien
tcactttacgctaaacctgcggatt

SEQ ID NO: 4839101 - DNA, 25 bp, Homo sapien
tacgctaaacctgcggattctaaat

SEQ ID NO: 4839102 - DNA, 25 bp, Homo sapien
tttacgctaaacctgcggattctaa

SEQ ID NO: 4839103 - DNA, 25 bp, Homo sapien
tatcagatgtaacagcataatttca

SEQ ID NO: 4839104 - DNA, 25 bp, Homo sapien
cccaggaatatcagtcgttcatatt

SEQ ID NO: 4839105 - DNA, 25 bp, Homo sapien
tattaatgcttaagtgaccattcct

SEQ ID NO: 4839106 - DNA, 25 bp, Homo sapien
agatgtaacagcataatttcaccca

SEQ ID NO: 4839107 - DNA, 25 bp, Homo sapien
ttattgctctgattcttctttgttt

SEQ ID NO: 4839108 - DNA, 25 bp, Homo sapien
ttcttttattgctctgattcttctt

SEQ ID NO: 4839109 - DNA, 25 bp, Homo sapien
ttctttgttttgtagaaaaatgatg

SEQ ID NO: 4839110 - DNA, 25 bp, Homo sapien
tgttttgtagaaaaatgatgtatga

SEQ ID NO: 4839111 - DNA, 25 bp, Homo sapien
ctccgggaactaagaccctggccat

SEQ ID NO: 4839112 - DNA, 25 bp, Homo sapien
cagaacagctacactcagagcaagg

SEQ ID NO: 4839113 - DNA, 25 bp, Homo sapien
aacaagcacgtcttgcttctcaaag

SEQ ID NO: 4839114 - DNA, 25 bp, Homo sapien
caaagtgacggttcttttgttccat

SEQ ID NO: 4839115 - DNA, 25 bp, Homo sapien
ccagactggctggactctgagaaga

SEQ ID NO: 4839116 - DNA, 25 bp, Homo sapien
caaaacaggttcttgccatagcagg

SEQ ID NO: 4839117 - DNA, 25 bp, Homo sapien
tagcaggttcatagcccacgctgtg

SEQ ID NO: 4839118 - DNA, 25 bp, Homo sapien
cacgctgtgggaccgttttgaacca

SEQ ID NO: 4839119 - DNA, 25 bp, Homo sapien
gactgttacagtgctactggcccaa

SEQ ID NO: 4839120 - DNA, 25 bp, Homo sapien
ttagtgctatccagaaaatttcccc

SEQ ID NO: 4839121 - DNA, 25 bp, Homo sapien
tcgacagacattgtatcatctgggt

SEQ ID NO: 4839122 - DNA, 25 bp, Homo sapien
gtggagtccaaaacatcagtctgtg

SEQ ID NO: 4839123 - DNA, 25 bp, Homo sapien
tctgtggaatcaactgcagaaatcc

SEQ ID NO: 4839124 - DNA, 25 bp, Homo sapien
tccccttctcgaaacacatggtagt

SEQ ID NO: 4839125 - DNA, 25 bp, Homo sapien
aacacatggtagtagcgcataaagg

SEQ ID NO: 4839126 - DNA, 25 bp, Homo sapien
tcccagaactcaggatacggagctc

SEQ ID NO: 4839127 - DNA, 25 bp, Homo sapien
ggatacggagctctgacacattctc

SEQ ID NO: 4839128 - DNA, 25 bp, Homo sapien
ttctctgcaatgatacaccagttac

SEQ ID NO: 4839129 - DNA, 25 bp, Homo sapien
tagatttaaagagacccatgggcaa

SEQ ID NO: 4839130 - DNA, 25 bp, Homo sapien
tcaagcaagttgaggccgacagcat

SEQ ID NO: 4839131 - DNA, 25 bp, Homo sapien
gatcagattactccagctaggtcag

SEQ ID NO: 4839132 - DNA, 25 bp, Homo sapien
ctttaagtagaagcaaggccttggc

SEQ ID NO: 4839133 - DNA, 25 bp, Homo sapien
tgaaaggctctaatactccgccaag

SEQ ID NO: 4839134 - DNA, 25 bp, Homo sapien
cagagactaggagccagacctgggt

SEQ ID NO: 4839135 - DNA, 25 bp, Homo sapien
taatcacacttaccttgaaaggctc

SEQ ID NO: 4839136 - DNA, 25 bp, Homo sapien
cctactatgtgtgtaaccttaagca

SEQ ID NO: 4839137 - DNA, 25 bp, Homo sapien
tgagccttaatgtattgccagcgtt

SEQ ID NO: 4839138 - DNA, 25 bp, Homo sapien
actattgctagcttcccctgggaaa

SEQ ID NO: 4839139 - DNA, 25 bp, Homo sapien
tcacgcgtgcacaaaagaactactt

SEQ ID NO: 4839140 - DNA, 25 bp, Homo sapien
tacacgtatcaacacgagaagaggc

SEQ ID NO: 4839141 - DNA, 25 bp, Homo sapien
ctcggggagatggagtatcttcttc

SEQ ID NO: 4839142 - DNA, 25 bp, Homo sapien
gagggccaatctgatgctcggggag

SEQ ID NO: 4839143 - DNA, 25 bp, Homo sapien
ccaatctgatgctcggggagatgga

SEQ ID NO: 4839144 - DNA, 25 bp, Homo sapien
atgctcggggagatggagtatcttc

SEQ ID NO: 4839145 - DNA, 25 bp, Homo sapien
ctgtgtgaggtgtgcaggtgacttt

SEQ ID NO: 4839146 - DNA, 25 bp, Homo sapien
tttatccatcacactgaagttccct

SEQ ID NO: 4839147 - DNA, 25 bp, Homo sapien
ggtgtgcaggtgactttatccatca

SEQ ID NO: 4839148 - DNA, 25 bp, Homo sapien
tgaggtgtgcaggtgactttatcca

SEQ ID NO: 4839149 - DNA, 25 bp, Homo sapien
gcctgggtgagggttacttcaggac

SEQ ID NO: 4839150 - DNA, 25 bp, Homo sapien
tgggtgagggttacttcaggacagc

SEQ ID NO: 4839151 - DNA, 25 bp, Homo sapien
ggtgagggttacttcaggacagctt

SEQ ID NO: 4839152 - DNA, 25 bp, Homo sapien
gtgagggttacttcaggacagcttc

SEQ ID NO: 4839153 - DNA, 25 bp, Homo sapien
gagatggaagcatgattaagtcagg

SEQ ID NO: 4839154 - DNA, 25 bp, Homo sapien
taagtcaggccaactgaggagtgga

SEQ ID NO: 4839155 - DNA, 25 bp, Homo sapien
catgattaagtcaggccaactgagg

SEQ ID NO: 4839156 - DNA, 25 bp, Homo sapien
gaagcatgattaagtcaggccaact

SEQ ID NO: 4839157 - DNA, 25 bp, Homo sapien
caaaaacgttcaaaggctcgctagc

SEQ ID NO: 4839158 - DNA, 25 bp, Homo sapien
tttccaacgcatgggctcaaaaacg

SEQ ID NO: 4839159 - DNA, 25 bp, Homo sapien
aggaatttttccaacgcatgggctc

SEQ ID NO: 4839160 - DNA, 25 bp, Homo sapien
gcatgggctcaaaaacgttcaaagg

SEQ ID NO: 4839161 - DNA, 25 bp, Homo sapien
cccagatgctgatgcaaggatggcg

SEQ ID NO: 4839162 - DNA, 25 bp, Homo sapien
gactattggcaggtgtctcgggcat

SEQ ID NO: 4839163 - DNA, 25 bp, Homo sapien
caaggatggcgagtggcagaggact

SEQ ID NO: 4839164 - DNA, 25 bp, Homo sapien
ggcgagtggcagaggactattggca

SEQ ID NO: 4839165 - DNA, 25 bp, Homo sapien
gacaacaccgtgcttaatgaagaaa

SEQ ID NO: 4839166 - DNA, 25 bp, Homo sapien
tccacaagtgggtctagtgccatct

SEQ ID NO: 4839167 - DNA, 25 bp, Homo sapien
gcttctagtcccacgctgatggcgc

SEQ ID NO: 4839168 - DNA, 25 bp, Homo sapien
gatgcgctgatgctttgctgcctga

SEQ ID NO: 4839169 - DNA, 25 bp, Homo sapien
gctgggctggcaatcacttctctat

SEQ ID NO: 4839170 - DNA, 25 bp, Homo sapien
tgggtcaggattccctactaagcct

SEQ ID NO: 4839171 - DNA, 25 bp, Homo sapien
cgaatggtcgactttatcttggaaa

SEQ ID NO: 4839172 - DNA, 25 bp, Homo sapien
tactaagccttatatgagatagctc

SEQ ID NO: 4839173 - DNA, 25 bp, Homo sapien
gttttcctgacacattcggcttctg

SEQ ID NO: 4839174 - DNA, 25 bp, Homo sapien
cattgcttgggaatgagcggttttc

SEQ ID NO: 4839175 - DNA, 25 bp, Homo sapien
gacaatttcaaagcaccataagcca

SEQ ID NO: 4839176 - DNA, 25 bp, Homo sapien
cagactctaaaccagagcaattgtt

SEQ ID NO: 4839177 - DNA, 25 bp, Homo sapien
ccacaagccaggccaggtcgttctg

SEQ ID NO: 4839178 - DNA, 25 bp, Homo sapien
gtagccgcgagtctccacaagccag

SEQ ID NO: 4839179 - DNA, 25 bp, Homo sapien
tagccgcgagtctccacaagccagg

SEQ ID NO: 4839180 - DNA, 25 bp, Homo sapien
agccgcgagtctccacaagccaggc

SEQ ID NO: 4839181 - DNA, 25 bp, Homo sapien
tcttgtttaggctcatgtcagtcag

SEQ ID NO: 4839182 - DNA, 25 bp, Homo sapien
gagcaccagggaggcgtcctcagat

SEQ ID NO: 4839183 - DNA, 25 bp, Homo sapien
cagggaggcgtcctcagattgtccc

SEQ ID NO: 4839184 - DNA, 25 bp, Homo sapien
gtcagtcagataattctcaggcttg

SEQ ID NO: 4839185 - DNA, 25 bp, Homo sapien
caaaagctgcgtgagagaaagttcc

SEQ ID NO: 4839186 - DNA, 25 bp, Homo sapien
taataaggtttcaagtctacagatc

SEQ ID NO: 4839187 - DNA, 25 bp, Homo sapien
aaaataacgtctctctaagcccttg

SEQ ID NO: 4839188 - DNA, 25 bp, Homo sapien
tggaccccgaactgtttcctgagaa

SEQ ID NO: 4839189 - DNA, 25 bp, Homo sapien
tctgaccccctacacggattgtcat

SEQ ID NO: 4839190 - DNA, 25 bp, Homo sapien
attgtcatggccacacggcagcgct

SEQ ID NO: 4839191 - DNA, 25 bp, Homo sapien
cccctacacggattgtcatggccac

SEQ ID NO: 4839192 - DNA, 25 bp, Homo sapien
cacggcagcgcttgagagtttccat

SEQ ID NO: 4839193 - DNA, 25 bp, Homo sapien
ttcagcattatcttttagcacgtgg

SEQ ID NO: 4839194 - DNA, 25 bp, Homo sapien
cacgctgcttagaaatcagcagagg

SEQ ID NO: 4839195 - DNA, 25 bp, Homo sapien
tcttttagcacgtggttgatcgcag

SEQ ID NO: 4839196 - DNA, 25 bp, Homo sapien
tggttgatcgcaggcataacacgct

SEQ ID NO: 4839197 - DNA, 25 bp, Homo sapien
ttcaaatgaatcctgggcgtggacg

SEQ ID NO: 4839198 - DNA, 25 bp, Homo sapien
cttcaaatgaatcctgggcgtggac

SEQ ID NO: 4839199 - DNA, 25 bp, Homo sapien
tcaaatgaatcctgggcgtggacgt

SEQ ID NO: 4839200 - DNA, 25 bp, Homo sapien
cagaatccagttgctattcacactt

SEQ ID NO: 4839201 - DNA, 25 bp, Homo sapien
tactttcagaatccagttgctattc

SEQ ID NO: 4839202 - DNA, 25 bp, Homo sapien
catgcaaatgaggttcaaagcagga

SEQ ID NO: 4839203 - DNA, 25 bp, Homo sapien
aaagcatgcaaatgaggttcaaagc

SEQ ID NO: 4839204 - DNA, 25 bp, Homo sapien
gaagagaattaatttggttgcaaca

SEQ ID NO: 4839205 - DNA, 25 bp, Homo sapien
agagaattaatttggttgcaacaat

SEQ ID NO: 4839206 - DNA, 25 bp, Homo sapien
gtgaagagaattaatttggttgcaa

SEQ ID NO: 4839207 - DNA, 25 bp, Homo sapien
ctaggagcagtgaagagaattaatt

SEQ ID NO: 4839208 - DNA, 25 bp, Homo sapien
cctttatcttcacctaatgcctcac

SEQ ID NO: 4839209 - DNA, 25 bp, Homo sapien
tcctttatcttcacctaatgcctca

SEQ ID NO: 4839210 - DNA, 25 bp, Homo sapien
attcctttatcttcacctaatgcct

SEQ ID NO: 4839211 - DNA, 25 bp, Homo sapien
ttcctttatcttcacctaatgcctc

SEQ ID NO: 4839212 - DNA, 25 bp, Homo sapien
ttatttcacctagcgctaatggctg

SEQ ID NO: 4839213 - DNA, 25 bp, Homo sapien
gattcaactccaaatgctcacaaag

SEQ ID NO: 4839214 - DNA, 25 bp, Homo sapien
taattaaggtttcagtcacccatgg

SEQ ID NO: 4839215 - DNA, 25 bp, Homo sapien
aaatgactctggcaatcttcccggg

SEQ ID NO: 4839216 - DNA, 25 bp, Homo sapien
ctagacaatagcgtctttgaaggca

SEQ ID NO: 4839217 - DNA, 25 bp, Homo sapien
tttgaaggcaaacatcgccttcttc

SEQ ID NO: 4839218 - DNA, 25 bp, Homo sapien
caatctgctttacaatcagacgtgc

SEQ ID NO: 4839219 - DNA, 25 bp, Homo sapien
tctctgtcccgaacactaacatagt

SEQ ID NO: 4839220 - DNA, 25 bp, Homo sapien
aaacgacgctgagaggatgacgaca

SEQ ID NO: 4839221 - DNA, 25 bp, Homo sapien
gaagcacggagattctctccaacaa

SEQ ID NO: 4839222 - DNA, 25 bp, Homo sapien
gatgcttgcaagcagagtcagggtc

SEQ ID NO: 4839223 - DNA, 25 bp, Homo sapien
gatgacgacaacgtgcaacagcaga

SEQ ID NO: 4839224 - DNA, 25 bp, Homo sapien
cactcccacccttaaaaccacagat

SEQ ID NO: 4839225 - DNA, 25 bp, Homo sapien
ccacagattgcaaagcatagcattt

SEQ ID NO: 4839226 - DNA, 25 bp, Homo sapien
catcaactacaatcaaaagagcgat

SEQ ID NO: 4839227 - DNA, 25 bp, Homo sapien
caataagtgcactattattaaatgt

SEQ ID NO: 4839228 - DNA, 25 bp, Homo sapien
tttgcttctcccagtgaacgccctc

SEQ ID NO: 4839229 - DNA, 25 bp, Homo sapien
ctggaacccacccatcaggtaaaga

SEQ ID NO: 4839230 - DNA, 25 bp, Homo sapien
cttactacaagtatttgtggtcgtg

SEQ ID NO: 4839231 - DNA, 25 bp, Homo sapien
acaagtatttgtggtcgtgatttgc

SEQ ID NO: 4839232 - DNA, 25 bp, Homo sapien
tttctaagtggaggatagagggtcc

SEQ ID NO: 4839233 - DNA, 25 bp, Homo sapien
catacgcgctgtactccactgtgaa

SEQ ID NO: 4839234 - DNA, 25 bp, Homo sapien
gaggatagagggtcctcatacgcgc

SEQ ID NO: 4839235 - DNA, 25 bp, Homo sapien
ccagttcgtttctaagtggaggata

SEQ ID NO: 4839236 - DNA, 25 bp, Homo sapien
ctaagccatcaaggcctactgggtg

SEQ ID NO: 4839237 - DNA, 25 bp, Homo sapien
actccctggaagaacatccccagga

SEQ ID NO: 4839238 - DNA, 25 bp, Homo sapien
caggaacaagcaccaactaagccat

SEQ ID NO: 4839239 - DNA, 25 bp, Homo sapien
gccacttgcccttcagattcacaca

SEQ ID NO: 4839240 - DNA, 25 bp, Homo sapien
attcgttgtagataccattgcactt

SEQ ID NO: 4839241 - DNA, 25 bp, Homo sapien
cgttgtagataccattgcacttgga

SEQ ID NO: 4839242 - DNA, 25 bp, Homo sapien
ttcgttgtagataccattgcacttg

SEQ ID NO: 4839243 - DNA, 25 bp, Homo sapien
tcgttgtagataccattgcacttgg

SEQ ID NO: 4839244 - DNA, 25 bp, Homo sapien
tgacccaaggaagccattcacccta

SEQ ID NO: 4839245 - DNA, 25 bp, Homo sapien
gccaatatatgggtctgtgcttgag

SEQ ID NO: 4839246 - DNA, 25 bp, Homo sapien
gagtgacacgatccagagagccaat

SEQ ID NO: 4839247 - DNA, 25 bp, Homo sapien
cctactgctagtcaaggccacaaga

SEQ ID NO: 4839248 - DNA, 25 bp, Homo sapien
tgttctgattgcaaaagcagtcctc

SEQ ID NO: 4839249 - DNA, 25 bp, Homo sapien
tggtgatgaatgtccccgcttgagg

SEQ ID NO: 4839250 - DNA, 25 bp, Homo sapien
cacatagctattggcataagggcct

SEQ ID NO: 4839251 - DNA, 25 bp, Homo sapien
cccaaggaagtttccgaggctgatg

SEQ ID NO: 4839252 - DNA, 25 bp, Homo sapien
ggcattgaggcctagaaataaaact

SEQ ID NO: 4839253 - DNA, 25 bp, Homo sapien
tactggtccagattccaaagatccc

SEQ ID NO: 4839254 - DNA, 25 bp, Homo sapien
gtaatgtatgcaactcctgcaacag

SEQ ID NO: 4839255 - DNA, 25 bp, Homo sapien
gaagaatgaaaatcccgcacttgat

SEQ ID NO: 4839256 - DNA, 25 bp, Homo sapien
gagctaataggctttagttttatat

SEQ ID NO: 4839257 - DNA, 25 bp, Homo sapien
gatgaccaaaattagtttgtagagc

SEQ ID NO: 4839258 - DNA, 25 bp, Homo sapien
gctggtcttgaacatttgaagagga

SEQ ID NO: 4839259 - DNA, 25 bp, Homo sapien
tattattgcagagtctagggaggga

SEQ ID NO: 4839260 - DNA, 25 bp, Homo sapien
ggacattttccagtagatgggtatc

SEQ ID NO: 4839261 - DNA, 25 bp, Homo sapien
tccagtagatgggtatcatgcaact

SEQ ID NO: 4839262 - DNA, 25 bp, Homo sapien
tcattatctccacaattaacttcat

SEQ ID NO: 4839263 - DNA, 25 bp, Homo sapien
tgggtatcatgcaacttcacattaa

SEQ ID NO: 4839264 - DNA, 25 bp, Homo sapien
ttttctcctgaagttgcttctgcat

SEQ ID NO: 4839265 - DNA, 25 bp, Homo sapien
acctcacttttctcctgaagttgct

SEQ ID NO: 4839266 - DNA, 25 bp, Homo sapien
acaacctcacttttctcctgaagtt

SEQ ID NO: 4839267 - DNA, 25 bp, Homo sapien
ggtaacaacctcacttttctcctga

SEQ ID NO: 4839268 - DNA, 25 bp, Homo sapien
ttggcttgaagcactttgatttgtt

SEQ ID NO: 4839269 - DNA, 25 bp, Homo sapien
ctatacttctcgtattgaccctcca

SEQ ID NO: 4839270 - DNA, 25 bp, Homo sapien
cttctcgtattgaccctccattggc

SEQ ID NO: 4839271 - DNA, 25 bp, Homo sapien
ccattggcttgaagcactttgattt

SEQ ID NO: 4839272 - DNA, 25 bp, Homo sapien
caccagatgataggcggagatagag

SEQ ID NO: 4839273 - DNA, 25 bp, Homo sapien
taaactcccctcaatgtgcctaacg

SEQ ID NO: 4839274 - DNA, 25 bp, Homo sapien
ccagcttctgggagtcactgttgac

SEQ ID NO: 4839275 - DNA, 25 bp, Homo sapien
taggtctgtggcatgcaactggcac

SEQ ID NO: 4839276 - DNA, 25 bp, Homo sapien
gccacgaagaggacgagaagctcta

SEQ ID NO: 4839277 - DNA, 25 bp, Homo sapien
cctgggaggccgaccaatgtgaact

SEQ ID NO: 4839278 - DNA, 25 bp, Homo sapien
tcactggaccggatacatgtctgtg

SEQ ID NO: 4839279 - DNA, 25 bp, Homo sapien
tgacctgtccatacatggccatttg

SEQ ID NO: 4839280 - DNA, 25 bp, Homo sapien
cactgatgtccttgtgtgttccaca

SEQ ID NO: 4839281 - DNA, 25 bp, Homo sapien
caaatggacactcgctgcatcactg

SEQ ID NO: 4839282 - DNA, 25 bp, Homo sapien
tcctcgtggtactaacagctgaaca

SEQ ID NO: 4839283 - DNA, 25 bp, Homo sapien
ccacaagtcctaaaatgcttcctcg

SEQ ID NO: 4839284 - DNA, 25 bp, Homo sapien
catttccatatctacgcttgctgat

SEQ ID NO: 4839285 - DNA, 25 bp, Homo sapien
ttccacattgcaggatgaaatgatc

SEQ ID NO: 4839286 - DNA, 25 bp, Homo sapien
ccatatctacgcttgctgattttct

SEQ ID NO: 4839287 - DNA, 25 bp, Homo sapien
cattgcaggatgaaatgatcacatt

SEQ ID NO: 4839288 - DNA, 25 bp, Homo sapien
ggcaggactcgattcttcatctttt

SEQ ID NO: 4839289 - DNA, 25 bp, Homo sapien
tagactgtgatgagccactccaagg

SEQ ID NO: 4839290 - DNA, 25 bp, Homo sapien
tctccccatctagactgtgatgagc

SEQ ID NO: 4839291 - DNA, 25 bp, Homo sapien
tccaaggcaggactcgattcttcat

SEQ ID NO: 4839292 - DNA, 25 bp, Homo sapien
ctgcagcttggacctctctcctgag

SEQ ID NO: 4839293 - DNA, 25 bp, Homo sapien
ttgtctctccctccttggcttagca

SEQ ID NO: 4839294 - DNA, 25 bp, Homo sapien
tgagtccagacttgtctctccctcc

SEQ ID NO: 4839295 - DNA, 25 bp, Homo sapien
tctctcctgagtccagacttgtctc

SEQ ID NO: 4839296 - DNA, 25 bp, Homo sapien
ccactacagtaaggagagtttctct

SEQ ID NO: 4839297 - DNA, 25 bp, Homo sapien
ccaatgcagcaactcttaacttcag

SEQ ID NO: 4839298 - DNA, 25 bp, Homo sapien
aaaatcaagcaagggcccaatgcag

SEQ ID NO: 4839299 - DNA, 25 bp, Homo sapien
gatttgagctcagctagggtgccag

SEQ ID NO: 4839300 - DNA, 25 bp, Homo sapien
gagtcagggatcagagcttgttcat

SEQ ID NO: 4839301 - DNA, 25 bp, Homo sapien
tatcttcacgtacagatgaggtgtg

SEQ ID NO: 4839302 - DNA, 25 bp, Homo sapien
tagacttctcagaactgaacttctc

SEQ ID NO: 4839303 - DNA, 25 bp, Homo sapien
gaggtgagcccttcaagaccatctg

SEQ ID NO: 4839304 - DNA, 25 bp, Homo sapien
gcttggttaacctacacatattttg

SEQ ID NO: 4839305 - DNA, 25 bp, Homo sapien
tgagcccgtattcatagaaattacc

SEQ ID NO: 4839306 - DNA, 25 bp, Homo sapien
tccttattaccagatatacgcattg

SEQ ID NO: 4839307 - DNA, 25 bp, Homo sapien
gctgaagattccatgtcgctagttg

SEQ ID NO: 4839308 - DNA, 25 bp, Homo sapien
gcatagcacatgtccgttcccaaag

SEQ ID NO: 4839309 - DNA, 25 bp, Homo sapien
tgaatatccccatagctcgatgtga

SEQ ID NO: 4839310 - DNA, 25 bp, Homo sapien
gattctgacgcacgctggagttcaa

SEQ ID NO: 4839311 - DNA, 25 bp, Homo sapien
taattcccttgcaattgggcgcagc

SEQ ID NO: 4839312 - DNA, 25 bp, Homo sapien
ggccaaatgtatcctctcgatctga

SEQ ID NO: 4839313 - DNA, 25 bp, Homo sapien
gagtttcacctgcattacaaagcct

SEQ ID NO: 4839314 - DNA, 25 bp, Homo sapien
caagcaggatttctatgttgcggtc

SEQ ID NO: 4839315 - DNA, 25 bp, Homo sapien
tccataaagcaagcagtcagcctgg

SEQ ID NO: 4839316 - DNA, 25 bp, Homo sapien
tgttcggaacaagcgcatccacgtg

SEQ ID NO: 4839317 - DNA, 25 bp, Homo sapien
gttgcttttgctgactttctatgca

SEQ ID NO: 4839318 - DNA, 25 bp, Homo sapien
tgcatgtgcatgtgacggtgaggcc

SEQ ID NO: 4839319 - DNA, 25 bp, Homo sapien
gctgaatggatcaaaggctctccct

SEQ ID NO: 4839320 - DNA, 25 bp, Homo sapien
gcatctcacaacgtgctggggctca

SEQ ID NO: 4839321 - DNA, 25 bp, Homo sapien
catctcacaacgtgctggggctcag

SEQ ID NO: 4839322 - DNA, 25 bp, Homo sapien
ctttaatctgtttgggtcatcagtg

SEQ ID NO: 4839323 - DNA, 25 bp, Homo sapien
atctcacaacgtgctggggctcagg

SEQ ID NO: 4839324 - DNA, 25 bp, Homo sapien
tattctctaaacatcatcaaaggct

SEQ ID NO: 4839325 - DNA, 25 bp, Homo sapien
ggtgaaccgtgtaatcatagcactg

SEQ ID NO: 4839326 - DNA, 25 bp, Homo sapien
tatgaatggaaataaggtgaaccgt

SEQ ID NO: 4839327 - DNA, 25 bp, Homo sapien
cacttacagactattgaggatgcag

SEQ ID NO: 4839328 - DNA, 25 bp, Homo sapien
cattcagacgaggagatgagaaccg

SEQ ID NO: 4839329 - DNA, 25 bp, Homo sapien
tggagtgcccaaaaaattaggagag

SEQ ID NO: 4839330 - DNA, 25 bp, Homo sapien
tctgcccgagctactagaagaatga

SEQ ID NO: 4839331 - DNA, 25 bp, Homo sapien
tggaccaaggaagtagctagcagca

SEQ ID NO: 4839332 - DNA, 25 bp, Homo sapien
taacttccacgtagaggtgatgaac

SEQ ID NO: 4839333 - DNA, 25 bp, Homo sapien
ttaagccttggcttcacccaccatc

SEQ ID NO: 4839334 - DNA, 25 bp, Homo sapien
gcagataatggttgtaaagccttgt

SEQ ID NO: 4839335 - DNA, 25 bp, Homo sapien
ggtgatgaacattgaagcagataat

SEQ ID NO: 4839336 - DNA, 25 bp, Homo sapien
tctggctttgaatattctccctggg

SEQ ID NO: 4839337 - DNA, 25 bp, Homo sapien
tggctttgaatattctccctgggaa

SEQ ID NO: 4839338 - DNA, 25 bp, Homo sapien
gctttgaatattctccctgggaatc

SEQ ID NO: 4839339 - DNA, 25 bp, Homo sapien
atatctgcccctgaaatcttatatc

SEQ ID NO: 4839340 - DNA, 25 bp, Homo sapien
gctccgtttgaagcctagttggagt

SEQ ID NO: 4839341 - DNA, 25 bp, Homo sapien
aaagttctggctaatcagtgctccg

SEQ ID NO: 4839342 - DNA, 25 bp, Homo sapien
ggacgagctgtatcaatatcctttg

SEQ ID NO: 4839343 - DNA, 25 bp, Homo sapien
tctgaacacttctcaggacgagctg

SEQ ID NO: 4839344 - DNA, 25 bp, Homo sapien
tgattacccttgtggggctgacgat

SEQ ID NO: 4839345 - DNA, 25 bp, Homo sapien
accgtgattacccttgtggggctga

SEQ ID NO: 4839346 - DNA, 25 bp, Homo sapien
gtgtgatgattatgcgcctctgctg

SEQ ID NO: 4839347 - DNA, 25 bp, Homo sapien
ttattgtgtgatgattatgcgcctc

SEQ ID NO: 4839348 - DNA, 25 bp, Homo sapien
ccagcttgatatacagctgcaccag

SEQ ID NO: 4839349 - DNA, 25 bp, Homo sapien
gataaccctgccgatttaattgatt

SEQ ID NO: 4839350 - DNA, 25 bp, Homo sapien
gggcaccatttgaccacattgataa

SEQ ID NO: 4839351 - DNA, 25 bp, Homo sapien
caactacaaaataagagggcaccat

SEQ ID NO: 4839352 - DNA, 25 bp, Homo sapien
tttagaagaattatggtattaaggc

SEQ ID NO: 4839353 - DNA, 25 bp, Homo sapien
gaagaattatggtattaaggctaaa

SEQ ID NO: 4839354 - DNA, 25 bp, Homo sapien
agaagaattatggtattaaggctaa

SEQ ID NO: 4839355 - DNA, 25 bp, Homo sapien
tagaagaattatggtattaaggcta

SEQ ID NO: 4839356 - DNA, 25 bp, Homo sapien
catagtaatacacagttaatatcac

SEQ ID NO: 4839357 - DNA, 25 bp, Homo sapien
tgtgggtactgcattgacaatacac

SEQ ID NO: 4839358 - DNA, 25 bp, Homo sapien
ggtgttatgaacatagtaatacaca

SEQ ID NO: 4839359 - DNA, 25 bp, Homo sapien
gacaatacacagactggtgttatga

SEQ ID NO: 4839360 - DNA, 25 bp, Homo sapien
aaaaggtgcagctgtgatatgacac

SEQ ID NO: 4839361 - DNA, 25 bp, Homo sapien
aaggtgcagctgtgatatgacacat

SEQ ID NO: 4839362 - DNA, 25 bp, Homo sapien
aaaaaggtgcagctgtgatatgaca

SEQ ID NO: 4839363 - DNA, 25 bp, Homo sapien
gaaaaaggtgcagctgtgatatgac

SEQ ID NO: 4839364 - DNA, 25 bp, Homo sapien
cttcttctcgttgagtaataaatgt

SEQ ID NO: 4839365 - DNA, 25 bp, Homo sapien
tcttcttctcgttgagtaataaatg

SEQ ID NO: 4839366 - DNA, 25 bp, Homo sapien
taattctgtacctccacccacaaat

SEQ ID NO: 4839367 - DNA, 25 bp, Homo sapien
aattctgtacctccacccacaaata

SEQ ID NO: 4839368 - DNA, 25 bp, Homo sapien
ataattctgtacctccacccacaaa

SEQ ID NO: 4839369 - DNA, 25 bp, Homo sapien
taactgtgtctgtctcgtagcccat

SEQ ID NO: 4839370 - DNA, 25 bp, Homo sapien
ctaactgtgtctgtctcgtagccca

SEQ ID NO: 4839371 - DNA, 25 bp, Homo sapien
tcatatctgctcgtcttcgaagtcc

SEQ ID NO: 4839372 - DNA, 25 bp, Homo sapien
taggaggagcgcacagctgttgttg

SEQ ID NO: 4839373 - DNA, 25 bp, Homo sapien
gagcgcacagctgttgttgacacca

SEQ ID NO: 4839374 - DNA, 25 bp, Homo sapien
gctcgtcttcgaagtccctaggagg

SEQ ID NO: 4839375 - DNA, 25 bp, Homo sapien
acttcaatgcgaagcagaatgacat

SEQ ID NO: 4839376 - DNA, 25 bp, Homo sapien
ctggaataaaaggtccaagagagca

SEQ ID NO: 4839377 - DNA, 25 bp, Homo sapien
taaaacttcaatgcgaagcagaatg

SEQ ID NO: 4839378 - DNA, 25 bp, Homo sapien
gtgaattctggaataaaaggtccaa

SEQ ID NO: 4839379 - DNA, 25 bp, Homo sapien
gatggcttttaaacaccgaagtgga

SEQ ID NO: 4839380 - DNA, 25 bp, Homo sapien
gaaaggattgagtcaccatgagtgg

SEQ ID NO: 4839381 - DNA, 25 bp, Homo sapien
gagaacagaaagagacgtgcttaac

SEQ ID NO: 4839382 - DNA, 25 bp, Homo sapien
cagtacataagtctgacaccaaggg

SEQ ID NO: 4839383 - DNA, 25 bp, Homo sapien
ttcccaggggtcagacaggtggcac

SEQ ID NO: 4839384 - DNA, 25 bp, Homo sapien
tgacaaatccgaacgtgtacgcccg

SEQ ID NO: 4839385 - DNA, 25 bp, Homo sapien
ccaatagagttaggtggcctgtgac

SEQ ID NO: 4839386 - DNA, 25 bp, Homo sapien
cacacgtgtgtgagaccaatagagt

SEQ ID NO: 4839387 - DNA, 25 bp, Homo sapien
actgcgcttgcgctgcttgcgccgg

SEQ ID NO: 4839388 - DNA, 25 bp, Homo sapien
ttgcgccgggttggcgattttgccc

SEQ ID NO: 4839389 - DNA, 25 bp, Homo sapien
gctaaagtcgagtagtcaacgggaa

SEQ ID NO: 4839390 - DNA, 25 bp, Homo sapien
gcagtgactggccaccatgcggcgt

SEQ ID NO: 4839391 - DNA, 25 bp, Homo sapien
tctgcggaggtcgtcttccgggaga

SEQ ID NO: 4839392 - DNA, 25 bp, Homo sapien
ccctccgggaatggatctcaatgcc

SEQ ID NO: 4839393 - DNA, 25 bp, Homo sapien
gcggaggtcgtcttccgggagacgc

SEQ ID NO: 4839394 - DNA, 25 bp, Homo sapien
cagctctgcggaggtcgtcttccgg

SEQ ID NO: 4839395 - DNA, 25 bp, Homo sapien
aatgcatcaggctcggctcctcatc

SEQ ID NO: 4839396 - DNA, 25 bp, Homo sapien
gctcaggaacccgtcaggagctgac

SEQ ID NO: 4839397 - DNA, 25 bp, Homo sapien
ttaagactggctcaggaacccgtca

SEQ ID NO: 4839398 - DNA, 25 bp, Homo sapien
cccaggttaagactggctcaggaac

SEQ ID NO: 4839399 - DNA, 25 bp, Homo sapien
caaaagctcagattgtgtgtctcct

SEQ ID NO: 4839400 - DNA, 25 bp, Homo sapien
ggaagtctgtacctcatcagtagag

SEQ ID NO: 4839401 - DNA, 25 bp, Homo sapien
agagcacttttgtccgtttgggcca

SEQ ID NO: 4839402 - DNA, 25 bp, Homo sapien
aaagtctcagtctcatcagaaaggt

SEQ ID NO: 4839403 - DNA, 25 bp, Homo sapien
tccaatacgggtgagaaagtctttg

SEQ ID NO: 4839404 - DNA, 25 bp, Homo sapien
tcaaaagttcatcgggtacagtaca

SEQ ID NO: 4839405 - DNA, 25 bp, Homo sapien
tcctgttacaatagggacactgata

SEQ ID NO: 4839406 - DNA, 25 bp, Homo sapien
gatgttcatctattctctcttggag

SEQ ID NO: 4839407 - DNA, 25 bp, Homo sapien
agctctggtttgattagagtaagtc

SEQ ID NO: 4839408 - DNA, 25 bp, Homo sapien
tgatatgacttttctcagtcagtct

SEQ ID NO: 4839409 - DNA, 25 bp, Homo sapien
aagcactatttccatctcgctgcaa

SEQ ID NO: 4839410 - DNA, 25 bp, Homo sapien
gattagagtaagtcgcttgagaaat

SEQ ID NO: 4839411 - DNA, 25 bp, Homo sapien
taattccccatagccatttgatcgc

SEQ ID NO: 4839412 - DNA, 25 bp, Homo sapien
tttgatcgccaaagacagttattac

SEQ ID NO: 4839413 - DNA, 25 bp, Homo sapien
taactattccaactacaacagtgcc

SEQ ID NO: 4839414 - DNA, 25 bp, Homo sapien
tcccaagtgcctgtagaaattatgg

SEQ ID NO: 4839415 - DNA, 25 bp, Homo sapien
gcagctctcttggaccctgtgagtg

SEQ ID NO: 4839416 - DNA, 25 bp, Homo sapien
ttcagccagctcctagatgaacggc

SEQ ID NO: 4839417 - DNA, 25 bp, Homo sapien
agacagaaatccaaccagaacagca

SEQ ID NO: 4839418 - DNA, 25 bp, Homo sapien
cctgtgagtgaccatgatagctgtc

SEQ ID NO: 4839419 - DNA, 25 bp, Homo sapien
ctgatgcaatagaacagtaccaaca

SEQ ID NO: 4839420 - DNA, 25 bp, Homo sapien
ggttgggtaagttcagcagttcgca

SEQ ID NO: 4839421 - DNA, 25 bp, Homo sapien
agttcgcactgtctagatccagcca

SEQ ID NO: 4839422 - DNA, 25 bp, Homo sapien
tccggctcaggcagatctttacagt

SEQ ID NO: 4839423 - DNA, 25 bp, Homo sapien
tcaacactgccatagatgaggagca

SEQ ID NO: 4839424 - DNA, 25 bp, Homo sapien
ttgcaaatgctctgatgttctgtct

SEQ ID NO: 4839425 - DNA, 25 bp, Homo sapien
caccatttgcaaatgctctgatgtt

SEQ ID NO: 4839426 - DNA, 25 bp, Homo sapien
attaataaaagccaaagacgcagta

SEQ ID NO: 4839427 - DNA, 25 bp, Homo sapien
ataaaagccaaagacgcagtaacat

SEQ ID NO: 4839428 - DNA, 25 bp, Homo sapien
tcttctatagccatctttgctccct

SEQ ID NO: 4839429 - DNA, 25 bp, Homo sapien
cagccagcggggaatatatccaggg

SEQ ID NO: 4839430 - DNA, 25 bp, Homo sapien
cagcggggaatatatccagggtctg

SEQ ID NO: 4839431 - DNA, 25 bp, Homo sapien
gccagcggggaatatatccagggtc

SEQ ID NO: 4839432 - DNA, 25 bp, Homo sapien
acagccagcggggaatatatccagg

SEQ ID NO: 4839433 - DNA, 25 bp, Homo sapien
ctccatttagtatcaagattatgac

SEQ ID NO: 4839434 - DNA, 25 bp, Homo sapien
catttagtatcaagattatgacaat

SEQ ID NO: 4839435 - DNA, 25 bp, Homo sapien
tccatttagtatcaagattatgaca

SEQ ID NO: 4839436 - DNA, 25 bp, Homo sapien
gtctccatttagtatcaagattatg

SEQ ID NO: 4839437 - DNA, 25 bp, Homo sapien
ttgtctagaaagctgaccgatcgca

SEQ ID NO: 4839438 - DNA, 25 bp, Homo sapien
tacataggagagacgaaaagagccc

SEQ ID NO: 4839439 - DNA, 25 bp, Homo sapien
ggtcccctgcggcattaaacagtat

SEQ ID NO: 4839440 - DNA, 25 bp, Homo sapien
tgaatggactacatcaaaggatcct

SEQ ID NO: 4839441 - DNA, 25 bp, Homo sapien
gtttaagagccaattgttgactgtg

SEQ ID NO: 4839442 - DNA, 25 bp, Homo sapien
ttaaatctcttatacgactctggga

SEQ ID NO: 4839443 - DNA, 25 bp, Homo sapien
aataattgcttgtcttcatgccagg

SEQ ID NO: 4839444 - DNA, 25 bp, Homo sapien
aaatctagaaaaactgtagtgtggg

SEQ ID NO: 4839445 - DNA, 25 bp, Homo sapien
gctgggttgcactccggcataaaaa

SEQ ID NO: 4839446 - DNA, 25 bp, Homo sapien
ttcatgacaatgatgctaccaggca

SEQ ID NO: 4839447 - DNA, 25 bp, Homo sapien
tttttgaaagctgtaccctcatgca

SEQ ID NO: 4839448 - DNA, 25 bp, Homo sapien
tctcaatagacaaagcacaggctct

SEQ ID NO: 4839449 - DNA, 25 bp, Homo sapien
aaaatccataggtgtcttgtccgac

SEQ ID NO: 4839450 - DNA, 25 bp, Homo sapien
ggtgtcttgtccgacttttaggcat

SEQ ID NO: 4839451 - DNA, 25 bp, Homo sapien
tccataggtgtcttgtccgactttt

SEQ ID NO: 4839452 - DNA, 25 bp, Homo sapien
taggtgtcttgtccgacttttaggc

SEQ ID NO: 4839453 - DNA, 25 bp, Homo sapien
taataagcatcatacaggcagcctg

SEQ ID NO: 4839454 - DNA, 25 bp, Homo sapien
gatgcaccgggagctagacttgtct

SEQ ID NO: 4839455 - DNA, 25 bp, Homo sapien
tagcagatgaatccaagtcctcaaa

SEQ ID NO: 4839456 - DNA, 25 bp, Homo sapien
gaatgccgctaggattccaggaaag

SEQ ID NO: 4839457 - DNA, 25 bp, Homo sapien
taataatccttttgtataattccca

SEQ ID NO: 4839458 - DNA, 25 bp, Homo sapien
aataatccttttgtataattcccat

SEQ ID NO: 4839459 - DNA, 25 bp, Homo sapien
ataatccttttgtataattcccatt

SEQ ID NO: 4839460 - DNA, 25 bp, Homo sapien
catgtgttgattcttgtccttgcct

SEQ ID NO: 4839461 - DNA, 25 bp, Homo sapien
taccgcggccttcagtcagctgaaa

SEQ ID NO: 4839462 - DNA, 25 bp, Homo sapien
caaggtgaaactgcaaagcctgcga

SEQ ID NO: 4839463 - DNA, 25 bp, Homo sapien
tcagctgaaagcattggtctcctcc

SEQ ID NO: 4839464 - DNA, 25 bp, Homo sapien
tgtgtccattaactaaatcatgact

SEQ ID NO: 4839465 - DNA, 25 bp, Homo sapien
ccattaactaaatcatgactactac

SEQ ID NO: 4839466 - DNA, 25 bp, Homo sapien
tcactgtgtccattaactaaatcat

SEQ ID NO: 4839467 - DNA, 25 bp, Homo sapien
taactaaatcatgactactacaatt

SEQ ID NO: 4839468 - DNA, 25 bp, Homo sapien
cagtaggtggtcaggcatttgccac

SEQ ID NO: 4839469 - DNA, 25 bp, Homo sapien
gagcctcaagtgcttctgcattaca

SEQ ID NO: 4839470 - DNA, 25 bp, Homo sapien
agatgagcctcaagtgcttctgcat

SEQ ID NO: 4839471 - DNA, 25 bp, Homo sapien
ctgcattacagtaggtggtcaggca

SEQ ID NO: 4839472 - DNA, 25 bp, Homo sapien
tccacactctaacattcactctcat

SEQ ID NO: 4839473 - DNA, 25 bp, Homo sapien
tttcatttctctcatccttattcca

SEQ ID NO: 4839474 - DNA, 25 bp, Homo sapien
ttcatttctctcatccttattccac

SEQ ID NO: 4839475 - DNA, 25 bp, Homo sapien
cttattccacactctaacattcact

SEQ ID NO: 4839476 - DNA, 25 bp, Homo sapien
tgctggtttggtctgcgctctttca

SEQ ID NO: 4839477 - DNA, 25 bp, Homo sapien
caagggagtaaatgccttccttact

SEQ ID NO: 4839478 - DNA, 25 bp, Homo sapien
gtgactttatcattagcatcccaga

SEQ ID NO: 4839479 - DNA, 25 bp, Homo sapien
ctatttccagctcaaagaatgccat

SEQ ID NO: 4839480 - DNA, 25 bp, Homo sapien
ctggactagaaagaatctgtgcatt

SEQ ID NO: 4839481 - DNA, 25 bp, Homo sapien
attgtaaggaggattcctctatggc

SEQ ID NO: 4839482 - DNA, 25 bp, Homo sapien
aattgtaaggaggattcctctatgg

SEQ ID NO: 4839483 - DNA, 25 bp, Homo sapien
gaatctgtgcattagtaggaagaaa

SEQ ID NO: 4839484 - DNA, 25 bp, Homo sapien
cctgcattactagtcagcgctcgta

SEQ ID NO: 4839485 - DNA, 25 bp, Homo sapien
aagtgcatcctgcattactagtcag

SEQ ID NO: 4839486 - DNA, 25 bp, Homo sapien
gcgctcgtaaccaagttgcattcat

SEQ ID NO: 4839487 - DNA, 25 bp, Homo sapien
tactagtcagcgctcgtaaccaagt

SEQ ID NO: 4839488 - DNA, 25 bp, Homo sapien
tttacatcagtcacattaggattct

SEQ ID NO: 4839489 - DNA, 25 bp, Homo sapien
gcatcaacaaatagaatggtcatgt

SEQ ID NO: 4839490 - DNA, 25 bp, Homo sapien
gaatggtcatgtattctaacaatgt

SEQ ID NO: 4839491 - DNA, 25 bp, Homo sapien
atcagtcacattaggattcttatgg

SEQ ID NO: 4839492 - DNA, 25 bp, Homo sapien
gatcttttgtcaagccaagtaagct

SEQ ID NO: 4839493 - DNA, 25 bp, Homo sapien
aagctctctgcaagtatttggtaca

SEQ ID NO: 4839494 - DNA, 25 bp, Homo sapien
ttttgctgaccctttagatcttttg

SEQ ID NO: 4839495 - DNA, 25 bp, Homo sapien
taagctctctgcaagtatttggtac

SEQ ID NO: 4839496 - DNA, 25 bp, Homo sapien
cctatagaacgcgtaagaagcattg

SEQ ID NO: 4839497 - DNA, 25 bp, Homo sapien
tttcccatgtttctgaatgaaggct

SEQ ID NO: 4839498 - DNA, 25 bp, Homo sapien
gaagcattgagctgattatccattg

SEQ ID NO: 4839499 - DNA, 25 bp, Homo sapien
tatccattggattgcctgagagagt

SEQ ID NO: 4839500 - DNA, 25 bp, Homo sapien
taactcaccatttagcattagatat

SEQ ID NO: 4839501 - DNA, 25 bp, Homo sapien
tgatgatttccaattacatgaactc

SEQ ID NO: 4839502 - DNA, 25 bp, Homo sapien
gatttccaattacatgaactcatca

SEQ ID NO: 4839503 - DNA, 25 bp, Homo sapien
gatgatttccaattacatgaactca

SEQ ID NO: 4839504 - DNA, 25 bp, Homo sapien
tgctcagagcgaattaatggtagga

SEQ ID NO: 4839505 - DNA, 25 bp, Homo sapien
tcaggggtgcactctgcacacaagt

SEQ ID NO: 4839506 - DNA, 25 bp, Homo sapien
gttggaataaggagatacggtgcta

SEQ ID NO: 4839507 - DNA, 25 bp, Homo sapien
ggagatacggtgctaatgcttcctg

SEQ ID NO: 4839508 - DNA, 25 bp, Homo sapien
aggaacttctcttttgtgccaacct

SEQ ID NO: 4839509 - DNA, 25 bp, Homo sapien
tacattcagggaatgttccttccat

SEQ ID NO: 4839510 - DNA, 25 bp, Homo sapien
tctcttttgtgccaaccttacattc

SEQ ID NO: 4839511 - DNA, 25 bp, Homo sapien
tagtttcctattcaacaggaacttc

SEQ ID NO: 4839512 - DNA, 25 bp, Homo sapien
agcacaagctgacctaaagacatcc

SEQ ID NO: 4839513 - DNA, 25 bp, Homo sapien
tgtagcacaagctgacctaaagaca

SEQ ID NO: 4839514 - DNA, 25 bp, Homo sapien
tagcacaagctgacctaaagacatc

SEQ ID NO: 4839515 - DNA, 25 bp, Homo sapien
gtagcacaagctgacctaaagacat

SEQ ID NO: 4839516 - DNA, 25 bp, Homo sapien
gaatatttccccgatgaaggatatt

SEQ ID NO: 4839517 - DNA, 25 bp, Homo sapien
aaggatattttgatcaaggaaaaag

SEQ ID NO: 4839518 - DNA, 25 bp, Homo sapien
gcaagagaatatttccccgatgaag

SEQ ID NO: 4839519 - DNA, 25 bp, Homo sapien
gaaggatattttgatcaaggaaaaa

SEQ ID NO: 4839520 - DNA, 25 bp, Homo sapien
caagcctattgccaacagatgcaga

SEQ ID NO: 4839521 - DNA, 25 bp, Homo sapien
cagggaggtgccaggtatattccat

SEQ ID NO: 4839522 - DNA, 25 bp, Homo sapien
ctagctgggtgcctttggtcatgcc

SEQ ID NO: 4839523 - DNA, 25 bp, Homo sapien
gctgcctaccatgcttcaagtccaa

SEQ ID NO: 4839524 - DNA, 25 bp, Homo sapien
cttgagatgaagatatgccacggaa

SEQ ID NO: 4839525 - DNA, 25 bp, Homo sapien
ggcacatgatttgtccctctggata

SEQ ID NO: 4839526 - DNA, 25 bp, Homo sapien
taacttatctcattgccagccgtcg

SEQ ID NO: 4839527 - DNA, 25 bp, Homo sapien
tatttattgccctgtgagtcgtgcc

SEQ ID NO: 4839528 - DNA, 25 bp, Homo sapien
atcatcaccataaatgacaatctgg

SEQ ID NO: 4839529 - DNA, 25 bp, Homo sapien
caatctggggatgaaaatgcgagag

SEQ ID NO: 4839530 - DNA, 25 bp, Homo sapien
tgacaatctggggatgaaaatgcga

SEQ ID NO: 4839531 - DNA, 25 bp, Homo sapien
tcatcaccataaatgacaatctggg

SEQ ID NO: 4839532 - DNA, 25 bp, Homo sapien
ggcagcacaataaaaggtcagggat

SEQ ID NO: 4839533 - DNA, 25 bp, Homo sapien
gctgcaggttctatgctttctctga

SEQ ID NO: 4839534 - DNA, 25 bp, Homo sapien
ccactcctctgcttccgtgctgttg

SEQ ID NO: 4839535 - DNA, 25 bp, Homo sapien
tgttgaagctgcaggttctatgctt

SEQ ID NO: 4839536 - DNA, 25 bp, Homo sapien
taaaggccagcaaaagttctcattt

SEQ ID NO: 4839537 - DNA, 25 bp, Homo sapien
ttctcaatgtgaggtgttcttgcct

SEQ ID NO: 4839538 - DNA, 25 bp, Homo sapien
tctcaatgtgaggtgttcttgcctt

SEQ ID NO: 4839539 - DNA, 25 bp, Homo sapien
cctgtctggagactacgtgaaagaa

SEQ ID NO: 4839540 - DNA, 25 bp, Homo sapien
ttgtcctacccaatcctgttcctgg

SEQ ID NO: 4839541 - DNA, 25 bp, Homo sapien
tatgagcgaaatgatggagcagcag

SEQ ID NO: 4839542 - DNA, 25 bp, Homo sapien
cagagaagaccttatgcacaaatta

SEQ ID NO: 4839543 - DNA, 25 bp, Homo sapien
caaaaagacatatgagccagttggg

SEQ ID NO: 4839544 - DNA, 25 bp, Homo sapien
atatacattggtggtcccaggaggt

SEQ ID NO: 4839545 - DNA, 25 bp, Homo sapien
cagttgggagatgcttctatgggct

SEQ ID NO: 4839546 - DNA, 25 bp, Homo sapien
cccaggaggttatgatggagataaa

SEQ ID NO: 4839547 - DNA, 25 bp, Homo sapien
tcagctttggactcaacctttctat

SEQ ID NO: 4839548 - DNA, 25 bp, Homo sapien
ggatggagccgctttgttcaaacaa

SEQ ID NO: 4839549 - DNA, 25 bp, Homo sapien
gttcaaacaacccatgaagaaatgt

SEQ ID NO: 4839550 - DNA, 25 bp, Homo sapien
caagaatgcggtaacactccggcag

SEQ ID NO: 4839551 - DNA, 25 bp, Homo sapien
cagaatagcagatattaactttata

SEQ ID NO: 4839552 - DNA, 25 bp, Homo sapien
tgtctcataattgttccagcgaagt

SEQ ID NO: 4839553 - DNA, 25 bp, Homo sapien
aattgttccagcgaagtaaaggcag

SEQ ID NO: 4839554 - DNA, 25 bp, Homo sapien
ctttgcctgtctcataattgttcca

SEQ ID NO: 4839555 - DNA, 25 bp, Homo sapien
cataattgttccagcgaagtaaagg

SEQ ID NO: 4839556 - DNA, 25 bp, Homo sapien
cacgtacggagggtacagattgacc

SEQ ID NO: 4839557 - DNA, 25 bp, Homo sapien
aaggaggcacgtacggagggtacag

SEQ ID NO: 4839558 - DNA, 25 bp, Homo sapien
gggtacagattgaccttcttgagtc

SEQ ID NO: 4839559 - DNA, 25 bp, Homo sapien
tacggagggtacagattgaccttct

SEQ ID NO: 4839560 - DNA, 25 bp, Homo sapien
ctggttgatgtccatttttcttaag

SEQ ID NO: 4839561 - DNA, 25 bp, Homo sapien
tgtccatttttcttaagacttcttg

SEQ ID NO: 4839562 - DNA, 25 bp, Homo sapien
tggttgatgtccatttttcttaaga

SEQ ID NO: 4839563 - DNA, 25 bp, Homo sapien
tgatgtccatttttcttaagacttc

SEQ ID NO: 4839564 - DNA, 25 bp, Homo sapien
gtggagcctccaccattgggtgagt

SEQ ID NO: 4839565 - DNA, 25 bp, Homo sapien
caccattgggtgagtgtttaggatg

SEQ ID NO: 4839566 - DNA, 25 bp, Homo sapien
tccaccattgggtgagtgtttagga

SEQ ID NO: 4839567 - DNA, 25 bp, Homo sapien
gagcctccaccattgggtgagtgtt

SEQ ID NO: 4839568 - DNA, 25 bp, Homo sapien
gattggaagatacattaggtaccac

SEQ ID NO: 4839569 - DNA, 25 bp, Homo sapien
tgagagtcactcagtccacaagtac

SEQ ID NO: 4839570 - DNA, 25 bp, Homo sapien
caagcatgggtactattgtctacac

SEQ ID NO: 4839571 - DNA, 25 bp, Homo sapien
gacatgtagactagctaaagattca

SEQ ID NO: 4839572 - DNA, 25 bp, Homo sapien
cacactagaaacaagcagctatatc

SEQ ID NO: 4839573 - DNA, 25 bp, Homo sapien
tactgacaggcatctaagattaaag

SEQ ID NO: 4839574 - DNA, 25 bp, Homo sapien
tatttgaccgatgtactgtagaaca

SEQ ID NO: 4839575 - DNA, 25 bp, Homo sapien
gaattactgctaaatagtaccaaga

SEQ ID NO: 4839576 - DNA, 25 bp, Homo sapien
taatagagccacacaaagactccct

SEQ ID NO: 4839577 - DNA, 25 bp, Homo sapien
cctcatcggtcaaatagggatcacc

SEQ ID NO: 4839578 - DNA, 25 bp, Homo sapien
ggcttgaatcctaactctagagtgc

SEQ ID NO: 4839579 - DNA, 25 bp, Homo sapien
gacttagtactcaaacagccttggc

SEQ ID NO: 4839580 - DNA, 25 bp, Homo sapien
ctatttgaatgactatgaggtgtaa

SEQ ID NO: 4839581 - DNA, 25 bp, Homo sapien
tgagattaccagaagacactaggat

SEQ ID NO: 4839582 - DNA, 25 bp, Homo sapien
catttttgacattaacaactgccaa

SEQ ID NO: 4839583 - DNA, 25 bp, Homo sapien
cgagtcaaaaaggacgtgtacctat

SEQ ID NO: 4839584 - DNA, 25 bp, Homo sapien
ctatttctttcgttttatgccccat

SEQ ID NO: 4839585 - DNA, 25 bp, Homo sapien
catctatttctttcgttttatgccc

SEQ ID NO: 4839586 - DNA, 25 bp, Homo sapien
tctatttctttcgttttatgcccca

SEQ ID NO: 4839587 - DNA, 25 bp, Homo sapien
ccccatctatttctttcgttttatg

SEQ ID NO: 4839588 - DNA, 25 bp, Homo sapien
ttttggaagacttaggaaggactca

SEQ ID NO: 4839589 - DNA, 25 bp, Homo sapien
caggtcaacaatggttttggaagac

SEQ ID NO: 4839590 - DNA, 25 bp, Homo sapien
caaggcaggtcaacaatggttttgg

SEQ ID NO: 4839591 - DNA, 25 bp, Homo sapien
tggaagacttaggaaggactcacat

SEQ ID NO: 4839592 - DNA, 25 bp, Homo sapien
ggaggagccagtgtgggtcaccttc

SEQ ID NO: 4839593 - DNA, 25 bp, Homo sapien
tggtacatccagcaaagggaggagc

SEQ ID NO: 4839594 - DNA, 25 bp, Homo sapien
aggagccagtgtgggtcaccttctg

SEQ ID NO: 4839595 - DNA, 25 bp, Homo sapien
tacatccagcaaagggaggagccag

SEQ ID NO: 4839596 - DNA, 25 bp, Homo sapien
taaggcgttggagatgccgtggcca

SEQ ID NO: 4839597 - DNA, 25 bp, Homo sapien
aagagagttgctcccctggtaggtt

SEQ ID NO: 4839598 - DNA, 25 bp, Homo sapien
tggccataggaaagagagttgctcc

SEQ ID NO: 4839599 - DNA, 25 bp, Homo sapien
taggaaagagagttgctcccctggt

SEQ ID NO: 4839600 - DNA, 25 bp, Homo sapien
catccattgtccactgggatttttc

SEQ ID NO: 4839601 - DNA, 25 bp, Homo sapien
tccattgtccactgggatttttctg

SEQ ID NO: 4839602 - DNA, 25 bp, Homo sapien
tcacatccattgtccactgggattt

SEQ ID NO: 4839603 - DNA, 25 bp, Homo sapien
ccattgtccactgggatttttctgt

SEQ ID NO: 4839604 - DNA, 25 bp, Homo sapien
ggtctgaacttacactaccagcagt

SEQ ID NO: 4839605 - DNA, 25 bp, Homo sapien
tgtggtctcaattctaaactctggg

SEQ ID NO: 4839606 - DNA, 25 bp, Homo sapien
taggccaagcctacaactagtgtag

SEQ ID NO: 4839607 - DNA, 25 bp, Homo sapien
tgggtattcagtggagtgtctctcc

SEQ ID NO: 4839608 - DNA, 25 bp, Homo sapien
tctaaatctactcttgtttggccac

SEQ ID NO: 4839609 - DNA, 25 bp, Homo sapien
tctactcttgtttggccacctttaa

SEQ ID NO: 4839610 - DNA, 25 bp, Homo sapien
tatcttctaaatctactcttgtttg

SEQ ID NO: 4839611 - DNA, 25 bp, Homo sapien
taaatctactcttgtttggccacct

SEQ ID NO: 4839612 - DNA, 25 bp, Homo sapien
caaagctctctgagtaaatggcaat

SEQ ID NO: 4839613 - DNA, 25 bp, Homo sapien
caattgagtgaaatcggagagggtg

SEQ ID NO: 4839614 - DNA, 25 bp, Homo sapien
tcggagagggtgtaggtcagaactt

SEQ ID NO: 4839615 - DNA, 25 bp, Homo sapien
tctctgagtaaatggcaattgagtg

SEQ ID NO: 4839616 - DNA, 25 bp, Homo sapien
cctcttctgtagttggggaattaag

SEQ ID NO: 4839617 - DNA, 25 bp, Homo sapien
tctcctcttctgtagttggggaatt

SEQ ID NO: 4839618 - DNA, 25 bp, Homo sapien
tctgtagttggggaattaagagtag

SEQ ID NO: 4839619 - DNA, 25 bp, Homo sapien
tttctcctcttctgtagttggggaa

SEQ ID NO: 4839620 - DNA, 25 bp, Homo sapien
tactagacaactggatatggttgta

SEQ ID NO: 4839621 - DNA, 25 bp, Homo sapien
agacaactggatatggttgtacaga

SEQ ID NO: 4839622 - DNA, 25 bp, Homo sapien
aaattactagacaactggatatggt

SEQ ID NO: 4839623 - DNA, 25 bp, Homo sapien
aattactagacaactggatatggtt

SEQ ID NO: 4839624 - DNA, 25 bp, Homo sapien
cgattgcttaactcagtctcctgtg

SEQ ID NO: 4839625 - DNA, 25 bp, Homo sapien
aactcagtctcctgtgagaatactc

SEQ ID NO: 4839626 - DNA, 25 bp, Homo sapien
ttataccgtccctgtatgtgtaaca

SEQ ID NO: 4839627 - DNA, 25 bp, Homo sapien
tagtccacactgctctcttatcaca

SEQ ID NO: 4839628 - DNA, 25 bp, Homo sapien
gctattcaagtaccgtagtgagaag

SEQ ID NO: 4839629 - DNA, 25 bp, Homo sapien
aggctattcaagtaccgtagtgaga

SEQ ID NO: 4839630 - DNA, 25 bp, Homo sapien
aaggctattcaagtaccgtagtgag

SEQ ID NO: 4839631 - DNA, 25 bp, Homo sapien
ggctattcaagtaccgtagtgagaa

SEQ ID NO: 4839632 - DNA, 25 bp, Homo sapien
tccttaagttaaatgcctgaggctc

SEQ ID NO: 4839633 - DNA, 25 bp, Homo sapien
ccttaagttaaatgcctgaggctct

SEQ ID NO: 4839634 - DNA, 25 bp, Homo sapien
cttaagttaaatgcctgaggctctt

SEQ ID NO: 4839635 - DNA, 25 bp, Homo sapien
aaggaaatgtgtatggcgctgtaac

SEQ ID NO: 4839636 - DNA, 25 bp, Homo sapien
ggtataatgacaagctgacacacaa

SEQ ID NO: 4839637 - DNA, 25 bp, Homo sapien
actcgaaagttctgagcttgtatgg

SEQ ID NO: 4839638 - DNA, 25 bp, Homo sapien
caataagcttataacctgatgcagg

SEQ ID NO: 4839639 - DNA, 25 bp, Homo sapien
cttgtacataaaggtcatttcgata

SEQ ID NO: 4839640 - DNA, 25 bp, Homo sapien
tgtacataaaggtcatttcgataaa

SEQ ID NO: 4839641 - DNA, 25 bp, Homo sapien
gcttgtacataaaggtcatttcgat

SEQ ID NO: 4839642 - DNA, 25 bp, Homo sapien
tacataaaggtcatttcgataaatt

SEQ ID NO: 4839643 - DNA, 25 bp, Homo sapien
aatgttctcaacactagttttgtgg

SEQ ID NO: 4839644 - DNA, 25 bp, Homo sapien
taagaagtagaattcatgtagcaaa

SEQ ID NO: 4839645 - DNA, 25 bp, Homo sapien
agcaaattattgtaggaatcctcag

SEQ ID NO: 4839646 - DNA, 25 bp, Homo sapien
ttgtaggaatcctcagtaaaagctc

SEQ ID NO: 4839647 - DNA, 25 bp, Homo sapien
gcaccttgtggaagaccttcgatgt

SEQ ID NO: 4839648 - DNA, 25 bp, Homo sapien
ccttgtggaagaccttcgatgtacc

SEQ ID NO: 4839649 - DNA, 25 bp, Homo sapien
caatcttagacgaagcaccttgtgg

SEQ ID NO: 4839650 - DNA, 25 bp, Homo sapien
ctgctcagggttgacaatcttagac

SEQ ID NO: 4839651 - DNA, 25 bp, Homo sapien
gcagtcaagtttacaacgatataga

SEQ ID NO: 4839652 - DNA, 25 bp, Homo sapien
gatctcttgtatgattaattcatct

SEQ ID NO: 4839653 - DNA, 25 bp, Homo sapien
ttatcaaggattgtacacaaaataa

SEQ ID NO: 4839654 - DNA, 25 bp, Homo sapien
tttgtaggcataaataaagtatgta

SEQ ID NO: 4839655 - DNA, 25 bp, Homo sapien
ttcttctcagactttagaattacct

SEQ ID NO: 4839656 - DNA, 25 bp, Homo sapien
caaagcctccgagggttctgtctct

SEQ ID NO: 4839657 - DNA, 25 bp, Homo sapien
actggaaaacaagattaacatgcaa

SEQ ID NO: 4839658 - DNA, 25 bp, Homo sapien
gggtcccagtcatggcaggtggatc

SEQ ID NO: 4839659 - DNA, 25 bp, Homo sapien
atcatcaaggttatcaaaatctgtg

SEQ ID NO: 4839660 - DNA, 25 bp, Homo sapien
tgtgacatctgttgttacaaagcag

SEQ ID NO: 4839661 - DNA, 25 bp, Homo sapien
cagtagatcatcaaggttatcaaaa

SEQ ID NO: 4839662 - DNA, 25 bp, Homo sapien
tgacatctgttgttacaaagcagaa

SEQ ID NO: 4839663 - DNA, 25 bp, Homo sapien
aaaagaactctgactattgccacat

SEQ ID NO: 4839664 - DNA, 25 bp, Homo sapien
cgatagtgaaattttgccatatact

SEQ ID NO: 4839665 - DNA, 25 bp, Homo sapien
agaactctgactattgccacatcga

SEQ ID NO: 4839666 - DNA, 25 bp, Homo sapien
tattgccacatcgatagtgaaattt

SEQ ID NO: 4839667 - DNA, 25 bp, Homo sapien
gtgacttctctctcgatcccagctt

SEQ ID NO: 4839668 - DNA, 25 bp, Homo sapien
tgctaccacatctctaagatcacgt

SEQ ID NO: 4839669 - DNA, 25 bp, Homo sapien
tgtctatactactcctcctttgggt

SEQ ID NO: 4839670 - DNA, 25 bp, Homo sapien
gcccagttgactgggtgatttgctg

SEQ ID NO: 4839671 - DNA, 25 bp, Homo sapien
tagtgtaaatggtgcccgtggactg

SEQ ID NO: 4839672 - DNA, 25 bp, Homo sapien
gcaattttagtgtaaatggtgcccg

SEQ ID NO: 4839673 - DNA, 25 bp, Homo sapien
aatggtgcccgtggactgtctttgt

SEQ ID NO: 4839674 - DNA, 25 bp, Homo sapien
gtgtctcatgcttgcaattttagtg

SEQ ID NO: 4839675 - DNA, 25 bp, Homo sapien
tgtttgaagtagtgtgggctttctg

SEQ ID NO: 4839676 - DNA, 25 bp, Homo sapien
cttgttctgcttggtgttagaatac

SEQ ID NO: 4839677 - DNA, 25 bp, Homo sapien
gaatacaagacaatatcccctcctc

SEQ ID NO: 4839678 - DNA, 25 bp, Homo sapien
gttaagctctcctgctgcgtttctg

SEQ ID NO: 4839679 - DNA, 25 bp, Homo sapien
cacacaaccataatttgcaaattcc

SEQ ID NO: 4839680 - DNA, 25 bp, Homo sapien
cctgtgctttctgcgccttgtaaat

SEQ ID NO: 4839681 - DNA, 25 bp, Homo sapien
tttctcgggttacctgtgctttctg

SEQ ID NO: 4839682 - DNA, 25 bp, Homo sapien
aattccagctttcatgactttctcg

SEQ ID NO: 4839683 - DNA, 25 bp, Homo sapien
tcaaggcatctttctcgtacagtca

SEQ ID NO: 4839684 - DNA, 25 bp, Homo sapien
ttaatatccatagggtattccagtg

SEQ ID NO: 4839685 - DNA, 25 bp, Homo sapien
gatttccgtatgtgtctgagagtcc

SEQ ID NO: 4839686 - DNA, 25 bp, Homo sapien
tattccagtgaaattggagacctca

SEQ ID NO: 4839687 - DNA, 25 bp, Homo sapien
tccttagccagaaatccccaaatgc

SEQ ID NO: 4839688 - DNA, 25 bp, Homo sapien
tgatttcagagctctgaattcccac

SEQ ID NO: 4839689 - DNA, 25 bp, Homo sapien
tcagagctctgaattcccactgtcc

SEQ ID NO: 4839690 - DNA, 25 bp, Homo sapien
ctgaattcccactgtccttagccag

SEQ ID NO: 4839691 - DNA, 25 bp, Homo sapien
tcagttcagcaggcttgttttgtac

SEQ ID NO: 4839692 - DNA, 25 bp, Homo sapien
tcagcaggcttgttttgtacattcc

SEQ ID NO: 4839693 - DNA, 25 bp, Homo sapien
cagcaggcttgttttgtacattccc

SEQ ID NO: 4839694 - DNA, 25 bp, Homo sapien
agttcagcaggcttgttttgtacat

SEQ ID NO: 4839695 - DNA, 25 bp, Homo sapien
catgagtccagggttcgatgattgc

SEQ ID NO: 4839696 - DNA, 25 bp, Homo sapien
cgatgattgctgtgatatcccacat

SEQ ID NO: 4839697 - DNA, 25 bp, Homo sapien
tacgacaagcttttatgacaacatg

SEQ ID NO: 4839698 - DNA, 25 bp, Homo sapien
tatcccacattttgtgcactggatt

SEQ ID NO: 4839699 - DNA, 25 bp, Homo sapien
atcatgggttttcacaagttgctta

SEQ ID NO: 4839700 - DNA, 25 bp, Homo sapien
taaatggcgttatctggtcatcttc

SEQ ID NO: 4839701 - DNA, 25 bp, Homo sapien
tttgtaccttatagaaatatttgac

SEQ ID NO: 4839702 - DNA, 25 bp, Homo sapien
ttgacacctggttctattaaattaa

SEQ ID NO: 4839703 - DNA, 25 bp, Homo sapien
tgagaagggtgatatctcctccaag

SEQ ID NO: 4839704 - DNA, 25 bp, Homo sapien
cacaattgagaagggtgatatctcc

SEQ ID NO: 4839705 - DNA, 25 bp, Homo sapien
gaattctgcacaattgagaagggtg

SEQ ID NO: 4839706 - DNA, 25 bp, Homo sapien
gaagggtgatatctcctccaagaga

SEQ ID NO: 4839707 - DNA, 25 bp, Homo sapien
gtcgtattctttttcggccagctgc

SEQ ID NO: 4839708 - DNA, 25 bp, Homo sapien
tgttctagttcctaaatatatgtca

SEQ ID NO: 4839709 - DNA, 25 bp, Homo sapien
agctgccagagtcacaatgcatttc

SEQ ID NO: 4839710 - DNA, 25 bp, Homo sapien
acacaatataatcttgtcgtattct

SEQ ID NO: 4839711 - DNA, 25 bp, Homo sapien
aaatgtattgtgaataaacaacatg

SEQ ID NO: 4839712 - DNA, 25 bp, Homo sapien
ataaatgtattgtgaataaacaaca

SEQ ID NO: 4839713 - DNA, 25 bp, Homo sapien
aatgtattgtgaataaacaacatga

SEQ ID NO: 4839714 - DNA, 25 bp, Homo sapien
tgtattgtgaataaacaacatgaat

SEQ ID NO: 4839715 - DNA, 25 bp, Homo sapien
taactctggtccaattcataaggga

SEQ ID NO: 4839716 - DNA, 25 bp, Homo sapien
tatgatacaaaaggtaatcaagtcc

SEQ ID NO: 4839717 - DNA, 25 bp, Homo sapien
tcataagggactaattggccatggg

SEQ ID NO: 4839718 - DNA, 25 bp, Homo sapien
tacctgtgagctgaaatactgtcat

SEQ ID NO: 4839719 - DNA, 25 bp, Homo sapien
tcatatgacagctttctgaatgatg

SEQ ID NO: 4839720 - DNA, 25 bp, Homo sapien
gatgagtgcagtcctcttcccttcc

SEQ ID NO: 4839721 - DNA, 25 bp, Homo sapien
ttctgaatgatgagtgcagtcctct

SEQ ID NO: 4839722 - DNA, 25 bp, Homo sapien
catatgacagctttctgaatgatga

SEQ ID NO: 4839723 - DNA, 25 bp, Homo sapien
ctcctgaaagtgtctgccctctttg

SEQ ID NO: 4839724 - DNA, 25 bp, Homo sapien
tctcctgaaagtgtctgccctcttt

SEQ ID NO: 4839725 - DNA, 25 bp, Homo sapien
tgtttctccaggaaaacttcagtat

SEQ ID NO: 4839726 - DNA, 25 bp, Homo sapien
ctgtttctccaggaaaacttcagta

SEQ ID NO: 4839727 - DNA, 25 bp, Homo sapien
tctgcaaaatgctttgactattttg

SEQ ID NO: 4839728 - DNA, 25 bp, Homo sapien
gttccagatggttaattcgtttgta

SEQ ID NO: 4839729 - DNA, 25 bp, Homo sapien
ttgaaatgagtcttgtttaggtggt

SEQ ID NO: 4839730 - DNA, 25 bp, Homo sapien
tattgaaatgagtcttgtttaggtg

SEQ ID NO: 4839731 - DNA, 25 bp, Homo sapien
ctgccgagctggcaagaaattcatt

SEQ ID NO: 4839732 - DNA, 25 bp, Homo sapien
aaattcattcccagcttgcgtcctc

SEQ ID NO: 4839733 - DNA, 25 bp, Homo sapien
agaaattcattcccagcttgcgtcc

SEQ ID NO: 4839734 - DNA, 25 bp, Homo sapien
gccgagctggcaagaaattcattcc

SEQ ID NO: 4839735 - DNA, 25 bp, Homo sapien
gcgaggtgcctctttggcaatatat

SEQ ID NO: 4839736 - DNA, 25 bp, Homo sapien
caatatattaaagtggacaggtcca

SEQ ID NO: 4839737 - DNA, 25 bp, Homo sapien
ccaggtgtgagtgtttgcaggcaca

SEQ ID NO: 4839738 - DNA, 25 bp, Homo sapien
actaagggactgcctgttgagccag

SEQ ID NO: 4839739 - DNA, 25 bp, Homo sapien
gagagtcagaattgctgtcatacag

SEQ ID NO: 4839740 - DNA, 25 bp, Homo sapien
gaattgctgtcatacagactattgg

SEQ ID NO: 4839741 - DNA, 25 bp, Homo sapien
tgctgtcatacagactattgggata

SEQ ID NO: 4839742 - DNA, 25 bp, Homo sapien
cagactattgggataagtaaatgta

SEQ ID NO: 4839743 - DNA, 25 bp, Homo sapien
agggagttggggtcactgcaagatt

SEQ ID NO: 4839744 - DNA, 25 bp, Homo sapien
gcaagattggaggtctgcccagtgt

SEQ ID NO: 4839745 - DNA, 25 bp, Homo sapien
tgcaagattggaggtctgcccagtg

SEQ ID NO: 4839746 - DNA, 25 bp, Homo sapien
tgggagattgtgcagctgtctctcc

SEQ ID NO: 4839747 - DNA, 25 bp, Homo sapien
gacaacagcctccattttactcaca

SEQ ID NO: 4839748 - DNA, 25 bp, Homo sapien
tcacatatgactctctgtaggtgct

SEQ ID NO: 4839749 - DNA, 25 bp, Homo sapien
tgtgaatttcagtgcgcttagatgg

SEQ ID NO: 4839750 - DNA, 25 bp, Homo sapien
ctttccagttgacaacagcctccat

SEQ ID NO: 4839751 - DNA, 25 bp, Homo sapien
gacacgagccgacaaggtgtactca

SEQ ID NO: 4839752 - DNA, 25 bp, Homo sapien
acacgagccgacaaggtgtactcac

SEQ ID NO: 4839753 - DNA, 25 bp, Homo sapien
aagacacgagccgacaaggtgtact

SEQ ID NO: 4839754 - DNA, 25 bp, Homo sapien
aaaaagacacgagccgacaaggtgt

SEQ ID NO: 4839755 - DNA, 25 bp, Homo sapien
tatctgttgcattatcgtagttctg

SEQ ID NO: 4839756 - DNA, 25 bp, Homo sapien
ccatctgtagaggtggctctgatgt

SEQ ID NO: 4839757 - DNA, 25 bp, Homo sapien
gttgtttcaggaccatctgtagagg

SEQ ID NO: 4839758 - DNA, 25 bp, Homo sapien
tggagggacaggttaaggtagatac

SEQ ID NO: 4839759 - DNA, 25 bp, Homo sapien
tttacattgtaaggcctaaatagga

SEQ ID NO: 4839760 - DNA, 25 bp, Homo sapien
gctttacattgtaaggcctaaatag

SEQ ID NO: 4839761 - DNA, 25 bp, Homo sapien
agaacaaatacctccttattaacat

SEQ ID NO: 4839762 - DNA, 25 bp, Homo sapien
cattgtaaggcctaaataggagaac

SEQ ID NO: 4839763 - DNA, 25 bp, Homo sapien
attgtttcttgcttatttctttgtt

SEQ ID NO: 4839764 - DNA, 25 bp, Homo sapien
ttgtttcttgcttatttctttgttc

SEQ ID NO: 4839765 - DNA, 25 bp, Homo sapien
gtttcttgcttatttctttgttcat

SEQ ID NO: 4839766 - DNA, 25 bp, Homo sapien
tgtttcttgcttatttctttgttca

SEQ ID NO: 4839767 - DNA, 25 bp, Homo sapien
gcgatatcccctacactcagcagat

SEQ ID NO: 4839768 - DNA, 25 bp, Homo sapien
atatgagcatcacgcttttgagtga

SEQ ID NO: 4839769 - DNA, 25 bp, Homo sapien
tgagcatcacgcttttgagtgacag

SEQ ID NO: 4839770 - DNA, 25 bp, Homo sapien
gtggaatgaggtatgttgcgatatc

SEQ ID NO: 4839771 - DNA, 25 bp, Homo sapien
atgaaaaactgtgtcttcagtgtga

SEQ ID NO: 4839772 - DNA, 25 bp, Homo sapien
tgagaggcccagtgatcatctgaag

SEQ ID NO: 4839773 - DNA, 25 bp, Homo sapien
gatcatctgaagcaaagataagctc

SEQ ID NO: 4839774 - DNA, 25 bp, Homo sapien
agataagctcctgttcattgtgacc

SEQ ID NO: 4839775 - DNA, 25 bp, Homo sapien
tgcttccaaacgaccttttgccaaa

SEQ ID NO: 4839776 - DNA, 25 bp, Homo sapien
atacaggatgattagaaaaagctac

SEQ ID NO: 4839777 - DNA, 25 bp, Homo sapien
ggtaaccaggagcataaatacagga

SEQ ID NO: 4839778 - DNA, 25 bp, Homo sapien
actccagcgatagagaaaattcctc

SEQ ID NO: 4839779 - DNA, 25 bp, Homo sapien
tttcccacagtagctctccagtgta

SEQ ID NO: 4839780 - DNA, 25 bp, Homo sapien
tgcataacaatctttcccacagtag

SEQ ID NO: 4839781 - DNA, 25 bp, Homo sapien
aataaaaatgatctggggggatatt

SEQ ID NO: 4839782 - DNA, 25 bp, Homo sapien
taaaaatgatctggggggatattgg

SEQ ID NO: 4839783 - DNA, 25 bp, Homo sapien
tttcacaaggaaggacagtcgtacg

SEQ ID NO: 4839784 - DNA, 25 bp, Homo sapien
gaaggacagtcgtacgcagtcattt

SEQ ID NO: 4839785 - DNA, 25 bp, Homo sapien
cagtcgtacgcagtcattttctgct

SEQ ID NO: 4839786 - DNA, 25 bp, Homo sapien
caaggaaggacagtcgtacgcagtc

SEQ ID NO: 4839787 - DNA, 25 bp, Homo sapien
gaagcctctgccatctagcgcaccg

SEQ ID NO: 4839788 - DNA, 25 bp, Homo sapien
ctctgccatctagcgcaccgtgtga

SEQ ID NO: 4839789 - DNA, 25 bp, Homo sapien
tgccatctagcgcaccgtgtgaagt

SEQ ID NO: 4839790 - DNA, 25 bp, Homo sapien
tagccggcatgaggcttcctttccc

SEQ ID NO: 4839791 - DNA, 25 bp, Homo sapien
tagggtattcttccacgttgtgtaa

SEQ ID NO: 4839792 - DNA, 25 bp, Homo sapien
gtgctatttttagggtattcttcca

SEQ ID NO: 4839793 - DNA, 25 bp, Homo sapien
catcatcagtatgtctagtgctatt

SEQ ID NO: 4839794 - DNA, 25 bp, Homo sapien
tctggagactgaagtgtactcatca

SEQ ID NO: 4839795 - DNA, 25 bp, Homo sapien
gctaagggcaagattaaatgcaccc

SEQ ID NO: 4839796 - DNA, 25 bp, Homo sapien
ctttccgttatagatgctaagggca

SEQ ID NO: 4839797 - DNA, 25 bp, Homo sapien
agtgatttcacgtgcctttgaggaa

SEQ ID NO: 4839798 - DNA, 25 bp, Homo sapien
tacatgctcaacgaagtcctttcca

SEQ ID NO: 4839799 - DNA, 25 bp, Homo sapien
catgtggcttagcatctgctgtgta

SEQ ID NO: 4839800 - DNA, 25 bp, Homo sapien
tattcccctggtggatcagatggcc

SEQ ID NO: 4839801 - DNA, 25 bp, Homo sapien
tcaagatccattagcaggatctgct

SEQ ID NO: 4839802 - DNA, 25 bp, Homo sapien
tgtgtattctgttagatcaagatcc

SEQ ID NO: 4839803 - DNA, 25 bp, Homo sapien
gggtaaccgcctccattatgattca

SEQ ID NO: 4839804 - DNA, 25 bp, Homo sapien
tatatagcctttatcgtgctcaggt

SEQ ID NO: 4839805 - DNA, 25 bp, Homo sapien
aaatgtatccttcgtcacatggtga

SEQ ID NO: 4839806 - DNA, 25 bp, Homo sapien
ggaaagcccctataaaatcattaga

SEQ ID NO: 4839807 - DNA, 25 bp, Homo sapien
gttagactgagctgatattgacatg

SEQ ID NO: 4839808 - DNA, 25 bp, Homo sapien
tgaaattgacaatgccactcctggg

SEQ ID NO: 4839809 - DNA, 25 bp, Homo sapien
tattgacatgtcatatcccacatcc

SEQ ID NO: 4839810 - DNA, 25 bp, Homo sapien
tacagattctgggttagactgagct

SEQ ID NO: 4839811 - DNA, 25 bp, Homo sapien
ttccaaacccaagcttatgtgtctt

SEQ ID NO: 4839812 - DNA, 25 bp, Homo sapien
taaggtatgcgaatggtcttttcca

SEQ ID NO: 4839813 - DNA, 25 bp, Homo sapien
agcaaccacgttgtagttttcggag

SEQ ID NO: 4839814 - DNA, 25 bp, Homo sapien
tttcggagtatgcaagaatattttc

SEQ ID NO: 4839815 - DNA, 25 bp, Homo sapien
catactcaaaccagatgaatcttcc

SEQ ID NO: 4839816 - DNA, 25 bp, Homo sapien
tgaatcttcctctagtttgacttgg

SEQ ID NO: 4839817 - DNA, 25 bp, Homo sapien
tgagtatgaagattgtgtccttatc

SEQ ID NO: 4839818 - DNA, 25 bp, Homo sapien
cagatttgatgccttttaacctttg

SEQ ID NO: 4839819 - DNA, 25 bp, Homo sapien
ccaatgtgttcagataaatgaaatc

SEQ ID NO: 4839820 - DNA, 25 bp, Homo sapien
tatccaatgtgttcagataaatgaa

SEQ ID NO: 4839821 - DNA, 25 bp, Homo sapien
gaaatctgacaggattcccagcagg

SEQ ID NO: 4839822 - DNA, 25 bp, Homo sapien
aatgaaatctgacaggattcccagc

SEQ ID NO: 4839823 - DNA, 25 bp, Homo sapien
cctctatttcaatgatgctgttccc

SEQ ID NO: 4839824 - DNA, 25 bp, Homo sapien
tttcaatgatgctgttcccatgcat

SEQ ID NO: 4839825 - DNA, 25 bp, Homo sapien
ctatttcaatgatgctgttcccatg

SEQ ID NO: 4839826 - DNA, 25 bp, Homo sapien
acgcctctatttcaatgatgctgtt

SEQ ID NO: 4839827 - DNA, 25 bp, Homo sapien
aacgggaccttgtggcttgagtgca

SEQ ID NO: 4839828 - DNA, 25 bp, Homo sapien
gaccttgtggcttgagtgcacttac

SEQ ID NO: 4839829 - DNA, 25 bp, Homo sapien
ccgaacgggaccttgtggcttgagt

SEQ ID NO: 4839830 - DNA, 25 bp, Homo sapien
gggaccttgtggcttgagtgcactt

SEQ ID NO: 4839831 - DNA, 25 bp, Homo sapien
tcagtttttgcagctcgccaggagc

SEQ ID NO: 4839832 - DNA, 25 bp, Homo sapien
gctcagtttttgcagctcgccagga

SEQ ID NO: 4839833 - DNA, 25 bp, Homo sapien
cagctcagtttttgcagctcgccag

SEQ ID NO: 4839834 - DNA, 25 bp, Homo sapien
ctcagtttttgcagctcgccaggag

SEQ ID NO: 4839835 - DNA, 25 bp, Homo sapien
acatcttcttgtgctgtgaagacag

SEQ ID NO: 4839836 - DNA, 25 bp, Homo sapien
agtggactcaggcaaaccggcatta

SEQ ID NO: 4839837 - DNA, 25 bp, Homo sapien
gagattgaggtgttagactccatag

SEQ ID NO: 4839838 - DNA, 25 bp, Homo sapien
catgtgatggcggctgtaagaacag

SEQ ID NO: 4839839 - DNA, 25 bp, Homo sapien
taatttcgaccatctgaggaacatc

SEQ ID NO: 4839840 - DNA, 25 bp, Homo sapien
gaggaacatctaaatgccctttatt

SEQ ID NO: 4839841 - DNA, 25 bp, Homo sapien
tcagctgctgtaggtgggacgttcc

SEQ ID NO: 4839842 - DNA, 25 bp, Homo sapien
gtcatattgtgttctcttgattctg

SEQ ID NO: 4839843 - DNA, 25 bp, Homo sapien
tatacagatactgctccaaaatttt

SEQ ID NO: 4839844 - DNA, 25 bp, Homo sapien
taaaattgccctgatgattatacag

SEQ ID NO: 4839845 - DNA, 25 bp, Homo sapien
tgtagcagggtgatatttgcatctg

SEQ ID NO: 4839846 - DNA, 25 bp, Homo sapien
cattttccaccttgtatgtagcagg

SEQ ID NO: 4839847 - DNA, 25 bp, Homo sapien
gatgaccattctattgagttgggca

SEQ ID NO: 4839848 - DNA, 25 bp, Homo sapien
tcagatgaccattctattgagttgg

SEQ ID NO: 4839849 - DNA, 25 bp, Homo sapien
tctcagatgaccattctattgagtt

SEQ ID NO: 4839850 - DNA, 25 bp, Homo sapien
cagatgaccattctattgagttggg

SEQ ID NO: 4839851 - DNA, 25 bp, Homo sapien
tcctggtccgtgacggcagcatttg

SEQ ID NO: 4839852 - DNA, 25 bp, Homo sapien
cagcaaagttgtccgagctgcgccg

SEQ ID NO: 4839853 - DNA, 25 bp, Homo sapien
gggacagtgcatttccgctcggaga

SEQ ID NO: 4839854 - DNA, 25 bp, Homo sapien
tcggagattcgcgtgacagaggcat

SEQ ID NO: 4839855 - DNA, 25 bp, Homo sapien
tcccgagccaggctgcactcccggg

SEQ ID NO: 4839856 - DNA, 25 bp, Homo sapien
gttctcccgagccaggctgcactcc

SEQ ID NO: 4839857 - DNA, 25 bp, Homo sapien
ccgagccaggctgcactcccgggct

SEQ ID NO: 4839858 - DNA, 25 bp, Homo sapien
tctcccgagccaggctgcactcccg

SEQ ID NO: 4839859 - DNA, 25 bp, Homo sapien
cagcggcgcggagtagttggtggtc

SEQ ID NO: 4839860 - DNA, 25 bp, Homo sapien
gcttcgcggccgcttctcggcgctc

SEQ ID NO: 4839861 - DNA, 25 bp, Homo sapien
ttagttgcgctccatggacagatca

SEQ ID NO: 4839862 - DNA, 25 bp, Homo sapien
gacagatcaacgaacctggacattg

SEQ ID NO: 4839863 - DNA, 25 bp, Homo sapien
tctgaaagttgtgccatctagtcgt

SEQ ID NO: 4839864 - DNA, 25 bp, Homo sapien
tatatgccagcacgatttcctccac

SEQ ID NO: 4839865 - DNA, 25 bp, Homo sapien
catgggtagctgtctttgtcctgaa

SEQ ID NO: 4839866 - DNA, 25 bp, Homo sapien
ccttgctcaggaggtgtaattactc

SEQ ID NO: 4839867 - DNA, 25 bp, Homo sapien
tgttgttattgcattggtttatcat

SEQ ID NO: 4839868 - DNA, 25 bp, Homo sapien
ttcatgaagatgttattgttgttgt

SEQ ID NO: 4839869 - DNA, 25 bp, Homo sapien
ttgttgttgttattgcattggttta

SEQ ID NO: 4839870 - DNA, 25 bp, Homo sapien
gttgttgttattgcattggtttatc

SEQ ID NO: 4839871 - DNA, 25 bp, Homo sapien
atctatatacccgaagtcaaacaca

SEQ ID NO: 4839872 - DNA, 25 bp, Homo sapien
cacagaaaagtaaaccataaggact

SEQ ID NO: 4839873 - DNA, 25 bp, Homo sapien
tatatacccgaagtcaaacacagaa

SEQ ID NO: 4839874 - DNA, 25 bp, Homo sapien
ggactttaagttgactatcggccat

SEQ ID NO: 4839875 - DNA, 25 bp, Homo sapien
tattatcaggttgatgacaaaatac

SEQ ID NO: 4839876 - DNA, 25 bp, Homo sapien
aaaatactttattatcaggttgata

SEQ ID NO: 4839877 - DNA, 25 bp, Homo sapien
tattttattatcaggttgatgacaa

SEQ ID NO: 4839878 - DNA, 25 bp, Homo sapien
tatcaggttgataaaggcttacgtt

SEQ ID NO: 4839879 - DNA, 25 bp, Homo sapien
taaatctcctgtccaatgaccatcc

SEQ ID NO: 4839880 - DNA, 25 bp, Homo sapien
gaccgcattgactcccagtctctgg

SEQ ID NO: 4839881 - DNA, 25 bp, Homo sapien
tccattaggagtcagataatcaact

SEQ ID NO: 4839882 - DNA, 25 bp, Homo sapien
tccacatgtgtatcttatcctctgc

SEQ ID NO: 4839883 - DNA, 25 bp, Homo sapien
gtgcagacatcagtaggcttggcag

SEQ ID NO: 4839884 - DNA, 25 bp, Homo sapien
tcagcactcttgactgtgggctctg

SEQ ID NO: 4839885 - DNA, 25 bp, Homo sapien
tcctggatgcatcagcactcttgac

SEQ ID NO: 4839886 - DNA, 25 bp, Homo sapien
acattggcagggcttgtgaaccgtg

SEQ ID NO: 4839887 - DNA, 25 bp, Homo sapien
taagagcctcacaatgatatgaaat

SEQ ID NO: 4839888 - DNA, 25 bp, Homo sapien
gacagttcatgaagccatcatgtcc

SEQ ID NO: 4839889 - DNA, 25 bp, Homo sapien
caattttgcctagagtaagagcctc

SEQ ID NO: 4839890 - DNA, 25 bp, Homo sapien
tgaggatattttactagacacactg

SEQ ID NO: 4839891 - DNA, 25 bp, Homo sapien
tttgcaaggcatcaagatgaagcca

SEQ ID NO: 4839892 - DNA, 25 bp, Homo sapien
aaagtggaacacagacagtaggctc

SEQ ID NO: 4839893 - DNA, 25 bp, Homo sapien
tgtaactaccttgttggacgcctgc

SEQ ID NO: 4839894 - DNA, 25 bp, Homo sapien
tgtgcaccaggtcactaatgggatt

SEQ ID NO: 4839895 - DNA, 25 bp, Homo sapien
tctgtgtagcttttgagtggagtac

SEQ ID NO: 4839896 - DNA, 25 bp, Homo sapien
tatcgctgggtttcactgttccttg

SEQ ID NO: 4839897 - DNA, 25 bp, Homo sapien
gctctagatgacttttatcgctggg

SEQ ID NO: 4839898 - DNA, 25 bp, Homo sapien
tttaatcgcaaagtctgtcatgtct

SEQ ID NO: 4839899 - DNA, 25 bp, Homo sapien
tacaggggactgtttgtatcttggg

SEQ ID NO: 4839900 - DNA, 25 bp, Homo sapien
tttgtatcttgggtgccaattggga

SEQ ID NO: 4839901 - DNA, 25 bp, Homo sapien
tatcttgggtgccaattgggattgg

SEQ ID NO: 4839902 - DNA, 25 bp, Homo sapien
tgggtgccaattgggattggtccct

SEQ ID NO: 4839903 - DNA, 25 bp, Homo sapien
tgaagaagaacatatctgcgagcca

SEQ ID NO: 4839904 - DNA, 25 bp, Homo sapien
tatccagtgaagaagaacatatctg

SEQ ID NO: 4839905 - DNA, 25 bp, Homo sapien
tctgcgagccattgtttgccagctg

SEQ ID NO: 4839906 - DNA, 25 bp, Homo sapien
taggttttatccagtgaagaagaac

SEQ ID NO: 4839907 - DNA, 25 bp, Homo sapien
ggcatttctagatttgtcactctgg

SEQ ID NO: 4839908 - DNA, 25 bp, Homo sapien
gatttgtcactctggaatataagca

SEQ ID NO: 4839909 - DNA, 25 bp, Homo sapien
cactctggaatataagcaaatgtct

SEQ ID NO: 4839910 - DNA, 25 bp, Homo sapien
tttactatcctaggatgactcagta

SEQ ID NO: 4839911 - DNA, 25 bp, Homo sapien
gactggacataacacaggtgaggaa

SEQ ID NO: 4839912 - DNA, 25 bp, Homo sapien
tctctccagagggattatactcagc

SEQ ID NO: 4839913 - DNA, 25 bp, Homo sapien
tatactcagcatcctggaatgtaaa

SEQ ID NO: 4839914 - DNA, 25 bp, Homo sapien
gaaatgtatgactgggaagctgagt

SEQ ID NO: 4839915 - DNA, 25 bp, Homo sapien
gaaaattccgcctctagcctatcct

SEQ ID NO: 4839916 - DNA, 25 bp, Homo sapien
taagatagtcattataagggagcag

SEQ ID NO: 4839917 - DNA, 25 bp, Homo sapien
caaactttgcccaggtcaacctgta

SEQ ID NO: 4839918 - DNA, 25 bp, Homo sapien
gacaaaaccaagaccatggatatgg

SEQ ID NO: 4839919 - DNA, 25 bp, Homo sapien
ttccattttgtcactcacacgattt

SEQ ID NO: 4839920 - DNA, 25 bp, Homo sapien
cactcacacgatttagcacaaactc

SEQ ID NO: 4839921 - DNA, 25 bp, Homo sapien
ttgtcactcacacgatttagcacaa

SEQ ID NO: 4839922 - DNA, 25 bp, Homo sapien
gtcactcacacgatttagcacaaac

SEQ ID NO: 4839923 - DNA, 25 bp, Homo sapien
caagcctacagggataaacctcaaa

SEQ ID NO: 4839924 - DNA, 25 bp, Homo sapien
ggtaaaagttatcctcaagcctaca

SEQ ID NO: 4839925 - DNA, 25 bp, Homo sapien
acagggataaacctcaaatgatttc

SEQ ID NO: 4839926 - DNA, 25 bp, Homo sapien
aaagttatcctcaagcctacaggga

SEQ ID NO: 4839927 - DNA, 25 bp, Homo sapien
atcaattccaacttcccatatctct

SEQ ID NO: 4839928 - DNA, 25 bp, Homo sapien
gacctggaagactattccctctcct

SEQ ID NO: 4839929 - DNA, 25 bp, Homo sapien
agtgcttgacctggaagactattcc

SEQ ID NO: 4839930 - DNA, 25 bp, Homo sapien
ttctccccatgcctcttcacacatg

SEQ ID NO: 4839931 - DNA, 25 bp, Homo sapien
tgccaagtgcttgacctggaagact

SEQ ID NO: 4839932 - DNA, 25 bp, Homo sapien
tcctgctcctgatggttaggcccgt

SEQ ID NO: 4839933 - DNA, 25 bp, Homo sapien
cctggagtgggtccgtgtaggtcat

SEQ ID NO: 4839934 - DNA, 25 bp, Homo sapien
tggttaggcccgtcaacctggagtg

SEQ ID NO: 4839935 - DNA, 25 bp, Homo sapien
gtcattgcaaggagtgcaagacgca

SEQ ID NO: 4839936 - DNA, 25 bp, Homo sapien
aagtagtggccaagaaagatgacct

SEQ ID NO: 4839937 - DNA, 25 bp, Homo sapien
ttaagtagtggccaagaaagatgac

SEQ ID NO: 4839938 - DNA, 25 bp, Homo sapien
gtagtggccaagaaagatgacctac

SEQ ID NO: 4839939 - DNA, 25 bp, Homo sapien
taagtagtggccaagaaagatgacc

SEQ ID NO: 4839940 - DNA, 25 bp, Homo sapien
aaacttacgatcatgcatgaagccg

SEQ ID NO: 4839941 - DNA, 25 bp, Homo sapien
gatcatgcatgaagccgaagaggaa

SEQ ID NO: 4839942 - DNA, 25 bp, Homo sapien
tacgatcatgcatgaagccgaagag

SEQ ID NO: 4839943 - DNA, 25 bp, Homo sapien
cttacgatcatgcatgaagccgaag

SEQ ID NO: 4839944 - DNA, 25 bp, Homo sapien
catatatgccacattaggtctatga

SEQ ID NO: 4839945 - DNA, 25 bp, Homo sapien
tatatgccacattaggtctatgatc

SEQ ID NO: 4839946 - DNA, 25 bp, Homo sapien
atccagggtctcagatgacgtggag

SEQ ID NO: 4839947 - DNA, 25 bp, Homo sapien
atatgccacattaggtctatgatcc

SEQ ID NO: 4839948 - DNA, 25 bp, Homo sapien
ccttaaggcatgactgtaggagaaa

SEQ ID NO: 4839949 - DNA, 25 bp, Homo sapien
ggtatagatcctggtttccatgagc

SEQ ID NO: 4839950 - DNA, 25 bp, Homo sapien
ttccatgagcaaacaatatttctac

SEQ ID NO: 4839951 - DNA, 25 bp, Homo sapien
gaaaatctgaaactcgaggtataga

SEQ ID NO: 4839952 - DNA, 25 bp, Homo sapien
gaggaaatgcctgttgactttgaag

SEQ ID NO: 4839953 - DNA, 25 bp, Homo sapien
aatgcctgttgactttgaagacacc

SEQ ID NO: 4839954 - DNA, 25 bp, Homo sapien
atgaactagggaccgctaagttgat

SEQ ID NO: 4839955 - DNA, 25 bp, Homo sapien
ccgctaagttgattgtgacagaaaa

SEQ ID NO: 4839956 - DNA, 25 bp, Homo sapien
tgtctccctacagccaaaataatta

SEQ ID NO: 4839957 - DNA, 25 bp, Homo sapien
cagcacacacttttgcacctgtgtc

SEQ ID NO: 4839958 - DNA, 25 bp, Homo sapien
ttttgtcttcccagcctgcctcttg

SEQ ID NO: 4839959 - DNA, 25 bp, Homo sapien
cattacggcctaaccgatcaggctc

SEQ ID NO: 4839960 - DNA, 25 bp, Homo sapien
atggcagcggctttgcgagggaccc

SEQ ID NO: 4839961 - DNA, 25 bp, Homo sapien
gagcatccggttcaccgggagaaga

SEQ ID NO: 4839962 - DNA, 25 bp, Homo sapien
gaggagactgacagagcatccggtt

SEQ ID NO: 4839963 - DNA, 25 bp, Homo sapien
ctgacagagcatccggttcaccggg

SEQ ID NO: 4839964 - DNA, 25 bp, Homo sapien
gtgtctcctccacgcgcggtagccg

SEQ ID NO: 4839965 - DNA, 25 bp, Homo sapien
cagtgtctcctccacgcgcggtagc

SEQ ID NO: 4839966 - DNA, 25 bp, Homo sapien
tccacgcgcggtagccgtgcgcgcc

SEQ ID NO: 4839967 - DNA, 25 bp, Homo sapien
cctccacgcgcggtagccgtgcgcg

SEQ ID NO: 4839968 - DNA, 25 bp, Homo sapien
ttgcctacggcgtgaaggagcgccc

SEQ ID NO: 4839969 - DNA, 25 bp, Homo sapien
gccgccccgcttgcctacggcgtga

SEQ ID NO: 4839970 - DNA, 25 bp, Homo sapien
ctcccccgagctggatgcagagcag

SEQ ID NO: 4839971 - DNA, 25 bp, Homo sapien
cccgcttgcctacggcgtgaaggag

SEQ ID NO: 4839972 - DNA, 25 bp, Homo sapien
tggcaacgcggcccaccctggcccg

SEQ ID NO: 4839973 - DNA, 25 bp, Homo sapien
ctggcaacgcggcccaccctggccc

SEQ ID NO: 4839974 - DNA, 25 bp, Homo sapien
ggcaacgcggcccaccctggcccgc

SEQ ID NO: 4839975 - DNA, 25 bp, Homo sapien
agaaccctgctaactccacgtcccg

SEQ ID NO: 4839976 - DNA, 25 bp, Homo sapien
tcagaaccctgctaactccacgtcc

SEQ ID NO: 4839977 - DNA, 25 bp, Homo sapien
cagaaccctgctaactccacgtccc

SEQ ID NO: 4839978 - DNA, 25 bp, Homo sapien
ccaggttccattgtgccaaatctta

SEQ ID NO: 4839979 - DNA, 25 bp, Homo sapien
tcaactgctacacttccaggttcca

SEQ ID NO: 4839980 - DNA, 25 bp, Homo sapien
cttatcataggcatcaggttttaaa

SEQ ID NO: 4839981 - DNA, 25 bp, Homo sapien
gccaaatcttatcataggcatcagg

SEQ ID NO: 4839982 - DNA, 25 bp, Homo sapien
atacacacatattccagatccaacg

SEQ ID NO: 4839983 - DNA, 25 bp, Homo sapien
cacatattccagatccaacgggcag

SEQ ID NO: 4839984 - DNA, 25 bp, Homo sapien
atattccagatccaacgggcagcct

SEQ ID NO: 4839985 - DNA, 25 bp, Homo sapien
cacacatattccagatccaacgggc

SEQ ID NO: 4839986 - DNA, 25 bp, Homo sapien
tactgaaacttgcgggtagtctgta

SEQ ID NO: 4839987 - DNA, 25 bp, Homo sapien
agtctgtacataagataccatccat

SEQ ID NO: 4839988 - DNA, 25 bp, Homo sapien
gaaacttgcgggtagtctgtacata

SEQ ID NO: 4839989 - DNA, 25 bp, Homo sapien
gtagtctgtacataagataccatcc

SEQ ID NO: 4839990 - DNA, 25 bp, Homo sapien
gaactgaaatctcgcctattcttag

SEQ ID NO: 4839991 - DNA, 25 bp, Homo sapien
catgtgtcgcagtgatgttaatcac

SEQ ID NO: 4839992 - DNA, 25 bp, Homo sapien
cgacttgtgactagtggtagagcca

SEQ ID NO: 4839993 - DNA, 25 bp, Homo sapien
ccaactgccttaagggagaaacaca

SEQ ID NO: 4839994 - DNA, 25 bp, Homo sapien
ctgcaattaaacacagaaattaaca

SEQ ID NO: 4839995 - DNA, 25 bp, Homo sapien
acatttacaaagagtcaaagtcctt

SEQ ID NO: 4839996 - DNA, 25 bp, Homo sapien
taacatttacaaagagtcaaagtcc

SEQ ID NO: 4839997 - DNA, 25 bp, Homo sapien
attaacatttacaaagagtcaaagt

SEQ ID NO: 4839998 - DNA, 25 bp, Homo sapien
tcggaatttatcaccattcattcgg

SEQ ID NO: 4839999 - DNA, 25 bp, Homo sapien
gaatagtttcgaggtggtgccttta

SEQ ID NO: 4840000 - DNA, 25 bp, Homo sapien
cagtgaacataacaatcatggaata

SEQ ID NO: 4840001 - DNA, 25 bp, Homo sapien
ggaagattgagcgtctggaactcca

SEQ ID NO: 4840002 - DNA, 25 bp, Homo sapien
cagctaattttctctatttctggta

SEQ ID NO: 4840003 - DNA, 25 bp, Homo sapien
cccagctaattttctctatttctgg

SEQ ID NO: 4840004 - DNA, 25 bp, Homo sapien
attttctctatttctggtagagaca

SEQ ID NO: 4840005 - DNA, 25 bp, Homo sapien
tctctctctctgtcgccaggccgga

SEQ ID NO: 4840006 - DNA, 25 bp, Homo sapien
gaatccagatcttaatcatcagtga

SEQ ID NO: 4840007 - DNA, 25 bp, Homo sapien
tgactcaaaggttacaatgactaaa

SEQ ID NO: 4840008 - DNA, 25 bp, Homo sapien
caaaggaatagtgttcatgactcaa

SEQ ID NO: 4840009 - DNA, 25 bp, Homo sapien
catgtgatatcctattagtaatgac

SEQ ID NO: 4840010 - DNA, 25 bp, Homo sapien
tctcagcgactgtgtagcactactg

SEQ ID NO: 4840011 - DNA, 25 bp, Homo sapien
ctgaaacagaaattctcagcgactg

SEQ ID NO: 4840012 - DNA, 25 bp, Homo sapien
cagaaattctcagcgactgtgtagc

SEQ ID NO: 4840013 - DNA, 25 bp, Homo sapien
tgtgtagcactactgattttatgca

SEQ ID NO: 4840014 - DNA, 25 bp, Homo sapien
cacggagagaagacgtaaagaagct

SEQ ID NO: 4840015 - DNA, 25 bp, Homo sapien
tgatcattagcaacactagataccg

SEQ ID NO: 4840016 - DNA, 25 bp, Homo sapien
agtctgtgaagctatgatgcaacca

SEQ ID NO: 4840017 - DNA, 25 bp, Homo sapien
atatattcttttgagcgggtcaggg

SEQ ID NO: 4840018 - DNA, 25 bp, Homo sapien
tgcccgcgtctagtcaggcctttgt

SEQ ID NO: 4840019 - DNA, 25 bp, Homo sapien
tttgttcatgggtattcacggaagg

SEQ ID NO: 4840020 - DNA, 25 bp, Homo sapien
gtcactgcacatacaaccctcagag

SEQ ID NO: 4840021 - DNA, 25 bp, Homo sapien
tcgacatacccagtgagaacatgca

SEQ ID NO: 4840022 - DNA, 25 bp, Homo sapien
caaaaggacttggagcagagtcagc

SEQ ID NO: 4840023 - DNA, 25 bp, Homo sapien
agcagcagaaagagttccacaaata

SEQ ID NO: 4840024 - DNA, 25 bp, Homo sapien
gagtcagcagcagaaagagttccac

SEQ ID NO: 4840025 - DNA, 25 bp, Homo sapien
taacaataacaaaaggacttggagc

SEQ ID NO: 4840026 - DNA, 25 bp, Homo sapien
gggccatagtagaaacacatcagta

SEQ ID NO: 4840027 - DNA, 25 bp, Homo sapien
ctgataagaataatgggccatagta

SEQ ID NO: 4840028 - DNA, 25 bp, Homo sapien
gaataatgggccatagtagaaacac

SEQ ID NO: 4840029 - DNA, 25 bp, Homo sapien
gtagaaacacatcagtactgaagca

SEQ ID NO: 4840030 - DNA, 25 bp, Homo sapien
ccaggagttcgccagtatttgatat

SEQ ID NO: 4840031 - DNA, 25 bp, Homo sapien
aaaaagcagatgaatagcgccagga

SEQ ID NO: 4840032 - DNA, 25 bp, Homo sapien
ccagtatttgatattcttcattagc

SEQ ID NO: 4840033 - DNA, 25 bp, Homo sapien
gaatagcgccaggagttcgccagta

SEQ ID NO: 4840034 - DNA, 25 bp, Homo sapien
tgaaaaacgtctgtcccctcatcat

SEQ ID NO: 4840035 - DNA, 25 bp, Homo sapien
ctgctgaaaaacgtctgtcccctca

SEQ ID NO: 4840036 - DNA, 25 bp, Homo sapien
gctgaaaaacgtctgtcccctcatc

SEQ ID NO: 4840037 - DNA, 25 bp, Homo sapien
aaaaacgtctgtcccctcatcatag

SEQ ID NO: 4840038 - DNA, 25 bp, Homo sapien
gaaaatgcatgaatgtaggagcaga

SEQ ID NO: 4840039 - DNA, 25 bp, Homo sapien
tttgctagttgctcagctgcaaatc

SEQ ID NO: 4840040 - DNA, 25 bp, Homo sapien
atgaacatccgttctgtcagcaatc

SEQ ID NO: 4840041 - DNA, 25 bp, Homo sapien
ctttggaggtcaaaagtatcagctc

SEQ ID NO: 4840042 - DNA, 25 bp, Homo sapien
aagcaatggtaccagagtagttggg

SEQ ID NO: 4840043 - DNA, 25 bp, Homo sapien
gacaccatggcccaaccagtcttgt

SEQ ID NO: 4840044 - DNA, 25 bp, Homo sapien
tccaacaagcgacactaacagggcc

SEQ ID NO: 4840045 - DNA, 25 bp, Homo sapien
tatagatgaactccaagttgttcct

SEQ ID NO: 4840046 - DNA, 25 bp, Homo sapien
cagagaataccagaataatgcattt

SEQ ID NO: 4840047 - DNA, 25 bp, Homo sapien
tgtccattgtgtgggttcttatgag

SEQ ID NO: 4840048 - DNA, 25 bp, Homo sapien
tatggaggtccacggatatggttcc

SEQ ID NO: 4840049 - DNA, 25 bp, Homo sapien
ttatgagcatatggaggtccacgga

SEQ ID NO: 4840050 - DNA, 25 bp, Homo sapien
aggtccacggatatggttccacatc

SEQ ID NO: 4840051 - DNA, 25 bp, Homo sapien
attcatgcttataaattacacttac

SEQ ID NO: 4840052 - DNA, 25 bp, Homo sapien
ttaaacttcagaatattcatgctta

SEQ ID NO: 4840053 - DNA, 25 bp, Homo sapien
atattcatgcttataaattacactt

SEQ ID NO: 4840054 - DNA, 25 bp, Homo sapien
aaacttcagaatattcatgcttata

SEQ ID NO: 4840055 - DNA, 25 bp, Homo sapien
agcgatccattgctggtatataccc

SEQ ID NO: 4840056 - DNA, 25 bp, Homo sapien
tagaaaacggaacacatacactgct

SEQ ID NO: 4840057 - DNA, 25 bp, Homo sapien
taagatagaactaccgttcgaccca

SEQ ID NO: 4840058 - DNA, 25 bp, Homo sapien
gttcgacccagcgatccattgctgg

SEQ ID NO: 4840059 - DNA, 25 bp, Homo sapien
tgcagaaggcttacgacaagcttag

SEQ ID NO: 4840060 - DNA, 25 bp, Homo sapien
gcttagccggttgggcctgctcctg

SEQ ID NO: 4840061 - DNA, 25 bp, Homo sapien
aacagtgatctaggtgcagaaggct

SEQ ID NO: 4840062 - DNA, 25 bp, Homo sapien
tacgacaagcttagccggttgggcc

SEQ ID NO: 4840063 - DNA, 25 bp, Homo sapien
gctgggcatccctcctttcataaga

SEQ ID NO: 4840064 - DNA, 25 bp, Homo sapien
cctcctttcataagaccagtccggg

SEQ ID NO: 4840065 - DNA, 25 bp, Homo sapien
tcataagaccagtccgggaggaacg

SEQ ID NO: 4840066 - DNA, 25 bp, Homo sapien
cgggaggaacgcagcctgacagcca

SEQ ID NO: 4840067 - DNA, 25 bp, Homo sapien
caagactatgggtatcaagaacaac

SEQ ID NO: 4840068 - DNA, 25 bp, Homo sapien
ggtcgccttcgacatcctggatggt

SEQ ID NO: 4840069 - DNA, 25 bp, Homo sapien
gttaaattgcacgacatggctgagc

SEQ ID NO: 4840070 - DNA, 25 bp, Homo sapien
tggctgagcaacatcccttcggtgt

SEQ ID NO: 4840071 - DNA, 25 bp, Homo sapien
tggctgggattaacggcgcacgcca

SEQ ID NO: 4840072 - DNA, 25 bp, Homo sapien
tatggaatatggataaaaacgaaga

SEQ ID NO: 4840073 - DNA, 25 bp, Homo sapien
tcttaaccaggctacaataacagaa

SEQ ID NO: 4840074 - DNA, 25 bp, Homo sapien
cccggccaacatggttcttaaccag

SEQ ID NO: 4840075 - DNA, 25 bp, Homo sapien
ctgaaccataaatgaggtttgaggc

SEQ ID NO: 4840076 - DNA, 25 bp, Homo sapien
gaggcagtctcatataatgggaaaa

SEQ ID NO: 4840077 - DNA, 25 bp, Homo sapien
ggtgctgtagagattacctcggtaa

SEQ ID NO: 4840078 - DNA, 25 bp, Homo sapien
tcattttcacctagtaatgagagaa

SEQ ID NO: 4840079 - DNA, 25 bp, Homo sapien
tcactgaatagttgttacagttaaa

SEQ ID NO: 4840080 - DNA, 25 bp, Homo sapien
tacagttaaatgattgctagttata

SEQ ID NO: 4840081 - DNA, 25 bp, Homo sapien
ggcaggccagtgctggagtatcact

SEQ ID NO: 4840082 - DNA, 25 bp, Homo sapien
caggccagtgctggagtatcacttg

SEQ ID NO: 4840083 - DNA, 25 bp, Homo sapien
aaaactaacatctaccagaattggt

SEQ ID NO: 4840084 - DNA, 25 bp, Homo sapien
ctactaagaaagaagtataaccttg

SEQ ID NO: 4840085 - DNA, 25 bp, Homo sapien
taaccttggaaattatgtagtactg

SEQ ID NO: 4840086 - DNA, 25 bp, Homo sapien
cagacagaggacaagaaattgtata

SEQ ID NO: 4840087 - DNA, 25 bp, Homo sapien
tagagaccaccgctagaaaaatgtg

SEQ ID NO: 4840088 - DNA, 25 bp, Homo sapien
gccttcgtagagcatatccacactg

SEQ ID NO: 4840089 - DNA, 25 bp, Homo sapien
caggctgttccgagtagtgtgatga

SEQ ID NO: 4840090 - DNA, 25 bp, Homo sapien
tccacagaaaagtatgcccacgagt

SEQ ID NO: 4840091 - DNA, 25 bp, Homo sapien
cctggctgctcccatgaatgtagct

SEQ ID NO: 4840092 - DNA, 25 bp, Homo sapien
tctgccacaaactgagcctggctgc

SEQ ID NO: 4840093 - DNA, 25 bp, Homo sapien
cagaataatgtgtgattctgccaca

SEQ ID NO: 4840094 - DNA, 25 bp, Homo sapien
taatgtgtgattctgccacaaactg

SEQ ID NO: 4840095 - DNA, 25 bp, Homo sapien
aggatgatctcaacacagcttttca

SEQ ID NO: 4840096 - DNA, 25 bp, Homo sapien
tggagaattcctgccatacaataaa

SEQ ID NO: 4840097 - DNA, 25 bp, Homo sapien
cctaaatctcagcttgatgtcaatg

SEQ ID NO: 4840098 - DNA, 25 bp, Homo sapien
tattcctgatgtgtttcgatagtca

SEQ ID NO: 4840099 - DNA, 25 bp, Homo sapien
tcttctaccaatatagcctccttac

SEQ ID NO: 4840100 - DNA, 25 bp, Homo sapien
tgtatcttctaccaatatagcctcc

SEQ ID NO: 4840101 - DNA, 25 bp, Homo sapien
ctgttgtatcttctaccaatatagc

SEQ ID NO: 4840102 - DNA, 25 bp, Homo sapien
tctaccaatatagcctccttaccca

SEQ ID NO: 4840103 - DNA, 25 bp, Homo sapien
taatattattacaggagcaagcctc

SEQ ID NO: 4840104 - DNA, 25 bp, Homo sapien
cttaatattattacaggagcaagcc

SEQ ID NO: 4840105 - DNA, 25 bp, Homo sapien
aatattattacaggagcaagcctcc

SEQ ID NO: 4840106 - DNA, 25 bp, Homo sapien
tattattacaggagcaagcctccat

SEQ ID NO: 4840107 - DNA, 25 bp, Homo sapien
gaacgactgccagcgactcctgctt

SEQ ID NO: 4840108 - DNA, 25 bp, Homo sapien
agcagccagaacgactgccagcgac

SEQ ID NO: 4840109 - DNA, 25 bp, Homo sapien
gctggaggatgaaccattgccagca

SEQ ID NO: 4840110 - DNA, 25 bp, Homo sapien
tttgctctaccttctctaccctatc

SEQ ID NO: 4840111 - DNA, 25 bp, Homo sapien
tctccattcccttacttaggttcat

SEQ ID NO: 4840112 - DNA, 25 bp, Homo sapien
aatcatctctgattcctgttcttga

SEQ ID NO: 4840113 - DNA, 25 bp, Homo sapien
ttcttgaaccttacttgtgacattt

SEQ ID NO: 4840114 - DNA, 25 bp, Homo sapien
gttcttgaaccttacttgtgacatt

SEQ ID NO: 4840115 - DNA, 25 bp, Homo sapien
gtcaaggaagccgtagacatagatg

SEQ ID NO: 4840116 - DNA, 25 bp, Homo sapien
tctggctctgaacacaatgttccag

SEQ ID NO: 4840117 - DNA, 25 bp, Homo sapien
aaggaagccgtagacatagatgtga

SEQ ID NO: 4840118 - DNA, 25 bp, Homo sapien
tctgaacacaatgttccagaatggt

SEQ ID NO: 4840119 - DNA, 25 bp, Homo sapien
caacatcgcctttcgaagttgctgc

SEQ ID NO: 4840120 - DNA, 25 bp, Homo sapien
agttgctgcttcatttagaagaacc

SEQ ID NO: 4840121 - DNA, 25 bp, Homo sapien
gtctttttccaacatcgcctttcga

SEQ ID NO: 4840122 - DNA, 25 bp, Homo sapien
cgcctttcgaagttgctgcttcatt

SEQ ID NO: 4840123 - DNA, 25 bp, Homo sapien
gcaattctggcaatcatggagtaca

SEQ ID NO: 4840124 - DNA, 25 bp, Homo sapien
caatttttatgcaactctacaggaa

SEQ ID NO: 4840125 - DNA, 25 bp, Homo sapien
ccaagtgtagcctctgacatttcat

SEQ ID NO: 4840126 - DNA, 25 bp, Homo sapien
cataaggtacggctttgtcaaaata

SEQ ID NO: 4840127 - DNA, 25 bp, Homo sapien
aggcccaatcccactaggcaaatta

SEQ ID NO: 4840128 - DNA, 25 bp, Homo sapien
tggtacttggaacgaaatattgaaa

SEQ ID NO: 4840129 - DNA, 25 bp, Homo sapien
tagccgtggtacttggaacgaaata

SEQ ID NO: 4840130 - DNA, 25 bp, Homo sapien
cttggaacgaaatattgaaagtaga

SEQ ID NO: 4840131 - DNA, 25 bp, Homo sapien
tagaaagaaactacatgctgtcagg

SEQ ID NO: 4840132 - DNA, 25 bp, Homo sapien
tacttcactatgctgaacacatggc

SEQ ID NO: 4840133 - DNA, 25 bp, Homo sapien
gaaatcacgacaaactaagggaaga

SEQ ID NO: 4840134 - DNA, 25 bp, Homo sapien
tgctgtcagggaacaagaaccatgc

SEQ ID NO: 4840135 - DNA, 25 bp, Homo sapien
gtttgtcaggcagttatcatcatca

SEQ ID NO: 4840136 - DNA, 25 bp, Homo sapien
cacatttgttttcgatgtttgtcag

SEQ ID NO: 4840137 - DNA, 25 bp, Homo sapien
catcattcacaagagagttgataaa

SEQ ID NO: 4840138 - DNA, 25 bp, Homo sapien
tcatcatcattcacaagagagttga

SEQ ID NO: 4840139 - DNA, 25 bp, Homo sapien
ctttatctagataagacaggggata

SEQ ID NO: 4840140 - DNA, 25 bp, Homo sapien
ttacagaatgccagcttatctctta

SEQ ID NO: 4840141 - DNA, 25 bp, Homo sapien
ataatccttaagattgaatttccat

SEQ ID NO: 4840142 - DNA, 25 bp, Homo sapien
tggtgcctttacagaatgccagctt

SEQ ID NO: 4840143 - DNA, 25 bp, Homo sapien
gagtttttaagtgccatggtccaaa

SEQ ID NO: 4840144 - DNA, 25 bp, Homo sapien
ctgaggttatagagtttttaagtgc

SEQ ID NO: 4840145 - DNA, 25 bp, Homo sapien
tatagagtttttaagtgccatggtc

SEQ ID NO: 4840146 - DNA, 25 bp, Homo sapien
ttttaagtgccatggtccaaatcac

SEQ ID NO: 4840147 - DNA, 25 bp, Homo sapien
aaatgattaactccacgtgtcagtc

SEQ ID NO: 4840148 - DNA, 25 bp, Homo sapien
tacccttgaatattaaggcttacat

SEQ ID NO: 4840149 - DNA, 25 bp, Homo sapien
gggtggaagcattgcatctgtcaaa

SEQ ID NO: 4840150 - DNA, 25 bp, Homo sapien
tttggctacatttttcctagataga

SEQ ID NO: 4840151 - DNA, 25 bp, Homo sapien
tgaacggtatggagcttctgccaga

SEQ ID NO: 4840152 - DNA, 25 bp, Homo sapien
tttgatgtgttagcctagaccctgt

SEQ ID NO: 4840153 - DNA, 25 bp, Homo sapien
tcagaactcttttggaacacaggag

SEQ ID NO: 4840154 - DNA, 25 bp, Homo sapien
ttctgccagagtaagaaggctgtat

SEQ ID NO: 4840155 - DNA, 25 bp, Homo sapien
gaatgccatgttacaaaatccaggg

SEQ ID NO: 4840156 - DNA, 25 bp, Homo sapien
gataatgactagataccgggagaca

SEQ ID NO: 4840157 - DNA, 25 bp, Homo sapien
tgttcactaagcacagataggccag

SEQ ID NO: 4840158 - DNA, 25 bp, Homo sapien
gctagcgagaagtacattgtggccc

SEQ ID NO: 4840159 - DNA, 25 bp, Homo sapien
ccatcagggatgcagagagactgtt

SEQ ID NO: 4840160 - DNA, 25 bp, Homo sapien
tccagaatgagtgagaagcagcctt

SEQ ID NO: 4840161 - DNA, 25 bp, Homo sapien
cacaaacttatggttcaggagtgcc

SEQ ID NO: 4840162 - DNA, 25 bp, Homo sapien
aagcagccttgggtaccacgatcaa

SEQ ID NO: 4840163 - DNA, 25 bp, Homo sapien
tgctggtaaagcagatagatgtgcc

SEQ ID NO: 4840164 - DNA, 25 bp, Homo sapien
aaaaacactgctggtaaagcagata

SEQ ID NO: 4840165 - DNA, 25 bp, Homo sapien
ccagctgtacatgaactgtggcatt

SEQ ID NO: 4840166 - DNA, 25 bp, Homo sapien
agcagatagatgtgccagctgtaca

SEQ ID NO: 4840167 - DNA, 25 bp, Homo sapien
gggccttaagctgtagttgctgttc

SEQ ID NO: 4840168 - DNA, 25 bp, Homo sapien
tgtcagcagtaaaccttgtcagggc

SEQ ID NO: 4840169 - DNA, 25 bp, Homo sapien
gaagaatgtcagcagtaaaccttgt

SEQ ID NO: 4840170 - DNA, 25 bp, Homo sapien
ttgtcagggccttaagctgtagttg

SEQ ID NO: 4840171 - DNA, 25 bp, Homo sapien
tttcaagataataagtaacgaataa

SEQ ID NO: 4840172 - DNA, 25 bp, Homo sapien
aagataataagtaacgaataaagcg

SEQ ID NO: 4840173 - DNA, 25 bp, Homo sapien
caagataataagtaacgaataaagc

SEQ ID NO: 4840174 - DNA, 25 bp, Homo sapien
gataataagtaacgaataaagcgta

SEQ ID NO: 4840175 - DNA, 25 bp, Homo sapien
tatcaggatgcaatgagacgtcgcc

SEQ ID NO: 4840176 - DNA, 25 bp, Homo sapien
aactagtgcctttaaccagatgagg

SEQ ID NO: 4840177 - DNA, 25 bp, Homo sapien
tacctttctgctaacacgtggcatg

SEQ ID NO: 4840178 - DNA, 25 bp, Homo sapien
ggaatggactgaaacaaatgcgtga

SEQ ID NO: 4840179 - DNA, 25 bp, Homo sapien
cacactgaatataacaggcttgaaa

SEQ ID NO: 4840180 - DNA, 25 bp, Homo sapien
taaacattcactttatgcaaatccc

SEQ ID NO: 4840181 - DNA, 25 bp, Homo sapien
aagtcaggaacagtttatcttcatg

SEQ ID NO: 4840182 - DNA, 25 bp, Homo sapien
gaataagctagctgatcacaatgaa

SEQ ID NO: 4840183 - DNA, 25 bp, Homo sapien
actaatgagtaaacagctctaaaac

SEQ ID NO: 4840184 - DNA, 25 bp, Homo sapien
gcatttgctttatccctgtacaata

SEQ ID NO: 4840185 - DNA, 25 bp, Homo sapien
ctttactaatgagtaaacagctcta

SEQ ID NO: 4840186 - DNA, 25 bp, Homo sapien
tttcatgcatttgctttatccctgt

SEQ ID NO: 4840187 - DNA, 25 bp, Homo sapien
tatagtgggttaggtttgctcgaaa

SEQ ID NO: 4840188 - DNA, 25 bp, Homo sapien
tgtaggtaccattcatccagttccc

SEQ ID NO: 4840189 - DNA, 25 bp, Homo sapien
tcatcgtctgatgcctttgaagcac

SEQ ID NO: 4840190 - DNA, 25 bp, Homo sapien
aaaacactattcgtaacagtgcacg

SEQ ID NO: 4840191 - DNA, 25 bp, Homo sapien
gaggctatatagctggaactcccaa

SEQ ID NO: 4840192 - DNA, 25 bp, Homo sapien
acttgataaacatgccccagtaggc

SEQ ID NO: 4840193 - DNA, 25 bp, Homo sapien
cattgccctgggatataacttgata

SEQ ID NO: 4840194 - DNA, 25 bp, Homo sapien
gaattacaggtcaagttctgcctag

SEQ ID NO: 4840195 - DNA, 25 bp, Homo sapien
tatagtgtctgaggatgacctgact

SEQ ID NO: 4840196 - DNA, 25 bp, Homo sapien
tgacactggaggatataacatacca

SEQ ID NO: 4840197 - DNA, 25 bp, Homo sapien
tatgacagtttggaacgcacagtga

SEQ ID NO: 4840198 - DNA, 25 bp, Homo sapien
tgtctagcaaaggtaaatacatcgc

SEQ ID NO: 4840199 - DNA, 25 bp, Homo sapien
tctaaggacaggtatgtccctggaa

SEQ ID NO: 4840200 - DNA, 25 bp, Homo sapien
taccctttgagtgtgactagctaca

SEQ ID NO: 4840201 - DNA, 25 bp, Homo sapien
ctttgtatagtagttggacccttgg

SEQ ID NO: 4840202 - DNA, 25 bp, Homo sapien
ggcagatgctcgtgaattatatcat

SEQ ID NO: 4840203 - DNA, 25 bp, Homo sapien
tctacatgttgaatcacgtctctct

SEQ ID NO: 4840204 - DNA, 25 bp, Homo sapien
taatggcctctaatgagcaactggc

SEQ ID NO: 4840205 - DNA, 25 bp, Homo sapien
aactggctattaatcttactgagga

SEQ ID NO: 4840206 - DNA, 25 bp, Homo sapien
aaaggataactttgccaggtacaga

SEQ ID NO: 4840207 - DNA, 25 bp, Homo sapien
ggttcacaagatttagttactgtat

SEQ ID NO: 4840208 - DNA, 25 bp, Homo sapien
tacatgaaacaaagttacaaaccaa

SEQ ID NO: 4840209 - DNA, 25 bp, Homo sapien
aggttcacaagatttagttactgta

SEQ ID NO: 4840210 - DNA, 25 bp, Homo sapien
ctttgtatgactctcagttgtcctt

SEQ ID NO: 4840211 - DNA, 25 bp, Homo sapien
tctcataaatgttggtatgtagaat

SEQ ID NO: 4840212 - DNA, 25 bp, Homo sapien
tcataaatgttggtatgtagaattt

SEQ ID NO: 4840213 - DNA, 25 bp, Homo sapien
ctcataaatgttggtatgtagaatt

SEQ ID NO: 4840214 - DNA, 25 bp, Homo sapien
caattctttaaagtgtacttgggat

SEQ ID NO: 4840215 - DNA, 25 bp, Homo sapien
gtgtacttgggatattaattcaaga

SEQ ID NO: 4840216 - DNA, 25 bp, Homo sapien
ttgggatattaattcaagatctttc

SEQ ID NO: 4840217 - DNA, 25 bp, Homo sapien
gtacttgggatattaattcaagatc

SEQ ID NO: 4840218 - DNA, 25 bp, Homo sapien
ggtgtaactcaccagtgaagtcatc

SEQ ID NO: 4840219 - DNA, 25 bp, Homo sapien
ggtgtcaaggttaatagttgccaca

SEQ ID NO: 4840220 - DNA, 25 bp, Homo sapien
tataaaacttttagtatcctgctgg

SEQ ID NO: 4840221 - DNA, 25 bp, Homo sapien
tgttgaaccaccttcgcatttctgg

SEQ ID NO: 4840222 - DNA, 25 bp, Homo sapien
tagttccttggttaaatctgtccaa

SEQ ID NO: 4840223 - DNA, 25 bp, Homo sapien
tgcaaaaaggccactggattataat

SEQ ID NO: 4840224 - DNA, 25 bp, Homo sapien
tcaggaccccatgcattttcatatg

SEQ ID NO: 4840225 - DNA, 25 bp, Homo sapien
catgttaaccatgtatcctgcaact

SEQ ID NO: 4840226 - DNA, 25 bp, Homo sapien
gcaatagccttctctcccaagatga

SEQ ID NO: 4840227 - DNA, 25 bp, Homo sapien
gctgacatagggctgaacattgaaa

SEQ ID NO: 4840228 - DNA, 25 bp, Homo sapien
gattcgaggatctagcacagaagtg

SEQ ID NO: 4840229 - DNA, 25 bp, Homo sapien
tctccgtcatgataagatgccagtg

SEQ ID NO: 4840230 - DNA, 25 bp, Homo sapien
taaactaattcctccaagggactga

SEQ ID NO: 4840231 - DNA, 25 bp, Homo sapien
tctggtccatctacaacgaagttaa

SEQ ID NO: 4840232 - DNA, 25 bp, Homo sapien
cagtcaaggaaatacggagctcagg

SEQ ID NO: 4840233 - DNA, 25 bp, Homo sapien
cagtaatttttgagctttggcacca

SEQ ID NO: 4840234 - DNA, 25 bp, Homo sapien
tggaccatgcagcatagaacttctg

SEQ ID NO: 4840235 - DNA, 25 bp, Homo sapien
taggcatctattctgtactaccagg

SEQ ID NO: 4840236 - DNA, 25 bp, Homo sapien
tcattatggtagctagaatgcttcg

SEQ ID NO: 4840237 - DNA, 25 bp, Homo sapien
tctagattgcagagctccacgtgag

SEQ ID NO: 4840238 - DNA, 25 bp, Homo sapien
cggtcttaatatcacctctgggaag

SEQ ID NO: 4840239 - DNA, 25 bp, Homo sapien
gtgaacggtcttaatatcacctctg

SEQ ID NO: 4840240 - DNA, 25 bp, Homo sapien
caggttatattgtcacggacacttt

SEQ ID NO: 4840241 - DNA, 25 bp, Homo sapien
tgggaagcaggttatattgtcacgg

SEQ ID NO: 4840242 - DNA, 25 bp, Homo sapien
acagccatagtctgttaaagccctc

SEQ ID NO: 4840243 - DNA, 25 bp, Homo sapien
gccatagtctgttaaagccctcatc

SEQ ID NO: 4840244 - DNA, 25 bp, Homo sapien
agccatagtctgttaaagccctcat

SEQ ID NO: 4840245 - DNA, 25 bp, Homo sapien
cagccatagtctgttaaagccctca

SEQ ID NO: 4840246 - DNA, 25 bp, Homo sapien
agggaagtcaagacaacatgtgtgt

SEQ ID NO: 4840247 - DNA, 25 bp, Homo sapien
tggtttccaaatgcacccaaagtat

SEQ ID NO: 4840248 - DNA, 25 bp, Homo sapien
aaagtatcaccagaagcagcgaaga

SEQ ID NO: 4840249 - DNA, 25 bp, Homo sapien
aatagtcgacacctgtttgcataag

SEQ ID NO: 4840250 - DNA, 25 bp, Homo sapien
agctctgtgattttgtaagatccag

SEQ ID NO: 4840251 - DNA, 25 bp, Homo sapien
atccttgcatgtgatagtatctggg

SEQ ID NO: 4840252 - DNA, 25 bp, Homo sapien
gatagtatctgggatgttatgggaa

SEQ ID NO: 4840253 - DNA, 25 bp, Homo sapien
tgtaagatccaggcttgaagtcact

SEQ ID NO: 4840254 - DNA, 25 bp, Homo sapien
tataacgggcatcctggttctcagg

SEQ ID NO: 4840255 - DNA, 25 bp, Homo sapien
taaccaggatttacagggtctgcag

SEQ ID NO: 4840256 - DNA, 25 bp, Homo sapien
tcattctttgctgtgtataacgggc

SEQ ID NO: 4840257 - DNA, 25 bp, Homo sapien
gagcatttgttagatcacatcgccg

SEQ ID NO: 4840258 - DNA, 25 bp, Homo sapien
gctacgcagcatgcaaggttgacgt

SEQ ID NO: 4840259 - DNA, 25 bp, Homo sapien
tagttgcgatacgagctacgcagca

SEQ ID NO: 4840260 - DNA, 25 bp, Homo sapien
gacgtattgaaatggaggatgcaca

SEQ ID NO: 4840261 - DNA, 25 bp, Homo sapien
gggtaattagttgcgatacgagcta

SEQ ID NO: 4840262 - DNA, 25 bp, Homo sapien
gagtaggaaaagatgttcggtaaga

SEQ ID NO: 4840263 - DNA, 25 bp, Homo sapien
cttcgtggaagatgtaacgatggca

SEQ ID NO: 4840264 - DNA, 25 bp, Homo sapien
tgtaacgatggcaggtctgagagta

SEQ ID NO: 4840265 - DNA, 25 bp, Homo sapien
gaataattctggacagtctcattaa

SEQ ID NO: 4840266 - DNA, 25 bp, Homo sapien
tcttgccccaattcactttagcact

SEQ ID NO: 4840267 - DNA, 25 bp, Homo sapien
catcttgactgctacttgttcttcc

SEQ ID NO: 4840268 - DNA, 25 bp, Homo sapien
ctagagtcaccggtataagtcaggg

SEQ ID NO: 4840269 - DNA, 25 bp, Homo sapien
gcttttgacctgactctgggatcat

SEQ ID NO: 4840270 - DNA, 25 bp, Homo sapien
aaccagctcctctgttatcacaggg

SEQ ID NO: 4840271 - DNA, 25 bp, Homo sapien
ggaacagttccccagctcaagaaag

SEQ ID NO: 4840272 - DNA, 25 bp, Homo sapien
caagaaagctgcctgggatagatgg

SEQ ID NO: 4840273 - DNA, 25 bp, Homo sapien
cacagggtgctgtattgtcagcaca

SEQ ID NO: 4840274 - DNA, 25 bp, Homo sapien
cttccgaaaagcgtcgcgtcgtcca

SEQ ID NO: 4840275 - DNA, 25 bp, Homo sapien
ttccgaaaagcgtcgcgtcgtccat

SEQ ID NO: 4840276 - DNA, 25 bp, Homo sapien
caagtttggtgtggtagaccagagt

SEQ ID NO: 4840277 - DNA, 25 bp, Homo sapien
agacagggcaaagccggaataattc

SEQ ID NO: 4840278 - DNA, 25 bp, Homo sapien
ctagagtactgtcaagtttggtgtg

SEQ ID NO: 4840279 - DNA, 25 bp, Homo sapien
gaccagagtgcattattgagtgttg

SEQ ID NO: 4840280 - DNA, 25 bp, Homo sapien
gcacagaccaaatgttcagtttcaa

SEQ ID NO: 4840281 - DNA, 25 bp, Homo sapien
ctgataataaagtagaaggtggaat

SEQ ID NO: 4840282 - DNA, 25 bp, Homo sapien
taagttatgtcctcaagaaagaagc

SEQ ID NO: 4840283 - DNA, 25 bp, Homo sapien
tgtctgtaagaggagaacactagct

SEQ ID NO: 4840284 - DNA, 25 bp, Homo sapien
gtctttcctgtaaagtgtctgccac

SEQ ID NO: 4840285 - DNA, 25 bp, Homo sapien
aaagtgtctgccactaccttataag

SEQ ID NO: 4840286 - DNA, 25 bp, Homo sapien
gtgtctgccactaccttataagggt

SEQ ID NO: 4840287 - DNA, 25 bp, Homo sapien
tgcaacgtctttcctgtaaagtgtc

SEQ ID NO: 4840288 - DNA, 25 bp, Homo sapien
tgttttccactcctaatgcgagtca

SEQ ID NO: 4840289 - DNA, 25 bp, Homo sapien
gttttccactcctaatgcgagtcat

SEQ ID NO: 4840290 - DNA, 25 bp, Homo sapien
ttgttttccactcctaatgcgagtc

SEQ ID NO: 4840291 - DNA, 25 bp, Homo sapien
cttgttttccactcctaatgcgagt

SEQ ID NO: 4840292 - DNA, 25 bp, Homo sapien
ctgtggtcctcctgctttcctctga

SEQ ID NO: 4840293 - DNA, 25 bp, Homo sapien
gtggtcctcctgctttcctctgact

SEQ ID NO: 4840294 - DNA, 25 bp, Homo sapien
ggtcctcctgctttcctctgactat

SEQ ID NO: 4840295 - DNA, 25 bp, Homo sapien
cctcctgctttcctctgactatcat

SEQ ID NO: 4840296 - DNA, 25 bp, Homo sapien
gaagctgatgtaacacatgagaggg

SEQ ID NO: 4840297 - DNA, 25 bp, Homo sapien
gatgtaacacatgagagggaaacag

SEQ ID NO: 4840298 - DNA, 25 bp, Homo sapien
gtaacacatgagagggaaacaggac

SEQ ID NO: 4840299 - DNA, 25 bp, Homo sapien
aagtggaagctgatgtaacacatga

SEQ ID NO: 4840300 - DNA, 25 bp, Homo sapien
cataaggattatgtagtgcaccaga

SEQ ID NO: 4840301 - DNA, 25 bp, Homo sapien
taaggcagcctagtgaattggttgc

SEQ ID NO: 4840302 - DNA, 25 bp, Homo sapien
gaacacataaacatctggcatccta

SEQ ID NO: 4840303 - DNA, 25 bp, Homo sapien
tgacaaacactagatgatttctaag

SEQ ID NO: 4840304 - DNA, 25 bp, Homo sapien
tgaactgtcttctagtgccagagag

SEQ ID NO: 4840305 - DNA, 25 bp, Homo sapien
tctgaactgtcttctagtgccagag

SEQ ID NO: 4840306 - DNA, 25 bp, Homo sapien
gtgacgtgctttgctcgtttacttc

SEQ ID NO: 4840307 - DNA, 25 bp, Homo sapien
aatgatgttgaacgctagtgacgtg

SEQ ID NO: 4840308 - DNA, 25 bp, Homo sapien
cccctaaacttccttgctcattaat

SEQ ID NO: 4840309 - DNA, 25 bp, Homo sapien
ccagctctccccctaaacttccttg

SEQ ID NO: 4840310 - DNA, 25 bp, Homo sapien
ttaatcctgtgttaggcccagctct

SEQ ID NO: 4840311 - DNA, 25 bp, Homo sapien
taatcctgtgttaggcccagctctc

SEQ ID NO: 4840312 - DNA, 25 bp, Homo sapien
tgtgttcaaaaaggacatcgagaac

SEQ ID NO: 4840313 - DNA, 25 bp, Homo sapien
tgccagatggtcacaaatagcactt

SEQ ID NO: 4840314 - DNA, 25 bp, Homo sapien
ttctcaggcgtgtttcatcagcagt

SEQ ID NO: 4840315 - DNA, 25 bp, Homo sapien
caattgccggcaacagccagcatag

SEQ ID NO: 4840316 - DNA, 25 bp, Homo sapien
tagtggatcttttctcaggcgtgtt

SEQ ID NO: 4840317 - DNA, 25 bp, Homo sapien
catttcaatgtctccggagaattca

SEQ ID NO: 4840318 - DNA, 25 bp, Homo sapien
tgtctccggagaattcaccccacaa

SEQ ID NO: 4840319 - DNA, 25 bp, Homo sapien
tcaatgtctccggagaattcacccc

SEQ ID NO: 4840320 - DNA, 25 bp, Homo sapien
tccatttcaatgtctccggagaatt

SEQ ID NO: 4840321 - DNA, 25 bp, Homo sapien
cccagtattccccctgaggctggtg

SEQ ID NO: 4840322 - DNA, 25 bp, Homo sapien
cagtattccccctgaggctggtgtc

SEQ ID NO: 4840323 - DNA, 25 bp, Homo sapien
gtattccccctgaggctggtgtccc

SEQ ID NO: 4840324 - DNA, 25 bp, Homo sapien
cacccccagtattccccctgaggct

SEQ ID NO: 4840325 - DNA, 25 bp, Homo sapien
tcaggaacagtcacatctaaatcca

SEQ ID NO: 4840326 - DNA, 25 bp, Homo sapien
caggaacagtcacatctaaatccat

SEQ ID NO: 4840327 - DNA, 25 bp, Homo sapien
tttcaggaacagtcacatctaaatc

SEQ ID NO: 4840328 - DNA, 25 bp, Homo sapien
ttcaggaacagtcacatctaaatcc

SEQ ID NO: 4840329 - DNA, 25 bp, Homo sapien
taaaaaccagcacaatgtgtacagc

SEQ ID NO: 4840330 - DNA, 25 bp, Homo sapien
gttgcttggatttagcccttttgct

SEQ ID NO: 4840331 - DNA, 25 bp, Homo sapien
ggactgagttgcttggatttagccc

SEQ ID NO: 4840332 - DNA, 25 bp, Homo sapien
tggtataccagtcctctctgctggg

SEQ ID NO: 4840333 - DNA, 25 bp, Homo sapien
aaatatacagagaggaagctcctgc

SEQ ID NO: 4840334 - DNA, 25 bp, Homo sapien
taaatcttgaatcccaactcaggga

SEQ ID NO: 4840335 - DNA, 25 bp, Homo sapien
tgtggacctcactgccgataaaaac

SEQ ID NO: 4840336 - DNA, 25 bp, Homo sapien
gaaaagactcagagaccgaggagac

SEQ ID NO: 4840337 - DNA, 25 bp, Homo sapien
acacatcagtatgggttcgaaaggg

SEQ ID NO: 4840338 - DNA, 25 bp, Homo sapien
tgcatatcctgcttttatctacgag

SEQ ID NO: 4840339 - DNA, 25 bp, Homo sapien
tagtcataggcaatgcatatcctgc

SEQ ID NO: 4840340 - DNA, 25 bp, Homo sapien
tatctacgagcttctgaaacctagc

SEQ ID NO: 4840341 - DNA, 25 bp, Homo sapien
tctgaaacctagctggacttcttgt

SEQ ID NO: 4840342 - DNA, 25 bp, Homo sapien
gaatctacatttggtctgatgccaa

SEQ ID NO: 4840343 - DNA, 25 bp, Homo sapien
gatgccaagtaggagatggcttgca

SEQ ID NO: 4840344 - DNA, 25 bp, Homo sapien
ctttaggaggaatctacatttggtc

SEQ ID NO: 4840345 - DNA, 25 bp, Homo sapien
acatttggtctgatgccaagtagga

SEQ ID NO: 4840346 - DNA, 25 bp, Homo sapien
accagttacacttaacttggacctg

SEQ ID NO: 4840347 - DNA, 25 bp, Homo sapien
ccggaaggcactaggcagcatgtgt

SEQ ID NO: 4840348 - DNA, 25 bp, Homo sapien
ttttcttgttgcctccataaccaaa

SEQ ID NO: 4840349 - DNA, 25 bp, Homo sapien
gcaccttgtcatcaatacctcttgg

SEQ ID NO: 4840350 - DNA, 25 bp, Homo sapien
gaagagacatggtgaacaatgtcag

SEQ ID NO: 4840351 - DNA, 25 bp, Homo sapien
aagagacatggtgaacaatgtcagt

SEQ ID NO: 4840352 - DNA, 25 bp, Homo sapien
ctctttccaagacagttttggagtt

SEQ ID NO: 4840353 - DNA, 25 bp, Homo sapien
cctgatggccagatgggctgctctt

SEQ ID NO: 4840354 - DNA, 25 bp, Homo sapien
gggctgctctttccaagacagtttt

SEQ ID NO: 4840355 - DNA, 25 bp, Homo sapien
gatgggctgctctttccaagacagt

SEQ ID NO: 4840356 - DNA, 25 bp, Homo sapien
gcacagcctggcattgggattgttt

SEQ ID NO: 4840357 - DNA, 25 bp, Homo sapien
acagcctggcattgggattgtttac

SEQ ID NO: 4840358 - DNA, 25 bp, Homo sapien
ctgcacagcctggcattgggattgt

SEQ ID NO: 4840359 - DNA, 25 bp, Homo sapien
ttgctgcacagcctggcattgggat

SEQ ID NO: 4840360 - DNA, 25 bp, Homo sapien
gccgtactggccacttttcatgcaa

SEQ ID NO: 4840361 - DNA, 25 bp, Homo sapien
gggctcaagaaggtctccagcaatc

SEQ ID NO: 4840362 - DNA, 25 bp, Homo sapien
cactatgtaagtgtagtcgccgtac

SEQ ID NO: 4840363 - DNA, 25 bp, Homo sapien
tcaagaaggtctccagcaatcacat

SEQ ID NO: 4840364 - DNA, 25 bp, Homo sapien
ggaaaggagagcatgttgagaagga

SEQ ID NO: 4840365 - DNA, 25 bp, Homo sapien
aaggaaaggagagcatgttgagaag

SEQ ID NO: 4840366 - DNA, 25 bp, Homo sapien
aaaggagagcatgttgagaaggagg

SEQ ID NO: 4840367 - DNA, 25 bp, Homo sapien
ctaaggaaaggagagcatgttgaga

SEQ ID NO: 4840368 - DNA, 25 bp, Homo sapien
cttgtgctgccaaattcggaatccc

SEQ ID NO: 4840369 - DNA, 25 bp, Homo sapien
gcctgtcgctttgcaagctgctgga

SEQ ID NO: 4840370 - DNA, 25 bp, Homo sapien
gccactcttgcacagcggggatgaa

SEQ ID NO: 4840371 - DNA, 25 bp, Homo sapien
tgaaaccgggtcagcctgtcgcttt

SEQ ID NO: 4840372 - DNA, 25 bp, Homo sapien
tcacaaaaagattatacagcccagg

SEQ ID NO: 4840373 - DNA, 25 bp, Homo sapien
acaaaaagattatacagcccaggca

SEQ ID NO: 4840374 - DNA, 25 bp, Homo sapien
cacaaaaagattatacagcccaggc

SEQ ID NO: 4840375 - DNA, 25 bp, Homo sapien
cctggacaactaaagtctcagactt

SEQ ID NO: 4840376 - DNA, 25 bp, Homo sapien
caggcctggacaactaaagtctcag

SEQ ID NO: 4840377 - DNA, 25 bp, Homo sapien
ctaaagtctcagactttagacacaa

SEQ ID NO: 4840378 - DNA, 25 bp, Homo sapien
ggcctggacaactaaagtctcagac

SEQ ID NO: 4840379 - DNA, 25 bp, Homo sapien
gctctgcaaatggttgggaactctt

SEQ ID NO: 4840380 - DNA, 25 bp, Homo sapien
caagtctgttaaagatgatgccggc

SEQ ID NO: 4840381 - DNA, 25 bp, Homo sapien
gatgccggcagagtgtttgataaca

SEQ ID NO: 4840382 - DNA, 25 bp, Homo sapien
tctttagtgggtgaatactgatcag

SEQ ID NO: 4840383 - DNA, 25 bp, Homo sapien
tctattcacagctctcttagagagt

SEQ ID NO: 4840384 - DNA, 25 bp, Homo sapien
tagatcagataagagccgcaagggc

SEQ ID NO: 4840385 - DNA, 25 bp, Homo sapien
taaagtggacatagatcagataaga

SEQ ID NO: 4840386 - DNA, 25 bp, Homo sapien
tagagagtggttataatgacaggaa

SEQ ID NO: 4840387 - DNA, 25 bp, Homo sapien
ttttccgatggccatcttcgcattg

SEQ ID NO: 4840388 - DNA, 25 bp, Homo sapien
ctggttttccgatggccatcttcgc

SEQ ID NO: 4840389 - DNA, 25 bp, Homo sapien
ttccgatggccatcttcgcattgta

SEQ ID NO: 4840390 - DNA, 25 bp, Homo sapien
tggttttccgatggccatcttcgca

SEQ ID NO: 4840391 - DNA, 25 bp, Homo sapien
tacgaaggcagaatagagtacttct

SEQ ID NO: 4840392 - DNA, 25 bp, Homo sapien
ttctaactacatagattcgtgagcc

SEQ ID NO: 4840393 - DNA, 25 bp, Homo sapien
gagccaagtgctttgagtttgaatc

SEQ ID NO: 4840394 - DNA, 25 bp, Homo sapien
aaagcaagagagtgttacgaaggca

SEQ ID NO: 4840395 - DNA, 25 bp, Homo sapien
acctgagaaaaacaagccatgggga

SEQ ID NO: 4840396 - DNA, 25 bp, Homo sapien
aaataatgctgcatatctacaacta

SEQ ID NO: 4840397 - DNA, 25 bp, Homo sapien
tcagaaataatgctgcatatctaca

SEQ ID NO: 4840398 - DNA, 25 bp, Homo sapien
gccctcagaaataatgctgcatatc

SEQ ID NO: 4840399 - DNA, 25 bp, Homo sapien
ccctcttgcctctggatattcctca

SEQ ID NO: 4840400 - DNA, 25 bp, Homo sapien
gcccctcttgcctctggatattcct

SEQ ID NO: 4840401 - DNA, 25 bp, Homo sapien
tgcccctcttgcctctggatattcc

SEQ ID NO: 4840402 - DNA, 25 bp, Homo sapien
ctcttgcctctggatattcctcaat

SEQ ID NO: 4840403 - DNA, 25 bp, Homo sapien
aacatttaatctgaacttcagccat

SEQ ID NO: 4840404 - DNA, 25 bp, Homo sapien
gcatacttctggtggaaacatttaa

SEQ ID NO: 4840405 - DNA, 25 bp, Homo sapien
tgggcatacttctggtggaaacatt

SEQ ID NO: 4840406 - DNA, 25 bp, Homo sapien
ctgctgggcatacttctggtggaaa

SEQ ID NO: 4840407 - DNA, 25 bp, Homo sapien
taatccttgcattcttgtggttctc

SEQ ID NO: 4840408 - DNA, 25 bp, Homo sapien
gacgttaacctcttcaccagtttca

SEQ ID NO: 4840409 - DNA, 25 bp, Homo sapien
tccttcagtttcaccccatagcagt

SEQ ID NO: 4840410 - DNA, 25 bp, Homo sapien
gcagtccagatgcaagacgttaacc

SEQ ID NO: 4840411 - DNA, 25 bp, Homo sapien
tgttccattggaagccagttatgaa

SEQ ID NO: 4840412 - DNA, 25 bp, Homo sapien
cattggaagccagttatgaacagtg

SEQ ID NO: 4840413 - DNA, 25 bp, Homo sapien
cagtgtgtacttgaaatcgtttttg

SEQ ID NO: 4840414 - DNA, 25 bp, Homo sapien
gccagttatgaacagtgtgtacttg

SEQ ID NO: 4840415 - DNA, 25 bp, Homo sapien
tccaccaaaaccgtttgcattttca

SEQ ID NO: 4840416 - DNA, 25 bp, Homo sapien
ccaccaaaaccgtttgcattttcat

SEQ ID NO: 4840417 - DNA, 25 bp, Homo sapien
ctcactggtaaggtttgaagcaaat

SEQ ID NO: 4840418 - DNA, 25 bp, Homo sapien
gaagcaaataatgggttcagcactt

SEQ ID NO: 4840419 - DNA, 25 bp, Homo sapien
catgaacagctgtgagtgaatctgc

SEQ ID NO: 4840420 - DNA, 25 bp, Homo sapien
tatagcacaggttggatgctctcaa

SEQ ID NO: 4840421 - DNA, 25 bp, Homo sapien
catgataacgttcatctacccgtaa

SEQ ID NO: 4840422 - DNA, 25 bp, Homo sapien
catctacccgtaaatcagaaaatgg

SEQ ID NO: 4840423 - DNA, 25 bp, Homo sapien
tcctgagtaggcctcatgataacgt

SEQ ID NO: 4840424 - DNA, 25 bp, Homo sapien
gtaggcctcatgataacgttcatct

SEQ ID NO: 4840425 - DNA, 25 bp, Homo sapien
cataattgcttcactgacccagttc

SEQ ID NO: 4840426 - DNA, 25 bp, Homo sapien
gacccagttcatgacatgagttata

SEQ ID NO: 4840427 - DNA, 25 bp, Homo sapien
tttctttgatgctacagtttcaggg

SEQ ID NO: 4840428 - DNA, 25 bp, Homo sapien
gtttcagggagagcattggcatcag

SEQ ID NO: 4840429 - DNA, 25 bp, Homo sapien
tcattagatttagggaccaaacagg

SEQ ID NO: 4840430 - DNA, 25 bp, Homo sapien
acaggaaagtccaggataatcttct

SEQ ID NO: 4840431 - DNA, 25 bp, Homo sapien
tcctcctccaaggtcgcattgcctc

SEQ ID NO: 4840432 - DNA, 25 bp, Homo sapien
ctccaaggtcgcattgcctcctcct

SEQ ID NO: 4840433 - DNA, 25 bp, Homo sapien
cagaatttattaccccaggctgcgg

SEQ ID NO: 4840434 - DNA, 25 bp, Homo sapien
ttaagctcacggcatcccattcggt

SEQ ID NO: 4840435 - DNA, 25 bp, Homo sapien
tattgggacggaataaggacagact

SEQ ID NO: 4840436 - DNA, 25 bp, Homo sapien
caaggtaaaattggcatcgggcgac

SEQ ID NO: 4840437 - DNA, 25 bp, Homo sapien
ggatttgtgtctctaacatagtcag

SEQ ID NO: 4840438 - DNA, 25 bp, Homo sapien
gaaatggctggaaggttgtttatcc

SEQ ID NO: 4840439 - DNA, 25 bp, Homo sapien
tcattgactacttcaaatggagcag

SEQ ID NO: 4840440 - DNA, 25 bp, Homo sapien
tacagagcaacttcggaactaaggg

SEQ ID NO: 4840441 - DNA, 25 bp, Homo sapien
ttcacaactatgaaatcgctgctca

SEQ ID NO: 4840442 - DNA, 25 bp, Homo sapien
caactatgaaatcgctgctcaaaaa

SEQ ID NO: 4840443 - DNA, 25 bp, Homo sapien
tatgaaatcgctgctcaaaaatgat

SEQ ID NO: 4840444 - DNA, 25 bp, Homo sapien
ttttcattcacaactatgaaatcgc

SEQ ID NO: 4840445 - DNA, 25 bp, Homo sapien
aatgcagttatacctcattattgca

SEQ ID NO: 4840446 - DNA, 25 bp, Homo sapien
gctggagtcacttgcactttataat

SEQ ID NO: 4840447 - DNA, 25 bp, Homo sapien
gaagaatgtaaaattcggcaatggg

SEQ ID NO: 4840448 - DNA, 25 bp, Homo sapien
caggtactggtccaatatggctgaa

SEQ ID NO: 4840449 - DNA, 25 bp, Homo sapien
gtacaaattctgcactgctgaaatc

SEQ ID NO: 4840450 - DNA, 25 bp, Homo sapien
tgctgtagacattgggagaattccc

SEQ ID NO: 4840451 - DNA, 25 bp, Homo sapien
attgtacaaattctgcactgctgaa

SEQ ID NO: 4840452 - DNA, 25 bp, Homo sapien
tcatgttgggatggccttgctggtg

SEQ ID NO: 4840453 - DNA, 25 bp, Homo sapien
tcccagctattgtgcctgtggtctc

SEQ ID NO: 4840454 - DNA, 25 bp, Homo sapien
tctcctgagtttatagtgctgaaac

SEQ ID NO: 4840455 - DNA, 25 bp, Homo sapien
tatatctgagcctgtatggatgctg

SEQ ID NO: 4840456 - DNA, 25 bp, Homo sapien
catacaacagtggtacctccaagaa

SEQ ID NO: 4840457 - DNA, 25 bp, Homo sapien
ctgagtagggatggttccaggtaac

SEQ ID NO: 4840458 - DNA, 25 bp, Homo sapien
gacagttacatggtgtttagagctt

SEQ ID NO: 4840459 - DNA, 25 bp, Homo sapien
cggaagagtgatgtttcagtcacac

SEQ ID NO: 4840460 - DNA, 25 bp, Homo sapien
gagtgatgtttcagtcacacgaaat

SEQ ID NO: 4840461 - DNA, 25 bp, Homo sapien
cttaacgcggaagagtgatgtttca

SEQ ID NO: 4840462 - DNA, 25 bp, Homo sapien
gatgtttcagtcacacgaaatgatt

SEQ ID NO: 4840463 - DNA, 25 bp, Homo sapien
gctttcttcagcagaccttggtcta

SEQ ID NO: 4840464 - DNA, 25 bp, Homo sapien
cactgcaagtcaggtagagtatgag

SEQ ID NO: 4840465 - DNA, 25 bp, Homo sapien
gtctacatcagccacacgatggcct

SEQ ID NO: 4840466 - DNA, 25 bp, Homo sapien
tgtcccattctgcactgcaagtcag

SEQ ID NO: 4840467 - DNA, 25 bp, Homo sapien
taatgaacatgttaacacctacctc

SEQ ID NO: 4840468 - DNA, 25 bp, Homo sapien
tagtagaactctagatggtatgcct

SEQ ID NO: 4840469 - DNA, 25 bp, Homo sapien
tacgttttaacacacagacccaaga

SEQ ID NO: 4840470 - DNA, 25 bp, Homo sapien
tttgaagtgtagtcgagcttgggca

SEQ ID NO: 4840471 - DNA, 25 bp, Homo sapien
cgtgttgtacctgacttccacatgg

SEQ ID NO: 4840472 - DNA, 25 bp, Homo sapien
cattaaaaggcccttcacctctgga

SEQ ID NO: 4840473 - DNA, 25 bp, Homo sapien
tctggacaagtcatctgcacaactg

SEQ ID NO: 4840474 - DNA, 25 bp, Homo sapien
cctcttaagatcaggtgggttgggc

SEQ ID NO: 4840475 - DNA, 25 bp, Homo sapien
tatccactaagggaaaatcaagctt

SEQ ID NO: 4840476 - DNA, 25 bp, Homo sapien
gaggcaaatgttcgcaacttcagca

SEQ ID NO: 4840477 - DNA, 25 bp, Homo sapien
tacagactctatggaagccaaacat

SEQ ID NO: 4840478 - DNA, 25 bp, Homo sapien
aagaatatttgtcaatctactgccg

SEQ ID NO: 4840479 - DNA, 25 bp, Homo sapien
cattcaaagacttattgtttccctc

SEQ ID NO: 4840480 - DNA, 25 bp, Homo sapien
gtacttctgtctgttttgcctcttg

SEQ ID NO: 4840481 - DNA, 25 bp, Homo sapien
tgttcaacatagtagaactttcagc

SEQ ID NO: 4840482 - DNA, 25 bp, Homo sapien
gcatgcaaataacgtacttctgtct

SEQ ID NO: 4840483 - DNA, 25 bp, Homo sapien
catggattaagtacacactgctcgt

SEQ ID NO: 4840484 - DNA, 25 bp, Homo sapien
cttctacatggattaagtacacact

SEQ ID NO: 4840485 - DNA, 25 bp, Homo sapien
tacacactgctcgtaagggtacagt

SEQ ID NO: 4840486 - DNA, 25 bp, Homo sapien
taagtacacactgctcgtaagggta

SEQ ID NO: 4840487 - DNA, 25 bp, Homo sapien
gtagttgaacatccttgatttttag

SEQ ID NO: 4840488 - DNA, 25 bp, Homo sapien
tgatgctcttatggccccaagatgc

SEQ ID NO: 4840489 - DNA, 25 bp, Homo sapien
acttgatttgtagttgaacatcctt

SEQ ID NO: 4840490 - DNA, 25 bp, Homo sapien
aagtcagcattggaggggcttctct

SEQ ID NO: 4840491 - DNA, 25 bp, Homo sapien
cttttggtaggaagcatgatttctc

SEQ ID NO: 4840492 - DNA, 25 bp, Homo sapien
tgcagacgtattgtcttctgaagga

SEQ ID NO: 4840493 - DNA, 25 bp, Homo sapien
ccatgggcacagcaatttggggcat

SEQ ID NO: 4840494 - DNA, 25 bp, Homo sapien
aaagaccgtgcgctgttcccgcata

SEQ ID NO: 4840495 - DNA, 25 bp, Homo sapien
tcccgcatactttcttgcagacgta

SEQ ID NO: 4840496 - DNA, 25 bp, Homo sapien
aagaataactgaataatactgttac

SEQ ID NO: 4840497 - DNA, 25 bp, Homo sapien
cagtatccagattgtcttgttgaga

SEQ ID NO: 4840498 - DNA, 25 bp, Homo sapien
aactcaggagcaccagtatccagat

SEQ ID NO: 4840499 - DNA, 25 bp, Homo sapien
gagaaaagcctatgttgttcagccc

SEQ ID NO: 4840500 - DNA, 25 bp, Homo sapien
tatttgcattttggaaactcaggag

SEQ ID NO: 4840501 - DNA, 25 bp, Homo sapien
tgagtcaaactcttcagctcccatt

SEQ ID NO: 4840502 - DNA, 25 bp, Homo sapien
agctcccattgctttaaggctccca

SEQ ID NO: 4840503 - DNA, 25 bp, Homo sapien
cccattgctttaaggctcccagaac

SEQ ID NO: 4840504 - DNA, 25 bp, Homo sapien
gagtcaaactcttcagctcccattg

SEQ ID NO: 4840505 - DNA, 25 bp, Homo sapien
taactaccaggaggggatctgagtt

SEQ ID NO: 4840506 - DNA, 25 bp, Homo sapien
gagattgggattctgtaactaccag

SEQ ID NO: 4840507 - DNA, 25 bp, Homo sapien
agtttagactgtacttcttgatggc

SEQ ID NO: 4840508 - DNA, 25 bp, Homo sapien
tcttgatggcttggagggaaccaca

SEQ ID NO: 4840509 - DNA, 25 bp, Homo sapien
ggaggtacacttctgctctccggca

SEQ ID NO: 4840510 - DNA, 25 bp, Homo sapien
tactgccgggggaggtacacttctg

SEQ ID NO: 4840511 - DNA, 25 bp, Homo sapien
aaaagacatcgtcatcctctctctg

SEQ ID NO: 4840512 - DNA, 25 bp, Homo sapien
tggatgtaaaagacatcgtcatcct

SEQ ID NO: 4840513 - DNA, 25 bp, Homo sapien
atcttgggagatggccggcttagat

SEQ ID NO: 4840514 - DNA, 25 bp, Homo sapien
aggttttccaggcaattctaaatgc

SEQ ID NO: 4840515 - DNA, 25 bp, Homo sapien
aaacaactgccaccgggcctgaggg

SEQ ID NO: 4840516 - DNA, 25 bp, Homo sapien
tgatcttgggagatggccggcttag

SEQ ID NO: 4840517 - DNA, 25 bp, Homo sapien
ttatcatcaacatcacagacaccaa

SEQ ID NO: 4840518 - DNA, 25 bp, Homo sapien
caacatcacagacaccaatggagca

SEQ ID NO: 4840519 - DNA, 25 bp, Homo sapien
atcaacatcacagacaccaatggag

SEQ ID NO: 4840520 - DNA, 25 bp, Homo sapien
tcatcaacatcacagacaccaatgg

SEQ ID NO: 4840521 - DNA, 25 bp, Homo sapien
aaactcataatgacagtcacccttc

SEQ ID NO: 4840522 - DNA, 25 bp, Homo sapien
ggtagcatcctacagataatgttgc

SEQ ID NO: 4840523 - DNA, 25 bp, Homo sapien
gcagggagaatttaaaaggcccaca

SEQ ID NO: 4840524 - DNA, 25 bp, Homo sapien
taatgttgctatcagtatgtgcagg

SEQ ID NO: 4840525 - DNA, 25 bp, Homo sapien
gagcaagtgtgtcttggccacaagc

SEQ ID NO: 4840526 - DNA, 25 bp, Homo sapien
tggaccatgtccctcgtgtattaga

SEQ ID NO: 4840527 - DNA, 25 bp, Homo sapien
gagttggcaactccagctgggattc

SEQ ID NO: 4840528 - DNA, 25 bp, Homo sapien
caggttccacaacagcatagctgca

SEQ ID NO: 4840529 - DNA, 25 bp, Homo sapien
tttgttctgttgtgatgtggctcta

SEQ ID NO: 4840530 - DNA, 25 bp, Homo sapien
taacactgatcattattcagcttct

SEQ ID NO: 4840531 - DNA, 25 bp, Homo sapien
cttcttgtcctttataacactgatc

SEQ ID NO: 4840532 - DNA, 25 bp, Homo sapien
tctgttgtgatgtggctctacaatt

SEQ ID NO: 4840533 - DNA, 25 bp, Homo sapien
taaataagatatcaacatggatttc

SEQ ID NO: 4840534 - DNA, 25 bp, Homo sapien
gcctactcctgttcctgtattaaat

SEQ ID NO: 4840535 - DNA, 25 bp, Homo sapien
actcctgttcctgtattaaataaga

SEQ ID NO: 4840536 - DNA, 25 bp, Homo sapien
tgtattaaataagatatcaacatgg

SEQ ID NO: 4840537 - DNA, 25 bp, Homo sapien
gtctctttgccattcccctggagga

SEQ ID NO: 4840538 - DNA, 25 bp, Homo sapien
cccctggcaccaaatgcgggtcaaa

SEQ ID NO: 4840539 - DNA, 25 bp, Homo sapien
tgtcaagacatggatcacagccatc

SEQ ID NO: 4840540 - DNA, 25 bp, Homo sapien
gcatcctggatgttgtggtccattt

SEQ ID NO: 4840541 - DNA, 25 bp, Homo sapien
ttatttcctggcttcggcttggatg

SEQ ID NO: 4840542 - DNA, 25 bp, Homo sapien
ctggcttcggcttggatgaggtaat

SEQ ID NO: 4840543 - DNA, 25 bp, Homo sapien
tggggttaattcactctctttagac

SEQ ID NO: 4840544 - DNA, 25 bp, Homo sapien
ttcggcttggatgaggtaattggca

SEQ ID NO: 4840545 - DNA, 25 bp, Homo sapien
atatacagcatatgctgattttgaa

SEQ ID NO: 4840546 - DNA, 25 bp, Homo sapien
gaatatacagcatatgctgattttg

SEQ ID NO: 4840547 - DNA, 25 bp, Homo sapien
aatatacagcatatgctgattttga

SEQ ID NO: 4840548 - DNA, 25 bp, Homo sapien
tgaatatacagcatatgctgatttt

SEQ ID NO: 4840549 - DNA, 25 bp, Homo sapien
taatcatgcttgtgtaagtgttggg

SEQ ID NO: 4840550 - DNA, 25 bp, Homo sapien
agcatttaatcatgcttgtgtaagt

SEQ ID NO: 4840551 - DNA, 25 bp, Homo sapien
catttaatcatgcttgtgtaagtgt

SEQ ID NO: 4840552 - DNA, 25 bp, Homo sapien
tttaatcatgcttgtgtaagtgttg

SEQ ID NO: 4840553 - DNA, 25 bp, Homo sapien
acactgacttctacagacctctacg

SEQ ID NO: 4840554 - DNA, 25 bp, Homo sapien
taaggccctattgagctttgctcca

SEQ ID NO: 4840555 - DNA, 25 bp, Homo sapien
ggagctgacagcctaacagcaggca

SEQ ID NO: 4840556 - DNA, 25 bp, Homo sapien
tgttcggtggttgcacctccatggc

SEQ ID NO: 4840557 - DNA, 25 bp, Homo sapien
tgctttgctcacatacagaggcagg

SEQ ID NO: 4840558 - DNA, 25 bp, Homo sapien
gcaaatagcataatgctgccagcag

SEQ ID NO: 4840559 - DNA, 25 bp, Homo sapien
cactccatggttcagagtatccaag

SEQ ID NO: 4840560 - DNA, 25 bp, Homo sapien
catggtgtggagcaatgctttgctc

SEQ ID NO: 4840561 - DNA, 25 bp, Homo sapien
ccatggatgtacaagcaggaatcac

SEQ ID NO: 4840562 - DNA, 25 bp, Homo sapien
tgtgatagggaaccagccaagtggc

SEQ ID NO: 4840563 - DNA, 25 bp, Homo sapien
ggaatcacaaaacgtctgacaaagg

SEQ ID NO: 4840564 - DNA, 25 bp, Homo sapien
gccaagtggccatcataaccgaaaa

SEQ ID NO: 4840565 - DNA, 25 bp, Homo sapien
accctccttaaagcaaaccatatct

SEQ ID NO: 4840566 - DNA, 25 bp, Homo sapien
gcaaaccatatcttgggtcacaaag

SEQ ID NO: 4840567 - DNA, 25 bp, Homo sapien
ttccaccttgaatgtgcgtaatgcc

SEQ ID NO: 4840568 - DNA, 25 bp, Homo sapien
tataagatttccaccttgaatgtgc

SEQ ID NO: 4840569 - DNA, 25 bp, Homo sapien
cctctccttgccagagaagcatagc

SEQ ID NO: 4840570 - DNA, 25 bp, Homo sapien
aagcatagccctggattagcagctg

SEQ ID NO: 4840571 - DNA, 25 bp, Homo sapien
tcctctccttgccagagaagcatag

SEQ ID NO: 4840572 - DNA, 25 bp, Homo sapien
catagccctggattagcagctgttc

SEQ ID NO: 4840573 - DNA, 25 bp, Homo sapien
agttactaagactgagataatgttc

SEQ ID NO: 4840574 - DNA, 25 bp, Homo sapien
gccagttactaagactgagataatg

SEQ ID NO: 4840575 - DNA, 25 bp, Homo sapien
ttactaagactgagataatgttcat

SEQ ID NO: 4840576 - DNA, 25 bp, Homo sapien
ccagttactaagactgagataatgt

SEQ ID NO: 4840577 - DNA, 25 bp, Homo sapien
gatgttgtatatctgagagtgctgc

SEQ ID NO: 4840578 - DNA, 25 bp, Homo sapien
gggcccaaatatggtcctccgcgct

SEQ ID NO: 4840579 - DNA, 25 bp, Homo sapien
tcccgaccggttgtagacagggatg

SEQ ID NO: 4840580 - DNA, 25 bp, Homo sapien
gacagggatgttgtatatctgagag

SEQ ID NO: 4840581 - DNA, 25 bp, Homo sapien
aatgcatgtctttgccagcagtgga

SEQ ID NO: 4840582 - DNA, 25 bp, Homo sapien
ttggcctgggtaatgcatgtctttg

SEQ ID NO: 4840583 - DNA, 25 bp, Homo sapien
atgtctttgccagcagtggactcag

SEQ ID NO: 4840584 - DNA, 25 bp, Homo sapien
caactctttggcctgggtaatgcat

SEQ ID NO: 4840585 - DNA, 25 bp, Homo sapien
caggctttgcgctgctggtcaaagt

SEQ ID NO: 4840586 - DNA, 25 bp, Homo sapien
gccaggctttgcgctgctggtcaaa

SEQ ID NO: 4840587 - DNA, 25 bp, Homo sapien
ggctttgcgctgctggtcaaagtag

SEQ ID NO: 4840588 - DNA, 25 bp, Homo sapien
ctttgcgctgctggtcaaagtagcc

SEQ ID NO: 4840589 - DNA, 25 bp, Homo sapien
ttttatggtgcaggagatgtgatga

SEQ ID NO: 4840590 - DNA, 25 bp, Homo sapien
tagcctgaacttggaaggccagtca

SEQ ID NO: 4840591 - DNA, 25 bp, Homo sapien
tcctgaggaacttgtagcctgaact

SEQ ID NO: 4840592 - DNA, 25 bp, Homo sapien
cttggaaggccagtcacaccatctt

SEQ ID NO: 4840593 - DNA, 25 bp, Homo sapien
cttggaagatcaagtagctgatgat

SEQ ID NO: 4840594 - DNA, 25 bp, Homo sapien
gagactggcagggtatcacctgaga

SEQ ID NO: 4840595 - DNA, 25 bp, Homo sapien
cagatactgtcagtgtacttttcca

SEQ ID NO: 4840596 - DNA, 25 bp, Homo sapien
tcttttaatgcctgcagaacttgga

SEQ ID NO: 4840597 - DNA, 25 bp, Homo sapien
cactcagggagctgggttgccagtc

SEQ ID NO: 4840598 - DNA, 25 bp, Homo sapien
gccagtctccaacgttctttttgtc

SEQ ID NO: 4840599 - DNA, 25 bp, Homo sapien
cccagtggtctgctctattctgtca

SEQ ID NO: 4840600 - DNA, 25 bp, Homo sapien
caggagtgagagtaccccagtggtc

SEQ ID NO: 4840601 - DNA, 25 bp, Homo sapien
ggcatagctcttcccagctagcaga

SEQ ID NO: 4840602 - DNA, 25 bp, Homo sapien
tataagcacagatctggagtctcag

SEQ ID NO: 4840603 - DNA, 25 bp, Homo sapien
tagcagagcctcaacaatggatacc

SEQ ID NO: 4840604 - DNA, 25 bp, Homo sapien
gatgtgctaagacacctggcatagc

SEQ ID NO: 4840605 - DNA, 25 bp, Homo sapien
ctgaaacttatgagtgactgaggaa

SEQ ID NO: 4840606 - DNA, 25 bp, Homo sapien
ctgaggaatttggtaaacattcatg

SEQ ID NO: 4840607 - DNA, 25 bp, Homo sapien
aggaatttggtaaacattcatgtac

SEQ ID NO: 4840608 - DNA, 25 bp, Homo sapien
tgactgaggaatttggtaaacattc

SEQ ID NO: 4840609 - DNA, 25 bp, Homo sapien
tccaattgaactgacgtctgatgcc

SEQ ID NO: 4840610 - DNA, 25 bp, Homo sapien
ggaggaggtgcttatgactgactct

SEQ ID NO: 4840611 - DNA, 25 bp, Homo sapien
gactgactctttgagttactagtat

SEQ ID NO: 4840612 - DNA, 25 bp, Homo sapien
ctttgagttactagtatatgaaaaa

SEQ ID NO: 4840613 - DNA, 25 bp, Homo sapien
ggacagtgcctgtcaggataaatga

SEQ ID NO: 4840614 - DNA, 25 bp, Homo sapien
tgatgatgagaagaaggacagtgcc

SEQ ID NO: 4840615 - DNA, 25 bp, Homo sapien
ccggtcctcagggtcatgatgatga

SEQ ID NO: 4840616 - DNA, 25 bp, Homo sapien
taaatgactcttgtactgtaaggta

SEQ ID NO: 4840617 - DNA, 25 bp, Homo sapien
caaataaagaattccactgggccac

SEQ ID NO: 4840618 - DNA, 25 bp, Homo sapien
caagttatggcaactgccagggctc

SEQ ID NO: 4840619 - DNA, 25 bp, Homo sapien
aaggtcgtggttcccagtgtggcac

SEQ ID NO: 4840620 - DNA, 25 bp, Homo sapien
tatgcattcccacaactccgatttc

SEQ ID NO: 4840621 - DNA, 25 bp, Homo sapien
tagatgatgaccctatctccagggt

SEQ ID NO: 4840622 - DNA, 25 bp, Homo sapien
ggtccttcttgagattcacgtaaaa

SEQ ID NO: 4840623 - DNA, 25 bp, Homo sapien
tttaaggcatgggtcataatcatag

SEQ ID NO: 4840624 - DNA, 25 bp, Homo sapien
tcttgagattcacgtaaaagctcat

SEQ ID NO: 4840625 - DNA, 25 bp, Homo sapien
cctgattccagcatcagctaagaag

SEQ ID NO: 4840626 - DNA, 25 bp, Homo sapien
acctgattccagcatcagctaagaa

SEQ ID NO: 4840627 - DNA, 25 bp, Homo sapien
tgattccagcatcagctaagaagcc

SEQ ID NO: 4840628 - DNA, 25 bp, Homo sapien
attccagcatcagctaagaagccac

SEQ ID NO: 4840629 - DNA, 25 bp, Homo sapien
aagtggtattcattgtccttaattt

SEQ ID NO: 4840630 - DNA, 25 bp, Homo sapien
ctaagtggtattcattgtccttaat

SEQ ID NO: 4840631 - DNA, 25 bp, Homo sapien
ttctaagtggtattcattgtcctta

SEQ ID NO: 4840632 - DNA, 25 bp, Homo sapien
tctaagtggtattcattgtccttaa

SEQ ID NO: 4840633 - DNA, 25 bp, Homo sapien
acactgtaaccagaagttaaacagt

SEQ ID NO: 4840634 - DNA, 25 bp, Homo sapien
cacactgtaaccagaagttaaacag

SEQ ID NO: 4840635 - DNA, 25 bp, Homo sapien
cactgtaaccagaagttaaacagtc

SEQ ID NO: 4840636 - DNA, 25 bp, Homo sapien
taattcttagtaataccaggtgctt

SEQ ID NO: 4840637 - DNA, 25 bp, Homo sapien
tttctgctgaagtcaggtcggtatc

SEQ ID NO: 4840638 - DNA, 25 bp, Homo sapien
tatataatgtcagtgcgctttcttt

SEQ ID NO: 4840639 - DNA, 25 bp, Homo sapien
tcaggtcggtatcattgacaggaag

SEQ ID NO: 4840640 - DNA, 25 bp, Homo sapien
gtttgcattgttttacgtacttggc

SEQ ID NO: 4840641 - DNA, 25 bp, Homo sapien
gacttttctgctgatgtaagtgaac

SEQ ID NO: 4840642 - DNA, 25 bp, Homo sapien
cgtacttggctatgggtgacttttc

SEQ ID NO: 4840643 - DNA, 25 bp, Homo sapien
ttcctttaccagagatcagtttgca

SEQ ID NO: 4840644 - DNA, 25 bp, Homo sapien
ctgcttcatcaaggatccctgtgat

SEQ ID NO: 4840645 - DNA, 25 bp, Homo sapien
ctgtggtctcaggattggcacagga

SEQ ID NO: 4840646 - DNA, 25 bp, Homo sapien
ggtctcaggattggcacaggaagca

SEQ ID NO: 4840647 - DNA, 25 bp, Homo sapien
tattagggttcatgctgtattttcc

SEQ ID NO: 4840648 - DNA, 25 bp, Homo sapien
tttgatggccccttgcaatctccct

SEQ ID NO: 4840649 - DNA, 25 bp, Homo sapien
aaactgcttgggtgacttgaagaca

SEQ ID NO: 4840650 - DNA, 25 bp, Homo sapien
gattcacagtagaaactgcttgggt

SEQ ID NO: 4840651 - DNA, 25 bp, Homo sapien
ttgacttggaatgacttttgatggc

SEQ ID NO: 4840652 - DNA, 25 bp, Homo sapien
caagccgaaggagatacaatgagca

SEQ ID NO: 4840653 - DNA, 25 bp, Homo sapien
tgagcattactggtagtgcctgcca

SEQ ID NO: 4840654 - DNA, 25 bp, Homo sapien
tatatgtcaactaaggagccaagcc

SEQ ID NO: 4840655 - DNA, 25 bp, Homo sapien
gatttctgacaaaaacgggagcata

SEQ ID NO: 4840656 - DNA, 25 bp, Homo sapien
gcttatgttcacatattgtttgttg

SEQ ID NO: 4840657 - DNA, 25 bp, Homo sapien
gttgttcatatccaacaccaaccat

SEQ ID NO: 4840658 - DNA, 25 bp, Homo sapien
gtagcatatgttttctgtgcctatt

SEQ ID NO: 4840659 - DNA, 25 bp, Homo sapien
gttcacatattgtttgttgttcata

SEQ ID NO: 4840660 - DNA, 25 bp, Homo sapien
tgatgtcaaatagcctatcatagtt

SEQ ID NO: 4840661 - DNA, 25 bp, Homo sapien
gaaagatcaataccaagcaatattc

SEQ ID NO: 4840662 - DNA, 25 bp, Homo sapien
tgaaaccttccgatgtattttggct

SEQ ID NO: 4840663 - DNA, 25 bp, Homo sapien
agtgcattctggtagttgtagtaaa

SEQ ID NO: 4840664 - DNA, 25 bp, Homo sapien
aaatcaaaagccagatccacttcaa

SEQ ID NO: 4840665 - DNA, 25 bp, Homo sapien
agatccacttcaatttctctgacaa

SEQ ID NO: 4840666 - DNA, 25 bp, Homo sapien
cacttcaatttctctgacaatgggc

SEQ ID NO: 4840667 - DNA, 25 bp, Homo sapien
tttctctgacaatgggctcttcaaa

SEQ ID NO: 4840668 - DNA, 25 bp, Homo sapien
tctgattatagcttctgccatccac

SEQ ID NO: 4840669 - DNA, 25 bp, Homo sapien
gcctgaggttggaatgcctggaagt

SEQ ID NO: 4840670 - DNA, 25 bp, Homo sapien
tactcatggcaataggaatgatgtg

SEQ ID NO: 4840671 - DNA, 25 bp, Homo sapien
aatgtttaaccaacacggctcgttg

SEQ ID NO: 4840672 - DNA, 25 bp, Homo sapien
taggaatgatgtgaatgtttaacca

SEQ ID NO: 4840673 - DNA, 25 bp, Homo sapien
ccaacacggctcgttggatttttgt

SEQ ID NO: 4840674 - DNA, 25 bp, Homo sapien
attacccaggtttcaatgcattggc

SEQ ID NO: 4840675 - DNA, 25 bp, Homo sapien
cattacccaggtttcaatgcattgg

SEQ ID NO: 4840676 - DNA, 25 bp, Homo sapien
ttacccaggtttcaatgcattggct

SEQ ID NO: 4840677 - DNA, 25 bp, Homo sapien
catttttctctcaggcaactcgtgc

SEQ ID NO: 4840678 - DNA, 25 bp, Homo sapien
ccatttttctctcaggcaactcgtg

SEQ ID NO: 4840679 - DNA, 25 bp, Homo sapien
tttttctctcaggcaactcgtgcat

SEQ ID NO: 4840680 - DNA, 25 bp, Homo sapien
atttttctctcaggcaactcgtgca

SEQ ID NO: 4840681 - DNA, 25 bp, Homo sapien
ttgactttatgaccttattgtgccc

SEQ ID NO: 4840682 - DNA, 25 bp, Homo sapien
tcttgactttatgaccttattgtgc

SEQ ID NO: 4840683 - DNA, 25 bp, Homo sapien
aatcttgactttatgaccttattgt

SEQ ID NO: 4840684 - DNA, 25 bp, Homo sapien
gactttatgaccttattgtgcccca

SEQ ID NO: 4840685 - DNA, 25 bp, Homo sapien
tgggccgtgagtcccctgctgggta

SEQ ID NO: 4840686 - DNA, 25 bp, Homo sapien
gtgggccgtgagtcccctgctgggt

SEQ ID NO: 4840687 - DNA, 25 bp, Homo sapien
gagtgggccgtgagtcccctgctgg

SEQ ID NO: 4840688 - DNA, 25 bp, Homo sapien
agtgggccgtgagtcccctgctggg

SEQ ID NO: 4840689 - DNA, 25 bp, Homo sapien
ggtaaatgacggctgaggaaaccag

SEQ ID NO: 4840690 - DNA, 25 bp, Homo sapien
gatatcttgcgggtaaatgacggct

SEQ ID NO: 4840691 - DNA, 25 bp, Homo sapien
gctgaggaaaccagtcgatgtgcta

SEQ ID NO: 4840692 - DNA, 25 bp, Homo sapien
tcgatgtgctatgggtatacgtggc

SEQ ID NO: 4840693 - DNA, 25 bp, Homo sapien
accttcttttcagatgtgatttgca

SEQ ID NO: 4840694 - DNA, 25 bp, Homo sapien
ctttcaccttcttttcagatgtgat

SEQ ID NO: 4840695 - DNA, 25 bp, Homo sapien
tttcaccttcttttcagatgtgatt

SEQ ID NO: 4840696 - DNA, 25 bp, Homo sapien
tcaccttcttttcagatgtgatttg

SEQ ID NO: 4840697 - DNA, 25 bp, Homo sapien
gatcgactcatagggcaatacaaaa

SEQ ID NO: 4840698 - DNA, 25 bp, Homo sapien
ttcaggatgttaaggtacagtctca

SEQ ID NO: 4840699 - DNA, 25 bp, Homo sapien
gggaaaagatgagcggatcgactca

SEQ ID NO: 4840700 - DNA, 25 bp, Homo sapien
aatgacagcattcaggatgttaagg

SEQ ID NO: 4840701 - DNA, 25 bp, Homo sapien
tgttattggcagaatcagagtttgc

SEQ ID NO: 4840702 - DNA, 25 bp, Homo sapien
gaagatgtggcagagttgttcaatc

SEQ ID NO: 4840703 - DNA, 25 bp, Homo sapien
gctgacaatcccaactctctcaagg

SEQ ID NO: 4840704 - DNA, 25 bp, Homo sapien
agagacaatggacagggtgttattg

SEQ ID NO: 4840705 - DNA, 25 bp, Homo sapien
ttttcttccactccgcagaacacgg

SEQ ID NO: 4840706 - DNA, 25 bp, Homo sapien
gggcaggtctttgtaaggagtaaca

SEQ ID NO: 4840707 - DNA, 25 bp, Homo sapien
aagtcctgtctggaacccattagca

SEQ ID NO: 4840708 - DNA, 25 bp, Homo sapien
tttatttttgcagattcaagtcctg

SEQ ID NO: 4840709 - DNA, 25 bp, Homo sapien
tcaatacatttggtataggcgaacc

SEQ ID NO: 4840710 - DNA, 25 bp, Homo sapien
gtataggcgaaccactggatcgtcc

SEQ ID NO: 4840711 - DNA, 25 bp, Homo sapien
ccactggatcgtccctgaggaactt

SEQ ID NO: 4840712 - DNA, 25 bp, Homo sapien
tacatttggtataggcgaaccactg

SEQ ID NO: 4840713 - DNA, 25 bp, Homo sapien
gctaacaaaattctcgtacttctga

SEQ ID NO: 4840714 - DNA, 25 bp, Homo sapien
gtacttctgacttgtggggggttca

SEQ ID NO: 4840715 - DNA, 25 bp, Homo sapien
tttgcagataatgtaaattgctaac

SEQ ID NO: 4840716 - DNA, 25 bp, Homo sapien
tgatggttactttgcgtctggtttt

SEQ ID NO: 4840717 - DNA, 25 bp, Homo sapien
ctggagtgttccttttggcagtagc

SEQ ID NO: 4840718 - DNA, 25 bp, Homo sapien
tggagtgttccttttggcagtagca

SEQ ID NO: 4840719 - DNA, 25 bp, Homo sapien
ggagtgttccttttggcagtagcat

SEQ ID NO: 4840720 - DNA, 25 bp, Homo sapien
aggctctccatgctctggggtttct

SEQ ID NO: 4840721 - DNA, 25 bp, Homo sapien
tgggatgcaggctctccatgctctg

SEQ ID NO: 4840722 - DNA, 25 bp, Homo sapien
gctctccatgctctggggtttctac

SEQ ID NO: 4840723 - DNA, 25 bp, Homo sapien
gcttccatctgtgggatgcaggctc

SEQ ID NO: 4840724 - DNA, 25 bp, Homo sapien
tgttggaccgacaagggatcttctc

SEQ ID NO: 4840725 - DNA, 25 bp, Homo sapien
tataagcacaatctaggaaacatgg

SEQ ID NO: 4840726 - DNA, 25 bp, Homo sapien
cagcccaatccctagtgttaacagg

SEQ ID NO: 4840727 - DNA, 25 bp, Homo sapien
aatgccctcttgagacctacagtgc

SEQ ID NO: 4840728 - DNA, 25 bp, Homo sapien
tctcctctacctaaattcaggcatg

SEQ ID NO: 4840729 - DNA, 25 bp, Homo sapien
ttctgcctgtggtagctttgagggt

SEQ ID NO: 4840730 - DNA, 25 bp, Homo sapien
taacattgggcatttgctcagaggg

SEQ ID NO: 4840731 - DNA, 25 bp, Homo sapien
tggtagctttgagggtgtagataac

SEQ ID NO: 4840732 - DNA, 25 bp, Homo sapien
gattgtgtggatacataaacaaaca

SEQ ID NO: 4840733 - DNA, 25 bp, Homo sapien
catgtaatttatttcctaaggcatt

SEQ ID NO: 4840734 - DNA, 25 bp, Homo sapien
tattatgttcttcctaggtgtctgt

SEQ ID NO: 4840735 - DNA, 25 bp, Homo sapien
gtgtctgttaattttagtaattatc

SEQ ID NO: 4840736 - DNA, 25 bp, Homo sapien
taatatctcatttatgagaaacctc

SEQ ID NO: 4840737 - DNA, 25 bp, Homo sapien
atcatttggcttctgcgtctgacag

SEQ ID NO: 4840738 - DNA, 25 bp, Homo sapien
tctggtagatctctatgaaaggaaa

SEQ ID NO: 4840739 - DNA, 25 bp, Homo sapien
gcaagcaggatatttagtcttacga

SEQ ID NO: 4840740 - DNA, 25 bp, Homo sapien
catgtcaacaggttggggatctggc

SEQ ID NO: 4840741 - DNA, 25 bp, Homo sapien
ttcatgtcaacaggttggggatctg

SEQ ID NO: 4840742 - DNA, 25 bp, Homo sapien
ggttggggatctggctgttgagtca

SEQ ID NO: 4840743 - DNA, 25 bp, Homo sapien
gggatctggctgttgagtcaatggg

SEQ ID NO: 4840744 - DNA, 25 bp, Homo sapien
actttggtttcggatgcatgctgcc

SEQ ID NO: 4840745 - DNA, 25 bp, Homo sapien
aagcatgcaaacagttctcttgaag

SEQ ID NO: 4840746 - DNA, 25 bp, Homo sapien
gcatgctgccatctaatgaggtaaa

SEQ ID NO: 4840747 - DNA, 25 bp, Homo sapien
gctgtttctatagccttgaagggaa

SEQ ID NO: 4840748 - DNA, 25 bp, Homo sapien
gaatcagtatgggtgcccttgtcaa

SEQ ID NO: 4840749 - DNA, 25 bp, Homo sapien
ttggaatcagtatgggtgcccttgt

SEQ ID NO: 4840750 - DNA, 25 bp, Homo sapien
agtatgggtgcccttgtcaagggct

SEQ ID NO: 4840751 - DNA, 25 bp, Homo sapien
ctttggaatcagtatgggtgccctt

SEQ ID NO: 4840752 - DNA, 25 bp, Homo sapien
ccaaattcccattgactatcagtca

SEQ ID NO: 4840753 - DNA, 25 bp, Homo sapien
cattgactatcagtcaagactgtca

SEQ ID NO: 4840754 - DNA, 25 bp, Homo sapien
caaattcccattgactatcagtcaa

SEQ ID NO: 4840755 - DNA, 25 bp, Homo sapien
gtatgtttctctccgatttcctttc

SEQ ID NO: 4840756 - DNA, 25 bp, Homo sapien
cctgtatgtttctctccgatttcct

SEQ ID NO: 4840757 - DNA, 25 bp, Homo sapien
ccctgtatgtttctctccgatttcc

SEQ ID NO: 4840758 - DNA, 25 bp, Homo sapien
atccctgtatgtttctctccgattt

SEQ ID NO: 4840759 - DNA, 25 bp, Homo sapien
aggagaaagggtgggcgcttcgcaa

SEQ ID NO: 4840760 - DNA, 25 bp, Homo sapien
gggtgggcgcttcgcaagctccttc

SEQ ID NO: 4840761 - DNA, 25 bp, Homo sapien
aaagggtgggcgcttcgcaagctcc

SEQ ID NO: 4840762 - DNA, 25 bp, Homo sapien
tgggcgcttcgcaagctccttcctg

SEQ ID NO: 4840763 - DNA, 25 bp, Homo sapien
ggcagctctattgccgcaccggctt

SEQ ID NO: 4840764 - DNA, 25 bp, Homo sapien
ggtttgtcgccgcagcctctagcag

SEQ ID NO: 4840765 - DNA, 25 bp, Homo sapien
tctttgcctgccaagggcgtcatcg

SEQ ID NO: 4840766 - DNA, 25 bp, Homo sapien
gaccacagcctcttcggtacgtact

SEQ ID NO: 4840767 - DNA, 25 bp, Homo sapien
tttgtgttccggatctccccctcca

SEQ ID NO: 4840768 - DNA, 25 bp, Homo sapien
gccagcaggtgggttcgcatttcct

SEQ ID NO: 4840769 - DNA, 25 bp, Homo sapien
aggtgggttcgcatttcctgttgcc

SEQ ID NO: 4840770 - DNA, 25 bp, Homo sapien
catggctcccttagccgaagtcggg

SEQ ID NO: 4840771 - DNA, 25 bp, Homo sapien
aagaggggcctcgactgcacctcct

SEQ ID NO: 4840772 - DNA, 25 bp, Homo sapien
atcaaagacggttgcacggccgcag

SEQ ID NO: 4840773 - DNA, 25 bp, Homo sapien
agcatcaccgctgtcccaaggacaa

SEQ ID NO: 4840774 - DNA, 25 bp, Homo sapien
cagctgaacagcatcaccgctgtcc

SEQ ID NO: 4840775 - DNA, 25 bp, Homo sapien
tagaggcgatttatcactgcaaagc

SEQ ID NO: 4840776 - DNA, 25 bp, Homo sapien
gaggcgatttatcactgcaaagctc

SEQ ID NO: 4840777 - DNA, 25 bp, Homo sapien
ggcgatttatcactgcaaagctcac

SEQ ID NO: 4840778 - DNA, 25 bp, Homo sapien
ttagaggcgatttatcactgcaaag

SEQ ID NO: 4840779 - DNA, 25 bp, Homo sapien
agttatcctgctacgagattcacac

SEQ ID NO: 4840780 - DNA, 25 bp, Homo sapien
tatcctgctacgagattcacacaac

SEQ ID NO: 4840781 - DNA, 25 bp, Homo sapien
ctgctacgagattcacacaactttg

SEQ ID NO: 4840782 - DNA, 25 bp, Homo sapien
tcagttatcctgctacgagattcac

SEQ ID NO: 4840783 - DNA, 25 bp, Homo sapien
tatgtgaccacatcgtcctctagtg

SEQ ID NO: 4840784 - DNA, 25 bp, Homo sapien
tggctgaccccataagaggccggtg

SEQ ID NO: 4840785 - DNA, 25 bp, Homo sapien
cattcctgcgtatcaaggttcctct

SEQ ID NO: 4840786 - DNA, 25 bp, Homo sapien
caagggtttggcagcgtatgtgacc

SEQ ID NO: 4840787 - DNA, 25 bp, Homo sapien
aaatatactgcattccttattttgg

SEQ ID NO: 4840788 - DNA, 25 bp, Homo sapien
agagcagcagttacatctgagatct

SEQ ID NO: 4840789 - DNA, 25 bp, Homo sapien
cagattcttgactagttaaaagagc

SEQ ID NO: 4840790 - DNA, 25 bp, Homo sapien
tctgtatcagggcacatgaaccacc

SEQ ID NO: 4840791 - DNA, 25 bp, Homo sapien
agcggaggccgcccacaccagagct

SEQ ID NO: 4840792 - DNA, 25 bp, Homo sapien
accagagctgggagggggcagagaa

SEQ ID NO: 4840793 - DNA, 25 bp, Homo sapien
gaggccgcccacaccagagctggga

SEQ ID NO: 4840794 - DNA, 25 bp, Homo sapien
cggaggccgcccacaccagagctgg

SEQ ID NO: 4840795 - DNA, 25 bp, Homo sapien
ggctggtgagcgcagagtggaggag

SEQ ID NO: 4840796 - DNA, 25 bp, Homo sapien
tcatcctctcgggaggagaagggcc

SEQ ID NO: 4840797 - DNA, 25 bp, Homo sapien
ggccacaagagccttcgcagcgcag

SEQ ID NO: 4840798 - DNA, 25 bp, Homo sapien
ggtggcggccacaagagccttcgca

SEQ ID NO: 4840799 - DNA, 25 bp, Homo sapien
cttggcagccgccactgggatgggc

SEQ ID NO: 4840800 - DNA, 25 bp, Homo sapien
ggggtccccgtacagctggtagcat

SEQ ID NO: 4840801 - DNA, 25 bp, Homo sapien
ctctttgagggtcgcccggtcgccg

SEQ ID NO: 4840802 - DNA, 25 bp, Homo sapien
cgggctccgtggccgcgctctttga

SEQ ID NO: 4840803 - DNA, 25 bp, Homo sapien
tgcgtacccggcacgaaggtcacat

SEQ ID NO: 4840804 - DNA, 25 bp, Homo sapien
aaggtcacatcccccgcgcaggtgt

SEQ ID NO: 4840805 - DNA, 25 bp, Homo sapien
cgcgcaggtgtgacgcgcgctcgcg

SEQ ID NO: 4840806 - DNA, 25 bp, Homo sapien
gcggccacagcgcttgcaccgtccc

SEQ ID NO: 4840807 - DNA, 25 bp, Homo sapien
gagaccaaatagaagtaaggtatta

SEQ ID NO: 4840808 - DNA, 25 bp, Homo sapien
gcaataatagcccacggcaggcttg

SEQ ID NO: 4840809 - DNA, 25 bp, Homo sapien
tgacttaagagaacagaggcactac

SEQ ID NO: 4840810 - DNA, 25 bp, Homo sapien
aaatggcagattgactccatgattc

SEQ ID NO: 4840811 - DNA, 25 bp, Homo sapien
caagtctcaagaatgtacaaagcag

SEQ ID NO: 4840812 - DNA, 25 bp, Homo sapien
acagggtaccaagtctcaagaatgt

SEQ ID NO: 4840813 - DNA, 25 bp, Homo sapien
gaatgtacaaagcagcaaggtgaga

SEQ ID NO: 4840814 - DNA, 25 bp, Homo sapien
tcaagaatgtacaaagcagcaaggt

SEQ ID NO: 4840815 - DNA, 25 bp, Homo sapien
agtctgccacatcgacggactcttc

SEQ ID NO: 4840816 - DNA, 25 bp, Homo sapien
atgaagtctgccacatcgacggact

SEQ ID NO: 4840817 - DNA, 25 bp, Homo sapien
gaagtctgccacatcgacggactct

SEQ ID NO: 4840818 - DNA, 25 bp, Homo sapien
tctgccacatcgacggactcttcct

SEQ ID NO: 4840819 - DNA, 25 bp, Homo sapien
agtgtcaactggatagatatcatcc

SEQ ID NO: 4840820 - DNA, 25 bp, Homo sapien
tatcatccttatcagacaggaaaaa

SEQ ID NO: 4840821 - DNA, 25 bp, Homo sapien
gattgtttcgaaattcttttgtata

SEQ ID NO: 4840822 - DNA, 25 bp, Homo sapien
tgtatacacttcctgtactctaaat

SEQ ID NO: 4840823 - DNA, 25 bp, Homo sapien
ctatgttatttccttaatcactata

SEQ ID NO: 4840824 - DNA, 25 bp, Homo sapien
tgttatttccttaatcactataatc

SEQ ID NO: 4840825 - DNA, 25 bp, Homo sapien
gttatttccttaatcactataatct

SEQ ID NO: 4840826 - DNA, 25 bp, Homo sapien
tatgttatttccttaatcactataa

SEQ ID NO: 4840827 - DNA, 25 bp, Homo sapien
gaactttcatactgggaggacttaa

SEQ ID NO: 4840828 - DNA, 25 bp, Homo sapien
ggtgaactttcatactgggaggact

SEQ ID NO: 4840829 - DNA, 25 bp, Homo sapien
ttcatactgggaggacttaagagac

SEQ ID NO: 4840830 - DNA, 25 bp, Homo sapien
gttaggtgaactttcatactgggag

SEQ ID NO: 4840831 - DNA, 25 bp, Homo sapien
ggaattggtattcacctggtctact

SEQ ID NO: 4840832 - DNA, 25 bp, Homo sapien
gagaatgcttctaatgaattgccaa

SEQ ID NO: 4840833 - DNA, 25 bp, Homo sapien
gagttagaatggtccttagagatca

SEQ ID NO: 4840834 - DNA, 25 bp, Homo sapien
cgttgccttattgctagagtggtag

SEQ ID NO: 4840835 - DNA, 25 bp, Homo sapien
tcatctcttgccactaccgctcctg

SEQ ID NO: 4840836 - DNA, 25 bp, Homo sapien
gccactaccgctcctgagatgcctg

SEQ ID NO: 4840837 - DNA, 25 bp, Homo sapien
tcttgccactaccgctcctgagatg

SEQ ID NO: 4840838 - DNA, 25 bp, Homo sapien
atctcttgccactaccgctcctgag

SEQ ID NO: 4840839 - DNA, 25 bp, Homo sapien
gcccttcacattctatagaagcaaa

SEQ ID NO: 4840840 - DNA, 25 bp, Homo sapien
catacggagtcatgaataactgccc

SEQ ID NO: 4840841 - DNA, 25 bp, Homo sapien
tgggctcatctgttgtaacagccaa

SEQ ID NO: 4840842 - DNA, 25 bp, Homo sapien
tagaagcaaataaacgaaatcgcct

SEQ ID NO: 4840843 - DNA, 25 bp, Homo sapien
tatatatccatatttgctaaccatc

SEQ ID NO: 4840844 - DNA, 25 bp, Homo sapien
catatttgctaaccatctacaacca

SEQ ID NO: 4840845 - DNA, 25 bp, Homo sapien
tttgctaaccatctacaaccataac

SEQ ID NO: 4840846 - DNA, 25 bp, Homo sapien
tatccatatttgctaaccatctaca

SEQ ID NO: 4840847 - DNA, 25 bp, Homo sapien
tggaaagtgacttccaagttttggc

SEQ ID NO: 4840848 - DNA, 25 bp, Homo sapien
ctgtttggaaagtgacttccaagtt

SEQ ID NO: 4840849 - DNA, 25 bp, Homo sapien
caaagtgagtataccaacacatgag

SEQ ID NO: 4840850 - DNA, 25 bp, Homo sapien
gcgcatgcactactgcagaatttaa

SEQ ID NO: 4840851 - DNA, 25 bp, Homo sapien
actttacaaggtacatgcgcatgca

SEQ ID NO: 4840852 - DNA, 25 bp, Homo sapien
taggtatagggtaggcatatcgcca

SEQ ID NO: 4840853 - DNA, 25 bp, Homo sapien
gcaggaacagcatttttaggggatt

SEQ ID NO: 4840854 - DNA, 25 bp, Homo sapien
gaagcccatatgtggattcttgtgt

SEQ ID NO: 4840855 - DNA, 25 bp, Homo sapien
aggggatttatggacaccttgaagc

SEQ ID NO: 4840856 - DNA, 25 bp, Homo sapien
cttggtatgtcaaaggcaggaacag

SEQ ID NO: 4840857 - DNA, 25 bp, Homo sapien
aaatagcttcgatgagcctttccaa

SEQ ID NO: 4840858 - DNA, 25 bp, Homo sapien
ctggtggtgtttctgcgagcatttg

SEQ ID NO: 4840859 - DNA, 25 bp, Homo sapien
tctttaagatttcgaaatagcttcg

SEQ ID NO: 4840860 - DNA, 25 bp, Homo sapien
tttctgcgagcatttgatttaattc

SEQ ID NO: 4840861 - DNA, 25 bp, Homo sapien
agatattctgtgtaagaaatcacac

SEQ ID NO: 4840862 - DNA, 25 bp, Homo sapien
aagatattctgtgtaagaaatcaca

SEQ ID NO: 4840863 - DNA, 25 bp, Homo sapien
tactataccataagctgtagcattt

SEQ ID NO: 4840864 - DNA, 25 bp, Homo sapien
gactctttacagtgctatgcttagc

SEQ ID NO: 4840865 - DNA, 25 bp, Homo sapien
cagcatggatattgattttcaagag

SEQ ID NO: 4840866 - DNA, 25 bp, Homo sapien
tatgtttttgactctttacagtgct

SEQ ID NO: 4840867 - DNA, 25 bp, Homo sapien
gctattctgaaccctgcatgtggct

SEQ ID NO: 4840868 - DNA, 25 bp, Homo sapien
agctattctgaaccctgcatgtggc

SEQ ID NO: 4840869 - DNA, 25 bp, Homo sapien
cattgcacgcttttcttcatctcct

SEQ ID NO: 4840870 - DNA, 25 bp, Homo sapien
cagcattgcacgcttttcttcatct

SEQ ID NO: 4840871 - DNA, 25 bp, Homo sapien
gcattgcacgcttttcttcatctcc

SEQ ID NO: 4840872 - DNA, 25 bp, Homo sapien
agcattgcacgcttttcttcatctc

SEQ ID NO: 4840873 - DNA, 25 bp, Homo sapien
gaacctggcctatggtcaggctgaa

SEQ ID NO: 4840874 - DNA, 25 bp, Homo sapien
gaggttttggagttggccagacaca

SEQ ID NO: 4840875 - DNA, 25 bp, Homo sapien
gacagtcaccttgttatattaccac

SEQ ID NO: 4840876 - DNA, 25 bp, Homo sapien
gcacctagtatagtgtccgtttgta

SEQ ID NO: 4840877 - DNA, 25 bp, Homo sapien
ggttttctcagtgtgcattgtctgc

SEQ ID NO: 4840878 - DNA, 25 bp, Homo sapien
caaattttgtgctaacactgtaggt

SEQ ID NO: 4840879 - DNA, 25 bp, Homo sapien
ggaagatgtgtaagtcctctctgga

SEQ ID NO: 4840880 - DNA, 25 bp, Homo sapien
gattcattaacattattcagcctcc

SEQ ID NO: 4840881 - DNA, 25 bp, Homo sapien
tacaacttagggtatgctggtataa

SEQ ID NO: 4840882 - DNA, 25 bp, Homo sapien
tacctgtggatatcaaagactttag

SEQ ID NO: 4840883 - DNA, 25 bp, Homo sapien
cgaatacttccgaggtacctgtgga

SEQ ID NO: 4840884 - DNA, 25 bp, Homo sapien
tgtaaagtgctgttagttccaaagt

SEQ ID NO: 4840885 - DNA, 25 bp, Homo sapien
gagtggcagggctaatactcaaacc

SEQ ID NO: 4840886 - DNA, 25 bp, Homo sapien
tacttacctggtagaacggtcatga

SEQ ID NO: 4840887 - DNA, 25 bp, Homo sapien
tagcacataagtgtcccaagaaatg

SEQ ID NO: 4840888 - DNA, 25 bp, Homo sapien
tccaaggtcatccaggtaatgagtg

SEQ ID NO: 4840889 - DNA, 25 bp, Homo sapien
aaatggtatgagagacctgtgctgg

SEQ ID NO: 4840890 - DNA, 25 bp, Homo sapien
gagagacctgtgctggaatcctgct

SEQ ID NO: 4840891 - DNA, 25 bp, Homo sapien
agacctgtgctggaatcctgctctg

SEQ ID NO: 4840892 - DNA, 25 bp, Homo sapien
caaggcagtggaaatggtatgagag

SEQ ID NO: 4840893 - DNA, 25 bp, Homo sapien
gatttggacatgcttccgcaatgct

SEQ ID NO: 4840894 - DNA, 25 bp, Homo sapien
tcagaatgaacccaagtacagcaaa

SEQ ID NO: 4840895 - DNA, 25 bp, Homo sapien
gaactactgctttgagtaaaacacg

SEQ ID NO: 4840896 - DNA, 25 bp, Homo sapien
aaaacacgttgtcctgaagtatgcg

SEQ ID NO: 4840897 - DNA, 25 bp, Homo sapien
gagaatggtatccataaagttgaag

SEQ ID NO: 4840898 - DNA, 25 bp, Homo sapien
ggagaatggtatccataaagttgaa

SEQ ID NO: 4840899 - DNA, 25 bp, Homo sapien
agaatggtatccataaagttgaaga

SEQ ID NO: 4840900 - DNA, 25 bp, Homo sapien
tcctaaaggtagaaactggctctta

SEQ ID NO: 4840901 - DNA, 25 bp, Homo sapien
aagcgggtcactgctttccctgagg

SEQ ID NO: 4840902 - DNA, 25 bp, Homo sapien
ctctggaaactagcagataattgct

SEQ ID NO: 4840903 - DNA, 25 bp, Homo sapien
tcttagtttatatccagctccatga

SEQ ID NO: 4840904 - DNA, 25 bp, Homo sapien
accagctgtcttctagtaagctaga

SEQ ID NO: 4840905 - DNA, 25 bp, Homo sapien
tgcaaaacagctacgagaaaccagc

SEQ ID NO: 4840906 - DNA, 25 bp, Homo sapien
ggatcctcaataactttcgacaatg

SEQ ID NO: 4840907 - DNA, 25 bp, Homo sapien
caatgtaatgggatcacagaccaca

SEQ ID NO: 4840908 - DNA, 25 bp, Homo sapien
ttttggtcaaaagcgcccagggcat

SEQ ID NO: 4840909 - DNA, 25 bp, Homo sapien
aagaatatacagttaggtagcccag

SEQ ID NO: 4840910 - DNA, 25 bp, Homo sapien
aaatgatgtcctgcatgtagtgtgc

SEQ ID NO: 4840911 - DNA, 25 bp, Homo sapien
tgccctgtaagtgtgacacattttt

SEQ ID NO: 4840912 - DNA, 25 bp, Homo sapien
gaagttttaagaagcacaactgaaa

SEQ ID NO: 4840913 - DNA, 25 bp, Homo sapien
gtagaagttttaagaagcacaactg

SEQ ID NO: 4840914 - DNA, 25 bp, Homo sapien
aagttttaagaagcacaactgaaat

SEQ ID NO: 4840915 - DNA, 25 bp, Homo sapien
ctgtagaagttttaagaagcacaac

SEQ ID NO: 4840916 - DNA, 25 bp, Homo sapien
cttctggagacaagttcctcagcat

SEQ ID NO: 4840917 - DNA, 25 bp, Homo sapien
tcagtgtatcccaatagcttctgga

SEQ ID NO: 4840918 - DNA, 25 bp, Homo sapien
ctctgcgaggtctgaaaacagtgct

SEQ ID NO: 4840919 - DNA, 25 bp, Homo sapien
gtgcttggcttgtgttacgtctcag

SEQ ID NO: 4840920 - DNA, 25 bp, Homo sapien
aacagtttttctaagatatggccca

SEQ ID NO: 4840921 - DNA, 25 bp, Homo sapien
tatggcccatcttgagaaactagaa

SEQ ID NO: 4840922 - DNA, 25 bp, Homo sapien
aagtcttttctggtaagaccgctag

SEQ ID NO: 4840923 - DNA, 25 bp, Homo sapien
cgctagctgcctctaataaagttct

SEQ ID NO: 4840924 - DNA, 25 bp, Homo sapien
tagcagctttggatcagagtgtgga

SEQ ID NO: 4840925 - DNA, 25 bp, Homo sapien
tctgggaagctgtaaaagcccacag

SEQ ID NO: 4840926 - DNA, 25 bp, Homo sapien
agtgtgctggcaaactgagttgtcc

SEQ ID NO: 4840927 - DNA, 25 bp, Homo sapien
ggtattcatactcctatcacggcca

SEQ ID NO: 4840928 - DNA, 25 bp, Homo sapien
attggagacacggagttttactgta

SEQ ID NO: 4840929 - DNA, 25 bp, Homo sapien
aatctatggttagaaacagctccag

SEQ ID NO: 4840930 - DNA, 25 bp, Homo sapien
ggtattcacagtaacctataaggat

SEQ ID NO: 4840931 - DNA, 25 bp, Homo sapien
tataaacaattctgtgttccgctgg

SEQ ID NO: 4840932 - DNA, 25 bp, Homo sapien
taaaatgagtggttacaggaacacc

SEQ ID NO: 4840933 - DNA, 25 bp, Homo sapien
cagataatccagatccaatgaggca

SEQ ID NO: 4840934 - DNA, 25 bp, Homo sapien
gagatgtaggttgcacttatccaga

SEQ ID NO: 4840935 - DNA, 25 bp, Homo sapien
caatgaggcataagtaacagtgaca

SEQ ID NO: 4840936 - DNA, 25 bp, Homo sapien
tacgtaacacgtcaaatggataaaa

SEQ ID NO: 4840937 - DNA, 25 bp, Homo sapien
cagatatactgaataaatggagctg

SEQ ID NO: 4840938 - DNA, 25 bp, Homo sapien
agcttcctttaaccactgtattcca

SEQ ID NO: 4840939 - DNA, 25 bp, Homo sapien
taattccagaggatttttgctttcc

SEQ ID NO: 4840940 - DNA, 25 bp, Homo sapien
aaaaatcttcaaagttgagctcagc

SEQ ID NO: 4840941 - DNA, 25 bp, Homo sapien
aatcttcaaagttgagctcagcttt

SEQ ID NO: 4840942 - DNA, 25 bp, Homo sapien
tactaaacttgtgatgtcatcagca

SEQ ID NO: 4840943 - DNA, 25 bp, Homo sapien
tgtagtatctgttactaaacttgtg

SEQ ID NO: 4840944 - DNA, 25 bp, Homo sapien
atcgtaaaagaatatgagcaaaatc

SEQ ID NO: 4840945 - DNA, 25 bp, Homo sapien
tttccacatttgtatatcgtaaaag

SEQ ID NO: 4840946 - DNA, 25 bp, Homo sapien
tcaggtatactgtaacgcacatttt

SEQ ID NO: 4840947 - DNA, 25 bp, Homo sapien
caggtatactgtaacgcacattttc

SEQ ID NO: 4840948 - DNA, 25 bp, Homo sapien
cctatagaacgacttgcaaagttat

SEQ ID NO: 4840949 - DNA, 25 bp, Homo sapien
tggaaaaatgacctgaattcatcaa

SEQ ID NO: 4840950 - DNA, 25 bp, Homo sapien
cttgccctatagaacgacttgcaaa

SEQ ID NO: 4840951 - DNA, 25 bp, Homo sapien
tgccctatagaacgacttgcaaagt

SEQ ID NO: 4840952 - DNA, 25 bp, Homo sapien
tttataacttaattgatcatctttg

SEQ ID NO: 4840953 - DNA, 25 bp, Homo sapien
ccggaatcctctatggagtctgtct

SEQ ID NO: 4840954 - DNA, 25 bp, Homo sapien
gtccagtagctacatagacggcacg

SEQ ID NO: 4840955 - DNA, 25 bp, Homo sapien
tacatagacggcacgtttaaattca

SEQ ID NO: 4840956 - DNA, 25 bp, Homo sapien
tgaaagtggggtacttctggactgt

SEQ ID NO: 4840957 - DNA, 25 bp, Homo sapien
tatatataacatttgtagtaacaag

SEQ ID NO: 4840958 - DNA, 25 bp, Homo sapien
tcttgttatttgtcacacagatagt

SEQ ID NO: 4840959 - DNA, 25 bp, Homo sapien
gagagttcagcaaatcaaggcaaag

SEQ ID NO: 4840960 - DNA, 25 bp, Homo sapien
tgaaaaagtgcagagagttcagcaa

SEQ ID NO: 4840961 - DNA, 25 bp, Homo sapien
gattctgagaagtaccataaactgt

SEQ ID NO: 4840962 - DNA, 25 bp, Homo sapien
aacgtgtaccacctatgatcaggag

SEQ ID NO: 4840963 - DNA, 25 bp, Homo sapien
taggcgatcaacattccatgagtca

SEQ ID NO: 4840964 - DNA, 25 bp, Homo sapien
tgcaggatttgccatgtacgcaaca

SEQ ID NO: 4840965 - DNA, 25 bp, Homo sapien
gcaggcgaaatctggccagccaaag

SEQ ID NO: 4840966 - DNA, 25 bp, Homo sapien
gattcctcgtatgaaatgccccagc

SEQ ID NO: 4840967 - DNA, 25 bp, Homo sapien
tatgaacgtataccaaaggattgcc

SEQ ID NO: 4840968 - DNA, 25 bp, Homo sapien
aaaacccctcaagaatgcagataga

SEQ ID NO: 4840969 - DNA, 25 bp, Homo sapien
tacgaggcaccttagtgacttctcc

SEQ ID NO: 4840970 - DNA, 25 bp, Homo sapien
cacttatgctcccacttacgaggca

SEQ ID NO: 4840971 - DNA, 25 bp, Homo sapien
cagatttcggttccagcagtgccca

SEQ ID NO: 4840972 - DNA, 25 bp, Homo sapien
tatccagtgaatcaaaggtgtgccc

SEQ ID NO: 4840973 - DNA, 25 bp, Homo sapien
gagattatccgggatttcccagatg

SEQ ID NO: 4840974 - DNA, 25 bp, Homo sapien
caagtgttcagctggagattatccg

SEQ ID NO: 4840975 - DNA, 25 bp, Homo sapien
gatggtatgggcctgcacaccaaac

SEQ ID NO: 4840976 - DNA, 25 bp, Homo sapien
ttcagtcctagaatcccagggccgt

SEQ ID NO: 4840977 - DNA, 25 bp, Homo sapien
tgctagctagccgagtgttaaacct

SEQ ID NO: 4840978 - DNA, 25 bp, Homo sapien
tatggcattcaagtgtgcgtagaag

SEQ ID NO: 4840979 - DNA, 25 bp, Homo sapien
aaccttgtcagtagagggttctgga

SEQ ID NO: 4840980 - DNA, 25 bp, Homo sapien
cctgcatgcttattccctgtgtggt

SEQ ID NO: 4840981 - DNA, 25 bp, Homo sapien
caggcagaaaggtggattgctctac

SEQ ID NO: 4840982 - DNA, 25 bp, Homo sapien
aagactatgtctgtaacccaggaga

SEQ ID NO: 4840983 - DNA, 25 bp, Homo sapien
tagggccttgtgaccaactgcagaa

SEQ ID NO: 4840984 - DNA, 25 bp, Homo sapien
tctactaggtggagtgactgatccc

SEQ ID NO: 4840985 - DNA, 25 bp, Homo sapien
tccataatcacatgtgccgatttct

SEQ ID NO: 4840986 - DNA, 25 bp, Homo sapien
taatcacatgtgccgatttcttaca

SEQ ID NO: 4840987 - DNA, 25 bp, Homo sapien
ctccataatcacatgtgccgatttc

SEQ ID NO: 4840988 - DNA, 25 bp, Homo sapien
ccaaggacacagctgctatcatgat

SEQ ID NO: 4840989 - DNA, 25 bp, Homo sapien
tcagtgctttaaaggcgatttccca

SEQ ID NO: 4840990 - DNA, 25 bp, Homo sapien
tgcttacccgccatgctattctgaa

SEQ ID NO: 4840991 - DNA, 25 bp, Homo sapien
tactgtgtgctcagttcagtgcttt

SEQ ID NO: 4840992 - DNA, 25 bp, Homo sapien
gaataaaatacctagctcagctaca

SEQ ID NO: 4840993 - DNA, 25 bp, Homo sapien
tatagatgttgagggttctgaatcc

SEQ ID NO: 4840994 - DNA, 25 bp, Homo sapien
caaaagatttgacaacgtggcataa

SEQ ID NO: 4840995 - DNA, 25 bp, Homo sapien
tctggagtacgagacaggatgtgtt

SEQ ID NO: 4840996 - DNA, 25 bp, Homo sapien
tctgtacagcagatatgagtggagg

SEQ ID NO: 4840997 - DNA, 25 bp, Homo sapien
taaagtcaacgtgtcttgccccgtg

SEQ ID NO: 4840998 - DNA, 25 bp, Homo sapien
gggcacctgaggaataactgcttat

SEQ ID NO: 4840999 - DNA, 25 bp, Homo sapien
tctgttggaagagcaggtaatcact

SEQ ID NO: 4841000 - DNA, 25 bp, Homo sapien
tgtcgttatccggaagaataggtct

SEQ ID NO: 4841001 - DNA, 25 bp, Homo sapien
gtctctggttgagttctgaaatttc

SEQ ID NO: 4841002 - DNA, 25 bp, Homo sapien
tccggaagaataggtctctggttga

SEQ ID NO: 4841003 - DNA, 25 bp, Homo sapien
ttctccatcaatgtcgttatccgga

SEQ ID NO: 4841004 - DNA, 25 bp, Homo sapien
ccttttcgctgtgtctactgtgaga

SEQ ID NO: 4841005 - DNA, 25 bp, Homo sapien
gaggaatccaaagagtaaagaacca

SEQ ID NO: 4841006 - DNA, 25 bp, Homo sapien
aagggatacccagtaattgcgaaag

SEQ ID NO: 4841007 - DNA, 25 bp, Homo sapien
cgaaaggccctagaggaaccctgtg

SEQ ID NO: 4841008 - DNA, 25 bp, Homo sapien
ttaatgtgtcctgccactagatggc

SEQ ID NO: 4841009 - DNA, 25 bp, Homo sapien
tccttactagagtggtctgcatgaa

SEQ ID NO: 4841010 - DNA, 25 bp, Homo sapien
cacactagggctttcacggtagcat

SEQ ID NO: 4841011 - DNA, 25 bp, Homo sapien
tgattgggtcgaaacactgggacaa

SEQ ID NO: 4841012 - DNA, 25 bp, Homo sapien
gaagcagaaatgcacagcgaagagg

SEQ ID NO: 4841013 - DNA, 25 bp, Homo sapien
caaggagcctccctttactactcgg

SEQ ID NO: 4841014 - DNA, 25 bp, Homo sapien
gcgtggaaccctcgcgcttcaactt

SEQ ID NO: 4841015 - DNA, 25 bp, Homo sapien
agttaggtcgcgagcgcttccgcgc

SEQ ID NO: 4841016 - DNA, 25 bp, Homo sapien
gccgccgtggcgctaactccccatc

SEQ ID NO: 4841017 - DNA, 25 bp, Homo sapien
tgggcgggcccggcacccctggctg

SEQ ID NO: 4841018 - DNA, 25 bp, Homo sapien
gtggcgctaactccccatcccgcag

SEQ ID NO: 4841019 - DNA, 25 bp, Homo sapien
tgccgccgccgtggcgctaactccc

SEQ ID NO: 4841020 - DNA, 25 bp, Homo sapien
gggtgatgaacaccaccgggatcca

SEQ ID NO: 4841021 - DNA, 25 bp, Homo sapien
aacaccaccgggatccagtacagca

SEQ ID NO: 4841022 - DNA, 25 bp, Homo sapien
caggagggtgatgaacaccaccggg

SEQ ID NO: 4841023 - DNA, 25 bp, Homo sapien
tgatgaacaccaccgggatccagta

SEQ ID NO: 4841024 - DNA, 25 bp, Homo sapien
tgcacagctggatggcgtaggcgta

SEQ ID NO: 4841025 - DNA, 25 bp, Homo sapien
ctggatggcgtaggcgtagtaggac

SEQ ID NO: 4841026 - DNA, 25 bp, Homo sapien
cagctggatggcgtaggcgtagtag

SEQ ID NO: 4841027 - DNA, 25 bp, Homo sapien
ctatgcacagctggatggcgtaggc

SEQ ID NO: 4841028 - DNA, 25 bp, Homo sapien
attgacgccaaccagcaagggatcc

SEQ ID NO: 4841029 - DNA, 25 bp, Homo sapien
gtgcattgacgccaaccagcaaggg

SEQ ID NO: 4841030 - DNA, 25 bp, Homo sapien
ttaacaagtgcattgacgccaacca

SEQ ID NO: 4841031 - DNA, 25 bp, Homo sapien
tctagggggtgtggccgaggcggcg

SEQ ID NO: 4841032 - DNA, 25 bp, Homo sapien
aattcagaactacatgactgcgcaa

SEQ ID NO: 4841033 - DNA, 25 bp, Homo sapien
catgatcgtttaaaatgacgtaact

SEQ ID NO: 4841034 - DNA, 25 bp, Homo sapien
tgaaaattcatgatcgtttaaaatg

SEQ ID NO: 4841035 - DNA, 25 bp, Homo sapien
catcataaacgtcccatagcacctg

SEQ ID NO: 4841036 - DNA, 25 bp, Homo sapien
agtgttctgtggtgaccggctgcca

SEQ ID NO: 4841037 - DNA, 25 bp, Homo sapien
gctctttccaaaggctgttcctcag

SEQ ID NO: 4841038 - DNA, 25 bp, Homo sapien
agcagtggtggttccagtgttctgt

SEQ ID NO: 4841039 - DNA, 25 bp, Homo sapien
ctgttcctcaggtgcaacgtcagct

SEQ ID NO: 4841040 - DNA, 25 bp, Homo sapien
tgtatccagtgccaagtctttaaat

SEQ ID NO: 4841041 - DNA, 25 bp, Homo sapien
catgtggcaatgttgattcctccct

SEQ ID NO: 4841042 - DNA, 25 bp, Homo sapien
cttgatgggccagtacatgtggcaa

SEQ ID NO: 4841043 - DNA, 25 bp, Homo sapien
ttcattgggcgctccttctcagtct

SEQ ID NO: 4841044 - DNA, 25 bp, Homo sapien
tcccacccactcctctttatcagtt

SEQ ID NO: 4841045 - DNA, 25 bp, Homo sapien
atgtattcacgatgcattcacggca

SEQ ID NO: 4841046 - DNA, 25 bp, Homo sapien
tattcacgatgcattcacggcatac

SEQ ID NO: 4841047 - DNA, 25 bp, Homo sapien
ttcacgatgcattcacggcatactt

SEQ ID NO: 4841048 - DNA, 25 bp, Homo sapien
ccttcagtattgggtcactgagaag

SEQ ID NO: 4841049 - DNA, 25 bp, Homo sapien
cttcagtattgggtcactgagaagc

SEQ ID NO: 4841050 - DNA, 25 bp, Homo sapien
gcacgtggatgtagagccgatctct

SEQ ID NO: 4841051 - DNA, 25 bp, Homo sapien
gaagaggctcctagtgccagcaagt

SEQ ID NO: 4841052 - DNA, 25 bp, Homo sapien
gatatagttcgccacagtagctgat

SEQ ID NO: 4841053 - DNA, 25 bp, Homo sapien
tgcagacactgacattaagagagac

SEQ ID NO: 4841054 - DNA, 25 bp, Homo sapien
tcaaagaacgatggaaaatggccca

SEQ ID NO: 4841055 - DNA, 25 bp, Homo sapien
ttgatcacggcactcagctgagcgg

SEQ ID NO: 4841056 - DNA, 25 bp, Homo sapien
tatgccaacgccctatggagtctga

SEQ ID NO: 4841057 - DNA, 25 bp, Homo sapien
taagggaagcctactgagtgcaaca

SEQ ID NO: 4841058 - DNA, 25 bp, Homo sapien
cttgttcgccagtgttttccatgga

SEQ ID NO: 4841059 - DNA, 25 bp, Homo sapien
tgttcgccagtgttttccatggaca

SEQ ID NO: 4841060 - DNA, 25 bp, Homo sapien
ttgttcgccagtgttttccatggac

SEQ ID NO: 4841061 - DNA, 25 bp, Homo sapien
tatgaccagacaaacattgcaaaaa

SEQ ID NO: 4841062 - DNA, 25 bp, Homo sapien
agttttccagtatgaccagacaaac

SEQ ID NO: 4841063 - DNA, 25 bp, Homo sapien
gaaggattcattggtaatgtaaaga

SEQ ID NO: 4841064 - DNA, 25 bp, Homo sapien
aagtagatgataggccatcaggcac

SEQ ID NO: 4841065 - DNA, 25 bp, Homo sapien
tgagatcacactgctaacagatgag

SEQ ID NO: 4841066 - DNA, 25 bp, Homo sapien
caagcgagaggtctctaacagctga

SEQ ID NO: 4841067 - DNA, 25 bp, Homo sapien
tgatcaattaaaagaatagcccaag

SEQ ID NO: 4841068 - DNA, 25 bp, Homo sapien
gttcttaaccaccagacaagggctc

SEQ ID NO: 4841069 - DNA, 25 bp, Homo sapien
ggctgctcgcctaagaacttcctga

SEQ ID NO: 4841070 - DNA, 25 bp, Homo sapien
gatgggaagatccttggctgctcgc

SEQ ID NO: 4841071 - DNA, 25 bp, Homo sapien
tccagacatggtcctggtatagatg

SEQ ID NO: 4841072 - DNA, 25 bp, Homo sapien
cctggtatagatgggaagatccttg

SEQ ID NO: 4841073 - DNA, 25 bp, Homo sapien
agcagtgatggcagcgatctggttt

SEQ ID NO: 4841074 - DNA, 25 bp, Homo sapien
ttatcacagacggagcagtgatggc

SEQ ID NO: 4841075 - DNA, 25 bp, Homo sapien
tctggttttataagttggcatctgt

SEQ ID NO: 4841076 - DNA, 25 bp, Homo sapien
tggcatctgtcacagtatcggatgg

SEQ ID NO: 4841077 - DNA, 25 bp, Homo sapien
tggacaatgatgatccatcttcaaa

SEQ ID NO: 4841078 - DNA, 25 bp, Homo sapien
catggacaatgatgatccatcttca

SEQ ID NO: 4841079 - DNA, 25 bp, Homo sapien
gacaatgatgatccatcttcaaaat

SEQ ID NO: 4841080 - DNA, 25 bp, Homo sapien
ggacaatgatgatccatcttcaaaa

SEQ ID NO: 4841081 - DNA, 25 bp, Homo sapien
tatacctactgtggacctgtgggca

SEQ ID NO: 4841082 - DNA, 25 bp, Homo sapien
gaagaataagcattactcacgccca

SEQ ID NO: 4841083 - DNA, 25 bp, Homo sapien
catgactgtcagagatatgcctaca

SEQ ID NO: 4841084 - DNA, 25 bp, Homo sapien
tgtatgggttgactagcctgaacgc

SEQ ID NO: 4841085 - DNA, 25 bp, Homo sapien
tgtaaatctgttgccgcaataaaaa

SEQ ID NO: 4841086 - DNA, 25 bp, Homo sapien
ttgataaaatactgtaaatctgttg

SEQ ID NO: 4841087 - DNA, 25 bp, Homo sapien
tgaaaatccaacacaattgttcacc

SEQ ID NO: 4841088 - DNA, 25 bp, Homo sapien
gtaaatctgttgccgcaataaaaag

SEQ ID NO: 4841089 - DNA, 25 bp, Homo sapien
gaaaatgaaggctaactggcacaat

SEQ ID NO: 4841090 - DNA, 25 bp, Homo sapien
gcaccacagaaaagatcaacaccag

SEQ ID NO: 4841091 - DNA, 25 bp, Homo sapien
aatgttaatatccatgggctgaaac

SEQ ID NO: 4841092 - DNA, 25 bp, Homo sapien
ggcacaatttggctactatccttat

SEQ ID NO: 4841093 - DNA, 25 bp, Homo sapien
aacataatatggaacttggcttgag

SEQ ID NO: 4841094 - DNA, 25 bp, Homo sapien
gctgacagaaaacatagctgcagca

SEQ ID NO: 4841095 - DNA, 25 bp, Homo sapien
tatttttgctgactagccaacaatg

SEQ ID NO: 4841096 - DNA, 25 bp, Homo sapien
gccaacaatgatagccaaacagaga

SEQ ID NO: 4841097 - DNA, 25 bp, Homo sapien
tatctgttccatgtcgaaatactgg

SEQ ID NO: 4841098 - DNA, 25 bp, Homo sapien
aaatgggtagcaaccagtacttctt

SEQ ID NO: 4841099 - DNA, 25 bp, Homo sapien
tcatcaccaaaaacttgtcgcatgt

SEQ ID NO: 4841100 - DNA, 25 bp, Homo sapien
tgtcgcatgtttttactgaaaccca

SEQ ID NO: 4841101 - DNA, 25 bp, Homo sapien
acaaggcaagttggaaaggagcagc

SEQ ID NO: 4841102 - DNA, 25 bp, Homo sapien
taacaaggcaagttggaaaggagca

SEQ ID NO: 4841103 - DNA, 25 bp, Homo sapien
aggatcctggttaacaaggcaagtt

SEQ ID NO: 4841104 - DNA, 25 bp, Homo sapien
agccctgcaggagtagatgcttgtt

SEQ ID NO: 4841105 - DNA, 25 bp, Homo sapien
gggatcctggtttagggactctgaa

SEQ ID NO: 4841106 - DNA, 25 bp, Homo sapien
tacagaagactaaccagatcctggg

SEQ ID NO: 4841107 - DNA, 25 bp, Homo sapien
gaaaacagcatatctccacacaggt

SEQ ID NO: 4841108 - DNA, 25 bp, Homo sapien
taacaggactctagcaaagggcaag

SEQ ID NO: 4841109 - DNA, 25 bp, Homo sapien
cgtccaagactgagaatcagtaaga

SEQ ID NO: 4841110 - DNA, 25 bp, Homo sapien
aatcagtaagaaggtggctctggga

SEQ ID NO: 4841111 - DNA, 25 bp, Homo sapien
atgctgctctccgtccaagactgag

SEQ ID NO: 4841112 - DNA, 25 bp, Homo sapien
atcagtaagaaggtggctctgggac

SEQ ID NO: 4841113 - DNA, 25 bp, Homo sapien
cattacactttaaaacgttgactgg

SEQ ID NO: 4841114 - DNA, 25 bp, Homo sapien
tcattacactttaaaacgttgactg

SEQ ID NO: 4841115 - DNA, 25 bp, Homo sapien
acaaataggcagaaacttcttattc

SEQ ID NO: 4841116 - DNA, 25 bp, Homo sapien
gaaacttcttattcatctatgaata

SEQ ID NO: 4841117 - DNA, 25 bp, Homo sapien
tctatgaataaggaatcccttggta

SEQ ID NO: 4841118 - DNA, 25 bp, Homo sapien
cttaatgaaagcacataagttagca

SEQ ID NO: 4841119 - DNA, 25 bp, Homo sapien
cattttccatggttaatgcaggatt

SEQ ID NO: 4841120 - DNA, 25 bp, Homo sapien
catggttaatgcaggattgctcata

SEQ ID NO: 4841121 - DNA, 25 bp, Homo sapien
tccatggttaatgcaggattgctca

SEQ ID NO: 4841122 - DNA, 25 bp, Homo sapien
ttttccatggttaatgcaggattgc

SEQ ID NO: 4841123 - DNA, 25 bp, Homo sapien
aaagtatgaatttatcttgcttgaa

SEQ ID NO: 4841124 - DNA, 25 bp, Homo sapien
ataaagtatgaatttatcttgcttg

SEQ ID NO: 4841125 - DNA, 25 bp, Homo sapien
gtatgaatttatcttgcttgaagag

SEQ ID NO: 4841126 - DNA, 25 bp, Homo sapien
tttataaagtatgaatttatcttgc

SEQ ID NO: 4841127 - DNA, 25 bp, Homo sapien
tataaggccctactatgacccaaaa

SEQ ID NO: 4841128 - DNA, 25 bp, Homo sapien
catggctaatgcaatctcacaagtc

SEQ ID NO: 4841129 - DNA, 25 bp, Homo sapien
tattgcacttcgacttagagtttcc

SEQ ID NO: 4841130 - DNA, 25 bp, Homo sapien
ggattgatccctaccacttaatgca

SEQ ID NO: 4841131 - DNA, 25 bp, Homo sapien
tttaggcacattataaccatctgga

SEQ ID NO: 4841132 - DNA, 25 bp, Homo sapien
tagtactaactatgggtttaggcac

SEQ ID NO: 4841133 - DNA, 25 bp, Homo sapien
tctatagcgctgattcatgctgcca

SEQ ID NO: 4841134 - DNA, 25 bp, Homo sapien
caaaacatgttactgcaactggttg

SEQ ID NO: 4841135 - DNA, 25 bp, Homo sapien
aaaactgtttactatgctagcaggc

SEQ ID NO: 4841136 - DNA, 25 bp, Homo sapien
caggctcagtagacgtgctcttgaa

SEQ ID NO: 4841137 - DNA, 25 bp, Homo sapien
cttcaatgtgagtggcagggttcta

SEQ ID NO: 4841138 - DNA, 25 bp, Homo sapien
tgttagttctgcattcatctgaggc

SEQ ID NO: 4841139 - DNA, 25 bp, Homo sapien
ggagagaactaatcaattcatattc

SEQ ID NO: 4841140 - DNA, 25 bp, Homo sapien
caaagggacataggcacaactgact

SEQ ID NO: 4841141 - DNA, 25 bp, Homo sapien
ttccatccatctacagcattgatac

SEQ ID NO: 4841142 - DNA, 25 bp, Homo sapien
acaatgtgtgtattggatccaaaac

SEQ ID NO: 4841143 - DNA, 25 bp, Homo sapien
gagagctcaagcttcaatgtccaca

SEQ ID NO: 4841144 - DNA, 25 bp, Homo sapien
tactgaagctgaacattctggcatc

SEQ ID NO: 4841145 - DNA, 25 bp, Homo sapien
tagctataggttccggtctggcact

SEQ ID NO: 4841146 - DNA, 25 bp, Homo sapien
cctagcttccagtttgacaagaggg

SEQ ID NO: 4841147 - DNA, 25 bp, Homo sapien
attcatggatatgaacttcattgaa

SEQ ID NO: 4841148 - DNA, 25 bp, Homo sapien
gtgaattcatggatatgaacttcat

SEQ ID NO: 4841149 - DNA, 25 bp, Homo sapien
gaattcatggatatgaacttcattg

SEQ ID NO: 4841150 - DNA, 25 bp, Homo sapien
tagggtatattaggagtgaattcat

SEQ ID NO: 4841151 - DNA, 25 bp, Homo sapien
gatcagaatctgtagtctaggtgtg

SEQ ID NO: 4841152 - DNA, 25 bp, Homo sapien
gacctatgttatggccacattgaag

SEQ ID NO: 4841153 - DNA, 25 bp, Homo sapien
atttcagaatcagccgagcccgttt

SEQ ID NO: 4841154 - DNA, 25 bp, Homo sapien
gaatcacatgattgcgtgcctaatt

SEQ ID NO: 4841155 - DNA, 25 bp, Homo sapien
tgagctattagatacctggactgca

SEQ ID NO: 4841156 - DNA, 25 bp, Homo sapien
ggaactagccataaaccagggctta

SEQ ID NO: 4841157 - DNA, 25 bp, Homo sapien
ccttccccggaagatgcaacataaa

SEQ ID NO: 4841158 - DNA, 25 bp, Homo sapien
tgtttacaagccagggcactactac

SEQ ID NO: 4841159 - DNA, 25 bp, Homo sapien
tagaaacgtaggactgtacacatcc

SEQ ID NO: 4841160 - DNA, 25 bp, Homo sapien
ggagttcctttagcttcagactatc

SEQ ID NO: 4841161 - DNA, 25 bp, Homo sapien
gccatagtctgtaggtgaatgaaca

SEQ ID NO: 4841162 - DNA, 25 bp, Homo sapien
tacatcttactagccatgtcatagg

SEQ ID NO: 4841163 - DNA, 25 bp, Homo sapien
cacacaggcgttcaatggcttagca

SEQ ID NO: 4841164 - DNA, 25 bp, Homo sapien
gggctctgggctgacattgaaattt

SEQ ID NO: 4841165 - DNA, 25 bp, Homo sapien
tgctatgagaagtcaaaacagcgct

SEQ ID NO: 4841166 - DNA, 25 bp, Homo sapien
aaacagcgctgtattgccaaatcca

SEQ ID NO: 4841167 - DNA, 25 bp, Homo sapien
caagtagcctatttgttagccaagc

SEQ ID NO: 4841168 - DNA, 25 bp, Homo sapien
ttggacacaacatcaaatgacactg

SEQ ID NO: 4841169 - DNA, 25 bp, Homo sapien
cccaactggtgggaaagcaacagtc

SEQ ID NO: 4841170 - DNA, 25 bp, Homo sapien
catcgtgcttgaagatagtaaccaa

SEQ ID NO: 4841171 - DNA, 25 bp, Homo sapien
ttcatgccctgtatctcagaacaag

SEQ ID NO: 4841172 - DNA, 25 bp, Homo sapien
tggaatgccctgtgtattgctagat

SEQ ID NO: 4841173 - DNA, 25 bp, Homo sapien
tcttgtttcacattgccgcttggca

SEQ ID NO: 4841174 - DNA, 25 bp, Homo sapien
gaatcatggtgatgcagatattacc

SEQ ID NO: 4841175 - DNA, 25 bp, Homo sapien
ggttgtcaaactatggcccgtagcc

SEQ ID NO: 4841176 - DNA, 25 bp, Homo sapien
gtgtggcccatgaactgaaaatggc

SEQ ID NO: 4841177 - DNA, 25 bp, Homo sapien
taaatctactagagcaagggttgtc

SEQ ID NO: 4841178 - DNA, 25 bp, Homo sapien
aacctcattgtaggttgagcaaccg

SEQ ID NO: 4841179 - DNA, 25 bp, Homo sapien
tcaaaccagctttacacccttcagg

SEQ ID NO: 4841180 - DNA, 25 bp, Homo sapien
cagaatatgtgaccagaccagagca

SEQ ID NO: 4841181 - DNA, 25 bp, Homo sapien
taactctaccccgaaatgatggact

SEQ ID NO: 4841182 - DNA, 25 bp, Homo sapien
gagactgtgaaatacttagccatgc

SEQ ID NO: 4841183 - DNA, 25 bp, Homo sapien
tacttgttagcaagcgtgtgtgaca

SEQ ID NO: 4841184 - DNA, 25 bp, Homo sapien
gggaatgcatatgaagaggaagcca

SEQ ID NO: 4841185 - DNA, 25 bp, Homo sapien
taagtatgaccgttcctatctcaga

SEQ ID NO: 4841186 - DNA, 25 bp, Homo sapien
ggttgaatccctcgaacaatagaca

SEQ ID NO: 4841187 - DNA, 25 bp, Homo sapien
ttgatgatgccaaatattgtggtca

SEQ ID NO: 4841188 - DNA, 25 bp, Homo sapien
tgtatggccttggttctggttcatc

SEQ ID NO: 4841189 - DNA, 25 bp, Homo sapien
catattgatgatgccaaatattgtg

SEQ ID NO: 4841190 - DNA, 25 bp, Homo sapien
tattgtggtcatttgtatggccttg

SEQ ID NO: 4841191 - DNA, 25 bp, Homo sapien
taactaaaggtggatttctggcact

SEQ ID NO: 4841192 - DNA, 25 bp, Homo sapien
tactgtccatgactttatggtttga

SEQ ID NO: 4841193 - DNA, 25 bp, Homo sapien
tgatcatttatagccagctcagcct

SEQ ID NO: 4841194 - DNA, 25 bp, Homo sapien
gctcagccttgcatacagatttaag

SEQ ID NO: 4841195 - DNA, 25 bp, Homo sapien
ttagagctggaacggataggaccac

SEQ ID NO: 4841196 - DNA, 25 bp, Homo sapien
gattttgggcaacaagtacctacta

SEQ ID NO: 4841197 - DNA, 25 bp, Homo sapien
cattggtgctcctcctacaaggcaa

SEQ ID NO: 4841198 - DNA, 25 bp, Homo sapien
cacattactagtgggagaactccag

SEQ ID NO: 4841199 - DNA, 25 bp, Homo sapien
tgataaagttcttaatactgtaaga

SEQ ID NO: 4841200 - DNA, 25 bp, Homo sapien
tactgtaagatgacgacattttctc

SEQ ID NO: 4841201 - DNA, 25 bp, Homo sapien
agatgacgacattttctcatagttc

SEQ ID NO: 4841202 - DNA, 25 bp, Homo sapien
tcttaatactgtaagatgacgacat

SEQ ID NO: 4841203 - DNA, 25 bp, Homo sapien
ccagttctcttgctacctttgctaa

SEQ ID NO: 4841204 - DNA, 25 bp, Homo sapien
ctgtgggcagcttgatactcttctt

SEQ ID NO: 4841205 - DNA, 25 bp, Homo sapien
gcattacttttgtctaccgaatgcc

SEQ ID NO: 4841206 - DNA, 25 bp, Homo sapien
tatgaccaccttatgtaaaagtggg

SEQ ID NO: 4841207 - DNA, 25 bp, Homo sapien
ttgtgccctcactatgccagcggca

SEQ ID NO: 4841208 - DNA, 25 bp, Homo sapien
tgccagcggcaactgtagatcatag

SEQ ID NO: 4841209 - DNA, 25 bp, Homo sapien
aatttgtgaagtttgggcttgcaac

SEQ ID NO: 4841210 - DNA, 25 bp, Homo sapien
gcttggcatctagactcccttgtgc

SEQ ID NO: 4841211 - DNA, 25 bp, Homo sapien
ttttccgttctgcaactgcgaacat

SEQ ID NO: 4841212 - DNA, 25 bp, Homo sapien
aatatgctctaagttttagacgttc

SEQ ID NO: 4841213 - DNA, 25 bp, Homo sapien
tctaagttttagacgttctattgtg

SEQ ID NO: 4841214 - DNA, 25 bp, Homo sapien
ttgtgttctttttccgttctgcaac

SEQ ID NO: 4841215 - DNA, 25 bp, Homo sapien
tgttatcagcaccttcgcactggcg

SEQ ID NO: 4841216 - DNA, 25 bp, Homo sapien
tcgtattgtttcacgcggcagtgct

SEQ ID NO: 4841217 - DNA, 25 bp, Homo sapien
cagtgtagctccagtcagtgttatc

SEQ ID NO: 4841218 - DNA, 25 bp, Homo sapien
tatctatggcttgaatacctcggtg

SEQ ID NO: 4841219 - DNA, 25 bp, Homo sapien
gagagggtgcgcgatggcgccagct

SEQ ID NO: 4841220 - DNA, 25 bp, Homo sapien
gcgcgtagtgatgacgcaaaggctt

SEQ ID NO: 4841221 - DNA, 25 bp, Homo sapien
ggttggcgcgtagtgatgacgcaaa

SEQ ID NO: 4841222 - DNA, 25 bp, Homo sapien
tagtgatgacgcaaaggctttgtac

SEQ ID NO: 4841223 - DNA, 25 bp, Homo sapien
tctgcgtgtcgcgtcatcatctagc

SEQ ID NO: 4841224 - DNA, 25 bp, Homo sapien
cgtgcgaaaagcgacggcgcagcac

SEQ ID NO: 4841225 - DNA, 25 bp, Homo sapien
ccccgtcaggacgtgcgaaaagcga

SEQ ID NO: 4841226 - DNA, 25 bp, Homo sapien
cctttcccttcgctgggcgagaggt

SEQ ID NO: 4841227 - DNA, 25 bp, Homo sapien
agacgcccaaaccggccagccaggg

SEQ ID NO: 4841228 - DNA, 25 bp, Homo sapien
cggcccagacgcccaaaccggccag

SEQ ID NO: 4841229 - DNA, 25 bp, Homo sapien
tggagagggaaacttgcggcccgga

SEQ ID NO: 4841230 - DNA, 25 bp, Homo sapien
acgcccaaaccggccagccagggag

SEQ ID NO: 4841231 - DNA, 25 bp, Homo sapien
ccggcggttctccagcgacagagga

SEQ ID NO: 4841232 - DNA, 25 bp, Homo sapien
ccaagcgctggggaccgcgtcttct

SEQ ID NO: 4841233 - DNA, 25 bp, Homo sapien
ggtgggacgtccgtggcccaagcgc

SEQ ID NO: 4841234 - DNA, 25 bp, Homo sapien
tgcttctcccagtggctcggcccgg

SEQ ID NO: 4841235 - DNA, 25 bp, Homo sapien
ttccggagggactcgatcaggcgct

SEQ ID NO: 4841236 - DNA, 25 bp, Homo sapien
gggactcgatcaggcgctgcttctg

SEQ ID NO: 4841237 - DNA, 25 bp, Homo sapien
gaggaggaggcgctcttggtcaggg

SEQ ID NO: 4841238 - DNA, 25 bp, Homo sapien
ctggagtgtgagttccggagggact

SEQ ID NO: 4841239 - DNA, 25 bp, Homo sapien
cggtggagaggcagcgaccagtcac

SEQ ID NO: 4841240 - DNA, 25 bp, Homo sapien
ttcctccggtggagaggcagcgacc

SEQ ID NO: 4841241 - DNA, 25 bp, Homo sapien
tcctccggtggagaggcagcgacca

SEQ ID NO: 4841242 - DNA, 25 bp, Homo sapien
ctccggtggagaggcagcgaccagt

SEQ ID NO: 4841243 - DNA, 25 bp, Homo sapien
caaagggaaagatcagtggcgaagc

SEQ ID NO: 4841244 - DNA, 25 bp, Homo sapien
taacaattctgctgacgcggcaatc

SEQ ID NO: 4841245 - DNA, 25 bp, Homo sapien
tgagaaatgtacatgcactggtcgc

SEQ ID NO: 4841246 - DNA, 25 bp, Homo sapien
ccaacagggtaaatcttagagactc

SEQ ID NO: 4841247 - DNA, 25 bp, Homo sapien
gagcaggagcagctatacttacagc

SEQ ID NO: 4841248 - DNA, 25 bp, Homo sapien
taaaaagacacacgtagactgaaag

SEQ ID NO: 4841249 - DNA, 25 bp, Homo sapien
gacccaagaatatgttgcctacaag

SEQ ID NO: 4841250 - DNA, 25 bp, Homo sapien
taaacctcatgaaaaccacagtgca

SEQ ID NO: 4841251 - DNA, 25 bp, Homo sapien
taaccatatctttatactgacagtg

SEQ ID NO: 4841252 - DNA, 25 bp, Homo sapien
tggctgcataatgttgtagtatatg

SEQ ID NO: 4841253 - DNA, 25 bp, Homo sapien
gcagcttttattcttacaaaccaca

SEQ ID NO: 4841254 - DNA, 25 bp, Homo sapien
tggtcatactattatttaagctatt

SEQ ID NO: 4841255 - DNA, 25 bp, Homo sapien
gtcaggttgtttatggtgaatggca

SEQ ID NO: 4841256 - DNA, 25 bp, Homo sapien
tattaatgttaattgtcaggttgtt

SEQ ID NO: 4841257 - DNA, 25 bp, Homo sapien
taattgtcaggttgtttatggtgaa

SEQ ID NO: 4841258 - DNA, 25 bp, Homo sapien
aatgttaattgtcaggttgtttatg

SEQ ID NO: 4841259 - DNA, 25 bp, Homo sapien
cattaagtgatgtcgtattggtgga

SEQ ID NO: 4841260 - DNA, 25 bp, Homo sapien
ttatccattaagtgatgtcgtattg

SEQ ID NO: 4841261 - DNA, 25 bp, Homo sapien
tccattaagtgatgtcgtattggtg

SEQ ID NO: 4841262 - DNA, 25 bp, Homo sapien
ttgtttatccattaagtgatgtcgt

SEQ ID NO: 4841263 - DNA, 25 bp, Homo sapien
caatcaaccatatcatattgtaaga

SEQ ID NO: 4841264 - DNA, 25 bp, Homo sapien
caaaggtaaatactagagtatatgg

SEQ ID NO: 4841265 - DNA, 25 bp, Homo sapien
gaagttataatctttcacaatcaac

SEQ ID NO: 4841266 - DNA, 25 bp, Homo sapien
tacacctattatattaccctgaaat

SEQ ID NO: 4841267 - DNA, 25 bp, Homo sapien
gctaaaactggaggattcttccaaa

SEQ ID NO: 4841268 - DNA, 25 bp, Homo sapien
aactggaggattcttccaaaactca

SEQ ID NO: 4841269 - DNA, 25 bp, Homo sapien
gtaggagctaaaactggaggattct

SEQ ID NO: 4841270 - DNA, 25 bp, Homo sapien
ggagctaaaactggaggattcttcc

SEQ ID NO: 4841271 - DNA, 25 bp, Homo sapien
tagtgaattggatgatctagctaag

SEQ ID NO: 4841272 - DNA, 25 bp, Homo sapien
cagtgcggatggtgccacctgattt

SEQ ID NO: 4841273 - DNA, 25 bp, Homo sapien
ctagtgaattggatgatctagctaa

SEQ ID NO: 4841274 - DNA, 25 bp, Homo sapien
tgcggatggtgccacctgatttcta

SEQ ID NO: 4841275 - DNA, 25 bp, Homo sapien
ctgagaagcataaggagacatccca

SEQ ID NO: 4841276 - DNA, 25 bp, Homo sapien
gagacatcccacttgggttactgta

SEQ ID NO: 4841277 - DNA, 25 bp, Homo sapien
gcataaggagacatcccacttgggt

SEQ ID NO: 4841278 - DNA, 25 bp, Homo sapien
catcccacttgggttactgtataga

SEQ ID NO: 4841279 - DNA, 25 bp, Homo sapien
taaagaagtgatactcctgtttgct

SEQ ID NO: 4841280 - DNA, 25 bp, Homo sapien
gaagcatccactgtgggaatgggta

SEQ ID NO: 4841281 - DNA, 25 bp, Homo sapien
gataaagaagtgatactcctgtttg

SEQ ID NO: 4841282 - DNA, 25 bp, Homo sapien
tccactgtgggaatgggtaatggca

SEQ ID NO: 4841283 - DNA, 25 bp, Homo sapien
ttagttctgagagttctggaaatgc

SEQ ID NO: 4841284 - DNA, 25 bp, Homo sapien
tgagagttctggaaatgcatcaggg

SEQ ID NO: 4841285 - DNA, 25 bp, Homo sapien
ggaaatgcatcagggacatctggca

SEQ ID NO: 4841286 - DNA, 25 bp, Homo sapien
tctggaaatgcatcagggacatctg

SEQ ID NO: 4841287 - DNA, 25 bp, Homo sapien
gtcaacttaactcaggtaaagaaca

SEQ ID NO: 4841288 - DNA, 25 bp, Homo sapien
tatgaaactaaggagcttattcagc

SEQ ID NO: 4841289 - DNA, 25 bp, Homo sapien
gggaaacagagctgaaaagaggcca

SEQ ID NO: 4841290 - DNA, 25 bp, Homo sapien
cactagtactatagtaaattcagac

SEQ ID NO: 4841291 - DNA, 25 bp, Homo sapien
gaaactgttctagtaatacctcctc

SEQ ID NO: 4841292 - DNA, 25 bp, Homo sapien
cagaaactgttctagtaatacctcc

SEQ ID NO: 4841293 - DNA, 25 bp, Homo sapien
actgttctagtaatacctcctcttg

SEQ ID NO: 4841294 - DNA, 25 bp, Homo sapien
ttctagtaatacctcctcttgttca

SEQ ID NO: 4841295 - DNA, 25 bp, Homo sapien
ggcttccaagctgggctccaaaagg

SEQ ID NO: 4841296 - DNA, 25 bp, Homo sapien
aacagtttgtcttttggcttccaag

SEQ ID NO: 4841297 - DNA, 25 bp, Homo sapien
tggcttccaagctgggctccaaaag

SEQ ID NO: 4841298 - DNA, 25 bp, Homo sapien
agtttgtcttttggcttccaagctg

SEQ ID NO: 4841299 - DNA, 25 bp, Homo sapien
gtaaatttcttcaaaattatcacta

SEQ ID NO: 4841300 - DNA, 25 bp, Homo sapien
aatttcttcaaaattatcactaact

SEQ ID NO: 4841301 - DNA, 25 bp, Homo sapien
ttcttcaaaattatcactaactcac

SEQ ID NO: 4841302 - DNA, 25 bp, Homo sapien
tatgtaaatttcttcaaaattatca

SEQ ID NO: 4841303 - DNA, 25 bp, Homo sapien
tgcatcttcttttcgaaagtggact

SEQ ID NO: 4841304 - DNA, 25 bp, Homo sapien
catcttcttttcgaaagtggacttc

SEQ ID NO: 4841305 - DNA, 25 bp, Homo sapien
tcttcttttcgaaagtggacttcat

SEQ ID NO: 4841306 - DNA, 25 bp, Homo sapien
ttgcatcttcttttcgaaagtggac

SEQ ID NO: 4841307 - DNA, 25 bp, Homo sapien
cagcagtgatcatgaggcattactc

SEQ ID NO: 4841308 - DNA, 25 bp, Homo sapien
tgcagtagtaattgctggagcaaac

SEQ ID NO: 4841309 - DNA, 25 bp, Homo sapien
tcctgactacccatctgaaaaataa

SEQ ID NO: 4841310 - DNA, 25 bp, Homo sapien
tggtcttgcagtactcaaaacctcc

SEQ ID NO: 4841311 - DNA, 25 bp, Homo sapien
gttttatggtttccgctgaagcagt

SEQ ID NO: 4841312 - DNA, 25 bp, Homo sapien
ctgtgtattgtatgatacaatgatc

SEQ ID NO: 4841313 - DNA, 25 bp, Homo sapien
aatcctagaagctagttgacgtttt

SEQ ID NO: 4841314 - DNA, 25 bp, Homo sapien
tgtatgatacaatgatctaaccttt

SEQ ID NO: 4841315 - DNA, 25 bp, Homo sapien
tgcaatattatcagattcttcctca

SEQ ID NO: 4841316 - DNA, 25 bp, Homo sapien
ttatccaatacttgtcctcaactga

SEQ ID NO: 4841317 - DNA, 25 bp, Homo sapien
ggacatcttagagcaatggcagttg

SEQ ID NO: 4841318 - DNA, 25 bp, Homo sapien
gaaatagccacacgtacaggccctc

SEQ ID NO: 4841319 - DNA, 25 bp, Homo sapien
taccagacaggaaatagccacacgt

SEQ ID NO: 4841320 - DNA, 25 bp, Homo sapien
tagagaaatagctaacacccagtgc

SEQ ID NO: 4841321 - DNA, 25 bp, Homo sapien
ccttggctcttctacagtggcaaat

SEQ ID NO: 4841322 - DNA, 25 bp, Homo sapien
ttccttggctcttctacagtggcaa

SEQ ID NO: 4841323 - DNA, 25 bp, Homo sapien
tccttggctcttctacagtggcaaa

SEQ ID NO: 4841324 - DNA, 25 bp, Homo sapien
tacaaagcattctatgttacatagc

SEQ ID NO: 4841325 - DNA, 25 bp, Homo sapien
caggcaccgttaacaacatgtctat

SEQ ID NO: 4841326 - DNA, 25 bp, Homo sapien
actgatgcaatcaccttgagactca

SEQ ID NO: 4841327 - DNA, 25 bp, Homo sapien
gcttaaggctgatgaacaggcaccg

SEQ ID NO: 4841328 - DNA, 25 bp, Homo sapien
tgataacggccatactgaccaaagt

SEQ ID NO: 4841329 - DNA, 25 bp, Homo sapien
tagattctatgctgttcccatcgag

SEQ ID NO: 4841330 - DNA, 25 bp, Homo sapien
gatgacccgattgtatatttaggaa

SEQ ID NO: 4841331 - DNA, 25 bp, Homo sapien
caagaaagagcccatatatccaaga

SEQ ID NO: 4841332 - DNA, 25 bp, Homo sapien
attcaacacagtactggaagttctg

SEQ ID NO: 4841333 - DNA, 25 bp, Homo sapien
aacacagtactggaagttctggcca

SEQ ID NO: 4841334 - DNA, 25 bp, Homo sapien
gcacaagacaactcctattcaacac

SEQ ID NO: 4841335 - DNA, 25 bp, Homo sapien
tcaacacagtactggaagttctggc

SEQ ID NO: 4841336 - DNA, 25 bp, Homo sapien
tcaacaaaaatgacgaccatgcaaa

SEQ ID NO: 4841337 - DNA, 25 bp, Homo sapien
cataaataaatgacctacctgatgg

SEQ ID NO: 4841338 - DNA, 25 bp, Homo sapien
cagactggcaaatgatacagagtca

SEQ ID NO: 4841339 - DNA, 25 bp, Homo sapien
gcaaacccaagacgtaattgtcaga

SEQ ID NO: 4841340 - DNA, 25 bp, Homo sapien
caaatggtcttgctcagcggatccc

SEQ ID NO: 4841341 - DNA, 25 bp, Homo sapien
gatcccacccctatggagtctagca

SEQ ID NO: 4841342 - DNA, 25 bp, Homo sapien
caattaagatttgcccacagtggct

SEQ ID NO: 4841343 - DNA, 25 bp, Homo sapien
caaagcctccgggaagtttggactg

SEQ ID NO: 4841344 - DNA, 25 bp, Homo sapien
ttctcaaagatcatagcaatcattc

SEQ ID NO: 4841345 - DNA, 25 bp, Homo sapien
taatcaaggtaagaggaacagcagt

SEQ ID NO: 4841346 - DNA, 25 bp, Homo sapien
ttctaatcggtacaaaatcagtctc

SEQ ID NO: 4841347 - DNA, 25 bp, Homo sapien
tagccactgatgaaatgccagtttg

SEQ ID NO: 4841348 - DNA, 25 bp, Homo sapien
gcaggtttggtgtttcctaacacta

SEQ ID NO: 4841349 - DNA, 25 bp, Homo sapien
caggtttggtgtttcctaacactat

SEQ ID NO: 4841350 - DNA, 25 bp, Homo sapien
ggtttggtgtttcctaacactatga

SEQ ID NO: 4841351 - DNA, 25 bp, Homo sapien
ttggtgtttcctaacactatgaata

SEQ ID NO: 4841352 - DNA, 25 bp, Homo sapien
tatctcagtccacgtgaatacctgc

SEQ ID NO: 4841353 - DNA, 25 bp, Homo sapien
tactatatgctggtgttgggaagac

SEQ ID NO: 4841354 - DNA, 25 bp, Homo sapien
gaagctttaacagcatgtccttagc

SEQ ID NO: 4841355 - DNA, 25 bp, Homo sapien
tagatggcaccttaccaagcctgag

SEQ ID NO: 4841356 - DNA, 25 bp, Homo sapien
gaaaattaagctctggtggccagtg

SEQ ID NO: 4841357 - DNA, 25 bp, Homo sapien
ggccagtgcagtataaggaaaggtt

SEQ ID NO: 4841358 - DNA, 25 bp, Homo sapien
ggttggcaaaagattgagactgttc

SEQ ID NO: 4841359 - DNA, 25 bp, Homo sapien
gactgttctatctcccattgctgta

SEQ ID NO: 4841360 - DNA, 25 bp, Homo sapien
gtggtatgctcctcccttgttatgg

SEQ ID NO: 4841361 - DNA, 25 bp, Homo sapien
cagattcttttcatcgtgggtgaca

SEQ ID NO: 4841362 - DNA, 25 bp, Homo sapien
ggcactgcttctccgatgtgaccaa

SEQ ID NO: 4841363 - DNA, 25 bp, Homo sapien
ttcagagcatggctaacccaacaag

SEQ ID NO: 4841364 - DNA, 25 bp, Homo sapien
ctttaatttcttccgtttgacagtg

SEQ ID NO: 4841365 - DNA, 25 bp, Homo sapien
tccactcttagaaactctgttgcct

SEQ ID NO: 4841366 - DNA, 25 bp, Homo sapien
tgttgcctaatattgaggatgtggc

SEQ ID NO: 4841367 - DNA, 25 bp, Homo sapien
aatttcttccgtttgacagtgtatg

SEQ ID NO: 4841368 - DNA, 25 bp, Homo sapien
ctgcaatatactatatgtaataggg

SEQ ID NO: 4841369 - DNA, 25 bp, Homo sapien
ctatatgtaatagggaataccttgc

SEQ ID NO: 4841370 - DNA, 25 bp, Homo sapien
ggatatagtggtaatggctttcaca

SEQ ID NO: 4841371 - DNA, 25 bp, Homo sapien
gagcagttcccaaattaagtacaag

SEQ ID NO: 4841372 - DNA, 25 bp, Homo sapien
taaagcaagtgtaattaattctttc

SEQ ID NO: 4841373 - DNA, 25 bp, Homo sapien
tagaatatattagagaactgtgatt

SEQ ID NO: 4841374 - DNA, 25 bp, Homo sapien
ctgaaatgaggacgagggcaagaaa

SEQ ID NO: 4841375 - DNA, 25 bp, Homo sapien
acattgctgatctctctagtatgaa

SEQ ID NO: 4841376 - DNA, 25 bp, Homo sapien
gctaacgaggtagaagcaacattca

SEQ ID NO: 4841377 - DNA, 25 bp, Homo sapien
cttagatactgaagaggacgtagtc

SEQ ID NO: 4841378 - DNA, 25 bp, Homo sapien
cactgcacatttaagggagagtccc

SEQ ID NO: 4841379 - DNA, 25 bp, Homo sapien
gagactacactaccgacagtgtggg

SEQ ID NO: 4841380 - DNA, 25 bp, Homo sapien
tgtccaaggtcgtgaagtccaggtt

SEQ ID NO: 4841381 - DNA, 25 bp, Homo sapien
cccacgtgggaggtaacaaatgcta

SEQ ID NO: 4841382 - DNA, 25 bp, Homo sapien
taaagcaggcctcacagattttgtc

SEQ ID NO: 4841383 - DNA, 25 bp, Homo sapien
caaggaccgggattctgatgaagcc

SEQ ID NO: 4841384 - DNA, 25 bp, Homo sapien
taaggtggtatcacgacgctttgcc

SEQ ID NO: 4841385 - DNA, 25 bp, Homo sapien
gatgcagccccgacagtcagttaca

SEQ ID NO: 4841386 - DNA, 25 bp, Homo sapien
catagataccttagaagacttgagg

SEQ ID NO: 4841387 - DNA, 25 bp, Homo sapien
ttttggagtggaatgtataaccgct

SEQ ID NO: 4841388 - DNA, 25 bp, Homo sapien
gcacttcggtttgggtgacaagagc

SEQ ID NO: 4841389 - DNA, 25 bp, Homo sapien
aaaagggatttattggtcaggcgtg

SEQ ID NO: 4841390 - DNA, 25 bp, Homo sapien
taagggtaactctgtgataacacca

SEQ ID NO: 4841391 - DNA, 25 bp, Homo sapien
caaatgtcaacttttagtggtcgtg

SEQ ID NO: 4841392 - DNA, 25 bp, Homo sapien
tctgctgttgatcacttcgtgcctt

SEQ ID NO: 4841393 - DNA, 25 bp, Homo sapien
gaggtttgtctctcagaagacttgc

SEQ ID NO: 4841394 - DNA, 25 bp, Homo sapien
ccatgatgtggtggcaaaaactcga

SEQ ID NO: 4841395 - DNA, 25 bp, Homo sapien
aacttttcggagcttcagcgttgac

SEQ ID NO: 4841396 - DNA, 25 bp, Homo sapien
cactgggccgtgtttcagggccgcg

SEQ ID NO: 4841397 - DNA, 25 bp, Homo sapien
ttcagggccgcgtgcataggcagaa

SEQ ID NO: 4841398 - DNA, 25 bp, Homo sapien
cttggagggcctgtctggtattgct

SEQ ID NO: 4841399 - DNA, 25 bp, Homo sapien
agaagtgagcctgatgcttggaggg

SEQ ID NO: 4841400 - DNA, 25 bp, Homo sapien
gcagtctaaagggaagagccccgga

SEQ ID NO: 4841401 - DNA, 25 bp, Homo sapien
tatgacggtcacatgttggatgcct

SEQ ID NO: 4841402 - DNA, 25 bp, Homo sapien
gatacccgatctgttcttccacgca

SEQ ID NO: 4841403 - DNA, 25 bp, Homo sapien
caccatcgtggtgggtatgacggtc

SEQ ID NO: 4841404 - DNA, 25 bp, Homo sapien
gatagggtctgtgtgcaatcagcgc

SEQ ID NO: 4841405 - DNA, 25 bp, Homo sapien
tcagctcaggcatgtgggcgatcgt

SEQ ID NO: 4841406 - DNA, 25 bp, Homo sapien
tggaatctttttagcaggcctcaaa

SEQ ID NO: 4841407 - DNA, 25 bp, Homo sapien
aaaaatgttccctgacatgatgggc

SEQ ID NO: 4841408 - DNA, 25 bp, Homo sapien
cataaattggaactcagggaccctc

SEQ ID NO: 4841409 - DNA, 25 bp, Homo sapien
gaattcagctgagggccccacatgt

SEQ ID NO: 4841410 - DNA, 25 bp, Homo sapien
ccaggcaagtatttggtaggcccca

SEQ ID NO: 4841411 - DNA, 25 bp, Homo sapien
taggtgaattcagtcagccaggcaa

SEQ ID NO: 4841412 - DNA, 25 bp, Homo sapien
tccaaagctttccacagaatttctg

SEQ ID NO: 4841413 - DNA, 25 bp, Homo sapien
ccaaagctttccacagaatttctgc

SEQ ID NO: 4841414 - DNA, 25 bp, Homo sapien
tgggctcttgtatccattgccaagc

SEQ ID NO: 4841415 - DNA, 25 bp, Homo sapien
ggctcttgtatccattgccaagctt

SEQ ID NO: 4841416 - DNA, 25 bp, Homo sapien
atctttgggctcttgtatccattgc

SEQ ID NO: 4841417 - DNA, 25 bp, Homo sapien
ccgaagtctgctagtgtcaatcttt

SEQ ID NO: 4841418 - DNA, 25 bp, Homo sapien
aggacctatgttgggccgccagtgt

SEQ ID NO: 4841419 - DNA, 25 bp, Homo sapien
agggaaggccaaggaggacctatgt

SEQ ID NO: 4841420 - DNA, 25 bp, Homo sapien
acctatgttgggccgccagtgtggc

SEQ ID NO: 4841421 - DNA, 25 bp, Homo sapien
ggaggacctatgttgggccgccagt

SEQ ID NO: 4841422 - DNA, 25 bp, Homo sapien
ggtggcacaatagaggatcactgaa

SEQ ID NO: 4841423 - DNA, 25 bp, Homo sapien
taagattgaaattcgaaggtggcac

SEQ ID NO: 4841424 - DNA, 25 bp, Homo sapien
gacccacattctactaagattgaaa

SEQ ID NO: 4841425 - DNA, 25 bp, Homo sapien
ggctctgactctcggtgatttatga

SEQ ID NO: 4841426 - DNA, 25 bp, Homo sapien
tggatatcagtgcagcctctgggcc

SEQ ID NO: 4841427 - DNA, 25 bp, Homo sapien
tgaagtaccactgggtcacagctgc

SEQ ID NO: 4841428 - DNA, 25 bp, Homo sapien
ggaaatgttaccaagtgctctaggg

SEQ ID NO: 4841429 - DNA, 25 bp, Homo sapien
caaaagtcgtgttggccatccaggt

SEQ ID NO: 4841430 - DNA, 25 bp, Homo sapien
aatcatgcagctttgcttattgggc

SEQ ID NO: 4841431 - DNA, 25 bp, Homo sapien
gcctccacatcattgggtctgcaag

SEQ ID NO: 4841432 - DNA, 25 bp, Homo sapien
gctttgcttattgggcctcagaaga

SEQ ID NO: 4841433 - DNA, 25 bp, Homo sapien
gcagctttgcttattgggcctcaga

SEQ ID NO: 4841434 - DNA, 25 bp, Homo sapien
taatatctttgtctatccttagcca

SEQ ID NO: 4841435 - DNA, 25 bp, Homo sapien
cacgtatagcttgttagagactaaa

SEQ ID NO: 4841436 - DNA, 25 bp, Homo sapien
tttgtatgctgaaagaacttccatg

SEQ ID NO: 4841437 - DNA, 25 bp, Homo sapien
ggatgtggccacaagtttgtatgct

SEQ ID NO: 4841438 - DNA, 25 bp, Homo sapien
tacacagaacggataatcaatattc

SEQ ID NO: 4841439 - DNA, 25 bp, Homo sapien
gccttacacagaacggataatcaat

SEQ ID NO: 4841440 - DNA, 25 bp, Homo sapien
cacagaacggataatcaatattcat

SEQ ID NO: 4841441 - DNA, 25 bp, Homo sapien
tcctcatcctgagcgtagcagctgc

SEQ ID NO: 4841442 - DNA, 25 bp, Homo sapien
aaggttggtgacaccagcgcgggcg

SEQ ID NO: 4841443 - DNA, 25 bp, Homo sapien
gttggtgacaccagcgcgggcggag

SEQ ID NO: 4841444 - DNA, 25 bp, Homo sapien
gcccaaggttggtgacaccagcgcg

SEQ ID NO: 4841445 - DNA, 25 bp, Homo sapien
cccaaggttggtgacaccagcgcgg

SEQ ID NO: 4841446 - DNA, 25 bp, Homo sapien
agccaagaccgcgtcccgcccactc

SEQ ID NO: 4841447 - DNA, 25 bp, Homo sapien
ctgggggcggagccaagaccgcgtc

SEQ ID NO: 4841448 - DNA, 25 bp, Homo sapien
gcggagccaagaccgcgtcccgccc

SEQ ID NO: 4841449 - DNA, 25 bp, Homo sapien
gggcggagccaagaccgcgtcccgc

SEQ ID NO: 4841450 - DNA, 25 bp, Homo sapien
tggccgtatagtgctccgccggctg

SEQ ID NO: 4841451 - DNA, 25 bp, Homo sapien
agctatcccaggacgccctagaagg

SEQ ID NO: 4841452 - DNA, 25 bp, Homo sapien
gccctctttgtgtctcggagaacag

SEQ ID NO: 4841453 - DNA, 25 bp, Homo sapien
ccaggacgccctagaaggaagccca

SEQ ID NO: 4841454 - DNA, 25 bp, Homo sapien
acatctgtgtagatgcgttgctatg

SEQ ID NO: 4841455 - DNA, 25 bp, Homo sapien
gtgtagatgcgttgctatgaatgaa

SEQ ID NO: 4841456 - DNA, 25 bp, Homo sapien
atctgtgtagatgcgttgctatgaa

SEQ ID NO: 4841457 - DNA, 25 bp, Homo sapien
ctgtgtagatgcgttgctatgaatg

SEQ ID NO: 4841458 - DNA, 25 bp, Homo sapien
gtatagactgtgcactcaagctcat

SEQ ID NO: 4841459 - DNA, 25 bp, Homo sapien
agtatagactgtgcactcaagctca

SEQ ID NO: 4841460 - DNA, 25 bp, Homo sapien
aaaagttttgccagagtaatgggtg

SEQ ID NO: 4841461 - DNA, 25 bp, Homo sapien
agaaagctaggaaatcgatgggagt

SEQ ID NO: 4841462 - DNA, 25 bp, Homo sapien
ggtataaagacacagcaagtcaaat

SEQ ID NO: 4841463 - DNA, 25 bp, Homo sapien
atcgatgggagtgttttgattaaaa

SEQ ID NO: 4841464 - DNA, 25 bp, Homo sapien
gattaacctttatccacccacagtg

SEQ ID NO: 4841465 - DNA, 25 bp, Homo sapien
ttcaacctaagtgccagggacatgc

SEQ ID NO: 4841466 - DNA, 25 bp, Homo sapien
ccctcaggacatgccctcaggacac

SEQ ID NO: 4841467 - DNA, 25 bp, Homo sapien
tgttcagctttgttcaacctaagtg

SEQ ID NO: 4841468 - DNA, 25 bp, Homo sapien
tccaataaattttcatcgtcctggc

SEQ ID NO: 4841469 - DNA, 25 bp, Homo sapien
ccaataaattttcatcgtcctggct

SEQ ID NO: 4841470 - DNA, 25 bp, Homo sapien
gcttggccagctttttccgggcaaa

SEQ ID NO: 4841471 - DNA, 25 bp, Homo sapien
ggccagctttttccgggcaaatatc

SEQ ID NO: 4841472 - DNA, 25 bp, Homo sapien
ttggccagctttttccgggcaaata

SEQ ID NO: 4841473 - DNA, 25 bp, Homo sapien
ctgcttggccagctttttccgggca

SEQ ID NO: 4841474 - DNA, 25 bp, Homo sapien
ttctggcagactcgacccatcagag

SEQ ID NO: 4841475 - DNA, 25 bp, Homo sapien
gcagactcgacccatcagagcagca

SEQ ID NO: 4841476 - DNA, 25 bp, Homo sapien
gtcttctggcagactcgacccatca

SEQ ID NO: 4841477 - DNA, 25 bp, Homo sapien
ctgtcttctggcagactcgacccat

SEQ ID NO: 4841478 - DNA, 25 bp, Homo sapien
ctatatggatgagaccaaaggaggg

SEQ ID NO: 4841479 - DNA, 25 bp, Homo sapien
atatggatgagaccaaaggagggca

SEQ ID NO: 4841480 - DNA, 25 bp, Homo sapien
ggcaggaggaactgttggtatctcc

SEQ ID NO: 4841481 - DNA, 25 bp, Homo sapien
gaactgttggtatctccctctcttt

SEQ ID NO: 4841482 - DNA, 25 bp, Homo sapien
acagagcagcaagagtgtgatcctc

SEQ ID NO: 4841483 - DNA, 25 bp, Homo sapien
ggatcgcctacagccgttatggagc

SEQ ID NO: 4841484 - DNA, 25 bp, Homo sapien
gcagcaagagtgtgatcctcgcctg

SEQ ID NO: 4841485 - DNA, 25 bp, Homo sapien
gcaccgggggatcgcctacagccgt

SEQ ID NO: 4841486 - DNA, 25 bp, Homo sapien
tctggggggctgtggtattgacagt

SEQ ID NO: 4841487 - DNA, 25 bp, Homo sapien
tggggggctgtggtattgacagtgt

SEQ ID NO: 4841488 - DNA, 25 bp, Homo sapien
gggggctgtggtattgacagtgtgc

SEQ ID NO: 4841489 - DNA, 25 bp, Homo sapien
ggctgtggtattgacagtgtgcaat

SEQ ID NO: 4841490 - DNA, 25 bp, Homo sapien
gccagcctggaagctttatgtttct

SEQ ID NO: 4841491 - DNA, 25 bp, Homo sapien
gcacaggctatatgagagccagcct

SEQ ID NO: 4841492 - DNA, 25 bp, Homo sapien
cagtgtaactgaacacagaaaggta

SEQ ID NO: 4841493 - DNA, 25 bp, Homo sapien
ttctcaaggagagcaccctgatcag

SEQ ID NO: 4841494 - DNA, 25 bp, Homo sapien
tcctaagggtgggaattgcgtctcc

SEQ ID NO: 4841495 - DNA, 25 bp, Homo sapien
caagaagccatctgtgggtccgcta

SEQ ID NO: 4841496 - DNA, 25 bp, Homo sapien
gctttgcatcagagtggagttatca

SEQ ID NO: 4841497 - DNA, 25 bp, Homo sapien
ggtccgctagccctcataggtgctt

SEQ ID NO: 4841498 - DNA, 25 bp, Homo sapien
ggattctatcatgtggcgtacccaa

SEQ ID NO: 4841499 - DNA, 25 bp, Homo sapien
tttggcgaaccacgcaaacaggtcg

SEQ ID NO: 4841500 - DNA, 25 bp, Homo sapien
tgttccgaggtaggataagccagca

SEQ ID NO: 4841501 - DNA, 25 bp, Homo sapien
tattttctccgcacatgtacatggg

SEQ ID NO: 4841502 - DNA, 25 bp, Homo sapien
agtgttattgaaaccacagtggcca

SEQ ID NO: 4841503 - DNA, 25 bp, Homo sapien
tagtgttattgaaaccacagtggcc

SEQ ID NO: 4841504 - DNA, 25 bp, Homo sapien
ttagtgttattgaaaccacagtggc

SEQ ID NO: 4841505 - DNA, 25 bp, Homo sapien
tggtagtcagtactccagcagttga

SEQ ID NO: 4841506 - DNA, 25 bp, Homo sapien
caccaatatcaggtacggtcattcc

SEQ ID NO: 4841507 - DNA, 25 bp, Homo sapien
cagttgatgccgttgaagtgagccc

SEQ ID NO: 4841508 - DNA, 25 bp, Homo sapien
tagaatgatctctcggaatgggaat

SEQ ID NO: 4841509 - DNA, 25 bp, Homo sapien
ttcctaggggatgggccactgtcaa

SEQ ID NO: 4841510 - DNA, 25 bp, Homo sapien
ccacttataattgcaatgacgatgt

SEQ ID NO: 4841511 - DNA, 25 bp, Homo sapien
ggacacacttcctatgtgtacacac

SEQ ID NO: 4841512 - DNA, 25 bp, Homo sapien
gggtggggcccacttataattgcaa

SEQ ID NO: 4841513 - DNA, 25 bp, Homo sapien
ttcattaaggattgagtttcttttc

SEQ ID NO: 4841514 - DNA, 25 bp, Homo sapien
taatacacaggatatttcattaagg

SEQ ID NO: 4841515 - DNA, 25 bp, Homo sapien
tcagatggagtctgaacgttttgct

SEQ ID NO: 4841516 - DNA, 25 bp, Homo sapien
ggaattaataaaagtagtatcaaca

SEQ ID NO: 4841517 - DNA, 25 bp, Homo sapien
tcctgaaacatgatagatctctggg

SEQ ID NO: 4841518 - DNA, 25 bp, Homo sapien
gacaccggcaataacatttctactg

SEQ ID NO: 4841519 - DNA, 25 bp, Homo sapien
gtcagtggtctctgacaccggcaat

SEQ ID NO: 4841520 - DNA, 25 bp, Homo sapien
gatctctgggtttttctgtcagtgg

SEQ ID NO: 4841521 - DNA, 25 bp, Homo sapien
aatactattctgatgataatcatac

SEQ ID NO: 4841522 - DNA, 25 bp, Homo sapien
ctattctgatgataatcatactcaa

SEQ ID NO: 4841523 - DNA, 25 bp, Homo sapien
ctgatgataatcatactcaatgcat

SEQ ID NO: 4841524 - DNA, 25 bp, Homo sapien
ttctgatgataatcatactcaatgc

SEQ ID NO: 4841525 - DNA, 25 bp, Homo sapien
caacacctggataactgcagtcctt

SEQ ID NO: 4841526 - DNA, 25 bp, Homo sapien
cacagctctccaacgcagggacagt

SEQ ID NO: 4841527 - DNA, 25 bp, Homo sapien
gctctccaacgcagggacagttgta

SEQ ID NO: 4841528 - DNA, 25 bp, Homo sapien
caacgcagggacagttgtagcaaac

SEQ ID NO: 4841529 - DNA, 25 bp, Homo sapien
ctggcccggcatggcgaaaagttgt

SEQ ID NO: 4841530 - DNA, 25 bp, Homo sapien
cggcatggcgaaaagttgtggaaat

SEQ ID NO: 4841531 - DNA, 25 bp, Homo sapien
tctggcccggcatggcgaaaagttg

SEQ ID NO: 4841532 - DNA, 25 bp, Homo sapien
gcccggcatggcgaaaagttgtgga

SEQ ID NO: 4841533 - DNA, 25 bp, Homo sapien
gaaggcggcggtgggctgccggctg

SEQ ID NO: 4841534 - DNA, 25 bp, Homo sapien
aagaaggcggcggtgggctgccggc

SEQ ID NO: 4841535 - DNA, 25 bp, Homo sapien
ggctgggttggggtcgcgccaagaa

SEQ ID NO: 4841536 - DNA, 25 bp, Homo sapien
gccaagaaggcggcggtgggctgcc

SEQ ID NO: 4841537 - DNA, 25 bp, Homo sapien
acagggaccggacgaggcgaggcgc

SEQ ID NO: 4841538 - DNA, 25 bp, Homo sapien
agggaccggacgaggcgaggcgcat

SEQ ID NO: 4841539 - DNA, 25 bp, Homo sapien
ctgcacagggaccggacgaggcgag

SEQ ID NO: 4841540 - DNA, 25 bp, Homo sapien
gcacagggaccggacgaggcgaggc

SEQ ID NO: 4841541 - DNA, 25 bp, Homo sapien
cctctggaaatagtgactgaagggt

SEQ ID NO: 4841542 - DNA, 25 bp, Homo sapien
tgactgaagggtccccgcgaagtcg

SEQ ID NO: 4841543 - DNA, 25 bp, Homo sapien
aaatagtgactgaagggtccccgcg

SEQ ID NO: 4841544 - DNA, 25 bp, Homo sapien
tggaaatagtgactgaagggtcccc

SEQ ID NO: 4841545 - DNA, 25 bp, Homo sapien
agccaagaaccgaaaaggagcgaag

SEQ ID NO: 4841546 - DNA, 25 bp, Homo sapien
ccgaaaaggagcgaaggcggcttcg

SEQ ID NO: 4841547 - DNA, 25 bp, Homo sapien
tcggggaccccggcagcgtgcaggg

SEQ ID NO: 4841548 - DNA, 25 bp, Homo sapien
cggcttcggggaccccggcagcgtg

SEQ ID NO: 4841549 - DNA, 25 bp, Homo sapien
tcagtcttgggtgtataaagtcccg

SEQ ID NO: 4841550 - DNA, 25 bp, Homo sapien
tctaaataagagacgtgacccacat

SEQ ID NO: 4841551 - DNA, 25 bp, Homo sapien
catggaatgttctcgcatcactcgc

SEQ ID NO: 4841552 - DNA, 25 bp, Homo sapien
gggctagtacgcagcagtgccagaa

SEQ ID NO: 4841553 - DNA, 25 bp, Homo sapien
cagatatactcccaccatacatata

SEQ ID NO: 4841554 - DNA, 25 bp, Homo sapien
taattgtaggacgacttaggaggac

SEQ ID NO: 4841555 - DNA, 25 bp, Homo sapien
ggacttgatgaagccaaaatgggtt

SEQ ID NO: 4841556 - DNA, 25 bp, Homo sapien
gtaagaatcaacaagggacatacaa

SEQ ID NO: 4841557 - DNA, 25 bp, Homo sapien
ctgctggtcttcagagagtctcctg

SEQ ID NO: 4841558 - DNA, 25 bp, Homo sapien
ctgtaagggctcactgctttcctgc

SEQ ID NO: 4841559 - DNA, 25 bp, Homo sapien
gctttcctgctggtcttcagagagt

SEQ ID NO: 4841560 - DNA, 25 bp, Homo sapien
tcctgctggtcttcagagagtctcc

SEQ ID NO: 4841561 - DNA, 25 bp, Homo sapien
tatactataagcaatgatcaaataa

SEQ ID NO: 4841562 - DNA, 25 bp, Homo sapien
tactataagcaatgatcaaataagg

SEQ ID NO: 4841563 - DNA, 25 bp, Homo sapien
tttgcattgtggatgttcaaaatcc

SEQ ID NO: 4841564 - DNA, 25 bp, Homo sapien
tataagcaatgatcaaataagggta

SEQ ID NO: 4841565 - DNA, 25 bp, Homo sapien
ccaaaaggcggcaacgatcaatcaa

SEQ ID NO: 4841566 - DNA, 25 bp, Homo sapien
accaaaaggcggcaacgatcaatca

SEQ ID NO: 4841567 - DNA, 25 bp, Homo sapien
caccaaaaggcggcaacgatcaatc

SEQ ID NO: 4841568 - DNA, 25 bp, Homo sapien
tcgtgcctcaatctcccaagtggct

SEQ ID NO: 4841569 - DNA, 25 bp, Homo sapien
gggattacagacgtgtgccaccaca

SEQ ID NO: 4841570 - DNA, 25 bp, Homo sapien
caaattcccaacctcgggtgatccg

SEQ ID NO: 4841571 - DNA, 25 bp, Homo sapien
aggcatgagccactgcacccagcca

SEQ ID NO: 4841572 - DNA, 25 bp, Homo sapien
cagttgctagtttcgtggtgagaca

SEQ ID NO: 4841573 - DNA, 25 bp, Homo sapien
gaaacttgctgtcgcaaaccggtgg

SEQ ID NO: 4841574 - DNA, 25 bp, Homo sapien
ggcaggtgttccaataaaccctcga

SEQ ID NO: 4841575 - DNA, 25 bp, Homo sapien
gtttgtctgagttataaccacttgt

SEQ ID NO: 4841576 - DNA, 25 bp, Homo sapien
cccctgtccttggccttagaatata

SEQ ID NO: 4841577 - DNA, 25 bp, Homo sapien
gaagtggcccatacaaaactcacac

SEQ ID NO: 4841578 - DNA, 25 bp, Homo sapien
tgggaagtggcccatacaaaactca

SEQ ID NO: 4841579 - DNA, 25 bp, Homo sapien
tgtccttggccttagaatataaggc

SEQ ID NO: 4841580 - DNA, 25 bp, Homo sapien
tctcaaggcctgctgaaatctaaaa

SEQ ID NO: 4841581 - DNA, 25 bp, Homo sapien
caatgaatgtgaagcagatgtgaac

SEQ ID NO: 4841582 - DNA, 25 bp, Homo sapien
tatcaagcatgtgtgagcttctctg

SEQ ID NO: 4841583 - DNA, 25 bp, Homo sapien
gctgtacatgggattgtctaccaaa

SEQ ID NO: 4841584 - DNA, 25 bp, Homo sapien
gggtctctagccttacaggacttag

SEQ ID NO: 4841585 - DNA, 25 bp, Homo sapien
gaattgtgctgggaatatgtgtaga

SEQ ID NO: 4841586 - DNA, 25 bp, Homo sapien
taaataccaggaattgtgctgggaa

SEQ ID NO: 4841587 - DNA, 25 bp, Homo sapien
tagaatgatctcttacatagatggg

SEQ ID NO: 4841588 - DNA, 25 bp, Homo sapien
ggaggttagaagctgatctggaatt

SEQ ID NO: 4841589 - DNA, 25 bp, Homo sapien
aggttagaagctgatctggaattgt

SEQ ID NO: 4841590 - DNA, 25 bp, Homo sapien
ggaggaggttagaagctgatctgga

SEQ ID NO: 4841591 - DNA, 25 bp, Homo sapien
gttagaagctgatctggaattgtca

SEQ ID NO: 4841592 - DNA, 25 bp, Homo sapien
tcagacatcgggcaaaggtcagcgc

SEQ ID NO: 4841593 - DNA, 25 bp, Homo sapien
caaattcggcatagcagaggccagc

SEQ ID NO: 4841594 - DNA, 25 bp, Homo sapien
tcagcgcggctctgcaaggaatcat

SEQ ID NO: 4841595 - DNA, 25 bp, Homo sapien
gtgtacaaatatgcagaccccgtct

SEQ ID NO: 4841596 - DNA, 25 bp, Homo sapien
gcaagaccagtgtaattcattctga

SEQ ID NO: 4841597 - DNA, 25 bp, Homo sapien
tgaccaatctgtttgctaagaagtt

SEQ ID NO: 4841598 - DNA, 25 bp, Homo sapien
gaagtatgtcctcaaaaactgacca

SEQ ID NO: 4841599 - DNA, 25 bp, Homo sapien
aaaaatcgggatattctgcaagacc

SEQ ID NO: 4841600 - DNA, 25 bp, Homo sapien
taagctagactgcttagaaaccaaa

SEQ ID NO: 4841601 - DNA, 25 bp, Homo sapien
cagctacatgctcttcgtcatttag

SEQ ID NO: 4841602 - DNA, 25 bp, Homo sapien
ggtgcaacttctcttgacattagac

SEQ ID NO: 4841603 - DNA, 25 bp, Homo sapien
tggaaataatttaacgctagactgg

SEQ ID NO: 4841604 - DNA, 25 bp, Homo sapien
cagctgtgaagactttattcaccca

SEQ ID NO: 4841605 - DNA, 25 bp, Homo sapien
ttcactaatcttccagtttgccaca

SEQ ID NO: 4841606 - DNA, 25 bp, Homo sapien
ttcacccaagcagactcttttactc

SEQ ID NO: 4841607 - DNA, 25 bp, Homo sapien
tcacaaacagaaggacgagaatatt

SEQ ID NO: 4841608 - DNA, 25 bp, Homo sapien
caattcataaagcatcgagtaaggc

SEQ ID NO: 4841609 - DNA, 25 bp, Homo sapien
ttggaatgactaaacaacctctgtc

SEQ ID NO: 4841610 - DNA, 25 bp, Homo sapien
gattccacatacgagccatgctctg

SEQ ID NO: 4841611 - DNA, 25 bp, Homo sapien
ggtgtaccccattccatgcaataga

SEQ ID NO: 4841612 - DNA, 25 bp, Homo sapien
gagaacaaacacattggaaagtcac

SEQ ID NO: 4841613 - DNA, 25 bp, Homo sapien
taaaactttactctctcaccctgtg

SEQ ID NO: 4841614 - DNA, 25 bp, Homo sapien
cagactatatccttggaaggtggtt

SEQ ID NO: 4841615 - DNA, 25 bp, Homo sapien
gctctttgaagatgatatacataaa

SEQ ID NO: 4841616 - DNA, 25 bp, Homo sapien
atacttgttccgttttcagaaggtg

SEQ ID NO: 4841617 - DNA, 25 bp, Homo sapien
acgttcccgtaaagccataaggcat

SEQ ID NO: 4841618 - DNA, 25 bp, Homo sapien
ccagccccatagatacttgttccgt

SEQ ID NO: 4841619 - DNA, 25 bp, Homo sapien
gttgttgcaatgcagtcaaatccca

SEQ ID NO: 4841620 - DNA, 25 bp, Homo sapien
gcctggaactagtgcccttcttacc

SEQ ID NO: 4841621 - DNA, 25 bp, Homo sapien
tctgctaccacacacgggtactcgt

SEQ ID NO: 4841622 - DNA, 25 bp, Homo sapien
ggaacactccttctacactgagcca

SEQ ID NO: 4841623 - DNA, 25 bp, Homo sapien
gggtactcgtgcacaacaaggaaca

SEQ ID NO: 4841624 - DNA, 25 bp, Homo sapien
tcatcgaggaggtagtacggcatca

SEQ ID NO: 4841625 - DNA, 25 bp, Homo sapien
cataagtgttaaagctgcagagacc

SEQ ID NO: 4841626 - DNA, 25 bp, Homo sapien
gacgacatatttggcaggaccccat

SEQ ID NO: 4841627 - DNA, 25 bp, Homo sapien
gcaaagacgtcacaattccaatggg

SEQ ID NO: 4841628 - DNA, 25 bp, Homo sapien
catagattacacgaggcattgggaa

SEQ ID NO: 4841629 - DNA, 25 bp, Homo sapien
catcctccgccatagcatagattac

SEQ ID NO: 4841630 - DNA, 25 bp, Homo sapien
cgttttggaattgatttgagctaga

SEQ ID NO: 4841631 - DNA, 25 bp, Homo sapien
cactgcacccgatgataaagtagca

SEQ ID NO: 4841632 - DNA, 25 bp, Homo sapien
tgcagtcaacgtggcagcaactggt

SEQ ID NO: 4841633 - DNA, 25 bp, Homo sapien
gccatcccgggccatggcaaacaga

SEQ ID NO: 4841634 - DNA, 25 bp, Homo sapien
tcactctggcaagaaatctaaacag

SEQ ID NO: 4841635 - DNA, 25 bp, Homo sapien
ggtaaaggaaacatagagcccagaa

SEQ ID NO: 4841636 - DNA, 25 bp, Homo sapien
catactgaggatggcgatcacaagg

SEQ ID NO: 4841637 - DNA, 25 bp, Homo sapien
taactgttagatggctgcgatggcc

SEQ ID NO: 4841638 - DNA, 25 bp, Homo sapien
tctgcatgagataaggatctggcca

SEQ ID NO: 4841639 - DNA, 25 bp, Homo sapien
tatggtcccttagcaatattcgacg

SEQ ID NO: 4841640 - DNA, 25 bp, Homo sapien
gataagttgtccacacaagcgctct

SEQ ID NO: 4841641 - DNA, 25 bp, Homo sapien
caagcgctctgatccaagttaagaa

SEQ ID NO: 4841642 - DNA, 25 bp, Homo sapien
taaaatgggcttcacatcatctggg

SEQ ID NO: 4841643 - DNA, 25 bp, Homo sapien
caagcaaagtaaggtatgggagtac

SEQ ID NO: 4841644 - DNA, 25 bp, Homo sapien
gcgattgtcatatctcagcctgccg

SEQ ID NO: 4841645 - DNA, 25 bp, Homo sapien
attgtcatatctcagcctgccgagt

SEQ ID NO: 4841646 - DNA, 25 bp, Homo sapien
gattgtcatatctcagcctgccgag

SEQ ID NO: 4841647 - DNA, 25 bp, Homo sapien
aagcgattgtcatatctcagcctgc

SEQ ID NO: 4841648 - DNA, 25 bp, Homo sapien
ccacaagcgccttcaggtcaaacag

SEQ ID NO: 4841649 - DNA, 25 bp, Homo sapien
aggccatgagtgtgccaatggacat

SEQ ID NO: 4841650 - DNA, 25 bp, Homo sapien
tatttccaaacaaacatctatgtct

SEQ ID NO: 4841651 - DNA, 25 bp, Homo sapien
caaacaaacatctatgtctttattc

SEQ ID NO: 4841652 - DNA, 25 bp, Homo sapien
ctatttccaaacaaacatctatgtc

SEQ ID NO: 4841653 - DNA, 25 bp, Homo sapien
acatctatgtctttattctcaaata

SEQ ID NO: 4841654 - DNA, 25 bp, Homo sapien
gggagacgatcccagaccatctttc

SEQ ID NO: 4841655 - DNA, 25 bp, Homo sapien
catttgggctggtcgtaagataagc

SEQ ID NO: 4841656 - DNA, 25 bp, Homo sapien
ttctcaggagaacatttgggctggt

SEQ ID NO: 4841657 - DNA, 25 bp, Homo sapien
ctgggagacgatcccagaccatctt

SEQ ID NO: 4841658 - DNA, 25 bp, Homo sapien
ggtccgcatgctgaagccctgtctc

SEQ ID NO: 4841659 - DNA, 25 bp, Homo sapien
ggaatcctaccagaaagctcacgag

SEQ ID NO: 4841660 - DNA, 25 bp, Homo sapien
cagaaagctcacgagagaagctgac

SEQ ID NO: 4841661 - DNA, 25 bp, Homo sapien
gaagagggtccgcatgctgaagccc

SEQ ID NO: 4841662 - DNA, 25 bp, Homo sapien
gtgtagataacagagtcagcacact

SEQ ID NO: 4841663 - DNA, 25 bp, Homo sapien
cccagattgcttggtgcaaaacagc

SEQ ID NO: 4841664 - DNA, 25 bp, Homo sapien
tctgataaaacactgacttctgtac

SEQ ID NO: 4841665 - DNA, 25 bp, Homo sapien
tacaaagagtcttcgccttgccctt

SEQ ID NO: 4841666 - DNA, 25 bp, Homo sapien
aaggctactttttgctgattctggg

SEQ ID NO: 4841667 - DNA, 25 bp, Homo sapien
acactcaggcccaacacgaggaaag

SEQ ID NO: 4841668 - DNA, 25 bp, Homo sapien
tgaactccgtaagtggtcaagacac

SEQ ID NO: 4841669 - DNA, 25 bp, Homo sapien
tgagaacgatggcaacgaagagaac

SEQ ID NO: 4841670 - DNA, 25 bp, Homo sapien
tcttcaaacccaagccagtatacgg

SEQ ID NO: 4841671 - DNA, 25 bp, Homo sapien
tatacggttagctcaaatgggacag

SEQ ID NO: 4841672 - DNA, 25 bp, Homo sapien
ggttatcccaggtacatcctcccag

SEQ ID NO: 4841673 - DNA, 25 bp, Homo sapien
gatagtttaacttgcagtggaggag

SEQ ID NO: 4841674 - DNA, 25 bp, Homo sapien
tgaacgctggcaaaaatggtaagaa

SEQ ID NO: 4841675 - DNA, 25 bp, Homo sapien
cttaactggaccatcaagtaaatgt

SEQ ID NO: 4841676 - DNA, 25 bp, Homo sapien
tgaatctgacccaagtgtctgcact

SEQ ID NO: 4841677 - DNA, 25 bp, Homo sapien
aaatgctgaatctgacccaagtgtc

SEQ ID NO: 4841678 - DNA, 25 bp, Homo sapien
ctgctgctgcatgaacgttgtctgg

SEQ ID NO: 4841679 - DNA, 25 bp, Homo sapien
ttttcatggaatatgaaaggtgaac

SEQ ID NO: 4841680 - DNA, 25 bp, Homo sapien
gatggtcatttgcttgaatggcaga

SEQ ID NO: 4841681 - DNA, 25 bp, Homo sapien
tccaggctgtgtctaatgccataag

SEQ ID NO: 4841682 - DNA, 25 bp, Homo sapien
tcttgggattacacgggccagctag

SEQ ID NO: 4841683 - DNA, 25 bp, Homo sapien
tcatgagcagtatcaccggaaaggg

SEQ ID NO: 4841684 - DNA, 25 bp, Homo sapien
taaagggtcccaagtatatcacagt

SEQ ID NO: 4841685 - DNA, 25 bp, Homo sapien
tatatgccaccgattaatgacgaca

SEQ ID NO: 4841686 - DNA, 25 bp, Homo sapien
taatcaggtgtaggccagagaaacc

SEQ ID NO: 4841687 - DNA, 25 bp, Homo sapien
tctatgagtcacagaggtcccttgg

SEQ ID NO: 4841688 - DNA, 25 bp, Homo sapien
tgcataaattgtagaccaggtccca

SEQ ID NO: 4841689 - DNA, 25 bp, Homo sapien
aatatgacgctctttcccaactggg

SEQ ID NO: 4841690 - DNA, 25 bp, Homo sapien
attttaaaaatacaccacatcagaa

SEQ ID NO: 4841691 - DNA, 25 bp, Homo sapien
taaaaatacaccacatcagaaagca

SEQ ID NO: 4841692 - DNA, 25 bp, Homo sapien
tttaaaaatacaccacatcagaaag

SEQ ID NO: 4841693 - DNA, 25 bp, Homo sapien
tattttaaaaatacaccacatcaga

SEQ ID NO: 4841694 - DNA, 25 bp, Homo sapien
tgaagcctgctttccgaaggcctga

SEQ ID NO: 4841695 - DNA, 25 bp, Homo sapien
tgttctttaaaccacgcactctgtg

SEQ ID NO: 4841696 - DNA, 25 bp, Homo sapien
taagggcttcccaagacatgtagct

SEQ ID NO: 4841697 - DNA, 25 bp, Homo sapien
aaatccacgtgctttgtctctaggg

SEQ ID NO: 4841698 - DNA, 25 bp, Homo sapien
tcctctgtgtctggccagagttggt

SEQ ID NO: 4841699 - DNA, 25 bp, Homo sapien
gccagagttggtctccgcacccagc

SEQ ID NO: 4841700 - DNA, 25 bp, Homo sapien
gttgccccgggttcttgctgctcct

SEQ ID NO: 4841701 - DNA, 25 bp, Homo sapien
gaccgttgccccgggttcttgctgc

SEQ ID NO: 4841702 - DNA, 25 bp, Homo sapien
gaggggcgggctcctgggacgccga

SEQ ID NO: 4841703 - DNA, 25 bp, Homo sapien
gcgaggggcgggctcctgggacgcc

SEQ ID NO: 4841704 - DNA, 25 bp, Homo sapien
gggctcctgggacgccgaagcggga

SEQ ID NO: 4841705 - DNA, 25 bp, Homo sapien
gggcgggctcctgggacgccgaagc

SEQ ID NO: 4841706 - DNA, 25 bp, Homo sapien
tgcaccagcagaagaccaagcagca

SEQ ID NO: 4841707 - DNA, 25 bp, Homo sapien
cctccagcgcttcgtgcaccagcag

SEQ ID NO: 4841708 - DNA, 25 bp, Homo sapien
cagcgcttcgtgcaccagcagaaga

SEQ ID NO: 4841709 - DNA, 25 bp, Homo sapien
gcttcgtgcaccagcagaagaccaa

SEQ ID NO: 4841710 - DNA, 25 bp, Homo sapien
cacgactatcttggattttgcaaac

SEQ ID NO: 4841711 - DNA, 25 bp, Homo sapien
ggattttgcaaactacaatgcggta

SEQ ID NO: 4841712 - DNA, 25 bp, Homo sapien
tcaagtaccacgactatcttggatt

SEQ ID NO: 4841713 - DNA, 25 bp, Homo sapien
actacaatgcggtatttttttggca

SEQ ID NO: 4841714 - DNA, 25 bp, Homo sapien
gcaaaacgtaaggagagagaaatgc

SEQ ID NO: 4841715 - DNA, 25 bp, Homo sapien
gagaaatgcgctgtagtaatgacat

SEQ ID NO: 4841716 - DNA, 25 bp, Homo sapien
tgcaaaacgtaaggagagagaaatg

SEQ ID NO: 4841717 - DNA, 25 bp, Homo sapien
aaggagagagaaatgcgctgtagta

SEQ ID NO: 4841718 - DNA, 25 bp, Homo sapien
catcgaagctctacagtttgccccg

SEQ ID NO: 4841719 - DNA, 25 bp, Homo sapien
taaaggtgtccagatacgcagggta

SEQ ID NO: 4841720 - DNA, 25 bp, Homo sapien
gatagactgcgtctttggtgctgaa

SEQ ID NO: 4841721 - DNA, 25 bp, Homo sapien
tgaggcgagaatccttaaaggtgtc

SEQ ID NO: 4841722 - DNA, 25 bp, Homo sapien
tggaggctcaacctgaggaaccctg

SEQ ID NO: 4841723 - DNA, 25 bp, Homo sapien
caaaaggcccctcgagttgtacagg

SEQ ID NO: 4841724 - DNA, 25 bp, Homo sapien
tctgccagtaaggttgaggactccc

SEQ ID NO: 4841725 - DNA, 25 bp, Homo sapien
gttgactacccattgggcctgcctg

SEQ ID NO: 4841726 - DNA, 25 bp, Homo sapien
cctccggccacttctcacaaactgg

SEQ ID NO: 4841727 - DNA, 25 bp, Homo sapien
ggccacttctcacaaactgggatgg

SEQ ID NO: 4841728 - DNA, 25 bp, Homo sapien
tccggccacttctcacaaactggga

SEQ ID NO: 4841729 - DNA, 25 bp, Homo sapien
actgcctccggccacttctcacaaa

SEQ ID NO: 4841730 - DNA, 25 bp, Homo sapien
gatggactgagtctggaggtaaaac

SEQ ID NO: 4841731 - DNA, 25 bp, Homo sapien
gctatttccgatctcaaagacagga

SEQ ID NO: 4841732 - DNA, 25 bp, Homo sapien
aaagacaggagatgtttatgggatc

SEQ ID NO: 4841733 - DNA, 25 bp, Homo sapien
tctggaggtaaaacctgaatcaatt

SEQ ID NO: 4841734 - DNA, 25 bp, Homo sapien
gccaagcccggacactggaggcaaa

SEQ ID NO: 4841735 - DNA, 25 bp, Homo sapien
gggtgggacggagccgccaaggcag

SEQ ID NO: 4841736 - DNA, 25 bp, Homo sapien
ggcagccaagcccggacactggagg

SEQ ID NO: 4841737 - DNA, 25 bp, Homo sapien
gacggagccgccaaggcagccaagc

SEQ ID NO: 4841738 - DNA, 25 bp, Homo sapien
tgttacaggaaagggtgagctggtg

SEQ ID NO: 4841739 - DNA, 25 bp, Homo sapien
tgagctggtgctttctgacctctgc

SEQ ID NO: 4841740 - DNA, 25 bp, Homo sapien
tgacctctgctccaatgtaactgag

SEQ ID NO: 4841741 - DNA, 25 bp, Homo sapien
gagaggagtgctttggacagtagga

SEQ ID NO: 4841742 - DNA, 25 bp, Homo sapien
cagccacatacttgggaagaatcgg

SEQ ID NO: 4841743 - DNA, 25 bp, Homo sapien
tcagctgaacgctcacagccacata

SEQ ID NO: 4841744 - DNA, 25 bp, Homo sapien
atgtagcagaagctcatcagcactt

SEQ ID NO: 4841745 - DNA, 25 bp, Homo sapien
tgtagcagaagctcatcagcacttc

SEQ ID NO: 4841746 - DNA, 25 bp, Homo sapien
tctgagccctccacgcatctctttc

SEQ ID NO: 4841747 - DNA, 25 bp, Homo sapien
acccagacacatcggctcattttca

SEQ ID NO: 4841748 - DNA, 25 bp, Homo sapien
caaacccagacacatcggctcattt

SEQ ID NO: 4841749 - DNA, 25 bp, Homo sapien
agacacatcggctcattttcacctc

SEQ ID NO: 4841750 - DNA, 25 bp, Homo sapien
tgacacaccagcgatcctcccaaca

SEQ ID NO: 4841751 - DNA, 25 bp, Homo sapien
tcctcccaacagaaaatcccctcca

SEQ ID NO: 4841752 - DNA, 25 bp, Homo sapien
agcgatcctcccaacagaaaatccc

SEQ ID NO: 4841753 - DNA, 25 bp, Homo sapien
cacaccagcgatcctcccaacagaa

SEQ ID NO: 4841754 - DNA, 25 bp, Homo sapien
cttgacaccacaaaccaaaaccata

SEQ ID NO: 4841755 - DNA, 25 bp, Homo sapien
ttgacaccacaaaccaaaaccatac

SEQ ID NO: 4841756 - DNA, 25 bp, Homo sapien
catcattctttttgaccctctgtcc

SEQ ID NO: 4841757 - DNA, 25 bp, Homo sapien
ttctttttgaccctctgtccagcat

SEQ ID NO: 4841758 - DNA, 25 bp, Homo sapien
tccttcagatattctctagactctg

SEQ ID NO: 4841759 - DNA, 25 bp, Homo sapien
tgagaaaatgagaagcgtatatccc

SEQ ID NO: 4841760 - DNA, 25 bp, Homo sapien
tcacctgtgtctgccgaggtggagt

SEQ ID NO: 4841761 - DNA, 25 bp, Homo sapien
tggcctcgtccttcctgcagatgta

SEQ ID NO: 4841762 - DNA, 25 bp, Homo sapien
tcaactggccgtagcgctcattctg

SEQ ID NO: 4841763 - DNA, 25 bp, Homo sapien
gatgtaggtggagcccgttttggcc

SEQ ID NO: 4841764 - DNA, 25 bp, Homo sapien
tcttggacgacaataggacgagggt

SEQ ID NO: 4841765 - DNA, 25 bp, Homo sapien
gcctatgtctaggtctacgtctgaa

SEQ ID NO: 4841766 - DNA, 25 bp, Homo sapien
tggtcagggcataacatcctttggg

SEQ ID NO: 4841767 - DNA, 25 bp, Homo sapien
gacgagggtggctttgtaagattcc

SEQ ID NO: 4841768 - DNA, 25 bp, Homo sapien
tcttgggctgtaagtaccaagttca

SEQ ID NO: 4841769 - DNA, 25 bp, Homo sapien
tgtcacagttagatggtgttttagg

SEQ ID NO: 4841770 - DNA, 25 bp, Homo sapien
taacacggagatccttcctcctgac

SEQ ID NO: 4841771 - DNA, 25 bp, Homo sapien
tcatcaaatggttcatgagccaaga

SEQ ID NO: 4841772 - DNA, 25 bp, Homo sapien
ttggcatggtacattgaatcctttg

SEQ ID NO: 4841773 - DNA, 25 bp, Homo sapien
tcagagctagtgataccccaatacg

SEQ ID NO: 4841774 - DNA, 25 bp, Homo sapien
caggcaagaaactctggactgggct

SEQ ID NO: 4841775 - DNA, 25 bp, Homo sapien
ccaatacgtattacatgctttcttg

SEQ ID NO: 4841776 - DNA, 25 bp, Homo sapien
tccctgtggagcgtgactttggccg

SEQ ID NO: 4841777 - DNA, 25 bp, Homo sapien
catagagcagctggtacttgacgga

SEQ ID NO: 4841778 - DNA, 25 bp, Homo sapien
gaggttgcagatacacaaagccccg

SEQ ID NO: 4841779 - DNA, 25 bp, Homo sapien
gacaacatcgaagtagctgggagaa

SEQ ID NO: 4841780 - DNA, 25 bp, Homo sapien
ttttcggtcagggtcataacaagga

SEQ ID NO: 4841781 - DNA, 25 bp, Homo sapien
ctgatccaacacagaggcagcacca

SEQ ID NO: 4841782 - DNA, 25 bp, Homo sapien
ttcggtcagggtcataacaaggaag

SEQ ID NO: 4841783 - DNA, 25 bp, Homo sapien
ccagagtgaacgatggaaggatttg

SEQ ID NO: 4841784 - DNA, 25 bp, Homo sapien
taaaggagtttggggacatagaaga

SEQ ID NO: 4841785 - DNA, 25 bp, Homo sapien
ctaaaggagtttggggacatagaag

SEQ ID NO: 4841786 - DNA, 25 bp, Homo sapien
catggagcctgcatgtgacaggaag

SEQ ID NO: 4841787 - DNA, 25 bp, Homo sapien
atggagcctgcatgtgacaggaaga

SEQ ID NO: 4841788 - DNA, 25 bp, Homo sapien
ggtctgcagtgcctttgcctcatca

SEQ ID NO: 4841789 - DNA, 25 bp, Homo sapien
ctgggtctgcagtgcctttgcctca

SEQ ID NO: 4841790 - DNA, 25 bp, Homo sapien
gtctgcagtgcctttgcctcatcat

SEQ ID NO: 4841791 - DNA, 25 bp, Homo sapien
tgggtctgcagtgcctttgcctcat

SEQ ID NO: 4841792 - DNA, 25 bp, Homo sapien
tgggaagatccaggtgaactccacc

SEQ ID NO: 4841793 - DNA, 25 bp, Homo sapien
gatgtcgtccccacttttcactttg

SEQ ID NO: 4841794 - DNA, 25 bp, Homo sapien
tgaagaagccaagatggttgttgag

SEQ ID NO: 4841795 - DNA, 25 bp, Homo sapien
caggacagtgcagagcacactgatg

SEQ ID NO: 4841796 - DNA, 25 bp, Homo sapien
gagctcccaattgctcagatttgag

SEQ ID NO: 4841797 - DNA, 25 bp, Homo sapien
tgtataaatgactaagagctcccaa

SEQ ID NO: 4841798 - DNA, 25 bp, Homo sapien
agaagtatgattaggccagtgtgcc

SEQ ID NO: 4841799 - DNA, 25 bp, Homo sapien
gtcagtagcctgaaaaagcacccac

SEQ ID NO: 4841800 - DNA, 25 bp, Homo sapien
caagtgtcttggatcgtcacaggcc

SEQ ID NO: 4841801 - DNA, 25 bp, Homo sapien
cagtggtagctactgtggtctgtcc

SEQ ID NO: 4841802 - DNA, 25 bp, Homo sapien
gagattctcgtggtgtgtcccagtc

SEQ ID NO: 4841803 - DNA, 25 bp, Homo sapien
gcatcaatcgtctcaaagtcttcca

SEQ ID NO: 4841804 - DNA, 25 bp, Homo sapien
tgtctgggtcggactcacgagacgc

SEQ ID NO: 4841805 - DNA, 25 bp, Homo sapien
ggtgtggtgcttgacatcagcctct

SEQ ID NO: 4841806 - DNA, 25 bp, Homo sapien
gactgtgtacacaaatgggctttcc

SEQ ID NO: 4841807 - DNA, 25 bp, Homo sapien
gaacacgtatgtaggtaagcaatca

SEQ ID NO: 4841808 - DNA, 25 bp, Homo sapien
gcagagttggtcatgggctcacaga

SEQ ID NO: 4841809 - DNA, 25 bp, Homo sapien
gctggaatactcaagaattgcatcc

SEQ ID NO: 4841810 - DNA, 25 bp, Homo sapien
tacgtgaccggcaaataaatctcat

SEQ ID NO: 4841811 - DNA, 25 bp, Homo sapien
acagcacagtaaaggtcgtatctcc

SEQ ID NO: 4841812 - DNA, 25 bp, Homo sapien
gagtgtcatgtgtctgatgcagcct

SEQ ID NO: 4841813 - DNA, 25 bp, Homo sapien
tacatttcagccaaagccatagaag

SEQ ID NO: 4841814 - DNA, 25 bp, Homo sapien
tacttacccatgtgagcctaacact

SEQ ID NO: 4841815 - DNA, 25 bp, Homo sapien
gaaatggatgtcacagagtgtcatg

SEQ ID NO: 4841816 - DNA, 25 bp, Homo sapien
aaagatttcggcatcgacacggacg

SEQ ID NO: 4841817 - DNA, 25 bp, Homo sapien
cgtgggcacaagaggtatatcagca

SEQ ID NO: 4841818 - DNA, 25 bp, Homo sapien
gacacggacgttgttgcacaaagca

SEQ ID NO: 4841819 - DNA, 25 bp, Homo sapien
caccgtagggtaactggagcgtcac

SEQ ID NO: 4841820 - DNA, 25 bp, Homo sapien
tgagagcctgccctgaaatggcact

SEQ ID NO: 4841821 - DNA, 25 bp, Homo sapien
cactcagtgttgtcctaaggtcgca

SEQ ID NO: 4841822 - DNA, 25 bp, Homo sapien
gagcaaattgaaaagagcacagggt

SEQ ID NO: 4841823 - DNA, 25 bp, Homo sapien
tagatgtaaagtaacgtcatacggc

SEQ ID NO: 4841824 - DNA, 25 bp, Homo sapien
tgcattgactggtcaccacatgaga

SEQ ID NO: 4841825 - DNA, 25 bp, Homo sapien
ttatccctcgtctttcctgctcttg

SEQ ID NO: 4841826 - DNA, 25 bp, Homo sapien
cctgctcttgtgtgagcttctacca

SEQ ID NO: 4841827 - DNA, 25 bp, Homo sapien
gggaggagtcgcttgtcctaagaaa

SEQ ID NO: 4841828 - DNA, 25 bp, Homo sapien
ttttatattatgtccgacaatccca

SEQ ID NO: 4841829 - DNA, 25 bp, Homo sapien
attttatattatgtccgacaatccc

SEQ ID NO: 4841830 - DNA, 25 bp, Homo sapien
ttgaaagtgtcagccttggaaatag

SEQ ID NO: 4841831 - DNA, 25 bp, Homo sapien
tttgaaagtgtcagccttggaaata

SEQ ID NO: 4841832 - DNA, 25 bp, Homo sapien
cttagtaccggggtgatgaaatatt

SEQ ID NO: 4841833 - DNA, 25 bp, Homo sapien
tgtgattcaagttgacccaaataac

SEQ ID NO: 4841834 - DNA, 25 bp, Homo sapien
gtgattcaagttgacccaaataaca

SEQ ID NO: 4841835 - DNA, 25 bp, Homo sapien
cctgcaggatttaagggaacccctg

SEQ ID NO: 4841836 - DNA, 25 bp, Homo sapien
gaacccctggcttttcagtactgtg

SEQ ID NO: 4841837 - DNA, 25 bp, Homo sapien
tggaaactgggtcatcggctgccat

SEQ ID NO: 4841838 - DNA, 25 bp, Homo sapien
cacgttagtaatgaatcctgcagga

SEQ ID NO: 4841839 - DNA, 25 bp, Homo sapien
ggctctgccgtgtcaggaatcctca

SEQ ID NO: 4841840 - DNA, 25 bp, Homo sapien
ttcggtggctctgccgtgtcaggaa

SEQ ID NO: 4841841 - DNA, 25 bp, Homo sapien
gctttgaggttgttcggtggctctg

SEQ ID NO: 4841842 - DNA, 25 bp, Homo sapien
gttgttcggtggctctgccgtgtca

SEQ ID NO: 4841843 - DNA, 25 bp, Homo sapien
ggcactctgatatattattactggg

SEQ ID NO: 4841844 - DNA, 25 bp, Homo sapien
ggcactgggcactctgatatattat

SEQ ID NO: 4841845 - DNA, 25 bp, Homo sapien
ttgttggatcgaggttatctttcct

SEQ ID NO: 4841846 - DNA, 25 bp, Homo sapien
ccatcactggcaaagcgtgttgttg

SEQ ID NO: 4841847 - DNA, 25 bp, Homo sapien
ccctgtctgctctccgtggagacag

SEQ ID NO: 4841848 - DNA, 25 bp, Homo sapien
ctgtctgctctccgtggagacagcc

SEQ ID NO: 4841849 - DNA, 25 bp, Homo sapien
cctgtctgctctccgtggagacagc

SEQ ID NO: 4841850 - DNA, 25 bp, Homo sapien
caaaggattgcttcgaaaccttcga

SEQ ID NO: 4841851 - DNA, 25 bp, Homo sapien
gactgacggccaaaggattgcttcg

SEQ ID NO: 4841852 - DNA, 25 bp, Homo sapien
gcttcgaaaccttcgacttccttca

SEQ ID NO: 4841853 - DNA, 25 bp, Homo sapien
acacaggtctgtctcgcatagatct

SEQ ID NO: 4841854 - DNA, 25 bp, Homo sapien
tgaaaaccataacaactccacaagc

SEQ ID NO: 4841855 - DNA, 25 bp, Homo sapien
gatgtggttcagaggcagcttctag

SEQ ID NO: 4841856 - DNA, 25 bp, Homo sapien
acaggatctgtgacattattggttg

SEQ ID NO: 4841857 - DNA, 25 bp, Homo sapien
caggatctgtgacattattggttgt

SEQ ID NO: 4841858 - DNA, 25 bp, Homo sapien
aatcaggatgttgaagagatacttg

SEQ ID NO: 4841859 - DNA, 25 bp, Homo sapien
tacttgcattcccatggtctgtcgc

SEQ ID NO: 4841860 - DNA, 25 bp, Homo sapien
tttcctgtaagtgttggccggtctg

SEQ ID NO: 4841861 - DNA, 25 bp, Homo sapien
cctgtaagtgttggccggtctgaga

SEQ ID NO: 4841862 - DNA, 25 bp, Homo sapien
acatcacaggagaacagggcggctt

SEQ ID NO: 4841863 - DNA, 25 bp, Homo sapien
acaagatcatcactctcaggtgcca

SEQ ID NO: 4841864 - DNA, 25 bp, Homo sapien
gcaagttgcaaacctgctgatgagg

SEQ ID NO: 4841865 - DNA, 25 bp, Homo sapien
tatttaaacgttatgacgctgcaag

SEQ ID NO: 4841866 - DNA, 25 bp, Homo sapien
gctacagactgggaagcacctcaga

SEQ ID NO: 4841867 - DNA, 25 bp, Homo sapien
gcccaaatttgagtctacagtgagc

SEQ ID NO: 4841868 - DNA, 25 bp, Homo sapien
taaagatataagagacaggcccagt

SEQ ID NO: 4841869 - DNA, 25 bp, Homo sapien
aatagagtagcaagaagttttccgg

SEQ ID NO: 4841870 - DNA, 25 bp, Homo sapien
tgtctgtctgccatccaagtactaa

SEQ ID NO: 4841871 - DNA, 25 bp, Homo sapien
gttcagggtgatatgacagtagact

SEQ ID NO: 4841872 - DNA, 25 bp, Homo sapien
tcaaagatcaggcgagattgggtgt

SEQ ID NO: 4841873 - DNA, 25 bp, Homo sapien
ttagcttcaaagatcaggcgagatt

SEQ ID NO: 4841874 - DNA, 25 bp, Homo sapien
catggaagtccccaatgattctgca

SEQ ID NO: 4841875 - DNA, 25 bp, Homo sapien
ggagacacaagcactaacaccagtt

SEQ ID NO: 4841876 - DNA, 25 bp, Homo sapien
catgatgaatccaatagcgaaccac

SEQ ID NO: 4841877 - DNA, 25 bp, Homo sapien
tcaccagtgagtacacagatggatc

SEQ ID NO: 4841878 - DNA, 25 bp, Homo sapien
ctgagctctgtttgcccagtgcctg

SEQ ID NO: 4841879 - DNA, 25 bp, Homo sapien
tgagctctgtttgcccagtgcctgg

SEQ ID NO: 4841880 - DNA, 25 bp, Homo sapien
gctctgtttgcccagtgcctggtgg

SEQ ID NO: 4841881 - DNA, 25 bp, Homo sapien
tgtttgcccagtgcctggtggccat

SEQ ID NO: 4841882 - DNA, 25 bp, Homo sapien
gcgtagtcatgcgactcagtatcgg

SEQ ID NO: 4841883 - DNA, 25 bp, Homo sapien
ctgcgtagtcatgcgactcagtatc

SEQ ID NO: 4841884 - DNA, 25 bp, Homo sapien
cgtagtcatgcgactcagtatcggg

SEQ ID NO: 4841885 - DNA, 25 bp, Homo sapien
tgcgtagtcatgcgactcagtatcg

SEQ ID NO: 4841886 - DNA, 25 bp, Homo sapien
ttggcggcccagtaggaacctaagc

SEQ ID NO: 4841887 - DNA, 25 bp, Homo sapien
gacctcgttattaagtgggctttga

SEQ ID NO: 4841888 - DNA, 25 bp, Homo sapien
taagcaccttgacttcactctgaaa

SEQ ID NO: 4841889 - DNA, 25 bp, Homo sapien
gtagttgtgtcattctttgcctgca

SEQ ID NO: 4841890 - DNA, 25 bp, Homo sapien
ttcacagccagagacttcactgggc

SEQ ID NO: 4841891 - DNA, 25 bp, Homo sapien
ggttgccttctcaaatacaagggcc

SEQ ID NO: 4841892 - DNA, 25 bp, Homo sapien
gctaggaccagtgagcaaatcgtct

SEQ ID NO: 4841893 - DNA, 25 bp, Homo sapien
ttcactgggcaggtgcttattgtca

SEQ ID NO: 4841894 - DNA, 25 bp, Homo sapien
tgcagaggtgagaaactgccctcca

SEQ ID NO: 4841895 - DNA, 25 bp, Homo sapien
cagtacttcccttggtgtatttctt

SEQ ID NO: 4841896 - DNA, 25 bp, Homo sapien
tttgctgatccatcggccctctcag

SEQ ID NO: 4841897 - DNA, 25 bp, Homo sapien
gcagaggtgagaaactgccctccag

SEQ ID NO: 4841898 - DNA, 25 bp, Homo sapien
tagggtctaaatgttcggatgctgg

SEQ ID NO: 4841899 - DNA, 25 bp, Homo sapien
ctaaatgttcggatgctgggtacat

SEQ ID NO: 4841900 - DNA, 25 bp, Homo sapien
cttaaggatagggtctaaatgttcg

SEQ ID NO: 4841901 - DNA, 25 bp, Homo sapien
tttttgctacatcttgtaagctcct

SEQ ID NO: 4841902 - DNA, 25 bp, Homo sapien
cccggagggaggtgaccacttagca

SEQ ID NO: 4841903 - DNA, 25 bp, Homo sapien
tgaccacttagcagcggatacagtg

SEQ ID NO: 4841904 - DNA, 25 bp, Homo sapien
ggaggtgaccacttagcagcggata

SEQ ID NO: 4841905 - DNA, 25 bp, Homo sapien
cttagcagcggatacagtggtgact

SEQ ID NO: 4841906 - DNA, 25 bp, Homo sapien
cgcgtcgcacgtggcaacaggtgca

SEQ ID NO: 4841907 - DNA, 25 bp, Homo sapien
tctgcgtctttgctcccggagcgct

SEQ ID NO: 4841908 - DNA, 25 bp, Homo sapien
gaggcccgagttcggctatttacaa

SEQ ID NO: 4841909 - DNA, 25 bp, Homo sapien
aagtgcgcgctggaatctgttcccg

SEQ ID NO: 4841910 - DNA, 25 bp, Homo sapien
tgtttagagaaaagtaggtcgagcc

SEQ ID NO: 4841911 - DNA, 25 bp, Homo sapien
gacagctgtcgatgaaatttgctca

SEQ ID NO: 4841912 - DNA, 25 bp, Homo sapien
gataatacagactgcgaatcagccc

SEQ ID NO: 4841913 - DNA, 25 bp, Homo sapien
ttttacggacctagaagacagctgt

SEQ ID NO: 4841914 - DNA, 25 bp, Homo sapien
cataattgcctcgtgacttgcggaa

SEQ ID NO: 4841915 - DNA, 25 bp, Homo sapien
caagaactattctgcttagggatgg

SEQ ID NO: 4841916 - DNA, 25 bp, Homo sapien
gataatctgacctatatacccctgg

SEQ ID NO: 4841917 - DNA, 25 bp, Homo sapien
ccaatgcctgcgtaagtagctctaa

SEQ ID NO: 4841918 - DNA, 25 bp, Homo sapien
gaatatttgccttgaggagtccctg

SEQ ID NO: 4841919 - DNA, 25 bp, Homo sapien
ccctgaagatgtccctagaagttaa

SEQ ID NO: 4841920 - DNA, 25 bp, Homo sapien
gcaggtcagcatcagagttcagaga

SEQ ID NO: 4841921 - DNA, 25 bp, Homo sapien
cacgcagggccaagataaactctta

SEQ ID NO: 4841922 - DNA, 25 bp, Homo sapien
tggtttaggaatagtctgtgctcac

SEQ ID NO: 4841923 - DNA, 25 bp, Homo sapien
tgactgcatcccttttgaaaatggg

SEQ ID NO: 4841924 - DNA, 25 bp, Homo sapien
ctacagagaaaagaacgaggctaat

SEQ ID NO: 4841925 - DNA, 25 bp, Homo sapien
ttagctaacatggagcgctttggcc

SEQ ID NO: 4841926 - DNA, 25 bp, Homo sapien
gggacctctgatctaaagaactaac

SEQ ID NO: 4841927 - DNA, 25 bp, Homo sapien
catatctaggtgtcaaagctaagtc

SEQ ID NO: 4841928 - DNA, 25 bp, Homo sapien
caagatctgatagcttaaaaatggc

SEQ ID NO: 4841929 - DNA, 25 bp, Homo sapien
taagtgtccatcctggatttctcag

SEQ ID NO: 4841930 - DNA, 25 bp, Homo sapien
tcaggtggtaatgcttgcttgatgc

SEQ ID NO: 4841931 - DNA, 25 bp, Homo sapien
tggtaatgcttgcttgatgccactc

SEQ ID NO: 4841932 - DNA, 25 bp, Homo sapien
ggtggtaatgcttgcttgatgccac

SEQ ID NO: 4841933 - DNA, 25 bp, Homo sapien
caggtggtaatgcttgcttgatgcc

SEQ ID NO: 4841934 - DNA, 25 bp, Homo sapien
gattatacaattaattctggttctt

SEQ ID NO: 4841935 - DNA, 25 bp, Homo sapien
gagatttccaatatatccctcccct

SEQ ID NO: 4841936 - DNA, 25 bp, Homo sapien
catatatacatagctcccccgttat

SEQ ID NO: 4841937 - DNA, 25 bp, Homo sapien
tacatctatctcactaaacaaaatt

SEQ ID NO: 4841938 - DNA, 25 bp, Homo sapien
taagggaatgaagacggacaggact

SEQ ID NO: 4841939 - DNA, 25 bp, Homo sapien
tgaaacctttagcttcaggccactc

SEQ ID NO: 4841940 - DNA, 25 bp, Homo sapien
cttgattgacaatgacagcactgac

SEQ ID NO: 4841941 - DNA, 25 bp, Homo sapien
tcgtgtccggtaaaaacatgcatag

SEQ ID NO: 4841942 - DNA, 25 bp, Homo sapien
cagttacagctcaggacaagtgtca

SEQ ID NO: 4841943 - DNA, 25 bp, Homo sapien
ttttgttagagacacgatttcacta

SEQ ID NO: 4841944 - DNA, 25 bp, Homo sapien
cagcaccacacttcttgtactgtct

SEQ ID NO: 4841945 - DNA, 25 bp, Homo sapien
acacttcttgtactgtctgcagaac

SEQ ID NO: 4841946 - DNA, 25 bp, Homo sapien
tttgttagagacacgatttcactat

SEQ ID NO: 4841947 - DNA, 25 bp, Homo sapien
aatatagcgagactgcatctgcagg

SEQ ID NO: 4841948 - DNA, 25 bp, Homo sapien
aaagtatgtctaattacttattaag

SEQ ID NO: 4841949 - DNA, 25 bp, Homo sapien
taagtataagtttagtcttcatatt

SEQ ID NO: 4841950 - DNA, 25 bp, Homo sapien
gtatgtctaattacttattaagtat

SEQ ID NO: 4841951 - DNA, 25 bp, Homo sapien
gcactgattgtctgggacttgtaca

SEQ ID NO: 4841952 - DNA, 25 bp, Homo sapien
cagtgtcttcgggaggcttcatagg

SEQ ID NO: 4841953 - DNA, 25 bp, Homo sapien
tggtctggaacctttgcatccgccc

SEQ ID NO: 4841954 - DNA, 25 bp, Homo sapien
tggaacacccttgagcttggtctgg

SEQ ID NO: 4841955 - DNA, 25 bp, Homo sapien
gaatacagcagccaccaatcacatg

SEQ ID NO: 4841956 - DNA, 25 bp, Homo sapien
gctaaattgctatcaagctgcgctg

SEQ ID NO: 4841957 - DNA, 25 bp, Homo sapien
cttggagacgcaatgaaaggacact

SEQ ID NO: 4841958 - DNA, 25 bp, Homo sapien
acatgtgactcctgcttacttgaaa

SEQ ID NO: 4841959 - DNA, 25 bp, Homo sapien
tattttagaggctgcattcatcttg

SEQ ID NO: 4841960 - DNA, 25 bp, Homo sapien
agaggctgcattcatcttgttgaca

SEQ ID NO: 4841961 - DNA, 25 bp, Homo sapien
gtgtctgacacatgacaggatctcg

SEQ ID NO: 4841962 - DNA, 25 bp, Homo sapien
caggatctcgaatgttcgttgactg

SEQ ID NO: 4841963 - DNA, 25 bp, Homo sapien
gattgtctggtacacctggcatggg

SEQ ID NO: 4841964 - DNA, 25 bp, Homo sapien
tgtgctttcagtacagcagatatgc

SEQ ID NO: 4841965 - DNA, 25 bp, Homo sapien
gcggcccctacacggctaaaacaga

SEQ ID NO: 4841966 - DNA, 25 bp, Homo sapien
gaatggtgtatactacagcggcccc

SEQ ID NO: 4841967 - DNA, 25 bp, Homo sapien
attttgacaagattatgggtgcagc

SEQ ID NO: 4841968 - DNA, 25 bp, Homo sapien
attagaaactaagctcacacctgta

SEQ ID NO: 4841969 - DNA, 25 bp, Homo sapien
tcatgctctaagtcaggataacctg

SEQ ID NO: 4841970 - DNA, 25 bp, Homo sapien
tccgtctgataaaactgtaagttcc

SEQ ID NO: 4841971 - DNA, 25 bp, Homo sapien
tacaacctagcaatttgtgcaaaca

SEQ ID NO: 4841972 - DNA, 25 bp, Homo sapien
taaagaatttgggtgctagcggatt

SEQ ID NO: 4841973 - DNA, 25 bp, Homo sapien
ggcacatgattttctacagcatact

SEQ ID NO: 4841974 - DNA, 25 bp, Homo sapien
tgcaaacaatgcactaggcacatga

SEQ ID NO: 4841975 - DNA, 25 bp, Homo sapien
tttgcaggcgctcgaggactgtgcc

SEQ ID NO: 4841976 - DNA, 25 bp, Homo sapien
ccaggtgcgcctgcttgagacccgg

SEQ ID NO: 4841977 - DNA, 25 bp, Homo sapien
cccgggtcaaacagcaacaggtcaa

SEQ ID NO: 4841978 - DNA, 25 bp, Homo sapien
gcctgcttgagacccgggtcaaaca

SEQ ID NO: 4841979 - DNA, 25 bp, Homo sapien
gagattgagagcacagtccttgaac

SEQ ID NO: 4841980 - DNA, 25 bp, Homo sapien
tgagccctttcctaccgcatggaat

SEQ ID NO: 4841981 - DNA, 25 bp, Homo sapien
gaatttgaatcccacctccgcttac

SEQ ID NO: 4841982 - DNA, 25 bp, Homo sapien
tggagatttacatgccaacagtaca

SEQ ID NO: 4841983 - DNA, 25 bp, Homo sapien
gccttgcagaggtacattctacttg

SEQ ID NO: 4841984 - DNA, 25 bp, Homo sapien
gcttggcatctttgtggaactacgc

SEQ ID NO: 4841985 - DNA, 25 bp, Homo sapien
tttttatataatgccccaggccacg

SEQ ID NO: 4841986 - DNA, 25 bp, Homo sapien
gcagagtgtttagtgatgcccaaac

SEQ ID NO: 4841987 - DNA, 25 bp, Homo sapien
tatactctgtagcagatggtctgca

SEQ ID NO: 4841988 - DNA, 25 bp, Homo sapien
cacatgaattaaggtgacagcagca

SEQ ID NO: 4841989 - DNA, 25 bp, Homo sapien
gagataccagtagattatgccaagg

SEQ ID NO: 4841990 - DNA, 25 bp, Homo sapien
aactgggagcagattgatcaactaa

SEQ ID NO: 4841991 - DNA, 25 bp, Homo sapien
ttctcaaaatgctgcagatacaagg

SEQ ID NO: 4841992 - DNA, 25 bp, Homo sapien
ttccctcttctcaaaatgctgcaga

SEQ ID NO: 4841993 - DNA, 25 bp, Homo sapien
cattcccaaagcaacagcctctttc

SEQ ID NO: 4841994 - DNA, 25 bp, Homo sapien
cctcttctcaaaatgctgcagatac

SEQ ID NO: 4841995 - DNA, 25 bp, Homo sapien
cctgcttttactgaattactgtaat

SEQ ID NO: 4841996 - DNA, 25 bp, Homo sapien
caagtctagcctcttttggctgttc

SEQ ID NO: 4841997 - DNA, 25 bp, Homo sapien
ttctctcaagtctagcctcttttgg

SEQ ID NO: 4841998 - DNA, 25 bp, Homo sapien
ctcaagtctagcctcttttggctgt

SEQ ID NO: 4841999 - DNA, 25 bp, Homo sapien
tttccattacatctacagtgggaaa

SEQ ID NO: 4842000 - DNA, 25 bp, Homo sapien
ctgaatgctctcaagcctcgaagtt

SEQ ID NO: 4842001 - DNA, 25 bp, Homo sapien
gtggggaaaccatgtttccattaca

SEQ ID NO: 4842002 - DNA, 25 bp, Homo sapien
gctctcaagcctcgaagttggtggg

SEQ ID NO: 4842003 - DNA, 25 bp, Homo sapien
tccacattgcgatggacccctggac

SEQ ID NO: 4842004 - DNA, 25 bp, Homo sapien
gctggttcccctacaaggttgacca

SEQ ID NO: 4842005 - DNA, 25 bp, Homo sapien
taaatatcagtggaatccagagctc

SEQ ID NO: 4842006 - DNA, 25 bp, Homo sapien
gagctcagggctgtcgcagtttcca

SEQ ID NO: 4842007 - DNA, 25 bp, Homo sapien
caattagttggactttaaggattat

SEQ ID NO: 4842008 - DNA, 25 bp, Homo sapien
ctatctctcgctcgttcccagaggc

SEQ ID NO: 4842009 - DNA, 25 bp, Homo sapien
tgcttggagtggaccgctcctttga

SEQ ID NO: 4842010 - DNA, 25 bp, Homo sapien
tgccctgctgatggtgcttggagtg

SEQ ID NO: 4842011 - DNA, 25 bp, Homo sapien
ggaccgctcctttgatgcacaggcc

SEQ ID NO: 4842012 - DNA, 25 bp, Homo sapien
tccctgaacaaaggtcttgtgggaa

SEQ ID NO: 4842013 - DNA, 25 bp, Homo sapien
cagcaggaggttgcttgtaaaagag

SEQ ID NO: 4842014 - DNA, 25 bp, Homo sapien
agggaacagcaggaggttgcttgta

SEQ ID NO: 4842015 - DNA, 25 bp, Homo sapien
gaacagcaggaggttgcttgtaaaa

SEQ ID NO: 4842016 - DNA, 25 bp, Homo sapien
ccgccatcttaggatctcattgtgg

SEQ ID NO: 4842017 - DNA, 25 bp, Homo sapien
gagccgcaatgcgagctagactgga

SEQ ID NO: 4842018 - DNA, 25 bp, Homo sapien
gtggccgccttttcgacctcagcta

SEQ ID NO: 4842019 - DNA, 25 bp, Homo sapien
tgtcaaaggcagagcgacagtcagc

SEQ ID NO: 4842020 - DNA, 25 bp, Homo sapien
cccgctccacacttcaaagctgttt

SEQ ID NO: 4842021 - DNA, 25 bp, Homo sapien
agaaactagtttttgcagctcagaa

SEQ ID NO: 4842022 - DNA, 25 bp, Homo sapien
tcctttcccgctccacacttcaaag

SEQ ID NO: 4842023 - DNA, 25 bp, Homo sapien
gtttagaaactagtttttgcagctc

SEQ ID NO: 4842024 - DNA, 25 bp, Homo sapien
tgacagggcctttccgaacaaagat

SEQ ID NO: 4842025 - DNA, 25 bp, Homo sapien
aaaagcagagcaaacagggcggtga

SEQ ID NO: 4842026 - DNA, 25 bp, Homo sapien
gaacaaagatataccggcaggccaa

SEQ ID NO: 4842027 - DNA, 25 bp, Homo sapien
tgtttactaagcagagaggatcctc

SEQ ID NO: 4842028 - DNA, 25 bp, Homo sapien
actgtgtcgactcaattctggctaa

SEQ ID NO: 4842029 - DNA, 25 bp, Homo sapien
cagtaactggcgcatggtttcactt

SEQ ID NO: 4842030 - DNA, 25 bp, Homo sapien
caaaaatgccttgctagctagcatc

SEQ ID NO: 4842031 - DNA, 25 bp, Homo sapien
tccctgcttgcatgaactaaacact

SEQ ID NO: 4842032 - DNA, 25 bp, Homo sapien
catattgttgagcctgtcatcaaca

SEQ ID NO: 4842033 - DNA, 25 bp, Homo sapien
atattgttgagcctgtcatcaacat

SEQ ID NO: 4842034 - DNA, 25 bp, Homo sapien
tattgttgagcctgtcatcaacatt

SEQ ID NO: 4842035 - DNA, 25 bp, Homo sapien
attgttgagcctgtcatcaacattc

SEQ ID NO: 4842036 - DNA, 25 bp, Homo sapien
taaatcactgaagtttatccgctgt

SEQ ID NO: 4842037 - DNA, 25 bp, Homo sapien
gacgactccggagaaatatcattgg

SEQ ID NO: 4842038 - DNA, 25 bp, Homo sapien
ttcttcgccttccaactcctggtga

SEQ ID NO: 4842039 - DNA, 25 bp, Homo sapien
gactcatgtatctactgtgtgggaa

SEQ ID NO: 4842040 - DNA, 25 bp, Homo sapien
tgttgttagcagctgttgctctacc

SEQ ID NO: 4842041 - DNA, 25 bp, Homo sapien
agggctttcggttttcactaagctg

SEQ ID NO: 4842042 - DNA, 25 bp, Homo sapien
cactaagctgacgtttgttgttagc

SEQ ID NO: 4842043 - DNA, 25 bp, Homo sapien
gctgttgctctaccttgggaatcac

SEQ ID NO: 4842044 - DNA, 25 bp, Homo sapien
tttacactgtgctgatccaatcgtt

SEQ ID NO: 4842045 - DNA, 25 bp, Homo sapien
ttcagacacctgacagttttgcaag

SEQ ID NO: 4842046 - DNA, 25 bp, Homo sapien
agaggtcattacttaaagcagaagc

SEQ ID NO: 4842047 - DNA, 25 bp, Homo sapien
catctttgctcttgttagtattaat

SEQ ID NO: 4842048 - DNA, 25 bp, Homo sapien
tgatctattagatgagtaaggcgct

SEQ ID NO: 4842049 - DNA, 25 bp, Homo sapien
gcgctcaacattagcagatctctca

SEQ ID NO: 4842050 - DNA, 25 bp, Homo sapien
gatcttcccgcatggaactagcttt

SEQ ID NO: 4842051 - DNA, 25 bp, Homo sapien
taatcgcgaatttgaacaagcctgc

SEQ ID NO: 4842052 - DNA, 25 bp, Homo sapien
tgaagcctcagactgcacatctatg

SEQ ID NO: 4842053 - DNA, 25 bp, Homo sapien
tgaatctatagtccgaacatcctcc

SEQ ID NO: 4842054 - DNA, 25 bp, Homo sapien
ctcagctacagaaccagatcccaca

SEQ ID NO: 4842055 - DNA, 25 bp, Homo sapien
cacatctatgtttagcgatgtgctc

SEQ ID NO: 4842056 - DNA, 25 bp, Homo sapien
tagtttgtcctcaatgcacggccga

SEQ ID NO: 4842057 - DNA, 25 bp, Homo sapien
tgtagtaacgtcaatgtctgaaacc

SEQ ID NO: 4842058 - DNA, 25 bp, Homo sapien
ggctatatttcctattaggcctcag

SEQ ID NO: 4842059 - DNA, 25 bp, Homo sapien
tgagggaaatccacgtttttggcta

SEQ ID NO: 4842060 - DNA, 25 bp, Homo sapien
gccgtccctgtagagctcttagttg

SEQ ID NO: 4842061 - DNA, 25 bp, Homo sapien
tcttccataggctcctgctgaggat

SEQ ID NO: 4842062 - DNA, 25 bp, Homo sapien
cagaatcatccatcactgcaatagc

SEQ ID NO: 4842063 - DNA, 25 bp, Homo sapien
caatagcttgctctgctttatgttg

SEQ ID NO: 4842064 - DNA, 25 bp, Homo sapien
tactgacgccagataagctacctgc

SEQ ID NO: 4842065 - DNA, 25 bp, Homo sapien
ctgagaatcacgaagctgattatga

SEQ ID NO: 4842066 - DNA, 25 bp, Homo sapien
ttagttcagatgtgatactgacgcc

SEQ ID NO: 4842067 - DNA, 25 bp, Homo sapien
atgaaaacgctgaattaagtcattc

SEQ ID NO: 4842068 - DNA, 25 bp, Homo sapien
gaatatctcccattatgcttagtca

SEQ ID NO: 4842069 - DNA, 25 bp, Homo sapien
taaccccaacctggaatcaggcatc

SEQ ID NO: 4842070 - DNA, 25 bp, Homo sapien
tcaggcatctaccattctctacatg

SEQ ID NO: 4842071 - DNA, 25 bp, Homo sapien
ctttgcaagaatccactagggctta

SEQ ID NO: 4842072 - DNA, 25 bp, Homo sapien
caggtaaacgttctgaagctgatgg

SEQ ID NO: 4842073 - DNA, 25 bp, Homo sapien
tcgaagtgtatgaagttctccaagc

SEQ ID NO: 4842074 - DNA, 25 bp, Homo sapien
gttaagatgctgatctcgaagtgta

SEQ ID NO: 4842075 - DNA, 25 bp, Homo sapien
tctgggaaacctccctagttaatga

SEQ ID NO: 4842076 - DNA, 25 bp, Homo sapien
tatgtccacgtatcaaacagttgcc

SEQ ID NO: 4842077 - DNA, 25 bp, Homo sapien
ctttcatatatattggcttgcaact

SEQ ID NO: 4842078 - DNA, 25 bp, Homo sapien
tagaaacttttcatatgcaagtctt

SEQ ID NO: 4842079 - DNA, 25 bp, Homo sapien
aatcaaagtactaactggattaact

SEQ ID NO: 4842080 - DNA, 25 bp, Homo sapien
ttaaacagggccactatgaatcatg

SEQ ID NO: 4842081 - DNA, 25 bp, Homo sapien
aaagtgactgtggtacctcaaacca

SEQ ID NO: 4842082 - DNA, 25 bp, Homo sapien
gataatggctaatcctctatggtcc

SEQ ID NO: 4842083 - DNA, 25 bp, Homo sapien
cagtttttcatacccacagatcagg

SEQ ID NO: 4842084 - DNA, 25 bp, Homo sapien
tgatgtgaggctattggattctcca

SEQ ID NO: 4842085 - DNA, 25 bp, Homo sapien
tctccattgacaaccggtgccaagc

SEQ ID NO: 4842086 - DNA, 25 bp, Homo sapien
gatggattgaggtggccttcgtttt

SEQ ID NO: 4842087 - DNA, 25 bp, Homo sapien
gaagtacttctctgatcgacactcc

SEQ ID NO: 4842088 - DNA, 25 bp, Homo sapien
tgttacatcacatctcttagacaac

SEQ ID NO: 4842089 - DNA, 25 bp, Homo sapien
tagacaactcaaattatgcccacac

SEQ ID NO: 4842090 - DNA, 25 bp, Homo sapien
aagaaagtaacatcagttcacagaa

SEQ ID NO: 4842091 - DNA, 25 bp, Homo sapien
tacctatcccttaagaatgtttaca

SEQ ID NO: 4842092 - DNA, 25 bp, Homo sapien
gaatatagaaatattttaactgtaa

SEQ ID NO: 4842093 - DNA, 25 bp, Homo sapien
tgaatatagaaatattttaactgta

SEQ ID NO: 4842094 - DNA, 25 bp, Homo sapien
ctgaatatagaaatattttaactgt

SEQ ID NO: 4842095 - DNA, 25 bp, Homo sapien
tagctcattcaatctctttcgaact

SEQ ID NO: 4842096 - DNA, 25 bp, Homo sapien
catcatgtctgacgtttgttcataa

SEQ ID NO: 4842097 - DNA, 25 bp, Homo sapien
cagaatcatattctgactcttcagt

SEQ ID NO: 4842098 - DNA, 25 bp, Homo sapien
caggctcggaattttcatgctcaga

SEQ ID NO: 4842099 - DNA, 25 bp, Homo sapien
tccaagtggaagctacttgtggatt

SEQ ID NO: 4842100 - DNA, 25 bp, Homo sapien
ccaagtggaagctacttgtggattt

SEQ ID NO: 4842101 - DNA, 25 bp, Homo sapien
tgtgcattactatgactatttactt

SEQ ID NO: 4842102 - DNA, 25 bp, Homo sapien
gcattactatgactatttacttcat

SEQ ID NO: 4842103 - DNA, 25 bp, Homo sapien
gagcccttatgttggcagcagatct

SEQ ID NO: 4842104 - DNA, 25 bp, Homo sapien
taaagaaggaggcatgtttagagcc

SEQ ID NO: 4842105 - DNA, 25 bp, Homo sapien
cacaattagaattaactgttcgccc

SEQ ID NO: 4842106 - DNA, 25 bp, Homo sapien
cagcagatctgttgttaatttcaca

SEQ ID NO: 4842107 - DNA, 25 bp, Homo sapien
tccccttctctattatatcgacaat

SEQ ID NO: 4842108 - DNA, 25 bp, Homo sapien
tgttccccttctctattatatcgac

SEQ ID NO: 4842109 - DNA, 25 bp, Homo sapien
tgtgcaacatgaatctcctgttccc

SEQ ID NO: 4842110 - DNA, 25 bp, Homo sapien
gtgcaacatgaatctcctgttcccc

SEQ ID NO: 4842111 - DNA, 25 bp, Homo sapien
tcctcctcctcctcatcatcttcac

SEQ ID NO: 4842112 - DNA, 25 bp, Homo sapien
ctgtgactagataatgaagctccac

SEQ ID NO: 4842113 - DNA, 25 bp, Homo sapien
tgtgactagataatgaagctccact

SEQ ID NO: 4842114 - DNA, 25 bp, Homo sapien
gtgactagataatgaagctccactg

SEQ ID NO: 4842115 - DNA, 25 bp, Homo sapien
tgactagataatgaagctccactga

SEQ ID NO: 4842116 - DNA, 25 bp, Homo sapien
tggatgctcatcaaccagactgctc

SEQ ID NO: 4842117 - DNA, 25 bp, Homo sapien
gtttctgttttgcagccataagtcg

SEQ ID NO: 4842118 - DNA, 25 bp, Homo sapien
tgtaccatagcaacaagatcttgta

SEQ ID NO: 4842119 - DNA, 25 bp, Homo sapien
cataagtcggttgatcttctgttca

SEQ ID NO: 4842120 - DNA, 25 bp, Homo sapien
catccaaatttgatgcactggcaga

SEQ ID NO: 4842121 - DNA, 25 bp, Homo sapien
aaatcatccaaatttgatgcactgg

SEQ ID NO: 4842122 - DNA, 25 bp, Homo sapien
gatgcactggcagagataactcctt

SEQ ID NO: 4842123 - DNA, 25 bp, Homo sapien
tgcactggcagagataactccttga

SEQ ID NO: 4842124 - DNA, 25 bp, Homo sapien
tagtttagcctcataaaatttctct

SEQ ID NO: 4842125 - DNA, 25 bp, Homo sapien
gtagtttagcctcataaaatttctc

SEQ ID NO: 4842126 - DNA, 25 bp, Homo sapien
tgtagtttagcctcataaaatttct

SEQ ID NO: 4842127 - DNA, 25 bp, Homo sapien
ctgtagtttagcctcataaaatttc

SEQ ID NO: 4842128 - DNA, 25 bp, Homo sapien
ttcctgcaattgttttagctctctc

SEQ ID NO: 4842129 - DNA, 25 bp, Homo sapien
caattgttttagctctctctgttgc

SEQ ID NO: 4842130 - DNA, 25 bp, Homo sapien
tgccgtttgcaatgcttgaattttc

SEQ ID NO: 4842131 - DNA, 25 bp, Homo sapien
gtaagtcagggcatgccgtttgcaa

SEQ ID NO: 4842132 - DNA, 25 bp, Homo sapien
tttgtatacttaacccacctttgca

SEQ ID NO: 4842133 - DNA, 25 bp, Homo sapien
tagatacagtaggaaaggcaagggt

SEQ ID NO: 4842134 - DNA, 25 bp, Homo sapien
caacctaactgaagataaagctagc

SEQ ID NO: 4842135 - DNA, 25 bp, Homo sapien
taaagctagccaataggccgggagc

SEQ ID NO: 4842136 - DNA, 25 bp, Homo sapien
ggtctcgtgttgattaacagttggg

SEQ ID NO: 4842137 - DNA, 25 bp, Homo sapien
tatctactattgaagaatcttcagg

SEQ ID NO: 4842138 - DNA, 25 bp, Homo sapien
gggacagttacccacactagcagct

SEQ ID NO: 4842139 - DNA, 25 bp, Homo sapien
aacagatttgcttgtactggtctcg

SEQ ID NO: 4842140 - DNA, 25 bp, Homo sapien
tcagccatcagagcttcaagctgct

SEQ ID NO: 4842141 - DNA, 25 bp, Homo sapien
gatgcagtttcagctagaccttgcc

SEQ ID NO: 4842142 - DNA, 25 bp, Homo sapien
tcagatccatcacttctcaatgaca

SEQ ID NO: 4842143 - DNA, 25 bp, Homo sapien
tgaggagtacataggttctcagatc

SEQ ID NO: 4842144 - DNA, 25 bp, Homo sapien
tcagaaaggtaaccgtcttcatctc

SEQ ID NO: 4842145 - DNA, 25 bp, Homo sapien
tcatctgtccgaacaattccttcag

SEQ ID NO: 4842146 - DNA, 25 bp, Homo sapien
cacactgttagaaggacacacagaa

SEQ ID NO: 4842147 - DNA, 25 bp, Homo sapien
tatcattggaactggcatcttgctc

SEQ ID NO: 4842148 - DNA, 25 bp, Homo sapien
caaatttctagccatgttgcacaga

SEQ ID NO: 4842149 - DNA, 25 bp, Homo sapien
gcttgctgtcagtcaaaaagacctg

SEQ ID NO: 4842150 - DNA, 25 bp, Homo sapien
aaaccatggaagctctgcacacctc

SEQ ID NO: 4842151 - DNA, 25 bp, Homo sapien
tgaactgagccccttaacttgaggg

SEQ ID NO: 4842152 - DNA, 25 bp, Homo sapien
agttttcattagtctccagtctttt

SEQ ID NO: 4842153 - DNA, 25 bp, Homo sapien
tatgtttttacacagcagtgtccat

SEQ ID NO: 4842154 - DNA, 25 bp, Homo sapien
ctctgatactcaggcctatgggcca

SEQ ID NO: 4842155 - DNA, 25 bp, Homo sapien
ggagaagtccagatctttagctttg

SEQ ID NO: 4842156 - DNA, 25 bp, Homo sapien
tcatctgccgaaaaagggcaattgt

SEQ ID NO: 4842157 - DNA, 25 bp, Homo sapien
gctctgacacccaacgaaggttttc

SEQ ID NO: 4842158 - DNA, 25 bp, Homo sapien
tcttctacgtaagagagctctgaca

SEQ ID NO: 4842159 - DNA, 25 bp, Homo sapien
tcttggctaaaggacgataattttc

SEQ ID NO: 4842160 - DNA, 25 bp, Homo sapien
gatgcaacattgctgggcataacac

SEQ ID NO: 4842161 - DNA, 25 bp, Homo sapien
gcataacactgtaaggacccgtgag

SEQ ID NO: 4842162 - DNA, 25 bp, Homo sapien
cccgtgagaagagtttgtagcagac

SEQ ID NO: 4842163 - DNA, 25 bp, Homo sapien
tgttagctgagtatagcactggttc

SEQ ID NO: 4842164 - DNA, 25 bp, Homo sapien
aaggagggtgcgatgcactactgcc

SEQ ID NO: 4842165 - DNA, 25 bp, Homo sapien
tgatgaaaagttagtaaatccaggt

SEQ ID NO: 4842166 - DNA, 25 bp, Homo sapien
tagtaaatccaggtatattgaagag

SEQ ID NO: 4842167 - DNA, 25 bp, Homo sapien
gctggcgcataagttcatttagcat

SEQ ID NO: 4842168 - DNA, 25 bp, Homo sapien
tactctcccagcgttttacacagtg

SEQ ID NO: 4842169 - DNA, 25 bp, Homo sapien
actcctttaggagagcactgtctta

SEQ ID NO: 4842170 - DNA, 25 bp, Homo sapien
agtgtcactcatctttagatcccag

SEQ ID NO: 4842171 - DNA, 25 bp, Homo sapien
tactgttatggcacccgtggcactg

SEQ ID NO: 4842172 - DNA, 25 bp, Homo sapien
tcagtaaaagcaatgggtaagagaa

SEQ ID NO: 4842173 - DNA, 25 bp, Homo sapien
cagtaaaagcaatgggtaagagaaa

SEQ ID NO: 4842174 - DNA, 25 bp, Homo sapien
atcagtaaaagcaatgggtaagaga

SEQ ID NO: 4842175 - DNA, 25 bp, Homo sapien
aggaaataaagggctgaaattcata

SEQ ID NO: 4842176 - DNA, 25 bp, Homo sapien
aaggaaataaagggctgaaattcat

SEQ ID NO: 4842177 - DNA, 25 bp, Homo sapien
gaaggaaataaagggctgaaattca

SEQ ID NO: 4842178 - DNA, 25 bp, Homo sapien
ggaaataaagggctgaaattcatac

SEQ ID NO: 4842179 - DNA, 25 bp, Homo sapien
tccaatagaggaactgctttcaaaa

SEQ ID NO: 4842180 - DNA, 25 bp, Homo sapien
cctgaagaattctgggctaagggtt

SEQ ID NO: 4842181 - DNA, 25 bp, Homo sapien
tggtttctctgctccaatagaggaa

SEQ ID NO: 4842182 - DNA, 25 bp, Homo sapien
ggctaagggttgctgctgttcactg

SEQ ID NO: 4842183 - DNA, 25 bp, Homo sapien
gatttttgcggttactacttgtaga

SEQ ID NO: 4842184 - DNA, 25 bp, Homo sapien
ctcctcttcaggcagttttttattc

SEQ ID NO: 4842185 - DNA, 25 bp, Homo sapien
tcttgttcatataaccatggtgtcc

SEQ ID NO: 4842186 - DNA, 25 bp, Homo sapien
tgaaaatccagtcttgataaatggt

SEQ ID NO: 4842187 - DNA, 25 bp, Homo sapien
gcttttcagctgagtagaattcctc

SEQ ID NO: 4842188 - DNA, 25 bp, Homo sapien
gatctactggatcaggcatactgct

SEQ ID NO: 4842189 - DNA, 25 bp, Homo sapien
tagtcactgttgttggatctactgg

SEQ ID NO: 4842190 - DNA, 25 bp, Homo sapien
ggcctgtgcagacgcttttcttgtc

SEQ ID NO: 4842191 - DNA, 25 bp, Homo sapien
gagaaatggcaccttggactacttt

SEQ ID NO: 4842192 - DNA, 25 bp, Homo sapien
tcctggaacatggacaagagaggct

SEQ ID NO: 4842193 - DNA, 25 bp, Homo sapien
ttcaagggacaatcgttagctagcc

SEQ ID NO: 4842194 - DNA, 25 bp, Homo sapien
tgtttaccagccaaatctgtcaggc

SEQ ID NO: 4842195 - DNA, 25 bp, Homo sapien
tgctggatagctttaataatggcaa

SEQ ID NO: 4842196 - DNA, 25 bp, Homo sapien
ggatagctttaataatggcaagatg

SEQ ID NO: 4842197 - DNA, 25 bp, Homo sapien
gggtgcatggaagtctcattcctgt

SEQ ID NO: 4842198 - DNA, 25 bp, Homo sapien
ctggatagctttaataatggcaaga

SEQ ID NO: 4842199 - DNA, 25 bp, Homo sapien
gcaacttggtctttcatatggaagc

SEQ ID NO: 4842200 - DNA, 25 bp, Homo sapien
tagttattgcttgtccacctggttt

SEQ ID NO: 4842201 - DNA, 25 bp, Homo sapien
gtcaactgtgtagcgtcattccact

SEQ ID NO: 4842202 - DNA, 25 bp, Homo sapien
ggaattcagggattttgccagactc

SEQ ID NO: 4842203 - DNA, 25 bp, Homo sapien
aaaggtctctattttgattcacagg

SEQ ID NO: 4842204 - DNA, 25 bp, Homo sapien
tatattagtgagactgatctactgt

SEQ ID NO: 4842205 - DNA, 25 bp, Homo sapien
tacatgtctgaaataaactctagtg

SEQ ID NO: 4842206 - DNA, 25 bp, Homo sapien
tcagataggataaactagtatctcc

SEQ ID NO: 4842207 - DNA, 25 bp, Homo sapien
tattccaattcgaagtatatggcag

SEQ ID NO: 4842208 - DNA, 25 bp, Homo sapien
tatatggcagaccttacatgacccc

SEQ ID NO: 4842209 - DNA, 25 bp, Homo sapien
gaaatcggtttccattgtgtaacag

SEQ ID NO: 4842210 - DNA, 25 bp, Homo sapien
caatgctaggaaggcctggtataaa

SEQ ID NO: 4842211 - DNA, 25 bp, Homo sapien
tgaatacttttgcttgaacaggctc

SEQ ID NO: 4842212 - DNA, 25 bp, Homo sapien
tcagtctgggctgaatgtctgttcc

SEQ ID NO: 4842213 - DNA, 25 bp, Homo sapien
tgcaaggttcacatgtgctagacat

SEQ ID NO: 4842214 - DNA, 25 bp, Homo sapien
ccagttgctcatgattctttctgct

SEQ ID NO: 4842215 - DNA, 25 bp, Homo sapien
gatggccatgtacgttccatgaagg

SEQ ID NO: 4842216 - DNA, 25 bp, Homo sapien
cacagtaagccaaaggattgaagca

SEQ ID NO: 4842217 - DNA, 25 bp, Homo sapien
tgctgccaagggactcaaaaaagtg

SEQ ID NO: 4842218 - DNA, 25 bp, Homo sapien
taaaattgtattaagagtccagcag

SEQ ID NO: 4842219 - DNA, 25 bp, Homo sapien
caactcagcattatgaggctcaaat

SEQ ID NO: 4842220 - DNA, 25 bp, Homo sapien
aatggagcatggtacaaaagatagc

SEQ ID NO: 4842221 - DNA, 25 bp, Homo sapien
ggattaagggcatgacttctgaagc

SEQ ID NO: 4842222 - DNA, 25 bp, Homo sapien
cctctttgaccatgtttcctccgaa

SEQ ID NO: 4842223 - DNA, 25 bp, Homo sapien
tgtttgcctgaactaaggcttacgc

SEQ ID NO: 4842224 - DNA, 25 bp, Homo sapien
taaacgtatattaaggcgaccgatg

SEQ ID NO: 4842225 - DNA, 25 bp, Homo sapien
ttttagaagcatacacatcaaggtg

SEQ ID NO: 4842226 - DNA, 25 bp, Homo sapien
ccacgggagaagaagactgcgtaat

SEQ ID NO: 4842227 - DNA, 25 bp, Homo sapien
ctggcgcttcattgcatgcatttct

SEQ ID NO: 4842228 - DNA, 25 bp, Homo sapien
tgtgttaggttacatacactaacag

SEQ ID NO: 4842229 - DNA, 25 bp, Homo sapien
tggacaccaaaactacgcagattgt

SEQ ID NO: 4842230 - DNA, 25 bp, Homo sapien
gtcacataacatatatactctcagc

SEQ ID NO: 4842231 - DNA, 25 bp, Homo sapien
tctgttacccttatgaatgtgttag

SEQ ID NO: 4842232 - DNA, 25 bp, Homo sapien
caagaggtggaaagtttatgccagt

SEQ ID NO: 4842233 - DNA, 25 bp, Homo sapien
tatattcagctttgtcagttctgga

SEQ ID NO: 4842234 - DNA, 25 bp, Homo sapien
ttagctttggctggaaaaatcccta

SEQ ID NO: 4842235 - DNA, 25 bp, Homo sapien
tagattcccctaaaggttccattca

SEQ ID NO: 4842236 - DNA, 25 bp, Homo sapien
gctgcagctcatggaagagttcaat

SEQ ID NO: 4842237 - DNA, 25 bp, Homo sapien
caagtagtctgtgtttagtagctgc

SEQ ID NO: 4842238 - DNA, 25 bp, Homo sapien
taaatagtatctcgcaaagcttcaa

SEQ ID NO: 4842239 - DNA, 25 bp, Homo sapien
taaagccctctgtctcaagtagtct

SEQ ID NO: 4842240 - DNA, 25 bp, Homo sapien
cagaaatatgtctggatactatgtc

SEQ ID NO: 4842241 - DNA, 25 bp, Homo sapien
taggagtaagttctgagtttgatgc

SEQ ID NO: 4842242 - DNA, 25 bp, Homo sapien
tatccaagtaccagagtttactgac

SEQ ID NO: 4842243 - DNA, 25 bp, Homo sapien
tcatcagtagtagcaaggctctcac

SEQ ID NO: 4842244 - DNA, 25 bp, Homo sapien
tattaggtctacctacaatttgaca

SEQ ID NO: 4842245 - DNA, 25 bp, Homo sapien
tgtcttttaagagtcagcccctata

SEQ ID NO: 4842246 - DNA, 25 bp, Homo sapien
cataaatatggctatctcagacctc

SEQ ID NO: 4842247 - DNA, 25 bp, Homo sapien
tgcatattatatctcgccctcaaaa

SEQ ID NO: 4842248 - DNA, 25 bp, Homo sapien
ggtgattcccaaacacctagcacat

SEQ ID NO: 4842249 - DNA, 25 bp, Homo sapien
tcaatcaacgatgtgctaagtgcta

SEQ ID NO: 4842250 - DNA, 25 bp, Homo sapien
gcctgaaccttgaaataggtgattc

SEQ ID NO: 4842251 - DNA, 25 bp, Homo sapien
gaatgtatttgctatcccacgacca

SEQ ID NO: 4842252 - DNA, 25 bp, Homo sapien
taatggctacagcattagacaatgc

SEQ ID NO: 4842253 - DNA, 25 bp, Homo sapien
gaatctgtccaatacaaaaaacacc

SEQ ID NO: 4842254 - DNA, 25 bp, Homo sapien
tcaagtacttgctagccacatgtag

SEQ ID NO: 4842255 - DNA, 25 bp, Homo sapien
agttcctcagttacaatagctatac

SEQ ID NO: 4842256 - DNA, 25 bp, Homo sapien
tgctgggtcacatgccacgtttatg

SEQ ID NO: 4842257 - DNA, 25 bp, Homo sapien
tcttcaagacagatgtgcttttacc

SEQ ID NO: 4842258 - DNA, 25 bp, Homo sapien
tattatcatcgggagcaggagacac

SEQ ID NO: 4842259 - DNA, 25 bp, Homo sapien
ttggcttttacacgactttaggtca

SEQ ID NO: 4842260 - DNA, 25 bp, Homo sapien
ttctgctggttgtagaacttcatac

SEQ ID NO: 4842261 - DNA, 25 bp, Homo sapien
ttgaggctatcatgactaaagatgc

SEQ ID NO: 4842262 - DNA, 25 bp, Homo sapien
cactggcccaggacgtttcttcaca

SEQ ID NO: 4842263 - DNA, 25 bp, Homo sapien
ccagattccctaaagataaagacca

SEQ ID NO: 4842264 - DNA, 25 bp, Homo sapien
agacaggacactagcattatcagca

SEQ ID NO: 4842265 - DNA, 25 bp, Homo sapien
aggctcaaaatttgatgatacagac

SEQ ID NO: 4842266 - DNA, 25 bp, Homo sapien
tgcaaaaggctcaaaatttgatgat

SEQ ID NO: 4842267 - DNA, 25 bp, Homo sapien
tcagcatcattttgctcacttattt

SEQ ID NO: 4842268 - DNA, 25 bp, Homo sapien
gttcccatgaattaactagatgacc

SEQ ID NO: 4842269 - DNA, 25 bp, Homo sapien
gatgaccttaaacgatgacctttcc

SEQ ID NO: 4842270 - DNA, 25 bp, Homo sapien
ggatgatttgctcacagggttaaga

SEQ ID NO: 4842271 - DNA, 25 bp, Homo sapien
ttagatgaggcctgaattgttccca

SEQ ID NO: 4842272 - DNA, 25 bp, Homo sapien
cagcctcagtcttcatacgctcata

SEQ ID NO: 4842273 - DNA, 25 bp, Homo sapien
ctcattctggctaatgcttgatcta

SEQ ID NO: 4842274 - DNA, 25 bp, Homo sapien
tgatctaagtgaatcacggtgttac

SEQ ID NO: 4842275 - DNA, 25 bp, Homo sapien
tcatatttgagttactttcagcctc

SEQ ID NO: 4842276 - DNA, 25 bp, Homo sapien
tgaactacgattttcaataacggga

SEQ ID NO: 4842277 - DNA, 25 bp, Homo sapien
aattgctttaatttgccggtccagc

SEQ ID NO: 4842278 - DNA, 25 bp, Homo sapien
cacttacaggttgttgtgaactacg

SEQ ID NO: 4842279 - DNA, 25 bp, Homo sapien
gctgctgagtatcaattctaggaca

SEQ ID NO: 4842280 - DNA, 25 bp, Homo sapien
ggttccaatatatctggcagtagac

SEQ ID NO: 4842281 - DNA, 25 bp, Homo sapien
gacagaggtagtaagcttaacaaca

SEQ ID NO: 4842282 - DNA, 25 bp, Homo sapien
cactagaatccttacaggtcaggag

SEQ ID NO: 4842283 - DNA, 25 bp, Homo sapien
gcacctggccgggaattcagaattc

SEQ ID NO: 4842284 - DNA, 25 bp, Homo sapien
aaatcaatccatataatacaaaatg

SEQ ID NO: 4842285 - DNA, 25 bp, Homo sapien
cctactttattcatacgtattgaga

SEQ ID NO: 4842286 - DNA, 25 bp, Homo sapien
tcttgccgtagatgctcctcaattt

SEQ ID NO: 4842287 - DNA, 25 bp, Homo sapien
tcagatgtctgtttagaaatatcca

SEQ ID NO: 4842288 - DNA, 25 bp, Homo sapien
tgggtaagggtcaaaaccatgcgcc

SEQ ID NO: 4842289 - DNA, 25 bp, Homo sapien
gctgcgaggagcatacttcatccat

SEQ ID NO: 4842290 - DNA, 25 bp, Homo sapien
catgcgccttactgaagttagaagc

SEQ ID NO: 4842291 - DNA, 25 bp, Homo sapien
catcattttgctgggtaagggtcaa

SEQ ID NO: 4842292 - DNA, 25 bp, Homo sapien
aggcagctatccctccaacactgtg

SEQ ID NO: 4842293 - DNA, 25 bp, Homo sapien
ggactaccctatttagcaaacaggc

SEQ ID NO: 4842294 - DNA, 25 bp, Homo sapien
aaacaggcaaacaactatgatgttc

SEQ ID NO: 4842295 - DNA, 25 bp, Homo sapien
taaatgatcccaaacttctgatgtc

SEQ ID NO: 4842296 - DNA, 25 bp, Homo sapien
cacttcagatatctctacaagaaga

SEQ ID NO: 4842297 - DNA, 25 bp, Homo sapien
ttttctgccagcaaattttgccagt

SEQ ID NO: 4842298 - DNA, 25 bp, Homo sapien
ggcacaagattgtatcactccagtt

SEQ ID NO: 4842299 - DNA, 25 bp, Homo sapien
aagaaagccaattcattgaacaaca

SEQ ID NO: 4842300 - DNA, 25 bp, Homo sapien
gtgagccatgatcttcaagaatcct

SEQ ID NO: 4842301 - DNA, 25 bp, Homo sapien
gaaatatcagatcttacatttttgg

SEQ ID NO: 4842302 - DNA, 25 bp, Homo sapien
gtttgagtctgcttaactgtttcag

SEQ ID NO: 4842303 - DNA, 25 bp, Homo sapien
acatttttgggaccatcatacacct

SEQ ID NO: 4842304 - DNA, 25 bp, Homo sapien
gaccatcatacacctcagatgtttg

SEQ ID NO: 4842305 - DNA, 25 bp, Homo sapien
ttctccacttccataattagttaaa

SEQ ID NO: 4842306 - DNA, 25 bp, Homo sapien
cataattagttaaagcctgagtttc

SEQ ID NO: 4842307 - DNA, 25 bp, Homo sapien
aattagttaaagcctgagtttcagc

SEQ ID NO: 4842308 - DNA, 25 bp, Homo sapien
taattagttaaagcctgagtttcag

SEQ ID NO: 4842309 - DNA, 25 bp, Homo sapien
agggaagtctggacatccacagggc

SEQ ID NO: 4842310 - DNA, 25 bp, Homo sapien
tttcttcagtagcttcagtgttagc

SEQ ID NO: 4842311 - DNA, 25 bp, Homo sapien
gaagtctggacatccacagggcctt

SEQ ID NO: 4842312 - DNA, 25 bp, Homo sapien
agcttcagtgttagcctggagggaa

SEQ ID NO: 4842313 - DNA, 25 bp, Homo sapien
catgcctgtataacggtgggacctc

SEQ ID NO: 4842314 - DNA, 25 bp, Homo sapien
gcaggacgacagtgaaggaccctaa

SEQ ID NO: 4842315 - DNA, 25 bp, Homo sapien
cttcagaatatcagcagccaagctc

SEQ ID NO: 4842316 - DNA, 25 bp, Homo sapien
cagaataatctagtgcatgcctgta

SEQ ID NO: 4842317 - DNA, 25 bp, Homo sapien
gggcctgaaatatatggtcactata

SEQ ID NO: 4842318 - DNA, 25 bp, Homo sapien
tagcagggcctgaaatatatggtca

SEQ ID NO: 4842319 - DNA, 25 bp, Homo sapien
atagcagggcctgaaatatatggtc

SEQ ID NO: 4842320 - DNA, 25 bp, Homo sapien
gcagggcctgaaatatatggtcact

SEQ ID NO: 4842321 - DNA, 25 bp, Homo sapien
ttttactagtggcttctcgttccaa

SEQ ID NO: 4842322 - DNA, 25 bp, Homo sapien
ttactagtggcttctcgttccaatg

SEQ ID NO: 4842323 - DNA, 25 bp, Homo sapien
tactagtggcttctcgttccaatgg

SEQ ID NO: 4842324 - DNA, 25 bp, Homo sapien
tttactagtggcttctcgttccaat

SEQ ID NO: 4842325 - DNA, 25 bp, Homo sapien
gccagagagctttcaggagtttcct

SEQ ID NO: 4842326 - DNA, 25 bp, Homo sapien
tccatttcaggtaaacgtaacggca

SEQ ID NO: 4842327 - DNA, 25 bp, Homo sapien
gactctaggcactaagggttccatt

SEQ ID NO: 4842328 - DNA, 25 bp, Homo sapien
tcattcactaacactggagattcag

SEQ ID NO: 4842329 - DNA, 25 bp, Homo sapien
aattcactattacccttctgctaaa

SEQ ID NO: 4842330 - DNA, 25 bp, Homo sapien
taaacagttgagaagaataggtagt

SEQ ID NO: 4842331 - DNA, 25 bp, Homo sapien
tagtataaaggataaaggaggattc

SEQ ID NO: 4842332 - DNA, 25 bp, Homo sapien
tacatgtggagaatgctaatctgaa

SEQ ID NO: 4842333 - DNA, 25 bp, Homo sapien
agtaagtactatcatgagtacagat

SEQ ID NO: 4842334 - DNA, 25 bp, Homo sapien
actatcatgagtacagatttcctag

SEQ ID NO: 4842335 - DNA, 25 bp, Homo sapien
agtactatcatgagtacagatttcc

SEQ ID NO: 4842336 - DNA, 25 bp, Homo sapien
tcatgagtacagatttcctagtttt

SEQ ID NO: 4842337 - DNA, 25 bp, Homo sapien
ccacagggggtctctttcaaatcct

SEQ ID NO: 4842338 - DNA, 25 bp, Homo sapien
tactctgacaccaaactgtaaaaga

SEQ ID NO: 4842339 - DNA, 25 bp, Homo sapien
tcctactctgacaccaaactgtaaa

SEQ ID NO: 4842340 - DNA, 25 bp, Homo sapien
tgacaccaaactgtaaaagacaaat

SEQ ID NO: 4842341 - DNA, 25 bp, Homo sapien
gagaaacaagcccacaaacatctgg

SEQ ID NO: 4842342 - DNA, 25 bp, Homo sapien
aacaagcccacaaacatctgggtac

SEQ ID NO: 4842343 - DNA, 25 bp, Homo sapien
tgagaaacaagcccacaaacatctg

SEQ ID NO: 4842344 - DNA, 25 bp, Homo sapien
gaaacaagcccacaaacatctgggt

SEQ ID NO: 4842345 - DNA, 25 bp, Homo sapien
ggatttcttaactgtaggattatag

SEQ ID NO: 4842346 - DNA, 25 bp, Homo sapien
gatggatttcttaactgtaggatta

SEQ ID NO: 4842347 - DNA, 25 bp, Homo sapien
tgtgatggatttcttaactgtagga

SEQ ID NO: 4842348 - DNA, 25 bp, Homo sapien
aggtgtgatggatttcttaactgta

SEQ ID NO: 4842349 - DNA, 25 bp, Homo sapien
tggaaccctggctagattaggccca

SEQ ID NO: 4842350 - DNA, 25 bp, Homo sapien
tcaatagtagttacaggacatacct

SEQ ID NO: 4842351 - DNA, 25 bp, Homo sapien
aatgtcagtttcagtccgttctcta

SEQ ID NO: 4842352 - DNA, 25 bp, Homo sapien
catgggtaccatcgccaaataagga

SEQ ID NO: 4842353 - DNA, 25 bp, Homo sapien
gaaacatactgtcaagctgttacca

SEQ ID NO: 4842354 - DNA, 25 bp, Homo sapien
gatccaaaccagtcatccatgtaaa

SEQ ID NO: 4842355 - DNA, 25 bp, Homo sapien
tatgcagttcataggaaaagctaca

SEQ ID NO: 4842356 - DNA, 25 bp, Homo sapien
tactgaacacgagagctgtacccag

SEQ ID NO: 4842357 - DNA, 25 bp, Homo sapien
tgacttatattaccagattctgctt

SEQ ID NO: 4842358 - DNA, 25 bp, Homo sapien
gaatatattgtcagtttcagtggta

SEQ ID NO: 4842359 - DNA, 25 bp, Homo sapien
tgtcagtttcagtggtaaatcttca

SEQ ID NO: 4842360 - DNA, 25 bp, Homo sapien
cttcatcagacttttgacttatatt

SEQ ID NO: 4842361 - DNA, 25 bp, Homo sapien
tcagaatttccagctaattcttcgg

SEQ ID NO: 4842362 - DNA, 25 bp, Homo sapien
aattcttcggtctgcatttcacata

SEQ ID NO: 4842363 - DNA, 25 bp, Homo sapien
aggttcttttagtgtctcagaattt

SEQ ID NO: 4842364 - DNA, 25 bp, Homo sapien
caccagataaatggtttttctgttc

SEQ ID NO: 4842365 - DNA, 25 bp, Homo sapien
ttacagaattacactttctttctag

SEQ ID NO: 4842366 - DNA, 25 bp, Homo sapien
aatagttgaactaaaattcttacag

SEQ ID NO: 4842367 - DNA, 25 bp, Homo sapien
tttctagtatttggcttaaatctcc

SEQ ID NO: 4842368 - DNA, 25 bp, Homo sapien
taaatctcccaggtcagtagtagca

SEQ ID NO: 4842369 - DNA, 25 bp, Homo sapien
gattcaacaaggcagactgagcaga

SEQ ID NO: 4842370 - DNA, 25 bp, Homo sapien
gagactatcgcttggctctacaatg

SEQ ID NO: 4842371 - DNA, 25 bp, Homo sapien
gaaacattgagtggctccagagctg

SEQ ID NO: 4842372 - DNA, 25 bp, Homo sapien
gaggctgcaactgagaagggtacca

SEQ ID NO: 4842373 - DNA, 25 bp, Homo sapien
tcatatactctgggctcccaccgtt

SEQ ID NO: 4842374 - DNA, 25 bp, Homo sapien
catatactctgggctcccaccgttt

SEQ ID NO: 4842375 - DNA, 25 bp, Homo sapien
tatgcattgagtatgtaaggacaga

SEQ ID NO: 4842376 - DNA, 25 bp, Homo sapien
agttagatgagcctctgaagacatc

SEQ ID NO: 4842377 - DNA, 25 bp, Homo sapien
cattgagtatgtaaggacagagtta

SEQ ID NO: 4842378 - DNA, 25 bp, Homo sapien
tgagtatgtaaggacagagttagat

SEQ ID NO: 4842379 - DNA, 25 bp, Homo sapien
gaccacacctatcaaaaaagcagtg

SEQ ID NO: 4842380 - DNA, 25 bp, Homo sapien
gtgtcaaggcttaaatctgtccaga

SEQ ID NO: 4842381 - DNA, 25 bp, Homo sapien
attcgttaccaaacatcacaatggg

SEQ ID NO: 4842382 - DNA, 25 bp, Homo sapien
aaaaaacacagtgtgtcaaggctta

SEQ ID NO: 4842383 - DNA, 25 bp, Homo sapien
ctaatggatgggctttataacaaat

SEQ ID NO: 4842384 - DNA, 25 bp, Homo sapien
tctctgagcagcctaaagttatata

SEQ ID NO: 4842385 - DNA, 25 bp, Homo sapien
tctaactaactcttaaccattgctc

SEQ ID NO: 4842386 - DNA, 25 bp, Homo sapien
cactggcattagttggaagactggc

SEQ ID NO: 4842387 - DNA, 25 bp, Homo sapien
ccctattcttgcacaggaataggac

SEQ ID NO: 4842388 - DNA, 25 bp, Homo sapien
taataacttcataggtatcctggat

SEQ ID NO: 4842389 - DNA, 25 bp, Homo sapien
gataatctgccctattcttgcacag

SEQ ID NO: 4842390 - DNA, 25 bp, Homo sapien
tcctggatatcttgataatctgccc

SEQ ID NO: 4842391 - DNA, 25 bp, Homo sapien
tatggacagtttgggataaaaagca

SEQ ID NO: 4842392 - DNA, 25 bp, Homo sapien
tgaagccttactgggtatatggaca

SEQ ID NO: 4842393 - DNA, 25 bp, Homo sapien
ggtgcctgggcagcaagtaaccatt

SEQ ID NO: 4842394 - DNA, 25 bp, Homo sapien
tacttttagtctgaggcgatgtaga

SEQ ID NO: 4842395 - DNA, 25 bp, Homo sapien
aaagagtacctccacagtctggcca

SEQ ID NO: 4842396 - DNA, 25 bp, Homo sapien
ccctgaagttagttagagcacctgg

SEQ ID NO: 4842397 - DNA, 25 bp, Homo sapien
gagcacctggataagaactccgaat

SEQ ID NO: 4842398 - DNA, 25 bp, Homo sapien
tacagtaaatgtcctcgcagggaaa

SEQ ID NO: 4842399 - DNA, 25 bp, Homo sapien
ggatacagagttgagccacagacaa

SEQ ID NO: 4842400 - DNA, 25 bp, Homo sapien
gaaagactctaacgccaagggtggc

SEQ ID NO: 4842401 - DNA, 25 bp, Homo sapien
gaaggatggaactggcacgtactaa

SEQ ID NO: 4842402 - DNA, 25 bp, Homo sapien
taacatgccccaaaaagacttgagg

SEQ ID NO: 4842403 - DNA, 25 bp, Homo sapien
gatttccacaaaggtaacaagacag

SEQ ID NO: 4842404 - DNA, 25 bp, Homo sapien
gtgcacgttgccaaactacaggtgg

SEQ ID NO: 4842405 - DNA, 25 bp, Homo sapien
aaattgctatgccaaagacggtacc

SEQ ID NO: 4842406 - DNA, 25 bp, Homo sapien
tgacttacctattagcagacttgga

SEQ ID NO: 4842407 - DNA, 25 bp, Homo sapien
gcacgatgcaagatctctgtataaa

SEQ ID NO: 4842408 - DNA, 25 bp, Homo sapien
gacctgcagtgaaggagatttatcc

SEQ ID NO: 4842409 - DNA, 25 bp, Homo sapien
ccatcagtgatgcaggaaactctgt

SEQ ID NO: 4842410 - DNA, 25 bp, Homo sapien
gaacttgagcatatgttaccctacg

SEQ ID NO: 4842411 - DNA, 25 bp, Homo sapien
caggctaggtcattagcttgcaagc

SEQ ID NO: 4842412 - DNA, 25 bp, Homo sapien
gccagcttagcctcacatatgacag

SEQ ID NO: 4842413 - DNA, 25 bp, Homo sapien
gaagcagcccatcttataactcgag

SEQ ID NO: 4842414 - DNA, 25 bp, Homo sapien
tgcgttgggcaattctctgtggcag

SEQ ID NO: 4842415 - DNA, 25 bp, Homo sapien
tgggcagtcgaaccatggtgaactc

SEQ ID NO: 4842416 - DNA, 25 bp, Homo sapien
aatgtacgtcatttgtgcaagaccg

SEQ ID NO: 4842417 - DNA, 25 bp, Homo sapien
cagcacgtctgtgtgagtaacggga

SEQ ID NO: 4842418 - DNA, 25 bp, Homo sapien
tgggcccttgcctctaaatagcact

SEQ ID NO: 4842419 - DNA, 25 bp, Homo sapien
ctttgaggaactattgcagaatttc

SEQ ID NO: 4842420 - DNA, 25 bp, Homo sapien
tcttaggtgaacctctgacactcat

SEQ ID NO: 4842421 - DNA, 25 bp, Homo sapien
catgttttcttcgtgcagactgtgt

SEQ ID NO: 4842422 - DNA, 25 bp, Homo sapien
taaaaagcactagggatactgacat

SEQ ID NO: 4842423 - DNA, 25 bp, Homo sapien
ttgaagaaacagttgtgaataaaaa

SEQ ID NO: 4842424 - DNA, 25 bp, Homo sapien
ggatattaggatgtttcttacttct

SEQ ID NO: 4842425 - DNA, 25 bp, Homo sapien
gcagatagacggtgacaacagtccc

SEQ ID NO: 4842426 - DNA, 25 bp, Homo sapien
ctggcagatagacggtgacaacagt

SEQ ID NO: 4842427 - DNA, 25 bp, Homo sapien
ctggaaacccgtgctctcagatttt

SEQ ID NO: 4842428 - DNA, 25 bp, Homo sapien
gacatctgtccttttcttgaggccc

SEQ ID NO: 4842429 - DNA, 25 bp, Homo sapien
tgtaccttacccttgagatgtcctg

SEQ ID NO: 4842430 - DNA, 25 bp, Homo sapien
gaaccatgtgatagtgaaccaaaac

SEQ ID NO: 4842431 - DNA, 25 bp, Homo sapien
aattgaggctccgatttctgtgtcc

SEQ ID NO: 4842432 - DNA, 25 bp, Homo sapien
ggtgtgctattgtatcaacagggta

SEQ ID NO: 4842433 - DNA, 25 bp, Homo sapien
tgcctcttcgtgaactttgtataaa

SEQ ID NO: 4842434 - DNA, 25 bp, Homo sapien
gatcaagatacggaagagcccagca

SEQ ID NO: 4842435 - DNA, 25 bp, Homo sapien
cacaggtcttagatatacagctcag

SEQ ID NO: 4842436 - DNA, 25 bp, Homo sapien
ttccattgaggtgtgatatacatac

SEQ ID NO: 4842437 - DNA, 25 bp, Homo sapien
tacaagtttccattgaggtgtgata

SEQ ID NO: 4842438 - DNA, 25 bp, Homo sapien
tgatatacctttaggtaaagttcac

SEQ ID NO: 4842439 - DNA, 25 bp, Homo sapien
agggtattgccgctgttactgatat

SEQ ID NO: 4842440 - DNA, 25 bp, Homo sapien
aatgaactgctgcatcgggctggga

SEQ ID NO: 4842441 - DNA, 25 bp, Homo sapien
taaccaacagcttggaggacccgag

SEQ ID NO: 4842442 - DNA, 25 bp, Homo sapien
gatggcacgaaagccaagcgagtcc

SEQ ID NO: 4842443 - DNA, 25 bp, Homo sapien
catttcgggccgcttttctcagagg

SEQ ID NO: 4842444 - DNA, 25 bp, Homo sapien
tggactttgaaatccaacccggtca

SEQ ID NO: 4842445 - DNA, 25 bp, Homo sapien
agaaaaaatactgccgagatttcgg

SEQ ID NO: 4842446 - DNA, 25 bp, Homo sapien
cgagatttcggcagcgtgctgagct

SEQ ID NO: 4842447 - DNA, 25 bp, Homo sapien
aatttgttgtcctttctctcacatg

SEQ ID NO: 4842448 - DNA, 25 bp, Homo sapien
aaagtcaaacttcatccttagggag

SEQ ID NO: 4842449 - DNA, 25 bp, Homo sapien
ggagacatgcttggcacattgtagg

SEQ ID NO: 4842450 - DNA, 25 bp, Homo sapien
ccatctgctagcttactgttcatgc

SEQ ID NO: 4842451 - DNA, 25 bp, Homo sapien
tccttagggagaacactgtcatctt

SEQ ID NO: 4842452 - DNA, 25 bp, Homo sapien
catgataggtttcatttagggtggg

SEQ ID NO: 4842453 - DNA, 25 bp, Homo sapien
ggtaatgtgatgttatacatgatag

SEQ ID NO: 4842454 - DNA, 25 bp, Homo sapien
tactaaatcaagtcaaacctgttcc

SEQ ID NO: 4842455 - DNA, 25 bp, Homo sapien
tatctcttgaccttttagtacacgt

SEQ ID NO: 4842456 - DNA, 25 bp, Homo sapien
ccattgtttgagctctcttaattgc

SEQ ID NO: 4842457 - DNA, 25 bp, Homo sapien
ttttgtgatttgtttcttcccacaa

SEQ ID NO: 4842458 - DNA, 25 bp, Homo sapien
tgtttgagctctcttaattgctttt

SEQ ID NO: 4842459 - DNA, 25 bp, Homo sapien
ttgcttttgtgatttgtttcttccc

SEQ ID NO: 4842460 - DNA, 25 bp, Homo sapien
ttccggatatctgatgttataaact

SEQ ID NO: 4842461 - DNA, 25 bp, Homo sapien
taagtttactggtggtaatgtgatg

SEQ ID NO: 4842462 - DNA, 25 bp, Homo sapien
tccctgaaatatgcaggatccttgt

SEQ ID NO: 4842463 - DNA, 25 bp, Homo sapien
tgtgatggaatttattccggatatc

SEQ ID NO: 4842464 - DNA, 25 bp, Homo sapien
gagcagttttaactccattcagttg

SEQ ID NO: 4842465 - DNA, 25 bp, Homo sapien
tgactatcacccagaaccactttca

SEQ ID NO: 4842466 - DNA, 25 bp, Homo sapien
aagcgatctgcttaatgaacactga

SEQ ID NO: 4842467 - DNA, 25 bp, Homo sapien
tttgtggaccagatataaatgacta

SEQ ID NO: 4842468 - DNA, 25 bp, Homo sapien
gcctttcaataagttgttgagggaa

SEQ ID NO: 4842469 - DNA, 25 bp, Homo sapien
cgcctttcaataagttgttgaggga

SEQ ID NO: 4842470 - DNA, 25 bp, Homo sapien
cagtaagtgctatgtccctcaagga

SEQ ID NO: 4842471 - DNA, 25 bp, Homo sapien
tccaaacaaaggtagcagtaagtgc

SEQ ID NO: 4842472 - DNA, 25 bp, Homo sapien
tctagctgctgacaatatggcggta

SEQ ID NO: 4842473 - DNA, 25 bp, Homo sapien
tatataatgctataggaaggcctca

SEQ ID NO: 4842474 - DNA, 25 bp, Homo sapien
gcaggctatgggtagtttaggaaaa

SEQ ID NO: 4842475 - DNA, 25 bp, Homo sapien
cactgtatcactatcaaagaacagc

SEQ ID NO: 4842476 - DNA, 25 bp, Homo sapien
gtggtgctttgccagggatcttccc

SEQ ID NO: 4842477 - DNA, 25 bp, Homo sapien
tctccaaagttatgtcatcaagctg

SEQ ID NO: 4842478 - DNA, 25 bp, Homo sapien
taagagcccactgttaaccataagc

SEQ ID NO: 4842479 - DNA, 25 bp, Homo sapien
ccacagtgtagctattaagagccca

SEQ ID NO: 4842480 - DNA, 25 bp, Homo sapien
catagggtgctgacacatgtctaac

SEQ ID NO: 4842481 - DNA, 25 bp, Homo sapien
tacagagagttatcctacagttaca

SEQ ID NO: 4842482 - DNA, 25 bp, Homo sapien
tggaagttcagatcctgtcgactgg

SEQ ID NO: 4842483 - DNA, 25 bp, Homo sapien
actggaagttcagatcctgtcgact

SEQ ID NO: 4842484 - DNA, 25 bp, Homo sapien
ttcagatcctgtcgactgggtcaat

SEQ ID NO: 4842485 - DNA, 25 bp, Homo sapien
agttcagatcctgtcgactgggtca

SEQ ID NO: 4842486 - DNA, 25 bp, Homo sapien
cataccccagtaaggatctggctcc

SEQ ID NO: 4842487 - DNA, 25 bp, Homo sapien
ccaattccattcagccctaatcata

SEQ ID NO: 4842488 - DNA, 25 bp, Homo sapien
gctggccatccggttgtcccaattc

SEQ ID NO: 4842489 - DNA, 25 bp, Homo sapien
ggccatccggttgtcccaattccat

SEQ ID NO: 4842490 - DNA, 25 bp, Homo sapien
agaagagggtctgatctctgctcca

SEQ ID NO: 4842491 - DNA, 25 bp, Homo sapien
tgctccatctgagaacatgcaggta

SEQ ID NO: 4842492 - DNA, 25 bp, Homo sapien
gaaaccagcacaattactcccatgc

SEQ ID NO: 4842493 - DNA, 25 bp, Homo sapien
catgcaggtatccatctaacagaaa

SEQ ID NO: 4842494 - DNA, 25 bp, Homo sapien
tctagaacatgcctctggcgtcctg

SEQ ID NO: 4842495 - DNA, 25 bp, Homo sapien
ggcgtcctgccacgtgaactcggga

SEQ ID NO: 4842496 - DNA, 25 bp, Homo sapien
tgttctagaacatgcctctggcgtc

SEQ ID NO: 4842497 - DNA, 25 bp, Homo sapien
tcgggactctatgcgaaggctttct

SEQ ID NO: 4842498 - DNA, 25 bp, Homo sapien
tgggagcctgacactagatgtccca

SEQ ID NO: 4842499 - DNA, 25 bp, Homo sapien
gaacgtgagagcttggaacaggtcc

SEQ ID NO: 4842500 - DNA, 25 bp, Homo sapien
ccatgccaccggctgggaggactgt

SEQ ID NO: 4842501 - DNA, 25 bp, Homo sapien
gagagttgtattgtccgattatccc

SEQ ID NO: 4842502 - DNA, 25 bp, Homo sapien
caaggtctatgaggaagtgctctca

SEQ ID NO: 4842503 - DNA, 25 bp, Homo sapien
caggttatttcagccggcaaccagg

SEQ ID NO: 4842504 - DNA, 25 bp, Homo sapien
agccggcaaccaggaactagactga

SEQ ID NO: 4842505 - DNA, 25 bp, Homo sapien
aatcctcccacatccaaggtctatg

SEQ ID NO: 4842506 - DNA, 25 bp, Homo sapien
ggagggtgagcgtcactgttacaag

SEQ ID NO: 4842507 - DNA, 25 bp, Homo sapien
gaggagggtgagcgtcactgttaca

SEQ ID NO: 4842508 - DNA, 25 bp, Homo sapien
gcgtcactgttacaagtaaccaaga

SEQ ID NO: 4842509 - DNA, 25 bp, Homo sapien
gagcgtcactgttacaagtaaccaa

SEQ ID NO: 4842510 - DNA, 25 bp, Homo sapien
tattacgagcttgctgcctgtagga

SEQ ID NO: 4842511 - DNA, 25 bp, Homo sapien
aagaggagcaggaattattacgagc

SEQ ID NO: 4842512 - DNA, 25 bp, Homo sapien
gctttttatcagctagtgcaagagg

SEQ ID NO: 4842513 - DNA, 25 bp, Homo sapien
ccaggatcattaggggctttttatc

SEQ ID NO: 4842514 - DNA, 25 bp, Homo sapien
gaattctgcaagtccatgttcaggg

SEQ ID NO: 4842515 - DNA, 25 bp, Homo sapien
gagcagcatccagggtagaaagcct

SEQ ID NO: 4842516 - DNA, 25 bp, Homo sapien
tagaaagcctgttgggccctcagct

SEQ ID NO: 4842517 - DNA, 25 bp, Homo sapien
tgtagtgggcctcatgtcagggcat

SEQ ID NO: 4842518 - DNA, 25 bp, Homo sapien
ggaaagcctagtgcccttgccttga

SEQ ID NO: 4842519 - DNA, 25 bp, Homo sapien
gcagggcagtgctggatcaatgact

SEQ ID NO: 4842520 - DNA, 25 bp, Homo sapien
gacctgtaccctagactctctttgg

SEQ ID NO: 4842521 - DNA, 25 bp, Homo sapien
ggagttgcagttcacatccaggctg

SEQ ID NO: 4842522 - DNA, 25 bp, Homo sapien
gctattatagccaacagctggaccc

SEQ ID NO: 4842523 - DNA, 25 bp, Homo sapien
aaacatggtgatcatcagagaccgg

SEQ ID NO: 4842524 - DNA, 25 bp, Homo sapien
agtaataacagcatggcccttctgt

SEQ ID NO: 4842525 - DNA, 25 bp, Homo sapien
ggctgcctccttgtgtaagagtaat

SEQ ID NO: 4842526 - DNA, 25 bp, Homo sapien
ctgtcatgagatcagcaaggaaggg

SEQ ID NO: 4842527 - DNA, 25 bp, Homo sapien
gctgatgaactgtcatgagatcagc

SEQ ID NO: 4842528 - DNA, 25 bp, Homo sapien
tgtcatgagatcagcaaggaagggt

SEQ ID NO: 4842529 - DNA, 25 bp, Homo sapien
gatgaactgtcatgagatcagcaag

SEQ ID NO: 4842530 - DNA, 25 bp, Homo sapien
gttttaatccagaagacagattgct

SEQ ID NO: 4842531 - DNA, 25 bp, Homo sapien
cagttttaatccagaagacagattg

SEQ ID NO: 4842532 - DNA, 25 bp, Homo sapien
tttaatccagaagacagattgctgc

SEQ ID NO: 4842533 - DNA, 25 bp, Homo sapien
agtaagttgaaagtaggttgatctt

SEQ ID NO: 4842534 - DNA, 25 bp, Homo sapien
cacttggatttgagtaggctaatta

SEQ ID NO: 4842535 - DNA, 25 bp, Homo sapien
gagtaggctaattatggctatattt

SEQ ID NO: 4842536 - DNA, 25 bp, Homo sapien
tacacttggatttgagtaggctaat

SEQ ID NO: 4842537 - DNA, 25 bp, Homo sapien
tttacacttggatttgagtaggcta

SEQ ID NO: 4842538 - DNA, 25 bp, Homo sapien
tctatcaccatgtttgggcacaagc

SEQ ID NO: 4842539 - DNA, 25 bp, Homo sapien
gggcacaagctttctctgcaaggaa

SEQ ID NO: 4842540 - DNA, 25 bp, Homo sapien
tggtatgagcgtccaaacccagcat

SEQ ID NO: 4842541 - DNA, 25 bp, Homo sapien
taagtccatggcatccccacaatgg

SEQ ID NO: 4842542 - DNA, 25 bp, Homo sapien
taaggtaagggtacagaagatacat

SEQ ID NO: 4842543 - DNA, 25 bp, Homo sapien
tagacaagattgttttactccttat

SEQ ID NO: 4842544 - DNA, 25 bp, Homo sapien
tggatgacaaatagacaagattgtt

SEQ ID NO: 4842545 - DNA, 25 bp, Homo sapien
tgataggtcgtcagttgataactgg

SEQ ID NO: 4842546 - DNA, 25 bp, Homo sapien
taaaagctttctagcataaatcacc

SEQ ID NO: 4842547 - DNA, 25 bp, Homo sapien
ttctagcataaatcaccaatttcca

SEQ ID NO: 4842548 - DNA, 25 bp, Homo sapien
tccaagataaccacaggccatcttt

SEQ ID NO: 4842549 - DNA, 25 bp, Homo sapien
tcaccaatttccaagataaccacag

SEQ ID NO: 4842550 - DNA, 25 bp, Homo sapien
ggatttcaactcagatctacacaag

SEQ ID NO: 4842551 - DNA, 25 bp, Homo sapien
gttccgccactaaactgtaaaagca

SEQ ID NO: 4842552 - DNA, 25 bp, Homo sapien
gagtcagagctacagatctaaaaag

SEQ ID NO: 4842553 - DNA, 25 bp, Homo sapien
taaaaagtaattcgcccagtgtcca

SEQ ID NO: 4842554 - DNA, 25 bp, Homo sapien
gcattgctgccagatagcagcagag

SEQ ID NO: 4842555 - DNA, 25 bp, Homo sapien
cctggtcagaaagtgaaaaacgtat

SEQ ID NO: 4842556 - DNA, 25 bp, Homo sapien
ccacaggcatggtcctggtcagaaa

SEQ ID NO: 4842557 - DNA, 25 bp, Homo sapien
aagagtacaagaaatgacctggcat

SEQ ID NO: 4842558 - DNA, 25 bp, Homo sapien
tgagtatctgggactgtcggtacat

SEQ ID NO: 4842559 - DNA, 25 bp, Homo sapien
tcaacaagtttggaatgcattggtg

SEQ ID NO: 4842560 - DNA, 25 bp, Homo sapien
gctaactgaatcctttaactcctgg

SEQ ID NO: 4842561 - DNA, 25 bp, Homo sapien
ggaaacttaacattcagcacaaaga

SEQ ID NO: 4842562 - DNA, 25 bp, Homo sapien
ttcactttcgtaaaatcagtcactt

SEQ ID NO: 4842563 - DNA, 25 bp, Homo sapien
attcactttcgtaaaatcagtcact

SEQ ID NO: 4842564 - DNA, 25 bp, Homo sapien
ctattcactttcgtaaaatcagtca

SEQ ID NO: 4842565 - DNA, 25 bp, Homo sapien
tattcactttcgtaaaatcagtcac

SEQ ID NO: 4842566 - DNA, 25 bp, Homo sapien
gagcctgaagccaattacctgcaga

SEQ ID NO: 4842567 - DNA, 25 bp, Homo sapien
tcctgaatgtagagaagatgcttct

SEQ ID NO: 4842568 - DNA, 25 bp, Homo sapien
cctgcagaacaaggtgaacttcctg

SEQ ID NO: 4842569 - DNA, 25 bp, Homo sapien
tgcatggagaacacttggacaatca

SEQ ID NO: 4842570 - DNA, 25 bp, Homo sapien
gattgataagccagcccacacctgg

SEQ ID NO: 4842571 - DNA, 25 bp, Homo sapien
tgcgtttaccctactgaggagggct

SEQ ID NO: 4842572 - DNA, 25 bp, Homo sapien
tacaatgaggatggactaccctgcg

SEQ ID NO: 4842573 - DNA, 25 bp, Homo sapien
gggcaccagccgttaaagattgata

SEQ ID NO: 4842574 - DNA, 25 bp, Homo sapien
tgactgggtattgaacccaggtcat

SEQ ID NO: 4842575 - DNA, 25 bp, Homo sapien
catggtagtaaaagcaaagaatcct

SEQ ID NO: 4842576 - DNA, 25 bp, Homo sapien
ggtattgaacccaggtcatggtagt

SEQ ID NO: 4842577 - DNA, 25 bp, Homo sapien
gaatcctaatcactgggctatagga

SEQ ID NO: 4842578 - DNA, 25 bp, Homo sapien
ttctgagctcctgttgacttgtaaa

SEQ ID NO: 4842579 - DNA, 25 bp, Homo sapien
ctgagctcctgttgacttgtaaaat

SEQ ID NO: 4842580 - DNA, 25 bp, Homo sapien
tcctgttgacttgtaaaattagcat

SEQ ID NO: 4842581 - DNA, 25 bp, Homo sapien
gctcctgttgacttgtaaaattagc

SEQ ID NO: 4842582 - DNA, 25 bp, Homo sapien
catcgttagctacatgaccttcatt

SEQ ID NO: 4842583 - DNA, 25 bp, Homo sapien
tgtgacatcgttagctacatgacct

SEQ ID NO: 4842584 - DNA, 25 bp, Homo sapien
cacctgtgacatcgttagctacatg

SEQ ID NO: 4842585 - DNA, 25 bp, Homo sapien
cttcacctgtgacatcgttagctac

SEQ ID NO: 4842586 - DNA, 25 bp, Homo sapien
tctatcgagattgagagatacgctg

SEQ ID NO: 4842587 - DNA, 25 bp, Homo sapien
agtttcagctctatcgagattgaga

SEQ ID NO: 4842588 - DNA, 25 bp, Homo sapien
cgagattgagagatacgctgaaggt

SEQ ID NO: 4842589 - DNA, 25 bp, Homo sapien
tgagagatacgctgaaggtgaaatg

SEQ ID NO: 4842590 - DNA, 25 bp, Homo sapien
cctagcaagggtcaagggacagctg

SEQ ID NO: 4842591 - DNA, 25 bp, Homo sapien
ggtaccctgaaatctgtaacctagc

SEQ ID NO: 4842592 - DNA, 25 bp, Homo sapien
aaatctgtaacctagcaggctgcag

SEQ ID NO: 4842593 - DNA, 25 bp, Homo sapien
cacagggatagaggggtaccctgaa

SEQ ID NO: 4842594 - DNA, 25 bp, Homo sapien
agggtggtcatcacaactttcaagc

SEQ ID NO: 4842595 - DNA, 25 bp, Homo sapien
ggtggtcatcacaactttcaagcca

SEQ ID NO: 4842596 - DNA, 25 bp, Homo sapien
agcagggtggtcatcacaactttca

SEQ ID NO: 4842597 - DNA, 25 bp, Homo sapien
tcatcacaactttcaagccatagtc

SEQ ID NO: 4842598 - DNA, 25 bp, Homo sapien
gagagcttgggaaaagtccaggaaa

SEQ ID NO: 4842599 - DNA, 25 bp, Homo sapien
gaagcctaatgcgagacttcccatg

SEQ ID NO: 4842600 - DNA, 25 bp, Homo sapien
tggtttctgctatctggaagcctaa

SEQ ID NO: 4842601 - DNA, 25 bp, Homo sapien
tcccatgtgttacgtggaaggtgag

SEQ ID NO: 4842602 - DNA, 25 bp, Homo sapien
catcttctaaggtgatccaggtagc

SEQ ID NO: 4842603 - DNA, 25 bp, Homo sapien
gatgtggtacttgccgttaacggtc

SEQ ID NO: 4842604 - DNA, 25 bp, Homo sapien
tttcttcccggagatcagaattaag

SEQ ID NO: 4842605 - DNA, 25 bp, Homo sapien
tcttcaattgttcaggattcaggag

SEQ ID NO: 4842606 - DNA, 25 bp, Homo sapien
ttatatatcaaaagcaccgtgggca

SEQ ID NO: 4842607 - DNA, 25 bp, Homo sapien
tgggccttatatatcaaaagcaccg

SEQ ID NO: 4842608 - DNA, 25 bp, Homo sapien
tatatcaaaagcaccgtgggcaagc

SEQ ID NO: 4842609 - DNA, 25 bp, Homo sapien
gaatgtctgggccttatatatcaaa

SEQ ID NO: 4842610 - DNA, 25 bp, Homo sapien
gattgttgacagtccagaccattgc

SEQ ID NO: 4842611 - DNA, 25 bp, Homo sapien
cattcagctgcaaggagtgtagatt

SEQ ID NO: 4842612 - DNA, 25 bp, Homo sapien
caaggagtgtagattgttgacagtc

SEQ ID NO: 4842613 - DNA, 25 bp, Homo sapien
tgtagattgttgacagtccagacca

SEQ ID NO: 4842614 - DNA, 25 bp, Homo sapien
ctttccagatcatggatgtaagttg

SEQ ID NO: 4842615 - DNA, 25 bp, Homo sapien
tcactaccctcctggagtcagaaag

SEQ ID NO: 4842616 - DNA, 25 bp, Homo sapien
ctaccctcctggagtcagaaagtaa

SEQ ID NO: 4842617 - DNA, 25 bp, Homo sapien
tggatgtaagttgggccacatggcc

SEQ ID NO: 4842618 - DNA, 25 bp, Homo sapien
cgtggaactcggcttctccatgtga

SEQ ID NO: 4842619 - DNA, 25 bp, Homo sapien
tctctgtcccgcgagtctcgaggag

SEQ ID NO: 4842620 - DNA, 25 bp, Homo sapien
gtgtgatgccggctcctcactcaac

SEQ ID NO: 4842621 - DNA, 25 bp, Homo sapien
ggagcccctccgagtccttgtgtga

SEQ ID NO: 4842622 - DNA, 25 bp, Homo sapien
ctcgcgcagcggaaagggaggaagt

SEQ ID NO: 4842623 - DNA, 25 bp, Homo sapien
aagtccgggcgctgctgaactccgg

SEQ ID NO: 4842624 - DNA, 25 bp, Homo sapien
gagggcgcgacaatccggaacgcct

SEQ ID NO: 4842625 - DNA, 25 bp, Homo sapien
gcggacagacctgccgaaccaggcg

SEQ ID NO: 4842626 - DNA, 25 bp, Homo sapien
ggctggtcgtccacaaggtggaggt

SEQ ID NO: 4842627 - DNA, 25 bp, Homo sapien
ccagcaaggcgcaaagaggaggaac

SEQ ID NO: 4842628 - DNA, 25 bp, Homo sapien
tgaatgagcacgagccggccagcaa

SEQ ID NO: 4842629 - DNA, 25 bp, Homo sapien
aggtggcctgcaaggagccgcagga

SEQ ID NO: 4842630 - DNA, 25 bp, Homo sapien
aggaccacagatgaagccagtattt

SEQ ID NO: 4842631 - DNA, 25 bp, Homo sapien
gtgtagacaaacttgacagtttaaa

SEQ ID NO: 4842632 - DNA, 25 bp, Homo sapien
taattcatgaattgttgagactcag

SEQ ID NO: 4842633 - DNA, 25 bp, Homo sapien
agcccaggttcagaggaccacagat

SEQ ID NO: 4842634 - DNA, 25 bp, Homo sapien
ttgcttccaaggtctgtaataaagt

SEQ ID NO: 4842635 - DNA, 25 bp, Homo sapien
ctcttgcttccaaggtctgtaataa

SEQ ID NO: 4842636 - DNA, 25 bp, Homo sapien
actaggctgaatgcaatcctcttgc

SEQ ID NO: 4842637 - DNA, 25 bp, Homo sapien
gaactaggctgaatgcaatcctctt

SEQ ID NO: 4842638 - DNA, 25 bp, Homo sapien
ggcttgcccacaatgcatgttaagg

SEQ ID NO: 4842639 - DNA, 25 bp, Homo sapien
gaacagcccggatctggtgctcaag

SEQ ID NO: 4842640 - DNA, 25 bp, Homo sapien
tgtgatcaaaaatagcctctaagcc

SEQ ID NO: 4842641 - DNA, 25 bp, Homo sapien
gaaaaccgattgtggtcagagccca

SEQ ID NO: 4842642 - DNA, 25 bp, Homo sapien
tgtatttgttaactggagggatgta

SEQ ID NO: 4842643 - DNA, 25 bp, Homo sapien
ctgtatttgttaactggagggatgt

SEQ ID NO: 4842644 - DNA, 25 bp, Homo sapien
tatttgttaactggagggatgtaaa

SEQ ID NO: 4842645 - DNA, 25 bp, Homo sapien
tgttaactggagggatgtaaaaata

SEQ ID NO: 4842646 - DNA, 25 bp, Homo sapien
gagttttaaactcgaccagatctgt

SEQ ID NO: 4842647 - DNA, 25 bp, Homo sapien
taaatagtaagggatccatcaccag

SEQ ID NO: 4842648 - DNA, 25 bp, Homo sapien
ttctataggtgaggatgaagcccac

SEQ ID NO: 4842649 - DNA, 25 bp, Homo sapien
caattgttcgaggttcaagcgtaaa

SEQ ID NO: 4842650 - DNA, 25 bp, Homo sapien
tctgatagcacataagttgataatt

SEQ ID NO: 4842651 - DNA, 25 bp, Homo sapien
tgaatcactctgcttcccaagataa

SEQ ID NO: 4842652 - DNA, 25 bp, Homo sapien
taacgtgagggtagagaggatatct

SEQ ID NO: 4842653 - DNA, 25 bp, Homo sapien
tgggtgatacatacacaagggttta

SEQ ID NO: 4842654 - DNA, 25 bp, Homo sapien
gctcattggagcactagttctgttt

SEQ ID NO: 4842655 - DNA, 25 bp, Homo sapien
cctatcagattaagactccacgttt

SEQ ID NO: 4842656 - DNA, 25 bp, Homo sapien
tgattccagaatcgcagataaagcc

SEQ ID NO: 4842657 - DNA, 25 bp, Homo sapien
tgacagatctctttccttaggttac

SEQ ID NO: 4842658 - DNA, 25 bp, Homo sapien
caaaacacattgaaggtttatgatg

SEQ ID NO: 4842659 - DNA, 25 bp, Homo sapien
aacacattgaaggtttatgatgatg

SEQ ID NO: 4842660 - DNA, 25 bp, Homo sapien
cacattgaaggtttatgatgatgac

SEQ ID NO: 4842661 - DNA, 25 bp, Homo sapien
gatcaaaacacattgaaggtttatg

SEQ ID NO: 4842662 - DNA, 25 bp, Homo sapien
tctttgacatctggtgccctcatca

SEQ ID NO: 4842663 - DNA, 25 bp, Homo sapien
tttgacatctggtgccctcatcagc

SEQ ID NO: 4842664 - DNA, 25 bp, Homo sapien
atctggtgccctcatcagcttcatc

SEQ ID NO: 4842665 - DNA, 25 bp, Homo sapien
ctaaattctttgacatctggtgccc

SEQ ID NO: 4842666 - DNA, 25 bp, Homo sapien
gaaaagtggtgcttaaagagctcat

SEQ ID NO: 4842667 - DNA, 25 bp, Homo sapien
ttttgaaaagtggtgcttaaagagc

SEQ ID NO: 4842668 - DNA, 25 bp, Homo sapien
aagtggtgcttaaagagctcatcct

SEQ ID NO: 4842669 - DNA, 25 bp, Homo sapien
tcattttttgaaaagtggtgcttaa

SEQ ID NO: 4842670 - DNA, 25 bp, Homo sapien
tgtaggaagcactttacactgttaa

SEQ ID NO: 4842671 - DNA, 25 bp, Homo sapien
aactctgttaactcatagactggat

SEQ ID NO: 4842672 - DNA, 25 bp, Homo sapien
gcactttacactgttaaacatcccc

SEQ ID NO: 4842673 - DNA, 25 bp, Homo sapien
caagagctagtacttggtaccaata

SEQ ID NO: 4842674 - DNA, 25 bp, Homo sapien
gtgaggtgtttattgctgggctagg

SEQ ID NO: 4842675 - DNA, 25 bp, Homo sapien
gctggtgaggtgtttattgctgggc

SEQ ID NO: 4842676 - DNA, 25 bp, Homo sapien
aggtgtttattgctgggctaggcat

SEQ ID NO: 4842677 - DNA, 25 bp, Homo sapien
ctatgggctggtgaggtgtttattg

SEQ ID NO: 4842678 - DNA, 25 bp, Homo sapien
gaaaacctttcagctagctctaagg

SEQ ID NO: 4842679 - DNA, 25 bp, Homo sapien
tcagctagctctaaggaccactggg

SEQ ID NO: 4842680 - DNA, 25 bp, Homo sapien
gggctagcataaggccagcgtaaaa

SEQ ID NO: 4842681 - DNA, 25 bp, Homo sapien
gccagcgtaaaagcccttgtataaa

SEQ ID NO: 4842682 - DNA, 25 bp, Homo sapien
tcctggcaagaagaatgtccctggg

SEQ ID NO: 4842683 - DNA, 25 bp, Homo sapien
cagctgtccgaggtgagagtcctcc

SEQ ID NO: 4842684 - DNA, 25 bp, Homo sapien
ccagaaagtaggatgcagggcccat

SEQ ID NO: 4842685 - DNA, 25 bp, Homo sapien
aaggtgagcaagatgacagtgtcgc

SEQ ID NO: 4842686 - DNA, 25 bp, Homo sapien
tggattctggtctcgcatacacaga

SEQ ID NO: 4842687 - DNA, 25 bp, Homo sapien
tgtgggggcattgtattacttgagc

SEQ ID NO: 4842688 - DNA, 25 bp, Homo sapien
tacttgagcccatcccttgaaaagc

SEQ ID NO: 4842689 - DNA, 25 bp, Homo sapien
tctccttgtacccagatggctaaat

SEQ ID NO: 4842690 - DNA, 25 bp, Homo sapien
cacaggcaccactcattgacaccaa

SEQ ID NO: 4842691 - DNA, 25 bp, Homo sapien
ccacaggcaccactcattgacacca

SEQ ID NO: 4842692 - DNA, 25 bp, Homo sapien
acaggcaccactcattgacaccaat

SEQ ID NO: 4842693 - DNA, 25 bp, Homo sapien
ggagccaccactccaacaggcatgt

SEQ ID NO: 4842694 - DNA, 25 bp, Homo sapien
tgcctcagacgtcagagacaatgcc

SEQ ID NO: 4842695 - DNA, 25 bp, Homo sapien
aacacctgcacgacagacactggag

SEQ ID NO: 4842696 - DNA, 25 bp, Homo sapien
caccactgcgacatgaactcctgtg

SEQ ID NO: 4842697 - DNA, 25 bp, Homo sapien
cttcaaagttttctccaccaatcat

SEQ ID NO: 4842698 - DNA, 25 bp, Homo sapien
tggtaagagagctccgactgaacat

SEQ ID NO: 4842699 - DNA, 25 bp, Homo sapien
tctgagctttactggtaagagagct

SEQ ID NO: 4842700 - DNA, 25 bp, Homo sapien
gctttactggtaagagagctccgac

SEQ ID NO: 4842701 - DNA, 25 bp, Homo sapien
cactcccctctgagctttactggta

SEQ ID NO: 4842702 - DNA, 25 bp, Homo sapien
cagaagctggtgtgcatcattttcc

SEQ ID NO: 4842703 - DNA, 25 bp, Homo sapien
gaagctggtgtgcatcattttccaa

SEQ ID NO: 4842704 - DNA, 25 bp, Homo sapien
tggtgtgcatcattttccaaggtgg

SEQ ID NO: 4842705 - DNA, 25 bp, Homo sapien
gtgcatcattttccaaggtggcaga

SEQ ID NO: 4842706 - DNA, 25 bp, Homo sapien
caagtacaacctcataggactgatt

SEQ ID NO: 4842707 - DNA, 25 bp, Homo sapien
tctttgagctttgaatcaccagggc

SEQ ID NO: 4842708 - DNA, 25 bp, Homo sapien
cagtgtactgtgtgcaataccaagg

SEQ ID NO: 4842709 - DNA, 25 bp, Homo sapien
ccttgtgaatcttttgcagtgtact

SEQ ID NO: 4842710 - DNA, 25 bp, Homo sapien
ctcccaggccatgccactgctctgc

SEQ ID NO: 4842711 - DNA, 25 bp, Homo sapien
cccaggccatgccactgctctgcca

SEQ ID NO: 4842712 - DNA, 25 bp, Homo sapien
cttgtctcccaggccatgccactgc

SEQ ID NO: 4842713 - DNA, 25 bp, Homo sapien
aggccatgccactgctctgccacat

SEQ ID NO: 4842714 - DNA, 25 bp, Homo sapien
caggatctcagactgccgtagcatg

SEQ ID NO: 4842715 - DNA, 25 bp, Homo sapien
taaaggttcttttgtgagccaggat

SEQ ID NO: 4842716 - DNA, 25 bp, Homo sapien
gactgccgtagcatgatgctgtcca

SEQ ID NO: 4842717 - DNA, 25 bp, Homo sapien
tgagccaggatctcagactgccgta

SEQ ID NO: 4842718 - DNA, 25 bp, Homo sapien
tgaaatactcggctagcatcagcac

SEQ ID NO: 4842719 - DNA, 25 bp, Homo sapien
cagggacttctggataggctaatag

SEQ ID NO: 4842720 - DNA, 25 bp, Homo sapien
taatagatcattggatacgaagggc

SEQ ID NO: 4842721 - DNA, 25 bp, Homo sapien
gcactgtccgtgtcatatgagtcac

SEQ ID NO: 4842722 - DNA, 25 bp, Homo sapien
tctagggttgcagttgctttctttg

SEQ ID NO: 4842723 - DNA, 25 bp, Homo sapien
cctctctagggttgcagttgctttc

SEQ ID NO: 4842724 - DNA, 25 bp, Homo sapien
tctctagggttgcagttgctttctt

SEQ ID NO: 4842725 - DNA, 25 bp, Homo sapien
agggttgcagttgctttctttgtaa

SEQ ID NO: 4842726 - DNA, 25 bp, Homo sapien
cttgttccagttacagtccctttga

SEQ ID NO: 4842727 - DNA, 25 bp, Homo sapien
agttcagggtgataaacagaatatt

SEQ ID NO: 4842728 - DNA, 25 bp, Homo sapien
gtccctttgaagttcagggtgataa

SEQ ID NO: 4842729 - DNA, 25 bp, Homo sapien
tcatgagcttgttccagttacagtc

SEQ ID NO: 4842730 - DNA, 25 bp, Homo sapien
caaaatggttctattaactttgcag

SEQ ID NO: 4842731 - DNA, 25 bp, Homo sapien
tgtctttgctcttgatttcttttgc

SEQ ID NO: 4842732 - DNA, 25 bp, Homo sapien
tttgctcttgatttcttttgctttg

SEQ ID NO: 4842733 - DNA, 25 bp, Homo sapien
ctcttgatttcttttgctttgatga

SEQ ID NO: 4842734 - DNA, 25 bp, Homo sapien
gattgtctttgctcttgatttcttt

SEQ ID NO: 4842735 - DNA, 25 bp, Homo sapien
tactgagtaacgatgaaagcgaggc

SEQ ID NO: 4842736 - DNA, 25 bp, Homo sapien
tcgagtccttcgctgaacccggata

SEQ ID NO: 4842737 - DNA, 25 bp, Homo sapien
catctgcggccaggaagtgctggtc

SEQ ID NO: 4842738 - DNA, 25 bp, Homo sapien
tgccaaagtcaagcgtaacgtgtca

SEQ ID NO: 4842739 - DNA, 25 bp, Homo sapien
gtactatgtaaatcttatacttggt

SEQ ID NO: 4842740 - DNA, 25 bp, Homo sapien
ccttctctccatgataagtactatg

SEQ ID NO: 4842741 - DNA, 25 bp, Homo sapien
tgttctctgtttcccgattctctct

SEQ ID NO: 4842742 - DNA, 25 bp, Homo sapien
tcgcggatggataaatgtgttctct

SEQ ID NO: 4842743 - DNA, 25 bp, Homo sapien
gttgaccatagttttcacagctccc

SEQ ID NO: 4842744 - DNA, 25 bp, Homo sapien
accaaacttcctcatacattaaggg

SEQ ID NO: 4842745 - DNA, 25 bp, Homo sapien
tttctggttgaccatagttttcaca

SEQ ID NO: 4842746 - DNA, 25 bp, Homo sapien
gctccctgtagccttataccaaact

SEQ ID NO: 4842747 - DNA, 25 bp, Homo sapien
ttcgaacccctgcagaaatggctcc

SEQ ID NO: 4842748 - DNA, 25 bp, Homo sapien
ggattttagcctttacatcatcttt

SEQ ID NO: 4842749 - DNA, 25 bp, Homo sapien
accaccacttcgaacccctgcagaa

SEQ ID NO: 4842750 - DNA, 25 bp, Homo sapien
ctggattttagcctttacatcatct

SEQ ID NO: 4842751 - DNA, 25 bp, Homo sapien
tactcagatatgtcgcagggatcat

SEQ ID NO: 4842752 - DNA, 25 bp, Homo sapien
tagcagcattgtaggagttctcttc

SEQ ID NO: 4842753 - DNA, 25 bp, Homo sapien
ggatcatctgctgtgagactgctag

SEQ ID NO: 4842754 - DNA, 25 bp, Homo sapien
ttcactctgtccacgtagaaatacg

SEQ ID NO: 4842755 - DNA, 25 bp, Homo sapien
gttcctttatttgacagctggtcat

SEQ ID NO: 4842756 - DNA, 25 bp, Homo sapien
ttaaaagaaagttgaatgacgtgag

SEQ ID NO: 4842757 - DNA, 25 bp, Homo sapien
gaatgacgtgagagccgatagagaa

SEQ ID NO: 4842758 - DNA, 25 bp, Homo sapien
gctggtcattgagctccggctcttc

SEQ ID NO: 4842759 - DNA, 25 bp, Homo sapien
tattgataaacgatgtgattgttcc

SEQ ID NO: 4842760 - DNA, 25 bp, Homo sapien
ttgataaacgatgtgattgttccat

SEQ ID NO: 4842761 - DNA, 25 bp, Homo sapien
cctattgataaacgatgtgattgtt

SEQ ID NO: 4842762 - DNA, 25 bp, Homo sapien
attgataaacgatgtgattgttcca

SEQ ID NO: 4842763 - DNA, 25 bp, Homo sapien
tcattagatgcagcttctatatcca

SEQ ID NO: 4842764 - DNA, 25 bp, Homo sapien
agttcattagatgcagcttctatat

SEQ ID NO: 4842765 - DNA, 25 bp, Homo sapien
cattagatgcagcttctatatccat

SEQ ID NO: 4842766 - DNA, 25 bp, Homo sapien
ttcattagatgcagcttctatatcc

SEQ ID NO: 4842767 - DNA, 25 bp, Homo sapien
tataaaggggtagtgctgctgttgt

SEQ ID NO: 4842768 - DNA, 25 bp, Homo sapien
tctcatagacttgacacaggagcag

SEQ ID NO: 4842769 - DNA, 25 bp, Homo sapien
tgctgtgggctgtgtatagaaaact

SEQ ID NO: 4842770 - DNA, 25 bp, Homo sapien
ctgttgtgaattgtcgggtaggttt

SEQ ID NO: 4842771 - DNA, 25 bp, Homo sapien
tagaggcttgtttttgccctcagat

SEQ ID NO: 4842772 - DNA, 25 bp, Homo sapien
gtagaatgctagtgatgtaaactcc

SEQ ID NO: 4842773 - DNA, 25 bp, Homo sapien
ccccaagaaaaccagtagaatgcta

SEQ ID NO: 4842774 - DNA, 25 bp, Homo sapien
tagtgatgtaaactccttgttcaca

SEQ ID NO: 4842775 - DNA, 25 bp, Homo sapien
ctcttcgggtgagaagggcctttgc

SEQ ID NO: 4842776 - DNA, 25 bp, Homo sapien
ctttgctccgagtgggatgtggatt

SEQ ID NO: 4842777 - DNA, 25 bp, Homo sapien
ttcgggtgagaagggcctttgctcc

SEQ ID NO: 4842778 - DNA, 25 bp, Homo sapien
agggctcttcgggtgagaagggcct

SEQ ID NO: 4842779 - DNA, 25 bp, Homo sapien
tgtccggtgggacagatggcgatga

SEQ ID NO: 4842780 - DNA, 25 bp, Homo sapien
ggtgtccggtgggacagatggcgat

SEQ ID NO: 4842781 - DNA, 25 bp, Homo sapien
gtccggtgggacagatggcgatgac

SEQ ID NO: 4842782 - DNA, 25 bp, Homo sapien
ggggtgtccggtgggacagatggcg

SEQ ID NO: 4842783 - DNA, 25 bp, Homo sapien
ttgttttgctagccagaagtgagtt

SEQ ID NO: 4842784 - DNA, 25 bp, Homo sapien
cttgttttgctagccagaagtgagt

SEQ ID NO: 4842785 - DNA, 25 bp, Homo sapien
tgttttgctagccagaagtgagttt

SEQ ID NO: 4842786 - DNA, 25 bp, Homo sapien
tatcaactgtgattagtgttttcaa

SEQ ID NO: 4842787 - DNA, 25 bp, Homo sapien
ttttacaaggccatctagataagag

SEQ ID NO: 4842788 - DNA, 25 bp, Homo sapien
caaggccatctagataagagaaatc

SEQ ID NO: 4842789 - DNA, 25 bp, Homo sapien
gccatctagataagagaaatctcag

SEQ ID NO: 4842790 - DNA, 25 bp, Homo sapien
tttttagagctgtcccacggaaaca

SEQ ID NO: 4842791 - DNA, 25 bp, Homo sapien
ggtcaggtcctcattttattgttgt

SEQ ID NO: 4842792 - DNA, 25 bp, Homo sapien
tacatattagcagatgagatttggt

SEQ ID NO: 4842793 - DNA, 25 bp, Homo sapien
gctgtggtaccttcatacctagaag

SEQ ID NO: 4842794 - DNA, 25 bp, Homo sapien
cgcttgtcagctggagaaggagaca

SEQ ID NO: 4842795 - DNA, 25 bp, Homo sapien
gcttgtcagctggagaaggagacat

SEQ ID NO: 4842796 - DNA, 25 bp, Homo sapien
ccggtcatcttatctttttcctaat

SEQ ID NO: 4842797 - DNA, 25 bp, Homo sapien
gcgtgtgtaggcaaggtacttcgtc

SEQ ID NO: 4842798 - DNA, 25 bp, Homo sapien
tattatcgtggttcacaatagtggg

SEQ ID NO: 4842799 - DNA, 25 bp, Homo sapien
gcaaggtacttcgtcccggtcatct

SEQ ID NO: 4842800 - DNA, 25 bp, Homo sapien
gcattgcacgtttcattctcttctt

SEQ ID NO: 4842801 - DNA, 25 bp, Homo sapien
aaaaagcagtaagtggtggttctag

SEQ ID NO: 4842802 - DNA, 25 bp, Homo sapien
tgatgctatagtctgcattgcacgt

SEQ ID NO: 4842803 - DNA, 25 bp, Homo sapien
taagatgttgtaaccaacgctgctg

SEQ ID NO: 4842804 - DNA, 25 bp, Homo sapien
tcaaagagtcaggatttcaagaggg

SEQ ID NO: 4842805 - DNA, 25 bp, Homo sapien
tcgtcacaggatctactatattacc

SEQ ID NO: 4842806 - DNA, 25 bp, Homo sapien
gcaggataaaggatgtcgtcacagg

SEQ ID NO: 4842807 - DNA, 25 bp, Homo sapien
tatattaccccctccatttatcagt

SEQ ID NO: 4842808 - DNA, 25 bp, Homo sapien
ggctcaactgggctacttgcatagg

SEQ ID NO: 4842809 - DNA, 25 bp, Homo sapien
cttgcatagggactcagaataatct

SEQ ID NO: 4842810 - DNA, 25 bp, Homo sapien
cgttctgtgaaagtaaaaagcctct

SEQ ID NO: 4842811 - DNA, 25 bp, Homo sapien
taaaccaggacgtgagtggaagcca

SEQ ID NO: 4842812 - DNA, 25 bp, Homo sapien
catagaggcagaattcaagtctggt

SEQ ID NO: 4842813 - DNA, 25 bp, Homo sapien
tttccaaaggctatacatagaggca

SEQ ID NO: 4842814 - DNA, 25 bp, Homo sapien
cccataattggacttggatttcctc

SEQ ID NO: 4842815 - DNA, 25 bp, Homo sapien
tacattgcagacactgccggtatgg

SEQ ID NO: 4842816 - DNA, 25 bp, Homo sapien
gtatttgaggtaatgggcatgttaa

SEQ ID NO: 4842817 - DNA, 25 bp, Homo sapien
gagccctgtgaccatgctagctaat

SEQ ID NO: 4842818 - DNA, 25 bp, Homo sapien
aatgtgttatctttagctattagac

SEQ ID NO: 4842819 - DNA, 25 bp, Homo sapien
tagagtccagacaaaggcactgtat

SEQ ID NO: 4842820 - DNA, 25 bp, Homo sapien
ttgcagttttgtccctgtgagcttg

SEQ ID NO: 4842821 - DNA, 25 bp, Homo sapien
agttttgtccctgtgagcttgtcca

SEQ ID NO: 4842822 - DNA, 25 bp, Homo sapien
cttgcagttttgtccctgtgagctt

SEQ ID NO: 4842823 - DNA, 25 bp, Homo sapien
gcagttttgtccctgtgagcttgtc

SEQ ID NO: 4842824 - DNA, 25 bp, Homo sapien
cctccactctggttgataggaacat

SEQ ID NO: 4842825 - DNA, 25 bp, Homo sapien
gaagacaggaaagcaacgccgtgct

SEQ ID NO: 4842826 - DNA, 25 bp, Homo sapien
gacaggaaagcaacgccgtgctagg

SEQ ID NO: 4842827 - DNA, 25 bp, Homo sapien
acaggaaagcaacgccgtgctaggg

SEQ ID NO: 4842828 - DNA, 25 bp, Homo sapien
gtaggttgccaaaatttagtgctca

SEQ ID NO: 4842829 - DNA, 25 bp, Homo sapien
gctgtcactgtggaacccgtgtcag

SEQ ID NO: 4842830 - DNA, 25 bp, Homo sapien
tcagcgtccagttttgcgggccagt

SEQ ID NO: 4842831 - DNA, 25 bp, Homo sapien
tcagattccgaggagagagagagta

SEQ ID NO: 4842832 - DNA, 25 bp, Homo sapien
ctctttgtagctagggaaggtcact

SEQ ID NO: 4842833 - DNA, 25 bp, Homo sapien
tctctctgccaataataagagggca

SEQ ID NO: 4842834 - DNA, 25 bp, Homo sapien
aataatgtgactgctaaaagggccc

SEQ ID NO: 4842835 - DNA, 25 bp, Homo sapien
gaaggtcactgcaagctgtcagaat

SEQ ID NO: 4842836 - DNA, 25 bp, Homo sapien
agagaaaagccggaagtcactggga

SEQ ID NO: 4842837 - DNA, 25 bp, Homo sapien
gagaaaagccggaagtcactgggaa

SEQ ID NO: 4842838 - DNA, 25 bp, Homo sapien
ctgggaaagtctagtggaagtgctg

SEQ ID NO: 4842839 - DNA, 25 bp, Homo sapien
tagtggaagtgctgaacccggaagc

SEQ ID NO: 4842840 - DNA, 25 bp, Homo sapien
actatccagccataatctctgctgg

SEQ ID NO: 4842841 - DNA, 25 bp, Homo sapien
tcactatccagccataatctctgct

SEQ ID NO: 4842842 - DNA, 25 bp, Homo sapien
cactatccagccataatctctgctg

SEQ ID NO: 4842843 - DNA, 25 bp, Homo sapien
catacgaagacttccgtagtctttc

SEQ ID NO: 4842844 - DNA, 25 bp, Homo sapien
accttccaccgaaacctgaagtgct

SEQ ID NO: 4842845 - DNA, 25 bp, Homo sapien
ctagtacatacgaagacttccgtag

SEQ ID NO: 4842846 - DNA, 25 bp, Homo sapien
tccaccgaaacctgaagtgctggtc

SEQ ID NO: 4842847 - DNA, 25 bp, Homo sapien
catttcagtaggaatgggttttact

SEQ ID NO: 4842848 - DNA, 25 bp, Homo sapien
ccacccaagatagttttccatttca

SEQ ID NO: 4842849 - DNA, 25 bp, Homo sapien
tccatttcagtaggaatgggtttta

SEQ ID NO: 4842850 - DNA, 25 bp, Homo sapien
cccaagatagttttccatttcagta

SEQ ID NO: 4842851 - DNA, 25 bp, Homo sapien
gctttctcattttgaataccgtagg

SEQ ID NO: 4842852 - DNA, 25 bp, Homo sapien
tctcattttgaataccgtaggtatt

SEQ ID NO: 4842853 - DNA, 25 bp, Homo sapien
tttctcattttgaataccgtaggta

SEQ ID NO: 4842854 - DNA, 25 bp, Homo sapien
ggtattcaaatgaattcactttcaa

SEQ ID NO: 4842855 - DNA, 25 bp, Homo sapien
caagaatacttgtatcatgtgccac

SEQ ID NO: 4842856 - DNA, 25 bp, Homo sapien
tgtcccagatgtatgtcgccgaagt

SEQ ID NO: 4842857 - DNA, 25 bp, Homo sapien
tgacaggtgcccgacattccagttc

SEQ ID NO: 4842858 - DNA, 25 bp, Homo sapien
tgtgttctcaccgtcattagccaaa

SEQ ID NO: 4842859 - DNA, 25 bp, Homo sapien
aagatttggtcacccgcttgctgag

SEQ ID NO: 4842860 - DNA, 25 bp, Homo sapien
cgttattgcaacagaagttgggagc

SEQ ID NO: 4842861 - DNA, 25 bp, Homo sapien
gggatggcacgctcaaagatttggt

SEQ ID NO: 4842862 - DNA, 25 bp, Homo sapien
ggttacattccccagattgccaggg

SEQ ID NO: 4842863 - DNA, 25 bp, Homo sapien
tgtatctgcccgcaaaggtttggca

SEQ ID NO: 4842864 - DNA, 25 bp, Homo sapien
tggagtaagcctattactttaagga

SEQ ID NO: 4842865 - DNA, 25 bp, Homo sapien
acattcgtctgtcatttaagttggg

SEQ ID NO: 4842866 - DNA, 25 bp, Homo sapien
aaacagctgataataatttgtagca

SEQ ID NO: 4842867 - DNA, 25 bp, Homo sapien
gatagcatagcatggaagacagtgg

SEQ ID NO: 4842868 - DNA, 25 bp, Homo sapien
tggaagacagtggaggaagtagaca

SEQ ID NO: 4842869 - DNA, 25 bp, Homo sapien
tattgatagcatagcatggaagaca

SEQ ID NO: 4842870 - DNA, 25 bp, Homo sapien
ttgatagcatagcatggaagacagt

SEQ ID NO: 4842871 - DNA, 25 bp, Homo sapien
tgtatttcagccctggaagctgtgc

SEQ ID NO: 4842872 - DNA, 25 bp, Homo sapien
tgtgcgtttgtacccgccctcttgt

SEQ ID NO: 4842873 - DNA, 25 bp, Homo sapien
gccctggaagctgtgcgtttgtacc

SEQ ID NO: 4842874 - DNA, 25 bp, Homo sapien
gaagctgtgcgtttgtacccgccct

SEQ ID NO: 4842875 - DNA, 25 bp, Homo sapien
atcgtttcttcgaaccaaactcctg

SEQ ID NO: 4842876 - DNA, 25 bp, Homo sapien
tcctggtcttccacgagtgcttgtt

SEQ ID NO: 4842877 - DNA, 25 bp, Homo sapien
ttgtacctatcgtttcttcgaacca

SEQ ID NO: 4842878 - DNA, 25 bp, Homo sapien
ttccatgtgtgcacactgttaccca

SEQ ID NO: 4842879 - DNA, 25 bp, Homo sapien
tcttgccagggtactaattctttcc

SEQ ID NO: 4842880 - DNA, 25 bp, Homo sapien
tcgcatagagcagctttcagtgtag

SEQ ID NO: 4842881 - DNA, 25 bp, Homo sapien
tagagaggatatgttgtcaggctgc

SEQ ID NO: 4842882 - DNA, 25 bp, Homo sapien
gaaaccttccctatatcgcatagag

SEQ ID NO: 4842883 - DNA, 25 bp, Homo sapien
ttaagagctgaagaccttcccctct

SEQ ID NO: 4842884 - DNA, 25 bp, Homo sapien
tttgccactttttcacgttgctccc

SEQ ID NO: 4842885 - DNA, 25 bp, Homo sapien
tggcaacaataagggataagcatta

SEQ ID NO: 4842886 - DNA, 25 bp, Homo sapien
ttgctccccatttggcaacaataag

SEQ ID NO: 4842887 - DNA, 25 bp, Homo sapien
gctcctagctcagtccctttctctc

SEQ ID NO: 4842888 - DNA, 25 bp, Homo sapien
tgtaggctcctagctcagtcccttt

SEQ ID NO: 4842889 - DNA, 25 bp, Homo sapien
cttgtaggctcctagctcagtccct

SEQ ID NO: 4842890 - DNA, 25 bp, Homo sapien
taggctcctagctcagtccctttct

SEQ ID NO: 4842891 - DNA, 25 bp, Homo sapien
gtacttaatgtttcttgatcacata

SEQ ID NO: 4842892 - DNA, 25 bp, Homo sapien
tttcgtacttaatgtttcttgatca

SEQ ID NO: 4842893 - DNA, 25 bp, Homo sapien
tcgtacttaatgtttcttgatcaca

SEQ ID NO: 4842894 - DNA, 25 bp, Homo sapien
taatgtttcttgatcacataaagcc

SEQ ID NO: 4842895 - DNA, 25 bp, Homo sapien
tatcctgtttcatgcttaagaaaat

SEQ ID NO: 4842896 - DNA, 25 bp, Homo sapien
tacaaggcaaacttggccccactgt

SEQ ID NO: 4842897 - DNA, 25 bp, Homo sapien
ctttggacaatagatcttttacaag

SEQ ID NO: 4842898 - DNA, 25 bp, Homo sapien
tttggtgtttatcctgtttcatgct

SEQ ID NO: 4842899 - DNA, 25 bp, Homo sapien
tcacttggcattcacattcctttga

SEQ ID NO: 4842900 - DNA, 25 bp, Homo sapien
ttgatttactgtggagtgattttgc

SEQ ID NO: 4842901 - DNA, 25 bp, Homo sapien
tcctttgatttactgtggagtgatt

SEQ ID NO: 4842902 - DNA, 25 bp, Homo sapien
ttggcattcacattcctttgattta

SEQ ID NO: 4842903 - DNA, 25 bp, Homo sapien
aaagcagaagtgtgcgcctcagcag

SEQ ID NO: 4842904 - DNA, 25 bp, Homo sapien
gcctcagcagcggaagtgaaaccag

SEQ ID NO: 4842905 - DNA, 25 bp, Homo sapien
aaaggcagtgtcgaggccaaatcgg

SEQ ID NO: 4842906 - DNA, 25 bp, Homo sapien
gggcctggtttctcgcatgaaagca

SEQ ID NO: 4842907 - DNA, 25 bp, Homo sapien
ttgagttgtcatgggtctttttctt

SEQ ID NO: 4842908 - DNA, 25 bp, Homo sapien
cattctttgagttgtcatgggtctt

SEQ ID NO: 4842909 - DNA, 25 bp, Homo sapien
ctgctttcttgatgacacgtgttcc

SEQ ID NO: 4842910 - DNA, 25 bp, Homo sapien
gcctttgcagtctgctttatcttca

SEQ ID NO: 4842911 - DNA, 25 bp, Homo sapien
gtagcctatgaatgctgttgccata

SEQ ID NO: 4842912 - DNA, 25 bp, Homo sapien
gcttcgcaggccaaggaacagttgt

SEQ ID NO: 4842913 - DNA, 25 bp, Homo sapien
tagactgaactgttgatgcttcgca

SEQ ID NO: 4842914 - DNA, 25 bp, Homo sapien
cactttgtctcgcttttgtggagat

SEQ ID NO: 4842915 - DNA, 25 bp, Homo sapien
gaacagttgtagctgtctggtgttc

SEQ ID NO: 4842916 - DNA, 25 bp, Homo sapien
tcctgtaggagagcgaagagcttgc

SEQ ID NO: 4842917 - DNA, 25 bp, Homo sapien
aagagcttgcctcgtagcagagggc

SEQ ID NO: 4842918 - DNA, 25 bp, Homo sapien
tgggaaccgcctgcacagctgggtt

SEQ ID NO: 4842919 - DNA, 25 bp, Homo sapien
agggaaagttctgtcgggcttgcca

SEQ ID NO: 4842920 - DNA, 25 bp, Homo sapien
tggaactaggtgtggtgagtgagtg

SEQ ID NO: 4842921 - DNA, 25 bp, Homo sapien
agccctggtcaggttgtggaactag

SEQ ID NO: 4842922 - DNA, 25 bp, Homo sapien
tctctgaacttcaacatcaggttgc

SEQ ID NO: 4842923 - DNA, 25 bp, Homo sapien
aggaggagggttctggtcgggactg

SEQ ID NO: 4842924 - DNA, 25 bp, Homo sapien
ttgtgcatgaaagaaagttcatgta

SEQ ID NO: 4842925 - DNA, 25 bp, Homo sapien
gaaagttcatgtatgctgaatcatc

SEQ ID NO: 4842926 - DNA, 25 bp, Homo sapien
tgtatgctgaatcatcagaatgcag

SEQ ID NO: 4842927 - DNA, 25 bp, Homo sapien
catgaaagaaagttcatgtatgctg

SEQ ID NO: 4842928 - DNA, 25 bp, Homo sapien
aaaagactggccatattgtgattgg

SEQ ID NO: 4842929 - DNA, 25 bp, Homo sapien
gagatactaataaaatctactagaa

SEQ ID NO: 4842930 - DNA, 25 bp, Homo sapien
tgagctcgtacacactggtggcagg

SEQ ID NO: 4842931 - DNA, 25 bp, Homo sapien
ccatattgtgattggtaagaaagtg

SEQ ID NO: 4842932 - DNA, 25 bp, Homo sapien
ctgggcttgaagtttgaggtaccta

SEQ ID NO: 4842933 - DNA, 25 bp, Homo sapien
gaagtttgaggtacctaatcatctg

SEQ ID NO: 4842934 - DNA, 25 bp, Homo sapien
tacttaacatgtattgtagccattt

SEQ ID NO: 4842935 - DNA, 25 bp, Homo sapien
gtttgtcatgcatcataagtaccta

SEQ ID NO: 4842936 - DNA, 25 bp, Homo sapien
gaaacccaggtatgaactacacatt

SEQ ID NO: 4842937 - DNA, 25 bp, Homo sapien
gaggccgatattataagtgcaatcc

SEQ ID NO: 4842938 - DNA, 25 bp, Homo sapien
tcatatccctgacctttgaggccga

SEQ ID NO: 4842939 - DNA, 25 bp, Homo sapien
tttgaggataccaagaaggcagtgt

SEQ ID NO: 4842940 - DNA, 25 bp, Homo sapien
catttcaaactagggacgagtatac

SEQ ID NO: 4842941 - DNA, 25 bp, Homo sapien
gattggcaattgcttccccacggac

SEQ ID NO: 4842942 - DNA, 25 bp, Homo sapien
tctagcacccctgtaatggattcct

SEQ ID NO: 4842943 - DNA, 25 bp, Homo sapien
agagtttgagtccagtcagagcaac

SEQ ID NO: 4842944 - DNA, 25 bp, Homo sapien
gtaacagccctgttgtgtgaacaat

SEQ ID NO: 4842945 - DNA, 25 bp, Homo sapien
tcagctggtgatctattgtgaccct

SEQ ID NO: 4842946 - DNA, 25 bp, Homo sapien
ttgtgacccttagtacatttacgca

SEQ ID NO: 4842947 - DNA, 25 bp, Homo sapien
taagcagcagtttactgtcagctgg

SEQ ID NO: 4842948 - DNA, 25 bp, Homo sapien
tttgagaagaacagttgtagggcat

SEQ ID NO: 4842949 - DNA, 25 bp, Homo sapien
ctgtttgagaagaacagttgtaggg

SEQ ID NO: 4842950 - DNA, 25 bp, Homo sapien
gtttgagaagaacagttgtagggca

SEQ ID NO: 4842951 - DNA, 25 bp, Homo sapien
tgagaagaacagttgtagggcataa

SEQ ID NO: 4842952 - DNA, 25 bp, Homo sapien
attcaaattgagccccaagaagatg

SEQ ID NO: 4842953 - DNA, 25 bp, Homo sapien
ccccaagaagatgtgcccgttggtc

SEQ ID NO: 4842954 - DNA, 25 bp, Homo sapien
ttgagccccaagaagatgtgcccgt

SEQ ID NO: 4842955 - DNA, 25 bp, Homo sapien
gagccccaagaagatgtgcccgttg

SEQ ID NO: 4842956 - DNA, 25 bp, Homo sapien
ggtacttagaatgtcgctttttctc

SEQ ID NO: 4842957 - DNA, 25 bp, Homo sapien
actgcagggagtgaaacctctgcca

SEQ ID NO: 4842958 - DNA, 25 bp, Homo sapien
gtttcttttcatactctggtactta

SEQ ID NO: 4842959 - DNA, 25 bp, Homo sapien
ctcagcactgcagggagtgaaacct

SEQ ID NO: 4842960 - DNA, 25 bp, Homo sapien
ttggctcctattgcatttacctggg

SEQ ID NO: 4842961 - DNA, 25 bp, Homo sapien
ggcagtcttaggtactgatgatcaa

SEQ ID NO: 4842962 - DNA, 25 bp, Homo sapien
ctggcccaatggagaatggcagtct

SEQ ID NO: 4842963 - DNA, 25 bp, Homo sapien
caaattcctccctaaagtcaggtgg

SEQ ID NO: 4842964 - DNA, 25 bp, Homo sapien
tcattcctgcgctgtaaaccccatg

SEQ ID NO: 4842965 - DNA, 25 bp, Homo sapien
taaaccccatgttgaggttactgtg

SEQ ID NO: 4842966 - DNA, 25 bp, Homo sapien
ccagtccaaccatagatgtagccat

SEQ ID NO: 4842967 - DNA, 25 bp, Homo sapien
ctctagtccagtccaaccatagatg

SEQ ID NO: 4842968 - DNA, 25 bp, Homo sapien
gagttcattggccagtcactggcct

SEQ ID NO: 4842969 - DNA, 25 bp, Homo sapien
tctattaaactcctctcattgggcc

SEQ ID NO: 4842970 - DNA, 25 bp, Homo sapien
tgaaaaacttgtcccttgcgtaaca

SEQ ID NO: 4842971 - DNA, 25 bp, Homo sapien
gcgtaacaccctgtctacacttgtg

SEQ ID NO: 4842972 - DNA, 25 bp, Homo sapien
tgcaggctgctgtttattagaacac

SEQ ID NO: 4842973 - DNA, 25 bp, Homo sapien
aacacacgctttttattccatgtca

SEQ ID NO: 4842974 - DNA, 25 bp, Homo sapien
ttccattgctgtagacttgtaaaac

SEQ ID NO: 4842975 - DNA, 25 bp, Homo sapien
ggcaagcgcttacattcccggacaa

SEQ ID NO: 4842976 - DNA, 25 bp, Homo sapien
ctttgatgctttgagcttctcagtt

SEQ ID NO: 4842977 - DNA, 25 bp, Homo sapien
tttgatgctttgagcttctcagttc

SEQ ID NO: 4842978 - DNA, 25 bp, Homo sapien
gagcttctcagttccttctggtctc

SEQ ID NO: 4842979 - DNA, 25 bp, Homo sapien
tttgagcttctcagttccttctggt

SEQ ID NO: 4842980 - DNA, 25 bp, Homo sapien
catcctggagttggttaattggagg

SEQ ID NO: 4842981 - DNA, 25 bp, Homo sapien
gtaacttgtgtcaccttgtgagaca

SEQ ID NO: 4842982 - DNA, 25 bp, Homo sapien
tgtcttcccgggtaacttgtgtcac

SEQ ID NO: 4842983 - DNA, 25 bp, Homo sapien
cagcaggtatgaatgggcatcagcc

SEQ ID NO: 4842984 - DNA, 25 bp, Homo sapien
gttagccagtcagtcaaagcagaga

SEQ ID NO: 4842985 - DNA, 25 bp, Homo sapien
cttgttagccagtcagtcaaagcag

SEQ ID NO: 4842986 - DNA, 25 bp, Homo sapien
tagccagtcagtcaaagcagagaat

SEQ ID NO: 4842987 - DNA, 25 bp, Homo sapien
gccagtcagtcaaagcagagaattt

SEQ ID NO: 4842988 - DNA, 25 bp, Homo sapien
tcctatacagattcgatgcttcggg

SEQ ID NO: 4842989 - DNA, 25 bp, Homo sapien
tcgatgcttcgggtacaaatctcca

SEQ ID NO: 4842990 - DNA, 25 bp, Homo sapien
gaatcctgtcatctgaataccttcc

SEQ ID NO: 4842991 - DNA, 25 bp, Homo sapien
ttccatgtgcttgattcctatacag

SEQ ID NO: 4842992 - DNA, 25 bp, Homo sapien
gatactctttggtcatcctgagatg

SEQ ID NO: 4842993 - DNA, 25 bp, Homo sapien
ctgtcagtgatagggaagcttctgc

SEQ ID NO: 4842994 - DNA, 25 bp, Homo sapien
tgtgccttgtccacagtttctgggg

SEQ ID NO: 4842995 - DNA, 25 bp, Homo sapien
tggtgaatggttggatactctttgg

SEQ ID NO: 4842996 - DNA, 25 bp, Homo sapien
ttagtcggcctcaaaggcgctgttg

SEQ ID NO: 4842997 - DNA, 25 bp, Homo sapien
gaccagaaagttacacaccctagaa

SEQ ID NO: 4842998 - DNA, 25 bp, Homo sapien
ctgggaaagttccatgtaggtgtga

SEQ ID NO: 4842999 - DNA, 25 bp, Homo sapien
gcagttctaagaaggaacagtttca

SEQ ID NO: 4843000 - DNA, 25 bp, Homo sapien
tgcctcagggtcaagctcttacagt

SEQ ID NO: 4843001 - DNA, 25 bp, Homo sapien
gataggcacagttttgattgagtca

SEQ ID NO: 4843002 - DNA, 25 bp, Homo sapien
tttgataggcacagttttgattgag

SEQ ID NO: 4843003 - DNA, 25 bp, Homo sapien
tatttgataggcacagttttgattg

SEQ ID NO: 4843004 - DNA, 25 bp, Homo sapien
caagaagttatttgataggcacagt

SEQ ID NO: 4843005 - DNA, 25 bp, Homo sapien
tcctgagccatctggtttgaaattc

SEQ ID NO: 4843006 - DNA, 25 bp, Homo sapien
ctgagccatctggtttgaaattccc

SEQ ID NO: 4843007 - DNA, 25 bp, Homo sapien
ttgaggaccactcactcctgagcca

SEQ ID NO: 4843008 - DNA, 25 bp, Homo sapien
tcactcctgagccatctggtttgaa

SEQ ID NO: 4843009 - DNA, 25 bp, Homo sapien
taagtgggattctggcaacaaatgc

SEQ ID NO: 4843010 - DNA, 25 bp, Homo sapien
gacactggttctcccgatagcggga

SEQ ID NO: 4843011 - DNA, 25 bp, Homo sapien
caaaggattttgcaaagcccggtag

SEQ ID NO: 4843012 - DNA, 25 bp, Homo sapien
gggatccaggatttccgctccagaa

SEQ ID NO: 4843013 - DNA, 25 bp, Homo sapien
gaaagatttgcggtctctccgtccc

SEQ ID NO: 4843014 - DNA, 25 bp, Homo sapien
tctacctgtcacttgaaaaagactg

SEQ ID NO: 4843015 - DNA, 25 bp, Homo sapien
tttggaacaataaggcggtaacaca

SEQ ID NO: 4843016 - DNA, 25 bp, Homo sapien
tgcttggatctacttaacggacctc

SEQ ID NO: 4843017 - DNA, 25 bp, Homo sapien
cacctgggaactgcgggacttacaa

SEQ ID NO: 4843018 - DNA, 25 bp, Homo sapien
gggtgcttccaaacctacacagctg

SEQ ID NO: 4843019 - DNA, 25 bp, Homo sapien
catggcgtaaagcaaggaggagcat

SEQ ID NO: 4843020 - DNA, 25 bp, Homo sapien
tcctctggtgggtgtccaaggcttc

SEQ ID NO: 4843021 - DNA, 25 bp, Homo sapien
cctgctgtcctcttggagacattcc

SEQ ID NO: 4843022 - DNA, 25 bp, Homo sapien
gcagcagtgtctctaagccctgctg

SEQ ID NO: 4843023 - DNA, 25 bp, Homo sapien
ggagacattccagggtacttttaca

SEQ ID NO: 4843024 - DNA, 25 bp, Homo sapien
tgtctctaagccctgctgtcctctt

SEQ ID NO: 4843025 - DNA, 25 bp, Homo sapien
ctctctttagagccactgaaatcaa

SEQ ID NO: 4843026 - DNA, 25 bp, Homo sapien
tctctctttagagccactgaaatca

SEQ ID NO: 4843027 - DNA, 25 bp, Homo sapien
gttgcttaacccctctatcagtgag

SEQ ID NO: 4843028 - DNA, 25 bp, Homo sapien
tgtatgatgaccagcttctgcccag

SEQ ID NO: 4843029 - DNA, 25 bp, Homo sapien
cagtgagagggcaatgaaccaatct

SEQ ID NO: 4843030 - DNA, 25 bp, Homo sapien
cccagttgctgaacgtttgtacaga

SEQ ID NO: 4843031 - DNA, 25 bp, Homo sapien
cttttatcctgaactagccttaact

SEQ ID NO: 4843032 - DNA, 25 bp, Homo sapien
tagagagcaaacttttctcttgtag

SEQ ID NO: 4843033 - DNA, 25 bp, Homo sapien
ttatagagagcaaacttttctcttg

SEQ ID NO: 4843034 - DNA, 25 bp, Homo sapien
gatgaaatggtattatagagagcaa

SEQ ID NO: 4843035 - DNA, 25 bp, Homo sapien
atattttggtcatcactatatgcag

SEQ ID NO: 4843036 - DNA, 25 bp, Homo sapien
tttggtcatcactatatgcagtcat

SEQ ID NO: 4843037 - DNA, 25 bp, Homo sapien
ttttggtcatcactatatgcagtca

SEQ ID NO: 4843038 - DNA, 25 bp, Homo sapien
ttcattgggatattttggtcatcac

SEQ ID NO: 4843039 - DNA, 25 bp, Homo sapien
gggtgatgtggttaattccttcagc

SEQ ID NO: 4843040 - DNA, 25 bp, Homo sapien
tcctggtaagcagctgtttttattg

SEQ ID NO: 4843041 - DNA, 25 bp, Homo sapien
tctgaaaatagttcctggtgggtga

SEQ ID NO: 4843042 - DNA, 25 bp, Homo sapien
gagatctaaagctctccacaagcaa

SEQ ID NO: 4843043 - DNA, 25 bp, Homo sapien
ctttgcatatgaaagatgtttgcag

SEQ ID NO: 4843044 - DNA, 25 bp, Homo sapien
tttgcagagaaaaaaggattcccat

SEQ ID NO: 4843045 - DNA, 25 bp, Homo sapien
tgaaagatgtttgcagagaaaaaag

SEQ ID NO: 4843046 - DNA, 25 bp, Homo sapien
gatgtttgcagagaaaaaaggattc

SEQ ID NO: 4843047 - DNA, 25 bp, Homo sapien
actgtggctgaaccagagttgaggt

SEQ ID NO: 4843048 - DNA, 25 bp, Homo sapien
gctgggattgctgctcagcagcttg

SEQ ID NO: 4843049 - DNA, 25 bp, Homo sapien
tggactcccagaggaaggtgctctg

SEQ ID NO: 4843050 - DNA, 25 bp, Homo sapien
gcacagtcctgaggctggactccca

SEQ ID NO: 4843051 - DNA, 25 bp, Homo sapien
cgtccttgttctaatgcacacccat

SEQ ID NO: 4843052 - DNA, 25 bp, Homo sapien
actgcaacaggctcccgtgcagtgt

SEQ ID NO: 4843053 - DNA, 25 bp, Homo sapien
aacaggctcccgtgcagtgtgagat

SEQ ID NO: 4843054 - DNA, 25 bp, Homo sapien
cctggaggacagacaccttgtcgtc

SEQ ID NO: 4843055 - DNA, 25 bp, Homo sapien
gccgacaagttggtcattggagttg

SEQ ID NO: 4843056 - DNA, 25 bp, Homo sapien
tgtttctaggtttgggcgagccagg

SEQ ID NO: 4843057 - DNA, 25 bp, Homo sapien
tttggatgtgaacatactccttgtt

SEQ ID NO: 4843058 - DNA, 25 bp, Homo sapien
ggctgccaactgtggcagaggcttc

SEQ ID NO: 4843059 - DNA, 25 bp, Homo sapien
agggcagccgtgaagcttggcctca

SEQ ID NO: 4843060 - DNA, 25 bp, Homo sapien
gggcagccgtgaagcttggcctcac

SEQ ID NO: 4843061 - DNA, 25 bp, Homo sapien
gccccagagggcagccgtgaagctt

SEQ ID NO: 4843062 - DNA, 25 bp, Homo sapien
cagagggcagccgtgaagcttggcc

SEQ ID NO: 4843063 - DNA, 25 bp, Homo sapien
gcttttctggaccatccttgctctc

SEQ ID NO: 4843064 - DNA, 25 bp, Homo sapien
ccctgcagaccttgccatggaaagc

SEQ ID NO: 4843065 - DNA, 25 bp, Homo sapien
cacagtggcttttctggaccatcct

SEQ ID NO: 4843066 - DNA, 25 bp, Homo sapien
tttgcttccatccaatcttgctcct

SEQ ID NO: 4843067 - DNA, 25 bp, Homo sapien
ggccctctacaagtaagcctgggca

SEQ ID NO: 4843068 - DNA, 25 bp, Homo sapien
tgtgaaggctcgaggtggggaattt

SEQ ID NO: 4843069 - DNA, 25 bp, Homo sapien
aatttgtcattgtcagtaggaagtg

SEQ ID NO: 4843070 - DNA, 25 bp, Homo sapien
tgtcattgtcagtaggaagtgacac

SEQ ID NO: 4843071 - DNA, 25 bp, Homo sapien
tgggtcacagaaaccagctgaatat

SEQ ID NO: 4843072 - DNA, 25 bp, Homo sapien
acagaaaccagctgaatatttgcct

SEQ ID NO: 4843073 - DNA, 25 bp, Homo sapien
ggtcacagaaaccagctgaatattt

SEQ ID NO: 4843074 - DNA, 25 bp, Homo sapien
tcacagaaaccagctgaatatttgc

SEQ ID NO: 4843075 - DNA, 25 bp, Homo sapien
gatgagagactttccgatgacttag

SEQ ID NO: 4843076 - DNA, 25 bp, Homo sapien
ccgatgacttagattctggtgattc

SEQ ID NO: 4843077 - DNA, 25 bp, Homo sapien
ttctggtgattctgcttttcatgtc

SEQ ID NO: 4843078 - DNA, 25 bp, Homo sapien
ccacaactgggtgttatttggatga

SEQ ID NO: 4843079 - DNA, 25 bp, Homo sapien
cagaagtagcaacagagatggaggc

SEQ ID NO: 4843080 - DNA, 25 bp, Homo sapien
catcatccgcagaagtagcaacaga

SEQ ID NO: 4843081 - DNA, 25 bp, Homo sapien
cagagatggaggctagagggacatc

SEQ ID NO: 4843082 - DNA, 25 bp, Homo sapien
tcctttgagttccatcatccgcaga

SEQ ID NO: 4843083 - DNA, 25 bp, Homo sapien
gctgctggaaatagtgtgtttcaga

SEQ ID NO: 4843084 - DNA, 25 bp, Homo sapien
ctagtttcttgttctgcaccagctg

SEQ ID NO: 4843085 - DNA, 25 bp, Homo sapien
ggaaatagtgtgtttcagagcttgg

SEQ ID NO: 4843086 - DNA, 25 bp, Homo sapien
tagtgtgtttcagagcttggtgtac

SEQ ID NO: 4843087 - DNA, 25 bp, Homo sapien
ggcttgctcatccattgatttccaa

SEQ ID NO: 4843088 - DNA, 25 bp, Homo sapien
tcaagcccagatttgacagcagccc

SEQ ID NO: 4843089 - DNA, 25 bp, Homo sapien
gcccgtgcaggcttgctcatccatt

SEQ ID NO: 4843090 - DNA, 25 bp, Homo sapien
ccagatttgacagcagcccgtgcag

SEQ ID NO: 4843091 - DNA, 25 bp, Homo sapien
cctaggctgcatgctttcaggtcca

SEQ ID NO: 4843092 - DNA, 25 bp, Homo sapien
tgctttcaggtccaacagttccact

SEQ ID NO: 4843093 - DNA, 25 bp, Homo sapien
tttcaggtccaacagttccactgct

SEQ ID NO: 4843094 - DNA, 25 bp, Homo sapien
gctttcaggtccaacagttccactg

SEQ ID NO: 4843095 - DNA, 25 bp, Homo sapien
ggatttccatgaggagcaagacatt

SEQ ID NO: 4843096 - DNA, 25 bp, Homo sapien
gctttctttgaacagtaatacaaat

SEQ ID NO: 4843097 - DNA, 25 bp, Homo sapien
ccaccacagaattttggaccggtat

SEQ ID NO: 4843098 - DNA, 25 bp, Homo sapien
tgcaagccgtctgtcctgtaatggt

SEQ ID NO: 4843099 - DNA, 25 bp, Homo sapien
ttattgagagcaacccgccagagct

SEQ ID NO: 4843100 - DNA, 25 bp, Homo sapien
catgaaaacactgatgacgtcccct

SEQ ID NO: 4843101 - DNA, 25 bp, Homo sapien
cacattgcaatggagatttgcggac

SEQ ID NO: 4843102 - DNA, 25 bp, Homo sapien
tgacgtcccctgcttcacattgcaa

SEQ ID NO: 4843103 - DNA, 25 bp, Homo sapien
caggggacagacgtgccaccctggc

SEQ ID NO: 4843104 - DNA, 25 bp, Homo sapien
agccaggggacagacgtgccaccct

SEQ ID NO: 4843105 - DNA, 25 bp, Homo sapien
ccaggggacagacgtgccaccctgg

SEQ ID NO: 4843106 - DNA, 25 bp, Homo sapien
gccaggggacagacgtgccaccctg

SEQ ID NO: 4843107 - DNA, 25 bp, Homo sapien
gcctctcaaggtaagaactcgcatg

SEQ ID NO: 4843108 - DNA, 25 bp, Homo sapien
caaatactccccaggagctgtaagg

SEQ ID NO: 4843109 - DNA, 25 bp, Homo sapien
agctgtgcacaccagcaagggctgc

SEQ ID NO: 4843110 - DNA, 25 bp, Homo sapien
cgacaagggcatggctctacaggta

SEQ ID NO: 4843111 - DNA, 25 bp, Homo sapien
ggttgtcataaggtttaagtgagag

SEQ ID NO: 4843112 - DNA, 25 bp, Homo sapien
taaggttgtcataaggtttaagtga

SEQ ID NO: 4843113 - DNA, 25 bp, Homo sapien
cattctgcaagcctctcaatctccc

SEQ ID NO: 4843114 - DNA, 25 bp, Homo sapien
cactgttctccctaatgatgtcaca

SEQ ID NO: 4843115 - DNA, 25 bp, Homo sapien
agcttggtaaacctgggccgctgca

SEQ ID NO: 4843116 - DNA, 25 bp, Homo sapien
ttctccaactgcaattgtgaatgag

SEQ ID NO: 4843117 - DNA, 25 bp, Homo sapien
agtgctgctaagcttgcccttggcc

SEQ ID NO: 4843118 - DNA, 25 bp, Homo sapien
tgaccaaagacgaattctccaactg

SEQ ID NO: 4843119 - DNA, 25 bp, Homo sapien
ttgagaccagcctgcacaacagagg

SEQ ID NO: 4843120 - DNA, 25 bp, Homo sapien
agcctgcacaacagagggagatcct

SEQ ID NO: 4843121 - DNA, 25 bp, Homo sapien
aggaagatcgcttgaaggcaggagt

SEQ ID NO: 4843122 - DNA, 25 bp, Homo sapien
accagcctgcacaacagagggagat

SEQ ID NO: 4843123 - DNA, 25 bp, Homo sapien
gtgtgggtgtggttggaataacagc

SEQ ID NO: 4843124 - DNA, 25 bp, Homo sapien
tgggtgtggttggaataacagccat

SEQ ID NO: 4843125 - DNA, 25 bp, Homo sapien
tgtgggtgtggttggaataacagcc

SEQ ID NO: 4843126 - DNA, 25 bp, Homo sapien
gtgggtgtggttggaataacagcca

SEQ ID NO: 4843127 - DNA, 25 bp, Homo sapien
gcttacccaaagttaccagctatgg

SEQ ID NO: 4843128 - DNA, 25 bp, Homo sapien
caggaaagccttcgtagagttagaa

SEQ ID NO: 4843129 - DNA, 25 bp, Homo sapien
tctcatgacataggacccatctggg

SEQ ID NO: 4843130 - DNA, 25 bp, Homo sapien
taagcccacaaacctcagtcaggag

SEQ ID NO: 4843131 - DNA, 25 bp, Homo sapien
ggatgtccccatcctagtatcagag

SEQ ID NO: 4843132 - DNA, 25 bp, Homo sapien
tgccttcacctaggagaggagagcc

SEQ ID NO: 4843133 - DNA, 25 bp, Homo sapien
agagtactgttctttcacaccaggg

SEQ ID NO: 4843134 - DNA, 25 bp, Homo sapien
cgttaaggcagtagagttggattcc

SEQ ID NO: 4843135 - DNA, 25 bp, Homo sapien
tttctgctttatgagtgcaattgac

SEQ ID NO: 4843136 - DNA, 25 bp, Homo sapien
ttctgctttatgagtgcaattgaca

SEQ ID NO: 4843137 - DNA, 25 bp, Homo sapien
tctgctttatgagtgcaattgacat

SEQ ID NO: 4843138 - DNA, 25 bp, Homo sapien
cctcacctatggagaggatcatata

SEQ ID NO: 4843139 - DNA, 25 bp, Homo sapien
tcatcagagatagtaacacgcagtt

SEQ ID NO: 4843140 - DNA, 25 bp, Homo sapien
tgcatctgaggaataaagcctgact

SEQ ID NO: 4843141 - DNA, 25 bp, Homo sapien
cattcagcatgatgtccgctatggg

SEQ ID NO: 4843142 - DNA, 25 bp, Homo sapien
tttgctcgaagtaagcgaaagacac

SEQ ID NO: 4843143 - DNA, 25 bp, Homo sapien
tgctcgaagtaagcgaaagacacat

SEQ ID NO: 4843144 - DNA, 25 bp, Homo sapien
ttgctcgaagtaagcgaaagacaca

SEQ ID NO: 4843145 - DNA, 25 bp, Homo sapien
ctttgctcgaagtaagcgaaagaca

SEQ ID NO: 4843146 - DNA, 25 bp, Homo sapien
tctgtttcctcacaagcagggcaac

SEQ ID NO: 4843147 - DNA, 25 bp, Homo sapien
ttacacagtggttcagagctccaga

SEQ ID NO: 4843148 - DNA, 25 bp, Homo sapien
caacctacgatagggaggacagcat

SEQ ID NO: 4843149 - DNA, 25 bp, Homo sapien
ttaggtagtcctagcgacatgggag

SEQ ID NO: 4843150 - DNA, 25 bp, Homo sapien
ctgaaacaaaacaggtcacatcctg

SEQ ID NO: 4843151 - DNA, 25 bp, Homo sapien
gaaacaaaacaggtcacatcctgat

SEQ ID NO: 4843152 - DNA, 25 bp, Homo sapien
acaaaacaggtcacatcctgatacc

SEQ ID NO: 4843153 - DNA, 25 bp, Homo sapien
aacaaaacaggtcacatcctgatac

SEQ ID NO: 4843154 - DNA, 25 bp, Homo sapien
ggtgctctttggaatttaacagtgc

SEQ ID NO: 4843155 - DNA, 25 bp, Homo sapien
tcttacatgccttgtgtaggtgctc

SEQ ID NO: 4843156 - DNA, 25 bp, Homo sapien
ctccggttggctgaagggttaagct

SEQ ID NO: 4843157 - DNA, 25 bp, Homo sapien
cattcagtccttttacggctccggt

SEQ ID NO: 4843158 - DNA, 25 bp, Homo sapien
ttggcccaatggaagaatgtgctcc

SEQ ID NO: 4843159 - DNA, 25 bp, Homo sapien
ggctgcccccttggcccaatggaag

SEQ ID NO: 4843160 - DNA, 25 bp, Homo sapien
gggcagttaggcttgccctggatga

SEQ ID NO: 4843161 - DNA, 25 bp, Homo sapien
ccccttggcccaatggaagaatgtg

SEQ ID NO: 4843162 - DNA, 25 bp, Homo sapien
cttgagtccctttgactaaggaata

SEQ ID NO: 4843163 - DNA, 25 bp, Homo sapien
cctggctggccagtttcaacctctt

SEQ ID NO: 4843164 - DNA, 25 bp, Homo sapien
ccttgagtccctttgactaaggaat

SEQ ID NO: 4843165 - DNA, 25 bp, Homo sapien
ctggctggccagtttcaacctcttt

SEQ ID NO: 4843166 - DNA, 25 bp, Homo sapien
ttgcagactcagacgggtactgtag

SEQ ID NO: 4843167 - DNA, 25 bp, Homo sapien
gactcagacgggtactgtagctttt

SEQ ID NO: 4843168 - DNA, 25 bp, Homo sapien
tgcagactcagacgggtactgtagc

SEQ ID NO: 4843169 - DNA, 25 bp, Homo sapien
cagacgggtactgtagcttttccag

SEQ ID NO: 4843170 - DNA, 25 bp, Homo sapien
tgatagtggttttccgggcaaatgg

SEQ ID NO: 4843171 - DNA, 25 bp, Homo sapien
gagggaagccctaaggaccaggcag

SEQ ID NO: 4843172 - DNA, 25 bp, Homo sapien
tagaactgtcttttttcagggtaga

SEQ ID NO: 4843173 - DNA, 25 bp, Homo sapien
gcacgtatcacaggaccagtagggt

SEQ ID NO: 4843174 - DNA, 25 bp, Homo sapien
ggaccagtagggtgacggcggccac

SEQ ID NO: 4843175 - DNA, 25 bp, Homo sapien
gcagtccttgggcacgtatcacagg

SEQ ID NO: 4843176 - DNA, 25 bp, Homo sapien
gggcggtctccagacgtgcacggcc

SEQ ID NO: 4843177 - DNA, 25 bp, Homo sapien
gggccatcacgaggaccatcaccag

SEQ ID NO: 4843178 - DNA, 25 bp, Homo sapien
tcccgttgcagatccaacatctgct

SEQ ID NO: 4843179 - DNA, 25 bp, Homo sapien
tctttgtttctgttaatcccgttgc

SEQ ID NO: 4843180 - DNA, 25 bp, Homo sapien
ggaccatcaccagtaactgttacaa

SEQ ID NO: 4843181 - DNA, 25 bp, Homo sapien
caatacttgcaaggtcgtcatcggt

SEQ ID NO: 4843182 - DNA, 25 bp, Homo sapien
tgtgaaggcgacaagtgtgacactg

SEQ ID NO: 4843183 - DNA, 25 bp, Homo sapien
gacactgacagccaactgaaatgga

SEQ ID NO: 4843184 - DNA, 25 bp, Homo sapien
taaacatttctaccgcatgtgacag

SEQ ID NO: 4843185 - DNA, 25 bp, Homo sapien
ttgccagagcgaaggaagtaaaagc

SEQ ID NO: 4843186 - DNA, 25 bp, Homo sapien
gcatccactatgagattcaccagag

SEQ ID NO: 4843187 - DNA, 25 bp, Homo sapien
ttccaccataagatttacaaagcag

SEQ ID NO: 4843188 - DNA, 25 bp, Homo sapien
tagtcttttcagttgccagagcgaa

SEQ ID NO: 4843189 - DNA, 25 bp, Homo sapien
ctttccaggaggtaggggtatacat

SEQ ID NO: 4843190 - DNA, 25 bp, Homo sapien
tttcccagtgtgagctgtcctgatt

SEQ ID NO: 4843191 - DNA, 25 bp, Homo sapien
aataaggaatagagcaagattgtct

SEQ ID NO: 4843192 - DNA, 25 bp, Homo sapien
gtgagctgtcctgattcctttccag

SEQ ID NO: 4843193 - DNA, 25 bp, Homo sapien
aaggcttttgtatgtatgctctgaa

SEQ ID NO: 4843194 - DNA, 25 bp, Homo sapien
gcccaacttccaaataatctttcca

SEQ ID NO: 4843195 - DNA, 25 bp, Homo sapien
caacttccaaataatctttccagtc

SEQ ID NO: 4843196 - DNA, 25 bp, Homo sapien
tcaaggcttttgtatgtatgctctg

SEQ ID NO: 4843197 - DNA, 25 bp, Homo sapien
tatgaacctccctaggcagggtgga

SEQ ID NO: 4843198 - DNA, 25 bp, Homo sapien
aattctgcagaggacgacccctagg

SEQ ID NO: 4843199 - DNA, 25 bp, Homo sapien
taaatattgtccatgcctaagggcc

SEQ ID NO: 4843200 - DNA, 25 bp, Homo sapien
gagactattagaaccatgccctggg

SEQ ID NO: 4843201 - DNA, 25 bp, Homo sapien
taatggatgtgaaagagggcttttg

SEQ ID NO: 4843202 - DNA, 25 bp, Homo sapien
tttttaaaccacatcggcctatcca

SEQ ID NO: 4843203 - DNA, 25 bp, Homo sapien
tggctgtgggtaagtcagtcacaca

SEQ ID NO: 4843204 - DNA, 25 bp, Homo sapien
ggcctatccaaagggccactacaag

SEQ ID NO: 4843205 - DNA, 25 bp, Homo sapien
tattcacattgcctcctcatgccat

SEQ ID NO: 4843206 - DNA, 25 bp, Homo sapien
ctctttttcgtacgtaaatgttctg

SEQ ID NO: 4843207 - DNA, 25 bp, Homo sapien
caagttgattcccaatggatgctga

SEQ ID NO: 4843208 - DNA, 25 bp, Homo sapien
actctccagcctgaaattattcaca

SEQ ID NO: 4843209 - DNA, 25 bp, Homo sapien
caaatgaaggacaaatgaggaccac

SEQ ID NO: 4843210 - DNA, 25 bp, Homo sapien
aatgaaggacaaatgaggaccacac

SEQ ID NO: 4843211 - DNA, 25 bp, Homo sapien
aaggacaaatgaggaccacactgcc

SEQ ID NO: 4843212 - DNA, 25 bp, Homo sapien
tgaaggacaaatgaggaccacactg

SEQ ID NO: 4843213 - DNA, 25 bp, Homo sapien
gaggaaggcatttccctctttggca

SEQ ID NO: 4843214 - DNA, 25 bp, Homo sapien
tggccctttagctgaggaaggcatt

SEQ ID NO: 4843215 - DNA, 25 bp, Homo sapien
tgaaacccccgacattccctctggc

SEQ ID NO: 4843216 - DNA, 25 bp, Homo sapien
gcaccaaaggctcgcccactcccac

SEQ ID NO: 4843217 - DNA, 25 bp, Homo sapien
gacattaagtaaatgatcaaactct

SEQ ID NO: 4843218 - DNA, 25 bp, Homo sapien
ctttgtaggacaagatgaaggaagg

SEQ ID NO: 4843219 - DNA, 25 bp, Homo sapien
tctttggcacttgtcggtacacgtg

SEQ ID NO: 4843220 - DNA, 25 bp, Homo sapien
aggagggtgcgcaggccccacttgt

SEQ ID NO: 4843221 - DNA, 25 bp, Homo sapien
caggcgggctgagcaaatactccgg

SEQ ID NO: 4843222 - DNA, 25 bp, Homo sapien
gggtggctcgatcacccgccacatc

SEQ ID NO: 4843223 - DNA, 25 bp, Homo sapien
cacttggccgccagaagccgtcggg

SEQ ID NO: 4843224 - DNA, 25 bp, Homo sapien
aaaggcagaggcgtcccaagcggcg

SEQ ID NO: 4843225 - DNA, 25 bp, Homo sapien
ctagccagcggctccagacaccgga

SEQ ID NO: 4843226 - DNA, 25 bp, Homo sapien
agcggctccagacaccggacaccgg

SEQ ID NO: 4843227 - DNA, 25 bp, Homo sapien
caccggacaccggacacccgccgcg

SEQ ID NO: 4843228 - DNA, 25 bp, Homo sapien
agccagcggctccagacaccggaca

SEQ ID NO: 4843229 - DNA, 25 bp, Homo sapien
ctgtccaaaatgctgttcactgaac

SEQ ID NO: 4843230 - DNA, 25 bp, Homo sapien
gctggcacttgggcgtttccacgaa

SEQ ID NO: 4843231 - DNA, 25 bp, Homo sapien
ttatacttgtggcaaaagttcctga

SEQ ID NO: 4843232 - DNA, 25 bp, Homo sapien
cttcccaaacagctcacaatcctgg

SEQ ID NO: 4843233 - DNA, 25 bp, Homo sapien
ttccacgaaacttcccaaacagctc

SEQ ID NO: 4843234 - DNA, 25 bp, Homo sapien
tgccagtagatcaggatctatgtac

SEQ ID NO: 4843235 - DNA, 25 bp, Homo sapien
gttcttcgctgagctctgccagtag

SEQ ID NO: 4843236 - DNA, 25 bp, Homo sapien
tctttccatcgtcggatctgttcct

SEQ ID NO: 4843237 - DNA, 25 bp, Homo sapien
ggtttcactggcagggactcctttc

SEQ ID NO: 4843238 - DNA, 25 bp, Homo sapien
ccacagaagaaacgtggataagttt

SEQ ID NO: 4843239 - DNA, 25 bp, Homo sapien
caggagctgttctaccaacacatcc

SEQ ID NO: 4843240 - DNA, 25 bp, Homo sapien
ctgctttgcttgtgactagtgtgaa

SEQ ID NO: 4843241 - DNA, 25 bp, Homo sapien
ggagctgttctaccaacacatccac

SEQ ID NO: 4843242 - DNA, 25 bp, Homo sapien
attcatctgccaaactggaacttgc

SEQ ID NO: 4843243 - DNA, 25 bp, Homo sapien
tcatctgccaaactggaacttgcac

SEQ ID NO: 4843244 - DNA, 25 bp, Homo sapien
ggattcatctgccaaactggaactt

SEQ ID NO: 4843245 - DNA, 25 bp, Homo sapien
ttaggattcatctgccaaactggaa

SEQ ID NO: 4843246 - DNA, 25 bp, Homo sapien
caagtgctgggaaacacgctgctaa

SEQ ID NO: 4843247 - DNA, 25 bp, Homo sapien
ggcgtcttctgtttgcgttacccaa

SEQ ID NO: 4843248 - DNA, 25 bp, Homo sapien
catagaccccatgaaacaagtgctg

SEQ ID NO: 4843249 - DNA, 25 bp, Homo sapien
tctgtggcagattcctgacgcgagc

SEQ ID NO: 4843250 - DNA, 25 bp, Homo sapien
caacactcgggtgagaggtctggct

SEQ ID NO: 4843251 - DNA, 25 bp, Homo sapien
aggtcttctgaacggaggtgctcac

SEQ ID NO: 4843252 - DNA, 25 bp, Homo sapien
ggcaatctgggtttgagtcactggc

SEQ ID NO: 4843253 - DNA, 25 bp, Homo sapien
aggtgctcaccaggcaaccaacact

SEQ ID NO: 4843254 - DNA, 25 bp, Homo sapien
gccatattgtcccaagtggatcttc

SEQ ID NO: 4843255 - DNA, 25 bp, Homo sapien
gctggcagactcccagaaaccactg

SEQ ID NO: 4843256 - DNA, 25 bp, Homo sapien
caaggttgttaccatgctggcagac

SEQ ID NO: 4843257 - DNA, 25 bp, Homo sapien
tgtcccaagtggatcttccttccct

SEQ ID NO: 4843258 - DNA, 25 bp, Homo sapien
ctttgaggagtcagctcttggtctc

SEQ ID NO: 4843259 - DNA, 25 bp, Homo sapien
caggtgaagaacaaagcattgacaa

SEQ ID NO: 4843260 - DNA, 25 bp, Homo sapien
gaagaggcgggagtaaggatgtcaa

SEQ ID NO: 4843261 - DNA, 25 bp, Homo sapien
gcgggagtaaggatgtcaagggtga

SEQ ID NO: 4843262 - DNA, 25 bp, Homo sapien
gtgacacccagggaatgatggatag

SEQ ID NO: 4843263 - DNA, 25 bp, Homo sapien
gaggaagctctgctccgcatgtcag

SEQ ID NO: 4843264 - DNA, 25 bp, Homo sapien
tgaaactcgctaactgggaacacag

SEQ ID NO: 4843265 - DNA, 25 bp, Homo sapien
cagtcaggtcctaaatagggcaggc

SEQ ID NO: 4843266 - DNA, 25 bp, Homo sapien
tcaaaagaccaggagtgaggcagtc

SEQ ID NO: 4843267 - DNA, 25 bp, Homo sapien
cacctctaagagctcttcaatgagc

SEQ ID NO: 4843268 - DNA, 25 bp, Homo sapien
gagctcttcaatgagctcagagagt

SEQ ID NO: 4843269 - DNA, 25 bp, Homo sapien
ttttcacctctaagagctcttcaat

SEQ ID NO: 4843270 - DNA, 25 bp, Homo sapien
tctaagagctcttcaatgagctcag

SEQ ID NO: 4843271 - DNA, 25 bp, Homo sapien
tttcattacagagcacatcataggg

SEQ ID NO: 4843272 - DNA, 25 bp, Homo sapien
ggtttatctagatggtgttcgccca

SEQ ID NO: 4843273 - DNA, 25 bp, Homo sapien
catacccagacttccttatcagctc

SEQ ID NO: 4843274 - DNA, 25 bp, Homo sapien
ccaagtttccaatgaaccgatttgc

SEQ ID NO: 4843275 - DNA, 25 bp, Homo sapien
gagagtctttaagtctctggttggt

SEQ ID NO: 4843276 - DNA, 25 bp, Homo sapien
tctaaagtctggagagtctttaagt

SEQ ID NO: 4843277 - DNA, 25 bp, Homo sapien
ctgatactgtgagcaagaggtgtgt

SEQ ID NO: 4843278 - DNA, 25 bp, Homo sapien
caagaggtgtgtttgcaatgttttc

SEQ ID NO: 4843279 - DNA, 25 bp, Homo sapien
caagctattggtgaattcttcagag

SEQ ID NO: 4843280 - DNA, 25 bp, Homo sapien
gtctgctggttatccggagcctgca

SEQ ID NO: 4843281 - DNA, 25 bp, Homo sapien
gcctgcagatcatggtactgtgatt

SEQ ID NO: 4843282 - DNA, 25 bp, Homo sapien
gctggcctcgatccttgctccagtt

SEQ ID NO: 4843283 - DNA, 25 bp, Homo sapien
ttaaaggctcacactagctgtgaaa

SEQ ID NO: 4843284 - DNA, 25 bp, Homo sapien
aaaggctcacactagctgtgaaatc

SEQ ID NO: 4843285 - DNA, 25 bp, Homo sapien
aaggctcacactagctgtgaaatca

SEQ ID NO: 4843286 - DNA, 25 bp, Homo sapien
taaaggctcacactagctgtgaaat

SEQ ID NO: 4843287 - DNA, 25 bp, Homo sapien
cccgggctagagttgggtagcgtga

SEQ ID NO: 4843288 - DNA, 25 bp, Homo sapien
ctagtgatgacctttcattggaaat

SEQ ID NO: 4843289 - DNA, 25 bp, Homo sapien
tcattggaaatttactacaaatcta

SEQ ID NO: 4843290 - DNA, 25 bp, Homo sapien
cacccgggctagagttgggtagcgt

SEQ ID NO: 4843291 - DNA, 25 bp, Homo sapien
actgacatttcgccggccaggactg

SEQ ID NO: 4843292 - DNA, 25 bp, Homo sapien
cactgacatttcgccggccaggact

SEQ ID NO: 4843293 - DNA, 25 bp, Homo sapien
tgacatttcgccggccaggactgca

SEQ ID NO: 4843294 - DNA, 25 bp, Homo sapien
acatttcgccggccaggactgcaga

SEQ ID NO: 4843295 - DNA, 25 bp, Homo sapien
taagggatctccttgaatgaagcca

SEQ ID NO: 4843296 - DNA, 25 bp, Homo sapien
gatttgcttctcatggctatcaggg

SEQ ID NO: 4843297 - DNA, 25 bp, Homo sapien
gctatcagggtgaagcagaaattct

SEQ ID NO: 4843298 - DNA, 25 bp, Homo sapien
gaaattcttcactcttagaactggg

SEQ ID NO: 4843299 - DNA, 25 bp, Homo sapien
ggatacttcgctgctctacatctaa

SEQ ID NO: 4843300 - DNA, 25 bp, Homo sapien
gaacacaatgcgtgagttatcctcc

SEQ ID NO: 4843301 - DNA, 25 bp, Homo sapien
taaaatagaacagacgcagagcagc

SEQ ID NO: 4843302 - DNA, 25 bp, Homo sapien
gaccaaggttttgtccgcagcacat

SEQ ID NO: 4843303 - DNA, 25 bp, Homo sapien
ttgttgaatatttcttgaagaactg

SEQ ID NO: 4843304 - DNA, 25 bp, Homo sapien
tgaatatttcttgaagaactggaga

SEQ ID NO: 4843305 - DNA, 25 bp, Homo sapien
gttgaatatttcttgaagaactgga

SEQ ID NO: 4843306 - DNA, 25 bp, Homo sapien
tatttcttgaagaactggagagtga

SEQ ID NO: 4843307 - DNA, 25 bp, Homo sapien
ctggtgaaatgcatatgccttcata

SEQ ID NO: 4843308 - DNA, 25 bp, Homo sapien
aatgcatatgccttcatacgattga

SEQ ID NO: 4843309 - DNA, 25 bp, Homo sapien
ttcatacgattgattgaatctgcca

SEQ ID NO: 4843310 - DNA, 25 bp, Homo sapien
gcatatgccttcatacgattgattg

SEQ ID NO: 4843311 - DNA, 25 bp, Homo sapien
ggccgaggctggatgctaatccaga

SEQ ID NO: 4843312 - DNA, 25 bp, Homo sapien
ggaacttgtcctgcgtctctgagag

SEQ ID NO: 4843313 - DNA, 25 bp, Homo sapien
ggaagcatgttggaccaggactcag

SEQ ID NO: 4843314 - DNA, 25 bp, Homo sapien
atggtttactttctctattcagaag

SEQ ID NO: 4843315 - DNA, 25 bp, Homo sapien
catgtgctgctagcaatttctaagc

SEQ ID NO: 4843316 - DNA, 25 bp, Homo sapien
tgccagcccaagatagatacatgtg

SEQ ID NO: 4843317 - DNA, 25 bp, Homo sapien
gaaaggactgttaaaatttgccatc

SEQ ID NO: 4843318 - DNA, 25 bp, Homo sapien
ccttccacatgcatacgtgtttatt

SEQ ID NO: 4843319 - DNA, 25 bp, Homo sapien
tatttcttcatcttgttttttcttc

SEQ ID NO: 4843320 - DNA, 25 bp, Homo sapien
ctatttgatttatttcttcatcttg

SEQ ID NO: 4843321 - DNA, 25 bp, Homo sapien
tatttgatttatttcttcatcttgt

SEQ ID NO: 4843322 - DNA, 25 bp, Homo sapien
tttcttcatcttgttttttcttcat

SEQ ID NO: 4843323 - DNA, 25 bp, Homo sapien
gatgcctgccattccgagtcttctt

SEQ ID NO: 4843324 - DNA, 25 bp, Homo sapien
tcttacaaatctgcttcgttctctc

SEQ ID NO: 4843325 - DNA, 25 bp, Homo sapien
ttctttccagctcttacaaatctgc

SEQ ID NO: 4843326 - DNA, 25 bp, Homo sapien
gagatgcctgccattccgagtcttc

SEQ ID NO: 4843327 - DNA, 25 bp, Homo sapien
cctcaggttgatctagcagttcaga

SEQ ID NO: 4843328 - DNA, 25 bp, Homo sapien
tacacttcaggcagtattggtcaaa

SEQ ID NO: 4843329 - DNA, 25 bp, Homo sapien
taatgggactgcagatcaatgtagg

SEQ ID NO: 4843330 - DNA, 25 bp, Homo sapien
tacttgacttcaaagagacacccaa

SEQ ID NO: 4843331 - DNA, 25 bp, Homo sapien
ttagggcttgcccagcgttcgctgc

SEQ ID NO: 4843332 - DNA, 25 bp, Homo sapien
tcaacacctatgatccaggccatta

SEQ ID NO: 4843333 - DNA, 25 bp, Homo sapien
gatccaggccattagggcttgccca

SEQ ID NO: 4843334 - DNA, 25 bp, Homo sapien
ccagcgttcgctgcaggattcctct

SEQ ID NO: 4843335 - DNA, 25 bp, Homo sapien
tcagcattcattgcacaacgggcag

SEQ ID NO: 4843336 - DNA, 25 bp, Homo sapien
ggcagcagcgcaggttctcagcagt

SEQ ID NO: 4843337 - DNA, 25 bp, Homo sapien
cagcagcgcaggttctcagcagttt

SEQ ID NO: 4843338 - DNA, 25 bp, Homo sapien
attcattgcacaacgggcagcagcg

SEQ ID NO: 4843339 - DNA, 25 bp, Homo sapien
cccgagggataacctcttgtagtct

SEQ ID NO: 4843340 - DNA, 25 bp, Homo sapien
gccaaggagcgtctcttctcatcag

SEQ ID NO: 4843341 - DNA, 25 bp, Homo sapien
gtagtcttctcgtgcttgtttagcc

SEQ ID NO: 4843342 - DNA, 25 bp, Homo sapien
ttgtttagccaaggagcgtctcttc

SEQ ID NO: 4843343 - DNA, 25 bp, Homo sapien
acgcaaggggctttgcagcctctca

SEQ ID NO: 4843344 - DNA, 25 bp, Homo sapien
tctttctggtttctgcggaacacgc

SEQ ID NO: 4843345 - DNA, 25 bp, Homo sapien
cccctgagtttaggaactgaggctt

SEQ ID NO: 4843346 - DNA, 25 bp, Homo sapien
ggtttttgaggatatgcccctgagt

SEQ ID NO: 4843347 - DNA, 25 bp, Homo sapien
acatccgcctttgtgtttcccctga

SEQ ID NO: 4843348 - DNA, 25 bp, Homo sapien
taagtagaaataattacagcaaaga

SEQ ID NO: 4843349 - DNA, 25 bp, Homo sapien
ctttccagtagagtaagtagaaata

SEQ ID NO: 4843350 - DNA, 25 bp, Homo sapien
gcaaagaaaaacatccgcctttgtg

SEQ ID NO: 4843351 - DNA, 25 bp, Homo sapien
actgagttccacgttggtccccact

SEQ ID NO: 4843352 - DNA, 25 bp, Homo sapien
tgagttccacgttggtccccacttc

SEQ ID NO: 4843353 - DNA, 25 bp, Homo sapien
tccactgagttccacgttggtcccc

SEQ ID NO: 4843354 - DNA, 25 bp, Homo sapien
ccactgagttccacgttggtcccca

SEQ ID NO: 4843355 - DNA, 25 bp, Homo sapien
tcttgctttgttgtcggtaagagaa

SEQ ID NO: 4843356 - DNA, 25 bp, Homo sapien
gagatcatggtctttactgtaatta

SEQ ID NO: 4843357 - DNA, 25 bp, Homo sapien
ctttgttgtcggtaagagaagaatc

SEQ ID NO: 4843358 - DNA, 25 bp, Homo sapien
gaatcattacccaaacgatcacttt

SEQ ID NO: 4843359 - DNA, 25 bp, Homo sapien
tggacagtgtcctcaccactccctg

SEQ ID NO: 4843360 - DNA, 25 bp, Homo sapien
gacagtgtcctcaccactccctgat

SEQ ID NO: 4843361 - DNA, 25 bp, Homo sapien
ctggacagtgtcctcaccactccct

SEQ ID NO: 4843362 - DNA, 25 bp, Homo sapien
cagtgtcctcaccactccctgattt

SEQ ID NO: 4843363 - DNA, 25 bp, Homo sapien
gctatggtgtctgaggttttctggt

SEQ ID NO: 4843364 - DNA, 25 bp, Homo sapien
gctcctctttaaaccaccggatgat

SEQ ID NO: 4843365 - DNA, 25 bp, Homo sapien
cgctcgaagtggtagctgctcctct

SEQ ID NO: 4843366 - DNA, 25 bp, Homo sapien
taaaccaccggatgatgtcctcttg

SEQ ID NO: 4843367 - DNA, 25 bp, Homo sapien
gacgaaacaccattgaggaaatctc

SEQ ID NO: 4843368 - DNA, 25 bp, Homo sapien
taagacgaaacaccattgaggaaat

SEQ ID NO: 4843369 - DNA, 25 bp, Homo sapien
gaaacaccattgaggaaatctctgc

SEQ ID NO: 4843370 - DNA, 25 bp, Homo sapien
ctaagacgaaacaccattgaggaaa

SEQ ID NO: 4843371 - DNA, 25 bp, Homo sapien
gagaaagcctgtcacaaatagctat

SEQ ID NO: 4843372 - DNA, 25 bp, Homo sapien
tgacgttctgaccacacaagcagcg

SEQ ID NO: 4843373 - DNA, 25 bp, Homo sapien
tgcttaggacaaacatactctggga

SEQ ID NO: 4843374 - DNA, 25 bp, Homo sapien
tacttccaagagacgccagacagtt

SEQ ID NO: 4843375 - DNA, 25 bp, Homo sapien
aagaatcctccaagaattcacagaa

SEQ ID NO: 4843376 - DNA, 25 bp, Homo sapien
tccaagaatcctccaagaattcaca

SEQ ID NO: 4843377 - DNA, 25 bp, Homo sapien
ccatctgtgtactcagctagttttc

SEQ ID NO: 4843378 - DNA, 25 bp, Homo sapien
gtactcagctagttttcccctccat

SEQ ID NO: 4843379 - DNA, 25 bp, Homo sapien
cctctgttaaatccagctgcatgga

SEQ ID NO: 4843380 - DNA, 25 bp, Homo sapien
gaaaatcccctctgttaaatccagc

SEQ ID NO: 4843381 - DNA, 25 bp, Homo sapien
tgcatggatatagagtcaatgacgc

SEQ ID NO: 4843382 - DNA, 25 bp, Homo sapien
gccaaatcattccagaaaatcccct

SEQ ID NO: 4843383 - DNA, 25 bp, Homo sapien
tccgacagataggacagggcatagc

SEQ ID NO: 4843384 - DNA, 25 bp, Homo sapien
gatattccaccaaatccgccaaggt

SEQ ID NO: 4843385 - DNA, 25 bp, Homo sapien
ggaaatgtttacagccgtcctccga

SEQ ID NO: 4843386 - DNA, 25 bp, Homo sapien
tgactcggatgagaaaactgccggg

SEQ ID NO: 4843387 - DNA, 25 bp, Homo sapien
acaggacagtaactcagaaggcaaa

SEQ ID NO: 4843388 - DNA, 25 bp, Homo sapien
caggacagtaactcagaaggcaaat

SEQ ID NO: 4843389 - DNA, 25 bp, Homo sapien
tacaggacagtaactcagaaggcaa

SEQ ID NO: 4843390 - DNA, 25 bp, Homo sapien
ggacagtaactcagaaggcaaatta

SEQ ID NO: 4843391 - DNA, 25 bp, Homo sapien
tatgtgatccatgtgggtacagctt

SEQ ID NO: 4843392 - DNA, 25 bp, Homo sapien
cctgtcattcacattatcgcctgag

SEQ ID NO: 4843393 - DNA, 25 bp, Homo sapien
gatctcagttgtgcgctccttagga

SEQ ID NO: 4843394 - DNA, 25 bp, Homo sapien
tccaggaaactggtgtcacaaagtt

SEQ ID NO: 4843395 - DNA, 25 bp, Homo sapien
tgaccacagggatagagaaggagct

SEQ ID NO: 4843396 - DNA, 25 bp, Homo sapien
tcaaacagctccaggtagtcaggca

SEQ ID NO: 4843397 - DNA, 25 bp, Homo sapien
gctccttccccagggaagtgatggg

SEQ ID NO: 4843398 - DNA, 25 bp, Homo sapien
ggcagctggtcctgctgaccacagg

SEQ ID NO: 4843399 - DNA, 25 bp, Homo sapien
ttgtccaggggaaagcccgcttgga

SEQ ID NO: 4843400 - DNA, 25 bp, Homo sapien
aaagcccgcttggaggctgtaggat

SEQ ID NO: 4843401 - DNA, 25 bp, Homo sapien
aggctgtaggatgaccctgatggag

SEQ ID NO: 4843402 - DNA, 25 bp, Homo sapien
gggaaagcccgcttggaggctgtag

SEQ ID NO: 4843403 - DNA, 25 bp, Homo sapien
tacttgctgaaattgagactcttct

SEQ ID NO: 4843404 - DNA, 25 bp, Homo sapien
aatgaggactccatggatactttac

SEQ ID NO: 4843405 - DNA, 25 bp, Homo sapien
ttcagttgatcagtattggctctgc

SEQ ID NO: 4843406 - DNA, 25 bp, Homo sapien
gaaaagaggtgtcaatgaggactcc

SEQ ID NO: 4843407 - DNA, 25 bp, Homo sapien
ccacaagtagcatccaaacagcctg

SEQ ID NO: 4843408 - DNA, 25 bp, Homo sapien
cgatgtttgctcactttcctgcagg

SEQ ID NO: 4843409 - DNA, 25 bp, Homo sapien
gaaacttcatgtcaacaggcccctg

SEQ ID NO: 4843410 - DNA, 25 bp, Homo sapien
gcttctgctggtggccggagatcct

SEQ ID NO: 4843411 - DNA, 25 bp, Homo sapien
ggacaaatatgtgtgccagggctaa

SEQ ID NO: 4843412 - DNA, 25 bp, Homo sapien
gggcataagattcctgacgggacaa

SEQ ID NO: 4843413 - DNA, 25 bp, Homo sapien
acacagttaggccagaggtactagc

SEQ ID NO: 4843414 - DNA, 25 bp, Homo sapien
ttatgaaaatggtggactgggcagc

SEQ ID NO: 4843415 - DNA, 25 bp, Homo sapien
aaatcttacatgactgtgggcggga

SEQ ID NO: 4843416 - DNA, 25 bp, Homo sapien
tgaaagcagcattcctagacccaga

SEQ ID NO: 4843417 - DNA, 25 bp, Homo sapien
gagcatctggcaatacggtggcagc

SEQ ID NO: 4843418 - DNA, 25 bp, Homo sapien
ttcagactgactagcactgctggtg

SEQ ID NO: 4843419 - DNA, 25 bp, Homo sapien
gaaacatatccatgcatagcccatg

SEQ ID NO: 4843420 - DNA, 25 bp, Homo sapien
ggaaagcatgtaccacgttctggat

SEQ ID NO: 4843421 - DNA, 25 bp, Homo sapien
tgaattgcagcctgaaaggaaagca

SEQ ID NO: 4843422 - DNA, 25 bp, Homo sapien
tcaccaaatagcaggagccccaaaa

SEQ ID NO: 4843423 - DNA, 25 bp, Homo sapien
cccagtgctgcttggatataatcag

SEQ ID NO: 4843424 - DNA, 25 bp, Homo sapien
ttaagcttctcggtatgcccagtgc

SEQ ID NO: 4843425 - DNA, 25 bp, Homo sapien
tctatctgaaggagaagggttacta

SEQ ID NO: 4843426 - DNA, 25 bp, Homo sapien
tacagtaaagatgatgaagccgtca

SEQ ID NO: 4843427 - DNA, 25 bp, Homo sapien
caaaggaaagcagtatcggaacagt

SEQ ID NO: 4843428 - DNA, 25 bp, Homo sapien
gattgtagaaggtcccacgaaaaca

SEQ ID NO: 4843429 - DNA, 25 bp, Homo sapien
gtttcaagaacccagtcacgtcgca

SEQ ID NO: 4843430 - DNA, 25 bp, Homo sapien
gtagaggccctctttagcaacatgc

SEQ ID NO: 4843431 - DNA, 25 bp, Homo sapien
tttctcctcagaagtagggaccgct

SEQ ID NO: 4843432 - DNA, 25 bp, Homo sapien
ccttacaagagagcacaagttggcc

SEQ ID NO: 4843433 - DNA, 25 bp, Homo sapien
tatgaatgagcctatcagcagggct

SEQ ID NO: 4843434 - DNA, 25 bp, Homo sapien
taacccagttgcaccctgtgaagtg

SEQ ID NO: 4843435 - DNA, 25 bp, Homo sapien
ggtggacactctcgtaccttggagg

SEQ ID NO: 4843436 - DNA, 25 bp, Homo sapien
gagaggatgtgcacctttatcgcaa

SEQ ID NO: 4843437 - DNA, 25 bp, Homo sapien
caacagtgtgttctgtcccgacagg

SEQ ID NO: 4843438 - DNA, 25 bp, Homo sapien
caacctcatagtggtacggacgcct

SEQ ID NO: 4843439 - DNA, 25 bp, Homo sapien
tgctggcgaacatcttgcaacgtgt

SEQ ID NO: 4843440 - DNA, 25 bp, Homo sapien
tggcgaacatcttgcaacgtgtctg

SEQ ID NO: 4843441 - DNA, 25 bp, Homo sapien
ccacttgctggcgaacatcttgcaa

SEQ ID NO: 4843442 - DNA, 25 bp, Homo sapien
ctgggccacttgctggcgaacatct

SEQ ID NO: 4843443 - DNA, 25 bp, Homo sapien
ttttgtctcttggtccagagccaca

SEQ ID NO: 4843444 - DNA, 25 bp, Homo sapien
tccctgtcacgtgaatcgtccacag

SEQ ID NO: 4843445 - DNA, 25 bp, Homo sapien
cacgtgaatcgtccacagagctgtg

SEQ ID NO: 4843446 - DNA, 25 bp, Homo sapien
atctttggggagagatgctgatttg

SEQ ID NO: 4843447 - DNA, 25 bp, Homo sapien
gaaaataatcatccctgtcacgtga

SEQ ID NO: 4843448 - DNA, 25 bp, Homo sapien
gaagacacaatgtgttttctatgaa

SEQ ID NO: 4843449 - DNA, 25 bp, Homo sapien
catttagttttagatgataggttcc

SEQ ID NO: 4843450 - DNA, 25 bp, Homo sapien
tggcagaacctggatgactccttgt

SEQ ID NO: 4843451 - DNA, 25 bp, Homo sapien
ttcatgggggcaacgagggcattta

SEQ ID NO: 4843452 - DNA, 25 bp, Homo sapien
tttacagagaggtaatttcacacct

SEQ ID NO: 4843453 - DNA, 25 bp, Homo sapien
tatggatgcagtacagtttctcttg

SEQ ID NO: 4843454 - DNA, 25 bp, Homo sapien
actggtattgttgcattatggatgc

SEQ ID NO: 4843455 - DNA, 25 bp, Homo sapien
taatttcacaccttcatagtttcca

SEQ ID NO: 4843456 - DNA, 25 bp, Homo sapien
ctgaatacacagccaggtatggatc

SEQ ID NO: 4843457 - DNA, 25 bp, Homo sapien
gaatacacagccaggtatggatcat

SEQ ID NO: 4843458 - DNA, 25 bp, Homo sapien
tgaatacacagccaggtatggatca

SEQ ID NO: 4843459 - DNA, 25 bp, Homo sapien
gtgatgtggacatctacttcacatc

SEQ ID NO: 4843460 - DNA, 25 bp, Homo sapien
aaagggacttgatgttggagcccgc

SEQ ID NO: 4843461 - DNA, 25 bp, Homo sapien
atctgaattcctcaatacgtgtagg

SEQ ID NO: 4843462 - DNA, 25 bp, Homo sapien
tcaggaactttaccttcatccagct

SEQ ID NO: 4843463 - DNA, 25 bp, Homo sapien
aagaatagtcattaatgatgacaag

SEQ ID NO: 4843464 - DNA, 25 bp, Homo sapien
caaagaatagtcattaatgatgaca

SEQ ID NO: 4843465 - DNA, 25 bp, Homo sapien
gaatagtcattaatgatgacaagag

SEQ ID NO: 4843466 - DNA, 25 bp, Homo sapien
tcacaaagaatagtcattaatgatg

SEQ ID NO: 4843467 - DNA, 25 bp, Homo sapien
aggaaaagggatttgctaggctgaa

SEQ ID NO: 4843468 - DNA, 25 bp, Homo sapien
aagggatttgctaggctgaaagaag

SEQ ID NO: 4843469 - DNA, 25 bp, Homo sapien
taggaaaagaagggtgtcgttgaca

SEQ ID NO: 4843470 - DNA, 25 bp, Homo sapien
taggccaggtagctggtaggacggg

SEQ ID NO: 4843471 - DNA, 25 bp, Homo sapien
aagtcccaggcaaagctagatcagg

SEQ ID NO: 4843472 - DNA, 25 bp, Homo sapien
tgttgatcagggtggatgaaagtcc

SEQ ID NO: 4843473 - DNA, 25 bp, Homo sapien
agcagctctaacatggacccatact

SEQ ID NO: 4843474 - DNA, 25 bp, Homo sapien
atggacccatactgccaagccagca

SEQ ID NO: 4843475 - DNA, 25 bp, Homo sapien
cagtactggtaagtttcagatgagg

SEQ ID NO: 4843476 - DNA, 25 bp, Homo sapien
ccagtactggtaagtttcagatgag

SEQ ID NO: 4843477 - DNA, 25 bp, Homo sapien
tgccccacttctaggcccaggaggt

SEQ ID NO: 4843478 - DNA, 25 bp, Homo sapien
agtactggtaagtttcagatgagga

SEQ ID NO: 4843479 - DNA, 25 bp, Homo sapien
tcagaatccattggtcacagcctct

SEQ ID NO: 4843480 - DNA, 25 bp, Homo sapien
actgcacagtgctggataatctctg

SEQ ID NO: 4843481 - DNA, 25 bp, Homo sapien
caccccgtgtgtgccgtttactgca

SEQ ID NO: 4843482 - DNA, 25 bp, Homo sapien
tccagtggatattggtcaccccgtg

SEQ ID NO: 4843483 - DNA, 25 bp, Homo sapien
ctcggctaacggcaagcttcgccca

SEQ ID NO: 4843484 - DNA, 25 bp, Homo sapien
ctaacggcaagcttcgcccactggg

SEQ ID NO: 4843485 - DNA, 25 bp, Homo sapien
ggctaacggcaagcttcgcccactg

SEQ ID NO: 4843486 - DNA, 25 bp, Homo sapien
tcggctaacggcaagcttcgcccac

SEQ ID NO: 4843487 - DNA, 25 bp, Homo sapien
cactaataaacatgccctgtatgaa

SEQ ID NO: 4843488 - DNA, 25 bp, Homo sapien
tgaaatactaagaggagtccttggg

SEQ ID NO: 4843489 - DNA, 25 bp, Homo sapien
cagtgaagtaactacataggcaaat

SEQ ID NO: 4843490 - DNA, 25 bp, Homo sapien
tccacatgaagacgtaaagattgcc

SEQ ID NO: 4843491 - DNA, 25 bp, Homo sapien
tgtttactggggatttgaatatgct

SEQ ID NO: 4843492 - DNA, 25 bp, Homo sapien
tttactggggatttgaatatgctat

SEQ ID NO: 4843493 - DNA, 25 bp, Homo sapien
tactggggatttgaatatgctatat

SEQ ID NO: 4843494 - DNA, 25 bp, Homo sapien
actggggatttgaatatgctatata

SEQ ID NO: 4843495 - DNA, 25 bp, Homo sapien
tgtgtgccaactctttgtggagatg

SEQ ID NO: 4843496 - DNA, 25 bp, Homo sapien
gctaagcgtgattctgctttgtgtg

SEQ ID NO: 4843497 - DNA, 25 bp, Homo sapien
gccagaggctttgctaagcgtgatt

SEQ ID NO: 4843498 - DNA, 25 bp, Homo sapien
ttgtgtgccaactctttgtggagat

SEQ ID NO: 4843499 - DNA, 25 bp, Homo sapien
gatccctcccaagcagataattagt

SEQ ID NO: 4843500 - DNA, 25 bp, Homo sapien
aacagggacagggagtagcaccttg

SEQ ID NO: 4843501 - DNA, 25 bp, Homo sapien
attagtctcggaccctgggaaacag

SEQ ID NO: 4843502 - DNA, 25 bp, Homo sapien
caaggatttttagataaccatctca

SEQ ID NO: 4843503 - DNA, 25 bp, Homo sapien
gcttgctgaggaaagaatgcataga

SEQ ID NO: 4843504 - DNA, 25 bp, Homo sapien
aattctcaaccagaaggtagcttgc

SEQ ID NO: 4843505 - DNA, 25 bp, Homo sapien
cttgctgaggaaagaatgcatagaa

SEQ ID NO: 4843506 - DNA, 25 bp, Homo sapien
cacgtctttgtgctctagaacggtg

SEQ ID NO: 4843507 - DNA, 25 bp, Homo sapien
ggccacgtctttgtgctctagaacg

SEQ ID NO: 4843508 - DNA, 25 bp, Homo sapien
aaggccacgtctttgtgctctagaa

SEQ ID NO: 4843509 - DNA, 25 bp, Homo sapien
gccacgtctttgtgctctagaacgg

SEQ ID NO: 4843510 - DNA, 25 bp, Homo sapien
gcgtactggccaggcacgggtatat

SEQ ID NO: 4843511 - DNA, 25 bp, Homo sapien
cgtactggccaggcacgggtatatt

SEQ ID NO: 4843512 - DNA, 25 bp, Homo sapien
ggcgtactggccaggcacgggtata

SEQ ID NO: 4843513 - DNA, 25 bp, Homo sapien
ccggcgtactggccaggcacgggta

SEQ ID NO: 4843514 - DNA, 25 bp, Homo sapien
aaatatgtcttcttggacagaagga

SEQ ID NO: 4843515 - DNA, 25 bp, Homo sapien
atatgtcttcttggacagaaggaag

SEQ ID NO: 4843516 - DNA, 25 bp, Homo sapien
cttggggaaggctaggtctgcagaa

SEQ ID NO: 4843517 - DNA, 25 bp, Homo sapien
tcacaaggcacaaagcggtcttggg

SEQ ID NO: 4843518 - DNA, 25 bp, Homo sapien
tgttttctcgccaacgagcttccct

SEQ ID NO: 4843519 - DNA, 25 bp, Homo sapien
ctgttttctcgccaacgagcttccc

SEQ ID NO: 4843520 - DNA, 25 bp, Homo sapien
tctgttttctcgccaacgagcttcc

SEQ ID NO: 4843521 - DNA, 25 bp, Homo sapien
ttgtagaaataccaaaatagcctgc

SEQ ID NO: 4843522 - DNA, 25 bp, Homo sapien
ccaaggtcctaggtggaagccaagg

SEQ ID NO: 4843523 - DNA, 25 bp, Homo sapien
gtctcttgtgtcttccctaggtccc

SEQ ID NO: 4843524 - DNA, 25 bp, Homo sapien
aagccaaggtctcttgtgtcttccc

SEQ ID NO: 4843525 - DNA, 25 bp, Homo sapien
ttgctcacttgctcatcttcagcag

SEQ ID NO: 4843526 - DNA, 25 bp, Homo sapien
tgctcacttgctcatcttcagcagc

SEQ ID NO: 4843527 - DNA, 25 bp, Homo sapien
tcacttgctcacttgctcatcttca

SEQ ID NO: 4843528 - DNA, 25 bp, Homo sapien
acttgctcacttgctcatcttcagc

SEQ ID NO: 4843529 - DNA, 25 bp, Homo sapien
atgaattgaagatgcggtgcctact

SEQ ID NO: 4843530 - DNA, 25 bp, Homo sapien
tgcatgtgctagacatgctaccaag

SEQ ID NO: 4843531 - DNA, 25 bp, Homo sapien
tgtcccttgctcgtggaggtaggaa

SEQ ID NO: 4843532 - DNA, 25 bp, Homo sapien
gctaccaaggtgcaggggatcagaa

SEQ ID NO: 4843533 - DNA, 25 bp, Homo sapien
tatcgtgcctctagcaaaaagggtg

SEQ ID NO: 4843534 - DNA, 25 bp, Homo sapien
gacaagttccggcagttcatgcaga

SEQ ID NO: 4843535 - DNA, 25 bp, Homo sapien
aatttcaggttggtttgttcgcacg

SEQ ID NO: 4843536 - DNA, 25 bp, Homo sapien
gaaaagctcaacatggccaacacgc

SEQ ID NO: 4843537 - DNA, 25 bp, Homo sapien
taaaattcatgctattttgacttct

SEQ ID NO: 4843538 - DNA, 25 bp, Homo sapien
tgcaggaaatttggatactagaaga

SEQ ID NO: 4843539 - DNA, 25 bp, Homo sapien
tgcaaatgcctctgtatcctatgaa

SEQ ID NO: 4843540 - DNA, 25 bp, Homo sapien
taatcccactctatatcatagtcag

SEQ ID NO: 4843541 - DNA, 25 bp, Homo sapien
acaacagtggatgcccagaagcata

SEQ ID NO: 4843542 - DNA, 25 bp, Homo sapien
gaagcatagagagttctgaacccta

SEQ ID NO: 4843543 - DNA, 25 bp, Homo sapien
aaactgtattccattgccgtgtcac

SEQ ID NO: 4843544 - DNA, 25 bp, Homo sapien
gaatccatggtactgtcattcaccc

SEQ ID NO: 4843545 - DNA, 25 bp, Homo sapien
gatgcgccctctgtgattaacgtgg

SEQ ID NO: 4843546 - DNA, 25 bp, Homo sapien
tcctgtccatggtgaatgcggctgc

SEQ ID NO: 4843547 - DNA, 25 bp, Homo sapien
gatacaccgcctgtgacaaacgtgg

SEQ ID NO: 4843548 - DNA, 25 bp, Homo sapien
tggataggccctccatggcaaatgt

SEQ ID NO: 4843549 - DNA, 25 bp, Homo sapien
aacccacagttcttcaacaatagga

SEQ ID NO: 4843550 - DNA, 25 bp, Homo sapien
tggagttgttttgagcagcctgata

SEQ ID NO: 4843551 - DNA, 25 bp, Homo sapien
gccatttcttcattagaaacccaca

SEQ ID NO: 4843552 - DNA, 25 bp, Homo sapien
gatgatgggaatagatggatctgcc

SEQ ID NO: 4843553 - DNA, 25 bp, Homo sapien
tacaccgtaagtcagaatcaatctg

SEQ ID NO: 4843554 - DNA, 25 bp, Homo sapien
tcctggcattgtaaatttcactgtc

SEQ ID NO: 4843555 - DNA, 25 bp, Homo sapien
tccaatgtttctctacaccgtaagt

SEQ ID NO: 4843556 - DNA, 25 bp, Homo sapien
cactgtcagaagcttccaatgtttc

SEQ ID NO: 4843557 - DNA, 25 bp, Homo sapien
acattctcttccgaatcttgtgctt

SEQ ID NO: 4843558 - DNA, 25 bp, Homo sapien
cctttgccagtcagtagcttctgct

SEQ ID NO: 4843559 - DNA, 25 bp, Homo sapien
gccagtcagtagcttctgcttcctt

SEQ ID NO: 4843560 - DNA, 25 bp, Homo sapien
tctcttccgaatcttgtgcttcttt

SEQ ID NO: 4843561 - DNA, 25 bp, Homo sapien
tggctgaagtgtcccccgcttctct

SEQ ID NO: 4843562 - DNA, 25 bp, Homo sapien
aagtgtcccccgcttctctctttat

SEQ ID NO: 4843563 - DNA, 25 bp, Homo sapien
ttccctatatttcccttcctcctgc

SEQ ID NO: 4843564 - DNA, 25 bp, Homo sapien
acacagcactggctgaagtgtcccc

SEQ ID NO: 4843565 - DNA, 25 bp, Homo sapien
tctgtgtgagttgaagctgctgcag

SEQ ID NO: 4843566 - DNA, 25 bp, Homo sapien
ggttctggctgcgttgtacacaaat

SEQ ID NO: 4843567 - DNA, 25 bp, Homo sapien
caaattggaaggacatgtgttctgt

SEQ ID NO: 4843568 - DNA, 25 bp, Homo sapien
tgttctgtgtgagttgaagctgctg

SEQ ID NO: 4843569 - DNA, 25 bp, Homo sapien
cactattggttcactgccagtagaa

SEQ ID NO: 4843570 - DNA, 25 bp, Homo sapien
cactgccagtagaattagcttcaca

SEQ ID NO: 4843571 - DNA, 25 bp, Homo sapien
actggccttcctcactattggttca

SEQ ID NO: 4843572 - DNA, 25 bp, Homo sapien
gcttcacagcatattccctttgtgc

SEQ ID NO: 4843573 - DNA, 25 bp, Homo sapien
aagagggcagaggtttctgttccca

SEQ ID NO: 4843574 - DNA, 25 bp, Homo sapien
ttcttttaggaaattcaggcatgtc

SEQ ID NO: 4843575 - DNA, 25 bp, Homo sapien
ccttgtctgatagcaaagagggcag

SEQ ID NO: 4843576 - DNA, 25 bp, Homo sapien
aggaaattcaggcatgtcatacatt

SEQ ID NO: 4843577 - DNA, 25 bp, Homo sapien
gaataagatgattcgtttgatcact

SEQ ID NO: 4843578 - DNA, 25 bp, Homo sapien
tgtgcttgttcaacattctggttgc

SEQ ID NO: 4843579 - DNA, 25 bp, Homo sapien
gatcactttccagcagttgtgcttg

SEQ ID NO: 4843580 - DNA, 25 bp, Homo sapien
tctggttgctatgacagtcagttga

SEQ ID NO: 4843581 - DNA, 25 bp, Homo sapien
aattatctgtgaatactttaatcat

SEQ ID NO: 4843582 - DNA, 25 bp, Homo sapien
ctgtcagcagtcattctaggacata

SEQ ID NO: 4843583 - DNA, 25 bp, Homo sapien
tttgtactgctatcagccttgcact

SEQ ID NO: 4843584 - DNA, 25 bp, Homo sapien
tgcgttctcttagcagtgctcagaa

SEQ ID NO: 4843585 - DNA, 25 bp, Homo sapien
agagaacctttgtggggctgcgttc

SEQ ID NO: 4843586 - DNA, 25 bp, Homo sapien
ccttcggcttaacttgtggttggag

SEQ ID NO: 4843587 - DNA, 25 bp, Homo sapien
cagcaagcggctccttcggcttaac

SEQ ID NO: 4843588 - DNA, 25 bp, Homo sapien
aaatatggatgcagtttgagacatg

SEQ ID NO: 4843589 - DNA, 25 bp, Homo sapien
gagaaattctgacacctactaaaat

SEQ ID NO: 4843590 - DNA, 25 bp, Homo sapien
attagccagtcgcagtatgacaaat

SEQ ID NO: 4843591 - DNA, 25 bp, Homo sapien
gatgaatggatacacgaaatgcagt

SEQ ID NO: 4843592 - DNA, 25 bp, Homo sapien
ccatgtcttattctgctgtcccata

SEQ ID NO: 4843593 - DNA, 25 bp, Homo sapien
ccccttcctcttgaccctccagatt

SEQ ID NO: 4843594 - DNA, 25 bp, Homo sapien
cccatatctgcagtgccttcccctt

SEQ ID NO: 4843595 - DNA, 25 bp, Homo sapien
tcttgaccctccagattctcactcc

SEQ ID NO: 4843596 - DNA, 25 bp, Homo sapien
cttataggccctttgcagttccgct

SEQ ID NO: 4843597 - DNA, 25 bp, Homo sapien
ataagcttataggccctttgcagtt

SEQ ID NO: 4843598 - DNA, 25 bp, Homo sapien
agcttataggccctttgcagttccg

SEQ ID NO: 4843599 - DNA, 25 bp, Homo sapien
tataggccctttgcagttccgctag

SEQ ID NO: 4843600 - DNA, 25 bp, Homo sapien
tgtcattattgtttgcgcagtcgtc

SEQ ID NO: 4843601 - DNA, 25 bp, Homo sapien
cacattcttcttatgggcacgtgtc

SEQ ID NO: 4843602 - DNA, 25 bp, Homo sapien
tgagcagggcgcagaactttccttt

SEQ ID NO: 4843603 - DNA, 25 bp, Homo sapien
gatggctccacttagtcctctggca

SEQ ID NO: 4843604 - DNA, 25 bp, Homo sapien
cccagtgtgacttcagcgctgtcag

SEQ ID NO: 4843605 - DNA, 25 bp, Homo sapien
aagcagagctgcgagttaggaagcg

SEQ ID NO: 4843606 - DNA, 25 bp, Homo sapien
gcgagatcggcttttttgatttgct

SEQ ID NO: 4843607 - DNA, 25 bp, Homo sapien
cagctgggcacgtttctttcctgcg

SEQ ID NO: 4843608 - DNA, 25 bp, Homo sapien
ggaaggcggtcgttcctccctgctc

SEQ ID NO: 4843609 - DNA, 25 bp, Homo sapien
tgctcccaccgttttccagcgtgtg

SEQ ID NO: 4843610 - DNA, 25 bp, Homo sapien
ttgtgcggcgaaccctgcggtgctt

SEQ ID NO: 4843611 - DNA, 25 bp, Homo sapien
tttccagcgtgtgcgctcttacctt

SEQ ID NO: 4843612 - DNA, 25 bp, Homo sapien
gggcgctgtgggcagatgcgctcgg

SEQ ID NO: 4843613 - DNA, 25 bp, Homo sapien
cgctgtgggcagatgcgctcggtcc

SEQ ID NO: 4843614 - DNA, 25 bp, Homo sapien
gggagcgggaggctccaggcgcggc

SEQ ID NO: 4843615 - DNA, 25 bp, Homo sapien
ctgtgggcagatgcgctcggtcctc

SEQ ID NO: 4843616 - DNA, 25 bp, Homo sapien
gacggctggggcccgttgtcactcc

SEQ ID NO: 4843617 - DNA, 25 bp, Homo sapien
cggtttcctccattgatattcctaa

SEQ ID NO: 4843618 - DNA, 25 bp, Homo sapien
ctagttgacacatcggtttcctcca

SEQ ID NO: 4843619 - DNA, 25 bp, Homo sapien
gacacatcggtttcctccattgata

SEQ ID NO: 4843620 - DNA, 25 bp, Homo sapien
gcctcattaggctctgtgatggcat

SEQ ID NO: 4843621 - DNA, 25 bp, Homo sapien
gcagggctagcccagaaggatttac

SEQ ID NO: 4843622 - DNA, 25 bp, Homo sapien
ggcatctagcaccagctgagcagct

SEQ ID NO: 4843623 - DNA, 25 bp, Homo sapien
cagctgtagtgtctaataagggcag

SEQ ID NO: 4843624 - DNA, 25 bp, Homo sapien
gagccagtaatggagatgcatgtag

SEQ ID NO: 4843625 - DNA, 25 bp, Homo sapien
tgttctgggcagttgtcctaagtgt

SEQ ID NO: 4843626 - DNA, 25 bp, Homo sapien
ctgcatctcaaacttgtgttctggg

SEQ ID NO: 4843627 - DNA, 25 bp, Homo sapien
agtgttgtctttgcccgaaaaggct

SEQ ID NO: 4843628 - DNA, 25 bp, Homo sapien
catagtatctctcaactgttgacat

SEQ ID NO: 4843629 - DNA, 25 bp, Homo sapien
tagtatctctcaactgttgacattc

SEQ ID NO: 4843630 - DNA, 25 bp, Homo sapien
agtatctctcaactgttgacattcc

SEQ ID NO: 4843631 - DNA, 25 bp, Homo sapien
tcatagtatctctcaactgttgaca

SEQ ID NO: 4843632 - DNA, 25 bp, Homo sapien
ccatcttagccaggctgatcgtctt

SEQ ID NO: 4843633 - DNA, 25 bp, Homo sapien
gggttacaggcaccctcaaccacgc

SEQ ID NO: 4843634 - DNA, 25 bp, Homo sapien
caccatcttagccaggctgatcgtc

SEQ ID NO: 4843635 - DNA, 25 bp, Homo sapien
atcttagccaggctgatcgtcttga

SEQ ID NO: 4843636 - DNA, 25 bp, Homo sapien
tctgctgctaccatgcaaaagatta

SEQ ID NO: 4843637 - DNA, 25 bp, Homo sapien
tgctgctaccatgcaaaagattagc

SEQ ID NO: 4843638 - DNA, 25 bp, Homo sapien
ctgctgctaccatgcaaaagattag

SEQ ID NO: 4843639 - DNA, 25 bp, Homo sapien
tttgtagccccatcatagagcctga

SEQ ID NO: 4843640 - DNA, 25 bp, Homo sapien
tctaagagggcagggtttgtagccc

SEQ ID NO: 4843641 - DNA, 25 bp, Homo sapien
cctgacagttctgaggcacgtgtgc

SEQ ID NO: 4843642 - DNA, 25 bp, Homo sapien
tcttacagcggtagagaattcagtg

SEQ ID NO: 4843643 - DNA, 25 bp, Homo sapien
cgaggaaaggtattccaaatgttat

SEQ ID NO: 4843644 - DNA, 25 bp, Homo sapien
aatgttatgcttatttctgacgaat

SEQ ID NO: 4843645 - DNA, 25 bp, Homo sapien
tctgacgaatgcttttttgatgctt

SEQ ID NO: 4843646 - DNA, 25 bp, Homo sapien
catttggtttggaagactttctagg

SEQ ID NO: 4843647 - DNA, 25 bp, Homo sapien
gagaggacgggtagctgtcttctcc

SEQ ID NO: 4843648 - DNA, 25 bp, Homo sapien
agttcagacaggtgcccagaggctt

SEQ ID NO: 4843649 - DNA, 25 bp, Homo sapien
gctcaggagaggacgggtagctgtc

SEQ ID NO: 4843650 - DNA, 25 bp, Homo sapien
tcgccaaggagttcagacaggtgcc

SEQ ID NO: 4843651 - DNA, 25 bp, Homo sapien
aatgattgttcaggcactgaatcca

SEQ ID NO: 4843652 - DNA, 25 bp, Homo sapien
tctctatggtttcattcctctgtct

SEQ ID NO: 4843653 - DNA, 25 bp, Homo sapien
tatggtttcattcctctgtcttaga

SEQ ID NO: 4843654 - DNA, 25 bp, Homo sapien
tagaaaatgattgttcaggcactga

SEQ ID NO: 4843655 - DNA, 25 bp, Homo sapien
tccctgggagacttgagaactccat

SEQ ID NO: 4843656 - DNA, 25 bp, Homo sapien
gtaatacaggtagattccgcatccc

SEQ ID NO: 4843657 - DNA, 25 bp, Homo sapien
cagtcaccattattggtaatacagg

SEQ ID NO: 4843658 - DNA, 25 bp, Homo sapien
gaaatggattacaaaatgatcctgc

SEQ ID NO: 4843659 - DNA, 25 bp, Homo sapien
catagagggattgggtgaggctggc

SEQ ID NO: 4843660 - DNA, 25 bp, Homo sapien
ccaggacgggtagggattgtgggca

SEQ ID NO: 4843661 - DNA, 25 bp, Homo sapien
acctggaaaagcttgaacacttgaa

SEQ ID NO: 4843662 - DNA, 25 bp, Homo sapien
ctggcgttgtggtacctggaaaagc

SEQ ID NO: 4843663 - DNA, 25 bp, Homo sapien
aggaccacgttgaccccgtcatcag

SEQ ID NO: 4843664 - DNA, 25 bp, Homo sapien
tcagcatcttctgttcgaccattgc

SEQ ID NO: 4843665 - DNA, 25 bp, Homo sapien
gcatcttctgttcgaccattgctga

SEQ ID NO: 4843666 - DNA, 25 bp, Homo sapien
cttctgttcgaccattgctgagcat

SEQ ID NO: 4843667 - DNA, 25 bp, Homo sapien
tggcctctggcatgctgtctccaca

SEQ ID NO: 4843668 - DNA, 25 bp, Homo sapien
gctggcctctggcatgctgtctcca

SEQ ID NO: 4843669 - DNA, 25 bp, Homo sapien
tgtgctggcctctggcatgctgtct

SEQ ID NO: 4843670 - DNA, 25 bp, Homo sapien
gtgctggcctctggcatgctgtctc

SEQ ID NO: 4843671 - DNA, 25 bp, Homo sapien
tcttagaattatctggtgatgcctc

SEQ ID NO: 4843672 - DNA, 25 bp, Homo sapien
ttctgaagaccgcacctccatgcta

SEQ ID NO: 4843673 - DNA, 25 bp, Homo sapien
gagcaactcgtgactcttcacctga

SEQ ID NO: 4843674 - DNA, 25 bp, Homo sapien
cagttaaaattgctaaggacacggg

SEQ ID NO: 4843675 - DNA, 25 bp, Homo sapien
cataatgtggaggtcctcaagcact

SEQ ID NO: 4843676 - DNA, 25 bp, Homo sapien
caccttaggcgttgcaggatcagct

SEQ ID NO: 4843677 - DNA, 25 bp, Homo sapien
cagtgggcacaccttaggcgttgca

SEQ ID NO: 4843678 - DNA, 25 bp, Homo sapien
gcactctgaaagcagtcagttcgtg

SEQ ID NO: 4843679 - DNA, 25 bp, Homo sapien
gagttgcttgtaggaacctctcgtg

SEQ ID NO: 4843680 - DNA, 25 bp, Homo sapien
gtggaagcatgaatgctacgctctt

SEQ ID NO: 4843681 - DNA, 25 bp, Homo sapien
ggaacagagttgcttgtaggaacct

SEQ ID NO: 4843682 - DNA, 25 bp, Homo sapien
agcatgaatgctacgctctttggaa

SEQ ID NO: 4843683 - DNA, 25 bp, Homo sapien
gctgggagtcggcctgtctgctggt

SEQ ID NO: 4843684 - DNA, 25 bp, Homo sapien
ctactctttgtacaagagtgacatt

SEQ ID NO: 4843685 - DNA, 25 bp, Homo sapien
cctggcccgcgctttcaccagctgg

SEQ ID NO: 4843686 - DNA, 25 bp, Homo sapien
tgtacaagagtgacatttgtctgtt

SEQ ID NO: 4843687 - DNA, 25 bp, Homo sapien
caggctgtgaataaagagcatttat

SEQ ID NO: 4843688 - DNA, 25 bp, Homo sapien
gcatttattccgtcaaatgtttacc

SEQ ID NO: 4843689 - DNA, 25 bp, Homo sapien
tacccgcagcctgagtacctttgag

SEQ ID NO: 4843690 - DNA, 25 bp, Homo sapien
gtcaaatgtttacccgcagcctgag

SEQ ID NO: 4843691 - DNA, 25 bp, Homo sapien
tgacatgggaaagtccgtggcttcc

SEQ ID NO: 4843692 - DNA, 25 bp, Homo sapien
aagttcatctttggttctggtcgca

SEQ ID NO: 4843693 - DNA, 25 bp, Homo sapien
taacccaaatctggactgccatgtg

SEQ ID NO: 4843694 - DNA, 25 bp, Homo sapien
gaccacatcttcctagggtacaagt

SEQ ID NO: 4843695 - DNA, 25 bp, Homo sapien
gggcagtgattccagcaccttagaa

SEQ ID NO: 4843696 - DNA, 25 bp, Homo sapien
ttcagagatggcataagaataatat

SEQ ID NO: 4843697 - DNA, 25 bp, Homo sapien
acttggctgcagtaatcttctgttg

SEQ ID NO: 4843698 - DNA, 25 bp, Homo sapien
gaaggaggattttatgtaacagatt

SEQ ID NO: 4843699 - DNA, 25 bp, Homo sapien
gaggtcccaccagtgatgactttat

SEQ ID NO: 4843700 - DNA, 25 bp, Homo sapien
ttcctattactccagacgaatctgt

SEQ ID NO: 4843701 - DNA, 25 bp, Homo sapien
ctgctgccttgaggtcccaccagtg

SEQ ID NO: 4843702 - DNA, 25 bp, Homo sapien
cattgcaggatctagttgtgattcc

SEQ ID NO: 4843703 - DNA, 25 bp, Homo sapien
gagtcaccccagcaggagtgagaca

SEQ ID NO: 4843704 - DNA, 25 bp, Homo sapien
taggtctacagtctcatatggtgaa

SEQ ID NO: 4843705 - DNA, 25 bp, Homo sapien
caatacctttgtcaatgaacgtacc

SEQ ID NO: 4843706 - DNA, 25 bp, Homo sapien
gagtgagacaattcctatcccactg

SEQ ID NO: 4843707 - DNA, 25 bp, Homo sapien
gggctgatgggacataactgcctta

SEQ ID NO: 4843708 - DNA, 25 bp, Homo sapien
cataactgccttatgtgctcattgc

SEQ ID NO: 4843709 - DNA, 25 bp, Homo sapien
gccttatgtgctcattgctggtaag

SEQ ID NO: 4843710 - DNA, 25 bp, Homo sapien
cattgctggtaagttagaaaataga

SEQ ID NO: 4843711 - DNA, 25 bp, Homo sapien
gaggaggttggcgagggcagttctg

SEQ ID NO: 4843712 - DNA, 25 bp, Homo sapien
gaacaactgggagatgatgatctgg

SEQ ID NO: 4843713 - DNA, 25 bp, Homo sapien
gcaggtgtagacgatgctctcagag

SEQ ID NO: 4843714 - DNA, 25 bp, Homo sapien
tctgttgggatggtagggatggaag

SEQ ID NO: 4843715 - DNA, 25 bp, Homo sapien
catgcagtgtcagctgggaccgttc

SEQ ID NO: 4843716 - DNA, 25 bp, Homo sapien
gggtcctggttcctctccaaatggc

SEQ ID NO: 4843717 - DNA, 25 bp, Homo sapien
tggaaggcacatggcatcgctactg

SEQ ID NO: 4843718 - DNA, 25 bp, Homo sapien
tgtagaacacgccatgggctgcctg

SEQ ID NO: 4843719 - DNA, 25 bp, Homo sapien
tggagatatcaccacaagcagagaa

SEQ ID NO: 4843720 - DNA, 25 bp, Homo sapien
caggaaaccgttactatgacaaagg

SEQ ID NO: 4843721 - DNA, 25 bp, Homo sapien
gagcaaataggcaaatgactggcac

SEQ ID NO: 4843722 - DNA, 25 bp, Homo sapien
gagccagttggcaaataagcctgga

SEQ ID NO: 4843723 - DNA, 25 bp, Homo sapien
tggacccatagcatggagcttgctg

SEQ ID NO: 4843724 - DNA, 25 bp, Homo sapien
ggtagcatttggtccagtctctaga

SEQ ID NO: 4843725 - DNA, 25 bp, Homo sapien
tttccccaggtgctaatgtgacttg

SEQ ID NO: 4843726 - DNA, 25 bp, Homo sapien
agggtagtggccagactttccccag

SEQ ID NO: 4843727 - DNA, 25 bp, Homo sapien
gagtggacagaacggccagtggaat

SEQ ID NO: 4843728 - DNA, 25 bp, Homo sapien
tccactcagtgctaacaacggcact

SEQ ID NO: 4843729 - DNA, 25 bp, Homo sapien
gagcagtaatgaggaggaagtcttc

SEQ ID NO: 4843730 - DNA, 25 bp, Homo sapien
gaagctctgtgttcttgttggttta

SEQ ID NO: 4843731 - DNA, 25 bp, Homo sapien
ggtgtgtttcgtgtcaccaagcata

SEQ ID NO: 4843732 - DNA, 25 bp, Homo sapien
caagcatagcgttgttaaggcgatc

SEQ ID NO: 4843733 - DNA, 25 bp, Homo sapien
aggcgatctatttcttttacaggaa

SEQ ID NO: 4843734 - DNA, 25 bp, Homo sapien
gaagaagccacgattgtgaacttgg

SEQ ID NO: 4843735 - DNA, 25 bp, Homo sapien
tcaccaaagtgaattgtcttaaaat

SEQ ID NO: 4843736 - DNA, 25 bp, Homo sapien
attgttgaacttgttacactctctt

SEQ ID NO: 4843737 - DNA, 25 bp, Homo sapien
gttgaacttgttacactctcttcct

SEQ ID NO: 4843738 - DNA, 25 bp, Homo sapien
ttcatcaccaaagtgaattgtctta

SEQ ID NO: 4843739 - DNA, 25 bp, Homo sapien
tggtggcaataaggaagagatttgc

SEQ ID NO: 4843740 - DNA, 25 bp, Homo sapien
tgttctggtgctgttttggccagga

SEQ ID NO: 4843741 - DNA, 25 bp, Homo sapien
cattttaagaaacgcagtggttggc

SEQ ID NO: 4843742 - DNA, 25 bp, Homo sapien
caaggtaacaggtgctgtccatcca

SEQ ID NO: 4843743 - DNA, 25 bp, Homo sapien
agataaaatcgttctattatagaga

SEQ ID NO: 4843744 - DNA, 25 bp, Homo sapien
aaagataaaatcgttctattataga

SEQ ID NO: 4843745 - DNA, 25 bp, Homo sapien
gataaaatcgttctattatagagac

SEQ ID NO: 4843746 - DNA, 25 bp, Homo sapien
tgtatttacccccatctttattctc

SEQ ID NO: 4843747 - DNA, 25 bp, Homo sapien
ccccttggggacaggtatctggctc

SEQ ID NO: 4843748 - DNA, 25 bp, Homo sapien
catcaggggcttcgttgtgatgttt

SEQ ID NO: 4843749 - DNA, 25 bp, Homo sapien
ttcatcaggggcttcgttgtgatgt

SEQ ID NO: 4843750 - DNA, 25 bp, Homo sapien
tggggacaggtatctggctcagatt

SEQ ID NO: 4843751 - DNA, 25 bp, Homo sapien
caatttcttttgcttccttcttggt

SEQ ID NO: 4843752 - DNA, 25 bp, Homo sapien
cgccaatttcttttgcttccttctt

SEQ ID NO: 4843753 - DNA, 25 bp, Homo sapien
tcaagcgccaatttcttttgcttcc

SEQ ID NO: 4843754 - DNA, 25 bp, Homo sapien
tgcttccttcttggttttaatgttc

SEQ ID NO: 4843755 - DNA, 25 bp, Homo sapien
gatggtggatagtcatccatcacca

SEQ ID NO: 4843756 - DNA, 25 bp, Homo sapien
gtgggatggtggatagtcatccatc

SEQ ID NO: 4843757 - DNA, 25 bp, Homo sapien
aaagaagagaatgcggggccaccaa

SEQ ID NO: 4843758 - DNA, 25 bp, Homo sapien
accaagcacatgtggcactctgtgt

SEQ ID NO: 4843759 - DNA, 25 bp, Homo sapien
caaggtcatatgggaccacccttct

SEQ ID NO: 4843760 - DNA, 25 bp, Homo sapien
tcaaggtcatatgggaccacccttc

SEQ ID NO: 4843761 - DNA, 25 bp, Homo sapien
cctacttctgctggtgagctgattt

SEQ ID NO: 4843762 - DNA, 25 bp, Homo sapien
gaacttcttcatgggaccccgttca

SEQ ID NO: 4843763 - DNA, 25 bp, Homo sapien
ttcttcatgggaccccgttcagctc

SEQ ID NO: 4843764 - DNA, 25 bp, Homo sapien
acttcttcatgggaccccgttcagc

SEQ ID NO: 4843765 - DNA, 25 bp, Homo sapien
tctgagcattctgatttaggaacgg

SEQ ID NO: 4843766 - DNA, 25 bp, Homo sapien
actgtcaccctttgtctgagatcgc

SEQ ID NO: 4843767 - DNA, 25 bp, Homo sapien
aaaggtctctagtctggtgggctcc

SEQ ID NO: 4843768 - DNA, 25 bp, Homo sapien
tgaaacattgcatgggcgctatcag

SEQ ID NO: 4843769 - DNA, 25 bp, Homo sapien
tagcacgggcattcttttagcagca

SEQ ID NO: 4843770 - DNA, 25 bp, Homo sapien
tcagtgcacatgtagacgtctttca

SEQ ID NO: 4843771 - DNA, 25 bp, Homo sapien
gaaaagcatgcataatttagcacgg

SEQ ID NO: 4843772 - DNA, 25 bp, Homo sapien
tagcagcagaaggacatagaccact

SEQ ID NO: 4843773 - DNA, 25 bp, Homo sapien
tctcagcggaggagttgggtgttct

SEQ ID NO: 4843774 - DNA, 25 bp, Homo sapien
gagggcagcaaacagctgtcgtggg

SEQ ID NO: 4843775 - DNA, 25 bp, Homo sapien
gccagaccaggtctcagcggaggag

SEQ ID NO: 4843776 - DNA, 25 bp, Homo sapien
aaacagctgtcgtgggggatgcatt

SEQ ID NO: 4843777 - DNA, 25 bp, Homo sapien
gctctagctctgttcttaatgccat

SEQ ID NO: 4843778 - DNA, 25 bp, Homo sapien
ttgctctagctctgttcttaatgcc

SEQ ID NO: 4843779 - DNA, 25 bp, Homo sapien
gttgctctagctctgttcttaatgc

SEQ ID NO: 4843780 - DNA, 25 bp, Homo sapien
tgctctagctctgttcttaatgcca

SEQ ID NO: 4843781 - DNA, 25 bp, Homo sapien
tgggctgccggaagatggtcaattc

SEQ ID NO: 4843782 - DNA, 25 bp, Homo sapien
ctaggtgttgggctgccggaagatg

SEQ ID NO: 4843783 - DNA, 25 bp, Homo sapien
aggtgttgggctgccggaagatggt

SEQ ID NO: 4843784 - DNA, 25 bp, Homo sapien
gttgggctgccggaagatggtcaat

SEQ ID NO: 4843785 - DNA, 25 bp, Homo sapien
tccgagagtgacaggcttcggccag

SEQ ID NO: 4843786 - DNA, 25 bp, Homo sapien
ggccccttccgagagtgacaggctt

SEQ ID NO: 4843787 - DNA, 25 bp, Homo sapien
aaacttctccggctcttggtgtcca

SEQ ID NO: 4843788 - DNA, 25 bp, Homo sapien
agtcacgcgtaaaccgcccctggtg

SEQ ID NO: 4843789 - DNA, 25 bp, Homo sapien
actctctgaccactgaggcatctcc

SEQ ID NO: 4843790 - DNA, 25 bp, Homo sapien
gaaactctctgaccactgaggcatc

SEQ ID NO: 4843791 - DNA, 25 bp, Homo sapien
tctcccttactggttctggctttcc

SEQ ID NO: 4843792 - DNA, 25 bp, Homo sapien
actgaggcatctcccttactggttc

SEQ ID NO: 4843793 - DNA, 25 bp, Homo sapien
cccatttgacactgcactgggacag

SEQ ID NO: 4843794 - DNA, 25 bp, Homo sapien
gctcccatttgacactgcactggga

SEQ ID NO: 4843795 - DNA, 25 bp, Homo sapien
tccctgctcccatttgacactgcac

SEQ ID NO: 4843796 - DNA, 25 bp, Homo sapien
ctgctcccatttgacactgcactgg

SEQ ID NO: 4843797 - DNA, 25 bp, Homo sapien
aaatattaagttctgtcttctgcta

SEQ ID NO: 4843798 - DNA, 25 bp, Homo sapien
tatatattgtaagatgatcttctga

SEQ ID NO: 4843799 - DNA, 25 bp, Homo sapien
atattgtaagatgatcttctgaaag

SEQ ID NO: 4843800 - DNA, 25 bp, Homo sapien
aatattaagttctgtcttctgctaa

SEQ ID NO: 4843801 - DNA, 25 bp, Homo sapien
ccaaatgtgtaacaccctttagcat

SEQ ID NO: 4843802 - DNA, 25 bp, Homo sapien
accaaatgtgtaacaccctttagca

SEQ ID NO: 4843803 - DNA, 25 bp, Homo sapien
cgacgaagcgtttctccactctgac

SEQ ID NO: 4843804 - DNA, 25 bp, Homo sapien
tgcctgggccttttagattccagct

SEQ ID NO: 4843805 - DNA, 25 bp, Homo sapien
gctgtagaaattttgagcctattga

SEQ ID NO: 4843806 - DNA, 25 bp, Homo sapien
ttgtattagtgattttggcccgacg

SEQ ID NO: 4843807 - DNA, 25 bp, Homo sapien
atacaggtattgtggctgttggtgg

SEQ ID NO: 4843808 - DNA, 25 bp, Homo sapien
acaggtattgtggctgttggtggtt

SEQ ID NO: 4843809 - DNA, 25 bp, Homo sapien
catacaggtattgtggctgttggtg

SEQ ID NO: 4843810 - DNA, 25 bp, Homo sapien
tacaggtattgtggctgttggtggt

SEQ ID NO: 4843811 - DNA, 25 bp, Homo sapien
gcctctatccccttgacacctacat

SEQ ID NO: 4843812 - DNA, 25 bp, Homo sapien
tctatccccttgacacctacatttt

SEQ ID NO: 4843813 - DNA, 25 bp, Homo sapien
ggcctctatccccttgacacctaca

SEQ ID NO: 4843814 - DNA, 25 bp, Homo sapien
tatccccttgacacctacattttcc

SEQ ID NO: 4843815 - DNA, 25 bp, Homo sapien
ctgacccagcaagggttttatatgt

SEQ ID NO: 4843816 - DNA, 25 bp, Homo sapien
tgacccagcaagggttttatatgtt

SEQ ID NO: 4843817 - DNA, 25 bp, Homo sapien
tgatcgtgcaaagcgtgagctccgg

SEQ ID NO: 4843818 - DNA, 25 bp, Homo sapien
tttctccaacaaacgtttattgagc

SEQ ID NO: 4843819 - DNA, 25 bp, Homo sapien
tttattgagcaacgaagtacttgga

SEQ ID NO: 4843820 - DNA, 25 bp, Homo sapien
tatttcacctttatgcaccggtttc

SEQ ID NO: 4843821 - DNA, 25 bp, Homo sapien
ggtgaagtcagggagcatgcgcggg

SEQ ID NO: 4843822 - DNA, 25 bp, Homo sapien
aagtcagggagcatgcgcgggagcg

SEQ ID NO: 4843823 - DNA, 25 bp, Homo sapien
ttggtgaagtcagggagcatgcgcg

SEQ ID NO: 4843824 - DNA, 25 bp, Homo sapien
tgaagtcagggagcatgcgcgggag

SEQ ID NO: 4843825 - DNA, 25 bp, Homo sapien
agaagccagagcagttgaaccgctt

SEQ ID NO: 4843826 - DNA, 25 bp, Homo sapien
aagccagagcagttgaaccgcttcc

SEQ ID NO: 4843827 - DNA, 25 bp, Homo sapien
gcttccaggtcacctcgaaaatgcg

SEQ ID NO: 4843828 - DNA, 25 bp, Homo sapien
ctcgaaaatgcggagaagtggattt

SEQ ID NO: 4843829 - DNA, 25 bp, Homo sapien
tgtctggaggcgcacggaggctggc

SEQ ID NO: 4843830 - DNA, 25 bp, Homo sapien
actgcgcatgtctggaggcgcacgg

SEQ ID NO: 4843831 - DNA, 25 bp, Homo sapien
tttccgggttttgcgagcagtctcc

SEQ ID NO: 4843832 - DNA, 25 bp, Homo sapien
agagtggatcgggaaagcttttccg

SEQ ID NO: 4843833 - DNA, 25 bp, Homo sapien
cagcccgaagcggccggaacgtccg

SEQ ID NO: 4843834 - DNA, 25 bp, Homo sapien
cgccagcccgaagcggccggaacgt

SEQ ID NO: 4843835 - DNA, 25 bp, Homo sapien
cgaagcggccggaacgtccggctct

SEQ ID NO: 4843836 - DNA, 25 bp, Homo sapien
agcggccggaacgtccggctctgga

SEQ ID NO: 4843837 - DNA, 25 bp, Homo sapien
aggaactcgcagtccccctgggcag

SEQ ID NO: 4843838 - DNA, 25 bp, Homo sapien
gccgtgatcagccacgccttggctg

SEQ ID NO: 4843839 - DNA, 25 bp, Homo sapien
aggtcttgcggcaccaactcccggg

SEQ ID NO: 4843840 - DNA, 25 bp, Homo sapien
gcccacaggtcttgcggcaccaact

SEQ ID NO: 4843841 - DNA, 25 bp, Homo sapien
tggatgttaaagtctgccgggtaga

SEQ ID NO: 4843842 - DNA, 25 bp, Homo sapien
ctggatgttaaagtctgccgggtag

SEQ ID NO: 4843843 - DNA, 25 bp, Homo sapien
gatgttaaagtctgccgggtagagg

SEQ ID NO: 4843844 - DNA, 25 bp, Homo sapien
ggatgttaaagtctgccgggtagag

SEQ ID NO: 4843845 - DNA, 25 bp, Homo sapien
ggccgcatgcacagccgggacctca

SEQ ID NO: 4843846 - DNA, 25 bp, Homo sapien
tccacgcagagcggccgcatgcaca

SEQ ID NO: 4843847 - DNA, 25 bp, Homo sapien
agagcggccgcatgcacagccggga

SEQ ID NO: 4843848 - DNA, 25 bp, Homo sapien
gcagagcggccgcatgcacagccgg

SEQ ID NO: 4843849 - DNA, 25 bp, Homo sapien
ctcatccagcatcgctcgttggccc

SEQ ID NO: 4843850 - DNA, 25 bp, Homo sapien
agctcatccagcatcgctcgttggc

SEQ ID NO: 4843851 - DNA, 25 bp, Homo sapien
ccagctcatccagcatcgctcgttg

SEQ ID NO: 4843852 - DNA, 25 bp, Homo sapien
catccagcatcgctcgttggccctc

SEQ ID NO: 4843853 - DNA, 25 bp, Homo sapien
cacacatcaggcaccctggtcactc

SEQ ID NO: 4843854 - DNA, 25 bp, Homo sapien
ctgcaacacacatcaggcaccctgg

SEQ ID NO: 4843855 - DNA, 25 bp, Homo sapien
acacatcaggcaccctggtcactca

SEQ ID NO: 4843856 - DNA, 25 bp, Homo sapien
caacacacatcaggcaccctggtca

SEQ ID NO: 4843857 - DNA, 25 bp, Homo sapien
atgtcgtacagcagcctcccggcgg

SEQ ID NO: 4843858 - DNA, 25 bp, Homo sapien
tcgtacagcagcctcccggcggtgg

SEQ ID NO: 4843859 - DNA, 25 bp, Homo sapien
tccgctcgatggtgtacatctcata

SEQ ID NO: 4843860 - DNA, 25 bp, Homo sapien
ctctgcattccgctcgatggtgtac

SEQ ID NO: 4843861 - DNA, 25 bp, Homo sapien
cagtaaaagtgatgtcaagcgtccc

SEQ ID NO: 4843862 - DNA, 25 bp, Homo sapien
gtaaaagtgatgtcaagcgtcccac

SEQ ID NO: 4843863 - DNA, 25 bp, Homo sapien
cctcatggagagattcagtgcagta

SEQ ID NO: 4843864 - DNA, 25 bp, Homo sapien
aaacaaaacctcatggagagattca

SEQ ID NO: 4843865 - DNA, 25 bp, Homo sapien
tttgctttaggtatcgaagatatag

SEQ ID NO: 4843866 - DNA, 25 bp, Homo sapien
gatgaacttgaagatcttcccccaa

SEQ ID NO: 4843867 - DNA, 25 bp, Homo sapien
ttaggtatcgaagatatagatgaac

SEQ ID NO: 4843868 - DNA, 25 bp, Homo sapien
tgaacttgaagatcttcccccaact

SEQ ID NO: 4843869 - DNA, 25 bp, Homo sapien
tctctacatactgatatgggaaggg

SEQ ID NO: 4843870 - DNA, 25 bp, Homo sapien
ctgcagggcaaaggtagtatggtct

SEQ ID NO: 4843871 - DNA, 25 bp, Homo sapien
ggttcagtttaggatgcactttcac

SEQ ID NO: 4843872 - DNA, 25 bp, Homo sapien
gatatactgcctacaaaacttaact

SEQ ID NO: 4843873 - DNA, 25 bp, Homo sapien
aacacactctttatacaccattggt

SEQ ID NO: 4843874 - DNA, 25 bp, Homo sapien
tggtaatgtagactgggatcgcaca

SEQ ID NO: 4843875 - DNA, 25 bp, Homo sapien
ccaagtgaatgcttagacgtgccaa

SEQ ID NO: 4843876 - DNA, 25 bp, Homo sapien
ggatcgcacattttggagagtaatt

SEQ ID NO: 4843877 - DNA, 25 bp, Homo sapien
ccacaccaccggctggtctgggaaa

SEQ ID NO: 4843878 - DNA, 25 bp, Homo sapien
gaatcgttccttaatgctgatgtaa

SEQ ID NO: 4843879 - DNA, 25 bp, Homo sapien
accggctggtctgggaaattcacaa

SEQ ID NO: 4843880 - DNA, 25 bp, Homo sapien
gtttgtttgtcctgtgaatcgttcc

SEQ ID NO: 4843881 - DNA, 25 bp, Homo sapien
tatatgatttggtattcccgaaatg

SEQ ID NO: 4843882 - DNA, 25 bp, Homo sapien
ggtaacttatacaccattattctta

SEQ ID NO: 4843883 - DNA, 25 bp, Homo sapien
aatggtaacttatacaccattattc

SEQ ID NO: 4843884 - DNA, 25 bp, Homo sapien
tgatttggtattcccgaaatggtaa

SEQ ID NO: 4843885 - DNA, 25 bp, Homo sapien
cttttggagccaatagtatctggca

SEQ ID NO: 4843886 - DNA, 25 bp, Homo sapien
tggacccgaccaggaagagtttcaa

SEQ ID NO: 4843887 - DNA, 25 bp, Homo sapien
ctggacccgaccaggaagagtttca

SEQ ID NO: 4843888 - DNA, 25 bp, Homo sapien
gaagcgcctcaaaagtagaagcaac

SEQ ID NO: 4843889 - DNA, 25 bp, Homo sapien
accaccgtttcagggaagcgcctca

SEQ ID NO: 4843890 - DNA, 25 bp, Homo sapien
cgtgttgaagcattgttccgtgacc

SEQ ID NO: 4843891 - DNA, 25 bp, Homo sapien
gaagcaacatttctgatcgttctaa

SEQ ID NO: 4843892 - DNA, 25 bp, Homo sapien
tggaaatgattaacccgggccagac

SEQ ID NO: 4843893 - DNA, 25 bp, Homo sapien
tcatggtggattagaaaggccctca

SEQ ID NO: 4843894 - DNA, 25 bp, Homo sapien
tgccttagcatagtagacggtccct

SEQ ID NO: 4843895 - DNA, 25 bp, Homo sapien
cctgccagggaatgccaaagattgc

SEQ ID NO: 4843896 - DNA, 25 bp, Homo sapien
cttgttcttcaatagtttcagcctc

SEQ ID NO: 4843897 - DNA, 25 bp, Homo sapien
tagtttcagcctctaatagtgcctc

SEQ ID NO: 4843898 - DNA, 25 bp, Homo sapien
tcaatagtttcagcctctaatagtg

SEQ ID NO: 4843899 - DNA, 25 bp, Homo sapien
gttcactggagattcttgttcttca

SEQ ID NO: 4843900 - DNA, 25 bp, Homo sapien
agcatattaatttaccatagaagta

SEQ ID NO: 4843901 - DNA, 25 bp, Homo sapien
agaagtaatagagaatacaattttc

SEQ ID NO: 4843902 - DNA, 25 bp, Homo sapien
taatttaccatagaagtaatagaga

SEQ ID NO: 4843903 - DNA, 25 bp, Homo sapien
gaagtaatagagaatacaattttcc

SEQ ID NO: 4843904 - DNA, 25 bp, Homo sapien
gcaggtaatcgaacatcatggttgt

SEQ ID NO: 4843905 - DNA, 25 bp, Homo sapien
gattttctatttgagtagacctagt

SEQ ID NO: 4843906 - DNA, 25 bp, Homo sapien
tgagtagacctagtgacataattga

SEQ ID NO: 4843907 - DNA, 25 bp, Homo sapien
gctgctttgttcaagtacttataca

SEQ ID NO: 4843908 - DNA, 25 bp, Homo sapien
tccgtcagcccttctattatgtact

SEQ ID NO: 4843909 - DNA, 25 bp, Homo sapien
attaaatcagatgtatcctgggcgc

SEQ ID NO: 4843910 - DNA, 25 bp, Homo sapien
ccaagggtccacgatctgggatgat

SEQ ID NO: 4843911 - DNA, 25 bp, Homo sapien
tctgagagctacgtttgctaggtga

SEQ ID NO: 4843912 - DNA, 25 bp, Homo sapien
tccaaaagaatcaataggcaattct

SEQ ID NO: 4843913 - DNA, 25 bp, Homo sapien
aaactatacctacgcattacacaga

SEQ ID NO: 4843914 - DNA, 25 bp, Homo sapien
tcttggctcatcgtagcctccacgt

SEQ ID NO: 4843915 - DNA, 25 bp, Homo sapien
tttttataaggatccaaaagaatca

SEQ ID NO: 4843916 - DNA, 25 bp, Homo sapien
ttcttaaagaagaccagcatggtgg

SEQ ID NO: 4843917 - DNA, 25 bp, Homo sapien
gcagagatccttcattctatgcaaa

SEQ ID NO: 4843918 - DNA, 25 bp, Homo sapien
gctgttgacatactggaatgcattc

SEQ ID NO: 4843919 - DNA, 25 bp, Homo sapien
tcaaagttgttcatgtatctgcaga

SEQ ID NO: 4843920 - DNA, 25 bp, Homo sapien
gttattcggatccagcaatactgga

SEQ ID NO: 4843921 - DNA, 25 bp, Homo sapien
cccacagttattcggatccagcaat

SEQ ID NO: 4843922 - DNA, 25 bp, Homo sapien
ggtactgccccacagttattcggat

SEQ ID NO: 4843923 - DNA, 25 bp, Homo sapien
cccacagtatgaactggctttttgg

SEQ ID NO: 4843924 - DNA, 25 bp, Homo sapien
catcaccatacacattcgatacatc

SEQ ID NO: 4843925 - DNA, 25 bp, Homo sapien
tacgatcaatttctacatcaccata

SEQ ID NO: 4843926 - DNA, 25 bp, Homo sapien
gatacatcttcaagaagaaccagtg

SEQ ID NO: 4843927 - DNA, 25 bp, Homo sapien
tatggatgtgtttattacgatcaat

SEQ ID NO: 4843928 - DNA, 25 bp, Homo sapien
gcaagttcggctttattgactacaa

SEQ ID NO: 4843929 - DNA, 25 bp, Homo sapien
gactacaatgtgacgatttcttcct

SEQ ID NO: 4843930 - DNA, 25 bp, Homo sapien
gaattctagggaatagagcaactcc

SEQ ID NO: 4843931 - DNA, 25 bp, Homo sapien
taacacttcagtggagttagcaagt

SEQ ID NO: 4843932 - DNA, 25 bp, Homo sapien
agccaagtatccgtcttccaggcca

SEQ ID NO: 4843933 - DNA, 25 bp, Homo sapien
ccaggccaagcaaatccttgtaaat

SEQ ID NO: 4843934 - DNA, 25 bp, Homo sapien
tagatgatcatatcagtgaggaaga

SEQ ID NO: 4843935 - DNA, 25 bp, Homo sapien
tgatcatatcagtgaggaagattct

SEQ ID NO: 4843936 - DNA, 25 bp, Homo sapien
tctgtggctgagaaatggatccctg

SEQ ID NO: 4843937 - DNA, 25 bp, Homo sapien
tgtactcccctagcgcaaagtggca

SEQ ID NO: 4843938 - DNA, 25 bp, Homo sapien
caaagtggcacgtcgccagctggat

SEQ ID NO: 4843939 - DNA, 25 bp, Homo sapien
tggatgagcgccctctgatgctcca

SEQ ID NO: 4843940 - DNA, 25 bp, Homo sapien
ccatgtagcacatcaaatcaaggac

SEQ ID NO: 4843941 - DNA, 25 bp, Homo sapien
gggagtaccatgtagcacatcaaat

SEQ ID NO: 4843942 - DNA, 25 bp, Homo sapien
tgggatttgcctccatcttgaatgg

SEQ ID NO: 4843943 - DNA, 25 bp, Homo sapien
tcttgaatggggagtaccatgtagc

SEQ ID NO: 4843944 - DNA, 25 bp, Homo sapien
cgtgcctggctttctaaagctattt

SEQ ID NO: 4843945 - DNA, 25 bp, Homo sapien
ccgtgcctggctttctaaagctatt

SEQ ID NO: 4843946 - DNA, 25 bp, Homo sapien
tcagtaggatttgtagtgacactcc

SEQ ID NO: 4843947 - DNA, 25 bp, Homo sapien
ttcaccttcctccttatcgatcttg

SEQ ID NO: 4843948 - DNA, 25 bp, Homo sapien
ttcctccttatcgatcttgttaggg

SEQ ID NO: 4843949 - DNA, 25 bp, Homo sapien
ctgatactggtaatttatgttcacc

SEQ ID NO: 4843950 - DNA, 25 bp, Homo sapien
ggtgcatggaataacagtctctctt

SEQ ID NO: 4843951 - DNA, 25 bp, Homo sapien
aaacaaaaggtgcatggaataacag

SEQ ID NO: 4843952 - DNA, 25 bp, Homo sapien
aaaaggtgcatggaataacagtctc

SEQ ID NO: 4843953 - DNA, 25 bp, Homo sapien
tcttcttgtctgagatgtcgtctta

SEQ ID NO: 4843954 - DNA, 25 bp, Homo sapien
tactcagaggcaagatagcaagaaa

SEQ ID NO: 4843955 - DNA, 25 bp, Homo sapien
tatcaactggtcaatatcaatacac

SEQ ID NO: 4843956 - DNA, 25 bp, Homo sapien
tacagaggatattgacatttccaat

SEQ ID NO: 4843957 - DNA, 25 bp, Homo sapien
cttcatgtggttcagatttatcaac

SEQ ID NO: 4843958 - DNA, 25 bp, Homo sapien
ggcagtatggcatgatagccttgct

SEQ ID NO: 4843959 - DNA, 25 bp, Homo sapien
ttgctggtacaaggcaggagcttca

SEQ ID NO: 4843960 - DNA, 25 bp, Homo sapien
caaggcaggagcttcagatccgaac

SEQ ID NO: 4843961 - DNA, 25 bp, Homo sapien
aaacaggctaacattaaatggaggc

SEQ ID NO: 4843962 - DNA, 25 bp, Homo sapien
gtaatggagaaataaatctgaagat

SEQ ID NO: 4843963 - DNA, 25 bp, Homo sapien
ctgtgtaatggagaaataaatctga

SEQ ID NO: 4843964 - DNA, 25 bp, Homo sapien
aatggagaaataaatctgaagattt

SEQ ID NO: 4843965 - DNA, 25 bp, Homo sapien
gtgtaatggagaaataaatctgaag

SEQ ID NO: 4843966 - DNA, 25 bp, Homo sapien
ttgcatatgagaatcaggggcagag

SEQ ID NO: 4843967 - DNA, 25 bp, Homo sapien
cagttggacatgggtgggcctgaag

SEQ ID NO: 4843968 - DNA, 25 bp, Homo sapien
agttggacatgggtgggcctgaagc

SEQ ID NO: 4843969 - DNA, 25 bp, Homo sapien
caggggcagagaactctgattcatc

SEQ ID NO: 4843970 - DNA, 25 bp, Homo sapien
aatgccatgtcgtctctgttgtctg

SEQ ID NO: 4843971 - DNA, 25 bp, Homo sapien
ccccgtggccactcttgctgaagca

SEQ ID NO: 4843972 - DNA, 25 bp, Homo sapien
caggaaaagattctcgccccgtggc

SEQ ID NO: 4843973 - DNA, 25 bp, Homo sapien
aatcacatgccccaatgccatgtcg

SEQ ID NO: 4843974 - DNA, 25 bp, Homo sapien
attgaaaaaattctcatattggaaa

SEQ ID NO: 4843975 - DNA, 25 bp, Homo sapien
cgtaattgaaaaaattctcatattg

SEQ ID NO: 4843976 - DNA, 25 bp, Homo sapien
gtaattgaaaaaattctcatattgg

SEQ ID NO: 4843977 - DNA, 25 bp, Homo sapien
tgtaacgtaattgaaaaaattctca

SEQ ID NO: 4843978 - DNA, 25 bp, Homo sapien
tttcacgactttcagaagatcaact

SEQ ID NO: 4843979 - DNA, 25 bp, Homo sapien
tggaagagggttgtaagattcccaa

SEQ ID NO: 4843980 - DNA, 25 bp, Homo sapien
ttgaatcatgtctttcacgactttc

SEQ ID NO: 4843981 - DNA, 25 bp, Homo sapien
ggttgtaagattcccaattccttga

SEQ ID NO: 4843982 - DNA, 25 bp, Homo sapien
aagtgattacttcttcataactggg

SEQ ID NO: 4843983 - DNA, 25 bp, Homo sapien
gatatctgtcccaaaccatggttaa

SEQ ID NO: 4843984 - DNA, 25 bp, Homo sapien
ccaaattttatgcaatatgtcgatg

SEQ ID NO: 4843985 - DNA, 25 bp, Homo sapien
caagggtttatagatgcatcagagg

SEQ ID NO: 4843986 - DNA, 25 bp, Homo sapien
aactgcagactccatatttgaaccc

SEQ ID NO: 4843987 - DNA, 25 bp, Homo sapien
cagttctctctgataaggaaatggg

SEQ ID NO: 4843988 - DNA, 25 bp, Homo sapien
tgcaggccagattcaggttaaccac

SEQ ID NO: 4843989 - DNA, 25 bp, Homo sapien
cattgccatcccactaaaaaaggtg

SEQ ID NO: 4843990 - DNA, 25 bp, Homo sapien
ccttgattgggtagtaattccagat

SEQ ID NO: 4843991 - DNA, 25 bp, Homo sapien
ttccttgattgggtagtaattccag

SEQ ID NO: 4843992 - DNA, 25 bp, Homo sapien
aattccagatgaattttcccacctt

SEQ ID NO: 4843993 - DNA, 25 bp, Homo sapien
ccaccttcctgagttctcaagtagg

SEQ ID NO: 4843994 - DNA, 25 bp, Homo sapien
aaggcactctgtgactaatcagaaa

SEQ ID NO: 4843995 - DNA, 25 bp, Homo sapien
cagagaccaggtttaaagtcctttg

SEQ ID NO: 4843996 - DNA, 25 bp, Homo sapien
aaaggtacccagaatcaaactatca

SEQ ID NO: 4843997 - DNA, 25 bp, Homo sapien
aggtgagcactcagcatggaagagc

SEQ ID NO: 4843998 - DNA, 25 bp, Homo sapien
tgagaatggagtccacaagacccta

SEQ ID NO: 4843999 - DNA, 25 bp, Homo sapien
cacagacttcggttccactatggct

SEQ ID NO: 4844000 - DNA, 25 bp, Homo sapien
tgggcttccgtatccaaaggtaatc

SEQ ID NO: 4844001 - DNA, 25 bp, Homo sapien
gcaaaccaatgcagaaaggtctcgt

SEQ ID NO: 4844002 - DNA, 25 bp, Homo sapien
gaagactgggcaaatccctacgagg

SEQ ID NO: 4844003 - DNA, 25 bp, Homo sapien
cctgtgatactagctggtacccaac

SEQ ID NO: 4844004 - DNA, 25 bp, Homo sapien
tgtattgatcaaggtgggagaccct

SEQ ID NO: 4844005 - DNA, 25 bp, Homo sapien
ggacttatgtcactcttcagctcag

SEQ ID NO: 4844006 - DNA, 25 bp, Homo sapien
acatctctgccactcatctggaggg

SEQ ID NO: 4844007 - DNA, 25 bp, Homo sapien
ccaaaaggtctgtaatggcttcaga

SEQ ID NO: 4844008 - DNA, 25 bp, Homo sapien
tgtacactgctcacaacatctctgc

SEQ ID NO: 4844009 - DNA, 25 bp, Homo sapien
ctggagggaccacccaaaaggtctg

SEQ ID NO: 4844010 - DNA, 25 bp, Homo sapien
tgcgtgtccagaggcgtctcagttc

SEQ ID NO: 4844011 - DNA, 25 bp, Homo sapien
ctttaacaggactgaagccccaccg

SEQ ID NO: 4844012 - DNA, 25 bp, Homo sapien
tcctttgagtgaagcaccgggtgcc

SEQ ID NO: 4844013 - DNA, 25 bp, Homo sapien
gggcagcctttgagaagacacattt

SEQ ID NO: 4844014 - DNA, 25 bp, Homo sapien
attcaaacacccacaccgactcacc

SEQ ID NO: 4844015 - DNA, 25 bp, Homo sapien
caaacacccacaccgactcaccctg

SEQ ID NO: 4844016 - DNA, 25 bp, Homo sapien
agcattcaaacacccacaccgactc

SEQ ID NO: 4844017 - DNA, 25 bp, Homo sapien
cagcattcaaacacccacaccgact

SEQ ID NO: 4844018 - DNA, 25 bp, Homo sapien
caggtaagaattcctgctgcagtaa

SEQ ID NO: 4844019 - DNA, 25 bp, Homo sapien
aagagcactgaggaacgaagagctg

SEQ ID NO: 4844020 - DNA, 25 bp, Homo sapien
gcagcgaacatgttgacaaacagca

SEQ ID NO: 4844021 - DNA, 25 bp, Homo sapien
cagcacactatgagcgggcgttgat

SEQ ID NO: 4844022 - DNA, 25 bp, Homo sapien
gatggtttgccaaaatgcggaacaa

SEQ ID NO: 4844023 - DNA, 25 bp, Homo sapien
caggcctggctaataaaccctgctt

SEQ ID NO: 4844024 - DNA, 25 bp, Homo sapien
gaatcatggtgcacctaagctaatg

SEQ ID NO: 4844025 - DNA, 25 bp, Homo sapien
gctacatcctgcagatcagggtcca

SEQ ID NO: 4844026 - DNA, 25 bp, Homo sapien
tatatatgaccgaaagccttaacgt

SEQ ID NO: 4844027 - DNA, 25 bp, Homo sapien
tctgaccaagcggaggttactggca

SEQ ID NO: 4844028 - DNA, 25 bp, Homo sapien
tacttgggtaggaataaagcctgcc

SEQ ID NO: 4844029 - DNA, 25 bp, Homo sapien
tgaatgagccaatcacccaagtgag

SEQ ID NO: 4844030 - DNA, 25 bp, Homo sapien
gacatagcatcggtgaggtcccgct

SEQ ID NO: 4844031 - DNA, 25 bp, Homo sapien
gattctctccacagcgggagacctg

SEQ ID NO: 4844032 - DNA, 25 bp, Homo sapien
gatgcctcgagttacagtgtggtgc

SEQ ID NO: 4844033 - DNA, 25 bp, Homo sapien
atggccaggcgaaagtcctccttca

SEQ ID NO: 4844034 - DNA, 25 bp, Homo sapien
cattaatgcagaacctgtgcagaac

SEQ ID NO: 4844035 - DNA, 25 bp, Homo sapien
ttaagcaaccaaggagttagaactc

SEQ ID NO: 4844036 - DNA, 25 bp, Homo sapien
aacaatgaccacggctctgtgccat

SEQ ID NO: 4844037 - DNA, 25 bp, Homo sapien
tctcagactcttgggaactactttt

SEQ ID NO: 4844038 - DNA, 25 bp, Homo sapien
tgccatggcaatcactgctgagtgt

SEQ ID NO: 4844039 - DNA, 25 bp, Homo sapien
catcagtgggagaggtcaggctcaa

SEQ ID NO: 4844040 - DNA, 25 bp, Homo sapien
tcctgggcttttcagcagccctgag

SEQ ID NO: 4844041 - DNA, 25 bp, Homo sapien
gtcctgggcttttcagcagccctga

SEQ ID NO: 4844042 - DNA, 25 bp, Homo sapien
tctccttcaggggaccatcagtggg

SEQ ID NO: 4844043 - DNA, 25 bp, Homo sapien
gatatccaaggtcagtcaagcctcc

SEQ ID NO: 4844044 - DNA, 25 bp, Homo sapien
tcatcccgatggtagctttgcctca

SEQ ID NO: 4844045 - DNA, 25 bp, Homo sapien
tagggagcaggattgccatggcaac

SEQ ID NO: 4844046 - DNA, 25 bp, Homo sapien
cattcgttactcagacaagcagaca

SEQ ID NO: 4844047 - DNA, 25 bp, Homo sapien
cccaggagggactctacatccagat

SEQ ID NO: 4844048 - DNA, 25 bp, Homo sapien
ggagggactctacatccagatggac

SEQ ID NO: 4844049 - DNA, 25 bp, Homo sapien
aacctgcatttggtgacgagtgagg

SEQ ID NO: 4844050 - DNA, 25 bp, Homo sapien
aggaacctgcatttggtgacgagtg

SEQ ID NO: 4844051 - DNA, 25 bp, Homo sapien
caggactgactttcaatggattgca

SEQ ID NO: 4844052 - DNA, 25 bp, Homo sapien
caaaccctggtgtccaggactgact

SEQ ID NO: 4844053 - DNA, 25 bp, Homo sapien
actgccgccccacagtgtggctccg

SEQ ID NO: 4844054 - DNA, 25 bp, Homo sapien
cacagtgtggctccgggtccgaagt

SEQ ID NO: 4844055 - DNA, 25 bp, Homo sapien
gccgccccacagtgtggctccgggt

SEQ ID NO: 4844056 - DNA, 25 bp, Homo sapien
gccccacagtgtggctccgggtccg

SEQ ID NO: 4844057 - DNA, 25 bp, Homo sapien
ggatgcgaaagtctgtgtccacaga

SEQ ID NO: 4844058 - DNA, 25 bp, Homo sapien
gcttgttcctggcaagggatgcgaa

SEQ ID NO: 4844059 - DNA, 25 bp, Homo sapien
acaggtggtgaggatacccggcctt

SEQ ID NO: 4844060 - DNA, 25 bp, Homo sapien
gggtgaccttcatggattacataaa

SEQ ID NO: 4844061 - DNA, 25 bp, Homo sapien
catccaggattagcaggggcgctgc

SEQ ID NO: 4844062 - DNA, 25 bp, Homo sapien
cacatccaggattagcaggggcgct

SEQ ID NO: 4844063 - DNA, 25 bp, Homo sapien
atccaggattagcaggggcgctgca

SEQ ID NO: 4844064 - DNA, 25 bp, Homo sapien
tcacatccaggattagcaggggcgc

SEQ ID NO: 4844065 - DNA, 25 bp, Homo sapien
ataatgttgtatactgttttctttc

SEQ ID NO: 4844066 - DNA, 25 bp, Homo sapien
gtatactgttttctttctctgttaa

SEQ ID NO: 4844067 - DNA, 25 bp, Homo sapien
actgttttctttctctgttaatcat

SEQ ID NO: 4844068 - DNA, 25 bp, Homo sapien
tactgttttctttctctgttaatca

SEQ ID NO: 4844069 - DNA, 25 bp, Homo sapien
cttctttatgaaattgtccttagca

SEQ ID NO: 4844070 - DNA, 25 bp, Homo sapien
gaatgagggaagtttttccgtctca

SEQ ID NO: 4844071 - DNA, 25 bp, Homo sapien
ctcaaacttcggctctagcagcttc

SEQ ID NO: 4844072 - DNA, 25 bp, Homo sapien
caacctcattaggacttgatggaga

SEQ ID NO: 4844073 - DNA, 25 bp, Homo sapien
agtgccgaagaaaaccaacctcatt

SEQ ID NO: 4844074 - DNA, 25 bp, Homo sapien
gcggaccgactgatgagccggctga

SEQ ID NO: 4844075 - DNA, 25 bp, Homo sapien
ggagccgcggtttggcgctgagcaa

SEQ ID NO: 4844076 - DNA, 25 bp, Homo sapien
ctgcaaggcgcggaccgactgatga

SEQ ID NO: 4844077 - DNA, 25 bp, Homo sapien
cgctgagcaagtcgccctttaaagg

SEQ ID NO: 4844078 - DNA, 25 bp, Homo sapien
gagtcagcacgagcagggctttgct

SEQ ID NO: 4844079 - DNA, 25 bp, Homo sapien
tcagcacgagcagggctttgctctc

SEQ ID NO: 4844080 - DNA, 25 bp, Homo sapien
gcacgagcagggctttgctctccat

SEQ ID NO: 4844081 - DNA, 25 bp, Homo sapien
cagagtcagcacgagcagggctttg

SEQ ID NO: 4844082 - DNA, 25 bp, Homo sapien
cgcgggaggcggtcagactctggag

SEQ ID NO: 4844083 - DNA, 25 bp, Homo sapien
cctccgcgggaggcggtcagactct

SEQ ID NO: 4844084 - DNA, 25 bp, Homo sapien
ccgcgggaggcggtcagactctgga

SEQ ID NO: 4844085 - DNA, 25 bp, Homo sapien
cacccctccgcgggaggcggtcaga

SEQ ID NO: 4844086 - DNA, 25 bp, Homo sapien
cagagtggaagggatagcgcgggaa

SEQ ID NO: 4844087 - DNA, 25 bp, Homo sapien
atagcgcgggaacccggcagagaga

SEQ ID NO: 4844088 - DNA, 25 bp, Homo sapien
ttcacgatcgggaggagattccctc

SEQ ID NO: 4844089 - DNA, 25 bp, Homo sapien
gaacgcggtcccagccagagtggaa

SEQ ID NO: 4844090 - DNA, 25 bp, Homo sapien
gcagtgccaaccaaggcgaggtcac

SEQ ID NO: 4844091 - DNA, 25 bp, Homo sapien
gtgactgcaggtcaccgccagccgg

SEQ ID NO: 4844092 - DNA, 25 bp, Homo sapien
ggactccgcgccacgcgtactttct

SEQ ID NO: 4844093 - DNA, 25 bp, Homo sapien
agcgtaccccgtgcggctgagatgc

SEQ ID NO: 4844094 - DNA, 25 bp, Homo sapien
gtggctcccaggacgaagtgcctga

SEQ ID NO: 4844095 - DNA, 25 bp, Homo sapien
tcttcacgtttcctaattggggcca

SEQ ID NO: 4844096 - DNA, 25 bp, Homo sapien
tctccctctcctagctcttcacgtt

SEQ ID NO: 4844097 - DNA, 25 bp, Homo sapien
ccaggacgaagtgcctgaggacagt

SEQ ID NO: 4844098 - DNA, 25 bp, Homo sapien
gaaactgttcccactcctatggcaa

SEQ ID NO: 4844099 - DNA, 25 bp, Homo sapien
taggttgttcagaaatacccgtgct

SEQ ID NO: 4844100 - DNA, 25 bp, Homo sapien
tacccgtgctatgtatcagccatgg

SEQ ID NO: 4844101 - DNA, 25 bp, Homo sapien
agggtggtcgctatctcctgggctc

SEQ ID NO: 4844102 - DNA, 25 bp, Homo sapien
gcaagtgtcctcagctgtgtcttca

SEQ ID NO: 4844103 - DNA, 25 bp, Homo sapien
tggatcaccatgaaggttttgctgc

SEQ ID NO: 4844104 - DNA, 25 bp, Homo sapien
gactctgctactccgggaatgaggt

SEQ ID NO: 4844105 - DNA, 25 bp, Homo sapien
tgattgaaatgacaggtagccacgg

SEQ ID NO: 4844106 - DNA, 25 bp, Homo sapien
caggagaatctcttatgcccaggtg

SEQ ID NO: 4844107 - DNA, 25 bp, Homo sapien
aaattgtagcgattgtcctcttcag

SEQ ID NO: 4844108 - DNA, 25 bp, Homo sapien
tatataaccaaagggcctctaaaga

SEQ ID NO: 4844109 - DNA, 25 bp, Homo sapien
aaaccctgcctgtgctgaaaatata

SEQ ID NO: 4844110 - DNA, 25 bp, Homo sapien
ggttctctcttgtacagggcggcca

SEQ ID NO: 4844111 - DNA, 25 bp, Homo sapien
ccaccagtttggtgtagcccgcgga

SEQ ID NO: 4844112 - DNA, 25 bp, Homo sapien
ggtaatgctcctgagcccgtgacag

SEQ ID NO: 4844113 - DNA, 25 bp, Homo sapien
catccagttgataaaccgggccaca

SEQ ID NO: 4844114 - DNA, 25 bp, Homo sapien
tatcccaagagatggacattgtcca

SEQ ID NO: 4844115 - DNA, 25 bp, Homo sapien
ctccaaggctgtatcccaagagatg

SEQ ID NO: 4844116 - DNA, 25 bp, Homo sapien
tgtccagagggtagttaaactcctc

SEQ ID NO: 4844117 - DNA, 25 bp, Homo sapien
ttcttattggtcagacttcctgcaa

SEQ ID NO: 4844118 - DNA, 25 bp, Homo sapien
tagcttctccaatgttacatcctgg

SEQ ID NO: 4844119 - DNA, 25 bp, Homo sapien
cctctctctgcaatcacgcggatag

SEQ ID NO: 4844120 - DNA, 25 bp, Homo sapien
ggaccctctggtgaatgtgtgtaag

SEQ ID NO: 4844121 - DNA, 25 bp, Homo sapien
cattcgggtaaatgtcaacatgccc

SEQ ID NO: 4844122 - DNA, 25 bp, Homo sapien
tgcttctagaaacatatacctgccc

SEQ ID NO: 4844123 - DNA, 25 bp, Homo sapien
tattacgtgcacaaaaataacgaga

SEQ ID NO: 4844124 - DNA, 25 bp, Homo sapien
tatgtacaattgagggttctgcccc

SEQ ID NO: 4844125 - DNA, 25 bp, Homo sapien
gttttaagtcaaaccatcacgtgct

SEQ ID NO: 4844126 - DNA, 25 bp, Homo sapien
aagagacaccaagattgtatctcgg

SEQ ID NO: 4844127 - DNA, 25 bp, Homo sapien
accaagattgtatctcggcagaaat

SEQ ID NO: 4844128 - DNA, 25 bp, Homo sapien
gacaccaagattgtatctcggcaga

SEQ ID NO: 4844129 - DNA, 25 bp, Homo sapien
caagattgtatctcggcagaaattc

SEQ ID NO: 4844130 - DNA, 25 bp, Homo sapien
tttctacaactcaagcagagccctt

SEQ ID NO: 4844131 - DNA, 25 bp, Homo sapien
gaactgcacctgtaggccttacttg

SEQ ID NO: 4844132 - DNA, 25 bp, Homo sapien
tcgtgggagcacttcactagctggt

SEQ ID NO: 4844133 - DNA, 25 bp, Homo sapien
tcatagcccagattgttgcagcggt

SEQ ID NO: 4844134 - DNA, 25 bp, Homo sapien
tctctcattttccgaccattccttt

SEQ ID NO: 4844135 - DNA, 25 bp, Homo sapien
gatttatccgaagacctcctctctc

SEQ ID NO: 4844136 - DNA, 25 bp, Homo sapien
ttccgaccattcctttaggtctgcc

SEQ ID NO: 4844137 - DNA, 25 bp, Homo sapien
cggatttatccgaagacctcctctc

SEQ ID NO: 4844138 - DNA, 25 bp, Homo sapien
cccttcctgaagttggtccctctca

SEQ ID NO: 4844139 - DNA, 25 bp, Homo sapien
ccttcctgaagttggtccctctcac

SEQ ID NO: 4844140 - DNA, 25 bp, Homo sapien
ttccatctggattccacaaaagcca

SEQ ID NO: 4844141 - DNA, 25 bp, Homo sapien
tctggattccacaaaagccaccctt

SEQ ID NO: 4844142 - DNA, 25 bp, Homo sapien
catgggtgccatatgttttacctgg

SEQ ID NO: 4844143 - DNA, 25 bp, Homo sapien
caggacaggccagagctgaagaagc

SEQ ID NO: 4844144 - DNA, 25 bp, Homo sapien
tgacagagccttgaacccactggtg

SEQ ID NO: 4844145 - DNA, 25 bp, Homo sapien
tgcctcaacctctataccacgaaag

SEQ ID NO: 4844146 - DNA, 25 bp, Homo sapien
tgattggtatgggtttcactctcag

SEQ ID NO: 4844147 - DNA, 25 bp, Homo sapien
caaaggcctgattggtatgggtttc

SEQ ID NO: 4844148 - DNA, 25 bp, Homo sapien
atctcaaaggcctgattggtatggg

SEQ ID NO: 4844149 - DNA, 25 bp, Homo sapien
gatgttctcactctcggccacggtg

SEQ ID NO: 4844150 - DNA, 25 bp, Homo sapien
cgtgaatgatgcatggtaggttcgc

SEQ ID NO: 4844151 - DNA, 25 bp, Homo sapien
gcacctggagggttctagccgtgaa

SEQ ID NO: 4844152 - DNA, 25 bp, Homo sapien
cactgcctcaatgttggatactggg

SEQ ID NO: 4844153 - DNA, 25 bp, Homo sapien
taaaatactaccttccgcacctgga

SEQ ID NO: 4844154 - DNA, 25 bp, Homo sapien
tctgaccagctaaagtatgaatcac

SEQ ID NO: 4844155 - DNA, 25 bp, Homo sapien
tctgaatggcgaagccgggactgct

SEQ ID NO: 4844156 - DNA, 25 bp, Homo sapien
ccatttgagcttcaacatgagtagt

SEQ ID NO: 4844157 - DNA, 25 bp, Homo sapien
tctacctctgtgtaaattaggaagg

SEQ ID NO: 4844158 - DNA, 25 bp, Homo sapien
tcagagacttgtcatggcatttcac

SEQ ID NO: 4844159 - DNA, 25 bp, Homo sapien
tttcacaaataccgcaggtgccttt

SEQ ID NO: 4844160 - DNA, 25 bp, Homo sapien
attcagagacttgtcatggcatttc

SEQ ID NO: 4844161 - DNA, 25 bp, Homo sapien
atttcacaaataccgcaggtgcctt

SEQ ID NO: 4844162 - DNA, 25 bp, Homo sapien
ttcacagaattcacatgccgttctt

SEQ ID NO: 4844163 - DNA, 25 bp, Homo sapien
tcacatgccgttctttgttctgtag

SEQ ID NO: 4844164 - DNA, 25 bp, Homo sapien
tctttgttctgtagattcgcccagt

SEQ ID NO: 4844165 - DNA, 25 bp, Homo sapien
cacttttgaaacaccccaaacactg

SEQ ID NO: 4844166 - DNA, 25 bp, Homo sapien
tagatgagtctgattcgtgccgcgg

SEQ ID NO: 4844167 - DNA, 25 bp, Homo sapien
cattgcacgcgatggtttacaagca

SEQ ID NO: 4844168 - DNA, 25 bp, Homo sapien
tctctctcagagaaagggtcgaagt

SEQ ID NO: 4844169 - DNA, 25 bp, Homo sapien
tactttcacagtcgggttcccagct

SEQ ID NO: 4844170 - DNA, 25 bp, Homo sapien
tgtaaagccagaacatccttgatat

SEQ ID NO: 4844171 - DNA, 25 bp, Homo sapien
agtgagttggctctgtgagaccatc

SEQ ID NO: 4844172 - DNA, 25 bp, Homo sapien
ttataaatgcagatagccacaatga

SEQ ID NO: 4844173 - DNA, 25 bp, Homo sapien
gacacatacagttagcaccacacat

SEQ ID NO: 4844174 - DNA, 25 bp, Homo sapien
taaaagaccctggagttgttggagc

SEQ ID NO: 4844175 - DNA, 25 bp, Homo sapien
tgtctttgacttagcaatctcttga

SEQ ID NO: 4844176 - DNA, 25 bp, Homo sapien
catttggctgaggaggcattgtctt

SEQ ID NO: 4844177 - DNA, 25 bp, Homo sapien
agagctttctccagttgtgtgctaa

SEQ ID NO: 4844178 - DNA, 25 bp, Homo sapien
ggttccctgacctgtggagtccgca

SEQ ID NO: 4844179 - DNA, 25 bp, Homo sapien
cacaaacgagttgccgaagcacagg

SEQ ID NO: 4844180 - DNA, 25 bp, Homo sapien
tgtggagtccgcactgaagtcagtg

SEQ ID NO: 4844181 - DNA, 25 bp, Homo sapien
gggtgtcaaggttccctgacctgtg

SEQ ID NO: 4844182 - DNA, 25 bp, Homo sapien
acatccatccttgacatatgtgctg

SEQ ID NO: 4844183 - DNA, 25 bp, Homo sapien
ccaggctgggttgataacatccatc

SEQ ID NO: 4844184 - DNA, 25 bp, Homo sapien
atccttgacatatgtgctgtccaca

SEQ ID NO: 4844185 - DNA, 25 bp, Homo sapien
gtagccataaacagtgtccaggctg

SEQ ID NO: 4844186 - DNA, 25 bp, Homo sapien
agaggagtgtctggggttgaggtca

SEQ ID NO: 4844187 - DNA, 25 bp, Homo sapien
gtctggggttgaggtcagtacttct

SEQ ID NO: 4844188 - DNA, 25 bp, Homo sapien
cagtgatgtcagcagcagatgcaga

SEQ ID NO: 4844189 - DNA, 25 bp, Homo sapien
tgatgtcagcagcagatgcagagag

SEQ ID NO: 4844190 - DNA, 25 bp, Homo sapien
cagaaggaggaatgtagagcctcac

SEQ ID NO: 4844191 - DNA, 25 bp, Homo sapien
gaaggaggaatgtagagcctcacac

SEQ ID NO: 4844192 - DNA, 25 bp, Homo sapien
agaaggaggaatgtagagcctcaca

SEQ ID NO: 4844193 - DNA, 25 bp, Homo sapien
tcagaaggaggaatgtagagcctca

SEQ ID NO: 4844194 - DNA, 25 bp, Homo sapien
tcttctccttcactaatgcccaaat

SEQ ID NO: 4844195 - DNA, 25 bp, Homo sapien
ctatgccaggtggttatacagtgct

SEQ ID NO: 4844196 - DNA, 25 bp, Homo sapien
gagatccttttcctctagggaacaa

SEQ ID NO: 4844197 - DNA, 25 bp, Homo sapien
tgcactttgagacgtgatttcttct

SEQ ID NO: 4844198 - DNA, 25 bp, Homo sapien
gaatggaaatgcctgtcagccttgc

SEQ ID NO: 4844199 - DNA, 25 bp, Homo sapien
acaatttacctgtctaacgaacctg

SEQ ID NO: 4844200 - DNA, 25 bp, Homo sapien
taaaaaactacatatcagtactagg

SEQ ID NO: 4844201 - DNA, 25 bp, Homo sapien
gcagttgaacttattaacctaacca

SEQ ID NO: 4844202 - DNA, 25 bp, Homo sapien
tactttgtataatgaaaggaacaac

SEQ ID NO: 4844203 - DNA, 25 bp, Homo sapien
aatgtgatatttctccaagccagag

SEQ ID NO: 4844204 - DNA, 25 bp, Homo sapien
tgtgatatttctccaagccagagaa

SEQ ID NO: 4844205 - DNA, 25 bp, Homo sapien
ctgaaatgtgatatttctccaagcc

SEQ ID NO: 4844206 - DNA, 25 bp, Homo sapien
gaaatgtgatatttctccaagccag

SEQ ID NO: 4844207 - DNA, 25 bp, Homo sapien
gacaagtttcattacacccctccga

SEQ ID NO: 4844208 - DNA, 25 bp, Homo sapien
gtcaacagaactccgctccagagga

SEQ ID NO: 4844209 - DNA, 25 bp, Homo sapien
taacactgtggttcacctcgcaaat

SEQ ID NO: 4844210 - DNA, 25 bp, Homo sapien
cagctgcccacaagttggtcccagt

SEQ ID NO: 4844211 - DNA, 25 bp, Homo sapien
acatgctcctacagtcaacaagggc

SEQ ID NO: 4844212 - DNA, 25 bp, Homo sapien
gggccaacctgccattgggtattgc

SEQ ID NO: 4844213 - DNA, 25 bp, Homo sapien
tcaacaagggccaacctgccattgg

SEQ ID NO: 4844214 - DNA, 25 bp, Homo sapien
tcctacagtcaacaagggccaacct

SEQ ID NO: 4844215 - DNA, 25 bp, Homo sapien
ttccttgccctggaggagttacagt

SEQ ID NO: 4844216 - DNA, 25 bp, Homo sapien
aaagtctccattccttgccctggag

SEQ ID NO: 4844217 - DNA, 25 bp, Homo sapien
cattccttgccctggaggagttaca

SEQ ID NO: 4844218 - DNA, 25 bp, Homo sapien
tccattccttgccctggaggagtta

SEQ ID NO: 4844219 - DNA, 25 bp, Homo sapien
tagttctgttaatccatagccagga

SEQ ID NO: 4844220 - DNA, 25 bp, Homo sapien
gcacatgcagtaccaatatggcacc

SEQ ID NO: 4844221 - DNA, 25 bp, Homo sapien
tatgaaatacatacaggatatacgc

SEQ ID NO: 4844222 - DNA, 25 bp, Homo sapien
gatatacgcatatgagcacatgcag

SEQ ID NO: 4844223 - DNA, 25 bp, Homo sapien
cgtgcactgtggcagtagcttttgc

SEQ ID NO: 4844224 - DNA, 25 bp, Homo sapien
gtgcactgtggcagtagcttttgca

SEQ ID NO: 4844225 - DNA, 25 bp, Homo sapien
ctgggaggggagatgctaactggaa

SEQ ID NO: 4844226 - DNA, 25 bp, Homo sapien
agatgctaactggaatgaccgacgt

SEQ ID NO: 4844227 - DNA, 25 bp, Homo sapien
gacgtgggggcatgttcagagccca

SEQ ID NO: 4844228 - DNA, 25 bp, Homo sapien
tgctaactggaatgaccgacgtggg

SEQ ID NO: 4844229 - DNA, 25 bp, Homo sapien
actgactgctgggctcagatactga

SEQ ID NO: 4844230 - DNA, 25 bp, Homo sapien
tcactgactgctgggctcagatact

SEQ ID NO: 4844231 - DNA, 25 bp, Homo sapien
actgctgggctcagatactgaatag

SEQ ID NO: 4844232 - DNA, 25 bp, Homo sapien
tgactgctgggctcagatactgaat

SEQ ID NO: 4844233 - DNA, 25 bp, Homo sapien
cttgaagccagttcagtgcatcaga

SEQ ID NO: 4844234 - DNA, 25 bp, Homo sapien
gaagccagttcagtgcatcagatgg

SEQ ID NO: 4844235 - DNA, 25 bp, Homo sapien
gccagttcagtgcatcagatggcgc

SEQ ID NO: 4844236 - DNA, 25 bp, Homo sapien
cctgcctttttgtctggggctggct

SEQ ID NO: 4844237 - DNA, 25 bp, Homo sapien
attctttttcccgatgaggacacag

SEQ ID NO: 4844238 - DNA, 25 bp, Homo sapien
ctgtgatctctgggccacgtaaatt

SEQ ID NO: 4844239 - DNA, 25 bp, Homo sapien
caatctcacacccttcttttcatca

SEQ ID NO: 4844240 - DNA, 25 bp, Homo sapien
taggtatcctgtctaacaatctcac

SEQ ID NO: 4844241 - DNA, 25 bp, Homo sapien
tttatcatcacgagccattgggtct

SEQ ID NO: 4844242 - DNA, 25 bp, Homo sapien
tggaaaaaccttacatcctggagga

SEQ ID NO: 4844243 - DNA, 25 bp, Homo sapien
tctgagcacgtagggaaaatgtcgg

SEQ ID NO: 4844244 - DNA, 25 bp, Homo sapien
ggctgcatacttggtggctggatca

SEQ ID NO: 4844245 - DNA, 25 bp, Homo sapien
aaatccaaaccataacaagtgtata

SEQ ID NO: 4844246 - DNA, 25 bp, Homo sapien
caactttggagattacgattcgaca

SEQ ID NO: 4844247 - DNA, 25 bp, Homo sapien
cataacaagtgtatacctaaagctc

SEQ ID NO: 4844248 - DNA, 25 bp, Homo sapien
ccttctccaactttggagattacga

SEQ ID NO: 4844249 - DNA, 25 bp, Homo sapien
ggcagagctttcatgatcccactac

SEQ ID NO: 4844250 - DNA, 25 bp, Homo sapien
gactaaacagtgtcctgcggtggtg

SEQ ID NO: 4844251 - DNA, 25 bp, Homo sapien
gagaaatccaaggtgctgcatctgg

SEQ ID NO: 4844252 - DNA, 25 bp, Homo sapien
gactgagtgtgctaatgtgccagct

SEQ ID NO: 4844253 - DNA, 25 bp, Homo sapien
cagaagagggcggtagagcccacac

SEQ ID NO: 4844254 - DNA, 25 bp, Homo sapien
tagtagattggatcggcctggacca

SEQ ID NO: 4844255 - DNA, 25 bp, Homo sapien
caagtaaagaccaattcccagtatt

SEQ ID NO: 4844256 - DNA, 25 bp, Homo sapien
cacactaaattgctcagacaccgaa

SEQ ID NO: 4844257 - DNA, 25 bp, Homo sapien
gaaggaccgtaggatatgtttctgc

SEQ ID NO: 4844258 - DNA, 25 bp, Homo sapien
gctcctaattggttctgtgcctctg

SEQ ID NO: 4844259 - DNA, 25 bp, Homo sapien
caacgtggtgttgaaaaccgcagaa

SEQ ID NO: 4844260 - DNA, 25 bp, Homo sapien
gagcactgctcatgaactcaacgtg

SEQ ID NO: 4844261 - DNA, 25 bp, Homo sapien
aaagtctgaatctgaccattgccag

SEQ ID NO: 4844262 - DNA, 25 bp, Homo sapien
gcagcactgtctcaaagtctgaatc

SEQ ID NO: 4844263 - DNA, 25 bp, Homo sapien
tatgatgtgttcatcagagaagtca

SEQ ID NO: 4844264 - DNA, 25 bp, Homo sapien
cattgccagaaaaggccttaattct

SEQ ID NO: 4844265 - DNA, 25 bp, Homo sapien
gggccagacctgcttgcgagcaaga

SEQ ID NO: 4844266 - DNA, 25 bp, Homo sapien
agcctcgtgacttcgcgccgctggg

SEQ ID NO: 4844267 - DNA, 25 bp, Homo sapien
agaggagctgaccagcgtgctggga

SEQ ID NO: 4844268 - DNA, 25 bp, Homo sapien
gcgcacgcgcagatataccaaggcg

SEQ ID NO: 4844269 - DNA, 25 bp, Homo sapien
tgggcacgggtagctcgggtgcggc

SEQ ID NO: 4844270 - DNA, 25 bp, Homo sapien
aggtagttccgactgactgccagcg

SEQ ID NO: 4844271 - DNA, 25 bp, Homo sapien
tcgggtgcggccccgttgacaatcc

SEQ ID NO: 4844272 - DNA, 25 bp, Homo sapien
caccgccggcccaccggtgggcacg

SEQ ID NO: 4844273 - DNA, 25 bp, Homo sapien
atgttacgcagaagtgacaaaagtc

SEQ ID NO: 4844274 - DNA, 25 bp, Homo sapien
gaggacgcagcatttagctaagtag

SEQ ID NO: 4844275 - DNA, 25 bp, Homo sapien
aactttatagaggacgcagcattta

SEQ ID NO: 4844276 - DNA, 25 bp, Homo sapien
gatgaggaaagggaatccttaatgt

SEQ ID NO: 4844277 - DNA, 25 bp, Homo sapien
agatcactagtggaccattgactcc

SEQ ID NO: 4844278 - DNA, 25 bp, Homo sapien
gatcactagtggaccattgactcca

SEQ ID NO: 4844279 - DNA, 25 bp, Homo sapien
tcactagtggaccattgactccaga

SEQ ID NO: 4844280 - DNA, 25 bp, Homo sapien
atcactagtggaccattgactccag

SEQ ID NO: 4844281 - DNA, 25 bp, Homo sapien
tggacaatttcagcatacctgggaa

SEQ ID NO: 4844282 - DNA, 25 bp, Homo sapien
tgaactactgccttggaaccactaa

SEQ ID NO: 4844283 - DNA, 25 bp, Homo sapien
ccacttctctttgtgccatccggta

SEQ ID NO: 4844284 - DNA, 25 bp, Homo sapien
catccggtaaggtcaaatggacaat

SEQ ID NO: 4844285 - DNA, 25 bp, Homo sapien
gacaccggtgttcggagaatatccc

SEQ ID NO: 4844286 - DNA, 25 bp, Homo sapien
cctcagacaccggtgttcggagaat

SEQ ID NO: 4844287 - DNA, 25 bp, Homo sapien
catatcctcagacaccggtgttcgg

SEQ ID NO: 4844288 - DNA, 25 bp, Homo sapien
accggtgttcggagaatatccccag

SEQ ID NO: 4844289 - DNA, 25 bp, Homo sapien
ttttcccgatccattgaatacccga

SEQ ID NO: 4844290 - DNA, 25 bp, Homo sapien
tttcccgatccattgaatacccgac

SEQ ID NO: 4844291 - DNA, 25 bp, Homo sapien
atcaaggaagtcttcggccagtaca

SEQ ID NO: 4844292 - DNA, 25 bp, Homo sapien
gtcttcggccagtacaacaggacct

SEQ ID NO: 4844293 - DNA, 25 bp, Homo sapien
gcaatactgttcatcccatcgatgg

SEQ ID NO: 4844294 - DNA, 25 bp, Homo sapien
ccatcgatggccgaaatgccagtct

SEQ ID NO: 4844295 - DNA, 25 bp, Homo sapien
ttcctctgggtagattcgacattga

SEQ ID NO: 4844296 - DNA, 25 bp, Homo sapien
cgacattgagggttgattggctgac

SEQ ID NO: 4844297 - DNA, 25 bp, Homo sapien
acttcatagcaaaccgatcccagtc

SEQ ID NO: 4844298 - DNA, 25 bp, Homo sapien
tattcggtttctcagtaacagtgat

SEQ ID NO: 4844299 - DNA, 25 bp, Homo sapien
cctttattcggtttctcagtaacag

SEQ ID NO: 4844300 - DNA, 25 bp, Homo sapien
ttcttgtctgctaaacttcatagca

SEQ ID NO: 4844301 - DNA, 25 bp, Homo sapien
tggatttctttaccaaaccagcctg

SEQ ID NO: 4844302 - DNA, 25 bp, Homo sapien
tctttaccaaaccagcctggcgaca

SEQ ID NO: 4844303 - DNA, 25 bp, Homo sapien
agcctggcgacagatctgagctgca

SEQ ID NO: 4844304 - DNA, 25 bp, Homo sapien
gatttctttaccaaaccagcctggc

SEQ ID NO: 4844305 - DNA, 25 bp, Homo sapien
gtcagatttgaagaaccgggcagtt

SEQ ID NO: 4844306 - DNA, 25 bp, Homo sapien
caggcgaggagtgataattcgctca

SEQ ID NO: 4844307 - DNA, 25 bp, Homo sapien
cattggtacgccagaaattcagctg

SEQ ID NO: 4844308 - DNA, 25 bp, Homo sapien
gcttcagcataagaactcatgtctg

SEQ ID NO: 4844309 - DNA, 25 bp, Homo sapien
cagctgtggttagagccaggcgagg

SEQ ID NO: 4844310 - DNA, 25 bp, Homo sapien
catgtaacctggaaaacctcgtcga

SEQ ID NO: 4844311 - DNA, 25 bp, Homo sapien
tcgcccagcgcgttcatatatcgtg

SEQ ID NO: 4844312 - DNA, 25 bp, Homo sapien
ttgagtaatcgagccgtttctccct

SEQ ID NO: 4844313 - DNA, 25 bp, Homo sapien
cattaggcatggttagaatagggat

SEQ ID NO: 4844314 - DNA, 25 bp, Homo sapien
taatgtagccagtcaagtctgggat

SEQ ID NO: 4844315 - DNA, 25 bp, Homo sapien
ctgtaatgtagccagtcaagtctgg

SEQ ID NO: 4844316 - DNA, 25 bp, Homo sapien
tgtaatgtagccagtcaagtctggg

SEQ ID NO: 4844317 - DNA, 25 bp, Homo sapien
atgtagccagtcaagtctgggatgg

SEQ ID NO: 4844318 - DNA, 25 bp, Homo sapien
ggatgagcaggtctgcaagcttccc

SEQ ID NO: 4844319 - DNA, 25 bp, Homo sapien
tcactaaagaataacggatgagcag

SEQ ID NO: 4844320 - DNA, 25 bp, Homo sapien
ttcctaagagcaaaatccaagtcac

SEQ ID NO: 4844321 - DNA, 25 bp, Homo sapien
gattcttaattctggcgctctgccg

SEQ ID NO: 4844322 - DNA, 25 bp, Homo sapien
catttgtctcctagatgaatcctac

SEQ ID NO: 4844323 - DNA, 25 bp, Homo sapien
tatagcatagcatttctttcgagaa

SEQ ID NO: 4844324 - DNA, 25 bp, Homo sapien
tcaaaatggtcttctgaactgactc

SEQ ID NO: 4844325 - DNA, 25 bp, Homo sapien
cttaaatcaaagacaaccgctgcat

SEQ ID NO: 4844326 - DNA, 25 bp, Homo sapien
taaccgtgatagtgagggcagcaca

SEQ ID NO: 4844327 - DNA, 25 bp, Homo sapien
agatacatcggcatgatccttcctg

SEQ ID NO: 4844328 - DNA, 25 bp, Homo sapien
tagctggttagatacatcggcatga

SEQ ID NO: 4844329 - DNA, 25 bp, Homo sapien
gcagacttcattaaccgtgatagtg

SEQ ID NO: 4844330 - DNA, 25 bp, Homo sapien
ttcatggcttgcacatcctttccaa

SEQ ID NO: 4844331 - DNA, 25 bp, Homo sapien
tttcatggcttgcacatcctttcca

SEQ ID NO: 4844332 - DNA, 25 bp, Homo sapien
agctttcatggcttgcacatccttt

SEQ ID NO: 4844333 - DNA, 25 bp, Homo sapien
gctttcatggcttgcacatcctttc

SEQ ID NO: 4844334 - DNA, 25 bp, Homo sapien
tggcaatgaagttgtaccgcagagg

SEQ ID NO: 4844335 - DNA, 25 bp, Homo sapien
ctaagaagttagcagcaaggagaac

SEQ ID NO: 4844336 - DNA, 25 bp, Homo sapien
atgaatcaggaaagtcccaagcccc

SEQ ID NO: 4844337 - DNA, 25 bp, Homo sapien
caagccccaaatgtcaaagcagatc

SEQ ID NO: 4844338 - DNA, 25 bp, Homo sapien
taaaggtccacacatcatagagccc

SEQ ID NO: 4844339 - DNA, 25 bp, Homo sapien
caacaacggtgttcctaaggcagct

SEQ ID NO: 4844340 - DNA, 25 bp, Homo sapien
tactgagcttgagttaactgggaca

SEQ ID NO: 4844341 - DNA, 25 bp, Homo sapien
ggttctgagtacactgagcctgagg

SEQ ID NO: 4844342 - DNA, 25 bp, Homo sapien
taattgatcaatggacaataagcaa

SEQ ID NO: 4844343 - DNA, 25 bp, Homo sapien
taaataattgatcaatggacaataa

SEQ ID NO: 4844344 - DNA, 25 bp, Homo sapien
attgatcaatggacaataagcaaag

SEQ ID NO: 4844345 - DNA, 25 bp, Homo sapien
tgatcaatggacaataagcaaagaa

SEQ ID NO: 4844346 - DNA, 25 bp, Homo sapien
aagattcggagtagctgccagccaa

SEQ ID NO: 4844347 - DNA, 25 bp, Homo sapien
aagacagtgcgattttcgtaaggac

SEQ ID NO: 4844348 - DNA, 25 bp, Homo sapien
agtctcaaagacagtgcgattttcg

SEQ ID NO: 4844349 - DNA, 25 bp, Homo sapien
gagtagctgccagccaatgtccaaa

SEQ ID NO: 4844350 - DNA, 25 bp, Homo sapien
gcagagtctcgagggtaaaattcgc

SEQ ID NO: 4844351 - DNA, 25 bp, Homo sapien
ctttgcagagtctcgagggtaaaat

SEQ ID NO: 4844352 - DNA, 25 bp, Homo sapien
gagtctcgagggtaaaattcgctga

SEQ ID NO: 4844353 - DNA, 25 bp, Homo sapien
tctcgagggtaaaattcgctgaggg

SEQ ID NO: 4844354 - DNA, 25 bp, Homo sapien
cacaaaggtgggaaccgagagtgca

SEQ ID NO: 4844355 - DNA, 25 bp, Homo sapien
cagaaccagtatttcacaagagcgc

SEQ ID NO: 4844356 - DNA, 25 bp, Homo sapien
caagagcgcggagcaatgcagaagc

SEQ ID NO: 4844357 - DNA, 25 bp, Homo sapien
cagggtaacatggtaaactccaaca

SEQ ID NO: 4844358 - DNA, 25 bp, Homo sapien
gcttggaaacccagtaaggatcacc

SEQ ID NO: 4844359 - DNA, 25 bp, Homo sapien
caacaggacgcatggcagaactgca

SEQ ID NO: 4844360 - DNA, 25 bp, Homo sapien
gatcttgcccctaatgtagagacca

SEQ ID NO: 4844361 - DNA, 25 bp, Homo sapien
catagaagatcgctcagggctcacg

SEQ ID NO: 4844362 - DNA, 25 bp, Homo sapien
tattttcattttatatccagatgtc

SEQ ID NO: 4844363 - DNA, 25 bp, Homo sapien
tttcattttatatccagatgtcaca

SEQ ID NO: 4844364 - DNA, 25 bp, Homo sapien
ttttcattttatatccagatgtcac

SEQ ID NO: 4844365 - DNA, 25 bp, Homo sapien
tcattttatatccagatgtcacatt

SEQ ID NO: 4844366 - DNA, 25 bp, Homo sapien
tgtgacccattagtgactggaagtg

SEQ ID NO: 4844367 - DNA, 25 bp, Homo sapien
ctagctcaggatacaaagctctgtg

SEQ ID NO: 4844368 - DNA, 25 bp, Homo sapien
gacgagttttgccactagctcagga

SEQ ID NO: 4844369 - DNA, 25 bp, Homo sapien
gttttctggacgagttttgccacta

SEQ ID NO: 4844370 - DNA, 25 bp, Homo sapien
cagagtatattgaggtttccagcaa

SEQ ID NO: 4844371 - DNA, 25 bp, Homo sapien
aacctaagcttgaatcagagtccca

SEQ ID NO: 4844372 - DNA, 25 bp, Homo sapien
tccagcttcccgcttgggagaggcc

SEQ ID NO: 4844373 - DNA, 25 bp, Homo sapien
aaggcccatggtccgtgctcgcttc

SEQ ID NO: 4844374 - DNA, 25 bp, Homo sapien
cacttgagtgcgactgaatagtaga

SEQ ID NO: 4844375 - DNA, 25 bp, Homo sapien
gaacaatgaacatctagtaggtaaa

SEQ ID NO: 4844376 - DNA, 25 bp, Homo sapien
taaatcactaatgaagcttccttgg

SEQ ID NO: 4844377 - DNA, 25 bp, Homo sapien
gcttccttggtgctagggccacact

SEQ ID NO: 4844378 - DNA, 25 bp, Homo sapien
ggttgcaggttgcagtcagtcaaga

SEQ ID NO: 4844379 - DNA, 25 bp, Homo sapien
ttgcaggttgcagtcagtcaagatc

SEQ ID NO: 4844380 - DNA, 25 bp, Homo sapien
gcagaggttgcaggttgcagtcagt

SEQ ID NO: 4844381 - DNA, 25 bp, Homo sapien
gaggttgcaggttgcagtcagtcaa

SEQ ID NO: 4844382 - DNA, 25 bp, Homo sapien
tttcagctcttattccacccctgcc

SEQ ID NO: 4844383 - DNA, 25 bp, Homo sapien
attcctcatcgtctcacaggattca

SEQ ID NO: 4844384 - DNA, 25 bp, Homo sapien
ttcagcctggtctcattcctcatcg

SEQ ID NO: 4844385 - DNA, 25 bp, Homo sapien
gaggagggctactgcatctcacact

SEQ ID NO: 4844386 - DNA, 25 bp, Homo sapien
tttaacaagagtgaacacccagtgc

SEQ ID NO: 4844387 - DNA, 25 bp, Homo sapien
cccagtgctagagagggtgcaatga

SEQ ID NO: 4844388 - DNA, 25 bp, Homo sapien
tcttaaatatcccagaacacggacg

SEQ ID NO: 4844389 - DNA, 25 bp, Homo sapien
gcagtttcccatgcaattaagaggc

SEQ ID NO: 4844390 - DNA, 25 bp, Homo sapien
cacctctagaaaaagtgatcaggag

SEQ ID NO: 4844391 - DNA, 25 bp, Homo sapien
tttgatttggtgatacacaggaggg

SEQ ID NO: 4844392 - DNA, 25 bp, Homo sapien
gtcctgccttgggtgaaatgtccat

SEQ ID NO: 4844393 - DNA, 25 bp, Homo sapien
agtggtgagtttagcagtgtcctgc

SEQ ID NO: 4844394 - DNA, 25 bp, Homo sapien
gaggcgatgagaccaaacagttccc

SEQ ID NO: 4844395 - DNA, 25 bp, Homo sapien
caatctgaggacctttctgcacagc

SEQ ID NO: 4844396 - DNA, 25 bp, Homo sapien
tagaacatagatttcgtctcggatc

SEQ ID NO: 4844397 - DNA, 25 bp, Homo sapien
catgttaggctaccacaatctgagg

SEQ ID NO: 4844398 - DNA, 25 bp, Homo sapien
gacatagtcattgaggcatgggcct

SEQ ID NO: 4844399 - DNA, 25 bp, Homo sapien
tactttggatgtctacaatcacccg

SEQ ID NO: 4844400 - DNA, 25 bp, Homo sapien
tctggttctgttgcaagcgctagag

SEQ ID NO: 4844401 - DNA, 25 bp, Homo sapien
cagagataatccctgctcagattgc

SEQ ID NO: 4844402 - DNA, 25 bp, Homo sapien
ttctaattttaatgtatgtgctgct

SEQ ID NO: 4844403 - DNA, 25 bp, Homo sapien
atcattctaattttaatgtatgtgc

SEQ ID NO: 4844404 - DNA, 25 bp, Homo sapien
ctgtatcattctaattttaatgtat

SEQ ID NO: 4844405 - DNA, 25 bp, Homo sapien
attctaattttaatgtatgtgctgc

SEQ ID NO: 4844406 - DNA, 25 bp, Homo sapien
cctttgttttgagatcatgagatca

SEQ ID NO: 4844407 - DNA, 25 bp, Homo sapien
ccctttgttttgagatcatgagatc

SEQ ID NO: 4844408 - DNA, 25 bp, Homo sapien
gcactcgctccctgatgggacaggg

SEQ ID NO: 4844409 - DNA, 25 bp, Homo sapien
ggcactcgctccctgatgggacagg

SEQ ID NO: 4844410 - DNA, 25 bp, Homo sapien
tctggaataactggtgacacaatct

SEQ ID NO: 4844411 - DNA, 25 bp, Homo sapien
caatctgtaggcattgtcagtgacc

SEQ ID NO: 4844412 - DNA, 25 bp, Homo sapien
cgttttttcgggcactgagctgaga

SEQ ID NO: 4844413 - DNA, 25 bp, Homo sapien
ctctctcgggcatgagcagctgctg

SEQ ID NO: 4844414 - DNA, 25 bp, Homo sapien
gataaagatgcttagcgccaggctc

SEQ ID NO: 4844415 - DNA, 25 bp, Homo sapien
ttggtgataaagatgcttagcgcca

SEQ ID NO: 4844416 - DNA, 25 bp, Homo sapien
tttggtggttttgataatgatcagc

SEQ ID NO: 4844417 - DNA, 25 bp, Homo sapien
ttttgataatgatcagcagtgacct

SEQ ID NO: 4844418 - DNA, 25 bp, Homo sapien
gaagagggctagagcggaggtggct

SEQ ID NO: 4844419 - DNA, 25 bp, Homo sapien
gagggaagagggctagagcggaggt

SEQ ID NO: 4844420 - DNA, 25 bp, Homo sapien
gggaagagggctagagcggaggtgg

SEQ ID NO: 4844421 - DNA, 25 bp, Homo sapien
tgagggaagagggctagagcggagg

SEQ ID NO: 4844422 - DNA, 25 bp, Homo sapien
gacactcgccgccaggaagcaaact

SEQ ID NO: 4844423 - DNA, 25 bp, Homo sapien
ccaggaagcaaactgtcggggagaa

SEQ ID NO: 4844424 - DNA, 25 bp, Homo sapien
gtgtagacatttgtggacactcgcc

SEQ ID NO: 4844425 - DNA, 25 bp, Homo sapien
cccacagccaactgtgtagacattt

SEQ ID NO: 4844426 - DNA, 25 bp, Homo sapien
ccagaagtgcctgtgatgcggatga

SEQ ID NO: 4844427 - DNA, 25 bp, Homo sapien
ggtgcagacctgtctgaggaaagct

SEQ ID NO: 4844428 - DNA, 25 bp, Homo sapien
gtctgaggaaagcttttctggctac

SEQ ID NO: 4844429 - DNA, 25 bp, Homo sapien
tgaggactcagggcgcagacctgtc

SEQ ID NO: 4844430 - DNA, 25 bp, Homo sapien
gcacaagctcttggtctgctgctgg

SEQ ID NO: 4844431 - DNA, 25 bp, Homo sapien
gtgcacagtggatagtcgcagcccc

SEQ ID NO: 4844432 - DNA, 25 bp, Homo sapien
caaggcacaagctcttggtctgctg

SEQ ID NO: 4844433 - DNA, 25 bp, Homo sapien
cacagtggatagtcgcagccccagg

SEQ ID NO: 4844434 - DNA, 25 bp, Homo sapien
ctggagaatcagctggccacgttag

SEQ ID NO: 4844435 - DNA, 25 bp, Homo sapien
ggagaatcagctggccacgttagca

SEQ ID NO: 4844436 - DNA, 25 bp, Homo sapien
gagaatcagctggccacgttagcat

SEQ ID NO: 4844437 - DNA, 25 bp, Homo sapien
tggagaatcagctggccacgttagc

SEQ ID NO: 4844438 - DNA, 25 bp, Homo sapien
cacgtacagaggttaagtccttcat

SEQ ID NO: 4844439 - DNA, 25 bp, Homo sapien
cagcacgtacagaggttaagtcctt

SEQ ID NO: 4844440 - DNA, 25 bp, Homo sapien
gcacgtacagaggttaagtccttca

SEQ ID NO: 4844441 - DNA, 25 bp, Homo sapien
ggcagcacgtacagaggttaagtcc

SEQ ID NO: 4844442 - DNA, 25 bp, Homo sapien
tctgcaaacttgaatctgatgggag

SEQ ID NO: 4844443 - DNA, 25 bp, Homo sapien
gggccagagcgcattccataaaaca

SEQ ID NO: 4844444 - DNA, 25 bp, Homo sapien
aacagtccggtttacacctccagtg

SEQ ID NO: 4844445 - DNA, 25 bp, Homo sapien
cctgcccaaaagcttgagtggctct

SEQ ID NO: 4844446 - DNA, 25 bp, Homo sapien
tatttttgacgtcactttttggcca

SEQ ID NO: 4844447 - DNA, 25 bp, Homo sapien
tttgacgtcactttttggccatgta

SEQ ID NO: 4844448 - DNA, 25 bp, Homo sapien
tgacgtcactttttggccatgtaaa

SEQ ID NO: 4844449 - DNA, 25 bp, Homo sapien
tttttgacgtcactttttggccatg

SEQ ID NO: 4844450 - DNA, 25 bp, Homo sapien
gtgcaaggtggcctttgtgctgcgc

SEQ ID NO: 4844451 - DNA, 25 bp, Homo sapien
aggtggcctttgtgctgcgcctgca

SEQ ID NO: 4844452 - DNA, 25 bp, Homo sapien
gcaaggtggcctttgtgctgcgcct

SEQ ID NO: 4844453 - DNA, 25 bp, Homo sapien
aaggtggcctttgtgctgcgcctgc

SEQ ID NO: 4844454 - DNA, 25 bp, Homo sapien
cctgggccatctcttaggtgagaca

SEQ ID NO: 4844455 - DNA, 25 bp, Homo sapien
agaggcactcagtgagcctcctgtg

SEQ ID NO: 4844456 - DNA, 25 bp, Homo sapien
tcaagccatcatgcggtgggtgctg

SEQ ID NO: 4844457 - DNA, 25 bp, Homo sapien
cagttgcccgaaactaagccaggcc

SEQ ID NO: 4844458 - DNA, 25 bp, Homo sapien
tctgcccctggacctgggaacgact

SEQ ID NO: 4844459 - DNA, 25 bp, Homo sapien
ccctggacctgggaacgactggact

SEQ ID NO: 4844460 - DNA, 25 bp, Homo sapien
cctgggaacgactggactgtcacgg

SEQ ID NO: 4844461 - DNA, 25 bp, Homo sapien
ggacctgggaacgactggactgtca

SEQ ID NO: 4844462 - DNA, 25 bp, Homo sapien
tgggcacgcctgctggccgacccac

SEQ ID NO: 4844463 - DNA, 25 bp, Homo sapien
ttggaccatgccagattctgcctct

SEQ ID NO: 4844464 - DNA, 25 bp, Homo sapien
ccactgacccactcggatggaccaa

SEQ ID NO: 4844465 - DNA, 25 bp, Homo sapien
actcggatggaccaacctgctctgt

SEQ ID NO: 4844466 - DNA, 25 bp, Homo sapien
cctgccctgtccaaaagcgccctca

SEQ ID NO: 4844467 - DNA, 25 bp, Homo sapien
cttcctgtgggtgttctttcctgcc

SEQ ID NO: 4844468 - DNA, 25 bp, Homo sapien
ccatttctgcctcgctcaccgctgg

SEQ ID NO: 4844469 - DNA, 25 bp, Homo sapien
aacttgcgagtccaaggccagtccc

SEQ ID NO: 4844470 - DNA, 25 bp, Homo sapien
ttcccacatgcctgcgcctgctgcc

SEQ ID NO: 4844471 - DNA, 25 bp, Homo sapien
gagcgtctgggaacttgcgagtcca

SEQ ID NO: 4844472 - DNA, 25 bp, Homo sapien
catatatgtgatctgggcattttcc

SEQ ID NO: 4844473 - DNA, 25 bp, Homo sapien
cagaagagcccatatcactaagatg

SEQ ID NO: 4844474 - DNA, 25 bp, Homo sapien
ggccggcggctactctggaatgttt

SEQ ID NO: 4844475 - DNA, 25 bp, Homo sapien
tctgcctacagccaggtttagcggc

SEQ ID NO: 4844476 - DNA, 25 bp, Homo sapien
tgaaaccaccgtgaaccagagggtg

SEQ ID NO: 4844477 - DNA, 25 bp, Homo sapien
gggagaatccaagggttgagagcca

SEQ ID NO: 4844478 - DNA, 25 bp, Homo sapien
gtgacctttgacctcggtgaccact

SEQ ID NO: 4844479 - DNA, 25 bp, Homo sapien
ttaagccatagaccctgaggccctg

SEQ ID NO: 4844480 - DNA, 25 bp, Homo sapien
actttggcctttgttcgaaatagat

SEQ ID NO: 4844481 - DNA, 25 bp, Homo sapien
tctgctttggttaagggctccctaa

SEQ ID NO: 4844482 - DNA, 25 bp, Homo sapien
gcctttgttcgaaatagatatcctc

SEQ ID NO: 4844483 - DNA, 25 bp, Homo sapien
ggccacagcaagtacagcggctccc

SEQ ID NO: 4844484 - DNA, 25 bp, Homo sapien
actgaaatgtagctggattgtcaac

SEQ ID NO: 4844485 - DNA, 25 bp, Homo sapien
gggatatgtgagctttctggagtcc

SEQ ID NO: 4844486 - DNA, 25 bp, Homo sapien
tagctggattgtcaacgtaggatcc

SEQ ID NO: 4844487 - DNA, 25 bp, Homo sapien
tgagctttctggagtcccactgaaa

SEQ ID NO: 4844488 - DNA, 25 bp, Homo sapien
gtctggtgactgacaaggttgttat

SEQ ID NO: 4844489 - DNA, 25 bp, Homo sapien
cagtgcatgacaatcaccaaccttt

SEQ ID NO: 4844490 - DNA, 25 bp, Homo sapien
aaaaatgtgcccagtccggtggctc

SEQ ID NO: 4844491 - DNA, 25 bp, Homo sapien
ccccttcttaattggatatctgtct

SEQ ID NO: 4844492 - DNA, 25 bp, Homo sapien
gccccattgggttacgctgtccagc

SEQ ID NO: 4844493 - DNA, 25 bp, Homo sapien
gggtctaacactcaggcccacagac

SEQ ID NO: 4844494 - DNA, 25 bp, Homo sapien
aggctcggacccaatgctcaggcca

SEQ ID NO: 4844495 - DNA, 25 bp, Homo sapien
gtccagctgtaatcttatctccaca

SEQ ID NO: 4844496 - DNA, 25 bp, Homo sapien
tacagtcactgcagtaagctcctac

SEQ ID NO: 4844497 - DNA, 25 bp, Homo sapien
gcagttatgatacagtcactgcagt

SEQ ID NO: 4844498 - DNA, 25 bp, Homo sapien
tagttaataacagttcaccccggca

SEQ ID NO: 4844499 - DNA, 25 bp, Homo sapien
accccggcacgtgacatctgcaaaa

SEQ ID NO: 4844500 - DNA, 25 bp, Homo sapien
ggcagttccacattcaggcggtgct

SEQ ID NO: 4844501 - DNA, 25 bp, Homo sapien
gggaaggcagttccacattcaggcg

SEQ ID NO: 4844502 - DNA, 25 bp, Homo sapien
tcttgaaataacattagcgcaatcg

SEQ ID NO: 4844503 - DNA, 25 bp, Homo sapien
aatcgactccccagctattaaaggg

SEQ ID NO: 4844504 - DNA, 25 bp, Homo sapien
gctgagtagctcagggagaacaact

SEQ ID NO: 4844505 - DNA, 25 bp, Homo sapien
aaatactgagtagacaccgtctttg

SEQ ID NO: 4844506 - DNA, 25 bp, Homo sapien
tcaaccattcctataaccattacgt

SEQ ID NO: 4844507 - DNA, 25 bp, Homo sapien
tagacaccgtctttgctgagtagct

SEQ ID NO: 4844508 - DNA, 25 bp, Homo sapien
aacagccagggcaagctcatagacc

SEQ ID NO: 4844509 - DNA, 25 bp, Homo sapien
gtcaacagccagggcaagctcatag

SEQ ID NO: 4844510 - DNA, 25 bp, Homo sapien
caacagccagggcaagctcatagac

SEQ ID NO: 4844511 - DNA, 25 bp, Homo sapien
cagccagggcaagctcatagaccct

SEQ ID NO: 4844512 - DNA, 25 bp, Homo sapien
tgggagcattgctgtaacctccctg

SEQ ID NO: 4844513 - DNA, 25 bp, Homo sapien
gcattgctgtaacctccctgccctg

SEQ ID NO: 4844514 - DNA, 25 bp, Homo sapien
ggagcattgctgtaacctccctgcc

SEQ ID NO: 4844515 - DNA, 25 bp, Homo sapien
ctgggagcattgctgtaacctccct

SEQ ID NO: 4844516 - DNA, 25 bp, Homo sapien
cagacccacagtcgggattccccat

SEQ ID NO: 4844517 - DNA, 25 bp, Homo sapien
tgggcagacccacagtcgggattcc

SEQ ID NO: 4844518 - DNA, 25 bp, Homo sapien
ccacagtcgggattccccatcccca

SEQ ID NO: 4844519 - DNA, 25 bp, Homo sapien
cagcaaaggagtggaggaccccacc

SEQ ID NO: 4844520 - DNA, 25 bp, Homo sapien
ttggggtgagttctagaggagcagg

SEQ ID NO: 4844521 - DNA, 25 bp, Homo sapien
tggggtgagttctagaggagcaggg

SEQ ID NO: 4844522 - DNA, 25 bp, Homo sapien
gagggttggaagacgcaggggaggc

SEQ ID NO: 4844523 - DNA, 25 bp, Homo sapien
agggttggaagacgcaggggaggca

SEQ ID NO: 4844524 - DNA, 25 bp, Homo sapien
tccgttggttagatcggtgacttcc

SEQ ID NO: 4844525 - DNA, 25 bp, Homo sapien
ttttgtccgttggttagatcggtga

SEQ ID NO: 4844526 - DNA, 25 bp, Homo sapien
tggttagatcggtgacttccaagca

SEQ ID NO: 4844527 - DNA, 25 bp, Homo sapien
gatcggtgacttccaagcactttaa

SEQ ID NO: 4844528 - DNA, 25 bp, Homo sapien
tagcctcagtcgcattggcataaaa

SEQ ID NO: 4844529 - DNA, 25 bp, Homo sapien
cagcctggaattagcctcagtcgca

SEQ ID NO: 4844530 - DNA, 25 bp, Homo sapien
actcaggcagcctggaattagcctc

SEQ ID NO: 4844531 - DNA, 25 bp, Homo sapien
tggaattagcctcagtcgcattggc

SEQ ID NO: 4844532 - DNA, 25 bp, Homo sapien
tgagacactgagttcaaagggctgc

SEQ ID NO: 4844533 - DNA, 25 bp, Homo sapien
gggattgagacactgagttcaaagg

SEQ ID NO: 4844534 - DNA, 25 bp, Homo sapien
ctgtgggattgagacactgagttca

SEQ ID NO: 4844535 - DNA, 25 bp, Homo sapien
gacactgagttcaaagggctgccct

SEQ ID NO: 4844536 - DNA, 25 bp, Homo sapien
tatcaaagagctgcctcgaaccagg

SEQ ID NO: 4844537 - DNA, 25 bp, Homo sapien
gaaccaggtagccatgggacttccc

SEQ ID NO: 4844538 - DNA, 25 bp, Homo sapien
gtctggttctaggaccaggagtgct

SEQ ID NO: 4844539 - DNA, 25 bp, Homo sapien
cgaaattacgcagtggtgggaacct

SEQ ID NO: 4844540 - DNA, 25 bp, Homo sapien
agatgagatgacatccggcgtgttc

SEQ ID NO: 4844541 - DNA, 25 bp, Homo sapien
gatgagatgacatccggcgtgttca

SEQ ID NO: 4844542 - DNA, 25 bp, Homo sapien
atgagatgacatccggcgtgttcag

SEQ ID NO: 4844543 - DNA, 25 bp, Homo sapien
ttccctgttaatggtgtggcccaga

SEQ ID NO: 4844544 - DNA, 25 bp, Homo sapien
tgttaaaacctgcatcgtcaaaagt

SEQ ID NO: 4844545 - DNA, 25 bp, Homo sapien
tccaggagagctccgtattgccttc

SEQ ID NO: 4844546 - DNA, 25 bp, Homo sapien
gacacacagctattagggctcagat

SEQ ID NO: 4844547 - DNA, 25 bp, Homo sapien
tacacgtgggagaggacatacatcc

SEQ ID NO: 4844548 - DNA, 25 bp, Homo sapien
tacgagtcctcctacgtgaaacagg

SEQ ID NO: 4844549 - DNA, 25 bp, Homo sapien
gaaatagttattctgcctaaacggc

SEQ ID NO: 4844550 - DNA, 25 bp, Homo sapien
tacatccggctgagtctcacatagg

SEQ ID NO: 4844551 - DNA, 25 bp, Homo sapien
gaagcaggtggagagagcaggtaag

SEQ ID NO: 4844552 - DNA, 25 bp, Homo sapien
acctggctggcagtctcagaagcag

SEQ ID NO: 4844553 - DNA, 25 bp, Homo sapien
tcacctggctggcagtctcagaagc

SEQ ID NO: 4844554 - DNA, 25 bp, Homo sapien
cctcacctggctggcagtctcagaa

SEQ ID NO: 4844555 - DNA, 25 bp, Homo sapien
ttcagagagtgggtgtaaggcagcc

SEQ ID NO: 4844556 - DNA, 25 bp, Homo sapien
taaggcagccgaacattatattcct

SEQ ID NO: 4844557 - DNA, 25 bp, Homo sapien
gtgggtgtaaggcagccgaacatta

SEQ ID NO: 4844558 - DNA, 25 bp, Homo sapien
cattcagagagtgggtgtaaggcag

SEQ ID NO: 4844559 - DNA, 25 bp, Homo sapien
ctggggtgacgtaggagatgtgcat

SEQ ID NO: 4844560 - DNA, 25 bp, Homo sapien
ctggcgagggccttgaaagacactt

SEQ ID NO: 4844561 - DNA, 25 bp, Homo sapien
catggacggatatggacgtggcctt

SEQ ID NO: 4844562 - DNA, 25 bp, Homo sapien
ttgaaagacacttccatctggcttg

SEQ ID NO: 4844563 - DNA, 25 bp, Homo sapien
atcccttcagagaaccagctctgag

SEQ ID NO: 4844564 - DNA, 25 bp, Homo sapien
gaccgcagatgcgtacatctccatc

SEQ ID NO: 4844565 - DNA, 25 bp, Homo sapien
tagaatagctgactgcagggaccgc

SEQ ID NO: 4844566 - DNA, 25 bp, Homo sapien
tataaagctcggtcaaaaaaagcag

SEQ ID NO: 4844567 - DNA, 25 bp, Homo sapien
agcaaagaaacttctggctgctggt

SEQ ID NO: 4844568 - DNA, 25 bp, Homo sapien
gcaaagaaacttctggctgctggtt

SEQ ID NO: 4844569 - DNA, 25 bp, Homo sapien
ggcatctcgtttttctcttcgtgtc

SEQ ID NO: 4844570 - DNA, 25 bp, Homo sapien
tctgcagcaaagactccccaagaat

SEQ ID NO: 4844571 - DNA, 25 bp, Homo sapien
ctgatgcataaagtcccatctctgc

SEQ ID NO: 4844572 - DNA, 25 bp, Homo sapien
gggcagcgtagacactttaagaatg

SEQ ID NO: 4844573 - DNA, 25 bp, Homo sapien
tccacgccagcgtaaaacgacaatc

SEQ ID NO: 4844574 - DNA, 25 bp, Homo sapien
gcgtaaaacgacaatcctattggat

SEQ ID NO: 4844575 - DNA, 25 bp, Homo sapien
gatgggggctgttccgctcttcatt

SEQ ID NO: 4844576 - DNA, 25 bp, Homo sapien
gaggctccacgccagcgtaaaacga

SEQ ID NO: 4844577 - DNA, 25 bp, Homo sapien
ttagcgattgcctttcacgaaactg

SEQ ID NO: 4844578 - DNA, 25 bp, Homo sapien
ggctctgctgggtgcacttctcagt

SEQ ID NO: 4844579 - DNA, 25 bp, Homo sapien
tcccactgagggtaggattcccatc

SEQ ID NO: 4844580 - DNA, 25 bp, Homo sapien
aggtgatgccccgtgatgggtcccc

SEQ ID NO: 4844581 - DNA, 25 bp, Homo sapien
tatgacactcaaccagctgagtacg

SEQ ID NO: 4844582 - DNA, 25 bp, Homo sapien
tgctcctccaagattagactaagga

SEQ ID NO: 4844583 - DNA, 25 bp, Homo sapien
gactgaggaaaatccctctggtacc

SEQ ID NO: 4844584 - DNA, 25 bp, Homo sapien
cagctcatccgcttcaaatatgggc

SEQ ID NO: 4844585 - DNA, 25 bp, Homo sapien
caccatggcacacgtatacctattt

SEQ ID NO: 4844586 - DNA, 25 bp, Homo sapien
accatggcacacgtatacctattta

SEQ ID NO: 4844587 - DNA, 25 bp, Homo sapien
acctgcatgttctgcacatgtatcc

SEQ ID NO: 4844588 - DNA, 25 bp, Homo sapien
acaaacctgcatgttctgcacatgt

SEQ ID NO: 4844589 - DNA, 25 bp, Homo sapien
tgtgacttcgaacaaattccctcag

SEQ ID NO: 4844590 - DNA, 25 bp, Homo sapien
gctgtgtgacttcgaacaaattccc

SEQ ID NO: 4844591 - DNA, 25 bp, Homo sapien
tgtgtgacttcgaacaaattccctc

SEQ ID NO: 4844592 - DNA, 25 bp, Homo sapien
agctgtgtgacttcgaacaaattcc

SEQ ID NO: 4844593 - DNA, 25 bp, Homo sapien
cccggcgaagaagtaggagcaggac

SEQ ID NO: 4844594 - DNA, 25 bp, Homo sapien
cccagccattgtggcccggcgaaga

SEQ ID NO: 4844595 - DNA, 25 bp, Homo sapien
actggtctcagttgatgcagcttca

SEQ ID NO: 4844596 - DNA, 25 bp, Homo sapien
aagtaggagcaggactggtctcagt

SEQ ID NO: 4844597 - DNA, 25 bp, Homo sapien
gggtccgtgtacagatattgggcaa

SEQ ID NO: 4844598 - DNA, 25 bp, Homo sapien
gatattgggcaaatttccccagcat

SEQ ID NO: 4844599 - DNA, 25 bp, Homo sapien
ctccacgggtccgtgtacagatatt

SEQ ID NO: 4844600 - DNA, 25 bp, Homo sapien
tattgggcaaatttccccagcatga

SEQ ID NO: 4844601 - DNA, 25 bp, Homo sapien
gcctacagattgagacaaggcatgg

SEQ ID NO: 4844602 - DNA, 25 bp, Homo sapien
ttagatgtgcctacagattgagaca

SEQ ID NO: 4844603 - DNA, 25 bp, Homo sapien
acagattgagacaaggcatgggcca

SEQ ID NO: 4844604 - DNA, 25 bp, Homo sapien
gatgtgcctacagattgagacaagg

SEQ ID NO: 4844605 - DNA, 25 bp, Homo sapien
ctgtctctgaatttccgtgtgtcct

SEQ ID NO: 4844606 - DNA, 25 bp, Homo sapien
cttctggtggatgagagtctttggt

SEQ ID NO: 4844607 - DNA, 25 bp, Homo sapien
gacaccagtcacagtggattatgac

SEQ ID NO: 4844608 - DNA, 25 bp, Homo sapien
ttggtgtccgttggctatagaccca

SEQ ID NO: 4844609 - DNA, 25 bp, Homo sapien
tctaggtggaaccaggggactctgc

SEQ ID NO: 4844610 - DNA, 25 bp, Homo sapien
gaaccaggggactctgcaaacgcag

SEQ ID NO: 4844611 - DNA, 25 bp, Homo sapien
gggactctgcaaacgcaggctttct

SEQ ID NO: 4844612 - DNA, 25 bp, Homo sapien
gcaaacgcaggctttctgggacttg

SEQ ID NO: 4844613 - DNA, 25 bp, Homo sapien
tgccattcaccttggataggatctg

SEQ ID NO: 4844614 - DNA, 25 bp, Homo sapien
gggagcaaggccatcctcatatagc

SEQ ID NO: 4844615 - DNA, 25 bp, Homo sapien
tagctgcttgccattcaccttggat

SEQ ID NO: 4844616 - DNA, 25 bp, Homo sapien
ggataggatctgctttggttccact

SEQ ID NO: 4844617 - DNA, 25 bp, Homo sapien
tgtgtcttcctagtccaggtctcaa

SEQ ID NO: 4844618 - DNA, 25 bp, Homo sapien
aatgacaactagaatgtggcagaag

SEQ ID NO: 4844619 - DNA, 25 bp, Homo sapien
tcttcttctcttaaatcagaactct

SEQ ID NO: 4844620 - DNA, 25 bp, Homo sapien
gggctggccttcttgaggatgggag

SEQ ID NO: 4844621 - DNA, 25 bp, Homo sapien
gagagagcctgtggcctttacaaga

SEQ ID NO: 4844622 - DNA, 25 bp, Homo sapien
gggtctaaatcatctagaactctgg

SEQ ID NO: 4844623 - DNA, 25 bp, Homo sapien
tagaactctgggattcggagacccc

SEQ ID NO: 4844624 - DNA, 25 bp, Homo sapien
tacaagaagtacctggaggtcccag

SEQ ID NO: 4844625 - DNA, 25 bp, Homo sapien
tgggaccaccttgaggagcaatact

SEQ ID NO: 4844626 - DNA, 25 bp, Homo sapien
tgactggaaaccgtgtagactgact

SEQ ID NO: 4844627 - DNA, 25 bp, Homo sapien
ttctggcaacctcagggaaatcagt

SEQ ID NO: 4844628 - DNA, 25 bp, Homo sapien
tagactgacttacgctccaatagca

SEQ ID NO: 4844629 - DNA, 25 bp, Homo sapien
tgggtcccacccaagatgtttgatt

SEQ ID NO: 4844630 - DNA, 25 bp, Homo sapien
tgtacacacagtgggctaacaggag

SEQ ID NO: 4844631 - DNA, 25 bp, Homo sapien
tagttagaatcacagaaagtcggct

SEQ ID NO: 4844632 - DNA, 25 bp, Homo sapien
tcatgtggcatgaaagggtgcttct

SEQ ID NO: 4844633 - DNA, 25 bp, Homo sapien
cacaggtggcttttgacaggtcatc

SEQ ID NO: 4844634 - DNA, 25 bp, Homo sapien
cctcaatcagtgcaggatgcgagct

SEQ ID NO: 4844635 - DNA, 25 bp, Homo sapien
gatgcgagcttacattgacaataga

SEQ ID NO: 4844636 - DNA, 25 bp, Homo sapien
tagatgagggagatccagatggttc

SEQ ID NO: 4844637 - DNA, 25 bp, Homo sapien
gggcacgcagggcccctttgcacag

SEQ ID NO: 4844638 - DNA, 25 bp, Homo sapien
ggctacctgcagagctgacctgctc

SEQ ID NO: 4844639 - DNA, 25 bp, Homo sapien
ttgcacagctggctacctgcagagc

SEQ ID NO: 4844640 - DNA, 25 bp, Homo sapien
ggaggatggggcacgcagggcccct

SEQ ID NO: 4844641 - DNA, 25 bp, Homo sapien
acctcatgctctttgtaacttccag

SEQ ID NO: 4844642 - DNA, 25 bp, Homo sapien
gctggcggctcttcatcaacctcag

SEQ ID NO: 4844643 - DNA, 25 bp, Homo sapien
acacatcacctcatgctctttgtaa

SEQ ID NO: 4844644 - DNA, 25 bp, Homo sapien
gcggctggcggctcttcatcaacct

SEQ ID NO: 4844645 - DNA, 25 bp, Homo sapien
gagctaccgctacctgtaaaacatt

SEQ ID NO: 4844646 - DNA, 25 bp, Homo sapien
taacgccatgcagaagcagagacac

SEQ ID NO: 4844647 - DNA, 25 bp, Homo sapien
tctgcagtgactccgatcttgagag

SEQ ID NO: 4844648 - DNA, 25 bp, Homo sapien
tgcacagcttgcatgataacgccat

SEQ ID NO: 4844649 - DNA, 25 bp, Homo sapien
tggactcactaagtccctaggcaag

SEQ ID NO: 4844650 - DNA, 25 bp, Homo sapien
ctggactcactaagtccctaggcaa

SEQ ID NO: 4844651 - DNA, 25 bp, Homo sapien
gtttataaacaaacgcccagctgag

SEQ ID NO: 4844652 - DNA, 25 bp, Homo sapien
cttggttaagggctatctggcctgt

SEQ ID NO: 4844653 - DNA, 25 bp, Homo sapien
ggcctgttggttctaaataactgga

SEQ ID NO: 4844654 - DNA, 25 bp, Homo sapien
tgctacttcaatctcagcccatgct

SEQ ID NO: 4844655 - DNA, 25 bp, Homo sapien
ttcctggacgggtaccagttagcca

SEQ ID NO: 4844656 - DNA, 25 bp, Homo sapien
tcctggacgggtaccagttagccaa

SEQ ID NO: 4844657 - DNA, 25 bp, Homo sapien
cctggacgggtaccagttagccaag

SEQ ID NO: 4844658 - DNA, 25 bp, Homo sapien
tggacgggtaccagttagccaagaa

SEQ ID NO: 4844659 - DNA, 25 bp, Homo sapien
tgcagacttccgactgcctactttc

SEQ ID NO: 4844660 - DNA, 25 bp, Homo sapien
ctggtgcagacttccgactgcctac

SEQ ID NO: 4844661 - DNA, 25 bp, Homo sapien
agacttccgactgcctactttccag

SEQ ID NO: 4844662 - DNA, 25 bp, Homo sapien
ttccgactgcctactttccaggagt

SEQ ID NO: 4844663 - DNA, 25 bp, Homo sapien
gatgaacagccgcttagtcagcacc

SEQ ID NO: 4844664 - DNA, 25 bp, Homo sapien
gaacagccgcttagtcagcacctct

SEQ ID NO: 4844665 - DNA, 25 bp, Homo sapien
tgctatgatgaacagccgcttagtc

SEQ ID NO: 4844666 - DNA, 25 bp, Homo sapien
ctatgatgaacagccgcttagtcag

SEQ ID NO: 4844667 - DNA, 25 bp, Homo sapien
taagtttcactgtccggatggtgga

SEQ ID NO: 4844668 - DNA, 25 bp, Homo sapien
gaaagcatttgagccgtctgaggca

SEQ ID NO: 4844669 - DNA, 25 bp, Homo sapien
taagcaataaactcgagagtccagg

SEQ ID NO: 4844670 - DNA, 25 bp, Homo sapien
tgaggaactgggactgataacgcac

SEQ ID NO: 4844671 - DNA, 25 bp, Homo sapien
ctctctcgctggagcttctcacaca

SEQ ID NO: 4844672 - DNA, 25 bp, Homo sapien
tctctcgctggagcttctcacacag

SEQ ID NO: 4844673 - DNA, 25 bp, Homo sapien
ggcatcattggtgggtgagaggcaa

SEQ ID NO: 4844674 - DNA, 25 bp, Homo sapien
ggttgcagattgatgcctgaagagc

SEQ ID NO: 4844675 - DNA, 25 bp, Homo sapien
gaggggcagtccattatgccaggaa

SEQ ID NO: 4844676 - DNA, 25 bp, Homo sapien
gcctggatgtctggttgcagattga

SEQ ID NO: 4844677 - DNA, 25 bp, Homo sapien
tgcatcacattcagatacagcaaca

SEQ ID NO: 4844678 - DNA, 25 bp, Homo sapien
gcatcacattcagatacagcaacaa

SEQ ID NO: 4844679 - DNA, 25 bp, Homo sapien
agatacagcaacaacacttgactgt

SEQ ID NO: 4844680 - DNA, 25 bp, Homo sapien
ctgtatggagtgagaaaaagacacc

SEQ ID NO: 4844681 - DNA, 25 bp, Homo sapien
aagacaccacagtcaacatcgccat

SEQ ID NO: 4844682 - DNA, 25 bp, Homo sapien
tgtatggagtgagaaaaagacacca

SEQ ID NO: 4844683 - DNA, 25 bp, Homo sapien
aaagacaccacagtcaacatcgcca

SEQ ID NO: 4844684 - DNA, 25 bp, Homo sapien
gccacacccaacatcgccaggggat

SEQ ID NO: 4844685 - DNA, 25 bp, Homo sapien
tcgccaggggatcgcacgttcacct

SEQ ID NO: 4844686 - DNA, 25 bp, Homo sapien
atcgcacgttcacctgtccctcctg

SEQ ID NO: 4844687 - DNA, 25 bp, Homo sapien
ccaacatcgccaggggatcgcacgt

SEQ ID NO: 4844688 - DNA, 25 bp, Homo sapien
ccaccttccaaggacggttgctagg

SEQ ID NO: 4844689 - DNA, 25 bp, Homo sapien
caaaacacccaaggactcggatggg

SEQ ID NO: 4844690 - DNA, 25 bp, Homo sapien
cagggagagcatctcttagtccttc

SEQ ID NO: 4844691 - DNA, 25 bp, Homo sapien
gcaaggcttttaccccacagaggag

SEQ ID NO: 4844692 - DNA, 25 bp, Homo sapien
tgtcccaagagtctggctgaataaa

SEQ ID NO: 4844693 - DNA, 25 bp, Homo sapien
ctgaataaatatggcttcaaggtcc

SEQ ID NO: 4844694 - DNA, 25 bp, Homo sapien
taaatatggcttcaaggtccaggtc

SEQ ID NO: 4844695 - DNA, 25 bp, Homo sapien
gtcccaagagtctggctgaataaat

SEQ ID NO: 4844696 - DNA, 25 bp, Homo sapien
aggatccagtccacctcacgaagca

SEQ ID NO: 4844697 - DNA, 25 bp, Homo sapien
gatccagtccacctcacgaagcaaa

SEQ ID NO: 4844698 - DNA, 25 bp, Homo sapien
aactgcctagactagtaaaatggtc

SEQ ID NO: 4844699 - DNA, 25 bp, Homo sapien
gaagcaaactgcctagactagtaaa

SEQ ID NO: 4844700 - DNA, 25 bp, Homo sapien
tgcctctgacttctgcaattgtacg

SEQ ID NO: 4844701 - DNA, 25 bp, Homo sapien
ctgcaattgtacgtggccatgagga

SEQ ID NO: 4844702 - DNA, 25 bp, Homo sapien
gcaagattctgaggaagcaaggttg

SEQ ID NO: 4844703 - DNA, 25 bp, Homo sapien
tcaattcatgcaagattctgaggaa

SEQ ID NO: 4844704 - DNA, 25 bp, Homo sapien
tctgggggatccaagtcaggaccac

SEQ ID NO: 4844705 - DNA, 25 bp, Homo sapien
agaacctcatctgcaagctaccaac

SEQ ID NO: 4844706 - DNA, 25 bp, Homo sapien
gctccaaagcagaacctcatctgca

SEQ ID NO: 4844707 - DNA, 25 bp, Homo sapien
atctgcaagctaccaaccagggcct

SEQ ID NO: 4844708 - DNA, 25 bp, Homo sapien
gagtgttccgagctctccgcaagtg

SEQ ID NO: 4844709 - DNA, 25 bp, Homo sapien
tggctccaaaagtcattctcggcgg

SEQ ID NO: 4844710 - DNA, 25 bp, Homo sapien
cctcttccgtctgttcataatctaa

SEQ ID NO: 4844711 - DNA, 25 bp, Homo sapien
tttcttcataactggagcgtgtcca

SEQ ID NO: 4844712 - DNA, 25 bp, Homo sapien
gagcaatcaaaagtcacaactcatg

SEQ ID NO: 4844713 - DNA, 25 bp, Homo sapien
aaaatttccgggagccccagatgca

SEQ ID NO: 4844714 - DNA, 25 bp, Homo sapien
tcaaatgtcaccaaggtctcactga

SEQ ID NO: 4844715 - DNA, 25 bp, Homo sapien
ggtacagaatagtccttagtcaaaa

SEQ ID NO: 4844716 - DNA, 25 bp, Homo sapien
gctgggactatccaagccatccatc

SEQ ID NO: 4844717 - DNA, 25 bp, Homo sapien
acaactgcatctccattgagtcccg

SEQ ID NO: 4844718 - DNA, 25 bp, Homo sapien
cctcctgtcatcagggagtatcctg

SEQ ID NO: 4844719 - DNA, 25 bp, Homo sapien
taaaacatggattcccactttgctg

SEQ ID NO: 4844720 - DNA, 25 bp, Homo sapien
tagttggccaagctgccaagagggc

SEQ ID NO: 4844721 - DNA, 25 bp, Homo sapien
cagttgctggtactagtagttggcc

SEQ ID NO: 4844722 - DNA, 25 bp, Homo sapien
acagcttctggagattgtgtcacct

SEQ ID NO: 4844723 - DNA, 25 bp, Homo sapien
tctggagattgtgtcacctttgtcc

SEQ ID NO: 4844724 - DNA, 25 bp, Homo sapien
gatgtgagccttcgtaagcccagtt

SEQ ID NO: 4844725 - DNA, 25 bp, Homo sapien
caaattaccccaagacatgagttca

SEQ ID NO: 4844726 - DNA, 25 bp, Homo sapien
tctgggagaattcagtacgtccaca

SEQ ID NO: 4844727 - DNA, 25 bp, Homo sapien
tatggagttaagcaggatgtgagcc

SEQ ID NO: 4844728 - DNA, 25 bp, Homo sapien
ttacacaataagcaataagtaaggg

SEQ ID NO: 4844729 - DNA, 25 bp, Homo sapien
tgagcatcacaagggacacttaggt

SEQ ID NO: 4844730 - DNA, 25 bp, Homo sapien
cacatagcagtatctcttacacaat

SEQ ID NO: 4844731 - DNA, 25 bp, Homo sapien
ggtcaactgacttaaggaccttgag

SEQ ID NO: 4844732 - DNA, 25 bp, Homo sapien
cctgcatcacatgtttgctgagtag

SEQ ID NO: 4844733 - DNA, 25 bp, Homo sapien
gggtcatcactccaacagagctact

SEQ ID NO: 4844734 - DNA, 25 bp, Homo sapien
cccctgcatcacatgtttgctgagt

SEQ ID NO: 4844735 - DNA, 25 bp, Homo sapien
ctaggacttggggtcatcactccaa

SEQ ID NO: 4844736 - DNA, 25 bp, Homo sapien
ccatgttagcaggtatcatccccat

SEQ ID NO: 4844737 - DNA, 25 bp, Homo sapien
ctccacgggacttgcacagtcccag

SEQ ID NO: 4844738 - DNA, 25 bp, Homo sapien
catccatgttagcaggtatcatccc

SEQ ID NO: 4844739 - DNA, 25 bp, Homo sapien
ttccccctcatccatgttagcaggt

SEQ ID NO: 4844740 - DNA, 25 bp, Homo sapien
cctgagatcctgacatggttctcac

SEQ ID NO: 4844741 - DNA, 25 bp, Homo sapien
ggcctgagatcctgacatggttctc

SEQ ID NO: 4844742 - DNA, 25 bp, Homo sapien
caaaggcctgagatcctgacatggt

SEQ ID NO: 4844743 - DNA, 25 bp, Homo sapien
aaggcctgagatcctgacatggttc

SEQ ID NO: 4844744 - DNA, 25 bp, Homo sapien
gacatggagtctaggagggagtcct

SEQ ID NO: 4844745 - DNA, 25 bp, Homo sapien
gagacatggagtctaggagggagtc

SEQ ID NO: 4844746 - DNA, 25 bp, Homo sapien
catggagtctaggagggagtcctta

SEQ ID NO: 4844747 - DNA, 25 bp, Homo sapien
caagagacatggagtctaggaggga

SEQ ID NO: 4844748 - DNA, 25 bp, Homo sapien
tagatgccagggacagccggagtcc

SEQ ID NO: 4844749 - DNA, 25 bp, Homo sapien
agcagccagctgtagatgccaggga

SEQ ID NO: 4844750 - DNA, 25 bp, Homo sapien
cagagcagccagctgtagatgccag

SEQ ID NO: 4844751 - DNA, 25 bp, Homo sapien
cagccagctgtagatgccagggaca

SEQ ID NO: 4844752 - DNA, 25 bp, Homo sapien
cagcaacccttgaaattcactaggc

SEQ ID NO: 4844753 - DNA, 25 bp, Homo sapien
agcaacccttgaaattcactaggcc

SEQ ID NO: 4844754 - DNA, 25 bp, Homo sapien
tcccagcaacccttgaaattcacta

SEQ ID NO: 4844755 - DNA, 25 bp, Homo sapien
ccagcaacccttgaaattcactagg

SEQ ID NO: 4844756 - DNA, 25 bp, Homo sapien
ctgctcaaatgactggctgacccac

SEQ ID NO: 4844757 - DNA, 25 bp, Homo sapien
tcctgctcaaatgactggctgaccc

SEQ ID NO: 4844758 - DNA, 25 bp, Homo sapien
ccactcccttcatgaacagctgcct

SEQ ID NO: 4844759 - DNA, 25 bp, Homo sapien
ccttcatgaacagctgcctcccact

SEQ ID NO: 4844760 - DNA, 25 bp, Homo sapien
ccacatctctctcggcagtggtggt

SEQ ID NO: 4844761 - DNA, 25 bp, Homo sapien
acatctctctcggcagtggtggttg

SEQ ID NO: 4844762 - DNA, 25 bp, Homo sapien
cacatctctctcggcagtggtggtt

SEQ ID NO: 4844763 - DNA, 25 bp, Homo sapien
cccacatctctctcggcagtggtgg

SEQ ID NO: 4844764 - DNA, 25 bp, Homo sapien
ccagcctgggtcattaatctcatta

SEQ ID NO: 4844765 - DNA, 25 bp, Homo sapien
gcagccggtggtgggaacaagtaca

SEQ ID NO: 4844766 - DNA, 25 bp, Homo sapien
gagccctgctccaatcgagagggaa

SEQ ID NO: 4844767 - DNA, 25 bp, Homo sapien
tctcattaagtctggcagccggtgg

SEQ ID NO: 4844768 - DNA, 25 bp, Homo sapien
gatgagggagagaagatatgtatgc

SEQ ID NO: 4844769 - DNA, 25 bp, Homo sapien
caaaatgggcgatgatgagggagag

SEQ ID NO: 4844770 - DNA, 25 bp, Homo sapien
atgatgagggagagaagatatgtat

SEQ ID NO: 4844771 - DNA, 25 bp, Homo sapien
ctacaaaatgggcgatgatgaggga

SEQ ID NO: 4844772 - DNA, 25 bp, Homo sapien
tagataaattactgctgagcacaag

SEQ ID NO: 4844773 - DNA, 25 bp, Homo sapien
ggtggaactgttctcatcggcagct

SEQ ID NO: 4844774 - DNA, 25 bp, Homo sapien
cagctttgcgctgagtctgccctgg

SEQ ID NO: 4844775 - DNA, 25 bp, Homo sapien
tcaagggtgtggacgatgaacccaa

SEQ ID NO: 4844776 - DNA, 25 bp, Homo sapien
gctccatgcttctgaccagatggtg

SEQ ID NO: 4844777 - DNA, 25 bp, Homo sapien
agatggtgtctgaaaagaccattga

SEQ ID NO: 4844778 - DNA, 25 bp, Homo sapien
tccatgcttctgaccagatggtgtc

SEQ ID NO: 4844779 - DNA, 25 bp, Homo sapien
atggtgtctgaaaagaccattgatg

SEQ ID NO: 4844780 - DNA, 25 bp, Homo sapien
tcgaggtcatgtaggtcctggagac

SEQ ID NO: 4844781 - DNA, 25 bp, Homo sapien
gacagaatgttttgatgcctgggaa

SEQ ID NO: 4844782 - DNA, 25 bp, Homo sapien
gccagaaagtgaggcgagaccaatt

SEQ ID NO: 4844783 - DNA, 25 bp, Homo sapien
gaccagggatgatcgaggtcatgta

SEQ ID NO: 4844784 - DNA, 25 bp, Homo sapien
ccagctcggtttcaatggaaatctc

SEQ ID NO: 4844785 - DNA, 25 bp, Homo sapien
ccaggaaaagccagctcggtttcaa

SEQ ID NO: 4844786 - DNA, 25 bp, Homo sapien
tggaaatctcaccatgcttttgggc

SEQ ID NO: 4844787 - DNA, 25 bp, Homo sapien
cggtttcaatggaaatctcaccatg

SEQ ID NO: 4844788 - DNA, 25 bp, Homo sapien
catgcaaatcggctgctggtttcaa

SEQ ID NO: 4844789 - DNA, 25 bp, Homo sapien
actgcactccatggcacatgcaaat

SEQ ID NO: 4844790 - DNA, 25 bp, Homo sapien
atggcacatgcaaatcggctgctgg

SEQ ID NO: 4844791 - DNA, 25 bp, Homo sapien
tcggctgctggtttcaatgattcca

SEQ ID NO: 4844792 - DNA, 25 bp, Homo sapien
cagggatgagaggtacctcatggta

SEQ ID NO: 4844793 - DNA, 25 bp, Homo sapien
aatttcttaatctcgtaggcccaat

SEQ ID NO: 4844794 - DNA, 25 bp, Homo sapien
taaatttcttaatctcgtaggccca

SEQ ID NO: 4844795 - DNA, 25 bp, Homo sapien
tcttaatctcgtaggcccaatattt

SEQ ID NO: 4844796 - DNA, 25 bp, Homo sapien
tttcttaatctcgtaggcccaatat

SEQ ID NO: 4844797 - DNA, 25 bp, Homo sapien
gagagtgtgagctgattgctgctcc

SEQ ID NO: 4844798 - DNA, 25 bp, Homo sapien
tgagagtgtgagctgattgctgctc

SEQ ID NO: 4844799 - DNA, 25 bp, Homo sapien
ggaggtatcagccaacctcacaatg

SEQ ID NO: 4844800 - DNA, 25 bp, Homo sapien
gtatcagccaacctcacaatgagta

SEQ ID NO: 4844801 - DNA, 25 bp, Homo sapien
cttccagagggctgggctaacatcc

SEQ ID NO: 4844802 - DNA, 25 bp, Homo sapien
aggtatcagccaacctcacaatgag

SEQ ID NO: 4844803 - DNA, 25 bp, Homo sapien
caaggctggaaactctagggcagag

SEQ ID NO: 4844804 - DNA, 25 bp, Homo sapien
caatgagctcaaacaaggctggaaa

SEQ ID NO: 4844805 - DNA, 25 bp, Homo sapien
aagagtatagcttgacaatgagctc

SEQ ID NO: 4844806 - DNA, 25 bp, Homo sapien
tagcttgacaatgagctcaaacaag

SEQ ID NO: 4844807 - DNA, 25 bp, Homo sapien
tggcccttgaggagaatcacatcgg

SEQ ID NO: 4844808 - DNA, 25 bp, Homo sapien
aatcacatcggttacctttgtcctg

SEQ ID NO: 4844809 - DNA, 25 bp, Homo sapien
tgtcctgaatgtttgcgaggagcag

SEQ ID NO: 4844810 - DNA, 25 bp, Homo sapien
tcctgaatgtttgcgaggagcagaa

SEQ ID NO: 4844811 - DNA, 25 bp, Homo sapien
gaagattggtaggaccaatctccac

SEQ ID NO: 4844812 - DNA, 25 bp, Homo sapien
taatgccaggtgtaggtctgaagat

SEQ ID NO: 4844813 - DNA, 25 bp, Homo sapien
gggcactggtcctgagtaatgccag

SEQ ID NO: 4844814 - DNA, 25 bp, Homo sapien
ccaatctccactggtgcgtggtctc

SEQ ID NO: 4844815 - DNA, 25 bp, Homo sapien
agtctttgggcatcaatcaccaggg

SEQ ID NO: 4844816 - DNA, 25 bp, Homo sapien
tgatggccaacaacctttcatagct

SEQ ID NO: 4844817 - DNA, 25 bp, Homo sapien
gaagttttgacgacactgttacggc

SEQ ID NO: 4844818 - DNA, 25 bp, Homo sapien
gccactcctggatgcgactctagaa

SEQ ID NO: 4844819 - DNA, 25 bp, Homo sapien
acagcaggcttgaccagcctggatt

SEQ ID NO: 4844820 - DNA, 25 bp, Homo sapien
gatggaactttctgctttgctgtag

SEQ ID NO: 4844821 - DNA, 25 bp, Homo sapien
caggatggaactttctgctttgctg

SEQ ID NO: 4844822 - DNA, 25 bp, Homo sapien
ggatggaactttctgctttgctgta

SEQ ID NO: 4844823 - DNA, 25 bp, Homo sapien
tcaggatggaactttctgctttgct

SEQ ID NO: 4844824 - DNA, 25 bp, Homo sapien
cactaccccatacagagggaaatat

SEQ ID NO: 4844825 - DNA, 25 bp, Homo sapien
tcatgtagcacactgtagtgtgatg

SEQ ID NO: 4844826 - DNA, 25 bp, Homo sapien
catggcctcagcatatggaagatac

SEQ ID NO: 4844827 - DNA, 25 bp, Homo sapien
tgacatgcccactaccccatacaga

SEQ ID NO: 4844828 - DNA, 25 bp, Homo sapien
tttgcacttgccgaagtactttccc

SEQ ID NO: 4844829 - DNA, 25 bp, Homo sapien
tgcacttgccgaagtactttcccat

SEQ ID NO: 4844830 - DNA, 25 bp, Homo sapien
ttgcacttgccgaagtactttccca

SEQ ID NO: 4844831 - DNA, 25 bp, Homo sapien
gagctcagtaggttgctggaagttg

SEQ ID NO: 4844832 - DNA, 25 bp, Homo sapien
aagagctcagtaggttgctggaagt

SEQ ID NO: 4844833 - DNA, 25 bp, Homo sapien
agagctcagtaggttgctggaagtt

SEQ ID NO: 4844834 - DNA, 25 bp, Homo sapien
gaagagctcagtaggttgctggaag

SEQ ID NO: 4844835 - DNA, 25 bp, Homo sapien
gaagatacccttcaggatcatccag

SEQ ID NO: 4844836 - DNA, 25 bp, Homo sapien
tgatagcaccaatgacctgagactt

SEQ ID NO: 4844837 - DNA, 25 bp, Homo sapien
taggggaggaacactgcatagtatt

SEQ ID NO: 4844838 - DNA, 25 bp, Homo sapien
acttgagcttaaaacaggaaatggt

SEQ ID NO: 4844839 - DNA, 25 bp, Homo sapien
atttgctcatctactctcttcctgc

SEQ ID NO: 4844840 - DNA, 25 bp, Homo sapien
tccagggaggtggttgtcaaatgga

SEQ ID NO: 4844841 - DNA, 25 bp, Homo sapien
tcaatttgctcatctactctcttcc

SEQ ID NO: 4844842 - DNA, 25 bp, Homo sapien
gaggtggttgtcaaatggaaggaca

SEQ ID NO: 4844843 - DNA, 25 bp, Homo sapien
ggagctcatcagatgggtcagccat

SEQ ID NO: 4844844 - DNA, 25 bp, Homo sapien
cattttgctgttcccaaaggaatgc

SEQ ID NO: 4844845 - DNA, 25 bp, Homo sapien
gaagtccacaaaggagctcatcaga

SEQ ID NO: 4844846 - DNA, 25 bp, Homo sapien
aaggaatgctttccatactgaagtc

SEQ ID NO: 4844847 - DNA, 25 bp, Homo sapien
aatcgttctgcctgagttaccctca

SEQ ID NO: 4844848 - DNA, 25 bp, Homo sapien
caccagcttctgtagctgtggtccc

SEQ ID NO: 4844849 - DNA, 25 bp, Homo sapien
ttcaaccactgaaatttctaccctg

SEQ ID NO: 4844850 - DNA, 25 bp, Homo sapien
tttctaccctgtgtgctcctaatcg

SEQ ID NO: 4844851 - DNA, 25 bp, Homo sapien
caattacatataaagagaagaccac

SEQ ID NO: 4844852 - DNA, 25 bp, Homo sapien
aacccaattacatataaagagaaga

SEQ ID NO: 4844853 - DNA, 25 bp, Homo sapien
ttaaacccaattacatataaagaga

SEQ ID NO: 4844854 - DNA, 25 bp, Homo sapien
ccaattacatataaagagaagacca

SEQ ID NO: 4844855 - DNA, 25 bp, Homo sapien
ttgagtgatttctataaagcgtcta

SEQ ID NO: 4844856 - DNA, 25 bp, Homo sapien
taaagcgtctatagcataatttcat

SEQ ID NO: 4844857 - DNA, 25 bp, Homo sapien
accatataaaaaaggtttcactctg

SEQ ID NO: 4844858 - DNA, 25 bp, Homo sapien
gatttctataaagcgtctatagcat

SEQ ID NO: 4844859 - DNA, 25 bp, Homo sapien
agtgaccagaggccccgaatgttaa

SEQ ID NO: 4844860 - DNA, 25 bp, Homo sapien
gtgaccagaggccccgaatgttaat

SEQ ID NO: 4844861 - DNA, 25 bp, Homo sapien
tgaccagaggccccgaatgttaatt

SEQ ID NO: 4844862 - DNA, 25 bp, Homo sapien
gaccagaggccccgaatgttaattc

SEQ ID NO: 4844863 - DNA, 25 bp, Homo sapien
ccctctgttgtggttggagcaggca

SEQ ID NO: 4844864 - DNA, 25 bp, Homo sapien
caggggcttcgcagaaacacagagg

SEQ ID NO: 4844865 - DNA, 25 bp, Homo sapien
gaggctacgtgactctggaaaacca

SEQ ID NO: 4844866 - DNA, 25 bp, Homo sapien
atgagctgaaagcttgcttccctct

SEQ ID NO: 4844867 - DNA, 25 bp, Homo sapien
tatgcctgactaggactgattgctg

SEQ ID NO: 4844868 - DNA, 25 bp, Homo sapien
caccaggttgactggctccagatga

SEQ ID NO: 4844869 - DNA, 25 bp, Homo sapien
cacctggcccattgctgatttaaat

SEQ ID NO: 4844870 - DNA, 25 bp, Homo sapien
tatgtgccatctatagcctcaacct

SEQ ID NO: 4844871 - DNA, 25 bp, Homo sapien
tctgtagaaaggcaggcacccttcc

SEQ ID NO: 4844872 - DNA, 25 bp, Homo sapien
gttctgtctacctctaaagcctgcg

SEQ ID NO: 4844873 - DNA, 25 bp, Homo sapien
taatgagtgacaatctgtgcccaga

SEQ ID NO: 4844874 - DNA, 25 bp, Homo sapien
tgtgcccagagtcaaccaaaatttg

SEQ ID NO: 4844875 - DNA, 25 bp, Homo sapien
caaccttactcaggttgttggaaga

SEQ ID NO: 4844876 - DNA, 25 bp, Homo sapien
tgtgttctcatctgggagtctggag

SEQ ID NO: 4844877 - DNA, 25 bp, Homo sapien
gactcaagagtcagcctgcctgtgt

SEQ ID NO: 4844878 - DNA, 25 bp, Homo sapien
cagagccttatataaagtgacgtaa

SEQ ID NO: 4844879 - DNA, 25 bp, Homo sapien
tgaacgggttttcattctccagtgc

SEQ ID NO: 4844880 - DNA, 25 bp, Homo sapien
ttgaacgggttttcattctccagtg

SEQ ID NO: 4844881 - DNA, 25 bp, Homo sapien
tattctagtacatcttgtttgtggg

SEQ ID NO: 4844882 - DNA, 25 bp, Homo sapien
gaggcctctggatcggcttcaaatg

SEQ ID NO: 4844883 - DNA, 25 bp, Homo sapien
tctgggacctaatgaatgctgatgt

SEQ ID NO: 4844884 - DNA, 25 bp, Homo sapien
gagaggttgtccagaatttcatcag

SEQ ID NO: 4844885 - DNA, 25 bp, Homo sapien
taggctgcgtcaatgattgtagtgc

SEQ ID NO: 4844886 - DNA, 25 bp, Homo sapien
caatgccaaggcgaatggggacaat

SEQ ID NO: 4844887 - DNA, 25 bp, Homo sapien
tccatggctggttttaaggtagtta

SEQ ID NO: 4844888 - DNA, 25 bp, Homo sapien
gtgctaattgttacagacatgacca

SEQ ID NO: 4844889 - DNA, 25 bp, Homo sapien
agtcctcaaatcttagtggctgcaa

SEQ ID NO: 4844890 - DNA, 25 bp, Homo sapien
taaatagttgtagcacctgagtctg

SEQ ID NO: 4844891 - DNA, 25 bp, Homo sapien
ctgagtctgtcaggataggcagtaa

SEQ ID NO: 4844892 - DNA, 25 bp, Homo sapien
gaatagcagggagctcatctgaccc

SEQ ID NO: 4844893 - DNA, 25 bp, Homo sapien
tcttgccagccgagaccttatcttt

SEQ ID NO: 4844894 - DNA, 25 bp, Homo sapien
tctccacgtgagagagatgtgccct

SEQ ID NO: 4844895 - DNA, 25 bp, Homo sapien
tctgaagtaaattgcagcacctgca

SEQ ID NO: 4844896 - DNA, 25 bp, Homo sapien
gaacaacattttgcgtggatcccct

SEQ ID NO: 4844897 - DNA, 25 bp, Homo sapien
aggagttcatgccagtaccctccag

SEQ ID NO: 4844898 - DNA, 25 bp, Homo sapien
accctccagtctaggtgccagagtg

SEQ ID NO: 4844899 - DNA, 25 bp, Homo sapien
tgccagtaccctccagtctaggtgc

SEQ ID NO: 4844900 - DNA, 25 bp, Homo sapien
gttcatgccagtaccctccagtcta

SEQ ID NO: 4844901 - DNA, 25 bp, Homo sapien
attctgtacacacattaacctcagg

SEQ ID NO: 4844902 - DNA, 25 bp, Homo sapien
ctagaaacgattgggcgggacatta

SEQ ID NO: 4844903 - DNA, 25 bp, Homo sapien
gctggcggcaagcacatgtagtgaa

SEQ ID NO: 4844904 - DNA, 25 bp, Homo sapien
ttcggaatgaagttggtcatgggct

SEQ ID NO: 4844905 - DNA, 25 bp, Homo sapien
tacatcggagagcacaaagatccct

SEQ ID NO: 4844906 - DNA, 25 bp, Homo sapien
gcaaatccacttcaggagaaactct

SEQ ID NO: 4844907 - DNA, 25 bp, Homo sapien
aaatccacttcaggagaaactcttg

SEQ ID NO: 4844908 - DNA, 25 bp, Homo sapien
cagccagcaaatccacttcaggaga

SEQ ID NO: 4844909 - DNA, 25 bp, Homo sapien
ccagcaaatccacttcaggagaaac

SEQ ID NO: 4844910 - DNA, 25 bp, Homo sapien
tattgagcagtctccatgtagctag

SEQ ID NO: 4844911 - DNA, 25 bp, Homo sapien
agctagctagcacttgttcaatgag

SEQ ID NO: 4844912 - DNA, 25 bp, Homo sapien
gaggtgtaggattcagccttcatct

SEQ ID NO: 4844913 - DNA, 25 bp, Homo sapien
tcaatgagccatggaggatacaagc

SEQ ID NO: 4844914 - DNA, 25 bp, Homo sapien
actgtagcttggtccccatcgggct

SEQ ID NO: 4844915 - DNA, 25 bp, Homo sapien
ccatcgggctgggtctgaagtagcc

SEQ ID NO: 4844916 - DNA, 25 bp, Homo sapien
aggcacagccagaacgtccatgact

SEQ ID NO: 4844917 - DNA, 25 bp, Homo sapien
tgaagtagccatggacacactgtct

SEQ ID NO: 4844918 - DNA, 25 bp, Homo sapien
atcctgcttcgggttaccttgatgt

SEQ ID NO: 4844919 - DNA, 25 bp, Homo sapien
tcgggttaccttgatgttattctcc

SEQ ID NO: 4844920 - DNA, 25 bp, Homo sapien
ggaggggcccacaacttctgctcct

SEQ ID NO: 4844921 - DNA, 25 bp, Homo sapien
ttaccttgatgttattctccagctg

SEQ ID NO: 4844922 - DNA, 25 bp, Homo sapien
gcagcagctccacactgctgcccat

SEQ ID NO: 4844923 - DNA, 25 bp, Homo sapien
tcccatcatcagtggtgtgcagcag

SEQ ID NO: 4844924 - DNA, 25 bp, Homo sapien
ctcccatcatcagtggtgtgcagca

SEQ ID NO: 4844925 - DNA, 25 bp, Homo sapien
tgtgcagcagctccacactgctgcc

SEQ ID NO: 4844926 - DNA, 25 bp, Homo sapien
agcattgagtggaaccatgactggc

SEQ ID NO: 4844927 - DNA, 25 bp, Homo sapien
tggccactcatccggtcaccattgt

SEQ ID NO: 4844928 - DNA, 25 bp, Homo sapien
ggtttctaatgtaggctccatcctt

SEQ ID NO: 4844929 - DNA, 25 bp, Homo sapien
tgtggacctgagctttgcaaactgc

SEQ ID NO: 4844930 - DNA, 25 bp, Homo sapien
tagttctgtctgtcgcttgccagga

SEQ ID NO: 4844931 - DNA, 25 bp, Homo sapien
gtagttctgtctgtcgcttgccagg

SEQ ID NO: 4844932 - DNA, 25 bp, Homo sapien
ctgtcgcttgccaggaacctcctgt

SEQ ID NO: 4844933 - DNA, 25 bp, Homo sapien
ctgtctgtcgcttgccaggaacctc

SEQ ID NO: 4844934 - DNA, 25 bp, Homo sapien
gtttatcagttccatcgcatgcagt

SEQ ID NO: 4844935 - DNA, 25 bp, Homo sapien
gagtctaatgctatttgaactggtt

SEQ ID NO: 4844936 - DNA, 25 bp, Homo sapien
gttccatcgcatgcagtatccctct

SEQ ID NO: 4844937 - DNA, 25 bp, Homo sapien
caatgtgtttcaatgagacagtatc

SEQ ID NO: 4844938 - DNA, 25 bp, Homo sapien
tgcactggcacgaataggaagagaa

SEQ ID NO: 4844939 - DNA, 25 bp, Homo sapien
cagccacagggtaaaactaagccga

SEQ ID NO: 4844940 - DNA, 25 bp, Homo sapien
gacttcataaagagcacacaggact

SEQ ID NO: 4844941 - DNA, 25 bp, Homo sapien
gaccctggaccacagactttaagga

SEQ ID NO: 4844942 - DNA, 25 bp, Homo sapien
tggcttcgagtagtggctctctaag

SEQ ID NO: 4844943 - DNA, 25 bp, Homo sapien
tatctctgctgcctgacgtaaggct

SEQ ID NO: 4844944 - DNA, 25 bp, Homo sapien
gacgtaaggcttggcttcgagtagt

SEQ ID NO: 4844945 - DNA, 25 bp, Homo sapien
tgagtggagaaagccgtgtgttttc

SEQ ID NO: 4844946 - DNA, 25 bp, Homo sapien
gaattctcactgctttccacttgct

SEQ ID NO: 4844947 - DNA, 25 bp, Homo sapien
gagcaatctgctaatgacttctaat

SEQ ID NO: 4844948 - DNA, 25 bp, Homo sapien
tcacttccttagagggacttccctg

SEQ ID NO: 4844949 - DNA, 25 bp, Homo sapien
cagtggagttccagtttagatgtca

SEQ ID NO: 4844950 - DNA, 25 bp, Homo sapien
gccataagactgcaagttagcaaat

SEQ ID NO: 4844951 - DNA, 25 bp, Homo sapien
tgtaaggagccataagactgcaagt

SEQ ID NO: 4844952 - DNA, 25 bp, Homo sapien
cttaaaggtgggaactccagagtag

SEQ ID NO: 4844953 - DNA, 25 bp, Homo sapien
gggccaaatccactcacactatata

SEQ ID NO: 4844954 - DNA, 25 bp, Homo sapien
gctaagttcccgtgaaatcctctaa

SEQ ID NO: 4844955 - DNA, 25 bp, Homo sapien
tatataatcctaggctggagtcaca

SEQ ID NO: 4844956 - DNA, 25 bp, Homo sapien
aataaatgggttccacgtgtacagc

SEQ ID NO: 4844957 - DNA, 25 bp, Homo sapien
aaattataggtctgggaatgtaggt

SEQ ID NO: 4844958 - DNA, 25 bp, Homo sapien
tatcatgtgactctctttggaggcc

SEQ ID NO: 4844959 - DNA, 25 bp, Homo sapien
taaatctcaggtgaaagtccagaac

SEQ ID NO: 4844960 - DNA, 25 bp, Homo sapien
cacactggattaggaaccaccctca

SEQ ID NO: 4844961 - DNA, 25 bp, Homo sapien
agggccgtaaggtcaggatctgttc

SEQ ID NO: 4844962 - DNA, 25 bp, Homo sapien
cctcatgttgttccttaggttctga

SEQ ID NO: 4844963 - DNA, 25 bp, Homo sapien
tccttaggttctgaagtccctagcc

SEQ ID NO: 4844964 - DNA, 25 bp, Homo sapien
tctgaagtccctagccagtttcctt

SEQ ID NO: 4844965 - DNA, 25 bp, Homo sapien
tgttgttccttaggttctgaagtcc

SEQ ID NO: 4844966 - DNA, 25 bp, Homo sapien
aactggtgcagtgccataaagcacc

SEQ ID NO: 4844967 - DNA, 25 bp, Homo sapien
tatggtttcatagggaactggtgca

SEQ ID NO: 4844968 - DNA, 25 bp, Homo sapien
tggtccatttcagagtctcagtcac

SEQ ID NO: 4844969 - DNA, 25 bp, Homo sapien
agtctccaccagtgattctctgtcc

SEQ ID NO: 4844970 - DNA, 25 bp, Homo sapien
cactttgtaattactacggtttgca

SEQ ID NO: 4844971 - DNA, 25 bp, Homo sapien
gttacacaatctcttcaagactcag

SEQ ID NO: 4844972 - DNA, 25 bp, Homo sapien
ggtttgcactcactgcaaagttaca

SEQ ID NO: 4844973 - DNA, 25 bp, Homo sapien
tcactgcaaagttacacaatctctt

SEQ ID NO: 4844974 - DNA, 25 bp, Homo sapien
gccagtgaccctgtacctggagcca

SEQ ID NO: 4844975 - DNA, 25 bp, Homo sapien
ccccactgccgccagtgaccctgta

SEQ ID NO: 4844976 - DNA, 25 bp, Homo sapien
tgaggttccccactgccgccagtga

SEQ ID NO: 4844977 - DNA, 25 bp, Homo sapien
tgccgccagtgaccctgtacctgga

SEQ ID NO: 4844978 - DNA, 25 bp, Homo sapien
tattcctatttggaaggccagtagg

SEQ ID NO: 4844979 - DNA, 25 bp, Homo sapien
ctttattcctatttggaaggccagt

SEQ ID NO: 4844980 - DNA, 25 bp, Homo sapien
aggccagtagggaagccttggagag

SEQ ID NO: 4844981 - DNA, 25 bp, Homo sapien
tcctatttggaaggccagtagggaa

SEQ ID NO: 4844982 - DNA, 25 bp, Homo sapien
cttcttcctcgctttgcccactgcc

SEQ ID NO: 4844983 - DNA, 25 bp, Homo sapien
catttctctcctgagagcaccttct

SEQ ID NO: 4844984 - DNA, 25 bp, Homo sapien
ctctcctgagagcaccttcttcttc

SEQ ID NO: 4844985 - DNA, 25 bp, Homo sapien
cttcttcttcctcgctttgcccact

SEQ ID NO: 4844986 - DNA, 25 bp, Homo sapien
gacattcacattcgagcagctccac

SEQ ID NO: 4844987 - DNA, 25 bp, Homo sapien
ttcacattcgagcagctccactccc

SEQ ID NO: 4844988 - DNA, 25 bp, Homo sapien
acattcacattcgagcagctccact

SEQ ID NO: 4844989 - DNA, 25 bp, Homo sapien
cattcacattcgagcagctccactc

SEQ ID NO: 4844990 - DNA, 25 bp, Homo sapien
aggaaagagtggttaagaatgccct

SEQ ID NO: 4844991 - DNA, 25 bp, Homo sapien
gaaagagtggttaagaatgccctta

SEQ ID NO: 4844992 - DNA, 25 bp, Homo sapien
aaaggccactgggacgatggacttc

SEQ ID NO: 4844993 - DNA, 25 bp, Homo sapien
gtagtgccggaattaaacctgctgg

SEQ ID NO: 4844994 - DNA, 25 bp, Homo sapien
cttcacactgggtgaggtagtgccg

SEQ ID NO: 4844995 - DNA, 25 bp, Homo sapien
cactgggacgatggacttcacactg

SEQ ID NO: 4844996 - DNA, 25 bp, Homo sapien
cagtctcttggttagggctctcgtt

SEQ ID NO: 4844997 - DNA, 25 bp, Homo sapien
cagcagcagcatggctttgcggaaa

SEQ ID NO: 4844998 - DNA, 25 bp, Homo sapien
aagcttcttccctgtgatagtggca

SEQ ID NO: 4844999 - DNA, 25 bp, Homo sapien
tagtggcacccgatatccacagcag

SEQ ID NO: 4845000 - DNA, 25 bp, Homo sapien
gtgctcttgtgtctacttccctcct

SEQ ID NO: 4845001 - DNA, 25 bp, Homo sapien
gaactgcactggattctaccttcat

SEQ ID NO: 4845002 - DNA, 25 bp, Homo sapien
catgtgggagtcagtatggcccaca

SEQ ID NO: 4845003 - DNA, 25 bp, Homo sapien
gcatctttgtcaggctttcttgata

SEQ ID NO: 4845004 - DNA, 25 bp, Homo sapien
tcatctgcagaagctcgggaacata

SEQ ID NO: 4845005 - DNA, 25 bp, Homo sapien
catgctttcggagtgtagtctttgc

SEQ ID NO: 4845006 - DNA, 25 bp, Homo sapien
aggatccatgctttcggagtgtagt

SEQ ID NO: 4845007 - DNA, 25 bp, Homo sapien
aagctcgggaacataggctgtccag

SEQ ID NO: 4845008 - DNA, 25 bp, Homo sapien
gtactccttgcttgtaatgccccat

SEQ ID NO: 4845009 - DNA, 25 bp, Homo sapien
gagtactccttgcttgtaatgcccc

SEQ ID NO: 4845010 - DNA, 25 bp, Homo sapien
cttgagtactccttgcttgtaatgc

SEQ ID NO: 4845011 - DNA, 25 bp, Homo sapien
tgagtactccttgcttgtaatgccc

SEQ ID NO: 4845012 - DNA, 25 bp, Homo sapien
cctccgagaatcgaagacataggga

SEQ ID NO: 4845013 - DNA, 25 bp, Homo sapien
ggcatttaatgttaccctccgagaa

SEQ ID NO: 4845014 - DNA, 25 bp, Homo sapien
cacgtagccccaaatgagaagtcca

SEQ ID NO: 4845015 - DNA, 25 bp, Homo sapien
ccccaaggatggcattggcatttaa

SEQ ID NO: 4845016 - DNA, 25 bp, Homo sapien
catgtctcttttgggtacatcagtg

SEQ ID NO: 4845017 - DNA, 25 bp, Homo sapien
atgtctcttttgggtacatcagtgt

SEQ ID NO: 4845018 - DNA, 25 bp, Homo sapien
acatgtctcttttgggtacatcagt

SEQ ID NO: 4845019 - DNA, 25 bp, Homo sapien
tgtctcttttgggtacatcagtgta

SEQ ID NO: 4845020 - DNA, 25 bp, Homo sapien
tctgctacgaaagcaccaaactcca

SEQ ID NO: 4845021 - DNA, 25 bp, Homo sapien
tcctttctgctacgaaagcaccaaa

SEQ ID NO: 4845022 - DNA, 25 bp, Homo sapien
gcaccaaactccaaacgtttactca

SEQ ID NO: 4845023 - DNA, 25 bp, Homo sapien
ctacgaaagcaccaaactccaaacg

SEQ ID NO: 4845024 - DNA, 25 bp, Homo sapien
gccaactgctgtaggatagctggaa

SEQ ID NO: 4845025 - DNA, 25 bp, Homo sapien
tctgtggcccttaggaaagatctct

SEQ ID NO: 4845026 - DNA, 25 bp, Homo sapien
gattttgagggttcgctgccaactg

SEQ ID NO: 4845027 - DNA, 25 bp, Homo sapien
gactagatcaagatcgttccctgac

SEQ ID NO: 4845028 - DNA, 25 bp, Homo sapien
ggattcagcataatccccagcttct

SEQ ID NO: 4845029 - DNA, 25 bp, Homo sapien
gattcagcataatccccagcttctc

SEQ ID NO: 4845030 - DNA, 25 bp, Homo sapien
ggccaccttccccaattaatccagc

SEQ ID NO: 4845031 - DNA, 25 bp, Homo sapien
taatccagcccactgggtaaattca

SEQ ID NO: 4845032 - DNA, 25 bp, Homo sapien
tgtataaagcgcacacagagacatc

SEQ ID NO: 4845033 - DNA, 25 bp, Homo sapien
ctgttcagcttgtgggaaggctctg

SEQ ID NO: 4845034 - DNA, 25 bp, Homo sapien
gatttgtaaattcattaccaacaag

SEQ ID NO: 4845035 - DNA, 25 bp, Homo sapien
gagacatcgaggtctgattcaccat

SEQ ID NO: 4845036 - DNA, 25 bp, Homo sapien
cacattgtgctgctggaacaaggct

SEQ ID NO: 4845037 - DNA, 25 bp, Homo sapien
ggcttttatcatcaaaccaaactcc

SEQ ID NO: 4845038 - DNA, 25 bp, Homo sapien
gctgctggaacaaggcttgcatttt

SEQ ID NO: 4845039 - DNA, 25 bp, Homo sapien
cattttcttgtaggcttttatcatc

SEQ ID NO: 4845040 - DNA, 25 bp, Homo sapien
gctagtgctaccaaggtatgaagag

SEQ ID NO: 4845041 - DNA, 25 bp, Homo sapien
ctccaggatgtctacccctcttctc

SEQ ID NO: 4845042 - DNA, 25 bp, Homo sapien
tccaggatgtctacccctcttctcc

SEQ ID NO: 4845043 - DNA, 25 bp, Homo sapien
tcttctcccacatgctagtgctacc

SEQ ID NO: 4845044 - DNA, 25 bp, Homo sapien
aaaattcctggttgtttgagcgagt

SEQ ID NO: 4845045 - DNA, 25 bp, Homo sapien
gtactgcccgtgattgtattttgtc

SEQ ID NO: 4845046 - DNA, 25 bp, Homo sapien
tgagcgagttgagttgtactgcccg

SEQ ID NO: 4845047 - DNA, 25 bp, Homo sapien
ttgtcgtttgcaatggacgccccac

SEQ ID NO: 4845048 - DNA, 25 bp, Homo sapien
gcagtcaatgggctatgcgatgctg

SEQ ID NO: 4845049 - DNA, 25 bp, Homo sapien
tgtgcagcgcctcttatcaatcact

SEQ ID NO: 4845050 - DNA, 25 bp, Homo sapien
tccactgagcgtttggtggcagtca

SEQ ID NO: 4845051 - DNA, 25 bp, Homo sapien
tgggctatgcgatgctggtgaacct

SEQ ID NO: 4845052 - DNA, 25 bp, Homo sapien
ttctaggtgcagggagtccctgcag

SEQ ID NO: 4845053 - DNA, 25 bp, Homo sapien
cttctaggtgcagggagtccctgca

SEQ ID NO: 4845054 - DNA, 25 bp, Homo sapien
tgtaggcaggcagatagtctggagc

SEQ ID NO: 4845055 - DNA, 25 bp, Homo sapien
tagtgatatcgaaatagcacagtct

SEQ ID NO: 4845056 - DNA, 25 bp, Homo sapien
tgccatatagtgatatcgaaatagc

SEQ ID NO: 4845057 - DNA, 25 bp, Homo sapien
caatggcaatgccatatagtgatat

SEQ ID NO: 4845058 - DNA, 25 bp, Homo sapien
taaacccatggggaatattgggtga

SEQ ID NO: 4845059 - DNA, 25 bp, Homo sapien
ctgtaaacccatggggaatattggg

SEQ ID NO: 4845060 - DNA, 25 bp, Homo sapien
tgggtgagggcacagacctctgtaa

SEQ ID NO: 4845061 - DNA, 25 bp, Homo sapien
aaacccatggggaatattgggtgag

SEQ ID NO: 4845062 - DNA, 25 bp, Homo sapien
ccacagcagctcgtgagggtcttca

SEQ ID NO: 4845063 - DNA, 25 bp, Homo sapien
tgacaatggagatcagcttgcaccc

SEQ ID NO: 4845064 - DNA, 25 bp, Homo sapien
tcatgggcatctgtgtactgacaat

SEQ ID NO: 4845065 - DNA, 25 bp, Homo sapien
tatatccacggcattattcatgggc

SEQ ID NO: 4845066 - DNA, 25 bp, Homo sapien
tctgcaacttccctcgaaaaagctt

SEQ ID NO: 4845067 - DNA, 25 bp, Homo sapien
actgtagtccagtccccgtgcttgg

SEQ ID NO: 4845068 - DNA, 25 bp, Homo sapien
gagattatttactggcattctcttc

SEQ ID NO: 4845069 - DNA, 25 bp, Homo sapien
ccatccagggtagcgaagcagctga

SEQ ID NO: 4845070 - DNA, 25 bp, Homo sapien
tcttcatggcaaagcttcagatcca

SEQ ID NO: 4845071 - DNA, 25 bp, Homo sapien
gaggaggtgcatggtgcctcttcat

SEQ ID NO: 4845072 - DNA, 25 bp, Homo sapien
ttcatggcaaagcttcagatccata

SEQ ID NO: 4845073 - DNA, 25 bp, Homo sapien
gaatgaggaggtgcatggtgcctct

SEQ ID NO: 4845074 - DNA, 25 bp, Homo sapien
gaaaagtctcttccagtatcctgtt

SEQ ID NO: 4845075 - DNA, 25 bp, Homo sapien
aggaaaagtctcttccagtatcctg

SEQ ID NO: 4845076 - DNA, 25 bp, Homo sapien
aagtctcttccagtatcctgttacc

SEQ ID NO: 4845077 - DNA, 25 bp, Homo sapien
aaaagtctcttccagtatcctgtta

SEQ ID NO: 4845078 - DNA, 25 bp, Homo sapien
tgaccactgggctgggatctctgag

SEQ ID NO: 4845079 - DNA, 25 bp, Homo sapien
gctgggatctctgagcagcagacac

SEQ ID NO: 4845080 - DNA, 25 bp, Homo sapien
tgggatctctgagcagcagacactg

SEQ ID NO: 4845081 - DNA, 25 bp, Homo sapien
actgggctgggatctctgagcagca

SEQ ID NO: 4845082 - DNA, 25 bp, Homo sapien
gaaggctaccagctgtgcctgacct

SEQ ID NO: 4845083 - DNA, 25 bp, Homo sapien
ccttgtggggaagcatgctcattgg

SEQ ID NO: 4845084 - DNA, 25 bp, Homo sapien
ttggtcatgccatgaggagggcaca

SEQ ID NO: 4845085 - DNA, 25 bp, Homo sapien
tgctctgctccacgagccacattgt

SEQ ID NO: 4845086 - DNA, 25 bp, Homo sapien
ccctttgctccagttgacaaccaaa

SEQ ID NO: 4845087 - DNA, 25 bp, Homo sapien
ctttgctccagttgacaaccaaatg

SEQ ID NO: 4845088 - DNA, 25 bp, Homo sapien
ttgctccagttgacaaccaaatgtc

SEQ ID NO: 4845089 - DNA, 25 bp, Homo sapien
accctttgctccagttgacaaccaa

SEQ ID NO: 4845090 - DNA, 25 bp, Homo sapien
acctttgttccatcgagcccaattg

SEQ ID NO: 4845091 - DNA, 25 bp, Homo sapien
tcatctcttggttgagcagacatag

SEQ ID NO: 4845092 - DNA, 25 bp, Homo sapien
cagacataggaaaacttcctgggct

SEQ ID NO: 4845093 - DNA, 25 bp, Homo sapien
ttgttccatcgagcccaattgtccc

SEQ ID NO: 4845094 - DNA, 25 bp, Homo sapien
aaccagcaagcgctgatctttttct

SEQ ID NO: 4845095 - DNA, 25 bp, Homo sapien
gatagaactggtttcttataaccag

SEQ ID NO: 4845096 - DNA, 25 bp, Homo sapien
ttcttataaccagcaagcgctgatc

SEQ ID NO: 4845097 - DNA, 25 bp, Homo sapien
ttggcgtaggcatcgggatagaact

SEQ ID NO: 4845098 - DNA, 25 bp, Homo sapien
tatatgttaagaggacaccactgtc

SEQ ID NO: 4845099 - DNA, 25 bp, Homo sapien
caccactgtcaagataaaaactgtc

SEQ ID NO: 4845100 - DNA, 25 bp, Homo sapien
tagaaagccctctcgcatggtgaat

SEQ ID NO: 4845101 - DNA, 25 bp, Homo sapien
tatccattcattagtgtggcaagca

SEQ ID NO: 4845102 - DNA, 25 bp, Homo sapien
gtccgtcctgctacaaaacgctagg

SEQ ID NO: 4845103 - DNA, 25 bp, Homo sapien
gctcgcaggctgaagtttccaaatc

SEQ ID NO: 4845104 - DNA, 25 bp, Homo sapien
tgcaccctcgatgctttgcttagat

SEQ ID NO: 4845105 - DNA, 25 bp, Homo sapien
cctccatttggatgacgaattctgt

SEQ ID NO: 4845106 - DNA, 25 bp, Homo sapien
tcaagtaggcatacacacaagaggt

SEQ ID NO: 4845107 - DNA, 25 bp, Homo sapien
tctgcaaccgaagtatttccaagtc

SEQ ID NO: 4845108 - DNA, 25 bp, Homo sapien
tctcagtgcctacttgggtccttcc

SEQ ID NO: 4845109 - DNA, 25 bp, Homo sapien
gaagtttgtgcgtcaaacccatcat

SEQ ID NO: 4845110 - DNA, 25 bp, Homo sapien
tgggatgtttggcaatagcataatt

SEQ ID NO: 4845111 - DNA, 25 bp, Homo sapien
ggatgtttggcaatagcataattcc

SEQ ID NO: 4845112 - DNA, 25 bp, Homo sapien
gggatgtttggcaatagcataattc

SEQ ID NO: 4845113 - DNA, 25 bp, Homo sapien
ctgggatgtttggcaatagcataat

SEQ ID NO: 4845114 - DNA, 25 bp, Homo sapien
taggaatgccgctaaaaacgccacc

SEQ ID NO: 4845115 - DNA, 25 bp, Homo sapien
tagggtggctgatgagttccacagc

SEQ ID NO: 4845116 - DNA, 25 bp, Homo sapien
tgttttctacccaacaagaggcacg

SEQ ID NO: 4845117 - DNA, 25 bp, Homo sapien
gatacttgttttgcgattccttccg

SEQ ID NO: 4845118 - DNA, 25 bp, Homo sapien
tcttgagcacaactgagaagtcata

SEQ ID NO: 4845119 - DNA, 25 bp, Homo sapien
cactgatgtgcccttcttgagcaca

SEQ ID NO: 4845120 - DNA, 25 bp, Homo sapien
tgcccttcttgagcacaactgagaa

SEQ ID NO: 4845121 - DNA, 25 bp, Homo sapien
gatgtgcccttcttgagcacaactg

SEQ ID NO: 4845122 - DNA, 25 bp, Homo sapien
tgggaatccacttcttggcgttcct

SEQ ID NO: 4845123 - DNA, 25 bp, Homo sapien
ctcattatgtttgggaatccacttc

SEQ ID NO: 4845124 - DNA, 25 bp, Homo sapien
acttcttggcgttcctggaatgctc

SEQ ID NO: 4845125 - DNA, 25 bp, Homo sapien
tcttggcgttcctggaatgctccat

SEQ ID NO: 4845126 - DNA, 25 bp, Homo sapien
ttccaggagcatgggcttggtcctg

SEQ ID NO: 4845127 - DNA, 25 bp, Homo sapien
tacagtgggtatattcagcgtagtc

SEQ ID NO: 4845128 - DNA, 25 bp, Homo sapien
cgccctgttcttggtagtttgcaat

SEQ ID NO: 4845129 - DNA, 25 bp, Homo sapien
gattaagaggcacatctctcgccct

SEQ ID NO: 4845130 - DNA, 25 bp, Homo sapien
ccaatgccgagaattcctgcatgca

SEQ ID NO: 4845131 - DNA, 25 bp, Homo sapien
ccccaatgccgagaattcctgcatg

SEQ ID NO: 4845132 - DNA, 25 bp, Homo sapien
tctttcccccaatgccgagaattcc

SEQ ID NO: 4845133 - DNA, 25 bp, Homo sapien
aatgccgagaattcctgcatgcaag

SEQ ID NO: 4845134 - DNA, 25 bp, Homo sapien
ttgagacggtggctaacaggtgaca

SEQ ID NO: 4845135 - DNA, 25 bp, Homo sapien
tgttagtaactagccctacacccag

SEQ ID NO: 4845136 - DNA, 25 bp, Homo sapien
gaaaattaggtacaatgcctctgca

SEQ ID NO: 4845137 - DNA, 25 bp, Homo sapien
gcctcagtaggatgttgtcagaaac

SEQ ID NO: 4845138 - DNA, 25 bp, Homo sapien
gggctcggacccctctatagcacag

SEQ ID NO: 4845139 - DNA, 25 bp, Homo sapien
gccatgggccatatgataaacgtca

SEQ ID NO: 4845140 - DNA, 25 bp, Homo sapien
tctacccaatctttgcggatggttg

SEQ ID NO: 4845141 - DNA, 25 bp, Homo sapien
ggtcaggattgcaccattggcccac

SEQ ID NO: 4845142 - DNA, 25 bp, Homo sapien
ccatggttctcagatgggtcaggtg

SEQ ID NO: 4845143 - DNA, 25 bp, Homo sapien
gggatgatgttccagcaaccacttc

SEQ ID NO: 4845144 - DNA, 25 bp, Homo sapien
ggccggggatgatgttccagcaacc

SEQ ID NO: 4845145 - DNA, 25 bp, Homo sapien
caccgccccttccccatggttctca

SEQ ID NO: 4845146 - DNA, 25 bp, Homo sapien
ctcagctgattctgaggctaggggc

SEQ ID NO: 4845147 - DNA, 25 bp, Homo sapien
ttaagtaagtctgaatggggcccag

SEQ ID NO: 4845148 - DNA, 25 bp, Homo sapien
gatgtaattaagtaagtctgaatgg

SEQ ID NO: 4845149 - DNA, 25 bp, Homo sapien
gctaggggcacgcaggcagtatacc

SEQ ID NO: 4845150 - DNA, 25 bp, Homo sapien
gcagcaggaagctgtgcagagccca

SEQ ID NO: 4845151 - DNA, 25 bp, Homo sapien
aggaacctggatgcccccaggcact

SEQ ID NO: 4845152 - DNA, 25 bp, Homo sapien
aggcactggggcagcggctatcccc

SEQ ID NO: 4845153 - DNA, 25 bp, Homo sapien
ccagcaggaggaacctggatgcccc

SEQ ID NO: 4845154 - DNA, 25 bp, Homo sapien
tcgtcagtctgtctcaagcataggg

SEQ ID NO: 4845155 - DNA, 25 bp, Homo sapien
tacctagatccacctgttttcgtca

SEQ ID NO: 4845156 - DNA, 25 bp, Homo sapien
ggagggtagcagagactgattttac

SEQ ID NO: 4845157 - DNA, 25 bp, Homo sapien
ggtgctggattcagagcttgagtcc

SEQ ID NO: 4845158 - DNA, 25 bp, Homo sapien
tcagcactttaacttctattctcca

SEQ ID NO: 4845159 - DNA, 25 bp, Homo sapien
cagtctgctatctcctatcttcttt

SEQ ID NO: 4845160 - DNA, 25 bp, Homo sapien
tctgaatgtgggcttttccttatct

SEQ ID NO: 4845161 - DNA, 25 bp, Homo sapien
cacatatataattagggatatatcc

SEQ ID NO: 4845162 - DNA, 25 bp, Homo sapien
tcttttccatgcattagggacttgg

SEQ ID NO: 4845163 - DNA, 25 bp, Homo sapien
ttttccatgcattagggacttggct

SEQ ID NO: 4845164 - DNA, 25 bp, Homo sapien
tgaggaggatcactcagtgttaaca

SEQ ID NO: 4845165 - DNA, 25 bp, Homo sapien
gatcactcagtgttaacacatggct

SEQ ID NO: 4845166 - DNA, 25 bp, Homo sapien
gagagtttggccacttaaaccaggc

SEQ ID NO: 4845167 - DNA, 25 bp, Homo sapien
caaatgccttaggaacggtggccaa

SEQ ID NO: 4845168 - DNA, 25 bp, Homo sapien
gaacctaaagttttgccagcccagc

SEQ ID NO: 4845169 - DNA, 25 bp, Homo sapien
tataatagatctcagcaaatgcgtc

SEQ ID NO: 4845170 - DNA, 25 bp, Homo sapien
caagcacctcaattagcaaatgcat

SEQ ID NO: 4845171 - DNA, 25 bp, Homo sapien
cagtggggagtaccagctgttagac

SEQ ID NO: 4845172 - DNA, 25 bp, Homo sapien
ttagacaagggagcgcggatgacct

SEQ ID NO: 4845173 - DNA, 25 bp, Homo sapien
agcaagcacctcaattagcaaatgc

SEQ ID NO: 4845174 - DNA, 25 bp, Homo sapien
ttacataacagcttccaagggccag

SEQ ID NO: 4845175 - DNA, 25 bp, Homo sapien
cagttatcaacaacagtctgggttc

SEQ ID NO: 4845176 - DNA, 25 bp, Homo sapien
gactgcccggaggagcaatttctgt

SEQ ID NO: 4845177 - DNA, 25 bp, Homo sapien
tctgtatcaagaatttcctggcctg

SEQ ID NO: 4845178 - DNA, 25 bp, Homo sapien
ttctgctttgttctgttcttctttc

SEQ ID NO: 4845179 - DNA, 25 bp, Homo sapien
tctttctgctttgttctgttcttct

SEQ ID NO: 4845180 - DNA, 25 bp, Homo sapien
gctttgttctgttcttctttccttc

SEQ ID NO: 4845181 - DNA, 25 bp, Homo sapien
ctctgtctttctgctttgttctgtt

SEQ ID NO: 4845182 - DNA, 25 bp, Homo sapien
caccacccgcggtcactgtgtgttt

SEQ ID NO: 4845183 - DNA, 25 bp, Homo sapien
gcacccgcgttccaggatcagggat

SEQ ID NO: 4845184 - DNA, 25 bp, Homo sapien
tgtctcccaggaaggatcctacact

SEQ ID NO: 4845185 - DNA, 25 bp, Homo sapien
ctctggcagcaaaggcaacaccacc

SEQ ID NO: 4845186 - DNA, 25 bp, Homo sapien
cacatcccctgacccttattaggct

SEQ ID NO: 4845187 - DNA, 25 bp, Homo sapien
tattttagggcggctgcatggacca

SEQ ID NO: 4845188 - DNA, 25 bp, Homo sapien
tgcatctgtctgctgttagctgcat

SEQ ID NO: 4845189 - DNA, 25 bp, Homo sapien
gggctggatgaacttgcatctgtct

SEQ ID NO: 4845190 - DNA, 25 bp, Homo sapien
ttaggatgtttacaggggtccaata

SEQ ID NO: 4845191 - DNA, 25 bp, Homo sapien
aggatgtttacaggggtccaataga

SEQ ID NO: 4845192 - DNA, 25 bp, Homo sapien
cttccgatatggacagcaagactga

SEQ ID NO: 4845193 - DNA, 25 bp, Homo sapien
ccgatatggacagcaagactgaaga

SEQ ID NO: 4845194 - DNA, 25 bp, Homo sapien
agaagctggcaggagcatcctcttc

SEQ ID NO: 4845195 - DNA, 25 bp, Homo sapien
cactgggaggattggaaaatactgc

SEQ ID NO: 4845196 - DNA, 25 bp, Homo sapien
tgaatattcatagcctgggagcccc

SEQ ID NO: 4845197 - DNA, 25 bp, Homo sapien
gggagagtgatgtaggtgtgtggga

SEQ ID NO: 4845198 - DNA, 25 bp, Homo sapien
tgttcattttcgagccagcaattac

SEQ ID NO: 4845199 - DNA, 25 bp, Homo sapien
caattacagggaagatggtcaggag

SEQ ID NO: 4845200 - DNA, 25 bp, Homo sapien
gattggagaggaaacggcccttgac

SEQ ID NO: 4845201 - DNA, 25 bp, Homo sapien
tagttcgtcacaagggagatatggg

SEQ ID NO: 4845202 - DNA, 25 bp, Homo sapien
caaacttgagtaataggggatgacg

SEQ ID NO: 4845203 - DNA, 25 bp, Homo sapien
tggcaatatccatctcaaactcaaa

SEQ ID NO: 4845204 - DNA, 25 bp, Homo sapien
taggggatgacggtggcaatatcca

SEQ ID NO: 4845205 - DNA, 25 bp, Homo sapien
gtggcaatatccatctcaaactcaa

SEQ ID NO: 4845206 - DNA, 25 bp, Homo sapien
gctgttttccggctggtaagctctt

SEQ ID NO: 4845207 - DNA, 25 bp, Homo sapien
gaacaggtctttatcacaacactta

SEQ ID NO: 4845208 - DNA, 25 bp, Homo sapien
caggtctttatcacaacacttatca

SEQ ID NO: 4845209 - DNA, 25 bp, Homo sapien
caagaacaggtctttatcacaacac

SEQ ID NO: 4845210 - DNA, 25 bp, Homo sapien
aggtctttatcacaacacttatcag

SEQ ID NO: 4845211 - DNA, 25 bp, Homo sapien
aaaggtgattggaactatgtggtca

SEQ ID NO: 4845212 - DNA, 25 bp, Homo sapien
aaggtgattggaactatgtggtcat

SEQ ID NO: 4845213 - DNA, 25 bp, Homo sapien
aggtgattggaactatgtggtcatt

SEQ ID NO: 4845214 - DNA, 25 bp, Homo sapien
caaaggtgattggaactatgtggtc

SEQ ID NO: 4845215 - DNA, 25 bp, Homo sapien
tggggtaaccgtaagcaatcaagga

SEQ ID NO: 4845216 - DNA, 25 bp, Homo sapien
tgtgctgtactagttttgaaggaac

SEQ ID NO: 4845217 - DNA, 25 bp, Homo sapien
ctgagggcagtaagatgagctgaat

SEQ ID NO: 4845218 - DNA, 25 bp, Homo sapien
cacacattttgtacgctgtgctgta

SEQ ID NO: 4845219 - DNA, 25 bp, Homo sapien
caggcactgtctgggtagggcacat

SEQ ID NO: 4845220 - DNA, 25 bp, Homo sapien
caacaggtgtctgtctactttctgt

SEQ ID NO: 4845221 - DNA, 25 bp, Homo sapien
aacaggtgtctgtctactttctgtt

SEQ ID NO: 4845222 - DNA, 25 bp, Homo sapien
acaggtgtctgtctactttctgttc

SEQ ID NO: 4845223 - DNA, 25 bp, Homo sapien
ggtcaggaagttgttctccaccttg

SEQ ID NO: 4845224 - DNA, 25 bp, Homo sapien
aggtcaggaagttgttctccacctt

SEQ ID NO: 4845225 - DNA, 25 bp, Homo sapien
agaaggtcaggaagttgttctccac

SEQ ID NO: 4845226 - DNA, 25 bp, Homo sapien
gaaggtcaggaagttgttctccacc

SEQ ID NO: 4845227 - DNA, 25 bp, Homo sapien
gaacgtttatgatggatactactgg

SEQ ID NO: 4845228 - DNA, 25 bp, Homo sapien
cctcttttggaacgtttatgatgga

SEQ ID NO: 4845229 - DNA, 25 bp, Homo sapien
tactggttgactcacttaaggccca

SEQ ID NO: 4845230 - DNA, 25 bp, Homo sapien
tatgatggatactactggttgactc

SEQ ID NO: 4845231 - DNA, 25 bp, Homo sapien
gcgagaagagcattcagagaaaatg

SEQ ID NO: 4845232 - DNA, 25 bp, Homo sapien
ggcgagaagagcattcagagaaaat

SEQ ID NO: 4845233 - DNA, 25 bp, Homo sapien
taggcgagaagagcattcagagaaa

SEQ ID NO: 4845234 - DNA, 25 bp, Homo sapien
gtaggcgagaagagcattcagagaa

SEQ ID NO: 4845235 - DNA, 25 bp, Homo sapien
aggcttccatgcactgattaccgct

SEQ ID NO: 4845236 - DNA, 25 bp, Homo sapien
actgattaccgctgaggccttgcca

SEQ ID NO: 4845237 - DNA, 25 bp, Homo sapien
tgaggccttgccattccagtagctg

SEQ ID NO: 4845238 - DNA, 25 bp, Homo sapien
ttgccattccagtagctgtatctct

SEQ ID NO: 4845239 - DNA, 25 bp, Homo sapien
cgttggtggttaccattttgccttg

SEQ ID NO: 4845240 - DNA, 25 bp, Homo sapien
ttgcccccgatgactggctgtcttc

SEQ ID NO: 4845241 - DNA, 25 bp, Homo sapien
ttgggcagccttgcccccgatgact

SEQ ID NO: 4845242 - DNA, 25 bp, Homo sapien
tggttaccattttgccttgggcagc

SEQ ID NO: 4845243 - DNA, 25 bp, Homo sapien
gcgggtgtcggaagaaagcaatggg

SEQ ID NO: 4845244 - DNA, 25 bp, Homo sapien
ctgtgcgggtgtcggaagaaagcaa

SEQ ID NO: 4845245 - DNA, 25 bp, Homo sapien
gtgcgggtgtcggaagaaagcaatg

SEQ ID NO: 4845246 - DNA, 25 bp, Homo sapien
tgcgggtgtcggaagaaagcaatgg

SEQ ID NO: 4845247 - DNA, 25 bp, Homo sapien
taaccagctcagatcttgcagccaa

SEQ ID NO: 4845248 - DNA, 25 bp, Homo sapien
tgtggcttgctgctccattgtcgga

SEQ ID NO: 4845249 - DNA, 25 bp, Homo sapien
cttatcgcggtgatgcacatgggct

SEQ ID NO: 4845250 - DNA, 25 bp, Homo sapien
cattgtcggatgagctacaaaggct

SEQ ID NO: 4845251 - DNA, 25 bp, Homo sapien
tttttgatccaaactgccccaggta

SEQ ID NO: 4845252 - DNA, 25 bp, Homo sapien
gggcaaagcatggaatccccgggct

SEQ ID NO: 4845253 - DNA, 25 bp, Homo sapien
taagggaggccaacaattccgtctc

SEQ ID NO: 4845254 - DNA, 25 bp, Homo sapien
atatataaccgagtgtccagcccag

SEQ ID NO: 4845255 - DNA, 25 bp, Homo sapien
aaggaacttcgggagcaattgctga

SEQ ID NO: 4845256 - DNA, 25 bp, Homo sapien
aatagacatcaaaggaacttcggga

SEQ ID NO: 4845257 - DNA, 25 bp, Homo sapien
tgctgaatttccgaagtaaacaggg

SEQ ID NO: 4845258 - DNA, 25 bp, Homo sapien
gggagcaattgctgaatttccgaag

SEQ ID NO: 4845259 - DNA, 25 bp, Homo sapien
gacccctcggcacatcaagaagatg

SEQ ID NO: 4845260 - DNA, 25 bp, Homo sapien
ttctaggaggtgtcaatctcatcgc

SEQ ID NO: 4845261 - DNA, 25 bp, Homo sapien
tcccttggctcagcggagaatctag

SEQ ID NO: 4845262 - DNA, 25 bp, Homo sapien
gaaatagcttctccataatgcaatg

SEQ ID NO: 4845263 - DNA, 25 bp, Homo sapien
ggtgctggtcgtttggccagggctg

SEQ ID NO: 4845264 - DNA, 25 bp, Homo sapien
gagaggtgctggtcgtttggccagg

SEQ ID NO: 4845265 - DNA, 25 bp, Homo sapien
gaggtgctggtcgtttggccagggc

SEQ ID NO: 4845266 - DNA, 25 bp, Homo sapien
ctgagaggtgctggtcgtttggcca

SEQ ID NO: 4845267 - DNA, 25 bp, Homo sapien
ctgcaccccttgcatcagggccagc

SEQ ID NO: 4845268 - DNA, 25 bp, Homo sapien
caccccttgcatcagggccagcact

SEQ ID NO: 4845269 - DNA, 25 bp, Homo sapien
aggcaggggctgctttgtctcgcat

SEQ ID NO: 4845270 - DNA, 25 bp, Homo sapien
cagggccagcactgtccaggcaggg

SEQ ID NO: 4845271 - DNA, 25 bp, Homo sapien
tggaggccgaatgcctgtgctctgg

SEQ ID NO: 4845272 - DNA, 25 bp, Homo sapien
tggatgcagattaggaggtgtctcc

SEQ ID NO: 4845273 - DNA, 25 bp, Homo sapien
ccttggaggccttgcttggagaggt

SEQ ID NO: 4845274 - DNA, 25 bp, Homo sapien
cctattaaggccattgctggaggag

SEQ ID NO: 4845275 - DNA, 25 bp, Homo sapien
gtactttgcctacacttctgaagga

SEQ ID NO: 4845276 - DNA, 25 bp, Homo sapien
gcctacacttctgaaggaaattatc

SEQ ID NO: 4845277 - DNA, 25 bp, Homo sapien
ggtagtgtactttgcctacacttct

SEQ ID NO: 4845278 - DNA, 25 bp, Homo sapien
actttgcctacacttctgaaggaaa

SEQ ID NO: 4845279 - DNA, 25 bp, Homo sapien
tgcttctgacgagaagcttctgttc

SEQ ID NO: 4845280 - DNA, 25 bp, Homo sapien
ataatctgcttctgacgagaagctt

SEQ ID NO: 4845281 - DNA, 25 bp, Homo sapien
tctgcttctgacgagaagcttctgt

SEQ ID NO: 4845282 - DNA, 25 bp, Homo sapien
aatctgcttctgacgagaagcttct

SEQ ID NO: 4845283 - DNA, 25 bp, Homo sapien
agcaggtggttgctgcgcctgtgga

SEQ ID NO: 4845284 - DNA, 25 bp, Homo sapien
gcaggtggttgctgcgcctgtggag

SEQ ID NO: 4845285 - DNA, 25 bp, Homo sapien
cagcaggtggttgctgcgcctgtgg

SEQ ID NO: 4845286 - DNA, 25 bp, Homo sapien
cctttctggtgttccgttctgctga

SEQ ID NO: 4845287 - DNA, 25 bp, Homo sapien
gacgttcggtgtgaactgaatatgc

SEQ ID NO: 4845288 - DNA, 25 bp, Homo sapien
ctgaatatgctactaatgttacctc

SEQ ID NO: 4845289 - DNA, 25 bp, Homo sapien
gattttcataatgacgttcggtgtg

SEQ ID NO: 4845290 - DNA, 25 bp, Homo sapien
ggtgcagacgtgaacatcagcagaa

SEQ ID NO: 4845291 - DNA, 25 bp, Homo sapien
ggtagaaggtgcagacgtgaacatc

SEQ ID NO: 4845292 - DNA, 25 bp, Homo sapien
gaaataagttcattagctaatttcc

SEQ ID NO: 4845293 - DNA, 25 bp, Homo sapien
tgggagtagggtagaaggtgcagac

SEQ ID NO: 4845294 - DNA, 25 bp, Homo sapien
gaatcatgacttcttcaatgtcacc

SEQ ID NO: 4845295 - DNA, 25 bp, Homo sapien
tcttgggataatgggaatcatgact

SEQ ID NO: 4845296 - DNA, 25 bp, Homo sapien
ggaatcatgacttcttcaatgtcac

SEQ ID NO: 4845297 - DNA, 25 bp, Homo sapien
agctcttgggataatgggaatcatg

SEQ ID NO: 4845298 - DNA, 25 bp, Homo sapien
cactgtggtcgtaacagcacagggc

SEQ ID NO: 4845299 - DNA, 25 bp, Homo sapien
caggtctgtcaacagaagccactgg

SEQ ID NO: 4845300 - DNA, 25 bp, Homo sapien
ctagagaaggcgagttgctgatcac

SEQ ID NO: 4845301 - DNA, 25 bp, Homo sapien
ttttgattgtgagcacaggtctgtc

SEQ ID NO: 4845302 - DNA, 25 bp, Homo sapien
gaaggcatggcagggtttacacaat

SEQ ID NO: 4845303 - DNA, 25 bp, Homo sapien
tgctggaaacccgactagcctctag

SEQ ID NO: 4845304 - DNA, 25 bp, Homo sapien
cttcaggtagggatgcacaggctgc

SEQ ID NO: 4845305 - DNA, 25 bp, Homo sapien
caggctgcatagaacggaaggaaac

SEQ ID NO: 4845306 - DNA, 25 bp, Homo sapien
tacaggtaggatcagggtgacaaca

SEQ ID NO: 4845307 - DNA, 25 bp, Homo sapien
atacaggtaggatcagggtgacaac

SEQ ID NO: 4845308 - DNA, 25 bp, Homo sapien
acaggtaggatcagggtgacaacaa

SEQ ID NO: 4845309 - DNA, 25 bp, Homo sapien
acagctttgcacaagcagaagagaa

SEQ ID NO: 4845310 - DNA, 25 bp, Homo sapien
cagggatcttcccactggtgccatt

SEQ ID NO: 4845311 - DNA, 25 bp, Homo sapien
agggcagggatcttcccactggtgc

SEQ ID NO: 4845312 - DNA, 25 bp, Homo sapien
gctttgcacaagcagaagagaatct

SEQ ID NO: 4845313 - DNA, 25 bp, Homo sapien
ctgttattagggtcagagaagggct

SEQ ID NO: 4845314 - DNA, 25 bp, Homo sapien
gtttgtgtggttctggctgtataaa

SEQ ID NO: 4845315 - DNA, 25 bp, Homo sapien
tgattcagaagggtggccttgccag

SEQ ID NO: 4845316 - DNA, 25 bp, Homo sapien
attcagaagggtggccttgccagac

SEQ ID NO: 4845317 - DNA, 25 bp, Homo sapien
taaatgttcacaagatacatgcttt

SEQ ID NO: 4845318 - DNA, 25 bp, Homo sapien
tcacaagatacatgctttccttctc

SEQ ID NO: 4845319 - DNA, 25 bp, Homo sapien
cagacaagctgtcgtcctggagaga

SEQ ID NO: 4845320 - DNA, 25 bp, Homo sapien
atcagacaagctgtcgtcctggaga

SEQ ID NO: 4845321 - DNA, 25 bp, Homo sapien
tcagacaagctgtcgtcctggagag

SEQ ID NO: 4845322 - DNA, 25 bp, Homo sapien
agacaagctgtcgtcctggagagat

SEQ ID NO: 4845323 - DNA, 25 bp, Homo sapien
tccgaggacgttctgaattgcatgc

SEQ ID NO: 4845324 - DNA, 25 bp, Homo sapien
ttagtcctcaccacgtctcctctgt

SEQ ID NO: 4845325 - DNA, 25 bp, Homo sapien
cgtctcctctgtgactgtaggaagt

SEQ ID NO: 4845326 - DNA, 25 bp, Homo sapien
tggtcctccgaggacgttctgaatt

SEQ ID NO: 4845327 - DNA, 25 bp, Homo sapien
catggaactatcaagtccaatgctg

SEQ ID NO: 4845328 - DNA, 25 bp, Homo sapien
ttagtaattccaggtctgacacatg

SEQ ID NO: 4845329 - DNA, 25 bp, Homo sapien
ctgacacatggaactatcaagtcca

SEQ ID NO: 4845330 - DNA, 25 bp, Homo sapien
ggaactatcaagtccaatgctgatc

SEQ ID NO: 4845331 - DNA, 25 bp, Homo sapien
tcttgttagtgctcccacattgaac

SEQ ID NO: 4845332 - DNA, 25 bp, Homo sapien
gcctctgtatctatttcttgttagt

SEQ ID NO: 4845333 - DNA, 25 bp, Homo sapien
tagcgtcacgttgcctctgtatcta

SEQ ID NO: 4845334 - DNA, 25 bp, Homo sapien
cagtgtcaaaggcagttagcgtcac

SEQ ID NO: 4845335 - DNA, 25 bp, Homo sapien
tgtacctctttaacttaatcactgt

SEQ ID NO: 4845336 - DNA, 25 bp, Homo sapien
tgaaattgttataccattcttggtt

SEQ ID NO: 4845337 - DNA, 25 bp, Homo sapien
cctctttaacttaatcactgtctct

SEQ ID NO: 4845338 - DNA, 25 bp, Homo sapien
gattataatgtacctctttaactta

SEQ ID NO: 4845339 - DNA, 25 bp, Homo sapien
gccagccaacttgtcatcttccatg

SEQ ID NO: 4845340 - DNA, 25 bp, Homo sapien
cagccaacttgtcatcttccatgtg

SEQ ID NO: 4845341 - DNA, 25 bp, Homo sapien
aggccagccaacttgtcatcttcca

SEQ ID NO: 4845342 - DNA, 25 bp, Homo sapien
gccaacttgtcatcttccatgtggc

SEQ ID NO: 4845343 - DNA, 25 bp, Homo sapien
ttcagggactccacaagatcttccc

SEQ ID NO: 4845344 - DNA, 25 bp, Homo sapien
agggactccacaagatcttcccact

SEQ ID NO: 4845345 - DNA, 25 bp, Homo sapien
agatcttcccactctattgtccctt

SEQ ID NO: 4845346 - DNA, 25 bp, Homo sapien
aagatcttcccactctattgtccct

SEQ ID NO: 4845347 - DNA, 25 bp, Homo sapien
gtctttcatcctgtggacctgctgg

SEQ ID NO: 4845348 - DNA, 25 bp, Homo sapien
gctggataatctccagcatgatgga

SEQ ID NO: 4845349 - DNA, 25 bp, Homo sapien
gctacaaacaggagattctttgtct

SEQ ID NO: 4845350 - DNA, 25 bp, Homo sapien
aaggccgtgactgcatcgtcttgct

SEQ ID NO: 4845351 - DNA, 25 bp, Homo sapien
ctcatctattcctgtcaattgcttc

SEQ ID NO: 4845352 - DNA, 25 bp, Homo sapien
aattgcttctccgttgtgaagaaga

SEQ ID NO: 4845353 - DNA, 25 bp, Homo sapien
cctgtcaattgcttctccgttgtga

SEQ ID NO: 4845354 - DNA, 25 bp, Homo sapien
tctattcctgtcaattgcttctccg

SEQ ID NO: 4845355 - DNA, 25 bp, Homo sapien
ccaaaccaactcttgacccctccat

SEQ ID NO: 4845356 - DNA, 25 bp, Homo sapien
atcctaactcctggattgggcttga

SEQ ID NO: 4845357 - DNA, 25 bp, Homo sapien
ggaaaaggaaggacagccacagcct

SEQ ID NO: 4845358 - DNA, 25 bp, Homo sapien
gtcctgggctgaaagctgtccaggg

SEQ ID NO: 4845359 - DNA, 25 bp, Homo sapien
tccttcaggtcctgggctgaaagct

SEQ ID NO: 4845360 - DNA, 25 bp, Homo sapien
tccaggactccagggagaggaaaag

SEQ ID NO: 4845361 - DNA, 25 bp, Homo sapien
tcttttaccaccaaccacgttgctc

SEQ ID NO: 4845362 - DNA, 25 bp, Homo sapien
gtccactgcaatgggacacacttcc

SEQ ID NO: 4845363 - DNA, 25 bp, Homo sapien
cacatctgctcaattcaaagagaga

SEQ ID NO: 4845364 - DNA, 25 bp, Homo sapien
aaagagagagcagactgggaggact

SEQ ID NO: 4845365 - DNA, 25 bp, Homo sapien
tgtggtggctgctctcccgaggtcc

SEQ ID NO: 4845366 - DNA, 25 bp, Homo sapien
tcttccggacggtgggtgtggtggc

SEQ ID NO: 4845367 - DNA, 25 bp, Homo sapien
gtggcagctgggagagtctacatag

SEQ ID NO: 4845368 - DNA, 25 bp, Homo sapien
cagctggtgcatgttgcgggagtta

SEQ ID NO: 4845369 - DNA, 25 bp, Homo sapien
tcaacatccaagccccgtgcaggat

SEQ ID NO: 4845370 - DNA, 25 bp, Homo sapien
catccaagccccgtgcaggatgatc

SEQ ID NO: 4845371 - DNA, 25 bp, Homo sapien
aacatccaagccccgtgcaggatga

SEQ ID NO: 4845372 - DNA, 25 bp, Homo sapien
gtcaacatccaagccccgtgcagga

SEQ ID NO: 4845373 - DNA, 25 bp, Homo sapien
cactgtccctggagcgggttgtgcc

SEQ ID NO: 4845374 - DNA, 25 bp, Homo sapien
tgacagtgtactgccccagttaaac

SEQ ID NO: 4845375 - DNA, 25 bp, Homo sapien
tgcagccaggtgtttggtgccagat

SEQ ID NO: 4845376 - DNA, 25 bp, Homo sapien
tcaccttaggacacttgcgttactg

SEQ ID NO: 4845377 - DNA, 25 bp, Homo sapien
aaattggatgtagccaatttgcatc

SEQ ID NO: 4845378 - DNA, 25 bp, Homo sapien
agttggatgaaattggatgtagcca

SEQ ID NO: 4845379 - DNA, 25 bp, Homo sapien
gcatcttcaaatcggttttgtacac

SEQ ID NO: 4845380 - DNA, 25 bp, Homo sapien
tacacacggtgcgtgtactcatgtc

SEQ ID NO: 4845381 - DNA, 25 bp, Homo sapien
tcatctgtggtctcggctgatgctt

SEQ ID NO: 4845382 - DNA, 25 bp, Homo sapien
gatgcttctcctttgactgtgtgta

SEQ ID NO: 4845383 - DNA, 25 bp, Homo sapien
tgtaaattcggtgggcataagtgcc

SEQ ID NO: 4845384 - DNA, 25 bp, Homo sapien
ccctctgtgtttggatttagggtgg

SEQ ID NO: 4845385 - DNA, 25 bp, Homo sapien
gtctctgtcgtagccctggttctgg

SEQ ID NO: 4845386 - DNA, 25 bp, Homo sapien
tctgtcgtagccctggttctggatg

SEQ ID NO: 4845387 - DNA, 25 bp, Homo sapien
ctgtcgtagccctggttctggatgg

SEQ ID NO: 4845388 - DNA, 25 bp, Homo sapien
catgtctctgtcgtagccctggttc

SEQ ID NO: 4845389 - DNA, 25 bp, Homo sapien
gggttggcacctctaaggcaccgat

SEQ ID NO: 4845390 - DNA, 25 bp, Homo sapien
tctcttgtaaggcatagacttgcgt

SEQ ID NO: 4845391 - DNA, 25 bp, Homo sapien
ggttggatgtgtacacccgcaaaca

SEQ ID NO: 4845392 - DNA, 25 bp, Homo sapien
ccgattggcagcagatggatgcagt

SEQ ID NO: 4845393 - DNA, 25 bp, Homo sapien
attgttccttgtgccgaagaccccg

SEQ ID NO: 4845394 - DNA, 25 bp, Homo sapien
ttgtgccgaagaccccgtccagacg

SEQ ID NO: 4845395 - DNA, 25 bp, Homo sapien
gctcccatattgttccttgtgccga

SEQ ID NO: 4845396 - DNA, 25 bp, Homo sapien
gactgggctcccatattgttccttg

SEQ ID NO: 4845397 - DNA, 25 bp, Homo sapien
tcaagggggccgtaatatctgctgc

SEQ ID NO: 4845398 - DNA, 25 bp, Homo sapien
gtgtctgccgcagacaggcctggct

SEQ ID NO: 4845399 - DNA, 25 bp, Homo sapien
gaccacaggccatttgagtatctcc

SEQ ID NO: 4845400 - DNA, 25 bp, Homo sapien
aggccttggcagatcattgagtgaa

SEQ ID NO: 4845401 - DNA, 25 bp, Homo sapien
tcatagagctgtccggtccattgat

SEQ ID NO: 4845402 - DNA, 25 bp, Homo sapien
cagtgcgtcatagagctgtccggtc

SEQ ID NO: 4845403 - DNA, 25 bp, Homo sapien
gcgtcatagagctgtccggtccatt

SEQ ID NO: 4845404 - DNA, 25 bp, Homo sapien
cttcgcagtgcgtcatagagctgtc

SEQ ID NO: 4845405 - DNA, 25 bp, Homo sapien
tggtactgatcggtgaccccagaaa

SEQ ID NO: 4845406 - DNA, 25 bp, Homo sapien
agagcagtggtactgatcggtgacc

SEQ ID NO: 4845407 - DNA, 25 bp, Homo sapien
ggctggtcacctttcttgttggaga

SEQ ID NO: 4845408 - DNA, 25 bp, Homo sapien
atggctggtcacctttcttgttgga

SEQ ID NO: 4845409 - DNA, 25 bp, Homo sapien
gtcatctggttctgagtgacttttc

SEQ ID NO: 4845410 - DNA, 25 bp, Homo sapien
agtcatctggttctgagtgactttt

SEQ ID NO: 4845411 - DNA, 25 bp, Homo sapien
tcatctggttctgagtgacttttcc

SEQ ID NO: 4845412 - DNA, 25 bp, Homo sapien
catctggttctgagtgacttttcca

SEQ ID NO: 4845413 - DNA, 25 bp, Homo sapien
tgttcccatggtgagttgtggcctg

SEQ ID NO: 4845414 - DNA, 25 bp, Homo sapien
ctgttcccatggtgagttgtggcct

SEQ ID NO: 4845415 - DNA, 25 bp, Homo sapien
ccggctgagtcctctgcaagtcctg

SEQ ID NO: 4845416 - DNA, 25 bp, Homo sapien
cggctgagtcctctgcaagtcctgg

SEQ ID NO: 4845417 - DNA, 25 bp, Homo sapien
aaggtggaggagatattgttgggac

SEQ ID NO: 4845418 - DNA, 25 bp, Homo sapien
gacaaggtggaggagatattgttgg

SEQ ID NO: 4845419 - DNA, 25 bp, Homo sapien
gaggacaaggtggaggagatattgt

SEQ ID NO: 4845420 - DNA, 25 bp, Homo sapien
caaggtggaggagatattgttggga

SEQ ID NO: 4845421 - DNA, 25 bp, Homo sapien
gaggctgttgagtcccatcgccagg

SEQ ID NO: 4845422 - DNA, 25 bp, Homo sapien
ggtgtagagatcaattctgtgacag

SEQ ID NO: 4845423 - DNA, 25 bp, Homo sapien
gttgagtcccatcgccaggtggcag

SEQ ID NO: 4845424 - DNA, 25 bp, Homo sapien
gaaacgtgctgagtgcacatgaggc

SEQ ID NO: 4845425 - DNA, 25 bp, Homo sapien
cttcttttaagtacaggccatgctc

SEQ ID NO: 4845426 - DNA, 25 bp, Homo sapien
tgtcttcttttaagtacaggccatg

SEQ ID NO: 4845427 - DNA, 25 bp, Homo sapien
catagcgggcactggcagctggcaa

SEQ ID NO: 4845428 - DNA, 25 bp, Homo sapien
ggccatgctcccctctctgacatag

SEQ ID NO: 4845429 - DNA, 25 bp, Homo sapien
gaagcctatagcagccatgcttctc

SEQ ID NO: 4845430 - DNA, 25 bp, Homo sapien
tggctttggatttatggttttgcat

SEQ ID NO: 4845431 - DNA, 25 bp, Homo sapien
cctgatctggaagcctatagcagcc

SEQ ID NO: 4845432 - DNA, 25 bp, Homo sapien
ctttggatttatggttttgcatagc

SEQ ID NO: 4845433 - DNA, 25 bp, Homo sapien
ccgatgggaccgtctgtgaagttga

SEQ ID NO: 4845434 - DNA, 25 bp, Homo sapien
tgtcagctgttttccgatgggaccg

SEQ ID NO: 4845435 - DNA, 25 bp, Homo sapien
taaccaggcctttgtcagctgtttt

SEQ ID NO: 4845436 - DNA, 25 bp, Homo sapien
agttgaggtttgctgttcaggaagc

SEQ ID NO: 4845437 - DNA, 25 bp, Homo sapien
tgtcggccgacatcatgcctgtcct

SEQ ID NO: 4845438 - DNA, 25 bp, Homo sapien
tgggtgcctgacctctcgtgtcaga

SEQ ID NO: 4845439 - DNA, 25 bp, Homo sapien
gcattgacccggttgcagtggcatg

SEQ ID NO: 4845440 - DNA, 25 bp, Homo sapien
ttctggccccgcattgacccggttg

SEQ ID NO: 4845441 - DNA, 25 bp, Homo sapien
aaaatgacttgaaaggaggcagaat

SEQ ID NO: 4845442 - DNA, 25 bp, Homo sapien
tgtggactgccaccttagagcttgc

SEQ ID NO: 4845443 - DNA, 25 bp, Homo sapien
ccgccacatgcttggttgcttcaat

SEQ ID NO: 4845444 - DNA, 25 bp, Homo sapien
agcaaacaccgccacatgcttggtt

SEQ ID NO: 4845445 - DNA, 25 bp, Homo sapien
agaaagctgggaggaaccgtcctgc

SEQ ID NO: 4845446 - DNA, 25 bp, Homo sapien
tgcatgcggtccagaggtgcaagga

SEQ ID NO: 4845447 - DNA, 25 bp, Homo sapien
aaccgtcctgcatgcggtccagagg

SEQ ID NO: 4845448 - DNA, 25 bp, Homo sapien
ggaggaaccgtcctgcatgcggtcc

SEQ ID NO: 4845449 - DNA, 25 bp, Homo sapien
gtcctaggcctgccaggatggacat

SEQ ID NO: 4845450 - DNA, 25 bp, Homo sapien
cctaggcctgccaggatggacatct

SEQ ID NO: 4845451 - DNA, 25 bp, Homo sapien
ttggccaatctggactttcgcccat

SEQ ID NO: 4845452 - DNA, 25 bp, Homo sapien
ctttggccaatctggactttcgccc

SEQ ID NO: 4845453 - DNA, 25 bp, Homo sapien
gaagtcagagagaaacggtcctttg

SEQ ID NO: 4845454 - DNA, 25 bp, Homo sapien
cagagagaaacggtcctttgttggc

SEQ ID NO: 4845455 - DNA, 25 bp, Homo sapien
tctcgtgggtcctttggcaggcctc

SEQ ID NO: 4845456 - DNA, 25 bp, Homo sapien
tctttgctttctcgtgggtcctttg

SEQ ID NO: 4845457 - DNA, 25 bp, Homo sapien
tgacaattaataccccctgagagct

SEQ ID NO: 4845458 - DNA, 25 bp, Homo sapien
gctgccttcatgacaattaataccc

SEQ ID NO: 4845459 - DNA, 25 bp, Homo sapien
ttcatgacaattaataccccctgag

SEQ ID NO: 4845460 - DNA, 25 bp, Homo sapien
caggggcttggatgcacaggtgcag

SEQ ID NO: 4845461 - DNA, 25 bp, Homo sapien
gagtcgttctctggtgactctgaga

SEQ ID NO: 4845462 - DNA, 25 bp, Homo sapien
agaggagagtcgttctctggtgact

SEQ ID NO: 4845463 - DNA, 25 bp, Homo sapien
cgttctctggtgactctgagaagcc

SEQ ID NO: 4845464 - DNA, 25 bp, Homo sapien
agtggagaggagagtcgttctctgg

SEQ ID NO: 4845465 - DNA, 25 bp, Homo sapien
cagctgttcggtttagtatttgggc

SEQ ID NO: 4845466 - DNA, 25 bp, Homo sapien
ggcaggtcagggcgggatgtggtcc

SEQ ID NO: 4845467 - DNA, 25 bp, Homo sapien
agctgttcggtttagtatttgggct

SEQ ID NO: 4845468 - DNA, 25 bp, Homo sapien
gagatacagagggcgatggtgctgg

SEQ ID NO: 4845469 - DNA, 25 bp, Homo sapien
atacagagggcgatggtgctggaga

SEQ ID NO: 4845470 - DNA, 25 bp, Homo sapien
agagatacagagggcgatggtgctg

SEQ ID NO: 4845471 - DNA, 25 bp, Homo sapien
tacagagggcgatggtgctggagag

SEQ ID NO: 4845472 - DNA, 25 bp, Homo sapien
tgcttctgcaagtctgagtgagctt

SEQ ID NO: 4845473 - DNA, 25 bp, Homo sapien
cttgagggctgtacattctgtggcc

SEQ ID NO: 4845474 - DNA, 25 bp, Homo sapien
agggctgtacattctgtggccattc

SEQ ID NO: 4845475 - DNA, 25 bp, Homo sapien
cattctgccagcgttgtgcttctgc

SEQ ID NO: 4845476 - DNA, 25 bp, Homo sapien
tcagggcattaataaagcacgtgct

SEQ ID NO: 4845477 - DNA, 25 bp, Homo sapien
gaagatacgatttgaggagaaccat

SEQ ID NO: 4845478 - DNA, 25 bp, Homo sapien
gagaaccatgggctcagggcattaa

SEQ ID NO: 4845479 - DNA, 25 bp, Homo sapien
taataaagcacgtgctgccctggga

SEQ ID NO: 4845480 - DNA, 25 bp, Homo sapien
ctgcctctcggagctttcttccatc

SEQ ID NO: 4845481 - DNA, 25 bp, Homo sapien
tctgcctctcggagctttcttccat

SEQ ID NO: 4845482 - DNA, 25 bp, Homo sapien
tgcctctcggagctttcttccatca

SEQ ID NO: 4845483 - DNA, 25 bp, Homo sapien
gcctctcggagctttcttccatcac

SEQ ID NO: 4845484 - DNA, 25 bp, Homo sapien
aaggattaaactgctcgatgtaggc

SEQ ID NO: 4845485 - DNA, 25 bp, Homo sapien
gattaaactgctcgatgtaggcatt

SEQ ID NO: 4845486 - DNA, 25 bp, Homo sapien
gttgtaaggattaaactgctcgatg

SEQ ID NO: 4845487 - DNA, 25 bp, Homo sapien
ttaaactgctcgatgtaggcattct

SEQ ID NO: 4845488 - DNA, 25 bp, Homo sapien
tcacccgtgtgagatttagcaggct

SEQ ID NO: 4845489 - DNA, 25 bp, Homo sapien
tgcgtggcaggccttgtccgtcacc

SEQ ID NO: 4845490 - DNA, 25 bp, Homo sapien
gcaagcacatcgattcgccgtgtgg

SEQ ID NO: 4845491 - DNA, 25 bp, Homo sapien
tggcaccacatgaaagcaagcacat

SEQ ID NO: 4845492 - DNA, 25 bp, Homo sapien
ttgcaggcctgacttgccaacccaa

SEQ ID NO: 4845493 - DNA, 25 bp, Homo sapien
tttctacactcttgcaggcctgact

SEQ ID NO: 4845494 - DNA, 25 bp, Homo sapien
gcaggcctgacttgccaacccaagt

SEQ ID NO: 4845495 - DNA, 25 bp, Homo sapien
tacactcttgcaggcctgacttgcc

SEQ ID NO: 4845496 - DNA, 25 bp, Homo sapien
ctggtgcctctcagggacccccttc

SEQ ID NO: 4845497 - DNA, 25 bp, Homo sapien
ttaatgtttcagcaggtcgggctgg

SEQ ID NO: 4845498 - DNA, 25 bp, Homo sapien
taatgtttcagcaggtcgggctggt

SEQ ID NO: 4845499 - DNA, 25 bp, Homo sapien
tcgggctggtgcctctcagggaccc

SEQ ID NO: 4845500 - DNA, 25 bp, Homo sapien
gccatgccgtgcaagtgtggctaga

SEQ ID NO: 4845501 - DNA, 25 bp, Homo sapien
tgggcccatgcctaaaggacaggga

SEQ ID NO: 4845502 - DNA, 25 bp, Homo sapien
ccactgggcccatgcctaaaggaca

SEQ ID NO: 4845503 - DNA, 25 bp, Homo sapien
cactgggcccatgcctaaaggacag

SEQ ID NO: 4845504 - DNA, 25 bp, Homo sapien
catccaaggtttagtgcagcgccat

SEQ ID NO: 4845505 - DNA, 25 bp, Homo sapien
cctggacggtagagttaggctcatc

SEQ ID NO: 4845506 - DNA, 25 bp, Homo sapien
gaaatgacttcgcactgcatccaag

SEQ ID NO: 4845507 - DNA, 25 bp, Homo sapien
ctgggctcctgacgtcttagactga

SEQ ID NO: 4845508 - DNA, 25 bp, Homo sapien
gctcacacgccagtatagcgcgcat

SEQ ID NO: 4845509 - DNA, 25 bp, Homo sapien
ggatcgggagggagactcaacatcc

SEQ ID NO: 4845510 - DNA, 25 bp, Homo sapien
cccgcagacactgtgcacgcacaca

SEQ ID NO: 4845511 - DNA, 25 bp, Homo sapien
cagggacgcggacgagggaccggag

SEQ ID NO: 4845512 - DNA, 25 bp, Homo sapien
tttcctactcccgtgggagctcagt

SEQ ID NO: 4845513 - DNA, 25 bp, Homo sapien
tgctaccggaatcctctttcctact

SEQ ID NO: 4845514 - DNA, 25 bp, Homo sapien
ctcctgctaccggaatcctctttcc

SEQ ID NO: 4845515 - DNA, 25 bp, Homo sapien
tctttcctactcccgtgggagctca

SEQ ID NO: 4845516 - DNA, 25 bp, Homo sapien
aggactccctgagatgggtggggct

SEQ ID NO: 4845517 - DNA, 25 bp, Homo sapien
ctccacctcctgccggtgcctacct

SEQ ID NO: 4845518 - DNA, 25 bp, Homo sapien
ggagaagctgggtaaaaccagagct

SEQ ID NO: 4845519 - DNA, 25 bp, Homo sapien
gctgggtaaaaccagagctccacct

SEQ ID NO: 4845520 - DNA, 25 bp, Homo sapien
cacagttttctcgagaagtctggga

SEQ ID NO: 4845521 - DNA, 25 bp, Homo sapien
gagaaacagcccttcccaggtctgt

SEQ ID NO: 4845522 - DNA, 25 bp, Homo sapien
gatttctggtgaaacaggaattcag

SEQ ID NO: 4845523 - DNA, 25 bp, Homo sapien
cgatgccagatgacttgagtgcttt

SEQ ID NO: 4845524 - DNA, 25 bp, Homo sapien
tggagatgatgtaaacataggtgac

SEQ ID NO: 4845525 - DNA, 25 bp, Homo sapien
tgtaaacataggtgaccactgtgag

SEQ ID NO: 4845526 - DNA, 25 bp, Homo sapien
cttggcctgagggtatcttcagaat

SEQ ID NO: 4845527 - DNA, 25 bp, Homo sapien
agggagctgatgagcaggaccaggg

SEQ ID NO: 4845528 - DNA, 25 bp, Homo sapien
ctgttgccagctcgttatgggccat

SEQ ID NO: 4845529 - DNA, 25 bp, Homo sapien
gcagcaccttgtgaagggatgccgc

SEQ ID NO: 4845530 - DNA, 25 bp, Homo sapien
aagggatgccgccttcctcagggct

SEQ ID NO: 4845531 - DNA, 25 bp, Homo sapien
acagtttggcgagggctgcgggcag

SEQ ID NO: 4845532 - DNA, 25 bp, Homo sapien
agcactgggcgtggacagtttggcg

SEQ ID NO: 4845533 - DNA, 25 bp, Homo sapien
acaagtaattcattaggcgcctaat

SEQ ID NO: 4845534 - DNA, 25 bp, Homo sapien
tgctggctgttcatcaagttagcaa

SEQ ID NO: 4845535 - DNA, 25 bp, Homo sapien
gctgttcatcaagttagcaattaac

SEQ ID NO: 4845536 - DNA, 25 bp, Homo sapien
caagttagcaattaacaagtaattc

SEQ ID NO: 4845537 - DNA, 25 bp, Homo sapien
aggccttgtggagtccccccgacat

SEQ ID NO: 4845538 - DNA, 25 bp, Homo sapien
ctgaggccttgtggagtccccccga

SEQ ID NO: 4845539 - DNA, 25 bp, Homo sapien
atggtcttctccccaccgatgtccc

SEQ ID NO: 4845540 - DNA, 25 bp, Homo sapien
tggtcttctccccaccgatgtcccc

SEQ ID NO: 4845541 - DNA, 25 bp, Homo sapien
caggaggtccggacccgggagcagc

SEQ ID NO: 4845542 - DNA, 25 bp, Homo sapien
ctggtgtccgtgggcaccctgaggt

SEQ ID NO: 4845543 - DNA, 25 bp, Homo sapien
gctggtgtccgtgggcaccctgagg

SEQ ID NO: 4845544 - DNA, 25 bp, Homo sapien
ctcccccccagcgcgcacctcggcc

SEQ ID NO: 4845545 - DNA, 25 bp, Homo sapien
gcgcacctcggccggagccgctgcc

SEQ ID NO: 4845546 - DNA, 25 bp, Homo sapien
tccattcatgctcctctccggcccc

SEQ ID NO: 4845547 - DNA, 25 bp, Homo sapien
ctccattcatgctcctctccggccc

SEQ ID NO: 4845548 - DNA, 25 bp, Homo sapien
ctccacagaagccatatttgctttc

SEQ ID NO: 4845549 - DNA, 25 bp, Homo sapien
tttcctccacagaagccatatttgc

SEQ ID NO: 4845550 - DNA, 25 bp, Homo sapien
cattacattgatttcctccacagaa

SEQ ID NO: 4845551 - DNA, 25 bp, Homo sapien
tcctccacagaagccatatttgctt

SEQ ID NO: 4845552 - DNA, 25 bp, Homo sapien
tatgtagcacagtatttgccctgga

SEQ ID NO: 4845553 - DNA, 25 bp, Homo sapien
tgccctggaacaatgtacaactgaa

SEQ ID NO: 4845554 - DNA, 25 bp, Homo sapien
taagaactacgaaagcaaggacatg

SEQ ID NO: 4845555 - DNA, 25 bp, Homo sapien
taaatattcagctatgggcaaacaa

SEQ ID NO: 4845556 - DNA, 25 bp, Homo sapien
tcatcacatggcataccagcagtcc

SEQ ID NO: 4845557 - DNA, 25 bp, Homo sapien
gaacttacagtgactacttatcggg

SEQ ID NO: 4845558 - DNA, 25 bp, Homo sapien
tattcggaatcatctggctgatcac

SEQ ID NO: 4845559 - DNA, 25 bp, Homo sapien
taaatgacgcatcctaccaagtgaa

SEQ ID NO: 4845560 - DNA, 25 bp, Homo sapien
caccaaggcatgactgtaatttacc

SEQ ID NO: 4845561 - DNA, 25 bp, Homo sapien
tcaggctgtttgacctagagttccc

SEQ ID NO: 4845562 - DNA, 25 bp, Homo sapien
ttcttaactagtcaggtggcacccg

SEQ ID NO: 4845563 - DNA, 25 bp, Homo sapien
tagtttcaccttctagggagaccga

SEQ ID NO: 4845564 - DNA, 25 bp, Homo sapien
gattataacttatcttcccatgata

SEQ ID NO: 4845565 - DNA, 25 bp, Homo sapien
agattataacttatcttcccatgat

SEQ ID NO: 4845566 - DNA, 25 bp, Homo sapien
aagattataacttatcttcccatga

SEQ ID NO: 4845567 - DNA, 25 bp, Homo sapien
ggtttgccatacaaaaggaaatgga

SEQ ID NO: 4845568 - DNA, 25 bp, Homo sapien
cacttcagaataattggtttgccat

SEQ ID NO: 4845569 - DNA, 25 bp, Homo sapien
tactttgagtaaggccgactatgta

SEQ ID NO: 4845570 - DNA, 25 bp, Homo sapien
tcagataacgtaccatgccacatgc

SEQ ID NO: 4845571 - DNA, 25 bp, Homo sapien
tctagttatttcgtggtatcttacc

SEQ ID NO: 4845572 - DNA, 25 bp, Homo sapien
ttttgttgggcacacaatgctaggc

SEQ ID NO: 4845573 - DNA, 25 bp, Homo sapien
gccccgtgctgtaatctgaacagta

SEQ ID NO: 4845574 - DNA, 25 bp, Homo sapien
ttcatgtcctttgtcgccccgtgct

SEQ ID NO: 4845575 - DNA, 25 bp, Homo sapien
tagggcccagtacggtgtgtcacac

SEQ ID NO: 4845576 - DNA, 25 bp, Homo sapien
ccaacagtggtcagtcaagttcaga

SEQ ID NO: 4845577 - DNA, 25 bp, Homo sapien
tgaacgtctatgaaacaagtgagat

SEQ ID NO: 4845578 - DNA, 25 bp, Homo sapien
cacactctcttcagaaacgtaaaag

SEQ ID NO: 4845579 - DNA, 25 bp, Homo sapien
catgtctaaagttcagcagactctc

SEQ ID NO: 4845580 - DNA, 25 bp, Homo sapien
ggatccctcatgtctaaagttcagc

SEQ ID NO: 4845581 - DNA, 25 bp, Homo sapien
tctaaagttcagcagactctcttct

SEQ ID NO: 4845582 - DNA, 25 bp, Homo sapien
tccctcatgtctaaagttcagcaga

SEQ ID NO: 4845583 - DNA, 25 bp, Homo sapien
tggcacttgctcaggcaatcagggc

SEQ ID NO: 4845584 - DNA, 25 bp, Homo sapien
tcctctttcgaggagtagctggcac

SEQ ID NO: 4845585 - DNA, 25 bp, Homo sapien
cacagattctctagttgggccaggc

SEQ ID NO: 4845586 - DNA, 25 bp, Homo sapien
caatcagggctgttggtaaattcaa

SEQ ID NO: 4845587 - DNA, 25 bp, Homo sapien
agcttggtaaggcatgtagctgcca

SEQ ID NO: 4845588 - DNA, 25 bp, Homo sapien
catgtagctgccagtaactgggagt

SEQ ID NO: 4845589 - DNA, 25 bp, Homo sapien
tctattcgctgttccaatggtaggg

SEQ ID NO: 4845590 - DNA, 25 bp, Homo sapien
ttgtttgtgcgtgatacaagcttgg

SEQ ID NO: 4845591 - DNA, 25 bp, Homo sapien
ccgagtggcaaggtagttgagcaca

SEQ ID NO: 4845592 - DNA, 25 bp, Homo sapien
ttctgacagtcaaaccagcccagtt

SEQ ID NO: 4845593 - DNA, 25 bp, Homo sapien
gaaagtagccaacttcggccgagtg

SEQ ID NO: 4845594 - DNA, 25 bp, Homo sapien
tgtaaaaaccttgtgacgtctgtga

SEQ ID NO: 4845595 - DNA, 25 bp, Homo sapien
aattgtgacaccaatgatgcagtat

SEQ ID NO: 4845596 - DNA, 25 bp, Homo sapien
ttggttagctgagataaaattgtga

SEQ ID NO: 4845597 - DNA, 25 bp, Homo sapien
gataaaattgtgacaccaatgatgc

SEQ ID NO: 4845598 - DNA, 25 bp, Homo sapien
tggttagctgagataaaattgtgac

SEQ ID NO: 4845599 - DNA, 25 bp, Homo sapien
caatgaggaaggctgtagcacttac

SEQ ID NO: 4845600 - DNA, 25 bp, Homo sapien
tcaatgaggaaggctgtagcactta

SEQ ID NO: 4845601 - DNA, 25 bp, Homo sapien
ttcaatgaggaaggctgtagcactt

SEQ ID NO: 4845602 - DNA, 25 bp, Homo sapien
cagcagaaaacaccaatactaagaa

SEQ ID NO: 4845603 - DNA, 25 bp, Homo sapien
gccaaaaaagatcatcccacacaca

SEQ ID NO: 4845604 - DNA, 25 bp, Homo sapien
caggccctagaataagactatttgg

SEQ ID NO: 4845605 - DNA, 25 bp, Homo sapien
tttggtaattactgatcacaacggg

SEQ ID NO: 4845606 - DNA, 25 bp, Homo sapien
tctgctgcaaagataagagtggtta

SEQ ID NO: 4845607 - DNA, 25 bp, Homo sapien
tagttgttaagaacacaggccctag

SEQ ID NO: 4845608 - DNA, 25 bp, Homo sapien
tgtgcagaaaaagaagaaaccaatg

SEQ ID NO: 4845609 - DNA, 25 bp, Homo sapien
cagaaaaagaagaaaccaatgcaaa

SEQ ID NO: 4845610 - DNA, 25 bp, Homo sapien
tgcagaaaaagaagaaaccaatgca

SEQ ID NO: 4845611 - DNA, 25 bp, Homo sapien
ctgtgcagaaaaagaagaaaccaat

SEQ ID NO: 4845612 - DNA, 25 bp, Homo sapien
tgcaggaaagtgtgaagatatcaaa

SEQ ID NO: 4845613 - DNA, 25 bp, Homo sapien
tttctgtgcttggttaaaggatggg

SEQ ID NO: 4845614 - DNA, 25 bp, Homo sapien
gatatcaaataatgatgaatcgcga

SEQ ID NO: 4845615 - DNA, 25 bp, Homo sapien
gaatcgcgaaaagaagaggctattt

SEQ ID NO: 4845616 - DNA, 25 bp, Homo sapien
gctcacttactgctctttacctagg

SEQ ID NO: 4845617 - DNA, 25 bp, Homo sapien
gaccagtttcttcaacgcctctatg

SEQ ID NO: 4845618 - DNA, 25 bp, Homo sapien
gaacctactttcagagcactaagaa

SEQ ID NO: 4845619 - DNA, 25 bp, Homo sapien
taaacagatgcataaactctcgtgg

SEQ ID NO: 4845620 - DNA, 25 bp, Homo sapien
ggtcgtctgaggactcatcagtgga

SEQ ID NO: 4845621 - DNA, 25 bp, Homo sapien
agtgagcttgagcagttgcatgagc

SEQ ID NO: 4845622 - DNA, 25 bp, Homo sapien
gggaatctgcactgtacacaggtcg

SEQ ID NO: 4845623 - DNA, 25 bp, Homo sapien
caaagttgaggcagttatgagtgag

SEQ ID NO: 4845624 - DNA, 25 bp, Homo sapien
gatgcactgagctgtgatcgtgcca

SEQ ID NO: 4845625 - DNA, 25 bp, Homo sapien
ccagcctgggtgacagagtgagacc

SEQ ID NO: 4845626 - DNA, 25 bp, Homo sapien
agcctgggtgacagagtgagaccct

SEQ ID NO: 4845627 - DNA, 25 bp, Homo sapien
cctgggtgacagagtgagaccctgt

SEQ ID NO: 4845628 - DNA, 25 bp, Homo sapien
ctgcaaggttgaagaatctaagaag

SEQ ID NO: 4845629 - DNA, 25 bp, Homo sapien
gaaaatgaaggagggatggaatgat

SEQ ID NO: 4845630 - DNA, 25 bp, Homo sapien
gaaggagggatggaatgatacaggt

SEQ ID NO: 4845631 - DNA, 25 bp, Homo sapien
aatgaaggagggatggaatgataca

SEQ ID NO: 4845632 - DNA, 25 bp, Homo sapien
aaatgaaggagggatggaatgatac

SEQ ID NO: 4845633 - DNA, 25 bp, Homo sapien
cagaaacgttccacctcctacaata

SEQ ID NO: 4845634 - DNA, 25 bp, Homo sapien
gcagaacccaaacacaacgattaaa

SEQ ID NO: 4845635 - DNA, 25 bp, Homo sapien
gaaacgttccacctcctacaatatc

SEQ ID NO: 4845636 - DNA, 25 bp, Homo sapien
cgattaaaaagactgtacagttact

SEQ ID NO: 4845637 - DNA, 25 bp, Homo sapien
cagtattcgtttaacaccatcaaca

SEQ ID NO: 4845638 - DNA, 25 bp, Homo sapien
tctgcattgttaaacagggatcttc

SEQ ID NO: 4845639 - DNA, 25 bp, Homo sapien
tctctgcattgttaaacagggatct

SEQ ID NO: 4845640 - DNA, 25 bp, Homo sapien
tttccagtattcgtttaacaccatc

SEQ ID NO: 4845641 - DNA, 25 bp, Homo sapien
tcctacatttctgaagcgggaggat

SEQ ID NO: 4845642 - DNA, 25 bp, Homo sapien
gatataagctcctcttttgggcaaa

SEQ ID NO: 4845643 - DNA, 25 bp, Homo sapien
gactcataacagctggccatacact

SEQ ID NO: 4845644 - DNA, 25 bp, Homo sapien
ttactgggccttgggatggatttcc

SEQ ID NO: 4845645 - DNA, 25 bp, Homo sapien
tatcaatcggatgacctcagggtag

SEQ ID NO: 4845646 - DNA, 25 bp, Homo sapien
cactgtgaagttggctatcaatcgg

SEQ ID NO: 4845647 - DNA, 25 bp, Homo sapien
ccaattctcccagttgatagttact

SEQ ID NO: 4845648 - DNA, 25 bp, Homo sapien
gatagttactcttcaatcgggccag

SEQ ID NO: 4845649 - DNA, 25 bp, Homo sapien
tcaggagtgtaagtttccagcatgt

SEQ ID NO: 4845650 - DNA, 25 bp, Homo sapien
ccaaccgggatgtgatgtaggcttt

SEQ ID NO: 4845651 - DNA, 25 bp, Homo sapien
tgatgtgcacagattccaaccggga

SEQ ID NO: 4845652 - DNA, 25 bp, Homo sapien
tggctttgacatacggcacagaggc

SEQ ID NO: 4845653 - DNA, 25 bp, Homo sapien
cagccccgtatcctccaggggatct

SEQ ID NO: 4845654 - DNA, 25 bp, Homo sapien
tagcagctcctggtacgactgggcc

SEQ ID NO: 4845655 - DNA, 25 bp, Homo sapien
tcatattcacaacgcccaatggtgg

SEQ ID NO: 4845656 - DNA, 25 bp, Homo sapien
gcaatgtccattgggcttgcgctgg

SEQ ID NO: 4845657 - DNA, 25 bp, Homo sapien
tggtcaaacaactgcacgaggagtg

SEQ ID NO: 4845658 - DNA, 25 bp, Homo sapien
tcaccatccatggcgtcttgctcat

SEQ ID NO: 4845659 - DNA, 25 bp, Homo sapien
ggccaccgatcactgctccaataat

SEQ ID NO: 4845660 - DNA, 25 bp, Homo sapien
gtgctggcaaaagaaacccggccac

SEQ ID NO: 4845661 - DNA, 25 bp, Homo sapien
aataatgtaaaccagccatgtcagc

SEQ ID NO: 4845662 - DNA, 25 bp, Homo sapien
ccagtgggaaaatgctacggagact

SEQ ID NO: 4845663 - DNA, 25 bp, Homo sapien
cattcttattaaagctctgctcaac

SEQ ID NO: 4845664 - DNA, 25 bp, Homo sapien
tctgctcaactcttcaaaaaatgcc

SEQ ID NO: 4845665 - DNA, 25 bp, Homo sapien
gagacttttgtcaggattaagggac

SEQ ID NO: 4845666 - DNA, 25 bp, Homo sapien
tctagcttctcattacccgcctggg

SEQ ID NO: 4845667 - DNA, 25 bp, Homo sapien
cgcctgggccaaacgagaatctgtt

SEQ ID NO: 4845668 - DNA, 25 bp, Homo sapien
tgttaggttcatcagctggagcacc

SEQ ID NO: 4845669 - DNA, 25 bp, Homo sapien
cttggtccccaatgtagatcttacg

SEQ ID NO: 4845670 - DNA, 25 bp, Homo sapien
tatgaagacgcttaggaccatggtc

SEQ ID NO: 4845671 - DNA, 25 bp, Homo sapien
ctcatcattcaagcccagaacttct

SEQ ID NO: 4845672 - DNA, 25 bp, Homo sapien
gcttaggaccatggtctcatcattc

SEQ ID NO: 4845673 - DNA, 25 bp, Homo sapien
ttttcctatgaagacgcttaggacc

SEQ ID NO: 4845674 - DNA, 25 bp, Homo sapien
aatcttcactacttggttccaaagc

SEQ ID NO: 4845675 - DNA, 25 bp, Homo sapien
ggttccaaagctacactggcccata

SEQ ID NO: 4845676 - DNA, 25 bp, Homo sapien
ttcagataatcttcactacttggtt

SEQ ID NO: 4845677 - DNA, 25 bp, Homo sapien
cccttggaattctggggcactccag

SEQ ID NO: 4845678 - DNA, 25 bp, Homo sapien
aagcaggagacccttttgatttgct

SEQ ID NO: 4845679 - DNA, 25 bp, Homo sapien
aaagcaggagacccttttgatttgc

SEQ ID NO: 4845680 - DNA, 25 bp, Homo sapien
gcaggagacccttttgatttgctgg

SEQ ID NO: 4845681 - DNA, 25 bp, Homo sapien
agcaggagacccttttgatttgctg

SEQ ID NO: 4845682 - DNA, 25 bp, Homo sapien
caacggccccagtacttcaagttgg

SEQ ID NO: 4845683 - DNA, 25 bp, Homo sapien
ggaggtgattggttcacaacggccc

SEQ ID NO: 4845684 - DNA, 25 bp, Homo sapien
tgattggttcacaacggccccagta

SEQ ID NO: 4845685 - DNA, 25 bp, Homo sapien
ggtcattgagaagctgtagtgtctt

SEQ ID NO: 4845686 - DNA, 25 bp, Homo sapien
tgtaccgcactaagcttcactagct

SEQ ID NO: 4845687 - DNA, 25 bp, Homo sapien
cgtgtgattgttcagcatgaactgt

SEQ ID NO: 4845688 - DNA, 25 bp, Homo sapien
tcagcatgaactgtaccgcactaag

SEQ ID NO: 4845689 - DNA, 25 bp, Homo sapien
gattgttcagcatgaactgtaccgc

SEQ ID NO: 4845690 - DNA, 25 bp, Homo sapien
tggcagtatcgtgggaatcaggacc

SEQ ID NO: 4845691 - DNA, 25 bp, Homo sapien
aaagagccactctgatgacgtaagt

SEQ ID NO: 4845692 - DNA, 25 bp, Homo sapien
gcaatacccgggacctcagtttaca

SEQ ID NO: 4845693 - DNA, 25 bp, Homo sapien
tgagtagcagtaggtgacttcacca

SEQ ID NO: 4845694 - DNA, 25 bp, Homo sapien
gacaccgcatgtctgtcaggttgga

SEQ ID NO: 4845695 - DNA, 25 bp, Homo sapien
tgtagaaggtagtccgacaccgcat

SEQ ID NO: 4845696 - DNA, 25 bp, Homo sapien
tgaggagacgcccaagtgctgtgta

SEQ ID NO: 4845697 - DNA, 25 bp, Homo sapien
caggttggactgattgttaataccc

SEQ ID NO: 4845698 - DNA, 25 bp, Homo sapien
tgtgagtggcagcatgaactgctca

SEQ ID NO: 4845699 - DNA, 25 bp, Homo sapien
gagtggcagcatgaactgctcatac

SEQ ID NO: 4845700 - DNA, 25 bp, Homo sapien
aactgctcatactgatcttcatcct

SEQ ID NO: 4845701 - DNA, 25 bp, Homo sapien
gctgctgtgagtggcagcatgaact

SEQ ID NO: 4845702 - DNA, 25 bp, Homo sapien
cctgctcgttgaaactattggtgct

SEQ ID NO: 4845703 - DNA, 25 bp, Homo sapien
tgctcgttgaaactattggtgctaa

SEQ ID NO: 4845704 - DNA, 25 bp, Homo sapien
tcctgctcgttgaaactattggtgc

SEQ ID NO: 4845705 - DNA, 25 bp, Homo sapien
ctcgttgaaactattggtgctaaac

SEQ ID NO: 4845706 - DNA, 25 bp, Homo sapien
caaaactgtaacaatctgatgagga

SEQ ID NO: 4845707 - DNA, 25 bp, Homo sapien
aaaactgtaacaatctgatgaggat

SEQ ID NO: 4845708 - DNA, 25 bp, Homo sapien
aactgtaacaatctgatgaggattc

SEQ ID NO: 4845709 - DNA, 25 bp, Homo sapien
acaaaactgtaacaatctgatgagg

SEQ ID NO: 4845710 - DNA, 25 bp, Homo sapien
cttggcattgaaagcgaaagcgatc

SEQ ID NO: 4845711 - DNA, 25 bp, Homo sapien
ttcaaagagcatcatgaagctggtc

SEQ ID NO: 4845712 - DNA, 25 bp, Homo sapien
aggtctcttactaggccaactagag

SEQ ID NO: 4845713 - DNA, 25 bp, Homo sapien
cattgaaagcgaaagcgatccctct

SEQ ID NO: 4845714 - DNA, 25 bp, Homo sapien
tatgtctgtcataaggtggcttcca

SEQ ID NO: 4845715 - DNA, 25 bp, Homo sapien
aatctcagacaaccttatgtctgtc

SEQ ID NO: 4845716 - DNA, 25 bp, Homo sapien
cacatgcaggccttctggctaactc

SEQ ID NO: 4845717 - DNA, 25 bp, Homo sapien
tatcacccaatcacactccagttaa

SEQ ID NO: 4845718 - DNA, 25 bp, Homo sapien
cccgttggagaattggcatatagga

SEQ ID NO: 4845719 - DNA, 25 bp, Homo sapien
tacaggtgtagtacaggctggatca

SEQ ID NO: 4845720 - DNA, 25 bp, Homo sapien
ccaattcagccatcaacttgagtac

SEQ ID NO: 4845721 - DNA, 25 bp, Homo sapien
taccagagctcaattgcccgttgga

SEQ ID NO: 4845722 - DNA, 25 bp, Homo sapien
tggtttctcggaagagtaagatgcc

SEQ ID NO: 4845723 - DNA, 25 bp, Homo sapien
ctggtttctcggaagagtaagatgc

SEQ ID NO: 4845724 - DNA, 25 bp, Homo sapien
gaattaacttctagaggcatgatta

SEQ ID NO: 4845725 - DNA, 25 bp, Homo sapien
ctagaggcatgattatctgaagcac

SEQ ID NO: 4845726 - DNA, 25 bp, Homo sapien
gaggcatgattatctgaagcactta

SEQ ID NO: 4845727 - DNA, 25 bp, Homo sapien
aacttctagaggcatgattatctga

SEQ ID NO: 4845728 - DNA, 25 bp, Homo sapien
tacaatacgaatgctgtcctggctc

SEQ ID NO: 4845729 - DNA, 25 bp, Homo sapien
ttcctactccaaaggcatacaaatt

SEQ ID NO: 4845730 - DNA, 25 bp, Homo sapien
ggcatacaaattccagtaggcccct

SEQ ID NO: 4845731 - DNA, 25 bp, Homo sapien
gacaggtggcactctaatgcacatg

SEQ ID NO: 4845732 - DNA, 25 bp, Homo sapien
ctttgggacctctcctagtgtcagg

SEQ ID NO: 4845733 - DNA, 25 bp, Homo sapien
ccagggcatcgtctccatagagacg

SEQ ID NO: 4845734 - DNA, 25 bp, Homo sapien
gaaattgacgtaactcccactgaga

SEQ ID NO: 4845735 - DNA, 25 bp, Homo sapien
gagacgaaagactccgaaattgacg

SEQ ID NO: 4845736 - DNA, 25 bp, Homo sapien
tgcaataaagttcatatggtcctgg

SEQ ID NO: 4845737 - DNA, 25 bp, Homo sapien
aaagttcatatggtcctgggtcagg

SEQ ID NO: 4845738 - DNA, 25 bp, Homo sapien
atatacatgatgacgtgaggttcca

SEQ ID NO: 4845739 - DNA, 25 bp, Homo sapien
gagagaatatacatgatgacgtgag

SEQ ID NO: 4845740 - DNA, 25 bp, Homo sapien
gaagaggtatgtcacaatgtggtcc

SEQ ID NO: 4845741 - DNA, 25 bp, Homo sapien
gcagcagcctgtgcataccatggtg

SEQ ID NO: 4845742 - DNA, 25 bp, Homo sapien
cttggtgctacgtgacagctgcttg

SEQ ID NO: 4845743 - DNA, 25 bp, Homo sapien
tgatgtgcagaaagcggtcgctctc

SEQ ID NO: 4845744 - DNA, 25 bp, Homo sapien
aatacaggagtatattaggctgaag

SEQ ID NO: 4845745 - DNA, 25 bp, Homo sapien
gtatagggtaaatcagacaaatagt

SEQ ID NO: 4845746 - DNA, 25 bp, Homo sapien
tctgagtcttctatttcaaggttac

SEQ ID NO: 4845747 - DNA, 25 bp, Homo sapien
gaatggagaatttcaggcagtgacc

SEQ ID NO: 4845748 - DNA, 25 bp, Homo sapien
tatcaagccaagtagtggtcgggac

SEQ ID NO: 4845749 - DNA, 25 bp, Homo sapien
ggacatagaccactggttcctacag

SEQ ID NO: 4845750 - DNA, 25 bp, Homo sapien
cattaagcaatatcaagccaagtag

SEQ ID NO: 4845751 - DNA, 25 bp, Homo sapien
ccaagtagtggtcgggacatagacc

SEQ ID NO: 4845752 - DNA, 25 bp, Homo sapien
cctgctgcttctccggtggctggct

SEQ ID NO: 4845753 - DNA, 25 bp, Homo sapien
gatttcgctcgatgccttccatcag

SEQ ID NO: 4845754 - DNA, 25 bp, Homo sapien
tgtttttcgtaagaagatttcgctc

SEQ ID NO: 4845755 - DNA, 25 bp, Homo sapien
cgtaagaagatttcgctcgatgcct

SEQ ID NO: 4845756 - DNA, 25 bp, Homo sapien
taccttgggctcatggcagcacaaa

SEQ ID NO: 4845757 - DNA, 25 bp, Homo sapien
taggaagttgccctcacacgtgagg

SEQ ID NO: 4845758 - DNA, 25 bp, Homo sapien
tctgagatttctaggcaggacgctt

SEQ ID NO: 4845759 - DNA, 25 bp, Homo sapien
tatgctgtccaatagggcggctgct

SEQ ID NO: 4845760 - DNA, 25 bp, Homo sapien
gacttctcgacggaatgctgacagg

SEQ ID NO: 4845761 - DNA, 25 bp, Homo sapien
cattgagtcgttgacttctcgacgg

SEQ ID NO: 4845762 - DNA, 25 bp, Homo sapien
cgccataagtggaattcttcattga

SEQ ID NO: 4845763 - DNA, 25 bp, Homo sapien
tcatcatgtcattgctattcacgcc

SEQ ID NO: 4845764 - DNA, 25 bp, Homo sapien
caaaccaaagggacgctgctctgta

SEQ ID NO: 4845765 - DNA, 25 bp, Homo sapien
gaagcagctagttgacctttgccat

SEQ ID NO: 4845766 - DNA, 25 bp, Homo sapien
tctgtacaggtagagtccaaggagg

SEQ ID NO: 4845767 - DNA, 25 bp, Homo sapien
gggcagaatctacacggtccaaggg

SEQ ID NO: 4845768 - DNA, 25 bp, Homo sapien
aagagctgaactagagatgtgtaca

SEQ ID NO: 4845769 - DNA, 25 bp, Homo sapien
taaaacctaattgatgagtgtcccg

SEQ ID NO: 4845770 - DNA, 25 bp, Homo sapien
gtgtacaactagcagcaacaattgt

SEQ ID NO: 4845771 - DNA, 25 bp, Homo sapien
aattgatgagtgtcccgtgggcaag

SEQ ID NO: 4845772 - DNA, 25 bp, Homo sapien
gtttattggcggtcacaatgcttac

SEQ ID NO: 4845773 - DNA, 25 bp, Homo sapien
gcttacactgtatgcagcaaacacc

SEQ ID NO: 4845774 - DNA, 25 bp, Homo sapien
ccttacaagtctatccgcaacctga

SEQ ID NO: 4845775 - DNA, 25 bp, Homo sapien
tcacgcaagaaaggattcatcacac

SEQ ID NO: 4845776 - DNA, 25 bp, Homo sapien
gtgtttctggcaatcaaatttcctc

SEQ ID NO: 4845777 - DNA, 25 bp, Homo sapien
tctagaaaagcgtaggcgagcaaag

SEQ ID NO: 4845778 - DNA, 25 bp, Homo sapien
agtaggtgggccctaaggctcttag

SEQ ID NO: 4845779 - DNA, 25 bp, Homo sapien
gacttgagaaggattaggtccgatt

SEQ ID NO: 4845780 - DNA, 25 bp, Homo sapien
ggaacactccaaacagaagagtagg

SEQ ID NO: 4845781 - DNA, 25 bp, Homo sapien
tgtcgctggtcatgacaccatggtc

SEQ ID NO: 4845782 - DNA, 25 bp, Homo sapien
agaaactgcacatccttgtcgctgg

SEQ ID NO: 4845783 - DNA, 25 bp, Homo sapien
atgacaccatggtctgggcccagct

SEQ ID NO: 4845784 - DNA, 25 bp, Homo sapien
ccagctcgtaagaagcacactttgg

SEQ ID NO: 4845785 - DNA, 25 bp, Homo sapien
caggcgggatggtgtcaatagcttt

SEQ ID NO: 4845786 - DNA, 25 bp, Homo sapien
taacctgcataaaccagtctggcgt

SEQ ID NO: 4845787 - DNA, 25 bp, Homo sapien
ctcttttcattgtcgtagcgagcta

SEQ ID NO: 4845788 - DNA, 25 bp, Homo sapien
tatggcagcgatgtgagggttaacc

SEQ ID NO: 4845789 - DNA, 25 bp, Homo sapien
tggacacctgagtgcgcaggcgcca

SEQ ID NO: 4845790 - DNA, 25 bp, Homo sapien
caccttccggcggaagaaactcgcg

SEQ ID NO: 4845791 - DNA, 25 bp, Homo sapien
gcgaaattacttccggggctgcagc

SEQ ID NO: 4845792 - DNA, 25 bp, Homo sapien
gagagccggaacagaggccgtggac

SEQ ID NO: 4845793 - DNA, 25 bp, Homo sapien
tagggcatcccatgtgcgccatggc

SEQ ID NO: 4845794 - DNA, 25 bp, Homo sapien
tgtgaactcgaacctctgccaggca

SEQ ID NO: 4845795 - DNA, 25 bp, Homo sapien
aacagcgccgctgattagcactgcg

SEQ ID NO: 4845796 - DNA, 25 bp, Homo sapien
ggaacgctcccgcaaagcaattaag

SEQ ID NO: 4845797 - DNA, 25 bp, Homo sapien
ggagtcccaattaggctcacccagc

SEQ ID NO: 4845798 - DNA, 25 bp, Homo sapien
gctaaacaaagactggtcaccaggc

SEQ ID NO: 4845799 - DNA, 25 bp, Homo sapien
caagtccgtattccccactagctgg

SEQ ID NO: 4845800 - DNA, 25 bp, Homo sapien
tatcctggaacgtgggaatcatacc

SEQ ID NO: 4845801 - DNA, 25 bp, Homo sapien
aagtgagccgggaagtgttccctct

SEQ ID NO: 4845802 - DNA, 25 bp, Homo sapien
acagcttatttcaaagtgagccggg

SEQ ID NO: 4845803 - DNA, 25 bp, Homo sapien
ttggaaacagcttatttcaaagtga

SEQ ID NO: 4845804 - DNA, 25 bp, Homo sapien
tatttcaaagtgagccgggaagtgt

SEQ ID NO: 4845805 - DNA, 25 bp, Homo sapien
agaggaactggctctatctctttgg

SEQ ID NO: 4845806 - DNA, 25 bp, Homo sapien
catgggccaccgctctggcctgggt

SEQ ID NO: 4845807 - DNA, 25 bp, Homo sapien
tctctttggcatgagctgggcttct

SEQ ID NO: 4845808 - DNA, 25 bp, Homo sapien
tacaaaaaactgcacttgaacgggc

SEQ ID NO: 4845809 - DNA, 25 bp, Homo sapien
gattataggcacgaatcatcgtgcc

SEQ ID NO: 4845810 - DNA, 25 bp, Homo sapien
gtggattgtttaggcttttctatac

SEQ ID NO: 4845811 - DNA, 25 bp, Homo sapien
cacgaatcatcgtgcctagccgtag

SEQ ID NO: 4845812 - DNA, 25 bp, Homo sapien
cgtgcctagccgtagtatggccatt

SEQ ID NO: 4845813 - DNA, 25 bp, Homo sapien
cgagccctgtctccagaacggtgag

SEQ ID NO: 4845814 - DNA, 25 bp, Homo sapien
aacggtgagatctcccgcggagagc

SEQ ID NO: 4845815 - DNA, 25 bp, Homo sapien
ggcccaggacctttcgtgagaagct

SEQ ID NO: 4845816 - DNA, 25 bp, Homo sapien
ttcttccagcctaccgtgagagcga

SEQ ID NO: 4845817 - DNA, 25 bp, Homo sapien
atcccctctggccggaaggcggctg

SEQ ID NO: 4845818 - DNA, 25 bp, Homo sapien
cggggccagtcacgccatcggcgct

SEQ ID NO: 4845819 - DNA, 25 bp, Homo sapien
ggagcgcagcgcaacctcatcccct

SEQ ID NO: 4845820 - DNA, 25 bp, Homo sapien
cggctgtccaagcccgggctaagaa

SEQ ID NO: 4845821 - DNA, 25 bp, Homo sapien
gggactcacgggagagggagctgtc

SEQ ID NO: 4845822 - DNA, 25 bp, Homo sapien
tgtgcgcgcggcttaggtcccagct

SEQ ID NO: 4845823 - DNA, 25 bp, Homo sapien
tccaccgagctcaggcttgaaaggc

SEQ ID NO: 4845824 - DNA, 25 bp, Homo sapien
cgcgtacaggacagcgggactcacg

SEQ ID NO: 4845825 - DNA, 25 bp, Homo sapien
tgccacggtcaagggctcaccggca

SEQ ID NO: 4845826 - DNA, 25 bp, Homo sapien
ggtcaagggctcaccggcaactcct

SEQ ID NO: 4845827 - DNA, 25 bp, Homo sapien
cacggtcaagggctcaccggcaact

SEQ ID NO: 4845828 - DNA, 25 bp, Homo sapien
ctgccacggtcaagggctcaccggc

SEQ ID NO: 4845829 - DNA, 25 bp, Homo sapien
gtgaggccttgctccctgaccctga

SEQ ID NO: 4845830 - DNA, 25 bp, Homo sapien
actgaggggtcgctcgcggctggag

SEQ ID NO: 4845831 - DNA, 25 bp, Homo sapien
accagcaggcatcggcaggtactga

SEQ ID NO: 4845832 - DNA, 25 bp, Homo sapien
gagggcgcccgcgtgaggccttgct

SEQ ID NO: 4845833 - DNA, 25 bp, Homo sapien
gctccgggcagagaagcgggctggc

SEQ ID NO: 4845834 - DNA, 25 bp, Homo sapien
gggcagagaagcgggctggccgggc

SEQ ID NO: 4845835 - DNA, 25 bp, Homo sapien
ggctccgggcagagaagcgggctgg

SEQ ID NO: 4845836 - DNA, 25 bp, Homo sapien
tccgggcagagaagcgggctggccg

SEQ ID NO: 4845837 - DNA, 25 bp, Homo sapien
ccagagcacggtcgtcactgccttt

SEQ ID NO: 4845838 - DNA, 25 bp, Homo sapien
gagcacggtcgtcactgccttttcc

SEQ ID NO: 4845839 - DNA, 25 bp, Homo sapien
ctccgtgctactggcgctactgaga

SEQ ID NO: 4845840 - DNA, 25 bp, Homo sapien
cttttcctccgtgctactggcgcta

SEQ ID NO: 4845841 - DNA, 25 bp, Homo sapien
cgcctctcctgactgagctcgcagc

SEQ ID NO: 4845842 - DNA, 25 bp, Homo sapien
gaaggtccaagtccgcctctcctga

SEQ ID NO: 4845843 - DNA, 25 bp, Homo sapien
ctggggtctgaaggtccaagtccgc

SEQ ID NO: 4845844 - DNA, 25 bp, Homo sapien
gtctgaaggtccaagtccgcctctc

SEQ ID NO: 4845845 - DNA, 25 bp, Homo sapien
ctggagtgaggcaatggtgaccggc

SEQ ID NO: 4845846 - DNA, 25 bp, Homo sapien
ggggcaggatctccacgcgatgcat

SEQ ID NO: 4845847 - DNA, 25 bp, Homo sapien
gcaggatctccacgcgatgcatctc

SEQ ID NO: 4845848 - DNA, 25 bp, Homo sapien
cctggagtgaggcaatggtgaccgg

SEQ ID NO: 4845849 - DNA, 25 bp, Homo sapien
caactcgtaaccaggtttgtgggag

SEQ ID NO: 4845850 - DNA, 25 bp, Homo sapien
caggtgatgtgccaactcgtaacca

SEQ ID NO: 4845851 - DNA, 25 bp, Homo sapien
ccaggtttgtgggaggcacacctta

SEQ ID NO: 4845852 - DNA, 25 bp, Homo sapien
gcacaccttacacacgagcgtgaaa

SEQ ID NO: 4845853 - DNA, 25 bp, Homo sapien
cagcccggagctggaaagtaactgg

SEQ ID NO: 4845854 - DNA, 25 bp, Homo sapien
ccagcccggagctggaaagtaactg

SEQ ID NO: 4845855 - DNA, 25 bp, Homo sapien
ccactgaggaacacgggtcctgagc

SEQ ID NO: 4845856 - DNA, 25 bp, Homo sapien
ctggccactgaggaacacgggtcct

SEQ ID NO: 4845857 - DNA, 25 bp, Homo sapien
ttcctgatcgcaggctctgacttac

SEQ ID NO: 4845858 - DNA, 25 bp, Homo sapien
cttcctgatcgcaggctctgactta

SEQ ID NO: 4845859 - DNA, 25 bp, Homo sapien
cctcctcctcccaggttaggtctga

SEQ ID NO: 4845860 - DNA, 25 bp, Homo sapien
tcctcctcccaggttaggtctgatg

SEQ ID NO: 4845861 - DNA, 25 bp, Homo sapien
cctcctcccaggttaggtctgatgc

SEQ ID NO: 4845862 - DNA, 25 bp, Homo sapien
ctcctcctcctcccaggttaggtct

SEQ ID NO: 4845863 - DNA, 25 bp, Homo sapien
atcctcatcctcatcatcttcctct

SEQ ID NO: 4845864 - DNA, 25 bp, Homo sapien
tcctcatcctcatcatcttcctctt

SEQ ID NO: 4845865 - DNA, 25 bp, Homo sapien
cctcatcctcatcatcttcctcttc

SEQ ID NO: 4845866 - DNA, 25 bp, Homo sapien
ctgcatcctcatcctcatcatcttc

SEQ ID NO: 4845867 - DNA, 25 bp, Homo sapien
cacgctcgcctgcttctggggcacc

SEQ ID NO: 4845868 - DNA, 25 bp, Homo sapien
tggggcaccagccttttgacttgtt

SEQ ID NO: 4845869 - DNA, 25 bp, Homo sapien
tgacttgtttgacagggctttgctc

SEQ ID NO: 4845870 - DNA, 25 bp, Homo sapien
cagccttttgacttgtttgacaggg

SEQ ID NO: 4845871 - DNA, 25 bp, Homo sapien
gaacagattcccaaagtccacaagg

SEQ ID NO: 4845872 - DNA, 25 bp, Homo sapien
cctgtacactcattctgggaggctg

SEQ ID NO: 4845873 - DNA, 25 bp, Homo sapien
actagctgaggtggccttggcccat

SEQ ID NO: 4845874 - DNA, 25 bp, Homo sapien
gacaaagtccagagccagaacagat

SEQ ID NO: 4845875 - DNA, 25 bp, Homo sapien
tatttcctcttcttctttttccagc

SEQ ID NO: 4845876 - DNA, 25 bp, Homo sapien
atttcctcttcttctttttccagct

SEQ ID NO: 4845877 - DNA, 25 bp, Homo sapien
gctggagactttggctaatttaata

SEQ ID NO: 4845878 - DNA, 25 bp, Homo sapien
tacatcccaacagcacagtattctt

SEQ ID NO: 4845879 - DNA, 25 bp, Homo sapien
tgtacatttgtacacgtacatccca

SEQ ID NO: 4845880 - DNA, 25 bp, Homo sapien
tttgtacacgtacatcccaacagca

SEQ ID NO: 4845881 - DNA, 25 bp, Homo sapien
tgtcctgctgtatgaactatcaata

SEQ ID NO: 4845882 - DNA, 25 bp, Homo sapien
caatattcttatcaggtgcagaggc

SEQ ID NO: 4845883 - DNA, 25 bp, Homo sapien
tcgcattccgggtctaagtgattct

SEQ ID NO: 4845884 - DNA, 25 bp, Homo sapien
ggttcactgcatccttcgcattccg

SEQ ID NO: 4845885 - DNA, 25 bp, Homo sapien
agaatactcgcctgtcccaagggcc

SEQ ID NO: 4845886 - DNA, 25 bp, Homo sapien
gccaaagccctctggtcctactcac

SEQ ID NO: 4845887 - DNA, 25 bp, Homo sapien
ccagagaatactcgcctgtcccaag

SEQ ID NO: 4845888 - DNA, 25 bp, Homo sapien
ctccagagaatactcgcctgtccca

SEQ ID NO: 4845889 - DNA, 25 bp, Homo sapien
tgaatcctggcttcttggctctggc

SEQ ID NO: 4845890 - DNA, 25 bp, Homo sapien
catttcttgaatcctggcttcttgg

SEQ ID NO: 4845891 - DNA, 25 bp, Homo sapien
tcttgaatcctggcttcttggctct

SEQ ID NO: 4845892 - DNA, 25 bp, Homo sapien
tcatttcttgaatcctggcttcttg

SEQ ID NO: 4845893 - DNA, 25 bp, Homo sapien
caactttattgtgaccccgaggtgg

SEQ ID NO: 4845894 - DNA, 25 bp, Homo sapien
caggcaactttattgtgaccccgag

SEQ ID NO: 4845895 - DNA, 25 bp, Homo sapien
cctgaccaggcaactttattgtgac

SEQ ID NO: 4845896 - DNA, 25 bp, Homo sapien
agggaaggcccactttgcaccgtgc

SEQ ID NO: 4845897 - DNA, 25 bp, Homo sapien
gacggagtttcattcttgttgttca

SEQ ID NO: 4845898 - DNA, 25 bp, Homo sapien
ctcagctcactgcaacctctgcttc

SEQ ID NO: 4845899 - DNA, 25 bp, Homo sapien
atctcagctcactgcaacctctgct

SEQ ID NO: 4845900 - DNA, 25 bp, Homo sapien
cggagtttcattcttgttgttcagg

SEQ ID NO: 4845901 - DNA, 25 bp, Homo sapien
tgtagggatacagaagccttcctgg

SEQ ID NO: 4845902 - DNA, 25 bp, Homo sapien
caggattaaaggtggaatccgaggt

SEQ ID NO: 4845903 - DNA, 25 bp, Homo sapien
ccgaggtcctggagaccggtgaaca

SEQ ID NO: 4845904 - DNA, 25 bp, Homo sapien
tgcttcattgtagggatacagaagc

SEQ ID NO: 4845905 - DNA, 25 bp, Homo sapien
gctagcctgagacagacacttggag

SEQ ID NO: 4845906 - DNA, 25 bp, Homo sapien
tctgcatggattgagttgccaccct

SEQ ID NO: 4845907 - DNA, 25 bp, Homo sapien
catactgctcggtacaatgccagcg

SEQ ID NO: 4845908 - DNA, 25 bp, Homo sapien
cagatggagatctaggaagaatccc

SEQ ID NO: 4845909 - DNA, 25 bp, Homo sapien
tcacagactggccaaactcgacgca

SEQ ID NO: 4845910 - DNA, 25 bp, Homo sapien
gagaggttcctcaggcggttgcccc

SEQ ID NO: 4845911 - DNA, 25 bp, Homo sapien
caaggtctctccgagccacaggttt

SEQ ID NO: 4845912 - DNA, 25 bp, Homo sapien
ccaagctcaggagcagatgtgggaa

SEQ ID NO: 4845913 - DNA, 25 bp, Homo sapien
tgggcagcaggcgggcggctcccat

SEQ ID NO: 4845914 - DNA, 25 bp, Homo sapien
aggttgggcagcaggcgggcggctc

SEQ ID NO: 4845915 - DNA, 25 bp, Homo sapien
agagtgaggttgggcagcaggcggg

SEQ ID NO: 4845916 - DNA, 25 bp, Homo sapien
agtgaggttgggcagcaggcgggcg

SEQ ID NO: 4845917 - DNA, 25 bp, Homo sapien
gagtttgacagcagagaatcagcag

SEQ ID NO: 4845918 - DNA, 25 bp, Homo sapien
gcttccaaccgctccaggctccatc

SEQ ID NO: 4845919 - DNA, 25 bp, Homo sapien
gagctggacatttaacctgcgcggg

SEQ ID NO: 4845920 - DNA, 25 bp, Homo sapien
gctttgcgtctaccttacagaaggg

SEQ ID NO: 4845921 - DNA, 25 bp, Homo sapien
tcaatttgctttgggtgacaccacc

SEQ ID NO: 4845922 - DNA, 25 bp, Homo sapien
gaagcactaactgtggaatcctgag

SEQ ID NO: 4845923 - DNA, 25 bp, Homo sapien
taaaattaggagacgggtgattctc

SEQ ID NO: 4845924 - DNA, 25 bp, Homo sapien
tgacctgcacgtgcttgccactggt

SEQ ID NO: 4845925 - DNA, 25 bp, Homo sapien
ttggtactcgcggatctgccgcctg

SEQ ID NO: 4845926 - DNA, 25 bp, Homo sapien
tgccgcctgctcagctggtcggtca

SEQ ID NO: 4845927 - DNA, 25 bp, Homo sapien
aaacttgttgccgtcctcggcggtg

SEQ ID NO: 4845928 - DNA, 25 bp, Homo sapien
agcccctttgatgcgaacccggctg

SEQ ID NO: 4845929 - DNA, 25 bp, Homo sapien
ttcccgatgagcttgcccctcttgt

SEQ ID NO: 4845930 - DNA, 25 bp, Homo sapien
gagcttgcccctcttgttcatacag

SEQ ID NO: 4845931 - DNA, 25 bp, Homo sapien
tgccaaacgtgtccgtctccactat

SEQ ID NO: 4845932 - DNA, 25 bp, Homo sapien
gaagggcatttgtccacctaccctg

SEQ ID NO: 4845933 - DNA, 25 bp, Homo sapien
atttgtccacctaccctggtctggg

SEQ ID NO: 4845934 - DNA, 25 bp, Homo sapien
gggcatttgtccacctaccctggtc

SEQ ID NO: 4845935 - DNA, 25 bp, Homo sapien
cctggtctggggtgtcgcccttacg

SEQ ID NO: 4845936 - DNA, 25 bp, Homo sapien
gaaggccgtatagttgttctccagc

SEQ ID NO: 4845937 - DNA, 25 bp, Homo sapien
cctgccgcgtgaaggccatgaacca

SEQ ID NO: 4845938 - DNA, 25 bp, Homo sapien
gcggagcccacaaactcgaactgct

SEQ ID NO: 4845939 - DNA, 25 bp, Homo sapien
gaacacgcagtctttgctcttcccg

SEQ ID NO: 4845940 - DNA, 25 bp, Homo sapien
tctgcaaggccttcagtcgctgacc

SEQ ID NO: 4845941 - DNA, 25 bp, Homo sapien
cagactgagggagatccgagaagca

SEQ ID NO: 4845942 - DNA, 25 bp, Homo sapien
gagatcagggtgacactcagttcct

SEQ ID NO: 4845943 - DNA, 25 bp, Homo sapien
gctgacctttcagcgggcttcagga

SEQ ID NO: 4845944 - DNA, 25 bp, Homo sapien
cggaaaaaaagcaatctcgctgccc

SEQ ID NO: 4845945 - DNA, 25 bp, Homo sapien
tcttccccaacaggtagcacgggcc

SEQ ID NO: 4845946 - DNA, 25 bp, Homo sapien
agcaatctcgctgcccgaggaggct

SEQ ID NO: 4845947 - DNA, 25 bp, Homo sapien
aaaaaagcaatctcgctgcccgagg

SEQ ID NO: 4845948 - DNA, 25 bp, Homo sapien
gaagacctccccctcgacaagatta

SEQ ID NO: 4845949 - DNA, 25 bp, Homo sapien
taaaagccagcgcactgaagaggcg

SEQ ID NO: 4845950 - DNA, 25 bp, Homo sapien
ggttgtccctgcgaggaagacctcc

SEQ ID NO: 4845951 - DNA, 25 bp, Homo sapien
aagattaaaagccagcgcactgaag

SEQ ID NO: 4845952 - DNA, 25 bp, Homo sapien
gaagtgccatcattagggatctatt

SEQ ID NO: 4845953 - DNA, 25 bp, Homo sapien
tagcatcttcgaagtcaccaccagt

SEQ ID NO: 4845954 - DNA, 25 bp, Homo sapien
tgtgcatgttaaatctcctctgaag

SEQ ID NO: 4845955 - DNA, 25 bp, Homo sapien
tagggatctattcttgtggcttctt

SEQ ID NO: 4845956 - DNA, 25 bp, Homo sapien
gccttgattctcgtgcccgtttttc

SEQ ID NO: 4845957 - DNA, 25 bp, Homo sapien
tctcgtcattttccgctctgtgcat

SEQ ID NO: 4845958 - DNA, 25 bp, Homo sapien
ccattttgccgccttgattctcgtg

SEQ ID NO: 4845959 - DNA, 25 bp, Homo sapien
tttcctctcgtcattttccgctctg

SEQ ID NO: 4845960 - DNA, 25 bp, Homo sapien
ggaccttgaggatgggcgcttgtgt

SEQ ID NO: 4845961 - DNA, 25 bp, Homo sapien
caacacggggccaggattcctgtat

SEQ ID NO: 4845962 - DNA, 25 bp, Homo sapien
ctttggaagttcaggagttctcagg

SEQ ID NO: 4845963 - DNA, 25 bp, Homo sapien
tgggcgcttgtgtccacaacacggg

SEQ ID NO: 4845964 - DNA, 25 bp, Homo sapien
tgttgccaagacaacctgccggcag

SEQ ID NO: 4845965 - DNA, 25 bp, Homo sapien
gttgccaagacaacctgccggcagc

SEQ ID NO: 4845966 - DNA, 25 bp, Homo sapien
ctgttgccaagacaacctgccggca

SEQ ID NO: 4845967 - DNA, 25 bp, Homo sapien
cctcctcggtgacatacacctccat

SEQ ID NO: 4845968 - DNA, 25 bp, Homo sapien
tcctcggtgacatacacctccatcc

SEQ ID NO: 4845969 - DNA, 25 bp, Homo sapien
acctccatccctcggcgcatctcct

SEQ ID NO: 4845970 - DNA, 25 bp, Homo sapien
atacacctccatccctcggcgcatc

SEQ ID NO: 4845971 - DNA, 25 bp, Homo sapien
taggtaataggtgtctcttccagga

SEQ ID NO: 4845972 - DNA, 25 bp, Homo sapien
gcttccccggagcacaaataacagg

SEQ ID NO: 4845973 - DNA, 25 bp, Homo sapien
acagtgtggcccagacgctctgagg

SEQ ID NO: 4845974 - DNA, 25 bp, Homo sapien
gtaggccagatccacgggctgtcac

SEQ ID NO: 4845975 - DNA, 25 bp, Homo sapien
ttccttgtcttggacctgtccctgc

SEQ ID NO: 4845976 - DNA, 25 bp, Homo sapien
ggcagggaactttgccccgcttcgc

SEQ ID NO: 4845977 - DNA, 25 bp, Homo sapien
cagtaagtgaattatgaaacgaggc

SEQ ID NO: 4845978 - DNA, 25 bp, Homo sapien
ttctgttcacagtgcgactgcctgg

SEQ ID NO: 4845979 - DNA, 25 bp, Homo sapien
gcgtcggtgggcagggaactttgcc

SEQ ID NO: 4845980 - DNA, 25 bp, Homo sapien
cctgctcgttgatggcatctgtaga

SEQ ID NO: 4845981 - DNA, 25 bp, Homo sapien
cgttgatggcatctgtagaagagca

SEQ ID NO: 4845982 - DNA, 25 bp, Homo sapien
gatggcatctgtagaagagcagctg

SEQ ID NO: 4845983 - DNA, 25 bp, Homo sapien
gctcgttgatggcatctgtagaaga

SEQ ID NO: 4845984 - DNA, 25 bp, Homo sapien
gcacgtaaacgtgggcctagcctta

SEQ ID NO: 4845985 - DNA, 25 bp, Homo sapien
gggcatttgcacgtaaacgtgggcc

SEQ ID NO: 4845986 - DNA, 25 bp, Homo sapien
ggcataatgtttgtactggttaaat

SEQ ID NO: 4845987 - DNA, 25 bp, Homo sapien
taaggcataatgtttgtactggtta

SEQ ID NO: 4845988 - DNA, 25 bp, Homo sapien
ttggcttggattggcgagtacctcg

SEQ ID NO: 4845989 - DNA, 25 bp, Homo sapien
gaagaagttgagacttgaacaagtt

SEQ ID NO: 4845990 - DNA, 25 bp, Homo sapien
tacattccaatcttgtgggttggct

SEQ ID NO: 4845991 - DNA, 25 bp, Homo sapien
acctcgtttgcacatgaagaagttg

SEQ ID NO: 4845992 - DNA, 25 bp, Homo sapien
gcgtggacgggaggcgaccgaagga

SEQ ID NO: 4845993 - DNA, 25 bp, Homo sapien
ttcccatccgctcagccccggagaa

SEQ ID NO: 4845994 - DNA, 25 bp, Homo sapien
agccccggagaacgcgcgcgtggac

SEQ ID NO: 4845995 - DNA, 25 bp, Homo sapien
ccgaaggacgggctgcgcttgtttt

SEQ ID NO: 4845996 - DNA, 25 bp, Homo sapien
cggcgttaggctgcggggcctccgc

SEQ ID NO: 4845997 - DNA, 25 bp, Homo sapien
cgcgccggggcggcgttaggctgcg

SEQ ID NO: 4845998 - DNA, 25 bp, Homo sapien
ccgcgccggggcggcgttaggctgc

SEQ ID NO: 4845999 - DNA, 25 bp, Homo sapien
gggcggcgttaggctgcggggcctc

SEQ ID NO: 4846000 - DNA, 25 bp, Homo sapien
gccgcgaaagcagctggcgcgttcc

SEQ ID NO: 4846001 - DNA, 25 bp, Homo sapien
gggctggcgcgtcctcatccctcgg

SEQ ID NO: 4846002 - DNA, 25 bp, Homo sapien
aggacagcgtgtcaggctcggcgcg

SEQ ID NO: 4846003 - DNA, 25 bp, Homo sapien
gcgctgcgcgcttggggccgcgaaa

SEQ ID NO: 4846004 - DNA, 25 bp, Homo sapien
tcgcccgccgggtcactcgcagagc

SEQ ID NO: 4846005 - DNA, 25 bp, Homo sapien
agctcgcccgccgggtcactcgcag

SEQ ID NO: 4846006 - DNA, 25 bp, Homo sapien
ctcgcccgccgggtcactcgcagag

SEQ ID NO: 4846007 - DNA, 25 bp, Homo sapien
cgcccgccgggtcactcgcagagcc

SEQ ID NO: 4846008 - DNA, 25 bp, Homo sapien
gagagcgagaaggcgggcgggtggg

SEQ ID NO: 4846009 - DNA, 25 bp, Homo sapien
gggcgggtgggcacgtgcgtgtgtg

SEQ ID NO: 4846010 - DNA, 25 bp, Homo sapien
tgcgtgtgtgcgggagcggggcggg

SEQ ID NO: 4846011 - DNA, 25 bp, Homo sapien
cacgtgcgtgtgtgcgggagcgggg

SEQ ID NO: 4846012 - DNA, 25 bp, Homo sapien
gcacactggaatctcgggaggggct

SEQ ID NO: 4846013 - DNA, 25 bp, Homo sapien
gccaggcacactggaatctcgggag

SEQ ID NO: 4846014 - DNA, 25 bp, Homo sapien
gagggagagccaggcacactggaat

SEQ ID NO: 4846015 - DNA, 25 bp, Homo sapien
tggaatctcgggaggggctcacgct

SEQ ID NO: 4846016 - DNA, 25 bp, Homo sapien
atgaggtcgggccgctcgatgtcca

SEQ ID NO: 4846017 - DNA, 25 bp, Homo sapien
ctgcgaggcagctccacgtgttcca

SEQ ID NO: 4846018 - DNA, 25 bp, Homo sapien
ttccaggagggaataagtgaagtga

SEQ ID NO: 4846019 - DNA, 25 bp, Homo sapien
agtgaggctcgtagatcatgaggtc

SEQ ID NO: 4846020 - DNA, 25 bp, Homo sapien
ggatgtggatttgggtgacagcgag

SEQ ID NO: 4846021 - DNA, 25 bp, Homo sapien
atgattccaggcgaccggctgtccg

SEQ ID NO: 4846022 - DNA, 25 bp, Homo sapien
gccgaggcctgagagatgattccag

SEQ ID NO: 4846023 - DNA, 25 bp, Homo sapien
ggccgaggcctgagagatgattcca

SEQ ID NO: 4846024 - DNA, 25 bp, Homo sapien
tgagagatgattccaggcgaccggc

SEQ ID NO: 4846025 - DNA, 25 bp, Homo sapien
gtagatgttggaatctgggcgggag

SEQ ID NO: 4846026 - DNA, 25 bp, Homo sapien
gatgttggaatctgggcgggaggtc

SEQ ID NO: 4846027 - DNA, 25 bp, Homo sapien
tctgcttatagatgggaggcttctt

SEQ ID NO: 4846028 - DNA, 25 bp, Homo sapien
ctctctgcttatagatgggaggctt

SEQ ID NO: 4846029 - DNA, 25 bp, Homo sapien
atggccagtagtcggtttcgatttt

SEQ ID NO: 4846030 - DNA, 25 bp, Homo sapien
tcggtttcgattttggctggctggt

SEQ ID NO: 4846031 - DNA, 25 bp, Homo sapien
gagatcctcgatgaggtgcttggtc

SEQ ID NO: 4846032 - DNA, 25 bp, Homo sapien
ggaaacttggatgactcgatgatga

SEQ ID NO: 4846033 - DNA, 25 bp, Homo sapien
ccgagacgccttccgcttcctccat

SEQ ID NO: 4846034 - DNA, 25 bp, Homo sapien
tgctcccctccgagacgccttccgc

SEQ ID NO: 4846035 - DNA, 25 bp, Homo sapien
tctctctgacgctccctgagagcct

SEQ ID NO: 4846036 - DNA, 25 bp, Homo sapien
ctctctctgacgctccctgagagcc

SEQ ID NO: 4846037 - DNA, 25 bp, Homo sapien
ccttcggatcggcaatgacttttcc

SEQ ID NO: 4846038 - DNA, 25 bp, Homo sapien
gagcgggttttccttcggatcggca

SEQ ID NO: 4846039 - DNA, 25 bp, Homo sapien
tttccttcggatcggcaatgacttt

SEQ ID NO: 4846040 - DNA, 25 bp, Homo sapien
ggttttccttcggatcggcaatgac

SEQ ID NO: 4846041 - DNA, 25 bp, Homo sapien
gtgtaccctgtactctgtaattcca

SEQ ID NO: 4846042 - DNA, 25 bp, Homo sapien
agcccagggtagtgcgctggatagt

SEQ ID NO: 4846043 - DNA, 25 bp, Homo sapien
ccacagtgtaccctgtactctgtaa

SEQ ID NO: 4846044 - DNA, 25 bp, Homo sapien
gtgggccacgccattcaaagcctgc

SEQ ID NO: 4846045 - DNA, 25 bp, Homo sapien
cagcaactacttttatcagctcctc

SEQ ID NO: 4846046 - DNA, 25 bp, Homo sapien
gcaactacttttatcagctcctcca

SEQ ID NO: 4846047 - DNA, 25 bp, Homo sapien
agcaactacttttatcagctcctcc

SEQ ID NO: 4846048 - DNA, 25 bp, Homo sapien
ggaagatttagacgttccctggtgc

SEQ ID NO: 4846049 - DNA, 25 bp, Homo sapien
aagatttagacgttccctggtgcaa

SEQ ID NO: 4846050 - DNA, 25 bp, Homo sapien
tggtcctgccataggcggggagaga

SEQ ID NO: 4846051 - DNA, 25 bp, Homo sapien
gatttagacgttccctggtgcaagg

SEQ ID NO: 4846052 - DNA, 25 bp, Homo sapien
tctcactccctgatgggctgaactc

SEQ ID NO: 4846053 - DNA, 25 bp, Homo sapien
agtctcactccctgatgggctgaac

SEQ ID NO: 4846054 - DNA, 25 bp, Homo sapien
tcactccctgatgggctgaactctg

SEQ ID NO: 4846055 - DNA, 25 bp, Homo sapien
ctccctgatgggctgaactctgtgg

SEQ ID NO: 4846056 - DNA, 25 bp, Homo sapien
accaggcaactctgtggccccacac

SEQ ID NO: 4846057 - DNA, 25 bp, Homo sapien
tcccctgacactttcgggtgccagg

SEQ ID NO: 4846058 - DNA, 25 bp, Homo sapien
ctgacactttcgggtgccaggaccc

SEQ ID NO: 4846059 - DNA, 25 bp, Homo sapien
ccctgacactttcgggtgccaggac

SEQ ID NO: 4846060 - DNA, 25 bp, Homo sapien
cacacagggcagggagttcccccgg

SEQ ID NO: 4846061 - DNA, 25 bp, Homo sapien
cagcacacagggcagggagttcccc

SEQ ID NO: 4846062 - DNA, 25 bp, Homo sapien
cttctgctccagcacacagggcagg

SEQ ID NO: 4846063 - DNA, 25 bp, Homo sapien
cggtccatcctccccctctggccct

SEQ ID NO: 4846064 - DNA, 25 bp, Homo sapien
gtggcagcttggttcgccccttgtt

SEQ ID NO: 4846065 - DNA, 25 bp, Homo sapien
ttggttcgccccttgttggtcacca

SEQ ID NO: 4846066 - DNA, 25 bp, Homo sapien
gccccttgttggtcaccactagcat

SEQ ID NO: 4846067 - DNA, 25 bp, Homo sapien
tggcagcttggttcgccccttgttg

SEQ ID NO: 4846068 - DNA, 25 bp, Homo sapien
ttgagaagtcctcggcagacagatg

SEQ ID NO: 4846069 - DNA, 25 bp, Homo sapien
cttgagaagtcctcggcagacagat

SEQ ID NO: 4846070 - DNA, 25 bp, Homo sapien
agaagtcctcggcagacagatgcct

SEQ ID NO: 4846071 - DNA, 25 bp, Homo sapien
tgagaagtcctcggcagacagatgc

SEQ ID NO: 4846072 - DNA, 25 bp, Homo sapien
tgcagaggttttggccccccactct

SEQ ID NO: 4846073 - DNA, 25 bp, Homo sapien
ccactctacctgaggaaaggagccc

SEQ ID NO: 4846074 - DNA, 25 bp, Homo sapien
catagctcactgccggggactgcag

SEQ ID NO: 4846075 - DNA, 25 bp, Homo sapien
agagcccagactggctttgccctgt

SEQ ID NO: 4846076 - DNA, 25 bp, Homo sapien
ggcctgttcccactagagtcagagg

SEQ ID NO: 4846077 - DNA, 25 bp, Homo sapien
ggaattcccatttcgtggcctggag

SEQ ID NO: 4846078 - DNA, 25 bp, Homo sapien
ggtagccaggacactccaaaatgtg

SEQ ID NO: 4846079 - DNA, 25 bp, Homo sapien
ggatcgtgtgtaggcggcatctcca

SEQ ID NO: 4846080 - DNA, 25 bp, Homo sapien
tagatatcattatatacacacgtgg

SEQ ID NO: 4846081 - DNA, 25 bp, Homo sapien
tgcaaccttttaattccaagcagag

SEQ ID NO: 4846082 - DNA, 25 bp, Homo sapien
tatacacacgtggactggaaagaag

SEQ ID NO: 4846083 - DNA, 25 bp, Homo sapien
tgggcaggagcaatacccagacctg

SEQ ID NO: 4846084 - DNA, 25 bp, Homo sapien
cggctcccgggcgaaagcggcggcg

SEQ ID NO: 4846085 - DNA, 25 bp, Homo sapien
gcagcgccccgagccggctcagcat

SEQ ID NO: 4846086 - DNA, 25 bp, Homo sapien
ggggtgacgggaagggcgtcctgca

SEQ ID NO: 4846087 - DNA, 25 bp, Homo sapien
ggtgacgggaagggcgtcctgcacc

SEQ ID NO: 4846088 - DNA, 25 bp, Homo sapien
tcgtggggacttggaccggcagggc

SEQ ID NO: 4846089 - DNA, 25 bp, Homo sapien
tgacgggaagggcgtcctgcacccc

SEQ ID NO: 4846090 - DNA, 25 bp, Homo sapien
cttgggaaagacctagactggcgac

SEQ ID NO: 4846091 - DNA, 25 bp, Homo sapien
atcacacttggtgaccaaggcttgg

SEQ ID NO: 4846092 - DNA, 25 bp, Homo sapien
gatcacacttggtgaccaaggcttg

SEQ ID NO: 4846093 - DNA, 25 bp, Homo sapien
gcttgggaaagacctagactggcga

SEQ ID NO: 4846094 - DNA, 25 bp, Homo sapien
tgagcagtgttttcggaagactcat

SEQ ID NO: 4846095 - DNA, 25 bp, Homo sapien
ctgagcagtgttttcggaagactca

SEQ ID NO: 4846096 - DNA, 25 bp, Homo sapien
cccctgcccgcatgggaacagatat

SEQ ID NO: 4846097 - DNA, 25 bp, Homo sapien
aacagatattctgagtgtcaggttc

SEQ ID NO: 4846098 - DNA, 25 bp, Homo sapien
ttcatgctaggcctcctcatgagga

SEQ ID NO: 4846099 - DNA, 25 bp, Homo sapien
ccaggacacactgtcatcttgccaa

SEQ ID NO: 4846100 - DNA, 25 bp, Homo sapien
gatgcccttccagtgctccacgaag

SEQ ID NO: 4846101 - DNA, 25 bp, Homo sapien
gtgcgtgatgcccttccagtgctcc

SEQ ID NO: 4846102 - DNA, 25 bp, Homo sapien
tgtagtagtgcgtgatgcccttcca

SEQ ID NO: 4846103 - DNA, 25 bp, Homo sapien
gtagtgcgtgatgcccttccagtgc

SEQ ID NO: 4846104 - DNA, 25 bp, Homo sapien
tgaatggtgacactctgcacactcc

SEQ ID NO: 4846105 - DNA, 25 bp, Homo sapien
gacacctgaatggtgacactctgca

SEQ ID NO: 4846106 - DNA, 25 bp, Homo sapien
gaatggtgacactctgcacactcct

SEQ ID NO: 4846107 - DNA, 25 bp, Homo sapien
ttcccaggacacctgaatggtgaca

SEQ ID NO: 4846108 - DNA, 25 bp, Homo sapien
gtgggaccggcagctaaatcatcag

SEQ ID NO: 4846109 - DNA, 25 bp, Homo sapien
aattctgaacgactgggcaggttac

SEQ ID NO: 4846110 - DNA, 25 bp, Homo sapien
ccttgcagagtcaggccagtgagac

SEQ ID NO: 4846111 - DNA, 25 bp, Homo sapien
tgtctccgtgaactcggctccaatt

SEQ ID NO: 4846112 - DNA, 25 bp, Homo sapien
agtcctctgagaacgcatgcatgcc

SEQ ID NO: 4846113 - DNA, 25 bp, Homo sapien
tacaaggacattgcccctaagctgg

SEQ ID NO: 4846114 - DNA, 25 bp, Homo sapien
agacaaaagtccttccaggctcagg

SEQ ID NO: 4846115 - DNA, 25 bp, Homo sapien
gcttcagggctagacttggagcacc

SEQ ID NO: 4846116 - DNA, 25 bp, Homo sapien
gcttcagccgccagggaatgtctgt

SEQ ID NO: 4846117 - DNA, 25 bp, Homo sapien
tgcttcagccgccagggaatgtctg

SEQ ID NO: 4846118 - DNA, 25 bp, Homo sapien
ttcagccgccagggaatgtctgtct

SEQ ID NO: 4846119 - DNA, 25 bp, Homo sapien
cttcagccgccagggaatgtctgtc

SEQ ID NO: 4846120 - DNA, 25 bp, Homo sapien
ggcccagcgcgcagagggcctccca

SEQ ID NO: 4846121 - DNA, 25 bp, Homo sapien
ctggcccagcgcgcagagggcctcc

SEQ ID NO: 4846122 - DNA, 25 bp, Homo sapien
gcctggcccagcgcgcagagggcct

SEQ ID NO: 4846123 - DNA, 25 bp, Homo sapien
tcggcctggcccagcgcgcagaggg

SEQ ID NO: 4846124 - DNA, 25 bp, Homo sapien
catggcaggcccatctttgtggagt

SEQ ID NO: 4846125 - DNA, 25 bp, Homo sapien
gcggtctcacgataacagttcactg

SEQ ID NO: 4846126 - DNA, 25 bp, Homo sapien
tgtcagtatgaatccctgctgtgtc

SEQ ID NO: 4846127 - DNA, 25 bp, Homo sapien
tctaagtgagacagccacagtgccc

SEQ ID NO: 4846128 - DNA, 25 bp, Homo sapien
cgctgaggtaatgcagcagggggtg

SEQ ID NO: 4846129 - DNA, 25 bp, Homo sapien
tggacgctgaggtaatgcagcaggg

SEQ ID NO: 4846130 - DNA, 25 bp, Homo sapien
gcctgtggacgctgaggtaatgcag

SEQ ID NO: 4846131 - DNA, 25 bp, Homo sapien
ctgtggacgctgaggtaatgcagca

SEQ ID NO: 4846132 - DNA, 25 bp, Homo sapien
ctggaagagcaccaggacagaaaca

SEQ ID NO: 4846133 - DNA, 25 bp, Homo sapien
agagagggggcctcacacccagaca

SEQ ID NO: 4846134 - DNA, 25 bp, Homo sapien
cacccagacaccccttggcttccgg

SEQ ID NO: 4846135 - DNA, 25 bp, Homo sapien
ggaagagcaccaggacagaaacaga

SEQ ID NO: 4846136 - DNA, 25 bp, Homo sapien
ttttctgtaacggatccggaagcag

SEQ ID NO: 4846137 - DNA, 25 bp, Homo sapien
cagtcccaccaagtcggaggagttt

SEQ ID NO: 4846138 - DNA, 25 bp, Homo sapien
atccggaagcagtcccaccaagtcg

SEQ ID NO: 4846139 - DNA, 25 bp, Homo sapien
cctgctggatcttggagcagaggac

SEQ ID NO: 4846140 - DNA, 25 bp, Homo sapien
gaaaagagggtgagatgaggccaga

SEQ ID NO: 4846141 - DNA, 25 bp, Homo sapien
tgaaaagagggtgagatgaggccag

SEQ ID NO: 4846142 - DNA, 25 bp, Homo sapien
gtccttgtccccgtggctggttgtg

SEQ ID NO: 4846143 - DNA, 25 bp, Homo sapien
gggcagtgggttctccgcatgcttt

SEQ ID NO: 4846144 - DNA, 25 bp, Homo sapien
ccgtggctggttgtgtccttaggca

SEQ ID NO: 4846145 - DNA, 25 bp, Homo sapien
gcaccatcgtgggagcagtccttgt

SEQ ID NO: 4846146 - DNA, 25 bp, Homo sapien
ggaggtaatcaggttgctctctgtg

SEQ ID NO: 4846147 - DNA, 25 bp, Homo sapien
acagcccaagcagggaggtaatcag

SEQ ID NO: 4846148 - DNA, 25 bp, Homo sapien
cacagcccaagcagggaggtaatca

SEQ ID NO: 4846149 - DNA, 25 bp, Homo sapien
taatcaggttgctctctgtggtccc

SEQ ID NO: 4846150 - DNA, 25 bp, Homo sapien
acctctccatctctgctgccagcac

SEQ ID NO: 4846151 - DNA, 25 bp, Homo sapien
ccccaacctctccatctctgctgcc

SEQ ID NO: 4846152 - DNA, 25 bp, Homo sapien
aacctctccatctctgctgccagca

SEQ ID NO: 4846153 - DNA, 25 bp, Homo sapien
ccaacctctccatctctgctgccag

SEQ ID NO: 4846154 - DNA, 25 bp, Homo sapien
tcctgggccttcaaggccacccgac

SEQ ID NO: 4846155 - DNA, 25 bp, Homo sapien
tgggccttcaaggccacccgactct

SEQ ID NO: 4846156 - DNA, 25 bp, Homo sapien
tctcctgggccttcaaggccacccg

SEQ ID NO: 4846157 - DNA, 25 bp, Homo sapien
agcaggttctcctgggccttcaagg

SEQ ID NO: 4846158 - DNA, 25 bp, Homo sapien
aggtggcagctgctggggaggccat

SEQ ID NO: 4846159 - DNA, 25 bp, Homo sapien
caggtaggtggcagctgctggggag

SEQ ID NO: 4846160 - DNA, 25 bp, Homo sapien
taggtggcagctgctggggaggcca

SEQ ID NO: 4846161 - DNA, 25 bp, Homo sapien
ggtaggtggcagctgctggggaggc

SEQ ID NO: 4846162 - DNA, 25 bp, Homo sapien
caaagtgccggacgatcgcagggca

SEQ ID NO: 4846163 - DNA, 25 bp, Homo sapien
gccggacgatcgcagggcagcaggc

SEQ ID NO: 4846164 - DNA, 25 bp, Homo sapien
ctggcaaagtgccggacgatcgcag

SEQ ID NO: 4846165 - DNA, 25 bp, Homo sapien
gtgccggacgatcgcagggcagcag

SEQ ID NO: 4846166 - DNA, 25 bp, Homo sapien
atgccctctaaggtggcaatgtctg

SEQ ID NO: 4846167 - DNA, 25 bp, Homo sapien
tgatgccctctaaggtggcaatgtc

SEQ ID NO: 4846168 - DNA, 25 bp, Homo sapien
gctgatgccctctaaggtggcaatg

SEQ ID NO: 4846169 - DNA, 25 bp, Homo sapien
ccagctgatgccctctaaggtggca

SEQ ID NO: 4846170 - DNA, 25 bp, Homo sapien
agtaatcaaaccagcccaagaaggc

SEQ ID NO: 4846171 - DNA, 25 bp, Homo sapien
gaggtggtcgcagtaatcaaaccag

SEQ ID NO: 4846172 - DNA, 25 bp, Homo sapien
aagcctcatcagacggggcactggg

SEQ ID NO: 4846173 - DNA, 25 bp, Homo sapien
gtcgcagtaatcaaaccagcccaag

SEQ ID NO: 4846174 - DNA, 25 bp, Homo sapien
tcagccacagccttcgccaaggcgt

SEQ ID NO: 4846175 - DNA, 25 bp, Homo sapien
tctccacgaagaagttctcagccac

SEQ ID NO: 4846176 - DNA, 25 bp, Homo sapien
acagccttcgccaaggcgtccgcaa

SEQ ID NO: 4846177 - DNA, 25 bp, Homo sapien
ccacgaagaagttctcagccacagc

SEQ ID NO: 4846178 - DNA, 25 bp, Homo sapien
gctgtgaggagggcggtggaggtca

SEQ ID NO: 4846179 - DNA, 25 bp, Homo sapien
agggcggtggaggtcaagatgctct

SEQ ID NO: 4846180 - DNA, 25 bp, Homo sapien
ggaggtcaagatgctctgctcggac

SEQ ID NO: 4846181 - DNA, 25 bp, Homo sapien
aggagggcggtggaggtcaagatgc

SEQ ID NO: 4846182 - DNA, 25 bp, Homo sapien
gtcacaatgcccgatgagatgagca

SEQ ID NO: 4846183 - DNA, 25 bp, Homo sapien
tgcccgatgagatgagcatacaggg

SEQ ID NO: 4846184 - DNA, 25 bp, Homo sapien
gtggtcacaatgcccgatgagatga

SEQ ID NO: 4846185 - DNA, 25 bp, Homo sapien
caggggagcgaagctggcgcagcat

SEQ ID NO: 4846186 - DNA, 25 bp, Homo sapien
caggctgtggatgatcccctcgtgg

SEQ ID NO: 4846187 - DNA, 25 bp, Homo sapien
taagggcggccctcaaggttgcgca

SEQ ID NO: 4846188 - DNA, 25 bp, Homo sapien
tcaaggttgcgcaggaccaggctgt

SEQ ID NO: 4846189 - DNA, 25 bp, Homo sapien
tgagccccaggccacgtaagggcgg

SEQ ID NO: 4846190 - DNA, 25 bp, Homo sapien
tgtcggtgaagtaggggtcttcctc

SEQ ID NO: 4846191 - DNA, 25 bp, Homo sapien
tcgtaactggtagcaggagctaggc

SEQ ID NO: 4846192 - DNA, 25 bp, Homo sapien
tgctgttttgccatcgtaactggta

SEQ ID NO: 4846193 - DNA, 25 bp, Homo sapien
taggcgaggctttgcgggagtttga

SEQ ID NO: 4846194 - DNA, 25 bp, Homo sapien
ctgagagatagaagccggtgtggag

SEQ ID NO: 4846195 - DNA, 25 bp, Homo sapien
gagagatagaagccggtgtggaggc

SEQ ID NO: 4846196 - DNA, 25 bp, Homo sapien
gggctgtggccaaagagtaaaactc

SEQ ID NO: 4846197 - DNA, 25 bp, Homo sapien
ccggtgtggaggcgctcccggctca

SEQ ID NO: 4846198 - DNA, 25 bp, Homo sapien
gtatgtgtcatagcctgtctcctcc

SEQ ID NO: 4846199 - DNA, 25 bp, Homo sapien
catcgtggacgtatgtgtcatagcc

SEQ ID NO: 4846200 - DNA, 25 bp, Homo sapien
caggccataagcatcgtggacgtat

SEQ ID NO: 4846201 - DNA, 25 bp, Homo sapien
aggtcttggcttcctcggggaccag

SEQ ID NO: 4846202 - DNA, 25 bp, Homo sapien
ctgatccagaatccgggacatgcgg

SEQ ID NO: 4846203 - DNA, 25 bp, Homo sapien
tcgaagaaaggtcgctcgggctcat

SEQ ID NO: 4846204 - DNA, 25 bp, Homo sapien
aaacagcactcggaggaagtggccc

SEQ ID NO: 4846205 - DNA, 25 bp, Homo sapien
gaagtggccctcgaagaaaggtcgc

SEQ ID NO: 4846206 - DNA, 25 bp, Homo sapien
cagaacgtgttaggacgtgtggagc

SEQ ID NO: 4846207 - DNA, 25 bp, Homo sapien
gacaggggtggcaccaaagaaccga

SEQ ID NO: 4846208 - DNA, 25 bp, Homo sapien
gaggcaaccctgtggccaacctctg

SEQ ID NO: 4846209 - DNA, 25 bp, Homo sapien
gggctgagggccagaacgtgttagg

SEQ ID NO: 4846210 - DNA, 25 bp, Homo sapien
gctggtgagtatttttgcactcccc

SEQ ID NO: 4846211 - DNA, 25 bp, Homo sapien
gggctggtgagtatttttgcactcc

SEQ ID NO: 4846212 - DNA, 25 bp, Homo sapien
agtatttttgcactcccccagcaag

SEQ ID NO: 4846213 - DNA, 25 bp, Homo sapien
gcagggctggtgagtatttttgcac

SEQ ID NO: 4846214 - DNA, 25 bp, Homo sapien
aacacggagaataggctcctgcagc

SEQ ID NO: 4846215 - DNA, 25 bp, Homo sapien
ggccaggctgatgtacggatccagc

SEQ ID NO: 4846216 - DNA, 25 bp, Homo sapien
caagccgggacaggaccgaggtcac

SEQ ID NO: 4846217 - DNA, 25 bp, Homo sapien
tcacctgcaggttcaggctgtatgg

SEQ ID NO: 4846218 - DNA, 25 bp, Homo sapien
caactgcttgcgcaccaggagcagc

SEQ ID NO: 4846219 - DNA, 25 bp, Homo sapien
gtaccctctggattctctgcatcaa

SEQ ID NO: 4846220 - DNA, 25 bp, Homo sapien
gggtaccctctggattctctgcatc

SEQ ID NO: 4846221 - DNA, 25 bp, Homo sapien
ccgtcaactgcttgcgcaccaggag

SEQ ID NO: 4846222 - DNA, 25 bp, Homo sapien
acagggggcatggctgggtgggggc

SEQ ID NO: 4846223 - DNA, 25 bp, Homo sapien
ggctgggtgggggcaggactgtgcc

SEQ ID NO: 4846224 - DNA, 25 bp, Homo sapien
catggctgggtgggggcaggactgt

SEQ ID NO: 4846225 - DNA, 25 bp, Homo sapien
ctgaggggagatggcacagggggca

SEQ ID NO: 4846226 - DNA, 25 bp, Homo sapien
ggggaaacttgacgaaggcaatggc

SEQ ID NO: 4846227 - DNA, 25 bp, Homo sapien
ccggggctggggagacgttctggcg

SEQ ID NO: 4846228 - DNA, 25 bp, Homo sapien
tgggggaaacttgacgaaggcaatg

SEQ ID NO: 4846229 - DNA, 25 bp, Homo sapien
agacgttctggcgaggatcatgtgg

SEQ ID NO: 4846230 - DNA, 25 bp, Homo sapien
aacccagtctggtgtggtcaacatg

SEQ ID NO: 4846231 - DNA, 25 bp, Homo sapien
caagaaggccccaaggaccttgctg

SEQ ID NO: 4846232 - DNA, 25 bp, Homo sapien
caacatgccgcagtctccttgagtg

SEQ ID NO: 4846233 - DNA, 25 bp, Homo sapien
gaaagccatctgtttggctccttgg

SEQ ID NO: 4846234 - DNA, 25 bp, Homo sapien
tgcaccaaggttctcattagcaggg

SEQ ID NO: 4846235 - DNA, 25 bp, Homo sapien
agcagctcccatggtacctaatgtg

SEQ ID NO: 4846236 - DNA, 25 bp, Homo sapien
ggtcttctatcaagaacactgggcc

SEQ ID NO: 4846237 - DNA, 25 bp, Homo sapien
ctaatgtgacacagacaaggctcca

SEQ ID NO: 4846238 - DNA, 25 bp, Homo sapien
gtagtcccgctgtgaggtaatgcct

SEQ ID NO: 4846239 - DNA, 25 bp, Homo sapien
aagcaaaagaggctctggcctgctc

SEQ ID NO: 4846240 - DNA, 25 bp, Homo sapien
aaaggaagcaaaagaggctctggcc

SEQ ID NO: 4846241 - DNA, 25 bp, Homo sapien
cagcaactgtgtagtcccgctgtga

SEQ ID NO: 4846242 - DNA, 25 bp, Homo sapien
tctaagagtccagacgcagttcatc

SEQ ID NO: 4846243 - DNA, 25 bp, Homo sapien
ccctcgaatattttatgaatctaag

SEQ ID NO: 4846244 - DNA, 25 bp, Homo sapien
catgtgcacggtgctcttcagagcg

SEQ ID NO: 4846245 - DNA, 25 bp, Homo sapien
tctgtgactcccaaaccctcgaata

SEQ ID NO: 4846246 - DNA, 25 bp, Homo sapien
atttattgctgtgctgtccggggaa

SEQ ID NO: 4846247 - DNA, 25 bp, Homo sapien
catttattgctgtgctgtccgggga

SEQ ID NO: 4846248 - DNA, 25 bp, Homo sapien
tttattgctgtgctgtccggggaag

SEQ ID NO: 4846249 - DNA, 25 bp, Homo sapien
cctgctgcagcgctagaaaaagaat

SEQ ID NO: 4846250 - DNA, 25 bp, Homo sapien
caaatgagacttgcacacagatgct

SEQ ID NO: 4846251 - DNA, 25 bp, Homo sapien
aagatgggcccgaattagcagtgga

SEQ ID NO: 4846252 - DNA, 25 bp, Homo sapien
gaagtggcactgctccgccaagagt

SEQ ID NO: 4846253 - DNA, 25 bp, Homo sapien
tttccctgagaacacacctgtgaaa

SEQ ID NO: 4846254 - DNA, 25 bp, Homo sapien
tccctgagaacacacctgtgaaatt

SEQ ID NO: 4846255 - DNA, 25 bp, Homo sapien
ctgagaacacacctgtgaaattttt

SEQ ID NO: 4846256 - DNA, 25 bp, Homo sapien
ccctgagaacacacctgtgaaattt

SEQ ID NO: 4846257 - DNA, 25 bp, Homo sapien
ttccccagagtctagcggagtgccc

SEQ ID NO: 4846258 - DNA, 25 bp, Homo sapien
gcgttcgtcccgatatgcagaagag

SEQ ID NO: 4846259 - DNA, 25 bp, Homo sapien
agatagcagtggctcaatcccggct

SEQ ID NO: 4846260 - DNA, 25 bp, Homo sapien
tgggcgatgtaatgacaactagacg

SEQ ID NO: 4846261 - DNA, 25 bp, Homo sapien
atccagaagtatggcccagaagagc

SEQ ID NO: 4846262 - DNA, 25 bp, Homo sapien
acagccacgaggtgacctccctgtg

SEQ ID NO: 4846263 - DNA, 25 bp, Homo sapien
gatgctcctgagtgcaagagcaggc

SEQ ID NO: 4846264 - DNA, 25 bp, Homo sapien
ttgcctcccactgaggagactttgg

SEQ ID NO: 4846265 - DNA, 25 bp, Homo sapien
agctgctcaggcttggcggagggag

SEQ ID NO: 4846266 - DNA, 25 bp, Homo sapien
tccgagacccaggagacaaacagcc

SEQ ID NO: 4846267 - DNA, 25 bp, Homo sapien
ttttgtgactgctgccagtgtggtt

SEQ ID NO: 4846268 - DNA, 25 bp, Homo sapien
agcggcatgggcgatgtcactcagc

SEQ ID NO: 4846269 - DNA, 25 bp, Homo sapien
caattgcgggccctgggaaagaaag

SEQ ID NO: 4846270 - DNA, 25 bp, Homo sapien
tgatgagaccaataccaacagcggt

SEQ ID NO: 4846271 - DNA, 25 bp, Homo sapien
caacagcggtcaatagtccatgcct

SEQ ID NO: 4846272 - DNA, 25 bp, Homo sapien
gaaagaaaggagcacgcttcctgcg

SEQ ID NO: 4846273 - DNA, 25 bp, Homo sapien
ccacccacccaaacaggccaagagc

SEQ ID NO: 4846274 - DNA, 25 bp, Homo sapien
gccacccacccaaacaggccaagag

SEQ ID NO: 4846275 - DNA, 25 bp, Homo sapien
acccacccaaacaggccaagagcca

SEQ ID NO: 4846276 - DNA, 25 bp, Homo sapien
tacaggcgtgaacagtgcatctgac

SEQ ID NO: 4846277 - DNA, 25 bp, Homo sapien
agtgctcacaccaaccaagtgaagg

SEQ ID NO: 4846278 - DNA, 25 bp, Homo sapien
gacttgttcttagcaggcactgtgg

SEQ ID NO: 4846279 - DNA, 25 bp, Homo sapien
gcccttaggctgtagctgtcacaag

SEQ ID NO: 4846280 - DNA, 25 bp, Homo sapien
ggtttgccgccatcgctgggtgctg

SEQ ID NO: 4846281 - DNA, 25 bp, Homo sapien
agctggccagcgggagagccaagca

SEQ ID NO: 4846282 - DNA, 25 bp, Homo sapien
ttaaatatttgcctaagactccagc

SEQ ID NO: 4846283 - DNA, 25 bp, Homo sapien
cccttgctgcccctttaaatatttg

SEQ ID NO: 4846284 - DNA, 25 bp, Homo sapien
tgcccctttaaatatttgcctaaga

SEQ ID NO: 4846285 - DNA, 25 bp, Homo sapien
gctgcccctttaaatatttgcctaa

SEQ ID NO: 4846286 - DNA, 25 bp, Homo sapien
tgggccctgcccttcggtcatgagc

SEQ ID NO: 4846287 - DNA, 25 bp, Homo sapien
tcagccccaaggttgcataacagca

SEQ ID NO: 4846288 - DNA, 25 bp, Homo sapien
ggccttcagccccaaggttgcataa

SEQ ID NO: 4846289 - DNA, 25 bp, Homo sapien
cccttcggtcatgagctggcaggtt

SEQ ID NO: 4846290 - DNA, 25 bp, Homo sapien
gacatcagttttcggggtttcataa

SEQ ID NO: 4846291 - DNA, 25 bp, Homo sapien
atttctagatacatagggatgcgct

SEQ ID NO: 4846292 - DNA, 25 bp, Homo sapien
gttttcggggtttcataaatgtgca

SEQ ID NO: 4846293 - DNA, 25 bp, Homo sapien
gatacatagggatgcgctccaggaa

SEQ ID NO: 4846294 - DNA, 25 bp, Homo sapien
tggccctccagaaccgaagcccaga

SEQ ID NO: 4846295 - DNA, 25 bp, Homo sapien
agaggtgaaggaccaagccccctgt

SEQ ID NO: 4846296 - DNA, 25 bp, Homo sapien
cctccagaaccgaagcccagataag

SEQ ID NO: 4846297 - DNA, 25 bp, Homo sapien
ccctccagaaccgaagcccagataa

SEQ ID NO: 4846298 - DNA, 25 bp, Homo sapien
cttgctgcaggtgctatgctctcct

SEQ ID NO: 4846299 - DNA, 25 bp, Homo sapien
cggcgggctctccatcaggacctct

SEQ ID NO: 4846300 - DNA, 25 bp, Homo sapien
ggcgggctctccatcaggacctctt

SEQ ID NO: 4846301 - DNA, 25 bp, Homo sapien
tgtctacggacagccctttctacgg

SEQ ID NO: 4846302 - DNA, 25 bp, Homo sapien
tacggacccctatagtggctcttgg

SEQ ID NO: 4846303 - DNA, 25 bp, Homo sapien
tccatgcggtgatacagagtctccc

SEQ ID NO: 4846304 - DNA, 25 bp, Homo sapien
ggtggcctggattctaacaaaccca

SEQ ID NO: 4846305 - DNA, 25 bp, Homo sapien
taagaaggcgtttcaggtgcactgg

SEQ ID NO: 4846306 - DNA, 25 bp, Homo sapien
tgtttctggctcatgtggagaccca

SEQ ID NO: 4846307 - DNA, 25 bp, Homo sapien
caccaccacgataagaaggcgtttc

SEQ ID NO: 4846308 - DNA, 25 bp, Homo sapien
tcccacaatcaccacgacgatgagg

SEQ ID NO: 4846309 - DNA, 25 bp, Homo sapien
ggcgccccaatgctcatctccagaa

SEQ ID NO: 4846310 - DNA, 25 bp, Homo sapien
tgctggtagtcatacaccacgaggc

SEQ ID NO: 4846311 - DNA, 25 bp, Homo sapien
cagtggagccgatggagaaggtggc

SEQ ID NO: 4846312 - DNA, 25 bp, Homo sapien
gaaggtggcagtggtaaccaggtgc

SEQ ID NO: 4846313 - DNA, 25 bp, Homo sapien
ctggagctatcttcatgatgtagca

SEQ ID NO: 4846314 - DNA, 25 bp, Homo sapien
ctggaagttgtggacttttctagtg

SEQ ID NO: 4846315 - DNA, 25 bp, Homo sapien
agttgtggacttttctagtgagagc

SEQ ID NO: 4846316 - DNA, 25 bp, Homo sapien
gaagttgtggacttttctagtgaga

SEQ ID NO: 4846317 - DNA, 25 bp, Homo sapien
ggaagttgtggacttttctagtgag

SEQ ID NO: 4846318 - DNA, 25 bp, Homo sapien
gaggggcagtcagctggcagccaat

SEQ ID NO: 4846319 - DNA, 25 bp, Homo sapien
aaatagccaccattcggacactcct

SEQ ID NO: 4846320 - DNA, 25 bp, Homo sapien
cagccaatgaggaacagtgctttac

SEQ ID NO: 4846321 - DNA, 25 bp, Homo sapien
gtgacaaatagccaccattcggaca

SEQ ID NO: 4846322 - DNA, 25 bp, Homo sapien
atgtgcagcccttattgtgggactt

SEQ ID NO: 4846323 - DNA, 25 bp, Homo sapien
tgggacttcaggtatatcaggcaat

SEQ ID NO: 4846324 - DNA, 25 bp, Homo sapien
tcaggtatatcaggcaatctctctg

SEQ ID NO: 4846325 - DNA, 25 bp, Homo sapien
aggaagtgagtttctatcccatgtg

SEQ ID NO: 4846326 - DNA, 25 bp, Homo sapien
gtcccctccggagggtgctgagcct

SEQ ID NO: 4846327 - DNA, 25 bp, Homo sapien
agcctgcatctcgcccctctgcctg

SEQ ID NO: 4846328 - DNA, 25 bp, Homo sapien
tcccctccggagggtgctgagcctg

SEQ ID NO: 4846329 - DNA, 25 bp, Homo sapien
ctgagcctgcatctcgcccctctgc

SEQ ID NO: 4846330 - DNA, 25 bp, Homo sapien
agcgctcctccgctgctgatcaggg

SEQ ID NO: 4846331 - DNA, 25 bp, Homo sapien
gaagtaccggtctgtgagcttcccc

SEQ ID NO: 4846332 - DNA, 25 bp, Homo sapien
ccgagttgcctggatgaccccgctt

SEQ ID NO: 4846333 - DNA, 25 bp, Homo sapien
tggatgaccccgcttcagtggacgc

SEQ ID NO: 4846334 - DNA, 25 bp, Homo sapien
aagcagcttcttgcccgtctgcaaa

SEQ ID NO: 4846335 - DNA, 25 bp, Homo sapien
agcttcttgcccgtctgcaaaagct

SEQ ID NO: 4846336 - DNA, 25 bp, Homo sapien
ttcttgcccgtctgcaaaagctgca

SEQ ID NO: 4846337 - DNA, 25 bp, Homo sapien
tcttgcccgtctgcaaaagctgcaa

SEQ ID NO: 4846338 - DNA, 25 bp, Homo sapien
caggctgctttattctgttgtggca

SEQ ID NO: 4846339 - DNA, 25 bp, Homo sapien
caatcaggctgctttattctgttgt

SEQ ID NO: 4846340 - DNA, 25 bp, Homo sapien
gctgctttattctgttgtggcagga

SEQ ID NO: 4846341 - DNA, 25 bp, Homo sapien
tcaggctgctttattctgttgtggc

SEQ ID NO: 4846342 - DNA, 25 bp, Homo sapien
ggcgggttttcgcccgagctctgcc

SEQ ID NO: 4846343 - DNA, 25 bp, Homo sapien
tctcgcccgcttgcttgctcgatcg

SEQ ID NO: 4846344 - DNA, 25 bp, Homo sapien
agggaagcggcgcactggaggccag

SEQ ID NO: 4846345 - DNA, 25 bp, Homo sapien
aaatgagctcgctggagggcgggtt

SEQ ID NO: 4846346 - DNA, 25 bp, Homo sapien
tcctcctccgccaggtcataggtgt

SEQ ID NO: 4846347 - DNA, 25 bp, Homo sapien
ctttgtagttgaggggctccgagtc

SEQ ID NO: 4846348 - DNA, 25 bp, Homo sapien
ccttgcaggggtctttgtagttgag

SEQ ID NO: 4846349 - DNA, 25 bp, Homo sapien
tgtagtcggccaagtccagcggccg

SEQ ID NO: 4846350 - DNA, 25 bp, Homo sapien
tcacaggtaagctgtgggagtcaaa

SEQ ID NO: 4846351 - DNA, 25 bp, Homo sapien
gtggctaccctcagagcaactggaa

SEQ ID NO: 4846352 - DNA, 25 bp, Homo sapien
cactacaacggcaaccataactcgg

SEQ ID NO: 4846353 - DNA, 25 bp, Homo sapien
cataactcggccagtaatggtccaa

SEQ ID NO: 4846354 - DNA, 25 bp, Homo sapien
ccccttgcggcactgaaataagaag

SEQ ID NO: 4846355 - DNA, 25 bp, Homo sapien
catgtagggcccagggagagtacaa

SEQ ID NO: 4846356 - DNA, 25 bp, Homo sapien
agagattacttctcgacctcagagg

SEQ ID NO: 4846357 - DNA, 25 bp, Homo sapien
gggtgtaccctaatcctctatggct

SEQ ID NO: 4846358 - DNA, 25 bp, Homo sapien
ccagtgtagaaccagggcagagcaa

SEQ ID NO: 4846359 - DNA, 25 bp, Homo sapien
ttgaatcgccatcctcggcaggtgg

SEQ ID NO: 4846360 - DNA, 25 bp, Homo sapien
cctccttgagtgaaaccctggtgca

SEQ ID NO: 4846361 - DNA, 25 bp, Homo sapien
tcagcaactgatgggacggcaacag

SEQ ID NO: 4846362 - DNA, 25 bp, Homo sapien
gcagctttgatggaggacttacgag

SEQ ID NO: 4846363 - DNA, 25 bp, Homo sapien
ctcaggtcctcttcgtccagggcaa

SEQ ID NO: 4846364 - DNA, 25 bp, Homo sapien
cttacgagctgtgtgccgtctgaga

SEQ ID NO: 4846365 - DNA, 25 bp, Homo sapien
tgtgtgccgtctgagatccacagcc

SEQ ID NO: 4846366 - DNA, 25 bp, Homo sapien
tggcagctgggggtagaagtgtttc

SEQ ID NO: 4846367 - DNA, 25 bp, Homo sapien
ctggcagctgggggtagaagtgttt

SEQ ID NO: 4846368 - DNA, 25 bp, Homo sapien
acacgctctggtcgggacgtcgccg

SEQ ID NO: 4846369 - DNA, 25 bp, Homo sapien
caaaggggatgaccccatcgggcca

SEQ ID NO: 4846370 - DNA, 25 bp, Homo sapien
ggctacgggatctacctctccatct

SEQ ID NO: 4846371 - DNA, 25 bp, Homo sapien
atcgggccacacacgctctggtcgg

SEQ ID NO: 4846372 - DNA, 25 bp, Homo sapien
tatagctgtcctcgtcagtgcgctc

SEQ ID NO: 4846373 - DNA, 25 bp, Homo sapien
tgcctcatggcctgccggaagactg

SEQ ID NO: 4846374 - DNA, 25 bp, Homo sapien
ccgcaaggtcgataggtgaacacaa

SEQ ID NO: 4846375 - DNA, 25 bp, Homo sapien
ctgccggaagactgccctctggcta

SEQ ID NO: 4846376 - DNA, 25 bp, Homo sapien
gggggagtgcatccactcaggggcg

SEQ ID NO: 4846377 - DNA, 25 bp, Homo sapien
gggagtgcatccactcaggggcggg

SEQ ID NO: 4846378 - DNA, 25 bp, Homo sapien
gagtgcatccactcaggggcggggc

SEQ ID NO: 4846379 - DNA, 25 bp, Homo sapien
agtgcatccactcaggggcggggcc

SEQ ID NO: 4846380 - DNA, 25 bp, Homo sapien
ggccagctcaggggggcggtcccga

SEQ ID NO: 4846381 - DNA, 25 bp, Homo sapien
gccagctcaggggggcggtcccgag

SEQ ID NO: 4846382 - DNA, 25 bp, Homo sapien
cacgaacgatggaaacgtggcggtc

SEQ ID NO: 4846383 - DNA, 25 bp, Homo sapien
ggaccacaatgccgaacttgtcaca

SEQ ID NO: 4846384 - DNA, 25 bp, Homo sapien
tgttcgtgccagaagccgacgacgt

SEQ ID NO: 4846385 - DNA, 25 bp, Homo sapien
gcggcgacccacgtaggagcagcac

SEQ ID NO: 4846386 - DNA, 25 bp, Homo sapien
aggagcagtgaagagtggagaacgc

SEQ ID NO: 4846387 - DNA, 25 bp, Homo sapien
ggtctcaggaagagtcctgtccagc

SEQ ID NO: 4846388 - DNA, 25 bp, Homo sapien
tctcaggaagagtcctgtccagcag

SEQ ID NO: 4846389 - DNA, 25 bp, Homo sapien
ggaggactcaagggaacatgggaag

SEQ ID NO: 4846390 - DNA, 25 bp, Homo sapien
ggtccggggagcagccaaggggagc

SEQ ID NO: 4846391 - DNA, 25 bp, Homo sapien
ctgagggtccggggagcagccaagg

SEQ ID NO: 4846392 - DNA, 25 bp, Homo sapien
tgagggtccggggagcagccaaggg

SEQ ID NO: 4846393 - DNA, 25 bp, Homo sapien
tgcatgatgctgtcgaagtcatagg

SEQ ID NO: 4846394 - DNA, 25 bp, Homo sapien
tggagaatgtgttccgagcgtaatg

SEQ ID NO: 4846395 - DNA, 25 bp, Homo sapien
gagcgtaatgcatgatgctgtcgaa

SEQ ID NO: 4846396 - DNA, 25 bp, Homo sapien
tgtgttccgagcgtaatgcatgatg

SEQ ID NO: 4846397 - DNA, 25 bp, Homo sapien
cccttccttggtctctgttcctgca

SEQ ID NO: 4846398 - DNA, 25 bp, Homo sapien
cttccttggtctctgttcctgcagg

SEQ ID NO: 4846399 - DNA, 25 bp, Homo sapien
ttccttggtctctgttcctgcaggt

SEQ ID NO: 4846400 - DNA, 25 bp, Homo sapien
cacccttccttggtctctgttcctg

SEQ ID NO: 4846401 - DNA, 25 bp, Homo sapien
gcttgcgggcttgggcaatgtcccc

SEQ ID NO: 4846402 - DNA, 25 bp, Homo sapien
gggacaatggtatccaggaagatgc

SEQ ID NO: 4846403 - DNA, 25 bp, Homo sapien
gacaatggtatccaggaagatgccc

SEQ ID NO: 4846404 - DNA, 25 bp, Homo sapien
ctgggcacttgtaaagcttgcgggc

SEQ ID NO: 4846405 - DNA, 25 bp, Homo sapien
tgtgacagagatgcgccacacgcag

SEQ ID NO: 4846406 - DNA, 25 bp, Homo sapien
gtgtgacagagatgcgccacacgca

SEQ ID NO: 4846407 - DNA, 25 bp, Homo sapien
tgcatgtgagcagagtagccattgg

SEQ ID NO: 4846408 - DNA, 25 bp, Homo sapien
cagagtagccattggggtattcagg

SEQ ID NO: 4846409 - DNA, 25 bp, Homo sapien
agctgctgaggaagaaaccacgccc

SEQ ID NO: 4846410 - DNA, 25 bp, Homo sapien
agagggcccacccgagagctccaaa

SEQ ID NO: 4846411 - DNA, 25 bp, Homo sapien
gcccagccggcagaaccccagaggg

SEQ ID NO: 4846412 - DNA, 25 bp, Homo sapien
tcacatcgctcaggaggaagaaacc

SEQ ID NO: 4846413 - DNA, 25 bp, Homo sapien
tttccttcatccttagaagcagcct

SEQ ID NO: 4846414 - DNA, 25 bp, Homo sapien
tgctgaggacaagcgcccgctttcc

SEQ ID NO: 4846415 - DNA, 25 bp, Homo sapien
agctgtgctgaggacaagcgcccgc

SEQ ID NO: 4846416 - DNA, 25 bp, Homo sapien
tcatccttagaagcagccttggctc

SEQ ID NO: 4846417 - DNA, 25 bp, Homo sapien
ctccacatagtcgtaccagcacagg

SEQ ID NO: 4846418 - DNA, 25 bp, Homo sapien
gaagccatctcggacctccacatag

SEQ ID NO: 4846419 - DNA, 25 bp, Homo sapien
ggctgcggtacaggtccagggacgt

SEQ ID NO: 4846420 - DNA, 25 bp, Homo sapien
atagtcgtaccagcacaggcggctg

SEQ ID NO: 4846421 - DNA, 25 bp, Homo sapien
tcccataccaggttgtcatccctgg

SEQ ID NO: 4846422 - DNA, 25 bp, Homo sapien
tggctcccataccaggttgtcatcc

SEQ ID NO: 4846423 - DNA, 25 bp, Homo sapien
gttgtcatccctggccagtgttggg

SEQ ID NO: 4846424 - DNA, 25 bp, Homo sapien
ggactcctggctcccataccaggtt

SEQ ID NO: 4846425 - DNA, 25 bp, Homo sapien
tctcgcagcaagtgagtaatgcagc

SEQ ID NO: 4846426 - DNA, 25 bp, Homo sapien
tgttgccaaagagtggtcctgagct

SEQ ID NO: 4846427 - DNA, 25 bp, Homo sapien
taaggacagctgctttgagtgacca

SEQ ID NO: 4846428 - DNA, 25 bp, Homo sapien
tagaggttagcaatatccgtctggc

SEQ ID NO: 4846429 - DNA, 25 bp, Homo sapien
tacgatcacgtccagctaggaggag

SEQ ID NO: 4846430 - DNA, 25 bp, Homo sapien
tcagggagtttggacccgcagaagc

SEQ ID NO: 4846431 - DNA, 25 bp, Homo sapien
gctcagggagtttggacccgcagaa

SEQ ID NO: 4846432 - DNA, 25 bp, Homo sapien
aattcaacccagaggcggctgtcag

SEQ ID NO: 4846433 - DNA, 25 bp, Homo sapien
ctgctgcggaattcaacccagaggc

SEQ ID NO: 4846434 - DNA, 25 bp, Homo sapien
gaatgtggccatagtcctttttcac

SEQ ID NO: 4846435 - DNA, 25 bp, Homo sapien
cctggatccgccagatgcagacttt

SEQ ID NO: 4846436 - DNA, 25 bp, Homo sapien
caaaggactggaatgtgaggcccac

SEQ ID NO: 4846437 - DNA, 25 bp, Homo sapien
taatcgtctgggtagttgggcgatt

SEQ ID NO: 4846438 - DNA, 25 bp, Homo sapien
atagccacagtagcgcccgatgagg

SEQ ID NO: 4846439 - DNA, 25 bp, Homo sapien
tcagagacgaacttgagccagaggc

SEQ ID NO: 4846440 - DNA, 25 bp, Homo sapien
tccagatagtcgtaggcacagctgt

SEQ ID NO: 4846441 - DNA, 25 bp, Homo sapien
tgaaaaagttgacggcaaagcccgc

SEQ ID NO: 4846442 - DNA, 25 bp, Homo sapien
ttgggccgagagcactcgtccacct

SEQ ID NO: 4846443 - DNA, 25 bp, Homo sapien
agggtgttgaggcaccgctgctcac

SEQ ID NO: 4846444 - DNA, 25 bp, Homo sapien
tcacagcggcgcttgtctggggcca

SEQ ID NO: 4846445 - DNA, 25 bp, Homo sapien
cgcggttgggccgagagcactcgtc

SEQ ID NO: 4846446 - DNA, 25 bp, Homo sapien
tctgtcccacaacaggggtttccca

SEQ ID NO: 4846447 - DNA, 25 bp, Homo sapien
catgcgtggagaggcggaaacagtg

SEQ ID NO: 4846448 - DNA, 25 bp, Homo sapien
ttcccaacctgtagatcataacacc

SEQ ID NO: 4846449 - DNA, 25 bp, Homo sapien
ttagcctcggagtgctgtccccagc

SEQ ID NO: 4846450 - DNA, 25 bp, Homo sapien
agctaaggggtcataagtgtggcca

SEQ ID NO: 4846451 - DNA, 25 bp, Homo sapien
ggacaaggaaggtggcatcgtctgc

SEQ ID NO: 4846452 - DNA, 25 bp, Homo sapien
tctctgcaaatgaacaggccaaggt

SEQ ID NO: 4846453 - DNA, 25 bp, Homo sapien
caaggtcctccaagagggagtgagc

SEQ ID NO: 4846454 - DNA, 25 bp, Homo sapien
ttggtgaggaatccgccacaagcag

SEQ ID NO: 4846455 - DNA, 25 bp, Homo sapien
ggtgatggagccgttgagcttggtg

SEQ ID NO: 4846456 - DNA, 25 bp, Homo sapien
aagaagtcaaactgcagggagatgc

SEQ ID NO: 4846457 - DNA, 25 bp, Homo sapien
cattgccctctgtctcaaagaagtc

SEQ ID NO: 4846458 - DNA, 25 bp, Homo sapien
agtcagctgtgagtccactgcgcac

SEQ ID NO: 4846459 - DNA, 25 bp, Homo sapien
cttgccatgcagcttggagtcagct

SEQ ID NO: 4846460 - DNA, 25 bp, Homo sapien
gagtcagctgtgagtccactgcgca

SEQ ID NO: 4846461 - DNA, 25 bp, Homo sapien
ttggagtcagctgtgagtccactgc

SEQ ID NO: 4846462 - DNA, 25 bp, Homo sapien
acgcgcatgttgttgtactgggagg

SEQ ID NO: 4846463 - DNA, 25 bp, Homo sapien
cttgaagccctttttggacacggtg

SEQ ID NO: 4846464 - DNA, 25 bp, Homo sapien
cgcatgttgttgtactgggaggtga

SEQ ID NO: 4846465 - DNA, 25 bp, Homo sapien
tgggccttgaagccctttttggaca

SEQ ID NO: 4846466 - DNA, 25 bp, Homo sapien
gaaggggagatctcctggacccgga

SEQ ID NO: 4846467 - DNA, 25 bp, Homo sapien
gggctgctgatcaccattgagacca

SEQ ID NO: 4846468 - DNA, 25 bp, Homo sapien
gccaggggctgctgatcaccattga

SEQ ID NO: 4846469 - DNA, 25 bp, Homo sapien
tgaagggctgagtgattcacaaaga

SEQ ID NO: 4846470 - DNA, 25 bp, Homo sapien
atggactcggccgtgggcatcctgc

SEQ ID NO: 4846471 - DNA, 25 bp, Homo sapien
tgccccgagtgggtgttacatcctc

SEQ ID NO: 4846472 - DNA, 25 bp, Homo sapien
tctggtgagcacctcttaggagtcc

SEQ ID NO: 4846473 - DNA, 25 bp, Homo sapien
ggtcaacgggccactgtaagcagag

SEQ ID NO: 4846474 - DNA, 25 bp, Homo sapien
cctctgcaggtttcttgtgcgatgg

SEQ ID NO: 4846475 - DNA, 25 bp, Homo sapien
gcatgggggcagagcagtaactcca

SEQ ID NO: 4846476 - DNA, 25 bp, Homo sapien
gatgtgagtgtcggtcccctgcccc

SEQ ID NO: 4846477 - DNA, 25 bp, Homo sapien
ggcacagtgtcgaccagggcatggg

SEQ ID NO: 4846478 - DNA, 25 bp, Homo sapien
tagggtctcctcggtgggtgtccca

SEQ ID NO: 4846479 - DNA, 25 bp, Homo sapien
tgtcccaaaagtccaaatagctccc

SEQ ID NO: 4846480 - DNA, 25 bp, Homo sapien
ggtgtcccaaaagtccaaatagctc

SEQ ID NO: 4846481 - DNA, 25 bp, Homo sapien
tgggtgtcccaaaagtccaaatagc

SEQ ID NO: 4846482 - DNA, 25 bp, Homo sapien
ccaaatgccccggaaggtggcaggg

SEQ ID NO: 4846483 - DNA, 25 bp, Homo sapien
tgaaggtcttcaggctctttcttct

SEQ ID NO: 4846484 - DNA, 25 bp, Homo sapien
cagtgcccaaatgccccggaaggtg

SEQ ID NO: 4846485 - DNA, 25 bp, Homo sapien
gggtcagactgaaggtcttcaggct

SEQ ID NO: 4846486 - DNA, 25 bp, Homo sapien
tcccacctatgtgtgaagaggcagg

SEQ ID NO: 4846487 - DNA, 25 bp, Homo sapien
gatacaaagtcacgcgtaaaggcag

SEQ ID NO: 4846488 - DNA, 25 bp, Homo sapien
gatgtaccgtcacccaaatgtggca

SEQ ID NO: 4846489 - DNA, 25 bp, Homo sapien
ttcaggcggcgacatctacagagtg

SEQ ID NO: 4846490 - DNA, 25 bp, Homo sapien
ggcaggaggcacagcgacgggacag

SEQ ID NO: 4846491 - DNA, 25 bp, Homo sapien
agggtggccatgtccgggcgcatcc

SEQ ID NO: 4846492 - DNA, 25 bp, Homo sapien
acggagggctgggttagcaggggca

SEQ ID NO: 4846493 - DNA, 25 bp, Homo sapien
gaggcacagcgacgggacagagaca

SEQ ID NO: 4846494 - DNA, 25 bp, Homo sapien
agcagtgaaaaccagacccagggcc

SEQ ID NO: 4846495 - DNA, 25 bp, Homo sapien
gagggacagcagtgaaaaccagacc

SEQ ID NO: 4846496 - DNA, 25 bp, Homo sapien
gggacagcagtgaaaaccagaccca

SEQ ID NO: 4846497 - DNA, 25 bp, Homo sapien
agggcctctgaggtggatctgaggg

SEQ ID NO: 4846498 - DNA, 25 bp, Homo sapien
cttttctgcactcggaatttgagct

SEQ ID NO: 4846499 - DNA, 25 bp, Homo sapien
ttcttttctgcactcggaatttgag

SEQ ID NO: 4846500 - DNA, 25 bp, Homo sapien
tcttttctgcactcggaatttgagc

SEQ ID NO: 4846501 - DNA, 25 bp, Homo sapien
gaagagagcaccagttctgtccggc

SEQ ID NO: 4846502 - DNA, 25 bp, Homo sapien
gactttctcccaccgggacagagca

SEQ ID NO: 4846503 - DNA, 25 bp, Homo sapien
tgggtcaccattacctgcttactgg

SEQ ID NO: 4846504 - DNA, 25 bp, Homo sapien
catcccattccgtccaaggtgaggt

SEQ ID NO: 4846505 - DNA, 25 bp, Homo sapien
cactgcggcattggcactcataact

SEQ ID NO: 4846506 - DNA, 25 bp, Homo sapien
ttgtcatggaggacgaagccactgc

SEQ ID NO: 4846507 - DNA, 25 bp, Homo sapien
cataactgccgaacgtgttgacgca

SEQ ID NO: 4846508 - DNA, 25 bp, Homo sapien
ggcagccgccgttatccttggagca

SEQ ID NO: 4846509 - DNA, 25 bp, Homo sapien
cttagagatcatacaggccccagaa

SEQ ID NO: 4846510 - DNA, 25 bp, Homo sapien
ccgacactgcgggaggaggatctat

SEQ ID NO: 4846511 - DNA, 25 bp, Homo sapien
gcctctgtgccggtaggaagtcaca

SEQ ID NO: 4846512 - DNA, 25 bp, Homo sapien
cagaagtgagcgtgtggctccgaca

SEQ ID NO: 4846513 - DNA, 25 bp, Homo sapien
agagacgggttttcatcacgctggc

SEQ ID NO: 4846514 - DNA, 25 bp, Homo sapien
gacgggttttcatcacgctggccag

SEQ ID NO: 4846515 - DNA, 25 bp, Homo sapien
gagacgggttttcatcacgctggcc

SEQ ID NO: 4846516 - DNA, 25 bp, Homo sapien
agacgggttttcatcacgctggcca

SEQ ID NO: 4846517 - DNA, 25 bp, Homo sapien
ggtgctcaggacctcaccttcctga

SEQ ID NO: 4846518 - DNA, 25 bp, Homo sapien
gcctggctggcctcttaattttaga

SEQ ID NO: 4846519 - DNA, 25 bp, Homo sapien
caaaaatgggtcctcactttgctac

SEQ ID NO: 4846520 - DNA, 25 bp, Homo sapien
tccttcggggtgctcaggacctcac

SEQ ID NO: 4846521 - DNA, 25 bp, Homo sapien
tagcctcctcagtatcttggattac

SEQ ID NO: 4846522 - DNA, 25 bp, Homo sapien
tcagtatcttggattacagacgtgc

SEQ ID NO: 4846523 - DNA, 25 bp, Homo sapien
tcctcagtatcttggattacagacg

SEQ ID NO: 4846524 - DNA, 25 bp, Homo sapien
ctcctcagtatcttggattacagac

SEQ ID NO: 4846525 - DNA, 25 bp, Homo sapien
agatggcccacgtgcactccttctt

SEQ ID NO: 4846526 - DNA, 25 bp, Homo sapien
tgatggtaccactggtggatgtcac

SEQ ID NO: 4846527 - DNA, 25 bp, Homo sapien
tgctgggatacttgtcaggccagtt

SEQ ID NO: 4846528 - DNA, 25 bp, Homo sapien
ggtaccactggtggatgtcaccttg

SEQ ID NO: 4846529 - DNA, 25 bp, Homo sapien
tatctgagtagaagcgcaggaacat

SEQ ID NO: 4846530 - DNA, 25 bp, Homo sapien
cactcaggctgggactcgatgtcca

SEQ ID NO: 4846531 - DNA, 25 bp, Homo sapien
tggaagccctttcgctggaccgagt

SEQ ID NO: 4846532 - DNA, 25 bp, Homo sapien
acctctaggtggtcgtaggcacact

SEQ ID NO: 4846533 - DNA, 25 bp, Homo sapien
gtgaacactcccacaaccggggaca

SEQ ID NO: 4846534 - DNA, 25 bp, Homo sapien
cagtgaacactcccacaaccgggga

SEQ ID NO: 4846535 - DNA, 25 bp, Homo sapien
tgaacactcccacaaccggggacag

SEQ ID NO: 4846536 - DNA, 25 bp, Homo sapien
taggggacaagaggggccaaccagc

SEQ ID NO: 4846537 - DNA, 25 bp, Homo sapien
tgtaggggacaagaggggccaacca

SEQ ID NO: 4846538 - DNA, 25 bp, Homo sapien
tgtcgtagccgtcgaagagctccat

SEQ ID NO: 4846539 - DNA, 25 bp, Homo sapien
aaaggtccttggtcttcacgtctgc

SEQ ID NO: 4846540 - DNA, 25 bp, Homo sapien
tcgaagagctccatgtagtcatagc

SEQ ID NO: 4846541 - DNA, 25 bp, Homo sapien
aaaggtctggaacacgagctccacg

SEQ ID NO: 4846542 - DNA, 25 bp, Homo sapien
tgaggacattccgagtagttgtgcc

SEQ ID NO: 4846543 - DNA, 25 bp, Homo sapien
gacattccgagtagttgtgccagga

SEQ ID NO: 4846544 - DNA, 25 bp, Homo sapien
gttccttccggtcaactcagcctgg

SEQ ID NO: 4846545 - DNA, 25 bp, Homo sapien
aagttccttccggtcaactcagcct

SEQ ID NO: 4846546 - DNA, 25 bp, Homo sapien
gaaaccttttttggtgatggtgtca

SEQ ID NO: 4846547 - DNA, 25 bp, Homo sapien
gtggaacttcaccaggacagaatct

SEQ ID NO: 4846548 - DNA, 25 bp, Homo sapien
tgatggtgtcatccgagtggaactt

SEQ ID NO: 4846549 - DNA, 25 bp, Homo sapien
aggacagaatctcccgccgagtaca

SEQ ID NO: 4846550 - DNA, 25 bp, Homo sapien
taaaaccaaatcgaggctggagcag

SEQ ID NO: 4846551 - DNA, 25 bp, Homo sapien
tggcttatgccggagtccagttccc

SEQ ID NO: 4846552 - DNA, 25 bp, Homo sapien
actatccagtctaggcgaccaaggg

SEQ ID NO: 4846553 - DNA, 25 bp, Homo sapien
cacagacacttgtgccccaggaaac

SEQ ID NO: 4846554 - DNA, 25 bp, Homo sapien
acactttcggtttattggctgcggt

SEQ ID NO: 4846555 - DNA, 25 bp, Homo sapien
tttcggtttattggctgcggtgccc

SEQ ID NO: 4846556 - DNA, 25 bp, Homo sapien
tcggtttattggctgcggtgccctg

SEQ ID NO: 4846557 - DNA, 25 bp, Homo sapien
gctgtaacactttcggtttattggc

SEQ ID NO: 4846558 - DNA, 25 bp, Homo sapien
atgggtgcctgcgagtatctgtgcc

SEQ ID NO: 4846559 - DNA, 25 bp, Homo sapien
cagccactttatggaatgttccacc

SEQ ID NO: 4846560 - DNA, 25 bp, Homo sapien
tgtgaaattacacccttggcagcct

SEQ ID NO: 4846561 - DNA, 25 bp, Homo sapien
tacatctggaacatgatggccccgc

SEQ ID NO: 4846562 - DNA, 25 bp, Homo sapien
caacactgcctgactcaaggccatg

SEQ ID NO: 4846563 - DNA, 25 bp, Homo sapien
aacactgcctgactcaaggccatgt

SEQ ID NO: 4846564 - DNA, 25 bp, Homo sapien
acactgcctgactcaaggccatgtt

SEQ ID NO: 4846565 - DNA, 25 bp, Homo sapien
cactgcctgactcaaggccatgttc

SEQ ID NO: 4846566 - DNA, 25 bp, Homo sapien
gatgaaacaggacttgagtgacacc

SEQ ID NO: 4846567 - DNA, 25 bp, Homo sapien
caggttaatacagaggtgccaggct

SEQ ID NO: 4846568 - DNA, 25 bp, Homo sapien
cataggattccccatgcacaaagcc

SEQ ID NO: 4846569 - DNA, 25 bp, Homo sapien
gccatccaggcaactcacaggttaa

SEQ ID NO: 4846570 - DNA, 25 bp, Homo sapien
tgtagcttgtctgagtcctttaata

SEQ ID NO: 4846571 - DNA, 25 bp, Homo sapien
ctgtagcttgtctgagtcctttaat

SEQ ID NO: 4846572 - DNA, 25 bp, Homo sapien
gcagcttggaacagccgcagtggac

SEQ ID NO: 4846573 - DNA, 25 bp, Homo sapien
agtggtcattacctccgggcagcga

SEQ ID NO: 4846574 - DNA, 25 bp, Homo sapien
agtggaccaaccggtgcccagtcat

SEQ ID NO: 4846575 - DNA, 25 bp, Homo sapien
accttggagtggtcattacctccgg

SEQ ID NO: 4846576 - DNA, 25 bp, Homo sapien
cgagccctgtctgcgggttctccat

SEQ ID NO: 4846577 - DNA, 25 bp, Homo sapien
tggacttaagagtcggggagtcctg

SEQ ID NO: 4846578 - DNA, 25 bp, Homo sapien
ttaagagtcggggagtcctgggcca

SEQ ID NO: 4846579 - DNA, 25 bp, Homo sapien
ctggacttaagagtcggggagtcct

SEQ ID NO: 4846580 - DNA, 25 bp, Homo sapien
agagtcggggagtcctgggccacac

SEQ ID NO: 4846581 - DNA, 25 bp, Homo sapien
cgccgggcggaagtctgcgtggcag

SEQ ID NO: 4846582 - DNA, 25 bp, Homo sapien
ccgggcggaagtctgcgtggcaggg

SEQ ID NO: 4846583 - DNA, 25 bp, Homo sapien
tgcaacgcgaccagccgccagcctt

SEQ ID NO: 4846584 - DNA, 25 bp, Homo sapien
cagccttcggtctccgcgccgggcg

SEQ ID NO: 4846585 - DNA, 25 bp, Homo sapien
cgcggctccacaccgcgcgtcacaa

SEQ ID NO: 4846586 - DNA, 25 bp, Homo sapien
tccacaccgcgcgtcacaacctcac

SEQ ID NO: 4846587 - DNA, 25 bp, Homo sapien
ccgggccgcggctccacaccgcgcg

SEQ ID NO: 4846588 - DNA, 25 bp, Homo sapien
ggccgcggctccacaccgcgcgtca

SEQ ID NO: 4846589 - DNA, 25 bp, Homo sapien
cacgtggcgagactcccgggaccac

SEQ ID NO: 4846590 - DNA, 25 bp, Homo sapien
gactgacacgcggaccctggcggaa

SEQ ID NO: 4846591 - DNA, 25 bp, Homo sapien
gagagcctttggctcgcgacacgcc

SEQ ID NO: 4846592 - DNA, 25 bp, Homo sapien
agtcggtgcgtccctccagtggcct

SEQ ID NO: 4846593 - DNA, 25 bp, Homo sapien
cgccggcggcgtttccttccgacat

SEQ ID NO: 4846594 - DNA, 25 bp, Homo sapien
tgctgggctcgccggcggcgtttcc

SEQ ID NO: 4846595 - DNA, 25 bp, Homo sapien
ctggaacggatggagggaaggcggc

SEQ ID NO: 4846596 - DNA, 25 bp, Homo sapien
cccagtcaggagaggtcggggccct

SEQ ID NO: 4846597 - DNA, 25 bp, Homo sapien
cttcttgactcccccgagggtgagg

SEQ ID NO: 4846598 - DNA, 25 bp, Homo sapien
tcttgactcccccgagggtgaggtc

SEQ ID NO: 4846599 - DNA, 25 bp, Homo sapien
tcttccttgatcttccgactgatga

SEQ ID NO: 4846600 - DNA, 25 bp, Homo sapien
gatcttccgactgatgatatttggg

SEQ ID NO: 4846601 - DNA, 25 bp, Homo sapien
tccttgatcttccgactgatgatat

SEQ ID NO: 4846602 - DNA, 25 bp, Homo sapien
ttgatcttccgactgatgatatttg

SEQ ID NO: 4846603 - DNA, 25 bp, Homo sapien
gactggatcacttctggacggcctc

SEQ ID NO: 4846604 - DNA, 25 bp, Homo sapien
cctgctcaaagatggagtgagactg

SEQ ID NO: 4846605 - DNA, 25 bp, Homo sapien
tctcgttgtcggtctctgtcccttt

SEQ ID NO: 4846606 - DNA, 25 bp, Homo sapien
atgcccctctcgttgtcggtctctg

SEQ ID NO: 4846607 - DNA, 25 bp, Homo sapien
tgatgttgatgatatgagaaggtcc

SEQ ID NO: 4846608 - DNA, 25 bp, Homo sapien
ccagcatacgcaagatctgtttagt

SEQ ID NO: 4846609 - DNA, 25 bp, Homo sapien
gatgttgatgatatgagaaggtccc

SEQ ID NO: 4846610 - DNA, 25 bp, Homo sapien
cgtccttctccagcatacgcaagat

SEQ ID NO: 4846611 - DNA, 25 bp, Homo sapien
tggatcaaagtctgctttagtccct

SEQ ID NO: 4846612 - DNA, 25 bp, Homo sapien
gatcaaagtctgctttagtcccttt

SEQ ID NO: 4846613 - DNA, 25 bp, Homo sapien
ggatcaaagtctgctttagtccctt

SEQ ID NO: 4846614 - DNA, 25 bp, Homo sapien
ggtcatccagcctgctagcacatgc

SEQ ID NO: 4846615 - DNA, 25 bp, Homo sapien
gtcatccagcctgctagcacatgca

SEQ ID NO: 4846616 - DNA, 25 bp, Homo sapien
ctgggtcatccagcctgctagcaca

SEQ ID NO: 4846617 - DNA, 25 bp, Homo sapien
gggtcatccagcctgctagcacatg

SEQ ID NO: 4846618 - DNA, 25 bp, Homo sapien
ggcatatttcgagtgtcgttcctca

SEQ ID NO: 4846619 - DNA, 25 bp, Homo sapien
cacaggcatatttcgagtgtcgttc

SEQ ID NO: 4846620 - DNA, 25 bp, Homo sapien
tttaacatctggttcgtcattttct

SEQ ID NO: 4846621 - DNA, 25 bp, Homo sapien
tttcgagtgtcgttcctcaggccgg

SEQ ID NO: 4846622 - DNA, 25 bp, Homo sapien
tgcttgatgagcaccacctgtccgt

SEQ ID NO: 4846623 - DNA, 25 bp, Homo sapien
acagatacatccttcgggaggcctg

SEQ ID NO: 4846624 - DNA, 25 bp, Homo sapien
tcttgataggcttgatgtcctgggt

SEQ ID NO: 4846625 - DNA, 25 bp, Homo sapien
tcgccctgcacctctgtcttgatag

SEQ ID NO: 4846626 - DNA, 25 bp, Homo sapien
cccagtccccgacttgattcccgca

SEQ ID NO: 4846627 - DNA, 25 bp, Homo sapien
tccccgacttgattcccgcaggcct

SEQ ID NO: 4846628 - DNA, 25 bp, Homo sapien
cccgacttgattcccgcaggcctct

SEQ ID NO: 4846629 - DNA, 25 bp, Homo sapien
agtccccgacttgattcccgcaggc

SEQ ID NO: 4846630 - DNA, 25 bp, Homo sapien
tccagacttgcggatgagtagcttg

SEQ ID NO: 4846631 - DNA, 25 bp, Homo sapien
gccagggtacaagcattctctgcca

SEQ ID NO: 4846632 - DNA, 25 bp, Homo sapien
tacaagcattctctgccaatttggc

SEQ ID NO: 4846633 - DNA, 25 bp, Homo sapien
gcggatgagtagcttgccaacctga

SEQ ID NO: 4846634 - DNA, 25 bp, Homo sapien
tgcttcacgtgtcccaggactgtca

SEQ ID NO: 4846635 - DNA, 25 bp, Homo sapien
ttgtgcttcacgtgtcccaggactg

SEQ ID NO: 4846636 - DNA, 25 bp, Homo sapien
gcttcacgtgtcccaggactgtcat

SEQ ID NO: 4846637 - DNA, 25 bp, Homo sapien
tgtgcttcacgtgtcccaggactgt

SEQ ID NO: 4846638 - DNA, 25 bp, Homo sapien
ccaagagggattcaaaatcagggga

SEQ ID NO: 4846639 - DNA, 25 bp, Homo sapien
cggtgtttgtgatccaagagggatt

SEQ ID NO: 4846640 - DNA, 25 bp, Homo sapien
gggattcaaaatcaggggaacatac

SEQ ID NO: 4846641 - DNA, 25 bp, Homo sapien
tgatccaagagggattcaaaatcag

SEQ ID NO: 4846642 - DNA, 25 bp, Homo sapien
taatagcccatgaatcctcacgcca

SEQ ID NO: 4846643 - DNA, 25 bp, Homo sapien
ccatctacccttggaggatgcatca

SEQ ID NO: 4846644 - DNA, 25 bp, Homo sapien
ggaccgagtgcttaagtctcagact

SEQ ID NO: 4846645 - DNA, 25 bp, Homo sapien
tgcaggaaggtcactgtgccattca

SEQ ID NO: 4846646 - DNA, 25 bp, Homo sapien
tattacagtaactcacacaggaggc

SEQ ID NO: 4846647 - DNA, 25 bp, Homo sapien
caccataaatttagggcatcaggcc

SEQ ID NO: 4846648 - DNA, 25 bp, Homo sapien
catcatcggccaagtgtcaaagagg

SEQ ID NO: 4846649 - DNA, 25 bp, Homo sapien
tgtgccatcagcgtctaacagccac

SEQ ID NO: 4846650 - DNA, 25 bp, Homo sapien
tgacaaatgagtaacaggcttgagg

SEQ ID NO: 4846651 - DNA, 25 bp, Homo sapien
ttgagggctttgtaggagaagccca

SEQ ID NO: 4846652 - DNA, 25 bp, Homo sapien
ggttgagggctttgtaggagaagcc

SEQ ID NO: 4846653 - DNA, 25 bp, Homo sapien
acaaatgagtaacaggcttgaggaa

SEQ ID NO: 4846654 - DNA, 25 bp, Homo sapien
tgaggatggcaaagcagacggttcc

SEQ ID NO: 4846655 - DNA, 25 bp, Homo sapien
taacatcgggccattgagttcgtcc

SEQ ID NO: 4846656 - DNA, 25 bp, Homo sapien
gatacggagtcataaggttcaagcc

SEQ ID NO: 4846657 - DNA, 25 bp, Homo sapien
gataagggcagaatgagaaggctcc

SEQ ID NO: 4846658 - DNA, 25 bp, Homo sapien
tggatgagcttgactctcctccctc

SEQ ID NO: 4846659 - DNA, 25 bp, Homo sapien
ctgtggatgagcttgactctcctcc

SEQ ID NO: 4846660 - DNA, 25 bp, Homo sapien
tgtggatgagcttgactctcctccc

SEQ ID NO: 4846661 - DNA, 25 bp, Homo sapien
atgagcttgactctcctccctctca

SEQ ID NO: 4846662 - DNA, 25 bp, Homo sapien
tggaggtaaacttgaggccaccttc

SEQ ID NO: 4846663 - DNA, 25 bp, Homo sapien
tggaaggtggaggtaaacttgaggc

SEQ ID NO: 4846664 - DNA, 25 bp, Homo sapien
ctttggccgtcttccgctgccagag

SEQ ID NO: 4846665 - DNA, 25 bp, Homo sapien
ttcttcactttggccgtcttccgct

SEQ ID NO: 4846666 - DNA, 25 bp, Homo sapien
tgctaactcccgtgaatatggctgg

SEQ ID NO: 4846667 - DNA, 25 bp, Homo sapien
aattcttgtgatcatcttgccctgg

SEQ ID NO: 4846668 - DNA, 25 bp, Homo sapien
gagaactgtgttggcagcacggcac

SEQ ID NO: 4846669 - DNA, 25 bp, Homo sapien
cacggcacagtctcaggaagcttca

SEQ ID NO: 4846670 - DNA, 25 bp, Homo sapien
tgcaacctcccacttctgggctcat

SEQ ID NO: 4846671 - DNA, 25 bp, Homo sapien
acctcccacttctgggctcatgcaa

SEQ ID NO: 4846672 - DNA, 25 bp, Homo sapien
gctcatgcaatcctcccacttcagc

SEQ ID NO: 4846673 - DNA, 25 bp, Homo sapien
gcaacctcccacttctgggctcatg

SEQ ID NO: 4846674 - DNA, 25 bp, Homo sapien
gaaccacgctgcctggcccaacatt

SEQ ID NO: 4846675 - DNA, 25 bp, Homo sapien
acaggcaggaaccacgctgcctggc

SEQ ID NO: 4846676 - DNA, 25 bp, Homo sapien
aggaaccacgctgcctggcccaaca

SEQ ID NO: 4846677 - DNA, 25 bp, Homo sapien
gctgcctggcccaacatttgcacac

SEQ ID NO: 4846678 - DNA, 25 bp, Homo sapien
tgggagctccctgtcttagtccatc

SEQ ID NO: 4846679 - DNA, 25 bp, Homo sapien
taatggtcccgcctcttagtactgt

SEQ ID NO: 4846680 - DNA, 25 bp, Homo sapien
ggtgggagccctcacggtcagatca

SEQ ID NO: 4846681 - DNA, 25 bp, Homo sapien
gaattttggaaggtgacaaacatcc

SEQ ID NO: 4846682 - DNA, 25 bp, Homo sapien
cattcacaggacattgatgtaaaac

SEQ ID NO: 4846683 - DNA, 25 bp, Homo sapien
tgaatagactcaaagccgtacccta

SEQ ID NO: 4846684 - DNA, 25 bp, Homo sapien
gggagccacaaggactgtatgttga

SEQ ID NO: 4846685 - DNA, 25 bp, Homo sapien
gtgcccattgtacacgtagcttggg

SEQ ID NO: 4846686 - DNA, 25 bp, Homo sapien
gggaagaccgagctcaacccacgcc

SEQ ID NO: 4846687 - DNA, 25 bp, Homo sapien
caggggaagaccgagctcaacccac

SEQ ID NO: 4846688 - DNA, 25 bp, Homo sapien
gagtcctcgccccagtcgcccagct

SEQ ID NO: 4846689 - DNA, 25 bp, Homo sapien
cctcaggggaagaccgagctcaacc

SEQ ID NO: 4846690 - DNA, 25 bp, Homo sapien
tgggcctccggagggcctcccctgc

SEQ ID NO: 4846691 - DNA, 25 bp, Homo sapien
tctctcaggccaaataagacgtcca

SEQ ID NO: 4846692 - DNA, 25 bp, Homo sapien
gggttctatctcctctctcaggcca

SEQ ID NO: 4846693 - DNA, 25 bp, Homo sapien
aataagacgtccacttgggcctccg

SEQ ID NO: 4846694 - DNA, 25 bp, Homo sapien
tgtcgatcctgttctggttaattac

SEQ ID NO: 4846695 - DNA, 25 bp, Homo sapien
acgggctgtagagaacacgtgtcga

SEQ ID NO: 4846696 - DNA, 25 bp, Homo sapien
tgtagagaacacgtgtcgatcctgt

SEQ ID NO: 4846697 - DNA, 25 bp, Homo sapien
gaacacgtgtcgatcctgttctggt

SEQ ID NO: 4846698 - DNA, 25 bp, Homo sapien
cctgaacgatggtcggaaaggatcc

SEQ ID NO: 4846699 - DNA, 25 bp, Homo sapien
aaggtttagaagcttgtggccaaca

SEQ ID NO: 4846700 - DNA, 25 bp, Homo sapien
tggcatccgtacagcctggcactgg

SEQ ID NO: 4846701 - DNA, 25 bp, Homo sapien
ttgtggccaacagcctggcatccgt

SEQ ID NO: 4846702 - DNA, 25 bp, Homo sapien
tagaaactgtttcaatgcccaggcc

SEQ ID NO: 4846703 - DNA, 25 bp, Homo sapien
agcatttcccgtttcagaggggtct

SEQ ID NO: 4846704 - DNA, 25 bp, Homo sapien
ctgatggaagcatttcccgtttcag

SEQ ID NO: 4846705 - DNA, 25 bp, Homo sapien
atggaagcatttcccgtttcagagg

SEQ ID NO: 4846706 - DNA, 25 bp, Homo sapien
tactccaaccaacggaggtctctgc

SEQ ID NO: 4846707 - DNA, 25 bp, Homo sapien
agattagcagacaagcctcgaccta

SEQ ID NO: 4846708 - DNA, 25 bp, Homo sapien
ctccctgtccttgcgtaccagatta

SEQ ID NO: 4846709 - DNA, 25 bp, Homo sapien
gacaagcctcgacctaaaatgcctc

SEQ ID NO: 4846710 - DNA, 25 bp, Homo sapien
taataaagacgcatctgaactccct

SEQ ID NO: 4846711 - DNA, 25 bp, Homo sapien
cccgggacggtgtgctgaaggtaca

SEQ ID NO: 4846712 - DNA, 25 bp, Homo sapien
accagagggcgatctggagagtgca

SEQ ID NO: 4846713 - DNA, 25 bp, Homo sapien
gctgaaggtacagggaggcttgtcc

SEQ ID NO: 4846714 - DNA, 25 bp, Homo sapien
gtattttgacgaggttcagtcccaa

SEQ ID NO: 4846715 - DNA, 25 bp, Homo sapien
catgatattgataaactgcttcatt

SEQ ID NO: 4846716 - DNA, 25 bp, Homo sapien
gataaactgcttcattatgacactg

SEQ ID NO: 4846717 - DNA, 25 bp, Homo sapien
atgacactgtattttgacgaggttc

SEQ ID NO: 4846718 - DNA, 25 bp, Homo sapien
cggtgacagcttgatggtccttcaa

SEQ ID NO: 4846719 - DNA, 25 bp, Homo sapien
gaatagatccatcaaacgcagtgac

SEQ ID NO: 4846720 - DNA, 25 bp, Homo sapien
taacaggcagatagagaatagatcc

SEQ ID NO: 4846721 - DNA, 25 bp, Homo sapien
ggtccttcaacatgccgaacctcat

SEQ ID NO: 4846722 - DNA, 25 bp, Homo sapien
tctgaatcttaatgctgatttcagc

SEQ ID NO: 4846723 - DNA, 25 bp, Homo sapien
agggaatgcacaggtcagagcaggg

SEQ ID NO: 4846724 - DNA, 25 bp, Homo sapien
aaacaacattgtagaagggaatgca

SEQ ID NO: 4846725 - DNA, 25 bp, Homo sapien
tgaatcttaatgctgatttcagcac

SEQ ID NO: 4846726 - DNA, 25 bp, Homo sapien
tccccacaagcttcatatctaaaag

SEQ ID NO: 4846727 - DNA, 25 bp, Homo sapien
tagtaccatagcacttgtagggtca

SEQ ID NO: 4846728 - DNA, 25 bp, Homo sapien
ctgtgttgctgtagtaccatagcac

SEQ ID NO: 4846729 - DNA, 25 bp, Homo sapien
gcacttgtagggtcataaaagtttc

SEQ ID NO: 4846730 - DNA, 25 bp, Homo sapien
gagccctccatctgtccttcggatg

SEQ ID NO: 4846731 - DNA, 25 bp, Homo sapien
gaatgaccttatgggagacatcagc

SEQ ID NO: 4846732 - DNA, 25 bp, Homo sapien
cattccgaatgaccttatgggagac

SEQ ID NO: 4846733 - DNA, 25 bp, Homo sapien
ttcggatgctagctgcatagcctgg

SEQ ID NO: 4846734 - DNA, 25 bp, Homo sapien
agcagagtccacactaaaggacata

SEQ ID NO: 4846735 - DNA, 25 bp, Homo sapien
taaaagaatttgtcaccagcagagt

SEQ ID NO: 4846736 - DNA, 25 bp, Homo sapien
tttcagaagacaacagtaaagaaaa

SEQ ID NO: 4846737 - DNA, 25 bp, Homo sapien
catatagaatagtgagggatgcagg

SEQ ID NO: 4846738 - DNA, 25 bp, Homo sapien
ggtgattgatttgtcaacaggaaca

SEQ ID NO: 4846739 - DNA, 25 bp, Homo sapien
taaaaagataacagtatcactggtg

SEQ ID NO: 4846740 - DNA, 25 bp, Homo sapien
caggaacaatgtaaaccaagggcca

SEQ ID NO: 4846741 - DNA, 25 bp, Homo sapien
ccttggcaacacagtcaaactgcat

SEQ ID NO: 4846742 - DNA, 25 bp, Homo sapien
cacatcatcaatacgataggtacga

SEQ ID NO: 4846743 - DNA, 25 bp, Homo sapien
gaagcttagtacactcatcctggaa

SEQ ID NO: 4846744 - DNA, 25 bp, Homo sapien
caatattgccaaccagaagcttagt

SEQ ID NO: 4846745 - DNA, 25 bp, Homo sapien
gacatcgtgaagctatcctttggag

SEQ ID NO: 4846746 - DNA, 25 bp, Homo sapien
gaatcagcaatggctggtcctcttc

SEQ ID NO: 4846747 - DNA, 25 bp, Homo sapien
cttaactgtgatcccataatttttg

SEQ ID NO: 4846748 - DNA, 25 bp, Homo sapien
gtgaatcagcaatggctggtcctct

SEQ ID NO: 4846749 - DNA, 25 bp, Homo sapien
tgtgaatcagcaatggctggtcctc

SEQ ID NO: 4846750 - DNA, 25 bp, Homo sapien
cttgcgcactaaggagtataaaatc

SEQ ID NO: 4846751 - DNA, 25 bp, Homo sapien
ggtcataaaagaaagctcaggcagc

SEQ ID NO: 4846752 - DNA, 25 bp, Homo sapien
tccggtcataaaagaaagctcaggc

SEQ ID NO: 4846753 - DNA, 25 bp, Homo sapien
cataaaagaaagctcaggcagcagc

SEQ ID NO: 4846754 - DNA, 25 bp, Homo sapien
attccggtcataaaagaaagctcag

SEQ ID NO: 4846755 - DNA, 25 bp, Homo sapien
gggcatttccggctgaaaacacagg

SEQ ID NO: 4846756 - DNA, 25 bp, Homo sapien
tcacaaagtgggcatttccggctga

SEQ ID NO: 4846757 - DNA, 25 bp, Homo sapien
tccggctgaaaacacaggactccaa

SEQ ID NO: 4846758 - DNA, 25 bp, Homo sapien
caaagtgggcatttccggctgaaaa

SEQ ID NO: 4846759 - DNA, 25 bp, Homo sapien
tttcaaatgtcatcgactctctctt

SEQ ID NO: 4846760 - DNA, 25 bp, Homo sapien
tctctctttcatgatgtgtggatct

SEQ ID NO: 4846761 - DNA, 25 bp, Homo sapien
gaaggtgaatgtgatataaggttaa

SEQ ID NO: 4846762 - DNA, 25 bp, Homo sapien
aaatatatctcttaggaaggtgaat

SEQ ID NO: 4846763 - DNA, 25 bp, Homo sapien
gcaagcattccaaagcactatggtg

SEQ ID NO: 4846764 - DNA, 25 bp, Homo sapien
gctcagattgatttgctgagccaaa

SEQ ID NO: 4846765 - DNA, 25 bp, Homo sapien
atccttttgcagacggagcccccaa

SEQ ID NO: 4846766 - DNA, 25 bp, Homo sapien
cactatggtgttgcttggggctcag

SEQ ID NO: 4846767 - DNA, 25 bp, Homo sapien
aggctcgtgcctcgacactcagcta

SEQ ID NO: 4846768 - DNA, 25 bp, Homo sapien
aagattcagttgtaaggatgtacac

SEQ ID NO: 4846769 - DNA, 25 bp, Homo sapien
gctcgtgcctcgacactcagctaat

SEQ ID NO: 4846770 - DNA, 25 bp, Homo sapien
ggatgtacactgcatcgttattttt

SEQ ID NO: 4846771 - DNA, 25 bp, Homo sapien
agtcaagatggaagggtctctggtt

SEQ ID NO: 4846772 - DNA, 25 bp, Homo sapien
caagatggaagggtctctggttact

SEQ ID NO: 4846773 - DNA, 25 bp, Homo sapien
cctgagatgtgataaacgaagtatt

SEQ ID NO: 4846774 - DNA, 25 bp, Homo sapien
gttcctgagatgtgataaacgaagt

SEQ ID NO: 4846775 - DNA, 25 bp, Homo sapien
aaagtgcccagaaatgcatggggat

SEQ ID NO: 4846776 - DNA, 25 bp, Homo sapien
taaaaaagtgcccagaaatgcatgg

SEQ ID NO: 4846777 - DNA, 25 bp, Homo sapien
gggtaaaaaagtgcccagaaatgca

SEQ ID NO: 4846778 - DNA, 25 bp, Homo sapien
tgggtaaaaaagtgcccagaaatgc

SEQ ID NO: 4846779 - DNA, 25 bp, Homo sapien
cggtcatcctttagttcaacccagg

SEQ ID NO: 4846780 - DNA, 25 bp, Homo sapien
tcagctcctaacgtggattgaatgg

SEQ ID NO: 4846781 - DNA, 25 bp, Homo sapien
ggtgggctcatacgcatgccaatgg

SEQ ID NO: 4846782 - DNA, 25 bp, Homo sapien
tccaacatgttgaccagttctcgag

SEQ ID NO: 4846783 - DNA, 25 bp, Homo sapien
ttctgagtatgcaaagccataggac

SEQ ID NO: 4846784 - DNA, 25 bp, Homo sapien
gagataaggtatatacaagtcaggc

SEQ ID NO: 4846785 - DNA, 25 bp, Homo sapien
ctagttggcagtattctgagtatgc

SEQ ID NO: 4846786 - DNA, 25 bp, Homo sapien
tacaagtcaggctgtggaattctct

SEQ ID NO: 4846787 - DNA, 25 bp, Homo sapien
tggccccatagagatcatcacgtgg

SEQ ID NO: 4846788 - DNA, 25 bp, Homo sapien
cacgtgggcccatgatgatgcaaac

SEQ ID NO: 4846789 - DNA, 25 bp, Homo sapien
tcttgatggccccatagagatcatc

SEQ ID NO: 4846790 - DNA, 25 bp, Homo sapien
tagagatcatcacgtgggcccatga

SEQ ID NO: 4846791 - DNA, 25 bp, Homo sapien
gccacactccgaagcctggtgggct

SEQ ID NO: 4846792 - DNA, 25 bp, Homo sapien
cagaggaatatccactccccagagc

SEQ ID NO: 4846793 - DNA, 25 bp, Homo sapien
gaccaatggttcgaacattgacaac

SEQ ID NO: 4846794 - DNA, 25 bp, Homo sapien
cacccaatttacagttaatctgaag

SEQ ID NO: 4846795 - DNA, 25 bp, Homo sapien
agattgatgcttgccacgaagccaa

SEQ ID NO: 4846796 - DNA, 25 bp, Homo sapien
tccatcccgatcaccattaactgtt

SEQ ID NO: 4846797 - DNA, 25 bp, Homo sapien
ttgccacgaagccaaccacggagcg

SEQ ID NO: 4846798 - DNA, 25 bp, Homo sapien
ccacggagcgcatgcctctactggg

SEQ ID NO: 4846799 - DNA, 25 bp, Homo sapien
tccacaatctcctgatgcggcatct

SEQ ID NO: 4846800 - DNA, 25 bp, Homo sapien
cttttttaaggagcccacgaggcat

SEQ ID NO: 4846801 - DNA, 25 bp, Homo sapien
cacgaggcatagcttcaggctgtcc

SEQ ID NO: 4846802 - DNA, 25 bp, Homo sapien
caccacccgggaataccattttgtg

SEQ ID NO: 4846803 - DNA, 25 bp, Homo sapien
acagaaattaactggacgtgctggt

SEQ ID NO: 4846804 - DNA, 25 bp, Homo sapien
aaccccagaagcctgagaatttctg

SEQ ID NO: 4846805 - DNA, 25 bp, Homo sapien
caaaaaaccccagaagcctgagaat

SEQ ID NO: 4846806 - DNA, 25 bp, Homo sapien
taactggacgtgctggtgcacgcct

SEQ ID NO: 4846807 - DNA, 25 bp, Homo sapien
ttgcaggatgctataggaaacatta

SEQ ID NO: 4846808 - DNA, 25 bp, Homo sapien
gcaggatgctataggaaacattatt

SEQ ID NO: 4846809 - DNA, 25 bp, Homo sapien
tgcaggatgctataggaaacattat

SEQ ID NO: 4846810 - DNA, 25 bp, Homo sapien
gggagtggatatcccagtttccttg

SEQ ID NO: 4846811 - DNA, 25 bp, Homo sapien
ggaagtccatctggctccatgaaat

SEQ ID NO: 4846812 - DNA, 25 bp, Homo sapien
ccttgcttgaggaagtccatctggc

SEQ ID NO: 4846813 - DNA, 25 bp, Homo sapien
gttgatggccaacagtaaaaccttc

SEQ ID NO: 4846814 - DNA, 25 bp, Homo sapien
tctactaaagtagtcatatgattct

SEQ ID NO: 4846815 - DNA, 25 bp, Homo sapien
tgatggatggattgcattaactgat

SEQ ID NO: 4846816 - DNA, 25 bp, Homo sapien
gaaccagccttgcataaccggaata

SEQ ID NO: 4846817 - DNA, 25 bp, Homo sapien
taaagtagtcatatgattcttcttc

SEQ ID NO: 4846818 - DNA, 25 bp, Homo sapien
aacagtggagtttggcccttcaatg

SEQ ID NO: 4846819 - DNA, 25 bp, Homo sapien
tgagcctctgtacgatcctgccaat

SEQ ID NO: 4846820 - DNA, 25 bp, Homo sapien
aaagactcctaactaactcgctgtg

SEQ ID NO: 4846821 - DNA, 25 bp, Homo sapien
tgtgttaaaaggcaggtgacccagg

SEQ ID NO: 4846822 - DNA, 25 bp, Homo sapien
gtgtagacgactcgagccacaccaa

SEQ ID NO: 4846823 - DNA, 25 bp, Homo sapien
gatgtgtagacgactcgagccacac

SEQ ID NO: 4846824 - DNA, 25 bp, Homo sapien
agccacaccaacagactgctcctcc

SEQ ID NO: 4846825 - DNA, 25 bp, Homo sapien
caaaggatgtgtagacgactcgagc

SEQ ID NO: 4846826 - DNA, 25 bp, Homo sapien
tgtgtagcctggaatcatggcagat

SEQ ID NO: 4846827 - DNA, 25 bp, Homo sapien
tggcagatccttttgcagttagtgc

SEQ ID NO: 4846828 - DNA, 25 bp, Homo sapien
gcagttagtgccaaagctactgtgc

SEQ ID NO: 4846829 - DNA, 25 bp, Homo sapien
gagaggcccactcgcattgtgtagc

SEQ ID NO: 4846830 - DNA, 25 bp, Homo sapien
atgacagcgaggatgtggtgactca

SEQ ID NO: 4846831 - DNA, 25 bp, Homo sapien
tgtggtgactcacagagccctcagg

SEQ ID NO: 4846832 - DNA, 25 bp, Homo sapien
atgtggtgactcacagagccctcag

SEQ ID NO: 4846833 - DNA, 25 bp, Homo sapien
tgaaatgacagcgaggatgtggtga

SEQ ID NO: 4846834 - DNA, 25 bp, Homo sapien
tcttctctggtagacagtggttcac

SEQ ID NO: 4846835 - DNA, 25 bp, Homo sapien
ccaggagtgggagttacaaagttct

SEQ ID NO: 4846836 - DNA, 25 bp, Homo sapien
ttgtatgatctaccacagttccagg

SEQ ID NO: 4846837 - DNA, 25 bp, Homo sapien
ggagcagccagatatagattagtac

SEQ ID NO: 4846838 - DNA, 25 bp, Homo sapien
tgccacagccctgccgtacatgatg

SEQ ID NO: 4846839 - DNA, 25 bp, Homo sapien
gatgggcaagaagatagaaatccac

SEQ ID NO: 4846840 - DNA, 25 bp, Homo sapien
cataatgcgtaggaatgccacagcc

SEQ ID NO: 4846841 - DNA, 25 bp, Homo sapien
gatcagggctcaggtttgcggtgtt

SEQ ID NO: 4846842 - DNA, 25 bp, Homo sapien
tgatgcaagatgtgtcctgacagga

SEQ ID NO: 4846843 - DNA, 25 bp, Homo sapien
gacaggaaagctagcttgtgggcat

SEQ ID NO: 4846844 - DNA, 25 bp, Homo sapien
ttgtgggcatacttgcaaggagctg

SEQ ID NO: 4846845 - DNA, 25 bp, Homo sapien
ggaagaacaggttctcgcacagctg

SEQ ID NO: 4846846 - DNA, 25 bp, Homo sapien
tactgaaatccacggaaaaggcttc

SEQ ID NO: 4846847 - DNA, 25 bp, Homo sapien
ctttcaagaggccaagggaagccat

SEQ ID NO: 4846848 - DNA, 25 bp, Homo sapien
gatttagtcagcaagggccgaccta

SEQ ID NO: 4846849 - DNA, 25 bp, Homo sapien
ccaggaagcggttattttgcaagag

SEQ ID NO: 4846850 - DNA, 25 bp, Homo sapien
gatctgcttagccagagaccagtgg

SEQ ID NO: 4846851 - DNA, 25 bp, Homo sapien
gaggctgcccttgcaagtggacaca

SEQ ID NO: 4846852 - DNA, 25 bp, Homo sapien
caatggtgacagacaccccgtgagg

SEQ ID NO: 4846853 - DNA, 25 bp, Homo sapien
gaaattacctggctactaacactgg

SEQ ID NO: 4846854 - DNA, 25 bp, Homo sapien
agcttagccggtgcgtccgcgtaga

SEQ ID NO: 4846855 - DNA, 25 bp, Homo sapien
tagccggtgcgtccgcgtagacacg

SEQ ID NO: 4846856 - DNA, 25 bp, Homo sapien
ggcggcagaagcagcttagccggtg

SEQ ID NO: 4846857 - DNA, 25 bp, Homo sapien
agaagcagcttagccggtgcgtccg

SEQ ID NO: 4846858 - DNA, 25 bp, Homo sapien
cggcctcggccccgcgcagcctcac

SEQ ID NO: 4846859 - DNA, 25 bp, Homo sapien
ctggcgctcggaggcggcctcggcc

SEQ ID NO: 4846860 - DNA, 25 bp, Homo sapien
gaggcggcctcggccccgcgcagcc

SEQ ID NO: 4846861 - DNA, 25 bp, Homo sapien
aggcggcctcggccccgcgcagcct

SEQ ID NO: 4846862 - DNA, 25 bp, Homo sapien
agggcccagcctctgcgtctctgcc

SEQ ID NO: 4846863 - DNA, 25 bp, Homo sapien
cccctgagaggtttaatgcccacgg

SEQ ID NO: 4846864 - DNA, 25 bp, Homo sapien
tgagaggtttaatgcccacggtagt

SEQ ID NO: 4846865 - DNA, 25 bp, Homo sapien
ggccccctgagaggtttaatgccca

SEQ ID NO: 4846866 - DNA, 25 bp, Homo sapien
cagtaactggattccgaacatggct

SEQ ID NO: 4846867 - DNA, 25 bp, Homo sapien
cagatttaaccttttacccagcgat

SEQ ID NO: 4846868 - DNA, 25 bp, Homo sapien
taagactagcttgggtaacgtagtg

SEQ ID NO: 4846869 - DNA, 25 bp, Homo sapien
gtcactgcgcccgttcaaaacattt

SEQ ID NO: 4846870 - DNA, 25 bp, Homo sapien
gactccgtggagaagtgcctgactc

SEQ ID NO: 4846871 - DNA, 25 bp, Homo sapien
gaaggagctcccaaaatggtcaaag

SEQ ID NO: 4846872 - DNA, 25 bp, Homo sapien
cattcagtacatcctagtgcagctc

SEQ ID NO: 4846873 - DNA, 25 bp, Homo sapien
taatcagggccacgataataggagc

SEQ ID NO: 4846874 - DNA, 25 bp, Homo sapien
tctggatcttaaggacacagggcct

SEQ ID NO: 4846875 - DNA, 25 bp, Homo sapien
tgtcctggatttacgatgggcccta

SEQ ID NO: 4846876 - DNA, 25 bp, Homo sapien
tctttggcagctccgtgaaccagag

SEQ ID NO: 4846877 - DNA, 25 bp, Homo sapien
tccacaaagacagagactgcgagct

SEQ ID NO: 4846878 - DNA, 25 bp, Homo sapien
cgggcatggtggctcactcccgtaa

SEQ ID NO: 4846879 - DNA, 25 bp, Homo sapien
gcatggtggctcactcccgtaattc

SEQ ID NO: 4846880 - DNA, 25 bp, Homo sapien
ggcatggtggctcactcccgtaatt

SEQ ID NO: 4846881 - DNA, 25 bp, Homo sapien
gccgggcatggtggctcactcccgt

SEQ ID NO: 4846882 - DNA, 25 bp, Homo sapien
caattggagtcacatgggcctggga

SEQ ID NO: 4846883 - DNA, 25 bp, Homo sapien
gcctcaagtacgctgtgctctaaga

SEQ ID NO: 4846884 - DNA, 25 bp, Homo sapien
tgctctaagaaaacaagcgcccagt

SEQ ID NO: 4846885 - DNA, 25 bp, Homo sapien
tggaatacagatacgccaattggag

SEQ ID NO: 4846886 - DNA, 25 bp, Homo sapien
gaaggtcaaccagctgataatccca

SEQ ID NO: 4846887 - DNA, 25 bp, Homo sapien
tccacatccctgagaaggtcaacca

SEQ ID NO: 4846888 - DNA, 25 bp, Homo sapien
gaaattttgagtttccctgccatca

SEQ ID NO: 4846889 - DNA, 25 bp, Homo sapien
aaaggaaagtccacaagtacaggct

SEQ ID NO: 4846890 - DNA, 25 bp, Homo sapien
cagaggcgtctgcagtgttccccac

SEQ ID NO: 4846891 - DNA, 25 bp, Homo sapien
ggcgtctgcagtgttccccaccatg

SEQ ID NO: 4846892 - DNA, 25 bp, Homo sapien
tgttccccaccatgctgtcggcata

SEQ ID NO: 4846893 - DNA, 25 bp, Homo sapien
gttccccaccatgctgtcggcatag

SEQ ID NO: 4846894 - DNA, 25 bp, Homo sapien
ggaggattgcttgaacccaggagtt

SEQ ID NO: 4846895 - DNA, 25 bp, Homo sapien
ttgcttgaacccaggagtttgaggc

SEQ ID NO: 4846896 - DNA, 25 bp, Homo sapien
cccagcagtgtgagaggctgaggtg

SEQ ID NO: 4846897 - DNA, 25 bp, Homo sapien
ggattgcttgaacccaggagtttga

SEQ ID NO: 4846898 - DNA, 25 bp, Homo sapien
aggatattaaatggcctagaggctc

SEQ ID NO: 4846899 - DNA, 25 bp, Homo sapien
acaggatattaaatggcctagaggc

SEQ ID NO: 4846900 - DNA, 25 bp, Homo sapien
ggatgtatagatcagggtgcagtta

SEQ ID NO: 4846901 - DNA, 25 bp, Homo sapien
gtgcagttaggctattttggcagac

SEQ ID NO: 4846902 - DNA, 25 bp, Homo sapien
taaaacatttcatgttagtgaggct

SEQ ID NO: 4846903 - DNA, 25 bp, Homo sapien
gataccattgactgcataaataatg

SEQ ID NO: 4846904 - DNA, 25 bp, Homo sapien
tgttagtgaggctaagcaatagaat

SEQ ID NO: 4846905 - DNA, 25 bp, Homo sapien
gcaatagaataagataccattgact

SEQ ID NO: 4846906 - DNA, 25 bp, Homo sapien
acgtgctgggtgacattaccccggc

SEQ ID NO: 4846907 - DNA, 25 bp, Homo sapien
cgctgatagctggtgcacccaggga

SEQ ID NO: 4846908 - DNA, 25 bp, Homo sapien
ccgatgtattagatcctgcaggaag

SEQ ID NO: 4846909 - DNA, 25 bp, Homo sapien
cccagggatgaagcgtgagcctcag

SEQ ID NO: 4846910 - DNA, 25 bp, Homo sapien
cgcgactgctcgctgaaattgtggg

SEQ ID NO: 4846911 - DNA, 25 bp, Homo sapien
ggagctcgctgctcccaatccgcga

SEQ ID NO: 4846912 - DNA, 25 bp, Homo sapien
tcctggttctccgaggtgcaggccc

SEQ ID NO: 4846913 - DNA, 25 bp, Homo sapien
tgaagaggtctccagaactaaagca

SEQ ID NO: 4846914 - DNA, 25 bp, Homo sapien
ctgtggaggaacaagaacagacgag

SEQ ID NO: 4846915 - DNA, 25 bp, Homo sapien
tggaggaacaagaacagacgagggc

SEQ ID NO: 4846916 - DNA, 25 bp, Homo sapien
aggaacaagaacagacgagggcctc

SEQ ID NO: 4846917 - DNA, 25 bp, Homo sapien
gaggaacaagaacagacgagggcct

SEQ ID NO: 4846918 - DNA, 25 bp, Homo sapien
tgagcacacggctgaaaaacgcttt

SEQ ID NO: 4846919 - DNA, 25 bp, Homo sapien
agacagcagcgttccaatggacagg

SEQ ID NO: 4846920 - DNA, 25 bp, Homo sapien
gatgagctggaatagcgcgttagac

SEQ ID NO: 4846921 - DNA, 25 bp, Homo sapien
cgatgaagtaagtgagcacacggct

SEQ ID NO: 4846922 - DNA, 25 bp, Homo sapien
aggttcatttctcaggtggcagtca

SEQ ID NO: 4846923 - DNA, 25 bp, Homo sapien
cctgagatccagagttagaagtcgt

SEQ ID NO: 4846924 - DNA, 25 bp, Homo sapien
ccagggaaagaggacgcgcaagttt

SEQ ID NO: 4846925 - DNA, 25 bp, Homo sapien
tacttagcaccaaaggcatggacgg

SEQ ID NO: 4846926 - DNA, 25 bp, Homo sapien
gcagactgtcaacttgggccttatt

SEQ ID NO: 4846927 - DNA, 25 bp, Homo sapien
tcaacttgggccttatttttatagc

SEQ ID NO: 4846928 - DNA, 25 bp, Homo sapien
ccctgcttgagctaaaaaagtgggc

SEQ ID NO: 4846929 - DNA, 25 bp, Homo sapien
agctaaaaaagtgggcagactgtca

SEQ ID NO: 4846930 - DNA, 25 bp, Homo sapien
catgactccctaatggggtcaacca

SEQ ID NO: 4846931 - DNA, 25 bp, Homo sapien
atggggtcaaccacacgtctgcgta

SEQ ID NO: 4846932 - DNA, 25 bp, Homo sapien
atccatgactccctaatggggtcaa

SEQ ID NO: 4846933 - DNA, 25 bp, Homo sapien
ggtcaaccacacgtctgcgtatcct

SEQ ID NO: 4846934 - DNA, 25 bp, Homo sapien
agcaaccaccatttagcgggaggaa

SEQ ID NO: 4846935 - DNA, 25 bp, Homo sapien
caaccaccatttagcgggaggaagg

SEQ ID NO: 4846936 - DNA, 25 bp, Homo sapien
ggtggagcagatagggaggtcgcaa

SEQ ID NO: 4846937 - DNA, 25 bp, Homo sapien
gcagatagggaggtcgcaaggaaaa

SEQ ID NO: 4846938 - DNA, 25 bp, Homo sapien
tgccgtgcggagggagggccagccc

SEQ ID NO: 4846939 - DNA, 25 bp, Homo sapien
cagagggagatgacggtcacacaga

SEQ ID NO: 4846940 - DNA, 25 bp, Homo sapien
acacagaggagaccgtatccccaca

SEQ ID NO: 4846941 - DNA, 25 bp, Homo sapien
gagcagagggagatgacggtcacac

SEQ ID NO: 4846942 - DNA, 25 bp, Homo sapien
gtcacacagaggagaccgtatcccc

SEQ ID NO: 4846943 - DNA, 25 bp, Homo sapien
caatcgccagagctatgaagtagag

SEQ ID NO: 4846944 - DNA, 25 bp, Homo sapien
gagtagagggttccaatcgccagag

SEQ ID NO: 4846945 - DNA, 25 bp, Homo sapien
gagggttccaatcgccagagctatg

SEQ ID NO: 4846946 - DNA, 25 bp, Homo sapien
tggaagagggcgttggagtagaggg

SEQ ID NO: 4846947 - DNA, 25 bp, Homo sapien
ttttctgcttaagaagaatcttcaa

SEQ ID NO: 4846948 - DNA, 25 bp, Homo sapien
cttccagagggttgaaaccaaatgc

SEQ ID NO: 4846949 - DNA, 25 bp, Homo sapien
gacataataatcttccagagggttg

SEQ ID NO: 4846950 - DNA, 25 bp, Homo sapien
caaacaccactgcagacttggagac

SEQ ID NO: 4846951 - DNA, 25 bp, Homo sapien
tgcacagagagcgagcccacaatga

SEQ ID NO: 4846952 - DNA, 25 bp, Homo sapien
gcccacaatgaccttctcgtccacc

SEQ ID NO: 4846953 - DNA, 25 bp, Homo sapien
ccaccatgggcgccttgccgtccag

SEQ ID NO: 4846954 - DNA, 25 bp, Homo sapien
cttcttggagggaagcgactcagag

SEQ ID NO: 4846955 - DNA, 25 bp, Homo sapien
gagtagcggacacctttcagccagt

SEQ ID NO: 4846956 - DNA, 25 bp, Homo sapien
acagtgaaggaagcaccgatggcca

SEQ ID NO: 4846957 - DNA, 25 bp, Homo sapien
tgaaattatggaggccgtcgctcag

SEQ ID NO: 4846958 - DNA, 25 bp, Homo sapien
ccagagtgccgatatcagagtagcg

SEQ ID NO: 4846959 - DNA, 25 bp, Homo sapien
tccagctagcgcaaaaatccagttg

SEQ ID NO: 4846960 - DNA, 25 bp, Homo sapien
aaggaagttgaagaagagagcttgt

SEQ ID NO: 4846961 - DNA, 25 bp, Homo sapien
tgccaaaggccagacccaggtagca

SEQ ID NO: 4846962 - DNA, 25 bp, Homo sapien
ttgttggatgctcatcccagcgttg

SEQ ID NO: 4846963 - DNA, 25 bp, Homo sapien
taaaaaccgctgaatggtaggtaca

SEQ ID NO: 4846964 - DNA, 25 bp, Homo sapien
aaaacaaactaccagccatgtgcgg

SEQ ID NO: 4846965 - DNA, 25 bp, Homo sapien
tattattaacaagctagatgcagtg

SEQ ID NO: 4846966 - DNA, 25 bp, Homo sapien
taggcagcatagagaccccattcta

SEQ ID NO: 4846967 - DNA, 25 bp, Homo sapien
tgataaatggaatcaagatgctgcc

SEQ ID NO: 4846968 - DNA, 25 bp, Homo sapien
tgatggtgaatccagtcaggaggcc

SEQ ID NO: 4846969 - DNA, 25 bp, Homo sapien
tcctgaatacatggtgaggaccacc

SEQ ID NO: 4846970 - DNA, 25 bp, Homo sapien
gatctgtcctgaatacatggtgagg

SEQ ID NO: 4846971 - DNA, 25 bp, Homo sapien
gaatgcaggaatacagtctgtgtca

SEQ ID NO: 4846972 - DNA, 25 bp, Homo sapien
gcattttacaaacggctgacatttg

SEQ ID NO: 4846973 - DNA, 25 bp, Homo sapien
atggtaagtcctcgggctggcgatc

SEQ ID NO: 4846974 - DNA, 25 bp, Homo sapien
cagtttttcatagaacggcctcttc

SEQ ID NO: 4846975 - DNA, 25 bp, Homo sapien
tggttaccagggcagcttattccta

SEQ ID NO: 4846976 - DNA, 25 bp, Homo sapien
caagaggcactagctagagactggt

SEQ ID NO: 4846977 - DNA, 25 bp, Homo sapien
agggcaagaggcactagctagagac

SEQ ID NO: 4846978 - DNA, 25 bp, Homo sapien
ggttaccagggcagcttattcctag

SEQ ID NO: 4846979 - DNA, 25 bp, Homo sapien
caaggaagcagtaacctagacgggt

SEQ ID NO: 4846980 - DNA, 25 bp, Homo sapien
tctaagtagagcataaatggcaccc

SEQ ID NO: 4846981 - DNA, 25 bp, Homo sapien
tgtgggcaccactaagaaaggcttc

SEQ ID NO: 4846982 - DNA, 25 bp, Homo sapien
tctgcgatgccctaagtgaagtttg

SEQ ID NO: 4846983 - DNA, 25 bp, Homo sapien
tttattgcaaatgatcacccgtggg

SEQ ID NO: 4846984 - DNA, 25 bp, Homo sapien
ttcaacagccttcattacatccaca

SEQ ID NO: 4846985 - DNA, 25 bp, Homo sapien
atttattgcaaatgatcacccgtgg

SEQ ID NO: 4846986 - DNA, 25 bp, Homo sapien
ttattgcaaatgatcacccgtggga

SEQ ID NO: 4846987 - DNA, 25 bp, Homo sapien
acaggataatcgcttcaacccaagc

SEQ ID NO: 4846988 - DNA, 25 bp, Homo sapien
tatacagtattgtccccatttttat

SEQ ID NO: 4846989 - DNA, 25 bp, Homo sapien
atttttattaacaaacatggctggc

SEQ ID NO: 4846990 - DNA, 25 bp, Homo sapien
aaaagcctcaggagatactgaaaag

SEQ ID NO: 4846991 - DNA, 25 bp, Homo sapien
tatttaatgacatgagaaaagcctc

SEQ ID NO: 4846992 - DNA, 25 bp, Homo sapien
ttagtatgtgtgctgtggaaaagag

SEQ ID NO: 4846993 - DNA, 25 bp, Homo sapien
ttcctattttagtatgtgtgctgtg

SEQ ID NO: 4846994 - DNA, 25 bp, Homo sapien
tatgtgtgctgtggaaaagagcacc

SEQ ID NO: 4846995 - DNA, 25 bp, Homo sapien
tagtatgtgtgctgtggaaaagagc

SEQ ID NO: 4846996 - DNA, 25 bp, Homo sapien
tccgacgccactgacaggacgaggg

SEQ ID NO: 4846997 - DNA, 25 bp, Homo sapien
tccgagcaccagaagggcgcggcca

SEQ ID NO: 4846998 - DNA, 25 bp, Homo sapien
tgctaaccgcccattttcgcttctt

SEQ ID NO: 4846999 - DNA, 25 bp, Homo sapien
ttcccgcgaggcagtagagctcggc

SEQ ID NO: 4847000 - DNA, 25 bp, Homo sapien
caggagcccgccggacgtgcgccta

SEQ ID NO: 4847001 - DNA, 25 bp, Homo sapien
aggagcccgccggacgtgcgcctac

SEQ ID NO: 4847002 - DNA, 25 bp, Homo sapien
cccgccggacgtgcgcctacgccgc

SEQ ID NO: 4847003 - DNA, 25 bp, Homo sapien
gagcccgccggacgtgcgcctacgc

SEQ ID NO: 4847004 - DNA, 25 bp, Homo sapien
atgacgcggtcggtggtggagaggt

SEQ ID NO: 4847005 - DNA, 25 bp, Homo sapien
gacgcggtcggtggtggagaggtgg

SEQ ID NO: 4847006 - DNA, 25 bp, Homo sapien
tgatgacgcggtcggtggtggagag

SEQ ID NO: 4847007 - DNA, 25 bp, Homo sapien
ctttgatgacgcggtcggtggtgga

SEQ ID NO: 4847008 - DNA, 25 bp, Homo sapien
ggaagagtcgactccctgctcacac

SEQ ID NO: 4847009 - DNA, 25 bp, Homo sapien
ttggaagagtcgactccctgctcac

SEQ ID NO: 4847010 - DNA, 25 bp, Homo sapien
ctgctcacaccacccccgatggctt

SEQ ID NO: 4847011 - DNA, 25 bp, Homo sapien
tcacaccacccccgatggcttcccc

SEQ ID NO: 4847012 - DNA, 25 bp, Homo sapien
agacacacaatctgctggcaagctg

SEQ ID NO: 4847013 - DNA, 25 bp, Homo sapien
ggcaagctgactcttggacttccca

SEQ ID NO: 4847014 - DNA, 25 bp, Homo sapien
atagaaggtgccacttataaggaag

SEQ ID NO: 4847015 - DNA, 25 bp, Homo sapien
aggacacatagaaggtgccacttat

SEQ ID NO: 4847016 - DNA, 25 bp, Homo sapien
ctgatgagtagtgatgttgaggacc

SEQ ID NO: 4847017 - DNA, 25 bp, Homo sapien
tacagtgaacgtctaccggtatctc

SEQ ID NO: 4847018 - DNA, 25 bp, Homo sapien
tccttgtcaacactcaatattgctc

SEQ ID NO: 4847019 - DNA, 25 bp, Homo sapien
gacgaaagttcttgtatgttctggg

SEQ ID NO: 4847020 - DNA, 25 bp, Homo sapien
catcaactttaggtttcccattctc

SEQ ID NO: 4847021 - DNA, 25 bp, Homo sapien
gattatctttaaggctacttcctct

SEQ ID NO: 4847022 - DNA, 25 bp, Homo sapien
gcatctacttctatcatagtcttct

SEQ ID NO: 4847023 - DNA, 25 bp, Homo sapien
ttgattatctttaaggctacttcct

SEQ ID NO: 4847024 - DNA, 25 bp, Homo sapien
tccaacttcaaataacttcattagg

SEQ ID NO: 4847025 - DNA, 25 bp, Homo sapien
ccagaaagaggtagcgtgtgttact

SEQ ID NO: 4847026 - DNA, 25 bp, Homo sapien
cgtgtgttactaggtgatcctccaa

SEQ ID NO: 4847027 - DNA, 25 bp, Homo sapien
tcaaataacttcattaggtcaaaga

SEQ ID NO: 4847028 - DNA, 25 bp, Homo sapien
agtcccaacatatccagtttaattt

SEQ ID NO: 4847029 - DNA, 25 bp, Homo sapien
tagtcccaacatatccagtttaatt

SEQ ID NO: 4847030 - DNA, 25 bp, Homo sapien
aatagtcccaacatatccagtttaa

SEQ ID NO: 4847031 - DNA, 25 bp, Homo sapien
atagtcccaacatatccagtttaat

SEQ ID NO: 4847032 - DNA, 25 bp, Homo sapien
gacttgcatttaggagtgaggctgc

SEQ ID NO: 4847033 - DNA, 25 bp, Homo sapien
gactcaatttctcagctcatgctta

SEQ ID NO: 4847034 - DNA, 25 bp, Homo sapien
cacacttagtacagtgagattctca

SEQ ID NO: 4847035 - DNA, 25 bp, Homo sapien
caggcaggactatagacagcaagac

SEQ ID NO: 4847036 - DNA, 25 bp, Homo sapien
ctttaccgtctgaaaccttctcatg

SEQ ID NO: 4847037 - DNA, 25 bp, Homo sapien
gctgaggtacgaaatgatcgcacct

SEQ ID NO: 4847038 - DNA, 25 bp, Homo sapien
acgaaatgatcgcacctgtgtatag

SEQ ID NO: 4847039 - DNA, 25 bp, Homo sapien
ggtacgaaatgatcgcacctgtgta

SEQ ID NO: 4847040 - DNA, 25 bp, Homo sapien
aatgatcgcacctgtgtatagccac

SEQ ID NO: 4847041 - DNA, 25 bp, Homo sapien
caacatgttagagtaagctatagcc

SEQ ID NO: 4847042 - DNA, 25 bp, Homo sapien
gactttgacactacacttctggaga

SEQ ID NO: 4847043 - DNA, 25 bp, Homo sapien
taagtcctaatatgaaaaacgctgt

SEQ ID NO: 4847044 - DNA, 25 bp, Homo sapien
cagaaaaggagcgtacaaaatgctc

SEQ ID NO: 4847045 - DNA, 25 bp, Homo sapien
ctgagtgaaattgtaatagggtttg

SEQ ID NO: 4847046 - DNA, 25 bp, Homo sapien
aatagaataattttgtatgacaaag

SEQ ID NO: 4847047 - DNA, 25 bp, Homo sapien
tcttatgtggcaaattttcatccta

SEQ ID NO: 4847048 - DNA, 25 bp, Homo sapien
tgtatgacaaagaatcttatgtggc

SEQ ID NO: 4847049 - DNA, 25 bp, Homo sapien
gattcaggactcaaagaatgactca

SEQ ID NO: 4847050 - DNA, 25 bp, Homo sapien
tctcaaaattcaaaggcatgccaag

SEQ ID NO: 4847051 - DNA, 25 bp, Homo sapien
tcgtaaggatcattcaaacagtctg

SEQ ID NO: 4847052 - DNA, 25 bp, Homo sapien
gattccagccggtaacatgttcaaa

SEQ ID NO: 4847053 - DNA, 25 bp, Homo sapien
ccccacgcctgatgagtcagaaaca

SEQ ID NO: 4847054 - DNA, 25 bp, Homo sapien
taacatttcaagaccactggacagc

SEQ ID NO: 4847055 - DNA, 25 bp, Homo sapien
gatgtattggctcagcacggcagct

SEQ ID NO: 4847056 - DNA, 25 bp, Homo sapien
tgggaacccgacagaatacagattg

SEQ ID NO: 4847057 - DNA, 25 bp, Homo sapien
cacaacagcaaaatcggcacccatt

SEQ ID NO: 4847058 - DNA, 25 bp, Homo sapien
tctgtactataccacaaggagtctc

SEQ ID NO: 4847059 - DNA, 25 bp, Homo sapien
gacacaatgctgaaagtaactgata

SEQ ID NO: 4847060 - DNA, 25 bp, Homo sapien
ccttattaaacgatgcatgacactg

SEQ ID NO: 4847061 - DNA, 25 bp, Homo sapien
ttctcagagcagataaggggccaac

SEQ ID NO: 4847062 - DNA, 25 bp, Homo sapien
cgtggggggctagggttggtgcttg

SEQ ID NO: 4847063 - DNA, 25 bp, Homo sapien
tcagagcagataaggggccaacgtg

SEQ ID NO: 4847064 - DNA, 25 bp, Homo sapien
tggtgcttgggggtctcgggtggac

SEQ ID NO: 4847065 - DNA, 25 bp, Homo sapien
gtttggcaagtctttcctggctcat

SEQ ID NO: 4847066 - DNA, 25 bp, Homo sapien
tgcagtttggcaagtctttcctggc

SEQ ID NO: 4847067 - DNA, 25 bp, Homo sapien
cagtttggcaagtctttcctggctc

SEQ ID NO: 4847068 - DNA, 25 bp, Homo sapien
ctgcagtttggcaagtctttcctgg

SEQ ID NO: 4847069 - DNA, 25 bp, Homo sapien
tctttctgtgaaccatttctttccc

SEQ ID NO: 4847070 - DNA, 25 bp, Homo sapien
tgtgaaccatttctttcccaccaat

SEQ ID NO: 4847071 - DNA, 25 bp, Homo sapien
tctgtgaaccatttctttcccacca

SEQ ID NO: 4847072 - DNA, 25 bp, Homo sapien
ttctgtgaaccatttctttcccacc

SEQ ID NO: 4847073 - DNA, 25 bp, Homo sapien
ttccttggtttgtaaacatattcac

SEQ ID NO: 4847074 - DNA, 25 bp, Homo sapien
tgttccttggtttgtaaacatattc

SEQ ID NO: 4847075 - DNA, 25 bp, Homo sapien
gttccttggtttgtaaacatattca

SEQ ID NO: 4847076 - DNA, 25 bp, Homo sapien
ctggcatctctgctgttaaagtgga

SEQ ID NO: 4847077 - DNA, 25 bp, Homo sapien
gcatctctgctgttaaagtggatca

SEQ ID NO: 4847078 - DNA, 25 bp, Homo sapien
catctctgctgttaaagtggatcac

SEQ ID NO: 4847079 - DNA, 25 bp, Homo sapien
ggcatctctgctgttaaagtggatc

SEQ ID NO: 4847080 - DNA, 25 bp, Homo sapien
tcagacagtgtgcaccaagctggtt

SEQ ID NO: 4847081 - DNA, 25 bp, Homo sapien
gtcagacagtgtgcaccaagctggt

SEQ ID NO: 4847082 - DNA, 25 bp, Homo sapien
tcatcaaaattctccatcttggaag

SEQ ID NO: 4847083 - DNA, 25 bp, Homo sapien
catcaaaattctccatcttggaagc

SEQ ID NO: 4847084 - DNA, 25 bp, Homo sapien
ctcatcaaaattctccatcttggaa

SEQ ID NO: 4847085 - DNA, 25 bp, Homo sapien
caaacttgattcccaggattcttca

SEQ ID NO: 4847086 - DNA, 25 bp, Homo sapien
aacttgattcccaggattcttcagc

SEQ ID NO: 4847087 - DNA, 25 bp, Homo sapien
ccaggattcttcagcttaattagct

SEQ ID NO: 4847088 - DNA, 25 bp, Homo sapien
ggattcttcagcttaattagctgca

SEQ ID NO: 4847089 - DNA, 25 bp, Homo sapien
atgattaatctttaaactccataaa

SEQ ID NO: 4847090 - DNA, 25 bp, Homo sapien
ggatgattaatctttaaactccata

SEQ ID NO: 4847091 - DNA, 25 bp, Homo sapien
gggatgattaatctttaaactccat

SEQ ID NO: 4847092 - DNA, 25 bp, Homo sapien
gatgattaatctttaaactccataa

SEQ ID NO: 4847093 - DNA, 25 bp, Homo sapien
gaaggtgaaatagtctgtaagatgc

SEQ ID NO: 4847094 - DNA, 25 bp, Homo sapien
ggtgaaatagtctgtaagatgcctg

SEQ ID NO: 4847095 - DNA, 25 bp, Homo sapien
aaggtgaaatagtctgtaagatgcc

SEQ ID NO: 4847096 - DNA, 25 bp, Homo sapien
gtgaaatagtctgtaagatgcctgc

SEQ ID NO: 4847097 - DNA, 25 bp, Homo sapien
tacagcagtagtcacagttagaaac

SEQ ID NO: 4847098 - DNA, 25 bp, Homo sapien
tatgattgtgtgttcgtaagatgga

SEQ ID NO: 4847099 - DNA, 25 bp, Homo sapien
cagtgattacctctaagtggcatga

SEQ ID NO: 4847100 - DNA, 25 bp, Homo sapien
tgtgctttccaaatatcccgaatta

SEQ ID NO: 4847101 - DNA, 25 bp, Homo sapien
aatggttcatggaagggccgggcat

SEQ ID NO: 4847102 - DNA, 25 bp, Homo sapien
atggttcatggaagggccgggcatg

SEQ ID NO: 4847103 - DNA, 25 bp, Homo sapien
aaatggttcatggaagggccgggca

SEQ ID NO: 4847104 - DNA, 25 bp, Homo sapien
acatttttgatgcacgaggcttcta

SEQ ID NO: 4847105 - DNA, 25 bp, Homo sapien
cacgaggcttctataccaggatggc

SEQ ID NO: 4847106 - DNA, 25 bp, Homo sapien
cccactgtggatatttccttgtacc

SEQ ID NO: 4847107 - DNA, 25 bp, Homo sapien
ggatggctccctaatcttcccactg

SEQ ID NO: 4847108 - DNA, 25 bp, Homo sapien
ggcatcatacacctgttccgaatat

SEQ ID NO: 4847109 - DNA, 25 bp, Homo sapien
tccatgtacacagagaaactgctgg

SEQ ID NO: 4847110 - DNA, 25 bp, Homo sapien
gtcaaatgtctccatacaggcatca

SEQ ID NO: 4847111 - DNA, 25 bp, Homo sapien
tctaaagaagtaatttcaggtgaca

SEQ ID NO: 4847112 - DNA, 25 bp, Homo sapien
tgtagaaataagagcaccctcggac

SEQ ID NO: 4847113 - DNA, 25 bp, Homo sapien
cacacaggtccaaaggcgggaggtt

SEQ ID NO: 4847114 - DNA, 25 bp, Homo sapien
aatcctctgagggatcagaccaaag

SEQ ID NO: 4847115 - DNA, 25 bp, Homo sapien
gtgggtatagtgctccaaggtcttc

SEQ ID NO: 4847116 - DNA, 25 bp, Homo sapien
tctaatcataatgaaagctcctgtg

SEQ ID NO: 4847117 - DNA, 25 bp, Homo sapien
tgtctaatcataatgaaagctcctg

SEQ ID NO: 4847118 - DNA, 25 bp, Homo sapien
gtgtctaatcataatgaaagctcct

SEQ ID NO: 4847119 - DNA, 25 bp, Homo sapien
gtctaatcataatgaaagctcctgt

SEQ ID NO: 4847120 - DNA, 25 bp, Homo sapien
tgcaaaaattcacaaactgcagggt

SEQ ID NO: 4847121 - DNA, 25 bp, Homo sapien
caaaaattcacaaactgcagggtaa

SEQ ID NO: 4847122 - DNA, 25 bp, Homo sapien
gcaaaaattcacaaactgcagggta

SEQ ID NO: 4847123 - DNA, 25 bp, Homo sapien
ctgcaaaaattcacaaactgcaggg

SEQ ID NO: 4847124 - DNA, 25 bp, Homo sapien
gggctctgataattgatagtaaatt

SEQ ID NO: 4847125 - DNA, 25 bp, Homo sapien
ggctctgataattgatagtaaatta

SEQ ID NO: 4847126 - DNA, 25 bp, Homo sapien
gaaaaagagatgaaagtccatctgt

SEQ ID NO: 4847127 - DNA, 25 bp, Homo sapien
ctgaaaaagagatgaaagtccatct

SEQ ID NO: 4847128 - DNA, 25 bp, Homo sapien
tgaaaaagagatgaaagtccatctg

SEQ ID NO: 4847129 - DNA, 25 bp, Homo sapien
taattgggggcagagaaaattgtaa

SEQ ID NO: 4847130 - DNA, 25 bp, Homo sapien
ctttattgttatagacatctaggta

SEQ ID NO: 4847131 - DNA, 25 bp, Homo sapien
ttggctcttcctgtacattcgatac

SEQ ID NO: 4847132 - DNA, 25 bp, Homo sapien
tgtaataagtgatggaaagcctgtg

SEQ ID NO: 4847133 - DNA, 25 bp, Homo sapien
cagagctcacgtttactcataaatt

SEQ ID NO: 4847134 - DNA, 25 bp, Homo sapien
ataaattcaaactcaaatattgctg

SEQ ID NO: 4847135 - DNA, 25 bp, Homo sapien
caaactcaaatattgctggattcct

SEQ ID NO: 4847136 - DNA, 25 bp, Homo sapien
gctcacgtttactcataaattcaaa

SEQ ID NO: 4847137 - DNA, 25 bp, Homo sapien
tgactttgagatactgttataaaca

SEQ ID NO: 4847138 - DNA, 25 bp, Homo sapien
gattaaaataccaatggtgactttg

SEQ ID NO: 4847139 - DNA, 25 bp, Homo sapien
tatgctaactattctggcatgagcc

SEQ ID NO: 4847140 - DNA, 25 bp, Homo sapien
gattctgtagtatcaatctgaccta

SEQ ID NO: 4847141 - DNA, 25 bp, Homo sapien
taggtgtgtagcctcccaaggtaac

SEQ ID NO: 4847142 - DNA, 25 bp, Homo sapien
actttgaagggacaatactcatttg

SEQ ID NO: 4847143 - DNA, 25 bp, Homo sapien
aggacagcattgttggaataggtgt

SEQ ID NO: 4847144 - DNA, 25 bp, Homo sapien
catttggatatgtttgttctggcat

SEQ ID NO: 4847145 - DNA, 25 bp, Homo sapien
taatcaaaagaatgtgtcgcagact

SEQ ID NO: 4847146 - DNA, 25 bp, Homo sapien
tcaaaggacgaagatttcccatcat

SEQ ID NO: 4847147 - DNA, 25 bp, Homo sapien
tcccatcattgaggataatcaaaag

SEQ ID NO: 4847148 - DNA, 25 bp, Homo sapien
ttatcagtcttgactccgaatgact

SEQ ID NO: 4847149 - DNA, 25 bp, Homo sapien
acaccagacctttttatcagatgag

SEQ ID NO: 4847150 - DNA, 25 bp, Homo sapien
ccatataattaatccagagatgctg

SEQ ID NO: 4847151 - DNA, 25 bp, Homo sapien
tgaaacttatctccccaactgcata

SEQ ID NO: 4847152 - DNA, 25 bp, Homo sapien
ctccagagccactgtatcagcaaca

SEQ ID NO: 4847153 - DNA, 25 bp, Homo sapien
gtctttcgtgtaactagtggaacta

SEQ ID NO: 4847154 - DNA, 25 bp, Homo sapien
tgggaggtgagtctcaacagtgaat

SEQ ID NO: 4847155 - DNA, 25 bp, Homo sapien
tggaaacaagagcttataaaactgc

SEQ ID NO: 4847156 - DNA, 25 bp, Homo sapien
taggaaatacctgtagataccaaga

SEQ ID NO: 4847157 - DNA, 25 bp, Homo sapien
gttaaactgcctgatattcatgaca

SEQ ID NO: 4847158 - DNA, 25 bp, Homo sapien
cagttaaactgcctgatattcatga

SEQ ID NO: 4847159 - DNA, 25 bp, Homo sapien
ttaaactgcctgatattcatgacat

SEQ ID NO: 4847160 - DNA, 25 bp, Homo sapien
aaactgcctgatattcatgacattg

SEQ ID NO: 4847161 - DNA, 25 bp, Homo sapien
aacatttctgaatcatggaggggct

SEQ ID NO: 4847162 - DNA, 25 bp, Homo sapien
taaggtatgctcagtcaccaaacaa

SEQ ID NO: 4847163 - DNA, 25 bp, Homo sapien
cagttcgtcatcagagcatatgttg

SEQ ID NO: 4847164 - DNA, 25 bp, Homo sapien
agagcatatgttgagcacatttacc

SEQ ID NO: 4847165 - DNA, 25 bp, Homo sapien
tcatcagagcatatgttgagcacat

SEQ ID NO: 4847166 - DNA, 25 bp, Homo sapien
tcatcagaaatcagttcgtcatcag

SEQ ID NO: 4847167 - DNA, 25 bp, Homo sapien
gataaacattgccaacaaacacaag

SEQ ID NO: 4847168 - DNA, 25 bp, Homo sapien
tggagacagcactgtgactatgcat

SEQ ID NO: 4847169 - DNA, 25 bp, Homo sapien
catcctgcaaaatgtaaagtggtac

SEQ ID NO: 4847170 - DNA, 25 bp, Homo sapien
caccagactataacaagtatcataa

SEQ ID NO: 4847171 - DNA, 25 bp, Homo sapien
tgtttaatggattctatagcttctc

SEQ ID NO: 4847172 - DNA, 25 bp, Homo sapien
tacaaatctcttcacaggaatagta

SEQ ID NO: 4847173 - DNA, 25 bp, Homo sapien
ctttcaggggatataattgttcttc

SEQ ID NO: 4847174 - DNA, 25 bp, Homo sapien
acggaggacagaacagtttacaaat

SEQ ID NO: 4847175 - DNA, 25 bp, Homo sapien
tttctgatagcttggaatgtagtga

SEQ ID NO: 4847176 - DNA, 25 bp, Homo sapien
ctttctgatagcttggaatgtagtg

SEQ ID NO: 4847177 - DNA, 25 bp, Homo sapien
ttctgatagcttggaatgtagtgat

SEQ ID NO: 4847178 - DNA, 25 bp, Homo sapien
gaattgaaaagacccgtgccatctt

SEQ ID NO: 4847179 - DNA, 25 bp, Homo sapien
aagacccgtgccatcttcccaatgg

SEQ ID NO: 4847180 - DNA, 25 bp, Homo sapien
caatggctctgatcttattcctgat

SEQ ID NO: 4847181 - DNA, 25 bp, Homo sapien
cgaagaattgaaaagacccgtgcca

SEQ ID NO: 4847182 - DNA, 25 bp, Homo sapien
ttgcctcctgagaggacgcccagag

SEQ ID NO: 4847183 - DNA, 25 bp, Homo sapien
gacgcccagagggagtgtgcctgtg

SEQ ID NO: 4847184 - DNA, 25 bp, Homo sapien
ctgtctcgatagtctgcttgcctcc

SEQ ID NO: 4847185 - DNA, 25 bp, Homo sapien
cagagggagtgtgcctgtgggagtc

SEQ ID NO: 4847186 - DNA, 25 bp, Homo sapien
cttccatggaggagcactctcatac

SEQ ID NO: 4847187 - DNA, 25 bp, Homo sapien
tccatggaggagcactctcatactc

SEQ ID NO: 4847188 - DNA, 25 bp, Homo sapien
ccatggaggagcactctcatactca

SEQ ID NO: 4847189 - DNA, 25 bp, Homo sapien
catggaggagcactctcatactcac

SEQ ID NO: 4847190 - DNA, 25 bp, Homo sapien
tttcctagatgaaaaactataataa

SEQ ID NO: 4847191 - DNA, 25 bp, Homo sapien
tatttcctagatgaaaaactataat

SEQ ID NO: 4847192 - DNA, 25 bp, Homo sapien
ctatttcctagatgaaaaactataa

SEQ ID NO: 4847193 - DNA, 25 bp, Homo sapien
tctatttcctagatgaaaaactata

SEQ ID NO: 4847194 - DNA, 25 bp, Homo sapien
gaaaaaaggccagatgaacgatgag

SEQ ID NO: 4847195 - DNA, 25 bp, Homo sapien
gactcctataaatggcaggatggcc

SEQ ID NO: 4847196 - DNA, 25 bp, Homo sapien
tcatacctagtgttagtcacccagt

SEQ ID NO: 4847197 - DNA, 25 bp, Homo sapien
ggtttgtccctgttagtcaatagca

SEQ ID NO: 4847198 - DNA, 25 bp, Homo sapien
gccaatccctcttagatcaaggtga

SEQ ID NO: 4847199 - DNA, 25 bp, Homo sapien
tactgttggttgaaagctctccaag

SEQ ID NO: 4847200 - DNA, 25 bp, Homo sapien
tggctactgggatgcttagagtcaa

SEQ ID NO: 4847201 - DNA, 25 bp, Homo sapien
tagttaatgctccagttagccaatg

SEQ ID NO: 4847202 - DNA, 25 bp, Homo sapien
tatgtagctatgactggaattgctg

SEQ ID NO: 4847203 - DNA, 25 bp, Homo sapien
caccagcagtgttaagaaggtccca

SEQ ID NO: 4847204 - DNA, 25 bp, Homo sapien
tgtcttttcacagccatcctactga

SEQ ID NO: 4847205 - DNA, 25 bp, Homo sapien
taatcatttgaagacctgtcagaat

SEQ ID NO: 4847206 - DNA, 25 bp, Homo sapien
caccacaatctgtgcttagaatatt

SEQ ID NO: 4847207 - DNA, 25 bp, Homo sapien
cctggttgaacacgaatctactttc

SEQ ID NO: 4847208 - DNA, 25 bp, Homo sapien
taatatagtagagctgtgcaaccat

SEQ ID NO: 4847209 - DNA, 25 bp, Homo sapien
cacttattagcactcacttcccatt

SEQ ID NO: 4847210 - DNA, 25 bp, Homo sapien
tccaggagtggagtacaaagctaac

SEQ ID NO: 4847211 - DNA, 25 bp, Homo sapien
tacagtgttcaagagagttggccag

SEQ ID NO: 4847212 - DNA, 25 bp, Homo sapien
tattaaatgagctactgctgggtcc

SEQ ID NO: 4847213 - DNA, 25 bp, Homo sapien
gatcctattaggagaaccctgtcag

SEQ ID NO: 4847214 - DNA, 25 bp, Homo sapien
cccgggcctctaccgcttctactgt

SEQ ID NO: 4847215 - DNA, 25 bp, Homo sapien
cgggcctctaccgcttctactgtgg

SEQ ID NO: 4847216 - DNA, 25 bp, Homo sapien
tcccgggcctctaccgcttctactg

SEQ ID NO: 4847217 - DNA, 25 bp, Homo sapien
ccgggcctctaccgcttctactgtg

SEQ ID NO: 4847218 - DNA, 25 bp, Homo sapien
cacctgcttcgttaacatgcctaga

SEQ ID NO: 4847219 - DNA, 25 bp, Homo sapien
gacacatggatcacatctatcagag

SEQ ID NO: 4847220 - DNA, 25 bp, Homo sapien
tgataaagcttcgaaaaaccagtac

SEQ ID NO: 4847221 - DNA, 25 bp, Homo sapien
taatgcaaagataggacacaaagga

SEQ ID NO: 4847222 - DNA, 25 bp, Homo sapien
tcttgcacaaccaggagctgtacat

SEQ ID NO: 4847223 - DNA, 25 bp, Homo sapien
taacaccaagttaaggcattcgcgt

SEQ ID NO: 4847224 - DNA, 25 bp, Homo sapien
gacctctcatgaccagttgcttaag

SEQ ID NO: 4847225 - DNA, 25 bp, Homo sapien
taccttagggcaacctcagaaatga

SEQ ID NO: 4847226 - DNA, 25 bp, Homo sapien
taattcggtccagacctcgcgcttc

SEQ ID NO: 4847227 - DNA, 25 bp, Homo sapien
gggtggcattcgctcattaattcgg

SEQ ID NO: 4847228 - DNA, 25 bp, Homo sapien
ccggatcttgtgctgaagcgagaac

SEQ ID NO: 4847229 - DNA, 25 bp, Homo sapien
cttcttcaaaactccggatcttgtg

SEQ ID NO: 4847230 - DNA, 25 bp, Homo sapien
tcatgaatgggctttcttcccttgg

SEQ ID NO: 4847231 - DNA, 25 bp, Homo sapien
tgcgcagcatgtgagtgtgctgagg

SEQ ID NO: 4847232 - DNA, 25 bp, Homo sapien
cttggtcgctcctgtgcgcagcatg

SEQ ID NO: 4847233 - DNA, 25 bp, Homo sapien
aatgggctttcttcccttggtcgct

SEQ ID NO: 4847234 - DNA, 25 bp, Homo sapien
tgtgttgacaacaatcagattcatt

SEQ ID NO: 4847235 - DNA, 25 bp, Homo sapien
gcacctccacgttgaagttgttttg

SEQ ID NO: 4847236 - DNA, 25 bp, Homo sapien
ggaagttcccctttatagcacaaga

SEQ ID NO: 4847237 - DNA, 25 bp, Homo sapien
agttttagatccacctgagccacgg

SEQ ID NO: 4847238 - DNA, 25 bp, Homo sapien
aagtagtcttcgagcaaacccaggg

SEQ ID NO: 4847239 - DNA, 25 bp, Homo sapien
taatggagcaatctatgcaggcaga

SEQ ID NO: 4847240 - DNA, 25 bp, Homo sapien
taatcatggccctagacaggaaaag

SEQ ID NO: 4847241 - DNA, 25 bp, Homo sapien
aaaagggataaggtactagcagctc

SEQ ID NO: 4847242 - DNA, 25 bp, Homo sapien
gctttactcattctgaggctggaga

SEQ ID NO: 4847243 - DNA, 25 bp, Homo sapien
tagagatcagctgtgcctcaaaccg

SEQ ID NO: 4847244 - DNA, 25 bp, Homo sapien
gagagactcctgaataatgaccatg

SEQ ID NO: 4847245 - DNA, 25 bp, Homo sapien
gaagaggatctaagggacaatgcca

SEQ ID NO: 4847246 - DNA, 25 bp, Homo sapien
cacaaacaatttaggaaattggagc

SEQ ID NO: 4847247 - DNA, 25 bp, Homo sapien
attggagcccatacccacagatggg

SEQ ID NO: 4847248 - DNA, 25 bp, Homo sapien
cagaaaagatgtggacccggtgcca

SEQ ID NO: 4847249 - DNA, 25 bp, Homo sapien
gaagccatggttataaccacaaaca

SEQ ID NO: 4847250 - DNA, 25 bp, Homo sapien
gttctctactcacactcaagataag

SEQ ID NO: 4847251 - DNA, 25 bp, Homo sapien
tccaggcgtctcatcacagcaatac

SEQ ID NO: 4847252 - DNA, 25 bp, Homo sapien
gcacaaagccctattgttaatacag

SEQ ID NO: 4847253 - DNA, 25 bp, Homo sapien
agcaatactgaaagggactgtggca

SEQ ID NO: 4847254 - DNA, 25 bp, Homo sapien
ttcactctcgctggctagatatagg

SEQ ID NO: 4847255 - DNA, 25 bp, Homo sapien
gaccccattcactctcgctggctag

SEQ ID NO: 4847256 - DNA, 25 bp, Homo sapien
tcccaaaccccaatgtaatataggc

SEQ ID NO: 4847257 - DNA, 25 bp, Homo sapien
gtaatataggctccctctttcacac

SEQ ID NO: 4847258 - DNA, 25 bp, Homo sapien
ggtgttatttagcaggtcttgccaa

SEQ ID NO: 4847259 - DNA, 25 bp, Homo sapien
tatttagcaggtcttgccaaggtgg

SEQ ID NO: 4847260 - DNA, 25 bp, Homo sapien
tggcaggggcgtgaggccaaggcct

SEQ ID NO: 4847261 - DNA, 25 bp, Homo sapien
tttagcaggtcttgccaaggtggca

SEQ ID NO: 4847262 - DNA, 25 bp, Homo sapien
ctagacttgccatgagggcatagaa

SEQ ID NO: 4847263 - DNA, 25 bp, Homo sapien
catagaagaggagatgatgcataac

SEQ ID NO: 4847264 - DNA, 25 bp, Homo sapien
atagaagaggagatgatgcataacc

SEQ ID NO: 4847265 - DNA, 25 bp, Homo sapien
gacttgccatgagggcatagaagag

SEQ ID NO: 4847266 - DNA, 25 bp, Homo sapien
gagacatctacgtcaagggagtgaa

SEQ ID NO: 4847267 - DNA, 25 bp, Homo sapien
tcaagatctatgacaggcctgctcc

SEQ ID NO: 4847268 - DNA, 25 bp, Homo sapien
tactggaaggcagtgtgcttggccc

SEQ ID NO: 4847269 - DNA, 25 bp, Homo sapien
tgcttggccctacttcagagctgct

SEQ ID NO: 4847270 - DNA, 25 bp, Homo sapien
tctaatttatagtacaaaagtccta

SEQ ID NO: 4847271 - DNA, 25 bp, Homo sapien
caactggtctgacgtcttgaccacc

SEQ ID NO: 4847272 - DNA, 25 bp, Homo sapien
aaaaagacattagatgatttcggcc

SEQ ID NO: 4847273 - DNA, 25 bp, Homo sapien
gaaaaagtaggcaatctctaagcac

SEQ ID NO: 4847274 - DNA, 25 bp, Homo sapien
ggtgaacctctcttagttctcagga

SEQ ID NO: 4847275 - DNA, 25 bp, Homo sapien
tcacatccacggctgttctctcttc

SEQ ID NO: 4847276 - DNA, 25 bp, Homo sapien
caagcacaatgcacagacggggtgt

SEQ ID NO: 4847277 - DNA, 25 bp, Homo sapien
ggtgtctttgagaagaactgagctg

SEQ ID NO: 4847278 - DNA, 25 bp, Homo sapien
tgcccaatttatcccgcctgtcctc

SEQ ID NO: 4847279 - DNA, 25 bp, Homo sapien
ggagaactcagccgtttgcccaatt

SEQ ID NO: 4847280 - DNA, 25 bp, Homo sapien
gagaactcagccgtttgcccaattt

SEQ ID NO: 4847281 - DNA, 25 bp, Homo sapien
aactcagccgtttgcccaatttatc

SEQ ID NO: 4847282 - DNA, 25 bp, Homo sapien
tcctgggtcctctgttgattcctgc

SEQ ID NO: 4847283 - DNA, 25 bp, Homo sapien
cagcaggaatctggactatgtttca

SEQ ID NO: 4847284 - DNA, 25 bp, Homo sapien
tggactatgtttcatgccctgggct

SEQ ID NO: 4847285 - DNA, 25 bp, Homo sapien
ctgggtcctctgttgattcctgctc

SEQ ID NO: 4847286 - DNA, 25 bp, Homo sapien
cactgccctttgtcaggggctgcct

SEQ ID NO: 4847287 - DNA, 25 bp, Homo sapien
ctctggcactgccctttgtcagggg

SEQ ID NO: 4847288 - DNA, 25 bp, Homo sapien
tctggcactgccctttgtcaggggc

SEQ ID NO: 4847289 - DNA, 25 bp, Homo sapien
tggcactgccctttgtcaggggctg

SEQ ID NO: 4847290 - DNA, 25 bp, Homo sapien
cagagctgacaaagttccccacttc

SEQ ID NO: 4847291 - DNA, 25 bp, Homo sapien
gagctgacaaagttccccacttcct

SEQ ID NO: 4847292 - DNA, 25 bp, Homo sapien
agcagagctgacaaagttccccact

SEQ ID NO: 4847293 - DNA, 25 bp, Homo sapien
gcagagctgacaaagttccccactt

SEQ ID NO: 4847294 - DNA, 25 bp, Homo sapien
ctcaccagcagcaagcttctcttat

SEQ ID NO: 4847295 - DNA, 25 bp, Homo sapien
aagcttctcttattctctagggctc

SEQ ID NO: 4847296 - DNA, 25 bp, Homo sapien
ccagcagcaagcttctcttattctc

SEQ ID NO: 4847297 - DNA, 25 bp, Homo sapien
agcaagcttctcttattctctaggg

SEQ ID NO: 4847298 - DNA, 25 bp, Homo sapien
tcagggtccttgggactaagaagga

SEQ ID NO: 4847299 - DNA, 25 bp, Homo sapien
gtccttgggactaagaaggaccaca

SEQ ID NO: 4847300 - DNA, 25 bp, Homo sapien
taagaaggaccacatcgctttcact

SEQ ID NO: 4847301 - DNA, 25 bp, Homo sapien
ggaccacatcgctttcactttcttc

SEQ ID NO: 4847302 - DNA, 25 bp, Homo sapien
tcttctccctcgttctggtaaagaa

SEQ ID NO: 4847303 - DNA, 25 bp, Homo sapien
tctggtaaagaagctctccccgttg

SEQ ID NO: 4847304 - DNA, 25 bp, Homo sapien
gaagctctccccgttgccttgaaac

SEQ ID NO: 4847305 - DNA, 25 bp, Homo sapien
tactgctttagtcttatcttctccc

SEQ ID NO: 4847306 - DNA, 25 bp, Homo sapien
gcccgaggccgcccgggagcgcagg

SEQ ID NO: 4847307 - DNA, 25 bp, Homo sapien
cttccccggcgagcaggtggctggg

SEQ ID NO: 4847308 - DNA, 25 bp, Homo sapien
ctgggcccgaggccgcccgggagcg

SEQ ID NO: 4847309 - DNA, 25 bp, Homo sapien
tgcttcgggccaaattgcagctcag

SEQ ID NO: 4847310 - DNA, 25 bp, Homo sapien
ccacctcgtgctcggtgagaactgc

SEQ ID NO: 4847311 - DNA, 25 bp, Homo sapien
ttcgggccaaattgcagctcagcag

SEQ ID NO: 4847312 - DNA, 25 bp, Homo sapien
tccccgcccacctcgtgctcggtga

SEQ ID NO: 4847313 - DNA, 25 bp, Homo sapien
catgcctgcccacagccagcttctt

SEQ ID NO: 4847314 - DNA, 25 bp, Homo sapien
gccagcttcttctgcctcatcccaa

SEQ ID NO: 4847315 - DNA, 25 bp, Homo sapien
cagcttcttctgcctcatcccaagg

SEQ ID NO: 4847316 - DNA, 25 bp, Homo sapien
tgcctgcccacagccagcttcttct

SEQ ID NO: 4847317 - DNA, 25 bp, Homo sapien
gaggactccgggcaagccagctgct

SEQ ID NO: 4847318 - DNA, 25 bp, Homo sapien
tgggaggactccgggcaagccagct

SEQ ID NO: 4847319 - DNA, 25 bp, Homo sapien
gggaggactccgggcaagccagctg

SEQ ID NO: 4847320 - DNA, 25 bp, Homo sapien
aggactccgggcaagccagctgctc

SEQ ID NO: 4847321 - DNA, 25 bp, Homo sapien
aggaagaccctatgtgggactggag

SEQ ID NO: 4847322 - DNA, 25 bp, Homo sapien
gtggccagggatgaagtcgtccagg

SEQ ID NO: 4847323 - DNA, 25 bp, Homo sapien
gaggtggccagggatgaagtcgtcc

SEQ ID NO: 4847324 - DNA, 25 bp, Homo sapien
gggaggaagaccctatgtgggactg

SEQ ID NO: 4847325 - DNA, 25 bp, Homo sapien
ttggagccaccattccggatcacgg

SEQ ID NO: 4847326 - DNA, 25 bp, Homo sapien
taagggtgttggagccaccattccg

SEQ ID NO: 4847327 - DNA, 25 bp, Homo sapien
ggtgttggagccaccattccggatc

SEQ ID NO: 4847328 - DNA, 25 bp, Homo sapien
aattaagggtgttggagccaccatt

SEQ ID NO: 4847329 - DNA, 25 bp, Homo sapien
gggaagcatctcgtcttggtgtgta

SEQ ID NO: 4847330 - DNA, 25 bp, Homo sapien
gcatctcgtcttggtgtgtagcccc

SEQ ID NO: 4847331 - DNA, 25 bp, Homo sapien
tcttggtgtgtagcccccattgcac

SEQ ID NO: 4847332 - DNA, 25 bp, Homo sapien
tgctgggaagcatctcgtcttggtg

SEQ ID NO: 4847333 - DNA, 25 bp, Homo sapien
tgtcccgacgcttgctgtccttggt

SEQ ID NO: 4847334 - DNA, 25 bp, Homo sapien
gggcaatgggcatgccgctctcgtc

SEQ ID NO: 4847335 - DNA, 25 bp, Homo sapien
ggccaggtctgataccacgcagggt

SEQ ID NO: 4847336 - DNA, 25 bp, Homo sapien
gtacttgacccagcgcttgtcccga

SEQ ID NO: 4847337 - DNA, 25 bp, Homo sapien
agctccctgtagatccctgggcccc

SEQ ID NO: 4847338 - DNA, 25 bp, Homo sapien
gctccctgtagatccctgggcccca

SEQ ID NO: 4847339 - DNA, 25 bp, Homo sapien
accagtctctgggtctgtcaacgct

SEQ ID NO: 4847340 - DNA, 25 bp, Homo sapien
cattttccggtgaatctgctggaac

SEQ ID NO: 4847341 - DNA, 25 bp, Homo sapien
tgctggaacattctccggtaccagt

SEQ ID NO: 4847342 - DNA, 25 bp, Homo sapien
tggcattttccggtgaatctgctgg

SEQ ID NO: 4847343 - DNA, 25 bp, Homo sapien
catttgccaagacccactcctagct

SEQ ID NO: 4847344 - DNA, 25 bp, Homo sapien
ttgtggacttgccctcaccactcag

SEQ ID NO: 4847345 - DNA, 25 bp, Homo sapien
tggggaaactcgacttgcaccctct

SEQ ID NO: 4847346 - DNA, 25 bp, Homo sapien
ttccccatttgccaagacccactcc

SEQ ID NO: 4847347 - DNA, 25 bp, Homo sapien
tcgaaggtccagtccagctgcaagt

SEQ ID NO: 4847348 - DNA, 25 bp, Homo sapien
tcctcgaaggtccagtccagctgca

SEQ ID NO: 4847349 - DNA, 25 bp, Homo sapien
tctgggtggctcctcgaaggtccag

SEQ ID NO: 4847350 - DNA, 25 bp, Homo sapien
ctctgggtggctcctcgaaggtcca

SEQ ID NO: 4847351 - DNA, 25 bp, Homo sapien
aactgagccaactggagagccccaa

SEQ ID NO: 4847352 - DNA, 25 bp, Homo sapien
gttccccgtgcaagctgaggctgtt

SEQ ID NO: 4847353 - DNA, 25 bp, Homo sapien
aaaaacctctcaggttgaactgagc

SEQ ID NO: 4847354 - DNA, 25 bp, Homo sapien
tgaggctgttaattaccacctaccg

SEQ ID NO: 4847355 - DNA, 25 bp, Homo sapien
gagacaggccgtgactggggctgag

SEQ ID NO: 4847356 - DNA, 25 bp, Homo sapien
gaggtacacgaggaaagcattgaag

SEQ ID NO: 4847357 - DNA, 25 bp, Homo sapien
tgcagaggaggtacacgaggaaagc

SEQ ID NO: 4847358 - DNA, 25 bp, Homo sapien
cagaggaggtacacgaggaaagcat

SEQ ID NO: 4847359 - DNA, 25 bp, Homo sapien
ccactggaagatgttgccgggccgg

SEQ ID NO: 4847360 - DNA, 25 bp, Homo sapien
ggcaggtctttgctgggctcctaga

SEQ ID NO: 4847361 - DNA, 25 bp, Homo sapien
gggcctgtgggcaggtctttgctgg

SEQ ID NO: 4847362 - DNA, 25 bp, Homo sapien
tttgctgggctcctagatgcctggg

SEQ ID NO: 4847363 - DNA, 25 bp, Homo sapien
agaaagggaaggacatctcttcagc

SEQ ID NO: 4847364 - DNA, 25 bp, Homo sapien
aaagaaagggaaggacatctcttca

SEQ ID NO: 4847365 - DNA, 25 bp, Homo sapien
ctaaagaaagggaaggacatctctt

SEQ ID NO: 4847366 - DNA, 25 bp, Homo sapien
aaagggaaggacatctcttcagctt

SEQ ID NO: 4847367 - DNA, 25 bp, Homo sapien
agaatgctccaggtctgtagttgaa

SEQ ID NO: 4847368 - DNA, 25 bp, Homo sapien
aactcttcagagtggtcccagcttc

SEQ ID NO: 4847369 - DNA, 25 bp, Homo sapien
tgaaggtgcttctaggtaactcttc

SEQ ID NO: 4847370 - DNA, 25 bp, Homo sapien
ggagaatgctccaggtctgtagttg

SEQ ID NO: 4847371 - DNA, 25 bp, Homo sapien
ggttccaggactcttccgtccagac

SEQ ID NO: 4847372 - DNA, 25 bp, Homo sapien
gactcttccgtccagacattgtcta

SEQ ID NO: 4847373 - DNA, 25 bp, Homo sapien
caggactcttccgtccagacattgt

SEQ ID NO: 4847374 - DNA, 25 bp, Homo sapien
tccaggactcttccgtccagacatt

SEQ ID NO: 4847375 - DNA, 25 bp, Homo sapien
caccagggtcgtccaccagcggttt

SEQ ID NO: 4847376 - DNA, 25 bp, Homo sapien
tcaccagggtcgtccaccagcggtt

SEQ ID NO: 4847377 - DNA, 25 bp, Homo sapien
gggctgggagggcttctcaccaggg

SEQ ID NO: 4847378 - DNA, 25 bp, Homo sapien
ggagggcttctcaccagggtcgtcc

SEQ ID NO: 4847379 - DNA, 25 bp, Homo sapien
ctgatcccgcgattccgcagtcctg

SEQ ID NO: 4847380 - DNA, 25 bp, Homo sapien
cgggagtgcctacgcgcttcctgat

SEQ ID NO: 4847381 - DNA, 25 bp, Homo sapien
gattccgcagtcctgccagtttctg

SEQ ID NO: 4847382 - DNA, 25 bp, Homo sapien
gtgtctctgttacagcaccaatggg

SEQ ID NO: 4847383 - DNA, 25 bp, Homo sapien
cggtcaaagatcgactgtgaaaagc

SEQ ID NO: 4847384 - DNA, 25 bp, Homo sapien
agatcgactgtgaaaagcaaggcca

SEQ ID NO: 4847385 - DNA, 25 bp, Homo sapien
gaggcagcggtcaaagatcgactgt

SEQ ID NO: 4847386 - DNA, 25 bp, Homo sapien
aaaagcaaggccagcgcaccgggcc

SEQ ID NO: 4847387 - DNA, 25 bp, Homo sapien
cagtcgggtctcaattgcccgcagg

SEQ ID NO: 4847388 - DNA, 25 bp, Homo sapien
cgggtctcaattgcccgcaggtcct

SEQ ID NO: 4847389 - DNA, 25 bp, Homo sapien
gacggcagtcgggtctcaattgccc

SEQ ID NO: 4847390 - DNA, 25 bp, Homo sapien
ggcagtcgggtctcaattgcccgca

SEQ ID NO: 4847391 - DNA, 25 bp, Homo sapien
gacgcggggtcctagaggcgcccgc

SEQ ID NO: 4847392 - DNA, 25 bp, Homo sapien
cgcctccggaaaagttcgcggctcg

SEQ ID NO: 4847393 - DNA, 25 bp, Homo sapien
aaacggcgcaatcagggcccgcgac

SEQ ID NO: 4847394 - DNA, 25 bp, Homo sapien
tgcgcggggaaacggcgcaatcagg

SEQ ID NO: 4847395 - DNA, 25 bp, Homo sapien
gctgctccggggcccgtcggggcgc

SEQ ID NO: 4847396 - DNA, 25 bp, Homo sapien
cgctgctccggggcccgtcggggcg

SEQ ID NO: 4847397 - DNA, 25 bp, Homo sapien
cagagagtggcgctgcggtccctcc

SEQ ID NO: 4847398 - DNA, 25 bp, Homo sapien
gcgaccccggtcctctgctaggagt

SEQ ID NO: 4847399 - DNA, 25 bp, Homo sapien
tgctaggagttagctgccctcggtg

SEQ ID NO: 4847400 - DNA, 25 bp, Homo sapien
ggacacggctctgcggttccttcct

SEQ ID NO: 4847401 - DNA, 25 bp, Homo sapien
gtcctgggctctccacaggatgtcc

SEQ ID NO: 4847402 - DNA, 25 bp, Homo sapien
gggtcctgggctctccacaggatgt

SEQ ID NO: 4847403 - DNA, 25 bp, Homo sapien
ctgggctctccacaggatgtcctac

SEQ ID NO: 4847404 - DNA, 25 bp, Homo sapien
ctcccagggcgtctcccgggtcctg

SEQ ID NO: 4847405 - DNA, 25 bp, Homo sapien
gcacggggcacagagactgagcctc

SEQ ID NO: 4847406 - DNA, 25 bp, Homo sapien
tgcacggggcacagagactgagcct

SEQ ID NO: 4847407 - DNA, 25 bp, Homo sapien
ctgcacggggcacagagactgagcc

SEQ ID NO: 4847408 - DNA, 25 bp, Homo sapien
gtaaggtgcatgtgggtagctggag

SEQ ID NO: 4847409 - DNA, 25 bp, Homo sapien
ggtaaggtgcatgtgggtagctgga

SEQ ID NO: 4847410 - DNA, 25 bp, Homo sapien
caggtaaggtgcatgtgggtagctg

SEQ ID NO: 4847411 - DNA, 25 bp, Homo sapien
ccaggtaaggtgcatgtgggtagct

SEQ ID NO: 4847412 - DNA, 25 bp, Homo sapien
tagacaaagtccctccgacctagga

SEQ ID NO: 4847413 - DNA, 25 bp, Homo sapien
ctgtggagaagcacaacctcagctt

SEQ ID NO: 4847414 - DNA, 25 bp, Homo sapien
tggagaagcacaacctcagcttggg

SEQ ID NO: 4847415 - DNA, 25 bp, Homo sapien
gagaagcacaacctcagcttgggga

SEQ ID NO: 4847416 - DNA, 25 bp, Homo sapien
gaagcacaacctcagcttggggagg

SEQ ID NO: 4847417 - DNA, 25 bp, Homo sapien
ctgccccctccgttagaggcactag

SEQ ID NO: 4847418 - DNA, 25 bp, Homo sapien
gggctgccccctccgttagaggcac

SEQ ID NO: 4847419 - DNA, 25 bp, Homo sapien
gctgccccctccgttagaggcacta

SEQ ID NO: 4847420 - DNA, 25 bp, Homo sapien
tgccccctccgttagaggcactagg

SEQ ID NO: 4847421 - DNA, 25 bp, Homo sapien
ggctctctcagttgggcgggtggca

SEQ ID NO: 4847422 - DNA, 25 bp, Homo sapien
gacagagtgggctctctcagttggg

SEQ ID NO: 4847423 - DNA, 25 bp, Homo sapien
cagttgggcgggtggcagatccagg

SEQ ID NO: 4847424 - DNA, 25 bp, Homo sapien
acagagtgggctctctcagttgggc

SEQ ID NO: 4847425 - DNA, 25 bp, Homo sapien
ggggactgcgcctggaagtcaaact

SEQ ID NO: 4847426 - DNA, 25 bp, Homo sapien
agtcaaacttgagcctggcggcctt

SEQ ID NO: 4847427 - DNA, 25 bp, Homo sapien
ctggaagtcaaacttgagcctggcg

SEQ ID NO: 4847428 - DNA, 25 bp, Homo sapien
gaagtcaaacttgagcctggcggcc

SEQ ID NO: 4847429 - DNA, 25 bp, Homo sapien
cttgtggatgtagacaatgtcaccc

SEQ ID NO: 4847430 - DNA, 25 bp, Homo sapien
tccacctccttgtggatgtagacaa

SEQ ID NO: 4847431 - DNA, 25 bp, Homo sapien
cacataattagcagggaagatgccc

SEQ ID NO: 4847432 - DNA, 25 bp, Homo sapien
cccaggcggccgtggtgctctccct

SEQ ID NO: 4847433 - DNA, 25 bp, Homo sapien
ggcttagggatctcatctgcgggca

SEQ ID NO: 4847434 - DNA, 25 bp, Homo sapien
ggcttgatgggcttagggatctcat

SEQ ID NO: 4847435 - DNA, 25 bp, Homo sapien
gatgggcttagggatctcatctgcg

SEQ ID NO: 4847436 - DNA, 25 bp, Homo sapien
cttagggatctcatctgcgggcagc

SEQ ID NO: 4847437 - DNA, 25 bp, Homo sapien
tccgatcacaggtgagcccgtggct

SEQ ID NO: 4847438 - DNA, 25 bp, Homo sapien
tcttggaagctcaacgggtgtgcat

SEQ ID NO: 4847439 - DNA, 25 bp, Homo sapien
ggtgtgaacgagatcaacagtccac

SEQ ID NO: 4847440 - DNA, 25 bp, Homo sapien
ttcggcgttcatagcaaggtccctc

SEQ ID NO: 4847441 - DNA, 25 bp, Homo sapien
ttggcgccccgtgcccgtgatgcgt

SEQ ID NO: 4847442 - DNA, 25 bp, Homo sapien
ttcaccttgcggatcaggcagatgt

SEQ ID NO: 4847443 - DNA, 25 bp, Homo sapien
tagctggcagggaatatgccttggc

SEQ ID NO: 4847444 - DNA, 25 bp, Homo sapien
cgtgatgcgtccctcgtaccagttc

SEQ ID NO: 4847445 - DNA, 25 bp, Homo sapien
aggtctgtccccccaagtcgatggg

SEQ ID NO: 4847446 - DNA, 25 bp, Homo sapien
gggccgtcgtcacagagccggagcc

SEQ ID NO: 4847447 - DNA, 25 bp, Homo sapien
agccggggttcacgagacacctgca

SEQ ID NO: 4847448 - DNA, 25 bp, Homo sapien
agaagccagtgcgacggggggaggt

SEQ ID NO: 4847449 - DNA, 25 bp, Homo sapien
gggaggaagacgatgggtacatgta

SEQ ID NO: 4847450 - DNA, 25 bp, Homo sapien
cagagggaggaagacgatgggtaca

SEQ ID NO: 4847451 - DNA, 25 bp, Homo sapien
aggaagacgatgggtacatgtaagc

SEQ ID NO: 4847452 - DNA, 25 bp, Homo sapien
gagggaggaagacgatgggtacatg

SEQ ID NO: 4847453 - DNA, 25 bp, Homo sapien
gggatggctgggacctcgagagtgg

SEQ ID NO: 4847454 - DNA, 25 bp, Homo sapien
gggacctcgagagtgggacagagct

SEQ ID NO: 4847455 - DNA, 25 bp, Homo sapien
gagaggtgttaggagaggaggtccc

SEQ ID NO: 4847456 - DNA, 25 bp, Homo sapien
ggtccagtgtatctgagaggtgtta

SEQ ID NO: 4847457 - DNA, 25 bp, Homo sapien
cctgtactggtacatcgcccggtac

SEQ ID NO: 4847458 - DNA, 25 bp, Homo sapien
acaaaccagccatcgtcacactgct

SEQ ID NO: 4847459 - DNA, 25 bp, Homo sapien
agctccagctcgtcttcgttctggg

SEQ ID NO: 4847460 - DNA, 25 bp, Homo sapien
cgttctggggcctgtactggtacat

SEQ ID NO: 4847461 - DNA, 25 bp, Homo sapien
ggtggtcggccatgaatctttgctg

SEQ ID NO: 4847462 - DNA, 25 bp, Homo sapien
ggggtggtcggccatgaatctttgc

SEQ ID NO: 4847463 - DNA, 25 bp, Homo sapien
ggccctgagatgccccctcccggcc

SEQ ID NO: 4847464 - DNA, 25 bp, Homo sapien
gtcggggggtggtcggccatgaatc

SEQ ID NO: 4847465 - DNA, 25 bp, Homo sapien
cattcctctcaaagcgcttgtggct

SEQ ID NO: 4847466 - DNA, 25 bp, Homo sapien
ctctcaaagcgcttgtggctcctaa

SEQ ID NO: 4847467 - DNA, 25 bp, Homo sapien
cggaaagggcacaggtctcgcccat

SEQ ID NO: 4847468 - DNA, 25 bp, Homo sapien
aagggcacaggtctcgcccattcct

SEQ ID NO: 4847469 - DNA, 25 bp, Homo sapien
ccacaccccccagctggttcctcca

SEQ ID NO: 4847470 - DNA, 25 bp, Homo sapien
acaccccccagctggttcctccagc

SEQ ID NO: 4847471 - DNA, 25 bp, Homo sapien
ctgtgtatccccacaccccccagct

SEQ ID NO: 4847472 - DNA, 25 bp, Homo sapien
tgtatccccacaccccccagctggt

SEQ ID NO: 4847473 - DNA, 25 bp, Homo sapien
gaatttctgggtcctccgggagaca

SEQ ID NO: 4847474 - DNA, 25 bp, Homo sapien
aggaggatgtgggcgggggtcctct

SEQ ID NO: 4847475 - DNA, 25 bp, Homo sapien
cctggctggctccaagttgccatgg

SEQ ID NO: 4847476 - DNA, 25 bp, Homo sapien
gggaaaggctgcgggggtcgtctgc

SEQ ID NO: 4847477 - DNA, 25 bp, Homo sapien
ggggtcgtctgcagatgctgggagc

SEQ ID NO: 4847478 - DNA, 25 bp, Homo sapien
gctgcgggggtcgtctgcagatgct

SEQ ID NO: 4847479 - DNA, 25 bp, Homo sapien
aaggctgcgggggtcgtctgcagat

SEQ ID NO: 4847480 - DNA, 25 bp, Homo sapien
aatgcctgtgagtcgtgggtgggaa

SEQ ID NO: 4847481 - DNA, 25 bp, Homo sapien
ccctgttagaggaaacgctggagca

SEQ ID NO: 4847482 - DNA, 25 bp, Homo sapien
ctaagaaggtgctgcgtctgtcccc

SEQ ID NO: 4847483 - DNA, 25 bp, Homo sapien
tgccaggcctagatcgctaagaagg

SEQ ID NO: 4847484 - DNA, 25 bp, Homo sapien
gggtctggtctcaataaggcctgga

SEQ ID NO: 4847485 - DNA, 25 bp, Homo sapien
ggaggagaagccgtacctggcaacc

SEQ ID NO: 4847486 - DNA, 25 bp, Homo sapien
caaggccatagagccgcctctcgtt

SEQ ID NO: 4847487 - DNA, 25 bp, Homo sapien
gagaagccgtacctggcaaccctct

SEQ ID NO: 4847488 - DNA, 25 bp, Homo sapien
tccggggacctcaaggccatagagc

SEQ ID NO: 4847489 - DNA, 25 bp, Homo sapien
cccaggtcctgggcagggtgggctg

SEQ ID NO: 4847490 - DNA, 25 bp, Homo sapien
ccccaggtcctgggcagggtgggct

SEQ ID NO: 4847491 - DNA, 25 bp, Homo sapien
tgggcagggtgggctgcctgggtgt

SEQ ID NO: 4847492 - DNA, 25 bp, Homo sapien
gcagggtgggctgcctgggtgtgtc

SEQ ID NO: 4847493 - DNA, 25 bp, Homo sapien
tgcaggctgcgaccgtccagccggt

SEQ ID NO: 4847494 - DNA, 25 bp, Homo sapien
tgccgtctacccgactctggggaga

SEQ ID NO: 4847495 - DNA, 25 bp, Homo sapien
ccataaagctctcccacgccggccg

SEQ ID NO: 4847496 - DNA, 25 bp, Homo sapien
gccccacttcgcagacgatcgaggg

SEQ ID NO: 4847497 - DNA, 25 bp, Homo sapien
tccgagggcaaagtaccctgcgggc

SEQ ID NO: 4847498 - DNA, 25 bp, Homo sapien
gatggcccggctctaccagttctgg

SEQ ID NO: 4847499 - DNA, 25 bp, Homo sapien
tggagcctccttcgctccgagggca

SEQ ID NO: 4847500 - DNA, 25 bp, Homo sapien
ctttgagccggtcagtggactccgc

SEQ ID NO: 4847501 - DNA, 25 bp, Homo sapien
cctgggaagccatgcttctgggttc

SEQ ID NO: 4847502 - DNA, 25 bp, Homo sapien
tcagcccagggagcgactcccagga

SEQ ID NO: 4847503 - DNA, 25 bp, Homo sapien
gggctggcaagtggaggggatgcca

SEQ ID NO: 4847504 - DNA, 25 bp, Homo sapien
tcccttccttagtcttcagcccagg

SEQ ID NO: 4847505 - DNA, 25 bp, Homo sapien
tctgggggcactgtaaggcagcagg

SEQ ID NO: 4847506 - DNA, 25 bp, Homo sapien
aaggagagggcaccacagctcccgg

SEQ ID NO: 4847507 - DNA, 25 bp, Homo sapien
gctcccggagcagctactcaggggc

SEQ ID NO: 4847508 - DNA, 25 bp, Homo sapien
ggtgaagtccatgcccctagccggc

SEQ ID NO: 4847509 - DNA, 25 bp, Homo sapien
atccctgccccctgtgatacggaag

SEQ ID NO: 4847510 - DNA, 25 bp, Homo sapien
cccctgtgatacggaagccccaggg

SEQ ID NO: 4847511 - DNA, 25 bp, Homo sapien
tgatgggcgtgtggaaatccctgcc

SEQ ID NO: 4847512 - DNA, 25 bp, Homo sapien
cttagtcaccatgatgggcgtgtgg

SEQ ID NO: 4847513 - DNA, 25 bp, Homo sapien
gggctctggcggatcttgctctggg

SEQ ID NO: 4847514 - DNA, 25 bp, Homo sapien
tctgggcctcggcatgcagcatgcc

SEQ ID NO: 4847515 - DNA, 25 bp, Homo sapien
gatggccacgattatgtctccaggc

SEQ ID NO: 4847516 - DNA, 25 bp, Homo sapien
ggtcagcgtccttggctttgccccg

SEQ ID NO: 4847517 - DNA, 25 bp, Homo sapien
ggaagcgagtcgccagcacttccaa

SEQ ID NO: 4847518 - DNA, 25 bp, Homo sapien
ctggaagcgagtcgccagcacttcc

SEQ ID NO: 4847519 - DNA, 25 bp, Homo sapien
tggaagcgagtcgccagcacttcca

SEQ ID NO: 4847520 - DNA, 25 bp, Homo sapien
tctcagtgtatgtcctcacggagcc

SEQ ID NO: 4847521 - DNA, 25 bp, Homo sapien
gactgactctcagtgtatgtcctca

SEQ ID NO: 4847522 - DNA, 25 bp, Homo sapien
gaccttaaggaggactgactctcag

SEQ ID NO: 4847523 - DNA, 25 bp, Homo sapien
gctggagtaggaggaccttaaggag

SEQ ID NO: 4847524 - DNA, 25 bp, Homo sapien
cggggaacatgccagactctggaag

SEQ ID NO: 4847525 - DNA, 25 bp, Homo sapien
ctgagtaggacaggcggtcagcagc

SEQ ID NO: 4847526 - DNA, 25 bp, Homo sapien
cccggggaacatgccagactctgga

SEQ ID NO: 4847527 - DNA, 25 bp, Homo sapien
gaggcccggggaacatgccagactc

SEQ ID NO: 4847528 - DNA, 25 bp, Homo sapien
ctgggggcaacacgatggggaagct

SEQ ID NO: 4847529 - DNA, 25 bp, Homo sapien
cacgatggggaagctcgggaaggct

SEQ ID NO: 4847530 - DNA, 25 bp, Homo sapien
aaggcttgcccttgagcacgtgggt

SEQ ID NO: 4847531 - DNA, 25 bp, Homo sapien
ctcgggaaggcttgcccttgagcac

SEQ ID NO: 4847532 - DNA, 25 bp, Homo sapien
ctcccacacccttcattttcctgga

SEQ ID NO: 4847533 - DNA, 25 bp, Homo sapien
aacacctctcgaaatgtgtgctggg

SEQ ID NO: 4847534 - DNA, 25 bp, Homo sapien
catgagcttgtctgtagccaacacc

SEQ ID NO: 4847535 - DNA, 25 bp, Homo sapien
tgtagccaacacctctcgaaatgtg

SEQ ID NO: 4847536 - DNA, 25 bp, Homo sapien
ctgcccatcatgagcttgtctgtag

SEQ ID NO: 4847537 - DNA, 25 bp, Homo sapien
gagtctgggctaaccagcctgtccc

SEQ ID NO: 4847538 - DNA, 25 bp, Homo sapien
gctcttaaatttgctcccaacatgg

SEQ ID NO: 4847539 - DNA, 25 bp, Homo sapien
ctgctaccagcagttggcctcgcat

SEQ ID NO: 4847540 - DNA, 25 bp, Homo sapien
cctctcctcagaggcgggagtctgg

SEQ ID NO: 4847541 - DNA, 25 bp, Homo sapien
gaggagatagaaacataaagggatg

SEQ ID NO: 4847542 - DNA, 25 bp, Homo sapien
gggatgaagcaaggggtcgaagtcc

SEQ ID NO: 4847543 - DNA, 25 bp, Homo sapien
ggagatagaaacataaagggatgaa

SEQ ID NO: 4847544 - DNA, 25 bp, Homo sapien
ctgaggagatagaaacataaaggga

SEQ ID NO: 4847545 - DNA, 25 bp, Homo sapien
agaggaagcacgctgcccttttgca

SEQ ID NO: 4847546 - DNA, 25 bp, Homo sapien
tccgatcccacggaaccagcagaga

SEQ ID NO: 4847547 - DNA, 25 bp, Homo sapien
aagacattgcacactggggcctggc

SEQ ID NO: 4847548 - DNA, 25 bp, Homo sapien
atctgtgtgcaaagacattgcacac

SEQ ID NO: 4847549 - DNA, 25 bp, Homo sapien
agggaggcatgcgggttctgccggg

SEQ ID NO: 4847550 - DNA, 25 bp, Homo sapien
gtgacagctaagcacagagtcctct

SEQ ID NO: 4847551 - DNA, 25 bp, Homo sapien
gggagggaggcatgcgggttctgcc

SEQ ID NO: 4847552 - DNA, 25 bp, Homo sapien
aggtgacagctaagcacagagtcct

SEQ ID NO: 4847553 - DNA, 25 bp, Homo sapien
ttggagccaaggtgtcgggggctcc

SEQ ID NO: 4847554 - DNA, 25 bp, Homo sapien
aacacacccaggagggcctagcccg

SEQ ID NO: 4847555 - DNA, 25 bp, Homo sapien
gagggcctagcccggctgttcccag

SEQ ID NO: 4847556 - DNA, 25 bp, Homo sapien
cccaggagggcctagcccggctgtt

SEQ ID NO: 4847557 - DNA, 25 bp, Homo sapien
ggcctagcccggctgttcccaggcc

SEQ ID NO: 4847558 - DNA, 25 bp, Homo sapien
ctgttgggaggaggcagccggggag

SEQ ID NO: 4847559 - DNA, 25 bp, Homo sapien
aggcagccggggaggagtcagggcc

SEQ ID NO: 4847560 - DNA, 25 bp, Homo sapien
aggaggcagccggggaggagtcagg

SEQ ID NO: 4847561 - DNA, 25 bp, Homo sapien
gcagccggggaggagtcagggccag

SEQ ID NO: 4847562 - DNA, 25 bp, Homo sapien
cagcaccgccgagtcgccagcgcgg

SEQ ID NO: 4847563 - DNA, 25 bp, Homo sapien
gccgagtcgccagcgcggccgaggc

SEQ ID NO: 4847564 - DNA, 25 bp, Homo sapien
tggaggagccaactgggcttggggg

SEQ ID NO: 4847565 - DNA, 25 bp, Homo sapien
ggtggaggagccaactgggcttggg

SEQ ID NO: 4847566 - DNA, 25 bp, Homo sapien
ggaggagccaactgggcttggggga

SEQ ID NO: 4847567 - DNA, 25 bp, Homo sapien
gtggaggagccaactgggcttgggg

SEQ ID NO: 4847568 - DNA, 25 bp, Homo sapien
tgcagcatcttgaagacttccgagt

SEQ ID NO: 4847569 - DNA, 25 bp, Homo sapien
aagagccgaaaggagctggactgtc

SEQ ID NO: 4847570 - DNA, 25 bp, Homo sapien
cgtccctcgcgattttcctgcagca

SEQ ID NO: 4847571 - DNA, 25 bp, Homo sapien
cttcctgcaagagccgaaaggagct

SEQ ID NO: 4847572 - DNA, 25 bp, Homo sapien
tgccaccccaatgggactcaactga

SEQ ID NO: 4847573 - DNA, 25 bp, Homo sapien
ttgccaccccaatgggactcaactg

SEQ ID NO: 4847574 - DNA, 25 bp, Homo sapien
gccaccccaatgggactcaactgag

SEQ ID NO: 4847575 - DNA, 25 bp, Homo sapien
tgctggtactgcacttctcacaagt

SEQ ID NO: 4847576 - DNA, 25 bp, Homo sapien
gcgatgctggtactgcacttctcac

SEQ ID NO: 4847577 - DNA, 25 bp, Homo sapien
tggtactgcacttctcacaagtgtg

SEQ ID NO: 4847578 - DNA, 25 bp, Homo sapien
gagctgggcaagaaggctggcgtgc

SEQ ID NO: 4847579 - DNA, 25 bp, Homo sapien
gcctggtccccactgtagcatcagg

SEQ ID NO: 4847580 - DNA, 25 bp, Homo sapien
tggcggtaccggccctcctggatgc

SEQ ID NO: 4847581 - DNA, 25 bp, Homo sapien
cagaagtgcccgcgcatcttcaggt

SEQ ID NO: 4847582 - DNA, 25 bp, Homo sapien
ccagaagtgcccgcgcatcttcagg

SEQ ID NO: 4847583 - DNA, 25 bp, Homo sapien
gtggcaggtgcggagtagcgctggc

SEQ ID NO: 4847584 - DNA, 25 bp, Homo sapien
agggtggcaggtgcggagtagcgct

SEQ ID NO: 4847585 - DNA, 25 bp, Homo sapien
gcaggtgcggagtagcgctggcggg

SEQ ID NO: 4847586 - DNA, 25 bp, Homo sapien
aggtgcggagtagcgctggcgggca

SEQ ID NO: 4847587 - DNA, 25 bp, Homo sapien
aacttatataggcatgaccctggcc

SEQ ID NO: 4847588 - DNA, 25 bp, Homo sapien
gggtgagtctcccacagtccaagac

SEQ ID NO: 4847589 - DNA, 25 bp, Homo sapien
tgtaagagcaactgcccaccattgt

SEQ ID NO: 4847590 - DNA, 25 bp, Homo sapien
tacttagaccctcgcacacaaaggt

SEQ ID NO: 4847591 - DNA, 25 bp, Homo sapien
tcctcctgtccctccgcttggcgcc

SEQ ID NO: 4847592 - DNA, 25 bp, Homo sapien
aatctcattccctccatagcacaag

SEQ ID NO: 4847593 - DNA, 25 bp, Homo sapien
tggctggatgggtctcctggtcttc

SEQ ID NO: 4847594 - DNA, 25 bp, Homo sapien
caaagcttccagtgacaatctcatt

SEQ ID NO: 4847595 - DNA, 25 bp, Homo sapien
ccttccaagtgttcccagaggctgg

SEQ ID NO: 4847596 - DNA, 25 bp, Homo sapien
gaattgctggccatgtctcaacaga

SEQ ID NO: 4847597 - DNA, 25 bp, Homo sapien
gattcctttcacaaagagccggaga

SEQ ID NO: 4847598 - DNA, 25 bp, Homo sapien
caaagtccgggaacatagacgggcg

SEQ ID NO: 4847599 - DNA, 25 bp, Homo sapien
agctcgggcagctcagggagcgcgt

SEQ ID NO: 4847600 - DNA, 25 bp, Homo sapien
atgcagccgcccgaggatcccggcc

SEQ ID NO: 4847601 - DNA, 25 bp, Homo sapien
gggcagctcagggagcgcgtcccga

SEQ ID NO: 4847602 - DNA, 25 bp, Homo sapien
gcggagctcgggcagctcagggagc

SEQ ID NO: 4847603 - DNA, 25 bp, Homo sapien
cccggccgtccacggcgaaggcgcg

SEQ ID NO: 4847604 - DNA, 25 bp, Homo sapien
ccggccgtccacggcgaaggcgcgc

SEQ ID NO: 4847605 - DNA, 25 bp, Homo sapien
ggccgtccacggcgaaggcgcgccg

SEQ ID NO: 4847606 - DNA, 25 bp, Homo sapien
ccgtccacggcgaaggcgcgccgcc

SEQ ID NO: 4847607 - DNA, 25 bp, Homo sapien
tcctggcggaatgaacggtacggga

SEQ ID NO: 4847608 - DNA, 25 bp, Homo sapien
ggccctctggcgacggggcgtcctg

SEQ ID NO: 4847609 - DNA, 25 bp, Homo sapien
acggggcgtcctggcggaatgaacg

SEQ ID NO: 4847610 - DNA, 25 bp, Homo sapien
ggcgtcctggcggaatgaacggtac

SEQ ID NO: 4847611 - DNA, 25 bp, Homo sapien
cccgagtcagaagtagggagccaca

SEQ ID NO: 4847612 - DNA, 25 bp, Homo sapien
tgagctgtgtggtaggcaaagccct

SEQ ID NO: 4847613 - DNA, 25 bp, Homo sapien
gatgggattcccttcgcaacggttg

SEQ ID NO: 4847614 - DNA, 25 bp, Homo sapien
tccccaagcgggagtaggactgtat

SEQ ID NO: 4847615 - DNA, 25 bp, Homo sapien
gatccgtctgtaggtgctggtgact

SEQ ID NO: 4847616 - DNA, 25 bp, Homo sapien
ctggtgactccaggcactatgcagc

SEQ ID NO: 4847617 - DNA, 25 bp, Homo sapien
atgagcacccgtgggcagcgtcggg

SEQ ID NO: 4847618 - DNA, 25 bp, Homo sapien
tttgagaaagagtgcctccctgccg

SEQ ID NO: 4847619 - DNA, 25 bp, Homo sapien
tcaaagtccagggagtcctgagaaa

SEQ ID NO: 4847620 - DNA, 25 bp, Homo sapien
tggctggccaggagtcggcctacct

SEQ ID NO: 4847621 - DNA, 25 bp, Homo sapien
ggcacttcacgctcaggcttgcttg

SEQ ID NO: 4847622 - DNA, 25 bp, Homo sapien
gaactccctgaggattcaaagtcca

SEQ ID NO: 4847623 - DNA, 25 bp, Homo sapien
cagaggtggccgtgcacaaatggaa

SEQ ID NO: 4847624 - DNA, 25 bp, Homo sapien
aggtggccgtgcacaaatggaactg

SEQ ID NO: 4847625 - DNA, 25 bp, Homo sapien
cccagcggggcatagtgccaggaag

SEQ ID NO: 4847626 - DNA, 25 bp, Homo sapien
ctctgcagaggtggccgtgcacaaa

SEQ ID NO: 4847627 - DNA, 25 bp, Homo sapien
ccctaccctaagcagccaggctggg

SEQ ID NO: 4847628 - DNA, 25 bp, Homo sapien
gacattgtgagataggggagatttc

SEQ ID NO: 4847629 - DNA, 25 bp, Homo sapien
gagataggggagatttcagccagta

SEQ ID NO: 4847630 - DNA, 25 bp, Homo sapien
cagccagtagggctcctgccctacc

SEQ ID NO: 4847631 - DNA, 25 bp, Homo sapien
gcccaggctccaggccccaggcccc

SEQ ID NO: 4847632 - DNA, 25 bp, Homo sapien
caggctccaggccccaggcccccca

SEQ ID NO: 4847633 - DNA, 25 bp, Homo sapien
caggcccaggctccaggccccaggc

SEQ ID NO: 4847634 - DNA, 25 bp, Homo sapien
ggggaggcaggcccaggctccaggc

SEQ ID NO: 4847635 - DNA, 25 bp, Homo sapien
gagctgctggagccttgccatctgc

SEQ ID NO: 4847636 - DNA, 25 bp, Homo sapien
agagctgctggagccttgccatctg

SEQ ID NO: 4847637 - DNA, 25 bp, Homo sapien
gggcctggctagagggctgaagctg

SEQ ID NO: 4847638 - DNA, 25 bp, Homo sapien
ggcctggctagagggctgaagctgc

SEQ ID NO: 4847639 - DNA, 25 bp, Homo sapien
ctgtctggcttagcagctcccatgg

SEQ ID NO: 4847640 - DNA, 25 bp, Homo sapien
ccccgattgcctggggtgtgtaacg

SEQ ID NO: 4847641 - DNA, 25 bp, Homo sapien
aggggctcgggtcgactcctcctcg

SEQ ID NO: 4847642 - DNA, 25 bp, Homo sapien
gggtcgactcctcctcgccgggatc

SEQ ID NO: 4847643 - DNA, 25 bp, Homo sapien
tggccagggccagaagacaccccat

SEQ ID NO: 4847644 - DNA, 25 bp, Homo sapien
caccccatcaagcttcggctcagag

SEQ ID NO: 4847645 - DNA, 25 bp, Homo sapien
tcagaggacctgctggtgggacccc

SEQ ID NO: 4847646 - DNA, 25 bp, Homo sapien
ttcagaaagacagtcaggttggcca

SEQ ID NO: 4847647 - DNA, 25 bp, Homo sapien
ctttgggggtgaagcagcctttgct

SEQ ID NO: 4847648 - DNA, 25 bp, Homo sapien
tttgggggtgaagcagcctttgctc

SEQ ID NO: 4847649 - DNA, 25 bp, Homo sapien
caagtggtacgttggctccactggg

SEQ ID NO: 4847650 - DNA, 25 bp, Homo sapien
gcctgggagggttggcactgggcac

SEQ ID NO: 4847651 - DNA, 25 bp, Homo sapien
ggatggcaagtggtacgttggctcc

SEQ ID NO: 4847652 - DNA, 25 bp, Homo sapien
ctgggaggatggcaagtggtacgtt

SEQ ID NO: 4847653 - DNA, 25 bp, Homo sapien
tgctccaaacaggaatcaatcctgt

SEQ ID NO: 4847654 - DNA, 25 bp, Homo sapien
ggaatcaatcctgtcatttccccag

SEQ ID NO: 4847655 - DNA, 25 bp, Homo sapien
ctgccccacatatacctgtccccta

SEQ ID NO: 4847656 - DNA, 25 bp, Homo sapien
agccaggacaagtcgcctgctccaa

SEQ ID NO: 4847657 - DNA, 25 bp, Homo sapien
ccggcagatccggttgagcaggacc

SEQ ID NO: 4847658 - DNA, 25 bp, Homo sapien
ggcagatccggttgagcaggacctt

SEQ ID NO: 4847659 - DNA, 25 bp, Homo sapien
tctccggcagatccggttgagcagg

SEQ ID NO: 4847660 - DNA, 25 bp, Homo sapien
tggcttctccggcagatccggttga

SEQ ID NO: 4847661 - DNA, 25 bp, Homo sapien
tagctgtcactgactcaccgtgcgg

SEQ ID NO: 4847662 - DNA, 25 bp, Homo sapien
ggacaataatgacaactggcatgac

SEQ ID NO: 4847663 - DNA, 25 bp, Homo sapien
tccgtgccctaacctgggctgggca

SEQ ID NO: 4847664 - DNA, 25 bp, Homo sapien
ctggcatgacaatctcagcatcctg

SEQ ID NO: 4847665 - DNA, 25 bp, Homo sapien
tgctcgttgcttcttaaccactaat

SEQ ID NO: 4847666 - DNA, 25 bp, Homo sapien
ttttgctcgttgcttcttaaccact

SEQ ID NO: 4847667 - DNA, 25 bp, Homo sapien
tttgctcgttgcttcttaaccacta

SEQ ID NO: 4847668 - DNA, 25 bp, Homo sapien
cttaaccactaatgatggcataaag

SEQ ID NO: 4847669 - DNA, 25 bp, Homo sapien
gaaaccaaggttcctgaccagactg

SEQ ID NO: 4847670 - DNA, 25 bp, Homo sapien
aatacacatctgcaacatgctgggc

SEQ ID NO: 4847671 - DNA, 25 bp, Homo sapien
gatggttggatccagccagcttgca

SEQ ID NO: 4847672 - DNA, 25 bp, Homo sapien
tgcttagaggagaaagattcagccc

SEQ ID NO: 4847673 - DNA, 25 bp, Homo sapien
ctgtcccagggctgccagcatggct

SEQ ID NO: 4847674 - DNA, 25 bp, Homo sapien
tctgtcccagggctgccagcatggc

SEQ ID NO: 4847675 - DNA, 25 bp, Homo sapien
cgttctctgtcccagggctgccagc

SEQ ID NO: 4847676 - DNA, 25 bp, Homo sapien
ttctctgtcccagggctgccagcat

SEQ ID NO: 4847677 - DNA, 25 bp, Homo sapien
taaacgctagtacggagcagagaag

SEQ ID NO: 4847678 - DNA, 25 bp, Homo sapien
catcattattcccagcgggaagctg

SEQ ID NO: 4847679 - DNA, 25 bp, Homo sapien
tcctcattccttgtgcagtcttcag

SEQ ID NO: 4847680 - DNA, 25 bp, Homo sapien
tgaaagttattcagttcccaggttg

SEQ ID NO: 4847681 - DNA, 25 bp, Homo sapien
cacgctcgcctccctctggcagtcg

SEQ ID NO: 4847682 - DNA, 25 bp, Homo sapien
gctcgcctccctctggcagtcgaga

SEQ ID NO: 4847683 - DNA, 25 bp, Homo sapien
acgctcgcctccctctggcagtcga

SEQ ID NO: 4847684 - DNA, 25 bp, Homo sapien
cgctcgcctccctctggcagtcgag

SEQ ID NO: 4847685 - DNA, 25 bp, Homo sapien
gaagtcgcgcctcggtagtgtcctc

SEQ ID NO: 4847686 - DNA, 25 bp, Homo sapien
gatgcgcgtcaggaagtcgcgcctc

SEQ ID NO: 4847687 - DNA, 25 bp, Homo sapien
tgcgccttcccggatcggatgcgcg

SEQ ID NO: 4847688 - DNA, 25 bp, Homo sapien
cttcccggatcggatgcgcgtcagg

SEQ ID NO: 4847689 - DNA, 25 bp, Homo sapien
cggaagcgcctctccggaagcgcga

SEQ ID NO: 4847690 - DNA, 25 bp, Homo sapien
tccggaagcgcgaccactggtcgga

SEQ ID NO: 4847691 - DNA, 25 bp, Homo sapien
gctctcccggatatggtccctccct

SEQ ID NO: 4847692 - DNA, 25 bp, Homo sapien
accactggtcggaagctgccgctct

SEQ ID NO: 4847693 - DNA, 25 bp, Homo sapien
cgaggagactgtgtgggccctctcc

SEQ ID NO: 4847694 - DNA, 25 bp, Homo sapien
acaacttagcgctcctctcactatg

SEQ ID NO: 4847695 - DNA, 25 bp, Homo sapien
cgttgtttcctcgaccggctggtgg

SEQ ID NO: 4847696 - DNA, 25 bp, Homo sapien
cgagagagccccgatgacattcctt

SEQ ID NO: 4847697 - DNA, 25 bp, Homo sapien
cctctttcagagtcgtggggaaaag

SEQ ID NO: 4847698 - DNA, 25 bp, Homo sapien
tcctctttcagagtcgtggggaaaa

SEQ ID NO: 4847699 - DNA, 25 bp, Homo sapien
gtcctctttcagagtcgtggggaaa

SEQ ID NO: 4847700 - DNA, 25 bp, Homo sapien
ctgagaagttgcgtccccctggaag

SEQ ID NO: 4847701 - DNA, 25 bp, Homo sapien
ttgcgtccccctggaagcgggttga

SEQ ID NO: 4847702 - DNA, 25 bp, Homo sapien
aagcgggttgatccgctggcgctta

SEQ ID NO: 4847703 - DNA, 25 bp, Homo sapien
tccgctggcgcttaaactgggacat

SEQ ID NO: 4847704 - DNA, 25 bp, Homo sapien
gagaagcaatctccaggaaccgccc

SEQ ID NO: 4847705 - DNA, 25 bp, Homo sapien
tatggggaaagagaagcaatctcca

SEQ ID NO: 4847706 - DNA, 25 bp, Homo sapien
ggaaagagaagcaatctccaggaac

SEQ ID NO: 4847707 - DNA, 25 bp, Homo sapien
agagaagcaatctccaggaaccgcc

SEQ ID NO: 4847708 - DNA, 25 bp, Homo sapien
agtgagcaaaccaggaggagggccc

SEQ ID NO: 4847709 - DNA, 25 bp, Homo sapien
cccagaagagatgttgaagctgtgc

SEQ ID NO: 4847710 - DNA, 25 bp, Homo sapien
agggcccagaagagatgttgaagct

SEQ ID NO: 4847711 - DNA, 25 bp, Homo sapien
acaggaggagtgagcaaaccaggag

SEQ ID NO: 4847712 - DNA, 25 bp, Homo sapien
aggtgcctggcattctgggacagtt

SEQ ID NO: 4847713 - DNA, 25 bp, Homo sapien
ctgaaggtgcctggcattctgggac

SEQ ID NO: 4847714 - DNA, 25 bp, Homo sapien
tgaaggtgcctggcattctgggaca

SEQ ID NO: 4847715 - DNA, 25 bp, Homo sapien
aaggtgcctggcattctgggacagt

SEQ ID NO: 4847716 - DNA, 25 bp, Homo sapien
agtgaagacccgctgtttctcccca

SEQ ID NO: 4847717 - DNA, 25 bp, Homo sapien
aagtagtcatgcaagctggtaacaa

SEQ ID NO: 4847718 - DNA, 25 bp, Homo sapien
cttagctgaaaaaagacctcttcat

SEQ ID NO: 4847719 - DNA, 25 bp, Homo sapien
tggtaacaataccagtgaagacccg

SEQ ID NO: 4847720 - DNA, 25 bp, Homo sapien
tggttggagagcgtttgcaccttga

SEQ ID NO: 4847721 - DNA, 25 bp, Homo sapien
tgcctggcctgggttgtatgcagcc

SEQ ID NO: 4847722 - DNA, 25 bp, Homo sapien
ggagagcgtttgcaccttgacagca

SEQ ID NO: 4847723 - DNA, 25 bp, Homo sapien
ggcctgggttgtatgcagccttcac

SEQ ID NO: 4847724 - DNA, 25 bp, Homo sapien
gaggtgctggggacttcagtagggg

SEQ ID NO: 4847725 - DNA, 25 bp, Homo sapien
ggaggtgctggggacttcagtaggg

SEQ ID NO: 4847726 - DNA, 25 bp, Homo sapien
aggaggtgctggggacttcagtagg

SEQ ID NO: 4847727 - DNA, 25 bp, Homo sapien
gagctcccaggatcccttgcttctg

SEQ ID NO: 4847728 - DNA, 25 bp, Homo sapien
gggaatccggtgaggctggaagatc

SEQ ID NO: 4847729 - DNA, 25 bp, Homo sapien
gaagatcaactgaggctgagctccc

SEQ ID NO: 4847730 - DNA, 25 bp, Homo sapien
aggatcccttgcttctggcccaggg

SEQ ID NO: 4847731 - DNA, 25 bp, Homo sapien
ccaacaacagtgccactcgtactca

SEQ ID NO: 4847732 - DNA, 25 bp, Homo sapien
caacaacagtgccactcgtactcac

SEQ ID NO: 4847733 - DNA, 25 bp, Homo sapien
tgggatgtttggaagagactcagag

SEQ ID NO: 4847734 - DNA, 25 bp, Homo sapien
cttcggccctgatccaaccgtccat

SEQ ID NO: 4847735 - DNA, 25 bp, Homo sapien
gccccgggcaggaaatctgttcagg

SEQ ID NO: 4847736 - DNA, 25 bp, Homo sapien
gccctgatccaaccgtccatgaggg

SEQ ID NO: 4847737 - DNA, 25 bp, Homo sapien
accgtctcagaaggcacctgctgtg

SEQ ID NO: 4847738 - DNA, 25 bp, Homo sapien
agtccacggcagtcacagagtttca

SEQ ID NO: 4847739 - DNA, 25 bp, Homo sapien
caaatgcaactgatagagaaagcct

SEQ ID NO: 4847740 - DNA, 25 bp, Homo sapien
taatacaacagaccttgcatgggcc

SEQ ID NO: 4847741 - DNA, 25 bp, Homo sapien
actgtgtggccactttcctccgctt

SEQ ID NO: 4847742 - DNA, 25 bp, Homo sapien
ggctgacctctcaggacttgcagca

SEQ ID NO: 4847743 - DNA, 25 bp, Homo sapien
ttatggtccactcaacgctgtacac

SEQ ID NO: 4847744 - DNA, 25 bp, Homo sapien
tccgcttcctgtacattgtcaggag

SEQ ID NO: 4847745 - DNA, 25 bp, Homo sapien
tgttctgccttttagacctgcctgg

SEQ ID NO: 4847746 - DNA, 25 bp, Homo sapien
taataagtcaccacagtattacact

SEQ ID NO: 4847747 - DNA, 25 bp, Homo sapien
gaccattcattataacgtgccagac

SEQ ID NO: 4847748 - DNA, 25 bp, Homo sapien
ctgtgcctgggtaactgagttgatt

SEQ ID NO: 4847749 - DNA, 25 bp, Homo sapien
gaggttgacccatcaccaacagtaa

SEQ ID NO: 4847750 - DNA, 25 bp, Homo sapien
aggttgacccatcaccaacagtaag

SEQ ID NO: 4847751 - DNA, 25 bp, Homo sapien
tagaggttgacccatcaccaacagt

SEQ ID NO: 4847752 - DNA, 25 bp, Homo sapien
ctagaggttgacccatcaccaacag

SEQ ID NO: 4847753 - DNA, 25 bp, Homo sapien
tccaccagcccgctgtttgcgtttc

SEQ ID NO: 4847754 - DNA, 25 bp, Homo sapien
ggacccggtaaggaggcaggtcatg

SEQ ID NO: 4847755 - DNA, 25 bp, Homo sapien
ccagcccgctgtttgcgtttcttgg

SEQ ID NO: 4847756 - DNA, 25 bp, Homo sapien
acccggtaaggaggcaggtcatgcc

SEQ ID NO: 4847757 - DNA, 25 bp, Homo sapien
tcaaggaagctagatcagatctgac

SEQ ID NO: 4847758 - DNA, 25 bp, Homo sapien
tacaaactctagatggcaaaagtca

SEQ ID NO: 4847759 - DNA, 25 bp, Homo sapien
gaagtaaggcacctctcaaggaagc

SEQ ID NO: 4847760 - DNA, 25 bp, Homo sapien
gcaagggaatccagactgagcaaag

SEQ ID NO: 4847761 - DNA, 25 bp, Homo sapien
gacagaaaatctgaggggaccagga

SEQ ID NO: 4847762 - DNA, 25 bp, Homo sapien
gaggctgcggtaacggcgctggagt

SEQ ID NO: 4847763 - DNA, 25 bp, Homo sapien
tagccaactcagatgcacggacaga

SEQ ID NO: 4847764 - DNA, 25 bp, Homo sapien
cggtaacggcgctggagttctagga

SEQ ID NO: 4847765 - DNA, 25 bp, Homo sapien
ctataagcggggtcactgtctgcag

SEQ ID NO: 4847766 - DNA, 25 bp, Homo sapien
aactataagcggggtcactgtctgc

SEQ ID NO: 4847767 - DNA, 25 bp, Homo sapien
cttttcagaagagacctggatccgg

SEQ ID NO: 4847768 - DNA, 25 bp, Homo sapien
cttcgaactataagcggggtcactg

SEQ ID NO: 4847769 - DNA, 25 bp, Homo sapien
catgcaacaacgatacaattcctcc

SEQ ID NO: 4847770 - DNA, 25 bp, Homo sapien
tcctccaaccccggggaagagagca

SEQ ID NO: 4847771 - DNA, 25 bp, Homo sapien
tgcaacaacgatacaattcctccaa

SEQ ID NO: 4847772 - DNA, 25 bp, Homo sapien
ctccaaccccggggaagagagcagc

SEQ ID NO: 4847773 - DNA, 25 bp, Homo sapien
tgctctggcgtctcccttggctcag

SEQ ID NO: 4847774 - DNA, 25 bp, Homo sapien
cttcagaggatgctctggcgtctcc

SEQ ID NO: 4847775 - DNA, 25 bp, Homo sapien
ggctcagccatgtcatccacaaaga

SEQ ID NO: 4847776 - DNA, 25 bp, Homo sapien
cttggctcagccatgtcatccacaa

SEQ ID NO: 4847777 - DNA, 25 bp, Homo sapien
tgcacattacccgtgaatgcatctc

SEQ ID NO: 4847778 - DNA, 25 bp, Homo sapien
acattacccgtgaatgcatctcctc

SEQ ID NO: 4847779 - DNA, 25 bp, Homo sapien
ttacccgtgaatgcatctcctcctg

SEQ ID NO: 4847780 - DNA, 25 bp, Homo sapien
ttgtgcacattacccgtgaatgcat

SEQ ID NO: 4847781 - DNA, 25 bp, Homo sapien
cagtctgggcctgcgcacagcggat

SEQ ID NO: 4847782 - DNA, 25 bp, Homo sapien
ttggtacagccgctcaaatcaatgc

SEQ ID NO: 4847783 - DNA, 25 bp, Homo sapien
cggatggcggtacgcaccagcacct

SEQ ID NO: 4847784 - DNA, 25 bp, Homo sapien
cagccgctcaaatcaatgccagtct

SEQ ID NO: 4847785 - DNA, 25 bp, Homo sapien
caggtactgaaactcggcaaagcgc

SEQ ID NO: 4847786 - DNA, 25 bp, Homo sapien
atccggcaggtacaccaccactgtc

SEQ ID NO: 4847787 - DNA, 25 bp, Homo sapien
ccactcctccaaagtaggcatgatg

SEQ ID NO: 4847788 - DNA, 25 bp, Homo sapien
caaagtaggcatgatggtccagaca

SEQ ID NO: 4847789 - DNA, 25 bp, Homo sapien
tctgcgttccgtctagaagtgtctg

SEQ ID NO: 4847790 - DNA, 25 bp, Homo sapien
tcaggtgcctgttcagtaggctccg

SEQ ID NO: 4847791 - DNA, 25 bp, Homo sapien
catggagggacaggtttacacagcc

SEQ ID NO: 4847792 - DNA, 25 bp, Homo sapien
tccgtttcctgctgtgtggtggcct

SEQ ID NO: 4847793 - DNA, 25 bp, Homo sapien
aactctatagccaaaatccctctgg

SEQ ID NO: 4847794 - DNA, 25 bp, Homo sapien
catctccagaaacagctcggccagc

SEQ ID NO: 4847795 - DNA, 25 bp, Homo sapien
tatagccaaaatccctctggagcat

SEQ ID NO: 4847796 - DNA, 25 bp, Homo sapien
tctatagccaaaatccctctggagc

SEQ ID NO: 4847797 - DNA, 25 bp, Homo sapien
ttcaggtggggacacgaccttttca

SEQ ID NO: 4847798 - DNA, 25 bp, Homo sapien
ggcctctgactctgtagccgggccc

SEQ ID NO: 4847799 - DNA, 25 bp, Homo sapien
tgtagccgggccctcattctgtgcc

SEQ ID NO: 4847800 - DNA, 25 bp, Homo sapien
caggtggggacacgaccttttcagg

SEQ ID NO: 4847801 - DNA, 25 bp, Homo sapien
gagtggtttgggcaaaagcccatcc

SEQ ID NO: 4847802 - DNA, 25 bp, Homo sapien
cctctccatcatccctcagaagcaa

SEQ ID NO: 4847803 - DNA, 25 bp, Homo sapien
tggtttgggcaaaagcccatcctcc

SEQ ID NO: 4847804 - DNA, 25 bp, Homo sapien
catcatccctcagaagcaacagttc

SEQ ID NO: 4847805 - DNA, 25 bp, Homo sapien
tgaggcaacggaccggacctccgaa

SEQ ID NO: 4847806 - DNA, 25 bp, Homo sapien
ttgaggcaacggaccggacctccga

SEQ ID NO: 4847807 - DNA, 25 bp, Homo sapien
ctgactggtttgaggcaacggaccg

SEQ ID NO: 4847808 - DNA, 25 bp, Homo sapien
tctctgactggtttgaggcaacgga

SEQ ID NO: 4847809 - DNA, 25 bp, Homo sapien
cactgaaatgttctcctggagccta

SEQ ID NO: 4847810 - DNA, 25 bp, Homo sapien
cacactgtgtgttgggtccatcaag

SEQ ID NO: 4847811 - DNA, 25 bp, Homo sapien
gaacgtgcccttccatgagccaagg

SEQ ID NO: 4847812 - DNA, 25 bp, Homo sapien
tctctcaggagaggatcaaataccc

SEQ ID NO: 4847813 - DNA, 25 bp, Homo sapien
cctgtccagaatccagtggcttggg

SEQ ID NO: 4847814 - DNA, 25 bp, Homo sapien
tagttccctcagtggctctatcgcc

SEQ ID NO: 4847815 - DNA, 25 bp, Homo sapien
agcaggatttgcaaatagttccctc

SEQ ID NO: 4847816 - DNA, 25 bp, Homo sapien
tctatcgcccaggattcagcctgtc

SEQ ID NO: 4847817 - DNA, 25 bp, Homo sapien
tgctctgcactgagccggatcccaa

SEQ ID NO: 4847818 - DNA, 25 bp, Homo sapien
actgagccggatcccaagggtaagg

SEQ ID NO: 4847819 - DNA, 25 bp, Homo sapien
taaggaggatcctctctaagtctcg

SEQ ID NO: 4847820 - DNA, 25 bp, Homo sapien
ggtgcaagtagccacaccagttggc

SEQ ID NO: 4847821 - DNA, 25 bp, Homo sapien
tgtactgaaggctccggtactggca

SEQ ID NO: 4847822 - DNA, 25 bp, Homo sapien
ggctccggtactggcagatgttctg

SEQ ID NO: 4847823 - DNA, 25 bp, Homo sapien
tactggcagatgttctgggtcacca

SEQ ID NO: 4847824 - DNA, 25 bp, Homo sapien
gcggctgtactgaaggctccggtac

SEQ ID NO: 4847825 - DNA, 25 bp, Homo sapien
tgtgtggatcttgttctctaggtag

SEQ ID NO: 4847826 - DNA, 25 bp, Homo sapien
cagctccagtgtgtggatcttgttc

SEQ ID NO: 4847827 - DNA, 25 bp, Homo sapien
acctggcttcgtgcttttcccagga

SEQ ID NO: 4847828 - DNA, 25 bp, Homo sapien
aggctccccacgttaatcaggctgc

SEQ ID NO: 4847829 - DNA, 25 bp, Homo sapien
gctggctcttctgtcgctccgccgt

SEQ ID NO: 4847830 - DNA, 25 bp, Homo sapien
tcagtggctgagaaacggttatggc

SEQ ID NO: 4847831 - DNA, 25 bp, Homo sapien
cgtcttattggttacttcagtggct

SEQ ID NO: 4847832 - DNA, 25 bp, Homo sapien
ctgccgccagcgtcttattggttac

SEQ ID NO: 4847833 - DNA, 25 bp, Homo sapien
ctggcaagcgatggaaagacgaagc

SEQ ID NO: 4847834 - DNA, 25 bp, Homo sapien
aagacgaagccggtgcctgctggcc

SEQ ID NO: 4847835 - DNA, 25 bp, Homo sapien
cgacacgggcaagcgcccttctggg

SEQ ID NO: 4847836 - DNA, 25 bp, Homo sapien
tggtcactcccgacacgggcaagcg

SEQ ID NO: 4847837 - DNA, 25 bp, Homo sapien
tgtacccagaatcgggcctggcaag

SEQ ID NO: 4847838 - DNA, 25 bp, Homo sapien
cctggcaaggtgatctgaggactgc

SEQ ID NO: 4847839 - DNA, 25 bp, Homo sapien
caaggtgatctgaggactgcggact

SEQ ID NO: 4847840 - DNA, 25 bp, Homo sapien
acagatgatgtacccagaatcgggc

SEQ ID NO: 4847841 - DNA, 25 bp, Homo sapien
cagttgctaggtgccggctcctcct

SEQ ID NO: 4847842 - DNA, 25 bp, Homo sapien
tcagttgctaggtgccggctcctcc

SEQ ID NO: 4847843 - DNA, 25 bp, Homo sapien
tgccgtcccctagaggctgagcatg

SEQ ID NO: 4847844 - DNA, 25 bp, Homo sapien
agcacaagactaaaagggccccagg

SEQ ID NO: 4847845 - DNA, 25 bp, Homo sapien
gcaagggctccaactttgccgggcg

SEQ ID NO: 4847846 - DNA, 25 bp, Homo sapien
tcacaggatggcagttccgtgcgag

SEQ ID NO: 4847847 - DNA, 25 bp, Homo sapien
gctggtttcttctggcaagaccggg

SEQ ID NO: 4847848 - DNA, 25 bp, Homo sapien
gactccattcccgtgatggccaagg

SEQ ID NO: 4847849 - DNA, 25 bp, Homo sapien
gtgtccggaacctagcagagcctgt

SEQ ID NO: 4847850 - DNA, 25 bp, Homo sapien
tgactggaacgcagtgttctactgg

SEQ ID NO: 4847851 - DNA, 25 bp, Homo sapien
aagtcaaactgaaaccacggattat

SEQ ID NO: 4847852 - DNA, 25 bp, Homo sapien
agaggcaagaattatgggtaacagg

SEQ ID NO: 4847853 - DNA, 25 bp, Homo sapien
ggccagagccaataccacattctga

SEQ ID NO: 4847854 - DNA, 25 bp, Homo sapien
ccacggattatggaaagaggcaaga

SEQ ID NO: 4847855 - DNA, 25 bp, Homo sapien
gcgttgtgggcatcaaatctacctc

SEQ ID NO: 4847856 - DNA, 25 bp, Homo sapien
aaccctgtgcgggagagctggtcct

SEQ ID NO: 4847857 - DNA, 25 bp, Homo sapien
gtacctcgggaacgcaagctgtcag

SEQ ID NO: 4847858 - DNA, 25 bp, Homo sapien
tcccagcaagacaaagggcaccctt

SEQ ID NO: 4847859 - DNA, 25 bp, Homo sapien
aattaggtgggtgtgatggcaggca

SEQ ID NO: 4847860 - DNA, 25 bp, Homo sapien
tgtaatcccagctacttgagaggct

SEQ ID NO: 4847861 - DNA, 25 bp, Homo sapien
gaggcaggagaatcacttgaagcca

SEQ ID NO: 4847862 - DNA, 25 bp, Homo sapien
ggaggcggaggatgcagtgagccga

SEQ ID NO: 4847863 - DNA, 25 bp, Homo sapien
catcagtgttgtaggcgggcttgct

SEQ ID NO: 4847864 - DNA, 25 bp, Homo sapien
aaaccagagttgaatgggtaactgc

SEQ ID NO: 4847865 - DNA, 25 bp, Homo sapien
agaagcctaacactactgtcctcag

SEQ ID NO: 4847866 - DNA, 25 bp, Homo sapien
cagccacatcagtctcatgtacggg

SEQ ID NO: 4847867 - DNA, 25 bp, Homo sapien
tgtgtctaagcgcttggccagagcc

SEQ ID NO: 4847868 - DNA, 25 bp, Homo sapien
gactggttgaatccggaagtgaccc

SEQ ID NO: 4847869 - DNA, 25 bp, Homo sapien
gcgggcttacgtcacttcctggaga

SEQ ID NO: 4847870 - DNA, 25 bp, Homo sapien
gaagtgaccctagagaaacgagttg

SEQ ID NO: 4847871 - DNA, 25 bp, Homo sapien
ggactctgagtctgccggcctcttt

SEQ ID NO: 4847872 - DNA, 25 bp, Homo sapien
tccaaggcgccattggcttcctggg

SEQ ID NO: 4847873 - DNA, 25 bp, Homo sapien
gactgcatttgcatctcggattgtg

SEQ ID NO: 4847874 - DNA, 25 bp, Homo sapien
catgttctgtgactgcatttgcatc

SEQ ID NO: 4847875 - DNA, 25 bp, Homo sapien
ttcagctgaagggtaaaatctttct

SEQ ID NO: 4847876 - DNA, 25 bp, Homo sapien
tgccaaaaggttgtgctatccagat

SEQ ID NO: 4847877 - DNA, 25 bp, Homo sapien
ccttctggtatatgcatgtcactgc

SEQ ID NO: 4847878 - DNA, 25 bp, Homo sapien
gcactctaacttatgtgaactgaga

SEQ ID NO: 4847879 - DNA, 25 bp, Homo sapien
gtggtcttccatccgctctgaaatc

SEQ ID NO: 4847880 - DNA, 25 bp, Homo sapien
ggtaaggagcgcaccaaagcgcaga

SEQ ID NO: 4847881 - DNA, 25 bp, Homo sapien
tgtgtttaagactcttgagctgaac

SEQ ID NO: 4847882 - DNA, 25 bp, Homo sapien
tataccccctcgaagactcgagagg

SEQ ID NO: 4847883 - DNA, 25 bp, Homo sapien
cctcgatcgagaaggctaggttggc

SEQ ID NO: 4847884 - DNA, 25 bp, Homo sapien
ttggcgacgccacggtagaggcttc

SEQ ID NO: 4847885 - DNA, 25 bp, Homo sapien
cgaccggagggaggtaggtgcgagc

SEQ ID NO: 4847886 - DNA, 25 bp, Homo sapien
tcagatggctacaggtaagggcggc

SEQ ID NO: 4847887 - DNA, 25 bp, Homo sapien
tatgaccggcaaactcgccgagaag

SEQ ID NO: 4847888 - DNA, 25 bp, Homo sapien
cagctcgggagtgctatgaccggca

SEQ ID NO: 4847889 - DNA, 25 bp, Homo sapien
cggatcgcctctcggatgccgcttg

SEQ ID NO: 4847890 - DNA, 25 bp, Homo sapien
cctggaagctgcgttaggagcgagc

SEQ ID NO: 4847891 - DNA, 25 bp, Homo sapien
atgttccattgtgaggagcttccat

SEQ ID NO: 4847892 - DNA, 25 bp, Homo sapien
tgcggcccgcttcctgctttctaat

SEQ ID NO: 4847893 - DNA, 25 bp, Homo sapien
tttctaatgttccattgtgaggagc

SEQ ID NO: 4847894 - DNA, 25 bp, Homo sapien
ggcccgcttcctgctttctaatgtt

SEQ ID NO: 4847895 - DNA, 25 bp, Homo sapien
tgtgcggttcctttaaaggctgcgg

SEQ ID NO: 4847896 - DNA, 25 bp, Homo sapien
cctgtgcggttcctttaaaggctgc

SEQ ID NO: 4847897 - DNA, 25 bp, Homo sapien
gcctgtgcggttcctttaaaggctg

SEQ ID NO: 4847898 - DNA, 25 bp, Homo sapien
agcctgtgcggttcctttaaaggct

SEQ ID NO: 4847899 - DNA, 25 bp, Homo sapien
caacttttagtcaggcctgcaaggg

SEQ ID NO: 4847900 - DNA, 25 bp, Homo sapien
gccagactgcgatgagaaaaccggg

SEQ ID NO: 4847901 - DNA, 25 bp, Homo sapien
tcacagtgagtatgcagcgctgggc

SEQ ID NO: 4847902 - DNA, 25 bp, Homo sapien
tggtgtgttcaagacacccctgaag

SEQ ID NO: 4847903 - DNA, 25 bp, Homo sapien
tgaacactcattagacctggacgtc

SEQ ID NO: 4847904 - DNA, 25 bp, Homo sapien
tttatcttcacacgacttaccggca

SEQ ID NO: 4847905 - DNA, 25 bp, Homo sapien
tcaaagggcacccagtacgtgaggc

SEQ ID NO: 4847906 - DNA, 25 bp, Homo sapien
gaggccatagctggaccaaaacaca

SEQ ID NO: 4847907 - DNA, 25 bp, Homo sapien
gaagctaaaagtggccagtctgagt

SEQ ID NO: 4847908 - DNA, 25 bp, Homo sapien
aataccctgtggtggccgccggaag

SEQ ID NO: 4847909 - DNA, 25 bp, Homo sapien
gggcttctactccaatggaacaaaa

SEQ ID NO: 4847910 - DNA, 25 bp, Homo sapien
ctgagttgctaaattggaccttggc

SEQ ID NO: 4847911 - DNA, 25 bp, Homo sapien
caggtccttgcacgatgttgaaaca

SEQ ID NO: 4847912 - DNA, 25 bp, Homo sapien
cagaactgaccagaatgagaggaca

SEQ ID NO: 4847913 - DNA, 25 bp, Homo sapien
tctttggagacgacgaacctggagg

SEQ ID NO: 4847914 - DNA, 25 bp, Homo sapien
gttctcagaagtccggcagaggagt

SEQ ID NO: 4847915 - DNA, 25 bp, Homo sapien
gaagagtaccccgaaactttgcatg

SEQ ID NO: 4847916 - DNA, 25 bp, Homo sapien
tactgggtcggctgtgccatctcag

SEQ ID NO: 4847917 - DNA, 25 bp, Homo sapien
cctgccagtctatcctcatgggttg

SEQ ID NO: 4847918 - DNA, 25 bp, Homo sapien
tcatgggttgctaattactgggtcg

SEQ ID NO: 4847919 - DNA, 25 bp, Homo sapien
gaatacacagattgctgggtagcgc

SEQ ID NO: 4847920 - DNA, 25 bp, Homo sapien
acagattgctgggtagcgctttcca

SEQ ID NO: 4847921 - DNA, 25 bp, Homo sapien
gccgaatacacagattgctgggtag

SEQ ID NO: 4847922 - DNA, 25 bp, Homo sapien
tgggtagcgctttccagtcctgtgc

SEQ ID NO: 4847923 - DNA, 25 bp, Homo sapien
taataggttggagcccaccccgctg

SEQ ID NO: 4847924 - DNA, 25 bp, Homo sapien
gctggcagcgccactggtaataggt

SEQ ID NO: 4847925 - DNA, 25 bp, Homo sapien
cactggtaataggttggagcccacc

SEQ ID NO: 4847926 - DNA, 25 bp, Homo sapien
cctctttcccattagggctggcagc

SEQ ID NO: 4847927 - DNA, 25 bp, Homo sapien
acatgagtctttttccaccggcaga

SEQ ID NO: 4847928 - DNA, 25 bp, Homo sapien
cccaattttcggcagatggcctgga

SEQ ID NO: 4847929 - DNA, 25 bp, Homo sapien
ggctctgaccggaagaccacagtta

SEQ ID NO: 4847930 - DNA, 25 bp, Homo sapien
ggcagcaggctgactcatacatgag

SEQ ID NO: 4847931 - DNA, 25 bp, Homo sapien
ttaggggcacgaggaacctgcatgc

SEQ ID NO: 4847932 - DNA, 25 bp, Homo sapien
cacgaggaacctgcatgcgtgggct

SEQ ID NO: 4847933 - DNA, 25 bp, Homo sapien
aggaacctgcatgcgtgggctcctc

SEQ ID NO: 4847934 - DNA, 25 bp, Homo sapien
aacctgcatgcgtgggctcctctgc

SEQ ID NO: 4847935 - DNA, 25 bp, Homo sapien
ccccgtaggaggctaagcgtgacct

SEQ ID NO: 4847936 - DNA, 25 bp, Homo sapien
tgtgcctctctaaatgttcctcttc

SEQ ID NO: 4847937 - DNA, 25 bp, Homo sapien
gagacagtgcatcgtctgttctgca

SEQ ID NO: 4847938 - DNA, 25 bp, Homo sapien
cactctccccatccaaggatgtagg

SEQ ID NO: 4847939 - DNA, 25 bp, Homo sapien
cagaaggacaaatggctgtagtccc

SEQ ID NO: 4847940 - DNA, 25 bp, Homo sapien
tctcaccttgctctcaggcagagga

SEQ ID NO: 4847941 - DNA, 25 bp, Homo sapien
caggcagagtggtggccacaacaca

SEQ ID NO: 4847942 - DNA, 25 bp, Homo sapien
tggccacaacacagtagggtgaggg

SEQ ID NO: 4847943 - DNA, 25 bp, Homo sapien
ccccagctctgatcacagtaggctc

SEQ ID NO: 4847944 - DNA, 25 bp, Homo sapien
ctcccccagctctgatcacagtagg

SEQ ID NO: 4847945 - DNA, 25 bp, Homo sapien
gctgctcacactggctcccccagct

SEQ ID NO: 4847946 - DNA, 25 bp, Homo sapien
ctgctgctcacactggctcccccag

SEQ ID NO: 4847947 - DNA, 25 bp, Homo sapien
tgcgtgtggatgtgccccagttgct

SEQ ID NO: 4847948 - DNA, 25 bp, Homo sapien
aggctgggacgaacctctcctccag

SEQ ID NO: 4847949 - DNA, 25 bp, Homo sapien
cattgcataagccagggcccaagtc

SEQ ID NO: 4847950 - DNA, 25 bp, Homo sapien
gactaagagtctgagcattgcataa

SEQ ID NO: 4847951 - DNA, 25 bp, Homo sapien
tggagggctcctctcaatggtccat

SEQ ID NO: 4847952 - DNA, 25 bp, Homo sapien
gggctcctctcaatggtccatccaa

SEQ ID NO: 4847953 - DNA, 25 bp, Homo sapien
caggcttggagccatcatcataccc

SEQ ID NO: 4847954 - DNA, 25 bp, Homo sapien
atcatcataccctagcagcctgagc

SEQ ID NO: 4847955 - DNA, 25 bp, Homo sapien
gaggaatctgattaacctgctccat

SEQ ID NO: 4847956 - DNA, 25 bp, Homo sapien
ggccaaacaggcaagtgaggaatct

SEQ ID NO: 4847957 - DNA, 25 bp, Homo sapien
aggaatctgattaacctgctccatt

SEQ ID NO: 4847958 - DNA, 25 bp, Homo sapien
aacaggcaagtgaggaatctgatta

SEQ ID NO: 4847959 - DNA, 25 bp, Homo sapien
gtcaaagttcatgcggcccccagtt

SEQ ID NO: 4847960 - DNA, 25 bp, Homo sapien
gtttcgatgctggaaggtgggttct

SEQ ID NO: 4847961 - DNA, 25 bp, Homo sapien
tcatgcggcccccagtttcgatgct

SEQ ID NO: 4847962 - DNA, 25 bp, Homo sapien
gcggcccccagtttcgatgctggaa

SEQ ID NO: 4847963 - DNA, 25 bp, Homo sapien
cccagggactttcacaactacgatg

SEQ ID NO: 4847964 - DNA, 25 bp, Homo sapien
tacacccgcagtccagtaggtaagg

SEQ ID NO: 4847965 - DNA, 25 bp, Homo sapien
caactacgatgtaagatactggaag

SEQ ID NO: 4847966 - DNA, 25 bp, Homo sapien
aaaaatgagcagttatcccagggac

SEQ ID NO: 4847967 - DNA, 25 bp, Homo sapien
gtctcaaactcccacatcctttcat

SEQ ID NO: 4847968 - DNA, 25 bp, Homo sapien
gattgaaaccctgtgcaaaggttgg

SEQ ID NO: 4847969 - DNA, 25 bp, Homo sapien
tttctgagtgaggtcagattgaaac

SEQ ID NO: 4847970 - DNA, 25 bp, Homo sapien
atgcccaggatagggcgggattctt

SEQ ID NO: 4847971 - DNA, 25 bp, Homo sapien
ggagagcgtgttcagagagagggac

SEQ ID NO: 4847972 - DNA, 25 bp, Homo sapien
gcaggagcttgggattgcaatgctt

SEQ ID NO: 4847973 - DNA, 25 bp, Homo sapien
tgtgtccccgttggaggcattgcag

SEQ ID NO: 4847974 - DNA, 25 bp, Homo sapien
tttagttgtgtccccgttggaggca

SEQ ID NO: 4847975 - DNA, 25 bp, Homo sapien
caggagcttgggattgcaatgcttt

SEQ ID NO: 4847976 - DNA, 25 bp, Homo sapien
ttccccgctgaatctattatgatac

SEQ ID NO: 4847977 - DNA, 25 bp, Homo sapien
agtagccaacttccccgctgaatct

SEQ ID NO: 4847978 - DNA, 25 bp, Homo sapien
tcagtagccaacttccccgctgaat

SEQ ID NO: 4847979 - DNA, 25 bp, Homo sapien
ccaacttccccgctgaatctattat

SEQ ID NO: 4847980 - DNA, 25 bp, Homo sapien
cagcatcatccagggaacctgcgac

SEQ ID NO: 4847981 - DNA, 25 bp, Homo sapien
aaattagaactgaggcaatgaacac

SEQ ID NO: 4847982 - DNA, 25 bp, Homo sapien
catccagggaacctgcgacccacag

SEQ ID NO: 4847983 - DNA, 25 bp, Homo sapien
aaaaattagaactgaggcaatgaac

SEQ ID NO: 4847984 - DNA, 25 bp, Homo sapien
tcatgatgacgactgctgtggacct

SEQ ID NO: 4847985 - DNA, 25 bp, Homo sapien
tgtgtaagcattccaacgacctcgg

SEQ ID NO: 4847986 - DNA, 25 bp, Homo sapien
tatcttctgggtcgagctgggcagt

SEQ ID NO: 4847987 - DNA, 25 bp, Homo sapien
tgtcagaactggcttgggcctccga

SEQ ID NO: 4847988 - DNA, 25 bp, Homo sapien
ttgaagacgcttactaagtagtagc

SEQ ID NO: 4847989 - DNA, 25 bp, Homo sapien
tcgtattgtggacttagaatgccca

SEQ ID NO: 4847990 - DNA, 25 bp, Homo sapien
gccagagttcatcctacgaggactg

SEQ ID NO: 4847991 - DNA, 25 bp, Homo sapien
cacttgctagcatattgaagacgct

SEQ ID NO: 4847992 - DNA, 25 bp, Homo sapien
tgccagtagcaacaataaatgcaga

SEQ ID NO: 4847993 - DNA, 25 bp, Homo sapien
gcttaaaactaatgattgccatata

SEQ ID NO: 4847994 - DNA, 25 bp, Homo sapien
tctcttgggagtgtgtaattagtac

SEQ ID NO: 4847995 - DNA, 25 bp, Homo sapien
aatgtgtattctttagcgtgctgtg

SEQ ID NO: 4847996 - DNA, 25 bp, Homo sapien
gtaattctacctctcggagacttgc

SEQ ID NO: 4847997 - DNA, 25 bp, Homo sapien
ttggaggcctgaccgagaagaaacc

SEQ ID NO: 4847998 - DNA, 25 bp, Homo sapien
tcggagacttgcagtctcttttctc

SEQ ID NO: 4847999 - DNA, 25 bp, Homo sapien
ctctgcaacggcatgggaattggag

SEQ ID NO: 4848000 - DNA, 25 bp, Homo sapien
agtaacctggacttgaagagagacc

SEQ ID NO: 4848001 - DNA, 25 bp, Homo sapien
gagagtaacctggacttgaagagag

SEQ ID NO: 4848002 - DNA, 25 bp, Homo sapien
agagagtaacctggacttgaagaga

SEQ ID NO: 4848003 - DNA, 25 bp, Homo sapien
gagtaacctggacttgaagagagac

SEQ ID NO: 4848004 - DNA, 25 bp, Homo sapien
gaatctgttagatccggaacacccc

SEQ ID NO: 4848005 - DNA, 25 bp, Homo sapien
taaggaggatggtattgtcagcccc

SEQ ID NO: 4848006 - DNA, 25 bp, Homo sapien
taaaatgcaagtactcctgagaagg

SEQ ID NO: 4848007 - DNA, 25 bp, Homo sapien
tattgtgctgtatgaagcagcccca

SEQ ID NO: 4848008 - DNA, 25 bp, Homo sapien
gtaattagtacagttgggtggtaga

SEQ ID NO: 4848009 - DNA, 25 bp, Homo sapien
tgggtggtagatagaagtaattatc

SEQ ID NO: 4848010 - DNA, 25 bp, Homo sapien
ataggttggtaattagtacagttgg

SEQ ID NO: 4848011 - DNA, 25 bp, Homo sapien
agttgggtggtagatagaagtaatt

SEQ ID NO: 4848012 - DNA, 25 bp, Homo sapien
cccctccatacgtgaacaccaccca

SEQ ID NO: 4848013 - DNA, 25 bp, Homo sapien
gtgaacaccacccacgggcccctgc

SEQ ID NO: 4848014 - DNA, 25 bp, Homo sapien
catacgtgaacaccacccacgggcc

SEQ ID NO: 4848015 - DNA, 25 bp, Homo sapien
gggcccctgcgcacccctcccggca

SEQ ID NO: 4848016 - DNA, 25 bp, Homo sapien
cctcttccacactgtaaatgtgaga

SEQ ID NO: 4848017 - DNA, 25 bp, Homo sapien
taagctcaggacaagcagtagagac

SEQ ID NO: 4848018 - DNA, 25 bp, Homo sapien
gacaggaagggaaccgtgatggcac

SEQ ID NO: 4848019 - DNA, 25 bp, Homo sapien
gagggcttctgcctcgcgggtccca

SEQ ID NO: 4848020 - DNA, 25 bp, Homo sapien
ggtagatgggcaaccaactccaggg

SEQ ID NO: 4848021 - DNA, 25 bp, Homo sapien
caccatggctgctgagattaaagag

SEQ ID NO: 4848022 - DNA, 25 bp, Homo sapien
ggaactgaggtcagcaggtcctgtt

SEQ ID NO: 4848023 - DNA, 25 bp, Homo sapien
aagagggggaactgaggtcagcagg

SEQ ID NO: 4848024 - DNA, 25 bp, Homo sapien
ccatggctgctgagattaaagaggg

SEQ ID NO: 4848025 - DNA, 25 bp, Homo sapien
gagcagctgcgccactgcctttgga

SEQ ID NO: 4848026 - DNA, 25 bp, Homo sapien
caccgccataagaaagccactgggt

SEQ ID NO: 4848027 - DNA, 25 bp, Homo sapien
ttccaggcacaagcatccagtgagg

SEQ ID NO: 4848028 - DNA, 25 bp, Homo sapien
ccactgggtacgcacaggagcagct

SEQ ID NO: 4848029 - DNA, 25 bp, Homo sapien
tgtcgtcccactgccacgggagcag

SEQ ID NO: 4848030 - DNA, 25 bp, Homo sapien
tgcagagagaagttgccgggccccc

SEQ ID NO: 4848031 - DNA, 25 bp, Homo sapien
cttgctcctagcttcccctcatttg

SEQ ID NO: 4848032 - DNA, 25 bp, Homo sapien
tgctgagctgccctgtcgtcccact

SEQ ID NO: 4848033 - DNA, 25 bp, Homo sapien
aagcttctcgatgccagactgaggt

SEQ ID NO: 4848034 - DNA, 25 bp, Homo sapien
tcattgacaagcttctcgatgccag

SEQ ID NO: 4848035 - DNA, 25 bp, Homo sapien
ttgacaagcttctcgatgccagact

SEQ ID NO: 4848036 - DNA, 25 bp, Homo sapien
gacaagcttctcgatgccagactga

SEQ ID NO: 4848037 - DNA, 25 bp, Homo sapien
ggaatgagggttctctgagctctcc

SEQ ID NO: 4848038 - DNA, 25 bp, Homo sapien
tgctccatagcacccagggtcttat

SEQ ID NO: 4848039 - DNA, 25 bp, Homo sapien
agcacccagggtcttattccagcag

SEQ ID NO: 4848040 - DNA, 25 bp, Homo sapien
ccagcagttgcacttccccaaataa

SEQ ID NO: 4848041 - DNA, 25 bp, Homo sapien
gtgtttgtgacttcagcttctcaat

SEQ ID NO: 4848042 - DNA, 25 bp, Homo sapien
tgtgtttgtgacttcagcttctcaa

SEQ ID NO: 4848043 - DNA, 25 bp, Homo sapien
gcgcagggcgacttgtgtttgtgac

SEQ ID NO: 4848044 - DNA, 25 bp, Homo sapien
agcgcagggcgacttgtgtttgtga

SEQ ID NO: 4848045 - DNA, 25 bp, Homo sapien
tctcagttatgccttgtttagcacc

SEQ ID NO: 4848046 - DNA, 25 bp, Homo sapien
tcaggttgtggttctcagttatgcc

SEQ ID NO: 4848047 - DNA, 25 bp, Homo sapien
atcacgagggtctgtcaggttgtgg

SEQ ID NO: 4848048 - DNA, 25 bp, Homo sapien
gtctgtcaggttgtggttctcagtt

SEQ ID NO: 4848049 - DNA, 25 bp, Homo sapien
agcaccgtcaagtacaccccaggtt

SEQ ID NO: 4848050 - DNA, 25 bp, Homo sapien
ggattggccatgcagcaggtggttg

SEQ ID NO: 4848051 - DNA, 25 bp, Homo sapien
gcaggtggttgagcaccgtcaagta

SEQ ID NO: 4848052 - DNA, 25 bp, Homo sapien
ctcccaggcctggtttctcttggct

SEQ ID NO: 4848053 - DNA, 25 bp, Homo sapien
tgctcggagtaaatgatcagggcct

SEQ ID NO: 4848054 - DNA, 25 bp, Homo sapien
caattgcagtgcatccggctgtctc

SEQ ID NO: 4848055 - DNA, 25 bp, Homo sapien
gaaggctcctaacaatacgaaaatg

SEQ ID NO: 4848056 - DNA, 25 bp, Homo sapien
gatggtgccctattctctccgggtc

SEQ ID NO: 4848057 - DNA, 25 bp, Homo sapien
agccagtagacacgccaccgttgta

SEQ ID NO: 4848058 - DNA, 25 bp, Homo sapien
ttgtacgcatggtacgtgttagcag

SEQ ID NO: 4848059 - DNA, 25 bp, Homo sapien
gctggcagagccagtagacacgcca

SEQ ID NO: 4848060 - DNA, 25 bp, Homo sapien
gacacgccaccgttgtacgcatggt

SEQ ID NO: 4848061 - DNA, 25 bp, Homo sapien
ctgcattgccttcttccctgcctcc

SEQ ID NO: 4848062 - DNA, 25 bp, Homo sapien
acactcagcttgcaggagcacagca

SEQ ID NO: 4848063 - DNA, 25 bp, Homo sapien
gggacacaggttgagtctctaaaga

SEQ ID NO: 4848064 - DNA, 25 bp, Homo sapien
aacactcagcttgcaggagcacagc

SEQ ID NO: 4848065 - DNA, 25 bp, Homo sapien
ccggttcaggaagggtctcagcatc

SEQ ID NO: 4848066 - DNA, 25 bp, Homo sapien
gaaacaaaacacgtacaccaacagc

SEQ ID NO: 4848067 - DNA, 25 bp, Homo sapien
acaaaacacgtacaccaacagctgc

SEQ ID NO: 4848068 - DNA, 25 bp, Homo sapien
cagtgaagggatggagatccggttc

SEQ ID NO: 4848069 - DNA, 25 bp, Homo sapien
gaccttgggcagagtagcttcacta

SEQ ID NO: 4848070 - DNA, 25 bp, Homo sapien
tctcagattggaggacacgtgtccg

SEQ ID NO: 4848071 - DNA, 25 bp, Homo sapien
agaaatagaccctgaacgcctgtgg

SEQ ID NO: 4848072 - DNA, 25 bp, Homo sapien
gcagtcatagcagggaaaggccagt

SEQ ID NO: 4848073 - DNA, 25 bp, Homo sapien
tagcaggtgtacagataagggtcac

SEQ ID NO: 4848074 - DNA, 25 bp, Homo sapien
tcacagtgaaaagctaacctccctc

SEQ ID NO: 4848075 - DNA, 25 bp, Homo sapien
cggtaaatacgttctttgagatggt

SEQ ID NO: 4848076 - DNA, 25 bp, Homo sapien
gcatgcgcgcatgcgtttgtattct

SEQ ID NO: 4848077 - DNA, 25 bp, Homo sapien
ccaaacggtccttaagatgatgcta

SEQ ID NO: 4848078 - DNA, 25 bp, Homo sapien
caccgtgcctagtcttgaatgcaaa

SEQ ID NO: 4848079 - DNA, 25 bp, Homo sapien
gctatgttcaaacgctggcctggca

SEQ ID NO: 4848080 - DNA, 25 bp, Homo sapien
caggtttgtccaggtcgtctcgtaa

SEQ ID NO: 4848081 - DNA, 25 bp, Homo sapien
actgttactgggtctcatgatggtg

SEQ ID NO: 4848082 - DNA, 25 bp, Homo sapien
cactgttactgggtctcatgatggt

SEQ ID NO: 4848083 - DNA, 25 bp, Homo sapien
gactggattagctgcggagccctgg

SEQ ID NO: 4848084 - DNA, 25 bp, Homo sapien
ggattagctgcggagccctggaagc

SEQ ID NO: 4848085 - DNA, 25 bp, Homo sapien
ctggattagctgcggagccctggaa

SEQ ID NO: 4848086 - DNA, 25 bp, Homo sapien
attagctgcggagccctggaagctg

SEQ ID NO: 4848087 - DNA, 25 bp, Homo sapien
ccagaagggatcagctaaactccgt

SEQ ID NO: 4848088 - DNA, 25 bp, Homo sapien
tggaaaggaccccagtggaaatctg

SEQ ID NO: 4848089 - DNA, 25 bp, Homo sapien
gaggtactcgacacctggcctggaa

SEQ ID NO: 4848090 - DNA, 25 bp, Homo sapien
gatacagcccgcacaacaaaggttc

SEQ ID NO: 4848091 - DNA, 25 bp, Homo sapien
tttaattgaagtttagttggctcat

SEQ ID NO: 4848092 - DNA, 25 bp, Homo sapien
gtttaattgaagtttagttggctca

SEQ ID NO: 4848093 - DNA, 25 bp, Homo sapien
aacctctcataagaaactggtccca

SEQ ID NO: 4848094 - DNA, 25 bp, Homo sapien
ctctcataagaaactggtcccatga

SEQ ID NO: 4848095 - DNA, 25 bp, Homo sapien
catctggtcagcataggactcttgg

SEQ ID NO: 4848096 - DNA, 25 bp, Homo sapien
tggtcagcataggactcttgggctc

SEQ ID NO: 4848097 - DNA, 25 bp, Homo sapien
cagacatctggtcagcataggactc

SEQ ID NO: 4848098 - DNA, 25 bp, Homo sapien
tctggtcagcataggactcttgggc

SEQ ID NO: 4848099 - DNA, 25 bp, Homo sapien
cagaaaagctatcggctcacagtgg

SEQ ID NO: 4848100 - DNA, 25 bp, Homo sapien
ctagtgtaaaatctagactggccat

SEQ ID NO: 4848101 - DNA, 25 bp, Homo sapien
tggccagccgggagacatgtgaagc

SEQ ID NO: 4848102 - DNA, 25 bp, Homo sapien
tgaagcaggactgatctagtgtaaa

SEQ ID NO: 4848103 - DNA, 25 bp, Homo sapien
ttaagggctgggatccaaagtccag

SEQ ID NO: 4848104 - DNA, 25 bp, Homo sapien
tttaagggctgggatccaaagtcca

SEQ ID NO: 4848105 - DNA, 25 bp, Homo sapien
ccctgtcctgaagtagtgttctcga

SEQ ID NO: 4848106 - DNA, 25 bp, Homo sapien
cctgaagtagtgttctcgaccaggt

SEQ ID NO: 4848107 - DNA, 25 bp, Homo sapien
ttccctgtcctgaagtagtgttctc

SEQ ID NO: 4848108 - DNA, 25 bp, Homo sapien
tgtcctgaagtagtgttctcgacca

SEQ ID NO: 4848109 - DNA, 25 bp, Homo sapien
gcaaaggtgaacttaacagggccag

SEQ ID NO: 4848110 - DNA, 25 bp, Homo sapien
taagagggcccaaatcagccaagct

SEQ ID NO: 4848111 - DNA, 25 bp, Homo sapien
gccagcaagatccttacatggtgag

SEQ ID NO: 4848112 - DNA, 25 bp, Homo sapien
aaaggtgaacttaacagggccagca

SEQ ID NO: 4848113 - DNA, 25 bp, Homo sapien
gatatgctatcatgtcatcaaggag

SEQ ID NO: 4848114 - DNA, 25 bp, Homo sapien
gttaagctctcgctagtgccacacc

SEQ ID NO: 4848115 - DNA, 25 bp, Homo sapien
ccttctgggccaaaatacacctgac

SEQ ID NO: 4848116 - DNA, 25 bp, Homo sapien
cccgggattgtgctgcatgtactac

SEQ ID NO: 4848117 - DNA, 25 bp, Homo sapien
cactgcgcgtgcatattcttgttta

SEQ ID NO: 4848118 - DNA, 25 bp, Homo sapien
tgatgtcagggatgagaaagttata

SEQ ID NO: 4848119 - DNA, 25 bp, Homo sapien
cctttggtagttggttctgctcaca

SEQ ID NO: 4848120 - DNA, 25 bp, Homo sapien
agaagtggtccactgcgcgtgcata

SEQ ID NO: 4848121 - DNA, 25 bp, Homo sapien
catcgctctgtgttccctccaggct

SEQ ID NO: 4848122 - DNA, 25 bp, Homo sapien
atcgctctgtgttccctccaggctc

SEQ ID NO: 4848123 - DNA, 25 bp, Homo sapien
ctgaagaggtcttctgggggccatc

SEQ ID NO: 4848124 - DNA, 25 bp, Homo sapien
gctgtctgaagaggtcttctggggg

SEQ ID NO: 4848125 - DNA, 25 bp, Homo sapien
gatctggcacgtcccttcatctttg

SEQ ID NO: 4848126 - DNA, 25 bp, Homo sapien
ccagctgaggatctggcacgtccct

SEQ ID NO: 4848127 - DNA, 25 bp, Homo sapien
agctgaggatctggcacgtcccttc

SEQ ID NO: 4848128 - DNA, 25 bp, Homo sapien
gaggatctggcacgtcccttcatct

SEQ ID NO: 4848129 - DNA, 25 bp, Homo sapien
agagaccagctgaatgccagatgcc

SEQ ID NO: 4848130 - DNA, 25 bp, Homo sapien
gagaccagctgaatgccagatgcca

SEQ ID NO: 4848131 - DNA, 25 bp, Homo sapien
cagagaccagctgaatgccagatgc

SEQ ID NO: 4848132 - DNA, 25 bp, Homo sapien
tctctgcatgattcccacggcaggc

SEQ ID NO: 4848133 - DNA, 25 bp, Homo sapien
tctcccacggacaccctgttccctc

SEQ ID NO: 4848134 - DNA, 25 bp, Homo sapien
aaaatcataacttgagatctctgca

SEQ ID NO: 4848135 - DNA, 25 bp, Homo sapien
ctgcgccagagaaaatcataacttg

SEQ ID NO: 4848136 - DNA, 25 bp, Homo sapien
ccatcttctgtgtgccaaagagccc

SEQ ID NO: 4848137 - DNA, 25 bp, Homo sapien
cccatcttctgtgtgccaaagagcc

SEQ ID NO: 4848138 - DNA, 25 bp, Homo sapien
gcctccaccactcctccatcttgtg

SEQ ID NO: 4848139 - DNA, 25 bp, Homo sapien
ctgaaccgcctccaccactcctcca

SEQ ID NO: 4848140 - DNA, 25 bp, Homo sapien
ctccaccactcctccatcttgtgct

SEQ ID NO: 4848141 - DNA, 25 bp, Homo sapien
gaaccgcctccaccactcctccatc

SEQ ID NO: 4848142 - DNA, 25 bp, Homo sapien
ttttcgtggcacttgagagccttcc

SEQ ID NO: 4848143 - DNA, 25 bp, Homo sapien
tccatggcccttaatgagttgtggg

SEQ ID NO: 4848144 - DNA, 25 bp, Homo sapien
cgttacctgtctcccacctaggcct

SEQ ID NO: 4848145 - DNA, 25 bp, Homo sapien
gcgtttccatacaagccctctgctg

SEQ ID NO: 4848146 - DNA, 25 bp, Homo sapien
gaggagaaaaaaatcgcacccaaga

SEQ ID NO: 4848147 - DNA, 25 bp, Homo sapien
gcggcgaaggcgctgccgcgaagac

SEQ ID NO: 4848148 - DNA, 25 bp, Homo sapien
gcgaagacgcctggcgctgcagtcc

SEQ ID NO: 4848149 - DNA, 25 bp, Homo sapien
taccgctcgcgacctccttttttca

SEQ ID NO: 4848150 - DNA, 25 bp, Homo sapien
tagtgaaatgtcaggggtccctccg

SEQ ID NO: 4848151 - DNA, 25 bp, Homo sapien
gcttctagcgtgaggaacacatctc

SEQ ID NO: 4848152 - DNA, 25 bp, Homo sapien
gctgagcacgctcattttagtgaaa

SEQ ID NO: 4848153 - DNA, 25 bp, Homo sapien
gtccctccgcgcctgcaagttggga

SEQ ID NO: 4848154 - DNA, 25 bp, Homo sapien
tgagcctggtcttacccacggcgtt

SEQ ID NO: 4848155 - DNA, 25 bp, Homo sapien
tgcaagcgcgggcacagatgagcct

SEQ ID NO: 4848156 - DNA, 25 bp, Homo sapien
ctcctggcacacacgatattggtcg

SEQ ID NO: 4848157 - DNA, 25 bp, Homo sapien
cacaacgcacttgatggtctctacg

SEQ ID NO: 4848158 - DNA, 25 bp, Homo sapien
gacatcatctaccacgtctcgggag

SEQ ID NO: 4848159 - DNA, 25 bp, Homo sapien
ctcccataagcaaagcgacggtctt

SEQ ID NO: 4848160 - DNA, 25 bp, Homo sapien
tcccagaggcgcagagagacgctga

SEQ ID NO: 4848161 - DNA, 25 bp, Homo sapien
accacgtctcgggagcgttccagca

SEQ ID NO: 4848162 - DNA, 25 bp, Homo sapien
agcgtagcgcaggtccaactggcag

SEQ ID NO: 4848163 - DNA, 25 bp, Homo sapien
tgacagcctccaggtcagcgtagcg

SEQ ID NO: 4848164 - DNA, 25 bp, Homo sapien
ggtcgcctagccctgttgacagcct

SEQ ID NO: 4848165 - DNA, 25 bp, Homo sapien
ctagccaagggtcgcctagccctgt

SEQ ID NO: 4848166 - DNA, 25 bp, Homo sapien
cacattgcggaggtgggacttccag

SEQ ID NO: 4848167 - DNA, 25 bp, Homo sapien
tgcagctcggatggcgttgtcaaag

SEQ ID NO: 4848168 - DNA, 25 bp, Homo sapien
ccaccacgctggtctcatagtaggg

SEQ ID NO: 4848169 - DNA, 25 bp, Homo sapien
tgtcaaagacgtccttgatgccgaa

SEQ ID NO: 4848170 - DNA, 25 bp, Homo sapien
ttggaggaagaggtggagaggtaga

SEQ ID NO: 4848171 - DNA, 25 bp, Homo sapien
tggaggaagaggtggagaggtagat

SEQ ID NO: 4848172 - DNA, 25 bp, Homo sapien
cttggaggaagaggtggagaggtag

SEQ ID NO: 4848173 - DNA, 25 bp, Homo sapien
ctgggtgggtgccccctggctccga

SEQ ID NO: 4848174 - DNA, 25 bp, Homo sapien
tgggtgccccctggctccgaggggc

SEQ ID NO: 4848175 - DNA, 25 bp, Homo sapien
ggtggtggtgttgatcagagtggcc

SEQ ID NO: 4848176 - DNA, 25 bp, Homo sapien
tggtgttgatcagagtggccctggt

SEQ ID NO: 4848177 - DNA, 25 bp, Homo sapien
agatcaaagacctcgagcagctcag

SEQ ID NO: 4848178 - DNA, 25 bp, Homo sapien
gcaatgtgcatgaggtcacgctcgt

SEQ ID NO: 4848179 - DNA, 25 bp, Homo sapien
tcctggatgctcacaaaagctcggc

SEQ ID NO: 4848180 - DNA, 25 bp, Homo sapien
aagatcccgtcgctggtggaagcac

SEQ ID NO: 4848181 - DNA, 25 bp, Homo sapien
aaagaagctgggagaacaagcccca

SEQ ID NO: 4848182 - DNA, 25 bp, Homo sapien
gaagctgggagaacaagccccaagg

SEQ ID NO: 4848183 - DNA, 25 bp, Homo sapien
gaacccagaagattcggggcacgga

SEQ ID NO: 4848184 - DNA, 25 bp, Homo sapien
tcacaggaggactggtgaaagaagc

SEQ ID NO: 4848185 - DNA, 25 bp, Homo sapien
ggtggagctctccacaaatggcccc

SEQ ID NO: 4848186 - DNA, 25 bp, Homo sapien
atggcagccatccagtcacagctgg

SEQ ID NO: 4848187 - DNA, 25 bp, Homo sapien
tgggcgctgatggtgccatcatcca

SEQ ID NO: 4848188 - DNA, 25 bp, Homo sapien
acagctggaaatcaacaggggcttg

SEQ ID NO: 4848189 - DNA, 25 bp, Homo sapien
gtagaggtattccagcacggcccgc

SEQ ID NO: 4848190 - DNA, 25 bp, Homo sapien
gcggttggctagaatgatgagcttc

SEQ ID NO: 4848191 - DNA, 25 bp, Homo sapien
ggctggaggtgaacatgccggtgta

SEQ ID NO: 4848192 - DNA, 25 bp, Homo sapien
gcttcatgtcatccaggtcggggct

SEQ ID NO: 4848193 - DNA, 25 bp, Homo sapien
accatcatctgggtcgcttccatca

SEQ ID NO: 4848194 - DNA, 25 bp, Homo sapien
atcagcccggtcactgtgtactgct

SEQ ID NO: 4848195 - DNA, 25 bp, Homo sapien
caaggacgtccccatcgatgtccac

SEQ ID NO: 4848196 - DNA, 25 bp, Homo sapien
tgggtcgcttccatcagcccggtca

SEQ ID NO: 4848197 - DNA, 25 bp, Homo sapien
atgtggtggagacaccagtcggcca

SEQ ID NO: 4848198 - DNA, 25 bp, Homo sapien
gtgcagatgtggtggagacaccagt

SEQ ID NO: 4848199 - DNA, 25 bp, Homo sapien
acatggccttcatgtctcgggggaa

SEQ ID NO: 4848200 - DNA, 25 bp, Homo sapien
gccttcatgtctcgggggaacttgc

SEQ ID NO: 4848201 - DNA, 25 bp, Homo sapien
tccctggagcctgtgcagtttctgt

SEQ ID NO: 4848202 - DNA, 25 bp, Homo sapien
gcagcatgaggcaaaaacacggcag

SEQ ID NO: 4848203 - DNA, 25 bp, Homo sapien
gatgcccagacctgggtggtccaag

SEQ ID NO: 4848204 - DNA, 25 bp, Homo sapien
aaagagtggcagacccttcagggag

SEQ ID NO: 4848205 - DNA, 25 bp, Homo sapien
cacaggtggccaccgatgcttctcg

SEQ ID NO: 4848206 - DNA, 25 bp, Homo sapien
cacacaggtggccaccgatgcttct

SEQ ID NO: 4848207 - DNA, 25 bp, Homo sapien
accgatgcttctcgaaatactcctg

SEQ ID NO: 4848208 - DNA, 25 bp, Homo sapien
tgcttctcgaaatactcctggtttt

SEQ ID NO: 4848209 - DNA, 25 bp, Homo sapien
ctgccgcttgaggtggaggtagtcc

SEQ ID NO: 4848210 - DNA, 25 bp, Homo sapien
tgaggtggaggtagtcctccttctc

SEQ ID NO: 4848211 - DNA, 25 bp, Homo sapien
gccgtttgggctgccgcttgaggtg

SEQ ID NO: 4848212 - DNA, 25 bp, Homo sapien
ccgcttgaggtggaggtagtcctcc

SEQ ID NO: 4848213 - DNA, 25 bp, Homo sapien
aggaggaggctgccgaggaagacgg

SEQ ID NO: 4848214 - DNA, 25 bp, Homo sapien
aggaggctgccgaggaagacgggga

SEQ ID NO: 4848215 - DNA, 25 bp, Homo sapien
caaatgcaacactcaagtccgtcgg

SEQ ID NO: 4848216 - DNA, 25 bp, Homo sapien
ttgttgcaccaagaggcactgcttc

SEQ ID NO: 4848217 - DNA, 25 bp, Homo sapien
tataaaaagcagtgccacccagagg

SEQ ID NO: 4848218 - DNA, 25 bp, Homo sapien
tccgtcggtggaaagatatggccaa

SEQ ID NO: 4848219 - DNA, 25 bp, Homo sapien
cggtttcagtttggttgtcattggt

SEQ ID NO: 4848220 - DNA, 25 bp, Homo sapien
ctttggagggatagaggacagagtg

SEQ ID NO: 4848221 - DNA, 25 bp, Homo sapien
cagagtgtttgttgatttttcgttt

SEQ ID NO: 4848222 - DNA, 25 bp, Homo sapien
ttcggtttcagtttggttgtcattg

SEQ ID NO: 4848223 - DNA, 25 bp, Homo sapien
tgtttcaggttagctcaatcccagg

SEQ ID NO: 4848224 - DNA, 25 bp, Homo sapien
gagaagtgccgagtcctttcctgaa

SEQ ID NO: 4848225 - DNA, 25 bp, Homo sapien
ggtgccatttaagccccgagaccaa

SEQ ID NO: 4848226 - DNA, 25 bp, Homo sapien
gaaaggcattggagtcgattctgca

SEQ ID NO: 4848227 - DNA, 25 bp, Homo sapien
gccagccgccctggaggccgtggag

SEQ ID NO: 4848228 - DNA, 25 bp, Homo sapien
ctgtagagggcagcatacgcgtggc

SEQ ID NO: 4848229 - DNA, 25 bp, Homo sapien
cagcatacgcgtggctttccagcca

SEQ ID NO: 4848230 - DNA, 25 bp, Homo sapien
gagggcagcatacgcgtggctttcc

SEQ ID NO: 4848231 - DNA, 25 bp, Homo sapien
gagccctgggctgcgctgagctgca

SEQ ID NO: 4848232 - DNA, 25 bp, Homo sapien
tggagccctgggctgcgctgagctg

SEQ ID NO: 4848233 - DNA, 25 bp, Homo sapien
ctgagctgcagggaggccgagcagc

SEQ ID NO: 4848234 - DNA, 25 bp, Homo sapien
tcacttggagccctgggctgcgctg

SEQ ID NO: 4848235 - DNA, 25 bp, Homo sapien
cttccctagaagtggaggtgctccg

SEQ ID NO: 4848236 - DNA, 25 bp, Homo sapien
cacgctgtccatcttccctagaagt

SEQ ID NO: 4848237 - DNA, 25 bp, Homo sapien
tggaggacccgctctccctttcgtc

SEQ ID NO: 4848238 - DNA, 25 bp, Homo sapien
tcgtccacagcttccgggaggccca

SEQ ID NO: 4848239 - DNA, 25 bp, Homo sapien
gaatcccgtggtcactctcctatgg

SEQ ID NO: 4848240 - DNA, 25 bp, Homo sapien
gcttcaggcacctaggagacctatt

SEQ ID NO: 4848241 - DNA, 25 bp, Homo sapien
ggtacccaggttgctcagcgcttca

SEQ ID NO: 4848242 - DNA, 25 bp, Homo sapien
gccgggttgcatctggttccgacag

SEQ ID NO: 4848243 - DNA, 25 bp, Homo sapien
cagccaggccaagctattcttttaa

SEQ ID NO: 4848244 - DNA, 25 bp, Homo sapien
tgaatccatgaccaaattaaatatg

SEQ ID NO: 4848245 - DNA, 25 bp, Homo sapien
taaagtaagcttcctgacgacatga

SEQ ID NO: 4848246 - DNA, 25 bp, Homo sapien
ggctttgctatatccccaggccaaa

SEQ ID NO: 4848247 - DNA, 25 bp, Homo sapien
gaactggatccacgtgaagtcctgt

SEQ ID NO: 4848248 - DNA, 25 bp, Homo sapien
agtcgggaccaaagagaactggatc

SEQ ID NO: 4848249 - DNA, 25 bp, Homo sapien
gaagaagtcccctgtaagatgtcac

SEQ ID NO: 4848250 - DNA, 25 bp, Homo sapien
agttgtttacatatgagtcgggacc

SEQ ID NO: 4848251 - DNA, 25 bp, Homo sapien
gatccatctacacagtcgttgtccg

SEQ ID NO: 4848252 - DNA, 25 bp, Homo sapien
gtccgacttcacttgatactatatg

SEQ ID NO: 4848253 - DNA, 25 bp, Homo sapien
ttatttgggctacattgtaagatcc

SEQ ID NO: 4848254 - DNA, 25 bp, Homo sapien
tcgttgtccgacttcacttgatact

SEQ ID NO: 4848255 - DNA, 25 bp, Homo sapien
atgtctggatcattccgtttgtgcg

SEQ ID NO: 4848256 - DNA, 25 bp, Homo sapien
gcgtactttgagatttggtttggga

SEQ ID NO: 4848257 - DNA, 25 bp, Homo sapien
gataataaggacactatggaaatgt

SEQ ID NO: 4848258 - DNA, 25 bp, Homo sapien
taaggacactatggaaatgtctgga

SEQ ID NO: 4848259 - DNA, 25 bp, Homo sapien
ttctctctcttaaccatgcccatgg

SEQ ID NO: 4848260 - DNA, 25 bp, Homo sapien
ttaaccatgcccatggacaccccca

SEQ ID NO: 4848261 - DNA, 25 bp, Homo sapien
tctctcttaaccatgcccatggaca

SEQ ID NO: 4848262 - DNA, 25 bp, Homo sapien
taaccatgcccatggacacccccat

SEQ ID NO: 4848263 - DNA, 25 bp, Homo sapien
gaactgaaataagccaaacccctga

SEQ ID NO: 4848264 - DNA, 25 bp, Homo sapien
ccaggtcatggtagtttggccagga

SEQ ID NO: 4848265 - DNA, 25 bp, Homo sapien
ggcagggtccctagaattcaatggg

SEQ ID NO: 4848266 - DNA, 25 bp, Homo sapien
tgagtcacaagacagggaaaccccg

SEQ ID NO: 4848267 - DNA, 25 bp, Homo sapien
gtcgctgcggcccagtggttccgtt

SEQ ID NO: 4848268 - DNA, 25 bp, Homo sapien
agatcgctttgaacctgcggccggc

SEQ ID NO: 4848269 - DNA, 25 bp, Homo sapien
aagaactcccctgtggtcgctgcgg

SEQ ID NO: 4848270 - DNA, 25 bp, Homo sapien
gccgctcatcgccaatgccattgtt

SEQ ID NO: 4848271 - DNA, 25 bp, Homo sapien
ttttcttttgcgccttcgaatgaat

SEQ ID NO: 4848272 - DNA, 25 bp, Homo sapien
ttcttttgcgccttcgaatgaattc

SEQ ID NO: 4848273 - DNA, 25 bp, Homo sapien
tttcttttgcgccttcgaatgaatt

SEQ ID NO: 4848274 - DNA, 25 bp, Homo sapien
tctgatgggcgatgtctccggtgaa

SEQ ID NO: 4848275 - DNA, 25 bp, Homo sapien
aatccactctgcattgggcaaacaa

SEQ ID NO: 4848276 - DNA, 25 bp, Homo sapien
atgtctccggtgaaaacttgacaat

SEQ ID NO: 4848277 - DNA, 25 bp, Homo sapien
aaacaatgatctctgaagtgctgat

SEQ ID NO: 4848278 - DNA, 25 bp, Homo sapien
tcaccggcctgcattatcatcatca

SEQ ID NO: 4848279 - DNA, 25 bp, Homo sapien
aaacctattgcatcaccggcctgca

SEQ ID NO: 4848280 - DNA, 25 bp, Homo sapien
cctattgcatcaccggcctgcatta

SEQ ID NO: 4848281 - DNA, 25 bp, Homo sapien
tgcatcaccggcctgcattatcatc

SEQ ID NO: 4848282 - DNA, 25 bp, Homo sapien
atgaccctttcagcttttgcctgtt

SEQ ID NO: 4848283 - DNA, 25 bp, Homo sapien
cctcccatgaccctttcagcttttg

SEQ ID NO: 4848284 - DNA, 25 bp, Homo sapien
ccatgaccctttcagcttttgcctg

SEQ ID NO: 4848285 - DNA, 25 bp, Homo sapien
tcccatgaccctttcagcttttgcc

SEQ ID NO: 4848286 - DNA, 25 bp, Homo sapien
tttctttcagtgtttgaggcctcca

SEQ ID NO: 4848287 - DNA, 25 bp, Homo sapien
tttgaggcctccagcaaggtgttga

SEQ ID NO: 4848288 - DNA, 25 bp, Homo sapien
tttcagtgtttgaggcctccagcaa

SEQ ID NO: 4848289 - DNA, 25 bp, Homo sapien
gttggtcctgaattatttcctttgc

SEQ ID NO: 4848290 - DNA, 25 bp, Homo sapien
cctcatagaagagatttttggagcc

SEQ ID NO: 4848291 - DNA, 25 bp, Homo sapien
cttcctcatagaagagatttttgga

SEQ ID NO: 4848292 - DNA, 25 bp, Homo sapien
catagaagagatttttggagcccac

SEQ ID NO: 4848293 - DNA, 25 bp, Homo sapien
tcatagaagagatttttggagccca

SEQ ID NO: 4848294 - DNA, 25 bp, Homo sapien
actctaagtcaaaccaccgtggtat

SEQ ID NO: 4848295 - DNA, 25 bp, Homo sapien
tggtaagctgcaccatattgatagc

SEQ ID NO: 4848296 - DNA, 25 bp, Homo sapien
cggccccttgagaagttgccagtca

SEQ ID NO: 4848297 - DNA, 25 bp, Homo sapien
tacatcaacatgcacgaaaatagga

SEQ ID NO: 4848298 - DNA, 25 bp, Homo sapien
cactactggactgctatggagaaga

SEQ ID NO: 4848299 - DNA, 25 bp, Homo sapien
tctttaccgtaaaatgcagctcagg

SEQ ID NO: 4848300 - DNA, 25 bp, Homo sapien
tcaaggaaggcctctacggaaggca

SEQ ID NO: 4848301 - DNA, 25 bp, Homo sapien
caaatagggtccatagggcagaaac

SEQ ID NO: 4848302 - DNA, 25 bp, Homo sapien
tgttcaggctcaggcctctccagga

SEQ ID NO: 4848303 - DNA, 25 bp, Homo sapien
catgttgttcaggctcaggcctctc

SEQ ID NO: 4848304 - DNA, 25 bp, Homo sapien
ctctccaggactgtggctgcctccc

SEQ ID NO: 4848305 - DNA, 25 bp, Homo sapien
cccctccacgtcctccagggcggct

SEQ ID NO: 4848306 - DNA, 25 bp, Homo sapien
ggcggtgggaggacaagcgagtctc

SEQ ID NO: 4848307 - DNA, 25 bp, Homo sapien
ctgttctttgataactcctggaacc

SEQ ID NO: 4848308 - DNA, 25 bp, Homo sapien
ttctttgataactcctggaacctgg

SEQ ID NO: 4848309 - DNA, 25 bp, Homo sapien
ggtgggaggacaagcgagtctcacg

SEQ ID NO: 4848310 - DNA, 25 bp, Homo sapien
cttgggtgccagggaggccaggcag

SEQ ID NO: 4848311 - DNA, 25 bp, Homo sapien
ggtgccagggaggccaggcagtgtg

SEQ ID NO: 4848312 - DNA, 25 bp, Homo sapien
gaggccaggcagtgtgggagggctc

SEQ ID NO: 4848313 - DNA, 25 bp, Homo sapien
aggccaggcagtgtgggagggctct

SEQ ID NO: 4848314 - DNA, 25 bp, Homo sapien
cctctctgaggacagattatctggt

SEQ ID NO: 4848315 - DNA, 25 bp, Homo sapien
tatctggtgaccttgtcttctggca

SEQ ID NO: 4848316 - DNA, 25 bp, Homo sapien
cccgggtgggttctcagccctctct

SEQ ID NO: 4848317 - DNA, 25 bp, Homo sapien
tccctctgtagggttcctccatact

SEQ ID NO: 4848318 - DNA, 25 bp, Homo sapien
cagtgttggaatccaggactcccga

SEQ ID NO: 4848319 - DNA, 25 bp, Homo sapien
gcaaaacacagactcgaattccggg

SEQ ID NO: 4848320 - DNA, 25 bp, Homo sapien
ctgtctctaaggaaggtggtgtgca

SEQ ID NO: 4848321 - DNA, 25 bp, Homo sapien
gaatcagtgaactctacaggatggg

SEQ ID NO: 4848322 - DNA, 25 bp, Homo sapien
ggaatcacaggttaatctaatcctg

SEQ ID NO: 4848323 - DNA, 25 bp, Homo sapien
atcacaggttaatctaatcctgccg

SEQ ID NO: 4848324 - DNA, 25 bp, Homo sapien
ctgagaagggcgttgtgggcagctc

SEQ ID NO: 4848325 - DNA, 25 bp, Homo sapien
gaagggcgttgtgggcagctccatg

SEQ ID NO: 4848326 - DNA, 25 bp, Homo sapien
gcttgatgttaacaacacactcttc

SEQ ID NO: 4848327 - DNA, 25 bp, Homo sapien
actcttcaaagataggatcatctac

SEQ ID NO: 4848328 - DNA, 25 bp, Homo sapien
cttcaaagataggatcatctactgc

SEQ ID NO: 4848329 - DNA, 25 bp, Homo sapien
tatgcttgatgttaacaacacactc

SEQ ID NO: 4848330 - DNA, 25 bp, Homo sapien
cagggagtccggggcaggaaacaag

SEQ ID NO: 4848331 - DNA, 25 bp, Homo sapien
caagcccccaccgacttcagcaagc

SEQ ID NO: 4848332 - DNA, 25 bp, Homo sapien
tgtcactttaaattccagggagtcc

SEQ ID NO: 4848333 - DNA, 25 bp, Homo sapien
gaaacaagcccccaccgacttcagc

SEQ ID NO: 4848334 - DNA, 25 bp, Homo sapien
catctcgagaacataggccatcctc

SEQ ID NO: 4848335 - DNA, 25 bp, Homo sapien
ccatctcgagaacataggccatcct

SEQ ID NO: 4848336 - DNA, 25 bp, Homo sapien
ctcgagaacataggccatcctctcc

SEQ ID NO: 4848337 - DNA, 25 bp, Homo sapien
atctcgagaacataggccatcctct

SEQ ID NO: 4848338 - DNA, 25 bp, Homo sapien
ccacacatacgcttctcactctgag

SEQ ID NO: 4848339 - DNA, 25 bp, Homo sapien
cactctgaggggtcagcaatttcaa

SEQ ID NO: 4848340 - DNA, 25 bp, Homo sapien
gcttctcactctgaggggtcagcaa

SEQ ID NO: 4848341 - DNA, 25 bp, Homo sapien
agcaatttcaatgtgggctgatcac

SEQ ID NO: 4848342 - DNA, 25 bp, Homo sapien
agtcagagcacgcctcttcttcaaa

SEQ ID NO: 4848343 - DNA, 25 bp, Homo sapien
cagtcagagcacgcctcttcttcaa

SEQ ID NO: 4848344 - DNA, 25 bp, Homo sapien
ggtcacttgtcacttgcagcagtca

SEQ ID NO: 4848345 - DNA, 25 bp, Homo sapien
tcacttccaagcactcagaaaaggg

SEQ ID NO: 4848346 - DNA, 25 bp, Homo sapien
ggagcgcagcgcctctgaatttata

SEQ ID NO: 4848347 - DNA, 25 bp, Homo sapien
aaatcgttggctgagttcgtgcgcg

SEQ ID NO: 4848348 - DNA, 25 bp, Homo sapien
cagagttccctaacggtaggaagcg

SEQ ID NO: 4848349 - DNA, 25 bp, Homo sapien
gtcctgggtcgcaccctgcctcggc

SEQ ID NO: 4848350 - DNA, 25 bp, Homo sapien
cctcggccatcaggcggccggggcg

SEQ ID NO: 4848351 - DNA, 25 bp, Homo sapien
ctgggtcctgggtcgcaccctgcct

SEQ ID NO: 4848352 - DNA, 25 bp, Homo sapien
atgacgacgacgaactttagggtct

SEQ ID NO: 4848353 - DNA, 25 bp, Homo sapien
cgatgacgacgacgaactttagggt

SEQ ID NO: 4848354 - DNA, 25 bp, Homo sapien
gatgacgacgacgaactttagggtc

SEQ ID NO: 4848355 - DNA, 25 bp, Homo sapien
acgatgacgacgacgaactttaggg

SEQ ID NO: 4848356 - DNA, 25 bp, Homo sapien
gactccgacggcgagttcgtcctgc

SEQ ID NO: 4848357 - DNA, 25 bp, Homo sapien
tcccctgactccgacggcgagttcg

SEQ ID NO: 4848358 - DNA, 25 bp, Homo sapien
gcgagttcgtcctgcccggacatgc

SEQ ID NO: 4848359 - DNA, 25 bp, Homo sapien
tccctctctcgattctggaacttcc

SEQ ID NO: 4848360 - DNA, 25 bp, Homo sapien
tgagagaggcaaccgctctgtgtct

SEQ ID NO: 4848361 - DNA, 25 bp, Homo sapien
attaatgagagaggcaaccgctctg

SEQ ID NO: 4848362 - DNA, 25 bp, Homo sapien
taatgagagaggcaaccgctctgtg

SEQ ID NO: 4848363 - DNA, 25 bp, Homo sapien
agaggcaaccgctctgtgtcttcag

SEQ ID NO: 4848364 - DNA, 25 bp, Homo sapien
cagtggtggcagagtaagctaggac

SEQ ID NO: 4848365 - DNA, 25 bp, Homo sapien
gcagtggtggcagagtaagctagga

SEQ ID NO: 4848366 - DNA, 25 bp, Homo sapien
ctcccccttgaagctgtgcctctgt

SEQ ID NO: 4848367 - DNA, 25 bp, Homo sapien
gagtcaccacagaattcccagaggc

SEQ ID NO: 4848368 - DNA, 25 bp, Homo sapien
tattacatacctttgactggcactg

SEQ ID NO: 4848369 - DNA, 25 bp, Homo sapien
cactggaattgagacagagaaatcc

SEQ ID NO: 4848370 - DNA, 25 bp, Homo sapien
tgtcatccattcagcatctattaca

SEQ ID NO: 4848371 - DNA, 25 bp, Homo sapien
aaggttcattgttggaagcgttggt

SEQ ID NO: 4848372 - DNA, 25 bp, Homo sapien
aagaaggttcattgttggaagcgtt

SEQ ID NO: 4848373 - DNA, 25 bp, Homo sapien
catgggaagcaagaaggttcattgt

SEQ ID NO: 4848374 - DNA, 25 bp, Homo sapien
tacaaactgtacatgggaagcaaga

SEQ ID NO: 4848375 - DNA, 25 bp, Homo sapien
tctggacaagaggtccacacattct

SEQ ID NO: 4848376 - DNA, 25 bp, Homo sapien
gacaagaggtccacacattctgtac

SEQ ID NO: 4848377 - DNA, 25 bp, Homo sapien
tggacaagaggtccacacattctgt

SEQ ID NO: 4848378 - DNA, 25 bp, Homo sapien
ctctggacaagaggtccacacattc

SEQ ID NO: 4848379 - DNA, 25 bp, Homo sapien
ggttccctgactcatatcggctaca

SEQ ID NO: 4848380 - DNA, 25 bp, Homo sapien
ttggttccctgactcatatcggcta

SEQ ID NO: 4848381 - DNA, 25 bp, Homo sapien
gttccctgactcatatcggctacaa

SEQ ID NO: 4848382 - DNA, 25 bp, Homo sapien
tccctgactcatatcggctacaact

SEQ ID NO: 4848383 - DNA, 25 bp, Homo sapien
ggtgcaggaacttttatgtttttga

SEQ ID NO: 4848384 - DNA, 25 bp, Homo sapien
gtgcaggaacttttatgtttttgat

SEQ ID NO: 4848385 - DNA, 25 bp, Homo sapien
cttctttacactgacacactgtgtc

SEQ ID NO: 4848386 - DNA, 25 bp, Homo sapien
tctttacactgacacactgtgtctc

SEQ ID NO: 4848387 - DNA, 25 bp, Homo sapien
cttccggcacatctctggggagttt

SEQ ID NO: 4848388 - DNA, 25 bp, Homo sapien
tcattccggaaggtgccttctttac

SEQ ID NO: 4848389 - DNA, 25 bp, Homo sapien
aaattcttcaacacactggatatca

SEQ ID NO: 4848390 - DNA, 25 bp, Homo sapien
ggcattggcaccaaattcttcaaca

SEQ ID NO: 4848391 - DNA, 25 bp, Homo sapien
catcccaggacgtacaattactgac

SEQ ID NO: 4848392 - DNA, 25 bp, Homo sapien
gagtccccgggctggtgatcattgt

SEQ ID NO: 4848393 - DNA, 25 bp, Homo sapien
gcacaattagaactatgatccctac

SEQ ID NO: 4848394 - DNA, 25 bp, Homo sapien
cagaagcacaattagaactatgatc

SEQ ID NO: 4848395 - DNA, 25 bp, Homo sapien
caatcagaagcacaattagaactat

SEQ ID NO: 4848396 - DNA, 25 bp, Homo sapien
gaagcacaattagaactatgatccc

SEQ ID NO: 4848397 - DNA, 25 bp, Homo sapien
tgtcacccagttgaggagccgactg

SEQ ID NO: 4848398 - DNA, 25 bp, Homo sapien
cagcgcctacctgaacctttcaggt

SEQ ID NO: 4848399 - DNA, 25 bp, Homo sapien
tgggagatgtgtggacccccagctc

SEQ ID NO: 4848400 - DNA, 25 bp, Homo sapien
tctgaccaaggctgaataaatcccg

SEQ ID NO: 4848401 - DNA, 25 bp, Homo sapien
tgtgagtgccggaaaaagaccacag

SEQ ID NO: 4848402 - DNA, 25 bp, Homo sapien
gacccgccggtctgtgtgatgctca

SEQ ID NO: 4848403 - DNA, 25 bp, Homo sapien
aaagggattgtgtccgccagggctc

SEQ ID NO: 4848404 - DNA, 25 bp, Homo sapien
ggcaaagaactgactcaggagtcca

SEQ ID NO: 4848405 - DNA, 25 bp, Homo sapien
gatgcgcgtaacatgacctaagcca

SEQ ID NO: 4848406 - DNA, 25 bp, Homo sapien
gccctgtggactctgctgaggaaca

SEQ ID NO: 4848407 - DNA, 25 bp, Homo sapien
ccaggcgcagacattctcagagtaa

SEQ ID NO: 4848408 - DNA, 25 bp, Homo sapien
agtctaagccggagaaaccacagca

SEQ ID NO: 4848409 - DNA, 25 bp, Homo sapien
gagtatcaggaataaggcacgaccc

SEQ ID NO: 4848410 - DNA, 25 bp, Homo sapien
tgacaggacactggtggacatagag

SEQ ID NO: 4848411 - DNA, 25 bp, Homo sapien
tgtgcatttcactctaagaactggt

SEQ ID NO: 4848412 - DNA, 25 bp, Homo sapien
ggtggccacactatacaaggaatcg

SEQ ID NO: 4848413 - DNA, 25 bp, Homo sapien
ctgctttacacagatgtctgacagc

SEQ ID NO: 4848414 - DNA, 25 bp, Homo sapien
gggctctgtccattgacagttccct

SEQ ID NO: 4848415 - DNA, 25 bp, Homo sapien
gtactgctttacacagatgtctgac

SEQ ID NO: 4848416 - DNA, 25 bp, Homo sapien
cagttccctttgactgtgaggatgg

SEQ ID NO: 4848417 - DNA, 25 bp, Homo sapien
tggatgaacctactgctccagcgcc

SEQ ID NO: 4848418 - DNA, 25 bp, Homo sapien
agagccaggtgaattgggactcagt

SEQ ID NO: 4848419 - DNA, 25 bp, Homo sapien
gaaaggacagaagttcccacattag

SEQ ID NO: 4848420 - DNA, 25 bp, Homo sapien
gactcagttcagaaaggacagaagt

SEQ ID NO: 4848421 - DNA, 25 bp, Homo sapien
tcggctgcctcatgagcgggttcca

SEQ ID NO: 4848422 - DNA, 25 bp, Homo sapien
tccaggagttaaagggtaggatctg

SEQ ID NO: 4848423 - DNA, 25 bp, Homo sapien
tagcatccgtacaaggcattcccag

SEQ ID NO: 4848424 - DNA, 25 bp, Homo sapien
gcattcccagggatcgctgcatcag

SEQ ID NO: 4848425 - DNA, 25 bp, Homo sapien
cctagccaagatgtctacttttaaa

SEQ ID NO: 4848426 - DNA, 25 bp, Homo sapien
cacctagccaagatgtctactttta

SEQ ID NO: 4848427 - DNA, 25 bp, Homo sapien
acctagccaagatgtctacttttaa

SEQ ID NO: 4848428 - DNA, 25 bp, Homo sapien
gatggtggccgtccagtaagctaag

SEQ ID NO: 4848429 - DNA, 25 bp, Homo sapien
ggcagctctcatcctaaacaaatgt

SEQ ID NO: 4848430 - DNA, 25 bp, Homo sapien
caaggtcacgtgatctgagataatc

SEQ ID NO: 4848431 - DNA, 25 bp, Homo sapien
aacacttacgtgtggccgggcatgg

SEQ ID NO: 4848432 - DNA, 25 bp, Homo sapien
cattcaatccctggtagtcctgaga

SEQ ID NO: 4848433 - DNA, 25 bp, Homo sapien
cacatattcagtaccacacattaaa

SEQ ID NO: 4848434 - DNA, 25 bp, Homo sapien
ctttaaatgaggctgttagaaaaca

SEQ ID NO: 4848435 - DNA, 25 bp, Homo sapien
gaaaacatagcttggtactcctggc

SEQ ID NO: 4848436 - DNA, 25 bp, Homo sapien
gggccaccggaaggtgggtgatgta

SEQ ID NO: 4848437 - DNA, 25 bp, Homo sapien
cggaaggtgggtgatgtatggatat

SEQ ID NO: 4848438 - DNA, 25 bp, Homo sapien
gccaccggaaggtgggtgatgtatg

SEQ ID NO: 4848439 - DNA, 25 bp, Homo sapien
accggaaggtgggtgatgtatggat

SEQ ID NO: 4848440 - DNA, 25 bp, Homo sapien
gccacataaacatcatagagcttct

SEQ ID NO: 4848441 - DNA, 25 bp, Homo sapien
gggggtgctctccagagtctcagta

SEQ ID NO: 4848442 - DNA, 25 bp, Homo sapien
catactcagtggtcagtggaagctt

SEQ ID NO: 4848443 - DNA, 25 bp, Homo sapien
gtgttgaaccttggccacataaaca

SEQ ID NO: 4848444 - DNA, 25 bp, Homo sapien
ctggcgctgggaccaagtggcaaaa

SEQ ID NO: 4848445 - DNA, 25 bp, Homo sapien
aaagcctcttagaggccagaccccg

SEQ ID NO: 4848446 - DNA, 25 bp, Homo sapien
aaacgactccgaatgcagcggcatc

SEQ ID NO: 4848447 - DNA, 25 bp, Homo sapien
aaaggctgaggtcaactcccgaccg

SEQ ID NO: 4848448 - DNA, 25 bp, Homo sapien
tttcgggaggctgattacccacgcc

SEQ ID NO: 4848449 - DNA, 25 bp, Homo sapien
tgtcatgtgccagatagtctcccgt

SEQ ID NO: 4848450 - DNA, 25 bp, Homo sapien
gttcttcgcaggcaggaccgtgact

SEQ ID NO: 4848451 - DNA, 25 bp, Homo sapien
cagaggaaccgctggaaggacctgt

SEQ ID NO: 4848452 - DNA, 25 bp, Homo sapien
tgtcctctggtgagggtcaccacac

SEQ ID NO: 4848453 - DNA, 25 bp, Homo sapien
cctctggtgagggtcaccacacaac

SEQ ID NO: 4848454 - DNA, 25 bp, Homo sapien
tctggtgagggtcaccacacaacag

SEQ ID NO: 4848455 - DNA, 25 bp, Homo sapien
tggtgagggtcaccacacaacagaa

SEQ ID NO: 4848456 - DNA, 25 bp, Homo sapien
aagggcattgtctcactccatttcc

SEQ ID NO: 4848457 - DNA, 25 bp, Homo sapien
tctggtaaagggcattgtctcactc

SEQ ID NO: 4848458 - DNA, 25 bp, Homo sapien
taaagggcattgtctcactccattt

SEQ ID NO: 4848459 - DNA, 25 bp, Homo sapien
ggtaaagggcattgtctcactccat

SEQ ID NO: 4848460 - DNA, 25 bp, Homo sapien
agccaagatggtgcctctgcattct

SEQ ID NO: 4848461 - DNA, 25 bp, Homo sapien
ttctagcctgggcaacagagcaaga

SEQ ID NO: 4848462 - DNA, 25 bp, Homo sapien
ccaagatggtgcctctgcattctag

SEQ ID NO: 4848463 - DNA, 25 bp, Homo sapien
aagatggtgcctctgcattctagcc

SEQ ID NO: 4848464 - DNA, 25 bp, Homo sapien
tacacacggaaccagaaccaagaag

SEQ ID NO: 4848465 - DNA, 25 bp, Homo sapien
gacacgtggtacaatatcatgcagt

SEQ ID NO: 4848466 - DNA, 25 bp, Homo sapien
gacgttgtggcaggttgaactttcc

SEQ ID NO: 4848467 - DNA, 25 bp, Homo sapien
gaaaacaaggaagcgagtctccgtg

SEQ ID NO: 4848468 - DNA, 25 bp, Homo sapien
caagcaagtttattgacctgccggc

SEQ ID NO: 4848469 - DNA, 25 bp, Homo sapien
aaatgcaaactggtacagctaccgt

SEQ ID NO: 4848470 - DNA, 25 bp, Homo sapien
cagctaccgtaaggttggccaagag

SEQ ID NO: 4848471 - DNA, 25 bp, Homo sapien
gccaagagaaaagacgagtatactc

SEQ ID NO: 4848472 - DNA, 25 bp, Homo sapien
tcaagattctggagttcggcaaagc

SEQ ID NO: 4848473 - DNA, 25 bp, Homo sapien
cgccctgagcgtgaaataagttcca

SEQ ID NO: 4848474 - DNA, 25 bp, Homo sapien
cataagtcttcaaggcgcatgcgtt

SEQ ID NO: 4848475 - DNA, 25 bp, Homo sapien
tcccacggtctttgtgccgaaagaa

SEQ ID NO: 4848476 - DNA, 25 bp, Homo sapien
agccccggcaaggctgcgaacacaa

SEQ ID NO: 4848477 - DNA, 25 bp, Homo sapien
cccggcaaggctgcgaacacaagcc

SEQ ID NO: 4848478 - DNA, 25 bp, Homo sapien
cagccccggcaaggctgcgaacaca

SEQ ID NO: 4848479 - DNA, 25 bp, Homo sapien
gccccggcaaggctgcgaacacaag

SEQ ID NO: 4848480 - DNA, 25 bp, Homo sapien
ctcgcgactcctcttgaaagcggag

SEQ ID NO: 4848481 - DNA, 25 bp, Homo sapien
ggaaggacatgcgctcctcgtcctc

SEQ ID NO: 4848482 - DNA, 25 bp, Homo sapien
tcttgaaagcggagaacaggaagga

SEQ ID NO: 4848483 - DNA, 25 bp, Homo sapien
ctcctcttgaaagcggagaacagga

SEQ ID NO: 4848484 - DNA, 25 bp, Homo sapien
cccagcgggacgctccccttgcgct

SEQ ID NO: 4848485 - DNA, 25 bp, Homo sapien
ggctcagcaccaacggcgcccagaa

SEQ ID NO: 4848486 - DNA, 25 bp, Homo sapien
tcctgcaagtcccgcagacgcaggc

SEQ ID NO: 4848487 - DNA, 25 bp, Homo sapien
ggacgctccccttgcgctgaaaggc

SEQ ID NO: 4848488 - DNA, 25 bp, Homo sapien
ggctcaacgcctgtaatcttaacac

SEQ ID NO: 4848489 - DNA, 25 bp, Homo sapien
ctcagaaagcctcgttggccaggtg

SEQ ID NO: 4848490 - DNA, 25 bp, Homo sapien
tggctcaacgcctgtaatcttaaca

SEQ ID NO: 4848491 - DNA, 25 bp, Homo sapien
agaaagcctcgttggccaggtgcag

SEQ ID NO: 4848492 - DNA, 25 bp, Homo sapien
cttcaacagctccacagcgacaagg

SEQ ID NO: 4848493 - DNA, 25 bp, Homo sapien
agatccagctgctgtctacactggc

SEQ ID NO: 4848494 - DNA, 25 bp, Homo sapien
gacctcctcagctggaaccttatta

SEQ ID NO: 4848495 - DNA, 25 bp, Homo sapien
cagctgctgtctacactggccatga

SEQ ID NO: 4848496 - DNA, 25 bp, Homo sapien
tgaagtgcccgcagagagcaaagag

SEQ ID NO: 4848497 - DNA, 25 bp, Homo sapien
taaaccccatgtggctgatcgaggg

SEQ ID NO: 4848498 - DNA, 25 bp, Homo sapien
gatgacaggcgattttctccagcag

SEQ ID NO: 4848499 - DNA, 25 bp, Homo sapien
gatggaacataccaggcaagaggcc

SEQ ID NO: 4848500 - DNA, 25 bp, Homo sapien
gtaaatccatactgtgtagggcctg

SEQ ID NO: 4848501 - DNA, 25 bp, Homo sapien
caaaccatcctgcagtctttgcggg

SEQ ID NO: 4848502 - DNA, 25 bp, Homo sapien
gaaatgtccatctgcggagcacctg

SEQ ID NO: 4848503 - DNA, 25 bp, Homo sapien
catggcactgttcccttctagtagg

SEQ ID NO: 4848504 - DNA, 25 bp, Homo sapien
ggcctgatttccagcctagcctggg

SEQ ID NO: 4848505 - DNA, 25 bp, Homo sapien
tggtgactccacatgaaatgaggca

SEQ ID NO: 4848506 - DNA, 25 bp, Homo sapien
gaaaggcaacattggctgacaggcc

SEQ ID NO: 4848507 - DNA, 25 bp, Homo sapien
ctgtgaacgagagctgaggcctgat

SEQ ID NO: 4848508 - DNA, 25 bp, Homo sapien
tctccccgttctgctcgaggactgt

SEQ ID NO: 4848509 - DNA, 25 bp, Homo sapien
tgatacagacgatacacctcctcag

SEQ ID NO: 4848510 - DNA, 25 bp, Homo sapien
gctgagctctgacagggccaccacg

SEQ ID NO: 4848511 - DNA, 25 bp, Homo sapien
tagaaggtcctctcatctgggcagg

SEQ ID NO: 4848512 - DNA, 25 bp, Homo sapien
tgctaccacaaaggctgagaaattc

SEQ ID NO: 4848513 - DNA, 25 bp, Homo sapien
cagggagaaattactactgctgcta

SEQ ID NO: 4848514 - DNA, 25 bp, Homo sapien
gagaaattcccaaccaggagcgctg

SEQ ID NO: 4848515 - DNA, 25 bp, Homo sapien
gtgagaacagcaggccccccttatc

SEQ ID NO: 4848516 - DNA, 25 bp, Homo sapien
gagagaagctgttcactctgcatca

SEQ ID NO: 4848517 - DNA, 25 bp, Homo sapien
tacgtcattgactggagagaccttg

SEQ ID NO: 4848518 - DNA, 25 bp, Homo sapien
ggactccactttgcgtgagagaagc

SEQ ID NO: 4848519 - DNA, 25 bp, Homo sapien
tgcatcagctggtacaccccaacat

SEQ ID NO: 4848520 - DNA, 25 bp, Homo sapien
acatatactaacattttgctggctc

SEQ ID NO: 4848521 - DNA, 25 bp, Homo sapien
aggaggctcagttcagggttaaaag

SEQ ID NO: 4848522 - DNA, 25 bp, Homo sapien
ggaggaggctcagttcagggttaaa

SEQ ID NO: 4848523 - DNA, 25 bp, Homo sapien
ggggaggaggctcagttcagggtta

SEQ ID NO: 4848524 - DNA, 25 bp, Homo sapien
gaagagcataaacataacattcaca

SEQ ID NO: 4848525 - DNA, 25 bp, Homo sapien
taaacataacattcacagtcatggt

SEQ ID NO: 4848526 - DNA, 25 bp, Homo sapien
gagcataaacataacattcacagtc

SEQ ID NO: 4848527 - DNA, 25 bp, Homo sapien
taacattcacagtcatggtctgtgg

SEQ ID NO: 4848528 - DNA, 25 bp, Homo sapien
cagataagattactgtgccacagga

SEQ ID NO: 4848529 - DNA, 25 bp, Homo sapien
gatgctgacggcaaaaactcttgtg

SEQ ID NO: 4848530 - DNA, 25 bp, Homo sapien
gaagagcccctcagaaagacctctg

SEQ ID NO: 4848531 - DNA, 25 bp, Homo sapien
gactaaacccaatacccagtggcaa

SEQ ID NO: 4848532 - DNA, 25 bp, Homo sapien
tcggcatgcccggcgggcttcttct

SEQ ID NO: 4848533 - DNA, 25 bp, Homo sapien
tgcccggcgggcttcttctttacac

SEQ ID NO: 4848534 - DNA, 25 bp, Homo sapien
ttcctgctcggcatgcccggcgggc

SEQ ID NO: 4848535 - DNA, 25 bp, Homo sapien
tgctcggcatgcccggcgggcttct

SEQ ID NO: 4848536 - DNA, 25 bp, Homo sapien
tgcttggccttgagagacctcagtg

SEQ ID NO: 4848537 - DNA, 25 bp, Homo sapien
tcgatgcgcttctctgtccgttgct

SEQ ID NO: 4848538 - DNA, 25 bp, Homo sapien
tgtctgggaggcatagatccggtcc

SEQ ID NO: 4848539 - DNA, 25 bp, Homo sapien
gcttggcatgcaaggcctcgatgcg

SEQ ID NO: 4848540 - DNA, 25 bp, Homo sapien
tgcaagtgaccaacacacacggaga

SEQ ID NO: 4848541 - DNA, 25 bp, Homo sapien
gccacatcccgaaagaacccaggga

SEQ ID NO: 4848542 - DNA, 25 bp, Homo sapien
aagctatcagtgcaaatgacagaca

SEQ ID NO: 4848543 - DNA, 25 bp, Homo sapien
ccgaggccaaacctcctgactggaa

SEQ ID NO: 4848544 - DNA, 25 bp, Homo sapien
agagtttgagtgctcctaccccagc

SEQ ID NO: 4848545 - DNA, 25 bp, Homo sapien
ttggatctgatccacgaggctctct

SEQ ID NO: 4848546 - DNA, 25 bp, Homo sapien
ggatctgatccacgaggctctctgc

SEQ ID NO: 4848547 - DNA, 25 bp, Homo sapien
cttcatggagagtttgagtgctcct

SEQ ID NO: 4848548 - DNA, 25 bp, Homo sapien
ctgtgtgtccctccctggccccttt

SEQ ID NO: 4848549 - DNA, 25 bp, Homo sapien
tgtgtccctccctggcccctttctg

SEQ ID NO: 4848550 - DNA, 25 bp, Homo sapien
tgtccctccctggcccctttctgta

SEQ ID NO: 4848551 - DNA, 25 bp, Homo sapien
ttctctgtgtgtccctccctggccc

SEQ ID NO: 4848552 - DNA, 25 bp, Homo sapien
caagtgcaaagccttgagctgggca

SEQ ID NO: 4848553 - DNA, 25 bp, Homo sapien
aggaaagcttcctcaagttcacaag

SEQ ID NO: 4848554 - DNA, 25 bp, Homo sapien
ggaaaatatctagggttacaaagca

SEQ ID NO: 4848555 - DNA, 25 bp, Homo sapien
ctgccccaagtgagaatcaaggaaa

SEQ ID NO: 4848556 - DNA, 25 bp, Homo sapien
gaaacttcatcctgggtgtcacaga

SEQ ID NO: 4848557 - DNA, 25 bp, Homo sapien
gagtctgagaaacttcatcctgggt

SEQ ID NO: 4848558 - DNA, 25 bp, Homo sapien
ctaagccatttgttaccccaccagc

SEQ ID NO: 4848559 - DNA, 25 bp, Homo sapien
aagccatttgttaccccaccagcca

SEQ ID NO: 4848560 - DNA, 25 bp, Homo sapien
cacagctgtcgaggaggaaatggca

SEQ ID NO: 4848561 - DNA, 25 bp, Homo sapien
tcacagcacagggaagcgaagtctt

SEQ ID NO: 4848562 - DNA, 25 bp, Homo sapien
ggaatgccgcagcacagatgggtca

SEQ ID NO: 4848563 - DNA, 25 bp, Homo sapien
aagtcaggagggtagcttcaagcag

SEQ ID NO: 4848564 - DNA, 25 bp, Homo sapien
gttcagcatctgagatcctagggtt

SEQ ID NO: 4848565 - DNA, 25 bp, Homo sapien
tccctctgataaggacagtttctca

SEQ ID NO: 4848566 - DNA, 25 bp, Homo sapien
ctagggttaggcacgctgttggtaa

SEQ ID NO: 4848567 - DNA, 25 bp, Homo sapien
ctgttggtaaaatgcctattgcggg

SEQ ID NO: 4848568 - DNA, 25 bp, Homo sapien
tctggcaaatggagtaattgggctt

SEQ ID NO: 4848569 - DNA, 25 bp, Homo sapien
agccagaaggccatatgccctccaa

SEQ ID NO: 4848570 - DNA, 25 bp, Homo sapien
ctctggcaaatggagtaattgggct

SEQ ID NO: 4848571 - DNA, 25 bp, Homo sapien
agaaggccatatgccctccaaaggc

SEQ ID NO: 4848572 - DNA, 25 bp, Homo sapien
taagagactgagtcttaatataaac

SEQ ID NO: 4848573 - DNA, 25 bp, Homo sapien
gactgaacactataacaggaaaatc

SEQ ID NO: 4848574 - DNA, 25 bp, Homo sapien
tgactgaacactataacaggaaaat

SEQ ID NO: 4848575 - DNA, 25 bp, Homo sapien
atgactgaacactataacaggaaaa

SEQ ID NO: 4848576 - DNA, 25 bp, Homo sapien
gctttagagtcggttccaattgcct

SEQ ID NO: 4848577 - DNA, 25 bp, Homo sapien
ctttttggagatttactgcttggga

SEQ ID NO: 4848578 - DNA, 25 bp, Homo sapien
caatggctttagagtcggttccaat

SEQ ID NO: 4848579 - DNA, 25 bp, Homo sapien
ccaattgcctttttggagatttact

SEQ ID NO: 4848580 - DNA, 25 bp, Homo sapien
gacattagcgacaggataaacccct

SEQ ID NO: 4848581 - DNA, 25 bp, Homo sapien
tcttcccaggcgagtgcagaagcct

SEQ ID NO: 4848582 - DNA, 25 bp, Homo sapien
taaaatggcagctaagtcccctcaa

SEQ ID NO: 4848583 - DNA, 25 bp, Homo sapien
gatcgcttcttctcgccattgccag

SEQ ID NO: 4848584 - DNA, 25 bp, Homo sapien
aatagtgattgtttctcttcacccc

SEQ ID NO: 4848585 - DNA, 25 bp, Homo sapien
agaaaaaaatagtgattgtttctct

SEQ ID NO: 4848586 - DNA, 25 bp, Homo sapien
aaaatagtgattgtttctcttcacc

SEQ ID NO: 4848587 - DNA, 25 bp, Homo sapien
aaaaaatagtgattgtttctcttca

SEQ ID NO: 4848588 - DNA, 25 bp, Homo sapien
caaggaacaagacgcttgataaaac

SEQ ID NO: 4848589 - DNA, 25 bp, Homo sapien
aattaggccacttacagagcccagg

SEQ ID NO: 4848590 - DNA, 25 bp, Homo sapien
cagcttaaagctcacacggtcaggc

SEQ ID NO: 4848591 - DNA, 25 bp, Homo sapien
ttcaaagaatgagtcctccccaggg

SEQ ID NO: 4848592 - DNA, 25 bp, Homo sapien
ttaacaaggttcaccaggtccaggc

SEQ ID NO: 4848593 - DNA, 25 bp, Homo sapien
gagtcctgtagattaccccttcttg

SEQ ID NO: 4848594 - DNA, 25 bp, Homo sapien
accaccagagtcctgtagattaccc

SEQ ID NO: 4848595 - DNA, 25 bp, Homo sapien
tgggaattccatgctggcagctgta

SEQ ID NO: 4848596 - DNA, 25 bp, Homo sapien
ttccatgctggcagctgtagccgcc

SEQ ID NO: 4848597 - DNA, 25 bp, Homo sapien
cacagaaaggcccaatggttggcac

SEQ ID NO: 4848598 - DNA, 25 bp, Homo sapien
gcatgaagcagggaagccatataaa

SEQ ID NO: 4848599 - DNA, 25 bp, Homo sapien
tgggactgaaggacaaacaatagct

SEQ ID NO: 4848600 - DNA, 25 bp, Homo sapien
gaatggacccaaatacctgacagtg

SEQ ID NO: 4848601 - DNA, 25 bp, Homo sapien
gtgttggccagaataacctctgaat

SEQ ID NO: 4848602 - DNA, 25 bp, Homo sapien
tgtgttggccagaataacctctgaa

SEQ ID NO: 4848603 - DNA, 25 bp, Homo sapien
acccaaaacccaggaagcaagccat

SEQ ID NO: 4848604 - DNA, 25 bp, Homo sapien
tgcagagacgcagcgccaccgcgcg

SEQ ID NO: 4848605 - DNA, 25 bp, Homo sapien
cagagacgcagcgccaccgcgcggc

SEQ ID NO: 4848606 - DNA, 25 bp, Homo sapien
ctgcagagacgcagcgccaccgcgc

SEQ ID NO: 4848607 - DNA, 25 bp, Homo sapien
gcagagacgcagcgccaccgcgcgg

SEQ ID NO: 4848608 - DNA, 25 bp, Homo sapien
ccaggggccagcgcgcccgagcgcc

SEQ ID NO: 4848609 - DNA, 25 bp, Homo sapien
cccaggggccagcgcgcccgagcgc

SEQ ID NO: 4848610 - DNA, 25 bp, Homo sapien
gggcctgctccgcgcagcccagctg

SEQ ID NO: 4848611 - DNA, 25 bp, Homo sapien
cagctgctccttcccacccgggagc

SEQ ID NO: 4848612 - DNA, 25 bp, Homo sapien
acccccccagtgctgctgcactcac

SEQ ID NO: 4848613 - DNA, 25 bp, Homo sapien
gcctgctccgcgcagcccagctgct

SEQ ID NO: 4848614 - DNA, 25 bp, Homo sapien
tgcgctgcgctccttcccggggctc

SEQ ID NO: 4848615 - DNA, 25 bp, Homo sapien
ctgcgctgcgctccttcccggggct

SEQ ID NO: 4848616 - DNA, 25 bp, Homo sapien
cctgcgctgcgctccttcccggggc

SEQ ID NO: 4848617 - DNA, 25 bp, Homo sapien
cgctgcgctccttcccggggctcac

SEQ ID NO: 4848618 - DNA, 25 bp, Homo sapien
ctgtaagagagacgggcagggccgg

SEQ ID NO: 4848619 - DNA, 25 bp, Homo sapien
gggcagggccgggaatcagagcaca

SEQ ID NO: 4848620 - DNA, 25 bp, Homo sapien
aatcagagcacagacccccggatct

SEQ ID NO: 4848621 - DNA, 25 bp, Homo sapien
cacagacccccggatctcccgcgac

SEQ ID NO: 4848622 - DNA, 25 bp, Homo sapien
gagaggaagacaccatccaagcaga

SEQ ID NO: 4848623 - DNA, 25 bp, Homo sapien
ctgaggagaggaagacaccatccaa

SEQ ID NO: 4848624 - DNA, 25 bp, Homo sapien
gaggagaggaagacaccatccaagc

SEQ ID NO: 4848625 - DNA, 25 bp, Homo sapien
gaggaagacaccatccaagcagaga

SEQ ID NO: 4848626 - DNA, 25 bp, Homo sapien
gatccggtggacgaagtcattctcg

SEQ ID NO: 4848627 - DNA, 25 bp, Homo sapien
cagcagaaagcggtccagttcctcc

SEQ ID NO: 4848628 - DNA, 25 bp, Homo sapien
ttcctcctggatccggtggacgaag

SEQ ID NO: 4848629 - DNA, 25 bp, Homo sapien
tctgcagcagaaagcggtccagttc

SEQ ID NO: 4848630 - DNA, 25 bp, Homo sapien
tgctcaagagatcaaaattctctgc

SEQ ID NO: 4848631 - DNA, 25 bp, Homo sapien
ggtgacagatgaccgtcctcctctt

SEQ ID NO: 4848632 - DNA, 25 bp, Homo sapien
ctccccaacggagaagctgctcaag

SEQ ID NO: 4848633 - DNA, 25 bp, Homo sapien
aattctctgctgttctatggatcag

SEQ ID NO: 4848634 - DNA, 25 bp, Homo sapien
cagagaggccatccgaactgggtac

SEQ ID NO: 4848635 - DNA, 25 bp, Homo sapien
gccagagaggccatccgaactgggt

SEQ ID NO: 4848636 - DNA, 25 bp, Homo sapien
gggccagagaggccatccgaactgg

SEQ ID NO: 4848637 - DNA, 25 bp, Homo sapien
agagaggccatccgaactgggtacc

SEQ ID NO: 4848638 - DNA, 25 bp, Homo sapien
ggtcaggcttgcgtccacgatacca

SEQ ID NO: 4848639 - DNA, 25 bp, Homo sapien
ccttggttggagatgggccgaggac

SEQ ID NO: 4848640 - DNA, 25 bp, Homo sapien
aggctggtcaggcttgcgtccacga

SEQ ID NO: 4848641 - DNA, 25 bp, Homo sapien
aggcttgcgtccacgataccaccgg

SEQ ID NO: 4848642 - DNA, 25 bp, Homo sapien
tgtcctgggccctttaggtcctctg

SEQ ID NO: 4848643 - DNA, 25 bp, Homo sapien
cacagggagtccctgatcagagttg

SEQ ID NO: 4848644 - DNA, 25 bp, Homo sapien
ttgagcaccgaggtagaggtcagcc

SEQ ID NO: 4848645 - DNA, 25 bp, Homo sapien
ggtctccagcaccaacatctccagg

SEQ ID NO: 4848646 - DNA, 25 bp, Homo sapien
ccaggtctagctgcagggtggaccc

SEQ ID NO: 4848647 - DNA, 25 bp, Homo sapien
tggacccaaaccgtgtggccatctc

SEQ ID NO: 4848648 - DNA, 25 bp, Homo sapien
tttccaggtctagctgcagggtgga

SEQ ID NO: 4848649 - DNA, 25 bp, Homo sapien
ggtggacccaaaccgtgtggccatc

SEQ ID NO: 4848650 - DNA, 25 bp, Homo sapien
cctcttcgtcctcttcctcctctgc

SEQ ID NO: 4848651 - DNA, 25 bp, Homo sapien
tccacctcctcttcgtcctcttcct

SEQ ID NO: 4848652 - DNA, 25 bp, Homo sapien
ctggggccatcctcttccacctcct

SEQ ID NO: 4848653 - DNA, 25 bp, Homo sapien
cttcgtcctcttcctcctctgccac

SEQ ID NO: 4848654 - DNA, 25 bp, Homo sapien
ctcactgtaatcgtcctccgagcag

SEQ ID NO: 4848655 - DNA, 25 bp, Homo sapien
gcagctcactgtaatcgtcctccga

SEQ ID NO: 4848656 - DNA, 25 bp, Homo sapien
gcagcagctcactgtaatcgtcctc

SEQ ID NO: 4848657 - DNA, 25 bp, Homo sapien
actgtaatcgtcctccgagcagctg

SEQ ID NO: 4848658 - DNA, 25 bp, Homo sapien
tcccttttcgggctcaagagcctca

SEQ ID NO: 4848659 - DNA, 25 bp, Homo sapien
cgccctcccttttcgggctcaagag

SEQ ID NO: 4848660 - DNA, 25 bp, Homo sapien
ttttcgggctcaagagcctcatcac

SEQ ID NO: 4848661 - DNA, 25 bp, Homo sapien
cctcccttttcgggctcaagagcct

SEQ ID NO: 4848662 - DNA, 25 bp, Homo sapien
taggagagatcggacccttagcaag

SEQ ID NO: 4848663 - DNA, 25 bp, Homo sapien
acgggagggcacttacttgtatgga

SEQ ID NO: 4848664 - DNA, 25 bp, Homo sapien
gcagagctgggcaagtccaagaact

SEQ ID NO: 4848665 - DNA, 25 bp, Homo sapien
tatggagtccccactaagtgactgg

SEQ ID NO: 4848666 - DNA, 25 bp, Homo sapien
tctccttcttcgtcaggttgtctgt

SEQ ID NO: 4848667 - DNA, 25 bp, Homo sapien
ctccttcttcgtcaggttgtctgtg

SEQ ID NO: 4848668 - DNA, 25 bp, Homo sapien
tccttcttcgtcaggttgtctgtga

SEQ ID NO: 4848669 - DNA, 25 bp, Homo sapien
gagcgctggttcaaagtcatagatc

SEQ ID NO: 4848670 - DNA, 25 bp, Homo sapien
aggtcctccgtcttgagcgctggtt

SEQ ID NO: 4848671 - DNA, 25 bp, Homo sapien
tggaactcagaaaacgttgccagca

SEQ ID NO: 4848672 - DNA, 25 bp, Homo sapien
tcagaaaacgttgccagcaggtcct

SEQ ID NO: 4848673 - DNA, 25 bp, Homo sapien
ggagctggcccgtagcctgctggag

SEQ ID NO: 4848674 - DNA, 25 bp, Homo sapien
agctggcccgtagcctgctggagac

SEQ ID NO: 4848675 - DNA, 25 bp, Homo sapien
gagctggcccgtagcctgctggaga

SEQ ID NO: 4848676 - DNA, 25 bp, Homo sapien
ctggcccgtagcctgctggagacac

SEQ ID NO: 4848677 - DNA, 25 bp, Homo sapien
gcgtgagtatcatccacccactgaa

SEQ ID NO: 4848678 - DNA, 25 bp, Homo sapien
tgccgagtgcgtgagtatcatccac

SEQ ID NO: 4848679 - DNA, 25 bp, Homo sapien
gcagggaaagatgccgagtgcgtga

SEQ ID NO: 4848680 - DNA, 25 bp, Homo sapien
gtatcatccacccactgaatcctga

SEQ ID NO: 4848681 - DNA, 25 bp, Homo sapien
tcagctgagcctgcgcccaggagat

SEQ ID NO: 4848682 - DNA, 25 bp, Homo sapien
gagatggtggcctctacccagggaa

SEQ ID NO: 4848683 - DNA, 25 bp, Homo sapien
aaccaagggtcctccctctcaacag

SEQ ID NO: 4848684 - DNA, 25 bp, Homo sapien
tctcaacagggatccgagcaagggc

SEQ ID NO: 4848685 - DNA, 25 bp, Homo sapien
tcattaaggcgcattactatgggcc

SEQ ID NO: 4848686 - DNA, 25 bp, Homo sapien
caaaggtcgcctgaatctgatgcct

SEQ ID NO: 4848687 - DNA, 25 bp, Homo sapien
ctaacacaataggaagggcttcttc

SEQ ID NO: 4848688 - DNA, 25 bp, Homo sapien
ttactatgggccagagaccgctcag

SEQ ID NO: 4848689 - DNA, 25 bp, Homo sapien
tttaacacagggacatccgttgggc

SEQ ID NO: 4848690 - DNA, 25 bp, Homo sapien
gcgaaaatcgagtaagaatgtgtct

SEQ ID NO: 4848691 - DNA, 25 bp, Homo sapien
tttggccgttaaagcagcactttgc

SEQ ID NO: 4848692 - DNA, 25 bp, Homo sapien
gaatgtgtctacttgaaccacatga

SEQ ID NO: 4848693 - DNA, 25 bp, Homo sapien
tgcacctattcaaagctcagggcag

SEQ ID NO: 4848694 - DNA, 25 bp, Homo sapien
cgacaccgccctggatgggcaagag

SEQ ID NO: 4848695 - DNA, 25 bp, Homo sapien
gcaagagacgactgccgcctgcttg

SEQ ID NO: 4848696 - DNA, 25 bp, Homo sapien
cctgcagccgtgttgtgcacctatt

SEQ ID NO: 4848697 - DNA, 25 bp, Homo sapien
tgtgaggggccggatcttgagcacc

SEQ ID NO: 4848698 - DNA, 25 bp, Homo sapien
agcaccgagaactcccgggtcaggg

SEQ ID NO: 4848699 - DNA, 25 bp, Homo sapien
tgagctttgactgcttggttccctg

SEQ ID NO: 4848700 - DNA, 25 bp, Homo sapien
gagctttgactgcttggttccctgt

SEQ ID NO: 4848701 - DNA, 25 bp, Homo sapien
tcaagcgggaagaattaacagaggg

SEQ ID NO: 4848702 - DNA, 25 bp, Homo sapien
ccctattcagggacatgcgctttcc

SEQ ID NO: 4848703 - DNA, 25 bp, Homo sapien
aagaccctgcccaaaccagacacac

SEQ ID NO: 4848704 - DNA, 25 bp, Homo sapien
acacagcctccctattcagggacat

SEQ ID NO: 4848705 - DNA, 25 bp, Homo sapien
gctataacggttatctggtaccttc

SEQ ID NO: 4848706 - DNA, 25 bp, Homo sapien
aaaggaggcgctataacggttatct

SEQ ID NO: 4848707 - DNA, 25 bp, Homo sapien
tggtaccttctatgtgccctcaggg

SEQ ID NO: 4848708 - DNA, 25 bp, Homo sapien
cggttatctggtaccttctatgtgc

SEQ ID NO: 4848709 - DNA, 25 bp, Homo sapien
gagctcacagacctacggacaggat

SEQ ID NO: 4848710 - DNA, 25 bp, Homo sapien
tatcaagtcaggatggaacacccag

SEQ ID NO: 4848711 - DNA, 25 bp, Homo sapien
gaaaccctggaccatgttggctacg

SEQ ID NO: 4848712 - DNA, 25 bp, Homo sapien
gagccagcctctcatgtgacacatg

SEQ ID NO: 4848713 - DNA, 25 bp, Homo sapien
agggcggcagcggaccccggacagc

SEQ ID NO: 4848714 - DNA, 25 bp, Homo sapien
ccccggacagcaggccgctctttct

SEQ ID NO: 4848715 - DNA, 25 bp, Homo sapien
ccgggccacagtcgcatttgtctgt

SEQ ID NO: 4848716 - DNA, 25 bp, Homo sapien
ctctccttcaccagacgcaggagtt

SEQ ID NO: 4848717 - DNA, 25 bp, Homo sapien
tgctctggcgtctgtgaaggcttat

SEQ ID NO: 4848718 - DNA, 25 bp, Homo sapien
tccatttctgggactaaactaaagc

SEQ ID NO: 4848719 - DNA, 25 bp, Homo sapien
cacaccccatggtgaagctcgaggg

SEQ ID NO: 4848720 - DNA, 25 bp, Homo sapien
gcgccagctacgtcgggacgcagat

SEQ ID NO: 4848721 - DNA, 25 bp, Homo sapien
cacaattgaatgagggcgtcggcac

SEQ ID NO: 4848722 - DNA, 25 bp, Homo sapien
gatacctgaactgccaaaggagtgt

SEQ ID NO: 4848723 - DNA, 25 bp, Homo sapien
ggtgcaacccagctcccaaaattgg

SEQ ID NO: 4848724 - DNA, 25 bp, Homo sapien
gctagggcccagcaaactagagggt

SEQ ID NO: 4848725 - DNA, 25 bp, Homo sapien
cagtgacacgtggacaaatgcgggc

SEQ ID NO: 4848726 - DNA, 25 bp, Homo sapien
gattcaacggtgctataaccagggt

SEQ ID NO: 4848727 - DNA, 25 bp, Homo sapien
agtcttgaccgggatgaggcccaca

SEQ ID NO: 4848728 - DNA, 25 bp, Homo sapien
aagcaagagggcatccgttcacagg

SEQ ID NO: 4848729 - DNA, 25 bp, Homo sapien
tttaggtgccacaagcaccggcctg

SEQ ID NO: 4848730 - DNA, 25 bp, Homo sapien
cattccccttaagatagacatggag

SEQ ID NO: 4848731 - DNA, 25 bp, Homo sapien
cagacatcagtggtgctgtgaagga

SEQ ID NO: 4848732 - DNA, 25 bp, Homo sapien
tcacgggacacaagaggtggtcttc

SEQ ID NO: 4848733 - DNA, 25 bp, Homo sapien
caaatgaggaaggtagagctaaagc

SEQ ID NO: 4848734 - DNA, 25 bp, Homo sapien
cactgccgcttgagcaagatgtgta

SEQ ID NO: 4848735 - DNA, 25 bp, Homo sapien
ggcttctccttaggtggaggcagaa

SEQ ID NO: 4848736 - DNA, 25 bp, Homo sapien
caaaagttcagacaagtgggaggtc

SEQ ID NO: 4848737 - DNA, 25 bp, Homo sapien
cagtaacctgaatgcgaccggagta

SEQ ID NO: 4848738 - DNA, 25 bp, Homo sapien
tggacgtgctgaccctattggacag

SEQ ID NO: 4848739 - DNA, 25 bp, Homo sapien
gaaatagatgtactcagcagctggc

SEQ ID NO: 4848740 - DNA, 25 bp, Homo sapien
gatcttttggactactggccactgg

SEQ ID NO: 4848741 - DNA, 25 bp, Homo sapien
gatggtgattccagtccccagacat

SEQ ID NO: 4848742 - DNA, 25 bp, Homo sapien
aaagatgtggcttccatgtcaggag

SEQ ID NO: 4848743 - DNA, 25 bp, Homo sapien
ttaccagtcggagccaagaaaagca

SEQ ID NO: 4848744 - DNA, 25 bp, Homo sapien
gacagcacgcgccttgttcagatgg

SEQ ID NO: 4848745 - DNA, 25 bp, Homo sapien
tggacggccaagaattcccgcgtgg

SEQ ID NO: 4848746 - DNA, 25 bp, Homo sapien
gaagcagatctgtgacaagcactgg

SEQ ID NO: 4848747 - DNA, 25 bp, Homo sapien
caccccagtgatggagggctacgtg

SEQ ID NO: 4848748 - DNA, 25 bp, Homo sapien
tcccgcgtggtctgcggcatgtttg

SEQ ID NO: 4848749 - DNA, 25 bp, Homo sapien
ccaggtggaggacattcggattcga

SEQ ID NO: 4848750 - DNA, 25 bp, Homo sapien
ctttctaactgcagcttgggccgtg

SEQ ID NO: 4848751 - DNA, 25 bp, Homo sapien
taggttcggatgtaggagaagccca

SEQ ID NO: 4848752 - DNA, 25 bp, Homo sapien
cctggcccatagtcgctaaagaagt

SEQ ID NO: 4848753 - DNA, 25 bp, Homo sapien
tcatataagtgaccccaccaaggtt

SEQ ID NO: 4848754 - DNA, 25 bp, Homo sapien
ttccagctgtgacggcctgtagttc

SEQ ID NO: 4848755 - DNA, 25 bp, Homo sapien
aacctgccttttgaccagcatccag

SEQ ID NO: 4848756 - DNA, 25 bp, Homo sapien
gagtgagttgaattcaatcccttcc

SEQ ID NO: 4848757 - DNA, 25 bp, Homo sapien
tgtttagaatgtatcccaactcccg

SEQ ID NO: 4848758 - DNA, 25 bp, Homo sapien
caggatggagacaaatctggaaacc

SEQ ID NO: 4848759 - DNA, 25 bp, Homo sapien
gaactactaccatgcagaagaatgt

SEQ ID NO: 4848760 - DNA, 25 bp, Homo sapien
tctggaaaccatatcatgaggaaat

SEQ ID NO: 4848761 - DNA, 25 bp, Homo sapien
gcttgactgcttggaaaccgggcca

SEQ ID NO: 4848762 - DNA, 25 bp, Homo sapien
ggtttttccctatcaggagcaggca

SEQ ID NO: 4848763 - DNA, 25 bp, Homo sapien
tactggattgtacctagaaccgccc

SEQ ID NO: 4848764 - DNA, 25 bp, Homo sapien
gaacagacacgtttcagcagggcct

SEQ ID NO: 4848765 - DNA, 25 bp, Homo sapien
gacatggttttctgggtgtaatgga

SEQ ID NO: 4848766 - DNA, 25 bp, Homo sapien
taatggagcccactcattatggcaa

SEQ ID NO: 4848767 - DNA, 25 bp, Homo sapien
ttttctgggtgtaatggagcccact

SEQ ID NO: 4848768 - DNA, 25 bp, Homo sapien
tatggcaaccgaactataatttcag

SEQ ID NO: 4848769 - DNA, 25 bp, Homo sapien
ggccaagtggatcagacagcccgga

SEQ ID NO: 4848770 - DNA, 25 bp, Homo sapien
cggaccaagcctggtgttaaagtct

SEQ ID NO: 4848771 - DNA, 25 bp, Homo sapien
aatagacgagactgaagtagactct

SEQ ID NO: 4848772 - DNA, 25 bp, Homo sapien
tgaacattcccactttgtggccaga

SEQ ID NO: 4848773 - DNA, 25 bp, Homo sapien
ctgccttatggagccagaaatttcc

SEQ ID NO: 4848774 - DNA, 25 bp, Homo sapien
gactgccttatggagccagaaattt

SEQ ID NO: 4848775 - DNA, 25 bp, Homo sapien
ctgactgccttatggagccagaaat

SEQ ID NO: 4848776 - DNA, 25 bp, Homo sapien
tgccttatggagccagaaatttcca

SEQ ID NO: 4848777 - DNA, 25 bp, Homo sapien
tgaatggtccctggtgacccagcac

SEQ ID NO: 4848778 - DNA, 25 bp, Homo sapien
ctggtgacccagcaccagctggcat

SEQ ID NO: 4848779 - DNA, 25 bp, Homo sapien
ggtccctggtgacccagcaccagct

SEQ ID NO: 4848780 - DNA, 25 bp, Homo sapien
cttgatgaatggtccctggtgaccc

SEQ ID NO: 4848781 - DNA, 25 bp, Homo sapien
cagcgtcagggacgtctctaggcgc

SEQ ID NO: 4848782 - DNA, 25 bp, Homo sapien
gcacctcttggccaagcgtattggc

SEQ ID NO: 4848783 - DNA, 25 bp, Homo sapien
ccttctaccgtgaccagcgtcaggg

SEQ ID NO: 4848784 - DNA, 25 bp, Homo sapien
gccaagcgtattggcagcccttcta

SEQ ID NO: 4848785 - DNA, 25 bp, Homo sapien
agaaaggcttttgtggtcggtctgc

SEQ ID NO: 4848786 - DNA, 25 bp, Homo sapien
aggcccacagacaaggcgggaatag

SEQ ID NO: 4848787 - DNA, 25 bp, Homo sapien
cagacaaggcgggaatagcagttgc

SEQ ID NO: 4848788 - DNA, 25 bp, Homo sapien
tttgtggtcggtctgcatggcagtc

SEQ ID NO: 4848789 - DNA, 25 bp, Homo sapien
ccatgacaagatgcgtgctccccat

SEQ ID NO: 4848790 - DNA, 25 bp, Homo sapien
gtatctgccctggaatggccaccag

SEQ ID NO: 4848791 - DNA, 25 bp, Homo sapien
tatctgccctggaatggccaccaga

SEQ ID NO: 4848792 - DNA, 25 bp, Homo sapien
ccaccagagccatgacaagatgcgt

SEQ ID NO: 4848793 - DNA, 25 bp, Homo sapien
gctgctaacgctattgaggtctggg

SEQ ID NO: 4848794 - DNA, 25 bp, Homo sapien
gtgttcgtcctattttgctgctaac

SEQ ID NO: 4848795 - DNA, 25 bp, Homo sapien
cctattttgctgctaacgctattga

SEQ ID NO: 4848796 - DNA, 25 bp, Homo sapien
ttttgctgctaacgctattgaggtc

SEQ ID NO: 4848797 - DNA, 25 bp, Homo sapien
agaattaacagcacgaaggcagggc

SEQ ID NO: 4848798 - DNA, 25 bp, Homo sapien
tgggcagaattaacagcacgaaggc

SEQ ID NO: 4848799 - DNA, 25 bp, Homo sapien
ccgtacaggaaaacgcggtgggcag

SEQ ID NO: 4848800 - DNA, 25 bp, Homo sapien
caggaaaacgcggtgggcagaatta

SEQ ID NO: 4848801 - DNA, 25 bp, Homo sapien
gtcggcaggagcagtcgtcagtttt

SEQ ID NO: 4848802 - DNA, 25 bp, Homo sapien
caatatggaggatgacattagacgc

SEQ ID NO: 4848803 - DNA, 25 bp, Homo sapien
cagccgttggagaatacatagatgt

SEQ ID NO: 4848804 - DNA, 25 bp, Homo sapien
cattattaatgttacgtgttaccaa

SEQ ID NO: 4848805 - DNA, 25 bp, Homo sapien
gacattagacgctcagcatgtttct

SEQ ID NO: 4848806 - DNA, 25 bp, Homo sapien
taagaataatactctcggaaggtcc

SEQ ID NO: 4848807 - DNA, 25 bp, Homo sapien
taaactcaggcctacacagagtagt

SEQ ID NO: 4848808 - DNA, 25 bp, Homo sapien
aatgaatgatgtgaccaaccaagga

SEQ ID NO: 4848809 - DNA, 25 bp, Homo sapien
gccacacttgggtactgaaaaatca

SEQ ID NO: 4848810 - DNA, 25 bp, Homo sapien
catgttcatcctaagctccggcttt

SEQ ID NO: 4848811 - DNA, 25 bp, Homo sapien
tcatcctaagctccggctttaggca

SEQ ID NO: 4848812 - DNA, 25 bp, Homo sapien
cctaagctccggctttaggcagtgc

SEQ ID NO: 4848813 - DNA, 25 bp, Homo sapien
taagctccggctttaggcagtgctt

SEQ ID NO: 4848814 - DNA, 25 bp, Homo sapien
aaggtctcgcgtaggtgaagacagc

SEQ ID NO: 4848815 - DNA, 25 bp, Homo sapien
cattatgccgtatggagatgtctgc

SEQ ID NO: 4848816 - DNA, 25 bp, Homo sapien
actcaagggagttcattatgccgta

SEQ ID NO: 4848817 - DNA, 25 bp, Homo sapien
gtctgcagtcgcagcaaatcacatt

SEQ ID NO: 4848818 - DNA, 25 bp, Homo sapien
ctgcagggagctggcgatggagcca

SEQ ID NO: 4848819 - DNA, 25 bp, Homo sapien
tcctggaggagccatggattattgg

SEQ ID NO: 4848820 - DNA, 25 bp, Homo sapien
cctgcctgcgacacttcctggagga

SEQ ID NO: 4848821 - DNA, 25 bp, Homo sapien
cgtatttgcgcttcgtggtcaaagt

SEQ ID NO: 4848822 - DNA, 25 bp, Homo sapien
cttctggctacctaataagttggtc

SEQ ID NO: 4848823 - DNA, 25 bp, Homo sapien
tcacattttgaaggaaaaaattcga

SEQ ID NO: 4848824 - DNA, 25 bp, Homo sapien
actgggagaccccatgcacagcctg

SEQ ID NO: 4848825 - DNA, 25 bp, Homo sapien
ctaaccgcattgactgaggctgttg

SEQ ID NO: 4848826 - DNA, 25 bp, Homo sapien
taatcgtactgggagaccccatgca

SEQ ID NO: 4848827 - DNA, 25 bp, Homo sapien
gtcctcttcctaaccgcattgactg

SEQ ID NO: 4848828 - DNA, 25 bp, Homo sapien
cgactacagctttgtgcgagtgtgt

SEQ ID NO: 4848829 - DNA, 25 bp, Homo sapien
aacatgggcaccaggagataaccat

SEQ ID NO: 4848830 - DNA, 25 bp, Homo sapien
ccatttataaaagtgatagtgaact

SEQ ID NO: 4848831 - DNA, 25 bp, Homo sapien
tagaaaaatcctcgttactgttatc

SEQ ID NO: 4848832 - DNA, 25 bp, Homo sapien
tctgctaatgccaaggaatgcgagg

SEQ ID NO: 4848833 - DNA, 25 bp, Homo sapien
gacagaaagataggccccagatcag

SEQ ID NO: 4848834 - DNA, 25 bp, Homo sapien
ccagatcagtactgtgcaaagagct

SEQ ID NO: 4848835 - DNA, 25 bp, Homo sapien
caaagagctttctgcgatgatgtca

SEQ ID NO: 4848836 - DNA, 25 bp, Homo sapien
gccatttgtgaaacctgcaatagtt

SEQ ID NO: 4848837 - DNA, 25 bp, Homo sapien
actcatgatttgtgtggcaggcact

SEQ ID NO: 4848838 - DNA, 25 bp, Homo sapien
ggtctgggcctatatctaattcatc

SEQ ID NO: 4848839 - DNA, 25 bp, Homo sapien
tgtaatgaggaagccaaccacacgt

SEQ ID NO: 4848840 - DNA, 25 bp, Homo sapien
cttcgtagtcctgactttcttcctc

SEQ ID NO: 4848841 - DNA, 25 bp, Homo sapien
ttcgtagtcctgactttcttcctca

SEQ ID NO: 4848842 - DNA, 25 bp, Homo sapien
ggatgtgggaatcaaagctgagaac

SEQ ID NO: 4848843 - DNA, 25 bp, Homo sapien
caccggatgtgggaatcaaagctga

SEQ ID NO: 4848844 - DNA, 25 bp, Homo sapien
ccaggtaatccaggtcaatggggat

SEQ ID NO: 4848845 - DNA, 25 bp, Homo sapien
tcaacaccggatgtgggaatcaaag

SEQ ID NO: 4848846 - DNA, 25 bp, Homo sapien
tgatgacattcgctcgtcttgtcgt

SEQ ID NO: 4848847 - DNA, 25 bp, Homo sapien
agcagggatgctgcacccgggaccc

SEQ ID NO: 4848848 - DNA, 25 bp, Homo sapien
gaaaaatggagcttattgggcagta

SEQ ID NO: 4848849 - DNA, 25 bp, Homo sapien
gcctgccgctttaaatgatgacatt

SEQ ID NO: 4848850 - DNA, 25 bp, Homo sapien
taagtacgctgaggctcgctgacga

SEQ ID NO: 4848851 - DNA, 25 bp, Homo sapien
ttcccgtgcacagcacactggcgtg

SEQ ID NO: 4848852 - DNA, 25 bp, Homo sapien
agtactgggtgcctccgtgctccca

SEQ ID NO: 4848853 - DNA, 25 bp, Homo sapien
cgagcaccacgccacagtactgggt

SEQ ID NO: 4848854 - DNA, 25 bp, Homo sapien
cagataatttcgaaggagactgtcc

SEQ ID NO: 4848855 - DNA, 25 bp, Homo sapien
aaatcacagtatgtcagtggccagc

SEQ ID NO: 4848856 - DNA, 25 bp, Homo sapien
cgcaagtcatgtgggagtctgaaac

SEQ ID NO: 4848857 - DNA, 25 bp, Homo sapien
tagtagagccctccttaaggaagac

SEQ ID NO: 4848858 - DNA, 25 bp, Homo sapien
cactctgttgctcaggctggagtcc

SEQ ID NO: 4848859 - DNA, 25 bp, Homo sapien
tgctcaggctggagtccattggcgt

SEQ ID NO: 4848860 - DNA, 25 bp, Homo sapien
tagtctggcttttcttctctctctc

SEQ ID NO: 4848861 - DNA, 25 bp, Homo sapien
tctctctctctctgagatggagtct

SEQ ID NO: 4848862 - DNA, 25 bp, Homo sapien
gtgcctggtccttatgttttgtttc

SEQ ID NO: 4848863 - DNA, 25 bp, Homo sapien
tgcctggtccttatgttttgtttct

SEQ ID NO: 4848864 - DNA, 25 bp, Homo sapien
gaaagcagacgtgctgccttgctca

SEQ ID NO: 4848865 - DNA, 25 bp, Homo sapien
catcgtttttatgctgctgtcggtg

SEQ ID NO: 4848866 - DNA, 25 bp, Homo sapien
ccatctcccttagtggacaaggaga

SEQ ID NO: 4848867 - DNA, 25 bp, Homo sapien
ggagactctgagcttgttcgtttct

SEQ ID NO: 4848868 - DNA, 25 bp, Homo sapien
tctagtggtgagtccgaggcttcac

SEQ ID NO: 4848869 - DNA, 25 bp, Homo sapien
agcgcgagctcggacgccatctagt

SEQ ID NO: 4848870 - DNA, 25 bp, Homo sapien
gcttcactggagggctcaaagagga

SEQ ID NO: 4848871 - DNA, 25 bp, Homo sapien
tgccccgcggtggagagcgcgagct

SEQ ID NO: 4848872 - DNA, 25 bp, Homo sapien
ccatctagtgccatgtcatgacgta

SEQ ID NO: 4848873 - DNA, 25 bp, Homo sapien
ggaagatgcccccttgagctccttt

SEQ ID NO: 4848874 - DNA, 25 bp, Homo sapien
tagtgccatgtcatgacgtagccgg

SEQ ID NO: 4848875 - DNA, 25 bp, Homo sapien
atgtcatgacgtagccgggaagcca

SEQ ID NO: 4848876 - DNA, 25 bp, Homo sapien
caggagctttcctagcaggtgcaca

SEQ ID NO: 4848877 - DNA, 25 bp, Homo sapien
aggctgggttcgcatggtgatctcc

SEQ ID NO: 4848878 - DNA, 25 bp, Homo sapien
tctggatgatcctggctcgagcaca

SEQ ID NO: 4848879 - DNA, 25 bp, Homo sapien
ggtgcaggcgctatcagactctgga

SEQ ID NO: 4848880 - DNA, 25 bp, Homo sapien
tgcccagcaggaagcttcatctcca

SEQ ID NO: 4848881 - DNA, 25 bp, Homo sapien
tggtggcacccgttgtcctgccgag

SEQ ID NO: 4848882 - DNA, 25 bp, Homo sapien
tgttgccagtggtggcacccgttgt

SEQ ID NO: 4848883 - DNA, 25 bp, Homo sapien
gctacgtgttgccagtggtggcacc

SEQ ID NO: 4848884 - DNA, 25 bp, Homo sapien
tctgaggtcaggagttcgagaccag

SEQ ID NO: 4848885 - DNA, 25 bp, Homo sapien
aaggccgaggctgggggatcatctg

SEQ ID NO: 4848886 - DNA, 25 bp, Homo sapien
tggaaggccgaggctgggggatcat

SEQ ID NO: 4848887 - DNA, 25 bp, Homo sapien
ctgaggtcaggagttcgagaccagc

SEQ ID NO: 4848888 - DNA, 25 bp, Homo sapien
aataaaagattaggcccagcgcggt

SEQ ID NO: 4848889 - DNA, 25 bp, Homo sapien
aggcgggctaatcaggaggttaaga

SEQ ID NO: 4848890 - DNA, 25 bp, Homo sapien
gcgggctaatcaggaggttaagaga

SEQ ID NO: 4848891 - DNA, 25 bp, Homo sapien
gaggcgggctaatcaggaggttaag

SEQ ID NO: 4848892 - DNA, 25 bp, Homo sapien
acacccagtgggacgtgatggcaga

SEQ ID NO: 4848893 - DNA, 25 bp, Homo sapien
tgtgagtagctcgatggcccatgac

SEQ ID NO: 4848894 - DNA, 25 bp, Homo sapien
tcctgtctctgtgtatgggaacaga

SEQ ID NO: 4848895 - DNA, 25 bp, Homo sapien
cagcagtgcccctttaagagaggga

SEQ ID NO: 4848896 - DNA, 25 bp, Homo sapien
gctgctctgagagccgtaagttgtt

SEQ ID NO: 4848897 - DNA, 25 bp, Homo sapien
tgaaggtggttcagatagggaaact

SEQ ID NO: 4848898 - DNA, 25 bp, Homo sapien
tcaatggagcaataaggagtcattt

SEQ ID NO: 4848899 - DNA, 25 bp, Homo sapien
agaacctgagcagatgcggtcgatc

SEQ ID NO: 4848900 - DNA, 25 bp, Homo sapien
gatgtatattcttttgccagcatta

SEQ ID NO: 4848901 - DNA, 25 bp, Homo sapien
tcattcttccagaatcattctagca

SEQ ID NO: 4848902 - DNA, 25 bp, Homo sapien
cactgagtctgtttgtgggctttcc

SEQ ID NO: 4848903 - DNA, 25 bp, Homo sapien
tagtttggttgtacctgcatgttca

SEQ ID NO: 4848904 - DNA, 25 bp, Homo sapien
gctctcctcttgaaaactgtattgg

SEQ ID NO: 4848905 - DNA, 25 bp, Homo sapien
aaaaaggctctcctcttgaaaactg

SEQ ID NO: 4848906 - DNA, 25 bp, Homo sapien
tggtttcaggcctatctgtaggtgg

SEQ ID NO: 4848907 - DNA, 25 bp, Homo sapien
gagagtttctcaataccatggtgtt

SEQ ID NO: 4848908 - DNA, 25 bp, Homo sapien
gaagctagtaccctaagtctctcct

SEQ ID NO: 4848909 - DNA, 25 bp, Homo sapien
gctagtaccctaagtctctcctcca

SEQ ID NO: 4848910 - DNA, 25 bp, Homo sapien
aagctagtaccctaagtctctcctc

SEQ ID NO: 4848911 - DNA, 25 bp, Homo sapien
ctgaagctagtaccctaagtctctc

SEQ ID NO: 4848912 - DNA, 25 bp, Homo sapien
tgaaagggcatagtaatgaaggcgc

SEQ ID NO: 4848913 - DNA, 25 bp, Homo sapien
atgtcacaaggcagcagccggtcca

SEQ ID NO: 4848914 - DNA, 25 bp, Homo sapien
ttttgtgcatagcagtgaaagggca

SEQ ID NO: 4848915 - DNA, 25 bp, Homo sapien
gcgccatcccggatgtcacaaggca

SEQ ID NO: 4848916 - DNA, 25 bp, Homo sapien
tgagtaggcacctccaggaaatttt

SEQ ID NO: 4848917 - DNA, 25 bp, Homo sapien
tgccctggaccgagcaaggctataa

SEQ ID NO: 4848918 - DNA, 25 bp, Homo sapien
aaggtctgtagaggcctgatctcac

SEQ ID NO: 4848919 - DNA, 25 bp, Homo sapien
ttcttaaagtcgtcctaagctggcc

SEQ ID NO: 4848920 - DNA, 25 bp, Homo sapien
gaggggcgcaaaacttcacttctta

SEQ ID NO: 4848921 - DNA, 25 bp, Homo sapien
ctggggtggagcgcagcggccagag

SEQ ID NO: 4848922 - DNA, 25 bp, Homo sapien
cgccagctcggcggggcgcaggagg

SEQ ID NO: 4848923 - DNA, 25 bp, Homo sapien
ccgccagctcggcggggcgcaggag

SEQ ID NO: 4848924 - DNA, 25 bp, Homo sapien
ccgccgccatctcggctgtccccat

SEQ ID NO: 4848925 - DNA, 25 bp, Homo sapien
gccgccatctcggctgtccccatcc

SEQ ID NO: 4848926 - DNA, 25 bp, Homo sapien
cgccgccatctcggctgtccccatc

SEQ ID NO: 4848927 - DNA, 25 bp, Homo sapien
aggcgctagtcggcaggttctcgta

SEQ ID NO: 4848928 - DNA, 25 bp, Homo sapien
tgggtggacacggaggcgctagtcg

SEQ ID NO: 4848929 - DNA, 25 bp, Homo sapien
gacacggaggcgctagtcggcaggt

SEQ ID NO: 4848930 - DNA, 25 bp, Homo sapien
tcctgctgtcatgtgggtggacacg

SEQ ID NO: 4848931 - DNA, 25 bp, Homo sapien
accgggtacatgaccgagtgctcca

SEQ ID NO: 4848932 - DNA, 25 bp, Homo sapien
tacatgaccgagtgctccaggatcc

SEQ ID NO: 4848933 - DNA, 25 bp, Homo sapien
gagtccaccgggtacatgaccgagt

SEQ ID NO: 4848934 - DNA, 25 bp, Homo sapien
ttcaccgagtccaccgggtacatga

SEQ ID NO: 4848935 - DNA, 25 bp, Homo sapien
gccggcgcgcgggatgcaaatgcgc

SEQ ID NO: 4848936 - DNA, 25 bp, Homo sapien
tccgctcgttgcgtccccgaagtct

SEQ ID NO: 4848937 - DNA, 25 bp, Homo sapien
agagctcggtttcgggacgctgccc

SEQ ID NO: 4848938 - DNA, 25 bp, Homo sapien
tttcgggacgctgccccgaggctgc

SEQ ID NO: 4848939 - DNA, 25 bp, Homo sapien
tcggaaaccgcgcacgtgtgggcgg

SEQ ID NO: 4848940 - DNA, 25 bp, Homo sapien
agtcgccgccgaagccagcggtgct

SEQ ID NO: 4848941 - DNA, 25 bp, Homo sapien
ccagcgtggtaagactgtgcagagc

SEQ ID NO: 4848942 - DNA, 25 bp, Homo sapien
gtgcagagcttcagcgatcgcgtcc

SEQ ID NO: 4848943 - DNA, 25 bp, Homo sapien
ctgtcgaaccggtaaagagctgcca

SEQ ID NO: 4848944 - DNA, 25 bp, Homo sapien
tccccgcaagcaaaaggagaaggca

SEQ ID NO: 4848945 - DNA, 25 bp, Homo sapien
gagctgccactagtcgagagaagac

SEQ ID NO: 4848946 - DNA, 25 bp, Homo sapien
ggcaaacgtcattgcctcccggcgg

SEQ ID NO: 4848947 - DNA, 25 bp, Homo sapien
tggctcaggcttaggtccagcagca

SEQ ID NO: 4848948 - DNA, 25 bp, Homo sapien
tataaaagtgcaacgtgtaacagtc

SEQ ID NO: 4848949 - DNA, 25 bp, Homo sapien
cccagggctgttgcatgaattaggc

SEQ ID NO: 4848950 - DNA, 25 bp, Homo sapien
aaggtaatcggttcgcctctctgcg

SEQ ID NO: 4848951 - DNA, 25 bp, Homo sapien
cacttcagcatggaagggcccctaa

SEQ ID NO: 4848952 - DNA, 25 bp, Homo sapien
gactagggcctgctcagataacacc

SEQ ID NO: 4848953 - DNA, 25 bp, Homo sapien
actgattagctaacccacgccttgt

SEQ ID NO: 4848954 - DNA, 25 bp, Homo sapien
aacgtgtgagaaacgcctcttgaga

SEQ ID NO: 4848955 - DNA, 25 bp, Homo sapien
agatcaaagttaaaaatggcgcctt

SEQ ID NO: 4848956 - DNA, 25 bp, Homo sapien
taacataaaagaggacgatgggtgt

SEQ ID NO: 4848957 - DNA, 25 bp, Homo sapien
tgttcagagaaacgaggcatgggtt

SEQ ID NO: 4848958 - DNA, 25 bp, Homo sapien
tagaaaaaagccagccgattcaaca

SEQ ID NO: 4848959 - DNA, 25 bp, Homo sapien
gcaaaataagtagcatcaggttcag

SEQ ID NO: 4848960 - DNA, 25 bp, Homo sapien
ggtgtgacctcacgaagaagcaaat

SEQ ID NO: 4848961 - DNA, 25 bp, Homo sapien
caccaggccgactttgcacttagaa

SEQ ID NO: 4848962 - DNA, 25 bp, Homo sapien
ataatgggaagcatccaccaggccg

SEQ ID NO: 4848963 - DNA, 25 bp, Homo sapien
agtctgaggaggctccgaggcaact

SEQ ID NO: 4848964 - DNA, 25 bp, Homo sapien
gagaaaagctgatgaccatcccagg

SEQ ID NO: 4848965 - DNA, 25 bp, Homo sapien
ccagaaagtctgggcccaagatagt

SEQ ID NO: 4848966 - DNA, 25 bp, Homo sapien
caggccttccctgcatacagggcag

SEQ ID NO: 4848967 - DNA, 25 bp, Homo sapien
tcaaggaagaggagacatccaggtc

SEQ ID NO: 4848968 - DNA, 25 bp, Homo sapien
atccaggtccctgaaccaaggcagt

SEQ ID NO: 4848969 - DNA, 25 bp, Homo sapien
gtccctgaaccaaggcagtaagtag

SEQ ID NO: 4848970 - DNA, 25 bp, Homo sapien
gaagaggagacatccaggtccctga

SEQ ID NO: 4848971 - DNA, 25 bp, Homo sapien
tgtgttacgaagtaacaactgctgg

SEQ ID NO: 4848972 - DNA, 25 bp, Homo sapien
gaccagccatggctgacgtgcagaa

SEQ ID NO: 4848973 - DNA, 25 bp, Homo sapien
aaataaacgatggtgtgtgttacga

SEQ ID NO: 4848974 - DNA, 25 bp, Homo sapien
tacagtggtgaacagaagagcatac

SEQ ID NO: 4848975 - DNA, 25 bp, Homo sapien
tactcttctctatttccgatgagaa

SEQ ID NO: 4848976 - DNA, 25 bp, Homo sapien
ctactcttctctatttccgatgaga

SEQ ID NO: 4848977 - DNA, 25 bp, Homo sapien
aaggtcgggctttacatgcaaggca

SEQ ID NO: 4848978 - DNA, 25 bp, Homo sapien
gatgcactaaaacgacctgcaaggg

SEQ ID NO: 4848979 - DNA, 25 bp, Homo sapien
tgtgcctgccatgcaaaggtcgggc

SEQ ID NO: 4848980 - DNA, 25 bp, Homo sapien
gaaaactgtgttccctgcaaacctg

SEQ ID NO: 4848981 - DNA, 25 bp, Homo sapien
tcattagccagccaaatgggcggca

SEQ ID NO: 4848982 - DNA, 25 bp, Homo sapien
tcactacatgcgtaagcggacctgc

SEQ ID NO: 4848983 - DNA, 25 bp, Homo sapien
aactgcagccttagtggaccacgga

SEQ ID NO: 4848984 - DNA, 25 bp, Homo sapien
tcttggctcaacagatgggagacac

SEQ ID NO: 4848985 - DNA, 25 bp, Homo sapien
tatcaaggacgtgccgtgagtcaga

SEQ ID NO: 4848986 - DNA, 25 bp, Homo sapien
gacaaaggcacttgtgtgcgttacc

SEQ ID NO: 4848987 - DNA, 25 bp, Homo sapien
ctaggacacccgtgatccacaggag

SEQ ID NO: 4848988 - DNA, 25 bp, Homo sapien
aaaaccctcaagatgggcaccgtgg

SEQ ID NO: 4848989 - DNA, 25 bp, Homo sapien
gcagtaaactatgatctcaacactg

SEQ ID NO: 4848990 - DNA, 25 bp, Homo sapien
aaactatgatctcaacactgcactc

SEQ ID NO: 4848991 - DNA, 25 bp, Homo sapien
gaggagggaggattccttgtaccca

SEQ ID NO: 4848992 - DNA, 25 bp, Homo sapien
aggagggaggattccttgtacccag

SEQ ID NO: 4848993 - DNA, 25 bp, Homo sapien
aaattagctgtgtggtggtgcgcac

SEQ ID NO: 4848994 - DNA, 25 bp, Homo sapien
aaaaattagctgtgtggtggtgcgc

SEQ ID NO: 4848995 - DNA, 25 bp, Homo sapien
ttaaaaattagctgtgtggtggtgc

SEQ ID NO: 4848996 - DNA, 25 bp, Homo sapien
tcactacaccaatttaaaaattagc

SEQ ID NO: 4848997 - DNA, 25 bp, Homo sapien
ttgagaggggatagctaccgcacac

SEQ ID NO: 4848998 - DNA, 25 bp, Homo sapien
tataccaaaagtacagtgaaggctg

SEQ ID NO: 4848999 - DNA, 25 bp, Homo sapien
tacgctatagtgtgttgctcctagg

SEQ ID NO: 4849000 - DNA, 25 bp, Homo sapien
tactgcaggcaactggaataccatg

SEQ ID NO: 4849001 - DNA, 25 bp, Homo sapien
tcgaactgctgtccgccagcaatcc

SEQ ID NO: 4849002 - DNA, 25 bp, Homo sapien
tctcgaactgctgtccgccagcaat

SEQ ID NO: 4849003 - DNA, 25 bp, Homo sapien
ggtctcgaactgctgtccgccagca

SEQ ID NO: 4849004 - DNA, 25 bp, Homo sapien
tagagttagggtcttgctccgttgc

SEQ ID NO: 4849005 - DNA, 25 bp, Homo sapien
cagtcaagcaacaccatgaatggtt

SEQ ID NO: 4849006 - DNA, 25 bp, Homo sapien
tacactcgagctactcaggtgagat

SEQ ID NO: 4849007 - DNA, 25 bp, Homo sapien
ccagagttgcttgattggtgggccc

SEQ ID NO: 4849008 - DNA, 25 bp, Homo sapien
gggcccctggtcatctcaagctaat

SEQ ID NO: 4849009 - DNA, 25 bp, Homo sapien
gaaaacttagatagctggcagagag

SEQ ID NO: 4849010 - DNA, 25 bp, Homo sapien
ttatcagtttacactggcacagagg

SEQ ID NO: 4849011 - DNA, 25 bp, Homo sapien
ttctaaatggatggcctaggctgct

SEQ ID NO: 4849012 - DNA, 25 bp, Homo sapien
actcactagacacaacactgggatg

SEQ ID NO: 4849013 - DNA, 25 bp, Homo sapien
aggatggagaaacgtgtcctgcccg

SEQ ID NO: 4849014 - DNA, 25 bp, Homo sapien
gccctcacgtgctgcctatgaataa

SEQ ID NO: 4849015 - DNA, 25 bp, Homo sapien
ctagaacaaagtgaagggtcagccc

SEQ ID NO: 4849016 - DNA, 25 bp, Homo sapien
gacaagggtctctggcctgacactg

SEQ ID NO: 4849017 - DNA, 25 bp, Homo sapien
gaaaaaacatctgggagtgagtgga

SEQ ID NO: 4849018 - DNA, 25 bp, Homo sapien
cattttctattccttgaggatcaga

SEQ ID NO: 4849019 - DNA, 25 bp, Homo sapien
tgaagggataaacacgatgtaatat

SEQ ID NO: 4849020 - DNA, 25 bp, Homo sapien
ttaaagctccactacctgtaaaatg

SEQ ID NO: 4849021 - DNA, 25 bp, Homo sapien
accaatcacctgaattagtggtcat

SEQ ID NO: 4849022 - DNA, 25 bp, Homo sapien
gaacggtgaaaaccaatcacctgaa

SEQ ID NO: 4849023 - DNA, 25 bp, Homo sapien
ttggaggaacggtgaaaaccaatca

SEQ ID NO: 4849024 - DNA, 25 bp, Homo sapien
caatcacctgaattagtggtcattt

SEQ ID NO: 4849025 - DNA, 25 bp, Homo sapien
gatgtagaattgtcctgtggtgccc

SEQ ID NO: 4849026 - DNA, 25 bp, Homo sapien
tctgtctgctaggacccaaggaagg

SEQ ID NO: 4849027 - DNA, 25 bp, Homo sapien
aaaaactgggtctctctcaaggaag

SEQ ID NO: 4849028 - DNA, 25 bp, Homo sapien
cagataacctctctatgtagccgga

SEQ ID NO: 4849029 - DNA, 25 bp, Homo sapien
tccagaagccttcggtccgcatgat

SEQ ID NO: 4849030 - DNA, 25 bp, Homo sapien
catgatcatgacgttgacgcctcgc

SEQ ID NO: 4849031 - DNA, 25 bp, Homo sapien
tacttgtgtactgggctttgggatc

SEQ ID NO: 4849032 - DNA, 25 bp, Homo sapien
ccgcatgattttcttgagggctccg

SEQ ID NO: 4849033 - DNA, 25 bp, Homo sapien
ggcaaaatacatggcatgggccggc

SEQ ID NO: 4849034 - DNA, 25 bp, Homo sapien
caaaatacatggcatgggccggccc

SEQ ID NO: 4849035 - DNA, 25 bp, Homo sapien
gcaggcaaaatacatggcatgggcc

SEQ ID NO: 4849036 - DNA, 25 bp, Homo sapien
atagcaggcaaaatacatggcatgg

SEQ ID NO: 4849037 - DNA, 25 bp, Homo sapien
ctaactccagacaaacgctttcaaa

SEQ ID NO: 4849038 - DNA, 25 bp, Homo sapien
aactccagacaaacgctttcaaaat

SEQ ID NO: 4849039 - DNA, 25 bp, Homo sapien
taactccagacaaacgctttcaaaa

SEQ ID NO: 4849040 - DNA, 25 bp, Homo sapien
cgtgtgtctgggtgtgcattgcaca

SEQ ID NO: 4849041 - DNA, 25 bp, Homo sapien
ggcgttgtagagacctgttgtacca

SEQ ID NO: 4849042 - DNA, 25 bp, Homo sapien
aatagtctcaaagaagctgtccaga

SEQ ID NO: 4849043 - DNA, 25 bp, Homo sapien
tctttattcgtgagcaagcgggccg

SEQ ID NO: 4849044 - DNA, 25 bp, Homo sapien
cagatccccggaagcttaaggtggg

SEQ ID NO: 4849045 - DNA, 25 bp, Homo sapien
gcagagagatgagactcagacaaac

SEQ ID NO: 4849046 - DNA, 25 bp, Homo sapien
gaaaggccttctgcgttgcgcgagt

SEQ ID NO: 4849047 - DNA, 25 bp, Homo sapien
tgcgttgcgcgagtcctttgtcagc

SEQ ID NO: 4849048 - DNA, 25 bp, Homo sapien
caaacaaaatgatttcagcccttgc

SEQ ID NO: 4849049 - DNA, 25 bp, Homo sapien
catgccttacgtaagagctgctggc

SEQ ID NO: 4849050 - DNA, 25 bp, Homo sapien
aatcagacggaacccaggacttagc

SEQ ID NO: 4849051 - DNA, 25 bp, Homo sapien
gaagggccccaatgtcatagaatca

SEQ ID NO: 4849052 - DNA, 25 bp, Homo sapien
catattgcagaaacagtgcagggca

SEQ ID NO: 4849053 - DNA, 25 bp, Homo sapien
tctgctggattcattaccgcatcgt

SEQ ID NO: 4849054 - DNA, 25 bp, Homo sapien
ctggattcattaccgcatcgtggag

SEQ ID NO: 4849055 - DNA, 25 bp, Homo sapien
gattcattaccgcatcgtggagcag

SEQ ID NO: 4849056 - DNA, 25 bp, Homo sapien
attcattaccgcatcgtggagcagg

SEQ ID NO: 4849057 - DNA, 25 bp, Homo sapien
gaacacactttgagtagctccgagc

SEQ ID NO: 4849058 - DNA, 25 bp, Homo sapien
ccctccctgggaccatgaaacatta

SEQ ID NO: 4849059 - DNA, 25 bp, Homo sapien
tatgttcacgtcctttcttgaggcc

SEQ ID NO: 4849060 - DNA, 25 bp, Homo sapien
ccctcaagatgtctgatgctgctgg

SEQ ID NO: 4849061 - DNA, 25 bp, Homo sapien
tctatctgctaggacatggagggta

SEQ ID NO: 4849062 - DNA, 25 bp, Homo sapien
gtgtgtcccttcagcatgcctcgtg

SEQ ID NO: 4849063 - DNA, 25 bp, Homo sapien
cgtgcggcacacgataaagaaatca

SEQ ID NO: 4849064 - DNA, 25 bp, Homo sapien
cattacaggacaagccatgaaggca

SEQ ID NO: 4849065 - DNA, 25 bp, Homo sapien
gactcacgcctggaaggtggctatt

SEQ ID NO: 4849066 - DNA, 25 bp, Homo sapien
ttagacaccggaaacaggcgagagc

SEQ ID NO: 4849067 - DNA, 25 bp, Homo sapien
tagagtcgctgatctgtttcccaga

SEQ ID NO: 4849068 - DNA, 25 bp, Homo sapien
gacacagtgcgtttggaacagacac

SEQ ID NO: 4849069 - DNA, 25 bp, Homo sapien
gatgcctttgaagtagccggccagg

SEQ ID NO: 4849070 - DNA, 25 bp, Homo sapien
gctggtacaccgtccggaaggcatt

SEQ ID NO: 4849071 - DNA, 25 bp, Homo sapien
tctggtagatgacacgcgcctggat

SEQ ID NO: 4849072 - DNA, 25 bp, Homo sapien
cacaccgtccggatgcagctgattg

SEQ ID NO: 4849073 - DNA, 25 bp, Homo sapien
gaaaagctacattctgcccagggag

SEQ ID NO: 4849074 - DNA, 25 bp, Homo sapien
ccgtaatactaggtgtagacacgca

SEQ ID NO: 4849075 - DNA, 25 bp, Homo sapien
gcctttttcgttcacctgatggaag

SEQ ID NO: 4849076 - DNA, 25 bp, Homo sapien
aaaaacagctggagagtcccagccg

SEQ ID NO: 4849077 - DNA, 25 bp, Homo sapien
caagggcttctaagtgctgaccggg

SEQ ID NO: 4849078 - DNA, 25 bp, Homo sapien
tttaaagacaagctccggtgagggc

SEQ ID NO: 4849079 - DNA, 25 bp, Homo sapien
aatggcacagctagggaaaacgggc

SEQ ID NO: 4849080 - DNA, 25 bp, Homo sapien
tcacatcactcacaaccagggaagg

SEQ ID NO: 4849081 - DNA, 25 bp, Homo sapien
aaggcgttaactgccagatgggaca

SEQ ID NO: 4849082 - DNA, 25 bp, Homo sapien
tcaacagtagcgtggactttacggc

SEQ ID NO: 4849083 - DNA, 25 bp, Homo sapien
aaaattcttcatcgctattagggca

SEQ ID NO: 4849084 - DNA, 25 bp, Homo sapien
tagggcaaaatctactccccaaggc

SEQ ID NO: 4849085 - DNA, 25 bp, Homo sapien
taagaaaccggactgcagtctgcgt

SEQ ID NO: 4849086 - DNA, 25 bp, Homo sapien
cagcgtggcatatcttaagtggacc

SEQ ID NO: 4849087 - DNA, 25 bp, Homo sapien
cagtctgcgtggagcaacaatacca

SEQ ID NO: 4849088 - DNA, 25 bp, Homo sapien
tacactgaattggtcaccagggtgg

SEQ ID NO: 4849089 - DNA, 25 bp, Homo sapien
aagatcagtactttattttctctag

SEQ ID NO: 4849090 - DNA, 25 bp, Homo sapien
agatcagtactttattttctctagc

SEQ ID NO: 4849091 - DNA, 25 bp, Homo sapien
gaagatcagtactttattttctcta

SEQ ID NO: 4849092 - DNA, 25 bp, Homo sapien
aaatgggccgaagaccttagcagac

SEQ ID NO: 4849093 - DNA, 25 bp, Homo sapien
caaaggcaggatccaagaaagaaat

SEQ ID NO: 4849094 - DNA, 25 bp, Homo sapien
aaatacacatatgaacagacgctgc

SEQ ID NO: 4849095 - DNA, 25 bp, Homo sapien
gacgctgcacatcatatgtcctcag

SEQ ID NO: 4849096 - DNA, 25 bp, Homo sapien
cattagatcctttgctggcccccat

SEQ ID NO: 4849097 - DNA, 25 bp, Homo sapien
ccattagatcctttgctggccccca

SEQ ID NO: 4849098 - DNA, 25 bp, Homo sapien
tccattagatcctttgctggccccc

SEQ ID NO: 4849099 - DNA, 25 bp, Homo sapien
atgctggtacgtggaaaaggcactt

SEQ ID NO: 4849100 - DNA, 25 bp, Homo sapien
aagcacagatgctggtacgtggaaa

SEQ ID NO: 4849101 - DNA, 25 bp, Homo sapien
cttaaagccccaaattgtcaaggtg

SEQ ID NO: 4849102 - DNA, 25 bp, Homo sapien
ttaaagccccaaattgtcaaggtga

SEQ ID NO: 4849103 - DNA, 25 bp, Homo sapien
gagagttgatttggcagtcagcctt

SEQ ID NO: 4849104 - DNA, 25 bp, Homo sapien
ccaatggattggatttgatgcgaga

SEQ ID NO: 4849105 - DNA, 25 bp, Homo sapien
caggtacatgaaccaatggattgga

SEQ ID NO: 4849106 - DNA, 25 bp, Homo sapien
gatttgatgcgagagttgatttggc

SEQ ID NO: 4849107 - DNA, 25 bp, Homo sapien
tcaccaccattgctgtcataacctc

SEQ ID NO: 4849108 - DNA, 25 bp, Homo sapien
cttcaccaccattgctgtcataacc

SEQ ID NO: 4849109 - DNA, 25 bp, Homo sapien
accaccattgctgtcataacctccc

SEQ ID NO: 4849110 - DNA, 25 bp, Homo sapien
ttcaccaccattgctgtcataacct

SEQ ID NO: 4849111 - DNA, 25 bp, Homo sapien
ttggagaggaatttcgttgattttc

SEQ ID NO: 4849112 - DNA, 25 bp, Homo sapien
tggagaggaatttcgttgattttcc

SEQ ID NO: 4849113 - DNA, 25 bp, Homo sapien
cctcctctgcaacacttggagagga

SEQ ID NO: 4849114 - DNA, 25 bp, Homo sapien
cgcattgatgtcgaagcactgttca

SEQ ID NO: 4849115 - DNA, 25 bp, Homo sapien
aacatcaacacaatgccaattactt

SEQ ID NO: 4849116 - DNA, 25 bp, Homo sapien
gaaaagaatccataaagccaatcgc

SEQ ID NO: 4849117 - DNA, 25 bp, Homo sapien
tacaattgagtatcttatgaaaaga

SEQ ID NO: 4849118 - DNA, 25 bp, Homo sapien
ccagaaatgggagcgagtaattgat

SEQ ID NO: 4849119 - DNA, 25 bp, Homo sapien
taattgattttctcaatgcggaggt

SEQ ID NO: 4849120 - DNA, 25 bp, Homo sapien
actgccagaaatgggagcgagtaat

SEQ ID NO: 4849121 - DNA, 25 bp, Homo sapien
gggagcgagtaattgattttctcaa

SEQ ID NO: 4849122 - DNA, 25 bp, Homo sapien
cacactcgaagaatctgtccccata

SEQ ID NO: 4849123 - DNA, 25 bp, Homo sapien
cagcttagcttgtcacacactcgaa

SEQ ID NO: 4849124 - DNA, 25 bp, Homo sapien
tcttctgcgtggcttttcgtgtggg

SEQ ID NO: 4849125 - DNA, 25 bp, Homo sapien
taagagcctaaaccaccagcttagc

SEQ ID NO: 4849126 - DNA, 25 bp, Homo sapien
atttgcagagctaagtcctccagtt

SEQ ID NO: 4849127 - DNA, 25 bp, Homo sapien
cgatgcactgacagtaaatgctatg

SEQ ID NO: 4849128 - DNA, 25 bp, Homo sapien
gctaagtcctccagttctcgatgca

SEQ ID NO: 4849129 - DNA, 25 bp, Homo sapien
tccagttctcgatgcactgacagta

SEQ ID NO: 4849130 - DNA, 25 bp, Homo sapien
tgtttcaatactattattgactaat

SEQ ID NO: 4849131 - DNA, 25 bp, Homo sapien
actattattgactaattcatccttt

SEQ ID NO: 4849132 - DNA, 25 bp, Homo sapien
ttaattttgatgcctcgtctgtcat

SEQ ID NO: 4849133 - DNA, 25 bp, Homo sapien
tactattattgactaattcatcctt

SEQ ID NO: 4849134 - DNA, 25 bp, Homo sapien
tcattcagtattgtttttaggatgt

SEQ ID NO: 4849135 - DNA, 25 bp, Homo sapien
cattcagtattgtttttaggatgta

SEQ ID NO: 4849136 - DNA, 25 bp, Homo sapien
attcagtattgtttttaggatgtat

SEQ ID NO: 4849137 - DNA, 25 bp, Homo sapien
cacagttgaagatcttggcgtcctg

SEQ ID NO: 4849138 - DNA, 25 bp, Homo sapien
ccacagttgaagatcttggcgtcct

SEQ ID NO: 4849139 - DNA, 25 bp, Homo sapien
agccacagttgaagatcttggcgtc

SEQ ID NO: 4849140 - DNA, 25 bp, Homo sapien
agttgaagatcttggcgtcctgtgc

SEQ ID NO: 4849141 - DNA, 25 bp, Homo sapien
tgtttccacgatggtcagctccact

SEQ ID NO: 4849142 - DNA, 25 bp, Homo sapien
tatggccattgtcaaacgctaagtg

SEQ ID NO: 4849143 - DNA, 25 bp, Homo sapien
ccagggatagtaaacaaatctgtgc

SEQ ID NO: 4849144 - DNA, 25 bp, Homo sapien
tgtccagagccctaaaggtccaggg

SEQ ID NO: 4849145 - DNA, 25 bp, Homo sapien
tgattggagccagagatgcagccca

SEQ ID NO: 4849146 - DNA, 25 bp, Homo sapien
gattggagccagagatgcagcccat

SEQ ID NO: 4849147 - DNA, 25 bp, Homo sapien
ctgattggagccagagatgcagccc

SEQ ID NO: 4849148 - DNA, 25 bp, Homo sapien
cactgcttgctgtaggctctgttcc

SEQ ID NO: 4849149 - DNA, 25 bp, Homo sapien
cctagattacaggtttctgtactca

SEQ ID NO: 4849150 - DNA, 25 bp, Homo sapien
ttcccggtgtaggaggaactgctct

SEQ ID NO: 4849151 - DNA, 25 bp, Homo sapien
tgtactcaatactctgcaattgtga

SEQ ID NO: 4849152 - DNA, 25 bp, Homo sapien
tgccccaagtccgccccaaggccca

SEQ ID NO: 4849153 - DNA, 25 bp, Homo sapien
cccaagtccgccccaaggcccacag

SEQ ID NO: 4849154 - DNA, 25 bp, Homo sapien
agtccgccccaaggcccacagatac

SEQ ID NO: 4849155 - DNA, 25 bp, Homo sapien
caagtccgccccaaggcccacagat

SEQ ID NO: 4849156 - DNA, 25 bp, Homo sapien
ggtccttcctcttgtgtaggcttca

SEQ ID NO: 4849157 - DNA, 25 bp, Homo sapien
cagggaggtttgtcttcagttctcc

SEQ ID NO: 4849158 - DNA, 25 bp, Homo sapien
gttctcccctctgttcactaacaag

SEQ ID NO: 4849159 - DNA, 25 bp, Homo sapien
tgttcactaacaagttggggtggtc

SEQ ID NO: 4849160 - DNA, 25 bp, Homo sapien
aaagcgagtgtcatatcacagcagc

SEQ ID NO: 4849161 - DNA, 25 bp, Homo sapien
taatggttgcttcattgcatgtgga

SEQ ID NO: 4849162 - DNA, 25 bp, Homo sapien
ccttggttcaagcagggcactattt

SEQ ID NO: 4849163 - DNA, 25 bp, Homo sapien
gcatccctagtcttatatggtggaa

SEQ ID NO: 4849164 - DNA, 25 bp, Homo sapien
taatgacgcttaatttacaggactg

SEQ ID NO: 4849165 - DNA, 25 bp, Homo sapien
gatgtgctgttccatggagctacac

SEQ ID NO: 4849166 - DNA, 25 bp, Homo sapien
gagactcaggttctacatcttcaga

SEQ ID NO: 4849167 - DNA, 25 bp, Homo sapien
tagatttctctaaacgtagcacggc

SEQ ID NO: 4849168 - DNA, 25 bp, Homo sapien
acttagatgttccacaatctccttc

SEQ ID NO: 4849169 - DNA, 25 bp, Homo sapien
ctacttagatgttccacaatctcct

SEQ ID NO: 4849170 - DNA, 25 bp, Homo sapien
tacttagatgttccacaatctcctt

SEQ ID NO: 4849171 - DNA, 25 bp, Homo sapien
aacacagcgcagaatgaagggccag

SEQ ID NO: 4849172 - DNA, 25 bp, Homo sapien
gaatctttgcatgcagaggaggtaa

SEQ ID NO: 4849173 - DNA, 25 bp, Homo sapien
tctgctgttacgtttgaagtctgac

SEQ ID NO: 4849174 - DNA, 25 bp, Homo sapien
gacagcttgagaaggtcactactgc

SEQ ID NO: 4849175 - DNA, 25 bp, Homo sapien
gtttccctgatccaggagtagtaac

SEQ ID NO: 4849176 - DNA, 25 bp, Homo sapien
tgttggtaacctttgtgccacactg

SEQ ID NO: 4849177 - DNA, 25 bp, Homo sapien
gatctgttggcgctatctccgtgtt

SEQ ID NO: 4849178 - DNA, 25 bp, Homo sapien
ctgatccaggagtagtaacagcagg

SEQ ID NO: 4849179 - DNA, 25 bp, Homo sapien
gacctagggctacgatttgaactca

SEQ ID NO: 4849180 - DNA, 25 bp, Homo sapien
aattccaccaactgataaggcgctg

SEQ ID NO: 4849181 - DNA, 25 bp, Homo sapien
tcagtatcccctggaaggacgaggc

SEQ ID NO: 4849182 - DNA, 25 bp, Homo sapien
tacgacttaggtagagcgcgactgt

SEQ ID NO: 4849183 - DNA, 25 bp, Homo sapien
ctgcgatgctttctgcctggttttg

SEQ ID NO: 4849184 - DNA, 25 bp, Homo sapien
gcccagatgcaaaccaaagcggtgc

SEQ ID NO: 4849185 - DNA, 25 bp, Homo sapien
ccagatgcaaaccaaagcggtgcat

SEQ ID NO: 4849186 - DNA, 25 bp, Homo sapien
ggagcccagatgcaaaccaaagcgg

SEQ ID NO: 4849187 - DNA, 25 bp, Homo sapien
gagcccagatgcaaaccaaagcggt

SEQ ID NO: 4849188 - DNA, 25 bp, Homo sapien
agcacaggagtggcccccgccaccc

SEQ ID NO: 4849189 - DNA, 25 bp, Homo sapien
tcatggtccctgcgtggaccccaaa

SEQ ID NO: 4849190 - DNA, 25 bp, Homo sapien
gtgctgctcatggtccctgcgtgga

SEQ ID NO: 4849191 - DNA, 25 bp, Homo sapien
gtggaccccaaacctggatcttcat

SEQ ID NO: 4849192 - DNA, 25 bp, Homo sapien
ccccagttgctccagcagagggtgc

SEQ ID NO: 4849193 - DNA, 25 bp, Homo sapien
gaagagaggcaatgaggtgctccca

SEQ ID NO: 4849194 - DNA, 25 bp, Homo sapien
ggtccacaagggctaccagctgtag

SEQ ID NO: 4849195 - DNA, 25 bp, Homo sapien
tagttaagtcatatgtcacaggtgc

SEQ ID NO: 4849196 - DNA, 25 bp, Homo sapien
tgtctcctcaaaggcgtgctctggt

SEQ ID NO: 4849197 - DNA, 25 bp, Homo sapien
gctgacactcgatatcttctcaccg

SEQ ID NO: 4849198 - DNA, 25 bp, Homo sapien
ctcgatatcttctcaccgccatggg

SEQ ID NO: 4849199 - DNA, 25 bp, Homo sapien
cagaccaggttgctgacactcgata

SEQ ID NO: 4849200 - DNA, 25 bp, Homo sapien
ggttgctgacactcgatatcttctc

SEQ ID NO: 4849201 - DNA, 25 bp, Homo sapien
tggccagcgtgagttagggtcccag

SEQ ID NO: 4849202 - DNA, 25 bp, Homo sapien
ctggccagcgtgagttagggtccca

SEQ ID NO: 4849203 - DNA, 25 bp, Homo sapien
ggccagcgtgagttagggtcccagg

SEQ ID NO: 4849204 - DNA, 25 bp, Homo sapien
gccagcgtgagttagggtcccagga

SEQ ID NO: 4849205 - DNA, 25 bp, Homo sapien
tggaaagggtatttgaacgaatgtg

SEQ ID NO: 4849206 - DNA, 25 bp, Homo sapien
cgaatgtgactagaacctcgtctct

SEQ ID NO: 4849207 - DNA, 25 bp, Homo sapien
tcgtctctttctagcgccactcttc

SEQ ID NO: 4849208 - DNA, 25 bp, Homo sapien
caaatggatgatgacccgatgggct

SEQ ID NO: 4849209 - DNA, 25 bp, Homo sapien
caggccagaccctaagtggaagaat

SEQ ID NO: 4849210 - DNA, 25 bp, Homo sapien
ctgagctacgctggtccctcaagct

SEQ ID NO: 4849211 - DNA, 25 bp, Homo sapien
tcactctcaactcccttgtcctgcc

SEQ ID NO: 4849212 - DNA, 25 bp, Homo sapien
gcacccaggcccttgaagcctttcc

SEQ ID NO: 4849213 - DNA, 25 bp, Homo sapien
ctcaataggaaatcggcacagggct

SEQ ID NO: 4849214 - DNA, 25 bp, Homo sapien
catagaaggaaagatccacttgagg

SEQ ID NO: 4849215 - DNA, 25 bp, Homo sapien
aaacaggcagttccactgacggcag

SEQ ID NO: 4849216 - DNA, 25 bp, Homo sapien
ggctaggacgcagcgtacagacacc

SEQ ID NO: 4849217 - DNA, 25 bp, Homo sapien
caagatctccactccgcgacaaagg

SEQ ID NO: 4849218 - DNA, 25 bp, Homo sapien
aagatctccactccgcgacaaaggc

SEQ ID NO: 4849219 - DNA, 25 bp, Homo sapien
agtccatgagacaccccaagatctc

SEQ ID NO: 4849220 - DNA, 25 bp, Homo sapien
tcaaagtccatgagacaccccaaga

SEQ ID NO: 4849221 - DNA, 25 bp, Homo sapien
aaaaaaacatctgcacacccatgag

SEQ ID NO: 4849222 - DNA, 25 bp, Homo sapien
aaaaacatctgcacacccatgaggc

SEQ ID NO: 4849223 - DNA, 25 bp, Homo sapien
aacatctgcacacccatgaggccag

SEQ ID NO: 4849224 - DNA, 25 bp, Homo sapien
tcacactagccctgaaaaaaacatc

SEQ ID NO: 4849225 - DNA, 25 bp, Homo sapien
tggacgagagaaggccatgacctgc

SEQ ID NO: 4849226 - DNA, 25 bp, Homo sapien
cctccaggcactgatggcatatgtc

SEQ ID NO: 4849227 - DNA, 25 bp, Homo sapien
tcctgtagtgcagtctgcaggccct

SEQ ID NO: 4849228 - DNA, 25 bp, Homo sapien
tatacaactgtgacgctgctcctgt

SEQ ID NO: 4849229 - DNA, 25 bp, Homo sapien
ctccaactcttctcggcaagtcctg

SEQ ID NO: 4849230 - DNA, 25 bp, Homo sapien
tgagctcaatggctatggcaagagt

SEQ ID NO: 4849231 - DNA, 25 bp, Homo sapien
gagtgtgtatgatcctcattccaac

SEQ ID NO: 4849232 - DNA, 25 bp, Homo sapien
tttaacaactctgctctgccagaac

SEQ ID NO: 4849233 - DNA, 25 bp, Homo sapien
gatgccatagcataatatgaagcct

SEQ ID NO: 4849234 - DNA, 25 bp, Homo sapien
tacacatacagaaagaagcagttct

SEQ ID NO: 4849235 - DNA, 25 bp, Homo sapien
ggctgacctagaccagtttgcatga

SEQ ID NO: 4849236 - DNA, 25 bp, Homo sapien
aaacttccaaagcttcgtcttgtgt

SEQ ID NO: 4849237 - DNA, 25 bp, Homo sapien
gagagtataaataaccctgggctgt

SEQ ID NO: 4849238 - DNA, 25 bp, Homo sapien
tatgggcttggaccacttacagtgt

SEQ ID NO: 4849239 - DNA, 25 bp, Homo sapien
caaaaagagcatccctatgggcttg

SEQ ID NO: 4849240 - DNA, 25 bp, Homo sapien
taagatgttaatctcccagcccacc

SEQ ID NO: 4849241 - DNA, 25 bp, Homo sapien
cggttgccccagtagagttagctga

SEQ ID NO: 4849242 - DNA, 25 bp, Homo sapien
tcgtgttatgaatctgtgctggcca

SEQ ID NO: 4849243 - DNA, 25 bp, Homo sapien
tgctggccatggacgaatatgaatg

SEQ ID NO: 4849244 - DNA, 25 bp, Homo sapien
gcctggctgtccaaccagactttga

SEQ ID NO: 4849245 - DNA, 25 bp, Homo sapien
gaaatcccgagtggcggctcaaaac

SEQ ID NO: 4849246 - DNA, 25 bp, Homo sapien
ggctcaaaactcaggtaagcagcaa

SEQ ID NO: 4849247 - DNA, 25 bp, Homo sapien
caacttagcggaaacttctcagaga

SEQ ID NO: 4849248 - DNA, 25 bp, Homo sapien
agtgcttctgcaacccatgaggcgg

SEQ ID NO: 4849249 - DNA, 25 bp, Homo sapien
catcaaatcctcacctaagctttca

SEQ ID NO: 4849250 - DNA, 25 bp, Homo sapien
caccctgaggggcagggctgtcagc

SEQ ID NO: 4849251 - DNA, 25 bp, Homo sapien
tgctccccgcaccctgaggggcagg

SEQ ID NO: 4849252 - DNA, 25 bp, Homo sapien
cctgctccccgcaccctgaggggca

SEQ ID NO: 4849253 - DNA, 25 bp, Homo sapien
tccccgcaccctgaggggcagggct

SEQ ID NO: 4849254 - DNA, 25 bp, Homo sapien
cattcacagcacctatttcacagct

SEQ ID NO: 4849255 - DNA, 25 bp, Homo sapien
tcacagcacctatttcacagctggt

SEQ ID NO: 4849256 - DNA, 25 bp, Homo sapien
gcttcgcattcacggcttctgaaag

SEQ ID NO: 4849257 - DNA, 25 bp, Homo sapien
tttcacagctggtggcttcgcattc

SEQ ID NO: 4849258 - DNA, 25 bp, Homo sapien
gggtccacagacagtacaatttgga

SEQ ID NO: 4849259 - DNA, 25 bp, Homo sapien
acagtacaatttggattctttgtca

SEQ ID NO: 4849260 - DNA, 25 bp, Homo sapien
ccacagacagtacaatttggattct

SEQ ID NO: 4849261 - DNA, 25 bp, Homo sapien
ctttgtcatgtagcaaacccttttt

SEQ ID NO: 4849262 - DNA, 25 bp, Homo sapien
ctggaagtgggagtgtaggtagttc

SEQ ID NO: 4849263 - DNA, 25 bp, Homo sapien
gagtgtaggtagttcagctgccata

SEQ ID NO: 4849264 - DNA, 25 bp, Homo sapien
tagccagatagtccatgggtccaaa

SEQ ID NO: 4849265 - DNA, 25 bp, Homo sapien
agctgccatatctgaaactgagctg

SEQ ID NO: 4849266 - DNA, 25 bp, Homo sapien
gagggtctatcaccagccttgtgtc

SEQ ID NO: 4849267 - DNA, 25 bp, Homo sapien
gccttgtgtctacaccatggcctat

SEQ ID NO: 4849268 - DNA, 25 bp, Homo sapien
acaatattgtagaggcatccttggc

SEQ ID NO: 4849269 - DNA, 25 bp, Homo sapien
cttggcaccaacatgagggtctatc

SEQ ID NO: 4849270 - DNA, 25 bp, Homo sapien
agttgtgtcagtgatattataagca

SEQ ID NO: 4849271 - DNA, 25 bp, Homo sapien
gatattataagcatcagagagaagg

SEQ ID NO: 4849272 - DNA, 25 bp, Homo sapien
ttataagcatcagagagaaggaact

SEQ ID NO: 4849273 - DNA, 25 bp, Homo sapien
tattataagcatcagagagaaggaa

SEQ ID NO: 4849274 - DNA, 25 bp, Homo sapien
tggaagcttctggaaagttgtgctt

SEQ ID NO: 4849275 - DNA, 25 bp, Homo sapien
tctcctgcgatggtcccagaagcag

SEQ ID NO: 4849276 - DNA, 25 bp, Homo sapien
gaaagttgtgcttagatctcctgcg

SEQ ID NO: 4849277 - DNA, 25 bp, Homo sapien
aatgcatgcaaagaagcccactgga

SEQ ID NO: 4849278 - DNA, 25 bp, Homo sapien
catccacagcagagcccatcacacc

SEQ ID NO: 4849279 - DNA, 25 bp, Homo sapien
gcagaatcagcctttcttccacatc

SEQ ID NO: 4849280 - DNA, 25 bp, Homo sapien
aaggcagaatcagcctttcttccac

SEQ ID NO: 4849281 - DNA, 25 bp, Homo sapien
atccacagcagagcccatcacaccc

SEQ ID NO: 4849282 - DNA, 25 bp, Homo sapien
tacacagcagaattggctcctccct

SEQ ID NO: 4849283 - DNA, 25 bp, Homo sapien
tttacacagcagaattggctcctcc

SEQ ID NO: 4849284 - DNA, 25 bp, Homo sapien
ttttacacagcagaattggctcctc

SEQ ID NO: 4849285 - DNA, 25 bp, Homo sapien
ttacacagcagaattggctcctccc

SEQ ID NO: 4849286 - DNA, 25 bp, Homo sapien
catcatataccagattgctcaagtg

SEQ ID NO: 4849287 - DNA, 25 bp, Homo sapien
gaggcaacacaagggcctgggatca

SEQ ID NO: 4849288 - DNA, 25 bp, Homo sapien
gaagtttgtccaggacaactgaggc

SEQ ID NO: 4849289 - DNA, 25 bp, Homo sapien
cctgccttggcaaagtcaggcgaag

SEQ ID NO: 4849290 - DNA, 25 bp, Homo sapien
tggtatcgctttacttctttccaca

SEQ ID NO: 4849291 - DNA, 25 bp, Homo sapien
cctctggctggcctcgatttggtat

SEQ ID NO: 4849292 - DNA, 25 bp, Homo sapien
gatttggtatcgctttacttctttc

SEQ ID NO: 4849293 - DNA, 25 bp, Homo sapien
tggcctcgatttggtatcgctttac

SEQ ID NO: 4849294 - DNA, 25 bp, Homo sapien
gtgccttttgacatgctccccagat

SEQ ID NO: 4849295 - DNA, 25 bp, Homo sapien
gccttttgacatgctccccagattc

SEQ ID NO: 4849296 - DNA, 25 bp, Homo sapien
cattgtgccttttgacatgctcccc

SEQ ID NO: 4849297 - DNA, 25 bp, Homo sapien
ttgtgccttttgacatgctccccag

SEQ ID NO: 4849298 - DNA, 25 bp, Homo sapien
tccagaagagaacattgtccttttg

SEQ ID NO: 4849299 - DNA, 25 bp, Homo sapien
tagagaaaggctgctccttggttag

SEQ ID NO: 4849300 - DNA, 25 bp, Homo sapien
gttagacctgcatcttctagtccct

SEQ ID NO: 4849301 - DNA, 25 bp, Homo sapien
ttggaaatatctccctggtaaagca

SEQ ID NO: 4849302 - DNA, 25 bp, Homo sapien
gcaaaacttccagtgcctacaaaac

SEQ ID NO: 4849303 - DNA, 25 bp, Homo sapien
ctgctttgtagcaaaacttccagtg

SEQ ID NO: 4849304 - DNA, 25 bp, Homo sapien
gtgcagcctttagatcctgctgctt

SEQ ID NO: 4849305 - DNA, 25 bp, Homo sapien
cagtgcctacaaaaccctttgtgaa

SEQ ID NO: 4849306 - DNA, 25 bp, Homo sapien
gtgtctttaccctgaggatcctcat

SEQ ID NO: 4849307 - DNA, 25 bp, Homo sapien
tgcccactcagtggctccgtagctg

SEQ ID NO: 4849308 - DNA, 25 bp, Homo sapien
tctgttcagaaagagccctgcccct

SEQ ID NO: 4849309 - DNA, 25 bp, Homo sapien
cccgtgttttgtcactgccttgtag

SEQ ID NO: 4849310 - DNA, 25 bp, Homo sapien
agtaaggtctttgtagccgcttcct

SEQ ID NO: 4849311 - DNA, 25 bp, Homo sapien
tgtgaaacctccttgtgtttggtgc

SEQ ID NO: 4849312 - DNA, 25 bp, Homo sapien
tcttcctggatgtctattttgggct

SEQ ID NO: 4849313 - DNA, 25 bp, Homo sapien
gatgtctattttgggctttccactc

SEQ ID NO: 4849314 - DNA, 25 bp, Homo sapien
tgagcccacatgctggctagatctt

SEQ ID NO: 4849315 - DNA, 25 bp, Homo sapien
ccaccgctatcatgtaatgaaggaa

SEQ ID NO: 4849316 - DNA, 25 bp, Homo sapien
ggtcctgacctaaatccaccgctat

SEQ ID NO: 4849317 - DNA, 25 bp, Homo sapien
tcaagggctctgttcgcaagacaag

SEQ ID NO: 4849318 - DNA, 25 bp, Homo sapien
agccacacccatttctgaaacttca

SEQ ID NO: 4849319 - DNA, 25 bp, Homo sapien
tgacagccacacccatttctgaaac

SEQ ID NO: 4849320 - DNA, 25 bp, Homo sapien
gctttctgtgacagccacacccatt

SEQ ID NO: 4849321 - DNA, 25 bp, Homo sapien
cctgctttctgtgacagccacaccc

SEQ ID NO: 4849322 - DNA, 25 bp, Homo sapien
gatgctggaagcttccagcagtgcg

SEQ ID NO: 4849323 - DNA, 25 bp, Homo sapien
gccagagacaggacgtacagatgaa

SEQ ID NO: 4849324 - DNA, 25 bp, Homo sapien
ttagagctgcagagataggatgctg

SEQ ID NO: 4849325 - DNA, 25 bp, Homo sapien
ccctgccgggtaattgtgctggaat

SEQ ID NO: 4849326 - DNA, 25 bp, Homo sapien
caattgaaagattgtgagatcaaca

SEQ ID NO: 4849327 - DNA, 25 bp, Homo sapien
gcagcagaagcattgactcattatg

SEQ ID NO: 4849328 - DNA, 25 bp, Homo sapien
gctagagagattatcttagaaataa

SEQ ID NO: 4849329 - DNA, 25 bp, Homo sapien
tactcaagaaagaggagcatctcac

SEQ ID NO: 4849330 - DNA, 25 bp, Homo sapien
tgtcacatacatattcaatctcaaa

SEQ ID NO: 4849331 - DNA, 25 bp, Homo sapien
tattcaatctcaaattaaacacttg

SEQ ID NO: 4849332 - DNA, 25 bp, Homo sapien
caaattaaacacttgacggcaaagg

SEQ ID NO: 4849333 - DNA, 25 bp, Homo sapien
aattctctgaagtggtattattctc

SEQ ID NO: 4849334 - DNA, 25 bp, Homo sapien
gcctttgttttccaccgcaaatcca

SEQ ID NO: 4849335 - DNA, 25 bp, Homo sapien
tgttttccaccgcaaatccatccag

SEQ ID NO: 4849336 - DNA, 25 bp, Homo sapien
tcatcatcaacagagagggaagcct

SEQ ID NO: 4849337 - DNA, 25 bp, Homo sapien
accgcaaatccatccagagcgtcat

SEQ ID NO: 4849338 - DNA, 25 bp, Homo sapien
tcttatttggctgagacatcaggtt

SEQ ID NO: 4849339 - DNA, 25 bp, Homo sapien
gatttaatcttgacggctgctcact

SEQ ID NO: 4849340 - DNA, 25 bp, Homo sapien
gagtccaatcagcaaagttaaaatc

SEQ ID NO: 4849341 - DNA, 25 bp, Homo sapien
actgtgacttgagtccaatcagcaa

SEQ ID NO: 4849342 - DNA, 25 bp, Homo sapien
ctgcttgtgtaatagcttgagttcc

SEQ ID NO: 4849343 - DNA, 25 bp, Homo sapien
tgctcagatggacagttgaagggaa

SEQ ID NO: 4849344 - DNA, 25 bp, Homo sapien
tagcttgagttcctgctcagatgga

SEQ ID NO: 4849345 - DNA, 25 bp, Homo sapien
tcccttgtctgcttgtgtaatagct

SEQ ID NO: 4849346 - DNA, 25 bp, Homo sapien
tcgcattggagcagcaagatccagg

SEQ ID NO: 4849347 - DNA, 25 bp, Homo sapien
agacaccaagaagattcgcattgga

SEQ ID NO: 4849348 - DNA, 25 bp, Homo sapien
tcaaaggcagattgtagctacccag

SEQ ID NO: 4849349 - DNA, 25 bp, Homo sapien
caggcacccagaagaccttttcaga

SEQ ID NO: 4849350 - DNA, 25 bp, Homo sapien
gacatccacgtggaagagacttggc

SEQ ID NO: 4849351 - DNA, 25 bp, Homo sapien
atgacatccacgtggaagagacttg

SEQ ID NO: 4849352 - DNA, 25 bp, Homo sapien
tttcacatcccaagccacctttgca

SEQ ID NO: 4849353 - DNA, 25 bp, Homo sapien
tttttcatagacatgacatccacgt

SEQ ID NO: 4849354 - DNA, 25 bp, Homo sapien
tgttctgccgaaaatggtacctacc

SEQ ID NO: 4849355 - DNA, 25 bp, Homo sapien
aatttaacgggtatgacactgccca

SEQ ID NO: 4849356 - DNA, 25 bp, Homo sapien
tagcctgctgcttaagatcatcaac

SEQ ID NO: 4849357 - DNA, 25 bp, Homo sapien
gccaagcccaactcttccaatagga

SEQ ID NO: 4849358 - DNA, 25 bp, Homo sapien
ttcattgcttgaactagctttgcca

SEQ ID NO: 4849359 - DNA, 25 bp, Homo sapien
tcattgcttgaactagctttgccac

SEQ ID NO: 4849360 - DNA, 25 bp, Homo sapien
gccctggatcttcctaccaaagcat

SEQ ID NO: 4849361 - DNA, 25 bp, Homo sapien
gaggtgtcaaccagcaatgccttga

SEQ ID NO: 4849362 - DNA, 25 bp, Homo sapien
cctgagaaatcaagaagtcatcctg

SEQ ID NO: 4849363 - DNA, 25 bp, Homo sapien
ttattagactcctgaaaaaggtgtc

SEQ ID NO: 4849364 - DNA, 25 bp, Homo sapien
caggacaatatagaacttcatatac

SEQ ID NO: 4849365 - DNA, 25 bp, Homo sapien
cccaatgctccagatcaagttaaga

SEQ ID NO: 4849366 - DNA, 25 bp, Homo sapien
ccatgtattgaaactaaataagaac

SEQ ID NO: 4849367 - DNA, 25 bp, Homo sapien
aaaatgggaaatttcaggacaatat

SEQ ID NO: 4849368 - DNA, 25 bp, Homo sapien
tacaacgcttaacctctggccaaag

SEQ ID NO: 4849369 - DNA, 25 bp, Homo sapien
tatctgtaggcgtttctcttggacc

SEQ ID NO: 4849370 - DNA, 25 bp, Homo sapien
caagagatatgtaaggctgactgcc

SEQ ID NO: 4849371 - DNA, 25 bp, Homo sapien
tgttgttgtaaatctggccaggtcc

SEQ ID NO: 4849372 - DNA, 25 bp, Homo sapien
tatgttcctttccttcttccttcat

SEQ ID NO: 4849373 - DNA, 25 bp, Homo sapien
cttcaatatgttcctttccttcttc

SEQ ID NO: 4849374 - DNA, 25 bp, Homo sapien
caatatgttcctttccttcttcctt

SEQ ID NO: 4849375 - DNA, 25 bp, Homo sapien
tcaatatgttcctttccttcttcct

SEQ ID NO: 4849376 - DNA, 25 bp, Homo sapien
cctatggctgtaccgaaagagttcc

SEQ ID NO: 4849377 - DNA, 25 bp, Homo sapien
tcaatcaggccacacaggttactag

SEQ ID NO: 4849378 - DNA, 25 bp, Homo sapien
acttttaggtcttcccaccattgca

SEQ ID NO: 4849379 - DNA, 25 bp, Homo sapien
ctgtaccgaaagagttcctggaggc

SEQ ID NO: 4849380 - DNA, 25 bp, Homo sapien
atttcaaagtagtcgctgacacggt

SEQ ID NO: 4849381 - DNA, 25 bp, Homo sapien
gatttcaaagtagtcgctgacacgg

SEQ ID NO: 4849382 - DNA, 25 bp, Homo sapien
ctggaataccatatttgttgtttat

SEQ ID NO: 4849383 - DNA, 25 bp, Homo sapien
tagtgtgtggttctcgggaagtttg

SEQ ID NO: 4849384 - DNA, 25 bp, Homo sapien
cagtagaactaaacagaattcccaa

SEQ ID NO: 4849385 - DNA, 25 bp, Homo sapien
aattcccaattctttagtgtgtggt

SEQ ID NO: 4849386 - DNA, 25 bp, Homo sapien
ggagtactggtgtgatttgcttaac

SEQ ID NO: 4849387 - DNA, 25 bp, Homo sapien
cataaacatttttcagcgactgtcc

SEQ ID NO: 4849388 - DNA, 25 bp, Homo sapien
gaaggtgatgtggatcatcagcact

SEQ ID NO: 4849389 - DNA, 25 bp, Homo sapien
tgtggatcatcagcactggattctc

SEQ ID NO: 4849390 - DNA, 25 bp, Homo sapien
tcagcactggattctccataaacat

SEQ ID NO: 4849391 - DNA, 25 bp, Homo sapien
tcagcttttggccaaatattctaac

SEQ ID NO: 4849392 - DNA, 25 bp, Homo sapien
tcaacctgtcagcttttggccaaat

SEQ ID NO: 4849393 - DNA, 25 bp, Homo sapien
tgtcagcttttggccaaatattcta

SEQ ID NO: 4849394 - DNA, 25 bp, Homo sapien
cctgtcagcttttggccaaatattc

SEQ ID NO: 4849395 - DNA, 25 bp, Homo sapien
taggtgctaacctaatgtatttctt

SEQ ID NO: 4849396 - DNA, 25 bp, Homo sapien
aggtgctaacctaatgtatttcttt

SEQ ID NO: 4849397 - DNA, 25 bp, Homo sapien
ctaggtgctaacctaatgtatttct

SEQ ID NO: 4849398 - DNA, 25 bp, Homo sapien
attttggtgtgccttgtaatttctt

SEQ ID NO: 4849399 - DNA, 25 bp, Homo sapien
ctttttgatagaagacatgatgcac

SEQ ID NO: 4849400 - DNA, 25 bp, Homo sapien
gatgcactagctaaacagaactgtg

SEQ ID NO: 4849401 - DNA, 25 bp, Homo sapien
acatccttgccgtatctggttctga

SEQ ID NO: 4849402 - DNA, 25 bp, Homo sapien
gttatgtcccttgctctttgaagac

SEQ ID NO: 4849403 - DNA, 25 bp, Homo sapien
ggagttcttactacacctcgtcaag

SEQ ID NO: 4849404 - DNA, 25 bp, Homo sapien
tgttttcctcgtgctagcattcagc

SEQ ID NO: 4849405 - DNA, 25 bp, Homo sapien
caagcattttgaccattctaagcat

SEQ ID NO: 4849406 - DNA, 25 bp, Homo sapien
gggacagcaatatgagtcctgccaa

SEQ ID NO: 4849407 - DNA, 25 bp, Homo sapien
cagcaatatgagtcctgccaatgcc

SEQ ID NO: 4849408 - DNA, 25 bp, Homo sapien
gacagcaatatgagtcctgccaatg

SEQ ID NO: 4849409 - DNA, 25 bp, Homo sapien
agcaatatgagtcctgccaatgcct

SEQ ID NO: 4849410 - DNA, 25 bp, Homo sapien
gataaccctttgctatagcctggcc

SEQ ID NO: 4849411 - DNA, 25 bp, Homo sapien
tgttgttagggacaaaggcgtgcct

SEQ ID NO: 4849412 - DNA, 25 bp, Homo sapien
gagaaggttactaccgctttgtcac

SEQ ID NO: 4849413 - DNA, 25 bp, Homo sapien
gtgagacatcttaaaaccatagcag

SEQ ID NO: 4849414 - DNA, 25 bp, Homo sapien
tcacgtagccctgtcctagggcaaa

SEQ ID NO: 4849415 - DNA, 25 bp, Homo sapien
tgtcacgtagccctgtcctagggca

SEQ ID NO: 4849416 - DNA, 25 bp, Homo sapien
cttgtcacgtagccctgtcctaggg

SEQ ID NO: 4849417 - DNA, 25 bp, Homo sapien
gtcacgtagccctgtcctagggcaa

SEQ ID NO: 4849418 - DNA, 25 bp, Homo sapien
tgctgctgtgcagatgtatttggtt

SEQ ID NO: 4849419 - DNA, 25 bp, Homo sapien
atgctgctgtgcagatgtatttggt

SEQ ID NO: 4849420 - DNA, 25 bp, Homo sapien
gctgctgtgcagatgtatttggttt

SEQ ID NO: 4849421 - DNA, 25 bp, Homo sapien
ctgctgtgcagatgtatttggtttc

SEQ ID NO: 4849422 - DNA, 25 bp, Homo sapien
tacacgactaagatgctgtcttcct

SEQ ID NO: 4849423 - DNA, 25 bp, Homo sapien
gactggtatgtaatacacgactaag

SEQ ID NO: 4849424 - DNA, 25 bp, Homo sapien
tcatcgacgaataatattgctatag

SEQ ID NO: 4849425 - DNA, 25 bp, Homo sapien
tgaatgattccagtgagagcatttg

SEQ ID NO: 4849426 - DNA, 25 bp, Homo sapien
ttgtgaaattgacccttccttctaa

SEQ ID NO: 4849427 - DNA, 25 bp, Homo sapien
tctttctgcgttttgggcttcacca

SEQ ID NO: 4849428 - DNA, 25 bp, Homo sapien
tgccatgtgactctctttctgcgtt

SEQ ID NO: 4849429 - DNA, 25 bp, Homo sapien
ctttgtgaaattgacccttccttct

SEQ ID NO: 4849430 - DNA, 25 bp, Homo sapien
tgtgtcagttcagatgaagcacagg

SEQ ID NO: 4849431 - DNA, 25 bp, Homo sapien
atttggttcccgtttctgaagagtg

SEQ ID NO: 4849432 - DNA, 25 bp, Homo sapien
gagaatcgtgagcaaggtattttcc

SEQ ID NO: 4849433 - DNA, 25 bp, Homo sapien
tataagtaggactcagaaacatgaa

SEQ ID NO: 4849434 - DNA, 25 bp, Homo sapien
ttttcagcaaatggctgtgttgaaa

SEQ ID NO: 4849435 - DNA, 25 bp, Homo sapien
tcagcaaatggctgtgttgaaaaat

SEQ ID NO: 4849436 - DNA, 25 bp, Homo sapien
caaatggctgtgttgaaaaatccaa

SEQ ID NO: 4849437 - DNA, 25 bp, Homo sapien
atggctgtgttgaaaaatccaatat

SEQ ID NO: 4849438 - DNA, 25 bp, Homo sapien
gcaattttccagtctgcaaattctc

SEQ ID NO: 4849439 - DNA, 25 bp, Homo sapien
atcccgacttccatttacattgcca

SEQ ID NO: 4849440 - DNA, 25 bp, Homo sapien
tagtttctataccatgctcatcccg

SEQ ID NO: 4849441 - DNA, 25 bp, Homo sapien
catttacattgccatgcctggactt

SEQ ID NO: 4849442 - DNA, 25 bp, Homo sapien
attcaggaagtgtttactaaaggtg

SEQ ID NO: 4849443 - DNA, 25 bp, Homo sapien
tctgattcaggaagtgtttactaaa

SEQ ID NO: 4849444 - DNA, 25 bp, Homo sapien
ccaggagcacggtgtctgctcttct

SEQ ID NO: 4849445 - DNA, 25 bp, Homo sapien
gctgggtgattccaggagcacggtg

SEQ ID NO: 4849446 - DNA, 25 bp, Homo sapien
gaggaggagactgactggcaggaga

SEQ ID NO: 4849447 - DNA, 25 bp, Homo sapien
gactgactggcaggagaccttgcaa

SEQ ID NO: 4849448 - DNA, 25 bp, Homo sapien
gagactgactggcaggagaccttgc

SEQ ID NO: 4849449 - DNA, 25 bp, Homo sapien
tgactggcaggagaccttgcaacat

SEQ ID NO: 4849450 - DNA, 25 bp, Homo sapien
gagagacttgctagacataatttcc

SEQ ID NO: 4849451 - DNA, 25 bp, Homo sapien
tagaagctgaagaatcacaataccc

SEQ ID NO: 4849452 - DNA, 25 bp, Homo sapien
caagctgggttttgatgaattccac

SEQ ID NO: 4849453 - DNA, 25 bp, Homo sapien
aactggctcccataataatagtagg

SEQ ID NO: 4849454 - DNA, 25 bp, Homo sapien
tactgcattcccaatgaacgatgcc

SEQ ID NO: 4849455 - DNA, 25 bp, Homo sapien
gtcagtaaaggccatccttactgca

SEQ ID NO: 4849456 - DNA, 25 bp, Homo sapien
gaaaagacttatccaggtagaactg

SEQ ID NO: 4849457 - DNA, 25 bp, Homo sapien
aatgaacgatgccacacacagaagc

SEQ ID NO: 4849458 - DNA, 25 bp, Homo sapien
gatgaagtcttataggataaaccac

SEQ ID NO: 4849459 - DNA, 25 bp, Homo sapien
tgcagtggatgaagtcttataggat

SEQ ID NO: 4849460 - DNA, 25 bp, Homo sapien
ctctcttttatgcagtggatgaagt

SEQ ID NO: 4849461 - DNA, 25 bp, Homo sapien
ccagggagttcttttatagcactta

SEQ ID NO: 4849462 - DNA, 25 bp, Homo sapien
tgggattagaggtttccaatgattc

SEQ ID NO: 4849463 - DNA, 25 bp, Homo sapien
gttgggattagaggtttccaatgat

SEQ ID NO: 4849464 - DNA, 25 bp, Homo sapien
gattagaggtttccaatgattctcc

SEQ ID NO: 4849465 - DNA, 25 bp, Homo sapien
ggattagaggtttccaatgattctc

SEQ ID NO: 4849466 - DNA, 25 bp, Homo sapien
gtaattcaaaggtgtcacctgacac

SEQ ID NO: 4849467 - DNA, 25 bp, Homo sapien
cacatggttattgtggggtaattca

SEQ ID NO: 4849468 - DNA, 25 bp, Homo sapien
gggtaattcaaaggtgtcacctgac

SEQ ID NO: 4849469 - DNA, 25 bp, Homo sapien
tgctaatggtttagccacatggtta

SEQ ID NO: 4849470 - DNA, 25 bp, Homo sapien
caatctgagggaggaattgtgctgt

SEQ ID NO: 4849471 - DNA, 25 bp, Homo sapien
gctaatgggcctgaaagaattctca

SEQ ID NO: 4849472 - DNA, 25 bp, Homo sapien
tacgacatgggccaataccaagatg

SEQ ID NO: 4849473 - DNA, 25 bp, Homo sapien
gctctagaaaccctgctaaatcagc

SEQ ID NO: 4849474 - DNA, 25 bp, Homo sapien
tcaaataaagcactgcaatttttcc

SEQ ID NO: 4849475 - DNA, 25 bp, Homo sapien
taatttgtgggcttgtggtgatctc

SEQ ID NO: 4849476 - DNA, 25 bp, Homo sapien
aatatgtttccgtgtagcctggtgc

SEQ ID NO: 4849477 - DNA, 25 bp, Homo sapien
aattataatatgtttccgtgtagcc

SEQ ID NO: 4849478 - DNA, 25 bp, Homo sapien
tgtttccgtgtagcctggtgcaagg

SEQ ID NO: 4849479 - DNA, 25 bp, Homo sapien
aaagaattgaagagactccgttata

SEQ ID NO: 4849480 - DNA, 25 bp, Homo sapien
tatttgcctggcaaggacactacct

SEQ ID NO: 4849481 - DNA, 25 bp, Homo sapien
tttgcctggcaaggacactaccttt

SEQ ID NO: 4849482 - DNA, 25 bp, Homo sapien
tctattatttgcctggcaaggacac

SEQ ID NO: 4849483 - DNA, 25 bp, Homo sapien
tgaaggacctttctagttcgggaca

SEQ ID NO: 4849484 - DNA, 25 bp, Homo sapien
gaaattgattgagaacaccagaggt

SEQ ID NO: 4849485 - DNA, 25 bp, Homo sapien
taatggtgcatgacccctcacatgg

SEQ ID NO: 4849486 - DNA, 25 bp, Homo sapien
ttcgggacagatgaggtgttgaccc

SEQ ID NO: 4849487 - DNA, 25 bp, Homo sapien
taagaatatgtccttgataataaca

SEQ ID NO: 4849488 - DNA, 25 bp, Homo sapien
tacatgtgctgatgctagcgtcaga

SEQ ID NO: 4849489 - DNA, 25 bp, Homo sapien
gaatatgtccttgataataacaatc

SEQ ID NO: 4849490 - DNA, 25 bp, Homo sapien
gtgctgatgctagcgtcagaaacct

SEQ ID NO: 4849491 - DNA, 25 bp, Homo sapien
gaaaaaacatgagagttctggcttc

SEQ ID NO: 4849492 - DNA, 25 bp, Homo sapien
acagatttataagatccaaaagagg

SEQ ID NO: 4849493 - DNA, 25 bp, Homo sapien
catacagatttataagatccaaaag

SEQ ID NO: 4849494 - DNA, 25 bp, Homo sapien
aacatgagagttctggcttcttaac

SEQ ID NO: 4849495 - DNA, 25 bp, Homo sapien
cacaggtgctgtcataattcttttc

SEQ ID NO: 4849496 - DNA, 25 bp, Homo sapien
acttgaagagtgcatgctcctgtcc

SEQ ID NO: 4849497 - DNA, 25 bp, Homo sapien
tttgatccccctgactgaagtagcc

SEQ ID NO: 4849498 - DNA, 25 bp, Homo sapien
gctcctgtccatcccgatgtatggg

SEQ ID NO: 4849499 - DNA, 25 bp, Homo sapien
ggtagggcaatgttctgctgcaaat

SEQ ID NO: 4849500 - DNA, 25 bp, Homo sapien
tgctgcaaatcgtgggcccacaaca

SEQ ID NO: 4849501 - DNA, 25 bp, Homo sapien
tactagtttggtggcaggtagggca

SEQ ID NO: 4849502 - DNA, 25 bp, Homo sapien
caatgttctgctgcaaatcgtgggc

SEQ ID NO: 4849503 - DNA, 25 bp, Homo sapien
agaattactgatacaatattgtttt

SEQ ID NO: 4849504 - DNA, 25 bp, Homo sapien
atgttcctgaaccttcctgtctttc

SEQ ID NO: 4849505 - DNA, 25 bp, Homo sapien
tctcatgttcctgaaccttcctgtc

SEQ ID NO: 4849506 - DNA, 25 bp, Homo sapien
tccaggaccaaataatattctatgt

SEQ ID NO: 4849507 - DNA, 25 bp, Homo sapien
ctcaccattatccaggaccaaataa

SEQ ID NO: 4849508 - DNA, 25 bp, Homo sapien
ttgacataattagccatctcaaata

SEQ ID NO: 4849509 - DNA, 25 bp, Homo sapien
ctttctgatctcatcttgattctca

SEQ ID NO: 4849510 - DNA, 25 bp, Homo sapien
gacataattagccatctcaaatacc

SEQ ID NO: 4849511 - DNA, 25 bp, Homo sapien
ataccctctttctgatctcatcttg

SEQ ID NO: 4849512 - DNA, 25 bp, Homo sapien
tctcccagcaaactgtttaaaactg

SEQ ID NO: 4849513 - DNA, 25 bp, Homo sapien
tcatgtgcgttcattgaaaaaccca

SEQ ID NO: 4849514 - DNA, 25 bp, Homo sapien
catctcccagcaaactgtttaaaac

SEQ ID NO: 4849515 - DNA, 25 bp, Homo sapien
tgaaaaacccagtgacatctcccag

SEQ ID NO: 4849516 - DNA, 25 bp, Homo sapien
cacctatgtagcaaaagttgtggtc

SEQ ID NO: 4849517 - DNA, 25 bp, Homo sapien
tggtcatcctttgggagccagtcag

SEQ ID NO: 4849518 - DNA, 25 bp, Homo sapien
tcttatacctgagaatactgtggca

SEQ ID NO: 4849519 - DNA, 25 bp, Homo sapien
cctctggaccagctttctgttggga

SEQ ID NO: 4849520 - DNA, 25 bp, Homo sapien
ctccaatcctggttaaaagcaactt

SEQ ID NO: 4849521 - DNA, 25 bp, Homo sapien
actccaatcctggttaaaagcaact

SEQ ID NO: 4849522 - DNA, 25 bp, Homo sapien
tgacaaaactccaatcctggttaaa

SEQ ID NO: 4849523 - DNA, 25 bp, Homo sapien
ctgacaaaactccaatcctggttaa

SEQ ID NO: 4849524 - DNA, 25 bp, Homo sapien
tgagcaatatcatgacgctttcttc

SEQ ID NO: 4849525 - DNA, 25 bp, Homo sapien
cttatccttgtcagtccagatttcc

SEQ ID NO: 4849526 - DNA, 25 bp, Homo sapien
tttccataccaactaaggccacatg

SEQ ID NO: 4849527 - DNA, 25 bp, Homo sapien
tgagagaacactccccctccattta

SEQ ID NO: 4849528 - DNA, 25 bp, Homo sapien
tgtgaaccatcactgtcatattttt

SEQ ID NO: 4849529 - DNA, 25 bp, Homo sapien
tgaaccatcactgtcatatttttct

SEQ ID NO: 4849530 - DNA, 25 bp, Homo sapien
tctttagtttttgaatttgcataag

SEQ ID NO: 4849531 - DNA, 25 bp, Homo sapien
tagtttttgaatttgcataaggcat

SEQ ID NO: 4849532 - DNA, 25 bp, Homo sapien
taaggagaacacattgtagacataa

SEQ ID NO: 4849533 - DNA, 25 bp, Homo sapien
gacccacagtcgttccagcaagttc

SEQ ID NO: 4849534 - DNA, 25 bp, Homo sapien
tgaacaacgccaacagaataaggag

SEQ ID NO: 4849535 - DNA, 25 bp, Homo sapien
tgtagacataaatgcaagacccaca

SEQ ID NO: 4849536 - DNA, 25 bp, Homo sapien
aaagttgtggcccatttcatgtgcc

SEQ ID NO: 4849537 - DNA, 25 bp, Homo sapien
ggacacttgcaagaatagtcgtcat

SEQ ID NO: 4849538 - DNA, 25 bp, Homo sapien
ctctaagaagattatcgctgtggtc

SEQ ID NO: 4849539 - DNA, 25 bp, Homo sapien
gcaagaatagtcgtcatgaaacatt

SEQ ID NO: 4849540 - DNA, 25 bp, Homo sapien
aacttgtcatagctgagacggctgc

SEQ ID NO: 4849541 - DNA, 25 bp, Homo sapien
tccaccaactggttcccacaaattg

SEQ ID NO: 4849542 - DNA, 25 bp, Homo sapien
gcaatggagcattaaagaggcaatt

SEQ ID NO: 4849543 - DNA, 25 bp, Homo sapien
gatatgatatctgtaggcaatggag

SEQ ID NO: 4849544 - DNA, 25 bp, Homo sapien
tagcatcacagcaaatattggtaca

SEQ ID NO: 4849545 - DNA, 25 bp, Homo sapien
tgtcttagcatcacagcaaatattg

SEQ ID NO: 4849546 - DNA, 25 bp, Homo sapien
tttacatgtcttagcatcacagcaa

SEQ ID NO: 4849547 - DNA, 25 bp, Homo sapien
tacatgtcttagcatcacagcaaat

SEQ ID NO: 4849548 - DNA, 25 bp, Homo sapien
ttacacatttcaggcaggtcgcact

SEQ ID NO: 4849549 - DNA, 25 bp, Homo sapien
caagggaagccattgacttggaatc

SEQ ID NO: 4849550 - DNA, 25 bp, Homo sapien
tttgctggtctgcacaccatcccag

SEQ ID NO: 4849551 - DNA, 25 bp, Homo sapien
gggcatgtccccatcaagcagtggc

SEQ ID NO: 4849552 - DNA, 25 bp, Homo sapien
tctgaaatgattttccttcgcacat

SEQ ID NO: 4849553 - DNA, 25 bp, Homo sapien
cgcacatgcacaggggaaaggattt

SEQ ID NO: 4849554 - DNA, 25 bp, Homo sapien
gattttccttcgcacatgcacaggg

SEQ ID NO: 4849555 - DNA, 25 bp, Homo sapien
gaaatgattttccttcgcacatgca

SEQ ID NO: 4849556 - DNA, 25 bp, Homo sapien
gtcctttgaccatggttaaacactg

SEQ ID NO: 4849557 - DNA, 25 bp, Homo sapien
tgagcacacctcaaatattgcatgg

SEQ ID NO: 4849558 - DNA, 25 bp, Homo sapien
catgggatatactgatgctgagaca

SEQ ID NO: 4849559 - DNA, 25 bp, Homo sapien
ccaagggtttatgatcttagtaggg

SEQ ID NO: 4849560 - DNA, 25 bp, Homo sapien
tggacaaagcgaccatttaagaact

SEQ ID NO: 4849561 - DNA, 25 bp, Homo sapien
ttttaggtatataagctagatcact

SEQ ID NO: 4849562 - DNA, 25 bp, Homo sapien
cttggtgaaattagagaatatggtc

SEQ ID NO: 4849563 - DNA, 25 bp, Homo sapien
ctaaaattttggcattatggacaaa

SEQ ID NO: 4849564 - DNA, 25 bp, Homo sapien
ggttccaggatactagtgagcttgc

SEQ ID NO: 4849565 - DNA, 25 bp, Homo sapien
aaattgtgtctcaacccgctgtagc

SEQ ID NO: 4849566 - DNA, 25 bp, Homo sapien
tactaagggaattgagctttgctcc

SEQ ID NO: 4849567 - DNA, 25 bp, Homo sapien
tgtttccacctttaacctggcgcat

SEQ ID NO: 4849568 - DNA, 25 bp, Homo sapien
cgtaaagatgatgctaacttgtgta

SEQ ID NO: 4849569 - DNA, 25 bp, Homo sapien
atttaccagcagtgtacgaagggag

SEQ ID NO: 4849570 - DNA, 25 bp, Homo sapien
ccagcagtgtacgaagggagttgtt

SEQ ID NO: 4849571 - DNA, 25 bp, Homo sapien
tgcatttttctgtccgtaaagatga

SEQ ID NO: 4849572 - DNA, 25 bp, Homo sapien
gaatcctatcaagtcacagagaaag

SEQ ID NO: 4849573 - DNA, 25 bp, Homo sapien
aaataaacacctatgaagatacggc

SEQ ID NO: 4849574 - DNA, 25 bp, Homo sapien
gcctttgacaaacagcaagctaagt

SEQ ID NO: 4849575 - DNA, 25 bp, Homo sapien
gaggtaccctctcttcaagaacaag

SEQ ID NO: 4849576 - DNA, 25 bp, Homo sapien
ttgctttgcagggaatgagtgtgtc

SEQ ID NO: 4849577 - DNA, 25 bp, Homo sapien
cctgttgtaacatgacttatctgca

SEQ ID NO: 4849578 - DNA, 25 bp, Homo sapien
tgtgtcatccactctgcgacagtac

SEQ ID NO: 4849579 - DNA, 25 bp, Homo sapien
gcgacagtacccgtactttgaccca

SEQ ID NO: 4849580 - DNA, 25 bp, Homo sapien
gatttatactgggaaatccctggac

SEQ ID NO: 4849581 - DNA, 25 bp, Homo sapien
gcacccaccatgagatacttgaaga

SEQ ID NO: 4849582 - DNA, 25 bp, Homo sapien
ttttagactcggtacctagcccaca

SEQ ID NO: 4849583 - DNA, 25 bp, Homo sapien
gctgttctatagtgttttcccggat

SEQ ID NO: 4849584 - DNA, 25 bp, Homo sapien
taatttttgccagttgccgaagtgc

SEQ ID NO: 4849585 - DNA, 25 bp, Homo sapien
taataggatgcctgaacgttagcac

SEQ ID NO: 4849586 - DNA, 25 bp, Homo sapien
tatttttccctgtagccgagactct

SEQ ID NO: 4849587 - DNA, 25 bp, Homo sapien
agtgctggcccatgagaagaaaaca

SEQ ID NO: 4849588 - DNA, 25 bp, Homo sapien
cacttagttccattggccaccatgc

SEQ ID NO: 4849589 - DNA, 25 bp, Homo sapien
gtgtcttcaggatcaaatgttttac

SEQ ID NO: 4849590 - DNA, 25 bp, Homo sapien
tacatgtcaggaaagtcactatccg

SEQ ID NO: 4849591 - DNA, 25 bp, Homo sapien
aattatccgacccaccttgacagaa

SEQ ID NO: 4849592 - DNA, 25 bp, Homo sapien
atcttctctgaacgtagatgagaaa

SEQ ID NO: 4849593 - DNA, 25 bp, Homo sapien
tcatcttctctgaacgtagatgaga

SEQ ID NO: 4849594 - DNA, 25 bp, Homo sapien
catcttctctgaacgtagatgagaa

SEQ ID NO: 4849595 - DNA, 25 bp, Homo sapien
cttcatcttctctgaacgtagatga

SEQ ID NO: 4849596 - DNA, 25 bp, Homo sapien
tatccacacattctgcattaatgca

SEQ ID NO: 4849597 - DNA, 25 bp, Homo sapien
gcacttagatgagcaattggttgat

SEQ ID NO: 4849598 - DNA, 25 bp, Homo sapien
caatatccacacattctgcattaat

SEQ ID NO: 4849599 - DNA, 25 bp, Homo sapien
agcatgtcctttgcacttagatgag

SEQ ID NO: 4849600 - DNA, 25 bp, Homo sapien
agaccactgaggagtcatcgcagtc

SEQ ID NO: 4849601 - DNA, 25 bp, Homo sapien
gtcgggagggatccatccttcctca

SEQ ID NO: 4849602 - DNA, 25 bp, Homo sapien
agtcatcgcagtcgggagggatcca

SEQ ID NO: 4849603 - DNA, 25 bp, Homo sapien
cactgaggagtcatcgcagtcggga

SEQ ID NO: 4849604 - DNA, 25 bp, Homo sapien
agatcaaaatcctaagaatttctcc

SEQ ID NO: 4849605 - DNA, 25 bp, Homo sapien
tgagatcaaaatcctaagaatttct

SEQ ID NO: 4849606 - DNA, 25 bp, Homo sapien
ctgagatcaaaatcctaagaatttc

SEQ ID NO: 4849607 - DNA, 25 bp, Homo sapien
atcaaaatcctaagaatttctccgt

SEQ ID NO: 4849608 - DNA, 25 bp, Homo sapien
gattatgttcatgcccctttcaaaa

SEQ ID NO: 4849609 - DNA, 25 bp, Homo sapien
ttgttacaccaggaagaaattagtc

SEQ ID NO: 4849610 - DNA, 25 bp, Homo sapien
tcatagaggtgacttagcaaatcaa

SEQ ID NO: 4849611 - DNA, 25 bp, Homo sapien
caaacctgctatgcatgctatgata

SEQ ID NO: 4849612 - DNA, 25 bp, Homo sapien
aactttaaagactcttggtgataat

SEQ ID NO: 4849613 - DNA, 25 bp, Homo sapien
ttaaagactcttggtgataatgatg

SEQ ID NO: 4849614 - DNA, 25 bp, Homo sapien
gataatgatgtgtccgggtatgttc

SEQ ID NO: 4849615 - DNA, 25 bp, Homo sapien
tccgggtatgttcatggatgtaaca

SEQ ID NO: 4849616 - DNA, 25 bp, Homo sapien
cagcagagaacaggggcccgctgag

SEQ ID NO: 4849617 - DNA, 25 bp, Homo sapien
agcagagaacaggggcccgctgagg

SEQ ID NO: 4849618 - DNA, 25 bp, Homo sapien
ccacaaaaatgaccgccattgggaa

SEQ ID NO: 4849619 - DNA, 25 bp, Homo sapien
aaatgaccgccattgggaacagcac

SEQ ID NO: 4849620 - DNA, 25 bp, Homo sapien
atgaccgccattgggaacagcaccc

SEQ ID NO: 4849621 - DNA, 25 bp, Homo sapien
aaaaatgaccgccattgggaacagc

SEQ ID NO: 4849622 - DNA, 25 bp, Homo sapien
ctctggagctctggtgccggattac

SEQ ID NO: 4849623 - DNA, 25 bp, Homo sapien
tgtttgtgtggcctggtgccagtgg

SEQ ID NO: 4849624 - DNA, 25 bp, Homo sapien
gtgtggcctggtgccagtggtagat

SEQ ID NO: 4849625 - DNA, 25 bp, Homo sapien
cttctgtttgtgtggcctggtgcca

SEQ ID NO: 4849626 - DNA, 25 bp, Homo sapien
cctggtgccagtggtagatagtggc

SEQ ID NO: 4849627 - DNA, 25 bp, Homo sapien
gcatttcatgaaccccggcaaagta

SEQ ID NO: 4849628 - DNA, 25 bp, Homo sapien
cgctgctgggtagaaatgatagata

SEQ ID NO: 4849629 - DNA, 25 bp, Homo sapien
tgtgttactgcaaaacgctgctggg

SEQ ID NO: 4849630 - DNA, 25 bp, Homo sapien
tagcctcggcattttagggactctt

SEQ ID NO: 4849631 - DNA, 25 bp, Homo sapien
tgggggctcattgccttctactggc

SEQ ID NO: 4849632 - DNA, 25 bp, Homo sapien
aggctgggggctcattgccttctac

SEQ ID NO: 4849633 - DNA, 25 bp, Homo sapien
gccttctactggcagatcatacaca

SEQ ID NO: 4849634 - DNA, 25 bp, Homo sapien
tctactggcagatcatacacatggg

SEQ ID NO: 4849635 - DNA, 25 bp, Homo sapien
ggtggaaaatctggctttgtaatta

SEQ ID NO: 4849636 - DNA, 25 bp, Homo sapien
tataggtgcaggaattggcggtggt

SEQ ID NO: 4849637 - DNA, 25 bp, Homo sapien
gcggtggtggaaaatctggctttgt

SEQ ID NO: 4849638 - DNA, 25 bp, Homo sapien
gcaaagaagatgatataggtgcagg

SEQ ID NO: 4849639 - DNA, 25 bp, Homo sapien
ttcaccaatgactatctgatactta

SEQ ID NO: 4849640 - DNA, 25 bp, Homo sapien
aaattcaccaatgactatctgatac

SEQ ID NO: 4849641 - DNA, 25 bp, Homo sapien
aattcaccaatgactatctgatact

SEQ ID NO: 4849642 - DNA, 25 bp, Homo sapien
aaaaattcaccaatgactatctgat

SEQ ID NO: 4849643 - DNA, 25 bp, Homo sapien
ccctgggacaaatgtgctgtgatat

SEQ ID NO: 4849644 - DNA, 25 bp, Homo sapien
gaagttttagatatccctgggacaa

SEQ ID NO: 4849645 - DNA, 25 bp, Homo sapien
tatagacaggaagttttagatatcc

SEQ ID NO: 4849646 - DNA, 25 bp, Homo sapien
tgtgctgtgatatttcaagttaacc

SEQ ID NO: 4849647 - DNA, 25 bp, Homo sapien
ttttatatgacttgttttttctcac

SEQ ID NO: 4849648 - DNA, 25 bp, Homo sapien
ctcgtcttgggcgatactacaaata

SEQ ID NO: 4849649 - DNA, 25 bp, Homo sapien
tgtcactcgtcttgggcgatactac

SEQ ID NO: 4849650 - DNA, 25 bp, Homo sapien
aaataacagttgaagaattaagtgc

SEQ ID NO: 4849651 - DNA, 25 bp, Homo sapien
tcttgggcgatactacaaataacag

SEQ ID NO: 4849652 - DNA, 25 bp, Homo sapien
tattcgtcctactttaaccactcca

SEQ ID NO: 4849653 - DNA, 25 bp, Homo sapien
ttcaaggtccagttcaaattccaac

SEQ ID NO: 4849654 - DNA, 25 bp, Homo sapien
tagaaatgctatgcttgtcccatct

SEQ ID NO: 4849655 - DNA, 25 bp, Homo sapien
tactcaaccaatgaatattcgtcct

SEQ ID NO: 4849656 - DNA, 25 bp, Homo sapien
agtagggggaagtgcgtttgtgtct

SEQ ID NO: 4849657 - DNA, 25 bp, Homo sapien
cagtagggggaagtgcgtttgtgtc

SEQ ID NO: 4849658 - DNA, 25 bp, Homo sapien
ggggaagtgcgtttgtgtctttatg

SEQ ID NO: 4849659 - DNA, 25 bp, Homo sapien
aacagtagggggaagtgcgtttgtg

SEQ ID NO: 4849660 - DNA, 25 bp, Homo sapien
gacatggtgggccttctcttgacag

SEQ ID NO: 4849661 - DNA, 25 bp, Homo sapien
aataatttggctatagatctcttac

SEQ ID NO: 4849662 - DNA, 25 bp, Homo sapien
gggccttctcttgacagtaggagat

SEQ ID NO: 4849663 - DNA, 25 bp, Homo sapien
tctaaaaagacatggtgggccttct

SEQ ID NO: 4849664 - DNA, 25 bp, Homo sapien
tttttaattattggccataccgaga

SEQ ID NO: 4849665 - DNA, 25 bp, Homo sapien
taaataatattggtgtctacatagc

SEQ ID NO: 4849666 - DNA, 25 bp, Homo sapien
catccttagggaatatttctgagaa

SEQ ID NO: 4849667 - DNA, 25 bp, Homo sapien
ttattattctatgggaggtttcttc

SEQ ID NO: 4849668 - DNA, 25 bp, Homo sapien
aagacataacttctaaatgatcaac

SEQ ID NO: 4849669 - DNA, 25 bp, Homo sapien
aaagacataacttctaaatgatcaa

SEQ ID NO: 4849670 - DNA, 25 bp, Homo sapien
tcttgagtcgagagcaaatactggt

SEQ ID NO: 4849671 - DNA, 25 bp, Homo sapien
taaattcatgcaaaggttctcaggc

SEQ ID NO: 4849672 - DNA, 25 bp, Homo sapien
caagaaagtgtgaggtaactccagc

SEQ ID NO: 4849673 - DNA, 25 bp, Homo sapien
cataatcaccgtgtggagcgcagca

SEQ ID NO: 4849674 - DNA, 25 bp, Homo sapien
tgatgatgaactaaagcatgttccc

SEQ ID NO: 4849675 - DNA, 25 bp, Homo sapien
tgggtgaagcagacaaatacaagaa

SEQ ID NO: 4849676 - DNA, 25 bp, Homo sapien
gggaccaggtaagtgattgatagaa

SEQ ID NO: 4849677 - DNA, 25 bp, Homo sapien
gcatgttccctgattatggaaacag

SEQ ID NO: 4849678 - DNA, 25 bp, Homo sapien
gccagagtgggcttatctagaacct

SEQ ID NO: 4849679 - DNA, 25 bp, Homo sapien
catactgcaagggtaaatgaaccat

SEQ ID NO: 4849680 - DNA, 25 bp, Homo sapien
gaaaaagcctgtatccttgacagtg

SEQ ID NO: 4849681 - DNA, 25 bp, Homo sapien
taaagttcctcatgaagcgacaggc

SEQ ID NO: 4849682 - DNA, 25 bp, Homo sapien
caggggagggtcttctgaaacctca

SEQ ID NO: 4849683 - DNA, 25 bp, Homo sapien
tacggatataagtaagtgtggaaac

SEQ ID NO: 4849684 - DNA, 25 bp, Homo sapien
gtgtggaaacagtattgtgaaatca

SEQ ID NO: 4849685 - DNA, 25 bp, Homo sapien
taaatgtcaaataagcggaattccc

SEQ ID NO: 4849686 - DNA, 25 bp, Homo sapien
taagtagacaaacactaaggtatct

SEQ ID NO: 4849687 - DNA, 25 bp, Homo sapien
ttcagtggttattggtagacttcac

SEQ ID NO: 4849688 - DNA, 25 bp, Homo sapien
catttgagggtcgttgaactcaggg

SEQ ID NO: 4849689 - DNA, 25 bp, Homo sapien
gtaatctggacaaaatttagctgca

SEQ ID NO: 4849690 - DNA, 25 bp, Homo sapien
tctgactgcaaccaactaaaatttg

SEQ ID NO: 4849691 - DNA, 25 bp, Homo sapien
tgttgggcattgtagcagaccaccc

SEQ ID NO: 4849692 - DNA, 25 bp, Homo sapien
tagcttacgctcaagagatggattc

SEQ ID NO: 4849693 - DNA, 25 bp, Homo sapien
cccaggcctagttgctaaaaagtgc

SEQ ID NO: 4849694 - DNA, 25 bp, Homo sapien
caaatcctcggtgctagtaaagaag

SEQ ID NO: 4849695 - DNA, 25 bp, Homo sapien
tagtcatcttagtcatttaatattg

SEQ ID NO: 4849696 - DNA, 25 bp, Homo sapien
cagatatatcccaagagtatggact

SEQ ID NO: 4849697 - DNA, 25 bp, Homo sapien
tgggagcaacataaacgacttagtc

SEQ ID NO: 4849698 - DNA, 25 bp, Homo sapien
taactttgtgtgaggtgggagcaac

SEQ ID NO: 4849699 - DNA, 25 bp, Homo sapien
aggtcttacgtctgagtctttgatc

SEQ ID NO: 4849700 - DNA, 25 bp, Homo sapien
tttgtcaatgttggcgtctgttgcc

SEQ ID NO: 4849701 - DNA, 25 bp, Homo sapien
tcaatgttggcgtctgttgccattg

SEQ ID NO: 4849702 - DNA, 25 bp, Homo sapien
cctaggtttacttctggagttatgg

SEQ ID NO: 4849703 - DNA, 25 bp, Homo sapien
tggttggctgcacccacccacccat

SEQ ID NO: 4849704 - DNA, 25 bp, Homo sapien
ggtggttggctgcacccacccaccc

SEQ ID NO: 4849705 - DNA, 25 bp, Homo sapien
tgaaggtttgttactataggtatac

SEQ ID NO: 4849706 - DNA, 25 bp, Homo sapien
catggtggttggctgcacccaccca

SEQ ID NO: 4849707 - DNA, 25 bp, Homo sapien
tccacagcagttagagagatcaagg

SEQ ID NO: 4849708 - DNA, 25 bp, Homo sapien
gcaacacatgttgatttacaaggga

SEQ ID NO: 4849709 - DNA, 25 bp, Homo sapien
gctgagacatagcacttggcctgtg

SEQ ID NO: 4849710 - DNA, 25 bp, Homo sapien
tttgcggtccagcagttgatacctg

SEQ ID NO: 4849711 - DNA, 25 bp, Homo sapien
cactccggttcccacattatctagg

SEQ ID NO: 4849712 - DNA, 25 bp, Homo sapien
tccccaaagtgccttgtgacccaag

SEQ ID NO: 4849713 - DNA, 25 bp, Homo sapien
tttcttcccgtttctcagtacttgc

SEQ ID NO: 4849714 - DNA, 25 bp, Homo sapien
cacagcactgtgtccgaggcaaagt

SEQ ID NO: 4849715 - DNA, 25 bp, Homo sapien
ctcctccatccctaatgatgctttc

SEQ ID NO: 4849716 - DNA, 25 bp, Homo sapien
tcctccatccctaatgatgctttcc

SEQ ID NO: 4849717 - DNA, 25 bp, Homo sapien
tgtttgcccctggtgctcctataag

SEQ ID NO: 4849718 - DNA, 25 bp, Homo sapien
tataagcagtgggaatgtgtgaact

SEQ ID NO: 4849719 - DNA, 25 bp, Homo sapien
gaggtggtcgcgtgcatatctacat

SEQ ID NO: 4849720 - DNA, 25 bp, Homo sapien
ctacatactcaccaaactggaccat

SEQ ID NO: 4849721 - DNA, 25 bp, Homo sapien
cacttttcgtgtgagattggggaat

SEQ ID NO: 4849722 - DNA, 25 bp, Homo sapien
cccccacttttcgtgtgagattggg

SEQ ID NO: 4849723 - DNA, 25 bp, Homo sapien
aacccccacttttcgtgtgagattg

SEQ ID NO: 4849724 - DNA, 25 bp, Homo sapien
cccacttttcgtgtgagattgggga

SEQ ID NO: 4849725 - DNA, 25 bp, Homo sapien
ggtctccccagtgtccagttttatc

SEQ ID NO: 4849726 - DNA, 25 bp, Homo sapien
tggtctccccagtgtccagttttat

SEQ ID NO: 4849727 - DNA, 25 bp, Homo sapien
tctccccagtgtccagttttatctt

SEQ ID NO: 4849728 - DNA, 25 bp, Homo sapien
gtctccccagtgtccagttttatct

SEQ ID NO: 4849729 - DNA, 25 bp, Homo sapien
gcaggtagctgggagatcccacgca

SEQ ID NO: 4849730 - DNA, 25 bp, Homo sapien
gtagctgggagatcccacgcagcat

SEQ ID NO: 4849731 - DNA, 25 bp, Homo sapien
ctgcaggtagctgggagatcccacg

SEQ ID NO: 4849732 - DNA, 25 bp, Homo sapien
aggtagctgggagatcccacgcagc

SEQ ID NO: 4849733 - DNA, 25 bp, Homo sapien
gaacaatgagccaaagtacaggcag

SEQ ID NO: 4849734 - DNA, 25 bp, Homo sapien
cttgagtttgaacaatgagccaaag

SEQ ID NO: 4849735 - DNA, 25 bp, Homo sapien
caaagtacaggcagcaggacccaag

SEQ ID NO: 4849736 - DNA, 25 bp, Homo sapien
aagtacaggcagcaggacccaagac

SEQ ID NO: 4849737 - DNA, 25 bp, Homo sapien
aggacaaactatttcatggagcgtt

SEQ ID NO: 4849738 - DNA, 25 bp, Homo sapien
tctgtctggttgttcttgatctctc

SEQ ID NO: 4849739 - DNA, 25 bp, Homo sapien
aattcaggtgtttgctttatggcta

SEQ ID NO: 4849740 - DNA, 25 bp, Homo sapien
catggagcgttaattcaggtgtttg

SEQ ID NO: 4849741 - DNA, 25 bp, Homo sapien
catttaagatcatctgatattgaac

SEQ ID NO: 4849742 - DNA, 25 bp, Homo sapien
tcatctgatattgaacttcaggttc

SEQ ID NO: 4849743 - DNA, 25 bp, Homo sapien
taagatcatctgatattgaacttca

SEQ ID NO: 4849744 - DNA, 25 bp, Homo sapien
tccatttaagatcatctgatattga

SEQ ID NO: 4849745 - DNA, 25 bp, Homo sapien
catgttctcaggtttcgtggtaatt

SEQ ID NO: 4849746 - DNA, 25 bp, Homo sapien
tctcaggtttcgtggtaatttcctc

SEQ ID NO: 4849747 - DNA, 25 bp, Homo sapien
tcaggtttcgtggtaatttcctctc

SEQ ID NO: 4849748 - DNA, 25 bp, Homo sapien
ctgggtgagtacaatgtttcagtgt

SEQ ID NO: 4849749 - DNA, 25 bp, Homo sapien
tcaacccgtcacaagtactgatgct

SEQ ID NO: 4849750 - DNA, 25 bp, Homo sapien
ctcaacccgtcacaagtactgatgc

SEQ ID NO: 4849751 - DNA, 25 bp, Homo sapien
aacccgtcacaagtactgatgctgg

SEQ ID NO: 4849752 - DNA, 25 bp, Homo sapien
acccgtcacaagtactgatgctggc

SEQ ID NO: 4849753 - DNA, 25 bp, Homo sapien
ctcctggttagatgtaaagacggca

SEQ ID NO: 4849754 - DNA, 25 bp, Homo sapien
gtggttagctgggtcttgttcctcc

SEQ ID NO: 4849755 - DNA, 25 bp, Homo sapien
tgatctagagattcgaattgggcct

SEQ ID NO: 4849756 - DNA, 25 bp, Homo sapien
ccttgtttcccgtcagtgctcttca

SEQ ID NO: 4849757 - DNA, 25 bp, Homo sapien
ccagcaccaaatagagatcaatgta

SEQ ID NO: 4849758 - DNA, 25 bp, Homo sapien
tccagcaccaaatagagatcaatgt

SEQ ID NO: 4849759 - DNA, 25 bp, Homo sapien
cagcaccaaatagagatcaatgtat

SEQ ID NO: 4849760 - DNA, 25 bp, Homo sapien
tatcagagttagattctcattatag

SEQ ID NO: 4849761 - DNA, 25 bp, Homo sapien
cacattgagtaggttcatcacatca

SEQ ID NO: 4849762 - DNA, 25 bp, Homo sapien
gcttcttatcagagttagattctca

SEQ ID NO: 4849763 - DNA, 25 bp, Homo sapien
attgagtaggttcatcacatcaaac

SEQ ID NO: 4849764 - DNA, 25 bp, Homo sapien
tgagcatggtcgtggatctttttcc

SEQ ID NO: 4849765 - DNA, 25 bp, Homo sapien
caaggccacttgaacatctatggtg

SEQ ID NO: 4849766 - DNA, 25 bp, Homo sapien
tcaaacgtggtgcttgcgctgggca

SEQ ID NO: 4849767 - DNA, 25 bp, Homo sapien
actgtgccatctcaggaagttgtca

SEQ ID NO: 4849768 - DNA, 25 bp, Homo sapien
acgtcgattgttgaagctaatcccg

SEQ ID NO: 4849769 - DNA, 25 bp, Homo sapien
ctgccagtcccacacgtcgattgtt

SEQ ID NO: 4849770 - DNA, 25 bp, Homo sapien
caataacagcaaccgaagatgggga

SEQ ID NO: 4849771 - DNA, 25 bp, Homo sapien
gaagatggggaacacaaggaatttg

SEQ ID NO: 4849772 - DNA, 25 bp, Homo sapien
tcagatactgattcatcacacaact

SEQ ID NO: 4849773 - DNA, 25 bp, Homo sapien
ggcataccaaggacatggcccagct

SEQ ID NO: 4849774 - DNA, 25 bp, Homo sapien
cttggtgttgaatggaacatcaggc

SEQ ID NO: 4849775 - DNA, 25 bp, Homo sapien
gacatcactcctacaagagccacat

SEQ ID NO: 4849776 - DNA, 25 bp, Homo sapien
tgcacggcaagatgtactgaaatcc

SEQ ID NO: 4849777 - DNA, 25 bp, Homo sapien
taggaataggtgcttgcagcaggca

SEQ ID NO: 4849778 - DNA, 25 bp, Homo sapien
gtatctttcaaaatgtgcacggcaa

SEQ ID NO: 4849779 - DNA, 25 bp, Homo sapien
cacttctagaaggtggttcccacac

SEQ ID NO: 4849780 - DNA, 25 bp, Homo sapien
acgttagggcttcacagcagagatt

SEQ ID NO: 4849781 - DNA, 25 bp, Homo sapien
ttagggcttcacagcagagattggt

SEQ ID NO: 4849782 - DNA, 25 bp, Homo sapien
gggcttcacagcagagattggtaca

SEQ ID NO: 4849783 - DNA, 25 bp, Homo sapien
ggcttcacagcagagattggtacac

SEQ ID NO: 4849784 - DNA, 25 bp, Homo sapien
tatggtttggagcatctcctccgca

SEQ ID NO: 4849785 - DNA, 25 bp, Homo sapien
tggagcatctcctccgcaatcagtt

SEQ ID NO: 4849786 - DNA, 25 bp, Homo sapien
gtggtatggtttggagcatctcctc

SEQ ID NO: 4849787 - DNA, 25 bp, Homo sapien
tggtttggagcatctcctccgcaat

SEQ ID NO: 4849788 - DNA, 25 bp, Homo sapien
cacaagattcctgggacagttagag

SEQ ID NO: 4849789 - DNA, 25 bp, Homo sapien
cagttagagttcttggttcttgtcc

SEQ ID NO: 4849790 - DNA, 25 bp, Homo sapien
tgtcctggcaaggtagcatctcagt

SEQ ID NO: 4849791 - DNA, 25 bp, Homo sapien
gtttcctggactgataacaatatag

SEQ ID NO: 4849792 - DNA, 25 bp, Homo sapien
agagccaatgtctctaattacatct

SEQ ID NO: 4849793 - DNA, 25 bp, Homo sapien
aatgtctctaattacatctgtttac

SEQ ID NO: 4849794 - DNA, 25 bp, Homo sapien
gccaatgtctctaattacatctgtt

SEQ ID NO: 4849795 - DNA, 25 bp, Homo sapien
ggcctaaacaaagagccaatgtctc

SEQ ID NO: 4849796 - DNA, 25 bp, Homo sapien
ctttcaagagcaaggcgaagtgaac

SEQ ID NO: 4849797 - DNA, 25 bp, Homo sapien
taactctgaatagtttagccgtgca

SEQ ID NO: 4849798 - DNA, 25 bp, Homo sapien
aaagccttcacccatcaagtggtat

SEQ ID NO: 4849799 - DNA, 25 bp, Homo sapien
ccaaagggcagaactaagtcacaaa

SEQ ID NO: 4849800 - DNA, 25 bp, Homo sapien
ctgtcatgcagggcatcccaggagg

SEQ ID NO: 4849801 - DNA, 25 bp, Homo sapien
gtcatgcagggcatcccaggaggcc

SEQ ID NO: 4849802 - DNA, 25 bp, Homo sapien
tgtcatgcagggcatcccaggaggc

SEQ ID NO: 4849803 - DNA, 25 bp, Homo sapien
agatcttggcaaggcatatcctggg

SEQ ID NO: 4849804 - DNA, 25 bp, Homo sapien
tggaaaggatgtcctaagaagccct

SEQ ID NO: 4849805 - DNA, 25 bp, Homo sapien
tgcagccgggctgatatgcacacct

SEQ ID NO: 4849806 - DNA, 25 bp, Homo sapien
tggctggaagttcgtatcaaacccg

SEQ ID NO: 4849807 - DNA, 25 bp, Homo sapien
ccctctgatgcacgagaaatgcaga

SEQ ID NO: 4849808 - DNA, 25 bp, Homo sapien
gtcacagcccctctgatgcacgaga

SEQ ID NO: 4849809 - DNA, 25 bp, Homo sapien
tctgatgcacgagaaatgcagagga

SEQ ID NO: 4849810 - DNA, 25 bp, Homo sapien
acagcccctctgatgcacgagaaat

SEQ ID NO: 4849811 - DNA, 25 bp, Homo sapien
gtcaagggcatatttggagcctctg

SEQ ID NO: 4849812 - DNA, 25 bp, Homo sapien
ggtcaagggcatatttggagcctct

SEQ ID NO: 4849813 - DNA, 25 bp, Homo sapien
tcaagggcatatttggagcctctgc

SEQ ID NO: 4849814 - DNA, 25 bp, Homo sapien
aaggtcaagggcatatttggagcct

SEQ ID NO: 4849815 - DNA, 25 bp, Homo sapien
tgcctgtaccggcaggtctccatta

SEQ ID NO: 4849816 - DNA, 25 bp, Homo sapien
tctgtgtgcctgtaccggcaggtct

SEQ ID NO: 4849817 - DNA, 25 bp, Homo sapien
gtaccggcaggtctccattaatcat

SEQ ID NO: 4849818 - DNA, 25 bp, Homo sapien
tgtgtgcctgtaccggcaggtctcc

SEQ ID NO: 4849819 - DNA, 25 bp, Homo sapien
tttggccaacgatcacttggttggt

SEQ ID NO: 4849820 - DNA, 25 bp, Homo sapien
ttggccaacgatcacttggttggtt

SEQ ID NO: 4849821 - DNA, 25 bp, Homo sapien
tcctcacttccactgcagggatgaa

SEQ ID NO: 4849822 - DNA, 25 bp, Homo sapien
tcacagataggtgggcagttttgat

SEQ ID NO: 4849823 - DNA, 25 bp, Homo sapien
tgagtgattctggtagaggagagca

SEQ ID NO: 4849824 - DNA, 25 bp, Homo sapien
gcagttttgatccacaacaaggaag

SEQ ID NO: 4849825 - DNA, 25 bp, Homo sapien
tcaagaatatacacccgggaagcat

SEQ ID NO: 4849826 - DNA, 25 bp, Homo sapien
atcaagaatatacacccgggaagca

SEQ ID NO: 4849827 - DNA, 25 bp, Homo sapien
catctgtgagatgagccctgcttaa

SEQ ID NO: 4849828 - DNA, 25 bp, Homo sapien
caaagcagctaatggccagcacagt

SEQ ID NO: 4849829 - DNA, 25 bp, Homo sapien
tgggtagccctgcatcagtgccaac

SEQ ID NO: 4849830 - DNA, 25 bp, Homo sapien
tattgtgtggccagcagtagcatat

SEQ ID NO: 4849831 - DNA, 25 bp, Homo sapien
tgggtgtgtccagtatctcgcttct

SEQ ID NO: 4849832 - DNA, 25 bp, Homo sapien
agttgttgaccctctactccaagga

SEQ ID NO: 4849833 - DNA, 25 bp, Homo sapien
taggacgaaccagttgttgaccctc

SEQ ID NO: 4849834 - DNA, 25 bp, Homo sapien
cagtatctcgcttctgtatcagagg

SEQ ID NO: 4849835 - DNA, 25 bp, Homo sapien
agatgaaggactaaggtttttctat

SEQ ID NO: 4849836 - DNA, 25 bp, Homo sapien
tatttcatacaacaattcttcttca

SEQ ID NO: 4849837 - DNA, 25 bp, Homo sapien
acaacaattcttcttcatacgtttt

SEQ ID NO: 4849838 - DNA, 25 bp, Homo sapien
ctggatcttagaagatgaaggacta

SEQ ID NO: 4849839 - DNA, 25 bp, Homo sapien
aggatgcctggtgaacgcttctcct

SEQ ID NO: 4849840 - DNA, 25 bp, Homo sapien
tattcgtgtactatggatccttggt

SEQ ID NO: 4849841 - DNA, 25 bp, Homo sapien
ctggcagctgaatcatattcgtgta

SEQ ID NO: 4849842 - DNA, 25 bp, Homo sapien
cattacacgtactgatactggcagc

SEQ ID NO: 4849843 - DNA, 25 bp, Homo sapien
gaccattacacgtactgatactggc

SEQ ID NO: 4849844 - DNA, 25 bp, Homo sapien
gaggtatctttggtcgtttattctg

SEQ ID NO: 4849845 - DNA, 25 bp, Homo sapien
ggtatctttggtcgtttattctgaa

SEQ ID NO: 4849846 - DNA, 25 bp, Homo sapien
ttggtcgtttattctgaagaatccc

SEQ ID NO: 4849847 - DNA, 25 bp, Homo sapien
atttcactggttcaatgaggtatct

SEQ ID NO: 4849848 - DNA, 25 bp, Homo sapien
gaataattggcaccatacggcaccc

SEQ ID NO: 4849849 - DNA, 25 bp, Homo sapien
tttctggtaaaattaagctctgtac

SEQ ID NO: 4849850 - DNA, 25 bp, Homo sapien
caccatacggcaccctcaggttata

SEQ ID NO: 4849851 - DNA, 25 bp, Homo sapien
gctctgtacaggaataattggcacc

SEQ ID NO: 4849852 - DNA, 25 bp, Homo sapien
tcatttggggtaaagataataataa

SEQ ID NO: 4849853 - DNA, 25 bp, Homo sapien
ggtaaagataataataaagtactca

SEQ ID NO: 4849854 - DNA, 25 bp, Homo sapien
gtaaagataataataaagtactcac

SEQ ID NO: 4849855 - DNA, 25 bp, Homo sapien
tgtttcatttggggtaaagataata

SEQ ID NO: 4849856 - DNA, 25 bp, Homo sapien
tagaaaagcctaaagctccaaggac

SEQ ID NO: 4849857 - DNA, 25 bp, Homo sapien
caggaaacatccattaggcatacag

SEQ ID NO: 4849858 - DNA, 25 bp, Homo sapien
gatgaagtgccagactgaaagtagc

SEQ ID NO: 4849859 - DNA, 25 bp, Homo sapien
gcttacagactaacatccactggga

SEQ ID NO: 4849860 - DNA, 25 bp, Homo sapien
gaacaattcaacatacttttcatca

SEQ ID NO: 4849861 - DNA, 25 bp, Homo sapien
acaattcaacatacttttcatcatg

SEQ ID NO: 4849862 - DNA, 25 bp, Homo sapien
tgaacaattcaacatacttttcatc

SEQ ID NO: 4849863 - DNA, 25 bp, Homo sapien
aacaattcaacatacttttcatcat

SEQ ID NO: 4849864 - DNA, 25 bp, Homo sapien
cctccaggaaatagctacgagggca

SEQ ID NO: 4849865 - DNA, 25 bp, Homo sapien
gctggagaagtgctgaagagggaca

SEQ ID NO: 4849866 - DNA, 25 bp, Homo sapien
gacaggaaactgtagctaccccttc

SEQ ID NO: 4849867 - DNA, 25 bp, Homo sapien
gagggacaggaaactgtagctaccc

SEQ ID NO: 4849868 - DNA, 25 bp, Homo sapien
caaaattgaccattccccaaattcg

SEQ ID NO: 4849869 - DNA, 25 bp, Homo sapien
tgtgaggatgaccatttctgcgata

SEQ ID NO: 4849870 - DNA, 25 bp, Homo sapien
ttgtgaggatgaccatttctgcgat

SEQ ID NO: 4849871 - DNA, 25 bp, Homo sapien
cgcaataaggtagtttctatatttg

SEQ ID NO: 4849872 - DNA, 25 bp, Homo sapien
ttcaatgccaaccaacgtcacatgg

SEQ ID NO: 4849873 - DNA, 25 bp, Homo sapien
ccaacgtcacatggatgtttaaggt

SEQ ID NO: 4849874 - DNA, 25 bp, Homo sapien
tcttcatgtgtccatatttcaatgc

SEQ ID NO: 4849875 - DNA, 25 bp, Homo sapien
ttagttgatattgagctcatcttta

SEQ ID NO: 4849876 - DNA, 25 bp, Homo sapien
cttagttgatattgagctcatcttt

SEQ ID NO: 4849877 - DNA, 25 bp, Homo sapien
agttgatattgagctcatctttaac

SEQ ID NO: 4849878 - DNA, 25 bp, Homo sapien
tagttgatattgagctcatctttaa

SEQ ID NO: 4849879 - DNA, 25 bp, Homo sapien
aatgatactggtggaataatagggc

SEQ ID NO: 4849880 - DNA, 25 bp, Homo sapien
ccctggataagaaattccttgcaca

SEQ ID NO: 4849881 - DNA, 25 bp, Homo sapien
taatagggcaggcacataccccctg

SEQ ID NO: 4849882 - DNA, 25 bp, Homo sapien
ccttgcacatgtgagtagagccact

SEQ ID NO: 4849883 - DNA, 25 bp, Homo sapien
gccccagttgatgtgccattctgtt

SEQ ID NO: 4849884 - DNA, 25 bp, Homo sapien
tgtccatcacgcattttcctgaagg

SEQ ID NO: 4849885 - DNA, 25 bp, Homo sapien
acaggtgcatgggaactcgtcatgc

SEQ ID NO: 4849886 - DNA, 25 bp, Homo sapien
catgctgcatcccaaggttatgccc

SEQ ID NO: 4849887 - DNA, 25 bp, Homo sapien
attgtaaggaaatggaatgttgagc

SEQ ID NO: 4849888 - DNA, 25 bp, Homo sapien
caagtactggtggtattggttttgg

SEQ ID NO: 4849889 - DNA, 25 bp, Homo sapien
tgcatgttggcttataatccttcaa

SEQ ID NO: 4849890 - DNA, 25 bp, Homo sapien
tggttttggctgcatttactgaatt

SEQ ID NO: 4849891 - DNA, 25 bp, Homo sapien
tggcttcagtacacatgtgtgtgca

SEQ ID NO: 4849892 - DNA, 25 bp, Homo sapien
catcacagcaaggattagtacactc

SEQ ID NO: 4849893 - DNA, 25 bp, Homo sapien
tctgcacaagtaaatcctggcttca

SEQ ID NO: 4849894 - DNA, 25 bp, Homo sapien
tgtgcatcacagcaaggattagtac

SEQ ID NO: 4849895 - DNA, 25 bp, Homo sapien
tgcatatggaccctgctttttttat

SEQ ID NO: 4849896 - DNA, 25 bp, Homo sapien
ctgcatatggaccctgcttttttta

SEQ ID NO: 4849897 - DNA, 25 bp, Homo sapien
gagcactgatcctcacgagttggac

SEQ ID NO: 4849898 - DNA, 25 bp, Homo sapien
gaaaatcacattcatctttcgccgg

SEQ ID NO: 4849899 - DNA, 25 bp, Homo sapien
cattgaccctgaactggtccttagg

SEQ ID NO: 4849900 - DNA, 25 bp, Homo sapien
tcttgcaaggaaatccattgaccct

SEQ ID NO: 4849901 - DNA, 25 bp, Homo sapien
atcttgtagcagatatcatgactct

SEQ ID NO: 4849902 - DNA, 25 bp, Homo sapien
catcttgtagcagatatcatgactc

SEQ ID NO: 4849903 - DNA, 25 bp, Homo sapien
cagatatcatgactctctattgcct

SEQ ID NO: 4849904 - DNA, 25 bp, Homo sapien
gcagatatcatgactctctattgcc

SEQ ID NO: 4849905 - DNA, 25 bp, Homo sapien
ggagagaggaaagctcccctccagt

SEQ ID NO: 4849906 - DNA, 25 bp, Homo sapien
catttgacagtagcattcttctggg

SEQ ID NO: 4849907 - DNA, 25 bp, Homo sapien
ccctccagtgcagtagatctttcca

SEQ ID NO: 4849908 - DNA, 25 bp, Homo sapien
cacattttgttcctgacgccaccag

SEQ ID NO: 4849909 - DNA, 25 bp, Homo sapien
tttacatattgtgcaggcatttttt

SEQ ID NO: 4849910 - DNA, 25 bp, Homo sapien
tacatattgtgcaggcattttttgc

SEQ ID NO: 4849911 - DNA, 25 bp, Homo sapien
acatattgtgcaggcattttttgct

SEQ ID NO: 4849912 - DNA, 25 bp, Homo sapien
tattgtgcaggcattttttgctaaa

SEQ ID NO: 4849913 - DNA, 25 bp, Homo sapien
aggggcaattggttgagatatagac

SEQ ID NO: 4849914 - DNA, 25 bp, Homo sapien
gcaattggttgagatatagaccttt

SEQ ID NO: 4849915 - DNA, 25 bp, Homo sapien
ttttccatgtttagacattcaccat

SEQ ID NO: 4849916 - DNA, 25 bp, Homo sapien
cactgagaggggcaattggttgaga

SEQ ID NO: 4849917 - DNA, 25 bp, Homo sapien
ttaattttgaaagcagtcatatctt

SEQ ID NO: 4849918 - DNA, 25 bp, Homo sapien
taattttgaaagcagtcatatctta

SEQ ID NO: 4849919 - DNA, 25 bp, Homo sapien
aattttgaaagcagtcatatcttac

SEQ ID NO: 4849920 - DNA, 25 bp, Homo sapien
cagtggcactggagtccgtggccat

SEQ ID NO: 4849921 - DNA, 25 bp, Homo sapien
aggtttcttcacaggctacaggtgc

SEQ ID NO: 4849922 - DNA, 25 bp, Homo sapien
tggtaacatgtaaggtttcttcaca

SEQ ID NO: 4849923 - DNA, 25 bp, Homo sapien
tggcactggagtccgtggccatcca

SEQ ID NO: 4849924 - DNA, 25 bp, Homo sapien
caacatgaagaaacatgggcttcat

SEQ ID NO: 4849925 - DNA, 25 bp, Homo sapien
tgcaacatgaagaaacatgggcttc

SEQ ID NO: 4849926 - DNA, 25 bp, Homo sapien
gcaacatgaagaaacatgggcttca

SEQ ID NO: 4849927 - DNA, 25 bp, Homo sapien
ctgcaacatgaagaaacatgggctt

SEQ ID NO: 4849928 - DNA, 25 bp, Homo sapien
gataccgacaataaccaggacaagc

SEQ ID NO: 4849929 - DNA, 25 bp, Homo sapien
tagtataagaactccgataccgaca

SEQ ID NO: 4849930 - DNA, 25 bp, Homo sapien
ggacaagcacaacaaccaagatggt

SEQ ID NO: 4849931 - DNA, 25 bp, Homo sapien
cttgatacattttcggtaacgaact

SEQ ID NO: 4849932 - DNA, 25 bp, Homo sapien
ccttatctgctgctcatcaccaaag

SEQ ID NO: 4849933 - DNA, 25 bp, Homo sapien
ttaggaaatgaatttctggcaggat

SEQ ID NO: 4849934 - DNA, 25 bp, Homo sapien
ggcaggattggctcagtccttatct

SEQ ID NO: 4849935 - DNA, 25 bp, Homo sapien
catcaccaaagtatcctttgttctc

SEQ ID NO: 4849936 - DNA, 25 bp, Homo sapien
tactacacctgcatgttttggcacg

SEQ ID NO: 4849937 - DNA, 25 bp, Homo sapien
cattcaggttaaaacactttctaat

SEQ ID NO: 4849938 - DNA, 25 bp, Homo sapien
gcagataagcgctatacattttcct

SEQ ID NO: 4849939 - DNA, 25 bp, Homo sapien
tttcttaaagtaaaagctgaggtca

SEQ ID NO: 4849940 - DNA, 25 bp, Homo sapien
caatctgatatttactttttctttt

SEQ ID NO: 4849941 - DNA, 25 bp, Homo sapien
gatcaatctgatatttactttttct

SEQ ID NO: 4849942 - DNA, 25 bp, Homo sapien
atcaatctgatatttactttttctt

SEQ ID NO: 4849943 - DNA, 25 bp, Homo sapien
gtgatcaatctgatatttacttttt

SEQ ID NO: 4849944 - DNA, 25 bp, Homo sapien
cagtgtgatgtagtggggacttgaa

SEQ ID NO: 4849945 - DNA, 25 bp, Homo sapien
ttgaaaaactagtgggcaggctttc

SEQ ID NO: 4849946 - DNA, 25 bp, Homo sapien
tgatgtagtggggacttgaaaaact

SEQ ID NO: 4849947 - DNA, 25 bp, Homo sapien
ggacttgaaaaactagtgggcaggc

SEQ ID NO: 4849948 - DNA, 25 bp, Homo sapien
tggcactttgattgggatctgcgat

SEQ ID NO: 4849949 - DNA, 25 bp, Homo sapien
actttgattgggatctgcgattcct

SEQ ID NO: 4849950 - DNA, 25 bp, Homo sapien
cactttgattgggatctgcgattcc

SEQ ID NO: 4849951 - DNA, 25 bp, Homo sapien
ggcactttgattgggatctgcgatt

SEQ ID NO: 4849952 - DNA, 25 bp, Homo sapien
tctgtagtcctacatttattcatgc

SEQ ID NO: 4849953 - DNA, 25 bp, Homo sapien
gattgtttcctatgaaatctgtgaa

SEQ ID NO: 4849954 - DNA, 25 bp, Homo sapien
cctatgaaatctgtgaaccatgtat

SEQ ID NO: 4849955 - DNA, 25 bp, Homo sapien
tatatctactaattagaataacctt

SEQ ID NO: 4849956 - DNA, 25 bp, Homo sapien
taattacctagaatccgtgccgctc

SEQ ID NO: 4849957 - DNA, 25 bp, Homo sapien
gaagcagctgaaatcattcccaggg

SEQ ID NO: 4849958 - DNA, 25 bp, Homo sapien
cataacaaacggatagggagagggc

SEQ ID NO: 4849959 - DNA, 25 bp, Homo sapien
taaagacgttgcatccagaatcccc

SEQ ID NO: 4849960 - DNA, 25 bp, Homo sapien
tatttatttcatcgagtcagaatat

SEQ ID NO: 4849961 - DNA, 25 bp, Homo sapien
tcttttgtagcctttatttatttca

SEQ ID NO: 4849962 - DNA, 25 bp, Homo sapien
tttatttatttcatcgagtcagaat

SEQ ID NO: 4849963 - DNA, 25 bp, Homo sapien
cctttatttatttcatcgagtcaga

SEQ ID NO: 4849964 - DNA, 25 bp, Homo sapien
tataaaggaaatacgatatcatcaa

SEQ ID NO: 4849965 - DNA, 25 bp, Homo sapien
aagtagcagctagttaaatatggag

SEQ ID NO: 4849966 - DNA, 25 bp, Homo sapien
aaataatgaatcagaaaggtgatcc

SEQ ID NO: 4849967 - DNA, 25 bp, Homo sapien
gggtacaagacatgtttattattgg

SEQ ID NO: 4849968 - DNA, 25 bp, Homo sapien
taacttcattgggctttgttttcaa

SEQ ID NO: 4849969 - DNA, 25 bp, Homo sapien
gagttgggtcctgtttacacaatta

SEQ ID NO: 4849970 - DNA, 25 bp, Homo sapien
tattttccactagctgtttaacttc

SEQ ID NO: 4849971 - DNA, 25 bp, Homo sapien
tgtttacacaattatccacatcttg

SEQ ID NO: 4849972 - DNA, 25 bp, Homo sapien
gaagagcctgtgttattgttctgca

SEQ ID NO: 4849973 - DNA, 25 bp, Homo sapien
gttctaagatctcagatgagccatt

SEQ ID NO: 4849974 - DNA, 25 bp, Homo sapien
agaagagcctgtgttattgttctgc

SEQ ID NO: 4849975 - DNA, 25 bp, Homo sapien
gatctcagatgagccatttgctgtt

SEQ ID NO: 4849976 - DNA, 25 bp, Homo sapien
tcactatcgaatatacaactttgga

SEQ ID NO: 4849977 - DNA, 25 bp, Homo sapien
tctcattgatgccttccatataaga

SEQ ID NO: 4849978 - DNA, 25 bp, Homo sapien
tctcacaattgtccattcacttcat

SEQ ID NO: 4849979 - DNA, 25 bp, Homo sapien
tgacacattttgcaaggttacttta

SEQ ID NO: 4849980 - DNA, 25 bp, Homo sapien
gacccacagtacttgagtctaatat

SEQ ID NO: 4849981 - DNA, 25 bp, Homo sapien
tacttgagtctaatattctttagct

SEQ ID NO: 4849982 - DNA, 25 bp, Homo sapien
ccacagtacttgagtctaatattct

SEQ ID NO: 4849983 - DNA, 25 bp, Homo sapien
ttgagtctaatattctttagctgca

SEQ ID NO: 4849984 - DNA, 25 bp, Homo sapien
ttaacattcgatcatgaccactgag

SEQ ID NO: 4849985 - DNA, 25 bp, Homo sapien
aacattcgatcatgaccactgaggg

SEQ ID NO: 4849986 - DNA, 25 bp, Homo sapien
agtgatttaacattcgatcatgacc

SEQ ID NO: 4849987 - DNA, 25 bp, Homo sapien
gatttaacattcgatcatgaccact

SEQ ID NO: 4849988 - DNA, 25 bp, Homo sapien
tgaagattggtaatagggatgatga

SEQ ID NO: 4849989 - DNA, 25 bp, Homo sapien
tgattggagtcagactctggagtaa

SEQ ID NO: 4849990 - DNA, 25 bp, Homo sapien
ttggagtcagactctggagtaagga

SEQ ID NO: 4849991 - DNA, 25 bp, Homo sapien
gatgattggagtcagactctggagt

SEQ ID NO: 4849992 - DNA, 25 bp, Homo sapien
aaccgaaagaatagactgctgtgaa

SEQ ID NO: 4849993 - DNA, 25 bp, Homo sapien
gacccaaaccgaaagaatagactgc

SEQ ID NO: 4849994 - DNA, 25 bp, Homo sapien
gaaagaatagactgctgtgaagact

SEQ ID NO: 4849995 - DNA, 25 bp, Homo sapien
tccatcaagacccaaaccgaaagaa

SEQ ID NO: 4849996 - DNA, 25 bp, Homo sapien
gcgtcctctgagacccatagggcaa

SEQ ID NO: 4849997 - DNA, 25 bp, Homo sapien
tctgtattggaaaccacacccacat

SEQ ID NO: 4849998 - DNA, 25 bp, Homo sapien
tgaatattcatagacagttagcttc

SEQ ID NO: 4849999 - DNA, 25 bp, Homo sapien
catagggcaacatggaaacttgaca

SEQ ID NO: 4850000 - DNA, 25 bp, Homo sapien
gattttccggattgtcaagtccata

SEQ ID NO: 4850001 - DNA, 25 bp, Homo sapien
caagtccatatttatcatagtgtaa

SEQ ID NO: 4850002 - DNA, 25 bp, Homo sapien
ttaatcactaatcagattttccgga

SEQ ID NO: 4850003 - DNA, 25 bp, Homo sapien
cactaatcagattttccggattgtc

SEQ ID NO: 4850004 - DNA, 25 bp, Homo sapien
tcctcaaacagatggctagttttcc

SEQ ID NO: 4850005 - DNA, 25 bp, Homo sapien
cagggacagatttagaggtgtgaaa

SEQ ID NO: 4850006 - DNA, 25 bp, Homo sapien
gaaactgagaatcgaagtgcagccc

SEQ ID NO: 4850007 - DNA, 25 bp, Homo sapien
tgtgaaccagaggtaatcttagcag

SEQ ID NO: 4850008 - DNA, 25 bp, Homo sapien
tagagtgtttgcccacggctacatc

SEQ ID NO: 4850009 - DNA, 25 bp, Homo sapien
agagtgtttgcccacggctacatcc

SEQ ID NO: 4850010 - DNA, 25 bp, Homo sapien
gagtgtttgcccacggctacatcct

SEQ ID NO: 4850011 - DNA, 25 bp, Homo sapien
cttttgagaagtgaccattcacttt

SEQ ID NO: 4850012 - DNA, 25 bp, Homo sapien
gtggccagtgaacacagcctccagc

SEQ ID NO: 4850013 - DNA, 25 bp, Homo sapien
aagtggccagtgaacacagcctcca

SEQ ID NO: 4850014 - DNA, 25 bp, Homo sapien
cacagcctccagcttggaaatccat

SEQ ID NO: 4850015 - DNA, 25 bp, Homo sapien
cttaatgaggtgaagaagtggccag

SEQ ID NO: 4850016 - DNA, 25 bp, Homo sapien
ttggcaccttaaatggtcctcggta

SEQ ID NO: 4850017 - DNA, 25 bp, Homo sapien
gggttcctgctgagactgtactcat

SEQ ID NO: 4850018 - DNA, 25 bp, Homo sapien
ttgcctccaggagacatcttgcagg

SEQ ID NO: 4850019 - DNA, 25 bp, Homo sapien
tcttgcaggcctctcattgatccat

SEQ ID NO: 4850020 - DNA, 25 bp, Homo sapien
tcaacatggatttattttctccaga

SEQ ID NO: 4850021 - DNA, 25 bp, Homo sapien
ttctccagattttcctctgaaaata

SEQ ID NO: 4850022 - DNA, 25 bp, Homo sapien
ttttctccagattttcctctgaaaa

SEQ ID NO: 4850023 - DNA, 25 bp, Homo sapien
ctccagattttcctctgaaaatatg

SEQ ID NO: 4850024 - DNA, 25 bp, Homo sapien
agtggatggccttcctggatttggg

SEQ ID NO: 4850025 - DNA, 25 bp, Homo sapien
gagtggatggccttcctggatttgg

SEQ ID NO: 4850026 - DNA, 25 bp, Homo sapien
gtggatggccttcctggatttgggt

SEQ ID NO: 4850027 - DNA, 25 bp, Homo sapien
agagtggatggccttcctggatttg

SEQ ID NO: 4850028 - DNA, 25 bp, Homo sapien
tatagttctgtccaatcaggatgtg

SEQ ID NO: 4850029 - DNA, 25 bp, Homo sapien
tattatagttctgtccaatcaggat

SEQ ID NO: 4850030 - DNA, 25 bp, Homo sapien
agttctgtccaatcaggatgtgctc

SEQ ID NO: 4850031 - DNA, 25 bp, Homo sapien
tctgtccaatcaggatgtgctctgc

SEQ ID NO: 4850032 - DNA, 25 bp, Homo sapien
cctctcagaacaaggataaaaacct

SEQ ID NO: 4850033 - DNA, 25 bp, Homo sapien
cacagcacaagtgctccaagtgtct

SEQ ID NO: 4850034 - DNA, 25 bp, Homo sapien
aaacctaagcgcagagcctgggaca

SEQ ID NO: 4850035 - DNA, 25 bp, Homo sapien
tccaagtgtctgaagagttaatgcc

SEQ ID NO: 4850036 - DNA, 25 bp, Homo sapien
ctccccacaattcatagactctttg

SEQ ID NO: 4850037 - DNA, 25 bp, Homo sapien
gtaaaacctccccacaattcataga

SEQ ID NO: 4850038 - DNA, 25 bp, Homo sapien
cagacgaaggtggtacctctgtcct

SEQ ID NO: 4850039 - DNA, 25 bp, Homo sapien
gagggatgggcaattttgtcgtaac

SEQ ID NO: 4850040 - DNA, 25 bp, Homo sapien
gccgagcccattagaaaggccaata

SEQ ID NO: 4850041 - DNA, 25 bp, Homo sapien
gctcccaaattgagacagctgagcc

SEQ ID NO: 4850042 - DNA, 25 bp, Homo sapien
ctgagccaaatcaatagatgcattt

SEQ ID NO: 4850043 - DNA, 25 bp, Homo sapien
taatgagattactgggacagctccc

SEQ ID NO: 4850044 - DNA, 25 bp, Homo sapien
tcggtgctatctctgcataggaaag

SEQ ID NO: 4850045 - DNA, 25 bp, Homo sapien
tagtttccataccacgttgttgcag

SEQ ID NO: 4850046 - DNA, 25 bp, Homo sapien
taatttcagttaaagcatgagggac

SEQ ID NO: 4850047 - DNA, 25 bp, Homo sapien
ttgttgcagaaatctatcactaggg

SEQ ID NO: 4850048 - DNA, 25 bp, Homo sapien
gatgttttctagactctgacgcaga

SEQ ID NO: 4850049 - DNA, 25 bp, Homo sapien
tgatgttttctagactctgacgcag

SEQ ID NO: 4850050 - DNA, 25 bp, Homo sapien
actgatgttttctagactctgacgc

SEQ ID NO: 4850051 - DNA, 25 bp, Homo sapien
atgttttctagactctgacgcagag

SEQ ID NO: 4850052 - DNA, 25 bp, Homo sapien
gatgtcattagaaagattagctttt

SEQ ID NO: 4850053 - DNA, 25 bp, Homo sapien
gaagaggcgctgagtgtgacataaa

SEQ ID NO: 4850054 - DNA, 25 bp, Homo sapien
gttgctcctggccatccaaatatga

SEQ ID NO: 4850055 - DNA, 25 bp, Homo sapien
tatgttcccaagtccatggttcggg

SEQ ID NO: 4850056 - DNA, 25 bp, Homo sapien
caattttgttcatgcctctccatgg

SEQ ID NO: 4850057 - DNA, 25 bp, Homo sapien
cagccaaggcttgtattttcttgcc

SEQ ID NO: 4850058 - DNA, 25 bp, Homo sapien
tctccatgggatgcccttctgctga

SEQ ID NO: 4850059 - DNA, 25 bp, Homo sapien
tacatagagcccatgctcgagtcag

SEQ ID NO: 4850060 - DNA, 25 bp, Homo sapien
tgcctctactgtcctttcatgtcgg

SEQ ID NO: 4850061 - DNA, 25 bp, Homo sapien
cctttcatgtcggacttgaactttc

SEQ ID NO: 4850062 - DNA, 25 bp, Homo sapien
actgtcctttcatgtcggacttgaa

SEQ ID NO: 4850063 - DNA, 25 bp, Homo sapien
catgtcggacttgaactttcagagt

SEQ ID NO: 4850064 - DNA, 25 bp, Homo sapien
tgtggccctcggacaacttcttcat

SEQ ID NO: 4850065 - DNA, 25 bp, Homo sapien
gtgttccataatatgctgcctctga

SEQ ID NO: 4850066 - DNA, 25 bp, Homo sapien
ttccataatatgctgcctctgagcc

SEQ ID NO: 4850067 - DNA, 25 bp, Homo sapien
gagcctgtggccctcggacaacttc

SEQ ID NO: 4850068 - DNA, 25 bp, Homo sapien
tcttcttttgcctttcgaggttaca

SEQ ID NO: 4850069 - DNA, 25 bp, Homo sapien
ctttcgaggttacataaggtgggag

SEQ ID NO: 4850070 - DNA, 25 bp, Homo sapien
tagttgacaaggcagcattttcttc

SEQ ID NO: 4850071 - DNA, 25 bp, Homo sapien
tgtaaagaaagtttacgatgaggtc

SEQ ID NO: 4850072 - DNA, 25 bp, Homo sapien
gatgtgagtctggagtaaatcagct

SEQ ID NO: 4850073 - DNA, 25 bp, Homo sapien
gagtctggagtaaatcagcttgagg

SEQ ID NO: 4850074 - DNA, 25 bp, Homo sapien
ttgcctagcataagggtttgagggt

SEQ ID NO: 4850075 - DNA, 25 bp, Homo sapien
ctgctcctgatttgcctagcataag

SEQ ID NO: 4850076 - DNA, 25 bp, Homo sapien
ttcagaaatggacgcaagaaacagg

SEQ ID NO: 4850077 - DNA, 25 bp, Homo sapien
tgcctgcttccgctgatcctctgga

SEQ ID NO: 4850078 - DNA, 25 bp, Homo sapien
gtaacaaatgttggcctccttcatc

SEQ ID NO: 4850079 - DNA, 25 bp, Homo sapien
ggagcttgacacactcttccttggc

SEQ ID NO: 4850080 - DNA, 25 bp, Homo sapien
aagagaagcctcattgaaaaagcct

SEQ ID NO: 4850081 - DNA, 25 bp, Homo sapien
tgttcctcaattcaccagcttttct

SEQ ID NO: 4850082 - DNA, 25 bp, Homo sapien
tcccctagtgcagtccagttgacct

SEQ ID NO: 4850083 - DNA, 25 bp, Homo sapien
ttctataactacccgaaagagaagc

SEQ ID NO: 4850084 - DNA, 25 bp, Homo sapien
cttagaggaattcagtgtcagatgc

SEQ ID NO: 4850085 - DNA, 25 bp, Homo sapien
tatggcctatgagtgtaaaaccagg

SEQ ID NO: 4850086 - DNA, 25 bp, Homo sapien
tcagatgcatgacacgctatggcct

SEQ ID NO: 4850087 - DNA, 25 bp, Homo sapien
catggtactgtaaagagactgaaag

SEQ ID NO: 4850088 - DNA, 25 bp, Homo sapien
gatttcaatcgtttttggcaagaag

SEQ ID NO: 4850089 - DNA, 25 bp, Homo sapien
gttccacttgcaaacagtccttcag

SEQ ID NO: 4850090 - DNA, 25 bp, Homo sapien
ctatactacaaggtcagcctctggg

SEQ ID NO: 4850091 - DNA, 25 bp, Homo sapien
tcagcctctgggtctatcctcatct

SEQ ID NO: 4850092 - DNA, 25 bp, Homo sapien
gggtcgctggactggtgccttatca

SEQ ID NO: 4850093 - DNA, 25 bp, Homo sapien
gactggtgccttatcaccgtgttgg

SEQ ID NO: 4850094 - DNA, 25 bp, Homo sapien
tatcaccgtgttggcgttgggttgc

SEQ ID NO: 4850095 - DNA, 25 bp, Homo sapien
ctgggtcgctggactggtgccttat

SEQ ID NO: 4850096 - DNA, 25 bp, Homo sapien
tgtttgctctgttcatttgtctttg

SEQ ID NO: 4850097 - DNA, 25 bp, Homo sapien
ttattggtagtgcaaaatagatgta

SEQ ID NO: 4850098 - DNA, 25 bp, Homo sapien
tattggtagtgcaaaatagatgtaa

SEQ ID NO: 4850099 - DNA, 25 bp, Homo sapien
tttctccatttatgatgcagaattt

SEQ ID NO: 4850100 - DNA, 25 bp, Homo sapien
tggcaactttcctatggacatagaa

SEQ ID NO: 4850101 - DNA, 25 bp, Homo sapien
cggcctcccaaaggcaagaatatat

SEQ ID NO: 4850102 - DNA, 25 bp, Homo sapien
tatgtaatgtttcacccctggaatg

SEQ ID NO: 4850103 - DNA, 25 bp, Homo sapien
tacttcttctggattctaacccaca

SEQ ID NO: 4850104 - DNA, 25 bp, Homo sapien
catcctaaacgtgggatgagccacg

SEQ ID NO: 4850105 - DNA, 25 bp, Homo sapien
agttttgaagccatgaaggcacggc

SEQ ID NO: 4850106 - DNA, 25 bp, Homo sapien
ggcacggctctacccttgtaggtgg

SEQ ID NO: 4850107 - DNA, 25 bp, Homo sapien
gctgtgtattcccacgggcaatcat

SEQ ID NO: 4850108 - DNA, 25 bp, Homo sapien
gttgtggtcacaatgatcttagtgc

SEQ ID NO: 4850109 - DNA, 25 bp, Homo sapien
gccattctgtgtaggtgatagagag

SEQ ID NO: 4850110 - DNA, 25 bp, Homo sapien
caatgatcttagtgccattctgtgt

SEQ ID NO: 4850111 - DNA, 25 bp, Homo sapien
tgtggagttgtggtcacaatgatct

SEQ ID NO: 4850112 - DNA, 25 bp, Homo sapien
ttggttgacactgggtaactcgact

SEQ ID NO: 4850113 - DNA, 25 bp, Homo sapien
gagcctacagttcaggcaaccagcg

SEQ ID NO: 4850114 - DNA, 25 bp, Homo sapien
gacttcgtccgattgagcaaatggg

SEQ ID NO: 4850115 - DNA, 25 bp, Homo sapien
tcaggcgatcttctggtcaaggaca

SEQ ID NO: 4850116 - DNA, 25 bp, Homo sapien
tctgctgctacccaactggtcaggg

SEQ ID NO: 4850117 - DNA, 25 bp, Homo sapien
caagttcctcttttgcccctgacaa

SEQ ID NO: 4850118 - DNA, 25 bp, Homo sapien
gctgctacccaactggtcagggcag

SEQ ID NO: 4850119 - DNA, 25 bp, Homo sapien
ttacaagttcctcttttgcccctga

SEQ ID NO: 4850120 - DNA, 25 bp, Homo sapien
tgctcagtcgcatgattttgacact

SEQ ID NO: 4850121 - DNA, 25 bp, Homo sapien
tctggattctgctcagtcgcatgat

SEQ ID NO: 4850122 - DNA, 25 bp, Homo sapien
tctgctcagtcgcatgattttgaca

SEQ ID NO: 4850123 - DNA, 25 bp, Homo sapien
gattctgctcagtcgcatgattttg

SEQ ID NO: 4850124 - DNA, 25 bp, Homo sapien
ccggtaacgggaagaagatgttgct

SEQ ID NO: 4850125 - DNA, 25 bp, Homo sapien
tggaggtgctctccggtaacgggaa

SEQ ID NO: 4850126 - DNA, 25 bp, Homo sapien
cactggctttttacccttgtttcat

SEQ ID NO: 4850127 - DNA, 25 bp, Homo sapien
tgctggggaacactggctttttacc

SEQ ID NO: 4850128 - DNA, 25 bp, Homo sapien
tagtctccatcgttctcagtgactc

SEQ ID NO: 4850129 - DNA, 25 bp, Homo sapien
cccttctgaaccatttgtcattgca

SEQ ID NO: 4850130 - DNA, 25 bp, Homo sapien
tacttttgtccacctcagcagtgac

SEQ ID NO: 4850131 - DNA, 25 bp, Homo sapien
aaagattcgaatccccaagataaca

SEQ ID NO: 4850132 - DNA, 25 bp, Homo sapien
gcacacactgtgagagttctgggaa

SEQ ID NO: 4850133 - DNA, 25 bp, Homo sapien
tatctaaatcaaaaggagcacacac

SEQ ID NO: 4850134 - DNA, 25 bp, Homo sapien
ccaaagggcacggattatctaaatc

SEQ ID NO: 4850135 - DNA, 25 bp, Homo sapien
actccaaagggcacggattatctaa

SEQ ID NO: 4850136 - DNA, 25 bp, Homo sapien
gcctcaggatcatggcaggaactga

SEQ ID NO: 4850137 - DNA, 25 bp, Homo sapien
ctcaggatcatggcaggaactgaaa

SEQ ID NO: 4850138 - DNA, 25 bp, Homo sapien
caggatcatggcaggaactgaaagg

SEQ ID NO: 4850139 - DNA, 25 bp, Homo sapien
cctcaggatcatggcaggaactgaa

SEQ ID NO: 4850140 - DNA, 25 bp, Homo sapien
tgcagttctcaaattttataagttt

SEQ ID NO: 4850141 - DNA, 25 bp, Homo sapien
aagtttttctcatcagtcttcttaa

SEQ ID NO: 4850142 - DNA, 25 bp, Homo sapien
gtttttctcatcagtcttcttaagt

SEQ ID NO: 4850143 - DNA, 25 bp, Homo sapien
ttttctcatcagtcttcttaagtct

SEQ ID NO: 4850144 - DNA, 25 bp, Homo sapien
tctctggaactttcgaatatcgtgt

SEQ ID NO: 4850145 - DNA, 25 bp, Homo sapien
tggaactttcgaatatcgtgtccat

SEQ ID NO: 4850146 - DNA, 25 bp, Homo sapien
tctggaactttcgaatatcgtgtcc

SEQ ID NO: 4850147 - DNA, 25 bp, Homo sapien
ctctctggaactttcgaatatcgtg

SEQ ID NO: 4850148 - DNA, 25 bp, Homo sapien
ttccacgtacaacactgaattcagc

SEQ ID NO: 4850149 - DNA, 25 bp, Homo sapien
tattcctagggtgatgtaaatggat

SEQ ID NO: 4850150 - DNA, 25 bp, Homo sapien
attaagcccatgacaagccccagtg

SEQ ID NO: 4850151 - DNA, 25 bp, Homo sapien
acaggacttctgtagcaatggagga

SEQ ID NO: 4850152 - DNA, 25 bp, Homo sapien
gggtaaacagactcaatctgcaatt

SEQ ID NO: 4850153 - DNA, 25 bp, Homo sapien
ggcttggtggtttatggcaggctca

SEQ ID NO: 4850154 - DNA, 25 bp, Homo sapien
tccttgtccattgtgggctgggtaa

SEQ ID NO: 4850155 - DNA, 25 bp, Homo sapien
cacatcaaagacgtcagagcactgg

SEQ ID NO: 4850156 - DNA, 25 bp, Homo sapien
catgagcaggcttaaggcagatttt

SEQ ID NO: 4850157 - DNA, 25 bp, Homo sapien
ttccaactgcttatgcaaaacagcc

SEQ ID NO: 4850158 - DNA, 25 bp, Homo sapien
tctgctggatacagctgcaagtgct

SEQ ID NO: 4850159 - DNA, 25 bp, Homo sapien
tagcagctgagtcctattaacaatc

SEQ ID NO: 4850160 - DNA, 25 bp, Homo sapien
cagacagagagattggaccgaaact

SEQ ID NO: 4850161 - DNA, 25 bp, Homo sapien
aagaagggagttggctttcacagga

SEQ ID NO: 4850162 - DNA, 25 bp, Homo sapien
tctcgaagtgggctacagaacacag

SEQ ID NO: 4850163 - DNA, 25 bp, Homo sapien
gcaaagatggtgagttagaagacac

SEQ ID NO: 4850164 - DNA, 25 bp, Homo sapien
ggagaaggcctatcattaccgcggg

SEQ ID NO: 4850165 - DNA, 25 bp, Homo sapien
caatgaggataggttgacacttgcc

SEQ ID NO: 4850166 - DNA, 25 bp, Homo sapien
cgccataggattaacccgccatgat

SEQ ID NO: 4850167 - DNA, 25 bp, Homo sapien
tgactttcaagactccgccatagga

SEQ ID NO: 4850168 - DNA, 25 bp, Homo sapien
gacaagggcctagtgtaaatcagta

SEQ ID NO: 4850169 - DNA, 25 bp, Homo sapien
gactcgggccttattggaccacttg

SEQ ID NO: 4850170 - DNA, 25 bp, Homo sapien
caagtgtctactctgaggtccctca

SEQ ID NO: 4850171 - DNA, 25 bp, Homo sapien
tcattcctcagtaaaaggtggccaa

SEQ ID NO: 4850172 - DNA, 25 bp, Homo sapien
tccatggtataatcagtccacgtcc

SEQ ID NO: 4850173 - DNA, 25 bp, Homo sapien
gatctctaatttcctgtgggtccat

SEQ ID NO: 4850174 - DNA, 25 bp, Homo sapien
cgaaaagtggctgtgagatagacac

SEQ ID NO: 4850175 - DNA, 25 bp, Homo sapien
caaggccattaggattccctgttgc

SEQ ID NO: 4850176 - DNA, 25 bp, Homo sapien
ttcatgaagactccacacttatgag

SEQ ID NO: 4850177 - DNA, 25 bp, Homo sapien
ccacctaatgtcatcatactggggg

SEQ ID NO: 4850178 - DNA, 25 bp, Homo sapien
taatgtcatcatactgggggttagg

SEQ ID NO: 4850179 - DNA, 25 bp, Homo sapien
gactccacacttatgagctactcac

SEQ ID NO: 4850180 - DNA, 25 bp, Homo sapien
ccttgtcttaaagcagctggagatg

SEQ ID NO: 4850181 - DNA, 25 bp, Homo sapien
ttggtgcgaatatcgccagcgccct

SEQ ID NO: 4850182 - DNA, 25 bp, Homo sapien
tggcctttagtccagttcaccctgc

SEQ ID NO: 4850183 - DNA, 25 bp, Homo sapien
gattgcgtttcgcacccttggtgcg

SEQ ID NO: 4850184 - DNA, 25 bp, Homo sapien
agcccatttatagccgcggcgctgg

SEQ ID NO: 4850185 - DNA, 25 bp, Homo sapien
aggccttggggcgtgtggctgtcac

SEQ ID NO: 4850186 - DNA, 25 bp, Homo sapien
ctgtcacagcgttctgccggcctcg

SEQ ID NO: 4850187 - DNA, 25 bp, Homo sapien
ggcctcgccgcagcccatttatagc

SEQ ID NO: 4850188 - DNA, 25 bp, Homo sapien
ggcgtagcggcatttgaaccactct

SEQ ID NO: 4850189 - DNA, 25 bp, Homo sapien
tactcggcgatctcttccttggcgg

SEQ ID NO: 4850190 - DNA, 25 bp, Homo sapien
tatgtagccggcaaagcggtcgttc

SEQ ID NO: 4850191 - DNA, 25 bp, Homo sapien
catgctgcgcttataggaggaggac

SEQ ID NO: 4850192 - DNA, 25 bp, Homo sapien
gagcccaagtgtcgggggcgcgcgg

SEQ ID NO: 4850193 - DNA, 25 bp, Homo sapien
gcgcgtgctctagcgagcggccacc

SEQ ID NO: 4850194 - DNA, 25 bp, Homo sapien
cggcgcgcgtgctctagcgagcggc

SEQ ID NO: 4850195 - DNA, 25 bp, Homo sapien
cctgggcacgagcccaagtgtcggg

SEQ ID NO: 4850196 - DNA, 25 bp, Homo sapien
caaatgacgagccatttcccacttt

SEQ ID NO: 4850197 - DNA, 25 bp, Homo sapien
ggaggtcctggtattcgcgcaaatg

SEQ ID NO: 4850198 - DNA, 25 bp, Homo sapien
tttgtgccccgaagctcattttcca

SEQ ID NO: 4850199 - DNA, 25 bp, Homo sapien
tgtacgcagcgatttctatatccag

SEQ ID NO: 4850200 - DNA, 25 bp, Homo sapien
aatgtgctaaatctagtctcttcac

SEQ ID NO: 4850201 - DNA, 25 bp, Homo sapien
tgctaaatctagtctcttcaccctc

SEQ ID NO: 4850202 - DNA, 25 bp, Homo sapien
agtggcccagtgatgcttcctgcaa

SEQ ID NO: 4850203 - DNA, 25 bp, Homo sapien
gtcggtgtgtatacagtggcccagt

SEQ ID NO: 4850204 - DNA, 25 bp, Homo sapien
tcctctatgatctcctcgacaaatt

SEQ ID NO: 4850205 - DNA, 25 bp, Homo sapien
gtttcctctatgatctcctcgacaa

SEQ ID NO: 4850206 - DNA, 25 bp, Homo sapien
ggtttcctctatgatctcctcgaca

SEQ ID NO: 4850207 - DNA, 25 bp, Homo sapien
ttcctctatgatctcctcgacaaat

SEQ ID NO: 4850208 - DNA, 25 bp, Homo sapien
ctctgtaatggctgtcagggcctct

SEQ ID NO: 4850209 - DNA, 25 bp, Homo sapien
tctgtaatggctgtcagggcctctt

SEQ ID NO: 4850210 - DNA, 25 bp, Homo sapien
tggagactttttggcagctacttct

SEQ ID NO: 4850211 - DNA, 25 bp, Homo sapien
ttcttcttcagcttcgggttcctct

SEQ ID NO: 4850212 - DNA, 25 bp, Homo sapien
cttcttcttcagcttcgggttcctc

SEQ ID NO: 4850213 - DNA, 25 bp, Homo sapien
gactttttggcagctacttcttctt

SEQ ID NO: 4850214 - DNA, 25 bp, Homo sapien
ctttaacttcaggtgcagttgcttt

SEQ ID NO: 4850215 - DNA, 25 bp, Homo sapien
tctttaacttcaggtgcagttgctt

SEQ ID NO: 4850216 - DNA, 25 bp, Homo sapien
tttaacttcaggtgcagttgctttc

SEQ ID NO: 4850217 - DNA, 25 bp, Homo sapien
ttaacttcaggtgcagttgctttca

SEQ ID NO: 4850218 - DNA, 25 bp, Homo sapien
ggtctgacttagctccctcatcttc

SEQ ID NO: 4850219 - DNA, 25 bp, Homo sapien
ccctcttcggcttggtctgacttag

SEQ ID NO: 4850220 - DNA, 25 bp, Homo sapien
ggcttggtctgacttagctccctca

SEQ ID NO: 4850221 - DNA, 25 bp, Homo sapien
tcttcggcttggtctgacttagctc

SEQ ID NO: 4850222 - DNA, 25 bp, Homo sapien
ttagcttcggcttcctctccttcag

SEQ ID NO: 4850223 - DNA, 25 bp, Homo sapien
tggtagccacttcctcactcttttc

SEQ ID NO: 4850224 - DNA, 25 bp, Homo sapien
tttcctctttagcttcggcttcctc

SEQ ID NO: 4850225 - DNA, 25 bp, Homo sapien
cttggtagccacttcctcactcttt

SEQ ID NO: 4850226 - DNA, 25 bp, Homo sapien
tggtgattttggcacaggagacttg

SEQ ID NO: 4850227 - DNA, 25 bp, Homo sapien
caggagacttggctttttctggctt

SEQ ID NO: 4850228 - DNA, 25 bp, Homo sapien
tctggcttttccaccttggcatctg

SEQ ID NO: 4850229 - DNA, 25 bp, Homo sapien
tttccaccttggcatctgccaccag

SEQ ID NO: 4850230 - DNA, 25 bp, Homo sapien
gattttggcacaggagatttggctt

SEQ ID NO: 4850231 - DNA, 25 bp, Homo sapien
tccactggtgatttcggcacaggag

SEQ ID NO: 4850232 - DNA, 25 bp, Homo sapien
tcttccactggtgacttgggcacag

SEQ ID NO: 4850233 - DNA, 25 bp, Homo sapien
tccactggtgattttgacacaggag

SEQ ID NO: 4850234 - DNA, 25 bp, Homo sapien
ctttccccacttctgcttttgactt

SEQ ID NO: 4850235 - DNA, 25 bp, Homo sapien
ctctttctgttcacctttccccact

SEQ ID NO: 4850236 - DNA, 25 bp, Homo sapien
ttccccacttctgcttttgactttg

SEQ ID NO: 4850237 - DNA, 25 bp, Homo sapien
ccacttctgcttttgactttgcctc

SEQ ID NO: 4850238 - DNA, 25 bp, Homo sapien
ccattggtgacaacgcctttctcct

SEQ ID NO: 4850239 - DNA, 25 bp, Homo sapien
cctggatcccttggcacctttatca

SEQ ID NO: 4850240 - DNA, 25 bp, Homo sapien
gccattggtgacaacgcctttctcc

SEQ ID NO: 4850241 - DNA, 25 bp, Homo sapien
tggatcccttggcacctttatcact

SEQ ID NO: 4850242 - DNA, 25 bp, Homo sapien
tgagtgacggttacagatttagtga

SEQ ID NO: 4850243 - DNA, 25 bp, Homo sapien
gacggttacagatttagtgatgtat

SEQ ID NO: 4850244 - DNA, 25 bp, Homo sapien
ttttgagtgacggttacagatttag

SEQ ID NO: 4850245 - DNA, 25 bp, Homo sapien
cctcactggtgattttttctaccgt

SEQ ID NO: 4850246 - DNA, 25 bp, Homo sapien
gacttcctttactatggcgtgtgaa

SEQ ID NO: 4850247 - DNA, 25 bp, Homo sapien
gggtgacttcctttactatggcgtg

SEQ ID NO: 4850248 - DNA, 25 bp, Homo sapien
tactatggcgtgtgaagtgactttt

SEQ ID NO: 4850249 - DNA, 25 bp, Homo sapien
ctttactatggcgtgtgaagtgact

SEQ ID NO: 4850250 - DNA, 25 bp, Homo sapien
ggcttaaccttttgcaatggactca

SEQ ID NO: 4850251 - DNA, 25 bp, Homo sapien
tgcaaactgtgcatgtcaacgaggt

SEQ ID NO: 4850252 - DNA, 25 bp, Homo sapien
gcaagtactgctgtgacgtttaaca

SEQ ID NO: 4850253 - DNA, 25 bp, Homo sapien
gagaacccgttctgttttgaagctg

SEQ ID NO: 4850254 - DNA, 25 bp, Homo sapien
accgggctcggtgaagatgttgaca

SEQ ID NO: 4850255 - DNA, 25 bp, Homo sapien
aagcttcaggtagtggagatttcac

SEQ ID NO: 4850256 - DNA, 25 bp, Homo sapien
cgttttccaagtaattgctgtcagg

SEQ ID NO: 4850257 - DNA, 25 bp, Homo sapien
aattttgggatgaagaccgggctcg

SEQ ID NO: 4850258 - DNA, 25 bp, Homo sapien
tttcataggtaacaccccatcacct

SEQ ID NO: 4850259 - DNA, 25 bp, Homo sapien
accccatcacctcggcagccctgtt

SEQ ID NO: 4850260 - DNA, 25 bp, Homo sapien
aggtaacaccccatcacctcggcag

SEQ ID NO: 4850261 - DNA, 25 bp, Homo sapien
attttcataggtaacaccccatcac

SEQ ID NO: 4850262 - DNA, 25 bp, Homo sapien
ctatcccagggagagcgttagcctg

SEQ ID NO: 4850263 - DNA, 25 bp, Homo sapien
cccagggagagcgttagcctggccc

SEQ ID NO: 4850264 - DNA, 25 bp, Homo sapien
cagggagagcgttagcctggcccca

SEQ ID NO: 4850265 - DNA, 25 bp, Homo sapien
atcccagggagagcgttagcctggc

SEQ ID NO: 4850266 - DNA, 25 bp, Homo sapien
gatgtacatggtaagtctcaaacag

SEQ ID NO: 4850267 - DNA, 25 bp, Homo sapien
gcttctgtaaagatgaggcgtctcc

SEQ ID NO: 4850268 - DNA, 25 bp, Homo sapien
atttctgcttactagacctgggttg

SEQ ID NO: 4850269 - DNA, 25 bp, Homo sapien
caaataggtaaagtgcttccttgcc

SEQ ID NO: 4850270 - DNA, 25 bp, Homo sapien
tttcttccttcaattggaaattctg

SEQ ID NO: 4850271 - DNA, 25 bp, Homo sapien
tgattacttgtgaaatctctcccca

SEQ ID NO: 4850272 - DNA, 25 bp, Homo sapien
taccttaaagatggcaccaatataa

SEQ ID NO: 4850273 - DNA, 25 bp, Homo sapien
tataccagtggactattgacctcca

SEQ ID NO: 4850274 - DNA, 25 bp, Homo sapien
catggaccacgcttatgagttcagg

SEQ ID NO: 4850275 - DNA, 25 bp, Homo sapien
tgagttcaggatctacggcaatgtg

SEQ ID NO: 4850276 - DNA, 25 bp, Homo sapien
tcctttgaaccttcggtggttagca

SEQ ID NO: 4850277 - DNA, 25 bp, Homo sapien
taaagaccctgagttatgtgcaata

SEQ ID NO: 4850278 - DNA, 25 bp, Homo sapien
aggtctttggccgatctgcctacgg

SEQ ID NO: 4850279 - DNA, 25 bp, Homo sapien
tgcctacggcggtttacagaccagc

SEQ ID NO: 4850280 - DNA, 25 bp, Homo sapien
gaggaaaccattgaggctgccaagg

SEQ ID NO: 4850281 - DNA, 25 bp, Homo sapien
tacaccagccatgtccaagaggagc

SEQ ID NO: 4850282 - DNA, 25 bp, Homo sapien
gaatggttcaagagccgcttcaccg

SEQ ID NO: 4850283 - DNA, 25 bp, Homo sapien
catgagttccttcagctacgagccg

SEQ ID NO: 4850284 - DNA, 25 bp, Homo sapien
gaaagtgcacgaagaggagatcgcc

SEQ ID NO: 4850285 - DNA, 25 bp, Homo sapien
tctccgtggagatggacgtgaccaa

SEQ ID NO: 4850286 - DNA, 25 bp, Homo sapien
aggagcctcccggcgtataaatagg

SEQ ID NO: 4850287 - DNA, 25 bp, Homo sapien
tggcagaacggcgccgagccgcaca

SEQ ID NO: 4850288 - DNA, 25 bp, Homo sapien
ccactggccggcgtgccgtgatcga

SEQ ID NO: 4850289 - DNA, 25 bp, Homo sapien
atcgcaggctgcgtcaggagcctcc

SEQ ID NO: 4850290 - DNA, 25 bp, Homo sapien
tgacgggatacagaaaactagggtg

SEQ ID NO: 4850291 - DNA, 25 bp, Homo sapien
aacttaaggatccaagtgtcacggg

SEQ ID NO: 4850292 - DNA, 25 bp, Homo sapien
cagagaaaatcagggccctctgagc

SEQ ID NO: 4850293 - DNA, 25 bp, Homo sapien
gcaccatcaccgtaaacaccaaggg

SEQ ID NO: 4850294 - DNA, 25 bp, Homo sapien
taaaccaatacctgcagtagtgccg

SEQ ID NO: 4850295 - DNA, 25 bp, Homo sapien
gaaatcatcaggtcgtgtgctacac

SEQ ID NO: 4850296 - DNA, 25 bp, Homo sapien
tgcaacacgttaaagccatctgcgg

SEQ ID NO: 4850297 - DNA, 25 bp, Homo sapien
catgtgtaaaaagaggaaagcggac

SEQ ID NO: 4850298 - DNA, 25 bp, Homo sapien
gggactcctaacatcatgcgtgtga

SEQ ID NO: 4850299 - DNA, 25 bp, Homo sapien
taccgcgtgcgccagtttcaagcat

SEQ ID NO: 4850300 - DNA, 25 bp, Homo sapien
tctgcaatccctccatgaaacctgg

SEQ ID NO: 4850301 - DNA, 25 bp, Homo sapien
tagggttgtatccacgtgcgctacc

SEQ ID NO: 4850302 - DNA, 25 bp, Homo sapien
catacaccggcgttacatatcctgg

SEQ ID NO: 4850303 - DNA, 25 bp, Homo sapien
cccatatgcaattctgcagcctttg

SEQ ID NO: 4850304 - DNA, 25 bp, Homo sapien
ggcgttacatatcctggcttcagaa

SEQ ID NO: 4850305 - DNA, 25 bp, Homo sapien
ctgtaggaatccagggatccgccca

SEQ ID NO: 4850306 - DNA, 25 bp, Homo sapien
atgattagagaagtgatgaaaagcc

SEQ ID NO: 4850307 - DNA, 25 bp, Homo sapien
tgattagagaagtgatgaaaagcca

SEQ ID NO: 4850308 - DNA, 25 bp, Homo sapien
tcttctgttggaccatcctgaattc

SEQ ID NO: 4850309 - DNA, 25 bp, Homo sapien
cttctgttggaccatcctgaattct

SEQ ID NO: 4850310 - DNA, 25 bp, Homo sapien
attctgttgctaatgttaacatcaa

SEQ ID NO: 4850311 - DNA, 25 bp, Homo sapien
gaattctgttgctaatgttaacatc

SEQ ID NO: 4850312 - DNA, 25 bp, Homo sapien
gcacggtccgatggcattggcagat

SEQ ID NO: 4850313 - DNA, 25 bp, Homo sapien
cggtccgatggcattggcagatctg

SEQ ID NO: 4850314 - DNA, 25 bp, Homo sapien
tctgagcacggtccgatggcattgg

SEQ ID NO: 4850315 - DNA, 25 bp, Homo sapien
ctattctgagcacggtccgatggca

SEQ ID NO: 4850316 - DNA, 25 bp, Homo sapien
ggtgagaatacaccacctctaaatc

SEQ ID NO: 4850317 - DNA, 25 bp, Homo sapien
cacagatgttcagcctaatgtcagg

SEQ ID NO: 4850318 - DNA, 25 bp, Homo sapien
gattccctctgctatgccctcttgg

SEQ ID NO: 4850319 - DNA, 25 bp, Homo sapien
agcaggccctgataccaccttttca

SEQ ID NO: 4850320 - DNA, 25 bp, Homo sapien
ctttcctggctgctgtccatccctg

SEQ ID NO: 4850321 - DNA, 25 bp, Homo sapien
tttcctggctgctgtccatccctgg

SEQ ID NO: 4850322 - DNA, 25 bp, Homo sapien
tggctgctgtccatccctgggcact

SEQ ID NO: 4850323 - DNA, 25 bp, Homo sapien
tcctggctgctgtccatccctgggc

SEQ ID NO: 4850324 - DNA, 25 bp, Homo sapien
tgacaccaacgtggacagtctgtgg

SEQ ID NO: 4850325 - DNA, 25 bp, Homo sapien
ttccgccttgaattaattgtagcct

SEQ ID NO: 4850326 - DNA, 25 bp, Homo sapien
tagaatagaagtttggatctttcct

SEQ ID NO: 4850327 - DNA, 25 bp, Homo sapien
gtctcttttagaatagaagtttgga

SEQ ID NO: 4850328 - DNA, 25 bp, Homo sapien
ccagctctgggtgcggcttcccggg

SEQ ID NO: 4850329 - DNA, 25 bp, Homo sapien
tttgtgcagggtcaggggaccctcg

SEQ ID NO: 4850330 - DNA, 25 bp, Homo sapien
caccacacccctgggtttgtgcagg

SEQ ID NO: 4850331 - DNA, 25 bp, Homo sapien
gaccctcgccgacgcaccccaccat

SEQ ID NO: 4850332 - DNA, 25 bp, Homo sapien
gatggagaaatcgcagacatagttt

SEQ ID NO: 4850333 - DNA, 25 bp, Homo sapien
tggagaaatcgcagacatagttttt

SEQ ID NO: 4850334 - DNA, 25 bp, Homo sapien
gcaaaacgcggaagggggcactggc

SEQ ID NO: 4850335 - DNA, 25 bp, Homo sapien
gagaaatcgcagacatagtttttta

SEQ ID NO: 4850336 - DNA, 25 bp, Homo sapien
gaccgcagcgtcttgcacaaaacag

SEQ ID NO: 4850337 - DNA, 25 bp, Homo sapien
cctgcggtagtaactagggcctgaa

SEQ ID NO: 4850338 - DNA, 25 bp, Homo sapien
tgttgcggcactcggtgtagaccag

SEQ ID NO: 4850339 - DNA, 25 bp, Homo sapien
cagaattccggactgggtgaccgca

SEQ ID NO: 4850340 - DNA, 25 bp, Homo sapien
gaacacttacagttcatctgagcac

SEQ ID NO: 4850341 - DNA, 25 bp, Homo sapien
gacttcctgaataatgatacgctcc

SEQ ID NO: 4850342 - DNA, 25 bp, Homo sapien
gctcttttgcgctattgcagaaagt

SEQ ID NO: 4850343 - DNA, 25 bp, Homo sapien
cattcactggtgtcttgacttcctg

SEQ ID NO: 4850344 - DNA, 25 bp, Homo sapien
tgcagcatctcacaattctaccagg

SEQ ID NO: 4850345 - DNA, 25 bp, Homo sapien
agatgcagcatctcacaattctacc

SEQ ID NO: 4850346 - DNA, 25 bp, Homo sapien
acaattctaccaggaacagaagaaa

SEQ ID NO: 4850347 - DNA, 25 bp, Homo sapien
caattctaccaggaacagaagaaat

SEQ ID NO: 4850348 - DNA, 25 bp, Homo sapien
tggtttagtgagttggaactgcagt

SEQ ID NO: 4850349 - DNA, 25 bp, Homo sapien
gtttagtgagttggaactgcagtca

SEQ ID NO: 4850350 - DNA, 25 bp, Homo sapien
cttggtttagtgagttggaactgca

SEQ ID NO: 4850351 - DNA, 25 bp, Homo sapien
tttagtgagttggaactgcagtcag

SEQ ID NO: 4850352 - DNA, 25 bp, Homo sapien
catggaaaagactgttcaggccaac

SEQ ID NO: 4850353 - DNA, 25 bp, Homo sapien
agtgcatctgtactgaaaaccaggg

SEQ ID NO: 4850354 - DNA, 25 bp, Homo sapien
cacaatacccaacagtgcatctgta

SEQ ID NO: 4850355 - DNA, 25 bp, Homo sapien
ggagagaccggattctactacagca

SEQ ID NO: 4850356 - DNA, 25 bp, Homo sapien
tgggaagttccagcagcaatctcag

SEQ ID NO: 4850357 - DNA, 25 bp, Homo sapien
ggaagcggtcacttgcctagaatct

SEQ ID NO: 4850358 - DNA, 25 bp, Homo sapien
ccctggcacattaggacgggcagca

SEQ ID NO: 4850359 - DNA, 25 bp, Homo sapien
ccagaccagggccataaagagggtg

SEQ ID NO: 4850360 - DNA, 25 bp, Homo sapien
ctgctgtctgcattcagagcatctg

SEQ ID NO: 4850361 - DNA, 25 bp, Homo sapien
tgtctgcattcagagcatctggtaa

SEQ ID NO: 4850362 - DNA, 25 bp, Homo sapien
tctgcattcagagcatctggtaaac

SEQ ID NO: 4850363 - DNA, 25 bp, Homo sapien
gctgtctgcattcagagcatctggt

SEQ ID NO: 4850364 - DNA, 25 bp, Homo sapien
gcagaatcaatcgtaccccttttgg

SEQ ID NO: 4850365 - DNA, 25 bp, Homo sapien
cagcagccgtaacatctgcagagga

SEQ ID NO: 4850366 - DNA, 25 bp, Homo sapien
gaggaacgatgtcccctcatactgc

SEQ ID NO: 4850367 - DNA, 25 bp, Homo sapien
caaaacctgtagtgtaggactgtcc

SEQ ID NO: 4850368 - DNA, 25 bp, Homo sapien
ataacttgcttgtgtctgctgatgg

SEQ ID NO: 4850369 - DNA, 25 bp, Homo sapien
gctgatggtgccttcgtgatttact

SEQ ID NO: 4850370 - DNA, 25 bp, Homo sapien
gaaatgtctgctccagcagaagacc

SEQ ID NO: 4850371 - DNA, 25 bp, Homo sapien
ggtgccttcgtgatttactgaaatg

SEQ ID NO: 4850372 - DNA, 25 bp, Homo sapien
ctctttagcatcggtttttactctt

SEQ ID NO: 4850373 - DNA, 25 bp, Homo sapien
gaggttcagcactaacacaatggaa

SEQ ID NO: 4850374 - DNA, 25 bp, Homo sapien
ttttggaggttcagcactaacacaa

SEQ ID NO: 4850375 - DNA, 25 bp, Homo sapien
cacaatggaaaaacgtgcccaaggg

SEQ ID NO: 4850376 - DNA, 25 bp, Homo sapien
ctgccttttttgcatttgatgcttc

SEQ ID NO: 4850377 - DNA, 25 bp, Homo sapien
ttttttgcatttgatgcttctctca

SEQ ID NO: 4850378 - DNA, 25 bp, Homo sapien
ccttttttgcatttgatgcttctct

SEQ ID NO: 4850379 - DNA, 25 bp, Homo sapien
gccttttttgcatttgatgcttctc

SEQ ID NO: 4850380 - DNA, 25 bp, Homo sapien
tctccattctttagcaggaactggg

SEQ ID NO: 4850381 - DNA, 25 bp, Homo sapien
ttccagacagcctgataatctgcag

SEQ ID NO: 4850382 - DNA, 25 bp, Homo sapien
agcagttgagctccgtgttttccca

SEQ ID NO: 4850383 - DNA, 25 bp, Homo sapien
caataggattgccttgagcacgtcc

SEQ ID NO: 4850384 - DNA, 25 bp, Homo sapien
tgaggcttcatcattacaacacagt

SEQ ID NO: 4850385 - DNA, 25 bp, Homo sapien
gaggcttcatcattacaacacagtg

SEQ ID NO: 4850386 - DNA, 25 bp, Homo sapien
aggcttcatcattacaacacagtga

SEQ ID NO: 4850387 - DNA, 25 bp, Homo sapien
aatgctgctgcattgtatattccat

SEQ ID NO: 4850388 - DNA, 25 bp, Homo sapien
tccgggacccttcagaaggcaatgc

SEQ ID NO: 4850389 - DNA, 25 bp, Homo sapien
aaggcaatgctgctgcattgtatat

SEQ ID NO: 4850390 - DNA, 25 bp, Homo sapien
tccatattggatttgattcttgatg

SEQ ID NO: 4850391 - DNA, 25 bp, Homo sapien
tgtgtgctgcagaataaataatgga

SEQ ID NO: 4850392 - DNA, 25 bp, Homo sapien
tccctgctggccgacagctgaaagg

SEQ ID NO: 4850393 - DNA, 25 bp, Homo sapien
tgccagtgccatccccctaatgttt

SEQ ID NO: 4850394 - DNA, 25 bp, Homo sapien
gcatgctaatactctggacaggtca

SEQ ID NO: 4850395 - DNA, 25 bp, Homo sapien
gaacgaagtccatgaaatccacgct

SEQ ID NO: 4850396 - DNA, 25 bp, Homo sapien
tggcaatatctgtcacactggaacg

SEQ ID NO: 4850397 - DNA, 25 bp, Homo sapien
ggacacagcgtggatttcacggaga

SEQ ID NO: 4850398 - DNA, 25 bp, Homo sapien
gatttcacggagaagacagcttgca

SEQ ID NO: 4850399 - DNA, 25 bp, Homo sapien
ggtcagttgtcgtacagaacatgcc

SEQ ID NO: 4850400 - DNA, 25 bp, Homo sapien
tgggtcagttgtcgtacagaacatg

SEQ ID NO: 4850401 - DNA, 25 bp, Homo sapien
actgggtcagttgtcgtacagaaca

SEQ ID NO: 4850402 - DNA, 25 bp, Homo sapien
tcagttgtcgtacagaacatgccat

SEQ ID NO: 4850403 - DNA, 25 bp, Homo sapien
cattatgtgtgttaagttggcggaa

SEQ ID NO: 4850404 - DNA, 25 bp, Homo sapien
gtaaaccctggtgaataagcctgct

SEQ ID NO: 4850405 - DNA, 25 bp, Homo sapien
agttgggtgcatccattcacagcag

SEQ ID NO: 4850406 - DNA, 25 bp, Homo sapien
gcctgctactgcttggtcattatgt

SEQ ID NO: 4850407 - DNA, 25 bp, Homo sapien
ctgcagttacactagacactagaga

SEQ ID NO: 4850408 - DNA, 25 bp, Homo sapien
tgcagttacactagacactagagag

SEQ ID NO: 4850409 - DNA, 25 bp, Homo sapien
gcagttacactagacactagagagt

SEQ ID NO: 4850410 - DNA, 25 bp, Homo sapien
cctgccctagctagcaatggagtga

SEQ ID NO: 4850411 - DNA, 25 bp, Homo sapien
gaagcattggattgtgaagactccc

SEQ ID NO: 4850412 - DNA, 25 bp, Homo sapien
gccagtggtccatagcaatgatcaa

SEQ ID NO: 4850413 - DNA, 25 bp, Homo sapien
gatgctttggttggactctggttct

SEQ ID NO: 4850414 - DNA, 25 bp, Homo sapien
tgtgataaaaagtgagaaggctagg

SEQ ID NO: 4850415 - DNA, 25 bp, Homo sapien
cagatttcctgagctaagaccacca

SEQ ID NO: 4850416 - DNA, 25 bp, Homo sapien
atttcacttgagttataccaaccag

SEQ ID NO: 4850417 - DNA, 25 bp, Homo sapien
ttccgtgggagaaagattgtatttc

SEQ ID NO: 4850418 - DNA, 25 bp, Homo sapien
caataagctgtgcaattgattgctg

SEQ ID NO: 4850419 - DNA, 25 bp, Homo sapien
gctgtaacaataagctgtgcaattg

SEQ ID NO: 4850420 - DNA, 25 bp, Homo sapien
agctgtaagctgtaacaataagctg

SEQ ID NO: 4850421 - DNA, 25 bp, Homo sapien
taagctgtgcaattgattgctgggc

SEQ ID NO: 4850422 - DNA, 25 bp, Homo sapien
tccacggatttaccattgacagcac

SEQ ID NO: 4850423 - DNA, 25 bp, Homo sapien
ctcctccacggatttaccattgaca

SEQ ID NO: 4850424 - DNA, 25 bp, Homo sapien
ggatttaccattgacagcacttgat

SEQ ID NO: 4850425 - DNA, 25 bp, Homo sapien
attgacagcacttgattcaatccag

SEQ ID NO: 4850426 - DNA, 25 bp, Homo sapien
tattttttcacagccaccaactgta

SEQ ID NO: 4850427 - DNA, 25 bp, Homo sapien
gtaacaataataactgcgtatgaag

SEQ ID NO: 4850428 - DNA, 25 bp, Homo sapien
gtactggctccaaatcaccttgttt

SEQ ID NO: 4850429 - DNA, 25 bp, Homo sapien
gaggtaaatataactctccggtcat

SEQ ID NO: 4850430 - DNA, 25 bp, Homo sapien
caagtgacttaggtcgtgagcatct

SEQ ID NO: 4850431 - DNA, 25 bp, Homo sapien
tatctcctcatctctgtcacaagga

SEQ ID NO: 4850432 - DNA, 25 bp, Homo sapien
tctgatggatgggaagataatgctc

SEQ ID NO: 4850433 - DNA, 25 bp, Homo sapien
gctgtgtctaaatgagctgattcca

SEQ ID NO: 4850434 - DNA, 25 bp, Homo sapien
ttgaatttgggtgccagagatttca

SEQ ID NO: 4850435 - DNA, 25 bp, Homo sapien
gtttgaatttgggtgccagagattt

SEQ ID NO: 4850436 - DNA, 25 bp, Homo sapien
aatttgggtgccagagatttcaaat

SEQ ID NO: 4850437 - DNA, 25 bp, Homo sapien
aggtttgaatttgggtgccagagat

SEQ ID NO: 4850438 - DNA, 25 bp, Homo sapien
agggccaaggcgcatccccgtcttt

SEQ ID NO: 4850439 - DNA, 25 bp, Homo sapien
caacgactgccttttcttgacgaag

SEQ ID NO: 4850440 - DNA, 25 bp, Homo sapien
tgcgcatttgaaccgccttgggctc

SEQ ID NO: 4850441 - DNA, 25 bp, Homo sapien
cattcccgtggagaaagggccaagg

SEQ ID NO: 4850442 - DNA, 25 bp, Homo sapien
gcagcagtgcgcgcccctcctggcg

SEQ ID NO: 4850443 - DNA, 25 bp, Homo sapien
ctgcagcgcagcagtgcgcgcccct

SEQ ID NO: 4850444 - DNA, 25 bp, Homo sapien
cagcgcagcagtgcgcgcccctcct

SEQ ID NO: 4850445 - DNA, 25 bp, Homo sapien
agcagtgcgcgcccctcctggcgcc

SEQ ID NO: 4850446 - DNA, 25 bp, Homo sapien
tgttccgccaaacttcgctggactc

SEQ ID NO: 4850447 - DNA, 25 bp, Homo sapien
aaacttcgctggactccgcgggccg

SEQ ID NO: 4850448 - DNA, 25 bp, Homo sapien
gtgccccagacgcttccgccatgtt

SEQ ID NO: 4850449 - DNA, 25 bp, Homo sapien
gccatgttccgccaaacttcgctgg

SEQ ID NO: 4850450 - DNA, 25 bp, Homo sapien
cggcggcggcgactaaggctgctac

SEQ ID NO: 4850451 - DNA, 25 bp, Homo sapien
ggcggcgactaaggctgctacagct

SEQ ID NO: 4850452 - DNA, 25 bp, Homo sapien
cggcggcgactaaggctgctacagc

SEQ ID NO: 4850453 - DNA, 25 bp, Homo sapien
ggcgactaaggctgctacagctcct

SEQ ID NO: 4850454 - DNA, 25 bp, Homo sapien
tgcctcttggtcgggatccagcggg

SEQ ID NO: 4850455 - DNA, 25 bp, Homo sapien
cctcttggtcgggatccagcgggcc

SEQ ID NO: 4850456 - DNA, 25 bp, Homo sapien
ttctgcctcttggtcgggatccagc

SEQ ID NO: 4850457 - DNA, 25 bp, Homo sapien
tctgcctcttggtcgggatccagcg

SEQ ID NO: 4850458 - DNA, 25 bp, Homo sapien
gaaccaccacatttggcctcatttt

SEQ ID NO: 4850459 - DNA, 25 bp, Homo sapien
gagacggggttgcacaacgttgccc

SEQ ID NO: 4850460 - DNA, 25 bp, Homo sapien
taggtgggaccacaaccacatgcta

SEQ ID NO: 4850461 - DNA, 25 bp, Homo sapien
ttaagcaatcctctcgtttcagtct

SEQ ID NO: 4850462 - DNA, 25 bp, Homo sapien
aaagttcctcttagctgggcttggt

SEQ ID NO: 4850463 - DNA, 25 bp, Homo sapien
aaaaagttcctcttagctgggcttg

SEQ ID NO: 4850464 - DNA, 25 bp, Homo sapien
tcccaactgcaatgggaaggtggaa

SEQ ID NO: 4850465 - DNA, 25 bp, Homo sapien
tgcaatgggaaggtggaagcaggga

SEQ ID NO: 4850466 - DNA, 25 bp, Homo sapien
gaatactgctggcaataagctagaa

SEQ ID NO: 4850467 - DNA, 25 bp, Homo sapien
tattttcagctaacaagatggctac

SEQ ID NO: 4850468 - DNA, 25 bp, Homo sapien
tacatgacagctatggccacaagaa

SEQ ID NO: 4850469 - DNA, 25 bp, Homo sapien
ttgagtaaccatggcttcaaagccc

SEQ ID NO: 4850470 - DNA, 25 bp, Homo sapien
taaggagatctgattaacaaacccc

SEQ ID NO: 4850471 - DNA, 25 bp, Homo sapien
taaggactgaaaccacgtgagaagt

SEQ ID NO: 4850472 - DNA, 25 bp, Homo sapien
gatgtcatgtcaataccacggtgct

SEQ ID NO: 4850473 - DNA, 25 bp, Homo sapien
cgtgagaagtcagtggccaaaccgt

SEQ ID NO: 4850474 - DNA, 25 bp, Homo sapien
tgggccctgacaactgaatcagcaa

SEQ ID NO: 4850475 - DNA, 25 bp, Homo sapien
ctgatttgggccctgacaactgaat

SEQ ID NO: 4850476 - DNA, 25 bp, Homo sapien
gattttcaaggccagaaggctgcta

SEQ ID NO: 4850477 - DNA, 25 bp, Homo sapien
aaggctgctaaaggcatgtatctga

SEQ ID NO: 4850478 - DNA, 25 bp, Homo sapien
tgggcctgacgcacaggaaacttct

SEQ ID NO: 4850479 - DNA, 25 bp, Homo sapien
tgtaggcaacctccaagactccgtt

SEQ ID NO: 4850480 - DNA, 25 bp, Homo sapien
agacgcccactgagcccaaggttta

SEQ ID NO: 4850481 - DNA, 25 bp, Homo sapien
tgaggctggaaacacggagaccttc

SEQ ID NO: 4850482 - DNA, 25 bp, Homo sapien
gaactccatcctaagtgaagccaag

SEQ ID NO: 4850483 - DNA, 25 bp, Homo sapien
gggacacacctatcctgcatcatgt

SEQ ID NO: 4850484 - DNA, 25 bp, Homo sapien
gccacggcaacgcatggaagttact

SEQ ID NO: 4850485 - DNA, 25 bp, Homo sapien
tttatgtcaggttaccactgccacg

SEQ ID NO: 4850486 - DNA, 25 bp, Homo sapien
tttttaatcatagacaatcttgtgt

SEQ ID NO: 4850487 - DNA, 25 bp, Homo sapien
ggtttttaatcatagacaatcttgt

SEQ ID NO: 4850488 - DNA, 25 bp, Homo sapien
ccagcgcagtttgggtttttaatca

SEQ ID NO: 4850489 - DNA, 25 bp, Homo sapien
attttcccttccagcgcagtttggg

SEQ ID NO: 4850490 - DNA, 25 bp, Homo sapien
cgtggatctctttcttctctgacat

SEQ ID NO: 4850491 - DNA, 25 bp, Homo sapien
ctgcgtggatctctttcttctctga

SEQ ID NO: 4850492 - DNA, 25 bp, Homo sapien
gcgtggatctctttcttctctgaca

SEQ ID NO: 4850493 - DNA, 25 bp, Homo sapien
tgcgtggatctctttcttctctgac

SEQ ID NO: 4850494 - DNA, 25 bp, Homo sapien
ttgacaatccaaggaacccataagg

SEQ ID NO: 4850495 - DNA, 25 bp, Homo sapien
tcagtccatcagtatatcccacagg

SEQ ID NO: 4850496 - DNA, 25 bp, Homo sapien
tgatgaatggatagtcactcagtcc

SEQ ID NO: 4850497 - DNA, 25 bp, Homo sapien
catctctgcaggcctgatgagtggc

SEQ ID NO: 4850498 - DNA, 25 bp, Homo sapien
catctccaggatgtgaactgtgtca

SEQ ID NO: 4850499 - DNA, 25 bp, Homo sapien
tgtcaccgatctgcaaggagagctc

SEQ ID NO: 4850500 - DNA, 25 bp, Homo sapien
tgagaagcattgtagttatagatcg

SEQ ID NO: 4850501 - DNA, 25 bp, Homo sapien
aactgtgtcaccgatctgcaaggag

SEQ ID NO: 4850502 - DNA, 25 bp, Homo sapien
tcatctggcagaaggccagccagac

SEQ ID NO: 4850503 - DNA, 25 bp, Homo sapien
ctggcagaaggccagccagacttac

SEQ ID NO: 4850504 - DNA, 25 bp, Homo sapien
tctggcagaaggccagccagactta

SEQ ID NO: 4850505 - DNA, 25 bp, Homo sapien
catctggcagaaggccagccagact

SEQ ID NO: 4850506 - DNA, 25 bp, Homo sapien
tagcttctcagtcagttctgcttct

SEQ ID NO: 4850507 - DNA, 25 bp, Homo sapien
agaacgctcgcttcagtccttaagg

SEQ ID NO: 4850508 - DNA, 25 bp, Homo sapien
taacggatgagcagtagatagcttc

SEQ ID NO: 4850509 - DNA, 25 bp, Homo sapien
ataattcctggagacctgtaacgga

SEQ ID NO: 4850510 - DNA, 25 bp, Homo sapien
cagtaataaacagctacctcgctgc

SEQ ID NO: 4850511 - DNA, 25 bp, Homo sapien
catggatctggggtggaaaggaacg

SEQ ID NO: 4850512 - DNA, 25 bp, Homo sapien
aaggaacgttcacagtaataaacag

SEQ ID NO: 4850513 - DNA, 25 bp, Homo sapien
agctacctcgctgccaaatacattc

SEQ ID NO: 4850514 - DNA, 25 bp, Homo sapien
ccagggacagtcaatctagacaagg

SEQ ID NO: 4850515 - DNA, 25 bp, Homo sapien
tatccctccaatgtaaaccctatga

SEQ ID NO: 4850516 - DNA, 25 bp, Homo sapien
gacacatacaaggtactatgcactt

SEQ ID NO: 4850517 - DNA, 25 bp, Homo sapien
gcaggaacttgcattttgtcactta

SEQ ID NO: 4850518 - DNA, 25 bp, Homo sapien
gagacatttcgttgtgtttgttcca

SEQ ID NO: 4850519 - DNA, 25 bp, Homo sapien
agaaatcactgctaacaccagcata

SEQ ID NO: 4850520 - DNA, 25 bp, Homo sapien
tgtgtttgttccaacagcggtcaat

SEQ ID NO: 4850521 - DNA, 25 bp, Homo sapien
caattgtgttgtatttaccccagaa

SEQ ID NO: 4850522 - DNA, 25 bp, Homo sapien
aagttacccccatatcaaaagtcat

SEQ ID NO: 4850523 - DNA, 25 bp, Homo sapien
tctccatgttattatattctaagag

SEQ ID NO: 4850524 - DNA, 25 bp, Homo sapien
tactgtggcttaacttctcattctc

SEQ ID NO: 4850525 - DNA, 25 bp, Homo sapien
gaaaggtctgtgtctaaattattat

SEQ ID NO: 4850526 - DNA, 25 bp, Homo sapien
gatttactgctctaaaaattccctg

SEQ ID NO: 4850527 - DNA, 25 bp, Homo sapien
tgccttctatgggtatggacaaatg

SEQ ID NO: 4850528 - DNA, 25 bp, Homo sapien
tttttagcgctgaatgatactccat

SEQ ID NO: 4850529 - DNA, 25 bp, Homo sapien
gacaagacatccctgctatcaacat

SEQ ID NO: 4850530 - DNA, 25 bp, Homo sapien
cttgggaagccagtgagcagaaact

SEQ ID NO: 4850531 - DNA, 25 bp, Homo sapien
ttgggaagccagtgagcagaaactg

SEQ ID NO: 4850532 - DNA, 25 bp, Homo sapien
tgtccttccaatagaagctgattgt

SEQ ID NO: 4850533 - DNA, 25 bp, Homo sapien
ccctgtgggccaggtaagctcgtca

SEQ ID NO: 4850534 - DNA, 25 bp, Homo sapien
ctcccatccccggtgagctgtcctt

SEQ ID NO: 4850535 - DNA, 25 bp, Homo sapien
aggtttccacgggcatatcctgtcc

SEQ ID NO: 4850536 - DNA, 25 bp, Homo sapien
aagtgttgctggtctggtatcttac

SEQ ID NO: 4850537 - DNA, 25 bp, Homo sapien
ttattttggagggtatatcctctgt

SEQ ID NO: 4850538 - DNA, 25 bp, Homo sapien
tggagggtatatcctctgtaccaac

SEQ ID NO: 4850539 - DNA, 25 bp, Homo sapien
attttggagggtatatcctctgtac

SEQ ID NO: 4850540 - DNA, 25 bp, Homo sapien
tttggagggtatatcctctgtacca

SEQ ID NO: 4850541 - DNA, 25 bp, Homo sapien
ttaacttgagggacaggaagcaaga

SEQ ID NO: 4850542 - DNA, 25 bp, Homo sapien
cagtcaatgggatttacactattac

SEQ ID NO: 4850543 - DNA, 25 bp, Homo sapien
tacactattacatttaggcactgag

SEQ ID NO: 4850544 - DNA, 25 bp, Homo sapien
tggctggtaggaaatacagtcaatg

SEQ ID NO: 4850545 - DNA, 25 bp, Homo sapien
atcatcactctaaatggctgggtca

SEQ ID NO: 4850546 - DNA, 25 bp, Homo sapien
tagctcttccccttaaagacggaga

SEQ ID NO: 4850547 - DNA, 25 bp, Homo sapien
aagcagagcagaattcatggcaact

SEQ ID NO: 4850548 - DNA, 25 bp, Homo sapien
gacacagcacaggagagcgtttcta

SEQ ID NO: 4850549 - DNA, 25 bp, Homo sapien
tgttgggaactaaccttgaagacat

SEQ ID NO: 4850550 - DNA, 25 bp, Homo sapien
cagttcggaagctctaggcctgtcc

SEQ ID NO: 4850551 - DNA, 25 bp, Homo sapien
gccactgcgccacggcaaatgattt

SEQ ID NO: 4850552 - DNA, 25 bp, Homo sapien
tccctaggaggcctaaggaactctg

SEQ ID NO: 4850553 - DNA, 25 bp, Homo sapien
tattcctggaagagttggtgtgaac

SEQ ID NO: 4850554 - DNA, 25 bp, Homo sapien
cccagatgtgagtgttatgtgtacc

SEQ ID NO: 4850555 - DNA, 25 bp, Homo sapien
gaaactatgcagtactcagtagccc

SEQ ID NO: 4850556 - DNA, 25 bp, Homo sapien
gaggaccagatctaaccaacaggaa

SEQ ID NO: 4850557 - DNA, 25 bp, Homo sapien
aagtcatccctcagaatatgcaagg

SEQ ID NO: 4850558 - DNA, 25 bp, Homo sapien
ttcaaatggatatatgtttcaggga

SEQ ID NO: 4850559 - DNA, 25 bp, Homo sapien
tcaaatggatatatgtttcagggaa

SEQ ID NO: 4850560 - DNA, 25 bp, Homo sapien
caaatggatatatgtttcagggaaa

SEQ ID NO: 4850561 - DNA, 25 bp, Homo sapien
gactttatcgcatccaagcatctgg

SEQ ID NO: 4850562 - DNA, 25 bp, Homo sapien
ttgagaatgaagctggttaggcctg

SEQ ID NO: 4850563 - DNA, 25 bp, Homo sapien
aaatgggctccgttcctgcaactga

SEQ ID NO: 4850564 - DNA, 25 bp, Homo sapien
gatcagacttcccaacgttcaaggt

SEQ ID NO: 4850565 - DNA, 25 bp, Homo sapien
cacgtagagctttcgccagatgaca

SEQ ID NO: 4850566 - DNA, 25 bp, Homo sapien
gatgacagcccattctcgcagagtg

SEQ ID NO: 4850567 - DNA, 25 bp, Homo sapien
gggagctcgccaggaatcacggttt

SEQ ID NO: 4850568 - DNA, 25 bp, Homo sapien
tctcgcagagtggacgtgagctcct

SEQ ID NO: 4850569 - DNA, 25 bp, Homo sapien
actaagagattttggcagccaaaat

SEQ ID NO: 4850570 - DNA, 25 bp, Homo sapien
cccaccaaggaaatgttcaacaaga

SEQ ID NO: 4850571 - DNA, 25 bp, Homo sapien
tacatgagtcctaattcttcatccc

SEQ ID NO: 4850572 - DNA, 25 bp, Homo sapien
ttatcacctttaactactaagagat

SEQ ID NO: 4850573 - DNA, 25 bp, Homo sapien
cattttcccctcatatgagactgtg

SEQ ID NO: 4850574 - DNA, 25 bp, Homo sapien
gtggatccacaacgtacatttctgg

SEQ ID NO: 4850575 - DNA, 25 bp, Homo sapien
gggttaatctggttagtggactgca

SEQ ID NO: 4850576 - DNA, 25 bp, Homo sapien
caacgtacatttctggtgaactgag

SEQ ID NO: 4850577 - DNA, 25 bp, Homo sapien
gtatgttctgcaagttcccctaccc

SEQ ID NO: 4850578 - DNA, 25 bp, Homo sapien
ccagaactatagactgccacagggt

SEQ ID NO: 4850579 - DNA, 25 bp, Homo sapien
cagcagccagtaataaccaccggtt

SEQ ID NO: 4850580 - DNA, 25 bp, Homo sapien
taaactgcctggatatgcgatgatg

SEQ ID NO: 4850581 - DNA, 25 bp, Homo sapien
tgtctagagataaacacaaagtcac

SEQ ID NO: 4850582 - DNA, 25 bp, Homo sapien
ggatgggtagaatggttcatgccta

SEQ ID NO: 4850583 - DNA, 25 bp, Homo sapien
cctgcatgggctaaagactctgtct

SEQ ID NO: 4850584 - DNA, 25 bp, Homo sapien
ggcccagctgcaatgggtattagaa

SEQ ID NO: 4850585 - DNA, 25 bp, Homo sapien
tttctgcattatccgccactgtcac

SEQ ID NO: 4850586 - DNA, 25 bp, Homo sapien
ccgccactgtcacatcatccaagaa

SEQ ID NO: 4850587 - DNA, 25 bp, Homo sapien
ccttttctgcattatccgccactgt

SEQ ID NO: 4850588 - DNA, 25 bp, Homo sapien
gcattatccgccactgtcacatcat

SEQ ID NO: 4850589 - DNA, 25 bp, Homo sapien
gcaatatgctctgttaacaccactg

SEQ ID NO: 4850590 - DNA, 25 bp, Homo sapien
cagttacattagacactatccgtgg

SEQ ID NO: 4850591 - DNA, 25 bp, Homo sapien
cacaaaggaaagagatgaacaaccc

SEQ ID NO: 4850592 - DNA, 25 bp, Homo sapien
taattattgcccgtccataccagcc

SEQ ID NO: 4850593 - DNA, 25 bp, Homo sapien
gctgtacgtcatctgctgcagctgg

SEQ ID NO: 4850594 - DNA, 25 bp, Homo sapien
cactcgatcaggctgtacgtcatct

SEQ ID NO: 4850595 - DNA, 25 bp, Homo sapien
caggatctgggaccgccactcgatc

SEQ ID NO: 4850596 - DNA, 25 bp, Homo sapien
tgagctctgccagttcatccttggg

SEQ ID NO: 4850597 - DNA, 25 bp, Homo sapien
caagagctggaacgggaaagaagtc

SEQ ID NO: 4850598 - DNA, 25 bp, Homo sapien
gactcatgaacaatggccatgctgg

SEQ ID NO: 4850599 - DNA, 25 bp, Homo sapien
tgctcggagactggatcaggaaggc

SEQ ID NO: 4850600 - DNA, 25 bp, Homo sapien
gaagtcatgttctgccgtttgtggg

SEQ ID NO: 4850601 - DNA, 25 bp, Homo sapien
tgtcatctcgcaccaccagatctaa

SEQ ID NO: 4850602 - DNA, 25 bp, Homo sapien
gggtctaggatgttcccattgtcat

SEQ ID NO: 4850603 - DNA, 25 bp, Homo sapien
tcgtcagggtctaggatgttcccat

SEQ ID NO: 4850604 - DNA, 25 bp, Homo sapien
caatggtgctggtttcgtcagggtc

SEQ ID NO: 4850605 - DNA, 25 bp, Homo sapien
ctgataaaagtggactggtctgggt

SEQ ID NO: 4850606 - DNA, 25 bp, Homo sapien
tctgggtcgtagagggccataaaca

SEQ ID NO: 4850607 - DNA, 25 bp, Homo sapien
gatggtactgaagatggactggccc

SEQ ID NO: 4850608 - DNA, 25 bp, Homo sapien
tggactggccccgcaaatcgaggtt

SEQ ID NO: 4850609 - DNA, 25 bp, Homo sapien
gcttggaggttattgagcttctcta

SEQ ID NO: 4850610 - DNA, 25 bp, Homo sapien
tttccttgggcatcccgttactgcc

SEQ ID NO: 4850611 - DNA, 25 bp, Homo sapien
gttactgccccaacgaattagatag

SEQ ID NO: 4850612 - DNA, 25 bp, Homo sapien
tgtaaacactgcttggaggttattg

SEQ ID NO: 4850613 - DNA, 25 bp, Homo sapien
cactccaaaaggtcttcggagtcca

SEQ ID NO: 4850614 - DNA, 25 bp, Homo sapien
ggatgaggtccatgctgctaaggtc

SEQ ID NO: 4850615 - DNA, 25 bp, Homo sapien
tcttcggagtccacaggtgtgcttc

SEQ ID NO: 4850616 - DNA, 25 bp, Homo sapien
ttcagctccatatggcccacgcgga

SEQ ID NO: 4850617 - DNA, 25 bp, Homo sapien
caaaaaagtgactcatgaggtgcta

SEQ ID NO: 4850618 - DNA, 25 bp, Homo sapien
tctttgccaatggtgattcccagtg

SEQ ID NO: 4850619 - DNA, 25 bp, Homo sapien
ggatcaattttgcagactacccact

SEQ ID NO: 4850620 - DNA, 25 bp, Homo sapien
gtgtacctagcccagcaaaaaagtg

SEQ ID NO: 4850621 - DNA, 25 bp, Homo sapien
ttcccatgtatgatatcagtaatat

SEQ ID NO: 4850622 - DNA, 25 bp, Homo sapien
ccatgtatgatatcagtaatatcca

SEQ ID NO: 4850623 - DNA, 25 bp, Homo sapien
tcccatgtatgatatcagtaatatc

SEQ ID NO: 4850624 - DNA, 25 bp, Homo sapien
cccatgtatgatatcagtaatatcc

SEQ ID NO: 4850625 - DNA, 25 bp, Homo sapien
tgagaagccctatgctagcccacgt

SEQ ID NO: 4850626 - DNA, 25 bp, Homo sapien
tgcgcccggacctaaattcaacatg

SEQ ID NO: 4850627 - DNA, 25 bp, Homo sapien
gcattgctgacacaaggacggcacc

SEQ ID NO: 4850628 - DNA, 25 bp, Homo sapien
cctgcagctcaatatggagggcctc

SEQ ID NO: 4850629 - DNA, 25 bp, Homo sapien
tcattctccccaatcacgtgtgatg

SEQ ID NO: 4850630 - DNA, 25 bp, Homo sapien
tgcctctggcggatgtaggtttcca

SEQ ID NO: 4850631 - DNA, 25 bp, Homo sapien
tatcaaaggcgacatgatgagctgc

SEQ ID NO: 4850632 - DNA, 25 bp, Homo sapien
caagactgaagtgagtggctcattc

SEQ ID NO: 4850633 - DNA, 25 bp, Homo sapien
tccagggatttgggaggccaaggtg

SEQ ID NO: 4850634 - DNA, 25 bp, Homo sapien
agttccagggatttgggaggccaag

SEQ ID NO: 4850635 - DNA, 25 bp, Homo sapien
tatctagggtcgacattgggaatga

SEQ ID NO: 4850636 - DNA, 25 bp, Homo sapien
tcaacagaacatgatatggagatac

SEQ ID NO: 4850637 - DNA, 25 bp, Homo sapien
tgcaccaacacactctatcaacaga

SEQ ID NO: 4850638 - DNA, 25 bp, Homo sapien
tgggaatgaagggtaggcaaaaaca

SEQ ID NO: 4850639 - DNA, 25 bp, Homo sapien
ccgggctattgctgttgatctatca

SEQ ID NO: 4850640 - DNA, 25 bp, Homo sapien
caggaaagcccatcttccgggctat

SEQ ID NO: 4850641 - DNA, 25 bp, Homo sapien
aggtcaccgggcaagagcttcaagg

SEQ ID NO: 4850642 - DNA, 25 bp, Homo sapien
aaaaattcttctgaacctgggtgag

SEQ ID NO: 4850643 - DNA, 25 bp, Homo sapien
caggttacagtctagtgccagagag

SEQ ID NO: 4850644 - DNA, 25 bp, Homo sapien
caggtcctgacctcgtctgcagggt

SEQ ID NO: 4850645 - DNA, 25 bp, Homo sapien
ggtaggagacaacctgactgacatc

SEQ ID NO: 4850646 - DNA, 25 bp, Homo sapien
ggctctgtgaatgcacaataccagg

SEQ ID NO: 4850647 - DNA, 25 bp, Homo sapien
gaaaacaggagtgcatatttagagc

SEQ ID NO: 4850648 - DNA, 25 bp, Homo sapien
tatttagagcactgatcgttttcat

SEQ ID NO: 4850649 - DNA, 25 bp, Homo sapien
gaaatcttacttgacacactctttg

SEQ ID NO: 4850650 - DNA, 25 bp, Homo sapien
cactatattaaactgccacccaatg

SEQ ID NO: 4850651 - DNA, 25 bp, Homo sapien
tcctcatcgtgcacagacatcgtca

SEQ ID NO: 4850652 - DNA, 25 bp, Homo sapien
tcatcgtgcacagacatcgtcacct

SEQ ID NO: 4850653 - DNA, 25 bp, Homo sapien
gacataaatgtcattccgaacatct

SEQ ID NO: 4850654 - DNA, 25 bp, Homo sapien
tttgtcaaactcaccgtggatcagg

SEQ ID NO: 4850655 - DNA, 25 bp, Homo sapien
tgtaaagacggatgcgatggtagca

SEQ ID NO: 4850656 - DNA, 25 bp, Homo sapien
taaaatacggccaagattctatcgt

SEQ ID NO: 4850657 - DNA, 25 bp, Homo sapien
tcaaacccatcctgatgcaaagaag

SEQ ID NO: 4850658 - DNA, 25 bp, Homo sapien
gaaactgctcactgctaatcacaaa

SEQ ID NO: 4850659 - DNA, 25 bp, Homo sapien
tctctcagggaacatgacgatgacg

SEQ ID NO: 4850660 - DNA, 25 bp, Homo sapien
catattcactcaactcagggctgca

SEQ ID NO: 4850661 - DNA, 25 bp, Homo sapien
tagggacttagggtattggcacagc

SEQ ID NO: 4850662 - DNA, 25 bp, Homo sapien
cactgagcttagtagaaccaggcct

SEQ ID NO: 4850663 - DNA, 25 bp, Homo sapien
gacagtctcataccaacagggctgc

SEQ ID NO: 4850664 - DNA, 25 bp, Homo sapien
gcttgacttggtaatagactactga

SEQ ID NO: 4850665 - DNA, 25 bp, Homo sapien
tctgaaatgccttcatatccagcac

SEQ ID NO: 4850666 - DNA, 25 bp, Homo sapien
tatccagcaccagggtgaattgctt

SEQ ID NO: 4850667 - DNA, 25 bp, Homo sapien
ggtataggtttcattcaaaggagac

SEQ ID NO: 4850668 - DNA, 25 bp, Homo sapien
acacaggatctttcagactgcaaga

SEQ ID NO: 4850669 - DNA, 25 bp, Homo sapien
catagattctgagcatagggatact

SEQ ID NO: 4850670 - DNA, 25 bp, Homo sapien
taataattagggctcataaagcagt

SEQ ID NO: 4850671 - DNA, 25 bp, Homo sapien
cctgtgtcggaaggtaaatcttata

SEQ ID NO: 4850672 - DNA, 25 bp, Homo sapien
cagcgtgtgacttcttctatagcaa

SEQ ID NO: 4850673 - DNA, 25 bp, Homo sapien
aatcttatatgacagcgtgtgactt

SEQ ID NO: 4850674 - DNA, 25 bp, Homo sapien
agatgacctgtgtcggaaggtaaat

SEQ ID NO: 4850675 - DNA, 25 bp, Homo sapien
gagtggtgccatccgggttcatcag

SEQ ID NO: 4850676 - DNA, 25 bp, Homo sapien
ttataaaccaccagatcgtgcctcc

SEQ ID NO: 4850677 - DNA, 25 bp, Homo sapien
ccgggttcatcagcttcacgaaggc

SEQ ID NO: 4850678 - DNA, 25 bp, Homo sapien
cccaaatgctcgctccgatttatct

SEQ ID NO: 4850679 - DNA, 25 bp, Homo sapien
ccaggcagggtcaggtagaatttag

SEQ ID NO: 4850680 - DNA, 25 bp, Homo sapien
agcagatgagggtggcaatctgaaa

SEQ ID NO: 4850681 - DNA, 25 bp, Homo sapien
gtctttagtgctatccttgcttggg

SEQ ID NO: 4850682 - DNA, 25 bp, Homo sapien
tgagggtggcaatctgaaagctgtc

SEQ ID NO: 4850683 - DNA, 25 bp, Homo sapien
ccaggtttttggatgcttgaagctc

SEQ ID NO: 4850684 - DNA, 25 bp, Homo sapien
atttgtgtcagtgtattcaccactc

SEQ ID NO: 4850685 - DNA, 25 bp, Homo sapien
gtgtcagtgtattcaccactcctac

SEQ ID NO: 4850686 - DNA, 25 bp, Homo sapien
tttgtgtcagtgtattcaccactcc

SEQ ID NO: 4850687 - DNA, 25 bp, Homo sapien
tgtgtcagtgtattcaccactccta

SEQ ID NO: 4850688 - DNA, 25 bp, Homo sapien
ccaatgatcccacacaaattggtct

SEQ ID NO: 4850689 - DNA, 25 bp, Homo sapien
cccacacaaattggtctgttttagt

SEQ ID NO: 4850690 - DNA, 25 bp, Homo sapien
ccagaaaccaatgatcccacacaaa

SEQ ID NO: 4850691 - DNA, 25 bp, Homo sapien
gtgggcccagaaaccaatgatccca

SEQ ID NO: 4850692 - DNA, 25 bp, Homo sapien
tgggagttggaacgccaatttaaca

SEQ ID NO: 4850693 - DNA, 25 bp, Homo sapien
gagttggaacgccaatttaacaagc

SEQ ID NO: 4850694 - DNA, 25 bp, Homo sapien
tctgggagttggaacgccaatttaa

SEQ ID NO: 4850695 - DNA, 25 bp, Homo sapien
tgttctgggagttggaacgccaatt

SEQ ID NO: 4850696 - DNA, 25 bp, Homo sapien
tttccatcattatgttaaagagtgc

SEQ ID NO: 4850697 - DNA, 25 bp, Homo sapien
gagtgcatctagtgtatcttgcaaa

SEQ ID NO: 4850698 - DNA, 25 bp, Homo sapien
gaagtcataggtttcactgtctgac

SEQ ID NO: 4850699 - DNA, 25 bp, Homo sapien
cagtgcgtcaaacacaaggaagtca

SEQ ID NO: 4850700 - DNA, 25 bp, Homo sapien
gaacttgatgtctcctatcagtgaa

SEQ ID NO: 4850701 - DNA, 25 bp, Homo sapien
atatgccaaagtggcgctgaagtgc

SEQ ID NO: 4850702 - DNA, 25 bp, Homo sapien
ggtttcaagtacaggattaaaatgc

SEQ ID NO: 4850703 - DNA, 25 bp, Homo sapien
aatgctggaacttgatgtctcctat

SEQ ID NO: 4850704 - DNA, 25 bp, Homo sapien
ctgggtggaacggccactgtcactg

SEQ ID NO: 4850705 - DNA, 25 bp, Homo sapien
gtggaacggccactgtcactggtgt

SEQ ID NO: 4850706 - DNA, 25 bp, Homo sapien
gggtggaacggccactgtcactggt

SEQ ID NO: 4850707 - DNA, 25 bp, Homo sapien
ggtggaacggccactgtcactggtg

SEQ ID NO: 4850708 - DNA, 25 bp, Homo sapien
gccacatagaagttcagtaccttgg

SEQ ID NO: 4850709 - DNA, 25 bp, Homo sapien
cattagccacatagaagttcagtac

SEQ ID NO: 4850710 - DNA, 25 bp, Homo sapien
gaagttcagtaccttggagagtttc

SEQ ID NO: 4850711 - DNA, 25 bp, Homo sapien
ctgcattagccacatagaagttcag

SEQ ID NO: 4850712 - DNA, 25 bp, Homo sapien
ctttcaacgcagcaaaaagcagttc

SEQ ID NO: 4850713 - DNA, 25 bp, Homo sapien
agtacttcaaggctttcaacgcagc

SEQ ID NO: 4850714 - DNA, 25 bp, Homo sapien
ggatgatgaatctaaacaagtactt

SEQ ID NO: 4850715 - DNA, 25 bp, Homo sapien
ctcaagtagagcactcgggattgga

SEQ ID NO: 4850716 - DNA, 25 bp, Homo sapien
tcatgagtcttctccaacagacacg

SEQ ID NO: 4850717 - DNA, 25 bp, Homo sapien
aacagacacgcagcccaaatccatc

SEQ ID NO: 4850718 - DNA, 25 bp, Homo sapien
tgagtcttctccaacagacacgcag

SEQ ID NO: 4850719 - DNA, 25 bp, Homo sapien
gagtcttctccaacagacacgcagc

SEQ ID NO: 4850720 - DNA, 25 bp, Homo sapien
tgcccaatctcatcaaggacaaaga

SEQ ID NO: 4850721 - DNA, 25 bp, Homo sapien
tagttgcccaggtagctaagcacag

SEQ ID NO: 4850722 - DNA, 25 bp, Homo sapien
agtcctgaggtcattactgccccag

SEQ ID NO: 4850723 - DNA, 25 bp, Homo sapien
tgaatgttccctgcaaaggtacttg

SEQ ID NO: 4850724 - DNA, 25 bp, Homo sapien
cagtctcagctcacatgataccacc

SEQ ID NO: 4850725 - DNA, 25 bp, Homo sapien
tgctggttccaccactccaacactg

SEQ ID NO: 4850726 - DNA, 25 bp, Homo sapien
gtctcagctcacatgataccacctc

SEQ ID NO: 4850727 - DNA, 25 bp, Homo sapien
ctgctggttccaccactccaacact

SEQ ID NO: 4850728 - DNA, 25 bp, Homo sapien
tgacatctctggaggctgcttcttc

SEQ ID NO: 4850729 - DNA, 25 bp, Homo sapien
acatctctggaggctgcttcttcat

SEQ ID NO: 4850730 - DNA, 25 bp, Homo sapien
gacatctctggaggctgcttcttca

SEQ ID NO: 4850731 - DNA, 25 bp, Homo sapien
ctgacatctctggaggctgcttctt

SEQ ID NO: 4850732 - DNA, 25 bp, Homo sapien
gaagccgctcaacccggaaaggctc

SEQ ID NO: 4850733 - DNA, 25 bp, Homo sapien
agccgctcaacccggaaaggctctg

SEQ ID NO: 4850734 - DNA, 25 bp, Homo sapien
aagccgctcaacccggaaaggctct

SEQ ID NO: 4850735 - DNA, 25 bp, Homo sapien
gaattattaaactcatctccatctt

SEQ ID NO: 4850736 - DNA, 25 bp, Homo sapien
gcctgtccatcagcatattgaaagc

SEQ ID NO: 4850737 - DNA, 25 bp, Homo sapien
aaagcaagaaataactggcgaattg

SEQ ID NO: 4850738 - DNA, 25 bp, Homo sapien
tgtccatcagcatattgaaagcaag

SEQ ID NO: 4850739 - DNA, 25 bp, Homo sapien
cacaatggcctttcaagggatgtct

SEQ ID NO: 4850740 - DNA, 25 bp, Homo sapien
catgatggccaattctaagcggtcc

SEQ ID NO: 4850741 - DNA, 25 bp, Homo sapien
atttgtcacctgtagtgcattggga

SEQ ID NO: 4850742 - DNA, 25 bp, Homo sapien
taccacagcctaagaagagttaccc

SEQ ID NO: 4850743 - DNA, 25 bp, Homo sapien
taattatgctaggaaggtacttcaa

SEQ ID NO: 4850744 - DNA, 25 bp, Homo sapien
gacatcattaattatgctaggaagg

SEQ ID NO: 4850745 - DNA, 25 bp, Homo sapien
catcattaattatgctaggaaggta

SEQ ID NO: 4850746 - DNA, 25 bp, Homo sapien
cattaattatgctaggaaggtactt

SEQ ID NO: 4850747 - DNA, 25 bp, Homo sapien
tttgaatgaatttgcagaagagcac

SEQ ID NO: 4850748 - DNA, 25 bp, Homo sapien
ttgaatgaatttgcagaagagcacg

SEQ ID NO: 4850749 - DNA, 25 bp, Homo sapien
gcagttaagtttctgccgaaccagc

SEQ ID NO: 4850750 - DNA, 25 bp, Homo sapien
tactatcttggtcatgcagttaagt

SEQ ID NO: 4850751 - DNA, 25 bp, Homo sapien
ccgaaccagctggttgtcaggaatg

SEQ ID NO: 4850752 - DNA, 25 bp, Homo sapien
ctgactgtcgaaaaagagtgctctc

SEQ ID NO: 4850753 - DNA, 25 bp, Homo sapien
taagtagaactatccagtgcatgct

SEQ ID NO: 4850754 - DNA, 25 bp, Homo sapien
tgtgcaggcgtgtggatttcagaaa

SEQ ID NO: 4850755 - DNA, 25 bp, Homo sapien
gaaatgactgttaaccgtgatcaca

SEQ ID NO: 4850756 - DNA, 25 bp, Homo sapien
ggcattacctctacctccaattgtg

SEQ ID NO: 4850757 - DNA, 25 bp, Homo sapien
taactggccgctgagctggtctgtc

SEQ ID NO: 4850758 - DNA, 25 bp, Homo sapien
gttgtcatctaactggccgctgagc

SEQ ID NO: 4850759 - DNA, 25 bp, Homo sapien
ttgcctcgtggtcaggcttgttgga

SEQ ID NO: 4850760 - DNA, 25 bp, Homo sapien
tcagaagctgcgagcttgcctcgtg

SEQ ID NO: 4850761 - DNA, 25 bp, Homo sapien
gaaccaggacaattccaaaacagag

SEQ ID NO: 4850762 - DNA, 25 bp, Homo sapien
ttgaaagaaccaggacaattccaaa

SEQ ID NO: 4850763 - DNA, 25 bp, Homo sapien
tggacttgaaagaaccaggacaatt

SEQ ID NO: 4850764 - DNA, 25 bp, Homo sapien
gcagctggacttgaaagaaccagga

SEQ ID NO: 4850765 - DNA, 25 bp, Homo sapien
gagacaacttcacagaggtgcttac

SEQ ID NO: 4850766 - DNA, 25 bp, Homo sapien
agagacaacttcacagaggtgctta

SEQ ID NO: 4850767 - DNA, 25 bp, Homo sapien
cagagacaacttcacagaggtgctt

SEQ ID NO: 4850768 - DNA, 25 bp, Homo sapien
tccacctaagttattgcaaaagaca

SEQ ID NO: 4850769 - DNA, 25 bp, Homo sapien
ttaattacagtatcaagtacctggg

SEQ ID NO: 4850770 - DNA, 25 bp, Homo sapien
ccagcagtgtaacaatgttcccctt

SEQ ID NO: 4850771 - DNA, 25 bp, Homo sapien
gacttctcaattatggtatggctat

SEQ ID NO: 4850772 - DNA, 25 bp, Homo sapien
tctcagcagccgttccattataagc

SEQ ID NO: 4850773 - DNA, 25 bp, Homo sapien
tgtccggttgatccttctcagcagc

SEQ ID NO: 4850774 - DNA, 25 bp, Homo sapien
ggagactgccggttcatcccaatca

SEQ ID NO: 4850775 - DNA, 25 bp, Homo sapien
tataagctgaatgtgcaccgcagtg

SEQ ID NO: 4850776 - DNA, 25 bp, Homo sapien
cctcccgataggcaaaggggacaga

SEQ ID NO: 4850777 - DNA, 25 bp, Homo sapien
agagaaacagcagcggccgtgggat

SEQ ID NO: 4850778 - DNA, 25 bp, Homo sapien
agcagcggccgtgggatccaacaaa

SEQ ID NO: 4850779 - DNA, 25 bp, Homo sapien
tgggatccaacaaagagatactcac

SEQ ID NO: 4850780 - DNA, 25 bp, Homo sapien
caatgacccatgatgtgagaggccc

SEQ ID NO: 4850781 - DNA, 25 bp, Homo sapien
tgagaggcccatgtgaagaatagtc

SEQ ID NO: 4850782 - DNA, 25 bp, Homo sapien
caagatctgctaaggttataaccaa

SEQ ID NO: 4850783 - DNA, 25 bp, Homo sapien
gcagcctcgacatctcacgtttaag

SEQ ID NO: 4850784 - DNA, 25 bp, Homo sapien
ctacccacgtgaattgtgaccctga

SEQ ID NO: 4850785 - DNA, 25 bp, Homo sapien
actacccacgtgaattgtgaccctg

SEQ ID NO: 4850786 - DNA, 25 bp, Homo sapien
caactccagagcccttcagccagtt

SEQ ID NO: 4850787 - DNA, 25 bp, Homo sapien
actccagagcccttcagccagttgt

SEQ ID NO: 4850788 - DNA, 25 bp, Homo sapien
tccagagcccttcagccagttgttc

SEQ ID NO: 4850789 - DNA, 25 bp, Homo sapien
cagagcccttcagccagttgttcca

SEQ ID NO: 4850790 - DNA, 25 bp, Homo sapien
gattaccagtgaagatgtaacaact

SEQ ID NO: 4850791 - DNA, 25 bp, Homo sapien
gctgtagtatagaattccatggaga

SEQ ID NO: 4850792 - DNA, 25 bp, Homo sapien
tcttgttgagacagagctgtagtat

SEQ ID NO: 4850793 - DNA, 25 bp, Homo sapien
ggacacctcaatgagattaccagtg

SEQ ID NO: 4850794 - DNA, 25 bp, Homo sapien
acgcaggtatcccaccacactggaa

SEQ ID NO: 4850795 - DNA, 25 bp, Homo sapien
ttctaaaggtccaaaggccacgtgc

SEQ ID NO: 4850796 - DNA, 25 bp, Homo sapien
cgtgctttgcggtttctgcttcaaa

SEQ ID NO: 4850797 - DNA, 25 bp, Homo sapien
tggaaacacgctgcattctaaaggt

SEQ ID NO: 4850798 - DNA, 25 bp, Homo sapien
tgctgatgtagtggctatagtggct

SEQ ID NO: 4850799 - DNA, 25 bp, Homo sapien
cagggcaatcatgcaagccacaaaa

SEQ ID NO: 4850800 - DNA, 25 bp, Homo sapien
tgtctggttttgaaagtgctgatgt

SEQ ID NO: 4850801 - DNA, 25 bp, Homo sapien
gtggctgtcgtccatttgctgcagc

SEQ ID NO: 4850802 - DNA, 25 bp, Homo sapien
ttcatcaccatccaatctttggcat

SEQ ID NO: 4850803 - DNA, 25 bp, Homo sapien
ttggcatagacattctttccaatca

SEQ ID NO: 4850804 - DNA, 25 bp, Homo sapien
tccttgaacatgataaaagtttcca

SEQ ID NO: 4850805 - DNA, 25 bp, Homo sapien
aatctttggcatagacattctttcc

SEQ ID NO: 4850806 - DNA, 25 bp, Homo sapien
tcaaagcttgcctgatccatgaaga

SEQ ID NO: 4850807 - DNA, 25 bp, Homo sapien
ttcaaagcttgcctgatccatgaag

SEQ ID NO: 4850808 - DNA, 25 bp, Homo sapien
agttcaaagcttgcctgatccatga

SEQ ID NO: 4850809 - DNA, 25 bp, Homo sapien
caaagcttgcctgatccatgaagaa

SEQ ID NO: 4850810 - DNA, 25 bp, Homo sapien
gaagcaggtaggtgagtcacatgcc

SEQ ID NO: 4850811 - DNA, 25 bp, Homo sapien
aagcaggtaggtgagtcacatgcct

SEQ ID NO: 4850812 - DNA, 25 bp, Homo sapien
ctcttgccatggccaagaattctag

SEQ ID NO: 4850813 - DNA, 25 bp, Homo sapien
tctcttgccatggccaagaattcta

SEQ ID NO: 4850814 - DNA, 25 bp, Homo sapien
taacaattttgttgcgcttggcttg

SEQ ID NO: 4850815 - DNA, 25 bp, Homo sapien
aaatgcaactgccaaatggaagtaa

SEQ ID NO: 4850816 - DNA, 25 bp, Homo sapien
ttgtgagaaggtttcaagctgaagg

SEQ ID NO: 4850817 - DNA, 25 bp, Homo sapien
aactgccaaatggaagtaattgttc

SEQ ID NO: 4850818 - DNA, 25 bp, Homo sapien
ccaggttataccacatgtcccggat

SEQ ID NO: 4850819 - DNA, 25 bp, Homo sapien
cacatgtcccggattctaaagccga

SEQ ID NO: 4850820 - DNA, 25 bp, Homo sapien
gattctaaagccgatttcctttctc

SEQ ID NO: 4850821 - DNA, 25 bp, Homo sapien
ggttataccacatgtcccggattct

SEQ ID NO: 4850822 - DNA, 25 bp, Homo sapien
acttcaggggtcagagtgacctcca

SEQ ID NO: 4850823 - DNA, 25 bp, Homo sapien
ggctttccggagctctacttcaggg

SEQ ID NO: 4850824 - DNA, 25 bp, Homo sapien
tcaggggtcagagtgacctccagaa

SEQ ID NO: 4850825 - DNA, 25 bp, Homo sapien
tccggagctctacttcaggggtcag

SEQ ID NO: 4850826 - DNA, 25 bp, Homo sapien
ccatttccactgaaattgaactcac

SEQ ID NO: 4850827 - DNA, 25 bp, Homo sapien
tgccatttccactgaaattgaactc

SEQ ID NO: 4850828 - DNA, 25 bp, Homo sapien
catatggaaattgccatttccactg

SEQ ID NO: 4850829 - DNA, 25 bp, Homo sapien
attgccatttccactgaaattgaac

SEQ ID NO: 4850830 - DNA, 25 bp, Homo sapien
cagaatttcacaggataatgttgca

SEQ ID NO: 4850831 - DNA, 25 bp, Homo sapien
catggccaactttctagacttggcc

SEQ ID NO: 4850832 - DNA, 25 bp, Homo sapien
aatttcacaggataatgttgcatcc

SEQ ID NO: 4850833 - DNA, 25 bp, Homo sapien
ggccaacccattcgctgagttgtga

SEQ ID NO: 4850834 - DNA, 25 bp, Homo sapien
tttccagaagaaccttgtattgttc

SEQ ID NO: 4850835 - DNA, 25 bp, Homo sapien
gaaccttgtattgttcgtctcctct

SEQ ID NO: 4850836 - DNA, 25 bp, Homo sapien
agctttgtgatcagctcattctcaa

SEQ ID NO: 4850837 - DNA, 25 bp, Homo sapien
cctcctggtccagctttgtgatcag

SEQ ID NO: 4850838 - DNA, 25 bp, Homo sapien
aggttctctaagaggctgctgacca

SEQ ID NO: 4850839 - DNA, 25 bp, Homo sapien
tcacagtgcagctcatacggttctc

SEQ ID NO: 4850840 - DNA, 25 bp, Homo sapien
gtgtttccggcaatgttctaggagc

SEQ ID NO: 4850841 - DNA, 25 bp, Homo sapien
tacggttctccttgctctcatcttg

SEQ ID NO: 4850842 - DNA, 25 bp, Homo sapien
ttatgtatatgtcctctctcttctt

SEQ ID NO: 4850843 - DNA, 25 bp, Homo sapien
tatgtatatgtcctctctcttcttt

SEQ ID NO: 4850844 - DNA, 25 bp, Homo sapien
cttatgtatatgtcctctctcttct

SEQ ID NO: 4850845 - DNA, 25 bp, Homo sapien
ctggcaagaaggggagaaggaagca

SEQ ID NO: 4850846 - DNA, 25 bp, Homo sapien
tggcaagaaggggagaaggaagcat

SEQ ID NO: 4850847 - DNA, 25 bp, Homo sapien
gcaaatctcgaagcttgtacagata

SEQ ID NO: 4850848 - DNA, 25 bp, Homo sapien
tgtagttctcacagtctcggtgcaa

SEQ ID NO: 4850849 - DNA, 25 bp, Homo sapien
gaagctcagcgtgcaagagaagcgt

SEQ ID NO: 4850850 - DNA, 25 bp, Homo sapien
tgcaagagaagcgtgtaggcagctt

SEQ ID NO: 4850851 - DNA, 25 bp, Homo sapien
gatttcttgatacagcttctcttta

SEQ ID NO: 4850852 - DNA, 25 bp, Homo sapien
gctgggtataaacatagtaactgtc

SEQ ID NO: 4850853 - DNA, 25 bp, Homo sapien
ttgcctttgtcgaaatatgatatga

SEQ ID NO: 4850854 - DNA, 25 bp, Homo sapien
gtaactgtccttctgaagcaaatga

SEQ ID NO: 4850855 - DNA, 25 bp, Homo sapien
tgcggggtcgggcaaaaacagccac

SEQ ID NO: 4850856 - DNA, 25 bp, Homo sapien
aatggacgtacaagtaggagagata

SEQ ID NO: 4850857 - DNA, 25 bp, Homo sapien
gaataacagcgattttttgggaaca

SEQ ID NO: 4850858 - DNA, 25 bp, Homo sapien
ctataaatggacgtacaagtaggag

SEQ ID NO: 4850859 - DNA, 25 bp, Homo sapien
tcactcgctttatcccttagatcag

SEQ ID NO: 4850860 - DNA, 25 bp, Homo sapien
gcaaaagccactggcgagtcactgg

SEQ ID NO: 4850861 - DNA, 25 bp, Homo sapien
caaggcagtcattgattcagtggca

SEQ ID NO: 4850862 - DNA, 25 bp, Homo sapien
cataaagacagtgtatattggcagc

SEQ ID NO: 4850863 - DNA, 25 bp, Homo sapien
ggccctcgtagtcaaatactttgct

SEQ ID NO: 4850864 - DNA, 25 bp, Homo sapien
caaatactttgctttcgtaagtctc

SEQ ID NO: 4850865 - DNA, 25 bp, Homo sapien
gttgccaaggccctcgtagtcaaat

SEQ ID NO: 4850866 - DNA, 25 bp, Homo sapien
tttcgtaagtctcagccaactcttt

SEQ ID NO: 4850867 - DNA, 25 bp, Homo sapien
ggctgcctaacactgggcactcatt

SEQ ID NO: 4850868 - DNA, 25 bp, Homo sapien
ggtggctgcctaacactgggcactc

SEQ ID NO: 4850869 - DNA, 25 bp, Homo sapien
ctgcctaacactgggcactcatttt

SEQ ID NO: 4850870 - DNA, 25 bp, Homo sapien
atggtggctgcctaacactgggcac

SEQ ID NO: 4850871 - DNA, 25 bp, Homo sapien
tgccttctattgggcattcagaaga

SEQ ID NO: 4850872 - DNA, 25 bp, Homo sapien
tcagaagagtggctgtctaccactg

SEQ ID NO: 4850873 - DNA, 25 bp, Homo sapien
attcagaagagtggctgtctaccac

SEQ ID NO: 4850874 - DNA, 25 bp, Homo sapien
ctgccttctattgggcattcagaag

SEQ ID NO: 4850875 - DNA, 25 bp, Homo sapien
tcattgccttaatgatgttctcata

SEQ ID NO: 4850876 - DNA, 25 bp, Homo sapien
ccaacagcaaagtattcaggctgag

SEQ ID NO: 4850877 - DNA, 25 bp, Homo sapien
gaaagccctgtccatagtatccaac

SEQ ID NO: 4850878 - DNA, 25 bp, Homo sapien
aaggaaagccctgtccatagtatcc

SEQ ID NO: 4850879 - DNA, 25 bp, Homo sapien
cctggcgtgacccgtagcagctgac

SEQ ID NO: 4850880 - DNA, 25 bp, Homo sapien
tggcgtgacccgtagcagctgacca

SEQ ID NO: 4850881 - DNA, 25 bp, Homo sapien
gcagctgaccagtgcgggggatggt

SEQ ID NO: 4850882 - DNA, 25 bp, Homo sapien
ccagtgcgggggatggttctgtttt

SEQ ID NO: 4850883 - DNA, 25 bp, Homo sapien
actgtctcattaggcactgttagga

SEQ ID NO: 4850884 - DNA, 25 bp, Homo sapien
tagctctggctagaaacatggtaaa

SEQ ID NO: 4850885 - DNA, 25 bp, Homo sapien
tattttgggatactcctgcagtctg

SEQ ID NO: 4850886 - DNA, 25 bp, Homo sapien
gcaaagctcagctctaaaagaaact

SEQ ID NO: 4850887 - DNA, 25 bp, Homo sapien
tggttgcctgggcaagtgcaaacat

SEQ ID NO: 4850888 - DNA, 25 bp, Homo sapien
gacagcgaccatcatatcctacaag

SEQ ID NO: 4850889 - DNA, 25 bp, Homo sapien
ccatggccagtctgcaaacagtctg

SEQ ID NO: 4850890 - DNA, 25 bp, Homo sapien
cagtctgcaaacagtctggacccat

SEQ ID NO: 4850891 - DNA, 25 bp, Homo sapien
caagagctgcggtttattggagaag

SEQ ID NO: 4850892 - DNA, 25 bp, Homo sapien
cccaggaggcgtggtactggtcatc

SEQ ID NO: 4850893 - DNA, 25 bp, Homo sapien
tcctttccccgatagatgaagattt

SEQ ID NO: 4850894 - DNA, 25 bp, Homo sapien
gaactgggttaacaacctcaggctg

SEQ ID NO: 4850895 - DNA, 25 bp, Homo sapien
tctcatactcctttccccgatagat

SEQ ID NO: 4850896 - DNA, 25 bp, Homo sapien
gtcagaatgcttgagaagatggtgt

SEQ ID NO: 4850897 - DNA, 25 bp, Homo sapien
gtgtcagaatgcttgagaagatggt

SEQ ID NO: 4850898 - DNA, 25 bp, Homo sapien
gtagctcctatgttctctggcttag

SEQ ID NO: 4850899 - DNA, 25 bp, Homo sapien
tgtagctcctatgttctctggctta

SEQ ID NO: 4850900 - DNA, 25 bp, Homo sapien
taaagttaggcttcaaaagcagctc

SEQ ID NO: 4850901 - DNA, 25 bp, Homo sapien
cagctaatgctattagggtcccaaa

SEQ ID NO: 4850902 - DNA, 25 bp, Homo sapien
aaagcagctcaagtgtaagcgctcc

SEQ ID NO: 4850903 - DNA, 25 bp, Homo sapien
caagtcttagaaagtcttagctccc

SEQ ID NO: 4850904 - DNA, 25 bp, Homo sapien
gaagagctcgttaaggaaaggagag

SEQ ID NO: 4850905 - DNA, 25 bp, Homo sapien
tgaagagctcgttaaggaaaggaga

SEQ ID NO: 4850906 - DNA, 25 bp, Homo sapien
ctgaagagctcgttaaggaaaggag

SEQ ID NO: 4850907 - DNA, 25 bp, Homo sapien
cactggctttacagtgaagcactgc

SEQ ID NO: 4850908 - DNA, 25 bp, Homo sapien
ctggctttacagtgaagcactgcat

SEQ ID NO: 4850909 - DNA, 25 bp, Homo sapien
actggctttacagtgaagcactgca

SEQ ID NO: 4850910 - DNA, 25 bp, Homo sapien
gtttatccttgtagctgggcggcaa

SEQ ID NO: 4850911 - DNA, 25 bp, Homo sapien
tatccttgtagctgggcggcaagct

SEQ ID NO: 4850912 - DNA, 25 bp, Homo sapien
aggtttatccttgtagctgggcggc

SEQ ID NO: 4850913 - DNA, 25 bp, Homo sapien
ttatccttgtagctgggcggcaagc

SEQ ID NO: 4850914 - DNA, 25 bp, Homo sapien
gagccaagatcacgcactgtactcc

SEQ ID NO: 4850915 - DNA, 25 bp, Homo sapien
agcctgggtgacggagcaagattcc

SEQ ID NO: 4850916 - DNA, 25 bp, Homo sapien
tgggtgacggagcaagattccgtct

SEQ ID NO: 4850917 - DNA, 25 bp, Homo sapien
cctgggtgacggagcaagattccgt

SEQ ID NO: 4850918 - DNA, 25 bp, Homo sapien
aacggccgggagtatctgaactgct

SEQ ID NO: 4850919 - DNA, 25 bp, Homo sapien
gaacggccgggagtatctgaactgc

SEQ ID NO: 4850920 - DNA, 25 bp, Homo sapien
cggaacggccgggagtatctgaact

SEQ ID NO: 4850921 - DNA, 25 bp, Homo sapien
cggccgggagtatctgaactgctgc

SEQ ID NO: 4850922 - DNA, 25 bp, Homo sapien
ccaccgtgctcagcccgttaatttt

SEQ ID NO: 4850923 - DNA, 25 bp, Homo sapien
caccgtgctcagcccgttaatttta

SEQ ID NO: 4850924 - DNA, 25 bp, Homo sapien
tatatgcagtcgtatacgtggtccg

SEQ ID NO: 4850925 - DNA, 25 bp, Homo sapien
aaccacttgagaatcccaggaaagg

SEQ ID NO: 4850926 - DNA, 25 bp, Homo sapien
tacgtggtccgttcaatccacatcg

SEQ ID NO: 4850927 - DNA, 25 bp, Homo sapien
aatctgtttgacttcaaaccacttg

SEQ ID NO: 4850928 - DNA, 25 bp, Homo sapien
ctgagtgacagagcacatgggagaa

SEQ ID NO: 4850929 - DNA, 25 bp, Homo sapien
agctccaagtaaagactgaaaaaag

SEQ ID NO: 4850930 - DNA, 25 bp, Homo sapien
agtgacagagcacatgggagaaaga

SEQ ID NO: 4850931 - DNA, 25 bp, Homo sapien
gagaaagaggacacttgtcagctcc

SEQ ID NO: 4850932 - DNA, 25 bp, Homo sapien
tgctgctgaacacagttgctgatcc

SEQ ID NO: 4850933 - DNA, 25 bp, Homo sapien
ggtcagctccatggtttcgatggca

SEQ ID NO: 4850934 - DNA, 25 bp, Homo sapien
cagttgctgatcctctcgttggtca

SEQ ID NO: 4850935 - DNA, 25 bp, Homo sapien
cgggtccacgatgccactgagcagc

SEQ ID NO: 4850936 - DNA, 25 bp, Homo sapien
caggtctgtgaatccctaggggatt

SEQ ID NO: 4850937 - DNA, 25 bp, Homo sapien
aggtctgtgaatccctaggggattc

SEQ ID NO: 4850938 - DNA, 25 bp, Homo sapien
ccaggtctgtgaatccctaggggat

SEQ ID NO: 4850939 - DNA, 25 bp, Homo sapien
gtctgtgaatccctaggggattctg

SEQ ID NO: 4850940 - DNA, 25 bp, Homo sapien
ttgtcagtggcaaatggcacagagg

SEQ ID NO: 4850941 - DNA, 25 bp, Homo sapien
ggcaaatggcacagagggaggcaca

SEQ ID NO: 4850942 - DNA, 25 bp, Homo sapien
cagtggcaaatggcacagagggagg

SEQ ID NO: 4850943 - DNA, 25 bp, Homo sapien
tggcaaatggcacagagggaggcac

SEQ ID NO: 4850944 - DNA, 25 bp, Homo sapien
gatgctcctgcaagtacttttctgt

SEQ ID NO: 4850945 - DNA, 25 bp, Homo sapien
tagtcgctttagcagctcaaccttc

SEQ ID NO: 4850946 - DNA, 25 bp, Homo sapien
tattagtcgctttagcagctcaacc

SEQ ID NO: 4850947 - DNA, 25 bp, Homo sapien
ctgtaatgctattagtcgctttagc

SEQ ID NO: 4850948 - DNA, 25 bp, Homo sapien
caaaaaatgagtgcagtgtgcttca

SEQ ID NO: 4850949 - DNA, 25 bp, Homo sapien
agaatacaggttggccctaaactgg

SEQ ID NO: 4850950 - DNA, 25 bp, Homo sapien
tagacatagtgctggccaatgggaa

SEQ ID NO: 4850951 - DNA, 25 bp, Homo sapien
acttctcagtgtaggacttgtggac

SEQ ID NO: 4850952 - DNA, 25 bp, Homo sapien
gaagacaaccgctcatgcagcggct

SEQ ID NO: 4850953 - DNA, 25 bp, Homo sapien
ggatgcggatcccttctgttagcag

SEQ ID NO: 4850954 - DNA, 25 bp, Homo sapien
gagttcccggaagcaagaagacaac

SEQ ID NO: 4850955 - DNA, 25 bp, Homo sapien
gcggcttcagctgctctgtgagttt

SEQ ID NO: 4850956 - DNA, 25 bp, Homo sapien
atcagatcccggtctggaaggagca

SEQ ID NO: 4850957 - DNA, 25 bp, Homo sapien
ggagcacaatagaccccgtgcggct

SEQ ID NO: 4850958 - DNA, 25 bp, Homo sapien
tgcttcctctccgtcaagttgggtg

SEQ ID NO: 4850959 - DNA, 25 bp, Homo sapien
ggtgatggacaacctccgcagagtg

SEQ ID NO: 4850960 - DNA, 25 bp, Homo sapien
tctcgctgttctcctctctaaggga

SEQ ID NO: 4850961 - DNA, 25 bp, Homo sapien
ctctaagggacagatcttcaactct

SEQ ID NO: 4850962 - DNA, 25 bp, Homo sapien
tgggacttgctcagactccagtctt

SEQ ID NO: 4850963 - DNA, 25 bp, Homo sapien
tcttaaacttgctgatccggttctc

SEQ ID NO: 4850964 - DNA, 25 bp, Homo sapien
tggaggtgggctcaagggtgttgac

SEQ ID NO: 4850965 - DNA, 25 bp, Homo sapien
gaaccgtgaaatggtgatagccgat

SEQ ID NO: 4850966 - DNA, 25 bp, Homo sapien
gattatccatcaactggagactctt

SEQ ID NO: 4850967 - DNA, 25 bp, Homo sapien
gatagccgattatccatcaactgga

SEQ ID NO: 4850968 - DNA, 25 bp, Homo sapien
gaagtttcaagagctccacaaggtg

SEQ ID NO: 4850969 - DNA, 25 bp, Homo sapien
tgttctctgatatagcccaagtgct

SEQ ID NO: 4850970 - DNA, 25 bp, Homo sapien
ctgcggatagaacgaagaagacttc

SEQ ID NO: 4850971 - DNA, 25 bp, Homo sapien
tgttgctggcactgtaacacctaag

SEQ ID NO: 4850972 - DNA, 25 bp, Homo sapien
aggagtggccgcgattccatctgtc

SEQ ID NO: 4850973 - DNA, 25 bp, Homo sapien
tgggacaggagtggccgcgattcca

SEQ ID NO: 4850974 - DNA, 25 bp, Homo sapien
ccatctgtctgcaacgatggggagc

SEQ ID NO: 4850975 - DNA, 25 bp, Homo sapien
tctggctgccttcatagggcttgct

SEQ ID NO: 4850976 - DNA, 25 bp, Homo sapien
ctgcccactaaagagcctggaaaac

SEQ ID NO: 4850977 - DNA, 25 bp, Homo sapien
actaaagagcctggaaaacctgatg

SEQ ID NO: 4850978 - DNA, 25 bp, Homo sapien
tgccttcccaggagtggcgctccct

SEQ ID NO: 4850979 - DNA, 25 bp, Homo sapien
ccactaaagagcctggaaaacctga

SEQ ID NO: 4850980 - DNA, 25 bp, Homo sapien
tccaggctcggaagtagggatgcca

SEQ ID NO: 4850981 - DNA, 25 bp, Homo sapien
aagtagggatgccagacttccgagc

SEQ ID NO: 4850982 - DNA, 25 bp, Homo sapien
agacttccgagcctttggaggtgga

SEQ ID NO: 4850983 - DNA, 25 bp, Homo sapien
tggtgctttggcttctcttcggaca

SEQ ID NO: 4850984 - DNA, 25 bp, Homo sapien
acaccggctggaggccagttctcag

SEQ ID NO: 4850985 - DNA, 25 bp, Homo sapien
gttttgggctggtaaacatcatccc

SEQ ID NO: 4850986 - DNA, 25 bp, Homo sapien
tgtctaaggcactcggtgttgcagg

SEQ ID NO: 4850987 - DNA, 25 bp, Homo sapien
ggtggcatggcctcaaaattctatc

SEQ ID NO: 4850988 - DNA, 25 bp, Homo sapien
ctgacatttaacaatggtgaaggca

SEQ ID NO: 4850989 - DNA, 25 bp, Homo sapien
ggctgacatttaacaatggtgaagg

SEQ ID NO: 4850990 - DNA, 25 bp, Homo sapien
tgacatttaacaatggtgaaggcaa

SEQ ID NO: 4850991 - DNA, 25 bp, Homo sapien
gctgacatttaacaatggtgaaggc

SEQ ID NO: 4850992 - DNA, 25 bp, Homo sapien
tcaatatggaagaacttgtccaggc

SEQ ID NO: 4850993 - DNA, 25 bp, Homo sapien
tctcttccaagatgcaatatgggat

SEQ ID NO: 4850994 - DNA, 25 bp, Homo sapien
tcctcaaaggagatacaatagacat

SEQ ID NO: 4850995 - DNA, 25 bp, Homo sapien
gaaaagtacctaagtctcaagcaca

SEQ ID NO: 4850996 - DNA, 25 bp, Homo sapien
gatcagtgtgtccacgtgagaaaag

SEQ ID NO: 4850997 - DNA, 25 bp, Homo sapien
actgcgacgcagtgaaggccattag

SEQ ID NO: 4850998 - DNA, 25 bp, Homo sapien
ccgtatgtgcaaaaggaagagcttc

SEQ ID NO: 4850999 - DNA, 25 bp, Homo sapien
ggactcaagaactcagggctgatgt

SEQ ID NO: 4851000 - DNA, 25 bp, Homo sapien
cctgtgccacaagaagatgggagtt

SEQ ID NO: 4851001 - DNA, 25 bp, Homo sapien
gaggcttcaagtccaaacgtctaaa

SEQ ID NO: 4851002 - DNA, 25 bp, Homo sapien
cggctgctgagtcacccaaatgggt

SEQ ID NO: 4851003 - DNA, 25 bp, Homo sapien
taaaatcaggtagcagatgcggctg

SEQ ID NO: 4851004 - DNA, 25 bp, Homo sapien
tagccagtgatttgcgctcagagga

SEQ ID NO: 4851005 - DNA, 25 bp, Homo sapien
gggcaaggttgtgggagagaccacc

SEQ ID NO: 4851006 - DNA, 25 bp, Homo sapien
tggaaaggactctgggcaaggttgt

SEQ ID NO: 4851007 - DNA, 25 bp, Homo sapien
ccttcacagtcaaaaagctttctgc

SEQ ID NO: 4851008 - DNA, 25 bp, Homo sapien
accagcaagtttcccccagtgctga

SEQ ID NO: 4851009 - DNA, 25 bp, Homo sapien
tgaaagggtggcggtgaaacaggaa

SEQ ID NO: 4851010 - DNA, 25 bp, Homo sapien
gcaggcaaataccagctctggcagc

SEQ ID NO: 4851011 - DNA, 25 bp, Homo sapien
ctgaaagggtggcggtgaaacagga

SEQ ID NO: 4851012 - DNA, 25 bp, Homo sapien
tggacacatctgagagcttttgctt

SEQ ID NO: 4851013 - DNA, 25 bp, Homo sapien
tccctgaccctcatgatgaactggt

SEQ ID NO: 4851014 - DNA, 25 bp, Homo sapien
catttcttaagtaacgccctggaca

SEQ ID NO: 4851015 - DNA, 25 bp, Homo sapien
gaatctgcatactcatttcttaagt

SEQ ID NO: 4851016 - DNA, 25 bp, Homo sapien
catgctagcacaatgcaggttttcc

SEQ ID NO: 4851017 - DNA, 25 bp, Homo sapien
caaatgggtttaattccaccaaatg

SEQ ID NO: 4851018 - DNA, 25 bp, Homo sapien
ctagcacaatgcaggttttcctggg

SEQ ID NO: 4851019 - DNA, 25 bp, Homo sapien
gattcttccatgctagcacaatgca

SEQ ID NO: 4851020 - DNA, 25 bp, Homo sapien
gagtttgcaaagttaacagatgtca

SEQ ID NO: 4851021 - DNA, 25 bp, Homo sapien
gtttgcaaagttaacagatgtcata

SEQ ID NO: 4851022 - DNA, 25 bp, Homo sapien
tgagtttgcaaagttaacagatgtc

SEQ ID NO: 4851023 - DNA, 25 bp, Homo sapien
ttgcaaagttaacagatgtcataac

SEQ ID NO: 4851024 - DNA, 25 bp, Homo sapien
tgaaaattacccatctgcacggcta

SEQ ID NO: 4851025 - DNA, 25 bp, Homo sapien
tatcttagaggcacggatgtgggca

SEQ ID NO: 4851026 - DNA, 25 bp, Homo sapien
aaataaattagccagtgacctaggg

SEQ ID NO: 4851027 - DNA, 25 bp, Homo sapien
tcccttttgttcaggcaggagagag

SEQ ID NO: 4851028 - DNA, 25 bp, Homo sapien
gacatctgatactgcagaccagcct

SEQ ID NO: 4851029 - DNA, 25 bp, Homo sapien
caccacctgggatgataaatgggac

SEQ ID NO: 4851030 - DNA, 25 bp, Homo sapien
tcctaggcgtcagagtgaaatcatg

SEQ ID NO: 4851031 - DNA, 25 bp, Homo sapien
gcagctagggctgaaggaattctaa

SEQ ID NO: 4851032 - DNA, 25 bp, Homo sapien
tttcaggaggtacccttgatgctcc

SEQ ID NO: 4851033 - DNA, 25 bp, Homo sapien
caggcctcccttgaatgggataaaa

SEQ ID NO: 4851034 - DNA, 25 bp, Homo sapien
ctgcaggcctcccttgaatgggata

SEQ ID NO: 4851035 - DNA, 25 bp, Homo sapien
ctttcaggaggtacccttgatgctc

SEQ ID NO: 4851036 - DNA, 25 bp, Homo sapien
tcaaataatgtcttcactccgtctt

SEQ ID NO: 4851037 - DNA, 25 bp, Homo sapien
aatatttgctactgcacaatgacag

SEQ ID NO: 4851038 - DNA, 25 bp, Homo sapien
gaagagtctctaaagtggaatcaaa

SEQ ID NO: 4851039 - DNA, 25 bp, Homo sapien
tcccaaatacctccattggaagagt

SEQ ID NO: 4851040 - DNA, 25 bp, Homo sapien
gtttcctgataggacaataatcacc

SEQ ID NO: 4851041 - DNA, 25 bp, Homo sapien
tagagagtgatggacttgatttcca

SEQ ID NO: 4851042 - DNA, 25 bp, Homo sapien
gcaactgtgctttatcttacatggt

SEQ ID NO: 4851043 - DNA, 25 bp, Homo sapien
aaccttggggaatagagacatgaga

SEQ ID NO: 4851044 - DNA, 25 bp, Homo sapien
gtcaaagaggttggtcaactggcag

SEQ ID NO: 4851045 - DNA, 25 bp, Homo sapien
gaaacccaacgcttcgaatgcacca

SEQ ID NO: 4851046 - DNA, 25 bp, Homo sapien
gaggttggtcaactggcagaaaccc

SEQ ID NO: 4851047 - DNA, 25 bp, Homo sapien
ctggcagaaacccaacgcttcgaat

SEQ ID NO: 4851048 - DNA, 25 bp, Homo sapien
tgctccaggtgagataaggcactta

SEQ ID NO: 4851049 - DNA, 25 bp, Homo sapien
tgatgttgtaccctagatgctccag

SEQ ID NO: 4851050 - DNA, 25 bp, Homo sapien
agctggccttattctactgacttgg

SEQ ID NO: 4851051 - DNA, 25 bp, Homo sapien
tatattaaacattcaggatagcccc

SEQ ID NO: 4851052 - DNA, 25 bp, Homo sapien
tgtccccagtggctaagaaactaaa

SEQ ID NO: 4851053 - DNA, 25 bp, Homo sapien
taggagctacttttcttaacagatg

SEQ ID NO: 4851054 - DNA, 25 bp, Homo sapien
ttagccagagattcctagtaggagc

SEQ ID NO: 4851055 - DNA, 25 bp, Homo sapien
taaaaaggtcctgaacatgtgagct

SEQ ID NO: 4851056 - DNA, 25 bp, Homo sapien
gcagcattaggccttacctggttaa

SEQ ID NO: 4851057 - DNA, 25 bp, Homo sapien
ccagaggagactgtgcaatgactga

SEQ ID NO: 4851058 - DNA, 25 bp, Homo sapien
tgaggactggacagcctccacagag

SEQ ID NO: 4851059 - DNA, 25 bp, Homo sapien
gatgggtttagcatcctacatgagg

SEQ ID NO: 4851060 - DNA, 25 bp, Homo sapien
ttcaatatgtgttgacaaccagccc

SEQ ID NO: 4851061 - DNA, 25 bp, Homo sapien
tggttctgggtagcaaaggaaatac

SEQ ID NO: 4851062 - DNA, 25 bp, Homo sapien
cattcacttaaaggtacctctgtag

SEQ ID NO: 4851063 - DNA, 25 bp, Homo sapien
taaacatggtgtgcttagaaactgc

SEQ ID NO: 4851064 - DNA, 25 bp, Homo sapien
taaatagctttagtgatgcctcccc

SEQ ID NO: 4851065 - DNA, 25 bp, Homo sapien
tatgaatatggtgagatcagactcc

SEQ ID NO: 4851066 - DNA, 25 bp, Homo sapien
ccaaatagtttacatagggccagct

SEQ ID NO: 4851067 - DNA, 25 bp, Homo sapien
actctggatggaggaataacttacc

SEQ ID NO: 4851068 - DNA, 25 bp, Homo sapien
tgcagtgtgcgaatctccagggagt

SEQ ID NO: 4851069 - DNA, 25 bp, Homo sapien
tgctctgttctaatgcagaaggagc

SEQ ID NO: 4851070 - DNA, 25 bp, Homo sapien
tccagggagtcaagatgctctgttc

SEQ ID NO: 4851071 - DNA, 25 bp, Homo sapien
tctacgaaggaagcagactgtaaag

SEQ ID NO: 4851072 - DNA, 25 bp, Homo sapien
catatttggaagctaataggcctcc

SEQ ID NO: 4851073 - DNA, 25 bp, Homo sapien
catgcctgtcagcttcagcagatca

SEQ ID NO: 4851074 - DNA, 25 bp, Homo sapien
gagtagtcaagagggcaaatcatgc

SEQ ID NO: 4851075 - DNA, 25 bp, Homo sapien
ggcagttggcaatcttgaggtcaca

SEQ ID NO: 4851076 - DNA, 25 bp, Homo sapien
gagttgttttgcatctgctttggtc

SEQ ID NO: 4851077 - DNA, 25 bp, Homo sapien
caggagttgttttgcatctgctttg

SEQ ID NO: 4851078 - DNA, 25 bp, Homo sapien
ctgcaggagttgttttgcatctgct

SEQ ID NO: 4851079 - DNA, 25 bp, Homo sapien
actgcaggagttgttttgcatctgc

SEQ ID NO: 4851080 - DNA, 25 bp, Homo sapien
agacagaagtaaactgcccgtggat

SEQ ID NO: 4851081 - DNA, 25 bp, Homo sapien
cagaagtaaactgcccgtggataaa

SEQ ID NO: 4851082 - DNA, 25 bp, Homo sapien
cgccggctccggtgctgagtaatga

SEQ ID NO: 4851083 - DNA, 25 bp, Homo sapien
taatgatctgctcggaaagtggcgg

SEQ ID NO: 4851084 - DNA, 25 bp, Homo sapien
gagctgcagtcaacccgaggactac

SEQ ID NO: 4851085 - DNA, 25 bp, Homo sapien
gaatttactctacgaatcactccgc

SEQ ID NO: 4851086 - DNA, 25 bp, Homo sapien
ttcctgggctcggagagggaccacc

SEQ ID NO: 4851087 - DNA, 25 bp, Homo sapien
gtcaacccgaggactacagacacct

SEQ ID NO: 4851088 - DNA, 25 bp, Homo sapien
acagcctgcgctgatcctggcctgc

SEQ ID NO: 4851089 - DNA, 25 bp, Homo sapien
agcctgcgctgatcctggcctgcgc

SEQ ID NO: 4851090 - DNA, 25 bp, Homo sapien
cacagcctgcgctgatcctggcctg

SEQ ID NO: 4851091 - DNA, 25 bp, Homo sapien
gcctgcgctgatcctggcctgcgct

SEQ ID NO: 4851092 - DNA, 25 bp, Homo sapien
ccgtggcaggcgagcgtcgcgtcgg

SEQ ID NO: 4851093 - DNA, 25 bp, Homo sapien
cgggagccgctcttcgaacccggag

SEQ ID NO: 4851094 - DNA, 25 bp, Homo sapien
aagggctctcctggcaaagcacccg

SEQ ID NO: 4851095 - DNA, 25 bp, Homo sapien
ggcagacaggcttactcccagagcc

SEQ ID NO: 4851096 - DNA, 25 bp, Homo sapien
cccggagaaacagccccgtggcagc

SEQ ID NO: 4851097 - DNA, 25 bp, Homo sapien
cggagaaacagccccgtggcagcgc

SEQ ID NO: 4851098 - DNA, 25 bp, Homo sapien
ggagaaacagccccgtggcagcgcg

SEQ ID NO: 4851099 - DNA, 25 bp, Homo sapien
gccccggagaaacagccccgtggca

SEQ ID NO: 4851100 - DNA, 25 bp, Homo sapien
gcttgtcttttgaattggcatccat

SEQ ID NO: 4851101 - DNA, 25 bp, Homo sapien
ttcagggggcttgtcttttgaattg

SEQ ID NO: 4851102 - DNA, 25 bp, Homo sapien
cagggggcttgtcttttgaattggc

SEQ ID NO: 4851103 - DNA, 25 bp, Homo sapien
ggggcttgtcttttgaattggcatc

SEQ ID NO: 4851104 - DNA, 25 bp, Homo sapien
tgtctaaaccttcaacttcacaagg

SEQ ID NO: 4851105 - DNA, 25 bp, Homo sapien
gggtgaggacaactctctgtctaaa

SEQ ID NO: 4851106 - DNA, 25 bp, Homo sapien
accttcaacttcacaaggaggcaga

SEQ ID NO: 4851107 - DNA, 25 bp, Homo sapien
ctgaaacggacgacatattgtaggg

SEQ ID NO: 4851108 - DNA, 25 bp, Homo sapien
gttcccaaaatgaaagaggcatttc

SEQ ID NO: 4851109 - DNA, 25 bp, Homo sapien
agttcccaaaatgaaagaggcattt

SEQ ID NO: 4851110 - DNA, 25 bp, Homo sapien
cagttcccaaaatgaaagaggcatt

SEQ ID NO: 4851111 - DNA, 25 bp, Homo sapien
caaagctttcaggtgtaattcccaa

SEQ ID NO: 4851112 - DNA, 25 bp, Homo sapien
tgctctacggttactgtggaaaagt

SEQ ID NO: 4851113 - DNA, 25 bp, Homo sapien
caaggattaggaggtaattcggcat

SEQ ID NO: 4851114 - DNA, 25 bp, Homo sapien
tttaaaagtatctggtgtgcaagga

SEQ ID NO: 4851115 - DNA, 25 bp, Homo sapien
ggtacctaaaatatgacagtacgta

SEQ ID NO: 4851116 - DNA, 25 bp, Homo sapien
tatgacagtacgtataaacaaataa

SEQ ID NO: 4851117 - DNA, 25 bp, Homo sapien
aataaagctgagttatattaaagtt

SEQ ID NO: 4851118 - DNA, 25 bp, Homo sapien
taaaatatgacagtacgtataaaca

SEQ ID NO: 4851119 - DNA, 25 bp, Homo sapien
ccgtgatccctgctatgctaaatga

SEQ ID NO: 4851120 - DNA, 25 bp, Homo sapien
gcacgactctgacttgggaacatta

SEQ ID NO: 4851121 - DNA, 25 bp, Homo sapien
gcgatttcgactcacggtaacctct

SEQ ID NO: 4851122 - DNA, 25 bp, Homo sapien
tagtattggcatcaagcacgactct

SEQ ID NO: 4851123 - DNA, 25 bp, Homo sapien
gccgagcaatgaaacgaatcagatg

SEQ ID NO: 4851124 - DNA, 25 bp, Homo sapien
caccgactgcagaacgtcgtctaca

SEQ ID NO: 4851125 - DNA, 25 bp, Homo sapien
cattctttatattttgctgccgagc

SEQ ID NO: 4851126 - DNA, 25 bp, Homo sapien
aaggagaatcttgtgccaaaggaga

SEQ ID NO: 4851127 - DNA, 25 bp, Homo sapien
ttaacatttcgatacagtgcagggc

SEQ ID NO: 4851128 - DNA, 25 bp, Homo sapien
ggctgatattcgttctcttaaagtg

SEQ ID NO: 4851129 - DNA, 25 bp, Homo sapien
catttcgatacagtgcagggctgcc

SEQ ID NO: 4851130 - DNA, 25 bp, Homo sapien
tggaaggctgatattcgttctctta

SEQ ID NO: 4851131 - DNA, 25 bp, Homo sapien
gtcatctcggactcttttcctgcct

SEQ ID NO: 4851132 - DNA, 25 bp, Homo sapien
agactgctggcaagcgctgagacct

SEQ ID NO: 4851133 - DNA, 25 bp, Homo sapien
gactgctggcaagcgctgagacctt

SEQ ID NO: 4851134 - DNA, 25 bp, Homo sapien
tggcaagcgctgagaccttcctttc

SEQ ID NO: 4851135 - DNA, 25 bp, Homo sapien
tgctggcaagcgctgagaccttcct

SEQ ID NO: 4851136 - DNA, 25 bp, Homo sapien
tattgaatatctggagaccaattac

SEQ ID NO: 4851137 - DNA, 25 bp, Homo sapien
tattctccgacgtttggaggacaac

SEQ ID NO: 4851138 - DNA, 25 bp, Homo sapien
agaagtttcaactgcacatgctctg

SEQ ID NO: 4851139 - DNA, 25 bp, Homo sapien
tcagcatccgtcagattttcatcag

SEQ ID NO: 4851140 - DNA, 25 bp, Homo sapien
gaagagactcttcaactaaaaatcc

SEQ ID NO: 4851141 - DNA, 25 bp, Homo sapien
tccagactgtgttgaaccaagttta

SEQ ID NO: 4851142 - DNA, 25 bp, Homo sapien
atccagactgtgttgaaccaagttt

SEQ ID NO: 4851143 - DNA, 25 bp, Homo sapien
agagactcttcaactaaaaatccag

SEQ ID NO: 4851144 - DNA, 25 bp, Homo sapien
cagggagattcgctgagttggatgt

SEQ ID NO: 4851145 - DNA, 25 bp, Homo sapien
ggcagggagattcgctgagttggat

SEQ ID NO: 4851146 - DNA, 25 bp, Homo sapien
agaaggcagggagattcgctgagtt

SEQ ID NO: 4851147 - DNA, 25 bp, Homo sapien
gggagattcgctgagttggatgttg

SEQ ID NO: 4851148 - DNA, 25 bp, Homo sapien
gaaacggcatcacttgatcctttgc

SEQ ID NO: 4851149 - DNA, 25 bp, Homo sapien
gatcctttgcccactacacagtcag

SEQ ID NO: 4851150 - DNA, 25 bp, Homo sapien
actacacagtcagcaacctttagtg

SEQ ID NO: 4851151 - DNA, 25 bp, Homo sapien
ctgtgaacgtgtcaggcgaaacggc

SEQ ID NO: 4851152 - DNA, 25 bp, Homo sapien
tggtgacctgacatcagggactgcg

SEQ ID NO: 4851153 - DNA, 25 bp, Homo sapien
gggactgcgtctgagctcacttctg

SEQ ID NO: 4851154 - DNA, 25 bp, Homo sapien
tgacctgacatcagggactgcgtct

SEQ ID NO: 4851155 - DNA, 25 bp, Homo sapien
cagggactgcgtctgagctcacttc

SEQ ID NO: 4851156 - DNA, 25 bp, Homo sapien
ctctagacacatcttaacagagggt

SEQ ID NO: 4851157 - DNA, 25 bp, Homo sapien
gagggtttcttcagtacagaacgaa

SEQ ID NO: 4851158 - DNA, 25 bp, Homo sapien
cacatcttaacagagggtttcttca

SEQ ID NO: 4851159 - DNA, 25 bp, Homo sapien
cagaacgaagtacaaaggtcttggg

SEQ ID NO: 4851160 - DNA, 25 bp, Homo sapien
ttattcatttgctttaggaaattta

SEQ ID NO: 4851161 - DNA, 25 bp, Homo sapien
catttgctttaggaaatttaactct

SEQ ID NO: 4851162 - DNA, 25 bp, Homo sapien
tattactttgaagcaaaatgcattt

SEQ ID NO: 4851163 - DNA, 25 bp, Homo sapien
tgctttaggaaatttaactctcttc

SEQ ID NO: 4851164 - DNA, 25 bp, Homo sapien
agatttgagattaagctcggatgag

SEQ ID NO: 4851165 - DNA, 25 bp, Homo sapien
catcatagaggttgttacagtgttc

SEQ ID NO: 4851166 - DNA, 25 bp, Homo sapien
catcatcatagaggttgttacagtg

SEQ ID NO: 4851167 - DNA, 25 bp, Homo sapien
ctttgcaacagtttgggagatttga

SEQ ID NO: 4851168 - DNA, 25 bp, Homo sapien
ggtgttcctcctttacgcaatggag

SEQ ID NO: 4851169 - DNA, 25 bp, Homo sapien
ctttacgcaatggagtatttgctgg

SEQ ID NO: 4851170 - DNA, 25 bp, Homo sapien
gttcctcctttacgcaatggagtat

SEQ ID NO: 4851171 - DNA, 25 bp, Homo sapien
cctcctttacgcaatggagtatttg

SEQ ID NO: 4851172 - DNA, 25 bp, Homo sapien
aggtaatggctcaggaacaggtgac

SEQ ID NO: 4851173 - DNA, 25 bp, Homo sapien
cccttgtcatcaaaatctggttgag

SEQ ID NO: 4851174 - DNA, 25 bp, Homo sapien
caggtgactgctcaagcagcaggga

SEQ ID NO: 4851175 - DNA, 25 bp, Homo sapien
caaaatctggttgaggtaatggctc

SEQ ID NO: 4851176 - DNA, 25 bp, Homo sapien
gaaagggtctcagagattgatgatt

SEQ ID NO: 4851177 - DNA, 25 bp, Homo sapien
tttattaggagaactgagaacggca

SEQ ID NO: 4851178 - DNA, 25 bp, Homo sapien
gaacggcaaatgatacttgaagtgg

SEQ ID NO: 4851179 - DNA, 25 bp, Homo sapien
gagattgatgatttattaggagaac

SEQ ID NO: 4851180 - DNA, 25 bp, Homo sapien
tttcttctgttagaagtccttgtta

SEQ ID NO: 4851181 - DNA, 25 bp, Homo sapien
ttattctaccaactttaggagagga

SEQ ID NO: 4851182 - DNA, 25 bp, Homo sapien
ctaccaactttaggagaggatattt

SEQ ID NO: 4851183 - DNA, 25 bp, Homo sapien
cttgttattctaccaactttaggag

SEQ ID NO: 4851184 - DNA, 25 bp, Homo sapien
tattcaataagttgcaaacactctc

SEQ ID NO: 4851185 - DNA, 25 bp, Homo sapien
cttaggaagtgctctctttgtacac

SEQ ID NO: 4851186 - DNA, 25 bp, Homo sapien
aacttctgtattcaataagttgcaa

SEQ ID NO: 4851187 - DNA, 25 bp, Homo sapien
ttgtttcttgagacttcctcctatt

SEQ ID NO: 4851188 - DNA, 25 bp, Homo sapien
tcaggcagctcgggaataggactga

SEQ ID NO: 4851189 - DNA, 25 bp, Homo sapien
ggcagctcgggaataggactgagga

SEQ ID NO: 4851190 - DNA, 25 bp, Homo sapien
aggggcttcttagaagcaatgtctc

SEQ ID NO: 4851191 - DNA, 25 bp, Homo sapien
cagctcgggaataggactgaggagg

SEQ ID NO: 4851192 - DNA, 25 bp, Homo sapien
gaacccagtcttcggatgctcggaa

SEQ ID NO: 4851193 - DNA, 25 bp, Homo sapien
cagtcttcggatgctcggaatggaa

SEQ ID NO: 4851194 - DNA, 25 bp, Homo sapien
tcttcggatgctcggaatggaaggt

SEQ ID NO: 4851195 - DNA, 25 bp, Homo sapien
ctgaacccagtcttcggatgctcgg

SEQ ID NO: 4851196 - DNA, 25 bp, Homo sapien
tagagtggtggatgccctgtcacaa

SEQ ID NO: 4851197 - DNA, 25 bp, Homo sapien
ggcatgtacctcattcatcctcaag

SEQ ID NO: 4851198 - DNA, 25 bp, Homo sapien
tatacaaatcaacacaccaaatgga

SEQ ID NO: 4851199 - DNA, 25 bp, Homo sapien
taccgcaaataggaggtaggctata

SEQ ID NO: 4851200 - DNA, 25 bp, Homo sapien
tgggtcatgacgcaaaagatccttt

SEQ ID NO: 4851201 - DNA, 25 bp, Homo sapien
gcaggtttgggactatctgatgcca

SEQ ID NO: 4851202 - DNA, 25 bp, Homo sapien
tcatcagaagtagcattgccaagcg

SEQ ID NO: 4851203 - DNA, 25 bp, Homo sapien
gaaaattcttgaccctgctgcaggg

SEQ ID NO: 4851204 - DNA, 25 bp, Homo sapien
ttggtttcactatttctcctctgaa

SEQ ID NO: 4851205 - DNA, 25 bp, Homo sapien
ttctaaatccttctgtagcctcgtg

SEQ ID NO: 4851206 - DNA, 25 bp, Homo sapien
tagcctcgtgctacgtcgcactttg

SEQ ID NO: 4851207 - DNA, 25 bp, Homo sapien
catacaagaccttcgttttctaaat

SEQ ID NO: 4851208 - DNA, 25 bp, Homo sapien
cactgctgtcaaatgtacatattgt

SEQ ID NO: 4851209 - DNA, 25 bp, Homo sapien
caggttcatcggaagaaccagcagc

SEQ ID NO: 4851210 - DNA, 25 bp, Homo sapien
gcggtttttgtctggaggacacagt

SEQ ID NO: 4851211 - DNA, 25 bp, Homo sapien
atctgagacgggaggtgccatctgc

SEQ ID NO: 4851212 - DNA, 25 bp, Homo sapien
ctcccttcccattaagagaggatct

SEQ ID NO: 4851213 - DNA, 25 bp, Homo sapien
ctttctccattatgttcaatccttt

SEQ ID NO: 4851214 - DNA, 25 bp, Homo sapien
tgaactgggaagtggctttagtatt

SEQ ID NO: 4851215 - DNA, 25 bp, Homo sapien
tctccggtagcctttgaactgggaa

SEQ ID NO: 4851216 - DNA, 25 bp, Homo sapien
tttcagcatagatggttactttccc

SEQ ID NO: 4851217 - DNA, 25 bp, Homo sapien
tcagcatagatggttactttccctc

SEQ ID NO: 4851218 - DNA, 25 bp, Homo sapien
ctgaggttgaacagagaatgggaac

SEQ ID NO: 4851219 - DNA, 25 bp, Homo sapien
tgggaactagacagatcatttcagc

SEQ ID NO: 4851220 - DNA, 25 bp, Homo sapien
gaagaaacttatttatttctacata

SEQ ID NO: 4851221 - DNA, 25 bp, Homo sapien
ctctggcggaagaagaatatattta

SEQ ID NO: 4851222 - DNA, 25 bp, Homo sapien
tactctctggcggaagaagaatata

SEQ ID NO: 4851223 - DNA, 25 bp, Homo sapien
caaagtagtaataaagcatttactc

SEQ ID NO: 4851224 - DNA, 25 bp, Homo sapien
gcatttactctctggcggaagaaga

SEQ ID NO: 4851225 - DNA, 25 bp, Homo sapien
ttttagtggtagagatttgccaacc

SEQ ID NO: 4851226 - DNA, 25 bp, Homo sapien
tacattagtctttagcagcaggagt

SEQ ID NO: 4851227 - DNA, 25 bp, Homo sapien
cagacctgccggtgccaagaaggta

SEQ ID NO: 4851228 - DNA, 25 bp, Homo sapien
ggtgcccagcgggagctttcttccc

SEQ ID NO: 4851229 - DNA, 25 bp, Homo sapien
tctggatgctttaaaaacgcgaact

SEQ ID NO: 4851230 - DNA, 25 bp, Homo sapien
tccattagtaaggagatgaccacct

SEQ ID NO: 4851231 - DNA, 25 bp, Homo sapien
caaaatggcattaagtagtaggaac

SEQ ID NO: 4851232 - DNA, 25 bp, Homo sapien
ggaatgtgccagctaagatccacag

SEQ ID NO: 4851233 - DNA, 25 bp, Homo sapien
tactgctatacagagtagtgtccag

SEQ ID NO: 4851234 - DNA, 25 bp, Homo sapien
tccagaggactaggctgaacgcaga

SEQ ID NO: 4851235 - DNA, 25 bp, Homo sapien
gagagaattacttcttgatgactga

SEQ ID NO: 4851236 - DNA, 25 bp, Homo sapien
cccagagaagttggtttccttgttg

SEQ ID NO: 4851237 - DNA, 25 bp, Homo sapien
tttaggtacaattcacaacttgtag

SEQ ID NO: 4851238 - DNA, 25 bp, Homo sapien
aattcacaacttgtagtctagtttc

SEQ ID NO: 4851239 - DNA, 25 bp, Homo sapien
cagaaatgcctaagcaattgagaac

SEQ ID NO: 4851240 - DNA, 25 bp, Homo sapien
agacagaaatgcctaagcaattgag

SEQ ID NO: 4851241 - DNA, 25 bp, Homo sapien
tgaacacacctgcacaatattagac

SEQ ID NO: 4851242 - DNA, 25 bp, Homo sapien
caattccactcacttggtctaggac

SEQ ID NO: 4851243 - DNA, 25 bp, Homo sapien
catttaagctatgttactcgcagtc

SEQ ID NO: 4851244 - DNA, 25 bp, Homo sapien
tgttagctgtttgcatccctgaagg

SEQ ID NO: 4851245 - DNA, 25 bp, Homo sapien
tttgaatcagacatagggatgaacc

SEQ ID NO: 4851246 - DNA, 25 bp, Homo sapien
gggatgaacctatttttgcaagcac

SEQ ID NO: 4851247 - DNA, 25 bp, Homo sapien
ctgggatatgagaacactgggaatg

SEQ ID NO: 4851248 - DNA, 25 bp, Homo sapien
gctacttagcagttatgtgatgtga

SEQ ID NO: 4851249 - DNA, 25 bp, Homo sapien
aaacgttaggcagaaaatcttacat

SEQ ID NO: 4851250 - DNA, 25 bp, Homo sapien
aacgttaggcagaaaatcttacatt

SEQ ID NO: 4851251 - DNA, 25 bp, Homo sapien
ggcagagggtcactggaaatcaccc

SEQ ID NO: 4851252 - DNA, 25 bp, Homo sapien
cagggaatacttctgcaatcttcat

SEQ ID NO: 4851253 - DNA, 25 bp, Homo sapien
ttttcaggtttgagtcagggaatac

SEQ ID NO: 4851254 - DNA, 25 bp, Homo sapien
gaaatcacccaagactaacaccagg

SEQ ID NO: 4851255 - DNA, 25 bp, Homo sapien
atatccaggtttagggaatatgttt

SEQ ID NO: 4851256 - DNA, 25 bp, Homo sapien
gtttccatcccttcgaatgcattca

SEQ ID NO: 4851257 - DNA, 25 bp, Homo sapien
tgtttgttttggctatgacataggg

SEQ ID NO: 4851258 - DNA, 25 bp, Homo sapien
tggctatgacatagggcagaacagt

SEQ ID NO: 4851259 - DNA, 25 bp, Homo sapien
taccattatgcgaggcaggctgcct

SEQ ID NO: 4851260 - DNA, 25 bp, Homo sapien
cattggacctctcagtgcttgggaa

SEQ ID NO: 4851261 - DNA, 25 bp, Homo sapien
cattgatgcttcctacagtggaggc

SEQ ID NO: 4851262 - DNA, 25 bp, Homo sapien
ttaagacacaaaccgagagccagct

SEQ ID NO: 4851263 - DNA, 25 bp, Homo sapien
gtttaaagggatcccttcagctgtc

SEQ ID NO: 4851264 - DNA, 25 bp, Homo sapien
aggtttaaagggatcccttcagctg

SEQ ID NO: 4851265 - DNA, 25 bp, Homo sapien
gataaaccaaagtgttcaattagtc

SEQ ID NO: 4851266 - DNA, 25 bp, Homo sapien
gaacttggataaaccaaagtgttca

SEQ ID NO: 4851267 - DNA, 25 bp, Homo sapien
tgtttaagagtctccaatttgactg

SEQ ID NO: 4851268 - DNA, 25 bp, Homo sapien
ttgtttaagagtctccaatttgact

SEQ ID NO: 4851269 - DNA, 25 bp, Homo sapien
attataaggggggcaggatatttat

SEQ ID NO: 4851270 - DNA, 25 bp, Homo sapien
gatctcacaataccttagaaggatg

SEQ ID NO: 4851271 - DNA, 25 bp, Homo sapien
ggcaggaagatctcacaatacctta

SEQ ID NO: 4851272 - DNA, 25 bp, Homo sapien
tgtttactatagtgtgagttgcaca

SEQ ID NO: 4851273 - DNA, 25 bp, Homo sapien
gaagcaatagcacatctccctctgt

SEQ ID NO: 4851274 - DNA, 25 bp, Homo sapien
aatctgaaagaccagccaataagaa

SEQ ID NO: 4851275 - DNA, 25 bp, Homo sapien
aaatctgaaagaccagccaataaga

SEQ ID NO: 4851276 - DNA, 25 bp, Homo sapien
atctgaaagaccagccaataagaat

SEQ ID NO: 4851277 - DNA, 25 bp, Homo sapien
gattctggatggcttcaaaactctg

SEQ ID NO: 4851278 - DNA, 25 bp, Homo sapien
tctgctttaaacagtgctgcttctg

SEQ ID NO: 4851279 - DNA, 25 bp, Homo sapien
gaacatgtaagtcaacattcatcat

SEQ ID NO: 4851280 - DNA, 25 bp, Homo sapien
tagatgcaactttggattatttgag

SEQ ID NO: 4851281 - DNA, 25 bp, Homo sapien
gtgctgacactggaaggcagacaca

SEQ ID NO: 4851282 - DNA, 25 bp, Homo sapien
gagtgctgacactggaaggcagaca

SEQ ID NO: 4851283 - DNA, 25 bp, Homo sapien
tgctgacactggaaggcagacacag

SEQ ID NO: 4851284 - DNA, 25 bp, Homo sapien
agtgctgacactggaaggcagacac

SEQ ID NO: 4851285 - DNA, 25 bp, Homo sapien
ttatagggcagctctagggcactgg

SEQ ID NO: 4851286 - DNA, 25 bp, Homo sapien
gggtagagatccacccagacattta

SEQ ID NO: 4851287 - DNA, 25 bp, Homo sapien
acatttatagggcagctctagggca

SEQ ID NO: 4851288 - DNA, 25 bp, Homo sapien
agggtagagatccacccagacattt

SEQ ID NO: 4851289 - DNA, 25 bp, Homo sapien
atcaattcatgatgtaatgcccaag

SEQ ID NO: 4851290 - DNA, 25 bp, Homo sapien
aatgcccaagggagaacaatcttct

SEQ ID NO: 4851291 - DNA, 25 bp, Homo sapien
tcatgatgtaatgcccaagggagaa

SEQ ID NO: 4851292 - DNA, 25 bp, Homo sapien
tctccccaagaggtcatctattata

SEQ ID NO: 4851293 - DNA, 25 bp, Homo sapien
cagtcactagatgggcatttagcga

SEQ ID NO: 4851294 - DNA, 25 bp, Homo sapien
ttcaatctgttagccaggcgctgga

SEQ ID NO: 4851295 - DNA, 25 bp, Homo sapien
cagcagacgcaaacagccagttctc

SEQ ID NO: 4851296 - DNA, 25 bp, Homo sapien
catttagcgatgaaaggttcgtcac

SEQ ID NO: 4851297 - DNA, 25 bp, Homo sapien
gggcttcgaaggttgagtgttgagt

SEQ ID NO: 4851298 - DNA, 25 bp, Homo sapien
tcgaaggttgagtgttgagtgccca

SEQ ID NO: 4851299 - DNA, 25 bp, Homo sapien
aggttgagtgttgagtgcccagtct

SEQ ID NO: 4851300 - DNA, 25 bp, Homo sapien
cttcgaaggttgagtgttgagtgcc

SEQ ID NO: 4851301 - DNA, 25 bp, Homo sapien
cattcacatcttccttttttacccg

SEQ ID NO: 4851302 - DNA, 25 bp, Homo sapien
ctttgccccccagtaccattcacat

SEQ ID NO: 4851303 - DNA, 25 bp, Homo sapien
taccattcacatcttccttttttac

SEQ ID NO: 4851304 - DNA, 25 bp, Homo sapien
ctcctttgccccccagtaccattca

SEQ ID NO: 4851305 - DNA, 25 bp, Homo sapien
cctccttcccgtggagactcatgtc

SEQ ID NO: 4851306 - DNA, 25 bp, Homo sapien
tggagactcatgtcctcgatacccc

SEQ ID NO: 4851307 - DNA, 25 bp, Homo sapien
gcatccctccttcccgtggagactc

SEQ ID NO: 4851308 - DNA, 25 bp, Homo sapien
gagactcatgtcctcgataccccat

SEQ ID NO: 4851309 - DNA, 25 bp, Homo sapien
ccaccaccttttagattagatttag

SEQ ID NO: 4851310 - DNA, 25 bp, Homo sapien
ctggcattgatgtcaggaagaagtc

SEQ ID NO: 4851311 - DNA, 25 bp, Homo sapien
cagtctgaagcctgtcccaaggtcc

SEQ ID NO: 4851312 - DNA, 25 bp, Homo sapien
aagtcttctctgcatccgatgcaga

SEQ ID NO: 4851313 - DNA, 25 bp, Homo sapien
taacagtcagtgaggtcaactgatt

SEQ ID NO: 4851314 - DNA, 25 bp, Homo sapien
cagtcagtgaggtcaactgatttta

SEQ ID NO: 4851315 - DNA, 25 bp, Homo sapien
cagtgaggtcaactgattttatggc

SEQ ID NO: 4851316 - DNA, 25 bp, Homo sapien
ctaacagtcagtgaggtcaactgat

SEQ ID NO: 4851317 - DNA, 25 bp, Homo sapien
cttgcagagccttgatggattccac

SEQ ID NO: 4851318 - DNA, 25 bp, Homo sapien
ttgcagagccttgatggattccact

SEQ ID NO: 4851319 - DNA, 25 bp, Homo sapien
tcacagcggcctcctggtgagtgag

SEQ ID NO: 4851320 - DNA, 25 bp, Homo sapien
agggccatgtcacagcggcctcctg

SEQ ID NO: 4851321 - DNA, 25 bp, Homo sapien
tgctccccgcgtctaggaggctctt

SEQ ID NO: 4851322 - DNA, 25 bp, Homo sapien
gcctcagtgctgtacagaaccatgg

SEQ ID NO: 4851323 - DNA, 25 bp, Homo sapien
tctagtttccacagaagccaattca

SEQ ID NO: 4851324 - DNA, 25 bp, Homo sapien
caaacaatgaccatgtggctgcctt

SEQ ID NO: 4851325 - DNA, 25 bp, Homo sapien
tggcccctgtatgtctctaatcttc

SEQ ID NO: 4851326 - DNA, 25 bp, Homo sapien
ccctgtatgtctctaatcttctttc

SEQ ID NO: 4851327 - DNA, 25 bp, Homo sapien
gcccctgtatgtctctaatcttctt

SEQ ID NO: 4851328 - DNA, 25 bp, Homo sapien
tctggcccctgtatgtctctaatct

SEQ ID NO: 4851329 - DNA, 25 bp, Homo sapien
gcattttcaggggctagagacttct

SEQ ID NO: 4851330 - DNA, 25 bp, Homo sapien
ttttcaggggctagagacttctctt

SEQ ID NO: 4851331 - DNA, 25 bp, Homo sapien
cattttcaggggctagagacttctc

SEQ ID NO: 4851332 - DNA, 25 bp, Homo sapien
tttcaggggctagagacttctcttc

SEQ ID NO: 4851333 - DNA, 25 bp, Homo sapien
tgtgttccagcacacctctaagtct

SEQ ID NO: 4851334 - DNA, 25 bp, Homo sapien
tctgtgacttgtgttccagcacacc

SEQ ID NO: 4851335 - DNA, 25 bp, Homo sapien
ttctgtgacttgtgttccagcacac

SEQ ID NO: 4851336 - DNA, 25 bp, Homo sapien
gacttgtgttccagcacacctctaa

SEQ ID NO: 4851337 - DNA, 25 bp, Homo sapien
caaccatgtgacagcttgcgtttga

SEQ ID NO: 4851338 - DNA, 25 bp, Homo sapien
tccccactgtaacgcaaccatgtga

SEQ ID NO: 4851339 - DNA, 25 bp, Homo sapien
aagatggtaagtcccctccccactg

SEQ ID NO: 4851340 - DNA, 25 bp, Homo sapien
gaaatcaggtctgcatgacctccaa

SEQ ID NO: 4851341 - DNA, 25 bp, Homo sapien
aggtcctgcctgtgtcaaccgcccg

SEQ ID NO: 4851342 - DNA, 25 bp, Homo sapien
tcctccggtttatgctctgatacat

SEQ ID NO: 4851343 - DNA, 25 bp, Homo sapien
tctgatacatctgagataagctcac

SEQ ID NO: 4851344 - DNA, 25 bp, Homo sapien
gataagctcacaagccaggtcctgc

SEQ ID NO: 4851345 - DNA, 25 bp, Homo sapien
aaacctcacattgtcttctcggtgg

SEQ ID NO: 4851346 - DNA, 25 bp, Homo sapien
gggccttggtgtgcgccatatcacc

SEQ ID NO: 4851347 - DNA, 25 bp, Homo sapien
gaagccactcgagtttcctcactct

SEQ ID NO: 4851348 - DNA, 25 bp, Homo sapien
tctcggtggtcagaccaggccagga

SEQ ID NO: 4851349 - DNA, 25 bp, Homo sapien
tcaagtcctgtctctgatttccagt

SEQ ID NO: 4851350 - DNA, 25 bp, Homo sapien
tctgttccttagattcttcagtcat

SEQ ID NO: 4851351 - DNA, 25 bp, Homo sapien
gctgtgttgtcttttgaccaaaaac

SEQ ID NO: 4851352 - DNA, 25 bp, Homo sapien
cattgtccaaattactttgagcttc

SEQ ID NO: 4851353 - DNA, 25 bp, Homo sapien
cttggttttgtcagctataaaatca

SEQ ID NO: 4851354 - DNA, 25 bp, Homo sapien
cactggttcagtcctgtcgctgctg

SEQ ID NO: 4851355 - DNA, 25 bp, Homo sapien
agggcttggttttgtcagctataaa

SEQ ID NO: 4851356 - DNA, 25 bp, Homo sapien
acactggttcagtcctgtcgctgct

SEQ ID NO: 4851357 - DNA, 25 bp, Homo sapien
tgctccgggttatgcacctcaaggc

SEQ ID NO: 4851358 - DNA, 25 bp, Homo sapien
acctcaaggctctccaaaggtgtta

SEQ ID NO: 4851359 - DNA, 25 bp, Homo sapien
ggctctcacgaaggcaagctgaatt

SEQ ID NO: 4851360 - DNA, 25 bp, Homo sapien
gagtgactccaatccagatctgcag

SEQ ID NO: 4851361 - DNA, 25 bp, Homo sapien
tcatcaactccctaggaaataagga

SEQ ID NO: 4851362 - DNA, 25 bp, Homo sapien
aggaaaattggaggttctatgcaaa

SEQ ID NO: 4851363 - DNA, 25 bp, Homo sapien
gaggttctatgcaaatcccctcttc

SEQ ID NO: 4851364 - DNA, 25 bp, Homo sapien
ctgaaatcatcaactccctaggaaa

SEQ ID NO: 4851365 - DNA, 25 bp, Homo sapien
aagatccctgaactgctctgaatgg

SEQ ID NO: 4851366 - DNA, 25 bp, Homo sapien
gcagtcacatgagcgatatcccagg

SEQ ID NO: 4851367 - DNA, 25 bp, Homo sapien
tctactctcatcacggaagcactta

SEQ ID NO: 4851368 - DNA, 25 bp, Homo sapien
tccatgtcagagtagtaaagatccc

SEQ ID NO: 4851369 - DNA, 25 bp, Homo sapien
tgcagaaaacatgggaccaggttcc

SEQ ID NO: 4851370 - DNA, 25 bp, Homo sapien
tgtcttaggccaagactctagggca

SEQ ID NO: 4851371 - DNA, 25 bp, Homo sapien
tatatcagatcatggtgcgctgtgc

SEQ ID NO: 4851372 - DNA, 25 bp, Homo sapien
ggcacattgttaagagctcaacctc

SEQ ID NO: 4851373 - DNA, 25 bp, Homo sapien
tggctcctgccatctccagatttgc

SEQ ID NO: 4851374 - DNA, 25 bp, Homo sapien
ggctcctgccatctccagatttgcc

SEQ ID NO: 4851375 - DNA, 25 bp, Homo sapien
tgactgctctccgactgctctcctg

SEQ ID NO: 4851376 - DNA, 25 bp, Homo sapien
ctcttgactcatgcggtttgtctca

SEQ ID NO: 4851377 - DNA, 25 bp, Homo sapien
ctttgactgctctccgactgctctc

SEQ ID NO: 4851378 - DNA, 25 bp, Homo sapien
ctgcctcttgactcatgcggtttgt

SEQ ID NO: 4851379 - DNA, 25 bp, Homo sapien
ttgatgggaaggtgtttgaagccac

SEQ ID NO: 4851380 - DNA, 25 bp, Homo sapien
agatgttgatgggaaggtgtttgaa

SEQ ID NO: 4851381 - DNA, 25 bp, Homo sapien
tgttgatgggaaggtgtttgaagcc

SEQ ID NO: 4851382 - DNA, 25 bp, Homo sapien
atgggaaggtgtttgaagccacact

SEQ ID NO: 4851383 - DNA, 25 bp, Homo sapien
ttgcctcttctcttggcaccgctgg

SEQ ID NO: 4851384 - DNA, 25 bp, Homo sapien
agcattggctatagtatgacctcca

SEQ ID NO: 4851385 - DNA, 25 bp, Homo sapien
tccagtattccccagtccttgatcc

SEQ ID NO: 4851386 - DNA, 25 bp, Homo sapien
gacctcactgcagttactgttgcct

SEQ ID NO: 4851387 - DNA, 25 bp, Homo sapien
cattcttcagaatgtccctcacttc

SEQ ID NO: 4851388 - DNA, 25 bp, Homo sapien
ggcactgagtcctatcattcttcag

SEQ ID NO: 4851389 - DNA, 25 bp, Homo sapien
cactgcactctatgtggattggtgc

SEQ ID NO: 4851390 - DNA, 25 bp, Homo sapien
gtccattgcattccctactgggctc

SEQ ID NO: 4851391 - DNA, 25 bp, Homo sapien
caaactagcatggtcagggaagcac

SEQ ID NO: 4851392 - DNA, 25 bp, Homo sapien
aaaatcagagctagtcaaccaagtc

SEQ ID NO: 4851393 - DNA, 25 bp, Homo sapien
tattgcaagcatgtataaccacgga

SEQ ID NO: 4851394 - DNA, 25 bp, Homo sapien
ccacggatatggtaaggatgctatt

SEQ ID NO: 4851395 - DNA, 25 bp, Homo sapien
ggcctcgtggactgttgcttccaaa

SEQ ID NO: 4851396 - DNA, 25 bp, Homo sapien
caatttctggaatgagcaagccaag

SEQ ID NO: 4851397 - DNA, 25 bp, Homo sapien
tctcattatcaaaatggcctcgtgg

SEQ ID NO: 4851398 - DNA, 25 bp, Homo sapien
gcatttacaatgtggtgacctgaca

SEQ ID NO: 4851399 - DNA, 25 bp, Homo sapien
caagtgagaagactagataatgtcc

SEQ ID NO: 4851400 - DNA, 25 bp, Homo sapien
gagtcatagttgcaaccagctattc

SEQ ID NO: 4851401 - DNA, 25 bp, Homo sapien
tattcagcaggttaatgaagagtca

SEQ ID NO: 4851402 - DNA, 25 bp, Homo sapien
ccagctattctgagtcctagatgca

SEQ ID NO: 4851403 - DNA, 25 bp, Homo sapien
aaacctggtgagatcctgatttctg

SEQ ID NO: 4851404 - DNA, 25 bp, Homo sapien
gtcctccacggtggaaaaggctcac

SEQ ID NO: 4851405 - DNA, 25 bp, Homo sapien
cattaatcgcctttcaaaggcccca

SEQ ID NO: 4851406 - DNA, 25 bp, Homo sapien
ccacggtggaaaaggctcactagct

SEQ ID NO: 4851407 - DNA, 25 bp, Homo sapien
ttatctgagccaatgtaaacatcga

SEQ ID NO: 4851408 - DNA, 25 bp, Homo sapien
aaagttctgagcctgtaccacacct

SEQ ID NO: 4851409 - DNA, 25 bp, Homo sapien
tgtaaacatcgaaccacaaatactt

SEQ ID NO: 4851410 - DNA, 25 bp, Homo sapien
tccaggatccaaatgtcaattgctt

SEQ ID NO: 4851411 - DNA, 25 bp, Homo sapien
cagcagcactactccaggctaggtc

SEQ ID NO: 4851412 - DNA, 25 bp, Homo sapien
gtctgtagatcagcccttcagcagc

SEQ ID NO: 4851413 - DNA, 25 bp, Homo sapien
ttcagcagcactactccaggctagg

SEQ ID NO: 4851414 - DNA, 25 bp, Homo sapien
tgagtctgtagatcagcccttcagc

SEQ ID NO: 4851415 - DNA, 25 bp, Homo sapien
gagccggctccttgggatgactcct

SEQ ID NO: 4851416 - DNA, 25 bp, Homo sapien
tgaggaaaccgtgagccggctcctt

SEQ ID NO: 4851417 - DNA, 25 bp, Homo sapien
atgactccttggaataggcatctgc

SEQ ID NO: 4851418 - DNA, 25 bp, Homo sapien
tgactccttggaataggcatctgca

SEQ ID NO: 4851419 - DNA, 25 bp, Homo sapien
cagtcagattccatgctcatcccag

SEQ ID NO: 4851420 - DNA, 25 bp, Homo sapien
catcccagtcgttacaaacaagagg

SEQ ID NO: 4851421 - DNA, 25 bp, Homo sapien
ccagagataacgtctgcagtcagat

SEQ ID NO: 4851422 - DNA, 25 bp, Homo sapien
aactggccgcttcttacatctatgg

SEQ ID NO: 4851423 - DNA, 25 bp, Homo sapien
tgtacctggttaattagccagaccc

SEQ ID NO: 4851424 - DNA, 25 bp, Homo sapien
gccaagcccattattaggtgtacct

SEQ ID NO: 4851425 - DNA, 25 bp, Homo sapien
gagactgggtccgttcaccaggaac

SEQ ID NO: 4851426 - DNA, 25 bp, Homo sapien
tctgtggtccatagtccaactgttg

SEQ ID NO: 4851427 - DNA, 25 bp, Homo sapien
gtgagtgctgtgagcaggacgggtc

SEQ ID NO: 4851428 - DNA, 25 bp, Homo sapien
gagtgagtgctgtgagcaggacggg

SEQ ID NO: 4851429 - DNA, 25 bp, Homo sapien
taaaaggtgcagagtgagtgctgtg

SEQ ID NO: 4851430 - DNA, 25 bp, Homo sapien
ctagagggttttaaaaggtgcagag

SEQ ID NO: 4851431 - DNA, 25 bp, Homo sapien
gtcctcactctggtcacctggagag

SEQ ID NO: 4851432 - DNA, 25 bp, Homo sapien
ctggtcacctggagagccatggcct

SEQ ID NO: 4851433 - DNA, 25 bp, Homo sapien
ctgctgatgggctgttccacctcag

SEQ ID NO: 4851434 - DNA, 25 bp, Homo sapien
tcactctggtcacctggagagccat

SEQ ID NO: 4851435 - DNA, 25 bp, Homo sapien
tcataacaactccaagcatggacgg

SEQ ID NO: 4851436 - DNA, 25 bp, Homo sapien
ctcgatccatcggaaggtagggctg

SEQ ID NO: 4851437 - DNA, 25 bp, Homo sapien
tcctttttgtgagacgggcatttca

SEQ ID NO: 4851438 - DNA, 25 bp, Homo sapien
gcatggacggagagcaagaagactc

SEQ ID NO: 4851439 - DNA, 25 bp, Homo sapien
cctgggagtaagatgatgttggaat

SEQ ID NO: 4851440 - DNA, 25 bp, Homo sapien
taacttctccaaatagacgaatatc

SEQ ID NO: 4851441 - DNA, 25 bp, Homo sapien
gaatgcgcattccacttcctttggt

SEQ ID NO: 4851442 - DNA, 25 bp, Homo sapien
tagacgaatatcagtgttgtcactg

SEQ ID NO: 4851443 - DNA, 25 bp, Homo sapien
ggactatcgaatgcagaacttcctg

SEQ ID NO: 4851444 - DNA, 25 bp, Homo sapien
aagcaaagtgttcttagtcctgcaa

SEQ ID NO: 4851445 - DNA, 25 bp, Homo sapien
caaagtgttcttagtcctgcaataa

SEQ ID NO: 4851446 - DNA, 25 bp, Homo sapien
acccattccaggactatcgaatgca

SEQ ID NO: 4851447 - DNA, 25 bp, Homo sapien
aaagcaagaagaagcgcccggtgtg

SEQ ID NO: 4851448 - DNA, 25 bp, Homo sapien
aagtgaggccccgttgggactgact

SEQ ID NO: 4851449 - DNA, 25 bp, Homo sapien
ttggatcatgtgagaggcctcgtgc

SEQ ID NO: 4851450 - DNA, 25 bp, Homo sapien
gcagaaagatctgccggatgggaat

SEQ ID NO: 4851451 - DNA, 25 bp, Homo sapien
ggttccaggttgcatgcaagcccag

SEQ ID NO: 4851452 - DNA, 25 bp, Homo sapien
aagggcatcttgatggggatttgaa

SEQ ID NO: 4851453 - DNA, 25 bp, Homo sapien
gctggaagggcatcttgatggggat

SEQ ID NO: 4851454 - DNA, 25 bp, Homo sapien
gttccaggttgcatgcaagcccagg

SEQ ID NO: 4851455 - DNA, 25 bp, Homo sapien
gatatatgtgcaggtcgtgtcatcc

SEQ ID NO: 4851456 - DNA, 25 bp, Homo sapien
tggcctcaagagatatgtcagtaga

SEQ ID NO: 4851457 - DNA, 25 bp, Homo sapien
gctgaactttcatgagagacccttg

SEQ ID NO: 4851458 - DNA, 25 bp, Homo sapien
tacagagtcatgctagggagaagac

SEQ ID NO: 4851459 - DNA, 25 bp, Homo sapien
cataatggcaggcattctgtagatt

SEQ ID NO: 4851460 - DNA, 25 bp, Homo sapien
gcataatggcaggcattctgtagat

SEQ ID NO: 4851461 - DNA, 25 bp, Homo sapien
ggacggtgacccagctgcctggcag

SEQ ID NO: 4851462 - DNA, 25 bp, Homo sapien
gcagttaaatctgccaccggtttca

SEQ ID NO: 4851463 - DNA, 25 bp, Homo sapien
taagatcgcagcgtgacaacaagac

SEQ ID NO: 4851464 - DNA, 25 bp, Homo sapien
tgccactgatgtactgaggagacga

SEQ ID NO: 4851465 - DNA, 25 bp, Homo sapien
ccttccgcaggtctcttccataaag

SEQ ID NO: 4851466 - DNA, 25 bp, Homo sapien
ggacagccacgcacaacattttctc

SEQ ID NO: 4851467 - DNA, 25 bp, Homo sapien
ttgaacactgaggtcggacagccac

SEQ ID NO: 4851468 - DNA, 25 bp, Homo sapien
gcaggttgtgaatttgaacactgag

SEQ ID NO: 4851469 - DNA, 25 bp, Homo sapien
cccgtttcttagtggagagtgccga

SEQ ID NO: 4851470 - DNA, 25 bp, Homo sapien
cgtttcttagtggagagtgccgaca

SEQ ID NO: 4851471 - DNA, 25 bp, Homo sapien
tttcccgtttcttagtggagagtgc

SEQ ID NO: 4851472 - DNA, 25 bp, Homo sapien
gttgtcaacattgtttggagaaagt

SEQ ID NO: 4851473 - DNA, 25 bp, Homo sapien
ctggggcgactccacggtgcgcctt

SEQ ID NO: 4851474 - DNA, 25 bp, Homo sapien
tgctcacttgagtcctggcaactcc

SEQ ID NO: 4851475 - DNA, 25 bp, Homo sapien
gccagggagagcctgatgtcagatc

SEQ ID NO: 4851476 - DNA, 25 bp, Homo sapien
catgcttccggaccctgtcctgctg

SEQ ID NO: 4851477 - DNA, 25 bp, Homo sapien
tcttcacttttcaatgcatcatctc

SEQ ID NO: 4851478 - DNA, 25 bp, Homo sapien
tttatcttcacttttcaatgcatca

SEQ ID NO: 4851479 - DNA, 25 bp, Homo sapien
taacataagcatgggagattaattt

SEQ ID NO: 4851480 - DNA, 25 bp, Homo sapien
ttatcggtattaacataagcatggg

SEQ ID NO: 4851481 - DNA, 25 bp, Homo sapien
tatcaaggaattggctggtacctgc

SEQ ID NO: 4851482 - DNA, 25 bp, Homo sapien
tgcttcccggtagaaggactcatag

SEQ ID NO: 4851483 - DNA, 25 bp, Homo sapien
ttaagcccttcgagctgaccacgtg

SEQ ID NO: 4851484 - DNA, 25 bp, Homo sapien
tgaccacgtgtttgaggcaagactc

SEQ ID NO: 4851485 - DNA, 25 bp, Homo sapien
ttaatcaagtggagtaaatacattc

SEQ ID NO: 4851486 - DNA, 25 bp, Homo sapien
tttcctgaggcaatgtgggccaggt

SEQ ID NO: 4851487 - DNA, 25 bp, Homo sapien
ctgaggcaatgtgggccaggtttta

SEQ ID NO: 4851488 - DNA, 25 bp, Homo sapien
gcaatgtgggccaggttttattcat

SEQ ID NO: 4851489 - DNA, 25 bp, Homo sapien
ttatcccatgtagcctagtgcctga

SEQ ID NO: 4851490 - DNA, 25 bp, Homo sapien
tgtaacaggcacgtattggtagaat

SEQ ID NO: 4851491 - DNA, 25 bp, Homo sapien
cacatggtacagctattgacaataa

SEQ ID NO: 4851492 - DNA, 25 bp, Homo sapien
gggctctggcttcgttctaagtgaa

SEQ ID NO: 4851493 - DNA, 25 bp, Homo sapien
ttgctggtctgtttgtagtttggcc

SEQ ID NO: 4851494 - DNA, 25 bp, Homo sapien
tctgcatgttagagccctcctgtgt

SEQ ID NO: 4851495 - DNA, 25 bp, Homo sapien
ttaatcctcgaaagcattctgcatg

SEQ ID NO: 4851496 - DNA, 25 bp, Homo sapien
cctgtgtagcaagtaggaactcctt

SEQ ID NO: 4851497 - DNA, 25 bp, Homo sapien
ccatgtgtccctgccacaacgtgat

SEQ ID NO: 4851498 - DNA, 25 bp, Homo sapien
aagccagaagtccatgtgtccctgc

SEQ ID NO: 4851499 - DNA, 25 bp, Homo sapien
cacaacgtgatgtcacacccaaaca

SEQ ID NO: 4851500 - DNA, 25 bp, Homo sapien
gtccctgccacaacgtgatgtcaca

SEQ ID NO: 4851501 - DNA, 25 bp, Homo sapien
ctattttgtgagtccatgggctgaa

SEQ ID NO: 4851502 - DNA, 25 bp, Homo sapien
tagcagtaaactcgacttgtgatac

SEQ ID NO: 4851503 - DNA, 25 bp, Homo sapien
gcaggaccgcctctattagcagtaa

SEQ ID NO: 4851504 - DNA, 25 bp, Homo sapien
tacgacatggacagagtctattttg

SEQ ID NO: 4851505 - DNA, 25 bp, Homo sapien
gcaatggcgccgtaggatattaata

SEQ ID NO: 4851506 - DNA, 25 bp, Homo sapien
caagtcgcttggtcctgtggctgaa

SEQ ID NO: 4851507 - DNA, 25 bp, Homo sapien
caaagcctggtggtactagttctgg

SEQ ID NO: 4851508 - DNA, 25 bp, Homo sapien
cactcctggcgagaaacagcttgca

SEQ ID NO: 4851509 - DNA, 25 bp, Homo sapien
tccttaactgtatttggcaccaact

SEQ ID NO: 4851510 - DNA, 25 bp, Homo sapien
tatttggcaccaactggctgcagca

SEQ ID NO: 4851511 - DNA, 25 bp, Homo sapien
tgtatttggcaccaactggctgcag

SEQ ID NO: 4851512 - DNA, 25 bp, Homo sapien
ttaactgtatttggcaccaactggc

SEQ ID NO: 4851513 - DNA, 25 bp, Homo sapien
gctggcattccaccctgacatctgt

SEQ ID NO: 4851514 - DNA, 25 bp, Homo sapien
gacaacagccactgccgctggcatt

SEQ ID NO: 4851515 - DNA, 25 bp, Homo sapien
tctgttcagctttattgatgcggcc

SEQ ID NO: 4851516 - DNA, 25 bp, Homo sapien
tgtgtagcagatgccgtttctcatt

SEQ ID NO: 4851517 - DNA, 25 bp, Homo sapien
taatcaatcgatcagaatgtgttct

SEQ ID NO: 4851518 - DNA, 25 bp, Homo sapien
aatcaatcgatcagaatgtgttctc

SEQ ID NO: 4851519 - DNA, 25 bp, Homo sapien
ttaatcaatcgatcagaatgtgttc

SEQ ID NO: 4851520 - DNA, 25 bp, Homo sapien
tgacggaattcatctgtccatcaac

SEQ ID NO: 4851521 - DNA, 25 bp, Homo sapien
gctttccactaacgcttccatgacg

SEQ ID NO: 4851522 - DNA, 25 bp, Homo sapien
aattctcctgtcagtaaatcccacg

SEQ ID NO: 4851523 - DNA, 25 bp, Homo sapien
gccacaaactattccgaattctgaa

SEQ ID NO: 4851524 - DNA, 25 bp, Homo sapien
tgaagtttgtgtagaacaacaggga

SEQ ID NO: 4851525 - DNA, 25 bp, Homo sapien
gtccttgactccttgacgtgaatgg

SEQ ID NO: 4851526 - DNA, 25 bp, Homo sapien
agactgtcccatttcctaactgtcc

SEQ ID NO: 4851527 - DNA, 25 bp, Homo sapien
ggaagaagagcaacagtccttgact

SEQ ID NO: 4851528 - DNA, 25 bp, Homo sapien
aacccttctggtcagtctgcgtgtc

SEQ ID NO: 4851529 - DNA, 25 bp, Homo sapien
caggtatgggtgtgggtcgggctct

SEQ ID NO: 4851530 - DNA, 25 bp, Homo sapien
tggtccaggactgctgaggaaccct

SEQ ID NO: 4851531 - DNA, 25 bp, Homo sapien
gcgtgtctttcacactcctccgtag

SEQ ID NO: 4851532 - DNA, 25 bp, Homo sapien
ctaggttttctccctctggctgaaa

SEQ ID NO: 4851533 - DNA, 25 bp, Homo sapien
cctctggctgaaagctgacagacat

SEQ ID NO: 4851534 - DNA, 25 bp, Homo sapien
ggttttctccctctggctgaaagct

SEQ ID NO: 4851535 - DNA, 25 bp, Homo sapien
tccctctggctgaaagctgacagac

SEQ ID NO: 4851536 - DNA, 25 bp, Homo sapien
gcaagacaatggccgtctgaaggga

SEQ ID NO: 4851537 - DNA, 25 bp, Homo sapien
ggagatgtaagtaagagatgctctt

SEQ ID NO: 4851538 - DNA, 25 bp, Homo sapien
aagggagatgtaagtaagagatgct

SEQ ID NO: 4851539 - DNA, 25 bp, Homo sapien
caatggccgtctgaagggagatgta

SEQ ID NO: 4851540 - DNA, 25 bp, Homo sapien
caataggtttaggagtcctgagtgc

SEQ ID NO: 4851541 - DNA, 25 bp, Homo sapien
tagaatgaaagaccgtttcaatagg

SEQ ID NO: 4851542 - DNA, 25 bp, Homo sapien
gctgatcaatttagccaccctccag

SEQ ID NO: 4851543 - DNA, 25 bp, Homo sapien
tctctgctgatcaatttagccaccc

SEQ ID NO: 4851544 - DNA, 25 bp, Homo sapien
cattgtttatcaaggtctgccccga

SEQ ID NO: 4851545 - DNA, 25 bp, Homo sapien
caggccaaggaacaaccaagtcatt

SEQ ID NO: 4851546 - DNA, 25 bp, Homo sapien
tctgcagctagggaaacagacaagg

SEQ ID NO: 4851547 - DNA, 25 bp, Homo sapien
gaaacttctggcatcgtgcgtggcc

SEQ ID NO: 4851548 - DNA, 25 bp, Homo sapien
taatgtagttataaatgtcgcatca

SEQ ID NO: 4851549 - DNA, 25 bp, Homo sapien
cacttggagatttaggaatccgatc

SEQ ID NO: 4851550 - DNA, 25 bp, Homo sapien
ggcacacagcaaagcgcatttcctt

SEQ ID NO: 4851551 - DNA, 25 bp, Homo sapien
cctcaacagtgtcaccactgtgcaa

SEQ ID NO: 4851552 - DNA, 25 bp, Homo sapien
gatcaatggaaatgggttccaccac

SEQ ID NO: 4851553 - DNA, 25 bp, Homo sapien
taggtgacactgtctctgatggtga

SEQ ID NO: 4851554 - DNA, 25 bp, Homo sapien
tcagtgaagggtcagatcccgaatc

SEQ ID NO: 4851555 - DNA, 25 bp, Homo sapien
tctgcggtatgggactggaagatca

SEQ ID NO: 4851556 - DNA, 25 bp, Homo sapien
caactgcagttagggacaagtgccc

SEQ ID NO: 4851557 - DNA, 25 bp, Homo sapien
gcataaacatatgactccccaagct

SEQ ID NO: 4851558 - DNA, 25 bp, Homo sapien
ccctaaacatggcttgtggctcaag

SEQ ID NO: 4851559 - DNA, 25 bp, Homo sapien
gctcaagctattgggagcataaaca

SEQ ID NO: 4851560 - DNA, 25 bp, Homo sapien
tctttgtgcgggtttgttatctgtc

SEQ ID NO: 4851561 - DNA, 25 bp, Homo sapien
tctttagatagaaataaccgggatg

SEQ ID NO: 4851562 - DNA, 25 bp, Homo sapien
accgggatgcctctggagagtttaa

SEQ ID NO: 4851563 - DNA, 25 bp, Homo sapien
cagttcctctttagatagaaataac

SEQ ID NO: 4851564 - DNA, 25 bp, Homo sapien
tccaggtatgagtctctgtttggaa

SEQ ID NO: 4851565 - DNA, 25 bp, Homo sapien
tatgagtctctgtttggaatctgct

SEQ ID NO: 4851566 - DNA, 25 bp, Homo sapien
tctgtttggaatctgctcaggaact

SEQ ID NO: 4851567 - DNA, 25 bp, Homo sapien
gagtctctgtttggaatctgctcag

SEQ ID NO: 4851568 - DNA, 25 bp, Homo sapien
tcagccactttgtaatgcgaggacc

SEQ ID NO: 4851569 - DNA, 25 bp, Homo sapien
tctggtgatgaaactcaacttggaa

SEQ ID NO: 4851570 - DNA, 25 bp, Homo sapien
tgcgaggaccttgcaatctggtgat

SEQ ID NO: 4851571 - DNA, 25 bp, Homo sapien
gggatttggattgatagccactggc

SEQ ID NO: 4851572 - DNA, 25 bp, Homo sapien
atttaaccacatgacaacaaatggt

SEQ ID NO: 4851573 - DNA, 25 bp, Homo sapien
tcagttttaatttaaccacatgaca

SEQ ID NO: 4851574 - DNA, 25 bp, Homo sapien
tttatgaagtaccagtgagctggaa

SEQ ID NO: 4851575 - DNA, 25 bp, Homo sapien
tgacattaacatactgtttgatgtt

SEQ ID NO: 4851576 - DNA, 25 bp, Homo sapien
tgttttgttccctcgacccagattg

SEQ ID NO: 4851577 - DNA, 25 bp, Homo sapien
gagaaggatacattgttctcataca

SEQ ID NO: 4851578 - DNA, 25 bp, Homo sapien
gatatgtcacgtccatgaaatattc

SEQ ID NO: 4851579 - DNA, 25 bp, Homo sapien
taaatgtggtggatatgtcacgtcc

SEQ ID NO: 4851580 - DNA, 25 bp, Homo sapien
tgtacatgtgcacttcgggcaagga

SEQ ID NO: 4851581 - DNA, 25 bp, Homo sapien
cgggaacaaaggcataactagcttg

SEQ ID NO: 4851582 - DNA, 25 bp, Homo sapien
gaaactgtcagccaatagcatttgt

SEQ ID NO: 4851583 - DNA, 25 bp, Homo sapien
tgagatcagagaggaccaccacttc

SEQ ID NO: 4851584 - DNA, 25 bp, Homo sapien
tttggaccattgctgcgatgcccct

SEQ ID NO: 4851585 - DNA, 25 bp, Homo sapien
tgggataaccaggatgaccatctcg

SEQ ID NO: 4851586 - DNA, 25 bp, Homo sapien
tctttagctcccagaaacagcttgg

SEQ ID NO: 4851587 - DNA, 25 bp, Homo sapien
cttggagatccgcagctaacagcca

SEQ ID NO: 4851588 - DNA, 25 bp, Homo sapien
tgacacaatgtgactcgagggccgg

SEQ ID NO: 4851589 - DNA, 25 bp, Homo sapien
ttagcccagcgtgcagttcccttgg

SEQ ID NO: 4851590 - DNA, 25 bp, Homo sapien
tcaaacactgtcgtggaagaaatgc

SEQ ID NO: 4851591 - DNA, 25 bp, Homo sapien
tgcagggaccgtttcttagcccagc

SEQ ID NO: 4851592 - DNA, 25 bp, Homo sapien
ttgcaatgtctggacttctctgaat

SEQ ID NO: 4851593 - DNA, 25 bp, Homo sapien
cattgttgcaatgtctggacttctc

SEQ ID NO: 4851594 - DNA, 25 bp, Homo sapien
ttctctgaatgtcagtgtgtactct

SEQ ID NO: 4851595 - DNA, 25 bp, Homo sapien
ttgttgcaatgtctggacttctctg

SEQ ID NO: 4851596 - DNA, 25 bp, Homo sapien
agctgacatagtgttcaggctcagt

SEQ ID NO: 4851597 - DNA, 25 bp, Homo sapien
tgacatagtgttcaggctcagtccc

SEQ ID NO: 4851598 - DNA, 25 bp, Homo sapien
atagtgttcaggctcagtcccaccc

SEQ ID NO: 4851599 - DNA, 25 bp, Homo sapien
acatagtgttcaggctcagtcccac

SEQ ID NO: 4851600 - DNA, 25 bp, Homo sapien
gggttcttatgcagtttgtgttcaa

SEQ ID NO: 4851601 - DNA, 25 bp, Homo sapien
gagtagcacgatacagaagcattca

SEQ ID NO: 4851602 - DNA, 25 bp, Homo sapien
tctggtttgattgtattattcttga

SEQ ID NO: 4851603 - DNA, 25 bp, Homo sapien
cagtttgtgttcaagaagagtagca

SEQ ID NO: 4851604 - DNA, 25 bp, Homo sapien
atccacttagcttacggaacgggag

SEQ ID NO: 4851605 - DNA, 25 bp, Homo sapien
ttagcttacggaacgggagactcat

SEQ ID NO: 4851606 - DNA, 25 bp, Homo sapien
cacttagcttacggaacgggagact

SEQ ID NO: 4851607 - DNA, 25 bp, Homo sapien
cttagcttacggaacgggagactca

SEQ ID NO: 4851608 - DNA, 25 bp, Homo sapien
cagtgtaaggcttcctggtgaggct

SEQ ID NO: 4851609 - DNA, 25 bp, Homo sapien
ttcctggtgaggctgccttgctgct

SEQ ID NO: 4851610 - DNA, 25 bp, Homo sapien
tgctgttgcttctgatgtttactca

SEQ ID NO: 4851611 - DNA, 25 bp, Homo sapien
ttagctctcagtgtaaggcttcctg

SEQ ID NO: 4851612 - DNA, 25 bp, Homo sapien
gtttccttttctactgcaaccttca

SEQ ID NO: 4851613 - DNA, 25 bp, Homo sapien
tcaggtttccttttctactgcaacc

SEQ ID NO: 4851614 - DNA, 25 bp, Homo sapien
caggtttccttttctactgcaacct

SEQ ID NO: 4851615 - DNA, 25 bp, Homo sapien
tccttttctactgcaaccttcaagg

SEQ ID NO: 4851616 - DNA, 25 bp, Homo sapien
cttttgtgccaccagtttctctctt

SEQ ID NO: 4851617 - DNA, 25 bp, Homo sapien
ggcttgaaatagtgcgagaaagatt

SEQ ID NO: 4851618 - DNA, 25 bp, Homo sapien
tcttctcctgacactgatatccttg

SEQ ID NO: 4851619 - DNA, 25 bp, Homo sapien
tgtttccttcacacctattgcttga

SEQ ID NO: 4851620 - DNA, 25 bp, Homo sapien
gaactcatctgtgctcttgtaacga

SEQ ID NO: 4851621 - DNA, 25 bp, Homo sapien
tattcaaagagagacggtggtgacg

SEQ ID NO: 4851622 - DNA, 25 bp, Homo sapien
tgccaggtagtgtgcttaattgccc

SEQ ID NO: 4851623 - DNA, 25 bp, Homo sapien
tactagttactcagtggcgctggca

SEQ ID NO: 4851624 - DNA, 25 bp, Homo sapien
taacttaggaagttctaggactcca

SEQ ID NO: 4851625 - DNA, 25 bp, Homo sapien
cctgggacaataaaattgtgatgtc

SEQ ID NO: 4851626 - DNA, 25 bp, Homo sapien
taaggactcaaatgccagattctca

SEQ ID NO: 4851627 - DNA, 25 bp, Homo sapien
gattctcattcgactgtaacttagg

SEQ ID NO: 4851628 - DNA, 25 bp, Homo sapien
tgtggtgcccagtgacaaatatata

SEQ ID NO: 4851629 - DNA, 25 bp, Homo sapien
gtggtgcccagtgacaaatatatac

SEQ ID NO: 4851630 - DNA, 25 bp, Homo sapien
ctgtggtgcccagtgacaaatatat

SEQ ID NO: 4851631 - DNA, 25 bp, Homo sapien
ttgatgatgatggtgtagctagcat

SEQ ID NO: 4851632 - DNA, 25 bp, Homo sapien
tggacccaaaatatgtttgagcttc

SEQ ID NO: 4851633 - DNA, 25 bp, Homo sapien
tagctagcatttgcactgctttgta

SEQ ID NO: 4851634 - DNA, 25 bp, Homo sapien
ggccacttagcgatattgatgatga

SEQ ID NO: 4851635 - DNA, 25 bp, Homo sapien
cacatgaccagtcaggaacttcctg

SEQ ID NO: 4851636 - DNA, 25 bp, Homo sapien
ctcccagagactcccagagtggaag

SEQ ID NO: 4851637 - DNA, 25 bp, Homo sapien
agtggaagcggaggagcaactctgg

SEQ ID NO: 4851638 - DNA, 25 bp, Homo sapien
agcaactctggatagcctcttggag

SEQ ID NO: 4851639 - DNA, 25 bp, Homo sapien
tgtaagaaacatttcgaaaactctg

SEQ ID NO: 4851640 - DNA, 25 bp, Homo sapien
ctgtaagaaacatttcgaaaactct

SEQ ID NO: 4851641 - DNA, 25 bp, Homo sapien
gctgtaagaaacatttcgaaaactc

SEQ ID NO: 4851642 - DNA, 25 bp, Homo sapien
acataaaagtcatcgtaaacaactt

SEQ ID NO: 4851643 - DNA, 25 bp, Homo sapien
aaagtcatcgtaaacaactttcatc

SEQ ID NO: 4851644 - DNA, 25 bp, Homo sapien
ctgctgccttacctacataaaagtc

SEQ ID NO: 4851645 - DNA, 25 bp, Homo sapien
gctgccttacctacataaaagtcat

SEQ ID NO: 4851646 - DNA, 25 bp, Homo sapien
gttttacggttacacatagatctgc

SEQ ID NO: 4851647 - DNA, 25 bp, Homo sapien
ctgctttaagaattccctggtgctc

SEQ ID NO: 4851648 - DNA, 25 bp, Homo sapien
tgtgtctggtaatgctagttttacg

SEQ ID NO: 4851649 - DNA, 25 bp, Homo sapien
cctggtgctcacttgtatagaacat

SEQ ID NO: 4851650 - DNA, 25 bp, Homo sapien
ctgatgggcccctgaaaggagtttc

SEQ ID NO: 4851651 - DNA, 25 bp, Homo sapien
gccagcacagggtgctaaattcctg

SEQ ID NO: 4851652 - DNA, 25 bp, Homo sapien
aatctgtgtgttgtgccgttccaag

SEQ ID NO: 4851653 - DNA, 25 bp, Homo sapien
caagctgtcagcagtggttcgccct

SEQ ID NO: 4851654 - DNA, 25 bp, Homo sapien
aacggagagctctgcatggttgcat

SEQ ID NO: 4851655 - DNA, 25 bp, Homo sapien
aacgggtgaccgcttgattagccgc

SEQ ID NO: 4851656 - DNA, 25 bp, Homo sapien
gctgcgcgtcgctgggtattttctg

SEQ ID NO: 4851657 - DNA, 25 bp, Homo sapien
aatatttagagctttccgaggcagc

SEQ ID NO: 4851658 - DNA, 25 bp, Homo sapien
tgtgtgccttgctaggatcacctgt

SEQ ID NO: 4851659 - DNA, 25 bp, Homo sapien
aatctggcaaacaccgcaaatatgg

SEQ ID NO: 4851660 - DNA, 25 bp, Homo sapien
tacatggcacatgctgtgagcaagg

SEQ ID NO: 4851661 - DNA, 25 bp, Homo sapien
tcacagaaaaggtcaacggtatggg

SEQ ID NO: 4851662 - DNA, 25 bp, Homo sapien
tttggtgggcccagtattgtctgta

SEQ ID NO: 4851663 - DNA, 25 bp, Homo sapien
gacgagggctttggactcttttgga

SEQ ID NO: 4851664 - DNA, 25 bp, Homo sapien
tagcaatatccggatgctgcctctg

SEQ ID NO: 4851665 - DNA, 25 bp, Homo sapien
taattgttggaaacagacgagggct

SEQ ID NO: 4851666 - DNA, 25 bp, Homo sapien
gaggatgctcattgagggcgttttt

SEQ ID NO: 4851667 - DNA, 25 bp, Homo sapien
taggtgccaaaagagattggctggc

SEQ ID NO: 4851668 - DNA, 25 bp, Homo sapien
aaaccccttcttatagctctaggtg

SEQ ID NO: 4851669 - DNA, 25 bp, Homo sapien
tttttgtcgagaggtggcacagtga

SEQ ID NO: 4851670 - DNA, 25 bp, Homo sapien
cagtaacttagccttggctgttctg

SEQ ID NO: 4851671 - DNA, 25 bp, Homo sapien
ccaactgacagcgtgcttgtcagta

SEQ ID NO: 4851672 - DNA, 25 bp, Homo sapien
ttctgtggctctcaatgggccattt

SEQ ID NO: 4851673 - DNA, 25 bp, Homo sapien
ctctcaatgggccatttgtttgctc

SEQ ID NO: 4851674 - DNA, 25 bp, Homo sapien
cgcgtccggccgtttctctcttact

SEQ ID NO: 4851675 - DNA, 25 bp, Homo sapien
caccgcgtccggccgtttctctctt

SEQ ID NO: 4851676 - DNA, 25 bp, Homo sapien
gaagctgattcacacgtaggagatt

SEQ ID NO: 4851677 - DNA, 25 bp, Homo sapien
tggggctcataacctttgccttctg

SEQ ID NO: 4851678 - DNA, 25 bp, Homo sapien
ctggggctcataacctttgccttct

SEQ ID NO: 4851679 - DNA, 25 bp, Homo sapien
gggtgatggctatacctcgaatatt

SEQ ID NO: 4851680 - DNA, 25 bp, Homo sapien
tatttacaaattggggcagaatggc

SEQ ID NO: 4851681 - DNA, 25 bp, Homo sapien
tctgaagtgcggagataatttccat

SEQ ID NO: 4851682 - DNA, 25 bp, Homo sapien
ggaagatctgaagtgcggagataat

SEQ ID NO: 4851683 - DNA, 25 bp, Homo sapien
tcatctcatttgtggtggccagcga

SEQ ID NO: 4851684 - DNA, 25 bp, Homo sapien
cagtcagcatttgggcgttgtgagc

SEQ ID NO: 4851685 - DNA, 25 bp, Homo sapien
tgggtccaggactgataactcgaat

SEQ ID NO: 4851686 - DNA, 25 bp, Homo sapien
tctgtcccaggcacaacttttcgga

SEQ ID NO: 4851687 - DNA, 25 bp, Homo sapien
tctgaaagagaaatcgctgggcgcg

SEQ ID NO: 4851688 - DNA, 25 bp, Homo sapien
tggtggacgctaatgtcgccgcgca

SEQ ID NO: 4851689 - DNA, 25 bp, Homo sapien
ttaaagcgacagtagaggatcagac

SEQ ID NO: 4851690 - DNA, 25 bp, Homo sapien
tggcaacgttgggaacagtcaggac

SEQ ID NO: 4851691 - DNA, 25 bp, Homo sapien
cagctggaaggatgcgagcgaccta

SEQ ID NO: 4851692 - DNA, 25 bp, Homo sapien
caggtgatgcttctaaattgtgatc

SEQ ID NO: 4851693 - DNA, 25 bp, Homo sapien
gattaggcagccatcaatttcctcc

SEQ ID NO: 4851694 - DNA, 25 bp, Homo sapien
cttgcggaggataagaacccaaact

SEQ ID NO: 4851695 - DNA, 25 bp, Homo sapien
aatgaggctccttatcgggccgcag

SEQ ID NO: 4851696 - DNA, 25 bp, Homo sapien
atcccgcgcgtccatgcaaatgagg

SEQ ID NO: 4851697 - DNA, 25 bp, Homo sapien
ccggagtcccggcaacgcagagcgt

SEQ ID NO: 4851698 - DNA, 25 bp, Homo sapien
gcagccagggccgtagtaacccatt

SEQ ID NO: 4851699 - DNA, 25 bp, Homo sapien
tgtttggtattgacggcggagtccc

SEQ ID NO: 4851700 - DNA, 25 bp, Homo sapien
gagtccccctgagatatttgtcgtg

SEQ ID NO: 4851701 - DNA, 25 bp, Homo sapien
tataagggagctgtttggtattgac

SEQ ID NO: 4851702 - DNA, 25 bp, Homo sapien
ccaaattgtcctataagggagctgt

SEQ ID NO: 4851703 - DNA, 25 bp, Homo sapien
gctgctgcgagaatttgttctcttg

SEQ ID NO: 4851704 - DNA, 25 bp, Homo sapien
gctgctgctgcgagaatttgttctc

SEQ ID NO: 4851705 - DNA, 25 bp, Homo sapien
ccaagctgctgctgcgagaatttgt

SEQ ID NO: 4851706 - DNA, 25 bp, Homo sapien
gctgcgagaatttgttctcttgacc

SEQ ID NO: 4851707 - DNA, 25 bp, Homo sapien
taatcaacacatcgctcacacctcc

SEQ ID NO: 4851708 - DNA, 25 bp, Homo sapien
cgccggccgcagcagagtatgcgct

SEQ ID NO: 4851709 - DNA, 25 bp, Homo sapien
ctccgccgcgatccgggaaggagct

SEQ ID NO: 4851710 - DNA, 25 bp, Homo sapien
gtatgcgctcggtaaaaatatgaat

SEQ ID NO: 4851711 - DNA, 25 bp, Homo sapien
gtgactgtctgaacgcagtgacccc

SEQ ID NO: 4851712 - DNA, 25 bp, Homo sapien
cgcgcggggtgactgtctgaacgca

SEQ ID NO: 4851713 - DNA, 25 bp, Homo sapien
caagccctgtgacccccatctgctc

SEQ ID NO: 4851714 - DNA, 25 bp, Homo sapien
cggggtgactgtctgaacgcagtga

SEQ ID NO: 4851715 - DNA, 25 bp, Homo sapien
aaaattgcaaatcaatcatcatctt

SEQ ID NO: 4851716 - DNA, 25 bp, Homo sapien
tttccctggagtataaatttctcag

SEQ ID NO: 4851717 - DNA, 25 bp, Homo sapien
gggtgtggacttggtgtcatttacc

SEQ ID NO: 4851718 - DNA, 25 bp, Homo sapien
ctgcaaagacagaattaacatgaga

SEQ ID NO: 4851719 - DNA, 25 bp, Homo sapien
ggttctttctgtcaccggtatgtgg

SEQ ID NO: 4851720 - DNA, 25 bp, Homo sapien
taaggatctaagaagtggttctttc

SEQ ID NO: 4851721 - DNA, 25 bp, Homo sapien
gtcacccattcttcttggttactga

SEQ ID NO: 4851722 - DNA, 25 bp, Homo sapien
ccattcttcttggttactgaacaaa

SEQ ID NO: 4851723 - DNA, 25 bp, Homo sapien
tttgagtgccacaatgtggaaacgg

SEQ ID NO: 4851724 - DNA, 25 bp, Homo sapien
ggtgtgccgtatctctggtttcatt

SEQ ID NO: 4851725 - DNA, 25 bp, Homo sapien
tctttgagtgccacaatgtggaaac

SEQ ID NO: 4851726 - DNA, 25 bp, Homo sapien
attttctttgagtgccacaatgtgg

SEQ ID NO: 4851727 - DNA, 25 bp, Homo sapien
gaagagagtggaacctatggattcc

SEQ ID NO: 4851728 - DNA, 25 bp, Homo sapien
tagggagaagagagtggaacctatg

SEQ ID NO: 4851729 - DNA, 25 bp, Homo sapien
gagagtggaacctatggattccatg

SEQ ID NO: 4851730 - DNA, 25 bp, Homo sapien
gagaagagagtggaacctatggatt

SEQ ID NO: 4851731 - DNA, 25 bp, Homo sapien
agaccaatggacagaataagagaac

SEQ ID NO: 4851732 - DNA, 25 bp, Homo sapien
aaaaccagaatagacataaagacca

SEQ ID NO: 4851733 - DNA, 25 bp, Homo sapien
tgtataacgatcacagacttcatga

SEQ ID NO: 4851734 - DNA, 25 bp, Homo sapien
gaaatagacctatacacgtagagtc

SEQ ID NO: 4851735 - DNA, 25 bp, Homo sapien
tctaaggactaaccaggctttatct

SEQ ID NO: 4851736 - DNA, 25 bp, Homo sapien
caggtgagatcggatgcattcaggt

SEQ ID NO: 4851737 - DNA, 25 bp, Homo sapien
aggccaggtgagatcggatgcattc

SEQ ID NO: 4851738 - DNA, 25 bp, Homo sapien
atctaaggactaaccaggctttatc

SEQ ID NO: 4851739 - DNA, 25 bp, Homo sapien
tagcactgtacttgggctgaatcca

SEQ ID NO: 4851740 - DNA, 25 bp, Homo sapien
aactgggaattacagaatcctgggc

SEQ ID NO: 4851741 - DNA, 25 bp, Homo sapien
taggaagtttcaagcaataggcagg

SEQ ID NO: 4851742 - DNA, 25 bp, Homo sapien
gaatctagcctcctaacaatgaaaa

SEQ ID NO: 4851743 - DNA, 25 bp, Homo sapien
cactgctacatacggtgctccaggg

SEQ ID NO: 4851744 - DNA, 25 bp, Homo sapien
tgctttgcttcctgcacggcgggta

SEQ ID NO: 4851745 - DNA, 25 bp, Homo sapien
tgcgcgcagccttttcaagggaaag

SEQ ID NO: 4851746 - DNA, 25 bp, Homo sapien
gatcgtttggcgtggaactgctcca

SEQ ID NO: 4851747 - DNA, 25 bp, Homo sapien
ttgggatttattcagggtttgtaga

SEQ ID NO: 4851748 - DNA, 25 bp, Homo sapien
tacatctgagggtatcctatagaaa

SEQ ID NO: 4851749 - DNA, 25 bp, Homo sapien
cagattaatgcttacatagctgggc

SEQ ID NO: 4851750 - DNA, 25 bp, Homo sapien
tctgaattggagtttacgaaacatg

SEQ ID NO: 4851751 - DNA, 25 bp, Homo sapien
aagctttgtaggtgtacacagcgtc

SEQ ID NO: 4851752 - DNA, 25 bp, Homo sapien
gaatagaagctttgtaggtgtacac

SEQ ID NO: 4851753 - DNA, 25 bp, Homo sapien
gaagcaggtggaatagaagctttgt

SEQ ID NO: 4851754 - DNA, 25 bp, Homo sapien
taggtgtacacagcgtcttttttca

SEQ ID NO: 4851755 - DNA, 25 bp, Homo sapien
ttagaccactgtggaggttagagga

SEQ ID NO: 4851756 - DNA, 25 bp, Homo sapien
gtgggtggcataggacttagaccac

SEQ ID NO: 4851757 - DNA, 25 bp, Homo sapien
tggcataggacttagaccactgtgg

SEQ ID NO: 4851758 - DNA, 25 bp, Homo sapien
tgtggaggttagaggagggcctttc

SEQ ID NO: 4851759 - DNA, 25 bp, Homo sapien
catttccggtataggcaggttcagt

SEQ ID NO: 4851760 - DNA, 25 bp, Homo sapien
tttggtcctgttttacagctgggcc

SEQ ID NO: 4851761 - DNA, 25 bp, Homo sapien
caggttcagtataaaatgaaagtat

SEQ ID NO: 4851762 - DNA, 25 bp, Homo sapien
tccctcctggagaagggtgtgtact

SEQ ID NO: 4851763 - DNA, 25 bp, Homo sapien
ctggatgtcactgtgagtgcataac

SEQ ID NO: 4851764 - DNA, 25 bp, Homo sapien
gcagccagacttgacatcccatatg

SEQ ID NO: 4851765 - DNA, 25 bp, Homo sapien
gagtgcataacagtgcagcagccag

SEQ ID NO: 4851766 - DNA, 25 bp, Homo sapien
gacttgacatcccatatgctttctg

SEQ ID NO: 4851767 - DNA, 25 bp, Homo sapien
ggacatggctaagggattctgagct

SEQ ID NO: 4851768 - DNA, 25 bp, Homo sapien
tgggacatggctaagggattctgag

SEQ ID NO: 4851769 - DNA, 25 bp, Homo sapien
gggagtgggacatggctaagggatt

SEQ ID NO: 4851770 - DNA, 25 bp, Homo sapien
catggctaagggattctgagcttcc

SEQ ID NO: 4851771 - DNA, 25 bp, Homo sapien
tcaaacatccgccaaagctgggctt

SEQ ID NO: 4851772 - DNA, 25 bp, Homo sapien
agtgcatcttgagtttcatgggcag

SEQ ID NO: 4851773 - DNA, 25 bp, Homo sapien
tcatgggcagtaactcctccaacct

SEQ ID NO: 4851774 - DNA, 25 bp, Homo sapien
aaagctgggcttgccgctcaagtgc

SEQ ID NO: 4851775 - DNA, 25 bp, Homo sapien
gagaaataaactctgtggccacttt

SEQ ID NO: 4851776 - DNA, 25 bp, Homo sapien
atccgcgggccctgcagaaatggtt

SEQ ID NO: 4851777 - DNA, 25 bp, Homo sapien
gatctcaaagtggaaggcgcttgga

SEQ ID NO: 4851778 - DNA, 25 bp, Homo sapien
ccatctcctctaggccacgtgtgga

SEQ ID NO: 4851779 - DNA, 25 bp, Homo sapien
catcatgaaatctgtgcccttttat

SEQ ID NO: 4851780 - DNA, 25 bp, Homo sapien
ccactgcaagtgtgtctgtgaagcc

SEQ ID NO: 4851781 - DNA, 25 bp, Homo sapien
actgcaagtgtgtctgtgaagccct

SEQ ID NO: 4851782 - DNA, 25 bp, Homo sapien
gtgaagcccttctcccaagagtcca

SEQ ID NO: 4851783 - DNA, 25 bp, Homo sapien
taccactgcaagtgtgtctgtgaag

SEQ ID NO: 4851784 - DNA, 25 bp, Homo sapien
ttttatcacagcaggtttcacggcc

SEQ ID NO: 4851785 - DNA, 25 bp, Homo sapien
aagctaagatttccctctgacacgg

SEQ ID NO: 4851786 - DNA, 25 bp, Homo sapien
tcacggcctcaagcaagttatccag

SEQ ID NO: 4851787 - DNA, 25 bp, Homo sapien
tactgccttgtgtaagggacgggaa

SEQ ID NO: 4851788 - DNA, 25 bp, Homo sapien
tcacatgaggattctatagggtgtc

SEQ ID NO: 4851789 - DNA, 25 bp, Homo sapien
acatgaggattctatagggtgtccc

SEQ ID NO: 4851790 - DNA, 25 bp, Homo sapien
atgaggattctatagggtgtcccac

SEQ ID NO: 4851791 - DNA, 25 bp, Homo sapien
catgaggattctatagggtgtccca

SEQ ID NO: 4851792 - DNA, 25 bp, Homo sapien
tcacaaaggcctatctcaaccacag

SEQ ID NO: 4851793 - DNA, 25 bp, Homo sapien
tcaaccacagcacttgtgaatacca

SEQ ID NO: 4851794 - DNA, 25 bp, Homo sapien
tgtgaataccaagcctggtccaaca

SEQ ID NO: 4851795 - DNA, 25 bp, Homo sapien
gatatcggcgtacacttcacaaagg

SEQ ID NO: 4851796 - DNA, 25 bp, Homo sapien
gcagatgagctatagtatgaagcat

SEQ ID NO: 4851797 - DNA, 25 bp, Homo sapien
gatgagctatagtatgaagcatttc

SEQ ID NO: 4851798 - DNA, 25 bp, Homo sapien
cagcagatgagctatagtatgaagc

SEQ ID NO: 4851799 - DNA, 25 bp, Homo sapien
cagatgagctatagtatgaagcatt

SEQ ID NO: 4851800 - DNA, 25 bp, Homo sapien
ccaacaggatttagccatgggttac

SEQ ID NO: 4851801 - DNA, 25 bp, Homo sapien
caggatttagccatgggttactgca

SEQ ID NO: 4851802 - DNA, 25 bp, Homo sapien
catgggttactgcaagatggctttt

SEQ ID NO: 4851803 - DNA, 25 bp, Homo sapien
agccaacaggatttagccatgggtt

SEQ ID NO: 4851804 - DNA, 25 bp, Homo sapien
aagacgttttacaatgatctcagtc

SEQ ID NO: 4851805 - DNA, 25 bp, Homo sapien
gacgttttacaatgatctcagtcat

SEQ ID NO: 4851806 - DNA, 25 bp, Homo sapien
aagaaagacgttttacaatgatctc

SEQ ID NO: 4851807 - DNA, 25 bp, Homo sapien
gaaagacgttttacaatgatctcag

SEQ ID NO: 4851808 - DNA, 25 bp, Homo sapien
gcggcgactacgacagcgacggcgg

SEQ ID NO: 4851809 - DNA, 25 bp, Homo sapien
gggcttccccgctcgtgctctttct

SEQ ID NO: 4851810 - DNA, 25 bp, Homo sapien
gctcgtgctctttctccggcagcgg

SEQ ID NO: 4851811 - DNA, 25 bp, Homo sapien
ctagatttcactctggggcttcccc

SEQ ID NO: 4851812 - DNA, 25 bp, Homo sapien
gggcgggcagaccagccggcaggat

SEQ ID NO: 4851813 - DNA, 25 bp, Homo sapien
aggggcgggcagaccagccggcagg

SEQ ID NO: 4851814 - DNA, 25 bp, Homo sapien
ggcgggcagaccagccggcaggatg

SEQ ID NO: 4851815 - DNA, 25 bp, Homo sapien
ggaggggcgggcagaccagccggca

SEQ ID NO: 4851816 - DNA, 25 bp, Homo sapien
tagagagggcggatggcggcggatg

SEQ ID NO: 4851817 - DNA, 25 bp, Homo sapien
atgggggggtagagagggcggatgg

SEQ ID NO: 4851818 - DNA, 25 bp, Homo sapien
tgggggggtagagagggcggatggc

SEQ ID NO: 4851819 - DNA, 25 bp, Homo sapien
gggtagagagggcggatggcggcgg

SEQ ID NO: 4851820 - DNA, 25 bp, Homo sapien
gttgcgctgcaaatggtgaccctgc

SEQ ID NO: 4851821 - DNA, 25 bp, Homo sapien
aatggtgaccctgctgggttcctcg

SEQ ID NO: 4851822 - DNA, 25 bp, Homo sapien
tcggggtctccgcttcctgaactca

SEQ ID NO: 4851823 - DNA, 25 bp, Homo sapien
gctgcaaatggtgaccctgctgggt

SEQ ID NO: 4851824 - DNA, 25 bp, Homo sapien
tgaaaggccttgcactcttcggcgg

SEQ ID NO: 4851825 - DNA, 25 bp, Homo sapien
taggcttccagtctcaaaaatattg

SEQ ID NO: 4851826 - DNA, 25 bp, Homo sapien
ccttctcgaggcaaaataaatgtgt

SEQ ID NO: 4851827 - DNA, 25 bp, Homo sapien
tacacccaagaaggcttgcagcagg

SEQ ID NO: 4851828 - DNA, 25 bp, Homo sapien
catgaaacatagaacgaagagaaaa

SEQ ID NO: 4851829 - DNA, 25 bp, Homo sapien
caccactgaatatcattccctcctc

SEQ ID NO: 4851830 - DNA, 25 bp, Homo sapien
aaaaacaccactgaatatcattccc

SEQ ID NO: 4851831 - DNA, 25 bp, Homo sapien
aaacaccactgaatatcattccctc

SEQ ID NO: 4851832 - DNA, 25 bp, Homo sapien
agaaaaacaccactgaatatcattc

SEQ ID NO: 4851833 - DNA, 25 bp, Homo sapien
acaactttgtggaaaatgcctccgc

SEQ ID NO: 4851834 - DNA, 25 bp, Homo sapien
gaacaaacagtaccctacagacagg

SEQ ID NO: 4851835 - DNA, 25 bp, Homo sapien
aataagagagttcggctaccaccca

SEQ ID NO: 4851836 - DNA, 25 bp, Homo sapien
tatacgattcctaaaagacaagcga

SEQ ID NO: 4851837 - DNA, 25 bp, Homo sapien
gagagctctgcaaaatatgacaagt

SEQ ID NO: 4851838 - DNA, 25 bp, Homo sapien
tacaccagttggcttgccataggat

SEQ ID NO: 4851839 - DNA, 25 bp, Homo sapien
cagatgaggatccaatagaaaagga

SEQ ID NO: 4851840 - DNA, 25 bp, Homo sapien
ttggcttgccataggattcaccaca

SEQ ID NO: 4851841 - DNA, 25 bp, Homo sapien
tttgaccaattattacacacttcag

SEQ ID NO: 4851842 - DNA, 25 bp, Homo sapien
tggccattgacaacgccgggtgaca

SEQ ID NO: 4851843 - DNA, 25 bp, Homo sapien
gcctaactgtagcagacctctcagg

SEQ ID NO: 4851844 - DNA, 25 bp, Homo sapien
tactgttcgactttaagaaatgaac

SEQ ID NO: 4851845 - DNA, 25 bp, Homo sapien
acagcattaagaaacgtacctttct

SEQ ID NO: 4851846 - DNA, 25 bp, Homo sapien
caccttaaagggcaacgagattaca

SEQ ID NO: 4851847 - DNA, 25 bp, Homo sapien
taaactaggcaaacacttatatgca

SEQ ID NO: 4851848 - DNA, 25 bp, Homo sapien
tgctgaggaagcaccttatggatac

SEQ ID NO: 4851849 - DNA, 25 bp, Homo sapien
gccagacgacatttagagaaccact

SEQ ID NO: 4851850 - DNA, 25 bp, Homo sapien
aattttgatggcagctacggactcc

SEQ ID NO: 4851851 - DNA, 25 bp, Homo sapien
tatagcacatctcagctaacgaacg

SEQ ID NO: 4851852 - DNA, 25 bp, Homo sapien
tacggactccgaccagagaaatgca

SEQ ID NO: 4851853 - DNA, 25 bp, Homo sapien
gcaatagttgatactacatccttag

SEQ ID NO: 4851854 - DNA, 25 bp, Homo sapien
tataattatgttgttcacttcagga

SEQ ID NO: 4851855 - DNA, 25 bp, Homo sapien
ttaagttgggaaagttagcaagcca

SEQ ID NO: 4851856 - DNA, 25 bp, Homo sapien
gctgaagtctacaaactttggcatt

SEQ ID NO: 4851857 - DNA, 25 bp, Homo sapien
tggtcttagacctgcaatatgggat

SEQ ID NO: 4851858 - DNA, 25 bp, Homo sapien
gcttgtaggctaccataaacattca

SEQ ID NO: 4851859 - DNA, 25 bp, Homo sapien
ttttcacagtaccatacgtagggtg

SEQ ID NO: 4851860 - DNA, 25 bp, Homo sapien
taattctgtatggtagcttgtaggc

SEQ ID NO: 4851861 - DNA, 25 bp, Homo sapien
tgtgccaggtattgtcaagaggtca

SEQ ID NO: 4851862 - DNA, 25 bp, Homo sapien
gaacgtgctcaaacaaataactgga

SEQ ID NO: 4851863 - DNA, 25 bp, Homo sapien
ccaactttctatggtgatttggcaa

SEQ ID NO: 4851864 - DNA, 25 bp, Homo sapien
ggccactcccattcactattggagg

SEQ ID NO: 4851865 - DNA, 25 bp, Homo sapien
gtgagcaaggggagaatgacaggaa

SEQ ID NO: 4851866 - DNA, 25 bp, Homo sapien
gagcaaggggagaatgacaggaatg

SEQ ID NO: 4851867 - DNA, 25 bp, Homo sapien
tgagcaaggggagaatgacaggaat

SEQ ID NO: 4851868 - DNA, 25 bp, Homo sapien
tgttcctggataatctgatagcccg

SEQ ID NO: 4851869 - DNA, 25 bp, Homo sapien
gatagcccgtttggataaaatggaa

SEQ ID NO: 4851870 - DNA, 25 bp, Homo sapien
attctcagggtccacaaggtaactt

SEQ ID NO: 4851871 - DNA, 25 bp, Homo sapien
gataatctgatagcccgtttggata

SEQ ID NO: 4851872 - DNA, 25 bp, Homo sapien
aacagctgatgtaggatccattcct

SEQ ID NO: 4851873 - DNA, 25 bp, Homo sapien
tatagattcctgaaagtgccatttg

SEQ ID NO: 4851874 - DNA, 25 bp, Homo sapien
tccttaagatgctgacaaaccctat

SEQ ID NO: 4851875 - DNA, 25 bp, Homo sapien
tgcgtctggcctgtttaagtatttt

SEQ ID NO: 4851876 - DNA, 25 bp, Homo sapien
tacctggccggatactgacttttat

SEQ ID NO: 4851877 - DNA, 25 bp, Homo sapien
tcatgctacacccaaacagggctgg

SEQ ID NO: 4851878 - DNA, 25 bp, Homo sapien
tgatacccatatgtagctagcggct

SEQ ID NO: 4851879 - DNA, 25 bp, Homo sapien
catgacatgcaaaaagtgaggaagc

SEQ ID NO: 4851880 - DNA, 25 bp, Homo sapien
ggtgcaatcatgtcgaacttctggg

SEQ ID NO: 4851881 - DNA, 25 bp, Homo sapien
tgctggaagtttgcaagcgctacca

SEQ ID NO: 4851882 - DNA, 25 bp, Homo sapien
ccagccgggctcaatttctaataag

SEQ ID NO: 4851883 - DNA, 25 bp, Homo sapien
tatgttgctcaaggtagtctcgagc

SEQ ID NO: 4851884 - DNA, 25 bp, Homo sapien
tatctcctgttgctagtaattctcc

SEQ ID NO: 4851885 - DNA, 25 bp, Homo sapien
tgttgaaagatgacaactctaccac

SEQ ID NO: 4851886 - DNA, 25 bp, Homo sapien
agatgacaactctaccacctttatc

SEQ ID NO: 4851887 - DNA, 25 bp, Homo sapien
gctagtaattctccagaatgattaa

SEQ ID NO: 4851888 - DNA, 25 bp, Homo sapien
gcactttgagatcctcaggtcaaag

SEQ ID NO: 4851889 - DNA, 25 bp, Homo sapien
actttgagatcctcaggtcaaaggc

SEQ ID NO: 4851890 - DNA, 25 bp, Homo sapien
cactttgagatcctcaggtcaaagg

SEQ ID NO: 4851891 - DNA, 25 bp, Homo sapien
ctttgagatcctcaggtcaaaggcg

SEQ ID NO: 4851892 - DNA, 25 bp, Homo sapien
tcttgcttgcctttatgatcactat

SEQ ID NO: 4851893 - DNA, 25 bp, Homo sapien
tcttttcttgcttgcctttatgatc

SEQ ID NO: 4851894 - DNA, 25 bp, Homo sapien
gcctttatgatcactatgagaatca

SEQ ID NO: 4851895 - DNA, 25 bp, Homo sapien
gcttgcctttatgatcactatgaga

SEQ ID NO: 4851896 - DNA, 25 bp, Homo sapien
tactatgtacactagggcgtagagg

SEQ ID NO: 4851897 - DNA, 25 bp, Homo sapien
tagactcgtggacaacaacacaggt

SEQ ID NO: 4851898 - DNA, 25 bp, Homo sapien
caagggcgagccacacattgtattt

SEQ ID NO: 4851899 - DNA, 25 bp, Homo sapien
taagcaatatgaagggccaagggcg

SEQ ID NO: 4851900 - DNA, 25 bp, Homo sapien
aaataatgataaagtcttgcccaga

SEQ ID NO: 4851901 - DNA, 25 bp, Homo sapien
aaaaaactgagcacccataataagg

SEQ ID NO: 4851902 - DNA, 25 bp, Homo sapien
tcattagggaaataatgacgttaaa

SEQ ID NO: 4851903 - DNA, 25 bp, Homo sapien
tatgcccactttagggtcaactccc

SEQ ID NO: 4851904 - DNA, 25 bp, Homo sapien
ggtagacaataaaaactgagcagca

SEQ ID NO: 4851905 - DNA, 25 bp, Homo sapien
tggtagacaataaaaactgagcagc

SEQ ID NO: 4851906 - DNA, 25 bp, Homo sapien
ttggtagacaataaaaactgagcag

SEQ ID NO: 4851907 - DNA, 25 bp, Homo sapien
agctggtggcgttaacttgggtcat

SEQ ID NO: 4851908 - DNA, 25 bp, Homo sapien
ggcttctccactatacaatgactct

SEQ ID NO: 4851909 - DNA, 25 bp, Homo sapien
taacttgggtcatttggttaagaca

SEQ ID NO: 4851910 - DNA, 25 bp, Homo sapien
ggtcatttggttaagacaatgtttg

SEQ ID NO: 4851911 - DNA, 25 bp, Homo sapien
tcacatttcacgtaaaaggattcca

SEQ ID NO: 4851912 - DNA, 25 bp, Homo sapien
tggtgtatgcaaacacatatatgtc

SEQ ID NO: 4851913 - DNA, 25 bp, Homo sapien
tgcaaagattggtggcactcataaa

SEQ ID NO: 4851914 - DNA, 25 bp, Homo sapien
gaaaaacttgatatgcatgtgtggt

SEQ ID NO: 4851915 - DNA, 25 bp, Homo sapien
tagtaactgtagtaggatctctata

SEQ ID NO: 4851916 - DNA, 25 bp, Homo sapien
caagttatacccttctggtcttttg

SEQ ID NO: 4851917 - DNA, 25 bp, Homo sapien
tcctctttcaagttatacccttctg

SEQ ID NO: 4851918 - DNA, 25 bp, Homo sapien
tagtaggatctctataccttccatc

SEQ ID NO: 4851919 - DNA, 25 bp, Homo sapien
caggatttgggctatataatatgaa

SEQ ID NO: 4851920 - DNA, 25 bp, Homo sapien
gctctgctcaggatttgggctatat

SEQ ID NO: 4851921 - DNA, 25 bp, Homo sapien
aattattcctattcaagctctgctc

SEQ ID NO: 4851922 - DNA, 25 bp, Homo sapien
tatgaatacaagcactatctgtgac

SEQ ID NO: 4851923 - DNA, 25 bp, Homo sapien
tactattagaatttgcagttcttag

SEQ ID NO: 4851924 - DNA, 25 bp, Homo sapien
cttttactggttgcaatactattag

SEQ ID NO: 4851925 - DNA, 25 bp, Homo sapien
gatgttgatcctttcgagtgctgaa

SEQ ID NO: 4851926 - DNA, 25 bp, Homo sapien
acagaaattacaaaaggctcagttt

SEQ ID NO: 4851927 - DNA, 25 bp, Homo sapien
ggactggcctcaaccattagatcca

SEQ ID NO: 4851928 - DNA, 25 bp, Homo sapien
gatccataggcctaaagactggcac

SEQ ID NO: 4851929 - DNA, 25 bp, Homo sapien
gagcattggcaaatattcttcgtgg

SEQ ID NO: 4851930 - DNA, 25 bp, Homo sapien
gattaatccgcaaatcatctgcaga

SEQ ID NO: 4851931 - DNA, 25 bp, Homo sapien
cagtagttcatacatttgattagaa

SEQ ID NO: 4851932 - DNA, 25 bp, Homo sapien
gccaggtgagactatttttacaata

SEQ ID NO: 4851933 - DNA, 25 bp, Homo sapien
gtcaccgcagccaggtgagactatt

SEQ ID NO: 4851934 - DNA, 25 bp, Homo sapien
aggctgagtcaccgcagccaggtga

SEQ ID NO: 4851935 - DNA, 25 bp, Homo sapien
atcatgcatcatgacttgcgtgaat

SEQ ID NO: 4851936 - DNA, 25 bp, Homo sapien
gcatcatgacttgcgtgaatttctt

SEQ ID NO: 4851937 - DNA, 25 bp, Homo sapien
catgcatcatgacttgcgtgaattt

SEQ ID NO: 4851938 - DNA, 25 bp, Homo sapien
aatcttaatctaatcgtaatcttta

SEQ ID NO: 4851939 - DNA, 25 bp, Homo sapien
tctcaaacctaaaacccattcatgg

SEQ ID NO: 4851940 - DNA, 25 bp, Homo sapien
taattctacatttctcaaacctaaa

SEQ ID NO: 4851941 - DNA, 25 bp, Homo sapien
aaacccattcatggacctaagcaaa

SEQ ID NO: 4851942 - DNA, 25 bp, Homo sapien
acccattcatggacctaagcaaaaa

SEQ ID NO: 4851943 - DNA, 25 bp, Homo sapien
ctagataacattttattaaggaatt

SEQ ID NO: 4851944 - DNA, 25 bp, Homo sapien
ttggcaggcttgatatccacaatgt

SEQ ID NO: 4851945 - DNA, 25 bp, Homo sapien
attggcaggcttgatatccacaatg

SEQ ID NO: 4851946 - DNA, 25 bp, Homo sapien
tcatgtcacatagccgaatagttcc

SEQ ID NO: 4851947 - DNA, 25 bp, Homo sapien
tttactgctgctgtatacaaatgtg

SEQ ID NO: 4851948 - DNA, 25 bp, Homo sapien
tagaatgtctatcacagagggcaga

SEQ ID NO: 4851949 - DNA, 25 bp, Homo sapien
gtaatcacctctgttagctcttcca

SEQ ID NO: 4851950 - DNA, 25 bp, Homo sapien
tggacacacgggtttaagactttga

SEQ ID NO: 4851951 - DNA, 25 bp, Homo sapien
gattaccaagggtacaagtggctct

SEQ ID NO: 4851952 - DNA, 25 bp, Homo sapien
gttacagagcccaaccgcaagttac

SEQ ID NO: 4851953 - DNA, 25 bp, Homo sapien
ccctacaagtgaggtaaaatgccag

SEQ ID NO: 4851954 - DNA, 25 bp, Homo sapien
aaaatgacctgttactgggatcttc

SEQ ID NO: 4851955 - DNA, 25 bp, Homo sapien
atcatatatcgaccactatggctga

SEQ ID NO: 4851956 - DNA, 25 bp, Homo sapien
attttgactgacaaatagtctctag

SEQ ID NO: 4851957 - DNA, 25 bp, Homo sapien
tgaattttacatccgaaatagagga

SEQ ID NO: 4851958 - DNA, 25 bp, Homo sapien
gtgcacctctactaaggactggcca

SEQ ID NO: 4851959 - DNA, 25 bp, Homo sapien
cagtccatttgacttggcacaccaa

SEQ ID NO: 4851960 - DNA, 25 bp, Homo sapien
tggacacggataaacagtagtggct

SEQ ID NO: 4851961 - DNA, 25 bp, Homo sapien
tcaagaactgacatccaacaacgga

SEQ ID NO: 4851962 - DNA, 25 bp, Homo sapien
tccatgttgctcaatagtgaactat

SEQ ID NO: 4851963 - DNA, 25 bp, Homo sapien
aaatctgcagttagccctgcggaac

SEQ ID NO: 4851964 - DNA, 25 bp, Homo sapien
agttttggccctccatatatttgag

SEQ ID NO: 4851965 - DNA, 25 bp, Homo sapien
cctgcggaacccacacgtgaagttt

SEQ ID NO: 4851966 - DNA, 25 bp, Homo sapien
tatgcatagcgtaaccatgccttgg

SEQ ID NO: 4851967 - DNA, 25 bp, Homo sapien
aaaaggaagtgtctatatttcacca

SEQ ID NO: 4851968 - DNA, 25 bp, Homo sapien
actactgataacaacactgaaactg

SEQ ID NO: 4851969 - DNA, 25 bp, Homo sapien
tgtcaaaagctaacaaagctgtgcc

SEQ ID NO: 4851970 - DNA, 25 bp, Homo sapien
ctgaataaaacattcaggccaaaaa

SEQ ID NO: 4851971 - DNA, 25 bp, Homo sapien
tgaataaaacattcaggccaaaaac

SEQ ID NO: 4851972 - DNA, 25 bp, Homo sapien
gaataaaacattcaggccaaaaaca

SEQ ID NO: 4851973 - DNA, 25 bp, Homo sapien
ttcctactggtatgacaaaggaaaa

SEQ ID NO: 4851974 - DNA, 25 bp, Homo sapien
cttcagggaggtacattttcctact

SEQ ID NO: 4851975 - DNA, 25 bp, Homo sapien
ggcatggcacacatagcctttataa

SEQ ID NO: 4851976 - DNA, 25 bp, Homo sapien
aggaaaactccattctgggcatggc

SEQ ID NO: 4851977 - DNA, 25 bp, Homo sapien
aatacaaatatactgcactgaaatt

SEQ ID NO: 4851978 - DNA, 25 bp, Homo sapien
agtgaacagagtttacttctgaggt

SEQ ID NO: 4851979 - DNA, 25 bp, Homo sapien
acagagtttacttctgaggtattca

SEQ ID NO: 4851980 - DNA, 25 bp, Homo sapien
gagtttacttctgaggtattcatgc

SEQ ID NO: 4851981 - DNA, 25 bp, Homo sapien
gtttacttctgaggtattcatgcac

SEQ ID NO: 4851982 - DNA, 25 bp, Homo sapien
ccaacaacattcaaatttgtcaaat

SEQ ID NO: 4851983 - DNA, 25 bp, Homo sapien
aaatttgtcaaatatgcagtcattt

SEQ ID NO: 4851984 - DNA, 25 bp, Homo sapien
ttgtcaaatatgcagtcattttcat

SEQ ID NO: 4851985 - DNA, 25 bp, Homo sapien
ctgtcagatccattccaacaacatt

SEQ ID NO: 4851986 - DNA, 25 bp, Homo sapien
tagtagtagcactcaaaggcaatgt

SEQ ID NO: 4851987 - DNA, 25 bp, Homo sapien
gaaaaactggttgtagctgtgcgcc

SEQ ID NO: 4851988 - DNA, 25 bp, Homo sapien
ccaaatgagttatctgccgcctgaa

SEQ ID NO: 4851989 - DNA, 25 bp, Homo sapien
ggaattacactacggcaaaactgga

SEQ ID NO: 4851990 - DNA, 25 bp, Homo sapien
tctccggattagatggcagtactgc

SEQ ID NO: 4851991 - DNA, 25 bp, Homo sapien
tgtattaggacacctaggctgtggc

SEQ ID NO: 4851992 - DNA, 25 bp, Homo sapien
ggtcagtttcagtgggtctccggat

SEQ ID NO: 4851993 - DNA, 25 bp, Homo sapien
tcaaactcaaggtaatgcgtgcccc

SEQ ID NO: 4851994 - DNA, 25 bp, Homo sapien
aagaaccccgcatgaagtagctgta

SEQ ID NO: 4851995 - DNA, 25 bp, Homo sapien
gctgttcacaagaaaccaatgcttt

SEQ ID NO: 4851996 - DNA, 25 bp, Homo sapien
ggagcaactatctgtggaactcaca

SEQ ID NO: 4851997 - DNA, 25 bp, Homo sapien
caggctatgtgatcaaccaggccag

SEQ ID NO: 4851998 - DNA, 25 bp, Homo sapien
cataggaagctacttcaaaagcaga

SEQ ID NO: 4851999 - DNA, 25 bp, Homo sapien
cagtacactcagtcaaacaagcaga

SEQ ID NO: 4852000 - DNA, 25 bp, Homo sapien
tgtgaaaatagacagtacactcagt

SEQ ID NO: 4852001 - DNA, 25 bp, Homo sapien
ttcaagtaaaatgattcggcaatta

SEQ ID NO: 4852002 - DNA, 25 bp, Homo sapien
tattgaagtctaggctgtcaacact

SEQ ID NO: 4852003 - DNA, 25 bp, Homo sapien
gcttcagaactgtgcgaggcttatt

SEQ ID NO: 4852004 - DNA, 25 bp, Homo sapien
cacagactttgcgaggcttcagaac

SEQ ID NO: 4852005 - DNA, 25 bp, Homo sapien
gatgcttctagggttatgtctcgct

SEQ ID NO: 4852006 - DNA, 25 bp, Homo sapien
cctaaatggctagcagacatggaga

SEQ ID NO: 4852007 - DNA, 25 bp, Homo sapien
taaatcccatagcatgactgaaggc

SEQ ID NO: 4852008 - DNA, 25 bp, Homo sapien
gattcaactatctcaactaagcagg

SEQ ID NO: 4852009 - DNA, 25 bp, Homo sapien
cagtccaatctagtccattaggcaa

SEQ ID NO: 4852010 - DNA, 25 bp, Homo sapien
taagagatgaaggggagcagtccag

SEQ ID NO: 4852011 - DNA, 25 bp, Homo sapien
tataccaccaccaagaccgggtgga

SEQ ID NO: 4852012 - DNA, 25 bp, Homo sapien
gagggggcaagggtaagagatgaag

SEQ ID NO: 4852013 - DNA, 25 bp, Homo sapien
aatataccaccaccaagaccgggtg

SEQ ID NO: 4852014 - DNA, 25 bp, Homo sapien
gcgaggagtgattacagccaactgt

SEQ ID NO: 4852015 - DNA, 25 bp, Homo sapien
ggcgaggagtgattacagccaactg

SEQ ID NO: 4852016 - DNA, 25 bp, Homo sapien
ttataccactgaccccaaactgact

SEQ ID NO: 4852017 - DNA, 25 bp, Homo sapien
cctttataccactgaccccaaactg

SEQ ID NO: 4852018 - DNA, 25 bp, Homo sapien
tagagggaatcacggtcggctcgtt

SEQ ID NO: 4852019 - DNA, 25 bp, Homo sapien
tcaccgcttagggaaaatgtattca

SEQ ID NO: 4852020 - DNA, 25 bp, Homo sapien
tctgcaagactgacaaaggtacatt

SEQ ID NO: 4852021 - DNA, 25 bp, Homo sapien
tcactgtgcccaaaggtatgacaca

SEQ ID NO: 4852022 - DNA, 25 bp, Homo sapien
gggaatatcccacttgcaagtcaag

SEQ ID NO: 4852023 - DNA, 25 bp, Homo sapien
tatctcaagacatacaaccaagctg

SEQ ID NO: 4852024 - DNA, 25 bp, Homo sapien
taagaatgtacccaagatccccaaa

SEQ ID NO: 4852025 - DNA, 25 bp, Homo sapien
tcactgtttgacacttgtggcaggg

SEQ ID NO: 4852026 - DNA, 25 bp, Homo sapien
aaggttaagtgatggagtatgtgca

SEQ ID NO: 4852027 - DNA, 25 bp, Homo sapien
aagaggttaatagaatgaaagtcct

SEQ ID NO: 4852028 - DNA, 25 bp, Homo sapien
tcctacccacaatctcttctaaaag

SEQ ID NO: 4852029 - DNA, 25 bp, Homo sapien
atacaagcaacttgacaagactaag

SEQ ID NO: 4852030 - DNA, 25 bp, Homo sapien
tacttctattacttgattgtggcaa

SEQ ID NO: 4852031 - DNA, 25 bp, Homo sapien
gcccagctgatatccccacttaata

SEQ ID NO: 4852032 - DNA, 25 bp, Homo sapien
tcattttagctatagttgtacttct

SEQ ID NO: 4852033 - DNA, 25 bp, Homo sapien
gcaatagctactggatacaaatact

SEQ ID NO: 4852034 - DNA, 25 bp, Homo sapien
cccaggccacgtgatgacaacacaa

SEQ ID NO: 4852035 - DNA, 25 bp, Homo sapien
tcaggcagcaacacaacaagccgag

SEQ ID NO: 4852036 - DNA, 25 bp, Homo sapien
acaacacaacaagcgaccggacggg

SEQ ID NO: 4852037 - DNA, 25 bp, Homo sapien
tgcccctgacgtcagggcccgccca

SEQ ID NO: 4852038 - DNA, 25 bp, Homo sapien
tgtcggacagctggcaggactgcgg

SEQ ID NO: 4852039 - DNA, 25 bp, Homo sapien
acagctggcaggactgcggcagcag

SEQ ID NO: 4852040 - DNA, 25 bp, Homo sapien
cggcagcagcaggaccgtctccggc

SEQ ID NO: 4852041 - DNA, 25 bp, Homo sapien
ggcagcagcaggaccgtctccggca

SEQ ID NO: 4852042 - DNA, 25 bp, Homo sapien
gcggctcgactaggtgggacgacat

SEQ ID NO: 4852043 - DNA, 25 bp, Homo sapien
cggcggcggctcgactaggtgggac

SEQ ID NO: 4852044 - DNA, 25 bp, Homo sapien
ggcggcggcggctcgactaggtggg

SEQ ID NO: 4852045 - DNA, 25 bp, Homo sapien
gcggcggctcgactaggtgggacga

SEQ ID NO: 4852046 - DNA, 25 bp, Homo sapien
cagggggatccgcgctacccgcgcc

SEQ ID NO: 4852047 - DNA, 25 bp, Homo sapien
gggatccgcgctacccgcgccgctc

SEQ ID NO: 4852048 - DNA, 25 bp, Homo sapien
gggggatccgcgctacccgcgccgc

SEQ ID NO: 4852049 - DNA, 25 bp, Homo sapien
ggggatccgcgctacccgcgccgct

SEQ ID NO: 4852050 - DNA, 25 bp, Homo sapien
gaattaacccatcaaaacctggagc

SEQ ID NO: 4852051 - DNA, 25 bp, Homo sapien
agcagcatccatcttaaaatctcca

SEQ ID NO: 4852052 - DNA, 25 bp, Homo sapien
tggagcagcagcatccatcttaaaa

SEQ ID NO: 4852053 - DNA, 25 bp, Homo sapien
ttctggaatatatgacacttaaagg

SEQ ID NO: 4852054 - DNA, 25 bp, Homo sapien
ttttgatgtcccatgcaggctgagt

SEQ ID NO: 4852055 - DNA, 25 bp, Homo sapien
cctctgtaagagctgatgtcagcca

SEQ ID NO: 4852056 - DNA, 25 bp, Homo sapien
tactttctatctagcagatgtccca

SEQ ID NO: 4852057 - DNA, 25 bp, Homo sapien
gcaggaaccgactggccaaagacat

SEQ ID NO: 4852058 - DNA, 25 bp, Homo sapien
ctaaaaaaacgaacagagtgagagg

SEQ ID NO: 4852059 - DNA, 25 bp, Homo sapien
aaaaaacgaacagagtgagaggcaa

SEQ ID NO: 4852060 - DNA, 25 bp, Homo sapien
gaggcaagaagggagtaattaaata

SEQ ID NO: 4852061 - DNA, 25 bp, Homo sapien
aaaacgaacagagtgagaggcaaga

SEQ ID NO: 4852062 - DNA, 25 bp, Homo sapien
gtccttcgacttatcagcaatttgg

SEQ ID NO: 4852063 - DNA, 25 bp, Homo sapien
caatttggatagtactagatgcctg

SEQ ID NO: 4852064 - DNA, 25 bp, Homo sapien
tagatgcctgaataagttgttttgc

SEQ ID NO: 4852065 - DNA, 25 bp, Homo sapien
cattgcccaaaaatcacttcaagga

SEQ ID NO: 4852066 - DNA, 25 bp, Homo sapien
cagtctctccacagcggtaaagtta

SEQ ID NO: 4852067 - DNA, 25 bp, Homo sapien
cttcactattcaaatacttcagtaa

SEQ ID NO: 4852068 - DNA, 25 bp, Homo sapien
aaatcccaaacgcaagataatctgt

SEQ ID NO: 4852069 - DNA, 25 bp, Homo sapien
tgaaagtgaacagtctctccacagc

SEQ ID NO: 4852070 - DNA, 25 bp, Homo sapien
gctgccaaacgacacagttgtacaa

SEQ ID NO: 4852071 - DNA, 25 bp, Homo sapien
ccaccaattccttaggactctgctg

SEQ ID NO: 4852072 - DNA, 25 bp, Homo sapien
ggactctgctgccaaacgacacagt

SEQ ID NO: 4852073 - DNA, 25 bp, Homo sapien
cgacacagttgtacaacatctccat

SEQ ID NO: 4852074 - DNA, 25 bp, Homo sapien
caggcaaacacgaaaagttttcttg

SEQ ID NO: 4852075 - DNA, 25 bp, Homo sapien
ttcattaaaccctgttgatttggga

SEQ ID NO: 4852076 - DNA, 25 bp, Homo sapien
gatttgggagcagaaacaactgcac

SEQ ID NO: 4852077 - DNA, 25 bp, Homo sapien
ccctgttgatttgggagcagaaaca

SEQ ID NO: 4852078 - DNA, 25 bp, Homo sapien
ttaaaccctgttgatttgggagcag

SEQ ID NO: 4852079 - DNA, 25 bp, Homo sapien
gttcatgggtagctccacccaggaa

SEQ ID NO: 4852080 - DNA, 25 bp, Homo sapien
ttcatgggtagctccacccaggaac

SEQ ID NO: 4852081 - DNA, 25 bp, Homo sapien
tgttcatgggtagctccacccagga

SEQ ID NO: 4852082 - DNA, 25 bp, Homo sapien
tccagccccccatttttcccattgc

SEQ ID NO: 4852083 - DNA, 25 bp, Homo sapien
cccatttttcccattgccattatca

SEQ ID NO: 4852084 - DNA, 25 bp, Homo sapien
ttcccattgccattatcattgccat

SEQ ID NO: 4852085 - DNA, 25 bp, Homo sapien
tttttcccattgccattatcattgc

SEQ ID NO: 4852086 - DNA, 25 bp, Homo sapien
tgtcctgattcatgttgtgcatcca

SEQ ID NO: 4852087 - DNA, 25 bp, Homo sapien
ctgtcctgattcatgttgtgcatcc

SEQ ID NO: 4852088 - DNA, 25 bp, Homo sapien
tctggaactactctgtcctgattca

SEQ ID NO: 4852089 - DNA, 25 bp, Homo sapien
gcctctggaactactctgtcctgat

SEQ ID NO: 4852090 - DNA, 25 bp, Homo sapien
gcagaggagacttcaaaactatctt

SEQ ID NO: 4852091 - DNA, 25 bp, Homo sapien
gagtgtctactacgtgccagcacca

SEQ ID NO: 4852092 - DNA, 25 bp, Homo sapien
gctataacgtgaagcaacctgcagt

SEQ ID NO: 4852093 - DNA, 25 bp, Homo sapien
gccagcaccattactgtgaaggtaa

SEQ ID NO: 4852094 - DNA, 25 bp, Homo sapien
tgtaattagtttcttcagctcaaat

SEQ ID NO: 4852095 - DNA, 25 bp, Homo sapien
cataagcagtccttaatccatgtaa

SEQ ID NO: 4852096 - DNA, 25 bp, Homo sapien
aatgaggtctgaaacaaaacatccc

SEQ ID NO: 4852097 - DNA, 25 bp, Homo sapien
tttcttcagctcaaatatagaaaaa

SEQ ID NO: 4852098 - DNA, 25 bp, Homo sapien
tctcgttgtattcttactctttcac

SEQ ID NO: 4852099 - DNA, 25 bp, Homo sapien
taatgctaacagtgtagctgtcact

SEQ ID NO: 4852100 - DNA, 25 bp, Homo sapien
tgtcatttaatatctagcccttctg

SEQ ID NO: 4852101 - DNA, 25 bp, Homo sapien
tccacacacatatctcgttgtattc

SEQ ID NO: 4852102 - DNA, 25 bp, Homo sapien
caagctgttcagaagagagccatct

SEQ ID NO: 4852103 - DNA, 25 bp, Homo sapien
tgaacgcagagtgaaagccttgttg

SEQ ID NO: 4852104 - DNA, 25 bp, Homo sapien
gctgtagctactggaatcaagggca

SEQ ID NO: 4852105 - DNA, 25 bp, Homo sapien
tctggttccgcttatgacaagagcc

SEQ ID NO: 4852106 - DNA, 25 bp, Homo sapien
tgaactagcacaggagtcaacccga

SEQ ID NO: 4852107 - DNA, 25 bp, Homo sapien
gaatgcattagagcttcacccatgg

SEQ ID NO: 4852108 - DNA, 25 bp, Homo sapien
taggctatcccagaagactcgagtt

SEQ ID NO: 4852109 - DNA, 25 bp, Homo sapien
tgtgccgtcaaggtgaaaacccctg

SEQ ID NO: 4852110 - DNA, 25 bp, Homo sapien
gcatttccacatcaaacatgatctg

SEQ ID NO: 4852111 - DNA, 25 bp, Homo sapien
ctgagagctatggtccctgctggtg

SEQ ID NO: 4852112 - DNA, 25 bp, Homo sapien
tatggtccctgctggtgtgcatttc

SEQ ID NO: 4852113 - DNA, 25 bp, Homo sapien
tccacatcaaacatgatctgcccat

SEQ ID NO: 4852114 - DNA, 25 bp, Homo sapien
tccaattcgtttagagtgacagggc

SEQ ID NO: 4852115 - DNA, 25 bp, Homo sapien
tcctccctattctgtggtcttaaag

SEQ ID NO: 4852116 - DNA, 25 bp, Homo sapien
ccttagttgtaaaggagtgcgacaa

SEQ ID NO: 4852117 - DNA, 25 bp, Homo sapien
tatacactcaagaaactagcctgga

SEQ ID NO: 4852118 - DNA, 25 bp, Homo sapien
cgcgcacccactggcctgcgcccac

SEQ ID NO: 4852119 - DNA, 25 bp, Homo sapien
tttttaagccggtctgaaaagcaca

SEQ ID NO: 4852120 - DNA, 25 bp, Homo sapien
cggtctgaaaagcacaatattcggg

SEQ ID NO: 4852121 - DNA, 25 bp, Homo sapien
cccgtagctcactctaatttgatcg

SEQ ID NO: 4852122 - DNA, 25 bp, Homo sapien
gcatgattttgcagcagctggtacc

SEQ ID NO: 4852123 - DNA, 25 bp, Homo sapien
ttttggcatgattttgcagcagctg

SEQ ID NO: 4852124 - DNA, 25 bp, Homo sapien
atgattttgcagcagctggtaccgg

SEQ ID NO: 4852125 - DNA, 25 bp, Homo sapien
cattttggcatgattttgcagcagc

SEQ ID NO: 4852126 - DNA, 25 bp, Homo sapien
ttagccacagttatatacttaccat

SEQ ID NO: 4852127 - DNA, 25 bp, Homo sapien
caacattgtcaactcctagtaaaca

SEQ ID NO: 4852128 - DNA, 25 bp, Homo sapien
gagtattctaaatcattagccacag

SEQ ID NO: 4852129 - DNA, 25 bp, Homo sapien
ttcatgtctagttctaatacaacct

SEQ ID NO: 4852130 - DNA, 25 bp, Homo sapien
tgacctttgaacaaatgttcttgaa

SEQ ID NO: 4852131 - DNA, 25 bp, Homo sapien
aactggtcagaattactcatgcgac

SEQ ID NO: 4852132 - DNA, 25 bp, Homo sapien
gaaaatgctaatctaaacttaaagc

SEQ ID NO: 4852133 - DNA, 25 bp, Homo sapien
ggctggactcaaaaacttgtggggc

SEQ ID NO: 4852134 - DNA, 25 bp, Homo sapien
acagtgctccacggagttattaagt

SEQ ID NO: 4852135 - DNA, 25 bp, Homo sapien
cagtgctccacggagttattaagtt

SEQ ID NO: 4852136 - DNA, 25 bp, Homo sapien
ggtcactctgtcctctaaatatgga

SEQ ID NO: 4852137 - DNA, 25 bp, Homo sapien
agaaccacctggaaacagaggttgc

SEQ ID NO: 4852138 - DNA, 25 bp, Homo sapien
taagaataagagtggtaagctttcc

SEQ ID NO: 4852139 - DNA, 25 bp, Homo sapien
gaagattctgatcgttctagcctgt

SEQ ID NO: 4852140 - DNA, 25 bp, Homo sapien
tctgggcaatacttacatggaggtc

SEQ ID NO: 4852141 - DNA, 25 bp, Homo sapien
gttgggatatctaagcacagcacag

SEQ ID NO: 4852142 - DNA, 25 bp, Homo sapien
cataagactgtactttgggatgtaa

SEQ ID NO: 4852143 - DNA, 25 bp, Homo sapien
cctcgataagagttaaatctgggca

SEQ ID NO: 4852144 - DNA, 25 bp, Homo sapien
ggaccagtctgatacccagtccgca

SEQ ID NO: 4852145 - DNA, 25 bp, Homo sapien
acccagtccgcacttttcttcaaag

SEQ ID NO: 4852146 - DNA, 25 bp, Homo sapien
tcgggtctactggaccagtctgata

SEQ ID NO: 4852147 - DNA, 25 bp, Homo sapien
gtggaatgttttcgggtctactgga

SEQ ID NO: 4852148 - DNA, 25 bp, Homo sapien
tttagggtgtctgaagtggaactcc

SEQ ID NO: 4852149 - DNA, 25 bp, Homo sapien
gagagatggaatgaacaccttcaga

SEQ ID NO: 4852150 - DNA, 25 bp, Homo sapien
ttcagaaattctgcggagaaaatac

SEQ ID NO: 4852151 - DNA, 25 bp, Homo sapien
tttcttcatggctccacttttcctc

SEQ ID NO: 4852152 - DNA, 25 bp, Homo sapien
aatttccgcctcccatgttcaagcg

SEQ ID NO: 4852153 - DNA, 25 bp, Homo sapien
accaccatggccagctaatttttgt

SEQ ID NO: 4852154 - DNA, 25 bp, Homo sapien
taccaccatggccagctaatttttg

SEQ ID NO: 4852155 - DNA, 25 bp, Homo sapien
aaaaaaactattcaatgtaatcatg

SEQ ID NO: 4852156 - DNA, 25 bp, Homo sapien
aaaaactattcaatgtaatcatgta

SEQ ID NO: 4852157 - DNA, 25 bp, Homo sapien
taaaaaaaactattcaatgtaatca

SEQ ID NO: 4852158 - DNA, 25 bp, Homo sapien
aaaactattcaatgtaatcatgtat

SEQ ID NO: 4852159 - DNA, 25 bp, Homo sapien
cacctccagtgcaattaaagcaacg

SEQ ID NO: 4852160 - DNA, 25 bp, Homo sapien
agtatgtaactagcttcacctccag

SEQ ID NO: 4852161 - DNA, 25 bp, Homo sapien
gagaacagatccctccacagagtaa

SEQ ID NO: 4852162 - DNA, 25 bp, Homo sapien
aagatgactgaaagagagacggcaa

SEQ ID NO: 4852163 - DNA, 25 bp, Homo sapien
tgctggcagagggtgtgctcagtcg

SEQ ID NO: 4852164 - DNA, 25 bp, Homo sapien
tgtgctcagtcgctttccaatatag

SEQ ID NO: 4852165 - DNA, 25 bp, Homo sapien
gagggtgtgctcagtcgctttccaa

SEQ ID NO: 4852166 - DNA, 25 bp, Homo sapien
gcagagggtgtgctcagtcgctttc

SEQ ID NO: 4852167 - DNA, 25 bp, Homo sapien
gggtcatgcttacaatggtctcaag

SEQ ID NO: 4852168 - DNA, 25 bp, Homo sapien
ttcacaggtcacacgcatttccagg

SEQ ID NO: 4852169 - DNA, 25 bp, Homo sapien
tggcatttgcggaaaagaagccctt

SEQ ID NO: 4852170 - DNA, 25 bp, Homo sapien
gatacaggtctagtctggtggcact

SEQ ID NO: 4852171 - DNA, 25 bp, Homo sapien
caggatatttttttgttgtgccttg

SEQ ID NO: 4852172 - DNA, 25 bp, Homo sapien
atattttttttattgcccaggatat

SEQ ID NO: 4852173 - DNA, 25 bp, Homo sapien
ggatatttttttgttgtgccttgcc

SEQ ID NO: 4852174 - DNA, 25 bp, Homo sapien
atatttttttgttgtgccttgcctt

SEQ ID NO: 4852175 - DNA, 25 bp, Homo sapien
gacgctattaggaggcttagacaaa

SEQ ID NO: 4852176 - DNA, 25 bp, Homo sapien
taagcctgagacgttccttatcaga

SEQ ID NO: 4852177 - DNA, 25 bp, Homo sapien
gattctacaccatagaaaagacagc

SEQ ID NO: 4852178 - DNA, 25 bp, Homo sapien
tcacatgcagctaattatcgtaaaa

SEQ ID NO: 4852179 - DNA, 25 bp, Homo sapien
gcacaagtgcttggaataactctga

SEQ ID NO: 4852180 - DNA, 25 bp, Homo sapien
aaacatgtggtatccttcagagtca

SEQ ID NO: 4852181 - DNA, 25 bp, Homo sapien
gaaaatgaccagtgcctgcagtcgc

SEQ ID NO: 4852182 - DNA, 25 bp, Homo sapien
tgcagtcgcaggaatcaccttggga

SEQ ID NO: 4852183 - DNA, 25 bp, Homo sapien
tatacccagtttcagtggcaccact

SEQ ID NO: 4852184 - DNA, 25 bp, Homo sapien
tcatcccatgtgttagggctacaga

SEQ ID NO: 4852185 - DNA, 25 bp, Homo sapien
gtagcagtaaaacgttcatcccatg

SEQ ID NO: 4852186 - DNA, 25 bp, Homo sapien
gaacttggaaagagcacaatgcact

SEQ ID NO: 4852187 - DNA, 25 bp, Homo sapien
ttttgtgagagctttaatggcacaa

SEQ ID NO: 4852188 - DNA, 25 bp, Homo sapien
accgttcacaccctgagcactgtta

SEQ ID NO: 4852189 - DNA, 25 bp, Homo sapien
gactgtccccacagaacaccgttca

SEQ ID NO: 4852190 - DNA, 25 bp, Homo sapien
tgagcactgttaggaactccactgc

SEQ ID NO: 4852191 - DNA, 25 bp, Homo sapien
ctgtgtgtaggcgaggaggcctcat

SEQ ID NO: 4852192 - DNA, 25 bp, Homo sapien
ggtgctccaagggtgcgctcctggg

SEQ ID NO: 4852193 - DNA, 25 bp, Homo sapien
ggggagaagcgctttggtgctggca

SEQ ID NO: 4852194 - DNA, 25 bp, Homo sapien
ggaggggggtgctccaagggtgcgc

SEQ ID NO: 4852195 - DNA, 25 bp, Homo sapien
ctcctggggagaagcgctttggtgc

SEQ ID NO: 4852196 - DNA, 25 bp, Homo sapien
aaagagtgctctttggtcttttaat

SEQ ID NO: 4852197 - DNA, 25 bp, Homo sapien
ggctgagcaaggcatgcagaccacc

SEQ ID NO: 4852198 - DNA, 25 bp, Homo sapien
tgagcaaggcatgcagaccacctga

SEQ ID NO: 4852199 - DNA, 25 bp, Homo sapien
agcaaggcatgcagaccacctgagg

SEQ ID NO: 4852200 - DNA, 25 bp, Homo sapien
cttggagccgaagggtatggaggga

SEQ ID NO: 4852201 - DNA, 25 bp, Homo sapien
gccatcagggccttggagccgaagg

SEQ ID NO: 4852202 - DNA, 25 bp, Homo sapien
tcccatgtgctatctccaagttaca

SEQ ID NO: 4852203 - DNA, 25 bp, Homo sapien
cctgtctctgcgatgggattttttg

SEQ ID NO: 4852204 - DNA, 25 bp, Homo sapien
tctgacccggttgtgaaattcaagt

SEQ ID NO: 4852205 - DNA, 25 bp, Homo sapien
aataatagttttcccatgtgctatc

SEQ ID NO: 4852206 - DNA, 25 bp, Homo sapien
aggtgtgccccaccatacctggctt

SEQ ID NO: 4852207 - DNA, 25 bp, Homo sapien
tcctggcctcaagcagtcctcctgc

SEQ ID NO: 4852208 - DNA, 25 bp, Homo sapien
tgtgccccaccatacctggcttttt

SEQ ID NO: 4852209 - DNA, 25 bp, Homo sapien
cagggtcttgccctttcactcaggc

SEQ ID NO: 4852210 - DNA, 25 bp, Homo sapien
gccttgatccatggttctacgttcc

SEQ ID NO: 4852211 - DNA, 25 bp, Homo sapien
gttcgccttgatccatggttctacg

SEQ ID NO: 4852212 - DNA, 25 bp, Homo sapien
gatccatggttctacgttcctgttg

SEQ ID NO: 4852213 - DNA, 25 bp, Homo sapien
tgcgttcgccttgatccatggttct

SEQ ID NO: 4852214 - DNA, 25 bp, Homo sapien
ggacaccgagagccctgattttcca

SEQ ID NO: 4852215 - DNA, 25 bp, Homo sapien
taggagcgcggaaggttgttgccat

SEQ ID NO: 4852216 - DNA, 25 bp, Homo sapien
ttcctaataggagcgcggaaggttg

SEQ ID NO: 4852217 - DNA, 25 bp, Homo sapien
gacaccgagagccctgattttccag

SEQ ID NO: 4852218 - DNA, 25 bp, Homo sapien
ccttgcaattaaagcggattgtcca

SEQ ID NO: 4852219 - DNA, 25 bp, Homo sapien
attaaagcggattgtccatgaggtg

SEQ ID NO: 4852220 - DNA, 25 bp, Homo sapien
gcaattaaagcggattgtccatgag

SEQ ID NO: 4852221 - DNA, 25 bp, Homo sapien
acccaaccttgcaattaaagcggat

SEQ ID NO: 4852222 - DNA, 25 bp, Homo sapien
ttggcttcacattccgtaacccaga

SEQ ID NO: 4852223 - DNA, 25 bp, Homo sapien
tttggcttcacattccgtaacccag

SEQ ID NO: 4852224 - DNA, 25 bp, Homo sapien
gattccatttgacgcttacctgtgc

SEQ ID NO: 4852225 - DNA, 25 bp, Homo sapien
ggaaagtgcccattagtgagaagcc

SEQ ID NO: 4852226 - DNA, 25 bp, Homo sapien
agaaaggttacctcgacgcgtcaca

SEQ ID NO: 4852227 - DNA, 25 bp, Homo sapien
tggacaagtcaacgctcagaaaggt

SEQ ID NO: 4852228 - DNA, 25 bp, Homo sapien
ttaagactcataaaccactgggctc

SEQ ID NO: 4852229 - DNA, 25 bp, Homo sapien
tagctatgattgattacaccattgc

SEQ ID NO: 4852230 - DNA, 25 bp, Homo sapien
tgagcgagagcctgaaataccttcc

SEQ ID NO: 4852231 - DNA, 25 bp, Homo sapien
ggttccagaagaggagttaagactc

SEQ ID NO: 4852232 - DNA, 25 bp, Homo sapien
cctcctctggggcatcaggcagcct

SEQ ID NO: 4852233 - DNA, 25 bp, Homo sapien
agcctcctctggggcatcaggcagc

SEQ ID NO: 4852234 - DNA, 25 bp, Homo sapien
cctctggggcatcaggcagcctcat

SEQ ID NO: 4852235 - DNA, 25 bp, Homo sapien
tcctctggggcatcaggcagcctca

SEQ ID NO: 4852236 - DNA, 25 bp, Homo sapien
caatggcttgatcatagggtagtac

SEQ ID NO: 4852237 - DNA, 25 bp, Homo sapien
gacatagtgctgtatgcatatacca

SEQ ID NO: 4852238 - DNA, 25 bp, Homo sapien
tggacatcgtgttcctaccaagagg

SEQ ID NO: 4852239 - DNA, 25 bp, Homo sapien
gtcatcagctggtaaggtcaatctt

SEQ ID NO: 4852240 - DNA, 25 bp, Homo sapien
ccttgacaatggtcacacgggaggg

SEQ ID NO: 4852241 - DNA, 25 bp, Homo sapien
caaacacttctgagccgacgtggtg

SEQ ID NO: 4852242 - DNA, 25 bp, Homo sapien
gcaggacggtagtgacccaaaagaa

SEQ ID NO: 4852243 - DNA, 25 bp, Homo sapien
aatcacttctcgctggttggaccgg

SEQ ID NO: 4852244 - DNA, 25 bp, Homo sapien
gctgcctagagccaatgcgtctggt

SEQ ID NO: 4852245 - DNA, 25 bp, Homo sapien
gacattaaacagagtccgtggtgac

SEQ ID NO: 4852246 - DNA, 25 bp, Homo sapien
caacaagtgccgtcctctgagatgg

SEQ ID NO: 4852247 - DNA, 25 bp, Homo sapien
tcctctgcggtcttggcaactgcac

SEQ ID NO: 4852248 - DNA, 25 bp, Homo sapien
tttagcaattcatctccattccaat

SEQ ID NO: 4852249 - DNA, 25 bp, Homo sapien
ttagcaattcatctccattccaatg

SEQ ID NO: 4852250 - DNA, 25 bp, Homo sapien
tagcaattcatctccattccaatga

SEQ ID NO: 4852251 - DNA, 25 bp, Homo sapien
ttaaatccatcaatgtgttcactta

SEQ ID NO: 4852252 - DNA, 25 bp, Homo sapien
gtttgcacatgaaaggcctgcttct

SEQ ID NO: 4852253 - DNA, 25 bp, Homo sapien
cttaaatccatcaatgtgttcactt

SEQ ID NO: 4852254 - DNA, 25 bp, Homo sapien
ttggtttgcacatgaaaggcctgct

SEQ ID NO: 4852255 - DNA, 25 bp, Homo sapien
tcatgccggatgcattctgcaaata

SEQ ID NO: 4852256 - DNA, 25 bp, Homo sapien
ttctggtgcactgccgagacctgtt

SEQ ID NO: 4852257 - DNA, 25 bp, Homo sapien
gaaatcttgaccttctgtatgtacc

SEQ ID NO: 4852258 - DNA, 25 bp, Homo sapien
agacctgttgactgatgggcttcac

SEQ ID NO: 4852259 - DNA, 25 bp, Homo sapien
cttccgtggacagggacacgatggc

SEQ ID NO: 4852260 - DNA, 25 bp, Homo sapien
acttctcatcggctgttcagtctgg

SEQ ID NO: 4852261 - DNA, 25 bp, Homo sapien
tgggccagagccactagagttgctg

SEQ ID NO: 4852262 - DNA, 25 bp, Homo sapien
ctgggccagagccactagagttgct

SEQ ID NO: 4852263 - DNA, 25 bp, Homo sapien
gcttgtagcacagtcagccctggct

SEQ ID NO: 4852264 - DNA, 25 bp, Homo sapien
cttgtgctgctcatccaaagggcag

SEQ ID NO: 4852265 - DNA, 25 bp, Homo sapien
catagagcctggaatccgcatcctc

SEQ ID NO: 4852266 - DNA, 25 bp, Homo sapien
cctcctgagatgttaccatggaaac

SEQ ID NO: 4852267 - DNA, 25 bp, Homo sapien
ttccttcataggaacctcgtggttg

SEQ ID NO: 4852268 - DNA, 25 bp, Homo sapien
ctcgtggttgcctattctcttacaa

SEQ ID NO: 4852269 - DNA, 25 bp, Homo sapien
tgctggctgggcgtgtcttttcaac

SEQ ID NO: 4852270 - DNA, 25 bp, Homo sapien
gctggctgggcgtgtcttttcaaca

SEQ ID NO: 4852271 - DNA, 25 bp, Homo sapien
cactgcgggtagtcccacagcagga

SEQ ID NO: 4852272 - DNA, 25 bp, Homo sapien
ctgggcgccactgcgggtagtccca

SEQ ID NO: 4852273 - DNA, 25 bp, Homo sapien
cgccactgcgggtagtcccacagca

SEQ ID NO: 4852274 - DNA, 25 bp, Homo sapien
actgcgggtagtcccacagcaggaa

SEQ ID NO: 4852275 - DNA, 25 bp, Homo sapien
tcctggtcctaacctgtgtgacaca

SEQ ID NO: 4852276 - DNA, 25 bp, Homo sapien
tatccaaatgctccttgaccttcca

SEQ ID NO: 4852277 - DNA, 25 bp, Homo sapien
tgtgtgacacaactcctttgctgta

SEQ ID NO: 4852278 - DNA, 25 bp, Homo sapien
tcctttgctgtatccaaatgctcct

SEQ ID NO: 4852279 - DNA, 25 bp, Homo sapien
gtgggccaggaattccttgagtttg

SEQ ID NO: 4852280 - DNA, 25 bp, Homo sapien
gtggagagaaagatggtgcccataa

SEQ ID NO: 4852281 - DNA, 25 bp, Homo sapien
gaattccttgagtttgctcagagaa

SEQ ID NO: 4852282 - DNA, 25 bp, Homo sapien
cataagtaggcttctcggaagctag

SEQ ID NO: 4852283 - DNA, 25 bp, Homo sapien
atcagagtccttactgaataccttg

SEQ ID NO: 4852284 - DNA, 25 bp, Homo sapien
aataccttgtcaccatcttcctgca

SEQ ID NO: 4852285 - DNA, 25 bp, Homo sapien
tactgaataccttgtcaccatcttc

SEQ ID NO: 4852286 - DNA, 25 bp, Homo sapien
aaccagcctgaacatcagagtcctt

SEQ ID NO: 4852287 - DNA, 25 bp, Homo sapien
ctgaaaaattttgagagataagttg

SEQ ID NO: 4852288 - DNA, 25 bp, Homo sapien
gagataagttgagaaaatcaagcta

SEQ ID NO: 4852289 - DNA, 25 bp, Homo sapien
tttgagagataagttgagaaaatca

SEQ ID NO: 4852290 - DNA, 25 bp, Homo sapien
tgaaaaattttgagagataagttga

SEQ ID NO: 4852291 - DNA, 25 bp, Homo sapien
taatactgttccaccaaagtgatgc

SEQ ID NO: 4852292 - DNA, 25 bp, Homo sapien
gcagtggttaccatgacaccctaat

SEQ ID NO: 4852293 - DNA, 25 bp, Homo sapien
gctaatatgcttccagttgacttcc

SEQ ID NO: 4852294 - DNA, 25 bp, Homo sapien
gattttcacgatgttcctgtctgct

SEQ ID NO: 4852295 - DNA, 25 bp, Homo sapien
ataagaagatgagagtacacggttg

SEQ ID NO: 4852296 - DNA, 25 bp, Homo sapien
taaaagcggtagcaccacatggttg

SEQ ID NO: 4852297 - DNA, 25 bp, Homo sapien
cacgtaagtgtgtgagtgcagtgca

SEQ ID NO: 4852298 - DNA, 25 bp, Homo sapien
taggcaaatctccaacacagttgat

SEQ ID NO: 4852299 - DNA, 25 bp, Homo sapien
gatcagacctgtgtatcacgtaagt

SEQ ID NO: 4852300 - DNA, 25 bp, Homo sapien
tgaaatcaaaccatgaaagccaatt

SEQ ID NO: 4852301 - DNA, 25 bp, Homo sapien
gaaatcaaaccatgaaagccaatta

SEQ ID NO: 4852302 - DNA, 25 bp, Homo sapien
ttggatctgggagggcgtccgctgc

SEQ ID NO: 4852303 - DNA, 25 bp, Homo sapien
ggaagcggcaaagttggatctggga

SEQ ID NO: 4852304 - DNA, 25 bp, Homo sapien
gcccaccgcaaggtgcacagaaagg

SEQ ID NO: 4852305 - DNA, 25 bp, Homo sapien
cgttcgccgcccaccgcaaggtgca

SEQ ID NO: 4852306 - DNA, 25 bp, Homo sapien
ccgtccgtctgccagtccctaagtc

SEQ ID NO: 4852307 - DNA, 25 bp, Homo sapien
tctgccagtccctaagtctccctcg

SEQ ID NO: 4852308 - DNA, 25 bp, Homo sapien
gtccctaagtctccctcgctgtgtg

SEQ ID NO: 4852309 - DNA, 25 bp, Homo sapien
gccagtccctaagtctccctcgctg

SEQ ID NO: 4852310 - DNA, 25 bp, Homo sapien
ccaccgacagcgagtcgaagtcgat

SEQ ID NO: 4852311 - DNA, 25 bp, Homo sapien
gcagggcttctttgcccgaggccct

SEQ ID NO: 4852312 - DNA, 25 bp, Homo sapien
ccttccggcccgattcaacagatgg

SEQ ID NO: 4852313 - DNA, 25 bp, Homo sapien
ttccaccgggcagaacatgccacag

SEQ ID NO: 4852314 - DNA, 25 bp, Homo sapien
cgacagtctatttcgagtgcgaggg

SEQ ID NO: 4852315 - DNA, 25 bp, Homo sapien
gaagccccggctgagacacttattg

SEQ ID NO: 4852316 - DNA, 25 bp, Homo sapien
aaatcaagcgtgaccaaattggcct

SEQ ID NO: 4852317 - DNA, 25 bp, Homo sapien
cacataggctatttaggagcgtctc

SEQ ID NO: 4852318 - DNA, 25 bp, Homo sapien
ggtcatgatacccactttgcaaagg

SEQ ID NO: 4852319 - DNA, 25 bp, Homo sapien
tcagtagcaagacctccctgtcaag

SEQ ID NO: 4852320 - DNA, 25 bp, Homo sapien
gtgatttgctaaagccaccatctgg

SEQ ID NO: 4852321 - DNA, 25 bp, Homo sapien
ggaacggtttcctcacagaagtaca

SEQ ID NO: 4852322 - DNA, 25 bp, Homo sapien
ttacagattcctcttcattcaaaca

SEQ ID NO: 4852323 - DNA, 25 bp, Homo sapien
attcctcttcattcaaacacaattt

SEQ ID NO: 4852324 - DNA, 25 bp, Homo sapien
cagattcctcttcattcaaacacaa

SEQ ID NO: 4852325 - DNA, 25 bp, Homo sapien
caaacacaatttattccctttcata

SEQ ID NO: 4852326 - DNA, 25 bp, Homo sapien
tcccatcaatacagctgcaattcag

SEQ ID NO: 4852327 - DNA, 25 bp, Homo sapien
gctgcaattcagaatcttgcccttc

SEQ ID NO: 4852328 - DNA, 25 bp, Homo sapien
cctctggtggccgagtcaagatgta

SEQ ID NO: 4852329 - DNA, 25 bp, Homo sapien
ccgagtcaagatgtagctcatttgc

SEQ ID NO: 4852330 - DNA, 25 bp, Homo sapien
tcaatccaataaaactggatgttgt

SEQ ID NO: 4852331 - DNA, 25 bp, Homo sapien
tgtatgctctcaatccaataaaact

SEQ ID NO: 4852332 - DNA, 25 bp, Homo sapien
aaactggatgttgtgtctaaacaca

SEQ ID NO: 4852333 - DNA, 25 bp, Homo sapien
ccaataaaactggatgttgtgtcta

SEQ ID NO: 4852334 - DNA, 25 bp, Homo sapien
tcctgtcagcaatccaaaatctcta

SEQ ID NO: 4852335 - DNA, 25 bp, Homo sapien
ctgggtctggttatgatgcttgttc

SEQ ID NO: 4852336 - DNA, 25 bp, Homo sapien
tccattagaggccttaacacgttaa

SEQ ID NO: 4852337 - DNA, 25 bp, Homo sapien
tggatacaatgtactgagtaaaagg

SEQ ID NO: 4852338 - DNA, 25 bp, Homo sapien
gcttgcaggccttcccgctcagatg

SEQ ID NO: 4852339 - DNA, 25 bp, Homo sapien
aggccttcccgctcagatgcactcc

SEQ ID NO: 4852340 - DNA, 25 bp, Homo sapien
tccgcctgcttgcaggccttcccgc

SEQ ID NO: 4852341 - DNA, 25 bp, Homo sapien
ctgcttgcaggccttcccgctcaga

SEQ ID NO: 4852342 - DNA, 25 bp, Homo sapien
gtttccaactcatcatccttggata

SEQ ID NO: 4852343 - DNA, 25 bp, Homo sapien
caactcatcatccttggatagaggg

SEQ ID NO: 4852344 - DNA, 25 bp, Homo sapien
tctcctcctgcttatctgtttccaa

SEQ ID NO: 4852345 - DNA, 25 bp, Homo sapien
tcatgccagggagacttctttctcc

SEQ ID NO: 4852346 - DNA, 25 bp, Homo sapien
tggacgtggttgtctggaaccactt

SEQ ID NO: 4852347 - DNA, 25 bp, Homo sapien
accttctcccggagtgatatcccaa

SEQ ID NO: 4852348 - DNA, 25 bp, Homo sapien
tcccggagtgatatcccaaaataat

SEQ ID NO: 4852349 - DNA, 25 bp, Homo sapien
ttggacgtggttgtctggaaccact

SEQ ID NO: 4852350 - DNA, 25 bp, Homo sapien
gccttggccacagcatctccatgtt

SEQ ID NO: 4852351 - DNA, 25 bp, Homo sapien
gaatttccttggaggccttggccac

SEQ ID NO: 4852352 - DNA, 25 bp, Homo sapien
aggccttggccacagcatctccatg

SEQ ID NO: 4852353 - DNA, 25 bp, Homo sapien
atgaatttccttggaggccttggcc

SEQ ID NO: 4852354 - DNA, 25 bp, Homo sapien
aagctcagcatagaaagccctcagt

SEQ ID NO: 4852355 - DNA, 25 bp, Homo sapien
taaagctcagcatagaaagccctca

SEQ ID NO: 4852356 - DNA, 25 bp, Homo sapien
atgataaagctcagcatagaaagcc

SEQ ID NO: 4852357 - DNA, 25 bp, Homo sapien
tcagcatagaaagccctcagttcaa

SEQ ID NO: 4852358 - DNA, 25 bp, Homo sapien
gtatatagacggcttctcttcaccc

SEQ ID NO: 4852359 - DNA, 25 bp, Homo sapien
cagtatatagacggcttctcttcac

SEQ ID NO: 4852360 - DNA, 25 bp, Homo sapien
agtatatagacggcttctcttcacc

SEQ ID NO: 4852361 - DNA, 25 bp, Homo sapien
tcagtatatagacggcttctcttca

SEQ ID NO: 4852362 - DNA, 25 bp, Homo sapien
ggaaaacagctctctgtctactgtg

SEQ ID NO: 4852363 - DNA, 25 bp, Homo sapien
gctctctgtctactgtgagagaggg

SEQ ID NO: 4852364 - DNA, 25 bp, Homo sapien
ttaatccacacaaagtataagtcat

SEQ ID NO: 4852365 - DNA, 25 bp, Homo sapien
aaggccttgattattgtcttttaat

SEQ ID NO: 4852366 - DNA, 25 bp, Homo sapien
tccactgtcttgaggaaccagacag

SEQ ID NO: 4852367 - DNA, 25 bp, Homo sapien
ccactgtcttgaggaaccagacaga

SEQ ID NO: 4852368 - DNA, 25 bp, Homo sapien
tgtcatcaacccaacgactggtctc

SEQ ID NO: 4852369 - DNA, 25 bp, Homo sapien
cacagtgtcatcaacccaacgactg

SEQ ID NO: 4852370 - DNA, 25 bp, Homo sapien
ggagatgtttacaagttccccatac

SEQ ID NO: 4852371 - DNA, 25 bp, Homo sapien
tacacagtccccctcttgtagtaca

SEQ ID NO: 4852372 - DNA, 25 bp, Homo sapien
accaagggggatcaggagatgttta

SEQ ID NO: 4852373 - DNA, 25 bp, Homo sapien
acagtccccctcttgtagtacaacg

SEQ ID NO: 4852374 - DNA, 25 bp, Homo sapien
gccatggttcttggccatttgtcca

SEQ ID NO: 4852375 - DNA, 25 bp, Homo sapien
catttcggttccctagaggacactt

SEQ ID NO: 4852376 - DNA, 25 bp, Homo sapien
gccatgatcaatgtactgaaaactg

SEQ ID NO: 4852377 - DNA, 25 bp, Homo sapien
tcactcatccaaaaacacgccatgg

SEQ ID NO: 4852378 - DNA, 25 bp, Homo sapien
cagccagaaaataccgcagatctcc

SEQ ID NO: 4852379 - DNA, 25 bp, Homo sapien
cacagccagaaaataccgcagatct

SEQ ID NO: 4852380 - DNA, 25 bp, Homo sapien
cagaaaataccgcagatctccctca

SEQ ID NO: 4852381 - DNA, 25 bp, Homo sapien
ataccgcagatctccctcaactggg

SEQ ID NO: 4852382 - DNA, 25 bp, Homo sapien
tgtccttgggaagcatcaagcctca

SEQ ID NO: 4852383 - DNA, 25 bp, Homo sapien
agctgtgcctggaggtccaatcatg

SEQ ID NO: 4852384 - DNA, 25 bp, Homo sapien
tccaatcatgataactgcagccggg

SEQ ID NO: 4852385 - DNA, 25 bp, Homo sapien
tgcagccgggttcctcttttcaatc

SEQ ID NO: 4852386 - DNA, 25 bp, Homo sapien
aacatgacagacgaacataaaggtt

SEQ ID NO: 4852387 - DNA, 25 bp, Homo sapien
taggaaacatgacagacgaacataa

SEQ ID NO: 4852388 - DNA, 25 bp, Homo sapien
catgacagacgaacataaaggttta

SEQ ID NO: 4852389 - DNA, 25 bp, Homo sapien
tgacagacgaacataaaggtttaaa

SEQ ID NO: 4852390 - DNA, 25 bp, Homo sapien
ccagtgtaactcagtttcactcagt

SEQ ID NO: 4852391 - DNA, 25 bp, Homo sapien
cccagtgtaactcagtttcactcag

SEQ ID NO: 4852392 - DNA, 25 bp, Homo sapien
tgatcggctgtctttctttactcct

SEQ ID NO: 4852393 - DNA, 25 bp, Homo sapien
cacattccttagatgtttccccttc

SEQ ID NO: 4852394 - DNA, 25 bp, Homo sapien
ccttctcccgaaatcaattctccat

SEQ ID NO: 4852395 - DNA, 25 bp, Homo sapien
cttgtgcaagaggtaggcacaggtg

SEQ ID NO: 4852396 - DNA, 25 bp, Homo sapien
catccaagttcaatttagctgtgca

SEQ ID NO: 4852397 - DNA, 25 bp, Homo sapien
cagaaagtagccgtagggcacgcac

SEQ ID NO: 4852398 - DNA, 25 bp, Homo sapien
ttcaccgatggttaattcatccaag

SEQ ID NO: 4852399 - DNA, 25 bp, Homo sapien
cgcacaaagtttcaccgatggttaa

SEQ ID NO: 4852400 - DNA, 25 bp, Homo sapien
cgtggggcggagaggaggagatgag

SEQ ID NO: 4852401 - DNA, 25 bp, Homo sapien
gtttacagtgccagtggatgggacc

SEQ ID NO: 4852402 - DNA, 25 bp, Homo sapien
acagtgccagtggatgggacccaca

SEQ ID NO: 4852403 - DNA, 25 bp, Homo sapien
ctgagggtttacagtgccagtggat

SEQ ID NO: 4852404 - DNA, 25 bp, Homo sapien
ccagtggatgggacccacaccgcac

SEQ ID NO: 4852405 - DNA, 25 bp, Homo sapien
gggcgcagcgcatttcgctggtgcc

SEQ ID NO: 4852406 - DNA, 25 bp, Homo sapien
gggggcgcagcgcatttcgctggtg

SEQ ID NO: 4852407 - DNA, 25 bp, Homo sapien
cgcagcgcatttcgctggtgcctgc

SEQ ID NO: 4852408 - DNA, 25 bp, Homo sapien
cgctggtgcctgcagcgctgtcggg

SEQ ID NO: 4852409 - DNA, 25 bp, Homo sapien
tcaagagggcagctttaaggcaaaa

SEQ ID NO: 4852410 - DNA, 25 bp, Homo sapien
gcttcgctggtcttgctattaggaa

SEQ ID NO: 4852411 - DNA, 25 bp, Homo sapien
taaaagcctcggttcaagtcggcca

SEQ ID NO: 4852412 - DNA, 25 bp, Homo sapien
tgaaaagggtgcaaccgcttcgctg

SEQ ID NO: 4852413 - DNA, 25 bp, Homo sapien
tatttttcttcccctgataagacat

SEQ ID NO: 4852414 - DNA, 25 bp, Homo sapien
ctgacaataaaagatagaccgggtc

SEQ ID NO: 4852415 - DNA, 25 bp, Homo sapien
gatagaccgggtctggcgcgttacc

SEQ ID NO: 4852416 - DNA, 25 bp, Homo sapien
tctggcgcgttacctaaggctacct

SEQ ID NO: 4852417 - DNA, 25 bp, Homo sapien
ctaaggctaccttcgtgcactcgcg

SEQ ID NO: 4852418 - DNA, 25 bp, Homo sapien
cagagaacaatatccgagctccagg

SEQ ID NO: 4852419 - DNA, 25 bp, Homo sapien
gaacaatatccgagctccaggcatg

SEQ ID NO: 4852420 - DNA, 25 bp, Homo sapien
tccaggcatgcatattcaatctggc

SEQ ID NO: 4852421 - DNA, 25 bp, Homo sapien
tgcatattcaatctggcatccattt

SEQ ID NO: 4852422 - DNA, 25 bp, Homo sapien
gcagtccgctttgtatgcaccaaca

SEQ ID NO: 4852423 - DNA, 25 bp, Homo sapien
tttgtatgcaccaacacggacgcct

SEQ ID NO: 4852424 - DNA, 25 bp, Homo sapien
ccgcgtcgcgcagcgccattagcgc

SEQ ID NO: 4852425 - DNA, 25 bp, Homo sapien
gcccaccctgcagtccgctttgtat

SEQ ID NO: 4852426 - DNA, 25 bp, Homo sapien
atcaccgcgaatatcccgagccaac

SEQ ID NO: 4852427 - DNA, 25 bp, Homo sapien
agccatcaccgcgaatatcccgagc

SEQ ID NO: 4852428 - DNA, 25 bp, Homo sapien
cccagccatcaccgcgaatatcccg

SEQ ID NO: 4852429 - DNA, 25 bp, Homo sapien
caccgcgaatatcccgagccaacat

SEQ ID NO: 4852430 - DNA, 25 bp, Homo sapien
tcctgcctccacagtcactgtggta

SEQ ID NO: 4852431 - DNA, 25 bp, Homo sapien
cctgcctccacagtcactgtggtac

SEQ ID NO: 4852432 - DNA, 25 bp, Homo sapien
ctcctgcctccacagtcactgtggt

SEQ ID NO: 4852433 - DNA, 25 bp, Homo sapien
ggcagtaaggtcacaacgcgtaact

SEQ ID NO: 4852434 - DNA, 25 bp, Homo sapien
gcagtaaggtcacaacgcgtaactg

SEQ ID NO: 4852435 - DNA, 25 bp, Homo sapien
gaggcagtaaggtcacaacgcgtaa

SEQ ID NO: 4852436 - DNA, 25 bp, Homo sapien
agtaaggtcacaacgcgtaactgac

SEQ ID NO: 4852437 - DNA, 25 bp, Homo sapien
aacaattttacctcctttgatcaga

SEQ ID NO: 4852438 - DNA, 25 bp, Homo sapien
gatcaacccatcttccatgtatatg

SEQ ID NO: 4852439 - DNA, 25 bp, Homo sapien
ctcctttgatcagaagacgatcgct

SEQ ID NO: 4852440 - DNA, 25 bp, Homo sapien
tgtctgcatagaacgactggtcatc

SEQ ID NO: 4852441 - DNA, 25 bp, Homo sapien
gccagggccgccttggttccttgga

SEQ ID NO: 4852442 - DNA, 25 bp, Homo sapien
caggcatctggaaacgagtgtggac

SEQ ID NO: 4852443 - DNA, 25 bp, Homo sapien
gagtgtggacgtcaattcctccggg

SEQ ID NO: 4852444 - DNA, 25 bp, Homo sapien
gcagacgtcattccctgatcaggca

SEQ ID NO: 4852445 - DNA, 25 bp, Homo sapien
actacaatgatgatttttaagcttc

SEQ ID NO: 4852446 - DNA, 25 bp, Homo sapien
ctacaatgatgatttttaagcttct

SEQ ID NO: 4852447 - DNA, 25 bp, Homo sapien
ctaagcactacaatgatgattttta

SEQ ID NO: 4852448 - DNA, 25 bp, Homo sapien
caatgatgatttttaagcttcttac

SEQ ID NO: 4852449 - DNA, 25 bp, Homo sapien
ccctaggtgtgcatgaaatctcccc

SEQ ID NO: 4852450 - DNA, 25 bp, Homo sapien
gctctccctaggtgtgcatgaaatc

SEQ ID NO: 4852451 - DNA, 25 bp, Homo sapien
gctctgctctccctaggtgtgcatg

SEQ ID NO: 4852452 - DNA, 25 bp, Homo sapien
gattccccagcaaatgacaaggtgc

SEQ ID NO: 4852453 - DNA, 25 bp, Homo sapien
gaggcagatgatcaccctgacttgg

SEQ ID NO: 4852454 - DNA, 25 bp, Homo sapien
cctgtgaactccaaactgaggcaga

SEQ ID NO: 4852455 - DNA, 25 bp, Homo sapien
ttgactgtctgtgaccaatccaggg

SEQ ID NO: 4852456 - DNA, 25 bp, Homo sapien
cggctgacacccgaatagtctaagc

SEQ ID NO: 4852457 - DNA, 25 bp, Homo sapien
tctacagaggtcagtaaacataggt

SEQ ID NO: 4852458 - DNA, 25 bp, Homo sapien
gaggttcgctcattggatgccccac

SEQ ID NO: 4852459 - DNA, 25 bp, Homo sapien
ttctcaggctataaaagcaatggca

SEQ ID NO: 4852460 - DNA, 25 bp, Homo sapien
gggtcacaatgctaaccatacactg

SEQ ID NO: 4852461 - DNA, 25 bp, Homo sapien
caggagggtggagtgcccaggggcg

SEQ ID NO: 4852462 - DNA, 25 bp, Homo sapien
ctggagaaggccagaaagccaggag

SEQ ID NO: 4852463 - DNA, 25 bp, Homo sapien
agaaggccagaaagccaggagggtg

SEQ ID NO: 4852464 - DNA, 25 bp, Homo sapien
gagaaggccagaaagccaggagggt

SEQ ID NO: 4852465 - DNA, 25 bp, Homo sapien
ccgtgagggcaggtgacatggtgac

SEQ ID NO: 4852466 - DNA, 25 bp, Homo sapien
tgagggcaggtgacatggtgacatg

SEQ ID NO: 4852467 - DNA, 25 bp, Homo sapien
agggcaggtgacatggtgacatggt

SEQ ID NO: 4852468 - DNA, 25 bp, Homo sapien
cgtgagggcaggtgacatggtgaca

SEQ ID NO: 4852469 - DNA, 25 bp, Homo sapien
tggatgccgcctgcagggtatgtct

SEQ ID NO: 4852470 - DNA, 25 bp, Homo sapien
tgtgattctcaatagcaggctctgt

SEQ ID NO: 4852471 - DNA, 25 bp, Homo sapien
tacatgcggcgccatttcagacaga

SEQ ID NO: 4852472 - DNA, 25 bp, Homo sapien
tgacctgggaaacgcagagccagca

SEQ ID NO: 4852473 - DNA, 25 bp, Homo sapien
tcgtaagacataagaattgattgtc

SEQ ID NO: 4852474 - DNA, 25 bp, Homo sapien
aagaattgattgtctccactttaca

SEQ ID NO: 4852475 - DNA, 25 bp, Homo sapien
catagtcgtaagacataagaattga

SEQ ID NO: 4852476 - DNA, 25 bp, Homo sapien
gacataagaattgattgtctccact

SEQ ID NO: 4852477 - DNA, 25 bp, Homo sapien
gcataagaagtcttcttacaggatt

SEQ ID NO: 4852478 - DNA, 25 bp, Homo sapien
taagccctataagctacattatacc

SEQ ID NO: 4852479 - DNA, 25 bp, Homo sapien
tttcttgcataagaagtcttcttac

SEQ ID NO: 4852480 - DNA, 25 bp, Homo sapien
cttacaggattataagccctataag

SEQ ID NO: 4852481 - DNA, 25 bp, Homo sapien
ggaagaatttgtcaccaatacttcc

SEQ ID NO: 4852482 - DNA, 25 bp, Homo sapien
gggaagaatttgtcaccaatacttc

SEQ ID NO: 4852483 - DNA, 25 bp, Homo sapien
gaagaatttgtcaccaatacttcca

SEQ ID NO: 4852484 - DNA, 25 bp, Homo sapien
tggggaagaatttgtcaccaatact

SEQ ID NO: 4852485 - DNA, 25 bp, Homo sapien
tgagttatacactttcagagagtga

SEQ ID NO: 4852486 - DNA, 25 bp, Homo sapien
tgagggtatacaaatcatatctaaa

SEQ ID NO: 4852487 - DNA, 25 bp, Homo sapien
cgctatagaaatgtagtggttgcca

SEQ ID NO: 4852488 - DNA, 25 bp, Homo sapien
agcagctgataattggtagggtttc

SEQ ID NO: 4852489 - DNA, 25 bp, Homo sapien
cagctgtgagcaatggttcctgcaa

SEQ ID NO: 4852490 - DNA, 25 bp, Homo sapien
gctctcatgggtaaagtaggcgaca

SEQ ID NO: 4852491 - DNA, 25 bp, Homo sapien
tactagttgggtaagtccctcagcc

SEQ ID NO: 4852492 - DNA, 25 bp, Homo sapien
cagagtgagggtatagcatccaagg

SEQ ID NO: 4852493 - DNA, 25 bp, Homo sapien
tccaccagtgggagaaacacgaact

SEQ ID NO: 4852494 - DNA, 25 bp, Homo sapien
tctgcatctgaaaaaaggccacgtt

SEQ ID NO: 4852495 - DNA, 25 bp, Homo sapien
ccttgttaggctaggcatccccgaa

SEQ ID NO: 4852496 - DNA, 25 bp, Homo sapien
taaagcaggatgacgaaatcgtggc

SEQ ID NO: 4852497 - DNA, 25 bp, Homo sapien
tcaatggatataaggagcaggaccc

SEQ ID NO: 4852498 - DNA, 25 bp, Homo sapien
tataaatcaagtggcaccatcggtc

SEQ ID NO: 4852499 - DNA, 25 bp, Homo sapien
gacagaatgtgggagctcaaacccc

SEQ ID NO: 4852500 - DNA, 25 bp, Homo sapien
tcctgaagcctagagtgggcacctg

SEQ ID NO: 4852501 - DNA, 25 bp, Homo sapien
ctcaaggttacacccgtggagcagg

SEQ ID NO: 4852502 - DNA, 25 bp, Homo sapien
gagaggatgtgtaaccctccaccct

SEQ ID NO: 4852503 - DNA, 25 bp, Homo sapien
ttatacccatggagcatgagggagg

SEQ ID NO: 4852504 - DNA, 25 bp, Homo sapien
aaaactcctgttgtcagtgcacaca

SEQ ID NO: 4852505 - DNA, 25 bp, Homo sapien
ggctggcagtatttctgacaaggtc

SEQ ID NO: 4852506 - DNA, 25 bp, Homo sapien
taaaaccagggatgtcagaaacagc

SEQ ID NO: 4852507 - DNA, 25 bp, Homo sapien
agcaggtaccacagtctgtaagtca

SEQ ID NO: 4852508 - DNA, 25 bp, Homo sapien
ctggaattgaagcagttgagcaggt

SEQ ID NO: 4852509 - DNA, 25 bp, Homo sapien
tatgtgtagagacaataggtctcgc

SEQ ID NO: 4852510 - DNA, 25 bp, Homo sapien
gagcgacactgatagagaacccaat

SEQ ID NO: 4852511 - DNA, 25 bp, Homo sapien
tgttgagaaggcgtctcgctctggc

SEQ ID NO: 4852512 - DNA, 25 bp, Homo sapien
ttaaaactcactatagactcacatg

SEQ ID NO: 4852513 - DNA, 25 bp, Homo sapien
gacagacaaggacaacttcaggctg

SEQ ID NO: 4852514 - DNA, 25 bp, Homo sapien
tgacagacaaggacaacttcaggct

SEQ ID NO: 4852515 - DNA, 25 bp, Homo sapien
gtgacagacaaggacaacttcaggc

SEQ ID NO: 4852516 - DNA, 25 bp, Homo sapien
gagagtagtcacagcaggacttgct

SEQ ID NO: 4852517 - DNA, 25 bp, Homo sapien
ttccctccactggtcaaaggcagcg

SEQ ID NO: 4852518 - DNA, 25 bp, Homo sapien
ggatgcccttatgccactcactgat

SEQ ID NO: 4852519 - DNA, 25 bp, Homo sapien
aaaggcagcgagcaggcttgtccca

SEQ ID NO: 4852520 - DNA, 25 bp, Homo sapien
tagtgcggacaaaatagagaagtgg

SEQ ID NO: 4852521 - DNA, 25 bp, Homo sapien
agtgcggacaaaatagagaagtgga

SEQ ID NO: 4852522 - DNA, 25 bp, Homo sapien
ctagtgcggacaaaatagagaagtg

SEQ ID NO: 4852523 - DNA, 25 bp, Homo sapien
tctttgaaagccatgtacacgagga

SEQ ID NO: 4852524 - DNA, 25 bp, Homo sapien
ctggcaatccgttagctggaagcga

SEQ ID NO: 4852525 - DNA, 25 bp, Homo sapien
catgtacacgaggaaggaatttacc

SEQ ID NO: 4852526 - DNA, 25 bp, Homo sapien
tagctggaagcgatctttgaaagcc

SEQ ID NO: 4852527 - DNA, 25 bp, Homo sapien
tatcccggatcacactcagtacttc

SEQ ID NO: 4852528 - DNA, 25 bp, Homo sapien
cattttctgcgtggacttgggctat

SEQ ID NO: 4852529 - DNA, 25 bp, Homo sapien
ggctatggcgccaatatcccggatc

SEQ ID NO: 4852530 - DNA, 25 bp, Homo sapien
tctgcaatgatgtcgccattttctg

SEQ ID NO: 4852531 - DNA, 25 bp, Homo sapien
tgatgaagaaatgacgaaaaagaaa

SEQ ID NO: 4852532 - DNA, 25 bp, Homo sapien
ggtgatgaagaaatgacgaaaaaga

SEQ ID NO: 4852533 - DNA, 25 bp, Homo sapien
atgaagaaatgacgaaaaagaaagc

SEQ ID NO: 4852534 - DNA, 25 bp, Homo sapien
tgaagaaatgacgaaaaagaaagcc

SEQ ID NO: 4852535 - DNA, 25 bp, Homo sapien
ctcaggtcggctcagcacatgtccc

SEQ ID NO: 4852536 - DNA, 25 bp, Homo sapien
gcacatgtccctcggggcccgtgat

SEQ ID NO: 4852537 - DNA, 25 bp, Homo sapien
aggtcggctcagcacatgtccctcg

SEQ ID NO: 4852538 - DNA, 25 bp, Homo sapien
gggcccgtgatgcccagatccagga

SEQ ID NO: 4852539 - DNA, 25 bp, Homo sapien
cctgattgcacgcttcactcgaagc

SEQ ID NO: 4852540 - DNA, 25 bp, Homo sapien
cctggtggttccctggagattccct

SEQ ID NO: 4852541 - DNA, 25 bp, Homo sapien
catgaaggggaaatcctggtggttc

SEQ ID NO: 4852542 - DNA, 25 bp, Homo sapien
cctagtcagggcccctagagcctga

SEQ ID NO: 4852543 - DNA, 25 bp, Homo sapien
cagcaccaggcggggacagggacgt

SEQ ID NO: 4852544 - DNA, 25 bp, Homo sapien
agatgcctgtggcccggcagcacca

SEQ ID NO: 4852545 - DNA, 25 bp, Homo sapien
cagagatgcctgtggcccggcagca

SEQ ID NO: 4852546 - DNA, 25 bp, Homo sapien
caggcggggacagggacgtcttgca

SEQ ID NO: 4852547 - DNA, 25 bp, Homo sapien
ttggtgatatacagcgggcagttgg

SEQ ID NO: 4852548 - DNA, 25 bp, Homo sapien
tgatggcacgattcacggcttcggc

SEQ ID NO: 4852549 - DNA, 25 bp, Homo sapien
tatacagcgggcagttggtctggtt

SEQ ID NO: 4852550 - DNA, 25 bp, Homo sapien
gtgcctgggcgatgacctcagcaga

SEQ ID NO: 4852551 - DNA, 25 bp, Homo sapien
gctgattcccacaaatgcgctgcct

SEQ ID NO: 4852552 - DNA, 25 bp, Homo sapien
tgccttcttgcaaatgcgtgtctgg

SEQ ID NO: 4852553 - DNA, 25 bp, Homo sapien
tgtggccggccttctgtacagaggc

SEQ ID NO: 4852554 - DNA, 25 bp, Homo sapien
gattccatcgtcatccacaatatct

SEQ ID NO: 4852555 - DNA, 25 bp, Homo sapien
tttccccctttcagacactatgcca

SEQ ID NO: 4852556 - DNA, 25 bp, Homo sapien
cctttcagacactatgccaaccatc

SEQ ID NO: 4852557 - DNA, 25 bp, Homo sapien
agacactatgccaaccatccccaca

SEQ ID NO: 4852558 - DNA, 25 bp, Homo sapien
ttcagacactatgccaaccatcccc

SEQ ID NO: 4852559 - DNA, 25 bp, Homo sapien
tgggcaccgcaacaacacactccag

SEQ ID NO: 4852560 - DNA, 25 bp, Homo sapien
ctaccaggcactgagttggggtaat

SEQ ID NO: 4852561 - DNA, 25 bp, Homo sapien
aacaacacactccagctccgcaact

SEQ ID NO: 4852562 - DNA, 25 bp, Homo sapien
gtaataggtccaaactgggcaccgc

SEQ ID NO: 4852563 - DNA, 25 bp, Homo sapien
tcaggattcttaaggaactaagccc

SEQ ID NO: 4852564 - DNA, 25 bp, Homo sapien
tcgcaagctcaaggttagaccagcc

SEQ ID NO: 4852565 - DNA, 25 bp, Homo sapien
tgtagtcacaataactggtcacgct

SEQ ID NO: 4852566 - DNA, 25 bp, Homo sapien
tgtcaggccactgtttcaatcagga

SEQ ID NO: 4852567 - DNA, 25 bp, Homo sapien
ttagattctggaccagcaggtcttg

SEQ ID NO: 4852568 - DNA, 25 bp, Homo sapien
gtggatcactaagagaaggagacat

SEQ ID NO: 4852569 - DNA, 25 bp, Homo sapien
ttccccgaacttctcttgtcttaga

SEQ ID NO: 4852570 - DNA, 25 bp, Homo sapien
ggaggttcatgtggatcactaagag

SEQ ID NO: 4852571 - DNA, 25 bp, Homo sapien
tgctccagtaatgggagccgtccgt

SEQ ID NO: 4852572 - DNA, 25 bp, Homo sapien
agtggttggatcagggctcaagggt

SEQ ID NO: 4852573 - DNA, 25 bp, Homo sapien
atgggctcgccatacaccacagttc

SEQ ID NO: 4852574 - DNA, 25 bp, Homo sapien
gagccgtccgttcccaagctggcag

SEQ ID NO: 4852575 - DNA, 25 bp, Homo sapien
actgcccgtgacctggaggtctcca

SEQ ID NO: 4852576 - DNA, 25 bp, Homo sapien
ggcactgcccgtgacctggaggtct

SEQ ID NO: 4852577 - DNA, 25 bp, Homo sapien
gcactgcccgtgacctggaggtctc

SEQ ID NO: 4852578 - DNA, 25 bp, Homo sapien
atgggcactgcccgtgacctggagg

SEQ ID NO: 4852579 - DNA, 25 bp, Homo sapien
cagggtgaagttgtcctttcctaca

SEQ ID NO: 4852580 - DNA, 25 bp, Homo sapien
gatgacggacatccgctcctcagtg

SEQ ID NO: 4852581 - DNA, 25 bp, Homo sapien
ctcagtgccattggtgccctccgga

SEQ ID NO: 4852582 - DNA, 25 bp, Homo sapien
tgccctccggaatcagggtgaagtt

SEQ ID NO: 4852583 - DNA, 25 bp, Homo sapien
accaggtcggcatcggatcccacag

SEQ ID NO: 4852584 - DNA, 25 bp, Homo sapien
cagcaatgcggcctttccgggggta

SEQ ID NO: 4852585 - DNA, 25 bp, Homo sapien
gtcggcatcggatcccacagcaatg

SEQ ID NO: 4852586 - DNA, 25 bp, Homo sapien
ccagatgaccaggtcggcatcggat

SEQ ID NO: 4852587 - DNA, 25 bp, Homo sapien
tcagtcgagcgcattcccatcacag

SEQ ID NO: 4852588 - DNA, 25 bp, Homo sapien
cccatcacagcaagttctttttaga

SEQ ID NO: 4852589 - DNA, 25 bp, Homo sapien
ggtctgcacagttaacaggtcttac

SEQ ID NO: 4852590 - DNA, 25 bp, Homo sapien
tctctgtgactgtaattcgtttgga

SEQ ID NO: 4852591 - DNA, 25 bp, Homo sapien
ccctaaatgaaaggattgtggtcac

SEQ ID NO: 4852592 - DNA, 25 bp, Homo sapien
gaaatgagccatccacaagtaggtt

SEQ ID NO: 4852593 - DNA, 25 bp, Homo sapien
tctagtctgtttgcggtgtggttaa

SEQ ID NO: 4852594 - DNA, 25 bp, Homo sapien
gaagagacatgcctccgataaaatg

SEQ ID NO: 4852595 - DNA, 25 bp, Homo sapien
gagacagggatcctgtcccaactgg

SEQ ID NO: 4852596 - DNA, 25 bp, Homo sapien
tgctccttgccttgatacgcttgta

SEQ ID NO: 4852597 - DNA, 25 bp, Homo sapien
cagagccttcggtgacatgcagggt

SEQ ID NO: 4852598 - DNA, 25 bp, Homo sapien
tacgcttgtaaacaaaatcagggaa

SEQ ID NO: 4852599 - DNA, 25 bp, Homo sapien
caggacaatcttcccctggctgatg

SEQ ID NO: 4852600 - DNA, 25 bp, Homo sapien
ggtccgtcatacaggccacgaggaa

SEQ ID NO: 4852601 - DNA, 25 bp, Homo sapien
gacacttcacacacaggtccgtcat

SEQ ID NO: 4852602 - DNA, 25 bp, Homo sapien
ctgtcttgggcgtcacagacacttc

SEQ ID NO: 4852603 - DNA, 25 bp, Homo sapien
tccagactggtgcaggttccggaca

SEQ ID NO: 4852604 - DNA, 25 bp, Homo sapien
ccagagatctgagtccactgtattt

SEQ ID NO: 4852605 - DNA, 25 bp, Homo sapien
tgtcctttccaaatgcaactgtagc

SEQ ID NO: 4852606 - DNA, 25 bp, Homo sapien
cactgtatttctcacgttggagaga

SEQ ID NO: 4852607 - DNA, 25 bp, Homo sapien
gagagaaagggaatatcattcactt

SEQ ID NO: 4852608 - DNA, 25 bp, Homo sapien
gtgacacagtgagatactattatat

SEQ ID NO: 4852609 - DNA, 25 bp, Homo sapien
gtgagatactattatatctctaaaa

SEQ ID NO: 4852610 - DNA, 25 bp, Homo sapien
tctagcctgggtactgggtgacaca

SEQ ID NO: 4852611 - DNA, 25 bp, Homo sapien
gacacagtgagatactattatatct

SEQ ID NO: 4852612 - DNA, 25 bp, Homo sapien
gccacgatacgctgggtggtgcggc

SEQ ID NO: 4852613 - DNA, 25 bp, Homo sapien
cggggggcgccacgatacgctgggt

SEQ ID NO: 4852614 - DNA, 25 bp, Homo sapien
cggggaatgttgtcatcaatctgag

SEQ ID NO: 4852615 - DNA, 25 bp, Homo sapien
tgcggcggggaatgttgtcatcaat

SEQ ID NO: 4852616 - DNA, 25 bp, Homo sapien
cccaggctggtgatgttggcacggc

SEQ ID NO: 4852617 - DNA, 25 bp, Homo sapien
aggctggtgatgttggcacggccac

SEQ ID NO: 4852618 - DNA, 25 bp, Homo sapien
ctagcccaggctggtgatgttggca

SEQ ID NO: 4852619 - DNA, 25 bp, Homo sapien
agcccaggctggtgatgttggcacg

SEQ ID NO: 4852620 - DNA, 25 bp, Homo sapien
cctgtctgcggttccacgtgtgata

SEQ ID NO: 4852621 - DNA, 25 bp, Homo sapien
gctcaaatcctttaggcggacccaa

SEQ ID NO: 4852622 - DNA, 25 bp, Homo sapien
catgacccggtacaggaaaaacagg

SEQ ID NO: 4852623 - DNA, 25 bp, Homo sapien
gacagacacgatgagtttgccaacc

SEQ ID NO: 4852624 - DNA, 25 bp, Homo sapien
gccaacaggtaaacatgcttacaca

SEQ ID NO: 4852625 - DNA, 25 bp, Homo sapien
tgagacactgtcgatttattttagc

SEQ ID NO: 4852626 - DNA, 25 bp, Homo sapien
gttctgagacactgtcgatttattt

SEQ ID NO: 4852627 - DNA, 25 bp, Homo sapien
tctgagacactgtcgatttatttta

SEQ ID NO: 4852628 - DNA, 25 bp, Homo sapien
ggcgttccatggtaatataacacag

SEQ ID NO: 4852629 - DNA, 25 bp, Homo sapien
tgggtcacaatcacaatttccagga

SEQ ID NO: 4852630 - DNA, 25 bp, Homo sapien
ttttgccatcaagacagtggttaca

SEQ ID NO: 4852631 - DNA, 25 bp, Homo sapien
gctttagaactgaaagttcctccac

SEQ ID NO: 4852632 - DNA, 25 bp, Homo sapien
tcatcctctgtgatcacaaccctgt

SEQ ID NO: 4852633 - DNA, 25 bp, Homo sapien
aaagctggtactgggcaaggtcaca

SEQ ID NO: 4852634 - DNA, 25 bp, Homo sapien
cctgttcccgttgcacttgccaggt

SEQ ID NO: 4852635 - DNA, 25 bp, Homo sapien
cacttgccaggttggctggatggtc

SEQ ID NO: 4852636 - DNA, 25 bp, Homo sapien
cttgatctgtctctgacaaagaccc

SEQ ID NO: 4852637 - DNA, 25 bp, Homo sapien
acaaagacccaggactatagaatgc

SEQ ID NO: 4852638 - DNA, 25 bp, Homo sapien
gacccaggactatagaatgctttag

SEQ ID NO: 4852639 - DNA, 25 bp, Homo sapien
aagacccaggactatagaatgcttt

SEQ ID NO: 4852640 - DNA, 25 bp, Homo sapien
ctccatgacaaagtggtctgggagt

SEQ ID NO: 4852641 - DNA, 25 bp, Homo sapien
gggagtctgagtggacttcacagca

SEQ ID NO: 4852642 - DNA, 25 bp, Homo sapien
gacaacagatcccagaactggccat

SEQ ID NO: 4852643 - DNA, 25 bp, Homo sapien
actccatgacaaagtggtctgggag

SEQ ID NO: 4852644 - DNA, 25 bp, Homo sapien
gaggtttgagaagaattcgcatcca

SEQ ID NO: 4852645 - DNA, 25 bp, Homo sapien
taaataggacatgaggacaaagcca

SEQ ID NO: 4852646 - DNA, 25 bp, Homo sapien
gaaagacaagaccttcatgcctcag

SEQ ID NO: 4852647 - DNA, 25 bp, Homo sapien
gagacatcctcacatcgtcacagtg

SEQ ID NO: 4852648 - DNA, 25 bp, Homo sapien
gactggtgccaagacattggccagg

SEQ ID NO: 4852649 - DNA, 25 bp, Homo sapien
ttgagtccgtaggtgactggtgcca

SEQ ID NO: 4852650 - DNA, 25 bp, Homo sapien
agaggtcctctctggttgagtccgt

SEQ ID NO: 4852651 - DNA, 25 bp, Homo sapien
ggtgccaagacattggccaggtcat

SEQ ID NO: 4852652 - DNA, 25 bp, Homo sapien
ccacaaaacatctttctccaataca

SEQ ID NO: 4852653 - DNA, 25 bp, Homo sapien
gggccctgatcgtaaagcaatggag

SEQ ID NO: 4852654 - DNA, 25 bp, Homo sapien
tggtccaagaacaaccagccagatt

SEQ ID NO: 4852655 - DNA, 25 bp, Homo sapien
caagaacaaccagccagattgtgca

SEQ ID NO: 4852656 - DNA, 25 bp, Homo sapien
gagtggaatcttgcccactaagaat

SEQ ID NO: 4852657 - DNA, 25 bp, Homo sapien
tgaatcctatcacataccacactgc

SEQ ID NO: 4852658 - DNA, 25 bp, Homo sapien
ctctgggtttctgaatcctatcaca

SEQ ID NO: 4852659 - DNA, 25 bp, Homo sapien
gaggttgggatgggctctgggtttc

SEQ ID NO: 4852660 - DNA, 25 bp, Homo sapien
catgaggttgggatgggctctgggt

SEQ ID NO: 4852661 - DNA, 25 bp, Homo sapien
tcctgacagagtgaccatgtttggc

SEQ ID NO: 4852662 - DNA, 25 bp, Homo sapien
cactgaaacagccagtcagtcaggg

SEQ ID NO: 4852663 - DNA, 25 bp, Homo sapien
tagtgcagcattacagtgggatggc

SEQ ID NO: 4852664 - DNA, 25 bp, Homo sapien
ctttgttctcaaggcttagtgcagc

SEQ ID NO: 4852665 - DNA, 25 bp, Homo sapien
tagagtcacgtgatgcaccagcttc

SEQ ID NO: 4852666 - DNA, 25 bp, Homo sapien
gactctcaggttgcaagtatatctg

SEQ ID NO: 4852667 - DNA, 25 bp, Homo sapien
ggttgcaagtatatctggttccaca

SEQ ID NO: 4852668 - DNA, 25 bp, Homo sapien
cagaacacccttgctatctagagtc

SEQ ID NO: 4852669 - DNA, 25 bp, Homo sapien
cagctccatgcatttgtagccctgc

SEQ ID NO: 4852670 - DNA, 25 bp, Homo sapien
gccatattagtgtcctagccaatca

SEQ ID NO: 4852671 - DNA, 25 bp, Homo sapien
tgtcctagccaatcataacaaatgg

SEQ ID NO: 4852672 - DNA, 25 bp, Homo sapien
tgtagccctgccatattagtgtcct

SEQ ID NO: 4852673 - DNA, 25 bp, Homo sapien
gagcaatgcttaacccatcggaatg

SEQ ID NO: 4852674 - DNA, 25 bp, Homo sapien
caaaactgtcaaccaggcaaagggt

SEQ ID NO: 4852675 - DNA, 25 bp, Homo sapien
taaaggatcttctcccaacgagtat

SEQ ID NO: 4852676 - DNA, 25 bp, Homo sapien
ccttaggagtgcctgagggtcttca

SEQ ID NO: 4852677 - DNA, 25 bp, Homo sapien
gatgagatggggctgctctcagcaa

SEQ ID NO: 4852678 - DNA, 25 bp, Homo sapien
gtgatgagatggggctgctctcagc

SEQ ID NO: 4852679 - DNA, 25 bp, Homo sapien
gcatagctctgagtgatgagatggg

SEQ ID NO: 4852680 - DNA, 25 bp, Homo sapien
tgagatggggctgctctcagcaact

SEQ ID NO: 4852681 - DNA, 25 bp, Homo sapien
tgtttggtcttggtcctgtgccctt

SEQ ID NO: 4852682 - DNA, 25 bp, Homo sapien
ccattattccactctccccttcttg

SEQ ID NO: 4852683 - DNA, 25 bp, Homo sapien
tgatcccatcctctccattattcca

SEQ ID NO: 4852684 - DNA, 25 bp, Homo sapien
gtgccatttcccatggaatccatgc

SEQ ID NO: 4852685 - DNA, 25 bp, Homo sapien
aatgtatattaggagtttgcaaacc

SEQ ID NO: 4852686 - DNA, 25 bp, Homo sapien
cagagagtccccagcttacaagctg

SEQ ID NO: 4852687 - DNA, 25 bp, Homo sapien
tacaagctggatagagttcaagttc

SEQ ID NO: 4852688 - DNA, 25 bp, Homo sapien
ggaggatgttcccagattaaccaaa

SEQ ID NO: 4852689 - DNA, 25 bp, Homo sapien
cttaatgtcctcaggaacgtagagg

SEQ ID NO: 4852690 - DNA, 25 bp, Homo sapien
aataattcttttcccggtcagcctg

SEQ ID NO: 4852691 - DNA, 25 bp, Homo sapien
ctgtgggtcattgcatacccactgg

SEQ ID NO: 4852692 - DNA, 25 bp, Homo sapien
ctcaggaacgtagaggtcccaaagg

SEQ ID NO: 4852693 - DNA, 25 bp, Homo sapien
ctcttggtttgctccacagggtgac

SEQ ID NO: 4852694 - DNA, 25 bp, Homo sapien
tccacagggtgacatgtaaggcagt

SEQ ID NO: 4852695 - DNA, 25 bp, Homo sapien
caggaggctcttggtttgctccaca

SEQ ID NO: 4852696 - DNA, 25 bp, Homo sapien
tgacatgtaaggcagtgattgccac

SEQ ID NO: 4852697 - DNA, 25 bp, Homo sapien
actgtgtttctcgacactcttgacg

SEQ ID NO: 4852698 - DNA, 25 bp, Homo sapien
ggccgagggcaaatttgtctatgct

SEQ ID NO: 4852699 - DNA, 25 bp, Homo sapien
catttgtccctgacctataattcca

SEQ ID NO: 4852700 - DNA, 25 bp, Homo sapien
tctgtcattgactgacagacaagca

SEQ ID NO: 4852701 - DNA, 25 bp, Homo sapien
ttgctgctgcaacatggattactgg

SEQ ID NO: 4852702 - DNA, 25 bp, Homo sapien
gctgctgcaacatggattactggtt

SEQ ID NO: 4852703 - DNA, 25 bp, Homo sapien
gctgcaacatggattactggttctc

SEQ ID NO: 4852704 - DNA, 25 bp, Homo sapien
caacatggattactggttctcccac

SEQ ID NO: 4852705 - DNA, 25 bp, Homo sapien
aatgccctgtggcagtctctgcgca

SEQ ID NO: 4852706 - DNA, 25 bp, Homo sapien
ctgcgcaggatgtgacgggtcctga

SEQ ID NO: 4852707 - DNA, 25 bp, Homo sapien
tttgttcttctgctgcgaaatgccc

SEQ ID NO: 4852708 - DNA, 25 bp, Homo sapien
cgtgcacatcaacgggtagggtttg

SEQ ID NO: 4852709 - DNA, 25 bp, Homo sapien
ccatcacagatgaggttcgaaaaag

SEQ ID NO: 4852710 - DNA, 25 bp, Homo sapien
gcatttgcacaaaaccatcagtcat

SEQ ID NO: 4852711 - DNA, 25 bp, Homo sapien
cagtcatgttggcattagccatttt

SEQ ID NO: 4852712 - DNA, 25 bp, Homo sapien
tcacagatgaggttcgaaaaagcat

SEQ ID NO: 4852713 - DNA, 25 bp, Homo sapien
gactctggtctgctcttaaactttg

SEQ ID NO: 4852714 - DNA, 25 bp, Homo sapien
ccttcttagagagccctggtcacca

SEQ ID NO: 4852715 - DNA, 25 bp, Homo sapien
gctcattggatgtgtaccaggcaca

SEQ ID NO: 4852716 - DNA, 25 bp, Homo sapien
caaagtagttcagcacaaaggcatc

SEQ ID NO: 4852717 - DNA, 25 bp, Homo sapien
tggaaaaagtccagagttccaactg

SEQ ID NO: 4852718 - DNA, 25 bp, Homo sapien
caactggatgggtcagttctctgcc

SEQ ID NO: 4852719 - DNA, 25 bp, Homo sapien
ccagatgttggtgtcctgtagaccc

SEQ ID NO: 4852720 - DNA, 25 bp, Homo sapien
cagagttccaactggatgggtcagt

SEQ ID NO: 4852721 - DNA, 25 bp, Homo sapien
cctgggcacctgttgtagagaacct

SEQ ID NO: 4852722 - DNA, 25 bp, Homo sapien
gtgtgtagtgccctctcctccgggt

SEQ ID NO: 4852723 - DNA, 25 bp, Homo sapien
tctgctgaccttgcctgggaaagtt

SEQ ID NO: 4852724 - DNA, 25 bp, Homo sapien
tgattcgaatctgccagagtacaga

SEQ ID NO: 4852725 - DNA, 25 bp, Homo sapien
gatgcagattaattggtctctttaa

SEQ ID NO: 4852726 - DNA, 25 bp, Homo sapien
tctttaataagaatgtcaacttttc

SEQ ID NO: 4852727 - DNA, 25 bp, Homo sapien
agcactttttcgactgtaaagtggc

SEQ ID NO: 4852728 - DNA, 25 bp, Homo sapien
aagtggcttccaactgatgcagatt

SEQ ID NO: 4852729 - DNA, 25 bp, Homo sapien
gccggcaccggtgaacatttccaag

SEQ ID NO: 4852730 - DNA, 25 bp, Homo sapien
aagtcggactcggagcaagtgacgc

SEQ ID NO: 4852731 - DNA, 25 bp, Homo sapien
tcttcgaggtcctaggctactgggc

SEQ ID NO: 4852732 - DNA, 25 bp, Homo sapien
aaaacgctgggcatcgtggtcggct

SEQ ID NO: 4852733 - DNA, 25 bp, Homo sapien
cctttgagcgtcgacggctgatctt

SEQ ID NO: 4852734 - DNA, 25 bp, Homo sapien
cagccaggacgaataagacagcgcg

SEQ ID NO: 4852735 - DNA, 25 bp, Homo sapien
tcaaaatgtaggtaactgcgggcca

SEQ ID NO: 4852736 - DNA, 25 bp, Homo sapien
gacagcgcggaaaagcagattctcg

SEQ ID NO: 4852737 - DNA, 25 bp, Homo sapien
gagagtgagcgtgctcgtggtcctg

SEQ ID NO: 4852738 - DNA, 25 bp, Homo sapien
aattccaccggcgtgagagtgagcg

SEQ ID NO: 4852739 - DNA, 25 bp, Homo sapien
ccgagtgcgaattccaccggcgtga

SEQ ID NO: 4852740 - DNA, 25 bp, Homo sapien
ggtgcgctctgcacacccgagtgcg

SEQ ID NO: 4852741 - DNA, 25 bp, Homo sapien
gtcatggtccatctgtcaacagcca

SEQ ID NO: 4852742 - DNA, 25 bp, Homo sapien
cctaaagtcatggtccatctgtcaa

SEQ ID NO: 4852743 - DNA, 25 bp, Homo sapien
gatgcccccacacctaaagtcatgg

SEQ ID NO: 4852744 - DNA, 25 bp, Homo sapien
ccacacctaaagtcatggtccatct

SEQ ID NO: 4852745 - DNA, 25 bp, Homo sapien
aaccaatgcagtccccacatccttc

SEQ ID NO: 4852746 - DNA, 25 bp, Homo sapien
aaaaaccaatgcagtccccacatcc

SEQ ID NO: 4852747 - DNA, 25 bp, Homo sapien
aatcccacctcagatactgccccca

SEQ ID NO: 4852748 - DNA, 25 bp, Homo sapien
gatactgcccccaccctcaatttgg

SEQ ID NO: 4852749 - DNA, 25 bp, Homo sapien
tctgaaacagcaaaacgtcaaatat

SEQ ID NO: 4852750 - DNA, 25 bp, Homo sapien
tttcacatggaaaagagccctactc

SEQ ID NO: 4852751 - DNA, 25 bp, Homo sapien
tctttcataatcgttctccatcgag

SEQ ID NO: 4852752 - DNA, 25 bp, Homo sapien
gaatgtttgctcgaaactggaggaa

SEQ ID NO: 4852753 - DNA, 25 bp, Homo sapien
gcagcagcaatgaaatcccaggttt

SEQ ID NO: 4852754 - DNA, 25 bp, Homo sapien
catggagcgggagcctcatgactga

SEQ ID NO: 4852755 - DNA, 25 bp, Homo sapien
catttgttcagtcgggcaccaggcc

SEQ ID NO: 4852756 - DNA, 25 bp, Homo sapien
gcagcaatgaaatcccaggtttcca

SEQ ID NO: 4852757 - DNA, 25 bp, Homo sapien
tgctctcatggcacaacgtgctcac

SEQ ID NO: 4852758 - DNA, 25 bp, Homo sapien
gaaagcagtgatcagctgggactcc

SEQ ID NO: 4852759 - DNA, 25 bp, Homo sapien
aaagcagtgatcagctgggactcct

SEQ ID NO: 4852760 - DNA, 25 bp, Homo sapien
gagaaagcagtgatcagctgggact

SEQ ID NO: 4852761 - DNA, 25 bp, Homo sapien
ctgcagcgcagttgaaatattggta

SEQ ID NO: 4852762 - DNA, 25 bp, Homo sapien
cgcagttgaaatattggtactaaaa

SEQ ID NO: 4852763 - DNA, 25 bp, Homo sapien
tgcagcgcagttgaaatattggtac

SEQ ID NO: 4852764 - DNA, 25 bp, Homo sapien
cagcgcagttgaaatattggtacta

SEQ ID NO: 4852765 - DNA, 25 bp, Homo sapien
ctctcctttgttatacccaactgca

SEQ ID NO: 4852766 - DNA, 25 bp, Homo sapien
tcctttgttatacccaactgcaatg

SEQ ID NO: 4852767 - DNA, 25 bp, Homo sapien
tctcctttgttatacccaactgcaa

SEQ ID NO: 4852768 - DNA, 25 bp, Homo sapien
ctttgttatacccaactgcaatgtc

SEQ ID NO: 4852769 - DNA, 25 bp, Homo sapien
tcagaccctgagaacttagtgctta

SEQ ID NO: 4852770 - DNA, 25 bp, Homo sapien
taaagacccttgtatctctgctcag

SEQ ID NO: 4852771 - DNA, 25 bp, Homo sapien
tagtgcttatgatggccaagtcacc

SEQ ID NO: 4852772 - DNA, 25 bp, Homo sapien
gaagcactctccctgctagtaacgg

SEQ ID NO: 4852773 - DNA, 25 bp, Homo sapien
ttatggaaccttagttccatagaaa

SEQ ID NO: 4852774 - DNA, 25 bp, Homo sapien
tggaaccttagttccatagaaatct

SEQ ID NO: 4852775 - DNA, 25 bp, Homo sapien
gaaccttagttccatagaaatcttc

SEQ ID NO: 4852776 - DNA, 25 bp, Homo sapien
gaaatcttccagaaccttgggagtg

SEQ ID NO: 4852777 - DNA, 25 bp, Homo sapien
gaaagatctgatcctgagtaagcca

SEQ ID NO: 4852778 - DNA, 25 bp, Homo sapien
taagaaagcgccatcccagactttg

SEQ ID NO: 4852779 - DNA, 25 bp, Homo sapien
ccagactttgttggcgatggcctgt

SEQ ID NO: 4852780 - DNA, 25 bp, Homo sapien
tggcctgttgaaaagacaacctcca

SEQ ID NO: 4852781 - DNA, 25 bp, Homo sapien
ccgttttggtagtatgaatcctgaa

SEQ ID NO: 4852782 - DNA, 25 bp, Homo sapien
tctgtgagcatgaaaggcaaattgg

SEQ ID NO: 4852783 - DNA, 25 bp, Homo sapien
cagaagctttggttcagcgagtgcc

SEQ ID NO: 4852784 - DNA, 25 bp, Homo sapien
tccagtatgtggtctccgtgcttcc

SEQ ID NO: 4852785 - DNA, 25 bp, Homo sapien
acacttgcttgaccctctccacaat

SEQ ID NO: 4852786 - DNA, 25 bp, Homo sapien
ctgacacttgcttgaccctctccac

SEQ ID NO: 4852787 - DNA, 25 bp, Homo sapien
tgacacttgcttgaccctctccaca

SEQ ID NO: 4852788 - DNA, 25 bp, Homo sapien
gacacttgcttgaccctctccacaa

SEQ ID NO: 4852789 - DNA, 25 bp, Homo sapien
tgtaacagggatgtcatgaagacag

SEQ ID NO: 4852790 - DNA, 25 bp, Homo sapien
gtaacagggatgtcatgaagacaga

SEQ ID NO: 4852791 - DNA, 25 bp, Homo sapien
catgccagaacatcaccctggcctt

SEQ ID NO: 4852792 - DNA, 25 bp, Homo sapien
catcatgccagaacatcaccctggc

SEQ ID NO: 4852793 - DNA, 25 bp, Homo sapien
agaacccactgctccatggcggtcg

SEQ ID NO: 4852794 - DNA, 25 bp, Homo sapien
tccaccagaacccactgctccatgg

SEQ ID NO: 4852795 - DNA, 25 bp, Homo sapien
taccatctccaccagaacccactgc

SEQ ID NO: 4852796 - DNA, 25 bp, Homo sapien
ctcgtaaagcaactgtaccatctcc

SEQ ID NO: 4852797 - DNA, 25 bp, Homo sapien
tgtaagtcttagagaaaagaagtct

SEQ ID NO: 4852798 - DNA, 25 bp, Homo sapien
atttgtaagtcttagagaaaagaag

SEQ ID NO: 4852799 - DNA, 25 bp, Homo sapien
gatggtcttttgggacaggaggaac

SEQ ID NO: 4852800 - DNA, 25 bp, Homo sapien
ttctctctcataatctgtaagtggg

SEQ ID NO: 4852801 - DNA, 25 bp, Homo sapien
taatctgtaagtgggccaaatgacc

SEQ ID NO: 4852802 - DNA, 25 bp, Homo sapien
tctcataatctgtaagtgggccaaa

SEQ ID NO: 4852803 - DNA, 25 bp, Homo sapien
tctctcataatctgtaagtgggcca

SEQ ID NO: 4852804 - DNA, 25 bp, Homo sapien
cgataaggcacctgattgatttagg

SEQ ID NO: 4852805 - DNA, 25 bp, Homo sapien
ggagtcggggatctgtgttctcttc

SEQ ID NO: 4852806 - DNA, 25 bp, Homo sapien
tgatttaggtattccaggagtcggg

SEQ ID NO: 4852807 - DNA, 25 bp, Homo sapien
ctgcatttctcgataaggcacctga

SEQ ID NO: 4852808 - DNA, 25 bp, Homo sapien
tggaagtcatggcttttgctactcc

SEQ ID NO: 4852809 - DNA, 25 bp, Homo sapien
tctggctgaatagtttggaagtcat

SEQ ID NO: 4852810 - DNA, 25 bp, Homo sapien
tctcttgctctggtgaatctggctg

SEQ ID NO: 4852811 - DNA, 25 bp, Homo sapien
tgggatctgatctcttgctctggtg

SEQ ID NO: 4852812 - DNA, 25 bp, Homo sapien
acagcccactcatggcatctgccag

SEQ ID NO: 4852813 - DNA, 25 bp, Homo sapien
ttgcttttccccaacacagcccact

SEQ ID NO: 4852814 - DNA, 25 bp, Homo sapien
tttgcacatctagttttcctggcac

SEQ ID NO: 4852815 - DNA, 25 bp, Homo sapien
ggcactgctgttaaaatgagtttgc

SEQ ID NO: 4852816 - DNA, 25 bp, Homo sapien
ggagacaaggaatgctggggatgag

SEQ ID NO: 4852817 - DNA, 25 bp, Homo sapien
cagagcagcacagaggagacaagga

SEQ ID NO: 4852818 - DNA, 25 bp, Homo sapien
tgaggggaaggcagggtgggtccat

SEQ ID NO: 4852819 - DNA, 25 bp, Homo sapien
gcacagaggagacaaggaatgctgg

SEQ ID NO: 4852820 - DNA, 25 bp, Homo sapien
agtgcactgggctgaggaatcagca

SEQ ID NO: 4852821 - DNA, 25 bp, Homo sapien
cagtgcactgggctgaggaatcagc

SEQ ID NO: 4852822 - DNA, 25 bp, Homo sapien
gattctgctatcactttcacgaagc

SEQ ID NO: 4852823 - DNA, 25 bp, Homo sapien
atccagtgcactgggctgaggaatc

SEQ ID NO: 4852824 - DNA, 25 bp, Homo sapien
tttttggataggctttccctcagca

SEQ ID NO: 4852825 - DNA, 25 bp, Homo sapien
tagtaaaccatcaccaagaggattc

SEQ ID NO: 4852826 - DNA, 25 bp, Homo sapien
ggtcccgtatgcttagaaaccagta

SEQ ID NO: 4852827 - DNA, 25 bp, Homo sapien
caccaggatattgactttgacacaa

SEQ ID NO: 4852828 - DNA, 25 bp, Homo sapien
ttgtccaccactaaaatgcctctgc

SEQ ID NO: 4852829 - DNA, 25 bp, Homo sapien
gccaaaggtgagcattgtccaccac

SEQ ID NO: 4852830 - DNA, 25 bp, Homo sapien
tagtctgtttatgctaaatctggcc

SEQ ID NO: 4852831 - DNA, 25 bp, Homo sapien
ttttgtggccagaatgaagtgatca

SEQ ID NO: 4852832 - DNA, 25 bp, Homo sapien
gcagactggagcagcccacttttgc

SEQ ID NO: 4852833 - DNA, 25 bp, Homo sapien
taacttcccctgttaccatcctgct

SEQ ID NO: 4852834 - DNA, 25 bp, Homo sapien
ttgcagactggagcagcccactttt

SEQ ID NO: 4852835 - DNA, 25 bp, Homo sapien
ttaacttcccctgttaccatcctgc

SEQ ID NO: 4852836 - DNA, 25 bp, Homo sapien
aaggagccgacatggagtccactcg

SEQ ID NO: 4852837 - DNA, 25 bp, Homo sapien
caccagtcgtacatgggaagggacc

SEQ ID NO: 4852838 - DNA, 25 bp, Homo sapien
gcccctgaaatagcaacagccaagg

SEQ ID NO: 4852839 - DNA, 25 bp, Homo sapien
gtgatgttattagcctcctcagaga

SEQ ID NO: 4852840 - DNA, 25 bp, Homo sapien
cttctcatccgggatggccactggc

SEQ ID NO: 4852841 - DNA, 25 bp, Homo sapien
catgcacttgaagcctgctgatgtc

SEQ ID NO: 4852842 - DNA, 25 bp, Homo sapien
tgcacttgaagcctgctgatgtccg

SEQ ID NO: 4852843 - DNA, 25 bp, Homo sapien
cacttgaagcctgctgatgtccggg

SEQ ID NO: 4852844 - DNA, 25 bp, Homo sapien
agtttttctgttgactgtggccgtt

SEQ ID NO: 4852845 - DNA, 25 bp, Homo sapien
gatgccagggggtgaagccctgcct

SEQ ID NO: 4852846 - DNA, 25 bp, Homo sapien
ggagctgattccatttggacattca

SEQ ID NO: 4852847 - DNA, 25 bp, Homo sapien
ctgaagatgccagggggtgaagccc

SEQ ID NO: 4852848 - DNA, 25 bp, Homo sapien
aaggcttggagctgattccatttgg

SEQ ID NO: 4852849 - DNA, 25 bp, Homo sapien
ctaaggcgggcaccagtggagctga

SEQ ID NO: 4852850 - DNA, 25 bp, Homo sapien
agctgaaccagtcatatgggaacac

SEQ ID NO: 4852851 - DNA, 25 bp, Homo sapien
ccagtcatatgggaacactagcggg

SEQ ID NO: 4852852 - DNA, 25 bp, Homo sapien
tgaaccagtcatatgggaacactag

SEQ ID NO: 4852853 - DNA, 25 bp, Homo sapien
gttctccaaggcagcgctgtcggta

SEQ ID NO: 4852854 - DNA, 25 bp, Homo sapien
cggtacagtgcggaggttctccaag

SEQ ID NO: 4852855 - DNA, 25 bp, Homo sapien
gcagcgctgtcggtaggagatatca

SEQ ID NO: 4852856 - DNA, 25 bp, Homo sapien
tccaaatgcctgttccaaacggtac

SEQ ID NO: 4852857 - DNA, 25 bp, Homo sapien
aatgacgtagccaggataatgctgc

SEQ ID NO: 4852858 - DNA, 25 bp, Homo sapien
tgatttcatggagaatgacgtagcc

SEQ ID NO: 4852859 - DNA, 25 bp, Homo sapien
tcaagtgatttcatggagaatgacg

SEQ ID NO: 4852860 - DNA, 25 bp, Homo sapien
catggagaatgacgtagccaggata

SEQ ID NO: 4852861 - DNA, 25 bp, Homo sapien
cagatcggcttgtcccaaagttggt

SEQ ID NO: 4852862 - DNA, 25 bp, Homo sapien
caggtggtaggaatcactggtccca

SEQ ID NO: 4852863 - DNA, 25 bp, Homo sapien
tgttggtgaatgtccacagtacccc

SEQ ID NO: 4852864 - DNA, 25 bp, Homo sapien
gatgctttcacatccatcgtgttgg

SEQ ID NO: 4852865 - DNA, 25 bp, Homo sapien
ttggcatcagcgtacagtttggcat

SEQ ID NO: 4852866 - DNA, 25 bp, Homo sapien
gcatcagcgtacagtttggcatctg

SEQ ID NO: 4852867 - DNA, 25 bp, Homo sapien
tttggcatcagcgtacagtttggca

SEQ ID NO: 4852868 - DNA, 25 bp, Homo sapien
agagtaggccgagggtctgccaggg

SEQ ID NO: 4852869 - DNA, 25 bp, Homo sapien
ctgccagggcctttcgcatgcccat

SEQ ID NO: 4852870 - DNA, 25 bp, Homo sapien
gtctgccagggcctttcgcatgccc

SEQ ID NO: 4852871 - DNA, 25 bp, Homo sapien
tctgccagggcctttcgcatgccca

SEQ ID NO: 4852872 - DNA, 25 bp, Homo sapien
cacatacaatgttagtaattaggct

SEQ ID NO: 4852873 - DNA, 25 bp, Homo sapien
agtaatcttggtgcattctttccat

SEQ ID NO: 4852874 - DNA, 25 bp, Homo sapien
tcagtaatcttggtgcattctttcc

SEQ ID NO: 4852875 - DNA, 25 bp, Homo sapien
ttcacatacaatgttagtaattagg

SEQ ID NO: 4852876 - DNA, 25 bp, Homo sapien
agtcaagaaggagaagtccacagcg

SEQ ID NO: 4852877 - DNA, 25 bp, Homo sapien
tcaagaaggagaagtccacagcggc

SEQ ID NO: 4852878 - DNA, 25 bp, Homo sapien
taagtcaagaaggagaagtccacag

SEQ ID NO: 4852879 - DNA, 25 bp, Homo sapien
gtcaagaaggagaagtccacagcgg

SEQ ID NO: 4852880 - DNA, 25 bp, Homo sapien
cagtggaccctggtgccgatttcca

SEQ ID NO: 4852881 - DNA, 25 bp, Homo sapien
atttttcaggtcgtaggtcttcagg

SEQ ID NO: 4852882 - DNA, 25 bp, Homo sapien
ctggtgccgatttccagggtaccaa

SEQ ID NO: 4852883 - DNA, 25 bp, Homo sapien
tgacagtcgtgggaagggtcctctt

SEQ ID NO: 4852884 - DNA, 25 bp, Homo sapien
gtataataaaacctccagcaaatca

SEQ ID NO: 4852885 - DNA, 25 bp, Homo sapien
gattgtataataaaacctccagcaa

SEQ ID NO: 4852886 - DNA, 25 bp, Homo sapien
taggattgtataataaaacctccag

SEQ ID NO: 4852887 - DNA, 25 bp, Homo sapien
ataataaaacctccagcaaatcagc

SEQ ID NO: 4852888 - DNA, 25 bp, Homo sapien
gatggcaagagccttgggcatcccc

SEQ ID NO: 4852889 - DNA, 25 bp, Homo sapien
tggcaagagccttgggcatccccat

SEQ ID NO: 4852890 - DNA, 25 bp, Homo sapien
ctgatggcaagagccttgggcatcc

SEQ ID NO: 4852891 - DNA, 25 bp, Homo sapien
atggcaagagccttgggcatcccca

SEQ ID NO: 4852892 - DNA, 25 bp, Homo sapien
ccaaactcacatcttgggcaagagg

SEQ ID NO: 4852893 - DNA, 25 bp, Homo sapien
gaggcacttgtgtctccaaactcac

SEQ ID NO: 4852894 - DNA, 25 bp, Homo sapien
ccagagaggcacttgtgtctccaaa

SEQ ID NO: 4852895 - DNA, 25 bp, Homo sapien
aaactcacatcttgggcaagaggct

SEQ ID NO: 4852896 - DNA, 25 bp, Homo sapien
ccagatcaaaggtttgagtaggtgg

SEQ ID NO: 4852897 - DNA, 25 bp, Homo sapien
gatctcttagatttgtggcattcca

SEQ ID NO: 4852898 - DNA, 25 bp, Homo sapien
agaagatctcttagatttgtggcat

SEQ ID NO: 4852899 - DNA, 25 bp, Homo sapien
ttccagatcaaaggtttgagtaggt

SEQ ID NO: 4852900 - DNA, 25 bp, Homo sapien
tctgcacaacactgagaggaaatcc

SEQ ID NO: 4852901 - DNA, 25 bp, Homo sapien
tacctcgtggtcacaaagtggctgc

SEQ ID NO: 4852902 - DNA, 25 bp, Homo sapien
gaatgtaccctatgctagaaaggcg

SEQ ID NO: 4852903 - DNA, 25 bp, Homo sapien
tagaaaggcgggctacaagcatctc

SEQ ID NO: 4852904 - DNA, 25 bp, Homo sapien
actctctttgtagtagccttcatgg

SEQ ID NO: 4852905 - DNA, 25 bp, Homo sapien
tcactctctttgtagtagccttcat

SEQ ID NO: 4852906 - DNA, 25 bp, Homo sapien
tttgtagtagccttcatgggctccc

SEQ ID NO: 4852907 - DNA, 25 bp, Homo sapien
tctctttgtagtagccttcatgggc

SEQ ID NO: 4852908 - DNA, 25 bp, Homo sapien
gggcataacacctttactgtccttc

SEQ ID NO: 4852909 - DNA, 25 bp, Homo sapien
ctgtccttctttgacagttccagga

SEQ ID NO: 4852910 - DNA, 25 bp, Homo sapien
tttactgtccttctttgacagttcc

SEQ ID NO: 4852911 - DNA, 25 bp, Homo sapien
cttgggcataacacctttactgtcc

SEQ ID NO: 4852912 - DNA, 25 bp, Homo sapien
gaatgactgccacattgaccttctg

SEQ ID NO: 4852913 - DNA, 25 bp, Homo sapien
aatagaagggctaggattggctctc

SEQ ID NO: 4852914 - DNA, 25 bp, Homo sapien
ctagctctggttctggatattggct

SEQ ID NO: 4852915 - DNA, 25 bp, Homo sapien
tgctgctggatgcaatgaatttcct

SEQ ID NO: 4852916 - DNA, 25 bp, Homo sapien
tttcttgtctcccattcccattttg

SEQ ID NO: 4852917 - DNA, 25 bp, Homo sapien
cctcagacacagcttttcttgtctc

SEQ ID NO: 4852918 - DNA, 25 bp, Homo sapien
tcccattcccattttgatcacacat

SEQ ID NO: 4852919 - DNA, 25 bp, Homo sapien
cttcctcagacacagcttttcttgt

SEQ ID NO: 4852920 - DNA, 25 bp, Homo sapien
cctccacctgctccctgatcgccat

SEQ ID NO: 4852921 - DNA, 25 bp, Homo sapien
ttcccctccacctgctccctgatcg

SEQ ID NO: 4852922 - DNA, 25 bp, Homo sapien
tcccctccacctgctccctgatcgc

SEQ ID NO: 4852923 - DNA, 25 bp, Homo sapien
ctcgccttcccctccacctgctccc

SEQ ID NO: 4852924 - DNA, 25 bp, Homo sapien
gttacatctgtactgtgcgacccca

SEQ ID NO: 4852925 - DNA, 25 bp, Homo sapien
aggaggaagcgtccatattcccgga

SEQ ID NO: 4852926 - DNA, 25 bp, Homo sapien
gaagcgtccatattcccggaggcag

SEQ ID NO: 4852927 - DNA, 25 bp, Homo sapien
tattcccggaggcagttacatctgt

SEQ ID NO: 4852928 - DNA, 25 bp, Homo sapien
tgggtgtcagctggagtcaccatgc

SEQ ID NO: 4852929 - DNA, 25 bp, Homo sapien
caaggaactctcttgggtgtcagct

SEQ ID NO: 4852930 - DNA, 25 bp, Homo sapien
ctctcttgggtgtcagctggagtca

SEQ ID NO: 4852931 - DNA, 25 bp, Homo sapien
tggagtcaccatgcagggggccaca

SEQ ID NO: 4852932 - DNA, 25 bp, Homo sapien
gccgggaggaccctggacaagggca

SEQ ID NO: 4852933 - DNA, 25 bp, Homo sapien
cttctcaggctccttccgaggtggg

SEQ ID NO: 4852934 - DNA, 25 bp, Homo sapien
ctcaggctccttccgaggtgggccg

SEQ ID NO: 4852935 - DNA, 25 bp, Homo sapien
catgaccacagtcagtttcttctca

SEQ ID NO: 4852936 - DNA, 25 bp, Homo sapien
agcaccatcctagcgactgcaagct

SEQ ID NO: 4852937 - DNA, 25 bp, Homo sapien
tgcagcaccatcctagcgactgcaa

SEQ ID NO: 4852938 - DNA, 25 bp, Homo sapien
ttttgaagtgaccaggaatcctgtt

SEQ ID NO: 4852939 - DNA, 25 bp, Homo sapien
tccagctgctttttgaagtgaccag

SEQ ID NO: 4852940 - DNA, 25 bp, Homo sapien
atgtcttgtgcacagtagggattgc

SEQ ID NO: 4852941 - DNA, 25 bp, Homo sapien
tccagaacttgggattgggagcaga

SEQ ID NO: 4852942 - DNA, 25 bp, Homo sapien
cacagtagggattgctgactcaggg

SEQ ID NO: 4852943 - DNA, 25 bp, Homo sapien
ggagcagaaacttttgtctcacgtt

SEQ ID NO: 4852944 - DNA, 25 bp, Homo sapien
tctcccacttttgcatccattccac

SEQ ID NO: 4852945 - DNA, 25 bp, Homo sapien
ttctcccacttttgcatccattcca

SEQ ID NO: 4852946 - DNA, 25 bp, Homo sapien
cccacttttgcatccattccacatg

SEQ ID NO: 4852947 - DNA, 25 bp, Homo sapien
acttttgcatccattccacatgcac

SEQ ID NO: 4852948 - DNA, 25 bp, Homo sapien
gttctgatgactccacatccctcag

SEQ ID NO: 4852949 - DNA, 25 bp, Homo sapien
aacttgagcaggctaggcctcttaa

SEQ ID NO: 4852950 - DNA, 25 bp, Homo sapien
tttatcatgcatcgattggtggaca

SEQ ID NO: 4852951 - DNA, 25 bp, Homo sapien
tatatgcctgggagcagatttgctg

SEQ ID NO: 4852952 - DNA, 25 bp, Homo sapien
ttctgtataataaacttgacctgaa

SEQ ID NO: 4852953 - DNA, 25 bp, Homo sapien
tgtaaagtatttatcccacccatta

SEQ ID NO: 4852954 - DNA, 25 bp, Homo sapien
gagagtgtgaccctctcctgtaaag

SEQ ID NO: 4852955 - DNA, 25 bp, Homo sapien
gaccctctcctgtaaagtatttatc

SEQ ID NO: 4852956 - DNA, 25 bp, Homo sapien
aaatatgttgtgtacactggttaga

SEQ ID NO: 4852957 - DNA, 25 bp, Homo sapien
tagataaaacttaaggccacaagga

SEQ ID NO: 4852958 - DNA, 25 bp, Homo sapien
gcccaggtaggcgatgtcagtgtgt

SEQ ID NO: 4852959 - DNA, 25 bp, Homo sapien
gcatgcacctggttggaagatgctc

SEQ ID NO: 4852960 - DNA, 25 bp, Homo sapien
ttttaaacaaatcatgactcacacg

SEQ ID NO: 4852961 - DNA, 25 bp, Homo sapien
gccttctgcccatccccttcagttc

SEQ ID NO: 4852962 - DNA, 25 bp, Homo sapien
tgcccatccccttcagttcacaaaa

SEQ ID NO: 4852963 - DNA, 25 bp, Homo sapien
tgggtcacattcctgaccaaggaca

SEQ ID NO: 4852964 - DNA, 25 bp, Homo sapien
cccggggcaagcaggtaacaaccag

SEQ ID NO: 4852965 - DNA, 25 bp, Homo sapien
ggcaagcaggtaacaaccagctggg

SEQ ID NO: 4852966 - DNA, 25 bp, Homo sapien
gaaataccaggggtgcaaactccag

SEQ ID NO: 4852967 - DNA, 25 bp, Homo sapien
gcaggtaacaaccagctgggtgcac

SEQ ID NO: 4852968 - DNA, 25 bp, Homo sapien
tcagtagatcaacttaaggagtctc

SEQ ID NO: 4852969 - DNA, 25 bp, Homo sapien
tattccattgatctcagtgcctgtt

SEQ ID NO: 4852970 - DNA, 25 bp, Homo sapien
tatagtaagggttagtccaacttca

SEQ ID NO: 4852971 - DNA, 25 bp, Homo sapien
gccagctaggataagggattgcact

SEQ ID NO: 4852972 - DNA, 25 bp, Homo sapien
tcactcaaagcctggaaccatgaag

SEQ ID NO: 4852973 - DNA, 25 bp, Homo sapien
tatctgttcaggcagtgtcatctcc

SEQ ID NO: 4852974 - DNA, 25 bp, Homo sapien
taggagttctccacctcactcaaag

SEQ ID NO: 4852975 - DNA, 25 bp, Homo sapien
gggctcgaaagctggtctgtaaact

SEQ ID NO: 4852976 - DNA, 25 bp, Homo sapien
tggtttctcccatccgcgggcctga

SEQ ID NO: 4852977 - DNA, 25 bp, Homo sapien
actacttcggaagcaggaagttggc

SEQ ID NO: 4852978 - DNA, 25 bp, Homo sapien
tccagtaacacggaagccctactac

SEQ ID NO: 4852979 - DNA, 25 bp, Homo sapien
gaagccctactacgccgcctgggag

SEQ ID NO: 4852980 - DNA, 25 bp, Homo sapien
cagggctattcaatgcagaaacatc

SEQ ID NO: 4852981 - DNA, 25 bp, Homo sapien
gtgaaggtgaagcaagacacctcct

SEQ ID NO: 4852982 - DNA, 25 bp, Homo sapien
gaaggtgaagcaagacacctccttt

SEQ ID NO: 4852983 - DNA, 25 bp, Homo sapien
aaggtgaagcaagacacctcctttg

SEQ ID NO: 4852984 - DNA, 25 bp, Homo sapien
tgaaggtgaagcaagacacctcctt

SEQ ID NO: 4852985 - DNA, 25 bp, Homo sapien
tgtgccaagaactttcatctgccgt

SEQ ID NO: 4852986 - DNA, 25 bp, Homo sapien
ccgtctatgaagttgctagtcctat

SEQ ID NO: 4852987 - DNA, 25 bp, Homo sapien
catctgccgtctagcttgtcttcac

SEQ ID NO: 4852988 - DNA, 25 bp, Homo sapien
gccatatagtttatcaagtgttcac

SEQ ID NO: 4852989 - DNA, 25 bp, Homo sapien
aactcaggtctataaccctggctca

SEQ ID NO: 4852990 - DNA, 25 bp, Homo sapien
ctcttcaaacaagccccgttccagc

SEQ ID NO: 4852991 - DNA, 25 bp, Homo sapien
tgaaaaaggcctttgaacaaatgtc

SEQ ID NO: 4852992 - DNA, 25 bp, Homo sapien
tgctggactcttccatttggatgtt

SEQ ID NO: 4852993 - DNA, 25 bp, Homo sapien
gctgacaggttagattctccctcct

SEQ ID NO: 4852994 - DNA, 25 bp, Homo sapien
aaaagggctgacaggttagattctc

SEQ ID NO: 4852995 - DNA, 25 bp, Homo sapien
tgagttgttaaccacacccctgctg

SEQ ID NO: 4852996 - DNA, 25 bp, Homo sapien
aagggctgacaggttagattctccc

SEQ ID NO: 4852997 - DNA, 25 bp, Homo sapien
ggtgtgcaacggctccggaggctgt

SEQ ID NO: 4852998 - DNA, 25 bp, Homo sapien
tactcctcgggcaccgccaggtgag

SEQ ID NO: 4852999 - DNA, 25 bp, Homo sapien
caagtacaggtaagtcggccgggca

SEQ ID NO: 4853000 - DNA, 25 bp, Homo sapien
ggaggcgcggactccagcgactact

SEQ ID NO: 4853001 - DNA, 25 bp, Homo sapien
cacatctggatggtcaccggagaca

SEQ ID NO: 4853002 - DNA, 25 bp, Homo sapien
gatacttcaaggtgctgccagatag

SEQ ID NO: 4853003 - DNA, 25 bp, Homo sapien
tgagacaggcttggcatttaacaca

SEQ ID NO: 4853004 - DNA, 25 bp, Homo sapien
tacagcattgaagaagacaagctcc

SEQ ID NO: 4853005 - DNA, 25 bp, Homo sapien
ccaggctggacttacgactttgaca

SEQ ID NO: 4853006 - DNA, 25 bp, Homo sapien
tttcagggagttcaaatctacagcc

SEQ ID NO: 4853007 - DNA, 25 bp, Homo sapien
gatacggttctttcctcaacagggc

SEQ ID NO: 4853008 - DNA, 25 bp, Homo sapien
tgtacgtactcaatgccagctgtgt

SEQ ID NO: 4853009 - DNA, 25 bp, Homo sapien
cattatcctacaaagtttacatatg

SEQ ID NO: 4853010 - DNA, 25 bp, Homo sapien
tcaatttgaaacagctaactctctt

SEQ ID NO: 4853011 - DNA, 25 bp, Homo sapien
gactatgatgcccacagaacatgaa

SEQ ID NO: 4853012 - DNA, 25 bp, Homo sapien
gagatgggagtgaacagttacaatg

SEQ ID NO: 4853013 - DNA, 25 bp, Homo sapien
cagcttcaatgcccaagcagcagtt

SEQ ID NO: 4853014 - DNA, 25 bp, Homo sapien
agcttcaatgcccaagcagcagttg

SEQ ID NO: 4853015 - DNA, 25 bp, Homo sapien
cctggccaagccctgtctgttctgt

SEQ ID NO: 4853016 - DNA, 25 bp, Homo sapien
tgcaaaggtgcttgagggtacatcc

SEQ ID NO: 4853017 - DNA, 25 bp, Homo sapien
tcgttgtttcaaccagggtgggcac

SEQ ID NO: 4853018 - DNA, 25 bp, Homo sapien
ggaagccaaccaagtcgtcagggcg

SEQ ID NO: 4853019 - DNA, 25 bp, Homo sapien
acatcacttgcaaccctgtgggaag

SEQ ID NO: 4853020 - DNA, 25 bp, Homo sapien
ccatgtgtcatagaagctgcctacc

SEQ ID NO: 4853021 - DNA, 25 bp, Homo sapien
ggtgtctcagacaggctcagtcact

SEQ ID NO: 4853022 - DNA, 25 bp, Homo sapien
cattccccagggataggcaggtcct

SEQ ID NO: 4853023 - DNA, 25 bp, Homo sapien
tctgcacaaataggttactgggtcc

SEQ ID NO: 4853024 - DNA, 25 bp, Homo sapien
ggatgacttttagtggtctgcccca

SEQ ID NO: 4853025 - DNA, 25 bp, Homo sapien
gagcgtgagcttcagacagtttggc

SEQ ID NO: 4853026 - DNA, 25 bp, Homo sapien
tgcagttcagcaccaaaggagcgtg

SEQ ID NO: 4853027 - DNA, 25 bp, Homo sapien
taatgcggtgggtagctccctatca

SEQ ID NO: 4853028 - DNA, 25 bp, Homo sapien
ggtttgtgaaacgtgaggcctctcc

SEQ ID NO: 4853029 - DNA, 25 bp, Homo sapien
gctgctccccaagaagagtatctca

SEQ ID NO: 4853030 - DNA, 25 bp, Homo sapien
taaatctccgttgttgaagctgccc

SEQ ID NO: 4853031 - DNA, 25 bp, Homo sapien
tgaggacacaggcaacagatggcat

SEQ ID NO: 4853032 - DNA, 25 bp, Homo sapien
actaggcgacggcatcaagatgatg

SEQ ID NO: 4853033 - DNA, 25 bp, Homo sapien
aggtgtgtgtgcacgccgggaagag

SEQ ID NO: 4853034 - DNA, 25 bp, Homo sapien
ggttgctaagcatatcgttactagg

SEQ ID NO: 4853035 - DNA, 25 bp, Homo sapien
catatcgttactaggcgacggcatc

SEQ ID NO: 4853036 - DNA, 25 bp, Homo sapien
tgcccaatgccaagtagaagccaag

SEQ ID NO: 4853037 - DNA, 25 bp, Homo sapien
gatgagccactatctctggagcata

SEQ ID NO: 4853038 - DNA, 25 bp, Homo sapien
cagtgcttcacatacagtgctggga

SEQ ID NO: 4853039 - DNA, 25 bp, Homo sapien
cctgacaacaagtgcaagcagagag

SEQ ID NO: 4853040 - DNA, 25 bp, Homo sapien
tcttgaccgggtgataaccagccac

SEQ ID NO: 4853041 - DNA, 25 bp, Homo sapien
tgaagtcttgaccgggtgataacca

SEQ ID NO: 4853042 - DNA, 25 bp, Homo sapien
aagtcttgaccgggtgataaccagc

SEQ ID NO: 4853043 - DNA, 25 bp, Homo sapien
gtcttgaccgggtgataaccagcca

SEQ ID NO: 4853044 - DNA, 25 bp, Homo sapien
ccccacttattaacaggaggctcta

SEQ ID NO: 4853045 - DNA, 25 bp, Homo sapien
cacttattaacaggaggctctactg

SEQ ID NO: 4853046 - DNA, 25 bp, Homo sapien
gggttaacagttcgcacttgtgtta

SEQ ID NO: 4853047 - DNA, 25 bp, Homo sapien
tgtgttatgtccgacctcttgcaac

SEQ ID NO: 4853048 - DNA, 25 bp, Homo sapien
cccgtgattaaagggattggaccag

SEQ ID NO: 4853049 - DNA, 25 bp, Homo sapien
cattaggaccagtagagggatggaa

SEQ ID NO: 4853050 - DNA, 25 bp, Homo sapien
gttctagcctcagatggaatccatt

SEQ ID NO: 4853051 - DNA, 25 bp, Homo sapien
ggtgattattacagttcctatcggc

SEQ ID NO: 4853052 - DNA, 25 bp, Homo sapien
tactactatgcaatgtatcccatgt

SEQ ID NO: 4853053 - DNA, 25 bp, Homo sapien
tattcgggtgatggttgcactacaa

SEQ ID NO: 4853054 - DNA, 25 bp, Homo sapien
catgtaacaaaatcactctcacttg

SEQ ID NO: 4853055 - DNA, 25 bp, Homo sapien
tacaagcccagactttactactatg

SEQ ID NO: 4853056 - DNA, 25 bp, Homo sapien
ggtcgtacaggcagaatactaaacc

SEQ ID NO: 4853057 - DNA, 25 bp, Homo sapien
tactaaaccagacataagtggacat

SEQ ID NO: 4853058 - DNA, 25 bp, Homo sapien
tgcagcccacggctcttctgagaac

SEQ ID NO: 4853059 - DNA, 25 bp, Homo sapien
tctgagaacaaacaggtcgtacagg

SEQ ID NO: 4853060 - DNA, 25 bp, Homo sapien
ctatgtttggcataacggtgccggg

SEQ ID NO: 4853061 - DNA, 25 bp, Homo sapien
ccccgtgtcggatgtgagtctatgt

SEQ ID NO: 4853062 - DNA, 25 bp, Homo sapien
catctctataaaaatcgggcatcca

SEQ ID NO: 4853063 - DNA, 25 bp, Homo sapien
aatcctgaatcctgggtttcatctc

SEQ ID NO: 4853064 - DNA, 25 bp, Homo sapien
gatctcagggagtgacaagtctcaa

SEQ ID NO: 4853065 - DNA, 25 bp, Homo sapien
gcctccctcccagggcggagctcgg

SEQ ID NO: 4853066 - DNA, 25 bp, Homo sapien
gcaaacatttggtgccacgatggat

SEQ ID NO: 4853067 - DNA, 25 bp, Homo sapien
cagggagtgacaagtctcaaaggca

SEQ ID NO: 4853068 - DNA, 25 bp, Homo sapien
gggattataggtgcccgcccccata

SEQ ID NO: 4853069 - DNA, 25 bp, Homo sapien
gtgcccgcccccatacccagctatt

SEQ ID NO: 4853070 - DNA, 25 bp, Homo sapien
ttataggtgcccgcccccataccca

SEQ ID NO: 4853071 - DNA, 25 bp, Homo sapien
ggtgcccgcccccatacccagctat

SEQ ID NO: 4853072 - DNA, 25 bp, Homo sapien
catagtaatgtcctgtgccatcaca

SEQ ID NO: 4853073 - DNA, 25 bp, Homo sapien
cacactcactcgcagattccgagag

SEQ ID NO: 4853074 - DNA, 25 bp, Homo sapien
gagagcaactttcggttctgcaagc

SEQ ID NO: 4853075 - DNA, 25 bp, Homo sapien
actgtaagtgccctagaccggtgca

SEQ ID NO: 4853076 - DNA, 25 bp, Homo sapien
gaatcatagcctgtatgtatttatt

SEQ ID NO: 4853077 - DNA, 25 bp, Homo sapien
cattagcttcaaagagccattcctt

SEQ ID NO: 4853078 - DNA, 25 bp, Homo sapien
gaaagatttagatagccattagctt

SEQ ID NO: 4853079 - DNA, 25 bp, Homo sapien
tattacgaagatgcaaaagagaggc

SEQ ID NO: 4853080 - DNA, 25 bp, Homo sapien
ggcagcagctaagatcggcacattg

SEQ ID NO: 4853081 - DNA, 25 bp, Homo sapien
cagcagctaagatcggcacattgca

SEQ ID NO: 4853082 - DNA, 25 bp, Homo sapien
agcagctaagatcggcacattgcag

SEQ ID NO: 4853083 - DNA, 25 bp, Homo sapien
cagctaagatcggcacattgcagtc

SEQ ID NO: 4853084 - DNA, 25 bp, Homo sapien
gcagaccttgaggatacgcacgtcc

SEQ ID NO: 4853085 - DNA, 25 bp, Homo sapien
gatctccgtctggacagtgcatttg

SEQ ID NO: 4853086 - DNA, 25 bp, Homo sapien
tctactggtaccaccaccatgggct

SEQ ID NO: 4853087 - DNA, 25 bp, Homo sapien
cgtgcccaactttactcgactcagg

SEQ ID NO: 4853088 - DNA, 25 bp, Homo sapien
gtggatatgggagagctgcgaggct

SEQ ID NO: 4853089 - DNA, 25 bp, Homo sapien
ctcttccacccaggggtggatatgg

SEQ ID NO: 4853090 - DNA, 25 bp, Homo sapien
gatatgggagagctgcgaggctgca

SEQ ID NO: 4853091 - DNA, 25 bp, Homo sapien
tccacccaggggtggatatgggaga

SEQ ID NO: 4853092 - DNA, 25 bp, Homo sapien
tattctctgggcaattagaggccct

SEQ ID NO: 4853093 - DNA, 25 bp, Homo sapien
tccttacagcatgatccccgggtga

SEQ ID NO: 4853094 - DNA, 25 bp, Homo sapien
cagctatttgcaataagcaggtggc

SEQ ID NO: 4853095 - DNA, 25 bp, Homo sapien
ggccacacaaccagtaaggatggag

SEQ ID NO: 4853096 - DNA, 25 bp, Homo sapien
tctgtggcccttcttagtgatttac

SEQ ID NO: 4853097 - DNA, 25 bp, Homo sapien
gcatatcagcctatttaaggttctg

SEQ ID NO: 4853098 - DNA, 25 bp, Homo sapien
gattggccagagatctagtggttta

SEQ ID NO: 4853099 - DNA, 25 bp, Homo sapien
aaaagttccctaaatgattggccag

SEQ ID NO: 4853100 - DNA, 25 bp, Homo sapien
gtccagtagtggctctaaattcttc

SEQ ID NO: 4853101 - DNA, 25 bp, Homo sapien
ctcccgggagcacctgtccagtagt

SEQ ID NO: 4853102 - DNA, 25 bp, Homo sapien
gcacctgtccagtagtggctctaaa

SEQ ID NO: 4853103 - DNA, 25 bp, Homo sapien
ctgagccctatagaggggtacaggt

SEQ ID NO: 4853104 - DNA, 25 bp, Homo sapien
tgcagccagtggatctcatcggact

SEQ ID NO: 4853105 - DNA, 25 bp, Homo sapien
cgatccgcccgctcagcaggatgga

SEQ ID NO: 4853106 - DNA, 25 bp, Homo sapien
atagcactcagccaaccggatgttg

SEQ ID NO: 4853107 - DNA, 25 bp, Homo sapien
cggcttccacgtgcagacactcata

SEQ ID NO: 4853108 - DNA, 25 bp, Homo sapien
caagtagcggatttgaaggtcatac

SEQ ID NO: 4853109 - DNA, 25 bp, Homo sapien
aatagagcagcgtggtcctgtcctc

SEQ ID NO: 4853110 - DNA, 25 bp, Homo sapien
aggctctccatgaagtcttctggca

SEQ ID NO: 4853111 - DNA, 25 bp, Homo sapien
ctgttggtaaaaatagagcagcgtg

SEQ ID NO: 4853112 - DNA, 25 bp, Homo sapien
gctgaccttgctggcgtagcgctgc

SEQ ID NO: 4853113 - DNA, 25 bp, Homo sapien
cgctgaccttgctggcgtagcgctg

SEQ ID NO: 4853114 - DNA, 25 bp, Homo sapien
gggccatgccctcgctgaccttgct

SEQ ID NO: 4853115 - DNA, 25 bp, Homo sapien
tgaccttgctggcgtagcgctgcat

SEQ ID NO: 4853116 - DNA, 25 bp, Homo sapien
gctggtcaaaaacgcctaggataag

SEQ ID NO: 4853117 - DNA, 25 bp, Homo sapien
taaccatgaggtcacagataaggct

SEQ ID NO: 4853118 - DNA, 25 bp, Homo sapien
gataaggctccggaaatgcagttct

SEQ ID NO: 4853119 - DNA, 25 bp, Homo sapien
tagggccaggacgtctccagtttat

SEQ ID NO: 4853120 - DNA, 25 bp, Homo sapien
tattgcccatgatttgtaggtagcc

SEQ ID NO: 4853121 - DNA, 25 bp, Homo sapien
ctgccttatggcctaattttccgaa

SEQ ID NO: 4853122 - DNA, 25 bp, Homo sapien
agagccacagccctagaaaattctg

SEQ ID NO: 4853123 - DNA, 25 bp, Homo sapien
ggcaggtgacctaatcaatgatgtt

SEQ ID NO: 4853124 - DNA, 25 bp, Homo sapien
gagctcgaagttggacttcttgtca

SEQ ID NO: 4853125 - DNA, 25 bp, Homo sapien
tctaggagctcgaagttggacttct

SEQ ID NO: 4853126 - DNA, 25 bp, Homo sapien
gctcgaagttggacttcttgtcaag

SEQ ID NO: 4853127 - DNA, 25 bp, Homo sapien
acttcttgtcaagtgcattgtgggg

SEQ ID NO: 4853128 - DNA, 25 bp, Homo sapien
tgcatctgctttgggaaaaacaagt

SEQ ID NO: 4853129 - DNA, 25 bp, Homo sapien
tgctttgggaaaaacaagtccagcc

SEQ ID NO: 4853130 - DNA, 25 bp, Homo sapien
ttaagttctcctgcatctgctttgg

SEQ ID NO: 4853131 - DNA, 25 bp, Homo sapien
atctgctttgggaaaaacaagtcca

SEQ ID NO: 4853132 - DNA, 25 bp, Homo sapien
ctctagtctcgggaatcagcacgaa

SEQ ID NO: 4853133 - DNA, 25 bp, Homo sapien
gaggtcctcgcccattggtttcctc

SEQ ID NO: 4853134 - DNA, 25 bp, Homo sapien
cacgaagaggtcctcgcccattggt

SEQ ID NO: 4853135 - DNA, 25 bp, Homo sapien
tctcgggaatcagcacgaagaggtc

SEQ ID NO: 4853136 - DNA, 25 bp, Homo sapien
atgtaacagttggatccccagcccc

SEQ ID NO: 4853137 - DNA, 25 bp, Homo sapien
gcctcgatacggagccggagcccag

SEQ ID NO: 4853138 - DNA, 25 bp, Homo sapien
gcccaggcatgtaacagttggatcc

SEQ ID NO: 4853139 - DNA, 25 bp, Homo sapien
cgcagagctgatacggcctcgatac

SEQ ID NO: 4853140 - DNA, 25 bp, Homo sapien
aatgagttcacagcggtaggtctcc

SEQ ID NO: 4853141 - DNA, 25 bp, Homo sapien
ttgaagaacttcatgacgcactcct

SEQ ID NO: 4853142 - DNA, 25 bp, Homo sapien
tctcctggtcgatgttggcgaagcc

SEQ ID NO: 4853143 - DNA, 25 bp, Homo sapien
tctgctggatcatcttccggaactg

SEQ ID NO: 4853144 - DNA, 25 bp, Homo sapien
ttccaccgacggcaggtcagcgagg

SEQ ID NO: 4853145 - DNA, 25 bp, Homo sapien
cagcgaggtcctgctgcctgagtga

SEQ ID NO: 4853146 - DNA, 25 bp, Homo sapien
agaggatcaagagagcccgccatta

SEQ ID NO: 4853147 - DNA, 25 bp, Homo sapien
agaatctgcagcgattgcagcctct

SEQ ID NO: 4853148 - DNA, 25 bp, Homo sapien
cctcctgacaccttgcctgtcctgc

SEQ ID NO: 4853149 - DNA, 25 bp, Homo sapien
cgaaaccctggccatatggatcttc

SEQ ID NO: 4853150 - DNA, 25 bp, Homo sapien
cttcaggcaaggggatgcttttgac

SEQ ID NO: 4853151 - DNA, 25 bp, Homo sapien
aaaccctggccatatggatcttccc

SEQ ID NO: 4853152 - DNA, 25 bp, Homo sapien
tccctaagctagacacaagccactg

SEQ ID NO: 4853153 - DNA, 25 bp, Homo sapien
aacttgaagaaaagctccctaagct

SEQ ID NO: 4853154 - DNA, 25 bp, Homo sapien
ggactgttgttccagagctgtcctc

SEQ ID NO: 4853155 - DNA, 25 bp, Homo sapien
aaggagagtggactgttgttccaga

SEQ ID NO: 4853156 - DNA, 25 bp, Homo sapien
ctttagggccaatgaccaggtccac

SEQ ID NO: 4853157 - DNA, 25 bp, Homo sapien
ctttgcgtcctgactagtcagctgg

SEQ ID NO: 4853158 - DNA, 25 bp, Homo sapien
gtcagctggcggatccctttagggc

SEQ ID NO: 4853159 - DNA, 25 bp, Homo sapien
ctgactagtcagctggcggatccct

SEQ ID NO: 4853160 - DNA, 25 bp, Homo sapien
tgctgccatctctaaatgctctcca

SEQ ID NO: 4853161 - DNA, 25 bp, Homo sapien
gctgctcacgccagggcatggcctt

SEQ ID NO: 4853162 - DNA, 25 bp, Homo sapien
agggcatggccttagaagaactctg

SEQ ID NO: 4853163 - DNA, 25 bp, Homo sapien
cactgctgctcacgccagggcatgg

SEQ ID NO: 4853164 - DNA, 25 bp, Homo sapien
aagggggagcttcagaccatcccac

SEQ ID NO: 4853165 - DNA, 25 bp, Homo sapien
agcttcagaccatcccactaccagg

SEQ ID NO: 4853166 - DNA, 25 bp, Homo sapien
taggccatgcagattggtcagtatg

SEQ ID NO: 4853167 - DNA, 25 bp, Homo sapien
ggactaggccatgcagattggtcag

SEQ ID NO: 4853168 - DNA, 25 bp, Homo sapien
gggcaccttcaatgcccagctgaag

SEQ ID NO: 4853169 - DNA, 25 bp, Homo sapien
gaggcacctgatggacctgatctgc

SEQ ID NO: 4853170 - DNA, 25 bp, Homo sapien
cagctgaagtactgcctggccctcc

SEQ ID NO: 4853171 - DNA, 25 bp, Homo sapien
tggacctgatctgcttgaactcggc

SEQ ID NO: 4853172 - DNA, 25 bp, Homo sapien
cggcagtagccgtctatgaggtcag

SEQ ID NO: 4853173 - DNA, 25 bp, Homo sapien
cctgcagccggcagtagccgtctat

SEQ ID NO: 4853174 - DNA, 25 bp, Homo sapien
tagccgtctatgaggtcagccatgt

SEQ ID NO: 4853175 - DNA, 25 bp, Homo sapien
gtctatgaggtcagccatgttctca

SEQ ID NO: 4853176 - DNA, 25 bp, Homo sapien
gatgatgagagagccttggtgctca

SEQ ID NO: 4853177 - DNA, 25 bp, Homo sapien
tggatgatgagagagccttggtgct

SEQ ID NO: 4853178 - DNA, 25 bp, Homo sapien
tcctaggatggatgatgagagagcc

SEQ ID NO: 4853179 - DNA, 25 bp, Homo sapien
ggatggatgatgagagagccttggt

SEQ ID NO: 4853180 - DNA, 25 bp, Homo sapien
ggcaggctgttccgcttctcaccat

SEQ ID NO: 4853181 - DNA, 25 bp, Homo sapien
ggggcaggctgttccgcttctcacc

SEQ ID NO: 4853182 - DNA, 25 bp, Homo sapien
gggcaggctgttccgcttctcacca

SEQ ID NO: 4853183 - DNA, 25 bp, Homo sapien
aggccggtaatgttcccctgggcag

SEQ ID NO: 4853184 - DNA, 25 bp, Homo sapien
cagaggccggtaatgttcccctggg

SEQ ID NO: 4853185 - DNA, 25 bp, Homo sapien
gtgagctcagaggccggtaatgttc

SEQ ID NO: 4853186 - DNA, 25 bp, Homo sapien
gctcagaggccggtaatgttcccct

SEQ ID NO: 4853187 - DNA, 25 bp, Homo sapien
gctctctgagaggtgggaccgccgg

SEQ ID NO: 4853188 - DNA, 25 bp, Homo sapien
ctatgctgcagctctctgagaggtg

SEQ ID NO: 4853189 - DNA, 25 bp, Homo sapien
tgagaggtgggaccgccgggcctcc

SEQ ID NO: 4853190 - DNA, 25 bp, Homo sapien
ctgcagctctctgagaggtgggacc

SEQ ID NO: 4853191 - DNA, 25 bp, Homo sapien
tcgcagggtttcgtcgggaatctct

SEQ ID NO: 4853192 - DNA, 25 bp, Homo sapien
tcgggaatctctgcgtagatgtctg

SEQ ID NO: 4853193 - DNA, 25 bp, Homo sapien
cttcgcagggtttcgtcgggaatct

SEQ ID NO: 4853194 - DNA, 25 bp, Homo sapien
gtttcgtcgggaatctctgcgtaga

SEQ ID NO: 4853195 - DNA, 25 bp, Homo sapien
tccccaagaatacgattcaggacca

SEQ ID NO: 4853196 - DNA, 25 bp, Homo sapien
gccttccccaagaatacgattcagg

SEQ ID NO: 4853197 - DNA, 25 bp, Homo sapien
caagaatacgattcaggaccacatc

SEQ ID NO: 4853198 - DNA, 25 bp, Homo sapien
agaatacgattcaggaccacatctt

SEQ ID NO: 4853199 - DNA, 25 bp, Homo sapien
tggtcaaatgagtcaagcccctggc

SEQ ID NO: 4853200 - DNA, 25 bp, Homo sapien
ccccaagtggatgaaggctgtgcca

SEQ ID NO: 4853201 - DNA, 25 bp, Homo sapien
gctagaagcgttaccacagcggtca

SEQ ID NO: 4853202 - DNA, 25 bp, Homo sapien
tgcccagtggacaagaggcccttag

SEQ ID NO: 4853203 - DNA, 25 bp, Homo sapien
acaagagtgtgttcaggaccccttg

SEQ ID NO: 4853204 - DNA, 25 bp, Homo sapien
aagagtgtgttcaggaccccttggt

SEQ ID NO: 4853205 - DNA, 25 bp, Homo sapien
agtgtgttcaggaccccttggtcca

SEQ ID NO: 4853206 - DNA, 25 bp, Homo sapien
tgtgttcaggaccccttggtccagc

SEQ ID NO: 4853207 - DNA, 25 bp, Homo sapien
tcttgcaggtcttgacagctacatt

SEQ ID NO: 4853208 - DNA, 25 bp, Homo sapien
tgcagtctttcttgcaggtcttgac

SEQ ID NO: 4853209 - DNA, 25 bp, Homo sapien
tctttcttgcaggtcttgacagcta

SEQ ID NO: 4853210 - DNA, 25 bp, Homo sapien
tccagagtgcagtctttcttgcagg

SEQ ID NO: 4853211 - DNA, 25 bp, Homo sapien
gatacaattccatgatgatccaggt

SEQ ID NO: 4853212 - DNA, 25 bp, Homo sapien
cgatcagcttcacgatgtgcgggtg

SEQ ID NO: 4853213 - DNA, 25 bp, Homo sapien
cgggtggtcgaggttcttcatgatc

SEQ ID NO: 4853214 - DNA, 25 bp, Homo sapien
cctcttcaatgatgccgatcagctt

SEQ ID NO: 4853215 - DNA, 25 bp, Homo sapien
tatctgcagtgagtacagcacgagg

SEQ ID NO: 4853216 - DNA, 25 bp, Homo sapien
ggccatggctttgcatatctgcagt

SEQ ID NO: 4853217 - DNA, 25 bp, Homo sapien
cagggagttcttgttccgctccagg

SEQ ID NO: 4853218 - DNA, 25 bp, Homo sapien
cgcagttgatgctctccaggtaggc

SEQ ID NO: 4853219 - DNA, 25 bp, Homo sapien
ccacaagccctgcttctacccagag

SEQ ID NO: 4853220 - DNA, 25 bp, Homo sapien
agaggccttgaggatctggtgaagg

SEQ ID NO: 4853221 - DNA, 25 bp, Homo sapien
acccacaagccctgcttctacccag

SEQ ID NO: 4853222 - DNA, 25 bp, Homo sapien
cctggcttccataccgctggccact

SEQ ID NO: 4853223 - DNA, 25 bp, Homo sapien
aggccaccaggatgttccggacagc

SEQ ID NO: 4853224 - DNA, 25 bp, Homo sapien
ggaggccaccaggatgttccggaca

SEQ ID NO: 4853225 - DNA, 25 bp, Homo sapien
tttgtaatagtcctcgtcctcaatg

SEQ ID NO: 4853226 - DNA, 25 bp, Homo sapien
gtcctcaatgtaccgggaaagacca

SEQ ID NO: 4853227 - DNA, 25 bp, Homo sapien
ctgtcgtgaagcgtcggaagttaat

SEQ ID NO: 4853228 - DNA, 25 bp, Homo sapien
tcactggctgtcgtgaagcgtcgga

SEQ ID NO: 4853229 - DNA, 25 bp, Homo sapien
gactctggggacatccatttgatgg

SEQ ID NO: 4853230 - DNA, 25 bp, Homo sapien
gaagcgtcggaagttaatggactct

SEQ ID NO: 4853231 - DNA, 25 bp, Homo sapien
ctggggtgtaagggagcgtcaggcc

SEQ ID NO: 4853232 - DNA, 25 bp, Homo sapien
taaaggaccggtggacagagatcag

SEQ ID NO: 4853233 - DNA, 25 bp, Homo sapien
tcatgagggtataaaggaccggtgg

SEQ ID NO: 4853234 - DNA, 25 bp, Homo sapien
cgatgacatccttgttctccagcca

SEQ ID NO: 4853235 - DNA, 25 bp, Homo sapien
aaagctcaggatctcccacatgcac

SEQ ID NO: 4853236 - DNA, 25 bp, Homo sapien
tgtggctctcaaggcctcagagtga

SEQ ID NO: 4853237 - DNA, 25 bp, Homo sapien
tcagagtgaatcaggactcccagct

SEQ ID NO: 4853238 - DNA, 25 bp, Homo sapien
tggtcgatgcctctgatgggaacac

SEQ ID NO: 4853239 - DNA, 25 bp, Homo sapien
cctggaacggttaggaaacactgat

SEQ ID NO: 4853240 - DNA, 25 bp, Homo sapien
cggtagcgagcattcctctcttgct

SEQ ID NO: 4853241 - DNA, 25 bp, Homo sapien
gttcggtagcgagcattcctctctt

SEQ ID NO: 4853242 - DNA, 25 bp, Homo sapien
tcggtagcgagcattcctctcttgc

SEQ ID NO: 4853243 - DNA, 25 bp, Homo sapien
gggttcggtagcgagcattcctctc

SEQ ID NO: 4853244 - DNA, 25 bp, Homo sapien
tgcggagggggtctgtacttaggtc

SEQ ID NO: 4853245 - DNA, 25 bp, Homo sapien
ggagccaggaggttggtttgcggag

SEQ ID NO: 4853246 - DNA, 25 bp, Homo sapien
agggggtctgtacttaggtcggctg

SEQ ID NO: 4853247 - DNA, 25 bp, Homo sapien
taactccctgttttaaatattgcac

SEQ ID NO: 4853248 - DNA, 25 bp, Homo sapien
caggtgtgttccaccctacctaact

SEQ ID NO: 4853249 - DNA, 25 bp, Homo sapien
aataagtatatcacaattttattgt

SEQ ID NO: 4853250 - DNA, 25 bp, Homo sapien
aatattgcacatgggtatatctctt

SEQ ID NO: 4853251 - DNA, 25 bp, Homo sapien
tactccatagggctggtgagcgtag

SEQ ID NO: 4853252 - DNA, 25 bp, Homo sapien
tggtgagcgtaggagagctggcaca

SEQ ID NO: 4853253 - DNA, 25 bp, Homo sapien
gcatgctgtggcgtttgaagacatt

SEQ ID NO: 4853254 - DNA, 25 bp, Homo sapien
tgagttaacgggagatggatactcc

SEQ ID NO: 4853255 - DNA, 25 bp, Homo sapien
aaattggacgaaggcaatgctaccc

SEQ ID NO: 4853256 - DNA, 25 bp, Homo sapien
gagggtggagaaaccgaacacagcc

SEQ ID NO: 4853257 - DNA, 25 bp, Homo sapien
tctaaagccctgatacaaaaggtct

SEQ ID NO: 4853258 - DNA, 25 bp, Homo sapien
tattgttaagcacacgcaaagacag

SEQ ID NO: 4853259 - DNA, 25 bp, Homo sapien
tggggctttggacctattcataatt

SEQ ID NO: 4853260 - DNA, 25 bp, Homo sapien
ggctttggacctattcataatttta

SEQ ID NO: 4853261 - DNA, 25 bp, Homo sapien
ctgagccactggtagtcctccacca

SEQ ID NO: 4853262 - DNA, 25 bp, Homo sapien
ttgtccaggatttgccgcattttga

SEQ ID NO: 4853263 - DNA, 25 bp, Homo sapien
gcctgagccactggtagtcctccac

SEQ ID NO: 4853264 - DNA, 25 bp, Homo sapien
gtccaggatttgccgcattttgacc

SEQ ID NO: 4853265 - DNA, 25 bp, Homo sapien
caccaagaatgcaggggacccttgc

SEQ ID NO: 4853266 - DNA, 25 bp, Homo sapien
gaaagcaccaagaatgcaggggacc

SEQ ID NO: 4853267 - DNA, 25 bp, Homo sapien
agagcgaaggactaagaattctgga

SEQ ID NO: 4853268 - DNA, 25 bp, Homo sapien
ggaagaaacaagagcgaaggactaa

SEQ ID NO: 4853269 - DNA, 25 bp, Homo sapien
tggggacttatcattcatataaacc

SEQ ID NO: 4853270 - DNA, 25 bp, Homo sapien
acttatcattcatataaaccatggg

SEQ ID NO: 4853271 - DNA, 25 bp, Homo sapien
aatggggacttatcattcatataaa

SEQ ID NO: 4853272 - DNA, 25 bp, Homo sapien
gggacttatcattcatataaaccat

SEQ ID NO: 4853273 - DNA, 25 bp, Homo sapien
ggtagccgacctccttctctggcgt

SEQ ID NO: 4853274 - DNA, 25 bp, Homo sapien
cactgcttaacttttcccacgggag

SEQ ID NO: 4853275 - DNA, 25 bp, Homo sapien
gagctctgtgaccactctaggcagc

SEQ ID NO: 4853276 - DNA, 25 bp, Homo sapien
taaatcatggccgatgctgcaggga

SEQ ID NO: 4853277 - DNA, 25 bp, Homo sapien
gaagataataaatggtcccaggccc

SEQ ID NO: 4853278 - DNA, 25 bp, Homo sapien
taccaccaggagacttcagggaaat

SEQ ID NO: 4853279 - DNA, 25 bp, Homo sapien
cactgttgtcccttttataggaaga

SEQ ID NO: 4853280 - DNA, 25 bp, Homo sapien
tgctgacatcaaatgagccccttcc

SEQ ID NO: 4853281 - DNA, 25 bp, Homo sapien
tggttttgcagtagtcagggacagc

SEQ ID NO: 4853282 - DNA, 25 bp, Homo sapien
gcttctgtgggggccctgtgaactc

SEQ ID NO: 4853283 - DNA, 25 bp, Homo sapien
ctgtgcgcccagcctcgggggcttc

SEQ ID NO: 4853284 - DNA, 25 bp, Homo sapien
tgcgcccagcctcgggggcttctgt

SEQ ID NO: 4853285 - DNA, 25 bp, Homo sapien
gggcttctgtgggggccctgtgaac

SEQ ID NO: 4853286 - DNA, 25 bp, Homo sapien
cagggagccttaacggaatactagt

SEQ ID NO: 4853287 - DNA, 25 bp, Homo sapien
gggcacggaatgattctttcctggg

SEQ ID NO: 4853288 - DNA, 25 bp, Homo sapien
cagcccgattggaaaggactcttct

SEQ ID NO: 4853289 - DNA, 25 bp, Homo sapien
tagaataattgtgccctgtcccggg

SEQ ID NO: 4853290 - DNA, 25 bp, Homo sapien
caggtcatcagtccggtccaggtta

SEQ ID NO: 4853291 - DNA, 25 bp, Homo sapien
tcagtccggtccaggttagctgtgg

SEQ ID NO: 4853292 - DNA, 25 bp, Homo sapien
gacagagctcattcttgagctccag

SEQ ID NO: 4853293 - DNA, 25 bp, Homo sapien
attgaggtacaccaggtcatcagtc

SEQ ID NO: 4853294 - DNA, 25 bp, Homo sapien
tcccgatgagcttccgcagggtcag

SEQ ID NO: 4853295 - DNA, 25 bp, Homo sapien
aggaaggcaggagatcatccacgct

SEQ ID NO: 4853296 - DNA, 25 bp, Homo sapien
tgtccgtgaagatgacggcaaggaa

SEQ ID NO: 4853297 - DNA, 25 bp, Homo sapien
ctctgtccgtgaagatgacggcaag

SEQ ID NO: 4853298 - DNA, 25 bp, Homo sapien
cacaaatgttcctaatattatctag

SEQ ID NO: 4853299 - DNA, 25 bp, Homo sapien
ccaaatggttaatgatattttgacc

SEQ ID NO: 4853300 - DNA, 25 bp, Homo sapien
aatattttcagtgaactttggccag

SEQ ID NO: 4853301 - DNA, 25 bp, Homo sapien
gaactttggccagatccataagaga

SEQ ID NO: 4853302 - DNA, 25 bp, Homo sapien
gatagggaagccacagaggtgtcca

SEQ ID NO: 4853303 - DNA, 25 bp, Homo sapien
acagaggtgtccacctgcatgctgg

SEQ ID NO: 4853304 - DNA, 25 bp, Homo sapien
acaggacaggttgagaggccacaaa

SEQ ID NO: 4853305 - DNA, 25 bp, Homo sapien
cacaaagtctgtgcttggaggatag

SEQ ID NO: 4853306 - DNA, 25 bp, Homo sapien
acttagggaggtcacggcgttctgc

SEQ ID NO: 4853307 - DNA, 25 bp, Homo sapien
ggttcttggcgtccacagccagggt

SEQ ID NO: 4853308 - DNA, 25 bp, Homo sapien
tgtgccagccgcatcttgttgatga

SEQ ID NO: 4853309 - DNA, 25 bp, Homo sapien
ggtccacagcgtcgagcaggttctt

SEQ ID NO: 4853310 - DNA, 25 bp, Homo sapien
gactcccaattagcttgttcctgga

SEQ ID NO: 4853311 - DNA, 25 bp, Homo sapien
gcacatgctgtcagtccagaccaaa

SEQ ID NO: 4853312 - DNA, 25 bp, Homo sapien
ccctgatgcttggtttgttgacaac

SEQ ID NO: 4853313 - DNA, 25 bp, Homo sapien
catcaagggacatctgagggccgaa

SEQ ID NO: 4853314 - DNA, 25 bp, Homo sapien
gatgatctggatccccgacattgtt

SEQ ID NO: 4853315 - DNA, 25 bp, Homo sapien
tttggcaacatcacatctctcaggg

SEQ ID NO: 4853316 - DNA, 25 bp, Homo sapien
tctgagatgatctggatccccgaca

SEQ ID NO: 4853317 - DNA, 25 bp, Homo sapien
gctggaaccccactgattttggcaa

SEQ ID NO: 4853318 - DNA, 25 bp, Homo sapien
gcctagcacccggacacgcagctaa

SEQ ID NO: 4853319 - DNA, 25 bp, Homo sapien
tagcacccggacacgcagctaacct

SEQ ID NO: 4853320 - DNA, 25 bp, Homo sapien
cagcctagcacccggacacgcagct

SEQ ID NO: 4853321 - DNA, 25 bp, Homo sapien
agctaacctgggagatgcgcgaagg

SEQ ID NO: 4853322 - DNA, 25 bp, Homo sapien
agggcctcctccgtgcggccgagga

SEQ ID NO: 4853323 - DNA, 25 bp, Homo sapien
gccagcaccccgtcaaggtcgaaga

SEQ ID NO: 4853324 - DNA, 25 bp, Homo sapien
aggacgccgaacaccgctggcagcg

SEQ ID NO: 4853325 - DNA, 25 bp, Homo sapien
cccgtcaaggtcgaagacggccgcg

SEQ ID NO: 4853326 - DNA, 25 bp, Homo sapien
tcctgaggccccgacccactgcggc

SEQ ID NO: 4853327 - DNA, 25 bp, Homo sapien
gggctgcaagcccagcgcggtctgc

SEQ ID NO: 4853328 - DNA, 25 bp, Homo sapien
ctgaggccccgacccactgcggcgg

SEQ ID NO: 4853329 - DNA, 25 bp, Homo sapien
agcccagcgcggtctgcctcctgag

SEQ ID NO: 4853330 - DNA, 25 bp, Homo sapien
ggatcaaggccatcaagctacagat

SEQ ID NO: 4853331 - DNA, 25 bp, Homo sapien
tagagtggtcatcacccagttccca

SEQ ID NO: 4853332 - DNA, 25 bp, Homo sapien
tctaccgaggactgctagactgacc

SEQ ID NO: 4853333 - DNA, 25 bp, Homo sapien
tttgactggcctagagagttcccct

SEQ ID NO: 4853334 - DNA, 25 bp, Homo sapien
ctggtccccctttctggaaagcatc

SEQ ID NO: 4853335 - DNA, 25 bp, Homo sapien
tggtccccctttctggaaagcatca

SEQ ID NO: 4853336 - DNA, 25 bp, Homo sapien
ctggaaagcatcattcagaagtcct

SEQ ID NO: 4853337 - DNA, 25 bp, Homo sapien
tttctggaaagcatcattcagaagt

SEQ ID NO: 4853338 - DNA, 25 bp, Homo sapien
ctctcctttcataagccgggtagtg

SEQ ID NO: 4853339 - DNA, 25 bp, Homo sapien
ttcataagccgggtagtggcaccct

SEQ ID NO: 4853340 - DNA, 25 bp, Homo sapien
ctcctttcataagccgggtagtggc

SEQ ID NO: 4853341 - DNA, 25 bp, Homo sapien
ctttcataagccgggtagtggcacc

SEQ ID NO: 4853342 - DNA, 25 bp, Homo sapien
actttagcggtctcggagcacttcc

SEQ ID NO: 4853343 - DNA, 25 bp, Homo sapien
agttttcttccatgagtggtatcca

SEQ ID NO: 4853344 - DNA, 25 bp, Homo sapien
cagttttcttccatgagtggtatcc

SEQ ID NO: 4853345 - DNA, 25 bp, Homo sapien
gggaggcagactttagcggtctcgg

SEQ ID NO: 4853346 - DNA, 25 bp, Homo sapien
cctggagcatggggcggttgatctt

SEQ ID NO: 4853347 - DNA, 25 bp, Homo sapien
ctttcttcctgagcatgagagctgc

SEQ ID NO: 4853348 - DNA, 25 bp, Homo sapien
agcatggggcggttgatctttctgg

SEQ ID NO: 4853349 - DNA, 25 bp, Homo sapien
ttcttcctgagcatgagagctgcct

SEQ ID NO: 4853350 - DNA, 25 bp, Homo sapien
ggtttgaccattcccacctgacacg

SEQ ID NO: 4853351 - DNA, 25 bp, Homo sapien
agtcaaagtgcatcttcagctcaca

SEQ ID NO: 4853352 - DNA, 25 bp, Homo sapien
cagaaacttgtagatctgaggttca

SEQ ID NO: 4853353 - DNA, 25 bp, Homo sapien
ctgacacgactctatcaggaagtca

SEQ ID NO: 4853354 - DNA, 25 bp, Homo sapien
ctggaagccatcgataggaagactg

SEQ ID NO: 4853355 - DNA, 25 bp, Homo sapien
tcctgtgcaggcttagattgggagc

SEQ ID NO: 4853356 - DNA, 25 bp, Homo sapien
gcaggcttagattgggagccctgct

SEQ ID NO: 4853357 - DNA, 25 bp, Homo sapien
cgataggaagactgatatattcctg

SEQ ID NO: 4853358 - DNA, 25 bp, Homo sapien
ggattccggtcactttctccagttc

SEQ ID NO: 4853359 - DNA, 25 bp, Homo sapien
attcccaagtcacgggctggcttca

SEQ ID NO: 4853360 - DNA, 25 bp, Homo sapien
gatggtgaccattcccaagtcacgg

SEQ ID NO: 4853361 - DNA, 25 bp, Homo sapien
tctttcagggccgtgtcagtgtcct

SEQ ID NO: 4853362 - DNA, 25 bp, Homo sapien
gacaaatgaacaaagcttgggcaag

SEQ ID NO: 4853363 - DNA, 25 bp, Homo sapien
tcatgggctaaactgtatcactctc

SEQ ID NO: 4853364 - DNA, 25 bp, Homo sapien
aaaaaatcagtcttgtcatgggcta

SEQ ID NO: 4853365 - DNA, 25 bp, Homo sapien
gctttaaggttatggagtcactggg

SEQ ID NO: 4853366 - DNA, 25 bp, Homo sapien
aaatacaagggggatgatgttcatt

SEQ ID NO: 4853367 - DNA, 25 bp, Homo sapien
aaaaatacaagggggatgatgttca

SEQ ID NO: 4853368 - DNA, 25 bp, Homo sapien
caagggggatgatgttcatttttcc

SEQ ID NO: 4853369 - DNA, 25 bp, Homo sapien
tacaagggggatgatgttcattttt

SEQ ID NO: 4853370 - DNA, 25 bp, Homo sapien
catgcgaagctcacacagcagtcac

SEQ ID NO: 4853371 - DNA, 25 bp, Homo sapien
ttcaagtcggccaaaatcaaactct

SEQ ID NO: 4853372 - DNA, 25 bp, Homo sapien
tccgatggtcgcccaggctcatgtg

SEQ ID NO: 4853373 - DNA, 25 bp, Homo sapien
tgaaaggtctctccttcaagtcggc

SEQ ID NO: 4853374 - DNA, 25 bp, Homo sapien
ctttactgtcacgtacccatggctc

SEQ ID NO: 4853375 - DNA, 25 bp, Homo sapien
tactgtcacgtacccatggctcatg

SEQ ID NO: 4853376 - DNA, 25 bp, Homo sapien
tcatgtcacttggattgcaagaggt

SEQ ID NO: 4853377 - DNA, 25 bp, Homo sapien
atggctcatgtcacttggattgcaa

SEQ ID NO: 4853378 - DNA, 25 bp, Homo sapien
gagcacttagccgactgagagacaa

SEQ ID NO: 4853379 - DNA, 25 bp, Homo sapien
ggatgttcaaccaccctcgatattt

SEQ ID NO: 4853380 - DNA, 25 bp, Homo sapien
gctttatagaatccgagacagggtc

SEQ ID NO: 4853381 - DNA, 25 bp, Homo sapien
gtttggccacatcagtcacactgct

SEQ ID NO: 4853382 - DNA, 25 bp, Homo sapien
ttatagaagggatgtcagtggcgct

SEQ ID NO: 4853383 - DNA, 25 bp, Homo sapien
tctttaccaccagagagatgagacc

SEQ ID NO: 4853384 - DNA, 25 bp, Homo sapien
tatgcaaacccactcgtgcctggat

SEQ ID NO: 4853385 - DNA, 25 bp, Homo sapien
gattaaacactcaccccttcaggag

SEQ ID NO: 4853386 - DNA, 25 bp, Homo sapien
gagtagcccagcaaacgcatgtcct

SEQ ID NO: 4853387 - DNA, 25 bp, Homo sapien
cattaggtgggcatctggcagaccc

SEQ ID NO: 4853388 - DNA, 25 bp, Homo sapien
aatgccagggccgtttcagtccgtt

SEQ ID NO: 4853389 - DNA, 25 bp, Homo sapien
tcctacagtcggtgtggacgcacaa

SEQ ID NO: 4853390 - DNA, 25 bp, Homo sapien
agcccagctccacaaaatgcagacg

SEQ ID NO: 4853391 - DNA, 25 bp, Homo sapien
tccacaaaatgcagacggaccctgg

SEQ ID NO: 4853392 - DNA, 25 bp, Homo sapien
cgggaaatccatggcagaggcacac

SEQ ID NO: 4853393 - DNA, 25 bp, Homo sapien
ccaagaataccaactctcgggaaat

SEQ ID NO: 4853394 - DNA, 25 bp, Homo sapien
gctgcatcttccccagctttctcac

SEQ ID NO: 4853395 - DNA, 25 bp, Homo sapien
tggctgcatcttccccagctttctc

SEQ ID NO: 4853396 - DNA, 25 bp, Homo sapien
cctgactggctgcatcttccccagc

SEQ ID NO: 4853397 - DNA, 25 bp, Homo sapien
tgactggctgcatcttccccagctt

SEQ ID NO: 4853398 - DNA, 25 bp, Homo sapien
ccatagctaggacccggtaacctgc

SEQ ID NO: 4853399 - DNA, 25 bp, Homo sapien
ctttcatgtccatagctaggacccg

SEQ ID NO: 4853400 - DNA, 25 bp, Homo sapien
tgtccatagctaggacccggtaacc

SEQ ID NO: 4853401 - DNA, 25 bp, Homo sapien
catgtccatagctaggacccggtaa

SEQ ID NO: 4853402 - DNA, 25 bp, Homo sapien
cttacataacacttccatgcaatat

SEQ ID NO: 4853403 - DNA, 25 bp, Homo sapien
taacacttccatgcaatattcttct

SEQ ID NO: 4853404 - DNA, 25 bp, Homo sapien
tacataacacttccatgcaatattc

SEQ ID NO: 4853405 - DNA, 25 bp, Homo sapien
cataacacttccatgcaatattctt

SEQ ID NO: 4853406 - DNA, 25 bp, Homo sapien
gtttatccaggaaggttaccatctc

SEQ ID NO: 4853407 - DNA, 25 bp, Homo sapien
agtttatccaggaaggttaccatct

SEQ ID NO: 4853408 - DNA, 25 bp, Homo sapien
gggtagaagagagccatgtaccaca

SEQ ID NO: 4853409 - DNA, 25 bp, Homo sapien
ccagtcatggccaatgaacactgct

SEQ ID NO: 4853410 - DNA, 25 bp, Homo sapien
tcggggtagaagagagccatgtacc

SEQ ID NO: 4853411 - DNA, 25 bp, Homo sapien
agtcatggccaatgaacactgcttg

SEQ ID NO: 4853412 - DNA, 25 bp, Homo sapien
tgtgtcacacagctgatcagggcag

SEQ ID NO: 4853413 - DNA, 25 bp, Homo sapien
gctgggctcactggacatttgcaca

SEQ ID NO: 4853414 - DNA, 25 bp, Homo sapien
tgagaatgccaaagcctaagaagcg

SEQ ID NO: 4853415 - DNA, 25 bp, Homo sapien
gagtcaggcaggagttaccattacc

SEQ ID NO: 4853416 - DNA, 25 bp, Homo sapien
gatttgctggtatgaagggagtatt

SEQ ID NO: 4853417 - DNA, 25 bp, Homo sapien
tgggttggctttgatactctccaaa

SEQ ID NO: 4853418 - DNA, 25 bp, Homo sapien
gctggtaatcaaatactgggttggc

SEQ ID NO: 4853419 - DNA, 25 bp, Homo sapien
gggagtattcaaactggccaccgcc

SEQ ID NO: 4853420 - DNA, 25 bp, Homo sapien
gttgtggtcttgctggaaacggtcc

SEQ ID NO: 4853421 - DNA, 25 bp, Homo sapien
ttactcgttgaatcgaaactgggat

SEQ ID NO: 4853422 - DNA, 25 bp, Homo sapien
aatcgaaactgggatggttgtggtc

SEQ ID NO: 4853423 - DNA, 25 bp, Homo sapien
gtggtcttgctggaaacggtccctc

SEQ ID NO: 4853424 - DNA, 25 bp, Homo sapien
gccaaggcgctttgttcttaagaac

SEQ ID NO: 4853425 - DNA, 25 bp, Homo sapien
tccttagagagtaggtatcaggcag

SEQ ID NO: 4853426 - DNA, 25 bp, Homo sapien
tacctattgagtggttccagtggct

SEQ ID NO: 4853427 - DNA, 25 bp, Homo sapien
ggaacccctgtgagtgatttctcct

SEQ ID NO: 4853428 - DNA, 25 bp, Homo sapien
gaaggagtcttccttaggctgcatg

SEQ ID NO: 4853429 - DNA, 25 bp, Homo sapien
ggagacgggtgcacccacagcacag

SEQ ID NO: 4853430 - DNA, 25 bp, Homo sapien
taagtgggggagacgggtgcaccca

SEQ ID NO: 4853431 - DNA, 25 bp, Homo sapien
cagaaggagtcttccttaggctgca

SEQ ID NO: 4853432 - DNA, 25 bp, Homo sapien
catgtgcggtttaaggacaagtaaa

SEQ ID NO: 4853433 - DNA, 25 bp, Homo sapien
taaagaggaccagtgtcgtgaggtg

SEQ ID NO: 4853434 - DNA, 25 bp, Homo sapien
aaaaatacacatgtgcggtttaagg

SEQ ID NO: 4853435 - DNA, 25 bp, Homo sapien
tgaaatctgcctctagcttgctata

SEQ ID NO: 4853436 - DNA, 25 bp, Homo sapien
gctcactgccaagatgggttcaaga

SEQ ID NO: 4853437 - DNA, 25 bp, Homo sapien
agctcactgccaagatgggttcaag

SEQ ID NO: 4853438 - DNA, 25 bp, Homo sapien
cactgccaagatgggttcaagagat

SEQ ID NO: 4853439 - DNA, 25 bp, Homo sapien
ctcagctcactgccaagatgggttc

SEQ ID NO: 4853440 - DNA, 25 bp, Homo sapien
tttgaaagtccgactcaggttctgt

SEQ ID NO: 4853441 - DNA, 25 bp, Homo sapien
caataacagagtttgcgagagggag

SEQ ID NO: 4853442 - DNA, 25 bp, Homo sapien
ggttggtaatgccaccaggatgcct

SEQ ID NO: 4853443 - DNA, 25 bp, Homo sapien
tagcaaacagtaaatacgactcccc

SEQ ID NO: 4853444 - DNA, 25 bp, Homo sapien
ggtcatttcctcaagcccaattgaa

SEQ ID NO: 4853445 - DNA, 25 bp, Homo sapien
ttcacagactttatgcatggataaa

SEQ ID NO: 4853446 - DNA, 25 bp, Homo sapien
cacagactttatgcatggataaaac

SEQ ID NO: 4853447 - DNA, 25 bp, Homo sapien
cagactttatgcatggataaaacac

SEQ ID NO: 4853448 - DNA, 25 bp, Homo sapien
agactttatgcatggataaaacact

SEQ ID NO: 4853449 - DNA, 25 bp, Homo sapien
aaagctcaaagctgtgatctcacgg

SEQ ID NO: 4853450 - DNA, 25 bp, Homo sapien
cattgcctctcgcagaccatctgaa

SEQ ID NO: 4853451 - DNA, 25 bp, Homo sapien
gatcccatctcctcgaaagctcaaa

SEQ ID NO: 4853452 - DNA, 25 bp, Homo sapien
gaacttgcgcaaggccttatgagtg

SEQ ID NO: 4853453 - DNA, 25 bp, Homo sapien
tgaactgctgcacatagaactggat

SEQ ID NO: 4853454 - DNA, 25 bp, Homo sapien
aaaccagacttcttgaactgctgca

SEQ ID NO: 4853455 - DNA, 25 bp, Homo sapien
tgaaaccagacttcttgaactgctg

SEQ ID NO: 4853456 - DNA, 25 bp, Homo sapien
cttgaactgctgcacatagaactgg

SEQ ID NO: 4853457 - DNA, 25 bp, Homo sapien
ccatgtttcggtaccagtttagagg

SEQ ID NO: 4853458 - DNA, 25 bp, Homo sapien
ttccatgtttcggtaccagtttaga

SEQ ID NO: 4853459 - DNA, 25 bp, Homo sapien
tccatgtttcggtaccagtttagag

SEQ ID NO: 4853460 - DNA, 25 bp, Homo sapien
catgtttcggtaccagtttagagga

SEQ ID NO: 4853461 - DNA, 25 bp, Homo sapien
agcacgaagtccttctccgccgtga

SEQ ID NO: 4853462 - DNA, 25 bp, Homo sapien
ctgggacatctgaggaacgagcacg

SEQ ID NO: 4853463 - DNA, 25 bp, Homo sapien
tctgaggaacgagcacgaagtcctt

SEQ ID NO: 4853464 - DNA, 25 bp, Homo sapien
tgaccatcagggccggaatcaggat

SEQ ID NO: 4853465 - DNA, 25 bp, Homo sapien
caatgggcaatggacgccttctctc

SEQ ID NO: 4853466 - DNA, 25 bp, Homo sapien
cagatgggtgtgtctctagctagtg

SEQ ID NO: 4853467 - DNA, 25 bp, Homo sapien
tgaatgaatgagaccccacatccat

SEQ ID NO: 4853468 - DNA, 25 bp, Homo sapien
tgaatgagaccccacatccatgcag

SEQ ID NO: 4853469 - DNA, 25 bp, Homo sapien
agtcctcaatgtgtccccttttcag

SEQ ID NO: 4853470 - DNA, 25 bp, Homo sapien
cacagtcctcaatgtgtcccctttt

SEQ ID NO: 4853471 - DNA, 25 bp, Homo sapien
cagtcctcaatgtgtccccttttca

SEQ ID NO: 4853472 - DNA, 25 bp, Homo sapien
tcctcaatgtgtccccttttcaggt

SEQ ID NO: 4853473 - DNA, 25 bp, Homo sapien
acttgtctgcacctacccagccaac

SEQ ID NO: 4853474 - DNA, 25 bp, Homo sapien
acacttgtctgcacctacccagcca

SEQ ID NO: 4853475 - DNA, 25 bp, Homo sapien
cacttgtctgcacctacccagccaa

SEQ ID NO: 4853476 - DNA, 25 bp, Homo sapien
gaggatctgattcacctcggttggc

SEQ ID NO: 4853477 - DNA, 25 bp, Homo sapien
gaatccagccacttaatgaggatct

SEQ ID NO: 4853478 - DNA, 25 bp, Homo sapien
ccacttaatgaggatctgattcacc

SEQ ID NO: 4853479 - DNA, 25 bp, Homo sapien
gttccgggcatcagaatccagccac

SEQ ID NO: 4853480 - DNA, 25 bp, Homo sapien
gcaaaccccttcagaacaatgctgc

SEQ ID NO: 4853481 - DNA, 25 bp, Homo sapien
tgcaagatgtgtgtaaggccacctc

SEQ ID NO: 4853482 - DNA, 25 bp, Homo sapien
tttttctgcaaaccccttcagaaca

SEQ ID NO: 4853483 - DNA, 25 bp, Homo sapien
tatactaagaatggtgccccagcag

SEQ ID NO: 4853484 - DNA, 25 bp, Homo sapien
gcctggagaactaatcacacctgat

SEQ ID NO: 4853485 - DNA, 25 bp, Homo sapien
tacaggacactaagggttcttacag

SEQ ID NO: 4853486 - DNA, 25 bp, Homo sapien
gataaagggacgatgcattcatgcc

SEQ ID NO: 4853487 - DNA, 25 bp, Homo sapien
taaggcatcccaatctctgctaaga

SEQ ID NO: 4853488 - DNA, 25 bp, Homo sapien
caaactctgctagggaagccgggag

SEQ ID NO: 4853489 - DNA, 25 bp, Homo sapien
taggattgtctcctggccagcacgg

SEQ ID NO: 4853490 - DNA, 25 bp, Homo sapien
ccagcacggcctagatcatacagca

SEQ ID NO: 4853491 - DNA, 25 bp, Homo sapien
gccgtgcattctccgtgaacagtca

SEQ ID NO: 4853492 - DNA, 25 bp, Homo sapien
tcagaggtggtgcatggaagactcc

SEQ ID NO: 4853493 - DNA, 25 bp, Homo sapien
tactcaggctcttgtgacctggcca

SEQ ID NO: 4853494 - DNA, 25 bp, Homo sapien
gaagactccaggtgcactagggcag

SEQ ID NO: 4853495 - DNA, 25 bp, Homo sapien
tctcggttaaatgggaaggactctc

SEQ ID NO: 4853496 - DNA, 25 bp, Homo sapien
acaagcagatgctgacagatttcgt

SEQ ID NO: 4853497 - DNA, 25 bp, Homo sapien
gatgctgacagatttcgtcaccacc

SEQ ID NO: 4853498 - DNA, 25 bp, Homo sapien
agcagatgctgacagatttcgtcac

SEQ ID NO: 4853499 - DNA, 25 bp, Homo sapien
cagatgctgacagatttcgtcacca

SEQ ID NO: 4853500 - DNA, 25 bp, Homo sapien
tgtgaaacacccgtgtccttactgt

SEQ ID NO: 4853501 - DNA, 25 bp, Homo sapien
gaaacacccgtgtccttactgtgga

SEQ ID NO: 4853502 - DNA, 25 bp, Homo sapien
aacacatttctgtgaaacacccgtg

SEQ ID NO: 4853503 - DNA, 25 bp, Homo sapien
catttctgtgaaacacccgtgtcct

SEQ ID NO: 4853504 - DNA, 25 bp, Homo sapien
tcacctgcttcttctcctcatccac

SEQ ID NO: 4853505 - DNA, 25 bp, Homo sapien
gtcacctgcttcttctcctcatcca

SEQ ID NO: 4853506 - DNA, 25 bp, Homo sapien
ggtcacctgcttcttctcctcatcc

SEQ ID NO: 4853507 - DNA, 25 bp, Homo sapien
caggccatgctcatccagctgtggg

SEQ ID NO: 4853508 - DNA, 25 bp, Homo sapien
tgtgggtgcaggttggccaggagga

SEQ ID NO: 4853509 - DNA, 25 bp, Homo sapien
gccaggccatgctcatccagctgtg

SEQ ID NO: 4853510 - DNA, 25 bp, Homo sapien
catgctcatccagctgtgggtgcag

SEQ ID NO: 4853511 - DNA, 25 bp, Homo sapien
caggagccacttgaggaggacaggg

SEQ ID NO: 4853512 - DNA, 25 bp, Homo sapien
ccaggagccacttgaggaggacagg

SEQ ID NO: 4853513 - DNA, 25 bp, Homo sapien
cccaggagccacttgaggaggacag

SEQ ID NO: 4853514 - DNA, 25 bp, Homo sapien
tcccaggagccacttgaggaggaca

SEQ ID NO: 4853515 - DNA, 25 bp, Homo sapien
tcatccctcagcctggcgttccagg

SEQ ID NO: 4853516 - DNA, 25 bp, Homo sapien
gggctccaggagaaaggcctcatcc

SEQ ID NO: 4853517 - DNA, 25 bp, Homo sapien
tgctcagaaaccttcaggggctcca

SEQ ID NO: 4853518 - DNA, 25 bp, Homo sapien
ctctcctgctcagaaaccttcaggg

SEQ ID NO: 4853519 - DNA, 25 bp, Homo sapien
cccaacgacgccagctgcagtcaca

SEQ ID NO: 4853520 - DNA, 25 bp, Homo sapien
tgttttgcattccagacccaacgac

SEQ ID NO: 4853521 - DNA, 25 bp, Homo sapien
cagctgcagtcacatctaccactat

SEQ ID NO: 4853522 - DNA, 25 bp, Homo sapien
agtcacatctaccactatgcccagg

SEQ ID NO: 4853523 - DNA, 25 bp, Homo sapien
tggagggcacctgttgcatctctgc

SEQ ID NO: 4853524 - DNA, 25 bp, Homo sapien
ctggagggcacctgttgcatctctg

SEQ ID NO: 4853525 - DNA, 25 bp, Homo sapien
tgggtgaagatcttggggctgaggt

SEQ ID NO: 4853526 - DNA, 25 bp, Homo sapien
tcttggggctgaggttgctgttctc

SEQ ID NO: 4853527 - DNA, 25 bp, Homo sapien
agatcttggggctgaggttgctgtt

SEQ ID NO: 4853528 - DNA, 25 bp, Homo sapien
gtgggtgaagatcttggggctgagg

SEQ ID NO: 4853529 - DNA, 25 bp, Homo sapien
tgggacaccacctcagggtgggcct

SEQ ID NO: 4853530 - DNA, 25 bp, Homo sapien
tcagtaggatgtcatcctccaggtg

SEQ ID NO: 4853531 - DNA, 25 bp, Homo sapien
accaggtagtgggacaccacctcag

SEQ ID NO: 4853532 - DNA, 25 bp, Homo sapien
caggtgaagcgtacccccaccaggt

SEQ ID NO: 4853533 - DNA, 25 bp, Homo sapien
tcacctgtacaggttgatgttcagg

SEQ ID NO: 4853534 - DNA, 25 bp, Homo sapien
tacaggttgatgttcaggtagcggc

SEQ ID NO: 4853535 - DNA, 25 bp, Homo sapien
tgatgttcaggtagcggctgtccca

SEQ ID NO: 4853536 - DNA, 25 bp, Homo sapien
gttgatgttcaggtagcggctgtcc

SEQ ID NO: 4853537 - DNA, 25 bp, Homo sapien
tctaggcaagtccaagactgggtac

SEQ ID NO: 4853538 - DNA, 25 bp, Homo sapien
ctagacaaacatatcagggctcttc

SEQ ID NO: 4853539 - DNA, 25 bp, Homo sapien
tgaagtctgcaaggcatggtaggtc

SEQ ID NO: 4853540 - DNA, 25 bp, Homo sapien
gcctatgatcaaggaatgcgctcca

SEQ ID NO: 4853541 - DNA, 25 bp, Homo sapien
ggatgacctgggtagtgctccaaag

SEQ ID NO: 4853542 - DNA, 25 bp, Homo sapien
tgacctgggtagtgctccaaaggac

SEQ ID NO: 4853543 - DNA, 25 bp, Homo sapien
ctgggtagtgctccaaaggaccctg

SEQ ID NO: 4853544 - DNA, 25 bp, Homo sapien
gagggatgacctgggtagtgctcca

SEQ ID NO: 4853545 - DNA, 25 bp, Homo sapien
tagtaaccgcagacctaaggataag

SEQ ID NO: 4853546 - DNA, 25 bp, Homo sapien
cgtaactagtaaccgcagacctaag

SEQ ID NO: 4853547 - DNA, 25 bp, Homo sapien
ccgcagacctaaggataagatcttt

SEQ ID NO: 4853548 - DNA, 25 bp, Homo sapien
taaggataagatctttctcgcaggg

SEQ ID NO: 4853549 - DNA, 25 bp, Homo sapien
catcccaggtgtgtagcaaagtcca

SEQ ID NO: 4853550 - DNA, 25 bp, Homo sapien
caggtggccatgactacccgtggta

SEQ ID NO: 4853551 - DNA, 25 bp, Homo sapien
tggaccacaggcgtttctcggcttt

SEQ ID NO: 4853552 - DNA, 25 bp, Homo sapien
agtctgaaccatagctgggctgcag

SEQ ID NO: 4853553 - DNA, 25 bp, Homo sapien
cagagagagctctgcacgtcaccaa

SEQ ID NO: 4853554 - DNA, 25 bp, Homo sapien
acgtcaccaagtaaccaggccccag

SEQ ID NO: 4853555 - DNA, 25 bp, Homo sapien
ttgcttttgcacctacgggggcatc

SEQ ID NO: 4853556 - DNA, 25 bp, Homo sapien
tggatcctgcactctaacactcgac

SEQ ID NO: 4853557 - DNA, 25 bp, Homo sapien
cactgtgacggtccctgtagaagtc

SEQ ID NO: 4853558 - DNA, 25 bp, Homo sapien
gaaccaggtccgttctgtccactga

SEQ ID NO: 4853559 - DNA, 25 bp, Homo sapien
tactctgaccaagggctgcttctaa

SEQ ID NO: 4853560 - DNA, 25 bp, Homo sapien
ctaaatttatggagaccgtggcgga

SEQ ID NO: 4853561 - DNA, 25 bp, Homo sapien
gctgctaaagtcctaccagtggaag

SEQ ID NO: 4853562 - DNA, 25 bp, Homo sapien
ttaactgggtgtcccggctggcaaa

SEQ ID NO: 4853563 - DNA, 25 bp, Homo sapien
tggcaaacctcacgcaaggcgaaga

SEQ ID NO: 4853564 - DNA, 25 bp, Homo sapien
tactatctgcgggtcaccacggtga

SEQ ID NO: 4853565 - DNA, 25 bp, Homo sapien
ctgcgctttcgacggagcccaggaa

SEQ ID NO: 4853566 - DNA, 25 bp, Homo sapien
gagggatgacacagctcgcagtcac

SEQ ID NO: 4853567 - DNA, 25 bp, Homo sapien
agtcacaacccctgcgctttcgacg

SEQ ID NO: 4853568 - DNA, 25 bp, Homo sapien
cagagccacaccaggacggatgggc

SEQ ID NO: 4853569 - DNA, 25 bp, Homo sapien
cggtgagatgtccccgtcttcccta

SEQ ID NO: 4853570 - DNA, 25 bp, Homo sapien
ggtgagatgtccccgtcttccctac

SEQ ID NO: 4853571 - DNA, 25 bp, Homo sapien
agaaagctccccttgctttccgcgg

SEQ ID NO: 4853572 - DNA, 25 bp, Homo sapien
cccggcttccagaaagctccccttg

SEQ ID NO: 4853573 - DNA, 25 bp, Homo sapien
ttccagaaagctccccttgctttcc

SEQ ID NO: 4853574 - DNA, 25 bp, Homo sapien
ggcttccagaaagctccccttgctt

SEQ ID NO: 4853575 - DNA, 25 bp, Homo sapien
actgagctcaaagtccaggttctct

SEQ ID NO: 4853576 - DNA, 25 bp, Homo sapien
aggttctctgtgtgatccttattca

SEQ ID NO: 4853577 - DNA, 25 bp, Homo sapien
ggttctctgtgtgatccttattcat

SEQ ID NO: 4853578 - DNA, 25 bp, Homo sapien
attgcactgagctcaaagtccaggt

SEQ ID NO: 4853579 - DNA, 25 bp, Homo sapien
cagattttagccctgcacgtttttc

SEQ ID NO: 4853580 - DNA, 25 bp, Homo sapien
gggaccccagattttagccctgcac

SEQ ID NO: 4853581 - DNA, 25 bp, Homo sapien
gcacgtttttctcgcccatcttatg

SEQ ID NO: 4853582 - DNA, 25 bp, Homo sapien
tcgcccatcttatgatgtcgagggc

SEQ ID NO: 4853583 - DNA, 25 bp, Homo sapien
gatcttagtccatttcactatcggg

SEQ ID NO: 4853584 - DNA, 25 bp, Homo sapien
tttcactatcgggaccgccaagtgg

SEQ ID NO: 4853585 - DNA, 25 bp, Homo sapien
gctccttgatcttagtccatttcac

SEQ ID NO: 4853586 - DNA, 25 bp, Homo sapien
tagtccatttcactatcgggaccgc

SEQ ID NO: 4853587 - DNA, 25 bp, Homo sapien
tgggccccggcccagatcaacttcc

SEQ ID NO: 4853588 - DNA, 25 bp, Homo sapien
cccgccgggcgcctagcgccgcgcc

SEQ ID NO: 4853589 - DNA, 25 bp, Homo sapien
ccgccgcccagagcgcgcatcccgc

SEQ ID NO: 4853590 - DNA, 25 bp, Homo sapien
tggggccccgcgaggtctgccgccg

SEQ ID NO: 4853591 - DNA, 25 bp, Homo sapien
cccgccgcccagagcgcgcatcccg

SEQ ID NO: 4853592 - DNA, 25 bp, Homo sapien
ggcgccgcccgcggccgtggggctc

SEQ ID NO: 4853593 - DNA, 25 bp, Homo sapien
cgccgcccgcggccgtggggctccg

SEQ ID NO: 4853594 - DNA, 25 bp, Homo sapien
taggcgccgcccgcggccgtggggc

SEQ ID NO: 4853595 - DNA, 25 bp, Homo sapien
ctaggcgccgcccgcggccgtgggg

SEQ ID NO: 4853596 - DNA, 25 bp, Homo sapien
cggcggatcctccagggcgcggatc

SEQ ID NO: 4853597 - DNA, 25 bp, Homo sapien
gggcggccggcggatcctccagggc

SEQ ID NO: 4853598 - DNA, 25 bp, Homo sapien
gccggcggatcctccagggcgcgga

SEQ ID NO: 4853599 - DNA, 25 bp, Homo sapien
gcggatcctccagggcgcggatcgc

SEQ ID NO: 4853600 - DNA, 25 bp, Homo sapien
ggtctcttcctctggggcctcagga

SEQ ID NO: 4853601 - DNA, 25 bp, Homo sapien
ggggcctcaggagggccccgctgca

SEQ ID NO: 4853602 - DNA, 25 bp, Homo sapien
ggagggccccgctgcaggcggctgg

SEQ ID NO: 4853603 - DNA, 25 bp, Homo sapien
ggcctcaggagggccccgctgcagg

SEQ ID NO: 4853604 - DNA, 25 bp, Homo sapien
gccagctgactgcagagggttcagc

SEQ ID NO: 4853605 - DNA, 25 bp, Homo sapien
aggacttggggcgaggctcccctca

SEQ ID NO: 4853606 - DNA, 25 bp, Homo sapien
gagggttcagctgcaaaggtgtctc

SEQ ID NO: 4853607 - DNA, 25 bp, Homo sapien
tgcaaaggtgtctcagtgaggagca

SEQ ID NO: 4853608 - DNA, 25 bp, Homo sapien
tggaggcttccagtaatggtctgcc

SEQ ID NO: 4853609 - DNA, 25 bp, Homo sapien
tgtggccccgtgtaagatgtggtcc

SEQ ID NO: 4853610 - DNA, 25 bp, Homo sapien
gatgtggtccaagacctttctggag

SEQ ID NO: 4853611 - DNA, 25 bp, Homo sapien
tttctggaggcttccagtaatggtc

SEQ ID NO: 4853612 - DNA, 25 bp, Homo sapien
ccacatgtcacatcttcgaggctgg

SEQ ID NO: 4853613 - DNA, 25 bp, Homo sapien
tggtgccgtcagatttgccagctcc

SEQ ID NO: 4853614 - DNA, 25 bp, Homo sapien
agagattgttcagggaacgggtgcc

SEQ ID NO: 4853615 - DNA, 25 bp, Homo sapien
cagagaggcaaatctggtgccgtca

SEQ ID NO: 4853616 - DNA, 25 bp, Homo sapien
cttcgaattgcactagagaagcctg

SEQ ID NO: 4853617 - DNA, 25 bp, Homo sapien
tccaagttctcattcgccctgacct

SEQ ID NO: 4853618 - DNA, 25 bp, Homo sapien
tgcttgatctcaagccccttgcctt

SEQ ID NO: 4853619 - DNA, 25 bp, Homo sapien
tcagcctgctttcttcgaattgcac

SEQ ID NO: 4853620 - DNA, 25 bp, Homo sapien
cagaggttgtgggtaaatccctgct

SEQ ID NO: 4853621 - DNA, 25 bp, Homo sapien
tggagaacgctataagtaaggttgc

SEQ ID NO: 4853622 - DNA, 25 bp, Homo sapien
tcaggtctcaagacacaggtccttt

SEQ ID NO: 4853623 - DNA, 25 bp, Homo sapien
tctgtaatcggttgggaatccgcct

SEQ ID NO: 4853624 - DNA, 25 bp, Homo sapien
tgccggctttcttttggttgaccaa

SEQ ID NO: 4853625 - DNA, 25 bp, Homo sapien
gtggtcaccaatgccggctttcttt

SEQ ID NO: 4853626 - DNA, 25 bp, Homo sapien
caccaatgccggctttcttttggtt

SEQ ID NO: 4853627 - DNA, 25 bp, Homo sapien
caatgccggctttcttttggttgac

SEQ ID NO: 4853628 - DNA, 25 bp, Homo sapien
ctctctagactagggggaccacggg

SEQ ID NO: 4853629 - DNA, 25 bp, Homo sapien
ggctgccagcgaagatcttggatct

SEQ ID NO: 4853630 - DNA, 25 bp, Homo sapien
gaccacgggtgtttggccatcttcc

SEQ ID NO: 4853631 - DNA, 25 bp, Homo sapien
ggaccacgggtgtttggccatcttc

SEQ ID NO: 4853632 - DNA, 25 bp, Homo sapien
tgagctccaggtggcctgatgtaag

SEQ ID NO: 4853633 - DNA, 25 bp, Homo sapien
gccaggtcctcttctgtaacgcaca

SEQ ID NO: 4853634 - DNA, 25 bp, Homo sapien
gtcctcttctgtaacgcacaaggca

SEQ ID NO: 4853635 - DNA, 25 bp, Homo sapien
tgcatgggaaggtcggcatgtcctc

SEQ ID NO: 4853636 - DNA, 25 bp, Homo sapien
gaaggtcggcatgtcctcgtcgtca

SEQ ID NO: 4853637 - DNA, 25 bp, Homo sapien
caggaagaggtaaagaatccgcacc

SEQ ID NO: 4853638 - DNA, 25 bp, Homo sapien
gatgtgtgcaaagataggttcttct

SEQ ID NO: 4853639 - DNA, 25 bp, Homo sapien
taaagaatccgcaccgatgtgtgca

SEQ ID NO: 4853640 - DNA, 25 bp, Homo sapien
ccgatgtgtgcaaagataggttctt

SEQ ID NO: 4853641 - DNA, 25 bp, Homo sapien
gtcataaatagactgggtcaaggag

SEQ ID NO: 4853642 - DNA, 25 bp, Homo sapien
ttgtcataaatagactgggtcaagg

SEQ ID NO: 4853643 - DNA, 25 bp, Homo sapien
tcaaggagatgtcttcggagagaga

SEQ ID NO: 4853644 - DNA, 25 bp, Homo sapien
tcttcggagagagagtccacttttc

SEQ ID NO: 4853645 - DNA, 25 bp, Homo sapien
gaagttgatctggtgcactgcagcc

SEQ ID NO: 4853646 - DNA, 25 bp, Homo sapien
aatctcgtgagaagccatgcgtcct

SEQ ID NO: 4853647 - DNA, 25 bp, Homo sapien
gcagttttcggatctctggccccag

SEQ ID NO: 4853648 - DNA, 25 bp, Homo sapien
gaagagccgtgtgtagttctgccag

SEQ ID NO: 4853649 - DNA, 25 bp, Homo sapien
agtggaagctttgtagcagccctac

SEQ ID NO: 4853650 - DNA, 25 bp, Homo sapien
cagtggaagctttgtagcagcccta

SEQ ID NO: 4853651 - DNA, 25 bp, Homo sapien
tcagtggaagctttgtagcagccct

SEQ ID NO: 4853652 - DNA, 25 bp, Homo sapien
ctttgcctaaaaccaggtacttctg

SEQ ID NO: 4853653 - DNA, 25 bp, Homo sapien
gcaaggacatttcttaaagctgccg

SEQ ID NO: 4853654 - DNA, 25 bp, Homo sapien
tgtgttagcccactagtactttgcc

SEQ ID NO: 4853655 - DNA, 25 bp, Homo sapien
ccgactgctgtaggcatttgctata

SEQ ID NO: 4853656 - DNA, 25 bp, Homo sapien
ccaaagggaggaatgctgctaccag

SEQ ID NO: 4853657 - DNA, 25 bp, Homo sapien
tttttaccagaatagacgcttgccc

SEQ ID NO: 4853658 - DNA, 25 bp, Homo sapien
gatagaggtctagttccaaagggag

SEQ ID NO: 4853659 - DNA, 25 bp, Homo sapien
tcacagcagacgaagtagggcaatg

SEQ ID NO: 4853660 - DNA, 25 bp, Homo sapien
gactttaacaaccaggagagaggct

SEQ ID NO: 4853661 - DNA, 25 bp, Homo sapien
ggctggccagtagacacaatttaaa

SEQ ID NO: 4853662 - DNA, 25 bp, Homo sapien
gcagacgttgaaccaagactcaggt

SEQ ID NO: 4853663 - DNA, 25 bp, Homo sapien
ctcaggtgtagctcaaacagatgcc

SEQ ID NO: 4853664 - DNA, 25 bp, Homo sapien
cttctgggtggacaagttcacaatc

SEQ ID NO: 4853665 - DNA, 25 bp, Homo sapien
ttctgggtggacaagttcacaatcc

SEQ ID NO: 4853666 - DNA, 25 bp, Homo sapien
ccgccacggggatgtggccctgcat

SEQ ID NO: 4853667 - DNA, 25 bp, Homo sapien
ctcccgccacggggatgtggccctg

SEQ ID NO: 4853668 - DNA, 25 bp, Homo sapien
tcccgccacggggatgtggccctgc

SEQ ID NO: 4853669 - DNA, 25 bp, Homo sapien
cccgccacggggatgtggccctgca

SEQ ID NO: 4853670 - DNA, 25 bp, Homo sapien
agttctgcggcacaggccccttcat

SEQ ID NO: 4853671 - DNA, 25 bp, Homo sapien
ccttcatcctggctgatgctatctg

SEQ ID NO: 4853672 - DNA, 25 bp, Homo sapien
gatgctatctgagccctctgctgtg

SEQ ID NO: 4853673 - DNA, 25 bp, Homo sapien
ccagttctgcggcacaggccccttc

SEQ ID NO: 4853674 - DNA, 25 bp, Homo sapien
cctgcaattcccggttttccctgag

SEQ ID NO: 4853675 - DNA, 25 bp, Homo sapien
tggatccctggttcacccttaggcc

SEQ ID NO: 4853676 - DNA, 25 bp, Homo sapien
tttcacgcccatatctcctttgaat

SEQ ID NO: 4853677 - DNA, 25 bp, Homo sapien
gcctttgaggcctgggaaccctcga

SEQ ID NO: 4853678 - DNA, 25 bp, Homo sapien
agtagaagctctggcttcctggtgg

SEQ ID NO: 4853679 - DNA, 25 bp, Homo sapien
cagtagaagctctggcttcctggtg

SEQ ID NO: 4853680 - DNA, 25 bp, Homo sapien
tagaagctctggcttcctggtggac

SEQ ID NO: 4853681 - DNA, 25 bp, Homo sapien
tcagtagaagctctggcttcctggt

SEQ ID NO: 4853682 - DNA, 25 bp, Homo sapien
aaaccagttgcacatccaggacagt

SEQ ID NO: 4853683 - DNA, 25 bp, Homo sapien
cattggaatcagaggaccacagctg

SEQ ID NO: 4853684 - DNA, 25 bp, Homo sapien
gcccctccggcattctgtgtgacag

SEQ ID NO: 4853685 - DNA, 25 bp, Homo sapien
ttagagtgtagccaacaggagacct

SEQ ID NO: 4853686 - DNA, 25 bp, Homo sapien
cacagctttgtcactagctggctct

SEQ ID NO: 4853687 - DNA, 25 bp, Homo sapien
ttagtaacgaggcagctggaaccgg

SEQ ID NO: 4853688 - DNA, 25 bp, Homo sapien
gaatagatgaaacacattgagatgt

SEQ ID NO: 4853689 - DNA, 25 bp, Homo sapien
gatttcgttggacacctatgttgga

SEQ ID NO: 4853690 - DNA, 25 bp, Homo sapien
tccgattatgtgaaaacaaagtgtg

SEQ ID NO: 4853691 - DNA, 25 bp, Homo sapien
tattttcatgtaccacaattggcta

SEQ ID NO: 4853692 - DNA, 25 bp, Homo sapien
gcttaccattaaggatagtaaacaa

SEQ ID NO: 4853693 - DNA, 25 bp, Homo sapien
caattggctagtgtctcaaggcata

SEQ ID NO: 4853694 - DNA, 25 bp, Homo sapien
aatatgtgcttaaggtgatgcttac

SEQ ID NO: 4853695 - DNA, 25 bp, Homo sapien
tctacatctcgaagaagggaagcct

SEQ ID NO: 4853696 - DNA, 25 bp, Homo sapien
gggaacaagcaagtcccaagttgta

SEQ ID NO: 4853697 - DNA, 25 bp, Homo sapien
ttttaaatgtgtctacatctcgaag

SEQ ID NO: 4853698 - DNA, 25 bp, Homo sapien
aattcagtgggatccgcaaactgcc

SEQ ID NO: 4853699 - DNA, 25 bp, Homo sapien
tgcatgtcaaccttgtacaagggtc

SEQ ID NO: 4853700 - DNA, 25 bp, Homo sapien
tagtctacgtgctgctgtaacaggt

SEQ ID NO: 4853701 - DNA, 25 bp, Homo sapien
atgtcaaccttgtacaagggtcagg

SEQ ID NO: 4853702 - DNA, 25 bp, Homo sapien
tctacgtgctgctgtaacaggtact

SEQ ID NO: 4853703 - DNA, 25 bp, Homo sapien
ggtatgtaccacaatgcctagcaaa

SEQ ID NO: 4853704 - DNA, 25 bp, Homo sapien
ctataggtatgtaccacaatgccta

SEQ ID NO: 4853705 - DNA, 25 bp, Homo sapien
tatgtaccacaatgcctagcaaatt

SEQ ID NO: 4853706 - DNA, 25 bp, Homo sapien
taggtatgtaccacaatgcctagca

SEQ ID NO: 4853707 - DNA, 25 bp, Homo sapien
ctacttattaagtcagttttggtga

SEQ ID NO: 4853708 - DNA, 25 bp, Homo sapien
taaattaagttagaggatgagttct

SEQ ID NO: 4853709 - DNA, 25 bp, Homo sapien
gcttgtaggtctttctatgtggacc

SEQ ID NO: 4853710 - DNA, 25 bp, Homo sapien
tgtgttggattggagttttgacttc

SEQ ID NO: 4853711 - DNA, 25 bp, Homo sapien
tagaggcttgattacacgtagggtg

SEQ ID NO: 4853712 - DNA, 25 bp, Homo sapien
taagattcaaacacagtccgcacat

SEQ ID NO: 4853713 - DNA, 25 bp, Homo sapien
tactgggtttgactgggcagcacct

SEQ ID NO: 4853714 - DNA, 25 bp, Homo sapien
taaactgaagataggtctagaggct

SEQ ID NO: 4853715 - DNA, 25 bp, Homo sapien
tgggcactgcgctttctcccttgat

SEQ ID NO: 4853716 - DNA, 25 bp, Homo sapien
ccagagccttgtggccaagtttccg

SEQ ID NO: 4853717 - DNA, 25 bp, Homo sapien
cagcacgaatccctggttcccgggt

SEQ ID NO: 4853718 - DNA, 25 bp, Homo sapien
tgccagttctcgacaggaaggcctt

SEQ ID NO: 4853719 - DNA, 25 bp, Homo sapien
caaggatggttggattaccctgcag

SEQ ID NO: 4853720 - DNA, 25 bp, Homo sapien
tgtggtgtgagttccgttttggcca

SEQ ID NO: 4853721 - DNA, 25 bp, Homo sapien
cattttggtaccctcgctgattgct

SEQ ID NO: 4853722 - DNA, 25 bp, Homo sapien
tgattgctcccttaatgagctgtgg

SEQ ID NO: 4853723 - DNA, 25 bp, Homo sapien
ttccccatctcgtgtccttctctcc

SEQ ID NO: 4853724 - DNA, 25 bp, Homo sapien
ttctctcctccaatcagttctgcac

SEQ ID NO: 4853725 - DNA, 25 bp, Homo sapien
gatcatctcattcccctactggaaa

SEQ ID NO: 4853726 - DNA, 25 bp, Homo sapien
tctagccacagaaatctgatcatct

SEQ ID NO: 4853727 - DNA, 25 bp, Homo sapien
gaatttctgctagtaagttattgaa

SEQ ID NO: 4853728 - DNA, 25 bp, Homo sapien
tctggcctttctgttgaatgttttt

SEQ ID NO: 4853729 - DNA, 25 bp, Homo sapien
gatgtcctcaagaacatattctggc

SEQ ID NO: 4853730 - DNA, 25 bp, Homo sapien
gacatgcactctttagttctggaaa

SEQ ID NO: 4853731 - DNA, 25 bp, Homo sapien
ggagcctccagaacccaatggtatc

SEQ ID NO: 4853732 - DNA, 25 bp, Homo sapien
ttcctggcccggtcaaggacttctc

SEQ ID NO: 4853733 - DNA, 25 bp, Homo sapien
aacacatgcatggttggagcctcca

SEQ ID NO: 4853734 - DNA, 25 bp, Homo sapien
ggttagaaacctgcacccaacaaga

SEQ ID NO: 4853735 - DNA, 25 bp, Homo sapien
tagggaggattagccgctggatcct

SEQ ID NO: 4853736 - DNA, 25 bp, Homo sapien
cagcgacggcccctccagaatggga

SEQ ID NO: 4853737 - DNA, 25 bp, Homo sapien
acggcccctccagaatgggagtgga

SEQ ID NO: 4853738 - DNA, 25 bp, Homo sapien
tgggtttagggaggattagccgctg

SEQ ID NO: 4853739 - DNA, 25 bp, Homo sapien
ctccgtctccgaggcaattatcctg

SEQ ID NO: 4853740 - DNA, 25 bp, Homo sapien
cctccgtctccgaggcaattatcct

SEQ ID NO: 4853741 - DNA, 25 bp, Homo sapien
ccactcaggaaagatggtgtgagcc

SEQ ID NO: 4853742 - DNA, 25 bp, Homo sapien
gcacagatttcagcgagcctttcag

SEQ ID NO: 4853743 - DNA, 25 bp, Homo sapien
tattcagtgccagcggttttcccca

SEQ ID NO: 4853744 - DNA, 25 bp, Homo sapien
tctaggctcacgatctttgggcaag

SEQ ID NO: 4853745 - DNA, 25 bp, Homo sapien
taaacgttggataggagaattcgaa

SEQ ID NO: 4853746 - DNA, 25 bp, Homo sapien
gagctgtgcccttgatcaaatctgt

SEQ ID NO: 4853747 - DNA, 25 bp, Homo sapien
ggtctgagtcactttgccaatgtcg

SEQ ID NO: 4853748 - DNA, 25 bp, Homo sapien
gacttataggttgattgcccacagg

SEQ ID NO: 4853749 - DNA, 25 bp, Homo sapien
agcagaagtccatattgcaattatg

SEQ ID NO: 4853750 - DNA, 25 bp, Homo sapien
agcgtgaagcagaagtccatattgc

SEQ ID NO: 4853751 - DNA, 25 bp, Homo sapien
cgtgaagcagaagtccatattgcaa

SEQ ID NO: 4853752 - DNA, 25 bp, Homo sapien
gtgccttaggatgcagcgtgaagca

SEQ ID NO: 4853753 - DNA, 25 bp, Homo sapien
gcagttgttgcctgagcaccaagta

SEQ ID NO: 4853754 - DNA, 25 bp, Homo sapien
tgaccctcagtgcagtctgtcccag

SEQ ID NO: 4853755 - DNA, 25 bp, Homo sapien
tgggcccaggagtaatttctcagca

SEQ ID NO: 4853756 - DNA, 25 bp, Homo sapien
gaggcctccatcttagtatcaacat

SEQ ID NO: 4853757 - DNA, 25 bp, Homo sapien
gaaactgacaacttaaggcggagaa

SEQ ID NO: 4853758 - DNA, 25 bp, Homo sapien
gaacttaggccagaatcagtttgca

SEQ ID NO: 4853759 - DNA, 25 bp, Homo sapien
gaggctcaaattactggaacttagg

SEQ ID NO: 4853760 - DNA, 25 bp, Homo sapien
tactaggtcaggtgggacttactgc

SEQ ID NO: 4853761 - DNA, 25 bp, Homo sapien
tgatccctttctctaacaatgctgg

SEQ ID NO: 4853762 - DNA, 25 bp, Homo sapien
caatcatagtctttgcgcctggata

SEQ ID NO: 4853763 - DNA, 25 bp, Homo sapien
taagtgaagttggagctaaaaccag

SEQ ID NO: 4853764 - DNA, 25 bp, Homo sapien
cagttcatcgtgctaatggaagaga

SEQ ID NO: 4853765 - DNA, 25 bp, Homo sapien
ccacttgtggcactttgtagggaca

SEQ ID NO: 4853766 - DNA, 25 bp, Homo sapien
caaataaggacctatgcccaagggt

SEQ ID NO: 4853767 - DNA, 25 bp, Homo sapien
ggtcgttgctatgagatttccagag

SEQ ID NO: 4853768 - DNA, 25 bp, Homo sapien
tgtttgtcgctatagaatcagcctg

SEQ ID NO: 4853769 - DNA, 25 bp, Homo sapien
gcaaatgccctttgagtgctccagt

SEQ ID NO: 4853770 - DNA, 25 bp, Homo sapien
tttgaccgtcctgtctaagtctcgg

SEQ ID NO: 4853771 - DNA, 25 bp, Homo sapien
gagaatatagaagacatcccaaagg

SEQ ID NO: 4853772 - DNA, 25 bp, Homo sapien
tggactgtgcccaccttgtgaaggc

SEQ ID NO: 4853773 - DNA, 25 bp, Homo sapien
tctgcttagcgtctttaggccccac

SEQ ID NO: 4853774 - DNA, 25 bp, Homo sapien
caatgtcagtaaagggcagtgctca

SEQ ID NO: 4853775 - DNA, 25 bp, Homo sapien
tgggatgtcacaaacgaaactgtca

SEQ ID NO: 4853776 - DNA, 25 bp, Homo sapien
tatagggccggatgaactgttgtgc

SEQ ID NO: 4853777 - DNA, 25 bp, Homo sapien
catggctggcctgaagatatctggt

SEQ ID NO: 4853778 - DNA, 25 bp, Homo sapien
gacttggccaagcattcaaactaga

SEQ ID NO: 4853779 - DNA, 25 bp, Homo sapien
gaagatctgatcaagcatggctggc

SEQ ID NO: 4853780 - DNA, 25 bp, Homo sapien
tagacggaggttcttactggtccag

SEQ ID NO: 4853781 - DNA, 25 bp, Homo sapien
ccatgtgtgatagaatttaaggtga

SEQ ID NO: 4853782 - DNA, 25 bp, Homo sapien
gaaacatctgaactattggttgctt

SEQ ID NO: 4853783 - DNA, 25 bp, Homo sapien
tatctgagctttagattagaagtat

SEQ ID NO: 4853784 - DNA, 25 bp, Homo sapien
ctgctacctccccagacaattactt

SEQ ID NO: 4853785 - DNA, 25 bp, Homo sapien
cagccactctccgggcagttgatgt

SEQ ID NO: 4853786 - DNA, 25 bp, Homo sapien
acccagccactctccgggcagttga

SEQ ID NO: 4853787 - DNA, 25 bp, Homo sapien
ctctccgggcagttgatgtcccaga

SEQ ID NO: 4853788 - DNA, 25 bp, Homo sapien
cactctccgggcagttgatgtccca

SEQ ID NO: 4853789 - DNA, 25 bp, Homo sapien
gtatacatgctgtcaaagcaagcat

SEQ ID NO: 4853790 - DNA, 25 bp, Homo sapien
agcaggggccatgttaaagttctct

SEQ ID NO: 4853791 - DNA, 25 bp, Homo sapien
agtatacatgctgtcaaagcaagca

SEQ ID NO: 4853792 - DNA, 25 bp, Homo sapien
ttgagcaggggccatgttaaagttc

SEQ ID NO: 4853793 - DNA, 25 bp, Homo sapien
cagcaacgccggactccgttcccgg

SEQ ID NO: 4853794 - DNA, 25 bp, Homo sapien
gaattgtagttctcggtccagttga

SEQ ID NO: 4853795 - DNA, 25 bp, Homo sapien
ggccttgtttaggtgcattctggga

SEQ ID NO: 4853796 - DNA, 25 bp, Homo sapien
aatcccctgcagcaacgccggactc

SEQ ID NO: 4853797 - DNA, 25 bp, Homo sapien
tcttcaaataatcgcgcgccaggct

SEQ ID NO: 4853798 - DNA, 25 bp, Homo sapien
aagccgctgcgttccgattggccac

SEQ ID NO: 4853799 - DNA, 25 bp, Homo sapien
cgcgccctggtgaggtgaaaaatct

SEQ ID NO: 4853800 - DNA, 25 bp, Homo sapien
caccctggtggctgtttccaagatt

SEQ ID NO: 4853801 - DNA, 25 bp, Homo sapien
cgcctcggcctactccagaggttac

SEQ ID NO: 4853802 - DNA, 25 bp, Homo sapien
ccgcctcggcctactccagaggtta

SEQ ID NO: 4853803 - DNA, 25 bp, Homo sapien
cttcttcggtctcgggcctgcggac

SEQ ID NO: 4853804 - DNA, 25 bp, Homo sapien
tgccgagcgccgagcaaaagctctt

SEQ ID NO: 4853805 - DNA, 25 bp, Homo sapien
acccggcgcctgtgagcgcggagaa

SEQ ID NO: 4853806 - DNA, 25 bp, Homo sapien
cgcggagaacgagtcagtggcttct

SEQ ID NO: 4853807 - DNA, 25 bp, Homo sapien
tcttccttggagtaagagctgccat

SEQ ID NO: 4853808 - DNA, 25 bp, Homo sapien
ctcttccttggagtaagagctgcca

SEQ ID NO: 4853809 - DNA, 25 bp, Homo sapien
aaacagtgctttttattaggtgatg

SEQ ID NO: 4853810 - DNA, 25 bp, Homo sapien
aacagtgctttttattaggtgatgg

SEQ ID NO: 4853811 - DNA, 25 bp, Homo sapien
tcagttgttttgagcgcacttaaaa

SEQ ID NO: 4853812 - DNA, 25 bp, Homo sapien
caaaatgctcttgttgagagcaatg

SEQ ID NO: 4853813 - DNA, 25 bp, Homo sapien
gctcttgttgagagcaatgcaggtt

SEQ ID NO: 4853814 - DNA, 25 bp, Homo sapien
taaatggtgagccttgatttgctga

SEQ ID NO: 4853815 - DNA, 25 bp, Homo sapien
gatttactcttttgggtgcgtccca

SEQ ID NO: 4853816 - DNA, 25 bp, Homo sapien
tttttggctcagaacccgaggagca

SEQ ID NO: 4853817 - DNA, 25 bp, Homo sapien
tcttctaggaccaagcactttggca

SEQ ID NO: 4853818 - DNA, 25 bp, Homo sapien
cacaattggcttatagatcactcga

SEQ ID NO: 4853819 - DNA, 25 bp, Homo sapien
tacttggccatactcgataaacagg

SEQ ID NO: 4853820 - DNA, 25 bp, Homo sapien
gatctggagacaacctctcttaagg

SEQ ID NO: 4853821 - DNA, 25 bp, Homo sapien
tgtcatggcttagctagcaagaacg

SEQ ID NO: 4853822 - DNA, 25 bp, Homo sapien
tggatcactatagcccagcagtgcg

SEQ ID NO: 4853823 - DNA, 25 bp, Homo sapien
gattcgcccttagctagcagagacg

SEQ ID NO: 4853824 - DNA, 25 bp, Homo sapien
tggctgagagggtgaaaccccgttc

SEQ ID NO: 4853825 - DNA, 25 bp, Homo sapien
aaaccataatatcccagcagaggtg

SEQ ID NO: 4853826 - DNA, 25 bp, Homo sapien
tcttgaaagagcatagccccgttcc

SEQ ID NO: 4853827 - DNA, 25 bp, Homo sapien
agaaaaagcctcatttttatcaact

SEQ ID NO: 4853828 - DNA, 25 bp, Homo sapien
agaatcctctgaagaaaaagcctca

SEQ ID NO: 4853829 - DNA, 25 bp, Homo sapien
gttcctttgaagaaactctgtcatc

SEQ ID NO: 4853830 - DNA, 25 bp, Homo sapien
tgaagaaactctgtcatctgatgaa

SEQ ID NO: 4853831 - DNA, 25 bp, Homo sapien
ggatagacagtggacttaggagaaa

SEQ ID NO: 4853832 - DNA, 25 bp, Homo sapien
ctgaagattggatagacagtggact

SEQ ID NO: 4853833 - DNA, 25 bp, Homo sapien
aagatgcactgaagattggatagac

SEQ ID NO: 4853834 - DNA, 25 bp, Homo sapien
gattggatagacagtggacttagga

SEQ ID NO: 4853835 - DNA, 25 bp, Homo sapien
aagcctgttagcaatcacgtgaacc

SEQ ID NO: 4853836 - DNA, 25 bp, Homo sapien
gcgattatctataggcacatttgaa

SEQ ID NO: 4853837 - DNA, 25 bp, Homo sapien
ttgctcactagcaggagctcccgac

SEQ ID NO: 4853838 - DNA, 25 bp, Homo sapien
gtcttcatttctgcgttcgtccacc

SEQ ID NO: 4853839 - DNA, 25 bp, Homo sapien
caaaagcagcatctcactactgtga

SEQ ID NO: 4853840 - DNA, 25 bp, Homo sapien
aaagcagcatctcactactgtgaaa

SEQ ID NO: 4853841 - DNA, 25 bp, Homo sapien
aaaagcagcatctcactactgtgaa

SEQ ID NO: 4853842 - DNA, 25 bp, Homo sapien
agcagcatctcactactgtgaaatt

SEQ ID NO: 4853843 - DNA, 25 bp, Homo sapien
acttgtatctctggtattagtattt

SEQ ID NO: 4853844 - DNA, 25 bp, Homo sapien
ttttttacttgtatctctggtatta

SEQ ID NO: 4853845 - DNA, 25 bp, Homo sapien
tgtttttttacttgtatctctggta

SEQ ID NO: 4853846 - DNA, 25 bp, Homo sapien
tttacttgtatctctggtattagta

SEQ ID NO: 4853847 - DNA, 25 bp, Homo sapien
gtgatgctgtacatgctgcatttca

SEQ ID NO: 4853848 - DNA, 25 bp, Homo sapien
tcataccacaagacttgcacacagt

SEQ ID NO: 4853849 - DNA, 25 bp, Homo sapien
tggaagcagtatatatcataccaca

SEQ ID NO: 4853850 - DNA, 25 bp, Homo sapien
gctgtacatgctgcatttcatcttc

SEQ ID NO: 4853851 - DNA, 25 bp, Homo sapien
ttgatagcaaagcttggatcatgtg

SEQ ID NO: 4853852 - DNA, 25 bp, Homo sapien
atcccaaaactctgctactacacgt

SEQ ID NO: 4853853 - DNA, 25 bp, Homo sapien
cttggatcatgtggcagaaccaaca

SEQ ID NO: 4853854 - DNA, 25 bp, Homo sapien
ctctgctactacacgttctttcttc

SEQ ID NO: 4853855 - DNA, 25 bp, Homo sapien
cttgctggaagcccaattcattatc

SEQ ID NO: 4853856 - DNA, 25 bp, Homo sapien
aaacacccaactactctcttttcat

SEQ ID NO: 4853857 - DNA, 25 bp, Homo sapien
taaacacccaactactctcttttca

SEQ ID NO: 4853858 - DNA, 25 bp, Homo sapien
gctggaagcccaattcattatcaac

SEQ ID NO: 4853859 - DNA, 25 bp, Homo sapien
ggatcgtaagagactatgaataatc

SEQ ID NO: 4853860 - DNA, 25 bp, Homo sapien
gaaagatctcaagtagcctaacgtt

SEQ ID NO: 4853861 - DNA, 25 bp, Homo sapien
aaaagattcgcaaaatgaagagttg

SEQ ID NO: 4853862 - DNA, 25 bp, Homo sapien
gaagcatacaacctacctataccaa

SEQ ID NO: 4853863 - DNA, 25 bp, Homo sapien
taggacattccgtagagcttgggga

SEQ ID NO: 4853864 - DNA, 25 bp, Homo sapien
ctaggacattccgtagagcttgggg

SEQ ID NO: 4853865 - DNA, 25 bp, Homo sapien
ggattctggaccaattggttcagac

SEQ ID NO: 4853866 - DNA, 25 bp, Homo sapien
gagcttggggattctggaccaattg

SEQ ID NO: 4853867 - DNA, 25 bp, Homo sapien
tatcaaccagtcgtcttgcaatgcg

SEQ ID NO: 4853868 - DNA, 25 bp, Homo sapien
tctacttatcccacagactgcaggt

SEQ ID NO: 4853869 - DNA, 25 bp, Homo sapien
gactgcaggttctggtacatctgaa

SEQ ID NO: 4853870 - DNA, 25 bp, Homo sapien
ttgcaatgcgctttcttctcttcag

SEQ ID NO: 4853871 - DNA, 25 bp, Homo sapien
gctgagaaaacagccaaacatgaag

SEQ ID NO: 4853872 - DNA, 25 bp, Homo sapien
gaaaacagccaaacatgaagcaatt

SEQ ID NO: 4853873 - DNA, 25 bp, Homo sapien
agaaaacagccaaacatgaagcaat

SEQ ID NO: 4853874 - DNA, 25 bp, Homo sapien
ctgagaaaacagccaaacatgaagc

SEQ ID NO: 4853875 - DNA, 25 bp, Homo sapien
tatacgaggaaattaggggtgttgc

SEQ ID NO: 4853876 - DNA, 25 bp, Homo sapien
aaattaggggtgttgcagtacttgg

SEQ ID NO: 4853877 - DNA, 25 bp, Homo sapien
cagtacttggttgcaaataacttgc

SEQ ID NO: 4853878 - DNA, 25 bp, Homo sapien
gggtgttgcagtacttggttgcaaa

SEQ ID NO: 4853879 - DNA, 25 bp, Homo sapien
ggtatctcagaacaagtaaggtgca

SEQ ID NO: 4853880 - DNA, 25 bp, Homo sapien
gataatcctggtctaagagtgggct

SEQ ID NO: 4853881 - DNA, 25 bp, Homo sapien
tcagagtgctaatcagggaatcacc

SEQ ID NO: 4853882 - DNA, 25 bp, Homo sapien
aactgagttactacagacgagtgcc

SEQ ID NO: 4853883 - DNA, 25 bp, Homo sapien
tggcaatctctatttctgtattatc

SEQ ID NO: 4853884 - DNA, 25 bp, Homo sapien
ttggcaatctctatttctgtattat

SEQ ID NO: 4853885 - DNA, 25 bp, Homo sapien
tttggcaatctctatttctgtatta

SEQ ID NO: 4853886 - DNA, 25 bp, Homo sapien
gctttgagaccatctcagtgcactt

SEQ ID NO: 4853887 - DNA, 25 bp, Homo sapien
cattagggtatcattgctttgagac

SEQ ID NO: 4853888 - DNA, 25 bp, Homo sapien
tatctaagacatactgaagtgaggc

SEQ ID NO: 4853889 - DNA, 25 bp, Homo sapien
aaattaagcagacgtggtgacacac

SEQ ID NO: 4853890 - DNA, 25 bp, Homo sapien
gatgtttgagagcttcctagaaacc

SEQ ID NO: 4853891 - DNA, 25 bp, Homo sapien
tcagggaggctagattgctttaaca

SEQ ID NO: 4853892 - DNA, 25 bp, Homo sapien
acctaggaatagacagaggaacttc

SEQ ID NO: 4853893 - DNA, 25 bp, Homo sapien
cactgtactagactggcaatcttag

SEQ ID NO: 4853894 - DNA, 25 bp, Homo sapien
tacagatacccaatcttattcaaga

SEQ ID NO: 4853895 - DNA, 25 bp, Homo sapien
ccaaaagaaaactagttcactgaag

SEQ ID NO: 4853896 - DNA, 25 bp, Homo sapien
aactagttcactgaagccaataaca

SEQ ID NO: 4853897 - DNA, 25 bp, Homo sapien
cccaatcttattcaagaacacatga

SEQ ID NO: 4853898 - DNA, 25 bp, Homo sapien
ctgttgattagaataaaaattagaa

SEQ ID NO: 4853899 - DNA, 25 bp, Homo sapien
tgttgattagaataaaaattagaaa

SEQ ID NO: 4853900 - DNA, 25 bp, Homo sapien
tgattagaataaaaattagaaagga

SEQ ID NO: 4853901 - DNA, 25 bp, Homo sapien
tccctttagaatctgtagaagcctc

SEQ ID NO: 4853902 - DNA, 25 bp, Homo sapien
tccaggagcttgttatgcctccata

SEQ ID NO: 4853903 - DNA, 25 bp, Homo sapien
catgtctcctggtacctatttaatc

SEQ ID NO: 4853904 - DNA, 25 bp, Homo sapien
taaaaggagataatcagcagctact

SEQ ID NO: 4853905 - DNA, 25 bp, Homo sapien
gactacctttacactgaattaatta

SEQ ID NO: 4853906 - DNA, 25 bp, Homo sapien
ccaggactacctttacactgaatta

SEQ ID NO: 4853907 - DNA, 25 bp, Homo sapien
tcctgagcaacctctgtctaggcct

SEQ ID NO: 4853908 - DNA, 25 bp, Homo sapien
tggaactcctgagcaacctctgtct

SEQ ID NO: 4853909 - DNA, 25 bp, Homo sapien
gccaactgaccagcttcttgaatat

SEQ ID NO: 4853910 - DNA, 25 bp, Homo sapien
ctgccaactgaccagcttcttgaat

SEQ ID NO: 4853911 - DNA, 25 bp, Homo sapien
caactgaccagcttcttgaatattt

SEQ ID NO: 4853912 - DNA, 25 bp, Homo sapien
actgaccagcttcttgaatatttac

SEQ ID NO: 4853913 - DNA, 25 bp, Homo sapien
gctgtctacaagaaaaacctgcagg

SEQ ID NO: 4853914 - DNA, 25 bp, Homo sapien
gaagggatcttagcttgaaaaaggc

SEQ ID NO: 4853915 - DNA, 25 bp, Homo sapien
tatttagcagtcctatagccctagc

SEQ ID NO: 4853916 - DNA, 25 bp, Homo sapien
catactgaagtagggaacaagacca

SEQ ID NO: 4853917 - DNA, 25 bp, Homo sapien
tcctgcataatggaagcttcgtgcc

SEQ ID NO: 4853918 - DNA, 25 bp, Homo sapien
ggaataaggacctctgcccagtctg

SEQ ID NO: 4853919 - DNA, 25 bp, Homo sapien
gaatcaatgtcctcactatgctgta

SEQ ID NO: 4853920 - DNA, 25 bp, Homo sapien
tgctgtacgttaggtcaccagaact

SEQ ID NO: 4853921 - DNA, 25 bp, Homo sapien
tctctgcttcagagttactgtagga

SEQ ID NO: 4853922 - DNA, 25 bp, Homo sapien
ctccaaaaagactgtgccaattaat

SEQ ID NO: 4853923 - DNA, 25 bp, Homo sapien
tgccccggactccaaaagcgttgag

SEQ ID NO: 4853924 - DNA, 25 bp, Homo sapien
agtaggcttggtcaaaagataccca

SEQ ID NO: 4853925 - DNA, 25 bp, Homo sapien
ggctcatattctttgatccccacga

SEQ ID NO: 4853926 - DNA, 25 bp, Homo sapien
ccacgaccctcaggacctgcgccat

SEQ ID NO: 4853927 - DNA, 25 bp, Homo sapien
caacatgtgatttatacgtcttggc

SEQ ID NO: 4853928 - DNA, 25 bp, Homo sapien
tccaacatgtgatttatacgtcttg

SEQ ID NO: 4853929 - DNA, 25 bp, Homo sapien
gacttgaatacggcttgatcaaagg

SEQ ID NO: 4853930 - DNA, 25 bp, Homo sapien
cttgaatacggcttgatcaaaggcg

SEQ ID NO: 4853931 - DNA, 25 bp, Homo sapien
ttgaatacggcttgatcaaaggcga

SEQ ID NO: 4853932 - DNA, 25 bp, Homo sapien
tgaatacggcttgatcaaaggcgaa

SEQ ID NO: 4853933 - DNA, 25 bp, Homo sapien
cagctgtgagggtttctgttgcagc

SEQ ID NO: 4853934 - DNA, 25 bp, Homo sapien
agctgacacctgactgttaacttca

SEQ ID NO: 4853935 - DNA, 25 bp, Homo sapien
acgttcagggctggatcagctgtga

SEQ ID NO: 4853936 - DNA, 25 bp, Homo sapien
ctcagcagtcagcacgttcagggct

SEQ ID NO: 4853937 - DNA, 25 bp, Homo sapien
tgccccagttgctccctgtagccat

SEQ ID NO: 4853938 - DNA, 25 bp, Homo sapien
gtgtgtggagacaccacctcccgca

SEQ ID NO: 4853939 - DNA, 25 bp, Homo sapien
ccccagtgtgtggagacaccacctc

SEQ ID NO: 4853940 - DNA, 25 bp, Homo sapien
cgcatgccccagttgctccctgtag

SEQ ID NO: 4853941 - DNA, 25 bp, Homo sapien
ccagggatgaaggatccgcagcaaa

SEQ ID NO: 4853942 - DNA, 25 bp, Homo sapien
catccaatatcgagaggaggcatcc

SEQ ID NO: 4853943 - DNA, 25 bp, Homo sapien
atccctggtgctctcgctgtagtct

SEQ ID NO: 4853944 - DNA, 25 bp, Homo sapien
tcttgcatagcctcagcctgtttgg

SEQ ID NO: 4853945 - DNA, 25 bp, Homo sapien
tggaccatgctcagggatcttctga

SEQ ID NO: 4853946 - DNA, 25 bp, Homo sapien
caaattggtggaccatgctcaggga

SEQ ID NO: 4853947 - DNA, 25 bp, Homo sapien
aagtcgtgatgcaaattggtggacc

SEQ ID NO: 4853948 - DNA, 25 bp, Homo sapien
aaggcatcttgcatcaaagtcgtga

SEQ ID NO: 4853949 - DNA, 25 bp, Homo sapien
gcaagatcagagcaaacttccagtt

SEQ ID NO: 4853950 - DNA, 25 bp, Homo sapien
agcaagatcagagcaaacttccagt

SEQ ID NO: 4853951 - DNA, 25 bp, Homo sapien
actggccacatttctagaggtgtca

SEQ ID NO: 4853952 - DNA, 25 bp, Homo sapien
gaggtgtcataaacctggcggttgt

SEQ ID NO: 4853953 - DNA, 25 bp, Homo sapien
ggctctgctggtctagcaagagatg

SEQ ID NO: 4853954 - DNA, 25 bp, Homo sapien
caagagatgctgatagaccccaggg

SEQ ID NO: 4853955 - DNA, 25 bp, Homo sapien
cctgagcctgtgctgcttgcaacat

SEQ ID NO: 4853956 - DNA, 25 bp, Homo sapien
gtccattcctgagcctgtgctgctt

SEQ ID NO: 4853957 - DNA, 25 bp, Homo sapien
tgcctgccagtctgtccattcctga

SEQ ID NO: 4853958 - DNA, 25 bp, Homo sapien
tgcaacattttgctgggagactgtt

SEQ ID NO: 4853959 - DNA, 25 bp, Homo sapien
gctgagttgtggtgaggactctcct

SEQ ID NO: 4853960 - DNA, 25 bp, Homo sapien
gaggactctcctcctggtgtgcaga

SEQ ID NO: 4853961 - DNA, 25 bp, Homo sapien
ggtgtgcagactgctgccttcttgc

SEQ ID NO: 4853962 - DNA, 25 bp, Homo sapien
gaaagtccaggatcagggtgtggca

SEQ ID NO: 4853963 - DNA, 25 bp, Homo sapien
tgaaggtcatgcataggtgagtccc

SEQ ID NO: 4853964 - DNA, 25 bp, Homo sapien
gtcatgcataggtgagtcccaggtt

SEQ ID NO: 4853965 - DNA, 25 bp, Homo sapien
aaggtcatgcataggtgagtcccag

SEQ ID NO: 4853966 - DNA, 25 bp, Homo sapien
ggtcatgcataggtgagtcccaggt

SEQ ID NO: 4853967 - DNA, 25 bp, Homo sapien
tggaccaggttccaggtagtcgtgc

SEQ ID NO: 4853968 - DNA, 25 bp, Homo sapien
gatctggaccaggttccaggtagtc

SEQ ID NO: 4853969 - DNA, 25 bp, Homo sapien
aaggcagggatctggaccaggttcc

SEQ ID NO: 4853970 - DNA, 25 bp, Homo sapien
gaccaggttccaggtagtcgtgcat

SEQ ID NO: 4853971 - DNA, 25 bp, Homo sapien
ccatggcttccttttagcctttggc

SEQ ID NO: 4853972 - DNA, 25 bp, Homo sapien
cagggagcactttgcttgtgtcacc

SEQ ID NO: 4853973 - DNA, 25 bp, Homo sapien
tgtgcagggagcactttgcttgtgt

SEQ ID NO: 4853974 - DNA, 25 bp, Homo sapien
ggagcactttgcttgtgtcaccgct

SEQ ID NO: 4853975 - DNA, 25 bp, Homo sapien
actttgcttgtgtcaccgctccctt

SEQ ID NO: 4853976 - DNA, 25 bp, Homo sapien
tgtgcttgtgtctgcagacaacctg

SEQ ID NO: 4853977 - DNA, 25 bp, Homo sapien
tccagcgctctggtcttgtgtgtgc

SEQ ID NO: 4853978 - DNA, 25 bp, Homo sapien
tctggaggccactgcaaaatggaag

SEQ ID NO: 4853979 - DNA, 25 bp, Homo sapien
gaatctttcccatgagtctgtttga

SEQ ID NO: 4853980 - DNA, 25 bp, Homo sapien
aaatcgctggctattgatgatcaac

SEQ ID NO: 4853981 - DNA, 25 bp, Homo sapien
gattgattaaatcgctggctattga

SEQ ID NO: 4853982 - DNA, 25 bp, Homo sapien
catcctgaggcgatctaggggtccc

SEQ ID NO: 4853983 - DNA, 25 bp, Homo sapien
gctggctattgatgatcaactcaac

SEQ ID NO: 4853984 - DNA, 25 bp, Homo sapien
gagtcatcttcaatacctaatggag

SEQ ID NO: 4853985 - DNA, 25 bp, Homo sapien
aacatctaaacatcgctgggcatgg

SEQ ID NO: 4853986 - DNA, 25 bp, Homo sapien
ggacatttctcaactatttggactt

SEQ ID NO: 4853987 - DNA, 25 bp, Homo sapien
taatggagttctaaagctttagggc

SEQ ID NO: 4853988 - DNA, 25 bp, Homo sapien
gaaaatgaatccgatgtgggctgtg

SEQ ID NO: 4853989 - DNA, 25 bp, Homo sapien
tctttgcccagcacaagattgcttt

SEQ ID NO: 4853990 - DNA, 25 bp, Homo sapien
tcagggtgaaatttgtctctttgcc

SEQ ID NO: 4853991 - DNA, 25 bp, Homo sapien
gactttgtccgctgaaatcgttggg

SEQ ID NO: 4853992 - DNA, 25 bp, Homo sapien
gcttcatttgcatacttgactattt

SEQ ID NO: 4853993 - DNA, 25 bp, Homo sapien
tttactcttcaatcaaggactctaa

SEQ ID NO: 4853994 - DNA, 25 bp, Homo sapien
ttgctttactcttcaatcaaggact

SEQ ID NO: 4853995 - DNA, 25 bp, Homo sapien
cgcttcatttgcatacttgactatt

SEQ ID NO: 4853996 - DNA, 25 bp, Homo sapien
ccagagttggccactcctccttgca

SEQ ID NO: 4853997 - DNA, 25 bp, Homo sapien
tcctccttgcacagatgaggatagg

SEQ ID NO: 4853998 - DNA, 25 bp, Homo sapien
ctccttgcacagatgaggataggtc

SEQ ID NO: 4853999 - DNA, 25 bp, Homo sapien
agagttggccactcctccttgcaca

SEQ ID NO: 4854000 - DNA, 25 bp, Homo sapien
ggctccagagttgggcactacactc

SEQ ID NO: 4854001 - DNA, 25 bp, Homo sapien
aacatcctgggctccagagttgggc

SEQ ID NO: 4854002 - DNA, 25 bp, Homo sapien
cctgggctccagagttgggcactac

SEQ ID NO: 4854003 - DNA, 25 bp, Homo sapien
tgggctccagagttgggcactacac

SEQ ID NO: 4854004 - DNA, 25 bp, Homo sapien
ccaccagagataaaaatgcagccac

SEQ ID NO: 4854005 - DNA, 25 bp, Homo sapien
cagccacaaactcagaccacgggga

SEQ ID NO: 4854006 - DNA, 25 bp, Homo sapien
caaactcagaccacggggaaagctg

SEQ ID NO: 4854007 - DNA, 25 bp, Homo sapien
ccgtagcagagccaccagagataaa

SEQ ID NO: 4854008 - DNA, 25 bp, Homo sapien
atttgattgcctgggcgttcgcccc

SEQ ID NO: 4854009 - DNA, 25 bp, Homo sapien
ttgattgcctgggcgttcgcccctt

SEQ ID NO: 4854010 - DNA, 25 bp, Homo sapien
gattgcctgggcgttcgcccctttc

SEQ ID NO: 4854011 - DNA, 25 bp, Homo sapien
tgcctgggcgttcgcccctttcgga

SEQ ID NO: 4854012 - DNA, 25 bp, Homo sapien
atcagctcagcagggctgagatctc

SEQ ID NO: 4854013 - DNA, 25 bp, Homo sapien
catcagctcagcagggctgagatct

SEQ ID NO: 4854014 - DNA, 25 bp, Homo sapien
gatgtctttcccctgctcgtgggct

SEQ ID NO: 4854015 - DNA, 25 bp, Homo sapien
gtttaataacatctcctatagtcag

SEQ ID NO: 4854016 - DNA, 25 bp, Homo sapien
tgctcgtgggcttcaatcagttgtt

SEQ ID NO: 4854017 - DNA, 25 bp, Homo sapien
ttatttagatcgatgtctttcccct

SEQ ID NO: 4854018 - DNA, 25 bp, Homo sapien
agaccttgcgatactgaggagggac

SEQ ID NO: 4854019 - DNA, 25 bp, Homo sapien
tagcagttctgatgggtttcgcctt

SEQ ID NO: 4854020 - DNA, 25 bp, Homo sapien
gggcatcaagaccttgcgatactga

SEQ ID NO: 4854021 - DNA, 25 bp, Homo sapien
ggcagcaatgatatccaccaggcgg

SEQ ID NO: 4854022 - DNA, 25 bp, Homo sapien
aggtactattaaactagcagcttca

SEQ ID NO: 4854023 - DNA, 25 bp, Homo sapien
ctcaaacgcctcatgaacacactgg

SEQ ID NO: 4854024 - DNA, 25 bp, Homo sapien
cagcaggtactattaaactagcagc

SEQ ID NO: 4854025 - DNA, 25 bp, Homo sapien
ctttgtgactcaaacgcctcatgaa

SEQ ID NO: 4854026 - DNA, 25 bp, Homo sapien
tgtggggtttgcacatcacagccac

SEQ ID NO: 4854027 - DNA, 25 bp, Homo sapien
tttgcacatcacagccacgacagca

SEQ ID NO: 4854028 - DNA, 25 bp, Homo sapien
taaaactgatgtgtggacatctgtg

SEQ ID NO: 4854029 - DNA, 25 bp, Homo sapien
aaaactgatgtgtggacatctgtgg

SEQ ID NO: 4854030 - DNA, 25 bp, Homo sapien
aaaatcagaatcaggtccaccaggg

SEQ ID NO: 4854031 - DNA, 25 bp, Homo sapien
agggtcatatctggcacggatagct

SEQ ID NO: 4854032 - DNA, 25 bp, Homo sapien
tcatatctggcacggatagctctca

SEQ ID NO: 4854033 - DNA, 25 bp, Homo sapien
ttctattcggtgtcttgtctgtagg

SEQ ID NO: 4854034 - DNA, 25 bp, Homo sapien
tctattcggtgtcttgtctgtagga

SEQ ID NO: 4854035 - DNA, 25 bp, Homo sapien
taaaagtcaacacacccacccattg

SEQ ID NO: 4854036 - DNA, 25 bp, Homo sapien
tgcgcatggccagtcaaaatacttc

SEQ ID NO: 4854037 - DNA, 25 bp, Homo sapien
tttttgaccttgctaggcatggcaa

SEQ ID NO: 4854038 - DNA, 25 bp, Homo sapien
gcaacaatggcttcttactaagtat

SEQ ID NO: 4854039 - DNA, 25 bp, Homo sapien
cagacttggtggtaagcctagagga

SEQ ID NO: 4854040 - DNA, 25 bp, Homo sapien
caagacagcagtctaaaattgatgg

SEQ ID NO: 4854041 - DNA, 25 bp, Homo sapien
ggcacaggaggcacttcaagtctgc

SEQ ID NO: 4854042 - DNA, 25 bp, Homo sapien
catttatggtcaacaatgatacatg

SEQ ID NO: 4854043 - DNA, 25 bp, Homo sapien
ggaagtatgtcctgataaggcatca

SEQ ID NO: 4854044 - DNA, 25 bp, Homo sapien
gactgcctcgtaaatattgttggaa

SEQ ID NO: 4854045 - DNA, 25 bp, Homo sapien
tctggaagggccataaacgttccac

SEQ ID NO: 4854046 - DNA, 25 bp, Homo sapien
taaactccactttatccacactatg

SEQ ID NO: 4854047 - DNA, 25 bp, Homo sapien
agtctacgaaattgtcttctgggcc

SEQ ID NO: 4854048 - DNA, 25 bp, Homo sapien
tgcttccgttgcagctgtgcaagtc

SEQ ID NO: 4854049 - DNA, 25 bp, Homo sapien
tgtgcaagtctacgaaattgtcttc

SEQ ID NO: 4854050 - DNA, 25 bp, Homo sapien
tgtaggttccttttgcttccgttgc

SEQ ID NO: 4854051 - DNA, 25 bp, Homo sapien
tatgagatagtggtaaagagtgtag

SEQ ID NO: 4854052 - DNA, 25 bp, Homo sapien
ctctctgtcctcctagtatgagata

SEQ ID NO: 4854053 - DNA, 25 bp, Homo sapien
cctagtatgagatagtggtaaagag

SEQ ID NO: 4854054 - DNA, 25 bp, Homo sapien
tagtatgagatagtggtaaagagtg

SEQ ID NO: 4854055 - DNA, 25 bp, Homo sapien
tagtaattccaatacactttgtgag

SEQ ID NO: 4854056 - DNA, 25 bp, Homo sapien
ggtttcaatagtaattccaatacac

SEQ ID NO: 4854057 - DNA, 25 bp, Homo sapien
gcagtaatctggtctggtttcaata

SEQ ID NO: 4854058 - DNA, 25 bp, Homo sapien
gtcacttaaatgtcgcttcatgcag

SEQ ID NO: 4854059 - DNA, 25 bp, Homo sapien
ctgttggtgtctctagccacatctt

SEQ ID NO: 4854060 - DNA, 25 bp, Homo sapien
tttctagtcccacgtttggcaggtc

SEQ ID NO: 4854061 - DNA, 25 bp, Homo sapien
catatgggccaccactttaaaaccg

SEQ ID NO: 4854062 - DNA, 25 bp, Homo sapien
tcccacgtttggcaggtcaggcatc

SEQ ID NO: 4854063 - DNA, 25 bp, Homo sapien
atctttggccaggtgaaatgactca

SEQ ID NO: 4854064 - DNA, 25 bp, Homo sapien
tacactcgagtccatggaggcacga

SEQ ID NO: 4854065 - DNA, 25 bp, Homo sapien
gctaggatccgagccaccaattcaa

SEQ ID NO: 4854066 - DNA, 25 bp, Homo sapien
catcgggacgaaaagcagggttctc

SEQ ID NO: 4854067 - DNA, 25 bp, Homo sapien
gatagagtttcagcccatcgggacg

SEQ ID NO: 4854068 - DNA, 25 bp, Homo sapien
ggaatgaatgcccttttcgccacat

SEQ ID NO: 4854069 - DNA, 25 bp, Homo sapien
tagaggacgtacagctctgacatcc

SEQ ID NO: 4854070 - DNA, 25 bp, Homo sapien
gatcaactccctgtaagtaactggt

SEQ ID NO: 4854071 - DNA, 25 bp, Homo sapien
tgtaccagatctgcccttggtggga

SEQ ID NO: 4854072 - DNA, 25 bp, Homo sapien
tctactcctgagctaactaaaggca

SEQ ID NO: 4854073 - DNA, 25 bp, Homo sapien
gctaactaaaggcattggaatatcc

SEQ ID NO: 4854074 - DNA, 25 bp, Homo sapien
gccagctctctcaggttaccatgct

SEQ ID NO: 4854075 - DNA, 25 bp, Homo sapien
gtctttcattcttgcaagtgccagc

SEQ ID NO: 4854076 - DNA, 25 bp, Homo sapien
gggagctttctgacctgacccgcaa

SEQ ID NO: 4854077 - DNA, 25 bp, Homo sapien
tctcaacagttgtggcctgaccgcc

SEQ ID NO: 4854078 - DNA, 25 bp, Homo sapien
gacttcaatggccagagggatagga

SEQ ID NO: 4854079 - DNA, 25 bp, Homo sapien
gcttcagctccgacacagttcagtg

SEQ ID NO: 4854080 - DNA, 25 bp, Homo sapien
gctatgactgaattccagcctttgg

SEQ ID NO: 4854081 - DNA, 25 bp, Homo sapien
cgagattgttgggataaccaggcca

SEQ ID NO: 4854082 - DNA, 25 bp, Homo sapien
gctcaagatgttgcctataggaact

SEQ ID NO: 4854083 - DNA, 25 bp, Homo sapien
ccagcttactttaatagaggctaac

SEQ ID NO: 4854084 - DNA, 25 bp, Homo sapien
tcttccagtaagaaaagatcactgt

SEQ ID NO: 4854085 - DNA, 25 bp, Homo sapien
aatgccaatgcaatgtctggtctgc

SEQ ID NO: 4854086 - DNA, 25 bp, Homo sapien
cacagtgcatgctatgctaccagac

SEQ ID NO: 4854087 - DNA, 25 bp, Homo sapien
caagcatctgtgatgtggctctcac

SEQ ID NO: 4854088 - DNA, 25 bp, Homo sapien
tggccgtactttgtgatgaatttct

SEQ ID NO: 4854089 - DNA, 25 bp, Homo sapien
tatggccgtactttgtgatgaattt

SEQ ID NO: 4854090 - DNA, 25 bp, Homo sapien
ctggtatggccgtactttgtgatga

SEQ ID NO: 4854091 - DNA, 25 bp, Homo sapien
ggtatggccgtactttgtgatgaat

SEQ ID NO: 4854092 - DNA, 25 bp, Homo sapien
gccaccatttgcaacataatctctc

SEQ ID NO: 4854093 - DNA, 25 bp, Homo sapien
aacacttgcgtaatcgtaggaggcc

SEQ ID NO: 4854094 - DNA, 25 bp, Homo sapien
cataatctctccttaccaattcaac

SEQ ID NO: 4854095 - DNA, 25 bp, Homo sapien
gatctgggtcttcgtatgacaagaa

SEQ ID NO: 4854096 - DNA, 25 bp, Homo sapien
agggaccacactcccatacacatgc

SEQ ID NO: 4854097 - DNA, 25 bp, Homo sapien
tacacatgcagctctcgtactatgg

SEQ ID NO: 4854098 - DNA, 25 bp, Homo sapien
cacatgcagctctcgtactatggag

SEQ ID NO: 4854099 - DNA, 25 bp, Homo sapien
tgcagctctcgtactatggagacac

SEQ ID NO: 4854100 - DNA, 25 bp, Homo sapien
atttagtaggatcccggctgctcac

SEQ ID NO: 4854101 - DNA, 25 bp, Homo sapien
gaaatttagtaggatcccggctgct

SEQ ID NO: 4854102 - DNA, 25 bp, Homo sapien
tgctgaaatttagtaggatcccggc

SEQ ID NO: 4854103 - DNA, 25 bp, Homo sapien
gatgctgaaatttagtaggatcccg

SEQ ID NO: 4854104 - DNA, 25 bp, Homo sapien
atatcacagcgattttcccagaccc

SEQ ID NO: 4854105 - DNA, 25 bp, Homo sapien
ctgatatcacagcgattttcccaga

SEQ ID NO: 4854106 - DNA, 25 bp, Homo sapien
gatatcacagcgattttcccagacc

SEQ ID NO: 4854107 - DNA, 25 bp, Homo sapien
tgatatcacagcgattttcccagac

SEQ ID NO: 4854108 - DNA, 25 bp, Homo sapien
tttccttttcatgcccacttcccca

SEQ ID NO: 4854109 - DNA, 25 bp, Homo sapien
gaattttccttttcatgcccacttc

SEQ ID NO: 4854110 - DNA, 25 bp, Homo sapien
acatgctgtactgaattttcctttt

SEQ ID NO: 4854111 - DNA, 25 bp, Homo sapien
cttttcatgcccacttccccagtga

SEQ ID NO: 4854112 - DNA, 25 bp, Homo sapien
tatgggaaactatcgccattttcat

SEQ ID NO: 4854113 - DNA, 25 bp, Homo sapien
actatcgccattttcatcagcaaac

SEQ ID NO: 4854114 - DNA, 25 bp, Homo sapien
ggaaactatcgccattttcatcagc

SEQ ID NO: 4854115 - DNA, 25 bp, Homo sapien
ctatgggaaactatcgccattttca

SEQ ID NO: 4854116 - DNA, 25 bp, Homo sapien
tgtcctttgataactcattagatga

SEQ ID NO: 4854117 - DNA, 25 bp, Homo sapien
tttcaatgtcctttgataactcatt

SEQ ID NO: 4854118 - DNA, 25 bp, Homo sapien
caatgtcctttgataactcattaga

SEQ ID NO: 4854119 - DNA, 25 bp, Homo sapien
cctttgataactcattagatgaaac

SEQ ID NO: 4854120 - DNA, 25 bp, Homo sapien
tgcaaagtgcctagagtgaacagct

SEQ ID NO: 4854121 - DNA, 25 bp, Homo sapien
cttgcaaagtgcctagagtgaacag

SEQ ID NO: 4854122 - DNA, 25 bp, Homo sapien
caaagtgcctagagtgaacagcttc

SEQ ID NO: 4854123 - DNA, 25 bp, Homo sapien
aagtgcctagagtgaacagcttctg

SEQ ID NO: 4854124 - DNA, 25 bp, Homo sapien
agctcagccctgagatggaacactg

SEQ ID NO: 4854125 - DNA, 25 bp, Homo sapien
cagcaggcctgagatggcgagctca

SEQ ID NO: 4854126 - DNA, 25 bp, Homo sapien
tattttcaataagacgcagcaggcc

SEQ ID NO: 4854127 - DNA, 25 bp, Homo sapien
gaagggaacttcacctctagtcagt

SEQ ID NO: 4854128 - DNA, 25 bp, Homo sapien
agacttctgagtttcgagctttcta

SEQ ID NO: 4854129 - DNA, 25 bp, Homo sapien
gacttctgagtttcgagctttctac

SEQ ID NO: 4854130 - DNA, 25 bp, Homo sapien
tctgagtttcgagctttctactcac

SEQ ID NO: 4854131 - DNA, 25 bp, Homo sapien
agtttcgagctttctactcacgtga

SEQ ID NO: 4854132 - DNA, 25 bp, Homo sapien
gcaacaccaggcaccaccttaggtg

SEQ ID NO: 4854133 - DNA, 25 bp, Homo sapien
cgtgtgcacccgtgtgttggagcct

SEQ ID NO: 4854134 - DNA, 25 bp, Homo sapien
aggcaacagcaaacgtgtgcacccg

SEQ ID NO: 4854135 - DNA, 25 bp, Homo sapien
tgcgtattcactaccctactggcaa

SEQ ID NO: 4854136 - DNA, 25 bp, Homo sapien
tacgggccttgtaatctgtagccga

SEQ ID NO: 4854137 - DNA, 25 bp, Homo sapien
gccttgtaatctgtagccgatcttt

SEQ ID NO: 4854138 - DNA, 25 bp, Homo sapien
cttcaccatgtacgggccttgtaat

SEQ ID NO: 4854139 - DNA, 25 bp, Homo sapien
tagccgatctttctataataattcc

SEQ ID NO: 4854140 - DNA, 25 bp, Homo sapien
taagcctcaaaaacgcaagtgattt

SEQ ID NO: 4854141 - DNA, 25 bp, Homo sapien
cctgattctccgtgttctgccaggg

SEQ ID NO: 4854142 - DNA, 25 bp, Homo sapien
tctgagtcaaaataggccacctgca

SEQ ID NO: 4854143 - DNA, 25 bp, Homo sapien
agcagatgaccagccgtggccttga

SEQ ID NO: 4854144 - DNA, 25 bp, Homo sapien
agctctttgtcatcgccgtctcgga

SEQ ID NO: 4854145 - DNA, 25 bp, Homo sapien
tccaatgcgtatgtcgttaaagggc

SEQ ID NO: 4854146 - DNA, 25 bp, Homo sapien
tcaggatagacagacaggaaagcca

SEQ ID NO: 4854147 - DNA, 25 bp, Homo sapien
cacactgctctgtagttgccaagag

SEQ ID NO: 4854148 - DNA, 25 bp, Homo sapien
gcagttctacaagaggagcctttga

SEQ ID NO: 4854149 - DNA, 25 bp, Homo sapien
tcacacacgggttgaacttgaactc

SEQ ID NO: 4854150 - DNA, 25 bp, Homo sapien
ggcagttctacaagaggagcctttg

SEQ ID NO: 4854151 - DNA, 25 bp, Homo sapien
ttgctttcacacacgggttgaactt

SEQ ID NO: 4854152 - DNA, 25 bp, Homo sapien
tttcaggccctttcagaggaatcaa

SEQ ID NO: 4854153 - DNA, 25 bp, Homo sapien
gatgcttttaacttaggaactgacc

SEQ ID NO: 4854154 - DNA, 25 bp, Homo sapien
ggccctttcagaggaatcaattcct

SEQ ID NO: 4854155 - DNA, 25 bp, Homo sapien
caggagccaaggttaagcgatgctt

SEQ ID NO: 4854156 - DNA, 25 bp, Homo sapien
tggtggaggctcaacaaatagtcgt

SEQ ID NO: 4854157 - DNA, 25 bp, Homo sapien
cactccagtgacagcggtatttcaa

SEQ ID NO: 4854158 - DNA, 25 bp, Homo sapien
cgtttgttcccctgaatgatgagac

SEQ ID NO: 4854159 - DNA, 25 bp, Homo sapien
tcacactgggatcggcaatgcgtgc

SEQ ID NO: 4854160 - DNA, 25 bp, Homo sapien
ggcctggtaagtcgagctgagtcta

SEQ ID NO: 4854161 - DNA, 25 bp, Homo sapien
tctctcagggatggtaaggacggtt

SEQ ID NO: 4854162 - DNA, 25 bp, Homo sapien
tcgggcttggatgaatgggtccccc

SEQ ID NO: 4854163 - DNA, 25 bp, Homo sapien
ctaattctgtaaagtgaataaacca

SEQ ID NO: 4854164 - DNA, 25 bp, Homo sapien
caccttctcccactcacacaagtga

SEQ ID NO: 4854165 - DNA, 25 bp, Homo sapien
tggctgttgtctcttctactttctg

SEQ ID NO: 4854166 - DNA, 25 bp, Homo sapien
tctcccactcacacaagtgatcccc

SEQ ID NO: 4854167 - DNA, 25 bp, Homo sapien
tgttgtctcttctactttctgccac

SEQ ID NO: 4854168 - DNA, 25 bp, Homo sapien
tggcccacttatggtatccttcttc

SEQ ID NO: 4854169 - DNA, 25 bp, Homo sapien
ctggcccacttatggtatccttctt

SEQ ID NO: 4854170 - DNA, 25 bp, Homo sapien
ggcccacttatggtatccttcttca

SEQ ID NO: 4854171 - DNA, 25 bp, Homo sapien
ttcctcacgacgctgcagttgggcc

SEQ ID NO: 4854172 - DNA, 25 bp, Homo sapien
cgtttgctagctgtaatcctgttcc

SEQ ID NO: 4854173 - DNA, 25 bp, Homo sapien
gtttttgtttcctgcgtcagcactg

SEQ ID NO: 4854174 - DNA, 25 bp, Homo sapien
gaaggtcagacaacgtttgctagct

SEQ ID NO: 4854175 - DNA, 25 bp, Homo sapien
ttgctttcgctggtgtgtctgggtc

SEQ ID NO: 4854176 - DNA, 25 bp, Homo sapien
tgggtctctaaagccgagcatccat

SEQ ID NO: 4854177 - DNA, 25 bp, Homo sapien
gttcttggccaacatgccttgctgg

SEQ ID NO: 4854178 - DNA, 25 bp, Homo sapien
tctgcactagcgcaggttcttggcc

SEQ ID NO: 4854179 - DNA, 25 bp, Homo sapien
ctcttcagcaatgctttgaagaaat

SEQ ID NO: 4854180 - DNA, 25 bp, Homo sapien
tcagcaatgctttgaagaaatccat

SEQ ID NO: 4854181 - DNA, 25 bp, Homo sapien
ttcagcaatgctttgaagaaatcca

SEQ ID NO: 4854182 - DNA, 25 bp, Homo sapien
cttcagcaatgctttgaagaaatcc

SEQ ID NO: 4854183 - DNA, 25 bp, Homo sapien
aatgtgactggcctgtcctagacca

SEQ ID NO: 4854184 - DNA, 25 bp, Homo sapien
gtcttgcatgaactccgtgtctatg

SEQ ID NO: 4854185 - DNA, 25 bp, Homo sapien
cctgtcctagaccatggtggccagt

SEQ ID NO: 4854186 - DNA, 25 bp, Homo sapien
tgtctatgacgtgggcaaggatgct

SEQ ID NO: 4854187 - DNA, 25 bp, Homo sapien
cagcttgaaagctgtattgagcagg

SEQ ID NO: 4854188 - DNA, 25 bp, Homo sapien
gaaagctgtattgagcaggtaacct

SEQ ID NO: 4854189 - DNA, 25 bp, Homo sapien
ttcagcttgaaagctgtattgagca

SEQ ID NO: 4854190 - DNA, 25 bp, Homo sapien
gcttgaaagctgtattgagcaggta

SEQ ID NO: 4854191 - DNA, 25 bp, Homo sapien
tcacatgagtggagaggcttcccgc

SEQ ID NO: 4854192 - DNA, 25 bp, Homo sapien
cctttccttcaggtcttcctgggag

SEQ ID NO: 4854193 - DNA, 25 bp, Homo sapien
aggtcttcctgggagtccccagtga

SEQ ID NO: 4854194 - DNA, 25 bp, Homo sapien
tccccagtgagtgtcttggggctct

SEQ ID NO: 4854195 - DNA, 25 bp, Homo sapien
cccatctggctccaaattctgacgc

SEQ ID NO: 4854196 - DNA, 25 bp, Homo sapien
gagcccatctggctccaaattctga

SEQ ID NO: 4854197 - DNA, 25 bp, Homo sapien
cggaagcacaggacagactgctgag

SEQ ID NO: 4854198 - DNA, 25 bp, Homo sapien
gacagactgctgagcccatctggct

SEQ ID NO: 4854199 - DNA, 25 bp, Homo sapien
tcctgcggaacagaggcccaaatcc

SEQ ID NO: 4854200 - DNA, 25 bp, Homo sapien
aagcatttccgagaatagtaatcaa

SEQ ID NO: 4854201 - DNA, 25 bp, Homo sapien
atttccgagaatagtaatcaatttt

SEQ ID NO: 4854202 - DNA, 25 bp, Homo sapien
gcatttccgagaatagtaatcaatt

SEQ ID NO: 4854203 - DNA, 25 bp, Homo sapien
agcatttccgagaatagtaatcaat

SEQ ID NO: 4854204 - DNA, 25 bp, Homo sapien
tgggtgtgctgtatttatttttatc

SEQ ID NO: 4854205 - DNA, 25 bp, Homo sapien
cctgtatttgggtgtgctgtattta

SEQ ID NO: 4854206 - DNA, 25 bp, Homo sapien
tatttgggtgtgctgtatttatttt

SEQ ID NO: 4854207 - DNA, 25 bp, Homo sapien
ctgtatttgggtgtgctgtatttat

SEQ ID NO: 4854208 - DNA, 25 bp, Homo sapien
atctgataaatgatatctctgtttg

SEQ ID NO: 4854209 - DNA, 25 bp, Homo sapien
gatatctctgtttgttacatgaact

SEQ ID NO: 4854210 - DNA, 25 bp, Homo sapien
tctgataaatgatatctctgtttgt

SEQ ID NO: 4854211 - DNA, 25 bp, Homo sapien
aatgatatctctgtttgttacatga

SEQ ID NO: 4854212 - DNA, 25 bp, Homo sapien
gatagacaagcttctatccacagtt

SEQ ID NO: 4854213 - DNA, 25 bp, Homo sapien
cttgttccattaagtagcgcatgta

SEQ ID NO: 4854214 - DNA, 25 bp, Homo sapien
catcttgttccattaagtagcgcat

SEQ ID NO: 4854215 - DNA, 25 bp, Homo sapien
gtgtacttctgcattgctttcagaa

SEQ ID NO: 4854216 - DNA, 25 bp, Homo sapien
catgatgcgcttctggtgtacttct

SEQ ID NO: 4854217 - DNA, 25 bp, Homo sapien
tgctgttttttttatgtattgagag

SEQ ID NO: 4854218 - DNA, 25 bp, Homo sapien
tgttttttttatgtattgagagaac

SEQ ID NO: 4854219 - DNA, 25 bp, Homo sapien
ctgttttttttatgtattgagagaa

SEQ ID NO: 4854220 - DNA, 25 bp, Homo sapien
ttatgctgttttttttatgtattga

SEQ ID NO: 4854221 - DNA, 25 bp, Homo sapien
tacgtctcctccatcgtgtctagag

SEQ ID NO: 4854222 - DNA, 25 bp, Homo sapien
ttatacgtctcctccatcgtgtcta

SEQ ID NO: 4854223 - DNA, 25 bp, Homo sapien
ctgatctttcttctgagtgagggac

SEQ ID NO: 4854224 - DNA, 25 bp, Homo sapien
tgatctttcttctgagtgagggaca

SEQ ID NO: 4854225 - DNA, 25 bp, Homo sapien
cctccgatggatgcgaggctcggtt

SEQ ID NO: 4854226 - DNA, 25 bp, Homo sapien
cctgcttcacctggactctgttcag

SEQ ID NO: 4854227 - DNA, 25 bp, Homo sapien
tcaatccattctcaagcctgcttca

SEQ ID NO: 4854228 - DNA, 25 bp, Homo sapien
aacctgcaagccttcctggctgttc

SEQ ID NO: 4854229 - DNA, 25 bp, Homo sapien
ccaggtcgaagctgtccagggctgg

SEQ ID NO: 4854230 - DNA, 25 bp, Homo sapien
cagtccctctgacaactgctgaaca

SEQ ID NO: 4854231 - DNA, 25 bp, Homo sapien
cagcagcaggtcacaaagcaggact

SEQ ID NO: 4854232 - DNA, 25 bp, Homo sapien
gtgagacagtccctctgacaactgc

SEQ ID NO: 4854233 - DNA, 25 bp, Homo sapien
agccatcacagaacacggtggttaa

SEQ ID NO: 4854234 - DNA, 25 bp, Homo sapien
tttggaacttgctctgaggaggaag

SEQ ID NO: 4854235 - DNA, 25 bp, Homo sapien
cacagaacacggtggttaaagactc

SEQ ID NO: 4854236 - DNA, 25 bp, Homo sapien
aatcctgttttggaacttgctctga

SEQ ID NO: 4854237 - DNA, 25 bp, Homo sapien
tcacagcacgttaacataggaagtt

SEQ ID NO: 4854238 - DNA, 25 bp, Homo sapien
ctctggtgtcacagcacgttaacat

SEQ ID NO: 4854239 - DNA, 25 bp, Homo sapien
aacacaggataaatgcgcccaacac

SEQ ID NO: 4854240 - DNA, 25 bp, Homo sapien
gcaccttgttacatctttagtcggg

SEQ ID NO: 4854241 - DNA, 25 bp, Homo sapien
tgctgcatctccgaagctctcggct

SEQ ID NO: 4854242 - DNA, 25 bp, Homo sapien
tggtagagagcagccgccacatgct

SEQ ID NO: 4854243 - DNA, 25 bp, Homo sapien
tctcttcacactcgaggatgcacac

SEQ ID NO: 4854244 - DNA, 25 bp, Homo sapien
gggcattcgccgcagatgctgcatc

SEQ ID NO: 4854245 - DNA, 25 bp, Homo sapien
cctgctcctggaacaagctccggac

SEQ ID NO: 4854246 - DNA, 25 bp, Homo sapien
gaaccgcttctgattggccaacttc

SEQ ID NO: 4854247 - DNA, 25 bp, Homo sapien
cggcgctggctggactgcatgctca

SEQ ID NO: 4854248 - DNA, 25 bp, Homo sapien
atgctcaggaccaagtattgcctca

SEQ ID NO: 4854249 - DNA, 25 bp, Homo sapien
tcataaactcactgaaccgcttctg

SEQ ID NO: 4854250 - DNA, 25 bp, Homo sapien
ttgcagtggccggtacagctgggag

SEQ ID NO: 4854251 - DNA, 25 bp, Homo sapien
atgggttgcagtggccggtacagct

SEQ ID NO: 4854252 - DNA, 25 bp, Homo sapien
tggccggtacagctgggaggagcgc

SEQ ID NO: 4854253 - DNA, 25 bp, Homo sapien
acagctgggaggagcgccccttccg

SEQ ID NO: 4854254 - DNA, 25 bp, Homo sapien
ccccagcttattggtgcccaactca

SEQ ID NO: 4854255 - DNA, 25 bp, Homo sapien
cccccagcttattggtgcccaactc

SEQ ID NO: 4854256 - DNA, 25 bp, Homo sapien
gcccccagcttattggtgcccaact

SEQ ID NO: 4854257 - DNA, 25 bp, Homo sapien
gcccaccctatggtaatgagttcgt

SEQ ID NO: 4854258 - DNA, 25 bp, Homo sapien
gatacagtttagaagtttgtcctct

SEQ ID NO: 4854259 - DNA, 25 bp, Homo sapien
ttgtatagactgcagaacgtgagcc

SEQ ID NO: 4854260 - DNA, 25 bp, Homo sapien
gcctttgtgcccaccctatggtaat

SEQ ID NO: 4854261 - DNA, 25 bp, Homo sapien
gatgaaaacaaggttgaagccggct

SEQ ID NO: 4854262 - DNA, 25 bp, Homo sapien
gaagccggctgttatagacttataa

SEQ ID NO: 4854263 - DNA, 25 bp, Homo sapien
tctccatcatgtgtagggcaggttg

SEQ ID NO: 4854264 - DNA, 25 bp, Homo sapien
acaacgcccggctaagtggctaatt

SEQ ID NO: 4854265 - DNA, 25 bp, Homo sapien
aatcgttcctaacgtagccagaggg

SEQ ID NO: 4854266 - DNA, 25 bp, Homo sapien
tagagacggaagcagtgaaagggag

SEQ ID NO: 4854267 - DNA, 25 bp, Homo sapien
tcagcatctccgcacatctgctccc

SEQ ID NO: 4854268 - DNA, 25 bp, Homo sapien
ttctattccccctagagacggaagc

SEQ ID NO: 4854269 - DNA, 25 bp, Homo sapien
ttctggaggcaaacgaagcctgcgg

SEQ ID NO: 4854270 - DNA, 25 bp, Homo sapien
ggaacaatcagacgggaaggttctg

SEQ ID NO: 4854271 - DNA, 25 bp, Homo sapien
aatacactctgatgtagcaacaggg

SEQ ID NO: 4854272 - DNA, 25 bp, Homo sapien
ggaatcctgattcccaggcggcagg

SEQ ID NO: 4854273 - DNA, 25 bp, Homo sapien
tagacactcatttagtgcccaggga

SEQ ID NO: 4854274 - DNA, 25 bp, Homo sapien
gcgaatgacgtctgtggccaagcga

SEQ ID NO: 4854275 - DNA, 25 bp, Homo sapien
cagagagtgttttgagccatggcca

SEQ ID NO: 4854276 - DNA, 25 bp, Homo sapien
gggaaccgacccagtgatcatgcct

SEQ ID NO: 4854277 - DNA, 25 bp, Homo sapien
acatgggaacttcgctcaggagggc

SEQ ID NO: 4854278 - DNA, 25 bp, Homo sapien
ccccagtttggaccgtgtagatata

SEQ ID NO: 4854279 - DNA, 25 bp, Homo sapien
ttcttatgccgttggtatacagggc

SEQ ID NO: 4854280 - DNA, 25 bp, Homo sapien
ttgagaattaagagctggcagctgc

SEQ ID NO: 4854281 - DNA, 25 bp, Homo sapien
tccggttattgaaaggacgcctcag

SEQ ID NO: 4854282 - DNA, 25 bp, Homo sapien
cttgcacccgtgagcgtcaggatga

SEQ ID NO: 4854283 - DNA, 25 bp, Homo sapien
ttagtggctgctggcgttttggccc

SEQ ID NO: 4854284 - DNA, 25 bp, Homo sapien
tgggctgcgtgcatgtcgataagca

SEQ ID NO: 4854285 - DNA, 25 bp, Homo sapien
cggcagccactgacaagaggccagt

SEQ ID NO: 4854286 - DNA, 25 bp, Homo sapien
gcagtgaaccagtgaccaaagaatt

SEQ ID NO: 4854287 - DNA, 25 bp, Homo sapien
taggagagagccaaaactgaccaag

SEQ ID NO: 4854288 - DNA, 25 bp, Homo sapien
tgaccaaggctattcagcagtgaac

SEQ ID NO: 4854289 - DNA, 25 bp, Homo sapien
cagcatggcgagtgtcctgtcccga

SEQ ID NO: 4854290 - DNA, 25 bp, Homo sapien
gagcccgggtgttgggacccagtgc

SEQ ID NO: 4854291 - DNA, 25 bp, Homo sapien
ttggaaagcggtccctcctgggagc

SEQ ID NO: 4854292 - DNA, 25 bp, Homo sapien
aaggaagtccttaaggctcccagca

SEQ ID NO: 4854293 - DNA, 25 bp, Homo sapien
tattttagtagacccttcctggctc

SEQ ID NO: 4854294 - DNA, 25 bp, Homo sapien
cctactaggaatggatatcactttt

SEQ ID NO: 4854295 - DNA, 25 bp, Homo sapien
tcctcagtggtttgcttttccgatt

SEQ ID NO: 4854296 - DNA, 25 bp, Homo sapien
agggaaggatgctagaagttgactt

SEQ ID NO: 4854297 - DNA, 25 bp, Homo sapien
taggcaggacctagttatttagaac

SEQ ID NO: 4854298 - DNA, 25 bp, Homo sapien
cctgggctacatatagtgggtttgg

SEQ ID NO: 4854299 - DNA, 25 bp, Homo sapien
gcaggtcactgcttggactaaatca

SEQ ID NO: 4854300 - DNA, 25 bp, Homo sapien
tatgctttatttagaatccgccctg

SEQ ID NO: 4854301 - DNA, 25 bp, Homo sapien
ggggaagccgggcgcgtgctgccgc

SEQ ID NO: 4854302 - DNA, 25 bp, Homo sapien
gagctagccgtccgagccgagccgt

SEQ ID NO: 4854303 - DNA, 25 bp, Homo sapien
ctgagctagccgtccgagccgagcc

SEQ ID NO: 4854304 - DNA, 25 bp, Homo sapien
ctagccgtccgagccgagccgtccg

SEQ ID NO: 4854305 - DNA, 25 bp, Homo sapien
tatgtgtttgggtgtacacgtggcc

SEQ ID NO: 4854306 - DNA, 25 bp, Homo sapien
tgaatatggacatttgctcaaattc

SEQ ID NO: 4854307 - DNA, 25 bp, Homo sapien
tatggacatttgctcaaattcactg

SEQ ID NO: 4854308 - DNA, 25 bp, Homo sapien
caagagtcatagggccttatgttcc

SEQ ID NO: 4854309 - DNA, 25 bp, Homo sapien
cagaagcagcaaccgcggcaaagtc

SEQ ID NO: 4854310 - DNA, 25 bp, Homo sapien
aaagtcgtcggggaacccactgcag

SEQ ID NO: 4854311 - DNA, 25 bp, Homo sapien
ttgagatgtcgggttctgtggacac

SEQ ID NO: 4854312 - DNA, 25 bp, Homo sapien
caggaagcttaagaggctctgctga

SEQ ID NO: 4854313 - DNA, 25 bp, Homo sapien
ccgggccccagcgagccgcaggaca

SEQ ID NO: 4854314 - DNA, 25 bp, Homo sapien
ccagcgagccgcaggacagacgcgg

SEQ ID NO: 4854315 - DNA, 25 bp, Homo sapien
gagccgcaggacagacgcggcccgg

SEQ ID NO: 4854316 - DNA, 25 bp, Homo sapien
ccgcaggacagacgcggcccggcat

SEQ ID NO: 4854317 - DNA, 25 bp, Homo sapien
cgcgctcggtttggctccccaggat

SEQ ID NO: 4854318 - DNA, 25 bp, Homo sapien
cggagcaggactacgggacaaaggg

SEQ ID NO: 4854319 - DNA, 25 bp, Homo sapien
gccggggagcgcaaacgcagccttt

SEQ ID NO: 4854320 - DNA, 25 bp, Homo sapien
cgccgggctgaagccgcgggttgtc

SEQ ID NO: 4854321 - DNA, 25 bp, Homo sapien
tgcttttaggcagattactccggta

SEQ ID NO: 4854322 - DNA, 25 bp, Homo sapien
tctacaagagtagcagacgaaagct

SEQ ID NO: 4854323 - DNA, 25 bp, Homo sapien
gacccgttaggagattgcagcagta

SEQ ID NO: 4854324 - DNA, 25 bp, Homo sapien
gttatctgatacaagggcagaccgt

SEQ ID NO: 4854325 - DNA, 25 bp, Homo sapien
gactagcagaggcaagacatgctct

SEQ ID NO: 4854326 - DNA, 25 bp, Homo sapien
gattaagtgccagatgactagcaga

SEQ ID NO: 4854327 - DNA, 25 bp, Homo sapien
aatgagttaactacagctgagcaca

SEQ ID NO: 4854328 - DNA, 25 bp, Homo sapien
tagctgcgatctggctggaaaaact

SEQ ID NO: 4854329 - DNA, 25 bp, Homo sapien
attggcgtgtcatcctcccacaggg

SEQ ID NO: 4854330 - DNA, 25 bp, Homo sapien
gtattggcgtgtcatcctcccacag

SEQ ID NO: 4854331 - DNA, 25 bp, Homo sapien
cttcatgtattggcgtgtcatcctc

SEQ ID NO: 4854332 - DNA, 25 bp, Homo sapien
atgtattggcgtgtcatcctcccac

SEQ ID NO: 4854333 - DNA, 25 bp, Homo sapien
ggagatccttccacagttgaatata

SEQ ID NO: 4854334 - DNA, 25 bp, Homo sapien
gacaaatagctatgcaaaccacctg

SEQ ID NO: 4854335 - DNA, 25 bp, Homo sapien
gcttatttccagttaagtggagaca

SEQ ID NO: 4854336 - DNA, 25 bp, Homo sapien
gatgcaggagttgatgcaaccagtt

SEQ ID NO: 4854337 - DNA, 25 bp, Homo sapien
ctggttgtctgtctcgtgttggtag

SEQ ID NO: 4854338 - DNA, 25 bp, Homo sapien
catcgcctagatccattacatcagg

SEQ ID NO: 4854339 - DNA, 25 bp, Homo sapien
tagccatggatactcatcgcctaga

SEQ ID NO: 4854340 - DNA, 25 bp, Homo sapien
gatccattacatcaggcaaactttt

SEQ ID NO: 4854341 - DNA, 25 bp, Homo sapien
tgaacagggatatgtacttccgtca

SEQ ID NO: 4854342 - DNA, 25 bp, Homo sapien
ggatatgtacttccgtcacaacgca

SEQ ID NO: 4854343 - DNA, 25 bp, Homo sapien
ggttatactgacagtcagacctaga

SEQ ID NO: 4854344 - DNA, 25 bp, Homo sapien
ggcttacgtatatactgaacaggga

SEQ ID NO: 4854345 - DNA, 25 bp, Homo sapien
tagggagcaatagctgaagctcagg

SEQ ID NO: 4854346 - DNA, 25 bp, Homo sapien
cagtagttggtatgctccacgagga

SEQ ID NO: 4854347 - DNA, 25 bp, Homo sapien
catctcattctcagttagggagcaa

SEQ ID NO: 4854348 - DNA, 25 bp, Homo sapien
tctgactcctttcctagtgagactt

SEQ ID NO: 4854349 - DNA, 25 bp, Homo sapien
acacaacagaaacacagggtttgta

SEQ ID NO: 4854350 - DNA, 25 bp, Homo sapien
cacaacagaaacacagggtttgtac

SEQ ID NO: 4854351 - DNA, 25 bp, Homo sapien
gcgcgtccctcaggtacccggagcg

SEQ ID NO: 4854352 - DNA, 25 bp, Homo sapien
gcgtccctcaggtacccggagcggc

SEQ ID NO: 4854353 - DNA, 25 bp, Homo sapien
gccgcgcgtccctcaggtacccgga

SEQ ID NO: 4854354 - DNA, 25 bp, Homo sapien
tgggggggctgcaccgcctgccgcg

SEQ ID NO: 4854355 - DNA, 25 bp, Homo sapien
gccgggagcctggcggcgcgcgctt

SEQ ID NO: 4854356 - DNA, 25 bp, Homo sapien
gggccgggagcctggcggcgcgcgc

SEQ ID NO: 4854357 - DNA, 25 bp, Homo sapien
tggcggcgcgcgcttcgggcggccg

SEQ ID NO: 4854358 - DNA, 25 bp, Homo sapien
cggcgcgcgcttcgggcggccggga

SEQ ID NO: 4854359 - DNA, 25 bp, Homo sapien
gcaggcaaaggtgggcccgaagctg

SEQ ID NO: 4854360 - DNA, 25 bp, Homo sapien
tgatggacgggaggggaaactttca

SEQ ID NO: 4854361 - DNA, 25 bp, Homo sapien
gggaaactttcaggcgtgggcaggc

SEQ ID NO: 4854362 - DNA, 25 bp, Homo sapien
ggcgtgggcaggcaaaggtgggccc

SEQ ID NO: 4854363 - DNA, 25 bp, Homo sapien
agcttcatttcagatgcggaccctc

SEQ ID NO: 4854364 - DNA, 25 bp, Homo sapien
ttcatttcagatgcggaccctcggg

SEQ ID NO: 4854365 - DNA, 25 bp, Homo sapien
aggcagccgggggaagctcgcggaa

SEQ ID NO: 4854366 - DNA, 25 bp, Homo sapien
gggaagctcgcggaagggagcaagg

SEQ ID NO: 4854367 - DNA, 25 bp, Homo sapien
gcatcatcttcaggagtaaccactt

SEQ ID NO: 4854368 - DNA, 25 bp, Homo sapien
cagcacaccaccaaggactaaagga

SEQ ID NO: 4854369 - DNA, 25 bp, Homo sapien
tgatgcggctactctgctgtgctgc

SEQ ID NO: 4854370 - DNA, 25 bp, Homo sapien
gaggctgtatctaaacacttccccg

SEQ ID NO: 4854371 - DNA, 25 bp, Homo sapien
tacaagtgctccataagtcaggtct

SEQ ID NO: 4854372 - DNA, 25 bp, Homo sapien
ctcaggttacaagtgctccataagt

SEQ ID NO: 4854373 - DNA, 25 bp, Homo sapien
agtgctccataagtcaggtcttgag

SEQ ID NO: 4854374 - DNA, 25 bp, Homo sapien
ggttacaagtgctccataagtcagg

SEQ ID NO: 4854375 - DNA, 25 bp, Homo sapien
tgttagcttggtctcacaaaaggcg

SEQ ID NO: 4854376 - DNA, 25 bp, Homo sapien
agttaaatactcttcgcaccgtcag

SEQ ID NO: 4854377 - DNA, 25 bp, Homo sapien
aggtctcagctcgaaggtacttctt

SEQ ID NO: 4854378 - DNA, 25 bp, Homo sapien
ccatcttaggagaagagctatttct

SEQ ID NO: 4854379 - DNA, 25 bp, Homo sapien
cagtcaagggccaaagagagaagac

SEQ ID NO: 4854380 - DNA, 25 bp, Homo sapien
gagagaagacaatccaagtcatagc

SEQ ID NO: 4854381 - DNA, 25 bp, Homo sapien
cctcaaggtaataggttcacaagaa

SEQ ID NO: 4854382 - DNA, 25 bp, Homo sapien
tatatgccccatgaacacagtcaag

SEQ ID NO: 4854383 - DNA, 25 bp, Homo sapien
agtattataaggcaaatcttggcac

SEQ ID NO: 4854384 - DNA, 25 bp, Homo sapien
taatgattcagaagattaggcatga

SEQ ID NO: 4854385 - DNA, 25 bp, Homo sapien
gcatgaaggtagtattataaggcaa

SEQ ID NO: 4854386 - DNA, 25 bp, Homo sapien
tgctgtctgttggtcataatgattc

SEQ ID NO: 4854387 - DNA, 25 bp, Homo sapien
ctgagaagtcctgaatgactacacc

SEQ ID NO: 4854388 - DNA, 25 bp, Homo sapien
tctgctgagaagtcctgaatgacta

SEQ ID NO: 4854389 - DNA, 25 bp, Homo sapien
tgctgagaagtcctgaatgactaca

SEQ ID NO: 4854390 - DNA, 25 bp, Homo sapien
ttctgctgagaagtcctgaatgact

SEQ ID NO: 4854391 - DNA, 25 bp, Homo sapien
tacgacagggaagtgtgacacgtcc

SEQ ID NO: 4854392 - DNA, 25 bp, Homo sapien
catacaaataggagcgtagagtgca

SEQ ID NO: 4854393 - DNA, 25 bp, Homo sapien
gccggaaatcccgagaacaatccag

SEQ ID NO: 4854394 - DNA, 25 bp, Homo sapien
tagagtgcacaaagaaaaggccgga

SEQ ID NO: 4854395 - DNA, 25 bp, Homo sapien
gacatggtggtacgcccatgtaatc

SEQ ID NO: 4854396 - DNA, 25 bp, Homo sapien
tggacatggtggtacgcccatgtaa

SEQ ID NO: 4854397 - DNA, 25 bp, Homo sapien
aggaggcgcctccttggtgcatcaa

SEQ ID NO: 4854398 - DNA, 25 bp, Homo sapien
ggtgcatcaacccatggcaaaaggg

SEQ ID NO: 4854399 - DNA, 25 bp, Homo sapien
gagggatgagatgaaactgctatca

SEQ ID NO: 4854400 - DNA, 25 bp, Homo sapien
tgatacagatttggcacaagtgctg

SEQ ID NO: 4854401 - DNA, 25 bp, Homo sapien
caagtcgaggatatggctcatcaca

SEQ ID NO: 4854402 - DNA, 25 bp, Homo sapien
ctctcggggacaccaaaaaccatag

SEQ ID NO: 4854403 - DNA, 25 bp, Homo sapien
cagaaaagaataacccagatcagga

SEQ ID NO: 4854404 - DNA, 25 bp, Homo sapien
tccagctaaattcagatccacaagt

SEQ ID NO: 4854405 - DNA, 25 bp, Homo sapien
gacaaggaggtgaacaatcacgcac

SEQ ID NO: 4854406 - DNA, 25 bp, Homo sapien
gaagtacatatttggacaaggaggt

SEQ ID NO: 4854407 - DNA, 25 bp, Homo sapien
tatttggacaaggaggtgaacaatc

SEQ ID NO: 4854408 - DNA, 25 bp, Homo sapien
tatgaaatagcgagcaaatgacagt

SEQ ID NO: 4854409 - DNA, 25 bp, Homo sapien
aaaagtaaacaatgtggccgagagg

SEQ ID NO: 4854410 - DNA, 25 bp, Homo sapien
gataacggaatcttgtgacatcaat

SEQ ID NO: 4854411 - DNA, 25 bp, Homo sapien
caatgtggccgagaggcaaatgatt

SEQ ID NO: 4854412 - DNA, 25 bp, Homo sapien
taataggcctttcaggataacggaa

SEQ ID NO: 4854413 - DNA, 25 bp, Homo sapien
gtgtcactgtggaagccttatattg

SEQ ID NO: 4854414 - DNA, 25 bp, Homo sapien
agggatggatgcattgcaggctact

SEQ ID NO: 4854415 - DNA, 25 bp, Homo sapien
actgtggaagccttatattgtgcag

SEQ ID NO: 4854416 - DNA, 25 bp, Homo sapien
gcaggctactcgatcttcaagcaaa

SEQ ID NO: 4854417 - DNA, 25 bp, Homo sapien
taagaattacccaccatacactgcc

SEQ ID NO: 4854418 - DNA, 25 bp, Homo sapien
atagcttcactaccccactttggca

SEQ ID NO: 4854419 - DNA, 25 bp, Homo sapien
gcacagctgctaaaaaccatgtgat

SEQ ID NO: 4854420 - DNA, 25 bp, Homo sapien
catgcactggcgtgaaacagcaatg

SEQ ID NO: 4854421 - DNA, 25 bp, Homo sapien
ggagagaaaccccaactaccacata

SEQ ID NO: 4854422 - DNA, 25 bp, Homo sapien
gaggccaacaaaacacacgccacta

SEQ ID NO: 4854423 - DNA, 25 bp, Homo sapien
tcaacatcgtagaggccaacaaaac

SEQ ID NO: 4854424 - DNA, 25 bp, Homo sapien
gggagcaagaacaaaatatctcaat

SEQ ID NO: 4854425 - DNA, 25 bp, Homo sapien
ccaagagtggtacgagataaagaat

SEQ ID NO: 4854426 - DNA, 25 bp, Homo sapien
gaatgtgatattctctgcagcgttc

SEQ ID NO: 4854427 - DNA, 25 bp, Homo sapien
gaatgctgaaaacaccgatccggat

SEQ ID NO: 4854428 - DNA, 25 bp, Homo sapien
cagatgccccggtaagcttgctcat

SEQ ID NO: 4854429 - DNA, 25 bp, Homo sapien
cgagatcagaagacatcgggagcat

SEQ ID NO: 4854430 - DNA, 25 bp, Homo sapien
ccgagatcagaagacatcgggagca

SEQ ID NO: 4854431 - DNA, 25 bp, Homo sapien
tccctcatggtcctttcataaacaa

SEQ ID NO: 4854432 - DNA, 25 bp, Homo sapien
tcatggtcctttcataaacaattct

SEQ ID NO: 4854433 - DNA, 25 bp, Homo sapien
cctcatggtcctttcataaacaatt

SEQ ID NO: 4854434 - DNA, 25 bp, Homo sapien
catggtcctttcataaacaattctg

SEQ ID NO: 4854435 - DNA, 25 bp, Homo sapien
ctaatgttggcagcgtaaaacatac

SEQ ID NO: 4854436 - DNA, 25 bp, Homo sapien
gtctaatgttggcagcgtaaaacat

SEQ ID NO: 4854437 - DNA, 25 bp, Homo sapien
tcattgtctaatgttggcagcgtaa

SEQ ID NO: 4854438 - DNA, 25 bp, Homo sapien
ttgtctaatgttggcagcgtaaaac

SEQ ID NO: 4854439 - DNA, 25 bp, Homo sapien
ggaggccaaggcgagcacatcactt

SEQ ID NO: 4854440 - DNA, 25 bp, Homo sapien
cggtgactcatgcctgtaatcccag

SEQ ID NO: 4854441 - DNA, 25 bp, Homo sapien
ataaaagtagagtgtgggccaggca

SEQ ID NO: 4854442 - DNA, 25 bp, Homo sapien
gccaaggcgagcacatcacttgagg

SEQ ID NO: 4854443 - DNA, 25 bp, Homo sapien
actatgagagccatcaggtatttca

SEQ ID NO: 4854444 - DNA, 25 bp, Homo sapien
ctatgagagccatcaggtatttcat

SEQ ID NO: 4854445 - DNA, 25 bp, Homo sapien
tcctacgaccatgaaaaaaactggc

SEQ ID NO: 4854446 - DNA, 25 bp, Homo sapien
tatgtcaatctgtcccctaaggtgg

SEQ ID NO: 4854447 - DNA, 25 bp, Homo sapien
gaaatctatcattctcaagacactg

SEQ ID NO: 4854448 - DNA, 25 bp, Homo sapien
gccaaattagatctataggactgac

SEQ ID NO: 4854449 - DNA, 25 bp, Homo sapien
taaggtggtatgatggaaaaaggcc

SEQ ID NO: 4854450 - DNA, 25 bp, Homo sapien
gagcaaaatcaggttcctggagtac

SEQ ID NO: 4854451 - DNA, 25 bp, Homo sapien
gagtatttggatccctcaggagaga

SEQ ID NO: 4854452 - DNA, 25 bp, Homo sapien
gatgttccttgagtggaagttcccc

SEQ ID NO: 4854453 - DNA, 25 bp, Homo sapien
ccccttgactttcttatgataggag

SEQ ID NO: 4854454 - DNA, 25 bp, Homo sapien
gccatcacgtgatctgtggaggctg

SEQ ID NO: 4854455 - DNA, 25 bp, Homo sapien
ccatcacgtgatctgtggaggctgc

SEQ ID NO: 4854456 - DNA, 25 bp, Homo sapien
cgtggtagctgctcactttgctgtg

SEQ ID NO: 4854457 - DNA, 25 bp, Homo sapien
tggtagctgctcactttgctgtgga

SEQ ID NO: 4854458 - DNA, 25 bp, Homo sapien
caataacccgattcatgctggtgcc

SEQ ID NO: 4854459 - DNA, 25 bp, Homo sapien
gccgatgagaactactatgcctgga

SEQ ID NO: 4854460 - DNA, 25 bp, Homo sapien
tatgcctggagtgatctgttagtcg

SEQ ID NO: 4854461 - DNA, 25 bp, Homo sapien
gacatgctgccatgaggtagtctct

SEQ ID NO: 4854462 - DNA, 25 bp, Homo sapien
caaagtcctactgttcatctgagaa

SEQ ID NO: 4854463 - DNA, 25 bp, Homo sapien
aatcaactcactacaggagggcctg

SEQ ID NO: 4854464 - DNA, 25 bp, Homo sapien
ttaggcatctgaagtaacccaagtg

SEQ ID NO: 4854465 - DNA, 25 bp, Homo sapien
cctactggctattgggcaaggcaag

SEQ ID NO: 4854466 - DNA, 25 bp, Homo sapien
tgagactcagtactagggtaaaagc

SEQ ID NO: 4854467 - DNA, 25 bp, Homo sapien
tgatccttacaatatccagtgaggg

SEQ ID NO: 4854468 - DNA, 25 bp, Homo sapien
ccctgtgccagctgagttattaacc

SEQ ID NO: 4854469 - DNA, 25 bp, Homo sapien
gagaaataaaatgaccagcccagtt

SEQ ID NO: 4854470 - DNA, 25 bp, Homo sapien
tacaatcagacggaaggcatgcgat

SEQ ID NO: 4854471 - DNA, 25 bp, Homo sapien
cattcttagaagacttggatcctga

SEQ ID NO: 4854472 - DNA, 25 bp, Homo sapien
tgatgactaaagaagcacaggatta

SEQ ID NO: 4854473 - DNA, 25 bp, Homo sapien
tcttaatcagctgtaaaacgacaca

SEQ ID NO: 4854474 - DNA, 25 bp, Homo sapien
gacgctacctaaactaattctcttg

SEQ ID NO: 4854475 - DNA, 25 bp, Homo sapien
tggaggcaccacgagataaaatgcc

SEQ ID NO: 4854476 - DNA, 25 bp, Homo sapien
gctgggcggaattttagacgctacc

SEQ ID NO: 4854477 - DNA, 25 bp, Homo sapien
caagttgatctagttcatgggatga

SEQ ID NO: 4854478 - DNA, 25 bp, Homo sapien
taaattagccatacgaaccattgct

SEQ ID NO: 4854479 - DNA, 25 bp, Homo sapien
ctctgcggagatatggaactaatgc

SEQ ID NO: 4854480 - DNA, 25 bp, Homo sapien
tccttggcctagtgcacagagaaca

SEQ ID NO: 4854481 - DNA, 25 bp, Homo sapien
tagctaaagaatcacaccagaaacc

SEQ ID NO: 4854482 - DNA, 25 bp, Homo sapien
gaatatcccattatcaaaacccaga

SEQ ID NO: 4854483 - DNA, 25 bp, Homo sapien
taaatcactctaggattacttgctt

SEQ ID NO: 4854484 - DNA, 25 bp, Homo sapien
gaactactgtgttgatcttgtctca

SEQ ID NO: 4854485 - DNA, 25 bp, Homo sapien
ggtggatggctaaacataaagtaaa

SEQ ID NO: 4854486 - DNA, 25 bp, Homo sapien
tagaaatagcacctgatggcaagag

SEQ ID NO: 4854487 - DNA, 25 bp, Homo sapien
gaacagctgatctacaggaggagcg

SEQ ID NO: 4854488 - DNA, 25 bp, Homo sapien
ggagcgatccacatgccgagatgac

SEQ ID NO: 4854489 - DNA, 25 bp, Homo sapien
tgaccgcgataatctaacaacactg

SEQ ID NO: 4854490 - DNA, 25 bp, Homo sapien
gatagttcagaataatgctgtatta

SEQ ID NO: 4854491 - DNA, 25 bp, Homo sapien
gttcagaataatgctgtattatcca

SEQ ID NO: 4854492 - DNA, 25 bp, Homo sapien
tttcagatagttcagaataatgctg

SEQ ID NO: 4854493 - DNA, 25 bp, Homo sapien
tcagaataatgctgtattatccaac

SEQ ID NO: 4854494 - DNA, 25 bp, Homo sapien
tcagacatcacatgggtttgggcaa

SEQ ID NO: 4854495 - DNA, 25 bp, Homo sapien
aagacacctggagtacctctatggg

SEQ ID NO: 4854496 - DNA, 25 bp, Homo sapien
tattgcctaggaagaagtgtaccaa

SEQ ID NO: 4854497 - DNA, 25 bp, Homo sapien
gaaaactaaactgctaagtgccagc

SEQ ID NO: 4854498 - DNA, 25 bp, Homo sapien
taaaatcagtttgtacactcacagt

SEQ ID NO: 4854499 - DNA, 25 bp, Homo sapien
agtgcacttgccctgtacatcccaa

SEQ ID NO: 4854500 - DNA, 25 bp, Homo sapien
cagttcatgctctaaccaagtgcac

SEQ ID NO: 4854501 - DNA, 25 bp, Homo sapien
cactcacagttaaagtgctaagaaa

SEQ ID NO: 4854502 - DNA, 25 bp, Homo sapien
tcacgctgagaatgcacgggaatct

SEQ ID NO: 4854503 - DNA, 25 bp, Homo sapien
tgcacgggaatctctgtcactataa

SEQ ID NO: 4854504 - DNA, 25 bp, Homo sapien
ttggaatccaccaaattgatgagtg

SEQ ID NO: 4854505 - DNA, 25 bp, Homo sapien
aaattgatgagtggaggcccatgca

SEQ ID NO: 4854506 - DNA, 25 bp, Homo sapien
aagacatcagaacgccacaaagtgg

SEQ ID NO: 4854507 - DNA, 25 bp, Homo sapien
gaaaagtctcgcattgctcagcagc

SEQ ID NO: 4854508 - DNA, 25 bp, Homo sapien
gcagtctgtacccttgaatgtcaaa

SEQ ID NO: 4854509 - DNA, 25 bp, Homo sapien
gattttcaacagaccacaatgacag

SEQ ID NO: 4854510 - DNA, 25 bp, Homo sapien
tggtctctgccggagcaagttacac

SEQ ID NO: 4854511 - DNA, 25 bp, Homo sapien
caacaggattccagtccttctgcat

SEQ ID NO: 4854512 - DNA, 25 bp, Homo sapien
ggagcaagttacaccaacaggattc

SEQ ID NO: 4854513 - DNA, 25 bp, Homo sapien
agttacaccaacaggattccagtcc

SEQ ID NO: 4854514 - DNA, 25 bp, Homo sapien
tgtctccataaagtagcgggctggc

SEQ ID NO: 4854515 - DNA, 25 bp, Homo sapien
gcaggaactgtctgacagtctctcc

SEQ ID NO: 4854516 - DNA, 25 bp, Homo sapien
gaactgtctgacagtctctcctgtc

SEQ ID NO: 4854517 - DNA, 25 bp, Homo sapien
ggaactgtctgacagtctctcctgt

SEQ ID NO: 4854518 - DNA, 25 bp, Homo sapien
agaccaacttggcaaacatagtgag

SEQ ID NO: 4854519 - DNA, 25 bp, Homo sapien
cccagtattttgggacgttgaggtg

SEQ ID NO: 4854520 - DNA, 25 bp, Homo sapien
aaattattcctagccaggctcagtg

SEQ ID NO: 4854521 - DNA, 25 bp, Homo sapien
aaaaaattattcctagccaggctca

SEQ ID NO: 4854522 - DNA, 25 bp, Homo sapien
atacagcagtttccggcgactatgc

SEQ ID NO: 4854523 - DNA, 25 bp, Homo sapien
caggctgcctttgaattcctctttt

SEQ ID NO: 4854524 - DNA, 25 bp, Homo sapien
gcagatacagcagtttccggcgact

SEQ ID NO: 4854525 - DNA, 25 bp, Homo sapien
ctcaggctgcctttgaattcctctt

SEQ ID NO: 4854526 - DNA, 25 bp, Homo sapien
ccattgatgcctaggattgcaaccc

SEQ ID NO: 4854527 - DNA, 25 bp, Homo sapien
ctggtataagggagaggcctcatga

SEQ ID NO: 4854528 - DNA, 25 bp, Homo sapien
gggcagcccatccttagttggccag

SEQ ID NO: 4854529 - DNA, 25 bp, Homo sapien
aacagtgctggcattaatctactca

SEQ ID NO: 4854530 - DNA, 25 bp, Homo sapien
cgaaagtcggcgtcccagaagccgt

SEQ ID NO: 4854531 - DNA, 25 bp, Homo sapien
cgccgcctgcgcgaaagtcggcgtc

SEQ ID NO: 4854532 - DNA, 25 bp, Homo sapien
tcggcgtcccagaagccgttctggc

SEQ ID NO: 4854533 - DNA, 25 bp, Homo sapien
ctgcgcgaaagtcggcgtcccagaa

SEQ ID NO: 4854534 - DNA, 25 bp, Homo sapien
acagctgcagccgagcgtccaaaaa

SEQ ID NO: 4854535 - DNA, 25 bp, Homo sapien
tgcagccgagcgtccaaaaaaaggt

SEQ ID NO: 4854536 - DNA, 25 bp, Homo sapien
cagccgagcgtccaaaaaaaggtgg

SEQ ID NO: 4854537 - DNA, 25 bp, Homo sapien
aggtggaggcgggtcccgagcagcc

SEQ ID NO: 4854538 - DNA, 25 bp, Homo sapien
gccgacagaagatgctccgggccag

SEQ ID NO: 4854539 - DNA, 25 bp, Homo sapien
gcaggcgactgcgtgtagaagcggg

SEQ ID NO: 4854540 - DNA, 25 bp, Homo sapien
aggcgagcccggcaaaaagagccag

SEQ ID NO: 4854541 - DNA, 25 bp, Homo sapien
ctggaccctcggacaggaagcggct

SEQ ID NO: 4854542 - DNA, 25 bp, Homo sapien
tgaattcagcttgagacgctttacc

SEQ ID NO: 4854543 - DNA, 25 bp, Homo sapien
caattcctcgttcttgactcataag

SEQ ID NO: 4854544 - DNA, 25 bp, Homo sapien
tcataagctccttgtcctttgttaa

SEQ ID NO: 4854545 - DNA, 25 bp, Homo sapien
taccatcccatcatcattaccatat

SEQ ID NO: 4854546 - DNA, 25 bp, Homo sapien
agaagtcgccatctgctagctcctc

SEQ ID NO: 4854547 - DNA, 25 bp, Homo sapien
agcagaagtcgccatctgctagctc

SEQ ID NO: 4854548 - DNA, 25 bp, Homo sapien
caaagcagaagtcgccatctgctag

SEQ ID NO: 4854549 - DNA, 25 bp, Homo sapien
tgcaaagcagaagtcgccatctgct

SEQ ID NO: 4854550 - DNA, 25 bp, Homo sapien
ctctgacttgtgtagcattacacct

SEQ ID NO: 4854551 - DNA, 25 bp, Homo sapien
tcagcacacgacttcttgaaagagt

SEQ ID NO: 4854552 - DNA, 25 bp, Homo sapien
tgtagcattacacctcagcacacga

SEQ ID NO: 4854553 - DNA, 25 bp, Homo sapien
tcttgaaagagtgaacctccagggc

SEQ ID NO: 4854554 - DNA, 25 bp, Homo sapien
gctgaccaacaaatatgcatagtgt

SEQ ID NO: 4854555 - DNA, 25 bp, Homo sapien
catgggttgctattccacaaaacga

SEQ ID NO: 4854556 - DNA, 25 bp, Homo sapien
tgcagctgaaatggtctctgaccct

SEQ ID NO: 4854557 - DNA, 25 bp, Homo sapien
gggtcactcgccataaccatgggtt

SEQ ID NO: 4854558 - DNA, 25 bp, Homo sapien
gttccccgcgcccccattccgcagc

SEQ ID NO: 4854559 - DNA, 25 bp, Homo sapien
cgttccccgcgcccccattccgcag

SEQ ID NO: 4854560 - DNA, 25 bp, Homo sapien
tccccgcgcccccattccgcagcat

SEQ ID NO: 4854561 - DNA, 25 bp, Homo sapien
ttccccgcgcccccattccgcagca

SEQ ID NO: 4854562 - DNA, 25 bp, Homo sapien
cactagtatcacgtaaaggcaggcg

SEQ ID NO: 4854563 - DNA, 25 bp, Homo sapien
aatgatccggtcatcgtagtcggcg

SEQ ID NO: 4854564 - DNA, 25 bp, Homo sapien
tcaaagcagttgtgtagccggcagc

SEQ ID NO: 4854565 - DNA, 25 bp, Homo sapien
ccaggaggtcactatcggagaggct

SEQ ID NO: 4854566 - DNA, 25 bp, Homo sapien
catgcaccaaaacgaactgttcgtt

SEQ ID NO: 4854567 - DNA, 25 bp, Homo sapien
tcatgcaccaaaacgaactgttcgt

SEQ ID NO: 4854568 - DNA, 25 bp, Homo sapien
tgcaccaaaacgaactgttcgtttc

SEQ ID NO: 4854569 - DNA, 25 bp, Homo sapien
atgcaccaaaacgaactgttcgttt

SEQ ID NO: 4854570 - DNA, 25 bp, Homo sapien
acttcaactggtggcacttctccca

SEQ ID NO: 4854571 - DNA, 25 bp, Homo sapien
tagtcctaccccattcaacgggaga

SEQ ID NO: 4854572 - DNA, 25 bp, Homo sapien
catcgcccctctgtttggtagtcct

SEQ ID NO: 4854573 - DNA, 25 bp, Homo sapien
aacgggagacccacttcaactggtg

SEQ ID NO: 4854574 - DNA, 25 bp, Homo sapien
cagagaactcaggaatgaggaaaat

SEQ ID NO: 4854575 - DNA, 25 bp, Homo sapien
aggaaaatgagatccaggaagaggc

SEQ ID NO: 4854576 - DNA, 25 bp, Homo sapien
aaagaggaaccatcagagaactcag

SEQ ID NO: 4854577 - DNA, 25 bp, Homo sapien
aggaagaggcacacagtcatgccca

SEQ ID NO: 4854578 - DNA, 25 bp, Homo sapien
gacaaaacgaaggaccgagtgaggc

SEQ ID NO: 4854579 - DNA, 25 bp, Homo sapien
aagtgtacagcccagggtatcctaa

SEQ ID NO: 4854580 - DNA, 25 bp, Homo sapien
cacaatgacaaaacgaaggaccgag

SEQ ID NO: 4854581 - DNA, 25 bp, Homo sapien
cagggtatcctaagctcagagtcca

SEQ ID NO: 4854582 - DNA, 25 bp, Homo sapien
caaacatgatttcgtcatggcggag

SEQ ID NO: 4854583 - DNA, 25 bp, Homo sapien
tggcggaggtgagcatcgtcatcaa

SEQ ID NO: 4854584 - DNA, 25 bp, Homo sapien
gacaggatggcctctgtctcaattt

SEQ ID NO: 4854585 - DNA, 25 bp, Homo sapien
tccagggtaagaatcggttgttcaa

SEQ ID NO: 4854586 - DNA, 25 bp, Homo sapien
acatgtatgatgagaagtggcctac

SEQ ID NO: 4854587 - DNA, 25 bp, Homo sapien
agactactgaactgcaccactccta

SEQ ID NO: 4854588 - DNA, 25 bp, Homo sapien
ccaaatttgagcagggctgacggag

SEQ ID NO: 4854589 - DNA, 25 bp, Homo sapien
tggagaactgaaagcgtttaagctc

SEQ ID NO: 4854590 - DNA, 25 bp, Homo sapien
cccatgcgtggtaacggccagggaa

SEQ ID NO: 4854591 - DNA, 25 bp, Homo sapien
atgcggtcccgagcttctctccaca

SEQ ID NO: 4854592 - DNA, 25 bp, Homo sapien
tcacaggagtagttggagttgtaga

SEQ ID NO: 4854593 - DNA, 25 bp, Homo sapien
gatgtcccatgcgtggtaacggcca

SEQ ID NO: 4854594 - DNA, 25 bp, Homo sapien
gggcatcacataagaatacaggtag

SEQ ID NO: 4854595 - DNA, 25 bp, Homo sapien
cctcacagttgatgtattcatccac

SEQ ID NO: 4854596 - DNA, 25 bp, Homo sapien
gcttccgagtgatgtgggagacaag

SEQ ID NO: 4854597 - DNA, 25 bp, Homo sapien
tattcatccaccatgtcccggatgg

SEQ ID NO: 4854598 - DNA, 25 bp, Homo sapien
aagtgggtggaaccaggctttctgt

SEQ ID NO: 4854599 - DNA, 25 bp, Homo sapien
ctaacccttaccagcatgctctaac

SEQ ID NO: 4854600 - DNA, 25 bp, Homo sapien
gaagtgggtggaaccaggctttctg

SEQ ID NO: 4854601 - DNA, 25 bp, Homo sapien
gcatgctctaacttgctgacagagc

SEQ ID NO: 4854602 - DNA, 25 bp, Homo sapien
caagggtatcgacgactgggtctag

SEQ ID NO: 4854603 - DNA, 25 bp, Homo sapien
tgtgttcactcctgctcatgatcag

SEQ ID NO: 4854604 - DNA, 25 bp, Homo sapien
tgtgcgtgtcctatgtgacctgagg

SEQ ID NO: 4854605 - DNA, 25 bp, Homo sapien
caatgaggctttacctgtgcgtgtc

SEQ ID NO: 4854606 - DNA, 25 bp, Homo sapien
catcggaatgtccaccgtgaggtca

SEQ ID NO: 4854607 - DNA, 25 bp, Homo sapien
ccgctcgtggaagtgggagtcatca

SEQ ID NO: 4854608 - DNA, 25 bp, Homo sapien
gaatccaccctgaactgcgtgtaca

SEQ ID NO: 4854609 - DNA, 25 bp, Homo sapien
gaagaagttgatgcacttgtgccgc

SEQ ID NO: 4854610 - DNA, 25 bp, Homo sapien
taaatcctcaaaaatcgctggcccc

SEQ ID NO: 4854611 - DNA, 25 bp, Homo sapien
gagagttcccttaagccgagctagc

SEQ ID NO: 4854612 - DNA, 25 bp, Homo sapien
taaaaaccacgaaccagctgtcctg

SEQ ID NO: 4854613 - DNA, 25 bp, Homo sapien
cagtacttgaagaggacccacgtgg

SEQ ID NO: 4854614 - DNA, 25 bp, Homo sapien
gaaagatcccatccttccggacagg

SEQ ID NO: 4854615 - DNA, 25 bp, Homo sapien
ccccgagggaagaaggctactgcta

SEQ ID NO: 4854616 - DNA, 25 bp, Homo sapien
taagaccattgtgctcgtgacgaaa

SEQ ID NO: 4854617 - DNA, 25 bp, Homo sapien
catctcaagcgagtcacaggtcggc

SEQ ID NO: 4854618 - DNA, 25 bp, Homo sapien
gaagacggacacacacaagagtaga

SEQ ID NO: 4854619 - DNA, 25 bp, Homo sapien
cagaaatgtacctcaacagtgcacc

SEQ ID NO: 4854620 - DNA, 25 bp, Homo sapien
tattcagcaacgatggatgcatctc

SEQ ID NO: 4854621 - DNA, 25 bp, Homo sapien
ccaaaacgttatgctgggtgtgtag

SEQ ID NO: 4854622 - DNA, 25 bp, Homo sapien
tgctaatcagacgacaccatacaga

SEQ ID NO: 4854623 - DNA, 25 bp, Homo sapien
gctgcattcatcaagaccgtatgga

SEQ ID NO: 4854624 - DNA, 25 bp, Homo sapien
tatggaactggcacgaggatgaaca

SEQ ID NO: 4854625 - DNA, 25 bp, Homo sapien
gaaacagagccccacttctataatg

SEQ ID NO: 4854626 - DNA, 25 bp, Homo sapien
tcagaaataacaccgcatatctaca

SEQ ID NO: 4854627 - DNA, 25 bp, Homo sapien
gccctcagaaataacaccgcatatc

SEQ ID NO: 4854628 - DNA, 25 bp, Homo sapien
agagcccacattgccaagtcaatcc

SEQ ID NO: 4854629 - DNA, 25 bp, Homo sapien
aaataacaccgcatatctacaacta

SEQ ID NO: 4854630 - DNA, 25 bp, Homo sapien
gagtacagaatttgttcgcaatgaa

SEQ ID NO: 4854631 - DNA, 25 bp, Homo sapien
gaaacagttttgtaactagctagtg

SEQ ID NO: 4854632 - DNA, 25 bp, Homo sapien
tagctagtggtgagggttacacaac

SEQ ID NO: 4854633 - DNA, 25 bp, Homo sapien
gagagaatagaggttatcagaggct

SEQ ID NO: 4854634 - DNA, 25 bp, Homo sapien
cattcataatagtgtgagataactt

SEQ ID NO: 4854635 - DNA, 25 bp, Homo sapien
gatgcaataccatcccagcagacag

SEQ ID NO: 4854636 - DNA, 25 bp, Homo sapien
ttaattctgcctattgatttatgga

SEQ ID NO: 4854637 - DNA, 25 bp, Homo sapien
tgtaagatctctacactaaaagtct

SEQ ID NO: 4854638 - DNA, 25 bp, Homo sapien
ttttatcagtgtagcgtgcccagcc

SEQ ID NO: 4854639 - DNA, 25 bp, Homo sapien
ttcttctggagacaaatccctcagg

SEQ ID NO: 4854640 - DNA, 25 bp, Homo sapien
cactgaggccatgagtgaatgcacc

SEQ ID NO: 4854641 - DNA, 25 bp, Homo sapien
cacctacaaggtagagacccaggga

SEQ ID NO: 4854642 - DNA, 25 bp, Homo sapien
tctctagtagcaaacaacagaaatg

SEQ ID NO: 4854643 - DNA, 25 bp, Homo sapien
tctagtagcaaacaacagaaatgat

SEQ ID NO: 4854644 - DNA, 25 bp, Homo sapien
gtagcaaacaacagaaatgatccct

SEQ ID NO: 4854645 - DNA, 25 bp, Homo sapien
tagtagcaaacaacagaaatgatcc

SEQ ID NO: 4854646 - DNA, 25 bp, Homo sapien
gccagtggttaaggacagactattc

SEQ ID NO: 4854647 - DNA, 25 bp, Homo sapien
ccttagagaacataagagaactcga

SEQ ID NO: 4854648 - DNA, 25 bp, Homo sapien
tgggttaaacgtagaaagagcaatg

SEQ ID NO: 4854649 - DNA, 25 bp, Homo sapien
gaagatacagaacttgttcatccct

SEQ ID NO: 4854650 - DNA, 25 bp, Homo sapien
cctttaccaattgcactctctttac

SEQ ID NO: 4854651 - DNA, 25 bp, Homo sapien
tccggcccaaagtacactctccatc

SEQ ID NO: 4854652 - DNA, 25 bp, Homo sapien
ctttctccggcccaaagtacactct

SEQ ID NO: 4854653 - DNA, 25 bp, Homo sapien
ttggccctttaccaattgcactctc

SEQ ID NO: 4854654 - DNA, 25 bp, Homo sapien
ttggaaaaccaagcacagccagtca

SEQ ID NO: 4854655 - DNA, 25 bp, Homo sapien
ccttgaagctaagacacgtggttct

SEQ ID NO: 4854656 - DNA, 25 bp, Homo sapien
aaggccttgaagactctccagcacc

SEQ ID NO: 4854657 - DNA, 25 bp, Homo sapien
ccttcccatataacttttggccttg

SEQ ID NO: 4854658 - DNA, 25 bp, Homo sapien
gaatgtgacactgatgtccttacca

SEQ ID NO: 4854659 - DNA, 25 bp, Homo sapien
gaaagtatccatcctacgcctttag

SEQ ID NO: 4854660 - DNA, 25 bp, Homo sapien
tccttaccaggctaagatttgaagt

SEQ ID NO: 4854661 - DNA, 25 bp, Homo sapien
catgagctaggcctggttagtttta

SEQ ID NO: 4854662 - DNA, 25 bp, Homo sapien
ggtgttcttgtttgattccctgtga

SEQ ID NO: 4854663 - DNA, 25 bp, Homo sapien
tctcctgagtgtctccctgacttgt

SEQ ID NO: 4854664 - DNA, 25 bp, Homo sapien
ggaccctcctctcataccactgctt

SEQ ID NO: 4854665 - DNA, 25 bp, Homo sapien
gctcttcttgcttgaccctcaggga

SEQ ID NO: 4854666 - DNA, 25 bp, Homo sapien
accaccattatgttggactgcggac

SEQ ID NO: 4854667 - DNA, 25 bp, Homo sapien
caccattatgttggactgcggactg

SEQ ID NO: 4854668 - DNA, 25 bp, Homo sapien
atcaaccaccattatgttggactgc

SEQ ID NO: 4854669 - DNA, 25 bp, Homo sapien
cattatgttggactgcggactggac

SEQ ID NO: 4854670 - DNA, 25 bp, Homo sapien
tgaataaccatagccttgaaacctt

SEQ ID NO: 4854671 - DNA, 25 bp, Homo sapien
ttttgaataactgtggcccatgtaa

SEQ ID NO: 4854672 - DNA, 25 bp, Homo sapien
gataattcaccagtgccttgtgaga

SEQ ID NO: 4854673 - DNA, 25 bp, Homo sapien
cttgtgagaacggaatgaataacca

SEQ ID NO: 4854674 - DNA, 25 bp, Homo sapien
cgtgcactcagttgacccacggtga

SEQ ID NO: 4854675 - DNA, 25 bp, Homo sapien
tttgggaagcatgagtgggatcttt

SEQ ID NO: 4854676 - DNA, 25 bp, Homo sapien
tgaaactgggtagagctcaaccttc

SEQ ID NO: 4854677 - DNA, 25 bp, Homo sapien
tctttggagtcagagggacctcgct

SEQ ID NO: 4854678 - DNA, 25 bp, Homo sapien
gaccctgcggccttcggccttccgc

SEQ ID NO: 4854679 - DNA, 25 bp, Homo sapien
ccctgcggccttcggccttccgcag

SEQ ID NO: 4854680 - DNA, 25 bp, Homo sapien
accctgcggccttcggccttccgca

SEQ ID NO: 4854681 - DNA, 25 bp, Homo sapien
ctgcggccttcggccttccgcagtg

SEQ ID NO: 4854682 - DNA, 25 bp, Homo sapien
gtgtcttccgcgtggggcgcccgtc

SEQ ID NO: 4854683 - DNA, 25 bp, Homo sapien
cccaacgtcccagtacgaagggctg

SEQ ID NO: 4854684 - DNA, 25 bp, Homo sapien
gctgagttctctccgcccggcacag

SEQ ID NO: 4854685 - DNA, 25 bp, Homo sapien
aatcacatcagactgactgtctttg

SEQ ID NO: 4854686 - DNA, 25 bp, Homo sapien
tcaatccggccgcttacgagaccca

SEQ ID NO: 4854687 - DNA, 25 bp, Homo sapien
ggcagtcgacgcctttccaggaccg

SEQ ID NO: 4854688 - DNA, 25 bp, Homo sapien
tcaaaccttccgctcatcgtagagg

SEQ ID NO: 4854689 - DNA, 25 bp, Homo sapien
acagcccgcgtctgggtcacccact

SEQ ID NO: 4854690 - DNA, 25 bp, Homo sapien
ggtggaggacgcctttcaaagtagc

SEQ ID NO: 4854691 - DNA, 25 bp, Homo sapien
tttcccacctatctaccgacttgag

SEQ ID NO: 4854692 - DNA, 25 bp, Homo sapien
caaagtagccccaatagtgtaacca

SEQ ID NO: 4854693 - DNA, 25 bp, Homo sapien
tatctaccgacttgaggatgcaaaa

SEQ ID NO: 4854694 - DNA, 25 bp, Homo sapien
ccaatgcttcttcactgttccattc

SEQ ID NO: 4854695 - DNA, 25 bp, Homo sapien
aatgcttcttcactgttccattcca

SEQ ID NO: 4854696 - DNA, 25 bp, Homo sapien
caatgcttcttcactgttccattcc

SEQ ID NO: 4854697 - DNA, 25 bp, Homo sapien
gcaaagcactgcaatcctgatgtga

SEQ ID NO: 4854698 - DNA, 25 bp, Homo sapien
tctgtacctgcaggataccagagaa

SEQ ID NO: 4854699 - DNA, 25 bp, Homo sapien
gaaatgttgtacgaagccaagaaag

SEQ ID NO: 4854700 - DNA, 25 bp, Homo sapien
cacaggcggtattatgtccaacaga

SEQ ID NO: 4854701 - DNA, 25 bp, Homo sapien
caattgatcaactcctagttcaagt

SEQ ID NO: 4854702 - DNA, 25 bp, Homo sapien
gccaaatgagatatctttgtacatg

SEQ ID NO: 4854703 - DNA, 25 bp, Homo sapien
aataattcttcacctgatcaagtgc

SEQ ID NO: 4854704 - DNA, 25 bp, Homo sapien
taaaatcaattgatcaactcctagt

SEQ ID NO: 4854705 - DNA, 25 bp, Homo sapien
ctaagagttaactcaggcatgctgc

SEQ ID NO: 4854706 - DNA, 25 bp, Homo sapien
tcttttaatataagcctggagggaa

SEQ ID NO: 4854707 - DNA, 25 bp, Homo sapien
ctaagaatctctacatacgtcatgt

SEQ ID NO: 4854708 - DNA, 25 bp, Homo sapien
aatgtaatgtaagataaccacacaa

SEQ ID NO: 4854709 - DNA, 25 bp, Homo sapien
caaaaactagccatacaaaaactgt

SEQ ID NO: 4854710 - DNA, 25 bp, Homo sapien
aaaaactagccatacaaaaactgtg

SEQ ID NO: 4854711 - DNA, 25 bp, Homo sapien
ctcacccggacacaacactaaattt

SEQ ID NO: 4854712 - DNA, 25 bp, Homo sapien
cctcacccggacacaacactaaatt

SEQ ID NO: 4854713 - DNA, 25 bp, Homo sapien
acctcacccggacacaacactaaat

SEQ ID NO: 4854714 - DNA, 25 bp, Homo sapien
ccacctcacccggacacaacactaa

SEQ ID NO: 4854715 - DNA, 25 bp, Homo sapien
ggtgcaaaccactacacgcagctaa

SEQ ID NO: 4854716 - DNA, 25 bp, Homo sapien
caggctccaactttggctcaaatga

SEQ ID NO: 4854717 - DNA, 25 bp, Homo sapien
tagctcaccacaggctccaactttg

SEQ ID NO: 4854718 - DNA, 25 bp, Homo sapien
caggtgcaaaccactacacgcagct

SEQ ID NO: 4854719 - DNA, 25 bp, Homo sapien
aagtatcaaagaagccgcagaagca

SEQ ID NO: 4854720 - DNA, 25 bp, Homo sapien
ttaagatgggaaacactcgagattc

SEQ ID NO: 4854721 - DNA, 25 bp, Homo sapien
tcctttagaaatacagtacagatgc

SEQ ID NO: 4854722 - DNA, 25 bp, Homo sapien
aacttagcgtaaggtcacatcctga

SEQ ID NO: 4854723 - DNA, 25 bp, Homo sapien
gacaagtctgtccattctaaccact

SEQ ID NO: 4854724 - DNA, 25 bp, Homo sapien
tctattcatacgcaatgtgattgtc

SEQ ID NO: 4854725 - DNA, 25 bp, Homo sapien
tcaaggctataagatacaaggataa

SEQ ID NO: 4854726 - DNA, 25 bp, Homo sapien
tattgctaagatgtaaattctgccc

SEQ ID NO: 4854727 - DNA, 25 bp, Homo sapien
tataatatcttattcatgaccaaaa

SEQ ID NO: 4854728 - DNA, 25 bp, Homo sapien
gaccaaaactcggagcaaactagaa

SEQ ID NO: 4854729 - DNA, 25 bp, Homo sapien
tatcttattcatgaccaaaactcgg

SEQ ID NO: 4854730 - DNA, 25 bp, Homo sapien
caaaactcggagcaaactagaaata

SEQ ID NO: 4854731 - DNA, 25 bp, Homo sapien
tacacggaggaaatttctaggcaaa

SEQ ID NO: 4854732 - DNA, 25 bp, Homo sapien
cattctcatgttagctcaaagtgtc

SEQ ID NO: 4854733 - DNA, 25 bp, Homo sapien
gaagccatagagttcatctcatttg

SEQ ID NO: 4854734 - DNA, 25 bp, Homo sapien
caaagacaagtggatttgtgaagcc

SEQ ID NO: 4854735 - DNA, 25 bp, Homo sapien
gatgatcgatcacattttctaggtc

SEQ ID NO: 4854736 - DNA, 25 bp, Homo sapien
aagaaaactctgatgatcgatcaca

SEQ ID NO: 4854737 - DNA, 25 bp, Homo sapien
gatcacattttctaggtctatgctg

SEQ ID NO: 4854738 - DNA, 25 bp, Homo sapien
ttctaggtctatgctgttcttggcc

SEQ ID NO: 4854739 - DNA, 25 bp, Homo sapien
cagctctgaagcactaaagacagca

SEQ ID NO: 4854740 - DNA, 25 bp, Homo sapien
tgcgctgaactacggacaatggaat

SEQ ID NO: 4854741 - DNA, 25 bp, Homo sapien
cagcaagaacctagagcgggtgaag

SEQ ID NO: 4854742 - DNA, 25 bp, Homo sapien
tcacagaggacccagtagcagtggc

SEQ ID NO: 4854743 - DNA, 25 bp, Homo sapien
cagtagtttctaaccatcttgaagg

SEQ ID NO: 4854744 - DNA, 25 bp, Homo sapien
tagctgtgtaatcacttttgatgga

SEQ ID NO: 4854745 - DNA, 25 bp, Homo sapien
tggaaacaggtccaacaagaggaag

SEQ ID NO: 4854746 - DNA, 25 bp, Homo sapien
tgattagtgacaactgtacacctct

SEQ ID NO: 4854747 - DNA, 25 bp, Homo sapien
tagcccttctgaaccagaatacctt

SEQ ID NO: 4854748 - DNA, 25 bp, Homo sapien
tagaatgtgagcataagagcaggga

SEQ ID NO: 4854749 - DNA, 25 bp, Homo sapien
tacaaaactctgctagtacagcacc

SEQ ID NO: 4854750 - DNA, 25 bp, Homo sapien
ttgtatacctatctgtctttcccta

SEQ ID NO: 4854751 - DNA, 25 bp, Homo sapien
tatattcagtactttctctcttcac

SEQ ID NO: 4854752 - DNA, 25 bp, Homo sapien
actcctgatcgggcttaagtgttcc

SEQ ID NO: 4854753 - DNA, 25 bp, Homo sapien
gaaactattaattctctgggcctat

SEQ ID NO: 4854754 - DNA, 25 bp, Homo sapien
cacaaaactcctgcagagagcctaa

SEQ ID NO: 4854755 - DNA, 25 bp, Homo sapien
ggaaaacacataccatagaaacagg

SEQ ID NO: 4854756 - DNA, 25 bp, Homo sapien
cccaaggtcaatcagctaacggact

SEQ ID NO: 4854757 - DNA, 25 bp, Homo sapien
taatcagaaggtgttgcactcatgc

SEQ ID NO: 4854758 - DNA, 25 bp, Homo sapien
tgaggccttactacagttagctgtg

SEQ ID NO: 4854759 - DNA, 25 bp, Homo sapien
caactcactgcaacctctgcctccc

SEQ ID NO: 4854760 - DNA, 25 bp, Homo sapien
cagtggcacaatcccaactcactgc

SEQ ID NO: 4854761 - DNA, 25 bp, Homo sapien
tcactctgtcgcccaagttggactg

SEQ ID NO: 4854762 - DNA, 25 bp, Homo sapien
cctttccagagatgatctgcgttat

SEQ ID NO: 4854763 - DNA, 25 bp, Homo sapien
ttacatgaggcggatcaatatcctt

SEQ ID NO: 4854764 - DNA, 25 bp, Homo sapien
cagagatgatctgcgttatctacca

SEQ ID NO: 4854765 - DNA, 25 bp, Homo sapien
gaggcggatcaatatcctttccaga

SEQ ID NO: 4854766 - DNA, 25 bp, Homo sapien
gatcaagacggtccaaagtttccaa

SEQ ID NO: 4854767 - DNA, 25 bp, Homo sapien
gaagatgctgggacattgttagtac

SEQ ID NO: 4854768 - DNA, 25 bp, Homo sapien
tccagtacgccgaagtcgctgaagc

SEQ ID NO: 4854769 - DNA, 25 bp, Homo sapien
cccgaatgctgcgtctgtgtggaag

SEQ ID NO: 4854770 - DNA, 25 bp, Homo sapien
tggtagcgagttggtgacatctttc

SEQ ID NO: 4854771 - DNA, 25 bp, Homo sapien
tccattggatgtagataatcgctca

SEQ ID NO: 4854772 - DNA, 25 bp, Homo sapien
tatcataactgttgctaggtgacgg

SEQ ID NO: 4854773 - DNA, 25 bp, Homo sapien
cccattttgattggtagtgcaaggc

SEQ ID NO: 4854774 - DNA, 25 bp, Homo sapien
aggcttcaaaactgtatgacctctg

SEQ ID NO: 4854775 - DNA, 25 bp, Homo sapien
catctaggtcctcttctgaggcttc

SEQ ID NO: 4854776 - DNA, 25 bp, Homo sapien
tctgaggcttcaaaactgtatgacc

SEQ ID NO: 4854777 - DNA, 25 bp, Homo sapien
ttatcatctacatctaggtcctctt

SEQ ID NO: 4854778 - DNA, 25 bp, Homo sapien
gctgaaacgcagcatactacttaaa

SEQ ID NO: 4854779 - DNA, 25 bp, Homo sapien
tcttatagctaagtagctgaaacgc

SEQ ID NO: 4854780 - DNA, 25 bp, Homo sapien
tagggactctgaataagcaaagtca

SEQ ID NO: 4854781 - DNA, 25 bp, Homo sapien
aaacaatctaagaatacagacattt

SEQ ID NO: 4854782 - DNA, 25 bp, Homo sapien
gttgaaggtagaaatcctcatcttt

SEQ ID NO: 4854783 - DNA, 25 bp, Homo sapien
atgttgaaggtagaaatcctcatct

SEQ ID NO: 4854784 - DNA, 25 bp, Homo sapien
tgttgaaggtagaaatcctcatctt

SEQ ID NO: 4854785 - DNA, 25 bp, Homo sapien
aaatcctccgattggcaagaaaggc

SEQ ID NO: 4854786 - DNA, 25 bp, Homo sapien
tccgattggcaagaaaggctttgat

SEQ ID NO: 4854787 - DNA, 25 bp, Homo sapien
gcttgggaaatcctccgattggcaa

SEQ ID NO: 4854788 - DNA, 25 bp, Homo sapien
actgcttgggaaatcctccgattgg

SEQ ID NO: 4854789 - DNA, 25 bp, Homo sapien
tatgaaccagaattagtgccccaat

SEQ ID NO: 4854790 - DNA, 25 bp, Homo sapien
gaatcactaggtacaggtaagatgc

SEQ ID NO: 4854791 - DNA, 25 bp, Homo sapien
cagtgatctgagtacagctggaaca

SEQ ID NO: 4854792 - DNA, 25 bp, Homo sapien
tgccactacgtgagaacacaatgaa

SEQ ID NO: 4854793 - DNA, 25 bp, Homo sapien
tcacttagctgtcaacaaagtaaga

SEQ ID NO: 4854794 - DNA, 25 bp, Homo sapien
cacttagctgtcaacaaagtaagaa

SEQ ID NO: 4854795 - DNA, 25 bp, Homo sapien
aagtaagaaaatatgggcatttgga

SEQ ID NO: 4854796 - DNA, 25 bp, Homo sapien
tttggatgtggtgaaggctggtttt

SEQ ID NO: 4854797 - DNA, 25 bp, Homo sapien
caaactgccgacctcctgtgattcg

SEQ ID NO: 4854798 - DNA, 25 bp, Homo sapien
gccaccgcacttggtcctgtttaag

SEQ ID NO: 4854799 - DNA, 25 bp, Homo sapien
aaactgccgacctcctgtgattcgc

SEQ ID NO: 4854800 - DNA, 25 bp, Homo sapien
ccgcacttggtcctgtttaagcaaa

SEQ ID NO: 4854801 - DNA, 25 bp, Homo sapien
ggagataggccactcaatattttaa

SEQ ID NO: 4854802 - DNA, 25 bp, Homo sapien
tatgttctttactcaggcatcacaa

SEQ ID NO: 4854803 - DNA, 25 bp, Homo sapien
aaaactactacaggcggcaaaatct

SEQ ID NO: 4854804 - DNA, 25 bp, Homo sapien
gcaaaatctcatagcttagcaagta

SEQ ID NO: 4854805 - DNA, 25 bp, Homo sapien
ggcaatatcatattggcctcgtact

SEQ ID NO: 4854806 - DNA, 25 bp, Homo sapien
ggactacatttctcatcaagaacaa

SEQ ID NO: 4854807 - DNA, 25 bp, Homo sapien
gaacaatgatgagcttggggcaata

SEQ ID NO: 4854808 - DNA, 25 bp, Homo sapien
taaaatcgacatgttcaaaagcaag

SEQ ID NO: 4854809 - DNA, 25 bp, Homo sapien
tataactcacttggacagctagatg

SEQ ID NO: 4854810 - DNA, 25 bp, Homo sapien
gcatggcatctaacacctgatagtg

SEQ ID NO: 4854811 - DNA, 25 bp, Homo sapien
gctaagagggtgcaggctagtaaaa

SEQ ID NO: 4854812 - DNA, 25 bp, Homo sapien
ctgttcagcaatggaagggcttgga

SEQ ID NO: 4854813 - DNA, 25 bp, Homo sapien
tatactcttccaaaggtacttctga

SEQ ID NO: 4854814 - DNA, 25 bp, Homo sapien
acttagctttaggaaagtcaatctg

SEQ ID NO: 4854815 - DNA, 25 bp, Homo sapien
taatccactcaagaatccgtttagg

SEQ ID NO: 4854816 - DNA, 25 bp, Homo sapien
gcgcccagccagcattgtatactct

SEQ ID NO: 4854817 - DNA, 25 bp, Homo sapien
aatacagaacttatacatggagtac

SEQ ID NO: 4854818 - DNA, 25 bp, Homo sapien
gattggtatcagagagcacaatgaa

SEQ ID NO: 4854819 - DNA, 25 bp, Homo sapien
atgaacaaactggtaacccctgaat

SEQ ID NO: 4854820 - DNA, 25 bp, Homo sapien
gaatctggccggtacagattattgt

SEQ ID NO: 4854821 - DNA, 25 bp, Homo sapien
aatgactctgttttacttactctaa

SEQ ID NO: 4854822 - DNA, 25 bp, Homo sapien
tctccaaggatctattaatgaactc

SEQ ID NO: 4854823 - DNA, 25 bp, Homo sapien
tatctggtagggcaaatttggccaa

SEQ ID NO: 4854824 - DNA, 25 bp, Homo sapien
taatgaactctatcctgtacaacta

SEQ ID NO: 4854825 - DNA, 25 bp, Homo sapien
atgctggatacaattccaacaccac

SEQ ID NO: 4854826 - DNA, 25 bp, Homo sapien
ctccttggaatgctggatacaattc

SEQ ID NO: 4854827 - DNA, 25 bp, Homo sapien
ccttggaatgctggatacaattcca

SEQ ID NO: 4854828 - DNA, 25 bp, Homo sapien
gaatgctggatacaattccaacacc

SEQ ID NO: 4854829 - DNA, 25 bp, Homo sapien
tcagagtctccaataccacaaattt

SEQ ID NO: 4854830 - DNA, 25 bp, Homo sapien
ccttccactagagggctctccacca

SEQ ID NO: 4854831 - DNA, 25 bp, Homo sapien
cttccactagagggctctccaccat

SEQ ID NO: 4854832 - DNA, 25 bp, Homo sapien
cacgctcccttccactagagggctc

SEQ ID NO: 4854833 - DNA, 25 bp, Homo sapien
ctcccttccactagagggctctcca

SEQ ID NO: 4854834 - DNA, 25 bp, Homo sapien
gataccatcggtaaaatgctctttt

SEQ ID NO: 4854835 - DNA, 25 bp, Homo sapien
tgagagatccggctctgactgatac

SEQ ID NO: 4854836 - DNA, 25 bp, Homo sapien
tcttctgttcactcaggtctgatcc

SEQ ID NO: 4854837 - DNA, 25 bp, Homo sapien
ggtctgatccctgctgcaacagcca

SEQ ID NO: 4854838 - DNA, 25 bp, Homo sapien
ttctacctcagagccaatgctatta

SEQ ID NO: 4854839 - DNA, 25 bp, Homo sapien
tctcccgagttaaagcaatttctct

SEQ ID NO: 4854840 - DNA, 25 bp, Homo sapien
ctgcctggaccattcggattgagaa

SEQ ID NO: 4854841 - DNA, 25 bp, Homo sapien
tgaggctgcagcattacagaacgca

SEQ ID NO: 4854842 - DNA, 25 bp, Homo sapien
ggtaaatcgactccctcgtcgcagt

SEQ ID NO: 4854843 - DNA, 25 bp, Homo sapien
cctcgtcgcagtcggaaagtaccag

SEQ ID NO: 4854844 - DNA, 25 bp, Homo sapien
gaaagtaccagatgtggcagagact

SEQ ID NO: 4854845 - DNA, 25 bp, Homo sapien
tcctttctccaggtaaatcgactcc

SEQ ID NO: 4854846 - DNA, 25 bp, Homo sapien
tatttatttacccatgcagtcaagg

SEQ ID NO: 4854847 - DNA, 25 bp, Homo sapien
gcgtcatactaaggataggaatttt

SEQ ID NO: 4854848 - DNA, 25 bp, Homo sapien
catgtccagccttacttttatctta

SEQ ID NO: 4854849 - DNA, 25 bp, Homo sapien
accaacatttgagtaaggcttactt

SEQ ID NO: 4854850 - DNA, 25 bp, Homo sapien
cgcgcctggccgattgagcatattt

SEQ ID NO: 4854851 - DNA, 25 bp, Homo sapien
tcatatgttcaaggaccatttgcat

SEQ ID NO: 4854852 - DNA, 25 bp, Homo sapien
gctcagcttttactccctccaaagt

SEQ ID NO: 4854853 - DNA, 25 bp, Homo sapien
tttcccattgccaggatatgaaggg

SEQ ID NO: 4854854 - DNA, 25 bp, Homo sapien
tctgaatgcacccaaaatgttacca

SEQ ID NO: 4854855 - DNA, 25 bp, Homo sapien
gatacatctcctacataaggcccga

SEQ ID NO: 4854856 - DNA, 25 bp, Homo sapien
taaggcccgaatgccaacacttacg

SEQ ID NO: 4854857 - DNA, 25 bp, Homo sapien
gaatgcacagtataaccaagttctg

SEQ ID NO: 4854858 - DNA, 25 bp, Homo sapien
aggttactctaatagcttcctaagc

SEQ ID NO: 4854859 - DNA, 25 bp, Homo sapien
ggacccctgctctaatccatttgca

SEQ ID NO: 4854860 - DNA, 25 bp, Homo sapien
cctcctactgtgtggaggtccacag

SEQ ID NO: 4854861 - DNA, 25 bp, Homo sapien
tagaccctcagcagtcatgcatagg

SEQ ID NO: 4854862 - DNA, 25 bp, Homo sapien
ttcatctgggtattgattctcattg

SEQ ID NO: 4854863 - DNA, 25 bp, Homo sapien
tcatctgggtattgattctcattga

SEQ ID NO: 4854864 - DNA, 25 bp, Homo sapien
gcattgcaagcgtttgcaatttctt

SEQ ID NO: 4854865 - DNA, 25 bp, Homo sapien
ctggcttctgtataactgcattgca

SEQ ID NO: 4854866 - DNA, 25 bp, Homo sapien
accaagcgctgtgctgcaccgcaga

SEQ ID NO: 4854867 - DNA, 25 bp, Homo sapien
tgtaaccaagcgctgtgctgcaccg

SEQ ID NO: 4854868 - DNA, 25 bp, Homo sapien
tgtgctgcaccgcagagcaaggctg

SEQ ID NO: 4854869 - DNA, 25 bp, Homo sapien
gcgctgtgctgcaccgcagagcaag

SEQ ID NO: 4854870 - DNA, 25 bp, Homo sapien
attatatactttcagggaggtaact

SEQ ID NO: 4854871 - DNA, 25 bp, Homo sapien
ttatatactttcagggaggtaactc

SEQ ID NO: 4854872 - DNA, 25 bp, Homo sapien
tatatactttcagggaggtaactct

SEQ ID NO: 4854873 - DNA, 25 bp, Homo sapien
gtcattcccgtcgacatcatcactg

SEQ ID NO: 4854874 - DNA, 25 bp, Homo sapien
tatcccatgactctccaggattgct

SEQ ID NO: 4854875 - DNA, 25 bp, Homo sapien
acatctatcccatgactctccagga

SEQ ID NO: 4854876 - DNA, 25 bp, Homo sapien
tgctcagagtagtcattcccgtcga

SEQ ID NO: 4854877 - DNA, 25 bp, Homo sapien
cctcctccccattgcgtacttgcca

SEQ ID NO: 4854878 - DNA, 25 bp, Homo sapien
ccccattgcgtacttgccaagtatc

SEQ ID NO: 4854879 - DNA, 25 bp, Homo sapien
cctccccattgcgtacttgccaagt

SEQ ID NO: 4854880 - DNA, 25 bp, Homo sapien
tccccattgcgtacttgccaagtat

SEQ ID NO: 4854881 - DNA, 25 bp, Homo sapien
tgtttggatcagatcctcctctctt

SEQ ID NO: 4854882 - DNA, 25 bp, Homo sapien
tggatcagatcctcctctcttcttc

SEQ ID NO: 4854883 - DNA, 25 bp, Homo sapien
ttgtttggatcagatcctcctctct

SEQ ID NO: 4854884 - DNA, 25 bp, Homo sapien
atcagatcctcctctcttcttctac

SEQ ID NO: 4854885 - DNA, 25 bp, Homo sapien
cctgcgtcggtacgtgtttaggcat

SEQ ID NO: 4854886 - DNA, 25 bp, Homo sapien
gtatttctcaaacactgagtgtgtg

SEQ ID NO: 4854887 - DNA, 25 bp, Homo sapien
gtccagctgcccctagtatttctca

SEQ ID NO: 4854888 - DNA, 25 bp, Homo sapien
gagtggggccttccatcgtgccctg

SEQ ID NO: 4854889 - DNA, 25 bp, Homo sapien
attgcacttatgagaggatgcatgt

SEQ ID NO: 4854890 - DNA, 25 bp, Homo sapien
gtcatgcaggtattgcacttatgag

SEQ ID NO: 4854891 - DNA, 25 bp, Homo sapien
gcacttatgagaggatgcatgtgtc

SEQ ID NO: 4854892 - DNA, 25 bp, Homo sapien
tgcacttatgagaggatgcatgtgt

SEQ ID NO: 4854893 - DNA, 25 bp, Homo sapien
gaagctggcattgcaggatgtacgt

SEQ ID NO: 4854894 - DNA, 25 bp, Homo sapien
tgtgttaaacaataaagctgtgaag

SEQ ID NO: 4854895 - DNA, 25 bp, Homo sapien
tccccgcgcagctcaatgtgttaaa

SEQ ID NO: 4854896 - DNA, 25 bp, Homo sapien
gaactccgtatcaaagagctttgga

SEQ ID NO: 4854897 - DNA, 25 bp, Homo sapien
aatatagcactaatcactgaaggcc

SEQ ID NO: 4854898 - DNA, 25 bp, Homo sapien
ctttagtcacagagagacatgctgg

SEQ ID NO: 4854899 - DNA, 25 bp, Homo sapien
ctgaaggccatactagtgagctatt

SEQ ID NO: 4854900 - DNA, 25 bp, Homo sapien
cactgaatggatataggtccaaaga

SEQ ID NO: 4854901 - DNA, 25 bp, Homo sapien
tcttggtggtcactatggctcgtac

SEQ ID NO: 4854902 - DNA, 25 bp, Homo sapien
ccaagatagtgtggttgactgctgc

SEQ ID NO: 4854903 - DNA, 25 bp, Homo sapien
gatttcgttggctccttgtcgggcc

SEQ ID NO: 4854904 - DNA, 25 bp, Homo sapien
cagggcctctgtcttgatttcgttg

SEQ ID NO: 4854905 - DNA, 25 bp, Homo sapien
taagaacacatgttaaggaccgagg

SEQ ID NO: 4854906 - DNA, 25 bp, Homo sapien
ccgaggaaagtctgctaaggtgcta

SEQ ID NO: 4854907 - DNA, 25 bp, Homo sapien
gaacaagaccctaacagctacctga

SEQ ID NO: 4854908 - DNA, 25 bp, Homo sapien
taaatacctggaagcactttcttgg

SEQ ID NO: 4854909 - DNA, 25 bp, Homo sapien
gaaatcaattatcctcacgctgagg

SEQ ID NO: 4854910 - DNA, 25 bp, Homo sapien
tataatgaggcacggcttattgcag

SEQ ID NO: 4854911 - DNA, 25 bp, Homo sapien
gactctgtggatactccccaaatgg

SEQ ID NO: 4854912 - DNA, 25 bp, Homo sapien
gaagtataatctagccacagtgtgg

SEQ ID NO: 4854913 - DNA, 25 bp, Homo sapien
catttaatcgggatgccaagagatc

SEQ ID NO: 4854914 - DNA, 25 bp, Homo sapien
gatcattttcatacaaggccagcag

SEQ ID NO: 4854915 - DNA, 25 bp, Homo sapien
catggacaaaagtgggaccaggccc

SEQ ID NO: 4854916 - DNA, 25 bp, Homo sapien
gaaatgatgcagtcagcgtgtgcct

SEQ ID NO: 4854917 - DNA, 25 bp, Homo sapien
taaatataacagtagcagcgccaca

SEQ ID NO: 4854918 - DNA, 25 bp, Homo sapien
ggaaagtttacccatctgaccatag

SEQ ID NO: 4854919 - DNA, 25 bp, Homo sapien
ttgaaagtcctcctcgacaggaagg

SEQ ID NO: 4854920 - DNA, 25 bp, Homo sapien
taagaatgcagggtgttgccctccc

SEQ ID NO: 4854921 - DNA, 25 bp, Homo sapien
ggtggggactgtccagagtcataag

SEQ ID NO: 4854922 - DNA, 25 bp, Homo sapien
gcccttgtgagtgacaggggtgggg

SEQ ID NO: 4854923 - DNA, 25 bp, Homo sapien
gggtggggactgtccagagtcataa

SEQ ID NO: 4854924 - DNA, 25 bp, Homo sapien
gagtgacaggggtggggactgtcca

SEQ ID NO: 4854925 - DNA, 25 bp, Homo sapien
tattcctaggtgaagtaagtcagac

SEQ ID NO: 4854926 - DNA, 25 bp, Homo sapien
cagggaacactggactggataactc

SEQ ID NO: 4854927 - DNA, 25 bp, Homo sapien
gtaagtcagacaatatggaaatgaa

SEQ ID NO: 4854928 - DNA, 25 bp, Homo sapien
ggataactcaggtattcctaggtga

SEQ ID NO: 4854929 - DNA, 25 bp, Homo sapien
aactgacttgttggcttgtatccga

SEQ ID NO: 4854930 - DNA, 25 bp, Homo sapien
ttataagtggaatggagaacagcct

SEQ ID NO: 4854931 - DNA, 25 bp, Homo sapien
tccaaacataacctgtgagaggagt

SEQ ID NO: 4854932 - DNA, 25 bp, Homo sapien
aagtggcggtcatctttgaaaccaa

SEQ ID NO: 4854933 - DNA, 25 bp, Homo sapien
tcagggactgtgtacggcatcaagc

SEQ ID NO: 4854934 - DNA, 25 bp, Homo sapien
tagaaagttcttacgctgaccccaa

SEQ ID NO: 4854935 - DNA, 25 bp, Homo sapien
tatggctgtgaagcgatctctcccg

SEQ ID NO: 4854936 - DNA, 25 bp, Homo sapien
gacgcttcgccctcttggatgtgga

SEQ ID NO: 4854937 - DNA, 25 bp, Homo sapien
caacaagcacttggtagaacctgca

SEQ ID NO: 4854938 - DNA, 25 bp, Homo sapien
caatcccaaggcatttgctccaggg

SEQ ID NO: 4854939 - DNA, 25 bp, Homo sapien
gaccccttgaggtagactgaacacc

SEQ ID NO: 4854940 - DNA, 25 bp, Homo sapien
gatagagcttaccatgatgacccct

SEQ ID NO: 4854941 - DNA, 25 bp, Homo sapien
cttagcagaaaattgtacgtacaca

SEQ ID NO: 4854942 - DNA, 25 bp, Homo sapien
taaaccaaatctcttctcacagcat

SEQ ID NO: 4854943 - DNA, 25 bp, Homo sapien
tataagacaaagacaggcatctgat

SEQ ID NO: 4854944 - DNA, 25 bp, Homo sapien
ctcacagcatcctatactacatcct

SEQ ID NO: 4854945 - DNA, 25 bp, Homo sapien
tattctttaatggcctctggacctc

SEQ ID NO: 4854946 - DNA, 25 bp, Homo sapien
gtttattctttaatggcctctggac

SEQ ID NO: 4854947 - DNA, 25 bp, Homo sapien
ttattctttaatggcctctggacct

SEQ ID NO: 4854948 - DNA, 25 bp, Homo sapien
tttattctttaatggcctctggacc

SEQ ID NO: 4854949 - DNA, 25 bp, Homo sapien
ctgtgtttggtggccaagacacctc

SEQ ID NO: 4854950 - DNA, 25 bp, Homo sapien
gtttggtggccaagacacctctaag

SEQ ID NO: 4854951 - DNA, 25 bp, Homo sapien
tggtggccaagacacctctaagccc

SEQ ID NO: 4854952 - DNA, 25 bp, Homo sapien
gtgtttggtggccaagacacctcta

SEQ ID NO: 4854953 - DNA, 25 bp, Homo sapien
caacatacagtgaccagcctgaagt

SEQ ID NO: 4854954 - DNA, 25 bp, Homo sapien
caccccaggagtacaagtggctcca

SEQ ID NO: 4854955 - DNA, 25 bp, Homo sapien
cgtacgggagccgaactctgttggc

SEQ ID NO: 4854956 - DNA, 25 bp, Homo sapien
acccagaagtgacatcggatcatct

SEQ ID NO: 4854957 - DNA, 25 bp, Homo sapien
ttctggccccagaatatgagggtct

SEQ ID NO: 4854958 - DNA, 25 bp, Homo sapien
gtgggggatgaagcgtcagcagcgg

SEQ ID NO: 4854959 - DNA, 25 bp, Homo sapien
ttgtggtaacctgatctgaagaaag

SEQ ID NO: 4854960 - DNA, 25 bp, Homo sapien
gccccagaatatgagggtctgttcc

SEQ ID NO: 4854961 - DNA, 25 bp, Homo sapien
atggttggcccgtcagcccctggac

SEQ ID NO: 4854962 - DNA, 25 bp, Homo sapien
cggagcttgtctttcagcctggcct

SEQ ID NO: 4854963 - DNA, 25 bp, Homo sapien
tgtgttttagcaccggcaaagtggg

SEQ ID NO: 4854964 - DNA, 25 bp, Homo sapien
gtggttggtttctggccattactgg

SEQ ID NO: 4854965 - DNA, 25 bp, Homo sapien
aggttcccattagtgggaccactgt

SEQ ID NO: 4854966 - DNA, 25 bp, Homo sapien
tcagaggcggatggcgcagtgggtg

SEQ ID NO: 4854967 - DNA, 25 bp, Homo sapien
gaggaggttcccattagtgggacca

SEQ ID NO: 4854968 - DNA, 25 bp, Homo sapien
gaccatttacatctagaaacaaggg

SEQ ID NO: 4854969 - DNA, 25 bp, Homo sapien
taaatatgagtcctacgggtgaagg

SEQ ID NO: 4854970 - DNA, 25 bp, Homo sapien
aaacaagggctttttgctacagcca

SEQ ID NO: 4854971 - DNA, 25 bp, Homo sapien
gggtgaaggtgcagtatcactctcc

SEQ ID NO: 4854972 - DNA, 25 bp, Homo sapien
ctctaataggtacaatactaaaata

SEQ ID NO: 4854973 - DNA, 25 bp, Homo sapien
attctctaataggtacaatactaaa

SEQ ID NO: 4854974 - DNA, 25 bp, Homo sapien
ttctctaataggtacaatactaaaa

SEQ ID NO: 4854975 - DNA, 25 bp, Homo sapien
tctctaataggtacaatactaaaat

SEQ ID NO: 4854976 - DNA, 25 bp, Homo sapien
taaagcttttcttgctatgccagcg

SEQ ID NO: 4854977 - DNA, 25 bp, Homo sapien
cccacaaggacgcagaggtgcttgt

SEQ ID NO: 4854978 - DNA, 25 bp, Homo sapien
tgctatgccagcgaatcagttggcc

SEQ ID NO: 4854979 - DNA, 25 bp, Homo sapien
cagaggtgcttgtggccccatgtaa

SEQ ID NO: 4854980 - DNA, 25 bp, Homo sapien
tccagtaccagtgagggatgccggc

SEQ ID NO: 4854981 - DNA, 25 bp, Homo sapien
attcgccagtagattcccactcagc

SEQ ID NO: 4854982 - DNA, 25 bp, Homo sapien
ttggcttccttccattcgccagtag

SEQ ID NO: 4854983 - DNA, 25 bp, Homo sapien
actcagccacaaggccccagtccag

SEQ ID NO: 4854984 - DNA, 25 bp, Homo sapien
cctgtatgtgaaacgggaagtcctg

SEQ ID NO: 4854985 - DNA, 25 bp, Homo sapien
tcaacaagagaacggagctgggaat

SEQ ID NO: 4854986 - DNA, 25 bp, Homo sapien
caaagtccgtggtgccttcctggtg

SEQ ID NO: 4854987 - DNA, 25 bp, Homo sapien
cacaagacgggagtcaccctgtgct

SEQ ID NO: 4854988 - DNA, 25 bp, Homo sapien
cggtgcggactaatgtcagcttgtg

SEQ ID NO: 4854989 - DNA, 25 bp, Homo sapien
ttcctgacttgagcaggtggatttg

SEQ ID NO: 4854990 - DNA, 25 bp, Homo sapien
agccagagttcctgacttgagcagg

SEQ ID NO: 4854991 - DNA, 25 bp, Homo sapien
ggccctgttcactcttgcttctcgg

SEQ ID NO: 4854992 - DNA, 25 bp, Homo sapien
tttgtttttgggtccgctggtgtca

SEQ ID NO: 4854993 - DNA, 25 bp, Homo sapien
tgtcactatggcctgggtgagaggc

SEQ ID NO: 4854994 - DNA, 25 bp, Homo sapien
ggtccgctggtgtcactatggcctg

SEQ ID NO: 4854995 - DNA, 25 bp, Homo sapien
ttttgggtccgctggtgtcactatg

SEQ ID NO: 4854996 - DNA, 25 bp, Homo sapien
ctggctgcgaggacaggttgtcttt

SEQ ID NO: 4854997 - DNA, 25 bp, Homo sapien
aaggctctggttctctagggacttg

SEQ ID NO: 4854998 - DNA, 25 bp, Homo sapien
tgaaggcgccaacagagtagtctcc

SEQ ID NO: 4854999 - DNA, 25 bp, Homo sapien
tctagaaagcgctgcggaaggctct

SEQ ID NO: 4855000 - DNA, 25 bp, Homo sapien
taaagttcagtaaccgagcagccac

SEQ ID NO: 4855001 - DNA, 25 bp, Homo sapien
aatgaagatacgagccctggcatgc

SEQ ID NO: 4855002 - DNA, 25 bp, Homo sapien
tctagaaggcctgactccatcgagg

SEQ ID NO: 4855003 - DNA, 25 bp, Homo sapien
tgtgtccacaagtaaccaggccctt

SEQ ID NO: 4855004 - DNA, 25 bp, Homo sapien
gaaccaaagtggcagtcagtcgagt

SEQ ID NO: 4855005 - DNA, 25 bp, Homo sapien
ccccgcatggtaggacctggtgcag

SEQ ID NO: 4855006 - DNA, 25 bp, Homo sapien
cagtcagtcgagtccctgaatccat

SEQ ID NO: 4855007 - DNA, 25 bp, Homo sapien
ggacctggtgcagtctctgttgagc

SEQ ID NO: 4855008 - DNA, 25 bp, Homo sapien
ttccttgattttagtgatttgctta

SEQ ID NO: 4855009 - DNA, 25 bp, Homo sapien
tgcatgagcagagacttagaaatga

SEQ ID NO: 4855010 - DNA, 25 bp, Homo sapien
caggagaattcgatcatgcatgagc

SEQ ID NO: 4855011 - DNA, 25 bp, Homo sapien
cggtattcactagatggaacacgat

SEQ ID NO: 4855012 - DNA, 25 bp, Homo sapien
ctgcggatgacacagcgaagccggt

SEQ ID NO: 4855013 - DNA, 25 bp, Homo sapien
gaaaaggtgtctgtataattatcca

SEQ ID NO: 4855014 - DNA, 25 bp, Homo sapien
gatgctaattgaaaaggtgtctgta

SEQ ID NO: 4855015 - DNA, 25 bp, Homo sapien
ggtagataaaggcttgtgtagaaag

SEQ ID NO: 4855016 - DNA, 25 bp, Homo sapien
gcccatctctgatgctaattgaaaa

SEQ ID NO: 4855017 - DNA, 25 bp, Homo sapien
gccagaatgatctttcacagcctca

SEQ ID NO: 4855018 - DNA, 25 bp, Homo sapien
gcctataagcatgtgaagcgccttc

SEQ ID NO: 4855019 - DNA, 25 bp, Homo sapien
cacagtcgtcagtggtgtgacacct

SEQ ID NO: 4855020 - DNA, 25 bp, Homo sapien
tattcgctcaccagtactaagccag

SEQ ID NO: 4855021 - DNA, 25 bp, Homo sapien
taatgctggaaacacttacatctcc

SEQ ID NO: 4855022 - DNA, 25 bp, Homo sapien
acttacatctccaggcttcagtgca

SEQ ID NO: 4855023 - DNA, 25 bp, Homo sapien
gacttggcgtcaacataatgctgga

SEQ ID NO: 4855024 - DNA, 25 bp, Homo sapien
tcctgcagacttggcgtcaacataa

SEQ ID NO: 4855025 - DNA, 25 bp, Homo sapien
ctggtagtaaagccagaacattcca

SEQ ID NO: 4855026 - DNA, 25 bp, Homo sapien
aacattccagttggtttgtgagaac

SEQ ID NO: 4855027 - DNA, 25 bp, Homo sapien
gtgagaactctgctccttggaaggc

SEQ ID NO: 4855028 - DNA, 25 bp, Homo sapien
tccagttggtttgtgagaactctgc

SEQ ID NO: 4855029 - DNA, 25 bp, Homo sapien
ttatgctcttactgttttggcaacg

SEQ ID NO: 4855030 - DNA, 25 bp, Homo sapien
actgttttggcaacgagtgattagc

SEQ ID NO: 4855031 - DNA, 25 bp, Homo sapien
gctcttactgttttggcaacgagtg

SEQ ID NO: 4855032 - DNA, 25 bp, Homo sapien
tttggcaacgagtgattagctctct

SEQ ID NO: 4855033 - DNA, 25 bp, Homo sapien
ggtacccagtttagcatctgcattg

SEQ ID NO: 4855034 - DNA, 25 bp, Homo sapien
ggaagcgcgtggtacccagtttagc

SEQ ID NO: 4855035 - DNA, 25 bp, Homo sapien
ctggaggagggaagcgcgtggtacc

SEQ ID NO: 4855036 - DNA, 25 bp, Homo sapien
catctgcattggttgctccctctga

SEQ ID NO: 4855037 - DNA, 25 bp, Homo sapien
aaaatcgagtgagtaattccagtgg

SEQ ID NO: 4855038 - DNA, 25 bp, Homo sapien
ttccgcagagattcgtaggcgtcag

SEQ ID NO: 4855039 - DNA, 25 bp, Homo sapien
taattccagtggagtgtttccgcag

SEQ ID NO: 4855040 - DNA, 25 bp, Homo sapien
tagtgcaggagaaaaatcgagtgag

SEQ ID NO: 4855041 - DNA, 25 bp, Homo sapien
caaagaatccgtatctggcagagga

SEQ ID NO: 4855042 - DNA, 25 bp, Homo sapien
ggtgctgcctaccagtgacttcagt

SEQ ID NO: 4855043 - DNA, 25 bp, Homo sapien
tctgccggtgaggacaaatgtgccc

SEQ ID NO: 4855044 - DNA, 25 bp, Homo sapien
tccctctgtgtaactgtatcatggc

SEQ ID NO: 4855045 - DNA, 25 bp, Homo sapien
tttatgactgtctgccaagaccggc

SEQ ID NO: 4855046 - DNA, 25 bp, Homo sapien
ggtataatgaaaccttagcaggctt

SEQ ID NO: 4855047 - DNA, 25 bp, Homo sapien
caccctggagtcagctgtgcattga

SEQ ID NO: 4855048 - DNA, 25 bp, Homo sapien
caagaccggctgaagttgaggtgca

SEQ ID NO: 4855049 - DNA, 25 bp, Homo sapien
aggcctttggccactgccactcgag

SEQ ID NO: 4855050 - DNA, 25 bp, Homo sapien
gattgaaccaattctagaagctgcc

SEQ ID NO: 4855051 - DNA, 25 bp, Homo sapien
gccactcgagcagaagattgaacca

SEQ ID NO: 4855052 - DNA, 25 bp, Homo sapien
gataacctctccttggtcggctcca

SEQ ID NO: 4855053 - DNA, 25 bp, Homo sapien
ggtggcctgcgttcttccatcagga

SEQ ID NO: 4855054 - DNA, 25 bp, Homo sapien
gggatgatcagccactgatgattct

SEQ ID NO: 4855055 - DNA, 25 bp, Homo sapien
catcttgtctagttgtttgtctttg

SEQ ID NO: 4855056 - DNA, 25 bp, Homo sapien
gtaggtggtggcctgcgttcttcca

SEQ ID NO: 4855057 - DNA, 25 bp, Homo sapien
gagaggatcgcaggaggcgatgagg

SEQ ID NO: 4855058 - DNA, 25 bp, Homo sapien
gcaggtcggctgcacgtggaggtga

SEQ ID NO: 4855059 - DNA, 25 bp, Homo sapien
aggtggcagaggtctcctttgagaa

SEQ ID NO: 4855060 - DNA, 25 bp, Homo sapien
gtgatgcgactcagtggtgatgttg

SEQ ID NO: 4855061 - DNA, 25 bp, Homo sapien
gctgatccattctatgatgagcagg

SEQ ID NO: 4855062 - DNA, 25 bp, Homo sapien
gatgtgaagttacaatacgctgttc

SEQ ID NO: 4855063 - DNA, 25 bp, Homo sapien
tacgctgttcccatcatcaaccaga

SEQ ID NO: 4855064 - DNA, 25 bp, Homo sapien
gggtggccaatgtcttcctcgagtc

SEQ ID NO: 4855065 - DNA, 25 bp, Homo sapien
taataacctagagtgcatcaaaaag

SEQ ID NO: 4855066 - DNA, 25 bp, Homo sapien
ttaataacctagagtgcatcaaaaa

SEQ ID NO: 4855067 - DNA, 25 bp, Homo sapien
taacctagagtgcatcaaaaagcag

SEQ ID NO: 4855068 - DNA, 25 bp, Homo sapien
aataacctagagtgcatcaaaaagc

SEQ ID NO: 4855069 - DNA, 25 bp, Homo sapien
cagatcctagtttgacatgggcata

SEQ ID NO: 4855070 - DNA, 25 bp, Homo sapien
ccaaattggttgaaatggagatcct

SEQ ID NO: 4855071 - DNA, 25 bp, Homo sapien
gaacttgtacaattgcccatcttct

SEQ ID NO: 4855072 - DNA, 25 bp, Homo sapien
catgggcatacttccagtattcttc

SEQ ID NO: 4855073 - DNA, 25 bp, Homo sapien
gaagagcacagcctcagtcaggtca

SEQ ID NO: 4855074 - DNA, 25 bp, Homo sapien
ggcatagtcaccctccagttgagaa

SEQ ID NO: 4855075 - DNA, 25 bp, Homo sapien
tttgtagagtgtctagccgcatccc

SEQ ID NO: 4855076 - DNA, 25 bp, Homo sapien
actagatggcgatagtagctgccgc

SEQ ID NO: 4855077 - DNA, 25 bp, Homo sapien
caccctcccgtgtttgctattagag

SEQ ID NO: 4855078 - DNA, 25 bp, Homo sapien
agactgcaacaagggttaatgagcc

SEQ ID NO: 4855079 - DNA, 25 bp, Homo sapien
gaaaatgggagattcactgtgtgcc

SEQ ID NO: 4855080 - DNA, 25 bp, Homo sapien
caggaactgcggatggtaacctaca

SEQ ID NO: 4855081 - DNA, 25 bp, Homo sapien
ggtgtgccgatcctcacctgtccag

SEQ ID NO: 4855082 - DNA, 25 bp, Homo sapien
gaaaatggcttagtgagccaccact

SEQ ID NO: 4855083 - DNA, 25 bp, Homo sapien
gaactgctcactggctttgcagcct

SEQ ID NO: 4855084 - DNA, 25 bp, Homo sapien
gtgctgagccagtcgtcctctcggt

SEQ ID NO: 4855085 - DNA, 25 bp, Homo sapien
tccttctctggtgcgttgggatcct

SEQ ID NO: 4855086 - DNA, 25 bp, Homo sapien
ccatgtagtagggacggagcttgtc

SEQ ID NO: 4855087 - DNA, 25 bp, Homo sapien
ttttgtgttccatgtagtagggacg

SEQ ID NO: 4855088 - DNA, 25 bp, Homo sapien
tagggacggagcttgtcatttcttt

SEQ ID NO: 4855089 - DNA, 25 bp, Homo sapien
gccatagctcccagccatatagatt

SEQ ID NO: 4855090 - DNA, 25 bp, Homo sapien
cataaattgaatcagctaaatctgc

SEQ ID NO: 4855091 - DNA, 25 bp, Homo sapien
aatctgcagctctaatattttgagg

SEQ ID NO: 4855092 - DNA, 25 bp, Homo sapien
gttagatcacataacaaattgtccc

SEQ ID NO: 4855093 - DNA, 25 bp, Homo sapien
gcacggaagcttccttgctcaattt

SEQ ID NO: 4855094 - DNA, 25 bp, Homo sapien
cacggaagcttccttgctcaatttc

SEQ ID NO: 4855095 - DNA, 25 bp, Homo sapien
acatgtaaggagcacggaagcttcc

SEQ ID NO: 4855096 - DNA, 25 bp, Homo sapien
cattctcatccagtgttaccacaac

SEQ ID NO: 4855097 - DNA, 25 bp, Homo sapien
gggctcacgtgattagctttcctca

SEQ ID NO: 4855098 - DNA, 25 bp, Homo sapien
cacgtgattagctttcctcagcctc

SEQ ID NO: 4855099 - DNA, 25 bp, Homo sapien
aattattttttcatgatccagggac

SEQ ID NO: 4855100 - DNA, 25 bp, Homo sapien
gattgtaggcatgaccagctgcacc

SEQ ID NO: 4855101 - DNA, 25 bp, Homo sapien
caagtatctatgatggatcctggaa

SEQ ID NO: 4855102 - DNA, 25 bp, Homo sapien
tatggagtctctgtgtctaccagga

SEQ ID NO: 4855103 - DNA, 25 bp, Homo sapien
gcaagaagcctttgacaaatcactg

SEQ ID NO: 4855104 - DNA, 25 bp, Homo sapien
tgtgcttaccgtgaacaagttggaa

SEQ ID NO: 4855105 - DNA, 25 bp, Homo sapien
cagtgggaacaggatttgaagaacc

SEQ ID NO: 4855106 - DNA, 25 bp, Homo sapien
tcagcgttccagcttagaatgccaa

SEQ ID NO: 4855107 - DNA, 25 bp, Homo sapien
tccctgggttgctacagatgcttat

SEQ ID NO: 4855108 - DNA, 25 bp, Homo sapien
tagggtggcaaggattccctggttc

SEQ ID NO: 4855109 - DNA, 25 bp, Homo sapien
gagctgcacttcttatactactaga

SEQ ID NO: 4855110 - DNA, 25 bp, Homo sapien
acattaatgcctgtcaccatggtag

SEQ ID NO: 4855111 - DNA, 25 bp, Homo sapien
acttgaatccaccagatcagtctag

SEQ ID NO: 4855112 - DNA, 25 bp, Homo sapien
aacataggataagaacgaaaggacg

SEQ ID NO: 4855113 - DNA, 25 bp, Homo sapien
gtagagacagggtttcatgttggcc

SEQ ID NO: 4855114 - DNA, 25 bp, Homo sapien
tagtagttggcattacaggtgccca

SEQ ID NO: 4855115 - DNA, 25 bp, Homo sapien
tgtctggctgatttttgtattttta

SEQ ID NO: 4855116 - DNA, 25 bp, Homo sapien
ccaccatgtctggctgatttttgta

SEQ ID NO: 4855117 - DNA, 25 bp, Homo sapien
cagcagccagaagattaaaaccgca

SEQ ID NO: 4855118 - DNA, 25 bp, Homo sapien
tctatgcgcttcctctgcgtggcta

SEQ ID NO: 4855119 - DNA, 25 bp, Homo sapien
aaaccgcaggcgacatctcttggag

SEQ ID NO: 4855120 - DNA, 25 bp, Homo sapien
gtggctattatggagcccctggctg

SEQ ID NO: 4855121 - DNA, 25 bp, Homo sapien
gaacagcatccagattgggtctcag

SEQ ID NO: 4855122 - DNA, 25 bp, Homo sapien
tgggtctcagctgaaacaagtctcc

SEQ ID NO: 4855123 - DNA, 25 bp, Homo sapien
gggttttatagctcctggcttcctg

SEQ ID NO: 4855124 - DNA, 25 bp, Homo sapien
tcccttcgtggcatagaaaaatgac

SEQ ID NO: 4855125 - DNA, 25 bp, Homo sapien
cctgtgtggttttagcagttaaagc

SEQ ID NO: 4855126 - DNA, 25 bp, Homo sapien
gtgcctgtgtggttttagcagttaa

SEQ ID NO: 4855127 - DNA, 25 bp, Homo sapien
tagcagttaaagctccacatttcac

SEQ ID NO: 4855128 - DNA, 25 bp, Homo sapien
ggttttagcagttaaagctccacat

SEQ ID NO: 4855129 - DNA, 25 bp, Homo sapien
atgtatctttcagacgctgcagggc

SEQ ID NO: 4855130 - DNA, 25 bp, Homo sapien
cagggcttggcggaagatctgagcc

SEQ ID NO: 4855131 - DNA, 25 bp, Homo sapien
agcccaactgggatgtatctttcag

SEQ ID NO: 4855132 - DNA, 25 bp, Homo sapien
cttccagcccaactgggatgtatct

SEQ ID NO: 4855133 - DNA, 25 bp, Homo sapien
cttctgagaaagtgccaccccagca

SEQ ID NO: 4855134 - DNA, 25 bp, Homo sapien
agcgcggagggggacagctcttctg

SEQ ID NO: 4855135 - DNA, 25 bp, Homo sapien
tcttctgagaaagtgccaccccagc

SEQ ID NO: 4855136 - DNA, 25 bp, Homo sapien
agggggacagctcttctgagaaagt

SEQ ID NO: 4855137 - DNA, 25 bp, Homo sapien
tcacactgggggcaccacttacaaa

SEQ ID NO: 4855138 - DNA, 25 bp, Homo sapien
tgggggcaccacttacaaagcttat

SEQ ID NO: 4855139 - DNA, 25 bp, Homo sapien
ggcaccacttacaaagcttatagct

SEQ ID NO: 4855140 - DNA, 25 bp, Homo sapien
cttcaaggcgatcacactgggggca

SEQ ID NO: 4855141 - DNA, 25 bp, Homo sapien
ttctaaggttccttgatcaggaaac

SEQ ID NO: 4855142 - DNA, 25 bp, Homo sapien
aaggttccttgatcaggaaacagag

SEQ ID NO: 4855143 - DNA, 25 bp, Homo sapien
ataattctaaggttccttgatcagg

SEQ ID NO: 4855144 - DNA, 25 bp, Homo sapien
ctgcacccataaataattctaaggt

SEQ ID NO: 4855145 - DNA, 25 bp, Homo sapien
gttaaaatggccttgctcatatcct

SEQ ID NO: 4855146 - DNA, 25 bp, Homo sapien
ttaaaatggccttgctcatatcctc

SEQ ID NO: 4855147 - DNA, 25 bp, Homo sapien
gtcctcatcctcactagcaaaaatc

SEQ ID NO: 4855148 - DNA, 25 bp, Homo sapien
aaatctcttctttagcccccataga

SEQ ID NO: 4855149 - DNA, 25 bp, Homo sapien
gaaccatctcttgggcggcctccaa

SEQ ID NO: 4855150 - DNA, 25 bp, Homo sapien
ggcctccaatctcctcaaggcggat

SEQ ID NO: 4855151 - DNA, 25 bp, Homo sapien
gaggcccccgtctactaagactgac

SEQ ID NO: 4855152 - DNA, 25 bp, Homo sapien
ttgaacaataacaaggaatgcgcca

SEQ ID NO: 4855153 - DNA, 25 bp, Homo sapien
tcagagtctcccttccgaagtccct

SEQ ID NO: 4855154 - DNA, 25 bp, Homo sapien
gaatgcgccaaaaagcgcctcagag

SEQ ID NO: 4855155 - DNA, 25 bp, Homo sapien
taaaacgttcctggattttgtgctg

SEQ ID NO: 4855156 - DNA, 25 bp, Homo sapien
tgcgtggcatcttgccacactatag

SEQ ID NO: 4855157 - DNA, 25 bp, Homo sapien
gccacactatagttgcctttccagt

SEQ ID NO: 4855158 - DNA, 25 bp, Homo sapien
gccagttctgcgtggcatcttgcca

SEQ ID NO: 4855159 - DNA, 25 bp, Homo sapien
catatttatgtcatggtgaggaaaa

SEQ ID NO: 4855160 - DNA, 25 bp, Homo sapien
gtttgtaaggccaatatgagggcac

SEQ ID NO: 4855161 - DNA, 25 bp, Homo sapien
aaaagtttgtaaggccaatatgagg

SEQ ID NO: 4855162 - DNA, 25 bp, Homo sapien
aggaaaagtttgtaaggccaatatg

SEQ ID NO: 4855163 - DNA, 25 bp, Homo sapien
ttgtcagtcaattctccaatgacag

SEQ ID NO: 4855164 - DNA, 25 bp, Homo sapien
tcaccgtcattgtcagtcaattctc

SEQ ID NO: 4855165 - DNA, 25 bp, Homo sapien
ccgtcattgtcagtcaattctccaa

SEQ ID NO: 4855166 - DNA, 25 bp, Homo sapien
agtcatcaccgtcattgtcagtcaa

SEQ ID NO: 4855167 - DNA, 25 bp, Homo sapien
gaccttagtaagattagtagtaaca

SEQ ID NO: 4855168 - DNA, 25 bp, Homo sapien
aggcacttgtacagcttcatgagag

SEQ ID NO: 4855169 - DNA, 25 bp, Homo sapien
cagcttcatgagagaccttagtaag

SEQ ID NO: 4855170 - DNA, 25 bp, Homo sapien
gaatgagagtaacacacttaccatg

SEQ ID NO: 4855171 - DNA, 25 bp, Homo sapien
tcttccctgttcatagatgtgccgg

SEQ ID NO: 4855172 - DNA, 25 bp, Homo sapien
ctgttcatagatgtgccgggtggca

SEQ ID NO: 4855173 - DNA, 25 bp, Homo sapien
tccctgttcatagatgtgccgggtg

SEQ ID NO: 4855174 - DNA, 25 bp, Homo sapien
attcttccctgttcatagatgtgcc

SEQ ID NO: 4855175 - DNA, 25 bp, Homo sapien
aactcaggactagctccagcgacat

SEQ ID NO: 4855176 - DNA, 25 bp, Homo sapien
gagggacggtaacctgcagaacaga

SEQ ID NO: 4855177 - DNA, 25 bp, Homo sapien
tccatttttatagaacgagtacacg

SEQ ID NO: 4855178 - DNA, 25 bp, Homo sapien
cacagggacagtcggaactcaggac

SEQ ID NO: 4855179 - DNA, 25 bp, Homo sapien
gtgaagcatggagggtttcagttcc

SEQ ID NO: 4855180 - DNA, 25 bp, Homo sapien
ctagaaataacagttcagggtgaag

SEQ ID NO: 4855181 - DNA, 25 bp, Homo sapien
ttcagttcccagacaatggaaccat

SEQ ID NO: 4855182 - DNA, 25 bp, Homo sapien
gagacaacacagttggacatttcca

SEQ ID NO: 4855183 - DNA, 25 bp, Homo sapien
cccactggcaatttttagaagagcc

SEQ ID NO: 4855184 - DNA, 25 bp, Homo sapien
ccaagctccgcctgtgggtgaggcc

SEQ ID NO: 4855185 - DNA, 25 bp, Homo sapien
ggcaatttttagaagagccagaggc

SEQ ID NO: 4855186 - DNA, 25 bp, Homo sapien
tgacttcaccaagctccgcctgtgg

SEQ ID NO: 4855187 - DNA, 25 bp, Homo sapien
ccttccatgaaccatgaacctgtga

SEQ ID NO: 4855188 - DNA, 25 bp, Homo sapien
tccatgaaccatgaacctgtgacgg

SEQ ID NO: 4855189 - DNA, 25 bp, Homo sapien
ttccttccatgaaccatgaacctgt

SEQ ID NO: 4855190 - DNA, 25 bp, Homo sapien
tgaaccatgaacctgtgacggcatc

SEQ ID NO: 4855191 - DNA, 25 bp, Homo sapien
gccagcttagaggttgttgcaaact

SEQ ID NO: 4855192 - DNA, 25 bp, Homo sapien
taaataacgtcaagcctcaatgtca

SEQ ID NO: 4855193 - DNA, 25 bp, Homo sapien
tctggcatcctagacaggacaaggt

SEQ ID NO: 4855194 - DNA, 25 bp, Homo sapien
caatgtcaccgtcacgttgggatac

SEQ ID NO: 4855195 - DNA, 25 bp, Homo sapien
gattgcttacatcggattccattgg

SEQ ID NO: 4855196 - DNA, 25 bp, Homo sapien
cattggtatgaatttcccaaactgg

SEQ ID NO: 4855197 - DNA, 25 bp, Homo sapien
catgggcacgcaggcgccattttga

SEQ ID NO: 4855198 - DNA, 25 bp, Homo sapien
gctggctcccgtgacgtgcgtcatg

SEQ ID NO: 4855199 - DNA, 25 bp, Homo sapien
gatcctagcaaatgtgcccaaccag

SEQ ID NO: 4855200 - DNA, 25 bp, Homo sapien
taaggcttgaagtgatgaaacccac

SEQ ID NO: 4855201 - DNA, 25 bp, Homo sapien
gccagaatggcaataaggactccga

SEQ ID NO: 4855202 - DNA, 25 bp, Homo sapien
ttagagcaataacggctgccgcagc

SEQ ID NO: 4855203 - DNA, 25 bp, Homo sapien
gatctgtctccctgatgccaggcac

SEQ ID NO: 4855204 - DNA, 25 bp, Homo sapien
tgtctccctgatgccaggcacagag

SEQ ID NO: 4855205 - DNA, 25 bp, Homo sapien
gcctggctgtcagaaccagtcctca

SEQ ID NO: 4855206 - DNA, 25 bp, Homo sapien
cacagagcctggctgtcagaaccag

SEQ ID NO: 4855207 - DNA, 25 bp, Homo sapien
gggcacccctccatgtaggcaccga

SEQ ID NO: 4855208 - DNA, 25 bp, Homo sapien
gcacccctccatgtaggcaccgaga

SEQ ID NO: 4855209 - DNA, 25 bp, Homo sapien
cccctccatgtaggcaccgagaagg

SEQ ID NO: 4855210 - DNA, 25 bp, Homo sapien
acccctccatgtaggcaccgagaag

SEQ ID NO: 4855211 - DNA, 25 bp, Homo sapien
ccaggtccctgacaagggttctgct

SEQ ID NO: 4855212 - DNA, 25 bp, Homo sapien
ctgacaagggttctgctgagtggca

SEQ ID NO: 4855213 - DNA, 25 bp, Homo sapien
ggtccctgacaagggttctgctgag

SEQ ID NO: 4855214 - DNA, 25 bp, Homo sapien
gtgccaggtccctgacaagggttct

SEQ ID NO: 4855215 - DNA, 25 bp, Homo sapien
ccagaacatatcgttctcacccatg

SEQ ID NO: 4855216 - DNA, 25 bp, Homo sapien
gcagcttcttccaccgatggataaa

SEQ ID NO: 4855217 - DNA, 25 bp, Homo sapien
atgctaacttgcatgcatcctcccg

SEQ ID NO: 4855218 - DNA, 25 bp, Homo sapien
gaacatatcgttctcacccatgagt

SEQ ID NO: 4855219 - DNA, 25 bp, Homo sapien
tgaacatagcagatcgcccaggagg

SEQ ID NO: 4855220 - DNA, 25 bp, Homo sapien
gaacatagcagatcgcccaggagga

SEQ ID NO: 4855221 - DNA, 25 bp, Homo sapien
ctgaacatagcagatcgcccaggag

SEQ ID NO: 4855222 - DNA, 25 bp, Homo sapien
tggctaacgaagaggaagcacgatg

SEQ ID NO: 4855223 - DNA, 25 bp, Homo sapien
aaagttcactccaacggaagccagt

SEQ ID NO: 4855224 - DNA, 25 bp, Homo sapien
gaaaagttcactccaacggaagcca

SEQ ID NO: 4855225 - DNA, 25 bp, Homo sapien
ggcagttcctggctaacgaagagga

SEQ ID NO: 4855226 - DNA, 25 bp, Homo sapien
tccccaaagcgctccaagagaaagt

SEQ ID NO: 4855227 - DNA, 25 bp, Homo sapien
gcgtccgcgccattgtttgagcttg

SEQ ID NO: 4855228 - DNA, 25 bp, Homo sapien
tgggacgcaagtcccctcgaatggc

SEQ ID NO: 4855229 - DNA, 25 bp, Homo sapien
tgagggcaattcctctgggacgcaa

SEQ ID NO: 4855230 - DNA, 25 bp, Homo sapien
ggctttagatgaaaatcgatcacgc

SEQ ID NO: 4855231 - DNA, 25 bp, Homo sapien
gatcacgctaatgcatacgctaacg

SEQ ID NO: 4855232 - DNA, 25 bp, Homo sapien
tacgctaacgtctcaggaatcgcat

SEQ ID NO: 4855233 - DNA, 25 bp, Homo sapien
ggatgaaagctcaaacccgagccct

SEQ ID NO: 4855234 - DNA, 25 bp, Homo sapien
caagcgtggctgatccataggtaga

SEQ ID NO: 4855235 - DNA, 25 bp, Homo sapien
gtaaaggaatacaagcgtggctgat

SEQ ID NO: 4855236 - DNA, 25 bp, Homo sapien
ctgatccataggtagagcagccccg

SEQ ID NO: 4855237 - DNA, 25 bp, Homo sapien
agcttctgtattgcaacctgtttca

SEQ ID NO: 4855238 - DNA, 25 bp, Homo sapien
acaaagaactgcctgtgaaggccat

SEQ ID NO: 4855239 - DNA, 25 bp, Homo sapien
tcccctgggtaaccaactgtctctg

SEQ ID NO: 4855240 - DNA, 25 bp, Homo sapien
ctcctccccgggatttccatggtca

SEQ ID NO: 4855241 - DNA, 25 bp, Homo sapien
tctgggtacaaagaactgcctgtga

SEQ ID NO: 4855242 - DNA, 25 bp, Homo sapien
ctctgccaaaaaccaggctttaggg

SEQ ID NO: 4855243 - DNA, 25 bp, Homo sapien
tctgccaaaaaccaggctttaggga

SEQ ID NO: 4855244 - DNA, 25 bp, Homo sapien
ccaggctttagggaagtctgttcct

SEQ ID NO: 4855245 - DNA, 25 bp, Homo sapien
caggctttagggaagtctgttcctt

SEQ ID NO: 4855246 - DNA, 25 bp, Homo sapien
ctcaaaccaaagagtgggatgagag

SEQ ID NO: 4855247 - DNA, 25 bp, Homo sapien
aagagtgggatgagaggcaggggac

SEQ ID NO: 4855248 - DNA, 25 bp, Homo sapien
aaaccaaagagtgggatgagaggca

SEQ ID NO: 4855249 - DNA, 25 bp, Homo sapien
agtgggatgagaggcaggggacggt

SEQ ID NO: 4855250 - DNA, 25 bp, Homo sapien
gttggcccccgcgatggatgctatg

SEQ ID NO: 4855251 - DNA, 25 bp, Homo sapien
tgctatggcattagaggcttcagca

SEQ ID NO: 4855252 - DNA, 25 bp, Homo sapien
tgcgcagggactctgcaactgtttg

SEQ ID NO: 4855253 - DNA, 25 bp, Homo sapien
cgcagggactctgcaactgtttgtt

SEQ ID NO: 4855254 - DNA, 25 bp, Homo sapien
tttttggaacagacttgaagacttg

SEQ ID NO: 4855255 - DNA, 25 bp, Homo sapien
cagacttgaagacttgtcattttgg

SEQ ID NO: 4855256 - DNA, 25 bp, Homo sapien
ggaacagacttgaagacttgtcatt

SEQ ID NO: 4855257 - DNA, 25 bp, Homo sapien
cttgaagacttgtcattttggtcac

SEQ ID NO: 4855258 - DNA, 25 bp, Homo sapien
acctgtgcgtgtccctccgccctat

SEQ ID NO: 4855259 - DNA, 25 bp, Homo sapien
aacataggatgctctgaggactctg

SEQ ID NO: 4855260 - DNA, 25 bp, Homo sapien
tggaacataggatgctctgaggact

SEQ ID NO: 4855261 - DNA, 25 bp, Homo sapien
cctatcgtgtggctgtcacccatgc

SEQ ID NO: 4855262 - DNA, 25 bp, Homo sapien
ggatctgcccttgaggtattactgg

SEQ ID NO: 4855263 - DNA, 25 bp, Homo sapien
tattactggtgaggtcagcaggtct

SEQ ID NO: 4855264 - DNA, 25 bp, Homo sapien
cagcaggtctaatccatgacaggac

SEQ ID NO: 4855265 - DNA, 25 bp, Homo sapien
acatggccggctgatccaactggaa

SEQ ID NO: 4855266 - DNA, 25 bp, Homo sapien
aaaaggatctactctttcatggata

SEQ ID NO: 4855267 - DNA, 25 bp, Homo sapien
aatcccaattgccttaaaaggatct

SEQ ID NO: 4855268 - DNA, 25 bp, Homo sapien
cccaacctctcacaaaaatcccaat

SEQ ID NO: 4855269 - DNA, 25 bp, Homo sapien
catctagcaacaggactgaggtctt

SEQ ID NO: 4855270 - DNA, 25 bp, Homo sapien
taatccccagggccccagtacaaga

SEQ ID NO: 4855271 - DNA, 25 bp, Homo sapien
cagtaatccccagggccccagtaca

SEQ ID NO: 4855272 - DNA, 25 bp, Homo sapien
gtgttttcgtggaggacaattgacc

SEQ ID NO: 4855273 - DNA, 25 bp, Homo sapien
gttttcgtggaggacaattgaccat

SEQ ID NO: 4855274 - DNA, 25 bp, Homo sapien
gggtgttttcgtggaggacaattga

SEQ ID NO: 4855275 - DNA, 25 bp, Homo sapien
ctgggtgttttcgtggaggacaatt

SEQ ID NO: 4855276 - DNA, 25 bp, Homo sapien
ctttcatttgatcttccatcactga

SEQ ID NO: 4855277 - DNA, 25 bp, Homo sapien
tttcatttgatcttccatcactgat

SEQ ID NO: 4855278 - DNA, 25 bp, Homo sapien
aggctttgttcatttgtttttgttg

SEQ ID NO: 4855279 - DNA, 25 bp, Homo sapien
agggtgaccgtagcccttttcagtg

SEQ ID NO: 4855280 - DNA, 25 bp, Homo sapien
atttcagaccacacagcgtcctttc

SEQ ID NO: 4855281 - DNA, 25 bp, Homo sapien
caagttgcttagcaccgtggtggct

SEQ ID NO: 4855282 - DNA, 25 bp, Homo sapien
ggtggcttgtgggtggtgaaatata

SEQ ID NO: 4855283 - DNA, 25 bp, Homo sapien
caacaagattagacggtgccaggcc

SEQ ID NO: 4855284 - DNA, 25 bp, Homo sapien
tagaagcgccaagtcgttgttgtct

SEQ ID NO: 4855285 - DNA, 25 bp, Homo sapien
tgagaccctggactatcgaggtgca

SEQ ID NO: 4855286 - DNA, 25 bp, Homo sapien
ttacattctgttgggtagaagcgcc

SEQ ID NO: 4855287 - DNA, 25 bp, Homo sapien
cctgctgtatggtgttttggcatag

SEQ ID NO: 4855288 - DNA, 25 bp, Homo sapien
caggcggagagcacgagaaaccttc

SEQ ID NO: 4855289 - DNA, 25 bp, Homo sapien
gagactgcttgctgtttccggacca

SEQ ID NO: 4855290 - DNA, 25 bp, Homo sapien
tggcatagatattctggatgtgact

SEQ ID NO: 4855291 - DNA, 25 bp, Homo sapien
tctccactgctcagctgagtcttca

SEQ ID NO: 4855292 - DNA, 25 bp, Homo sapien
agtcttcagcagcacgatggctgtc

SEQ ID NO: 4855293 - DNA, 25 bp, Homo sapien
ggctgtctgtcctccttccaagtct

SEQ ID NO: 4855294 - DNA, 25 bp, Homo sapien
ttccaagtctagacacaacctcttc

SEQ ID NO: 4855295 - DNA, 25 bp, Homo sapien
agccgatgtcacctttcctcccctg

SEQ ID NO: 4855296 - DNA, 25 bp, Homo sapien
ctttgggcatctgtaatgaatgagc

SEQ ID NO: 4855297 - DNA, 25 bp, Homo sapien
tgggcttccacagccgatgtcacct

SEQ ID NO: 4855298 - DNA, 25 bp, Homo sapien
gccctttgggcatctgtaatgaatg

SEQ ID NO: 4855299 - DNA, 25 bp, Homo sapien
gcatggaggaccctgcagccatgag

SEQ ID NO: 4855300 - DNA, 25 bp, Homo sapien
tgtaggacattgcagtagacccacc

SEQ ID NO: 4855301 - DNA, 25 bp, Homo sapien
aatggtatggattgaggactgagaa

SEQ ID NO: 4855302 - DNA, 25 bp, Homo sapien
tatggattgaggactgagaagacaa

SEQ ID NO: 4855303 - DNA, 25 bp, Homo sapien
ggccaatccaagtgacctctgctct

SEQ ID NO: 4855304 - DNA, 25 bp, Homo sapien
caagtgacctctgctctcgaagacc

SEQ ID NO: 4855305 - DNA, 25 bp, Homo sapien
catcaggccaatccaagtgacctct

SEQ ID NO: 4855306 - DNA, 25 bp, Homo sapien
tgacctctgctctcgaagacctgtg

SEQ ID NO: 4855307 - DNA, 25 bp, Homo sapien
atgtaacctgaacagatgaggctct

SEQ ID NO: 4855308 - DNA, 25 bp, Homo sapien
atagcctctagtaagcagaataggg

SEQ ID NO: 4855309 - DNA, 25 bp, Homo sapien
ggtgtcagcacagagggtcatgtaa

SEQ ID NO: 4855310 - DNA, 25 bp, Homo sapien
gagacatcacaatagcctctagtaa

SEQ ID NO: 4855311 - DNA, 25 bp, Homo sapien
ggatacatcatttcgcctcaagaga

SEQ ID NO: 4855312 - DNA, 25 bp, Homo sapien
aatgtcttcgatggcgctagctgga

SEQ ID NO: 4855313 - DNA, 25 bp, Homo sapien
tcgatggcgctagctggatacatca

SEQ ID NO: 4855314 - DNA, 25 bp, Homo sapien
tccaaatgtcttcgatggcgctagc

SEQ ID NO: 4855315 - DNA, 25 bp, Homo sapien
cagacagggctttcggagataaata

SEQ ID NO: 4855316 - DNA, 25 bp, Homo sapien
tctggctacacgctaagagtcctgc

SEQ ID NO: 4855317 - DNA, 25 bp, Homo sapien
taaataatgaactccacgtgggtac

SEQ ID NO: 4855318 - DNA, 25 bp, Homo sapien
tgttggccaaactgcagatgattcg

SEQ ID NO: 4855319 - DNA, 25 bp, Homo sapien
tcaagagtataacctggtgtctggg

SEQ ID NO: 4855320 - DNA, 25 bp, Homo sapien
gctcctctgccggtttctcagggct

SEQ ID NO: 4855321 - DNA, 25 bp, Homo sapien
taaggcccaaattagatgagtcctg

SEQ ID NO: 4855322 - DNA, 25 bp, Homo sapien
tatcacttgaggcaaaatactcttg

SEQ ID NO: 4855323 - DNA, 25 bp, Homo sapien
tgtccttctggagggcccctctgca

SEQ ID NO: 4855324 - DNA, 25 bp, Homo sapien
gtcccactgccctgtccttctggag

SEQ ID NO: 4855325 - DNA, 25 bp, Homo sapien
gatgtttcccattcagtcccactgc

SEQ ID NO: 4855326 - DNA, 25 bp, Homo sapien
ctgcttgggtgatgtttcccattca

SEQ ID NO: 4855327 - DNA, 25 bp, Homo sapien
aggggacttgcaagacgaggctcat

SEQ ID NO: 4855328 - DNA, 25 bp, Homo sapien
gaaggggacttgcaagacgaggctc

SEQ ID NO: 4855329 - DNA, 25 bp, Homo sapien
cccaaagaaggggacttgcaagacg

SEQ ID NO: 4855330 - DNA, 25 bp, Homo sapien
caaagaaggggacttgcaagacgag

SEQ ID NO: 4855331 - DNA, 25 bp, Homo sapien
caatgcatatctcgtcatagcatcc

SEQ ID NO: 4855332 - DNA, 25 bp, Homo sapien
agcttctcaatgcatatctcgtcat

SEQ ID NO: 4855333 - DNA, 25 bp, Homo sapien
tctcaatgcatatctcgtcatagca

SEQ ID NO: 4855334 - DNA, 25 bp, Homo sapien
gcatatctcgtcatagcatcctgtt

SEQ ID NO: 4855335 - DNA, 25 bp, Homo sapien
ctctgctggaaatgatgactacaat

SEQ ID NO: 4855336 - DNA, 25 bp, Homo sapien
caaggtcatgagttaaacagctggc

SEQ ID NO: 4855337 - DNA, 25 bp, Homo sapien
caatgtgatcactaagaatagcccc

SEQ ID NO: 4855338 - DNA, 25 bp, Homo sapien
tgactacaataagaataaggccctg

SEQ ID NO: 4855339 - DNA, 25 bp, Homo sapien
tgccaatacttcagtctcagttctg

SEQ ID NO: 4855340 - DNA, 25 bp, Homo sapien
attaccatagttggattctttcact

SEQ ID NO: 4855341 - DNA, 25 bp, Homo sapien
ccaatacttcagtctcagttctgag

SEQ ID NO: 4855342 - DNA, 25 bp, Homo sapien
ttctgagaagactcttgaattacca

SEQ ID NO: 4855343 - DNA, 25 bp, Homo sapien
ctttgtctccacagtccattggccg

SEQ ID NO: 4855344 - DNA, 25 bp, Homo sapien
acagtccattggccgaccatcttct

SEQ ID NO: 4855345 - DNA, 25 bp, Homo sapien
tccacagtccattggccgaccatct

SEQ ID NO: 4855346 - DNA, 25 bp, Homo sapien
ttgtctccacagtccattggccgac

SEQ ID NO: 4855347 - DNA, 25 bp, Homo sapien
cagaagagccttgatcatagaaact

SEQ ID NO: 4855348 - DNA, 25 bp, Homo sapien
aatcttgcagggctgagaagacgca

SEQ ID NO: 4855349 - DNA, 25 bp, Homo sapien
gtggagtccacgtggtgaccatgaa

SEQ ID NO: 4855350 - DNA, 25 bp, Homo sapien
tccattctgggtgcgatgacacagg

SEQ ID NO: 4855351 - DNA, 25 bp, Homo sapien
ctggtgtggcacttactgtactagc

SEQ ID NO: 4855352 - DNA, 25 bp, Homo sapien
tactgtactagcaactattttgttg

SEQ ID NO: 4855353 - DNA, 25 bp, Homo sapien
tctctgattgtagtgcctggaaggc

SEQ ID NO: 4855354 - DNA, 25 bp, Homo sapien
tttctctgattgtagtgcctggaag

SEQ ID NO: 4855355 - DNA, 25 bp, Homo sapien
ggtccatttgtgacttccatctaga

SEQ ID NO: 4855356 - DNA, 25 bp, Homo sapien
tcacagctcctcgtagatgtcccag

SEQ ID NO: 4855357 - DNA, 25 bp, Homo sapien
acttggggaccacttgactctgtct

SEQ ID NO: 4855358 - DNA, 25 bp, Homo sapien
ccagcaagccttgacttggcttgta

SEQ ID NO: 4855359 - DNA, 25 bp, Homo sapien
tgcaccccaaatataagagagtccc

SEQ ID NO: 4855360 - DNA, 25 bp, Homo sapien
gaaaattcaagtagttccaagtgtg

SEQ ID NO: 4855361 - DNA, 25 bp, Homo sapien
tctctttcgcagaaataaaaagtcg

SEQ ID NO: 4855362 - DNA, 25 bp, Homo sapien
aacttactggccatgagttcccagg

SEQ ID NO: 4855363 - DNA, 25 bp, Homo sapien
gtcccctgatatggtgacatcatca

SEQ ID NO: 4855364 - DNA, 25 bp, Homo sapien
cacaaaacacgagatgtcccctgat

SEQ ID NO: 4855365 - DNA, 25 bp, Homo sapien
aacacgagatgtcccctgatatggt

SEQ ID NO: 4855366 - DNA, 25 bp, Homo sapien
cgagatgtcccctgatatggtgaca

SEQ ID NO: 4855367 - DNA, 25 bp, Homo sapien
cagtgccctctggcatgtctttcat

SEQ ID NO: 4855368 - DNA, 25 bp, Homo sapien
ctctatcccgctacctggaaattca

SEQ ID NO: 4855369 - DNA, 25 bp, Homo sapien
tgcagactctatcccgctacctgga

SEQ ID NO: 4855370 - DNA, 25 bp, Homo sapien
tgcaatggggcactttgcattattc

SEQ ID NO: 4855371 - DNA, 25 bp, Homo sapien
tgtgcagactctatcccgctacctg

SEQ ID NO: 4855372 - DNA, 25 bp, Homo sapien
gaatcagaagacattcaaggcatcc

SEQ ID NO: 4855373 - DNA, 25 bp, Homo sapien
caagttcagcgactccactggaaat

SEQ ID NO: 4855374 - DNA, 25 bp, Homo sapien
tcttagatacattgggaccattgag

SEQ ID NO: 4855375 - DNA, 25 bp, Homo sapien
taaaatgagtaatccatggtcacag

SEQ ID NO: 4855376 - DNA, 25 bp, Homo sapien
gcctcctgggaagccgaaacatctt

SEQ ID NO: 4855377 - DNA, 25 bp, Homo sapien
taaggaaccaaagggcatctcaagc

SEQ ID NO: 4855378 - DNA, 25 bp, Homo sapien
tggcccaccagatcacgctgaagtt

SEQ ID NO: 4855379 - DNA, 25 bp, Homo sapien
cagaggacaattgtttccagggcca

SEQ ID NO: 4855380 - DNA, 25 bp, Homo sapien
ctgtgtcctctagactgttgtttct

SEQ ID NO: 4855381 - DNA, 25 bp, Homo sapien
ctgtcctctaggctgtgtcctctag

SEQ ID NO: 4855382 - DNA, 25 bp, Homo sapien
tgtgtcctctagactgttgtttctc

SEQ ID NO: 4855383 - DNA, 25 bp, Homo sapien
ctgaaagtttggaaagtttgtatgt

SEQ ID NO: 4855384 - DNA, 25 bp, Homo sapien
tgaaagtttggaaagtttgtatgtc

SEQ ID NO: 4855385 - DNA, 25 bp, Homo sapien
ggaaggtaggtgagagccctgggca

SEQ ID NO: 4855386 - DNA, 25 bp, Homo sapien
gagcttagctcttctggccatttca

SEQ ID NO: 4855387 - DNA, 25 bp, Homo sapien
aaaggagatccttactgaacatgag

SEQ ID NO: 4855388 - DNA, 25 bp, Homo sapien
gagcctttctcttgcgactctgcat

SEQ ID NO: 4855389 - DNA, 25 bp, Homo sapien
ttttgccagtttgacgccaaggtcc

SEQ ID NO: 4855390 - DNA, 25 bp, Homo sapien
gtgttcatttctgactgggacccca

SEQ ID NO: 4855391 - DNA, 25 bp, Homo sapien
caggaaaatctggtcccaagcaggg

SEQ ID NO: 4855392 - DNA, 25 bp, Homo sapien
gagttgacatctacatcgtgggtgc

SEQ ID NO: 4855393 - DNA, 25 bp, Homo sapien
gcctggccggagacgattacagaga

SEQ ID NO: 4855394 - DNA, 25 bp, Homo sapien
tgagctgcagccgttgtgactagta

SEQ ID NO: 4855395 - DNA, 25 bp, Homo sapien
tctacttttcagttcactctccttg

SEQ ID NO: 4855396 - DNA, 25 bp, Homo sapien
cttatggagaagaacttctttctac

SEQ ID NO: 4855397 - DNA, 25 bp, Homo sapien
tgactagtagttttttattgtagct

SEQ ID NO: 4855398 - DNA, 25 bp, Homo sapien
tgcctcccacatgggtaatagtgac

SEQ ID NO: 4855399 - DNA, 25 bp, Homo sapien
tagtgacccgtagctatgacacccc

SEQ ID NO: 4855400 - DNA, 25 bp, Homo sapien
tctgttatgtaggaaagggccttct

SEQ ID NO: 4855401 - DNA, 25 bp, Homo sapien
tgggggcaattccaaacaaccacac

SEQ ID NO: 4855402 - DNA, 25 bp, Homo sapien
ctaccgggccatctaatgtgaaatt

SEQ ID NO: 4855403 - DNA, 25 bp, Homo sapien
ccttggatggagatactaccgggcc

SEQ ID NO: 4855404 - DNA, 25 bp, Homo sapien
ttttctgctggagtggttaacgctg

SEQ ID NO: 4855405 - DNA, 25 bp, Homo sapien
ttccttgaaaaacatcgccactgag

SEQ ID NO: 4855406 - DNA, 25 bp, Homo sapien
tgaaggatcctctgaccctggaatc

SEQ ID NO: 4855407 - DNA, 25 bp, Homo sapien
gatcctctgaccctggaatcttacc

SEQ ID NO: 4855408 - DNA, 25 bp, Homo sapien
agagcatgaaggatcctctgaccct

SEQ ID NO: 4855409 - DNA, 25 bp, Homo sapien
gaccctggaatcttacctcgagcac

SEQ ID NO: 4855410 - DNA, 25 bp, Homo sapien
cctgggacaaggcagctggtatagc

SEQ ID NO: 4855411 - DNA, 25 bp, Homo sapien
ttgggtgacagtcgccctgcaggaa

SEQ ID NO: 4855412 - DNA, 25 bp, Homo sapien
gctggtatagctactgttgggtgac

SEQ ID NO: 4855413 - DNA, 25 bp, Homo sapien
caggtgacatgcacccagaggcaaa

SEQ ID NO: 4855414 - DNA, 25 bp, Homo sapien
cacctccaggcacgtgacctaagtc

SEQ ID NO: 4855415 - DNA, 25 bp, Homo sapien
ggactaggacttggccgcactgtgc

SEQ ID NO: 4855416 - DNA, 25 bp, Homo sapien
aaaggtggaggcgagacagggacta

SEQ ID NO: 4855417 - DNA, 25 bp, Homo sapien
gagaagttcaacgtccaaaggtcca

SEQ ID NO: 4855418 - DNA, 25 bp, Homo sapien
cactttgtcatggagcagctagaaa

SEQ ID NO: 4855419 - DNA, 25 bp, Homo sapien
gctagaaattcacctcaacatactc

SEQ ID NO: 4855420 - DNA, 25 bp, Homo sapien
gcacatattccatgccaggcacagt

SEQ ID NO: 4855421 - DNA, 25 bp, Homo sapien
gattacccggactcttcagaaaaca

SEQ ID NO: 4855422 - DNA, 25 bp, Homo sapien
cggagatggcacgacgtccttctat

SEQ ID NO: 4855423 - DNA, 25 bp, Homo sapien
tgattcatggtgtgcagtcccacgg

SEQ ID NO: 4855424 - DNA, 25 bp, Homo sapien
taaaccctgagtacacggagatggc

SEQ ID NO: 4855425 - DNA, 25 bp, Homo sapien
tgacacccagaacaccctggtgggc

SEQ ID NO: 4855426 - DNA, 25 bp, Homo sapien
tgcatgatccgaggcacaatggcag

SEQ ID NO: 4855427 - DNA, 25 bp, Homo sapien
gtagtgaggagcagagacgaactcc

SEQ ID NO: 4855428 - DNA, 25 bp, Homo sapien
acctccggaggctgaatggacggta

SEQ ID NO: 4855429 - DNA, 25 bp, Homo sapien
accctggatggagagctgcatgatc

SEQ ID NO: 4855430 - DNA, 25 bp, Homo sapien
aaagaacaatcaggaaggtgattgt

SEQ ID NO: 4855431 - DNA, 25 bp, Homo sapien
agaacaatcaggaaggtgattgttc

SEQ ID NO: 4855432 - DNA, 25 bp, Homo sapien
gagaaagaacaatcaggaaggtgat

SEQ ID NO: 4855433 - DNA, 25 bp, Homo sapien
gaaagaacaatcaggaaggtgattg

SEQ ID NO: 4855434 - DNA, 25 bp, Homo sapien
tcaacactagactggggcagtcagt

SEQ ID NO: 4855435 - DNA, 25 bp, Homo sapien
gaggggtgagagctatgacagaggt

SEQ ID NO: 4855436 - DNA, 25 bp, Homo sapien
gtgttggtggtcaacactagactgg

SEQ ID NO: 4855437 - DNA, 25 bp, Homo sapien
tggtcaacactagactggggcagtc

SEQ ID NO: 4855438 - DNA, 25 bp, Homo sapien
ggcaggggagattgacttgggggag

SEQ ID NO: 4855439 - DNA, 25 bp, Homo sapien
gcaggggagattgacttgggggagt

SEQ ID NO: 4855440 - DNA, 25 bp, Homo sapien
caggggagattgacttgggggagtg

SEQ ID NO: 4855441 - DNA, 25 bp, Homo sapien
gatgttcggagacctgaagctgtcc

SEQ ID NO: 4855442 - DNA, 25 bp, Homo sapien
taggagaccatgcatgatgttcgga

SEQ ID NO: 4855443 - DNA, 25 bp, Homo sapien
tcattttagcaggactcgggaaggt

SEQ ID NO: 4855444 - DNA, 25 bp, Homo sapien
gagaaatacccattgcacatcgaca

SEQ ID NO: 4855445 - DNA, 25 bp, Homo sapien
tgctgatgtagctcaacgtctgatg

SEQ ID NO: 4855446 - DNA, 25 bp, Homo sapien
catgccctaaggagctgtgatagct

SEQ ID NO: 4855447 - DNA, 25 bp, Homo sapien
gagccatgaacccaagacgaggaaa

SEQ ID NO: 4855448 - DNA, 25 bp, Homo sapien
tgtcatctcctaagctgcactgttg

SEQ ID NO: 4855449 - DNA, 25 bp, Homo sapien
taccaagcattgaggaatatacaca

SEQ ID NO: 4855450 - DNA, 25 bp, Homo sapien
gattgagatcagcaaaggaaagagg

SEQ ID NO: 4855451 - DNA, 25 bp, Homo sapien
tacacaaagacggttcttgcccttg

SEQ ID NO: 4855452 - DNA, 25 bp, Homo sapien
caattactgatctatgaattcagtg

SEQ ID NO: 4855453 - DNA, 25 bp, Homo sapien
atgaaaaaattatctattagagaac

SEQ ID NO: 4855454 - DNA, 25 bp, Homo sapien
catgttattcatgtcaaggaataga

SEQ ID NO: 4855455 - DNA, 25 bp, Homo sapien
cttcatgttattcatgtcaaggaat

SEQ ID NO: 4855456 - DNA, 25 bp, Homo sapien
attatctattagagaacatacttca

SEQ ID NO: 4855457 - DNA, 25 bp, Homo sapien
cgctgtctctaactgatgttgaatg

SEQ ID NO: 4855458 - DNA, 25 bp, Homo sapien
ccccgctgtctctaactgatgttga

SEQ ID NO: 4855459 - DNA, 25 bp, Homo sapien
ttaggcagaaggttcgccgagcact

SEQ ID NO: 4855460 - DNA, 25 bp, Homo sapien
ccgagcactcctaaggctgactcag

SEQ ID NO: 4855461 - DNA, 25 bp, Homo sapien
gatcccttacaaacaatgagtttcc

SEQ ID NO: 4855462 - DNA, 25 bp, Homo sapien
atcccttacaaacaatgagtttcct

SEQ ID NO: 4855463 - DNA, 25 bp, Homo sapien
ttagacaaactggagtctcactcgg

SEQ ID NO: 4855464 - DNA, 25 bp, Homo sapien
ccattgtctagatgaaccacagttc

SEQ ID NO: 4855465 - DNA, 25 bp, Homo sapien
tatttttaagggctatgcattccat

SEQ ID NO: 4855466 - DNA, 25 bp, Homo sapien
tctggtgtgcaacagtaaacttaca

SEQ ID NO: 4855467 - DNA, 25 bp, Homo sapien
aatgcaatctattctcggcttgtca

SEQ ID NO: 4855468 - DNA, 25 bp, Homo sapien
gagaccagcctcgttggtataaaaa

SEQ ID NO: 4855469 - DNA, 25 bp, Homo sapien
aaagcgtaggtaaaagtgatcaact

SEQ ID NO: 4855470 - DNA, 25 bp, Homo sapien
gatacatattttccggatcttgaga

SEQ ID NO: 4855471 - DNA, 25 bp, Homo sapien
tgttagtgatcggagaaatgcagac

SEQ ID NO: 4855472 - DNA, 25 bp, Homo sapien
accttagagtttggtatttcctgat

SEQ ID NO: 4855473 - DNA, 25 bp, Homo sapien
tcgtctgtcccgtcaggactcagct

SEQ ID NO: 4855474 - DNA, 25 bp, Homo sapien
ctcagcttgggggtagtcaaggctt

SEQ ID NO: 4855475 - DNA, 25 bp, Homo sapien
gcttctccacaggatgatgtgggca

SEQ ID NO: 4855476 - DNA, 25 bp, Homo sapien
ggggcagtccgcagcctccgttctt

SEQ ID NO: 4855477 - DNA, 25 bp, Homo sapien
ttttaatgagcttggatcaggccgg

SEQ ID NO: 4855478 - DNA, 25 bp, Homo sapien
atgagcttggatcaggccggcagac

SEQ ID NO: 4855479 - DNA, 25 bp, Homo sapien
tcatgggatggagcacagcctcctt

SEQ ID NO: 4855480 - DNA, 25 bp, Homo sapien
atggagcacagcctccttccgacat

SEQ ID NO: 4855481 - DNA, 25 bp, Homo sapien
ttttggctgttaacactctcatggc

SEQ ID NO: 4855482 - DNA, 25 bp, Homo sapien
ctggcccattacttttggctgttaa

SEQ ID NO: 4855483 - DNA, 25 bp, Homo sapien
tctcatggcatcttgctcccttgta

SEQ ID NO: 4855484 - DNA, 25 bp, Homo sapien
tgttaacactctcatggcatcttgc

SEQ ID NO: 4855485 - DNA, 25 bp, Homo sapien
ttgcatgattttgtgcggttgtcag

SEQ ID NO: 4855486 - DNA, 25 bp, Homo sapien
tgcatgattttgtgcggttgtcagg

SEQ ID NO: 4855487 - DNA, 25 bp, Homo sapien
tgattttgtgcggttgtcagggtca

SEQ ID NO: 4855488 - DNA, 25 bp, Homo sapien
ttttgtgcggttgtcagggtcaagt

SEQ ID NO: 4855489 - DNA, 25 bp, Homo sapien
agtgacatttttcagatactttgtg

SEQ ID NO: 4855490 - DNA, 25 bp, Homo sapien
tgacatttttcagatactttgtggc

SEQ ID NO: 4855491 - DNA, 25 bp, Homo sapien
tactttgtggcttttcgtatatgca

SEQ ID NO: 4855492 - DNA, 25 bp, Homo sapien
aaagtgacatttttcagatactttg

SEQ ID NO: 4855493 - DNA, 25 bp, Homo sapien
ctgcttggcctaggcacatctgcca

SEQ ID NO: 4855494 - DNA, 25 bp, Homo sapien
tggcctaggcacatctgccagctcc

SEQ ID NO: 4855495 - DNA, 25 bp, Homo sapien
gcttggcctaggcacatctgccagc

SEQ ID NO: 4855496 - DNA, 25 bp, Homo sapien
gcctaggcacatctgccagctccac

SEQ ID NO: 4855497 - DNA, 25 bp, Homo sapien
gcagcaaaaattcagcacttttttg

SEQ ID NO: 4855498 - DNA, 25 bp, Homo sapien
ctgcatttttaagaatgtgcagcaa

SEQ ID NO: 4855499 - DNA, 25 bp, Homo sapien
cagcacttttttgggccaccgacct

SEQ ID NO: 4855500 - DNA, 25 bp, Homo sapien
aattcagcacttttttgggccaccg

SEQ ID NO: 4855501 - DNA, 25 bp, Homo sapien
tcctctgggcaacttccttttctgg

SEQ ID NO: 4855502 - DNA, 25 bp, Homo sapien
agctctgtaggtccaacggtgcatc

SEQ ID NO: 4855503 - DNA, 25 bp, Homo sapien
gtaggtccaacggtgcatcttaggt

SEQ ID NO: 4855504 - DNA, 25 bp, Homo sapien
ctctgtaggtccaacggtgcatctt

SEQ ID NO: 4855505 - DNA, 25 bp, Homo sapien
tccatcgcattaagatgcaaatgac

SEQ ID NO: 4855506 - DNA, 25 bp, Homo sapien
tgacatcaaatgctttcctgacagc

SEQ ID NO: 4855507 - DNA, 25 bp, Homo sapien
tttccatcgcattaagatgcaaatg

SEQ ID NO: 4855508 - DNA, 25 bp, Homo sapien
ttccatcgcattaagatgcaaatga

SEQ ID NO: 4855509 - DNA, 25 bp, Homo sapien
gaccgaagatccgacgctctggctt

SEQ ID NO: 4855510 - DNA, 25 bp, Homo sapien
cagtacttgactccaagcatcacag

SEQ ID NO: 4855511 - DNA, 25 bp, Homo sapien
gctctcacttgcttgtgctcaccag

SEQ ID NO: 4855512 - DNA, 25 bp, Homo sapien
aagatggaacccagtacttgactcc

SEQ ID NO: 4855513 - DNA, 25 bp, Homo sapien
taaccgctcctcataacaagatctg

SEQ ID NO: 4855514 - DNA, 25 bp, Homo sapien
ttaaccgctcctcataacaagatct

SEQ ID NO: 4855515 - DNA, 25 bp, Homo sapien
aaccgctcctcataacaagatctgc

SEQ ID NO: 4855516 - DNA, 25 bp, Homo sapien
tcctgatactgaaggaattgcccag

SEQ ID NO: 4855517 - DNA, 25 bp, Homo sapien
tcaaagcgacgcactgaatcatcat

SEQ ID NO: 4855518 - DNA, 25 bp, Homo sapien
cattctcgaagacactggcagcaca

SEQ ID NO: 4855519 - DNA, 25 bp, Homo sapien
aaagcaccacatgggtcaaagcgac

SEQ ID NO: 4855520 - DNA, 25 bp, Homo sapien
ttctccatcgcccaagcaccgtctt

SEQ ID NO: 4855521 - DNA, 25 bp, Homo sapien
cccctgctgataggcgtctctcact

SEQ ID NO: 4855522 - DNA, 25 bp, Homo sapien
gctgataggcgtctctcactctgca

SEQ ID NO: 4855523 - DNA, 25 bp, Homo sapien
caagcaccgtcttctcaatgctgcc

SEQ ID NO: 4855524 - DNA, 25 bp, Homo sapien
taaagtgcagcgacgtctttccaca

SEQ ID NO: 4855525 - DNA, 25 bp, Homo sapien
caacatgaatctgagctcccactgc

SEQ ID NO: 4855526 - DNA, 25 bp, Homo sapien
cactaccttggcaaaccagaatggt

SEQ ID NO: 4855527 - DNA, 25 bp, Homo sapien
cagaaaagcgttcgagaaactctca

SEQ ID NO: 4855528 - DNA, 25 bp, Homo sapien
tcaaagtccaaagcgagagcagatg

SEQ ID NO: 4855529 - DNA, 25 bp, Homo sapien
tccagcataaagagacgtaagaacg

SEQ ID NO: 4855530 - DNA, 25 bp, Homo sapien
tggtgttctgcgagccctcatggga

SEQ ID NO: 4855531 - DNA, 25 bp, Homo sapien
taagaacgagtactaggaggcaaag

SEQ ID NO: 4855532 - DNA, 25 bp, Homo sapien
tctcctcagtccaatcaggatcgcc

SEQ ID NO: 4855533 - DNA, 25 bp, Homo sapien
gtctcctcagtccaatcaggatcgc

SEQ ID NO: 4855534 - DNA, 25 bp, Homo sapien
cctcagtccaatcaggatcgcccat

SEQ ID NO: 4855535 - DNA, 25 bp, Homo sapien
tcctcagtccaatcaggatcgccca

SEQ ID NO: 4855536 - DNA, 25 bp, Homo sapien
ctatggaggagcaaaaccttcacgg

SEQ ID NO: 4855537 - DNA, 25 bp, Homo sapien
cagagagggcaaagctagggatgcc

SEQ ID NO: 4855538 - DNA, 25 bp, Homo sapien
agcaaaaccttcacggtgcagggca

SEQ ID NO: 4855539 - DNA, 25 bp, Homo sapien
gcaaagctagggatgcccccaggtg

SEQ ID NO: 4855540 - DNA, 25 bp, Homo sapien
tgtgcttttgttccaaggagctcgg

SEQ ID NO: 4855541 - DNA, 25 bp, Homo sapien
tacgaagactcaggatgggatgtgc

SEQ ID NO: 4855542 - DNA, 25 bp, Homo sapien
cattttttccgtaaccatatactgg

SEQ ID NO: 4855543 - DNA, 25 bp, Homo sapien
catatactggatacgaagactcagg

SEQ ID NO: 4855544 - DNA, 25 bp, Homo sapien
cagggacaagtgtagaatggagtcc

SEQ ID NO: 4855545 - DNA, 25 bp, Homo sapien
ctccagggacaagtgtagaatggag

SEQ ID NO: 4855546 - DNA, 25 bp, Homo sapien
agcaccccttgccatatgcccagac

SEQ ID NO: 4855547 - DNA, 25 bp, Homo sapien
acaagtgtagaatggagtccagagg

SEQ ID NO: 4855548 - DNA, 25 bp, Homo sapien
ccagtatgatccaatgagctaaggg

SEQ ID NO: 4855549 - DNA, 25 bp, Homo sapien
ggatcatgcccgctggaccagtatg

SEQ ID NO: 4855550 - DNA, 25 bp, Homo sapien
gatggccgtggatctgtggacacaa

SEQ ID NO: 4855551 - DNA, 25 bp, Homo sapien
tcttaggctccagcaagcttttggc

SEQ ID NO: 4855552 - DNA, 25 bp, Homo sapien
gagctgagggttttggagcactggt

SEQ ID NO: 4855553 - DNA, 25 bp, Homo sapien
agagctgagggttttggagcactgg

SEQ ID NO: 4855554 - DNA, 25 bp, Homo sapien
cacctaaggggctgaagccctccag

SEQ ID NO: 4855555 - DNA, 25 bp, Homo sapien
ctaaggggctgaagccctccaggag

SEQ ID NO: 4855556 - DNA, 25 bp, Homo sapien
ggaaaaatttgccagctgcgagtga

SEQ ID NO: 4855557 - DNA, 25 bp, Homo sapien
catactgggtcacacttgcaatgcc

SEQ ID NO: 4855558 - DNA, 25 bp, Homo sapien
gacctcgaaatctttctgcagccca

SEQ ID NO: 4855559 - DNA, 25 bp, Homo sapien
caggtcttgccggtatcggtggtca

SEQ ID NO: 4855560 - DNA, 25 bp, Homo sapien
ggacagagaaatgtaagggaataat

SEQ ID NO: 4855561 - DNA, 25 bp, Homo sapien
tagctccgacatatctaggaaacag

SEQ ID NO: 4855562 - DNA, 25 bp, Homo sapien
caaatgaagcattgatggattcgca

SEQ ID NO: 4855563 - DNA, 25 bp, Homo sapien
tttcccgttcttctttggatatgga

SEQ ID NO: 4855564 - DNA, 25 bp, Homo sapien
tggtacagggcctgccgcatacctg

SEQ ID NO: 4855565 - DNA, 25 bp, Homo sapien
tcagaggccagtcaattgtagtctc

SEQ ID NO: 4855566 - DNA, 25 bp, Homo sapien
ggcagagcattgttgatctttccca

SEQ ID NO: 4855567 - DNA, 25 bp, Homo sapien
gttttatgttcaggatatagcccta

SEQ ID NO: 4855568 - DNA, 25 bp, Homo sapien
caaccagcccagtttaatcagcgaa

SEQ ID NO: 4855569 - DNA, 25 bp, Homo sapien
acaatagagcttgcaggcggtgtca

SEQ ID NO: 4855570 - DNA, 25 bp, Homo sapien
caggcggtgtcatgctgagtatctg

SEQ ID NO: 4855571 - DNA, 25 bp, Homo sapien
ggtgttcaccacagcggaaccatgg

SEQ ID NO: 4855572 - DNA, 25 bp, Homo sapien
gaaatggatcatggccggcactcca

SEQ ID NO: 4855573 - DNA, 25 bp, Homo sapien
ccatcattcttatgatcccttttaa

SEQ ID NO: 4855574 - DNA, 25 bp, Homo sapien
tccacgcttggacccgtctctgaaa

SEQ ID NO: 4855575 - DNA, 25 bp, Homo sapien
tcatggccggcactccacgcttgga

SEQ ID NO: 4855576 - DNA, 25 bp, Homo sapien
tatcgaggctgtcggtctgttccct

SEQ ID NO: 4855577 - DNA, 25 bp, Homo sapien
gctgtgattgagtgatgactttacc

SEQ ID NO: 4855578 - DNA, 25 bp, Homo sapien
gactttaccagcaaaatatcgaggc

SEQ ID NO: 4855579 - DNA, 25 bp, Homo sapien
gcaaaatatcgaggctgtcggtctg

SEQ ID NO: 4855580 - DNA, 25 bp, Homo sapien
tttgctattgcagggtctgaccacg

SEQ ID NO: 4855581 - DNA, 25 bp, Homo sapien
aagggcacccagagtatgatcagag

SEQ ID NO: 4855582 - DNA, 25 bp, Homo sapien
gtgtctgtcagtggcccaagggcac

SEQ ID NO: 4855583 - DNA, 25 bp, Homo sapien
agacatcgcccttttgcacctggaa

SEQ ID NO: 4855584 - DNA, 25 bp, Homo sapien
tcatcctgtgagtgccatgagctga

SEQ ID NO: 4855585 - DNA, 25 bp, Homo sapien
catcctgtgagtgccatgagctgac

SEQ ID NO: 4855586 - DNA, 25 bp, Homo sapien
caaaattagttatgggatgcctctc

SEQ ID NO: 4855587 - DNA, 25 bp, Homo sapien
caaggcttccatgagagatccaggc

SEQ ID NO: 4855588 - DNA, 25 bp, Homo sapien
tgaaatcctccagtacgtggccctg

SEQ ID NO: 4855589 - DNA, 25 bp, Homo sapien
tattgtgctttgtccccatgacggg

SEQ ID NO: 4855590 - DNA, 25 bp, Homo sapien
aatatgctgcgtgcccccgacagct

SEQ ID NO: 4855591 - DNA, 25 bp, Homo sapien
tcacagcctccaatatgctgcgtgc

SEQ ID NO: 4855592 - DNA, 25 bp, Homo sapien
tgaatcacagcctccaatatgctgc

SEQ ID NO: 4855593 - DNA, 25 bp, Homo sapien
cttgtactccttcctgaatcacagc

SEQ ID NO: 4855594 - DNA, 25 bp, Homo sapien
cagtgtgtcctcgaaaagtctttat

SEQ ID NO: 4855595 - DNA, 25 bp, Homo sapien
gtgtgtcctcgaaaagtctttattc

SEQ ID NO: 4855596 - DNA, 25 bp, Homo sapien
aaagtctttattctgcatgcaacca

SEQ ID NO: 4855597 - DNA, 25 bp, Homo sapien
ctgcatgcaaccatgtctgtgacca

SEQ ID NO: 4855598 - DNA, 25 bp, Homo sapien
acttccagattgcaactgactgctg

SEQ ID NO: 4855599 - DNA, 25 bp, Homo sapien
tggttaagactgcaacttccagatt

SEQ ID NO: 4855600 - DNA, 25 bp, Homo sapien
caacttccagattgcaactgactgc

SEQ ID NO: 4855601 - DNA, 25 bp, Homo sapien
ttccagattgcaactgactgctggt

SEQ ID NO: 4855602 - DNA, 25 bp, Homo sapien
ttacttctctttaattcagctttag

SEQ ID NO: 4855603 - DNA, 25 bp, Homo sapien
acttctctttaattcagctttagag

SEQ ID NO: 4855604 - DNA, 25 bp, Homo sapien
tggttttacttctctttaattcagc

SEQ ID NO: 4855605 - DNA, 25 bp, Homo sapien
tatggttttacttctctttaattca

SEQ ID NO: 4855606 - DNA, 25 bp, Homo sapien
tcatctggacccctggggacttcct

SEQ ID NO: 4855607 - DNA, 25 bp, Homo sapien
tcaggacagcgatgggcaggcccag

SEQ ID NO: 4855608 - DNA, 25 bp, Homo sapien
aggtgcctgttctgatcatctcccc

SEQ ID NO: 4855609 - DNA, 25 bp, Homo sapien
caggagggagacaggttgcaaacac

SEQ ID NO: 4855610 - DNA, 25 bp, Homo sapien
cagtaaggcttgtggataaatggaa

SEQ ID NO: 4855611 - DNA, 25 bp, Homo sapien
tggcaatcataatcagggagaggag

SEQ ID NO: 4855612 - DNA, 25 bp, Homo sapien
cataaggtgggctctcagtaaggct

SEQ ID NO: 4855613 - DNA, 25 bp, Homo sapien
tacaccaccaaccttggaggatggg

SEQ ID NO: 4855614 - DNA, 25 bp, Homo sapien
gactggccaacgacattgcaggcag

SEQ ID NO: 4855615 - DNA, 25 bp, Homo sapien
gaatgtgagcttgagcaaagaccca

SEQ ID NO: 4855616 - DNA, 25 bp, Homo sapien
gattttggacaagagggcaccatga

SEQ ID NO: 4855617 - DNA, 25 bp, Homo sapien
aaaggctgccagtgtgttagtaccc

SEQ ID NO: 4855618 - DNA, 25 bp, Homo sapien
gtcctgtgtaatgctcggtcaaggg

SEQ ID NO: 4855619 - DNA, 25 bp, Homo sapien
gcctgcagatatataatgtcctgtg

SEQ ID NO: 4855620 - DNA, 25 bp, Homo sapien
tcagtgctgcctgcagatatataat

SEQ ID NO: 4855621 - DNA, 25 bp, Homo sapien
tatataatgtcctgtgtaatgctcg

SEQ ID NO: 4855622 - DNA, 25 bp, Homo sapien
gctcctggaggcgatatggcttgtt

SEQ ID NO: 4855623 - DNA, 25 bp, Homo sapien
ctgctcctggaggcgatatggcttg

SEQ ID NO: 4855624 - DNA, 25 bp, Homo sapien
ctggaggcgatatggcttgttttgc

SEQ ID NO: 4855625 - DNA, 25 bp, Homo sapien
aggcgatatggcttgttttgctctc

SEQ ID NO: 4855626 - DNA, 25 bp, Homo sapien
cattatgtatctggaaccgttagtc

SEQ ID NO: 4855627 - DNA, 25 bp, Homo sapien
gaacctgggcagaataactcctgga

SEQ ID NO: 4855628 - DNA, 25 bp, Homo sapien
ccctgtgaagtaggcattatggtct

SEQ ID NO: 4855629 - DNA, 25 bp, Homo sapien
tctccagtgaacaggatcagtgtta

SEQ ID NO: 4855630 - DNA, 25 bp, Homo sapien
aaactcaacatcagtgtcgggcttt

SEQ ID NO: 4855631 - DNA, 25 bp, Homo sapien
actcaacatcagtgtcgggctttgc

SEQ ID NO: 4855632 - DNA, 25 bp, Homo sapien
aactcaacatcagtgtcgggctttg

SEQ ID NO: 4855633 - DNA, 25 bp, Homo sapien
gaaactcaacatcagtgtcgggctt

SEQ ID NO: 4855634 - DNA, 25 bp, Homo sapien
actctgtcgcctgaaatcctcccaa

SEQ ID NO: 4855635 - DNA, 25 bp, Homo sapien
gtcatggtctccttggtctacgagt

SEQ ID NO: 4855636 - DNA, 25 bp, Homo sapien
tgcccaacactctgtcgcctgaaat

SEQ ID NO: 4855637 - DNA, 25 bp, Homo sapien
tggtctccttggtctacgagtgctt

SEQ ID NO: 4855638 - DNA, 25 bp, Homo sapien
tgtggatatgttgatcctgcacaca

SEQ ID NO: 4855639 - DNA, 25 bp, Homo sapien
tgatcctgcacacaatactcaaggc

SEQ ID NO: 4855640 - DNA, 25 bp, Homo sapien
caggaatttcccaggttttgtggat

SEQ ID NO: 4855641 - DNA, 25 bp, Homo sapien
caggttttgtggatatgttgatcct

SEQ ID NO: 4855642 - DNA, 25 bp, Homo sapien
ctgtgagcattcggcggggtgggtg

SEQ ID NO: 4855643 - DNA, 25 bp, Homo sapien
cctctcttccatttcgcaagacaaa

SEQ ID NO: 4855644 - DNA, 25 bp, Homo sapien
tgcactttgcaccacctgacattgg

SEQ ID NO: 4855645 - DNA, 25 bp, Homo sapien
cagctgcctgctctcgtgcactttg

SEQ ID NO: 4855646 - DNA, 25 bp, Homo sapien
catttcgcaagacaaacagaggaac

SEQ ID NO: 4855647 - DNA, 25 bp, Homo sapien
ctaggcacaaaaagaattaacaaga

SEQ ID NO: 4855648 - DNA, 25 bp, Homo sapien
taggcacaaaaagaattaacaagaa

SEQ ID NO: 4855649 - DNA, 25 bp, Homo sapien
cacaaaaagaattaacaagaatttg

SEQ ID NO: 4855650 - DNA, 25 bp, Homo sapien
aggcacaaaaagaattaacaagaat

SEQ ID NO: 4855651 - DNA, 25 bp, Homo sapien
cttggcattggtgccagatgaacca

SEQ ID NO: 4855652 - DNA, 25 bp, Homo sapien
cattggtgccagatgaaccagggtt

SEQ ID NO: 4855653 - DNA, 25 bp, Homo sapien
caaatgattaggcagtttccagagc

SEQ ID NO: 4855654 - DNA, 25 bp, Homo sapien
ccagctgtgtaaaccagacagccaa

SEQ ID NO: 4855655 - DNA, 25 bp, Homo sapien
gatagtcattgccttcctcaaggac

SEQ ID NO: 4855656 - DNA, 25 bp, Homo sapien
aattctctcggtgccccgtagcagc

SEQ ID NO: 4855657 - DNA, 25 bp, Homo sapien
caagtgtcagaggctttagtccctg

SEQ ID NO: 4855658 - DNA, 25 bp, Homo sapien
atagtctgcctagcccaccgagctg

SEQ ID NO: 4855659 - DNA, 25 bp, Homo sapien
atgataatccacttgaaaagctgac

SEQ ID NO: 4855660 - DNA, 25 bp, Homo sapien
atttgggaaatgataatccacttga

SEQ ID NO: 4855661 - DNA, 25 bp, Homo sapien
gaaatgataatccacttgaaaagct

SEQ ID NO: 4855662 - DNA, 25 bp, Homo sapien
gggaaatgataatccacttgaaaag

SEQ ID NO: 4855663 - DNA, 25 bp, Homo sapien
cagtctcaatcgtttctcgtcctgc

SEQ ID NO: 4855664 - DNA, 25 bp, Homo sapien
gaacagtgatttcttcactaaatag

SEQ ID NO: 4855665 - DNA, 25 bp, Homo sapien
attctcagaggatcacttagagggg

SEQ ID NO: 4855666 - DNA, 25 bp, Homo sapien
gatacggtttttggaatgctgtgac

SEQ ID NO: 4855667 - DNA, 25 bp, Homo sapien
tgcaagggtcctttagggcacaaag

SEQ ID NO: 4855668 - DNA, 25 bp, Homo sapien
ggcaatcctataagtgtgaaatcgt

SEQ ID NO: 4855669 - DNA, 25 bp, Homo sapien
ccctagtggctagtgacattgcaca

SEQ ID NO: 4855670 - DNA, 25 bp, Homo sapien
tttggaggaatatctattcagagcc

SEQ ID NO: 4855671 - DNA, 25 bp, Homo sapien
tgcaagggtgctgaagcttgacatc

SEQ ID NO: 4855672 - DNA, 25 bp, Homo sapien
catcccattgttggtggaagtctgg

SEQ ID NO: 4855673 - DNA, 25 bp, Homo sapien
tgtgattccagatgtcaagtctcat

SEQ ID NO: 4855674 - DNA, 25 bp, Homo sapien
gaagatgggaattatcactggcgca

SEQ ID NO: 4855675 - DNA, 25 bp, Homo sapien
tcaggtctgttgtggttgtgattcc

SEQ ID NO: 4855676 - DNA, 25 bp, Homo sapien
tccaggtccagggtccaatcatagc

SEQ ID NO: 4855677 - DNA, 25 bp, Homo sapien
cacacggtttctccaccagtgagga

SEQ ID NO: 4855678 - DNA, 25 bp, Homo sapien
ggaaatccaggaactcgtatagcca

SEQ ID NO: 4855679 - DNA, 25 bp, Homo sapien
gatagggtccagattaaaagccagc

SEQ ID NO: 4855680 - DNA, 25 bp, Homo sapien
ctgatgaattcgtatgacccagaaa

SEQ ID NO: 4855681 - DNA, 25 bp, Homo sapien
tctttccgatgcatggcagcctctc

SEQ ID NO: 4855682 - DNA, 25 bp, Homo sapien
cacaatcaagcgagaatttttattc

SEQ ID NO: 4855683 - DNA, 25 bp, Homo sapien
cttccattgcttgcccaacacttgg

SEQ ID NO: 4855684 - DNA, 25 bp, Homo sapien
aggagggattcagaagttcaggacc

SEQ ID NO: 4855685 - DNA, 25 bp, Homo sapien
actatccaggttcttagagtgaggg

SEQ ID NO: 4855686 - DNA, 25 bp, Homo sapien
gaggaacgttccaggatgagcaaaa

SEQ ID NO: 4855687 - DNA, 25 bp, Homo sapien
acttctcaggaacgaggtgcacccc

SEQ ID NO: 4855688 - DNA, 25 bp, Homo sapien
ggccactatacccagagacaaaggc

SEQ ID NO: 4855689 - DNA, 25 bp, Homo sapien
cagagctattcagaacaggtttcaa

SEQ ID NO: 4855690 - DNA, 25 bp, Homo sapien
acagagctattcagaacaggtttca

SEQ ID NO: 4855691 - DNA, 25 bp, Homo sapien
cacagagctattcagaacaggtttc

SEQ ID NO: 4855692 - DNA, 25 bp, Homo sapien
caggattttccccattgtagtccat

SEQ ID NO: 4855693 - DNA, 25 bp, Homo sapien
tcttgcctccaggattttccccatt

SEQ ID NO: 4855694 - DNA, 25 bp, Homo sapien
ttgcctccaggattttccccattgt

SEQ ID NO: 4855695 - DNA, 25 bp, Homo sapien
gcctccaggattttccccattgtag

SEQ ID NO: 4855696 - DNA, 25 bp, Homo sapien
ctctagggtagaaggaggtataatc

SEQ ID NO: 4855697 - DNA, 25 bp, Homo sapien
gcttcctcgtttgagtgactgtgaa

SEQ ID NO: 4855698 - DNA, 25 bp, Homo sapien
tgactgtgaacgaggaaggactcat

SEQ ID NO: 4855699 - DNA, 25 bp, Homo sapien
gtcaatcttagatgtcgacactgat

SEQ ID NO: 4855700 - DNA, 25 bp, Homo sapien
agaaaatgcactgaagcttgcttcc

SEQ ID NO: 4855701 - DNA, 25 bp, Homo sapien
cctggcaacataaggattgttaccc

SEQ ID NO: 4855702 - DNA, 25 bp, Homo sapien
cataattttggggatagtcctggca

SEQ ID NO: 4855703 - DNA, 25 bp, Homo sapien
ggatagtcctggcaacataaggatt

SEQ ID NO: 4855704 - DNA, 25 bp, Homo sapien
taaggattgttacccctcagattta

SEQ ID NO: 4855705 - DNA, 25 bp, Homo sapien
ctttgggatggtacccagttccagg

SEQ ID NO: 4855706 - DNA, 25 bp, Homo sapien
cagcgctgtggtccctgatgtcttg

SEQ ID NO: 4855707 - DNA, 25 bp, Homo sapien
ctgtggtccctgatgtcttgcctct

SEQ ID NO: 4855708 - DNA, 25 bp, Homo sapien
gcgctgtggtccctgatgtcttgcc

SEQ ID NO: 4855709 - DNA, 25 bp, Homo sapien
ctcccacctgagtgtaaagtggcca

SEQ ID NO: 4855710 - DNA, 25 bp, Homo sapien
aagtggccatcgtcaactggcccta

SEQ ID NO: 4855711 - DNA, 25 bp, Homo sapien
tgtaaagtggccatcgtcaactggc

SEQ ID NO: 4855712 - DNA, 25 bp, Homo sapien
tgagtgtaaagtggccatcgtcaac

SEQ ID NO: 4855713 - DNA, 25 bp, Homo sapien
caaggaaggcatacccttcaatgag

SEQ ID NO: 4855714 - DNA, 25 bp, Homo sapien
ttcaagcctgtgagggtttctgcca

SEQ ID NO: 4855715 - DNA, 25 bp, Homo sapien
caggatatcggaagggtgagaaaca

SEQ ID NO: 4855716 - DNA, 25 bp, Homo sapien
gctcactgctttggtggtagaggca

SEQ ID NO: 4855717 - DNA, 25 bp, Homo sapien
caaaccccttgacaaacacagttct

SEQ ID NO: 4855718 - DNA, 25 bp, Homo sapien
tcaaaccccttgacaaacacagttc

SEQ ID NO: 4855719 - DNA, 25 bp, Homo sapien
cttcaaaccccttgacaaacacagt

SEQ ID NO: 4855720 - DNA, 25 bp, Homo sapien
aaaccccttgacaaacacagttctg

SEQ ID NO: 4855721 - DNA, 25 bp, Homo sapien
ggaagacaggaaagtcagaccagat

SEQ ID NO: 4855722 - DNA, 25 bp, Homo sapien
catgggttattattggaaacagatc

SEQ ID NO: 4855723 - DNA, 25 bp, Homo sapien
gaaagtcagaccagatggcatgggt

SEQ ID NO: 4855724 - DNA, 25 bp, Homo sapien
ttgtaggtgcgttgggtatttgtca

SEQ ID NO: 4855725 - DNA, 25 bp, Homo sapien
cacagatgtgatcttgacggtcacg

SEQ ID NO: 4855726 - DNA, 25 bp, Homo sapien
gaatccttcatcctacaaatcacag

SEQ ID NO: 4855727 - DNA, 25 bp, Homo sapien
gagtcttgagatgcaggtcctcaat

SEQ ID NO: 4855728 - DNA, 25 bp, Homo sapien
tgctggtgagtggaaacagaatcct

SEQ ID NO: 4855729 - DNA, 25 bp, Homo sapien
tacttcaaggccaggcccactttgc

SEQ ID NO: 4855730 - DNA, 25 bp, Homo sapien
cctggagtacttggtgctatttaga

SEQ ID NO: 4855731 - DNA, 25 bp, Homo sapien
acgtggccgtgcctgagtgctttag

SEQ ID NO: 4855732 - DNA, 25 bp, Homo sapien
gctttaggttcagctgagtccccat

SEQ ID NO: 4855733 - DNA, 25 bp, Homo sapien
tgttgaatgcttgtactaggaagga

SEQ ID NO: 4855734 - DNA, 25 bp, Homo sapien
gaatctgcggtaccaacactctgag

SEQ ID NO: 4855735 - DNA, 25 bp, Homo sapien
ttttcctcgggctcccgtgatgggc

SEQ ID NO: 4855736 - DNA, 25 bp, Homo sapien
tctctggccccagttgaatctgcgg

SEQ ID NO: 4855737 - DNA, 25 bp, Homo sapien
ctctggattcgtgggtcgtggggat

SEQ ID NO: 4855738 - DNA, 25 bp, Homo sapien
tgggtcgtggggatacgggcaacaa

SEQ ID NO: 4855739 - DNA, 25 bp, Homo sapien
ggggatacgggcaacaacaaaatgc

SEQ ID NO: 4855740 - DNA, 25 bp, Homo sapien
agctttgcacctaccagatcctcct

SEQ ID NO: 4855741 - DNA, 25 bp, Homo sapien
gagacttgatgtggatccctggtgt

SEQ ID NO: 4855742 - DNA, 25 bp, Homo sapien
gatgtggatccctggtgtcattgct

SEQ ID NO: 4855743 - DNA, 25 bp, Homo sapien
tcctcatagactgagacttgatgtg

SEQ ID NO: 4855744 - DNA, 25 bp, Homo sapien
agttcctcatagactgagacttgat

SEQ ID NO: 4855745 - DNA, 25 bp, Homo sapien
cttccttcccgaagcaggagaattg

SEQ ID NO: 4855746 - DNA, 25 bp, Homo sapien
ggcctccacaactgtgtgatccaat

SEQ ID NO: 4855747 - DNA, 25 bp, Homo sapien
ggatctgctggcctccacaactgtg

SEQ ID NO: 4855748 - DNA, 25 bp, Homo sapien
ccttccttccttcccgaagcaggag

SEQ ID NO: 4855749 - DNA, 25 bp, Homo sapien
gcttgtctggtctggcctctatcag

SEQ ID NO: 4855750 - DNA, 25 bp, Homo sapien
gcactatgggcccagaggctactac

SEQ ID NO: 4855751 - DNA, 25 bp, Homo sapien
tttggtgtcccactatggacttggc

SEQ ID NO: 4855752 - DNA, 25 bp, Homo sapien
tatgttcatagctccttgaggtccc

SEQ ID NO: 4855753 - DNA, 25 bp, Homo sapien
agatccatttgaggtccagtcacat

SEQ ID NO: 4855754 - DNA, 25 bp, Homo sapien
ggctccattccaagggctctgaatc

SEQ ID NO: 4855755 - DNA, 25 bp, Homo sapien
cagtcacatttggagggagctgatg

SEQ ID NO: 4855756 - DNA, 25 bp, Homo sapien
ggtgatcatgtgacctgtgggttgt

SEQ ID NO: 4855757 - DNA, 25 bp, Homo sapien
tttactcaagtctctatgaagcagc

SEQ ID NO: 4855758 - DNA, 25 bp, Homo sapien
aagcagccctgcttcagagctgcac

SEQ ID NO: 4855759 - DNA, 25 bp, Homo sapien
ttactcaagtctctatgaagcagcc

SEQ ID NO: 4855760 - DNA, 25 bp, Homo sapien
ctatttactcaagtctctatgaagc

SEQ ID NO: 4855761 - DNA, 25 bp, Homo sapien
gcttcagctagaatggtctccctgt

SEQ ID NO: 4855762 - DNA, 25 bp, Homo sapien
tgtccttcctgccatagtaagcctg

SEQ ID NO: 4855763 - DNA, 25 bp, Homo sapien
cacacccatgtgagccaggtcttta

SEQ ID NO: 4855764 - DNA, 25 bp, Homo sapien
tccaaggagaggtgccatatctgaa

SEQ ID NO: 4855765 - DNA, 25 bp, Homo sapien
tggttgtggcattctgggttgacca

SEQ ID NO: 4855766 - DNA, 25 bp, Homo sapien
gagatgctcattgagtgtggcttcc

SEQ ID NO: 4855767 - DNA, 25 bp, Homo sapien
ggctgagagatgctcattgagtgtg

SEQ ID NO: 4855768 - DNA, 25 bp, Homo sapien
ctgtggttgtggcattctgggttga

SEQ ID NO: 4855769 - DNA, 25 bp, Homo sapien
caagttcagcctaatttcttatctc

SEQ ID NO: 4855770 - DNA, 25 bp, Homo sapien
cctttaggatgtgaataggtcatgg

SEQ ID NO: 4855771 - DNA, 25 bp, Homo sapien
gagaggctgggtttgctatacaagc

SEQ ID NO: 4855772 - DNA, 25 bp, Homo sapien
tgtttgtgtcctctgaacctcatgt

SEQ ID NO: 4855773 - DNA, 25 bp, Homo sapien
taaaagatgcgttcaaaaccctgag

SEQ ID NO: 4855774 - DNA, 25 bp, Homo sapien
aagtgccttgtatggtgcctatttc

SEQ ID NO: 4855775 - DNA, 25 bp, Homo sapien
gcaattgaaacacaaaactggtctt

SEQ ID NO: 4855776 - DNA, 25 bp, Homo sapien
tacaaactccgtagcttctgacatg

SEQ ID NO: 4855777 - DNA, 25 bp, Homo sapien
tgcgtagatcctttcagagcttgct

SEQ ID NO: 4855778 - DNA, 25 bp, Homo sapien
taccactgaggcaagatcttcttcc

SEQ ID NO: 4855779 - DNA, 25 bp, Homo sapien
gaaactgtagatccttagaaatgcg

SEQ ID NO: 4855780 - DNA, 25 bp, Homo sapien
gctctgggaggcgttagaaactgta

SEQ ID NO: 4855781 - DNA, 25 bp, Homo sapien
agctgagacagctgctgctgctgct

SEQ ID NO: 4855782 - DNA, 25 bp, Homo sapien
ctgtgtcccaatcagctgagacagc

SEQ ID NO: 4855783 - DNA, 25 bp, Homo sapien
tgtgtcccaatcagctgagacagct

SEQ ID NO: 4855784 - DNA, 25 bp, Homo sapien
taatggctctgactgtacccatgag

SEQ ID NO: 4855785 - DNA, 25 bp, Homo sapien
tatggagcatagaaaggctgtggcc

SEQ ID NO: 4855786 - DNA, 25 bp, Homo sapien
ctcaatagaggattggacttttggt

SEQ ID NO: 4855787 - DNA, 25 bp, Homo sapien
gacttttggtactttccgactctca

SEQ ID NO: 4855788 - DNA, 25 bp, Homo sapien
actgataacacaggactatcaccac

SEQ ID NO: 4855789 - DNA, 25 bp, Homo sapien
tccactactaactgataacacagga

SEQ ID NO: 4855790 - DNA, 25 bp, Homo sapien
ctgagctgtatcatagatacagctt

SEQ ID NO: 4855791 - DNA, 25 bp, Homo sapien
gatacagcttccactactaactgat

SEQ ID NO: 4855792 - DNA, 25 bp, Homo sapien
gagtgaccatagcataagaatcctg

SEQ ID NO: 4855793 - DNA, 25 bp, Homo sapien
caatatatgttgatgctctctaccg

SEQ ID NO: 4855794 - DNA, 25 bp, Homo sapien
gaatcctggtcctagactcattggg

SEQ ID NO: 4855795 - DNA, 25 bp, Homo sapien
cattgggtaccatcatagacattct

SEQ ID NO: 4855796 - DNA, 25 bp, Homo sapien
tttataagtgggatagtctcaaaac

SEQ ID NO: 4855797 - DNA, 25 bp, Homo sapien
tgctatcatggctctctgcggtctc

SEQ ID NO: 4855798 - DNA, 25 bp, Homo sapien
ctatcatggctctctgcggtctcaa

SEQ ID NO: 4855799 - DNA, 25 bp, Homo sapien
ttaactgggcatggttggattgata

SEQ ID NO: 4855800 - DNA, 25 bp, Homo sapien
gagaagccaattacccacagtggag

SEQ ID NO: 4855801 - DNA, 25 bp, Homo sapien
cagggacacccaagctaagatagta

SEQ ID NO: 4855802 - DNA, 25 bp, Homo sapien
cagtggaggccaacttgccaatgcc

SEQ ID NO: 4855803 - DNA, 25 bp, Homo sapien
ccaccagggctcacatatgcataag

SEQ ID NO: 4855804 - DNA, 25 bp, Homo sapien
ctcagatctcccagtgtgtctggga

SEQ ID NO: 4855805 - DNA, 25 bp, Homo sapien
ggaatgtttgccacctccctgtagt

SEQ ID NO: 4855806 - DNA, 25 bp, Homo sapien
tagtgaggctgtatcttctctgctc

SEQ ID NO: 4855807 - DNA, 25 bp, Homo sapien
tcttagggacccaattgcagttaac

SEQ ID NO: 4855808 - DNA, 25 bp, Homo sapien
gaagtgtgcgatgtctcagggccac

SEQ ID NO: 4855809 - DNA, 25 bp, Homo sapien
ccattcctgagtgggtgttgcacag

SEQ ID NO: 4855810 - DNA, 25 bp, Homo sapien
tcaggaaacacttgattctccccat

SEQ ID NO: 4855811 - DNA, 25 bp, Homo sapien
tcagggccacgccactcagttgtct

SEQ ID NO: 4855812 - DNA, 25 bp, Homo sapien
gatagggtgcaaggtgcaaagtgga

SEQ ID NO: 4855813 - DNA, 25 bp, Homo sapien
aggagctccttggtgtcgcctgcca

SEQ ID NO: 4855814 - DNA, 25 bp, Homo sapien
tcagtatccagccagtggttcgtgc

SEQ ID NO: 4855815 - DNA, 25 bp, Homo sapien
gagctgttgcagactttctcattct

SEQ ID NO: 4855816 - DNA, 25 bp, Homo sapien
ctgggaccatttccctcgagtgtct

SEQ ID NO: 4855817 - DNA, 25 bp, Homo sapien
gagtgtctctggcacttgcaatctc

SEQ ID NO: 4855818 - DNA, 25 bp, Homo sapien
catttccctcgagtgtctctggcac

SEQ ID NO: 4855819 - DNA, 25 bp, Homo sapien
tgcaatctctgagtgggtaggccca

SEQ ID NO: 4855820 - DNA, 25 bp, Homo sapien
tggagccacttcctgatctggctgc

SEQ ID NO: 4855821 - DNA, 25 bp, Homo sapien
ccacttcctgatctggctgcctttg

SEQ ID NO: 4855822 - DNA, 25 bp, Homo sapien
aagttggagccacttcctgatctgg

SEQ ID NO: 4855823 - DNA, 25 bp, Homo sapien
gaaaagcaagttggagccacttcct

SEQ ID NO: 4855824 - DNA, 25 bp, Homo sapien
tacaaattcttcatgcacccgttcc

SEQ ID NO: 4855825 - DNA, 25 bp, Homo sapien
tttgtgcttcccgtgtggacagcca

SEQ ID NO: 4855826 - DNA, 25 bp, Homo sapien
tgcacccgttccacttgatgaagcc

SEQ ID NO: 4855827 - DNA, 25 bp, Homo sapien
gtgcttcccgtgtggacagccagca

SEQ ID NO: 4855828 - DNA, 25 bp, Homo sapien
ggaatgcagatgtgcaaagctcaag

SEQ ID NO: 4855829 - DNA, 25 bp, Homo sapien
gctcaagcagttcagagcagaggga

SEQ ID NO: 4855830 - DNA, 25 bp, Homo sapien
aaagagaagactcggccttggctct

SEQ ID NO: 4855831 - DNA, 25 bp, Homo sapien
gtgggtctctcggaaatctccgtgg

SEQ ID NO: 4855832 - DNA, 25 bp, Homo sapien
tctctatgctccatggatgggggcc

SEQ ID NO: 4855833 - DNA, 25 bp, Homo sapien
agtgaggatgctcaccacctgtttc

SEQ ID NO: 4855834 - DNA, 25 bp, Homo sapien
gaaagtgacgttgcctctgctgtga

SEQ ID NO: 4855835 - DNA, 25 bp, Homo sapien
tgctgtgagcgcctgctgcatctgc

SEQ ID NO: 4855836 - DNA, 25 bp, Homo sapien
acttggcgtggagggaatacaactg

SEQ ID NO: 4855837 - DNA, 25 bp, Homo sapien
gctgggctgtctgagtcttggttat

SEQ ID NO: 4855838 - DNA, 25 bp, Homo sapien
gagtcttggttattaagggacattc

SEQ ID NO: 4855839 - DNA, 25 bp, Homo sapien
ctgaacttggcgtggagggaataca

SEQ ID NO: 4855840 - DNA, 25 bp, Homo sapien
atttccttttcatcacctatggatt

SEQ ID NO: 4855841 - DNA, 25 bp, Homo sapien
ttccttttcatcacctatggattct

SEQ ID NO: 4855842 - DNA, 25 bp, Homo sapien
tttgcaatctgatgacggcagtaag

SEQ ID NO: 4855843 - DNA, 25 bp, Homo sapien
tgcaatctgatgacggcagtaagtc

SEQ ID NO: 4855844 - DNA, 25 bp, Homo sapien
gcagtgcacctagccgctcgtcgaa

SEQ ID NO: 4855845 - DNA, 25 bp, Homo sapien
tgccgccgcagtgcacctagccgct

SEQ ID NO: 4855846 - DNA, 25 bp, Homo sapien
tgcacctagccgctcgtcgaagcga

SEQ ID NO: 4855847 - DNA, 25 bp, Homo sapien
gaaagtgctgccgccgcagtgcacc

SEQ ID NO: 4855848 - DNA, 25 bp, Homo sapien
cattttggacccgactaaggcgctt

SEQ ID NO: 4855849 - DNA, 25 bp, Homo sapien
cccacgcagagagccgaagggctgc

SEQ ID NO: 4855850 - DNA, 25 bp, Homo sapien
tccgcgtctgccttcggcgaggctg

SEQ ID NO: 4855851 - DNA, 25 bp, Homo sapien
caggaccaagtccggtccgcgtctg

SEQ ID NO: 4855852 - DNA, 25 bp, Homo sapien
tctgcaaggcctccaagttggtttc

SEQ ID NO: 4855853 - DNA, 25 bp, Homo sapien
cctccaagttggtttccgcagagct

SEQ ID NO: 4855854 - DNA, 25 bp, Homo sapien
ggcctccaagttggtttccgcagag

SEQ ID NO: 4855855 - DNA, 25 bp, Homo sapien
ccaagttggtttccgcagagctggt

SEQ ID NO: 4855856 - DNA, 25 bp, Homo sapien
aagtcgtcatcctttagttctccca

SEQ ID NO: 4855857 - DNA, 25 bp, Homo sapien
gctcactgatcttctcaaagtcgtc

SEQ ID NO: 4855858 - DNA, 25 bp, Homo sapien
ttggacaccacaccgccattgccag

SEQ ID NO: 4855859 - DNA, 25 bp, Homo sapien
ctttggacaccacaccgccattgcc

SEQ ID NO: 4855860 - DNA, 25 bp, Homo sapien
gaccaggccagaaggcttgtgggag

SEQ ID NO: 4855861 - DNA, 25 bp, Homo sapien
cagctcccttatgatctggttccgg

SEQ ID NO: 4855862 - DNA, 25 bp, Homo sapien
gcagctcccttatgatctggttccg

SEQ ID NO: 4855863 - DNA, 25 bp, Homo sapien
gcctctcgctgtagaatgcaccaca

SEQ ID NO: 4855864 - DNA, 25 bp, Homo sapien
ctcgctgtagaatgcaccacagaag

SEQ ID NO: 4855865 - DNA, 25 bp, Homo sapien
tctcgcctctcgctgtagaatgcac

SEQ ID NO: 4855866 - DNA, 25 bp, Homo sapien
ctgatctcgcctctcgctgtagaat

SEQ ID NO: 4855867 - DNA, 25 bp, Homo sapien
tcaggaattcttcccgctttcttca

SEQ ID NO: 4855868 - DNA, 25 bp, Homo sapien
ccagggaatctccatccatgtgcta

SEQ ID NO: 4855869 - DNA, 25 bp, Homo sapien
gaattcttcccgctttcttcaggac

SEQ ID NO: 4855870 - DNA, 25 bp, Homo sapien
tttcttcaggacttgatccagggaa

SEQ ID NO: 4855871 - DNA, 25 bp, Homo sapien
acgggagctgactatgatgtgggag

SEQ ID NO: 4855872 - DNA, 25 bp, Homo sapien
ccacgggagctgactatgatgtggg

SEQ ID NO: 4855873 - DNA, 25 bp, Homo sapien
ggagctgactatgatgtgggagggc

SEQ ID NO: 4855874 - DNA, 25 bp, Homo sapien
gctgactatgatgtgggagggctgg

SEQ ID NO: 4855875 - DNA, 25 bp, Homo sapien
tctggggacatgtaggaccttgggc

SEQ ID NO: 4855876 - DNA, 25 bp, Homo sapien
acatgtaggaccttgggcccatgaa

SEQ ID NO: 4855877 - DNA, 25 bp, Homo sapien
aatctttctggggacatgtaggacc

SEQ ID NO: 4855878 - DNA, 25 bp, Homo sapien
gggacatgtaggaccttgggcccat

SEQ ID NO: 4855879 - DNA, 25 bp, Homo sapien
gagaagggatgggatacctcccaac

SEQ ID NO: 4855880 - DNA, 25 bp, Homo sapien
tctctaccagagagagtcccatgct

SEQ ID NO: 4855881 - DNA, 25 bp, Homo sapien
tctgactgcacagagtaatgagtcc

SEQ ID NO: 4855882 - DNA, 25 bp, Homo sapien
ggatgggatacctcccaactgccat

SEQ ID NO: 4855883 - DNA, 25 bp, Homo sapien
tccatatgagctaagaggcctccct

SEQ ID NO: 4855884 - DNA, 25 bp, Homo sapien
catatgagctaagaggcctccctgg

SEQ ID NO: 4855885 - DNA, 25 bp, Homo sapien
ccatatgagctaagaggcctccctg

SEQ ID NO: 4855886 - DNA, 25 bp, Homo sapien
catgagttgcttcaaatctgctctc

SEQ ID NO: 4855887 - DNA, 25 bp, Homo sapien
gcatgaaccatgagttgcttcaaat

SEQ ID NO: 4855888 - DNA, 25 bp, Homo sapien
ataaaagcatgaaccatgagttgct

SEQ ID NO: 4855889 - DNA, 25 bp, Homo sapien
cttgataaaagcatgaaccatgagt

SEQ ID NO: 4855890 - DNA, 25 bp, Homo sapien
ctggttaagcccgatggtggagcag

SEQ ID NO: 4855891 - DNA, 25 bp, Homo sapien
gtggagcagagccaacccgcaaaat

SEQ ID NO: 4855892 - DNA, 25 bp, Homo sapien
ttagacgccagcagcatgggttggt

SEQ ID NO: 4855893 - DNA, 25 bp, Homo sapien
caaaatccacttcctcagcatcaga

SEQ ID NO: 4855894 - DNA, 25 bp, Homo sapien
ggcccaaaagtgacatggcaaacca

SEQ ID NO: 4855895 - DNA, 25 bp, Homo sapien
gaaggaggcccaaaagtgacatggc

SEQ ID NO: 4855896 - DNA, 25 bp, Homo sapien
agtgacatggcaaaccactgggcag

SEQ ID NO: 4855897 - DNA, 25 bp, Homo sapien
gcaggggacttgctctttgctgctt

SEQ ID NO: 4855898 - DNA, 25 bp, Homo sapien
gtgttggaatggcagtgtcgtcccc

SEQ ID NO: 4855899 - DNA, 25 bp, Homo sapien
tggaatggcagtgtcgtcccccaca

SEQ ID NO: 4855900 - DNA, 25 bp, Homo sapien
ctggtgttggaatggcagtgtcgtc

SEQ ID NO: 4855901 - DNA, 25 bp, Homo sapien
gaatggcagtgtcgtcccccacatc

SEQ ID NO: 4855902 - DNA, 25 bp, Homo sapien
ccagaatcattggttgtcactttcc

SEQ ID NO: 4855903 - DNA, 25 bp, Homo sapien
aatttcgaattgagtgtttcccaga

SEQ ID NO: 4855904 - DNA, 25 bp, Homo sapien
agaataccccaaatttcgaattgag

SEQ ID NO: 4855905 - DNA, 25 bp, Homo sapien
tagaaagcaaccagtcatggcccaa

SEQ ID NO: 4855906 - DNA, 25 bp, Homo sapien
taaaacctgtgatgccctaagaagc

SEQ ID NO: 4855907 - DNA, 25 bp, Homo sapien
tgtgaatgactctgtgctggcaaaa

SEQ ID NO: 4855908 - DNA, 25 bp, Homo sapien
tctgatcacttttgagctctgaagc

SEQ ID NO: 4855909 - DNA, 25 bp, Homo sapien
tcgttcataagaggtaaaggtcaaa

SEQ ID NO: 4855910 - DNA, 25 bp, Homo sapien
aataaattgtggtgacgttagccta

SEQ ID NO: 4855911 - DNA, 25 bp, Homo sapien
ggtaagctttttgcattgatctcac

SEQ ID NO: 4855912 - DNA, 25 bp, Homo sapien
tggcagtgcttttacaggacaacaa

SEQ ID NO: 4855913 - DNA, 25 bp, Homo sapien
cttgggaactggtggaatactagga

SEQ ID NO: 4855914 - DNA, 25 bp, Homo sapien
tattattataagtggtcctcggcgg

SEQ ID NO: 4855915 - DNA, 25 bp, Homo sapien
taagacggacttagatattgcatac

SEQ ID NO: 4855916 - DNA, 25 bp, Homo sapien
gctgtgaaggctatgagtcctctga

SEQ ID NO: 4855917 - DNA, 25 bp, Homo sapien
gaacttggcctgcagaaactgaagg

SEQ ID NO: 4855918 - DNA, 25 bp, Homo sapien
ctgcgcatctgctttgttgttatgg

SEQ ID NO: 4855919 - DNA, 25 bp, Homo sapien
tgcgcatctgctttgttgttatggc

SEQ ID NO: 4855920 - DNA, 25 bp, Homo sapien
gcgcatctgctttgttgttatggct

SEQ ID NO: 4855921 - DNA, 25 bp, Homo sapien
gggtgcccggattccccatgtctga

SEQ ID NO: 4855922 - DNA, 25 bp, Homo sapien
tctgacctctttgctgttcgtgctc

SEQ ID NO: 4855923 - DNA, 25 bp, Homo sapien
cctgcgtttccgtgcgccgtcttcc

SEQ ID NO: 4855924 - DNA, 25 bp, Homo sapien
caggcgcttcgttcgcccttttccg

SEQ ID NO: 4855925 - DNA, 25 bp, Homo sapien
gcttgctcctcggcttgcatttgtt

SEQ ID NO: 4855926 - DNA, 25 bp, Homo sapien
ttgtttctgctgaccgcgggccctg

SEQ ID NO: 4855927 - DNA, 25 bp, Homo sapien
tgcttgctcctcggcttgcatttgt

SEQ ID NO: 4855928 - DNA, 25 bp, Homo sapien
tgtttctgctgaccgcgggccctgc

SEQ ID NO: 4855929 - DNA, 25 bp, Homo sapien
gcacggatccgttgcggctgcagct

SEQ ID NO: 4855930 - DNA, 25 bp, Homo sapien
tagctgcgcagcgtcgcgcgcgcta

SEQ ID NO: 4855931 - DNA, 25 bp, Homo sapien
tgacgtagggttggcgcacggatcc

SEQ ID NO: 4855932 - DNA, 25 bp, Homo sapien
gcgccatcttcatcgagcgccatgg

SEQ ID NO: 4855933 - DNA, 25 bp, Homo sapien
gcgtcgtgacgttttcagcctctca

SEQ ID NO: 4855934 - DNA, 25 bp, Homo sapien
tcagacgagacacaacaaagctgcg

SEQ ID NO: 4855935 - DNA, 25 bp, Homo sapien
aaactgcatcgcctacgcacagaag

SEQ ID NO: 4855936 - DNA, 25 bp, Homo sapien
catttcttagatttcgcgtcgtgac

SEQ ID NO: 4855937 - DNA, 25 bp, Homo sapien
cagctcaaatggtaatttctcagag

SEQ ID NO: 4855938 - DNA, 25 bp, Homo sapien
tgttatggcactacctgtcatattg

SEQ ID NO: 4855939 - DNA, 25 bp, Homo sapien
ctacctgtcatattgctctgttttc

SEQ ID NO: 4855940 - DNA, 25 bp, Homo sapien
atcctacttgttatggcactacctg

SEQ ID NO: 4855941 - DNA, 25 bp, Homo sapien
catttgtctcacagtgagcaaagga

SEQ ID NO: 4855942 - DNA, 25 bp, Homo sapien
caggtatagtcacttatgctttagt

SEQ ID NO: 4855943 - DNA, 25 bp, Homo sapien
atgctttagtctgggttagtgaaaa

SEQ ID NO: 4855944 - DNA, 25 bp, Homo sapien
catggtagcttcctgtcatggcagc

SEQ ID NO: 4855945 - DNA, 25 bp, Homo sapien
cggccagacaacacccggaagtgcg

SEQ ID NO: 4855946 - DNA, 25 bp, Homo sapien
ggccagacaacacccggaagtgcgc

SEQ ID NO: 4855947 - DNA, 25 bp, Homo sapien
gccagacaacacccggaagtgcgcg

SEQ ID NO: 4855948 - DNA, 25 bp, Homo sapien
cggcagccgggagacccaagacgcg

SEQ ID NO: 4855949 - DNA, 25 bp, Homo sapien
gctcctggctccacgacccgaggcg

SEQ ID NO: 4855950 - DNA, 25 bp, Homo sapien
cctggctccacgacccgaggcggcg

SEQ ID NO: 4855951 - DNA, 25 bp, Homo sapien
cagcggcagccgggagacccaagac

SEQ ID NO: 4855952 - DNA, 25 bp, Homo sapien
gcgcgcgcgagcccggaggggaagt

SEQ ID NO: 4855953 - DNA, 25 bp, Homo sapien
tgcggggcgaagccggggtcgcaac

SEQ ID NO: 4855954 - DNA, 25 bp, Homo sapien
gcaaccgtccgttgcccgagggcgc

SEQ ID NO: 4855955 - DNA, 25 bp, Homo sapien
tcgcaaccgtccgttgcccgagggc

SEQ ID NO: 4855956 - DNA, 25 bp, Homo sapien
cgcaaccgtccgttgcccgagggcg

SEQ ID NO: 4855957 - DNA, 25 bp, Homo sapien
ccaaccacttcatattttgtccggg

SEQ ID NO: 4855958 - DNA, 25 bp, Homo sapien
tgcaaaacgtgtgtggccgtccaag

SEQ ID NO: 4855959 - DNA, 25 bp, Homo sapien
gagaggctgccgaaatcggcagaaa

SEQ ID NO: 4855960 - DNA, 25 bp, Homo sapien
aagtcgcgacgggactcctcactga

SEQ ID NO: 4855961 - DNA, 25 bp, Homo sapien
tgcagcgcccgcagaccgcacttgt

SEQ ID NO: 4855962 - DNA, 25 bp, Homo sapien
agcctgtaaagcctcgggcgcgggc

SEQ ID NO: 4855963 - DNA, 25 bp, Homo sapien
gtttcgggcagacccgtgcagcgcc

SEQ ID NO: 4855964 - DNA, 25 bp, Homo sapien
gcacttgtgcctttcggtgggaaat

SEQ ID NO: 4855965 - DNA, 25 bp, Homo sapien
aggatcaactctagggtccagacac

SEQ ID NO: 4855966 - DNA, 25 bp, Homo sapien
gaagaacagggaaacgggcaacatc

SEQ ID NO: 4855967 - DNA, 25 bp, Homo sapien
gcagtatttccctaggtctggagaa

SEQ ID NO: 4855968 - DNA, 25 bp, Homo sapien
gagattacaaagtatcccagttgct

SEQ ID NO: 4855969 - DNA, 25 bp, Homo sapien
tcaaaagtgcagttcacctgaggca

SEQ ID NO: 4855970 - DNA, 25 bp, Homo sapien
catcttccagtcataccgaataagg

SEQ ID NO: 4855971 - DNA, 25 bp, Homo sapien
taagtctgggttctactcccaaagc

SEQ ID NO: 4855972 - DNA, 25 bp, Homo sapien
tggagcagcccaattatctagcaaa

SEQ ID NO: 4855973 - DNA, 25 bp, Homo sapien
ccgaataaggtagccaattagaggt

SEQ ID NO: 4855974 - DNA, 25 bp, Homo sapien
catttcacgaaaggagggagcaagt

SEQ ID NO: 4855975 - DNA, 25 bp, Homo sapien
tgagactctggagggtccaaggccc

SEQ ID NO: 4855976 - DNA, 25 bp, Homo sapien
tcagctgcgatttcctactggtttg

SEQ ID NO: 4855977 - DNA, 25 bp, Homo sapien
tgttgtgatgatcgtgcctggctct

SEQ ID NO: 4855978 - DNA, 25 bp, Homo sapien
aagcttttgctctcacgttctagtg

SEQ ID NO: 4855979 - DNA, 25 bp, Homo sapien
tccaaacctcctgattagaccaatt

SEQ ID NO: 4855980 - DNA, 25 bp, Homo sapien
caaacgtcaggtagagtaagggatg

SEQ ID NO: 4855981 - DNA, 25 bp, Homo sapien
gcacctaacgtgtgtcagatactgt

SEQ ID NO: 4855982 - DNA, 25 bp, Homo sapien
ggcaaccccgaacacatcacttagt

SEQ ID NO: 4855983 - DNA, 25 bp, Homo sapien
caaattggttctcatgaccgggccc

SEQ ID NO: 4855984 - DNA, 25 bp, Homo sapien
accccatgacatagtggcttggcag

SEQ ID NO: 4855985 - DNA, 25 bp, Homo sapien
tactttacagcaaacgaggcacttc

SEQ ID NO: 4855986 - DNA, 25 bp, Homo sapien
ttctaaagagtcaaagtccacaggc

SEQ ID NO: 4855987 - DNA, 25 bp, Homo sapien
tttaaagctctaacctactgctagt

SEQ ID NO: 4855988 - DNA, 25 bp, Homo sapien
cagacgctggttccctttctaaaga

SEQ ID NO: 4855989 - DNA, 25 bp, Homo sapien
catccagccagtgacaccgattttt

SEQ ID NO: 4855990 - DNA, 25 bp, Homo sapien
tccaagcatcaaaaacatcagtccg

SEQ ID NO: 4855991 - DNA, 25 bp, Homo sapien
tcaaaaacatcagtccgattgctcc

SEQ ID NO: 4855992 - DNA, 25 bp, Homo sapien
gggcacatccaagcatcaaaaacat

SEQ ID NO: 4855993 - DNA, 25 bp, Homo sapien
tcagtccgattgctcctccaaagga

SEQ ID NO: 4855994 - DNA, 25 bp, Homo sapien
cagcagtagtgaaagagcaggtaac

SEQ ID NO: 4855995 - DNA, 25 bp, Homo sapien
agggctgaggtactgtgtagctatc

SEQ ID NO: 4855996 - DNA, 25 bp, Homo sapien
tttgcatcttggtgtcctaaaatct

SEQ ID NO: 4855997 - DNA, 25 bp, Homo sapien
gctatcttgccactgcagactcagc

SEQ ID NO: 4855998 - DNA, 25 bp, Homo sapien
aataagttaatgtaatttttgctat

SEQ ID NO: 4855999 - DNA, 25 bp, Homo sapien
taatgtaatttttgctatgtcattt

SEQ ID NO: 4856000 - DNA, 25 bp, Homo sapien
atgtaatttttgctatgtcattttc

SEQ ID NO: 4856001 - DNA, 25 bp, Homo sapien
taagttaatgtaatttttgctatgt

SEQ ID NO: 4856002 - DNA, 25 bp, Homo sapien
aaatagaacaaagaggggccagtat

SEQ ID NO: 4856003 - DNA, 25 bp, Homo sapien
cagtatggaataggtgaaaggatgt

SEQ ID NO: 4856004 - DNA, 25 bp, Homo sapien
tcatccactaatcttcttgctatgc

SEQ ID NO: 4856005 - DNA, 25 bp, Homo sapien
taatcttcttgctatgcagtatgga

SEQ ID NO: 4856006 - DNA, 25 bp, Homo sapien
gtccaaaagctgacacgacaatgcc

SEQ ID NO: 4856007 - DNA, 25 bp, Homo sapien
cgacaatgcccgttgtaagaaagat

SEQ ID NO: 4856008 - DNA, 25 bp, Homo sapien
gcaagttccttacaagcgttactca

SEQ ID NO: 4856009 - DNA, 25 bp, Homo sapien
cgttgtaagaaagatggcaagttcc

SEQ ID NO: 4856010 - DNA, 25 bp, Homo sapien
aaaacaattgccttctccatatggc

SEQ ID NO: 4856011 - DNA, 25 bp, Homo sapien
tcacagatggaaacacacccatgta

SEQ ID NO: 4856012 - DNA, 25 bp, Homo sapien
gaagaactgagtacccgtagccagc

SEQ ID NO: 4856013 - DNA, 25 bp, Homo sapien
gcagagcacatgcaccttctcaggt

SEQ ID NO: 4856014 - DNA, 25 bp, Homo sapien
taagatacactcagtcaacaggcat

SEQ ID NO: 4856015 - DNA, 25 bp, Homo sapien
aaggctctagttgtatcccaattat

SEQ ID NO: 4856016 - DNA, 25 bp, Homo sapien
ctatggaaataagatacactcagtc

SEQ ID NO: 4856017 - DNA, 25 bp, Homo sapien
tacactcagtcaacaggcatgaaaa

SEQ ID NO: 4856018 - DNA, 25 bp, Homo sapien
cctagtatagttgcaaagatgactg

SEQ ID NO: 4856019 - DNA, 25 bp, Homo sapien
actgctgccagctgaagtcgtcatt

SEQ ID NO: 4856020 - DNA, 25 bp, Homo sapien
tgagaacaagtgcacaagctcccca

SEQ ID NO: 4856021 - DNA, 25 bp, Homo sapien
tcgtcattgcttccaaagaccaaga

SEQ ID NO: 4856022 - DNA, 25 bp, Homo sapien
tgcgtgaatggccaacaaatgacag

SEQ ID NO: 4856023 - DNA, 25 bp, Homo sapien
tgagaagggagcacctaaaataccc

SEQ ID NO: 4856024 - DNA, 25 bp, Homo sapien
agaggcttgctataccattcagcat

SEQ ID NO: 4856025 - DNA, 25 bp, Homo sapien
tctcctgtgtgcgtgaatggccaac

SEQ ID NO: 4856026 - DNA, 25 bp, Homo sapien
taagttaggcaataaaacctgtggc

SEQ ID NO: 4856027 - DNA, 25 bp, Homo sapien
tacttgaccagtaatagagccggcg

SEQ ID NO: 4856028 - DNA, 25 bp, Homo sapien
tacagtctataacgtatgccaaccg

SEQ ID NO: 4856029 - DNA, 25 bp, Homo sapien
ggcactctgaatgtacggcatagca

SEQ ID NO: 4856030 - DNA, 25 bp, Homo sapien
aagtaggaccttgcctttagatcag

SEQ ID NO: 4856031 - DNA, 25 bp, Homo sapien
agattaccaatccttttactacagc

SEQ ID NO: 4856032 - DNA, 25 bp, Homo sapien
gctcaaaattacagggctgcattgt

SEQ ID NO: 4856033 - DNA, 25 bp, Homo sapien
tgcacttcagaatgaaagtgtgcca

SEQ ID NO: 4856034 - DNA, 25 bp, Homo sapien
tattctaagaaagcacatgtgtaca

SEQ ID NO: 4856035 - DNA, 25 bp, Homo sapien
gcatcctgggatctaaaacacacat

SEQ ID NO: 4856036 - DNA, 25 bp, Homo sapien
gggtgctagaaacaaatactcagtt

SEQ ID NO: 4856037 - DNA, 25 bp, Homo sapien
tacaggtcggcagccacttacaatg

SEQ ID NO: 4856038 - DNA, 25 bp, Homo sapien
gatctagaagtaaccctcaggttac

SEQ ID NO: 4856039 - DNA, 25 bp, Homo sapien
cttctggaatatcctctcattaatg

SEQ ID NO: 4856040 - DNA, 25 bp, Homo sapien
ctcaggttacccctgctttttgtct

SEQ ID NO: 4856041 - DNA, 25 bp, Homo sapien
taatgttctctgacctcacttccag

SEQ ID NO: 4856042 - DNA, 25 bp, Homo sapien
cacacccagttgatcattgcctaca

SEQ ID NO: 4856043 - DNA, 25 bp, Homo sapien
gccgatgaggctgttctatagaacc

SEQ ID NO: 4856044 - DNA, 25 bp, Homo sapien
tgcctacatcatgctggctgtggag

SEQ ID NO: 4856045 - DNA, 25 bp, Homo sapien
gtttatcagatcctggccgatgagg

SEQ ID NO: 4856046 - DNA, 25 bp, Homo sapien
gggcttttcaagctcacctactact

SEQ ID NO: 4856047 - DNA, 25 bp, Homo sapien
tactactcccactggatcctggacg

SEQ ID NO: 4856048 - DNA, 25 bp, Homo sapien
gagcgggactgactgattgccagca

SEQ ID NO: 4856049 - DNA, 25 bp, Homo sapien
tcgagtgcatctatgtcgtgtggac

SEQ ID NO: 4856050 - DNA, 25 bp, Homo sapien
ggcgtaggaagtaccaaatgggatg

SEQ ID NO: 4856051 - DNA, 25 bp, Homo sapien
aggttggctgctctaaggaaaaggc

SEQ ID NO: 4856052 - DNA, 25 bp, Homo sapien
gctgctctaaggaaaaggcaagatg

SEQ ID NO: 4856053 - DNA, 25 bp, Homo sapien
cttcaggttggctgctctaaggaaa

SEQ ID NO: 4856054 - DNA, 25 bp, Homo sapien
cagtttatcggtctgggtagtacca

SEQ ID NO: 4856055 - DNA, 25 bp, Homo sapien
tcagcacgggttgagtggacactct

SEQ ID NO: 4856056 - DNA, 25 bp, Homo sapien
gcaggtaacaatcttctcatggcgg

SEQ ID NO: 4856057 - DNA, 25 bp, Homo sapien
gccacgtgttgcctacatggtgcag

SEQ ID NO: 4856058 - DNA, 25 bp, Homo sapien
ctgcctagacaaacaggggaattgc

SEQ ID NO: 4856059 - DNA, 25 bp, Homo sapien
ctccactgcctagacaaacagggga

SEQ ID NO: 4856060 - DNA, 25 bp, Homo sapien
gtgaatgttagtgtaaccgcccagt

SEQ ID NO: 4856061 - DNA, 25 bp, Homo sapien
atgttagtgtaaccgcccagtgggt

SEQ ID NO: 4856062 - DNA, 25 bp, Homo sapien
ttcgaagggaagtgttgagtctcct

SEQ ID NO: 4856063 - DNA, 25 bp, Homo sapien
ggtagcacgaccctgtgaaaaggaa

SEQ ID NO: 4856064 - DNA, 25 bp, Homo sapien
tacttgtcttgagaggatgcctagg

SEQ ID NO: 4856065 - DNA, 25 bp, Homo sapien
cagtcagatgacgtaccaggagatt

SEQ ID NO: 4856066 - DNA, 25 bp, Homo sapien
tggctgctcaagataaagtgttgtg

SEQ ID NO: 4856067 - DNA, 25 bp, Homo sapien
acttcaggtggagagcaataacctt

SEQ ID NO: 4856068 - DNA, 25 bp, Homo sapien
accatatgacgattttatagctcgg

SEQ ID NO: 4856069 - DNA, 25 bp, Homo sapien
atataactgcagactaacttttggg

SEQ ID NO: 4856070 - DNA, 25 bp, Homo sapien
ttggaacgtagatcgacaccaccgc

SEQ ID NO: 4856071 - DNA, 25 bp, Homo sapien
acaccaccgcctgggtagagcgata

SEQ ID NO: 4856072 - DNA, 25 bp, Homo sapien
ggtagagcgataattccacatgcga

SEQ ID NO: 4856073 - DNA, 25 bp, Homo sapien
ccacatgcgattggagagcctggca

SEQ ID NO: 4856074 - DNA, 25 bp, Homo sapien
tttctacacatacaactgctccagg

SEQ ID NO: 4856075 - DNA, 25 bp, Homo sapien
cgatagttacatctcctctgatttc

SEQ ID NO: 4856076 - DNA, 25 bp, Homo sapien
tgatttcactttctacacatacaac

SEQ ID NO: 4856077 - DNA, 25 bp, Homo sapien
gatagttacatctcctctgatttca

SEQ ID NO: 4856078 - DNA, 25 bp, Homo sapien
tggcaaggctacactgagaagatct

SEQ ID NO: 4856079 - DNA, 25 bp, Homo sapien
ggcacatcgcaggtacacaacagat

SEQ ID NO: 4856080 - DNA, 25 bp, Homo sapien
tagcatacaggtgacatgcggctgc

SEQ ID NO: 4856081 - DNA, 25 bp, Homo sapien
tcaaagtaacccagcaagaaaggag

SEQ ID NO: 4856082 - DNA, 25 bp, Homo sapien
gataaatatgtggtcccagtctgca

SEQ ID NO: 4856083 - DNA, 25 bp, Homo sapien
ccagtctgcagtagagattgtaaaa

SEQ ID NO: 4856084 - DNA, 25 bp, Homo sapien
cttcgcaagtggtttaggtaataca

SEQ ID NO: 4856085 - DNA, 25 bp, Homo sapien
gaatgcattgcaaactactataagg

SEQ ID NO: 4856086 - DNA, 25 bp, Homo sapien
catgcttttctgatgccatgagcac

SEQ ID NO: 4856087 - DNA, 25 bp, Homo sapien
tcaccacggaaaacattgaaagcct

SEQ ID NO: 4856088 - DNA, 25 bp, Homo sapien
tggccacggttcacttcatgctttt

SEQ ID NO: 4856089 - DNA, 25 bp, Homo sapien
cagcacactgaaacgtggccacggt

SEQ ID NO: 4856090 - DNA, 25 bp, Homo sapien
accagcacggtctaccccgccctga

SEQ ID NO: 4856091 - DNA, 25 bp, Homo sapien
tcccacttcaccagcacggtctacc

SEQ ID NO: 4856092 - DNA, 25 bp, Homo sapien
tcaccagcacggtctaccccgccct

SEQ ID NO: 4856093 - DNA, 25 bp, Homo sapien
acttcaccagcacggtctaccccgc

SEQ ID NO: 4856094 - DNA, 25 bp, Homo sapien
caaaggtgatcactggagtccgagg

SEQ ID NO: 4856095 - DNA, 25 bp, Homo sapien
gatttaaaccagtgaaagctgaaaa

SEQ ID NO: 4856096 - DNA, 25 bp, Homo sapien
ctctagtctcgaattgaagggaaca

SEQ ID NO: 4856097 - DNA, 25 bp, Homo sapien
tctggcccaggatatgatttaaacc

SEQ ID NO: 4856098 - DNA, 25 bp, Homo sapien
ggttcccttcgccaatcactattgg

SEQ ID NO: 4856099 - DNA, 25 bp, Homo sapien
tcttctattaggttcccttcgccaa

SEQ ID NO: 4856100 - DNA, 25 bp, Homo sapien
gcccggcttccgcaataattcttgc

SEQ ID NO: 4856101 - DNA, 25 bp, Homo sapien
taattcttgctttagggtggatcac

SEQ ID NO: 4856102 - DNA, 25 bp, Homo sapien
aacagccaacttcaaacacattatt

SEQ ID NO: 4856103 - DNA, 25 bp, Homo sapien
gatcttcagtgtcaggagtgatatt

SEQ ID NO: 4856104 - DNA, 25 bp, Homo sapien
gatcataggttttggttctggatct

SEQ ID NO: 4856105 - DNA, 25 bp, Homo sapien
tattggtgccaatgatcataggttt

SEQ ID NO: 4856106 - DNA, 25 bp, Homo sapien
ttatggtagattattgtaaaggata

SEQ ID NO: 4856107 - DNA, 25 bp, Homo sapien
gaggacaggggtgtcagatgggcca

SEQ ID NO: 4856108 - DNA, 25 bp, Homo sapien
aggacaggggtgtcagatgggccat

SEQ ID NO: 4856109 - DNA, 25 bp, Homo sapien
ggacagaggacaggggtgtcagatg

SEQ ID NO: 4856110 - DNA, 25 bp, Homo sapien
cagaggacaggggtgtcagatgggc

SEQ ID NO: 4856111 - DNA, 25 bp, Homo sapien
cttttgattcaatgacattattatc

SEQ ID NO: 4856112 - DNA, 25 bp, Homo sapien
tgattcaatgacattattatctccc

SEQ ID NO: 4856113 - DNA, 25 bp, Homo sapien
gattcaatgacattattatctccca

SEQ ID NO: 4856114 - DNA, 25 bp, Homo sapien
tttgattcaatgacattattatctc

SEQ ID NO: 4856115 - DNA, 25 bp, Homo sapien
gctcagtctgcacccgacgaaggca

SEQ ID NO: 4856116 - DNA, 25 bp, Homo sapien
aacaagccccaatgatgcagccact

SEQ ID NO: 4856117 - DNA, 25 bp, Homo sapien
gtctgcacccgacgaaggcagtctg

SEQ ID NO: 4856118 - DNA, 25 bp, Homo sapien
ggtcgctcagtctgcacccgacgaa

SEQ ID NO: 4856119 - DNA, 25 bp, Homo sapien
aagataaggtaattaaggccgattg

SEQ ID NO: 4856120 - DNA, 25 bp, Homo sapien
gaaagcaaagtcaagagtaccacac

SEQ ID NO: 4856121 - DNA, 25 bp, Homo sapien
ttaaggccgattggcagaaagcaaa

SEQ ID NO: 4856122 - DNA, 25 bp, Homo sapien
agtcaagagtaccacacagcaacca

SEQ ID NO: 4856123 - DNA, 25 bp, Homo sapien
tctttactggagttgagcttccttt

SEQ ID NO: 4856124 - DNA, 25 bp, Homo sapien
gttctttactggagttgagcttcct

SEQ ID NO: 4856125 - DNA, 25 bp, Homo sapien
ttctttactggagttgagcttcctt

SEQ ID NO: 4856126 - DNA, 25 bp, Homo sapien
ctttactggagttgagcttcctttc

SEQ ID NO: 4856127 - DNA, 25 bp, Homo sapien
acaaaatgttatcttcatgttatac

SEQ ID NO: 4856128 - DNA, 25 bp, Homo sapien
aaaatgttatcttcatgttatacac

SEQ ID NO: 4856129 - DNA, 25 bp, Homo sapien
aagacaaaatgttatcttcatgtta

SEQ ID NO: 4856130 - DNA, 25 bp, Homo sapien
aatgttatcttcatgttatacactg

SEQ ID NO: 4856131 - DNA, 25 bp, Homo sapien
gacagttacaatgaaactccattag

SEQ ID NO: 4856132 - DNA, 25 bp, Homo sapien
cataactaaaatttgtggctagcag

SEQ ID NO: 4856133 - DNA, 25 bp, Homo sapien
tgtcttttcttgtcaagggtagcct

SEQ ID NO: 4856134 - DNA, 25 bp, Homo sapien
tgtgggcccattcaaaagacagtgg

SEQ ID NO: 4856135 - DNA, 25 bp, Homo sapien
aacacattagctttaatacaactag

SEQ ID NO: 4856136 - DNA, 25 bp, Homo sapien
actgattaaagtatgcttactaaag

SEQ ID NO: 4856137 - DNA, 25 bp, Homo sapien
aaaactgattaaagtatgcttacta

SEQ ID NO: 4856138 - DNA, 25 bp, Homo sapien
cattagctttaatacaactagtaca

SEQ ID NO: 4856139 - DNA, 25 bp, Homo sapien
aagctcaatgattagtgattagcac

SEQ ID NO: 4856140 - DNA, 25 bp, Homo sapien
caatagctactgaaattcacctgaa

SEQ ID NO: 4856141 - DNA, 25 bp, Homo sapien
taaacagctacaaatccacaagagg

SEQ ID NO: 4856142 - DNA, 25 bp, Homo sapien
tgctcactacatagacaacagaata

SEQ ID NO: 4856143 - DNA, 25 bp, Homo sapien
gctcaatgtttcatctgctacagta

SEQ ID NO: 4856144 - DNA, 25 bp, Homo sapien
gattacgctaatttgcactgtcagt

SEQ ID NO: 4856145 - DNA, 25 bp, Homo sapien
ggtcaagtgatccatgtgagcagac

SEQ ID NO: 4856146 - DNA, 25 bp, Homo sapien
gctacagtatagttttccaagttta

SEQ ID NO: 4856147 - DNA, 25 bp, Homo sapien
gactctcctcactatgtgtagactc

SEQ ID NO: 4856148 - DNA, 25 bp, Homo sapien
cattgagactctcctcactatgtgt

SEQ ID NO: 4856149 - DNA, 25 bp, Homo sapien
ttgagactctcctcactatgtgtag

SEQ ID NO: 4856150 - DNA, 25 bp, Homo sapien
gagactctcctcactatgtgtagac

SEQ ID NO: 4856151 - DNA, 25 bp, Homo sapien
tttcacggataacactgtatacaca

SEQ ID NO: 4856152 - DNA, 25 bp, Homo sapien
cactgtatacacactgtcatatttt

SEQ ID NO: 4856153 - DNA, 25 bp, Homo sapien
ttccttttcacggataacactgtat

SEQ ID NO: 4856154 - DNA, 25 bp, Homo sapien
atctcttggatgcaggacttccttt

SEQ ID NO: 4856155 - DNA, 25 bp, Homo sapien
gttggtgccctcatgcagaattctc

SEQ ID NO: 4856156 - DNA, 25 bp, Homo sapien
gtagagaacacttttggtcactgaa

SEQ ID NO: 4856157 - DNA, 25 bp, Homo sapien
ccttgggtcttgataaactagtcct

SEQ ID NO: 4856158 - DNA, 25 bp, Homo sapien
tggcaagtctcaaggtatgttctcc

SEQ ID NO: 4856159 - DNA, 25 bp, Homo sapien
ccaagatggcacactaacatggttg

SEQ ID NO: 4856160 - DNA, 25 bp, Homo sapien
ccagaatatgagtgatcccagagag

SEQ ID NO: 4856161 - DNA, 25 bp, Homo sapien
gttgttgcccgaaggcctcagttca

SEQ ID NO: 4856162 - DNA, 25 bp, Homo sapien
cttactagctgagtggacctctggc

SEQ ID NO: 4856163 - DNA, 25 bp, Homo sapien
tagtgtcatgaacctagtcccagct

SEQ ID NO: 4856164 - DNA, 25 bp, Homo sapien
tactggtgccctcttgtgttaaaac

SEQ ID NO: 4856165 - DNA, 25 bp, Homo sapien
gagttgtgttttccagcctgggtaa

SEQ ID NO: 4856166 - DNA, 25 bp, Homo sapien
tataacaagcagacccagactgggc

SEQ ID NO: 4856167 - DNA, 25 bp, Homo sapien
caatccattcttggctgggtctcta

SEQ ID NO: 4856168 - DNA, 25 bp, Homo sapien
gcaatgctgaaaccctgtggagagg

SEQ ID NO: 4856169 - DNA, 25 bp, Homo sapien
catggtgagtccctgtcactgaaaa

SEQ ID NO: 4856170 - DNA, 25 bp, Homo sapien
gggacttagcaccaaactttcatga

SEQ ID NO: 4856171 - DNA, 25 bp, Homo sapien
catacaactcagagagagcagtgat

SEQ ID NO: 4856172 - DNA, 25 bp, Homo sapien
aacattcacggttgctttacccaca

SEQ ID NO: 4856173 - DNA, 25 bp, Homo sapien
ggtttatctacccatcactcctttg

SEQ ID NO: 4856174 - DNA, 25 bp, Homo sapien
tgaggactcaagacacttgtgaaac

SEQ ID NO: 4856175 - DNA, 25 bp, Homo sapien
gaacatattttaggcacagttgcag

SEQ ID NO: 4856176 - DNA, 25 bp, Homo sapien
gaaagttcacgggttacagcaacca

SEQ ID NO: 4856177 - DNA, 25 bp, Homo sapien
tgcaggataagctgacagacttgaa

SEQ ID NO: 4856178 - DNA, 25 bp, Homo sapien
cagcaaccaaaagtggaagtcttcc

SEQ ID NO: 4856179 - DNA, 25 bp, Homo sapien
ttgaagatctgttaggaagaagaaa

SEQ ID NO: 4856180 - DNA, 25 bp, Homo sapien
tgattaaagtcaatccatggatggg

SEQ ID NO: 4856181 - DNA, 25 bp, Homo sapien
gaagaaagtgatgtgctatggtctg

SEQ ID NO: 4856182 - DNA, 25 bp, Homo sapien
catggatgggtggatagttgaacaa

SEQ ID NO: 4856183 - DNA, 25 bp, Homo sapien
tgccaccagggaaagccattacagc

SEQ ID NO: 4856184 - DNA, 25 bp, Homo sapien
gctgctgtccactagttaactgatt

SEQ ID NO: 4856185 - DNA, 25 bp, Homo sapien
tacagctcatgaaggccgaatccaa

SEQ ID NO: 4856186 - DNA, 25 bp, Homo sapien
tgtattcacagttgcgtttggccac

SEQ ID NO: 4856187 - DNA, 25 bp, Homo sapien
caggtattgagtgctagtttcatca

SEQ ID NO: 4856188 - DNA, 25 bp, Homo sapien
gaaggtgacttctatgtgtactcac

SEQ ID NO: 4856189 - DNA, 25 bp, Homo sapien
tccatctgggttgctataggagaag

SEQ ID NO: 4856190 - DNA, 25 bp, Homo sapien
tgcaggctccctcaagcttctttgt

SEQ ID NO: 4856191 - DNA, 25 bp, Homo sapien
tgggttatccttgggtggcctctac

SEQ ID NO: 4856192 - DNA, 25 bp, Homo sapien
cattagtttagtgcagaaaggcggg

SEQ ID NO: 4856193 - DNA, 25 bp, Homo sapien
tcaaagaagggccaaataggtgtca

SEQ ID NO: 4856194 - DNA, 25 bp, Homo sapien
tgatgcgtgccccaaactttgtaaa

SEQ ID NO: 4856195 - DNA, 25 bp, Homo sapien
ccacggtgggtcttgtgcgtgcata

SEQ ID NO: 4856196 - DNA, 25 bp, Homo sapien
ctgcagggcaagcaacagaggacac

SEQ ID NO: 4856197 - DNA, 25 bp, Homo sapien
cagtgaccacgtgtgactgctgaga

SEQ ID NO: 4856198 - DNA, 25 bp, Homo sapien
ggcaagcaacagaggacacataaac

SEQ ID NO: 4856199 - DNA, 25 bp, Homo sapien
ccaccatgactagcctaaacaacca

SEQ ID NO: 4856200 - DNA, 25 bp, Homo sapien
ccatgactagcctaaacaaccattt

SEQ ID NO: 4856201 - DNA, 25 bp, Homo sapien
caccatgactagcctaaacaaccat

SEQ ID NO: 4856202 - DNA, 25 bp, Homo sapien
accatgactagcctaaacaaccatt

SEQ ID NO: 4856203 - DNA, 25 bp, Homo sapien
tgctgctgcgtaggtccagctcgga

SEQ ID NO: 4856204 - DNA, 25 bp, Homo sapien
gtccagctcggacagtgaaaaaaga

SEQ ID NO: 4856205 - DNA, 25 bp, Homo sapien
tgcaggcacgttccatgagctgcat

SEQ ID NO: 4856206 - DNA, 25 bp, Homo sapien
gctgctgcgtaggtccagctcggac

SEQ ID NO: 4856207 - DNA, 25 bp, Homo sapien
ataccaactgtaggtccctcagaca

SEQ ID NO: 4856208 - DNA, 25 bp, Homo sapien
aataccaactgtaggtccctcagac

SEQ ID NO: 4856209 - DNA, 25 bp, Homo sapien
taccaactgtaggtccctcagacat

SEQ ID NO: 4856210 - DNA, 25 bp, Homo sapien
cttggagtagtttggcttccctgat

SEQ ID NO: 4856211 - DNA, 25 bp, Homo sapien
tgtctctacttttccgtgttggaaa

SEQ ID NO: 4856212 - DNA, 25 bp, Homo sapien
gcttggagtagtttggcttccctga

SEQ ID NO: 4856213 - DNA, 25 bp, Homo sapien
ggcaattgtctctacttttccgtgt

SEQ ID NO: 4856214 - DNA, 25 bp, Homo sapien
attgctttatatcacactggacaac

SEQ ID NO: 4856215 - DNA, 25 bp, Homo sapien
gaagacatctcgtcctctgggtaga

SEQ ID NO: 4856216 - DNA, 25 bp, Homo sapien
aagacatctcgtcctctgggtagaa

SEQ ID NO: 4856217 - DNA, 25 bp, Homo sapien
ctgttttcccaagatcagcttctgc

SEQ ID NO: 4856218 - DNA, 25 bp, Homo sapien
tgtgaccacagcatcggtaactgtt

SEQ ID NO: 4856219 - DNA, 25 bp, Homo sapien
agttgtctcatcgataattctaagt

SEQ ID NO: 4856220 - DNA, 25 bp, Homo sapien
tgcagttgtctcatcgataattcta

SEQ ID NO: 4856221 - DNA, 25 bp, Homo sapien
gttgtctcatcgataattctaagta

SEQ ID NO: 4856222 - DNA, 25 bp, Homo sapien
cagttgtctcatcgataattctaag

SEQ ID NO: 4856223 - DNA, 25 bp, Homo sapien
ctttctctgtctaagccataagcaa

SEQ ID NO: 4856224 - DNA, 25 bp, Homo sapien
tctctgtctaagccataagcaatag

SEQ ID NO: 4856225 - DNA, 25 bp, Homo sapien
ctgtctaagccataagcaatagcac

SEQ ID NO: 4856226 - DNA, 25 bp, Homo sapien
tctgtctaagccataagcaatagca

SEQ ID NO: 4856227 - DNA, 25 bp, Homo sapien
ggttgactatttggttgtcaaagtc

SEQ ID NO: 4856228 - DNA, 25 bp, Homo sapien
gttgactatttggttgtcaaagtct

SEQ ID NO: 4856229 - DNA, 25 bp, Homo sapien
ttgactatttggttgtcaaagtctt

SEQ ID NO: 4856230 - DNA, 25 bp, Homo sapien
ggtcgatggtgccatggagcaagtc

SEQ ID NO: 4856231 - DNA, 25 bp, Homo sapien
gatggtgccatggagcaagtcagtt

SEQ ID NO: 4856232 - DNA, 25 bp, Homo sapien
ctacggggtcgatggtgccatggag

SEQ ID NO: 4856233 - DNA, 25 bp, Homo sapien
tcgatggtgccatggagcaagtcag

SEQ ID NO: 4856234 - DNA, 25 bp, Homo sapien
gaggagtggcatccaacagaagcaa

SEQ ID NO: 4856235 - DNA, 25 bp, Homo sapien
agaggagtggcatccaacagaagca

SEQ ID NO: 4856236 - DNA, 25 bp, Homo sapien
aggagtggcatccaacagaagcaaa

SEQ ID NO: 4856237 - DNA, 25 bp, Homo sapien
cttaatgaggacagtcgtgactccg

SEQ ID NO: 4856238 - DNA, 25 bp, Homo sapien
ttggtaaaaatggtagtattgtgct

SEQ ID NO: 4856239 - DNA, 25 bp, Homo sapien
gacagtcgtgactccgtcatcagtt

SEQ ID NO: 4856240 - DNA, 25 bp, Homo sapien
aaataggcagtgaaattctgtgtct

SEQ ID NO: 4856241 - DNA, 25 bp, Homo sapien
tcatggaatgctcatctctataaac

SEQ ID NO: 4856242 - DNA, 25 bp, Homo sapien
catggaatgctcatctctataaacc

SEQ ID NO: 4856243 - DNA, 25 bp, Homo sapien
atggaatgctcatctctataaacct

SEQ ID NO: 4856244 - DNA, 25 bp, Homo sapien
gggtgacaccttgtccctctgcttc

SEQ ID NO: 4856245 - DNA, 25 bp, Homo sapien
tcttcaacagtgctttcatgttgaa

SEQ ID NO: 4856246 - DNA, 25 bp, Homo sapien
tcaagtgaattcttgggtgacacct

SEQ ID NO: 4856247 - DNA, 25 bp, Homo sapien
tcatgttgaatgcatgggactcaag

SEQ ID NO: 4856248 - DNA, 25 bp, Homo sapien
ggccctgaggaagcattgacagagg

SEQ ID NO: 4856249 - DNA, 25 bp, Homo sapien
tgaggaagcattgacagagggagga

SEQ ID NO: 4856250 - DNA, 25 bp, Homo sapien
ctgaggaagcattgacagagggagg

SEQ ID NO: 4856251 - DNA, 25 bp, Homo sapien
gccctgaggaagcattgacagaggg

SEQ ID NO: 4856252 - DNA, 25 bp, Homo sapien
tccgtgaaccccagtgaagataagg

SEQ ID NO: 4856253 - DNA, 25 bp, Homo sapien
caagaagtggaagaacgggctctgc

SEQ ID NO: 4856254 - DNA, 25 bp, Homo sapien
ttagagaatacctgggtgggcctcc

SEQ ID NO: 4856255 - DNA, 25 bp, Homo sapien
cccacaagaggctgttgtttgggca

SEQ ID NO: 4856256 - DNA, 25 bp, Homo sapien
cagagtgaccccccaatccccagcc

SEQ ID NO: 4856257 - DNA, 25 bp, Homo sapien
cataaggcttcctagggtcagaact

SEQ ID NO: 4856258 - DNA, 25 bp, Homo sapien
gggtcagaactctgaggatccaaca

SEQ ID NO: 4856259 - DNA, 25 bp, Homo sapien
cagaactctgaggatccaacagtgg

SEQ ID NO: 4856260 - DNA, 25 bp, Homo sapien
taaggcttcctagggtcagaactct

SEQ ID NO: 4856261 - DNA, 25 bp, Homo sapien
caagggaggaatgttgtctttgaaa

SEQ ID NO: 4856262 - DNA, 25 bp, Homo sapien
gcaagggaggaatgttgtctttgaa

SEQ ID NO: 4856263 - DNA, 25 bp, Homo sapien
agggaggaatgttgtctttgaaaca

SEQ ID NO: 4856264 - DNA, 25 bp, Homo sapien
cctgtgcattaactggaggataagg

SEQ ID NO: 4856265 - DNA, 25 bp, Homo sapien
tcctgtgcattaactggaggataag

SEQ ID NO: 4856266 - DNA, 25 bp, Homo sapien
ctgtgcattaactggaggataaggt

SEQ ID NO: 4856267 - DNA, 25 bp, Homo sapien
tgtgcattaactggaggataaggtg

SEQ ID NO: 4856268 - DNA, 25 bp, Homo sapien
ggtctccagggatgtttgcaacatc

SEQ ID NO: 4856269 - DNA, 25 bp, Homo sapien
gcaacatcctctaagagggcttggg

SEQ ID NO: 4856270 - DNA, 25 bp, Homo sapien
catcctctaagagggcttgggagga

SEQ ID NO: 4856271 - DNA, 25 bp, Homo sapien
gggaggatgtgtttaagacctgcct

SEQ ID NO: 4856272 - DNA, 25 bp, Homo sapien
gatggatcttttttccactatcttg

SEQ ID NO: 4856273 - DNA, 25 bp, Homo sapien
tctgctaaatacctcactcttcaag

SEQ ID NO: 4856274 - DNA, 25 bp, Homo sapien
ttcaagatgggaagttcccagctga

SEQ ID NO: 4856275 - DNA, 25 bp, Homo sapien
ttgttgctaaccacatccacctttc

SEQ ID NO: 4856276 - DNA, 25 bp, Homo sapien
tgctcttgttgctaaccacatccac

SEQ ID NO: 4856277 - DNA, 25 bp, Homo sapien
tactgagttctctactgttcaaagt

SEQ ID NO: 4856278 - DNA, 25 bp, Homo sapien
tgggtaagaactgcacttgcagagc

SEQ ID NO: 4856279 - DNA, 25 bp, Homo sapien
tgttcaaagtgagttaaacagacac

SEQ ID NO: 4856280 - DNA, 25 bp, Homo sapien
cttaggccaaaccaattcatgttgg

SEQ ID NO: 4856281 - DNA, 25 bp, Homo sapien
aatgactaagatgcatgggaacaca

SEQ ID NO: 4856282 - DNA, 25 bp, Homo sapien
ccccttattcattagacctggtgcc

SEQ ID NO: 4856283 - DNA, 25 bp, Homo sapien
gccctgaagcatattccaaagccta

SEQ ID NO: 4856284 - DNA, 25 bp, Homo sapien
gatgctggcctcttgacactgggct

SEQ ID NO: 4856285 - DNA, 25 bp, Homo sapien
ttggggaagtaggaacatactgctg

SEQ ID NO: 4856286 - DNA, 25 bp, Homo sapien
ttacttatgttgtccccacacctct

SEQ ID NO: 4856287 - DNA, 25 bp, Homo sapien
tacttatgttgtccccacacctcta

SEQ ID NO: 4856288 - DNA, 25 bp, Homo sapien
acacctctaatgtctttccttccat

SEQ ID NO: 4856289 - DNA, 25 bp, Homo sapien
tcctctccaatttgctgcactgtca

SEQ ID NO: 4856290 - DNA, 25 bp, Homo sapien
ctcctctccaatttgctgcactgtc

SEQ ID NO: 4856291 - DNA, 25 bp, Homo sapien
cctctccaatttgctgcactgtcat

SEQ ID NO: 4856292 - DNA, 25 bp, Homo sapien
tcacttcaaggtatgtacggggcaa

SEQ ID NO: 4856293 - DNA, 25 bp, Homo sapien
ttgctcacttcaaggtatgtacggg

SEQ ID NO: 4856294 - DNA, 25 bp, Homo sapien
tggaaggttggaatatgccctagat

SEQ ID NO: 4856295 - DNA, 25 bp, Homo sapien
ctggaaggttggaatatgccctaga

SEQ ID NO: 4856296 - DNA, 25 bp, Homo sapien
cgatctggttgccacgctgaccagc

SEQ ID NO: 4856297 - DNA, 25 bp, Homo sapien
tggttgccacgctgaccagcctgga

SEQ ID NO: 4856298 - DNA, 25 bp, Homo sapien
ggcaccgatctggttgccacgctga

SEQ ID NO: 4856299 - DNA, 25 bp, Homo sapien
atgccatgttcatcactgatcacct

SEQ ID NO: 4856300 - DNA, 25 bp, Homo sapien
ttctagatccaccagtatggcacga

SEQ ID NO: 4856301 - DNA, 25 bp, Homo sapien
catatttgccatcagtggcttcact

SEQ ID NO: 4856302 - DNA, 25 bp, Homo sapien
gatccaccagtatggcacgaggaac

SEQ ID NO: 4856303 - DNA, 25 bp, Homo sapien
tgtagtacacggagatgcggtccag

SEQ ID NO: 4856304 - DNA, 25 bp, Homo sapien
gtctggtctaaagatctggccaaaa

SEQ ID NO: 4856305 - DNA, 25 bp, Homo sapien
tctggtctaaagatctggccaaaag

SEQ ID NO: 4856306 - DNA, 25 bp, Homo sapien
ctgaccaaatacaaagttgtctggt

SEQ ID NO: 4856307 - DNA, 25 bp, Homo sapien
aaatacaaagttgtctggtctaaag

SEQ ID NO: 4856308 - DNA, 25 bp, Homo sapien
tccaggacagaatcaaccagctcgg

SEQ ID NO: 4856309 - DNA, 25 bp, Homo sapien
aggacagaatcaaccagctcggcgc

SEQ ID NO: 4856310 - DNA, 25 bp, Homo sapien
aatcaaccagctcggcgccctctgt

SEQ ID NO: 4856311 - DNA, 25 bp, Homo sapien
tggcccagttgttacctgccccaga

SEQ ID NO: 4856312 - DNA, 25 bp, Homo sapien
gcagtcacagctctctgcctccttc

SEQ ID NO: 4856313 - DNA, 25 bp, Homo sapien
tcacagctctctgcctccttccgta

SEQ ID NO: 4856314 - DNA, 25 bp, Homo sapien
gcaggcagtcacagctctctgcctc

SEQ ID NO: 4856315 - DNA, 25 bp, Homo sapien
tgcaggcagtcacagctctctgcct

SEQ ID NO: 4856316 - DNA, 25 bp, Homo sapien
agagggtagcattgtaggactcgat

SEQ ID NO: 4856317 - DNA, 25 bp, Homo sapien
ggtagcattgtaggactcgatcacg

SEQ ID NO: 4856318 - DNA, 25 bp, Homo sapien
agggtagcattgtaggactcgatca

SEQ ID NO: 4856319 - DNA, 25 bp, Homo sapien
agcattgtaggactcgatcacggtg

SEQ ID NO: 4856320 - DNA, 25 bp, Homo sapien
cagagtgcggaagcagatatcatag

SEQ ID NO: 4856321 - DNA, 25 bp, Homo sapien
atagagggcctcgttgtcaatgcaa

SEQ ID NO: 4856322 - DNA, 25 bp, Homo sapien
cctcagagtgcggaagcagatatca

SEQ ID NO: 4856323 - DNA, 25 bp, Homo sapien
gttgtcaatgcaataggtctcatca

SEQ ID NO: 4856324 - DNA, 25 bp, Homo sapien
tagaggaggtggttcagatccccat

SEQ ID NO: 4856325 - DNA, 25 bp, Homo sapien
tgtcttagaggaggtggttcagatc

SEQ ID NO: 4856326 - DNA, 25 bp, Homo sapien
cttagaggaggtggttcagatcccc

SEQ ID NO: 4856327 - DNA, 25 bp, Homo sapien
cagatccccataggttggtgtggtc

SEQ ID NO: 4856328 - DNA, 25 bp, Homo sapien
agcggaggcaggtggtgacaccact

SEQ ID NO: 4856329 - DNA, 25 bp, Homo sapien
cggaggcaggtggtgacaccactca

SEQ ID NO: 4856330 - DNA, 25 bp, Homo sapien
ggaagcggaggcaggtggtgacacc

SEQ ID NO: 4856331 - DNA, 25 bp, Homo sapien
aagcggaggcaggtggtgacaccac

SEQ ID NO: 4856332 - DNA, 25 bp, Homo sapien
cgtgctactgccgatgaaggtgact

SEQ ID NO: 4856333 - DNA, 25 bp, Homo sapien
caaacacaaattctgagggagagga

SEQ ID NO: 4856334 - DNA, 25 bp, Homo sapien
ctgctttctccacaggtcaggccat

SEQ ID NO: 4856335 - DNA, 25 bp, Homo sapien
tctccacaggtcaggccataggtgc

SEQ ID NO: 4856336 - DNA, 25 bp, Homo sapien
gctttctccacaggtcaggccatag

SEQ ID NO: 4856337 - DNA, 25 bp, Homo sapien
cacaggtcaggccataggtgctggc

SEQ ID NO: 4856338 - DNA, 25 bp, Homo sapien
ccgaccagggtatctcattgactta

SEQ ID NO: 4856339 - DNA, 25 bp, Homo sapien
gacttaaggagcattaccacttggg

SEQ ID NO: 4856340 - DNA, 25 bp, Homo sapien
tcaagacagtctcatcgaacccatt

SEQ ID NO: 4856341 - DNA, 25 bp, Homo sapien
gaacatatatgactgccgaccaggg

SEQ ID NO: 4856342 - DNA, 25 bp, Homo sapien
tgtgcgacttttagtttgccggctt

SEQ ID NO: 4856343 - DNA, 25 bp, Homo sapien
tgccggcttttaccgagggatttgc

SEQ ID NO: 4856344 - DNA, 25 bp, Homo sapien
ctccgggccggctttttcaggacag

SEQ ID NO: 4856345 - DNA, 25 bp, Homo sapien
agcatgagaactcgagggacaccgg

SEQ ID NO: 4856346 - DNA, 25 bp, Homo sapien
tcccaggagtaagcgcggagagttg

SEQ ID NO: 4856347 - DNA, 25 bp, Homo sapien
caccgagacaatcgggccccgggag

SEQ ID NO: 4856348 - DNA, 25 bp, Homo sapien
gctgagtacgcgctccaggcaggct

SEQ ID NO: 4856349 - DNA, 25 bp, Homo sapien
ctgggacccgagagccgctgagtac

SEQ ID NO: 4856350 - DNA, 25 bp, Homo sapien
gcctcgctcggggtgttctccttct

SEQ ID NO: 4856351 - DNA, 25 bp, Homo sapien
tccttctcggctttgccgccgttgt

SEQ ID NO: 4856352 - DNA, 25 bp, Homo sapien
cttctcggctttgccgccgttgttc

SEQ ID NO: 4856353 - DNA, 25 bp, Homo sapien
tcctcctgaaggttggcctcgctcg

SEQ ID NO: 4856354 - DNA, 25 bp, Homo sapien
gcagacgcgcgtggacacaaaaaca

SEQ ID NO: 4856355 - DNA, 25 bp, Homo sapien
ggcacgggccatgcctgaaccttct

SEQ ID NO: 4856356 - DNA, 25 bp, Homo sapien
acacaaaaacacacgctcccgagat

SEQ ID NO: 4856357 - DNA, 25 bp, Homo sapien
tccgaaaagtccttggagttacgca

SEQ ID NO: 4856358 - DNA, 25 bp, Homo sapien
cctatgaaaataccctcgatgagca

SEQ ID NO: 4856359 - DNA, 25 bp, Homo sapien
ggaacgctccgcagtcacaaaactt

SEQ ID NO: 4856360 - DNA, 25 bp, Homo sapien
aatgcatgctcagaagtcaaagtcc

SEQ ID NO: 4856361 - DNA, 25 bp, Homo sapien
tttcatcatgattacggacgcacca

SEQ ID NO: 4856362 - DNA, 25 bp, Homo sapien
ggatgttaagaagtacgccagaaat

SEQ ID NO: 4856363 - DNA, 25 bp, Homo sapien
gaaataatttcttggactccagata

SEQ ID NO: 4856364 - DNA, 25 bp, Homo sapien
gataacgtacctgcaaaaagagtca

SEQ ID NO: 4856365 - DNA, 25 bp, Homo sapien
aaagagtcatttggtaggataccac

SEQ ID NO: 4856366 - DNA, 25 bp, Homo sapien
caatacctgtgtgaatcttttcggg

SEQ ID NO: 4856367 - DNA, 25 bp, Homo sapien
catatttagacgtgcactttcctgc

SEQ ID NO: 4856368 - DNA, 25 bp, Homo sapien
gcattgtttggcatagtctcgctcc

SEQ ID NO: 4856369 - DNA, 25 bp, Homo sapien
cactaccatacaactgggtgacgag

SEQ ID NO: 4856370 - DNA, 25 bp, Homo sapien
cacaccattcaactctccatcgctt

SEQ ID NO: 4856371 - DNA, 25 bp, Homo sapien
aacacaccattcaactctccatcgc

SEQ ID NO: 4856372 - DNA, 25 bp, Homo sapien
caccattcaactctccatcgctttg

SEQ ID NO: 4856373 - DNA, 25 bp, Homo sapien
acaccattcaactctccatcgcttt

SEQ ID NO: 4856374 - DNA, 25 bp, Homo sapien
acgctgtcagataacaggacaagta

SEQ ID NO: 4856375 - DNA, 25 bp, Homo sapien
tgaaaaggaacgctgtcagataaca

SEQ ID NO: 4856376 - DNA, 25 bp, Homo sapien
aaggaacgctgtcagataacaggac

SEQ ID NO: 4856377 - DNA, 25 bp, Homo sapien
gaacgctgtcagataacaggacaag

SEQ ID NO: 4856378 - DNA, 25 bp, Homo sapien
tgaaatcttcctacgtgtcccctta

SEQ ID NO: 4856379 - DNA, 25 bp, Homo sapien
cttggacaacttgggttctgaaatc

SEQ ID NO: 4856380 - DNA, 25 bp, Homo sapien
gttttgtacacgacatctctcttgg

SEQ ID NO: 4856381 - DNA, 25 bp, Homo sapien
cctctcttcacggtcttaactgttt

SEQ ID NO: 4856382 - DNA, 25 bp, Homo sapien
caggacaacttgcttagggaacaca

SEQ ID NO: 4856383 - DNA, 25 bp, Homo sapien
catgttctgccaaagttctcaaaaa

SEQ ID NO: 4856384 - DNA, 25 bp, Homo sapien
tctctcttacacaactggctagcca

SEQ ID NO: 4856385 - DNA, 25 bp, Homo sapien
gacaactggttagtctttacaggac

SEQ ID NO: 4856386 - DNA, 25 bp, Homo sapien
aataagttacaagctataagttagc

SEQ ID NO: 4856387 - DNA, 25 bp, Homo sapien
tcagcctgaaaagtactcaatgaca

SEQ ID NO: 4856388 - DNA, 25 bp, Homo sapien
aatcagcctgaaaagtactcaatga

SEQ ID NO: 4856389 - DNA, 25 bp, Homo sapien
gtgaccaacaaataagttacaagct

SEQ ID NO: 4856390 - DNA, 25 bp, Homo sapien
tttccttttaggtgcagggttggca

SEQ ID NO: 4856391 - DNA, 25 bp, Homo sapien
ccagattttatggtagcttgatctt

SEQ ID NO: 4856392 - DNA, 25 bp, Homo sapien
gattttatggtagcttgatctttcc

SEQ ID NO: 4856393 - DNA, 25 bp, Homo sapien
ggttggcaaatggagagttggagaa

SEQ ID NO: 4856394 - DNA, 25 bp, Homo sapien
gcctatctaccctggtgacatgaga

SEQ ID NO: 4856395 - DNA, 25 bp, Homo sapien
tctatcctataggtgggcgtaagag

SEQ ID NO: 4856396 - DNA, 25 bp, Homo sapien
taagtcccgtaaatcacacatgctg

SEQ ID NO: 4856397 - DNA, 25 bp, Homo sapien
tttgcaaaaccctaaaggctgacag

SEQ ID NO: 4856398 - DNA, 25 bp, Homo sapien
aagtgtgtgagatgacaactgcggt

SEQ ID NO: 4856399 - DNA, 25 bp, Homo sapien
catctgaacatttccagcttaaaag

SEQ ID NO: 4856400 - DNA, 25 bp, Homo sapien
caactgcggttttgtatgcaataaa

SEQ ID NO: 4856401 - DNA, 25 bp, Homo sapien
gaaatgatcatcttcaaggcagaaa

SEQ ID NO: 4856402 - DNA, 25 bp, Homo sapien
ctgtggaattagtaggtttcccatc

SEQ ID NO: 4856403 - DNA, 25 bp, Homo sapien
cttgccctactggtacttaggcatt

SEQ ID NO: 4856404 - DNA, 25 bp, Homo sapien
acatccctctcctcgttctgtggaa

SEQ ID NO: 4856405 - DNA, 25 bp, Homo sapien
tactggtacttaggcattccctaca

SEQ ID NO: 4856406 - DNA, 25 bp, Homo sapien
aaacaagcaatgttaccacagataa

SEQ ID NO: 4856407 - DNA, 25 bp, Homo sapien
aaaacaagcaatgttaccacagata

SEQ ID NO: 4856408 - DNA, 25 bp, Homo sapien
attacaggcatgagccaccccacct

SEQ ID NO: 4856409 - DNA, 25 bp, Homo sapien
tagagatgggggtttatccatgttg

SEQ ID NO: 4856410 - DNA, 25 bp, Homo sapien
ggattacaggcatgagccaccccac

SEQ ID NO: 4856411 - DNA, 25 bp, Homo sapien
gagatgggggtttatccatgttggc

SEQ ID NO: 4856412 - DNA, 25 bp, Homo sapien
taattctgagtcacggatgggacac

SEQ ID NO: 4856413 - DNA, 25 bp, Homo sapien
aaatatcaatgactgtacccaaggg

SEQ ID NO: 4856414 - DNA, 25 bp, Homo sapien
gttaatggtgattgccctgcccaca

SEQ ID NO: 4856415 - DNA, 25 bp, Homo sapien
cactcttggtatgttgcgggcatca

SEQ ID NO: 4856416 - DNA, 25 bp, Homo sapien
atgacaagaccacagttcactgcag

SEQ ID NO: 4856417 - DNA, 25 bp, Homo sapien
ggagtgcaatgacaagaccacagtt

SEQ ID NO: 4856418 - DNA, 25 bp, Homo sapien
gcaatgacaagaccacagttcactg

SEQ ID NO: 4856419 - DNA, 25 bp, Homo sapien
agtgcaatgacaagaccacagttca

SEQ ID NO: 4856420 - DNA, 25 bp, Homo sapien
tctgaaacaggctaatccatagagg

SEQ ID NO: 4856421 - DNA, 25 bp, Homo sapien
caaatctttgatcaaggagcctcca

SEQ ID NO: 4856422 - DNA, 25 bp, Homo sapien
gcactagacattgagggacccagag

SEQ ID NO: 4856423 - DNA, 25 bp, Homo sapien
cccagaggtggaatgctttgtaaga

SEQ ID NO: 4856424 - DNA, 25 bp, Homo sapien
ccacttcccaccactactgaggcca

SEQ ID NO: 4856425 - DNA, 25 bp, Homo sapien
ggccaaagttcctcaactctgcacc

SEQ ID NO: 4856426 - DNA, 25 bp, Homo sapien
caaagttcctcaactctgcaccatt

SEQ ID NO: 4856427 - DNA, 25 bp, Homo sapien
tcccaccactactgaggccaaagtt

SEQ ID NO: 4856428 - DNA, 25 bp, Homo sapien
gcacctaggtgaaggctgtgactcc

SEQ ID NO: 4856429 - DNA, 25 bp, Homo sapien
ccatgggaatgcaggaccacgagaa

SEQ ID NO: 4856430 - DNA, 25 bp, Homo sapien
catccagctagaagtggtgtagaca

SEQ ID NO: 4856431 - DNA, 25 bp, Homo sapien
ccacgagaaatgaagaggcaggacg

SEQ ID NO: 4856432 - DNA, 25 bp, Homo sapien
aagtgaatgaagctcggtatgactg

SEQ ID NO: 4856433 - DNA, 25 bp, Homo sapien
gctcggtatgactgaagcatagggt

SEQ ID NO: 4856434 - DNA, 25 bp, Homo sapien
ttactggatagatgaaagagatgat

SEQ ID NO: 4856435 - DNA, 25 bp, Homo sapien
agagatgatgcattatcagaagtga

SEQ ID NO: 4856436 - DNA, 25 bp, Homo sapien
tggtttgcaactttctagaagtttc

SEQ ID NO: 4856437 - DNA, 25 bp, Homo sapien
ctttctagaagtttctataaaacag

SEQ ID NO: 4856438 - DNA, 25 bp, Homo sapien
tttctataaaacaggttttctgaga

SEQ ID NO: 4856439 - DNA, 25 bp, Homo sapien
ttctataaaacaggttttctgagac

SEQ ID NO: 4856440 - DNA, 25 bp, Homo sapien
tggaacatccatacattgaaacact

SEQ ID NO: 4856441 - DNA, 25 bp, Homo sapien
catggcattgtttactggatgtact

SEQ ID NO: 4856442 - DNA, 25 bp, Homo sapien
cattaaaccgttaactgtggtcaca

SEQ ID NO: 4856443 - DNA, 25 bp, Homo sapien
ttacagctgcacatactaacatgga

SEQ ID NO: 4856444 - DNA, 25 bp, Homo sapien
ccaggagcggtactcatgtgcatga

SEQ ID NO: 4856445 - DNA, 25 bp, Homo sapien
tacaacgtataaagagtgccaaggc

SEQ ID NO: 4856446 - DNA, 25 bp, Homo sapien
catgagtacctgtaccactaaaaca

SEQ ID NO: 4856447 - DNA, 25 bp, Homo sapien
atgtgcatgagtacctgtaccacta

SEQ ID NO: 4856448 - DNA, 25 bp, Homo sapien
aatccatgcatgtcgtcctctcaaa

SEQ ID NO: 4856449 - DNA, 25 bp, Homo sapien
atccatgcatgtcgtcctctcaaag

SEQ ID NO: 4856450 - DNA, 25 bp, Homo sapien
caatccatgcatgtcgtcctctcaa

SEQ ID NO: 4856451 - DNA, 25 bp, Homo sapien
tccatgcatgtcgtcctctcaaagt

SEQ ID NO: 4856452 - DNA, 25 bp, Homo sapien
agaagaaagggacttgctgcgatca

SEQ ID NO: 4856453 - DNA, 25 bp, Homo sapien
gggacttgctgcgatcatagaattc

SEQ ID NO: 4856454 - DNA, 25 bp, Homo sapien
cttgctgcgatcatagaattccctg

SEQ ID NO: 4856455 - DNA, 25 bp, Homo sapien
gaaagggacttgctgcgatcataga

SEQ ID NO: 4856456 - DNA, 25 bp, Homo sapien
ttcaactgctcggagacctggagcc

SEQ ID NO: 4856457 - DNA, 25 bp, Homo sapien
tggactttgccaggtacatttcaac

SEQ ID NO: 4856458 - DNA, 25 bp, Homo sapien
acatttcaactgctcggagacctgg

SEQ ID NO: 4856459 - DNA, 25 bp, Homo sapien
tgaacatgatggctacaaaatgaac

SEQ ID NO: 4856460 - DNA, 25 bp, Homo sapien
taagaacaatagctgaattcaccga

SEQ ID NO: 4856461 - DNA, 25 bp, Homo sapien
gtgaagatttgacaggctagctacc

SEQ ID NO: 4856462 - DNA, 25 bp, Homo sapien
gcttaattttagagccacgaggccc

SEQ ID NO: 4856463 - DNA, 25 bp, Homo sapien
taagaatggccaataaagcagggtc

SEQ ID NO: 4856464 - DNA, 25 bp, Homo sapien
tgccagttaactttataatataagg

SEQ ID NO: 4856465 - DNA, 25 bp, Homo sapien
tagtgtacatgagttttcttaccct

SEQ ID NO: 4856466 - DNA, 25 bp, Homo sapien
tagtggagctacaaatggcgacgcc

SEQ ID NO: 4856467 - DNA, 25 bp, Homo sapien
cagtacgtacttgtaaatggcttaa

SEQ ID NO: 4856468 - DNA, 25 bp, Homo sapien
tgtataaagagggaatagaaggtcc

SEQ ID NO: 4856469 - DNA, 25 bp, Homo sapien
tggttgaggcttctaacactgtcat

SEQ ID NO: 4856470 - DNA, 25 bp, Homo sapien
gtggccatccacgtgatgacaaaca

SEQ ID NO: 4856471 - DNA, 25 bp, Homo sapien
ggcatgtatatcaatcactggatgg

SEQ ID NO: 4856472 - DNA, 25 bp, Homo sapien
taaaagttgcttccagaccctgtgt

SEQ ID NO: 4856473 - DNA, 25 bp, Homo sapien
gaaagttcacgtttgggtcagccaa

SEQ ID NO: 4856474 - DNA, 25 bp, Homo sapien
tactgcacagttatgaatgagccag

SEQ ID NO: 4856475 - DNA, 25 bp, Homo sapien
gaggccgctggctatttgaatcact

SEQ ID NO: 4856476 - DNA, 25 bp, Homo sapien
ccactgaactccagcgagactccgt

SEQ ID NO: 4856477 - DNA, 25 bp, Homo sapien
gagaatccacgaataaaaaatattg

SEQ ID NO: 4856478 - DNA, 25 bp, Homo sapien
cactgaactccagcgagactccgtc

SEQ ID NO: 4856479 - DNA, 25 bp, Homo sapien
atggtattaagagaatccacgaata

SEQ ID NO: 4856480 - DNA, 25 bp, Homo sapien
tcggtgccctcgcacttccaacagc

SEQ ID NO: 4856481 - DNA, 25 bp, Homo sapien
caacagccggttcgggcccaggaga

SEQ ID NO: 4856482 - DNA, 25 bp, Homo sapien
tcgcacttccaacagccggttcggg

SEQ ID NO: 4856483 - DNA, 25 bp, Homo sapien
cggttcgggcccaggagactcgctc

SEQ ID NO: 4856484 - DNA, 25 bp, Homo sapien
gaaaacattttagaacttatctgaa

SEQ ID NO: 4856485 - DNA, 25 bp, Homo sapien
ttggctaggcaagatggagtgagga

SEQ ID NO: 4856486 - DNA, 25 bp, Homo sapien
agagtagaggcaagtcaaggctgaa

SEQ ID NO: 4856487 - DNA, 25 bp, Homo sapien
gtgcttaagagtagaggcaagtcaa

SEQ ID NO: 4856488 - DNA, 25 bp, Homo sapien
cccacattgtccttttgatcaggct

SEQ ID NO: 4856489 - DNA, 25 bp, Homo sapien
tagattttaactttgtccttcagag

SEQ ID NO: 4856490 - DNA, 25 bp, Homo sapien
ttcatgcattcccacattgtccttt

SEQ ID NO: 4856491 - DNA, 25 bp, Homo sapien
tgcattcccacattgtccttttgat

SEQ ID NO: 4856492 - DNA, 25 bp, Homo sapien
taaggtgatataggctcgctggagc

SEQ ID NO: 4856493 - DNA, 25 bp, Homo sapien
cagacacaaggatagcaagatttac

SEQ ID NO: 4856494 - DNA, 25 bp, Homo sapien
cctaggcgacagtgcaacaccttgt

SEQ ID NO: 4856495 - DNA, 25 bp, Homo sapien
ggtctgtactacacgctactcagga

SEQ ID NO: 4856496 - DNA, 25 bp, Homo sapien
ctttttctacatgggtgacaggctg

SEQ ID NO: 4856497 - DNA, 25 bp, Homo sapien
tggtgatttatagaacccagcagct

SEQ ID NO: 4856498 - DNA, 25 bp, Homo sapien
gatgactgtgggaagtagagcaccc

SEQ ID NO: 4856499 - DNA, 25 bp, Homo sapien
tactttgcagggatgctcaagactg

SEQ ID NO: 4856500 - DNA, 25 bp, Homo sapien
gacattattcaagttgcttcaggat

SEQ ID NO: 4856501 - DNA, 25 bp, Homo sapien
gaatcaccctgaggccaagtttctc

SEQ ID NO: 4856502 - DNA, 25 bp, Homo sapien
tctccttgtgtgaggtacaggtgac

SEQ ID NO: 4856503 - DNA, 25 bp, Homo sapien
gaaaaggatccaatcgagctgggtg

SEQ ID NO: 4856504 - DNA, 25 bp, Homo sapien
gcagtggaggcatactaccaaggtt

SEQ ID NO: 4856505 - DNA, 25 bp, Homo sapien
tacctgaagtgacctcccatgacat

SEQ ID NO: 4856506 - DNA, 25 bp, Homo sapien
acagatactgggctgaaaccatcca

SEQ ID NO: 4856507 - DNA, 25 bp, Homo sapien
tgaaactaagtctgcctgctagaga

SEQ ID NO: 4856508 - DNA, 25 bp, Homo sapien
tatcagcaactcagcaattggcagg

SEQ ID NO: 4856509 - DNA, 25 bp, Homo sapien
taaatgatgcggatataggcagccc

SEQ ID NO: 4856510 - DNA, 25 bp, Homo sapien
taggcagcccatagaacacacactg

SEQ ID NO: 4856511 - DNA, 25 bp, Homo sapien
cagagaccacaatgaatccacgagg

SEQ ID NO: 4856512 - DNA, 25 bp, Homo sapien
ccttctgctacgttcaaagaggatg

SEQ ID NO: 4856513 - DNA, 25 bp, Homo sapien
ttgtctgagacacaaggattactcc

SEQ ID NO: 4856514 - DNA, 25 bp, Homo sapien
gaggttgaagcacactcacaagttt

SEQ ID NO: 4856515 - DNA, 25 bp, Homo sapien
gcagagtaagacatggcaaatcaca

SEQ ID NO: 4856516 - DNA, 25 bp, Homo sapien
cttcgatgaccttttaaggctagca

SEQ ID NO: 4856517 - DNA, 25 bp, Homo sapien
caagcatcatttttttgcccaaata

SEQ ID NO: 4856518 - DNA, 25 bp, Homo sapien
ttaaggctagcacaagcatcatttt

SEQ ID NO: 4856519 - DNA, 25 bp, Homo sapien
ccttttaaggctagcacaagcatca

SEQ ID NO: 4856520 - DNA, 25 bp, Homo sapien
cagagagactaagtaggacccaagg

SEQ ID NO: 4856521 - DNA, 25 bp, Homo sapien
aagcatataaactgtagagccagac

SEQ ID NO: 4856522 - DNA, 25 bp, Homo sapien
ccaacaccaattagctgagcaatct

SEQ ID NO: 4856523 - DNA, 25 bp, Homo sapien
tacctctcagggttgctaagaggaa

SEQ ID NO: 4856524 - DNA, 25 bp, Homo sapien
tagcaatgttatgtgcctgctggaa

SEQ ID NO: 4856525 - DNA, 25 bp, Homo sapien
cagtgctgataatgagtacttccag

SEQ ID NO: 4856526 - DNA, 25 bp, Homo sapien
tacaagtcttgctatgatgtacaac

SEQ ID NO: 4856527 - DNA, 25 bp, Homo sapien
catttaggctacaattaatatgccc

SEQ ID NO: 4856528 - DNA, 25 bp, Homo sapien
aggccgcgggcaaatttcactctgg

SEQ ID NO: 4856529 - DNA, 25 bp, Homo sapien
tgtaaaaggccgcgggcaaatttca

SEQ ID NO: 4856530 - DNA, 25 bp, Homo sapien
aaaggccgcgggcaaatttcactct

SEQ ID NO: 4856531 - DNA, 25 bp, Homo sapien
aaggccgcgggcaaatttcactctg

SEQ ID NO: 4856532 - DNA, 25 bp, Homo sapien
caggttctgcaactcacaaggtatg

SEQ ID NO: 4856533 - DNA, 25 bp, Homo sapien
cgcagccccagctaaaatgttgtga

SEQ ID NO: 4856534 - DNA, 25 bp, Homo sapien
gtgattccaaccttatgaccctgag

SEQ ID NO: 4856535 - DNA, 25 bp, Homo sapien
taagtgattcgcttctagtgagcag

SEQ ID NO: 4856536 - DNA, 25 bp, Homo sapien
tacttaatataaactaaggttcatc

SEQ ID NO: 4856537 - DNA, 25 bp, Homo sapien
tattgttatagagaaaagggcttca

SEQ ID NO: 4856538 - DNA, 25 bp, Homo sapien
caatttaccaacagaggttacttga

SEQ ID NO: 4856539 - DNA, 25 bp, Homo sapien
aaatctggggattatgaacaaaagg

SEQ ID NO: 4856540 - DNA, 25 bp, Homo sapien
ttctggtcaggacaacctgggcaga

SEQ ID NO: 4856541 - DNA, 25 bp, Homo sapien
tgggcagagcgagaataccatcttc

SEQ ID NO: 4856542 - DNA, 25 bp, Homo sapien
gaggaaatcctgctaatccagtgtg

SEQ ID NO: 4856543 - DNA, 25 bp, Homo sapien
tctttatgaagttcgctgaggcaga

SEQ ID NO: 4856544 - DNA, 25 bp, Homo sapien
tctgaaaagcagatagagctcccga

SEQ ID NO: 4856545 - DNA, 25 bp, Homo sapien
agagctcccgaggtttgatatccag

SEQ ID NO: 4856546 - DNA, 25 bp, Homo sapien
gcagatagagctcccgaggtttgat

SEQ ID NO: 4856547 - DNA, 25 bp, Homo sapien
ggccactgacaaatagggtccggac

SEQ ID NO: 4856548 - DNA, 25 bp, Homo sapien
ctgtttagatgtgagctttataaga

SEQ ID NO: 4856549 - DNA, 25 bp, Homo sapien
tttagatgtgagctttataagagaa

SEQ ID NO: 4856550 - DNA, 25 bp, Homo sapien
tgtttagatgtgagctttataagag

SEQ ID NO: 4856551 - DNA, 25 bp, Homo sapien
gtttagatgtgagctttataagaga

SEQ ID NO: 4856552 - DNA, 25 bp, Homo sapien
cttctgagcgactgtcaaaactgac

SEQ ID NO: 4856553 - DNA, 25 bp, Homo sapien
gttcccagacgcctccaaaatggta

SEQ ID NO: 4856554 - DNA, 25 bp, Homo sapien
tacaaccagtcaagtggccgcttgc

SEQ ID NO: 4856555 - DNA, 25 bp, Homo sapien
acaaaggccagacgcaagttcccag

SEQ ID NO: 4856556 - DNA, 25 bp, Homo sapien
ggtacctgtattacaaccagtcaag

SEQ ID NO: 4856557 - DNA, 25 bp, Homo sapien
cagcactctgcatggtctactcaaa

SEQ ID NO: 4856558 - DNA, 25 bp, Homo sapien
tagacctctaagtcatcacctatat

SEQ ID NO: 4856559 - DNA, 25 bp, Homo sapien
catggtctactcaaaggagcagctg

SEQ ID NO: 4856560 - DNA, 25 bp, Homo sapien
cctatatcaggtctctccaacagca

SEQ ID NO: 4856561 - DNA, 25 bp, Homo sapien
tcacagcggctttatactggcacaa

SEQ ID NO: 4856562 - DNA, 25 bp, Homo sapien
catcacagcggctttatactggcac

SEQ ID NO: 4856563 - DNA, 25 bp, Homo sapien
cccacatcacagcggctttatactg

SEQ ID NO: 4856564 - DNA, 25 bp, Homo sapien
cacatcacagcggctttatactggc

SEQ ID NO: 4856565 - DNA, 25 bp, Homo sapien
tataaagtaacttgatgtgaattcc

SEQ ID NO: 4856566 - DNA, 25 bp, Homo sapien
ataaagtaacttgatgtgaattcct

SEQ ID NO: 4856567 - DNA, 25 bp, Homo sapien
taaagtaacttgatgtgaattcctt

SEQ ID NO: 4856568 - DNA, 25 bp, Homo sapien
gttataaagtaacttgatgtgaatt

SEQ ID NO: 4856569 - DNA, 25 bp, Homo sapien
tggattcggacacccacatgattgg

SEQ ID NO: 4856570 - DNA, 25 bp, Homo sapien
ccacatgattggttatcaagaagac

SEQ ID NO: 4856571 - DNA, 25 bp, Homo sapien
tttgaggtggccacgatcaacagca

SEQ ID NO: 4856572 - DNA, 25 bp, Homo sapien
tggatataatcaggtccgctggatt

SEQ ID NO: 4856573 - DNA, 25 bp, Homo sapien
tccagtctgatgctgtgtagtttcc

SEQ ID NO: 4856574 - DNA, 25 bp, Homo sapien
tctgatgctgtgtagtttcctttat

SEQ ID NO: 4856575 - DNA, 25 bp, Homo sapien
cagtctgatgctgtgtagtttcctt

SEQ ID NO: 4856576 - DNA, 25 bp, Homo sapien
gtctgatgctgtgtagtttccttta

SEQ ID NO: 4856577 - DNA, 25 bp, Homo sapien
gagactgccccaattgggagaaagc

SEQ ID NO: 4856578 - DNA, 25 bp, Homo sapien
tgagactgccccaattgggagaaag

SEQ ID NO: 4856579 - DNA, 25 bp, Homo sapien
gactgccccaattgggagaaagcag

SEQ ID NO: 4856580 - DNA, 25 bp, Homo sapien
tgccccaattgggagaaagcagcag

SEQ ID NO: 4856581 - DNA, 25 bp, Homo sapien
catgacaggccacagataaacccgc

SEQ ID NO: 4856582 - DNA, 25 bp, Homo sapien
taatctattacagtggagagcacag

SEQ ID NO: 4856583 - DNA, 25 bp, Homo sapien
cagttggagcctgaaatgactccat

SEQ ID NO: 4856584 - DNA, 25 bp, Homo sapien
gataaacccgcatctgggtaatcta

SEQ ID NO: 4856585 - DNA, 25 bp, Homo sapien
taagggatttcctactgggacacag

SEQ ID NO: 4856586 - DNA, 25 bp, Homo sapien
caggctcccagtgttgttacaaatg

SEQ ID NO: 4856587 - DNA, 25 bp, Homo sapien
tttagaatgagacaaccaaccagtt

SEQ ID NO: 4856588 - DNA, 25 bp, Homo sapien
aatggttctgcgctaaagttagtcc

SEQ ID NO: 4856589 - DNA, 25 bp, Homo sapien
tggctactggacagccaacagtctc

SEQ ID NO: 4856590 - DNA, 25 bp, Homo sapien
cagtctctacaaatgcaggttccat

SEQ ID NO: 4856591 - DNA, 25 bp, Homo sapien
cagccaacagtctctacaaatgcag

SEQ ID NO: 4856592 - DNA, 25 bp, Homo sapien
ctgactggctactggacagccaaca

SEQ ID NO: 4856593 - DNA, 25 bp, Homo sapien
aactctagtcgtagtgtttgcggaa

SEQ ID NO: 4856594 - DNA, 25 bp, Homo sapien
ggctctctggcaatgaactgaggta

SEQ ID NO: 4856595 - DNA, 25 bp, Homo sapien
ggaatttcaggatcgaagcggatgc

SEQ ID NO: 4856596 - DNA, 25 bp, Homo sapien
gccatcttcgtgtttgccttagcaa

SEQ ID NO: 4856597 - DNA, 25 bp, Homo sapien
ttcgtggtcctgttaaaaagagcat

SEQ ID NO: 4856598 - DNA, 25 bp, Homo sapien
tttgtatagcatgtcgtaatctggc

SEQ ID NO: 4856599 - DNA, 25 bp, Homo sapien
ggctggcaaattcactaaaaaggca

SEQ ID NO: 4856600 - DNA, 25 bp, Homo sapien
taccctgtcatggaaactatctggc

SEQ ID NO: 4856601 - DNA, 25 bp, Homo sapien
gcaagtgggtttgtccgtgtagacc

SEQ ID NO: 4856602 - DNA, 25 bp, Homo sapien
caattctgagtacaatgcaagtggg

SEQ ID NO: 4856603 - DNA, 25 bp, Homo sapien
tatgtgacggtcaagttcccagttc

SEQ ID NO: 4856604 - DNA, 25 bp, Homo sapien
gaccaccttgagtaccaattctgag

SEQ ID NO: 4856605 - DNA, 25 bp, Homo sapien
acaggaatgatcaaccaagcccagt

SEQ ID NO: 4856606 - DNA, 25 bp, Homo sapien
ggtgagcgctgccacgcctagttaa

SEQ ID NO: 4856607 - DNA, 25 bp, Homo sapien
aagcccagtctgaagcttgattttt

SEQ ID NO: 4856608 - DNA, 25 bp, Homo sapien
ttcaataagaagttgaccagccctg

SEQ ID NO: 4856609 - DNA, 25 bp, Homo sapien
cctgttatttgtttacagctgttca

SEQ ID NO: 4856610 - DNA, 25 bp, Homo sapien
tatttgtttacagctgttcaatgat

SEQ ID NO: 4856611 - DNA, 25 bp, Homo sapien
tgtttacagctgttcaatgatttaa

SEQ ID NO: 4856612 - DNA, 25 bp, Homo sapien
cctgagttcctgttatttgtttaca

SEQ ID NO: 4856613 - DNA, 25 bp, Homo sapien
tgcgtggaccatgcttttgagaact

SEQ ID NO: 4856614 - DNA, 25 bp, Homo sapien
tattaaggtgccagtagttatgtcc

SEQ ID NO: 4856615 - DNA, 25 bp, Homo sapien
tgtactcccttaaggaatctcagag

SEQ ID NO: 4856616 - DNA, 25 bp, Homo sapien
taaaagggagcctgcatcaacaatg

SEQ ID NO: 4856617 - DNA, 25 bp, Homo sapien
tacttctgagacgactaaagcagca

SEQ ID NO: 4856618 - DNA, 25 bp, Homo sapien
tctagatttcctaaatgcggcacaa

SEQ ID NO: 4856619 - DNA, 25 bp, Homo sapien
taagcaggatccagttaacctgtgc

SEQ ID NO: 4856620 - DNA, 25 bp, Homo sapien
tcagccatgtgggaccataagcagg

SEQ ID NO: 4856621 - DNA, 25 bp, Homo sapien
caagtgtaggtcatactggcttaca

SEQ ID NO: 4856622 - DNA, 25 bp, Homo sapien
tcaggaggggttaacgataatgtat

SEQ ID NO: 4856623 - DNA, 25 bp, Homo sapien
tctatcaagtgtaggtcatactggc

SEQ ID NO: 4856624 - DNA, 25 bp, Homo sapien
tctctgctccatctatcaagtgtag

SEQ ID NO: 4856625 - DNA, 25 bp, Homo sapien
taacagtgataggtcgtattgggca

SEQ ID NO: 4856626 - DNA, 25 bp, Homo sapien
tattgggcacctagggaagcacctc

SEQ ID NO: 4856627 - DNA, 25 bp, Homo sapien
caaaacaaggtccactgaggcagtc

SEQ ID NO: 4856628 - DNA, 25 bp, Homo sapien
taatgactgcggtatactgaaaccc

SEQ ID NO: 4856629 - DNA, 25 bp, Homo sapien
gccctgactcaatgtgacgtttgga

SEQ ID NO: 4856630 - DNA, 25 bp, Homo sapien
ggaggacattatgcccacatgatac

SEQ ID NO: 4856631 - DNA, 25 bp, Homo sapien
gagaggatcctaccgtttgcaacaa

SEQ ID NO: 4856632 - DNA, 25 bp, Homo sapien
aataagcattcccataccaagagcc

SEQ ID NO: 4856633 - DNA, 25 bp, Homo sapien
gccctttttaggatggagctacaga

SEQ ID NO: 4856634 - DNA, 25 bp, Homo sapien
tatctttagatgagaatcaggtcca

SEQ ID NO: 4856635 - DNA, 25 bp, Homo sapien
gagcgctatctgaatcatcaccctg

SEQ ID NO: 4856636 - DNA, 25 bp, Homo sapien
gtaactcacttcaaggttttgccag

SEQ ID NO: 4856637 - DNA, 25 bp, Homo sapien
cagggccatttcatctgttaattcc

SEQ ID NO: 4856638 - DNA, 25 bp, Homo sapien
cttccagggccatttcatctgttaa

SEQ ID NO: 4856639 - DNA, 25 bp, Homo sapien
agcttccagggccatttcatctgtt

SEQ ID NO: 4856640 - DNA, 25 bp, Homo sapien
tccagggccatttcatctgttaatt

SEQ ID NO: 4856641 - DNA, 25 bp, Homo sapien
taaatggatcatgaagcccacagca

SEQ ID NO: 4856642 - DNA, 25 bp, Homo sapien
tctcacactgtgctgaggcccagca

SEQ ID NO: 4856643 - DNA, 25 bp, Homo sapien
taaccaacggttgtaggccagctag

SEQ ID NO: 4856644 - DNA, 25 bp, Homo sapien
gactgggctgtgtatgtaaccaacg

SEQ ID NO: 4856645 - DNA, 25 bp, Homo sapien
gttaagacctaatgacccaccatgg

SEQ ID NO: 4856646 - DNA, 25 bp, Homo sapien
ggaaccaaatcctattgcagagact

SEQ ID NO: 4856647 - DNA, 25 bp, Homo sapien
tagtacctctccgaaagcaatgtga

SEQ ID NO: 4856648 - DNA, 25 bp, Homo sapien
catggtcacaggtatgtcccggctc

SEQ ID NO: 4856649 - DNA, 25 bp, Homo sapien
aaaaaatggcaggtttatgtcatat

SEQ ID NO: 4856650 - DNA, 25 bp, Homo sapien
tacaggcatgcagttagagttttta

SEQ ID NO: 4856651 - DNA, 25 bp, Homo sapien
tttggtagagacgtgggctttacca

SEQ ID NO: 4856652 - DNA, 25 bp, Homo sapien
actgtgaatataattgatgtcactg

SEQ ID NO: 4856653 - DNA, 25 bp, Homo sapien
gttgctttccttcacctcccttgct

SEQ ID NO: 4856654 - DNA, 25 bp, Homo sapien
cacgttgccactgaaggataatccc

SEQ ID NO: 4856655 - DNA, 25 bp, Homo sapien
cacctcccttgctttcagaggcagg

SEQ ID NO: 4856656 - DNA, 25 bp, Homo sapien
ttcagaggcaggctaggttccacgt

SEQ ID NO: 4856657 - DNA, 25 bp, Homo sapien
ctgctctaggaactcagcaactcca

SEQ ID NO: 4856658 - DNA, 25 bp, Homo sapien
tgctctaggaactcagcaactccac

SEQ ID NO: 4856659 - DNA, 25 bp, Homo sapien
caactccaccacccccgttcttctg

SEQ ID NO: 4856660 - DNA, 25 bp, Homo sapien
tgcaatcaagtctggatgtttaaca

SEQ ID NO: 4856661 - DNA, 25 bp, Homo sapien
cattagcagaatattccaagtgtct

SEQ ID NO: 4856662 - DNA, 25 bp, Homo sapien
tggcattagcagaatattccaagtg

SEQ ID NO: 4856663 - DNA, 25 bp, Homo sapien
tttgacaactgcaatcaagtctgga

SEQ ID NO: 4856664 - DNA, 25 bp, Homo sapien
caagatcatgagtccagacccttca

SEQ ID NO: 4856665 - DNA, 25 bp, Homo sapien
tgagacacagcgaggttaaatatcc

SEQ ID NO: 4856666 - DNA, 25 bp, Homo sapien
gttaaatatccagcccaacgactct

SEQ ID NO: 4856667 - DNA, 25 bp, Homo sapien
cagcgaggttaaatatccagcccaa

SEQ ID NO: 4856668 - DNA, 25 bp, Homo sapien
tgtctcttaattcagtcatgtcact

SEQ ID NO: 4856669 - DNA, 25 bp, Homo sapien
cctaggacttatttgaggttgcagt

SEQ ID NO: 4856670 - DNA, 25 bp, Homo sapien
tgggaggttcactcgaacctaggac

SEQ ID NO: 4856671 - DNA, 25 bp, Homo sapien
tctcttaattcagtcatgtcactcc

SEQ ID NO: 4856672 - DNA, 25 bp, Homo sapien
tcaaaagatacgtggtctgaccagg

SEQ ID NO: 4856673 - DNA, 25 bp, Homo sapien
catacactcctttgacggaaatggg

SEQ ID NO: 4856674 - DNA, 25 bp, Homo sapien
taactttccagtatgagcctgagca

SEQ ID NO: 4856675 - DNA, 25 bp, Homo sapien
taacgtattagtgaggcagaagcct

SEQ ID NO: 4856676 - DNA, 25 bp, Homo sapien
gaaaaccatggcttaacggcagggc

SEQ ID NO: 4856677 - DNA, 25 bp, Homo sapien
tgatgtctttccgactgtagctggg

SEQ ID NO: 4856678 - DNA, 25 bp, Homo sapien
ccacaaatgctaagtaagggaacga

SEQ ID NO: 4856679 - DNA, 25 bp, Homo sapien
caggaaatgcgaccctctgaggaaa

SEQ ID NO: 4856680 - DNA, 25 bp, Homo sapien
taaagtgcaggcactgtgagctcat

SEQ ID NO: 4856681 - DNA, 25 bp, Homo sapien
gggctactggggtaaagtgcaggca

SEQ ID NO: 4856682 - DNA, 25 bp, Homo sapien
tactggggtaaagtgcaggcactgt

SEQ ID NO: 4856683 - DNA, 25 bp, Homo sapien
ttcagggctactggggtaaagtgca

SEQ ID NO: 4856684 - DNA, 25 bp, Homo sapien
gcgctaactccgctgggtacagagg

SEQ ID NO: 4856685 - DNA, 25 bp, Homo sapien
gtagagcaggcgctaactccgctgg

SEQ ID NO: 4856686 - DNA, 25 bp, Homo sapien
gcaggcgctaactccgctgggtaca

SEQ ID NO: 4856687 - DNA, 25 bp, Homo sapien
taactccgctgggtacagagggtac

SEQ ID NO: 4856688 - DNA, 25 bp, Homo sapien
gcagtgaagcgggataggtgaaagc

SEQ ID NO: 4856689 - DNA, 25 bp, Homo sapien
cagtgaagcgggataggtgaaagca

SEQ ID NO: 4856690 - DNA, 25 bp, Homo sapien
ctgggcatgcagtgaagcgggatag

SEQ ID NO: 4856691 - DNA, 25 bp, Homo sapien
gcatgcagtgaagcgggataggtga

SEQ ID NO: 4856692 - DNA, 25 bp, Homo sapien
tcttctcaccgtacacgagagtgga

SEQ ID NO: 4856693 - DNA, 25 bp, Homo sapien
tacactctggtgatgccctctagct

SEQ ID NO: 4856694 - DNA, 25 bp, Homo sapien
tatcattgctgtcagacgatcctcg

SEQ ID NO: 4856695 - DNA, 25 bp, Homo sapien
gaagtcctggccgatgggtatcaat

SEQ ID NO: 4856696 - DNA, 25 bp, Homo sapien
tccatcttagacactatcttgtatc

SEQ ID NO: 4856697 - DNA, 25 bp, Homo sapien
taattccatcttagacactatcttg

SEQ ID NO: 4856698 - DNA, 25 bp, Homo sapien
tgtaattccatcttagacactatct

SEQ ID NO: 4856699 - DNA, 25 bp, Homo sapien
catcttagacactatcttgtatctc

SEQ ID NO: 4856700 - DNA, 25 bp, Homo sapien
agctggtcagaatagagatctctac

SEQ ID NO: 4856701 - DNA, 25 bp, Homo sapien
taatctttgcggagaaacaggaagt

SEQ ID NO: 4856702 - DNA, 25 bp, Homo sapien
cacttgcactaaaagcgaagctaag

SEQ ID NO: 4856703 - DNA, 25 bp, Homo sapien
tacactgattactaccacttgcact

SEQ ID NO: 4856704 - DNA, 25 bp, Homo sapien
tctgcctgtccagcctaataatttt

SEQ ID NO: 4856705 - DNA, 25 bp, Homo sapien
tttatttcacccagccttgtaaaca

SEQ ID NO: 4856706 - DNA, 25 bp, Homo sapien
caggcaaacgaaaactctgcctgtc

SEQ ID NO: 4856707 - DNA, 25 bp, Homo sapien
atttaaaggctgaattacacatgca

SEQ ID NO: 4856708 - DNA, 25 bp, Homo sapien
tgcttctaggtggtctttatcaaga

SEQ ID NO: 4856709 - DNA, 25 bp, Homo sapien
taggtggtctttatcaagacaggga

SEQ ID NO: 4856710 - DNA, 25 bp, Homo sapien
tctaggtggtctttatcaagacagg

SEQ ID NO: 4856711 - DNA, 25 bp, Homo sapien
gcttctaggtggtctttatcaagac

SEQ ID NO: 4856712 - DNA, 25 bp, Homo sapien
aggaagccgggtcatcaatgcacgc

SEQ ID NO: 4856713 - DNA, 25 bp, Homo sapien
gcacaacgtgttggtaactcagaat

SEQ ID NO: 4856714 - DNA, 25 bp, Homo sapien
aacatagagggcaatcattactggg

SEQ ID NO: 4856715 - DNA, 25 bp, Homo sapien
tgtgccatgtactctcaaccaccaa

SEQ ID NO: 4856716 - DNA, 25 bp, Homo sapien
ctgccagttgtgagggttcccaagc

SEQ ID NO: 4856717 - DNA, 25 bp, Homo sapien
tgccagttgtgagggttcccaagca

SEQ ID NO: 4856718 - DNA, 25 bp, Homo sapien
tgtacccggcagtctagcaagagga

SEQ ID NO: 4856719 - DNA, 25 bp, Homo sapien
tgctacaaagatcctaatgactcag

SEQ ID NO: 4856720 - DNA, 25 bp, Homo sapien
aagaggagacaccatccagagcagg

SEQ ID NO: 4856721 - DNA, 25 bp, Homo sapien
taattgccacgtgatctgtacccgg

SEQ ID NO: 4856722 - DNA, 25 bp, Homo sapien
ggccaaaagccactattcccagtac

SEQ ID NO: 4856723 - DNA, 25 bp, Homo sapien
gttgctgactaaccaaagccatggc

SEQ ID NO: 4856724 - DNA, 25 bp, Homo sapien
gatgtggcagagctaagtggattcc

SEQ ID NO: 4856725 - DNA, 25 bp, Homo sapien
tcttgattatccagggtaagggtga

SEQ ID NO: 4856726 - DNA, 25 bp, Homo sapien
ccagcacctcggagtggaaagagcc

SEQ ID NO: 4856727 - DNA, 25 bp, Homo sapien
taagtgctgattccctttgctttgc

SEQ ID NO: 4856728 - DNA, 25 bp, Homo sapien
tagtcatggtagagccccttcagat

SEQ ID NO: 4856729 - DNA, 25 bp, Homo sapien
tccaaagagtcactggagtgaggcc

SEQ ID NO: 4856730 - DNA, 25 bp, Homo sapien
ggtatgttacaaacacattcccaga

SEQ ID NO: 4856731 - DNA, 25 bp, Homo sapien
gttggtatgttacaaacacattccc

SEQ ID NO: 4856732 - DNA, 25 bp, Homo sapien
taggttggtatgttacaaacacatt

SEQ ID NO: 4856733 - DNA, 25 bp, Homo sapien
cagtaggttggtatgttacaaacac

SEQ ID NO: 4856734 - DNA, 25 bp, Homo sapien
gaaatctctcaaaggtcgtcaagaa

SEQ ID NO: 4856735 - DNA, 25 bp, Homo sapien
tctctcaaaggtcgtcaagaaatag

SEQ ID NO: 4856736 - DNA, 25 bp, Homo sapien
ttttattgaaatctctcaaaggtcg

SEQ ID NO: 4856737 - DNA, 25 bp, Homo sapien
ctcaaaggtcgtcaagaaatagttt

SEQ ID NO: 4856738 - DNA, 25 bp, Homo sapien
gatgagacgcttccaacatgcagct

SEQ ID NO: 4856739 - DNA, 25 bp, Homo sapien
tagacgcagcatccctgctgaagtg

SEQ ID NO: 4856740 - DNA, 25 bp, Homo sapien
gggctcccctagctagacgcagcat

SEQ ID NO: 4856741 - DNA, 25 bp, Homo sapien
aggtctcctggtggatgagacgctt

SEQ ID NO: 4856742 - DNA, 25 bp, Homo sapien
tgttactctggacaaatgaggcctc

SEQ ID NO: 4856743 - DNA, 25 bp, Homo sapien
gtacagcagccctattagaaatccg

SEQ ID NO: 4856744 - DNA, 25 bp, Homo sapien
tatgtccaggtaagctgtacagcag

SEQ ID NO: 4856745 - DNA, 25 bp, Homo sapien
gagctcccttcctggttagcctatg

SEQ ID NO: 4856746 - DNA, 25 bp, Homo sapien
cggagcgctcaaggggtggcttctc

SEQ ID NO: 4856747 - DNA, 25 bp, Homo sapien
ggcactatcaggagacggagcgctc

SEQ ID NO: 4856748 - DNA, 25 bp, Homo sapien
actatcaggagacggagcgctcaag

SEQ ID NO: 4856749 - DNA, 25 bp, Homo sapien
tctcctcacagtctgaccttcacag

SEQ ID NO: 4856750 - DNA, 25 bp, Homo sapien
tcaggaggcaggcatagaaatcgcc

SEQ ID NO: 4856751 - DNA, 25 bp, Homo sapien
tagcagcccctgttagtgtcatcca

SEQ ID NO: 4856752 - DNA, 25 bp, Homo sapien
catgaagcccttctaatatgccggg

SEQ ID NO: 4856753 - DNA, 25 bp, Homo sapien
tgctcaattgaggtcgcacagcgtg

SEQ ID NO: 4856754 - DNA, 25 bp, Homo sapien
ctcttttggataagctctcccagtg

SEQ ID NO: 4856755 - DNA, 25 bp, Homo sapien
tccggtggccgtgtccagcctggtt

SEQ ID NO: 4856756 - DNA, 25 bp, Homo sapien
ttccggtggccgtgtccagcctggt

SEQ ID NO: 4856757 - DNA, 25 bp, Homo sapien
gcccctcttttggataagctctccc

SEQ ID NO: 4856758 - DNA, 25 bp, Homo sapien
gcaagggccattccgtcgctgggat

SEQ ID NO: 4856759 - DNA, 25 bp, Homo sapien
aagtaactcgtgagggcaagggcca

SEQ ID NO: 4856760 - DNA, 25 bp, Homo sapien
cgataggaaagtgagataaggctgc

SEQ ID NO: 4856761 - DNA, 25 bp, Homo sapien
tctccagtttctccgataggaaagt

SEQ ID NO: 4856762 - DNA, 25 bp, Homo sapien
aagtgccagaaagtccagggaggaa

SEQ ID NO: 4856763 - DNA, 25 bp, Homo sapien
tgtgaagagagcaatatccccaagt

SEQ ID NO: 4856764 - DNA, 25 bp, Homo sapien
tacaagctgtaactccattgcctgg

SEQ ID NO: 4856765 - DNA, 25 bp, Homo sapien
ctgaggagaatactagcagaaggac

SEQ ID NO: 4856766 - DNA, 25 bp, Homo sapien
tctggacaaaagaacacgtctccct

SEQ ID NO: 4856767 - DNA, 25 bp, Homo sapien
gtctccctaacaccctggacggatg

SEQ ID NO: 4856768 - DNA, 25 bp, Homo sapien
gaaggacaaaatgctgatgtctctc

SEQ ID NO: 4856769 - DNA, 25 bp, Homo sapien
gactctggtttctgaacggcatttc

SEQ ID NO: 4856770 - DNA, 25 bp, Homo sapien
taaccttccgcaaaggacaacatgg

SEQ ID NO: 4856771 - DNA, 25 bp, Homo sapien
cacgcggttgttaatcccagggaag

SEQ ID NO: 4856772 - DNA, 25 bp, Homo sapien
gaggaggcccacgttgagatgttct

SEQ ID NO: 4856773 - DNA, 25 bp, Homo sapien
tccaggtgcgacttgttgggactca

SEQ ID NO: 4856774 - DNA, 25 bp, Homo sapien
gactgtgagtacatcctggtaagcc

SEQ ID NO: 4856775 - DNA, 25 bp, Homo sapien
taaagcacgttaggccattacagca

SEQ ID NO: 4856776 - DNA, 25 bp, Homo sapien
tcaagggccattagaggtccccagg

SEQ ID NO: 4856777 - DNA, 25 bp, Homo sapien
taactatgtttgctatcaagggcca

SEQ ID NO: 4856778 - DNA, 25 bp, Homo sapien
gacatttagtctgcgtcagagaccg

SEQ ID NO: 4856779 - DNA, 25 bp, Homo sapien
acacagcctgtgacatctaaggcaa

SEQ ID NO: 4856780 - DNA, 25 bp, Homo sapien
caacgtggacgaccctgggaatctt

SEQ ID NO: 4856781 - DNA, 25 bp, Homo sapien
tcagagaccgcgctaagcacttcac

SEQ ID NO: 4856782 - DNA, 25 bp, Homo sapien
gagagggttctctcttagccccatt

SEQ ID NO: 4856783 - DNA, 25 bp, Homo sapien
tcttagccccattcgggctgcttgt

SEQ ID NO: 4856784 - DNA, 25 bp, Homo sapien
ggttctctcttagccccattcgggc

SEQ ID NO: 4856785 - DNA, 25 bp, Homo sapien
tgaggagagggttctctcttagccc

SEQ ID NO: 4856786 - DNA, 25 bp, Homo sapien
ccggcagagcggcagggctcatggt

SEQ ID NO: 4856787 - DNA, 25 bp, Homo sapien
ggaacaagctgctccgcgctaatca

SEQ ID NO: 4856788 - DNA, 25 bp, Homo sapien
cagggctcatggtgcacagcagagt

SEQ ID NO: 4856789 - DNA, 25 bp, Homo sapien
cacagcagagttcgggcagccggcc

SEQ ID NO: 4856790 - DNA, 25 bp, Homo sapien
cccccctggccaagtctgagcggct

SEQ ID NO: 4856791 - DNA, 25 bp, Homo sapien
ggcagtgcccccctggccaagtctg

SEQ ID NO: 4856792 - DNA, 25 bp, Homo sapien
ccctggccaagtctgagcggctcat

SEQ ID NO: 4856793 - DNA, 25 bp, Homo sapien
tgagaggctccgctgcgcccagctt

SEQ ID NO: 4856794 - DNA, 25 bp, Homo sapien
ctgaggagtgaggacgccagtgatg

SEQ ID NO: 4856795 - DNA, 25 bp, Homo sapien
gctgaggagtgaggacgccagtgat

SEQ ID NO: 4856796 - DNA, 25 bp, Homo sapien
agctgaggagtgaggacgccagtga

SEQ ID NO: 4856797 - DNA, 25 bp, Homo sapien
gagtgacatgaaggcgggttccgag

SEQ ID NO: 4856798 - DNA, 25 bp, Homo sapien
ctggtcgaggcgcactccagagtga

SEQ ID NO: 4856799 - DNA, 25 bp, Homo sapien
tggtcgaggcgcactccagagtgac

SEQ ID NO: 4856800 - DNA, 25 bp, Homo sapien
gtgcagcccgtcttcaggctctcgt

SEQ ID NO: 4856801 - DNA, 25 bp, Homo sapien
tctgctttcggtgcaggtgactgcg

SEQ ID NO: 4856802 - DNA, 25 bp, Homo sapien
tgcacagtggatggcatggttctgc

SEQ ID NO: 4856803 - DNA, 25 bp, Homo sapien
cgtgacggtgtttcacaggagacac

SEQ ID NO: 4856804 - DNA, 25 bp, Homo sapien
acggctcatggcctggtgcatctga

SEQ ID NO: 4856805 - DNA, 25 bp, Homo sapien
gtgcatctgaatccacttgctcact

SEQ ID NO: 4856806 - DNA, 25 bp, Homo sapien
cggctcatggcctggtgcatctgaa

SEQ ID NO: 4856807 - DNA, 25 bp, Homo sapien
tccacttgctcactaagcaaagagc

SEQ ID NO: 4856808 - DNA, 25 bp, Homo sapien
gaaacgcaggcttaggacataccgg

SEQ ID NO: 4856809 - DNA, 25 bp, Homo sapien
gatatgaccagcgatcagatgacca

SEQ ID NO: 4856810 - DNA, 25 bp, Homo sapien
cttgtccctggtccgagcacaaggc

SEQ ID NO: 4856811 - DNA, 25 bp, Homo sapien
tgcattgggtctcttctggcgacca

SEQ ID NO: 4856812 - DNA, 25 bp, Homo sapien
tgagaggcgttccacacaccattat

SEQ ID NO: 4856813 - DNA, 25 bp, Homo sapien
tgaaaagcatcagagcggtgtcctg

SEQ ID NO: 4856814 - DNA, 25 bp, Homo sapien
catttgaggctaagatccggcacag

SEQ ID NO: 4856815 - DNA, 25 bp, Homo sapien
cattctcacggagggtcctgcttgg

SEQ ID NO: 4856816 - DNA, 25 bp, Homo sapien
agaactgacgggacttccagccctg

SEQ ID NO: 4856817 - DNA, 25 bp, Homo sapien
aactgacgggacttccagccctgag

SEQ ID NO: 4856818 - DNA, 25 bp, Homo sapien
tgacgggacttccagccctgagaag

SEQ ID NO: 4856819 - DNA, 25 bp, Homo sapien
ctgacgggacttccagccctgagaa

SEQ ID NO: 4856820 - DNA, 25 bp, Homo sapien
aggggcttcgcacattccaaaggaa

SEQ ID NO: 4856821 - DNA, 25 bp, Homo sapien
gtgttctaggggcttcgcacattcc

SEQ ID NO: 4856822 - DNA, 25 bp, Homo sapien
gttctaggggcttcgcacattccaa

SEQ ID NO: 4856823 - DNA, 25 bp, Homo sapien
ctaggggcttcgcacattccaaagg

SEQ ID NO: 4856824 - DNA, 25 bp, Homo sapien
tgtcatggaatagggagctgctcac

SEQ ID NO: 4856825 - DNA, 25 bp, Homo sapien
tggagagctcaacacactgtcatgg

SEQ ID NO: 4856826 - DNA, 25 bp, Homo sapien
ggtcagtgtttcaagccatgccttc

SEQ ID NO: 4856827 - DNA, 25 bp, Homo sapien
agggtccgctcagtgccatctggag

SEQ ID NO: 4856828 - DNA, 25 bp, Homo sapien
tcctgaagcatctgactgacagaag

SEQ ID NO: 4856829 - DNA, 25 bp, Homo sapien
aagtggccggcgcaccctgcttctc

SEQ ID NO: 4856830 - DNA, 25 bp, Homo sapien
cctgaagcatctgactgacagaagt

SEQ ID NO: 4856831 - DNA, 25 bp, Homo sapien
gactgacagaagtggccggcgcacc

SEQ ID NO: 4856832 - DNA, 25 bp, Homo sapien
tttgcccacttctctaccaactgaa

SEQ ID NO: 4856833 - DNA, 25 bp, Homo sapien
ggaacccacgcaactgcttcacaat

SEQ ID NO: 4856834 - DNA, 25 bp, Homo sapien
ctgtggcctacataaattcttaagg

SEQ ID NO: 4856835 - DNA, 25 bp, Homo sapien
ctgaaattgccaagttgaaggtctt

SEQ ID NO: 4856836 - DNA, 25 bp, Homo sapien
tcttattcggatctagggcttctat

SEQ ID NO: 4856837 - DNA, 25 bp, Homo sapien
gggcttctattagccgtacttccaa

SEQ ID NO: 4856838 - DNA, 25 bp, Homo sapien
tattcttattcggatcttattcgga

SEQ ID NO: 4856839 - DNA, 25 bp, Homo sapien
caattgttcgtccttctagtagcca

SEQ ID NO: 4856840 - DNA, 25 bp, Homo sapien
gcgcccaccaccatgcttgggtaat

SEQ ID NO: 4856841 - DNA, 25 bp, Homo sapien
cgcccaccaccatgcttgggtaatt

SEQ ID NO: 4856842 - DNA, 25 bp, Homo sapien
ggcttgcgtctcctcactgggaaaa

SEQ ID NO: 4856843 - DNA, 25 bp, Homo sapien
ctttagagctcagatgggaaccata

SEQ ID NO: 4856844 - DNA, 25 bp, Homo sapien
aaagaattgcagaaccaggcttgcg

SEQ ID NO: 4856845 - DNA, 25 bp, Homo sapien
gccgtaccacaacactgagctgctt

SEQ ID NO: 4856846 - DNA, 25 bp, Homo sapien
catttcccgggaggctgtatttcta

SEQ ID NO: 4856847 - DNA, 25 bp, Homo sapien
gatatctggctacttgtaccctagg

SEQ ID NO: 4856848 - DNA, 25 bp, Homo sapien
tgggcttcagctaatcagtgcgact

SEQ ID NO: 4856849 - DNA, 25 bp, Homo sapien
catacaagtactgggatcctgggac

SEQ ID NO: 4856850 - DNA, 25 bp, Homo sapien
gaactcttcgctgagggcgcattag

SEQ ID NO: 4856851 - DNA, 25 bp, Homo sapien
tagacccggaggactgtccaaaggc

SEQ ID NO: 4856852 - DNA, 25 bp, Homo sapien
agcaagcaggactctacacccacgt

SEQ ID NO: 4856853 - DNA, 25 bp, Homo sapien
gcggagcaagtaagaggaggcttct

SEQ ID NO: 4856854 - DNA, 25 bp, Homo sapien
tatgcgacatgaaaagctctcagcc

SEQ ID NO: 4856855 - DNA, 25 bp, Homo sapien
cagaatggccttggatatgcgacat

SEQ ID NO: 4856856 - DNA, 25 bp, Homo sapien
agccaagagaggcaacgccgaaaga

SEQ ID NO: 4856857 - DNA, 25 bp, Homo sapien
gcaacgccgaaagagatcaaaggcc

SEQ ID NO: 4856858 - DNA, 25 bp, Homo sapien
cgttaacggtgcacagtaacctcca

SEQ ID NO: 4856859 - DNA, 25 bp, Homo sapien
gcctcggtcttgaagaccggcctgt

SEQ ID NO: 4856860 - DNA, 25 bp, Homo sapien
ggctgcctcggtcttgaagaccggc

SEQ ID NO: 4856861 - DNA, 25 bp, Homo sapien
tgggatggagaaagatcacccgtta

SEQ ID NO: 4856862 - DNA, 25 bp, Homo sapien
cagttttgtagaacagctagagaac

SEQ ID NO: 4856863 - DNA, 25 bp, Homo sapien
cattaatacccacaagacagattgc

SEQ ID NO: 4856864 - DNA, 25 bp, Homo sapien
acagtagccaccactgaagattgca

SEQ ID NO: 4856865 - DNA, 25 bp, Homo sapien
tgtagaacagctagagaacagtagc

SEQ ID NO: 4856866 - DNA, 25 bp, Homo sapien
aaaaatgtatcagttgctgtcctgg

SEQ ID NO: 4856867 - DNA, 25 bp, Homo sapien
ttccctggcaggccgtgttggagca

SEQ ID NO: 4856868 - DNA, 25 bp, Homo sapien
tggtgagcaccaaatactggggtga

SEQ ID NO: 4856869 - DNA, 25 bp, Homo sapien
cagatgttaaagagctccgggcaga

SEQ ID NO: 4856870 - DNA, 25 bp, Homo sapien
caggccactttagctttgacaggga

SEQ ID NO: 4856871 - DNA, 25 bp, Homo sapien
tgaaaaagttcacggtctctggagc

SEQ ID NO: 4856872 - DNA, 25 bp, Homo sapien
gaccttctctgtgacgggcgactaa

SEQ ID NO: 4856873 - DNA, 25 bp, Homo sapien
tgaccactgaaacatagcgtacggg

SEQ ID NO: 4856874 - DNA, 25 bp, Homo sapien
gatgtgtgatagaggctgtgacaaa

SEQ ID NO: 4856875 - DNA, 25 bp, Homo sapien
gaggctgtgacaaagtcttgaaggg

SEQ ID NO: 4856876 - DNA, 25 bp, Homo sapien
agatgtgtgatagaggctgtgacaa

SEQ ID NO: 4856877 - DNA, 25 bp, Homo sapien
cagatgtgtgatagaggctgtgaca

SEQ ID NO: 4856878 - DNA, 25 bp, Homo sapien
caggctctgcacttacactgcggga

SEQ ID NO: 4856879 - DNA, 25 bp, Homo sapien
tcacagtgagcacacgccatttggg

SEQ ID NO: 4856880 - DNA, 25 bp, Homo sapien
gaaattttcaacataagccgagcgg

SEQ ID NO: 4856881 - DNA, 25 bp, Homo sapien
tcatggtatgtggtcggtttggccc

SEQ ID NO: 4856882 - DNA, 25 bp, Homo sapien
cctgacaatgggaatgaaatctgct

SEQ ID NO: 4856883 - DNA, 25 bp, Homo sapien
tggctttccccggtatctgcttcct

SEQ ID NO: 4856884 - DNA, 25 bp, Homo sapien
tctttgtgcctaagctcaatggcca

SEQ ID NO: 4856885 - DNA, 25 bp, Homo sapien
aaatctgctggcgtcttgtctgcag

SEQ ID NO: 4856886 - DNA, 25 bp, Homo sapien
taggaccacaggtgctagtactcct

SEQ ID NO: 4856887 - DNA, 25 bp, Homo sapien
aaaaaagagtaggtgagagtatata

SEQ ID NO: 4856888 - DNA, 25 bp, Homo sapien
tctcttggcaattggtgcctggttt

SEQ ID NO: 4856889 - DNA, 25 bp, Homo sapien
cttgggctcaagttgtctttcctct

SEQ ID NO: 4856890 - DNA, 25 bp, Homo sapien
ttttcagactaactggaccgtagaa

SEQ ID NO: 4856891 - DNA, 25 bp, Homo sapien
tggaccgtagaacacccatccctgt

SEQ ID NO: 4856892 - DNA, 25 bp, Homo sapien
ggatggtccaaggacctcttggaaa

SEQ ID NO: 4856893 - DNA, 25 bp, Homo sapien
tgggatggtccaaggacctcttgga

SEQ ID NO: 4856894 - DNA, 25 bp, Homo sapien
ctgcaggttcgaggtctctcagggt

SEQ ID NO: 4856895 - DNA, 25 bp, Homo sapien
ttctgcagcgaggcggagcagccct

SEQ ID NO: 4856896 - DNA, 25 bp, Homo sapien
gaccttcctgcaggttcgaggtctc

SEQ ID NO: 4856897 - DNA, 25 bp, Homo sapien
actgttgacaagctcagcctggtgc

SEQ ID NO: 4856898 - DNA, 25 bp, Homo sapien
agccccagcgttcaagggactgcga

SEQ ID NO: 4856899 - DNA, 25 bp, Homo sapien
ctgtctttatctgtgagccgtttga

SEQ ID NO: 4856900 - DNA, 25 bp, Homo sapien
gactgcgagtggacagccctgtctt

SEQ ID NO: 4856901 - DNA, 25 bp, Homo sapien
ttagtggaaaggcagcgcaggacat

SEQ ID NO: 4856902 - DNA, 25 bp, Homo sapien
gtcacagcctgtaaatgtggccaga

SEQ ID NO: 4856903 - DNA, 25 bp, Homo sapien
taaaaaccgaacatttggctgctgc

SEQ ID NO: 4856904 - DNA, 25 bp, Homo sapien
gcctggacagagtgtaaaaaccgaa

SEQ ID NO: 4856905 - DNA, 25 bp, Homo sapien
taagggaaatgtagtcaagcctgga

SEQ ID NO: 4856906 - DNA, 25 bp, Homo sapien
tctgatttccatgggtcacgtgctg

SEQ ID NO: 4856907 - DNA, 25 bp, Homo sapien
ggatgtgatgaagcctgcagtctgc

SEQ ID NO: 4856908 - DNA, 25 bp, Homo sapien
gatgaagcctgcagtctgcactgtg

SEQ ID NO: 4856909 - DNA, 25 bp, Homo sapien
cagtctctgatttccatgggtcacg

SEQ ID NO: 4856910 - DNA, 25 bp, Homo sapien
cagatgcagcgtaaaaggaagacca

SEQ ID NO: 4856911 - DNA, 25 bp, Homo sapien
gcaagaacgtggaggcagaccagct

SEQ ID NO: 4856912 - DNA, 25 bp, Homo sapien
gctgaaggtcgaacagacactgagg

SEQ ID NO: 4856913 - DNA, 25 bp, Homo sapien
cactggagatcggtgtaaggcgcaa

SEQ ID NO: 4856914 - DNA, 25 bp, Homo sapien
gaaagacacgaagccctgtctgagt

SEQ ID NO: 4856915 - DNA, 25 bp, Homo sapien
gagggacagtagatccttttggaaa

SEQ ID NO: 4856916 - DNA, 25 bp, Homo sapien
gggagtttgtatccactcacaggct

SEQ ID NO: 4856917 - DNA, 25 bp, Homo sapien
tctttgctcctatgagataagagcc

SEQ ID NO: 4856918 - DNA, 25 bp, Homo sapien
ctgtttgtaatgcagtctagtgcac

SEQ ID NO: 4856919 - DNA, 25 bp, Homo sapien
gatgctgctgaagcgatggtatcgt

SEQ ID NO: 4856920 - DNA, 25 bp, Homo sapien
cacaatggagctgacagtttcctct

SEQ ID NO: 4856921 - DNA, 25 bp, Homo sapien
ggagctgtgcttctattggttgaac

SEQ ID NO: 4856922 - DNA, 25 bp, Homo sapien
cacagatggtaagggtgcttatcaa

SEQ ID NO: 4856923 - DNA, 25 bp, Homo sapien
tgttcagtgtagtataatgcagccc

SEQ ID NO: 4856924 - DNA, 25 bp, Homo sapien
tatcaaatagcacaaggcagtcttc

SEQ ID NO: 4856925 - DNA, 25 bp, Homo sapien
taccaagcggtgaaacgaatacatt

SEQ ID NO: 4856926 - DNA, 25 bp, Homo sapien
taaccgagcggctcaaaacattcat

SEQ ID NO: 4856927 - DNA, 25 bp, Homo sapien
tgtcttgtgagtgtattgataaccg

SEQ ID NO: 4856928 - DNA, 25 bp, Homo sapien
gaaagtgtataggtcaggtttatgt

SEQ ID NO: 4856929 - DNA, 25 bp, Homo sapien
gaagtgtctaagcagtttaagaaag

SEQ ID NO: 4856930 - DNA, 25 bp, Homo sapien
tgcagatgcagggcctcaaaaattg

SEQ ID NO: 4856931 - DNA, 25 bp, Homo sapien
gcagatgcagggcctcaaaaattgg

SEQ ID NO: 4856932 - DNA, 25 bp, Homo sapien
cagatgcagggcctcaaaaattggg

SEQ ID NO: 4856933 - DNA, 25 bp, Homo sapien
cttctttaaacttcgatgacaggtg

SEQ ID NO: 4856934 - DNA, 25 bp, Homo sapien
ccttctttaaacttcgatgacaggt

SEQ ID NO: 4856935 - DNA, 25 bp, Homo sapien
ccataccctgttttttaacatatat

SEQ ID NO: 4856936 - DNA, 25 bp, Homo sapien
gaatatgtatatttaagattcaggc

SEQ ID NO: 4856937 - DNA, 25 bp, Homo sapien
taacatatattatttgctagatgaa

SEQ ID NO: 4856938 - DNA, 25 bp, Homo sapien
tgtatatttaagattcaggccaggc

SEQ ID NO: 4856939 - DNA, 25 bp, Homo sapien
tagagattccacttgctcttttgaa

SEQ ID NO: 4856940 - DNA, 25 bp, Homo sapien
agagattccacttgctcttttgaat

SEQ ID NO: 4856941 - DNA, 25 bp, Homo sapien
ttagagattccacttgctcttttga

SEQ ID NO: 4856942 - DNA, 25 bp, Homo sapien
cttagagattccacttgctcttttg

SEQ ID NO: 4856943 - DNA, 25 bp, Homo sapien
aaaaccaaggtactgataaacagag

SEQ ID NO: 4856944 - DNA, 25 bp, Homo sapien
taaacagaggtagtggtttcattcc

SEQ ID NO: 4856945 - DNA, 25 bp, Homo sapien
aataaaagcaggatgacaaagcagg

SEQ ID NO: 4856946 - DNA, 25 bp, Homo sapien
aaagcaggatgacaaagcaggcagt

SEQ ID NO: 4856947 - DNA, 25 bp, Homo sapien
gatgttgtccatcatacttctaaga

SEQ ID NO: 4856948 - DNA, 25 bp, Homo sapien
agcagcagcagtcaagcacttcata

SEQ ID NO: 4856949 - DNA, 25 bp, Homo sapien
aaagccagcaccactaaagatacca

SEQ ID NO: 4856950 - DNA, 25 bp, Homo sapien
gttttctgatgttgtccatcatact

SEQ ID NO: 4856951 - DNA, 25 bp, Homo sapien
tctcagaagaggttgagctgctttc

SEQ ID NO: 4856952 - DNA, 25 bp, Homo sapien
tgctgcttaatattgaactctagga

SEQ ID NO: 4856953 - DNA, 25 bp, Homo sapien
tgttttgtagcaacagttggcctca

SEQ ID NO: 4856954 - DNA, 25 bp, Homo sapien
tttatccagtttttgaagtgtcagt

SEQ ID NO: 4856955 - DNA, 25 bp, Homo sapien
tggccttcagttgctttttaataat

SEQ ID NO: 4856956 - DNA, 25 bp, Homo sapien
gctttttaataattcattaagttga

SEQ ID NO: 4856957 - DNA, 25 bp, Homo sapien
tgtgcctggccttcagttgcttttt

SEQ ID NO: 4856958 - DNA, 25 bp, Homo sapien
cctggccttcagttgctttttaata

SEQ ID NO: 4856959 - DNA, 25 bp, Homo sapien
tcatcatttacattgtctgaggttt

SEQ ID NO: 4856960 - DNA, 25 bp, Homo sapien
ttcatcatttacattgtctgaggtt

SEQ ID NO: 4856961 - DNA, 25 bp, Homo sapien
cttataatccttttgatatctataa

SEQ ID NO: 4856962 - DNA, 25 bp, Homo sapien
cattcatcatttacattgtctgagg

SEQ ID NO: 4856963 - DNA, 25 bp, Homo sapien
tatttagatgttcaaacaaccttgc

SEQ ID NO: 4856964 - DNA, 25 bp, Homo sapien
tatctaatgagatgagcatgttctc

SEQ ID NO: 4856965 - DNA, 25 bp, Homo sapien
cataaatgggtactggatgttgtct

SEQ ID NO: 4856966 - DNA, 25 bp, Homo sapien
catctctattcctgagggacttgat

SEQ ID NO: 4856967 - DNA, 25 bp, Homo sapien
tctttgcctgacacaggtcatgaaa

SEQ ID NO: 4856968 - DNA, 25 bp, Homo sapien
tagctcctgcatttaggtttgtagt

SEQ ID NO: 4856969 - DNA, 25 bp, Homo sapien
cgtgttcttatgaagttgtcccagc

SEQ ID NO: 4856970 - DNA, 25 bp, Homo sapien
gcttattgaccatgtgtattccttg

SEQ ID NO: 4856971 - DNA, 25 bp, Homo sapien
ctcctgtagtagaaaaacgttcagc

SEQ ID NO: 4856972 - DNA, 25 bp, Homo sapien
caaaggtagaacatggaggatcgtc

SEQ ID NO: 4856973 - DNA, 25 bp, Homo sapien
ggatcgtcaggctctaaacaaaatt

SEQ ID NO: 4856974 - DNA, 25 bp, Homo sapien
tgtagcattatggatccaagcctgt

SEQ ID NO: 4856975 - DNA, 25 bp, Homo sapien
agagggaaaattcgcggtctgccgc

SEQ ID NO: 4856976 - DNA, 25 bp, Homo sapien
ttcatagccgggtcctgaggtgcca

SEQ ID NO: 4856977 - DNA, 25 bp, Homo sapien
tcatttaagggcgaagcagcctgct

SEQ ID NO: 4856978 - DNA, 25 bp, Homo sapien
taaaatgatgctcatacgcggactg

SEQ ID NO: 4856979 - DNA, 25 bp, Homo sapien
ctcacgggaagctgggaccgccgtt

SEQ ID NO: 4856980 - DNA, 25 bp, Homo sapien
gcgagtcgtgcgaggctgcccttct

SEQ ID NO: 4856981 - DNA, 25 bp, Homo sapien
gggaggctgagcgtgacctccacct

SEQ ID NO: 4856982 - DNA, 25 bp, Homo sapien
aggaagagggtgcagtgccggcgtg

SEQ ID NO: 4856983 - DNA, 25 bp, Homo sapien
agcgggatagttccgctcccgcggc

SEQ ID NO: 4856984 - DNA, 25 bp, Homo sapien
ccaggacgccagagcgggatagttc

SEQ ID NO: 4856985 - DNA, 25 bp, Homo sapien
gggcacgcaatgacgcatgcgctcg

SEQ ID NO: 4856986 - DNA, 25 bp, Homo sapien
gcatgcgctcgcttggctgccctgg

SEQ ID NO: 4856987 - DNA, 25 bp, Homo sapien
accattgaaagatagcgtcgtcggc

SEQ ID NO: 4856988 - DNA, 25 bp, Homo sapien
caaaaatagtccgtcgtggtggcac

SEQ ID NO: 4856989 - DNA, 25 bp, Homo sapien
taattcaacgacagccacagaatgg

SEQ ID NO: 4856990 - DNA, 25 bp, Homo sapien
tcgcttgtaaaagagctggaaccgc

SEQ ID NO: 4856991 - DNA, 25 bp, Homo sapien
gcaataggggcagcgaccacacttg

SEQ ID NO: 4856992 - DNA, 25 bp, Homo sapien
tctcaagggaagagatagtgaatat

SEQ ID NO: 4856993 - DNA, 25 bp, Homo sapien
gactcaaaagcaatcgggaagaggg

SEQ ID NO: 4856994 - DNA, 25 bp, Homo sapien
tctgtaaagattctctaattgttag

SEQ ID NO: 4856995 - DNA, 25 bp, Homo sapien
catgtaatgtgagaagccggcctgc

SEQ ID NO: 4856996 - DNA, 25 bp, Homo sapien
tgccagcttgctaattttcacagaa

SEQ ID NO: 4856997 - DNA, 25 bp, Homo sapien
ttacccgagtgtggtgatgtgcatc

SEQ ID NO: 4856998 - DNA, 25 bp, Homo sapien
catgctgctgcactcaatcttggac

SEQ ID NO: 4856999 - DNA, 25 bp, Homo sapien
gtgccatcatggcttgtggtagcct

SEQ ID NO: 4857000 - DNA, 25 bp, Homo sapien
gagggtgaacagatccaacagagtc

SEQ ID NO: 4857001 - DNA, 25 bp, Homo sapien
ggcagctttccaagcagagacttta

SEQ ID NO: 4857002 - DNA, 25 bp, Homo sapien
cttttcaggcaggaacggtgtctca

SEQ ID NO: 4857003 - DNA, 25 bp, Homo sapien
cataggtgccagcttaggaataacc

SEQ ID NO: 4857004 - DNA, 25 bp, Homo sapien
gagtctagcactcattagccaatga

SEQ ID NO: 4857005 - DNA, 25 bp, Homo sapien
cagtcatgctcaacagggctctctg

SEQ ID NO: 4857006 - DNA, 25 bp, Homo sapien
ttagtgagtctagcactcattagcc

SEQ ID NO: 4857007 - DNA, 25 bp, Homo sapien
gtcatgctcaacagggctctctgat

SEQ ID NO: 4857008 - DNA, 25 bp, Homo sapien
tctgtggatcacaaaaaccgctact

SEQ ID NO: 4857009 - DNA, 25 bp, Homo sapien
tattcccaaaggagacccagtctct

SEQ ID NO: 4857010 - DNA, 25 bp, Homo sapien
tgctcggatgacctgtgcactgtcc

SEQ ID NO: 4857011 - DNA, 25 bp, Homo sapien
ggcacaggatcgtggcctaccacaa

SEQ ID NO: 4857012 - DNA, 25 bp, Homo sapien
ccagacacacaagggggacagcaga

SEQ ID NO: 4857013 - DNA, 25 bp, Homo sapien
atccgggatcccacgccggagctcc

SEQ ID NO: 4857014 - DNA, 25 bp, Homo sapien
ctatatccgggatcccacgccggag

SEQ ID NO: 4857015 - DNA, 25 bp, Homo sapien
aaaatgccaacaaccccacgtgaag

SEQ ID NO: 4857016 - DNA, 25 bp, Homo sapien
aattacccagctgtgactgtcgaag

SEQ ID NO: 4857017 - DNA, 25 bp, Homo sapien
cgaagtgaagtcagctccggaagtg

SEQ ID NO: 4857018 - DNA, 25 bp, Homo sapien
gaaaaggttcctcgaagtgaagtca

SEQ ID NO: 4857019 - DNA, 25 bp, Homo sapien
gaggcggtcgttctatgcaacattc

SEQ ID NO: 4857020 - DNA, 25 bp, Homo sapien
taagaagagcaagcagtagcaaaat

SEQ ID NO: 4857021 - DNA, 25 bp, Homo sapien
agcaaaatccggccacaaagcaaaa

SEQ ID NO: 4857022 - DNA, 25 bp, Homo sapien
aagaagagcaagcagtagcaaaatc

SEQ ID NO: 4857023 - DNA, 25 bp, Homo sapien
gcagtagcaaaatccggccacaaag

SEQ ID NO: 4857024 - DNA, 25 bp, Homo sapien
cttggggagatttaaatgagttaag

SEQ ID NO: 4857025 - DNA, 25 bp, Homo sapien
cttctctccttgtgcttcttgttgt

SEQ ID NO: 4857026 - DNA, 25 bp, Homo sapien
gtcttttctcattcttttcttcttc

SEQ ID NO: 4857027 - DNA, 25 bp, Homo sapien
ttctcacaagtttttgtcttttctc

SEQ ID NO: 4857028 - DNA, 25 bp, Homo sapien
tctctccttgtgcttcttgttgttt

SEQ ID NO: 4857029 - DNA, 25 bp, Homo sapien
gataaaagcgctcctccagttttct

SEQ ID NO: 4857030 - DNA, 25 bp, Homo sapien
aaacattctctatgtatctgctggc

SEQ ID NO: 4857031 - DNA, 25 bp, Homo sapien
catttgataaaagcgctcctccagt

SEQ ID NO: 4857032 - DNA, 25 bp, Homo sapien
ccgtcatttgataaaagcgctcctc

SEQ ID NO: 4857033 - DNA, 25 bp, Homo sapien
gaccactgcttaatttccaggcttc

SEQ ID NO: 4857034 - DNA, 25 bp, Homo sapien
ttgtgaccactgcttaatttccagg

SEQ ID NO: 4857035 - DNA, 25 bp, Homo sapien
gtgaccactgcttaatttccaggct

SEQ ID NO: 4857036 - DNA, 25 bp, Homo sapien
tgtgaccactgcttaatttccaggc

SEQ ID NO: 4857037 - DNA, 25 bp, Homo sapien
ttgcattgagctgagatggtgccat

SEQ ID NO: 4857038 - DNA, 25 bp, Homo sapien
aacaaaaattagctgaggcagaaga

SEQ ID NO: 4857039 - DNA, 25 bp, Homo sapien
attgcttgaacctgagaggcagagg

SEQ ID NO: 4857040 - DNA, 25 bp, Homo sapien
cctgggcgatggagagagactctgt

SEQ ID NO: 4857041 - DNA, 25 bp, Homo sapien
gtttcaaaagatgtctgacttgtac

SEQ ID NO: 4857042 - DNA, 25 bp, Homo sapien
caggagacggaaattcagttaaagg

SEQ ID NO: 4857043 - DNA, 25 bp, Homo sapien
gaaggttcttcaggtaaatcaggaa

SEQ ID NO: 4857044 - DNA, 25 bp, Homo sapien
agaaggttcttcaggtaaatcagga

SEQ ID NO: 4857045 - DNA, 25 bp, Homo sapien
ctgtttgagaaggttcttcaggtaa

SEQ ID NO: 4857046 - DNA, 25 bp, Homo sapien
ttcttctgctgtttgagaaggttct

SEQ ID NO: 4857047 - DNA, 25 bp, Homo sapien
gcaggcttgcaaaatagtactcatg

SEQ ID NO: 4857048 - DNA, 25 bp, Homo sapien
gctatcacttctttctaaacccaag

SEQ ID NO: 4857049 - DNA, 25 bp, Homo sapien
tcatgttgaggaatttgatactaca

SEQ ID NO: 4857050 - DNA, 25 bp, Homo sapien
ttccaagtaagacccagctacccag

SEQ ID NO: 4857051 - DNA, 25 bp, Homo sapien
ccaaagtgctcggacatatgcctat

SEQ ID NO: 4857052 - DNA, 25 bp, Homo sapien
gtaagcaacgcattttctgacctaa

SEQ ID NO: 4857053 - DNA, 25 bp, Homo sapien
agttctggaaaagcccacgtgtcct

SEQ ID NO: 4857054 - DNA, 25 bp, Homo sapien
ccacgtgtcctatgcctgaggcagt

SEQ ID NO: 4857055 - DNA, 25 bp, Homo sapien
gctaagcagctaaaaaggacttaga

SEQ ID NO: 4857056 - DNA, 25 bp, Homo sapien
gctctttgcaattcctttcattcca

SEQ ID NO: 4857057 - DNA, 25 bp, Homo sapien
aaacagctaagcagctaaaaaggac

SEQ ID NO: 4857058 - DNA, 25 bp, Homo sapien
cagctaaaaaggacttagatactgc

SEQ ID NO: 4857059 - DNA, 25 bp, Homo sapien
aatattcacataagaactccgatcc

SEQ ID NO: 4857060 - DNA, 25 bp, Homo sapien
gaaatattcacataagaactccgat

SEQ ID NO: 4857061 - DNA, 25 bp, Homo sapien
tattcacataagaactccgatccat

SEQ ID NO: 4857062 - DNA, 25 bp, Homo sapien
aaatattcacataagaactccgatc

SEQ ID NO: 4857063 - DNA, 25 bp, Homo sapien
ctgggacatcggagagcaacagtaa

SEQ ID NO: 4857064 - DNA, 25 bp, Homo sapien
gacatcggagagcaacagtaactac

SEQ ID NO: 4857065 - DNA, 25 bp, Homo sapien
gggacatcggagagcaacagtaact

SEQ ID NO: 4857066 - DNA, 25 bp, Homo sapien
tgggacatcggagagcaacagtaac

SEQ ID NO: 4857067 - DNA, 25 bp, Homo sapien
tgtgagctgtaggacttcaaaacct

SEQ ID NO: 4857068 - DNA, 25 bp, Homo sapien
ctgtgagctgtaggacttcaaaacc

SEQ ID NO: 4857069 - DNA, 25 bp, Homo sapien
gtgagctgtaggacttcaaaacctt

SEQ ID NO: 4857070 - DNA, 25 bp, Homo sapien
ggtacccaattctcgtcatccagtc

SEQ ID NO: 4857071 - DNA, 25 bp, Homo sapien
gaagtagaaaggctgtatagagata

SEQ ID NO: 4857072 - DNA, 25 bp, Homo sapien
tatagagatatgtggtacccaattc

SEQ ID NO: 4857073 - DNA, 25 bp, Homo sapien
agtgtccacagttattcctatgtcc

SEQ ID NO: 4857074 - DNA, 25 bp, Homo sapien
gctccttctcctccaggatgagtac

SEQ ID NO: 4857075 - DNA, 25 bp, Homo sapien
ctagttggtctgctccttctcctcc

SEQ ID NO: 4857076 - DNA, 25 bp, Homo sapien
gtctgctccttctcctccaggatga

SEQ ID NO: 4857077 - DNA, 25 bp, Homo sapien
tctgctccttctcctccaggatgag

SEQ ID NO: 4857078 - DNA, 25 bp, Homo sapien
aggtcatagcataactgacttcatg

SEQ ID NO: 4857079 - DNA, 25 bp, Homo sapien
ggtcatagcataactgacttcatgc

SEQ ID NO: 4857080 - DNA, 25 bp, Homo sapien
tgaaagtgaagcctttattgtgcca

SEQ ID NO: 4857081 - DNA, 25 bp, Homo sapien
aaagtgaagcctttattgtgccaga

SEQ ID NO: 4857082 - DNA, 25 bp, Homo sapien
cattcctgcgtataagactttgaag

SEQ ID NO: 4857083 - DNA, 25 bp, Homo sapien
tgagaaatcatgtcagctgggaaaa

SEQ ID NO: 4857084 - DNA, 25 bp, Homo sapien
gagtaccttactgcatacatttcaa

SEQ ID NO: 4857085 - DNA, 25 bp, Homo sapien
caatgttcaaagtttactgccatga

SEQ ID NO: 4857086 - DNA, 25 bp, Homo sapien
tgcacacccaacagaaagaacttta

SEQ ID NO: 4857087 - DNA, 25 bp, Homo sapien
aaattatataaatcgcaaacatcag

SEQ ID NO: 4857088 - DNA, 25 bp, Homo sapien
atgcacacccaacagaaagaacttt

SEQ ID NO: 4857089 - DNA, 25 bp, Homo sapien
cgcaaacatcagttaagtaaactgt

SEQ ID NO: 4857090 - DNA, 25 bp, Homo sapien
cagatttactacttctggacagctc

SEQ ID NO: 4857091 - DNA, 25 bp, Homo sapien
ttcactagcgtgtcctgaagttcct

SEQ ID NO: 4857092 - DNA, 25 bp, Homo sapien
tcagttgatgtgtccatttgaaaca

SEQ ID NO: 4857093 - DNA, 25 bp, Homo sapien
ctgcagccttgacaataaatcagtt

SEQ ID NO: 4857094 - DNA, 25 bp, Homo sapien
ttgacccagcgcctcgtcgtggtga

SEQ ID NO: 4857095 - DNA, 25 bp, Homo sapien
taactgcttcatctccttttgcgct

SEQ ID NO: 4857096 - DNA, 25 bp, Homo sapien
taggtcagtctaacagtttgcctgc

SEQ ID NO: 4857097 - DNA, 25 bp, Homo sapien
tggtgagcctcatgttacacggcgc

SEQ ID NO: 4857098 - DNA, 25 bp, Homo sapien
tgttatcgttgtgggaaccaggctg

SEQ ID NO: 4857099 - DNA, 25 bp, Homo sapien
gctatcatggaattagatgacactt

SEQ ID NO: 4857100 - DNA, 25 bp, Homo sapien
tcagtgcacccaattactgttatcg

SEQ ID NO: 4857101 - DNA, 25 bp, Homo sapien
ggttaccattttcagtgcacccaat

SEQ ID NO: 4857102 - DNA, 25 bp, Homo sapien
taaaatgggtgcgttagtagagctt

SEQ ID NO: 4857103 - DNA, 25 bp, Homo sapien
tagtgcactaagtttgaaaagctga

SEQ ID NO: 4857104 - DNA, 25 bp, Homo sapien
caagaacaggtgcagctttagtgca

SEQ ID NO: 4857105 - DNA, 25 bp, Homo sapien
aattataactatgcaggagctcgtg

SEQ ID NO: 4857106 - DNA, 25 bp, Homo sapien
aattggtggaaaatcaccggataca

SEQ ID NO: 4857107 - DNA, 25 bp, Homo sapien
tcgttgccctgttactgtctgtgga

SEQ ID NO: 4857108 - DNA, 25 bp, Homo sapien
caaactacttattcatgggtgacta

SEQ ID NO: 4857109 - DNA, 25 bp, Homo sapien
cagaggatattattcagtggagact

SEQ ID NO: 4857110 - DNA, 25 bp, Homo sapien
tagtcatgatgtaccttcagaacag

SEQ ID NO: 4857111 - DNA, 25 bp, Homo sapien
gaaaaccactcttaggttcagtgat

SEQ ID NO: 4857112 - DNA, 25 bp, Homo sapien
tagggtggtcatagaaaaccttcca

SEQ ID NO: 4857113 - DNA, 25 bp, Homo sapien
tatactagttcagtgggttccgaaa

SEQ ID NO: 4857114 - DNA, 25 bp, Homo sapien
tgaacgagaaccaagtgcggacgct

SEQ ID NO: 4857115 - DNA, 25 bp, Homo sapien
gatccgcatcgggatcgggccgcca

SEQ ID NO: 4857116 - DNA, 25 bp, Homo sapien
gacgacaaggcgttcaccaaggagc

SEQ ID NO: 4857117 - DNA, 25 bp, Homo sapien
tcgagcagctgaacgagtgtaagca

SEQ ID NO: 4857118 - DNA, 25 bp, Homo sapien
cgtttctccgccaagccacgcgagg

SEQ ID NO: 4857119 - DNA, 25 bp, Homo sapien
tttctccgccaagccacgcgagggc

SEQ ID NO: 4857120 - DNA, 25 bp, Homo sapien
tctccgccaagccacgcgagggcgc

SEQ ID NO: 4857121 - DNA, 25 bp, Homo sapien
ctccgccaagccacgcgagggcgct

SEQ ID NO: 4857122 - DNA, 25 bp, Homo sapien
aggtcctccctcaagtacggcaaag

SEQ ID NO: 4857123 - DNA, 25 bp, Homo sapien
caaggtatctggcagctagcagctg

SEQ ID NO: 4857124 - DNA, 25 bp, Homo sapien
caactccctgatggtttacaggtaa

SEQ ID NO: 4857125 - DNA, 25 bp, Homo sapien
gaggcatttattgcattgcaccaag

SEQ ID NO: 4857126 - DNA, 25 bp, Homo sapien
tggtttgcataatctcagtgtttcc

SEQ ID NO: 4857127 - DNA, 25 bp, Homo sapien
tacaagagccatttccagaagatta

SEQ ID NO: 4857128 - DNA, 25 bp, Homo sapien
atagtatgtaactgcagtcttgagc

SEQ ID NO: 4857129 - DNA, 25 bp, Homo sapien
taataatcatcatagggcaacagga

SEQ ID NO: 4857130 - DNA, 25 bp, Homo sapien
tgtttatctgttttctgtactccca

SEQ ID NO: 4857131 - DNA, 25 bp, Homo sapien
gttgcttaagttgatattgtttatc

SEQ ID NO: 4857132 - DNA, 25 bp, Homo sapien
gcttaagttgatattgtttatctgt

SEQ ID NO: 4857133 - DNA, 25 bp, Homo sapien
gtttatctgttttctgtactcccat

SEQ ID NO: 4857134 - DNA, 25 bp, Homo sapien
tttgagttctcatagtcgatgaggg

SEQ ID NO: 4857135 - DNA, 25 bp, Homo sapien
cgtttgagttctcatagtcgatgag

SEQ ID NO: 4857136 - DNA, 25 bp, Homo sapien
tcgtttgagttctcatagtcgatga

SEQ ID NO: 4857137 - DNA, 25 bp, Homo sapien
cttcgtttgagttctcatagtcgat

SEQ ID NO: 4857138 - DNA, 25 bp, Homo sapien
tgctggtgtacctcagccaacttga

SEQ ID NO: 4857139 - DNA, 25 bp, Homo sapien
atctttgctctttaaccaggcctta

SEQ ID NO: 4857140 - DNA, 25 bp, Homo sapien
aaatttatcagctcttcttttgcag

SEQ ID NO: 4857141 - DNA, 25 bp, Homo sapien
tgccactctcttccgtttgaaattt

SEQ ID NO: 4857142 - DNA, 25 bp, Homo sapien
gttgaagctaataaatcttccatgg

SEQ ID NO: 4857143 - DNA, 25 bp, Homo sapien
gaagctaataaatcttccatggcaa

SEQ ID NO: 4857144 - DNA, 25 bp, Homo sapien
gatttaagtgcaagtgatgtttggc

SEQ ID NO: 4857145 - DNA, 25 bp, Homo sapien
gatgtttggctttctttcacattca

SEQ ID NO: 4857146 - DNA, 25 bp, Homo sapien
actgcgctcttagcccctggttcat

SEQ ID NO: 4857147 - DNA, 25 bp, Homo sapien
acggcactgcgctcttagcccctgg

SEQ ID NO: 4857148 - DNA, 25 bp, Homo sapien
ggagttaatgcacctgctgggtcct

SEQ ID NO: 4857149 - DNA, 25 bp, Homo sapien
cagggggagttaatgcacctgctgg

SEQ ID NO: 4857150 - DNA, 25 bp, Homo sapien
tttccccttagggtgtactgcgagc

SEQ ID NO: 4857151 - DNA, 25 bp, Homo sapien
gggtgtactgcgagcgtagattcac

SEQ ID NO: 4857152 - DNA, 25 bp, Homo sapien
ccttagggtgtactgcgagcgtaga

SEQ ID NO: 4857153 - DNA, 25 bp, Homo sapien
ttccccttagggtgtactgcgagcg

SEQ ID NO: 4857154 - DNA, 25 bp, Homo sapien
cacacatgctgaacaaagcttgaag

SEQ ID NO: 4857155 - DNA, 25 bp, Homo sapien
tgcatgttaacagttaggtcctaaa

SEQ ID NO: 4857156 - DNA, 25 bp, Homo sapien
tggtgcttttgtggatgctaactgc

SEQ ID NO: 4857157 - DNA, 25 bp, Homo sapien
ggtcctaaaattctgtggtgctaat

SEQ ID NO: 4857158 - DNA, 25 bp, Homo sapien
cataccaatagccactttcttactt

SEQ ID NO: 4857159 - DNA, 25 bp, Homo sapien
cacataccaatagccactttcttac

SEQ ID NO: 4857160 - DNA, 25 bp, Homo sapien
tgtcacataccaatagccactttct

SEQ ID NO: 4857161 - DNA, 25 bp, Homo sapien
caatagccactttcttacttttaca

SEQ ID NO: 4857162 - DNA, 25 bp, Homo sapien
aggagcacaaagagatcccaaaaca

SEQ ID NO: 4857163 - DNA, 25 bp, Homo sapien
ggagcacaaagagatcccaaaacat

SEQ ID NO: 4857164 - DNA, 25 bp, Homo sapien
ccaccttcaagactgaaataaggag

SEQ ID NO: 4857165 - DNA, 25 bp, Homo sapien
caagactgaaataaggagctgcagg

SEQ ID NO: 4857166 - DNA, 25 bp, Homo sapien
tggtaaatgggtttcatctcgcttg

SEQ ID NO: 4857167 - DNA, 25 bp, Homo sapien
ttcttgtccctggagaagtagtggt

SEQ ID NO: 4857168 - DNA, 25 bp, Homo sapien
caattgattggctgccctaaagtgc

SEQ ID NO: 4857169 - DNA, 25 bp, Homo sapien
tcgcttgtatttgcaattgattggc

SEQ ID NO: 4857170 - DNA, 25 bp, Homo sapien
tctggcctaagcaagagtagactct

SEQ ID NO: 4857171 - DNA, 25 bp, Homo sapien
ctagacgtgaagcaaagctcccggg

SEQ ID NO: 4857172 - DNA, 25 bp, Homo sapien
gagctggcctccaaacgagtggaca

SEQ ID NO: 4857173 - DNA, 25 bp, Homo sapien
gaagagcatcctcacagtgtcctga

SEQ ID NO: 4857174 - DNA, 25 bp, Homo sapien
ttcagccggatgactgtggagcgcc

SEQ ID NO: 4857175 - DNA, 25 bp, Homo sapien
gcaaactttattcccgcgctgccga

SEQ ID NO: 4857176 - DNA, 25 bp, Homo sapien
agtgtagtctcttcgcaggtgcggc

SEQ ID NO: 4857177 - DNA, 25 bp, Homo sapien
agctagagtcctgcatcccggtgga

SEQ ID NO: 4857178 - DNA, 25 bp, Homo sapien
agttagttgcaaaatggtcctcatg

SEQ ID NO: 4857179 - DNA, 25 bp, Homo sapien
tcatgatagctaaacgagtggacct

SEQ ID NO: 4857180 - DNA, 25 bp, Homo sapien
caaggctggcgttattaacaaccca

SEQ ID NO: 4857181 - DNA, 25 bp, Homo sapien
gttcatgtcaatagaaatcacgcca

SEQ ID NO: 4857182 - DNA, 25 bp, Homo sapien
caatgtcttcatgggtaaatacaaa

SEQ ID NO: 4857183 - DNA, 25 bp, Homo sapien
tgcacattcatccattcaggacatt

SEQ ID NO: 4857184 - DNA, 25 bp, Homo sapien
ccattcaggacatttccgctgctgt

SEQ ID NO: 4857185 - DNA, 25 bp, Homo sapien
ctgcacattcatccattcaggacat

SEQ ID NO: 4857186 - DNA, 25 bp, Homo sapien
tggatccagtgaattctaagaaggg

SEQ ID NO: 4857187 - DNA, 25 bp, Homo sapien
gcaatcactagcatcgtaactatac

SEQ ID NO: 4857188 - DNA, 25 bp, Homo sapien
aggaaagagcaatcactagcatcgt

SEQ ID NO: 4857189 - DNA, 25 bp, Homo sapien
tcaaaaacactcttccgaacacatg

SEQ ID NO: 4857190 - DNA, 25 bp, Homo sapien
cgcctggcctctaatgtttagttag

SEQ ID NO: 4857191 - DNA, 25 bp, Homo sapien
cctggcctctaatgtttagttagaa

SEQ ID NO: 4857192 - DNA, 25 bp, Homo sapien
aaggatcatttgctacaactgttac

SEQ ID NO: 4857193 - DNA, 25 bp, Homo sapien
ggcctctaatgtttagttagaacat

SEQ ID NO: 4857194 - DNA, 25 bp, Homo sapien
ggtggccactccatgtcaaatccca

SEQ ID NO: 4857195 - DNA, 25 bp, Homo sapien
ttccctctattgtataatggtggcc

SEQ ID NO: 4857196 - DNA, 25 bp, Homo sapien
ctgacatggaagaaacgtggaacaa

SEQ ID NO: 4857197 - DNA, 25 bp, Homo sapien
caactgaattagtgcaactttgcca

SEQ ID NO: 4857198 - DNA, 25 bp, Homo sapien
ttgatatcaaagtcacgtagaagtt

SEQ ID NO: 4857199 - DNA, 25 bp, Homo sapien
ttccactgatctccttcaattccta

SEQ ID NO: 4857200 - DNA, 25 bp, Homo sapien
gatatcaaagtcacgtagaagtttc

SEQ ID NO: 4857201 - DNA, 25 bp, Homo sapien
tcaattcctacacctgcctttttaa

SEQ ID NO: 4857202 - DNA, 25 bp, Homo sapien
tactccaattgctacagcggataga

SEQ ID NO: 4857203 - DNA, 25 bp, Homo sapien
taaccagactgttaaggctccaggt

SEQ ID NO: 4857204 - DNA, 25 bp, Homo sapien
tcaggagctgtttacctaagaggtg

SEQ ID NO: 4857205 - DNA, 25 bp, Homo sapien
cagtggctgcatacagtttctggtc

SEQ ID NO: 4857206 - DNA, 25 bp, Homo sapien
tatatataaagataagcccagattt

SEQ ID NO: 4857207 - DNA, 25 bp, Homo sapien
gaatgttagtctcaagtttggcggt

SEQ ID NO: 4857208 - DNA, 25 bp, Homo sapien
tccctaacaaaagtgaattgtttgc

SEQ ID NO: 4857209 - DNA, 25 bp, Homo sapien
gtttgctggttacaattcaaaggag

SEQ ID NO: 4857210 - DNA, 25 bp, Homo sapien
tatcatccaaaatctctaaatttcg

SEQ ID NO: 4857211 - DNA, 25 bp, Homo sapien
catccaaaatctctaaatttcggta

SEQ ID NO: 4857212 - DNA, 25 bp, Homo sapien
tgcacagtatcatccaaaatctcta

SEQ ID NO: 4857213 - DNA, 25 bp, Homo sapien
ctttgcacagtatcatccaaaatct

SEQ ID NO: 4857214 - DNA, 25 bp, Homo sapien
gagaaacaggtacatcccaggtcac

SEQ ID NO: 4857215 - DNA, 25 bp, Homo sapien
tgggctcacccactctactacgtgg

SEQ ID NO: 4857216 - DNA, 25 bp, Homo sapien
cagcactgaggttggatgacatgac

SEQ ID NO: 4857217 - DNA, 25 bp, Homo sapien
cagatgcttcgaatagtttgtccct

SEQ ID NO: 4857218 - DNA, 25 bp, Homo sapien
taacatataaaggagggcctgccac

SEQ ID NO: 4857219 - DNA, 25 bp, Homo sapien
cattttatatgaggcagtcatgcca

SEQ ID NO: 4857220 - DNA, 25 bp, Homo sapien
tggagactgactctaagttacagcc

SEQ ID NO: 4857221 - DNA, 25 bp, Homo sapien
ccacagaggctcaacgacaattata

SEQ ID NO: 4857222 - DNA, 25 bp, Homo sapien
actgcacctggccttagctaactct

SEQ ID NO: 4857223 - DNA, 25 bp, Homo sapien
cagtcacttcgattgctcttgggag

SEQ ID NO: 4857224 - DNA, 25 bp, Homo sapien
gatattcctactgtgactcctgcct

SEQ ID NO: 4857225 - DNA, 25 bp, Homo sapien
cacaattaaccgactcaagttgcca

SEQ ID NO: 4857226 - DNA, 25 bp, Homo sapien
tatccgttttttattctagagccca

SEQ ID NO: 4857227 - DNA, 25 bp, Homo sapien
cctctaaatgctggtgtgcccttga

SEQ ID NO: 4857228 - DNA, 25 bp, Homo sapien
ggcttcagaactaaacacctcctgt

SEQ ID NO: 4857229 - DNA, 25 bp, Homo sapien
aagaaaaggttactgatggcctcca

SEQ ID NO: 4857230 - DNA, 25 bp, Homo sapien
tgctttaactaccatcggatctgaa

SEQ ID NO: 4857231 - DNA, 25 bp, Homo sapien
tccaacaaaaagaccttcttattca

SEQ ID NO: 4857232 - DNA, 25 bp, Homo sapien
ttcttattcaatccccaaattgcct

SEQ ID NO: 4857233 - DNA, 25 bp, Homo sapien
tattcaatccccaaattgcctcaat

SEQ ID NO: 4857234 - DNA, 25 bp, Homo sapien
caaagcagagatattcatttagcca

SEQ ID NO: 4857235 - DNA, 25 bp, Homo sapien
ggaagatgcttagccagatccatca

SEQ ID NO: 4857236 - DNA, 25 bp, Homo sapien
ttactgaaagcatgaggaagatgct

SEQ ID NO: 4857237 - DNA, 25 bp, Homo sapien
cctcagagattgaagtcaactgttt

SEQ ID NO: 4857238 - DNA, 25 bp, Homo sapien
tcaactgtttgttcatgtcgctaag

SEQ ID NO: 4857239 - DNA, 25 bp, Homo sapien
gtgtgtgtgtattcaagcaaatttc

SEQ ID NO: 4857240 - DNA, 25 bp, Homo sapien
ttcactattcaacaactggaaagat

SEQ ID NO: 4857241 - DNA, 25 bp, Homo sapien
caaatttatgcatcagtctgtgtgt

SEQ ID NO: 4857242 - DNA, 25 bp, Homo sapien
gcaaatttctatgagtcagccttaa

SEQ ID NO: 4857243 - DNA, 25 bp, Homo sapien
gtcccatgtttcatcttcaacgtga

SEQ ID NO: 4857244 - DNA, 25 bp, Homo sapien
taatatctaacgacatcaaacaagc

SEQ ID NO: 4857245 - DNA, 25 bp, Homo sapien
taagtttaaattattgctgggcctc

SEQ ID NO: 4857246 - DNA, 25 bp, Homo sapien
tagtagacccaattatcatcctcct

SEQ ID NO: 4857247 - DNA, 25 bp, Homo sapien
cataggacgtatcgttttcattatc

SEQ ID NO: 4857248 - DNA, 25 bp, Homo sapien
cactctcaattacataggacgtatc

SEQ ID NO: 4857249 - DNA, 25 bp, Homo sapien
caattacataggacgtatcgttttc

SEQ ID NO: 4857250 - DNA, 25 bp, Homo sapien
tttcattatcattgggagataaatg

SEQ ID NO: 4857251 - DNA, 25 bp, Homo sapien
cactctcaattacataggacgtatc

SEQ ID NO: 4857252 - DNA, 25 bp, Homo sapien
caattacataggacgtatcgttttc

SEQ ID NO: 4857253 - DNA, 25 bp, Homo sapien
cataggacgtatcgttttcattatc

SEQ ID NO: 4857254 - DNA, 25 bp, Homo sapien
tttcattatcattgggagataaatg

SEQ ID NO: 4857255 - DNA, 25 bp, Homo sapien
ttctctatatcatgtgtcagtcgca

SEQ ID NO: 4857256 - DNA, 25 bp, Homo sapien
tatcatgtgtcagtcgcattctttc

SEQ ID NO: 4857257 - DNA, 25 bp, Homo sapien
tgtgtcagtcgcattctttctgaat

SEQ ID NO: 4857258 - DNA, 25 bp, Homo sapien
aacaagtttctctatatcatgtgtc

SEQ ID NO: 4857259 - DNA, 25 bp, Homo sapien
ggactattattaacagggcctacaa

SEQ ID NO: 4857260 - DNA, 25 bp, Homo sapien
aaagcaaaaccactgacagtgtcgt

SEQ ID NO: 4857261 - DNA, 25 bp, Homo sapien
gggcctacaattttgtcgaaagctg

SEQ ID NO: 4857262 - DNA, 25 bp, Homo sapien
attttgtcgaaagctggcagatgtg

SEQ ID NO: 4857263 - DNA, 25 bp, Homo sapien
tggttctaccgtgccactattgagg

SEQ ID NO: 4857264 - DNA, 25 bp, Homo sapien
cgtgccactattgaggttttctaaa

SEQ ID NO: 4857265 - DNA, 25 bp, Homo sapien
gtaggaagacccagatttctttcca

SEQ ID NO: 4857266 - DNA, 25 bp, Homo sapien
gcatttagaatgagttggttctacc

SEQ ID NO: 4857267 - DNA, 25 bp, Homo sapien
tgtccacagtgagcttgaaagattc

SEQ ID NO: 4857268 - DNA, 25 bp, Homo sapien
tccctgtccacagtgagcttgaaag

SEQ ID NO: 4857269 - DNA, 25 bp, Homo sapien
cctgtccacagtgagcttgaaagat

SEQ ID NO: 4857270 - DNA, 25 bp, Homo sapien
ttccctgtccacagtgagcttgaaa

SEQ ID NO: 4857271 - DNA, 25 bp, Homo sapien
tcattgggtgctggccacaaaaagt

SEQ ID NO: 4857272 - DNA, 25 bp, Homo sapien
atcttgaggcaagtaacttgctctt

SEQ ID NO: 4857273 - DNA, 25 bp, Homo sapien
ttcattgggtgctggccacaaaaag

SEQ ID NO: 4857274 - DNA, 25 bp, Homo sapien
tacatcttgaggcaagtaacttgct

SEQ ID NO: 4857275 - DNA, 25 bp, Homo sapien
gttgccatgacagcaacattatctc

SEQ ID NO: 4857276 - DNA, 25 bp, Homo sapien
tgccatgacagcaacattatctctt

SEQ ID NO: 4857277 - DNA, 25 bp, Homo sapien
tttcttctaatactgaatgaatcac

SEQ ID NO: 4857278 - DNA, 25 bp, Homo sapien
cagttgccatgacagcaacattatc

SEQ ID NO: 4857279 - DNA, 25 bp, Homo sapien
tggaagcacaaactctttccatatc

SEQ ID NO: 4857280 - DNA, 25 bp, Homo sapien
ggatactggaagcacaaactctttc

SEQ ID NO: 4857281 - DNA, 25 bp, Homo sapien
gtggatactggaagcacaaactctt

SEQ ID NO: 4857282 - DNA, 25 bp, Homo sapien
tggatactggaagcacaaactcttt

SEQ ID NO: 4857283 - DNA, 25 bp, Homo sapien
taaggggagagataacaaggccaat

SEQ ID NO: 4857284 - DNA, 25 bp, Homo sapien
gcacttggtcttccatcagagaaat

SEQ ID NO: 4857285 - DNA, 25 bp, Homo sapien
tagcacttggtcttccatcagagaa

SEQ ID NO: 4857286 - DNA, 25 bp, Homo sapien
gctgtagcacttggtcttccatcag

SEQ ID NO: 4857287 - DNA, 25 bp, Homo sapien
gatccaaggaagcaagctgggatgt

SEQ ID NO: 4857288 - DNA, 25 bp, Homo sapien
gaagcaagctgggatgttggacatt

SEQ ID NO: 4857289 - DNA, 25 bp, Homo sapien
ttctgactgtgctgatccaaggaag

SEQ ID NO: 4857290 - DNA, 25 bp, Homo sapien
tgttagaacattttctgactgtgct

SEQ ID NO: 4857291 - DNA, 25 bp, Homo sapien
cctgaacagtattctggagttacgt

SEQ ID NO: 4857292 - DNA, 25 bp, Homo sapien
gttacctgaacagtattctggagtt

SEQ ID NO: 4857293 - DNA, 25 bp, Homo sapien
tggagttacgtatacaatccggtat

SEQ ID NO: 4857294 - DNA, 25 bp, Homo sapien
cagtattctggagttacgtatacaa

SEQ ID NO: 4857295 - DNA, 25 bp, Homo sapien
caatatcagcctcaagttgctggag

SEQ ID NO: 4857296 - DNA, 25 bp, Homo sapien
agcctcaagttgctggagcaggccc

SEQ ID NO: 4857297 - DNA, 25 bp, Homo sapien
atcagcctcaagttgctggagcagg

SEQ ID NO: 4857298 - DNA, 25 bp, Homo sapien
aatatcagcctcaagttgctggagc

SEQ ID NO: 4857299 - DNA, 25 bp, Homo sapien
tcagaaatacagtgagcctcatcca

SEQ ID NO: 4857300 - DNA, 25 bp, Homo sapien
atgaatccctaaaatcatgccccca

SEQ ID NO: 4857301 - DNA, 25 bp, Homo sapien
tcatccacagcaatgagcgtgatac

SEQ ID NO: 4857302 - DNA, 25 bp, Homo sapien
agtgctgtctttagggagcccaact

SEQ ID NO: 4857303 - DNA, 25 bp, Homo sapien
gggctgagtgtattgtaaacttatt

SEQ ID NO: 4857304 - DNA, 25 bp, Homo sapien
gctgagtgtattgtaaacttattct

SEQ ID NO: 4857305 - DNA, 25 bp, Homo sapien
ggctgagtgtattgtaaacttattc

SEQ ID NO: 4857306 - DNA, 25 bp, Homo sapien
aagggctgagtgtattgtaaactta

SEQ ID NO: 4857307 - DNA, 25 bp, Homo sapien
tcccggattgaagaacttgcagtag

SEQ ID NO: 4857308 - DNA, 25 bp, Homo sapien
taagcaacgtacaatgtcttcccgg

SEQ ID NO: 4857309 - DNA, 25 bp, Homo sapien
caaaaccagtacaggtgatctgagg

SEQ ID NO: 4857310 - DNA, 25 bp, Homo sapien
tagcagtaagtgcaacgattggaac

SEQ ID NO: 4857311 - DNA, 25 bp, Homo sapien
cagtagatgattgttggaccttcaa

SEQ ID NO: 4857312 - DNA, 25 bp, Homo sapien
catgcccgcatggtatgttccacag

SEQ ID NO: 4857313 - DNA, 25 bp, Homo sapien
agttcacctgtaacttgttgtgtca

SEQ ID NO: 4857314 - DNA, 25 bp, Homo sapien
tgttccacaggatagattcagtttc

SEQ ID NO: 4857315 - DNA, 25 bp, Homo sapien
taatatactacatggctcagagatc

SEQ ID NO: 4857316 - DNA, 25 bp, Homo sapien
taaggactggtgactagaaatggga

SEQ ID NO: 4857317 - DNA, 25 bp, Homo sapien
cctggcacaaagtggaattcaatgt

SEQ ID NO: 4857318 - DNA, 25 bp, Homo sapien
ttcaagcgtccttacctgattgcag

SEQ ID NO: 4857319 - DNA, 25 bp, Homo sapien
tgacttggcgaatgtcagctttatt

SEQ ID NO: 4857320 - DNA, 25 bp, Homo sapien
tccatgtccttaggagcaccgtaat

SEQ ID NO: 4857321 - DNA, 25 bp, Homo sapien
ccagaggacgtgacaagaactttga

SEQ ID NO: 4857322 - DNA, 25 bp, Homo sapien
cttaggagcaccgtaatgaatgact

SEQ ID NO: 4857323 - DNA, 25 bp, Homo sapien
ggatactggaaatagcctcaaacac

SEQ ID NO: 4857324 - DNA, 25 bp, Homo sapien
atgcactcacaaattacttgggata

SEQ ID NO: 4857325 - DNA, 25 bp, Homo sapien
tactggaaatagcctcaaacacttt

SEQ ID NO: 4857326 - DNA, 25 bp, Homo sapien
aaatgcactcacaaattacttggga

SEQ ID NO: 4857327 - DNA, 25 bp, Homo sapien
gtaacaaaatcagtggtagttgaag

SEQ ID NO: 4857328 - DNA, 25 bp, Homo sapien
gtaactatggctgaagacatcgcaa

SEQ ID NO: 4857329 - DNA, 25 bp, Homo sapien
tgaagacatcgcaacttgacaggat

SEQ ID NO: 4857330 - DNA, 25 bp, Homo sapien
gaaatcctctggaataatcaccact

SEQ ID NO: 4857331 - DNA, 25 bp, Homo sapien
attacgtatctcagtaagaaggtgc

SEQ ID NO: 4857332 - DNA, 25 bp, Homo sapien
tctcattacgtatctcagtaagaag

SEQ ID NO: 4857333 - DNA, 25 bp, Homo sapien
tcgaaacttctcattacgtatctca

SEQ ID NO: 4857334 - DNA, 25 bp, Homo sapien
taatttgtataatcgaaacttctca

SEQ ID NO: 4857335 - DNA, 25 bp, Homo sapien
ggctttttgtacttgtttgtcctca

SEQ ID NO: 4857336 - DNA, 25 bp, Homo sapien
cagcatttttcagttcccataattc

SEQ ID NO: 4857337 - DNA, 25 bp, Homo sapien
cataattcccaaggaggctttttgt

SEQ ID NO: 4857338 - DNA, 25 bp, Homo sapien
ggacctgcaattatcacagcatttt

SEQ ID NO: 4857339 - DNA, 25 bp, Homo sapien
ttctgatttgccttgagacttcctc

SEQ ID NO: 4857340 - DNA, 25 bp, Homo sapien
taagcttaggtactgatttgagacc

SEQ ID NO: 4857341 - DNA, 25 bp, Homo sapien
ttaagatgtaagcttaggtactgat

SEQ ID NO: 4857342 - DNA, 25 bp, Homo sapien
cagtattgcattagctgcatctcac

SEQ ID NO: 4857343 - DNA, 25 bp, Homo sapien
cttatcatccctagtaatacctggg

SEQ ID NO: 4857344 - DNA, 25 bp, Homo sapien
caatccctctaatggttgtaacact

SEQ ID NO: 4857345 - DNA, 25 bp, Homo sapien
cctgggaggtctgtagtgaaattcc

SEQ ID NO: 4857346 - DNA, 25 bp, Homo sapien
tcactgacaatgaatgctgcatgct

SEQ ID NO: 4857347 - DNA, 25 bp, Homo sapien
catgcccagactagtttttatcatt

SEQ ID NO: 4857348 - DNA, 25 bp, Homo sapien
ggcacataatgctatgcctagctaa

SEQ ID NO: 4857349 - DNA, 25 bp, Homo sapien
cacagtctcggttttttgcccagac

SEQ ID NO: 4857350 - DNA, 25 bp, Homo sapien
agagacacagtctcggttttttgcc

SEQ ID NO: 4857351 - DNA, 25 bp, Homo sapien
tccaaatgcatgaggattttgttgt

SEQ ID NO: 4857352 - DNA, 25 bp, Homo sapien
ttccaaatgcatgaggattttgttg

SEQ ID NO: 4857353 - DNA, 25 bp, Homo sapien
gaattttgagacaagctagtctagt

SEQ ID NO: 4857354 - DNA, 25 bp, Homo sapien
agacaagctagtctagtacagggtc

SEQ ID NO: 4857355 - DNA, 25 bp, Homo sapien
gagaacaaggataatgttcatttga

SEQ ID NO: 4857356 - DNA, 25 bp, Homo sapien
aaggataatgttcatttgaaggttc

SEQ ID NO: 4857357 - DNA, 25 bp, Homo sapien
aacaaggataatgttcatttgaagg

SEQ ID NO: 4857358 - DNA, 25 bp, Homo sapien
ctgagaacaaggataatgttcattt

SEQ ID NO: 4857359 - DNA, 25 bp, Homo sapien
ccaactgcttcagaagctatgaata

SEQ ID NO: 4857360 - DNA, 25 bp, Homo sapien
aaagatttagcataacaattagcca

SEQ ID NO: 4857361 - DNA, 25 bp, Homo sapien
gcttagcaaaggcatgtatctttag

SEQ ID NO: 4857362 - DNA, 25 bp, Homo sapien
aaaaatatctcaaatgtgccaactg

SEQ ID NO: 4857363 - DNA, 25 bp, Homo sapien
caaaagcttaaatgcttgtggacca

SEQ ID NO: 4857364 - DNA, 25 bp, Homo sapien
aattccaaatttttcgcctaagatg

SEQ ID NO: 4857365 - DNA, 25 bp, Homo sapien
gatcctcggagaaataaaattggaa

SEQ ID NO: 4857366 - DNA, 25 bp, Homo sapien
ttttcgcctaagatgtccacagcag

SEQ ID NO: 4857367 - DNA, 25 bp, Homo sapien
gaagatctatgaagggaattcacag

SEQ ID NO: 4857368 - DNA, 25 bp, Homo sapien
tgaagggaattcacagatatatact

SEQ ID NO: 4857369 - DNA, 25 bp, Homo sapien
gatctatgaagggaattcacagata

SEQ ID NO: 4857370 - DNA, 25 bp, Homo sapien
agggaattcacagatatatacttac

SEQ ID NO: 4857371 - DNA, 25 bp, Homo sapien
aaggaaaggactacagaacaagctc

SEQ ID NO: 4857372 - DNA, 25 bp, Homo sapien
aaagtatcctatctcttgctcttga

SEQ ID NO: 4857373 - DNA, 25 bp, Homo sapien
gaacaagctcttggactgcaacggt

SEQ ID NO: 4857374 - DNA, 25 bp, Homo sapien
tacatgaagcattcgagtatttcac

SEQ ID NO: 4857375 - DNA, 25 bp, Homo sapien
tcgtaagggcgcaaatcttcataaa

SEQ ID NO: 4857376 - DNA, 25 bp, Homo sapien
ccttgccagtgccaaataaactgtg

SEQ ID NO: 4857377 - DNA, 25 bp, Homo sapien
tcagctgacgggaaaaagccttcca

SEQ ID NO: 4857378 - DNA, 25 bp, Homo sapien
gatattgatcggcaagacgctgaga

SEQ ID NO: 4857379 - DNA, 25 bp, Homo sapien
cttgaaggatgaggctctgagattc

SEQ ID NO: 4857380 - DNA, 25 bp, Homo sapien
aaggatgaggctctgagattctgta

SEQ ID NO: 4857381 - DNA, 25 bp, Homo sapien
agcttgaaggatgaggctctgagat

SEQ ID NO: 4857382 - DNA, 25 bp, Homo sapien
tgaggctctgagattctgtattagc

SEQ ID NO: 4857383 - DNA, 25 bp, Homo sapien
ggtgcccgaagatacagttttcgaa

SEQ ID NO: 4857384 - DNA, 25 bp, Homo sapien
tgtacttaattcaactggtacttga

SEQ ID NO: 4857385 - DNA, 25 bp, Homo sapien
tctttggtgcccgaagatacagttt

SEQ ID NO: 4857386 - DNA, 25 bp, Homo sapien
ctggtacttgattataacaatgctc

SEQ ID NO: 4857387 - DNA, 25 bp, Homo sapien
aatgttactcccagaagaaatctta

SEQ ID NO: 4857388 - DNA, 25 bp, Homo sapien
tcttatcacatggtttataagaata

SEQ ID NO: 4857389 - DNA, 25 bp, Homo sapien
tatcacatggtttataagaatataa

SEQ ID NO: 4857390 - DNA, 25 bp, Homo sapien
ttagaaatgttactcccagaagaaa

SEQ ID NO: 4857391 - DNA, 25 bp, Homo sapien
agtctcctgctcttgtgccgaaata

SEQ ID NO: 4857392 - DNA, 25 bp, Homo sapien
cttgtttgttgccagaatagctggg

SEQ ID NO: 4857393 - DNA, 25 bp, Homo sapien
tctgcctagcttctaccaatttgcc

SEQ ID NO: 4857394 - DNA, 25 bp, Homo sapien
gcctagcttctaccaatttgccata

SEQ ID NO: 4857395 - DNA, 25 bp, Homo sapien
ggccatatccaccagtatcttgttt

SEQ ID NO: 4857396 - DNA, 25 bp, Homo sapien
tgaacactatttgtttggcagaaat

SEQ ID NO: 4857397 - DNA, 25 bp, Homo sapien
cagaggggccaacatggcagctttg

SEQ ID NO: 4857398 - DNA, 25 bp, Homo sapien
ctgaacactatttgtttggcagaaa

SEQ ID NO: 4857399 - DNA, 25 bp, Homo sapien
gagtgcttaggtaagctttgccaac

SEQ ID NO: 4857400 - DNA, 25 bp, Homo sapien
gcatgagggattgcaccttgccatg

SEQ ID NO: 4857401 - DNA, 25 bp, Homo sapien
ccatgagggaacttctgatagtgcc

SEQ ID NO: 4857402 - DNA, 25 bp, Homo sapien
tctttttatctgaagagtgcttagg

SEQ ID NO: 4857403 - DNA, 25 bp, Homo sapien
cctgtaacagatgaaattaataatt

SEQ ID NO: 4857404 - DNA, 25 bp, Homo sapien
tgagtactaatttactgcttggtga

SEQ ID NO: 4857405 - DNA, 25 bp, Homo sapien
gaagagcctcgtctcttgatgaatg

SEQ ID NO: 4857406 - DNA, 25 bp, Homo sapien
aacagcatactacagtcataataaa

SEQ ID NO: 4857407 - DNA, 25 bp, Homo sapien
ttgctaccagactcgtcttctgttc

SEQ ID NO: 4857408 - DNA, 25 bp, Homo sapien
ctaccagactcgtcttctgttcttc

SEQ ID NO: 4857409 - DNA, 25 bp, Homo sapien
tgctaccagactcgtcttctgttct

SEQ ID NO: 4857410 - DNA, 25 bp, Homo sapien
tcttcttgaggttttgtacttgaaa

SEQ ID NO: 4857411 - DNA, 25 bp, Homo sapien
ataaagagtatgtgatggccataga

SEQ ID NO: 4857412 - DNA, 25 bp, Homo sapien
ttggaataaagagtatgtgatggcc

SEQ ID NO: 4857413 - DNA, 25 bp, Homo sapien
ttcttggaataaagagtatgtgatg

SEQ ID NO: 4857414 - DNA, 25 bp, Homo sapien
gaataaagagtatgtgatggccata

SEQ ID NO: 4857415 - DNA, 25 bp, Homo sapien
aggcctgctcgctccaaatcaaggg

SEQ ID NO: 4857416 - DNA, 25 bp, Homo sapien
gcaataatcttctgaacctctggag

SEQ ID NO: 4857417 - DNA, 25 bp, Homo sapien
tgacgggagggtttcggataacatc

SEQ ID NO: 4857418 - DNA, 25 bp, Homo sapien
tcaccgcttgggataagtgcatgcc

SEQ ID NO: 4857419 - DNA, 25 bp, Homo sapien
cattaagggtgcagagctaggccat

SEQ ID NO: 4857420 - DNA, 25 bp, Homo sapien
aaatttctcagtatactttcctctg

SEQ ID NO: 4857421 - DNA, 25 bp, Homo sapien
tagtggattgcttgtttacttcatc

SEQ ID NO: 4857422 - DNA, 25 bp, Homo sapien
tcctctgagtgataatgggaagaaa

SEQ ID NO: 4857423 - DNA, 25 bp, Homo sapien
ctattttcctctctctgccttgatt

SEQ ID NO: 4857424 - DNA, 25 bp, Homo sapien
tattttcctctctctgccttgattt

SEQ ID NO: 4857425 - DNA, 25 bp, Homo sapien
gatgttgcagtcaacgacgggcagc

SEQ ID NO: 4857426 - DNA, 25 bp, Homo sapien
accatttgctattaccagtgtgcca

SEQ ID NO: 4857427 - DNA, 25 bp, Homo sapien
tggtgtaaacaaactcaccttgctg

SEQ ID NO: 4857428 - DNA, 25 bp, Homo sapien
aagttcactgtaaaacacgcaggcc

SEQ ID NO: 4857429 - DNA, 25 bp, Homo sapien
cagatctcttcagaaccgggaaaac

SEQ ID NO: 4857430 - DNA, 25 bp, Homo sapien
tccgctgtcaggaccatgtttaagg

SEQ ID NO: 4857431 - DNA, 25 bp, Homo sapien
catcacatgaaggttgaagtccgct

SEQ ID NO: 4857432 - DNA, 25 bp, Homo sapien
ttgccatgtggataaggtacgtgtc

SEQ ID NO: 4857433 - DNA, 25 bp, Homo sapien
ttcctttggcaaaccacacaggtaa

SEQ ID NO: 4857434 - DNA, 25 bp, Homo sapien
cattaatttcttgctggtatcactt

SEQ ID NO: 4857435 - DNA, 25 bp, Homo sapien
ccacacaggtaatcgtctctttctc

SEQ ID NO: 4857436 - DNA, 25 bp, Homo sapien
ttaatttcttgctggtatcacttcc

SEQ ID NO: 4857437 - DNA, 25 bp, Homo sapien
tattctgttaggtgatgtactcacg

SEQ ID NO: 4857438 - DNA, 25 bp, Homo sapien
gacccagaaactacatgaattgcgg

SEQ ID NO: 4857439 - DNA, 25 bp, Homo sapien
tgtactcacgtaggctcccagaaga

SEQ ID NO: 4857440 - DNA, 25 bp, Homo sapien
tgcggaaggctgatttaagatgcca

SEQ ID NO: 4857441 - DNA, 25 bp, Homo sapien
tatttaatggcacccaaaatgcggt

SEQ ID NO: 4857442 - DNA, 25 bp, Homo sapien
tgttatctatatcaaatcagagcac

SEQ ID NO: 4857443 - DNA, 25 bp, Homo sapien
tcactgccctggtcaactaatacca

SEQ ID NO: 4857444 - DNA, 25 bp, Homo sapien
tgcctagtgcaattggtctccattt

SEQ ID NO: 4857445 - DNA, 25 bp, Homo sapien
taataggcgccactaccttctggta

SEQ ID NO: 4857446 - DNA, 25 bp, Homo sapien
catggctggacaacaacatatcaca

SEQ ID NO: 4857447 - DNA, 25 bp, Homo sapien
tcaaacaagtgcttctcctggagac

SEQ ID NO: 4857448 - DNA, 25 bp, Homo sapien
tacctaggcatgcagcagacgtgtc

SEQ ID NO: 4857449 - DNA, 25 bp, Homo sapien
attataggcacgcaccaacacaccc

SEQ ID NO: 4857450 - DNA, 25 bp, Homo sapien
ttataggcacgcaccaacacaccca

SEQ ID NO: 4857451 - DNA, 25 bp, Homo sapien
tagcctgttcagataatggtggaca

SEQ ID NO: 4857452 - DNA, 25 bp, Homo sapien
tagcagtagtaaaccaagtacacat

SEQ ID NO: 4857453 - DNA, 25 bp, Homo sapien
aaaatctgactttgcacaggcacgt

SEQ ID NO: 4857454 - DNA, 25 bp, Homo sapien
tggcttaacaaaagtggctgtattc

SEQ ID NO: 4857455 - DNA, 25 bp, Homo sapien
ccgcgcccggctgaagtaaatgttt

SEQ ID NO: 4857456 - DNA, 25 bp, Homo sapien
cttgtagaaaagttgtttgtggatg

SEQ ID NO: 4857457 - DNA, 25 bp, Homo sapien
tgtagaaaagttgtttgtggatgtt

SEQ ID NO: 4857458 - DNA, 25 bp, Homo sapien
ttcttgtagaaaagttgtttgtgga

SEQ ID NO: 4857459 - DNA, 25 bp, Homo sapien
gctcacgagtgtttgggccaggcat

SEQ ID NO: 4857460 - DNA, 25 bp, Homo sapien
gatcgtcttttgttggaggccgaaa

SEQ ID NO: 4857461 - DNA, 25 bp, Homo sapien
taacatactctaggaaaccaggacc

SEQ ID NO: 4857462 - DNA, 25 bp, Homo sapien
gaggtcctcgtgtccaagagaacag

SEQ ID NO: 4857463 - DNA, 25 bp, Homo sapien
gaagcttgtggaattctatctacca

SEQ ID NO: 4857464 - DNA, 25 bp, Homo sapien
ttttgcaaaatgtctacgagggaag

SEQ ID NO: 4857465 - DNA, 25 bp, Homo sapien
aatttagcaccactatgggacgctg

SEQ ID NO: 4857466 - DNA, 25 bp, Homo sapien
taagcttgttagtcacggtgttcac

SEQ ID NO: 4857467 - DNA, 25 bp, Homo sapien
taagagatttctgggcaggtatggt

SEQ ID NO: 4857468 - DNA, 25 bp, Homo sapien
aaagtgacttctgagatatggaaag

SEQ ID NO: 4857469 - DNA, 25 bp, Homo sapien
agtgacttctgagatatggaaagta

SEQ ID NO: 4857470 - DNA, 25 bp, Homo sapien
aataagagatttctgggcaggtatg

SEQ ID NO: 4857471 - DNA, 25 bp, Homo sapien
agccactgacgctgtgccttttctg

SEQ ID NO: 4857472 - DNA, 25 bp, Homo sapien
tattatctagagagacaggctgctt

SEQ ID NO: 4857473 - DNA, 25 bp, Homo sapien
gaataccaaccatgtgtgacagcaa

SEQ ID NO: 4857474 - DNA, 25 bp, Homo sapien
tagcgacagctgagtgaataccaac

SEQ ID NO: 4857475 - DNA, 25 bp, Homo sapien
tgtaagaaggatccacttggggtgc

SEQ ID NO: 4857476 - DNA, 25 bp, Homo sapien
taagaaggatccacttggggtgctg

SEQ ID NO: 4857477 - DNA, 25 bp, Homo sapien
cacccgatttttaatcaaggtcagt

SEQ ID NO: 4857478 - DNA, 25 bp, Homo sapien
agaaggatccacttggggtgctgac

SEQ ID NO: 4857479 - DNA, 25 bp, Homo sapien
tataacgtggcttcccggatagctt

SEQ ID NO: 4857480 - DNA, 25 bp, Homo sapien
ataacgtggcttcccggatagcttt

SEQ ID NO: 4857481 - DNA, 25 bp, Homo sapien
ctataacgtggcttcccggatagct

SEQ ID NO: 4857482 - DNA, 25 bp, Homo sapien
gctctcctccagtgcggccttggaa

SEQ ID NO: 4857483 - DNA, 25 bp, Homo sapien
gagatcctacggctgccaccaggcg

SEQ ID NO: 4857484 - DNA, 25 bp, Homo sapien
cactttcctgttcttaggaggcagc

SEQ ID NO: 4857485 - DNA, 25 bp, Homo sapien
ttcctgttcttaggaggcagctctc

SEQ ID NO: 4857486 - DNA, 25 bp, Homo sapien
ttatcgtgggtcaagtggagttgtt

SEQ ID NO: 4857487 - DNA, 25 bp, Homo sapien
agttgttgctgtgggaggctcttaa

SEQ ID NO: 4857488 - DNA, 25 bp, Homo sapien
ctcttaatgggggtggtccaggcac

SEQ ID NO: 4857489 - DNA, 25 bp, Homo sapien
cagagcaagaggcatggcatctgct

SEQ ID NO: 4857490 - DNA, 25 bp, Homo sapien
ctagagcgcccacatcagccaccat

SEQ ID NO: 4857491 - DNA, 25 bp, Homo sapien
aggatccacgataatgtgaaaacag

SEQ ID NO: 4857492 - DNA, 25 bp, Homo sapien
cataggatccacgataatgtgaaaa

SEQ ID NO: 4857493 - DNA, 25 bp, Homo sapien
aaaacagggccagtctcctagagcg

SEQ ID NO: 4857494 - DNA, 25 bp, Homo sapien
ctgaggcaaggaaacattgacttcc

SEQ ID NO: 4857495 - DNA, 25 bp, Homo sapien
tcccacctgccacagatctctcccc

SEQ ID NO: 4857496 - DNA, 25 bp, Homo sapien
gaaacattgacttccttcccacctg

SEQ ID NO: 4857497 - DNA, 25 bp, Homo sapien
acctgccacagatctctccccagaa

SEQ ID NO: 4857498 - DNA, 25 bp, Homo sapien
tggccaattcttcagccagtaggcc

SEQ ID NO: 4857499 - DNA, 25 bp, Homo sapien
tccgtagttggcaataacctgaagc

SEQ ID NO: 4857500 - DNA, 25 bp, Homo sapien
ttatgccataatgtagcagcccagg

SEQ ID NO: 4857501 - DNA, 25 bp, Homo sapien
cccttgtaatatccaacttccgtag

SEQ ID NO: 4857502 - DNA, 25 bp, Homo sapien
agcaccgtaacaaccaaattcaaca

SEQ ID NO: 4857503 - DNA, 25 bp, Homo sapien
ctcagcaccgtaacaaccaaattca

SEQ ID NO: 4857504 - DNA, 25 bp, Homo sapien
cagcaccgtaacaaccaaattcaac

SEQ ID NO: 4857505 - DNA, 25 bp, Homo sapien
tcagcaccgtaacaaccaaattcaa

SEQ ID NO: 4857506 - DNA, 25 bp, Homo sapien
cgaacaatcgttccctcactcaatt

SEQ ID NO: 4857507 - DNA, 25 bp, Homo sapien
actgccagtgctgcccgaacaatcg

SEQ ID NO: 4857508 - DNA, 25 bp, Homo sapien
cagcagatgcctgtctgtccaaaac

SEQ ID NO: 4857509 - DNA, 25 bp, Homo sapien
tccatgcactgagggtgtcagcaga

SEQ ID NO: 4857510 - DNA, 25 bp, Homo sapien
cttccctaactcaatgtcctcggga

SEQ ID NO: 4857511 - DNA, 25 bp, Homo sapien
tgtggaataatgtcctggatatcag

SEQ ID NO: 4857512 - DNA, 25 bp, Homo sapien
atgtcctcgggaaaatgttagcctt

SEQ ID NO: 4857513 - DNA, 25 bp, Homo sapien
ataatgtcctggatatcagatgcag

SEQ ID NO: 4857514 - DNA, 25 bp, Homo sapien
gagtcataaatcaaccgaccatggc

SEQ ID NO: 4857515 - DNA, 25 bp, Homo sapien
cctctggtaattatctgtgtgggaa

SEQ ID NO: 4857516 - DNA, 25 bp, Homo sapien
gaccatggcccaacttgaggatgtg

SEQ ID NO: 4857517 - DNA, 25 bp, Homo sapien
ggtccgcttccaacacgggaattca

SEQ ID NO: 4857518 - DNA, 25 bp, Homo sapien
cacgcttctccatgactcctgataa

SEQ ID NO: 4857519 - DNA, 25 bp, Homo sapien
tgataaaatccaattcctagctctg

SEQ ID NO: 4857520 - DNA, 25 bp, Homo sapien
ctgagaacaaacacgcttctccatg

SEQ ID NO: 4857521 - DNA, 25 bp, Homo sapien
gcaggcagccattcactccatttac

SEQ ID NO: 4857522 - DNA, 25 bp, Homo sapien
gcttattgatgaagatcccgtcaag

SEQ ID NO: 4857523 - DNA, 25 bp, Homo sapien
gatgaagatcccgtcaagtgggctg

SEQ ID NO: 4857524 - DNA, 25 bp, Homo sapien
agagatgcttattgatgaagatccc

SEQ ID NO: 4857525 - DNA, 25 bp, Homo sapien
atgaagatcccgtcaagtgggctga

SEQ ID NO: 4857526 - DNA, 25 bp, Homo sapien
ctgccgtcagtttcccacagattcc

SEQ ID NO: 4857527 - DNA, 25 bp, Homo sapien
atactggtgcttcctagccaaggaa

SEQ ID NO: 4857528 - DNA, 25 bp, Homo sapien
taatcaattaccttgccacaaagcc

SEQ ID NO: 4857529 - DNA, 25 bp, Homo sapien
gaaaattgatccactttgcgaatga

SEQ ID NO: 4857530 - DNA, 25 bp, Homo sapien
cactttaaagtgtcatagaataccc

SEQ ID NO: 4857531 - DNA, 25 bp, Homo sapien
gactctatagtgtgtctccacaaag

SEQ ID NO: 4857532 - DNA, 25 bp, Homo sapien
tgaaagcatcatagactctatagtg

SEQ ID NO: 4857533 - DNA, 25 bp, Homo sapien
ttggtgaaagcatcatagactctat

SEQ ID NO: 4857534 - DNA, 25 bp, Homo sapien
catcatagactctatagtgtgtctc

SEQ ID NO: 4857535 - DNA, 25 bp, Homo sapien
ggatgtaattctgtgacttcaacac

SEQ ID NO: 4857536 - DNA, 25 bp, Homo sapien
gttttgtggcatacaatctataagg

SEQ ID NO: 4857537 - DNA, 25 bp, Homo sapien
cctgaaaggagtaggcaccgagctg

SEQ ID NO: 4857538 - DNA, 25 bp, Homo sapien
cagttaatagtctaaaagcaagtat

SEQ ID NO: 4857539 - DNA, 25 bp, Homo sapien
tcctagggctgtccaaatttcatcc

SEQ ID NO: 4857540 - DNA, 25 bp, Homo sapien
tcagctggtgcatcaagttctttaa

SEQ ID NO: 4857541 - DNA, 25 bp, Homo sapien
aaccatatgccccagatttcctagg

SEQ ID NO: 4857542 - DNA, 25 bp, Homo sapien
tctttaagaattgtttcaatgcaca

SEQ ID NO: 4857543 - DNA, 25 bp, Homo sapien
agcatttctccttggataggccacc

SEQ ID NO: 4857544 - DNA, 25 bp, Homo sapien
gcatttctccttggataggccacct

SEQ ID NO: 4857545 - DNA, 25 bp, Homo sapien
atttctccttggataggccacctac

SEQ ID NO: 4857546 - DNA, 25 bp, Homo sapien
catttctccttggataggccaccta

SEQ ID NO: 4857547 - DNA, 25 bp, Homo sapien
gaaaatgcttaggttgtacagaata

SEQ ID NO: 4857548 - DNA, 25 bp, Homo sapien
tgaggccttttgatctgcacgtttt

SEQ ID NO: 4857549 - DNA, 25 bp, Homo sapien
ttgactcatcaaagatagaaaatgc

SEQ ID NO: 4857550 - DNA, 25 bp, Homo sapien
agaaataacgtggactctccctagg

SEQ ID NO: 4857551 - DNA, 25 bp, Homo sapien
agtaatggtggacagaactgccagt

SEQ ID NO: 4857552 - DNA, 25 bp, Homo sapien
gcagcagtcctcaaaatgtggcaca

SEQ ID NO: 4857553 - DNA, 25 bp, Homo sapien
ttgcattgatgatgcaaaagtaatg

SEQ ID NO: 4857554 - DNA, 25 bp, Homo sapien
gtcctcaaaatgtggcacacagagc

SEQ ID NO: 4857555 - DNA, 25 bp, Homo sapien
atggaagtgctgtctccccacctga

SEQ ID NO: 4857556 - DNA, 25 bp, Homo sapien
tgtgtccatgaagacgacagtgctc

SEQ ID NO: 4857557 - DNA, 25 bp, Homo sapien
gtgctccacaagacagagagtctca

SEQ ID NO: 4857558 - DNA, 25 bp, Homo sapien
tatcatttaaagagaatggaagtgc

SEQ ID NO: 4857559 - DNA, 25 bp, Homo sapien
aaggccagatcagttttctatggga

SEQ ID NO: 4857560 - DNA, 25 bp, Homo sapien
tgcaggctataaaacaagaacggcg

SEQ ID NO: 4857561 - DNA, 25 bp, Homo sapien
tgtcatgaccatgtcttagtccatt

SEQ ID NO: 4857562 - DNA, 25 bp, Homo sapien
tgggagactttgtcatgaccatgtc

SEQ ID NO: 4857563 - DNA, 25 bp, Homo sapien
aaaggctatgcatggtggtttacgc

SEQ ID NO: 4857564 - DNA, 25 bp, Homo sapien
taaaaagacagtcctaaaggctatg

SEQ ID NO: 4857565 - DNA, 25 bp, Homo sapien
gacagtcctaaaggctatgcatggt

SEQ ID NO: 4857566 - DNA, 25 bp, Homo sapien
tcctaaaggctatgcatggtggttt

SEQ ID NO: 4857567 - DNA, 25 bp, Homo sapien
tctgcactcccagacatatgtcagc

SEQ ID NO: 4857568 - DNA, 25 bp, Homo sapien
catatgtcagcactagggtccccat

SEQ ID NO: 4857569 - DNA, 25 bp, Homo sapien
gttgtatatgtaacctcccctgagg

SEQ ID NO: 4857570 - DNA, 25 bp, Homo sapien
caatcgggcttgaattctgctggag

SEQ ID NO: 4857571 - DNA, 25 bp, Homo sapien
ttgttatgtaggtgcttatcactat

SEQ ID NO: 4857572 - DNA, 25 bp, Homo sapien
tttgttatgtaggtgcttatcacta

SEQ ID NO: 4857573 - DNA, 25 bp, Homo sapien
tgttatgtaggtgcttatcactata

SEQ ID NO: 4857574 - DNA, 25 bp, Homo sapien
ttttgttatgtaggtgcttatcact

SEQ ID NO: 4857575 - DNA, 25 bp, Homo sapien
cactaggcacacagcaatgtgaggc

SEQ ID NO: 4857576 - DNA, 25 bp, Homo sapien
cagtgaatacttagagctatgagtc

SEQ ID NO: 4857577 - DNA, 25 bp, Homo sapien
ttctcaaggcagcaacataggcgga

SEQ ID NO: 4857578 - DNA, 25 bp, Homo sapien
gaagcaagtcccagtcatgaagctg

SEQ ID NO: 4857579 - DNA, 25 bp, Homo sapien
tttgaagtcagtttcgatgacatgt

SEQ ID NO: 4857580 - DNA, 25 bp, Homo sapien
tgacatgttctcagggactccttcc

SEQ ID NO: 4857581 - DNA, 25 bp, Homo sapien
cagtttcgatgacatgttctcaggg

SEQ ID NO: 4857582 - DNA, 25 bp, Homo sapien
tcgatgacatgttctcagggactcc

SEQ ID NO: 4857583 - DNA, 25 bp, Homo sapien
ccagctggcagaaaagcgtctcctc

SEQ ID NO: 4857584 - DNA, 25 bp, Homo sapien
ttccagctggcagaaaagcgtctcc

SEQ ID NO: 4857585 - DNA, 25 bp, Homo sapien
agctggcagaaaagcgtctcctctg

SEQ ID NO: 4857586 - DNA, 25 bp, Homo sapien
ctgctaccccttccagctggcagaa

SEQ ID NO: 4857587 - DNA, 25 bp, Homo sapien
ccgctggcaagctgggaatccatta

SEQ ID NO: 4857588 - DNA, 25 bp, Homo sapien
gcaagctgggaatccattaccccac

SEQ ID NO: 4857589 - DNA, 25 bp, Homo sapien
tggcaagctgggaatccattacccc

SEQ ID NO: 4857590 - DNA, 25 bp, Homo sapien
cgctggcaagctgggaatccattac

SEQ ID NO: 4857591 - DNA, 25 bp, Homo sapien
ttctttcactttataggcatcactc

SEQ ID NO: 4857592 - DNA, 25 bp, Homo sapien
tttataggcatcactctcagaattt

SEQ ID NO: 4857593 - DNA, 25 bp, Homo sapien
tcactttataggcatcactctcaga

SEQ ID NO: 4857594 - DNA, 25 bp, Homo sapien
actttataggcatcactctcagaat

SEQ ID NO: 4857595 - DNA, 25 bp, Homo sapien
cttatatgcagaacaggtgcattca

SEQ ID NO: 4857596 - DNA, 25 bp, Homo sapien
ttatatgcagaacaggtgcattcat

SEQ ID NO: 4857597 - DNA, 25 bp, Homo sapien
ttcacaagattcacagtgtgacagg

SEQ ID NO: 4857598 - DNA, 25 bp, Homo sapien
gctagtcacaaggtggcctaaaagt

SEQ ID NO: 4857599 - DNA, 25 bp, Homo sapien
ggaggcatcccaagctgtcactgtc

SEQ ID NO: 4857600 - DNA, 25 bp, Homo sapien
taaagactttgaagtggctagtcac

SEQ ID NO: 4857601 - DNA, 25 bp, Homo sapien
aaacaccaaatagcaatgtttcagt

SEQ ID NO: 4857602 - DNA, 25 bp, Homo sapien
atgtgacagctgtgagtttcttctt

SEQ ID NO: 4857603 - DNA, 25 bp, Homo sapien
gacagctgtgagtttcttcttatga

SEQ ID NO: 4857604 - DNA, 25 bp, Homo sapien
gtgacagctgtgagtttcttcttat

SEQ ID NO: 4857605 - DNA, 25 bp, Homo sapien
agctgtgagtttcttcttatgaaaa

SEQ ID NO: 4857606 - DNA, 25 bp, Homo sapien
gcatttgaaaatgctttctgtattt

SEQ ID NO: 4857607 - DNA, 25 bp, Homo sapien
aataaaattagcatttgaaaatgct

SEQ ID NO: 4857608 - DNA, 25 bp, Homo sapien
attagcatttgaaaatgctttctgt

SEQ ID NO: 4857609 - DNA, 25 bp, Homo sapien
tagcatttgaaaatgctttctgtat

SEQ ID NO: 4857610 - DNA, 25 bp, Homo sapien
ttgaatcttctaccagatacagaca

SEQ ID NO: 4857611 - DNA, 25 bp, Homo sapien
cagtgaatggggaatttgctgccaa

SEQ ID NO: 4857612 - DNA, 25 bp, Homo sapien
tgaatcttctaccagatacagacat

SEQ ID NO: 4857613 - DNA, 25 bp, Homo sapien
caggttgccagtgaatggggaattt

SEQ ID NO: 4857614 - DNA, 25 bp, Homo sapien
ttgctgttgttttagctggttcctt

SEQ ID NO: 4857615 - DNA, 25 bp, Homo sapien
tggttccttaggttgtaaagcagta

SEQ ID NO: 4857616 - DNA, 25 bp, Homo sapien
tagctggttccttaggttgtaaagc

SEQ ID NO: 4857617 - DNA, 25 bp, Homo sapien
tgctgttgttttagctggttcctta

SEQ ID NO: 4857618 - DNA, 25 bp, Homo sapien
gctggttggcgttggtgtctttaaa

SEQ ID NO: 4857619 - DNA, 25 bp, Homo sapien
cctaaggagctagttctaggaatgc

SEQ ID NO: 4857620 - DNA, 25 bp, Homo sapien
ctgggacctagaccgctcagtaggg

SEQ ID NO: 4857621 - DNA, 25 bp, Homo sapien
ctggaaataactgttgctactgaaa

SEQ ID NO: 4857622 - DNA, 25 bp, Homo sapien
gtatgagagccagatgaatttgttc

SEQ ID NO: 4857623 - DNA, 25 bp, Homo sapien
cctaaaaactgtatgagagccagat

SEQ ID NO: 4857624 - DNA, 25 bp, Homo sapien
aatcaaagtagtatcctaaaaactg

SEQ ID NO: 4857625 - DNA, 25 bp, Homo sapien
gagccagatgaatttgttctttaga

SEQ ID NO: 4857626 - DNA, 25 bp, Homo sapien
taagtcaaaatggtgcagatacctc

SEQ ID NO: 4857627 - DNA, 25 bp, Homo sapien
ttatcaaggatctcaacaatgtgac

SEQ ID NO: 4857628 - DNA, 25 bp, Homo sapien
tattatgcctccacagtaacagtag

SEQ ID NO: 4857629 - DNA, 25 bp, Homo sapien
gagcagtatcatggaaaattagagc

SEQ ID NO: 4857630 - DNA, 25 bp, Homo sapien
caatccggttaagatccattgctgg

SEQ ID NO: 4857631 - DNA, 25 bp, Homo sapien
tcaccttgctctagtctgttgttaa

SEQ ID NO: 4857632 - DNA, 25 bp, Homo sapien
gggagctattgcaatccttcagaag

SEQ ID NO: 4857633 - DNA, 25 bp, Homo sapien
gaatgctagtgactcacaggtttag

SEQ ID NO: 4857634 - DNA, 25 bp, Homo sapien
tgtttatcctgtcaaataattcatt

SEQ ID NO: 4857635 - DNA, 25 bp, Homo sapien
tttgtatttctgagagaccagttgt

SEQ ID NO: 4857636 - DNA, 25 bp, Homo sapien
tgagagaccagttgtaacatcatct

SEQ ID NO: 4857637 - DNA, 25 bp, Homo sapien
taaatattctagtttgtttccatag

SEQ ID NO: 4857638 - DNA, 25 bp, Homo sapien
ttagggaagaatccctcctccttga

SEQ ID NO: 4857639 - DNA, 25 bp, Homo sapien
acacgcttgtgctcgcctcttgaca

SEQ ID NO: 4857640 - DNA, 25 bp, Homo sapien
tagaagcttggcaagcacacgcttg

SEQ ID NO: 4857641 - DNA, 25 bp, Homo sapien
gacctctgggttggtcagacatcca

SEQ ID NO: 4857642 - DNA, 25 bp, Homo sapien
tgcattttagccctcccttggttaa

SEQ ID NO: 4857643 - DNA, 25 bp, Homo sapien
ctaggtcaaggagggcactgaagtg

SEQ ID NO: 4857644 - DNA, 25 bp, Homo sapien
ggtcaaggagggcactgaagtgtag

SEQ ID NO: 4857645 - DNA, 25 bp, Homo sapien
tcaaggagggcactgaagtgtagag

SEQ ID NO: 4857646 - DNA, 25 bp, Homo sapien
aaggagggcactgaagtgtagaggc

SEQ ID NO: 4857647 - DNA, 25 bp, Homo sapien
tctactccatgctcctttgatcctt

SEQ ID NO: 4857648 - DNA, 25 bp, Homo sapien
gcacttcagatgtgacgcctcctct

SEQ ID NO: 4857649 - DNA, 25 bp, Homo sapien
cttcagatgtgacgcctcctctact

SEQ ID NO: 4857650 - DNA, 25 bp, Homo sapien
agtgtgcacttcagatgtgacgcct

SEQ ID NO: 4857651 - DNA, 25 bp, Homo sapien
cgggacccgcgagtgggtcctcctg

SEQ ID NO: 4857652 - DNA, 25 bp, Homo sapien
tgtcgccccgagtgctgcaatggga

SEQ ID NO: 4857653 - DNA, 25 bp, Homo sapien
tgcaatgggaggacgggcggcaaac

SEQ ID NO: 4857654 - DNA, 25 bp, Homo sapien
cggcaaacaggctgcagtccgagtg

SEQ ID NO: 4857655 - DNA, 25 bp, Homo sapien
ctcggcccgcgcgtcctttccccat

SEQ ID NO: 4857656 - DNA, 25 bp, Homo sapien
gtgccaactcggcccgcgcgtcctt

SEQ ID NO: 4857657 - DNA, 25 bp, Homo sapien
gccaactcggcccgcgcgtcctttc

SEQ ID NO: 4857658 - DNA, 25 bp, Homo sapien
tggtgccaactcggcccgcgcgtcc

SEQ ID NO: 4857659 - DNA, 25 bp, Homo sapien
cctggaggcggagttgcgtgcctgg

SEQ ID NO: 4857660 - DNA, 25 bp, Homo sapien
ctggaaatcgctgggtggccgcggc

SEQ ID NO: 4857661 - DNA, 25 bp, Homo sapien
gcgacagcgtcctgcgcctcgccag

SEQ ID NO: 4857662 - DNA, 25 bp, Homo sapien
cgtcctgcgcctcgccagcctgttt

SEQ ID NO: 4857663 - DNA, 25 bp, Homo sapien
tgctccgcgggtgacagtcctttgt

SEQ ID NO: 4857664 - DNA, 25 bp, Homo sapien
gacagtcctttgtgtgaagtgatgc

SEQ ID NO: 4857665 - DNA, 25 bp, Homo sapien
cgcgggtgacagtcctttgtgtgaa

SEQ ID NO: 4857666 - DNA, 25 bp, Homo sapien
cctttgtgtgaagtgatgctgcggc

SEQ ID NO: 4857667 - DNA, 25 bp, Homo sapien
tgcgaggtgcgtgcgggcttctggc

SEQ ID NO: 4857668 - DNA, 25 bp, Homo sapien
ccacagaaaggcgaagaggtataag

SEQ ID NO: 4857669 - DNA, 25 bp, Homo sapien
gtcggttcggactctgcccggctct

SEQ ID NO: 4857670 - DNA, 25 bp, Homo sapien
ggcttctggctgtcggttcggactc

SEQ ID NO: 4857671 - DNA, 25 bp, Homo sapien
gggacgagtagcacaccgaggcccc

SEQ ID NO: 4857672 - DNA, 25 bp, Homo sapien
ggagccgcctcgttgccggccgccg

SEQ ID NO: 4857673 - DNA, 25 bp, Homo sapien
ggcggggacgagtagcacaccgagg

SEQ ID NO: 4857674 - DNA, 25 bp, Homo sapien
ctgggcggggacgagtagcacaccg

SEQ ID NO: 4857675 - DNA, 25 bp, Homo sapien
gcgcgctgagctagctcctgcaccg

SEQ ID NO: 4857676 - DNA, 25 bp, Homo sapien
gcgctgagctagctcctgcaccgat

SEQ ID NO: 4857677 - DNA, 25 bp, Homo sapien
gcggcgcgctgagctagctcctgca

SEQ ID NO: 4857678 - DNA, 25 bp, Homo sapien
cgcggcgcgctgagctagctcctgc

SEQ ID NO: 4857679 - DNA, 25 bp, Homo sapien
tcgcgatcgccgccccacgcccctg

SEQ ID NO: 4857680 - DNA, 25 bp, Homo sapien
ccgccgccgccttcctgtcgagtgc

SEQ ID NO: 4857681 - DNA, 25 bp, Homo sapien
ccccacgcccctgcctcgcccgccg

SEQ ID NO: 4857682 - DNA, 25 bp, Homo sapien
ccgccgccttcctgtcgagtgcccc

SEQ ID NO: 4857683 - DNA, 25 bp, Homo sapien
cggccccagcgcccgtgggcccgcg

SEQ ID NO: 4857684 - DNA, 25 bp, Homo sapien
cacggtcccgttggcggcgagcagc

SEQ ID NO: 4857685 - DNA, 25 bp, Homo sapien
gcacggtcccgttggcggcgagcag

SEQ ID NO: 4857686 - DNA, 25 bp, Homo sapien
gggcacggtcccgttggcggcgagc

SEQ ID NO: 4857687 - DNA, 25 bp, Homo sapien
gagggcacggtcccgttggcggcga

SEQ ID NO: 4857688 - DNA, 25 bp, Homo sapien
tgcaccttcaccagatagggcgcct

SEQ ID NO: 4857689 - DNA, 25 bp, Homo sapien
tgctgttggcgtcgggctccatgaa

SEQ ID NO: 4857690 - DNA, 25 bp, Homo sapien
catgaagaagatgtacctgctgtcc

SEQ ID NO: 4857691 - DNA, 25 bp, Homo sapien
ttgaggttccggcccgtctccagag

SEQ ID NO: 4857692 - DNA, 25 bp, Homo sapien
gccggcacatttccgatctacttgg

SEQ ID NO: 4857693 - DNA, 25 bp, Homo sapien
acccacaagaaagcagccggcacat

SEQ ID NO: 4857694 - DNA, 25 bp, Homo sapien
gaaagcagccggcacatttccgatc

SEQ ID NO: 4857695 - DNA, 25 bp, Homo sapien
acatttccgatctacttggtgagcc

SEQ ID NO: 4857696 - DNA, 25 bp, Homo sapien
tcataaacctggctactagctccgg

SEQ ID NO: 4857697 - DNA, 25 bp, Homo sapien
tctgaactagagatgcaatgcaggt

SEQ ID NO: 4857698 - DNA, 25 bp, Homo sapien
gcaggttaccatccacgtcctcatg

SEQ ID NO: 4857699 - DNA, 25 bp, Homo sapien
caacattccttggacccggacagct

SEQ ID NO: 4857700 - DNA, 25 bp, Homo sapien
catcccctgggctcttaggtatacc

SEQ ID NO: 4857701 - DNA, 25 bp, Homo sapien
cttgcactgggcttgattcagctca

SEQ ID NO: 4857702 - DNA, 25 bp, Homo sapien
tgccctcatcaggtatgttcccttg

SEQ ID NO: 4857703 - DNA, 25 bp, Homo sapien
ttaggtatacccagtaccaagactc

SEQ ID NO: 4857704 - DNA, 25 bp, Homo sapien
aaagatgacaccgaaaggcacatta

SEQ ID NO: 4857705 - DNA, 25 bp, Homo sapien
ccgaaaggcacattacacgtatcat

SEQ ID NO: 4857706 - DNA, 25 bp, Homo sapien
gccgaacagccgatggcaaagatga

SEQ ID NO: 4857707 - DNA, 25 bp, Homo sapien
aacagccgatggcaaagatgacacc

SEQ ID NO: 4857708 - DNA, 25 bp, Homo sapien
gtaaagtaatgacaaacttctcatc

SEQ ID NO: 4857709 - DNA, 25 bp, Homo sapien
aaagtaatgacaaacttctcatcca

SEQ ID NO: 4857710 - DNA, 25 bp, Homo sapien
cacacatctagccaagaagcagtaa

SEQ ID NO: 4857711 - DNA, 25 bp, Homo sapien
agccaagaagcagtaaagtaatgac

SEQ ID NO: 4857712 - DNA, 25 bp, Homo sapien
gtgaatatttggaaacctcctccat

SEQ ID NO: 4857713 - DNA, 25 bp, Homo sapien
gtgctgtgaatatttggaaacctcc

SEQ ID NO: 4857714 - DNA, 25 bp, Homo sapien
gctgtgaatatttggaaacctcctc

SEQ ID NO: 4857715 - DNA, 25 bp, Homo sapien
gcttttgatcacttggtgctgtgaa

SEQ ID NO: 4857716 - DNA, 25 bp, Homo sapien
tattttccaggagaagaggctctct

SEQ ID NO: 4857717 - DNA, 25 bp, Homo sapien
tactgggccctggtttgtcctgaag

SEQ ID NO: 4857718 - DNA, 25 bp, Homo sapien
ctcagaaatctgctcaatggctccc

SEQ ID NO: 4857719 - DNA, 25 bp, Homo sapien
tcgaagggctgttggttcaatcaat

SEQ ID NO: 4857720 - DNA, 25 bp, Homo sapien
tctgtatgttatggatttaccaggc

SEQ ID NO: 4857721 - DNA, 25 bp, Homo sapien
ccagggctcacattacctcgggttc

SEQ ID NO: 4857722 - DNA, 25 bp, Homo sapien
tacacgctttgttgagaagcaaatc

SEQ ID NO: 4857723 - DNA, 25 bp, Homo sapien
aatcattctcgcctttctttaccta

SEQ ID NO: 4857724 - DNA, 25 bp, Homo sapien
ttagaaccgtatttagacagtagtc

SEQ ID NO: 4857725 - DNA, 25 bp, Homo sapien
gagaaaaaagctagagctgagggac

SEQ ID NO: 4857726 - DNA, 25 bp, Homo sapien
taacccatgaaatagagactgaact

SEQ ID NO: 4857727 - DNA, 25 bp, Homo sapien
ctgcacccggtgaaaatcctgtatc

SEQ ID NO: 4857728 - DNA, 25 bp, Homo sapien
ttaaaaagatggtaaggcacacaca

SEQ ID NO: 4857729 - DNA, 25 bp, Homo sapien
ggatggagtcatgaaacagctggag

SEQ ID NO: 4857730 - DNA, 25 bp, Homo sapien
agatggtaaggcacacacatggcag

SEQ ID NO: 4857731 - DNA, 25 bp, Homo sapien
caggcctgtgctctgcttaaaaaga

SEQ ID NO: 4857732 - DNA, 25 bp, Homo sapien
gaagagggaaagcactacagtacca

SEQ ID NO: 4857733 - DNA, 25 bp, Homo sapien
aaagacttttcagtaacgagatcag

SEQ ID NO: 4857734 - DNA, 25 bp, Homo sapien
ccgtggccgctatgaggactttggt

SEQ ID NO: 4857735 - DNA, 25 bp, Homo sapien
caccttagttactcttgcaaaagac

SEQ ID NO: 4857736 - DNA, 25 bp, Homo sapien
accgagttttacagtggccgccacg

SEQ ID NO: 4857737 - DNA, 25 bp, Homo sapien
gtccaatttaacagttcgtatcact

SEQ ID NO: 4857738 - DNA, 25 bp, Homo sapien
gcaaatcatgtcacccacatctgaa

SEQ ID NO: 4857739 - DNA, 25 bp, Homo sapien
tcacctaaatctaaacttgtccaat

SEQ ID NO: 4857740 - DNA, 25 bp, Homo sapien
tctcataacagtggacagccctggg

SEQ ID NO: 4857741 - DNA, 25 bp, Homo sapien
gtggaaccccatgccccagatatag

SEQ ID NO: 4857742 - DNA, 25 bp, Homo sapien
aaggattcattaacccgcaggcaag

SEQ ID NO: 4857743 - DNA, 25 bp, Homo sapien
gccctgggagcaagtaaatacgcgc

SEQ ID NO: 4857744 - DNA, 25 bp, Homo sapien
cagtcaaaacagatggagcccttac

SEQ ID NO: 4857745 - DNA, 25 bp, Homo sapien
tagtgtgaccattgcctgaatagcg

SEQ ID NO: 4857746 - DNA, 25 bp, Homo sapien
gaatctgtccgcaaaggcatgtccc

SEQ ID NO: 4857747 - DNA, 25 bp, Homo sapien
tggagcaccgactatggaggagcaa

SEQ ID NO: 4857748 - DNA, 25 bp, Homo sapien
tctaaatgcaagtccggcatccttg

SEQ ID NO: 4857749 - DNA, 25 bp, Homo sapien
gcccctgctgggaattaggaggcac

SEQ ID NO: 4857750 - DNA, 25 bp, Homo sapien
ggcgcccttgacaacattcacagaa

SEQ ID NO: 4857751 - DNA, 25 bp, Homo sapien
ccttaacaaacaggcctgacaagag

SEQ ID NO: 4857752 - DNA, 25 bp, Homo sapien
caatcttcccaaggtatttgcaaac

SEQ ID NO: 4857753 - DNA, 25 bp, Homo sapien
cattttggcctcagcttagaaggac

SEQ ID NO: 4857754 - DNA, 25 bp, Homo sapien
cagtgagctactgcaatggcattta

SEQ ID NO: 4857755 - DNA, 25 bp, Homo sapien
acttccctgggaaaatatcatctcc

SEQ ID NO: 4857756 - DNA, 25 bp, Homo sapien
tgatacggtcttgtttatcctaccc

SEQ ID NO: 4857757 - DNA, 25 bp, Homo sapien
cgcccggccggtattcacttcattt

SEQ ID NO: 4857758 - DNA, 25 bp, Homo sapien
ttattcattacctaaagtcaccaat

SEQ ID NO: 4857759 - DNA, 25 bp, Homo sapien
aaactgttacaactaattatgctgt

SEQ ID NO: 4857760 - DNA, 25 bp, Homo sapien
gtcataattgttagaaagggttcca

SEQ ID NO: 4857761 - DNA, 25 bp, Homo sapien
tcataattgttagaaagggttccat

SEQ ID NO: 4857762 - DNA, 25 bp, Homo sapien
tggtcataattgttagaaagggttc

SEQ ID NO: 4857763 - DNA, 25 bp, Homo sapien
ctttggtcataattgttagaaaggg

SEQ ID NO: 4857764 - DNA, 25 bp, Homo sapien
gctttattagcaagattgttaatta

SEQ ID NO: 4857765 - DNA, 25 bp, Homo sapien
tattagcaagattgttaattagaaa

SEQ ID NO: 4857766 - DNA, 25 bp, Homo sapien
ttagcaagattgttaattagaaaag

SEQ ID NO: 4857767 - DNA, 25 bp, Homo sapien
agcaagattgttaattagaaaagca

SEQ ID NO: 4857768 - DNA, 25 bp, Homo sapien
cccatttcagggtgaactgtctgaa

SEQ ID NO: 4857769 - DNA, 25 bp, Homo sapien
tgattaccatattaatagcagaaga

SEQ ID NO: 4857770 - DNA, 25 bp, Homo sapien
caatagttcattgtgggtctgggac

SEQ ID NO: 4857771 - DNA, 25 bp, Homo sapien
aagatgacattactggatcatggta

SEQ ID NO: 4857772 - DNA, 25 bp, Homo sapien
tctgagagcctacttcctctggtgc

SEQ ID NO: 4857773 - DNA, 25 bp, Homo sapien
agctccatacaacagatttcctagg

SEQ ID NO: 4857774 - DNA, 25 bp, Homo sapien
tttctgacaaatttgcagtagctac

SEQ ID NO: 4857775 - DNA, 25 bp, Homo sapien
gtagctacatactgaatctcattgt

SEQ ID NO: 4857776 - DNA, 25 bp, Homo sapien
ctcagctccatacaacagatttcct

SEQ ID NO: 4857777 - DNA, 25 bp, Homo sapien
tcctcaacggcatcacttagatggc

SEQ ID NO: 4857778 - DNA, 25 bp, Homo sapien
ggcagcttcctcaacggcatcactt

SEQ ID NO: 4857779 - DNA, 25 bp, Homo sapien
acggcatcacttagatggccactct

SEQ ID NO: 4857780 - DNA, 25 bp, Homo sapien
ttagatggccactctctttgttttc

SEQ ID NO: 4857781 - DNA, 25 bp, Homo sapien
taaaatacctaggatggaacactgc

SEQ ID NO: 4857782 - DNA, 25 bp, Homo sapien
ggaacactgccgctgtcaagaacca

SEQ ID NO: 4857783 - DNA, 25 bp, Homo sapien
gcatgcagactgacggtttgtactt

SEQ ID NO: 4857784 - DNA, 25 bp, Homo sapien
taggctccgatgattataaacagtc

SEQ ID NO: 4857785 - DNA, 25 bp, Homo sapien
caagatagcctgtcccttgaagtca

SEQ ID NO: 4857786 - DNA, 25 bp, Homo sapien
gcatgggcttcgacttaaggtcacc

SEQ ID NO: 4857787 - DNA, 25 bp, Homo sapien
tacatcagtatttgctgcaccacct

SEQ ID NO: 4857788 - DNA, 25 bp, Homo sapien
aatgttgtggctgatctcctatcca

SEQ ID NO: 4857789 - DNA, 25 bp, Homo sapien
aatatatgtgatgagagtgccactg

SEQ ID NO: 4857790 - DNA, 25 bp, Homo sapien
caatatatgtgatgagagtgccact

SEQ ID NO: 4857791 - DNA, 25 bp, Homo sapien
atctgcatgctgattttcagccttt

SEQ ID NO: 4857792 - DNA, 25 bp, Homo sapien
tcattcatctgcatgctgattttca

SEQ ID NO: 4857793 - DNA, 25 bp, Homo sapien
cattcatctgcatgctgattttcag

SEQ ID NO: 4857794 - DNA, 25 bp, Homo sapien
ttcatctgcatgctgattttcagcc

SEQ ID NO: 4857795 - DNA, 25 bp, Homo sapien
tcacaaattgttggtctctatcacg

SEQ ID NO: 4857796 - DNA, 25 bp, Homo sapien
caaattgttggtctctatcacggga

SEQ ID NO: 4857797 - DNA, 25 bp, Homo sapien
tctatcacgggaaaaccatctgcta

SEQ ID NO: 4857798 - DNA, 25 bp, Homo sapien
tgttggtctctatcacgggaaaacc

SEQ ID NO: 4857799 - DNA, 25 bp, Homo sapien
ctgaagataggcagccactgtccca

SEQ ID NO: 4857800 - DNA, 25 bp, Homo sapien
atctgaagataggcagccactgtcc

SEQ ID NO: 4857801 - DNA, 25 bp, Homo sapien
tctgaagataggcagccactgtccc

SEQ ID NO: 4857802 - DNA, 25 bp, Homo sapien
tgaagataggcagccactgtcccat

SEQ ID NO: 4857803 - DNA, 25 bp, Homo sapien
tcatttttcttacgttcattcgttg

SEQ ID NO: 4857804 - DNA, 25 bp, Homo sapien
cgttcattcgttgtgcagttatgta

SEQ ID NO: 4857805 - DNA, 25 bp, Homo sapien
tcttacgttcattcgttgtgcagtt

SEQ ID NO: 4857806 - DNA, 25 bp, Homo sapien
tttttcttacgttcattcgttgtgc

SEQ ID NO: 4857807 - DNA, 25 bp, Homo sapien
ctttagcaacatcaatgtattgagc

SEQ ID NO: 4857808 - DNA, 25 bp, Homo sapien
tttagcaacatcaatgtattgagca

SEQ ID NO: 4857809 - DNA, 25 bp, Homo sapien
ttatggccaaacttccatggtcgga

SEQ ID NO: 4857810 - DNA, 25 bp, Homo sapien
tccatggtcggagggcactgatatg

SEQ ID NO: 4857811 - DNA, 25 bp, Homo sapien
gcatatggattgactcccagggtca

SEQ ID NO: 4857812 - DNA, 25 bp, Homo sapien
cagggcttgaactagttatggccaa

SEQ ID NO: 4857813 - DNA, 25 bp, Homo sapien
taaaagtcatttaaccacatagttc

SEQ ID NO: 4857814 - DNA, 25 bp, Homo sapien
caaatgagggctgatttattgatgt

SEQ ID NO: 4857815 - DNA, 25 bp, Homo sapien
gttggtagcctgaaaacaatcatgg

SEQ ID NO: 4857816 - DNA, 25 bp, Homo sapien
tttacaccatggcaaacgggagaag

SEQ ID NO: 4857817 - DNA, 25 bp, Homo sapien
tgggaaccacccctctaaatgatgc

SEQ ID NO: 4857818 - DNA, 25 bp, Homo sapien
cagtctgtggactggcttttgggaa

SEQ ID NO: 4857819 - DNA, 25 bp, Homo sapien
gatttatgctcctagatgttgctga

SEQ ID NO: 4857820 - DNA, 25 bp, Homo sapien
ggtaagctacatgactcccctaact

SEQ ID NO: 4857821 - DNA, 25 bp, Homo sapien
aaagaaatactcaagggttgagatt

SEQ ID NO: 4857822 - DNA, 25 bp, Homo sapien
ggacaaattcctcaactttggttga

SEQ ID NO: 4857823 - DNA, 25 bp, Homo sapien
ggtggaagattcacactctcagatc

SEQ ID NO: 4857824 - DNA, 25 bp, Homo sapien
caagggttgagattatagcaggaca

SEQ ID NO: 4857825 - DNA, 25 bp, Homo sapien
ctacgatattattcaggaccttcat

SEQ ID NO: 4857826 - DNA, 25 bp, Homo sapien
gtaatggcacttcttctgcctacga

SEQ ID NO: 4857827 - DNA, 25 bp, Homo sapien
tcttctgcctacgatattattcagg

SEQ ID NO: 4857828 - DNA, 25 bp, Homo sapien
ggcacttcttctgcctacgatatta

SEQ ID NO: 4857829 - DNA, 25 bp, Homo sapien
cccgagtctgcagtaggaagagagc

SEQ ID NO: 4857830 - DNA, 25 bp, Homo sapien
ctttttgacaatattgtcgggtagc

SEQ ID NO: 4857831 - DNA, 25 bp, Homo sapien
taagatacatcggatacttgcctga

SEQ ID NO: 4857832 - DNA, 25 bp, Homo sapien
gcctgaaatttgtacatccaagtat

SEQ ID NO: 4857833 - DNA, 25 bp, Homo sapien
tagctgattctataagatacatcgg

SEQ ID NO: 4857834 - DNA, 25 bp, Homo sapien
ttttcctgccagactaatcccttta

SEQ ID NO: 4857835 - DNA, 25 bp, Homo sapien
gtattttcctgccagactaatccct

SEQ ID NO: 4857836 - DNA, 25 bp, Homo sapien
caggctagagtttgttgactttctg

SEQ ID NO: 4857837 - DNA, 25 bp, Homo sapien
ttaagttcatttgttgcaggctaga

SEQ ID NO: 4857838 - DNA, 25 bp, Homo sapien
gcatttactcgaaggcaaaaagggc

SEQ ID NO: 4857839 - DNA, 25 bp, Homo sapien
taattgcatgcggattactgagtcc

SEQ ID NO: 4857840 - DNA, 25 bp, Homo sapien
tatggatgacttggcgaaaggactc

SEQ ID NO: 4857841 - DNA, 25 bp, Homo sapien
cagaagaaagcctagtgacagtcga

SEQ ID NO: 4857842 - DNA, 25 bp, Homo sapien
gaagaaaatggatctccttcatagc

SEQ ID NO: 4857843 - DNA, 25 bp, Homo sapien
aaatggatctccttcatagcctcct

SEQ ID NO: 4857844 - DNA, 25 bp, Homo sapien
tggccagagaccgaaagccatccag

SEQ ID NO: 4857845 - DNA, 25 bp, Homo sapien
gcctatcagaatgatttagaagaaa

SEQ ID NO: 4857846 - DNA, 25 bp, Homo sapien
cctggagctatttgcccactagtta

SEQ ID NO: 4857847 - DNA, 25 bp, Homo sapien
agggctcctctttaactcatcaggt

SEQ ID NO: 4857848 - DNA, 25 bp, Homo sapien
ttttcaatacactcccagggctcct

SEQ ID NO: 4857849 - DNA, 25 bp, Homo sapien
taaagtactgaaggccatccacagc

SEQ ID NO: 4857850 - DNA, 25 bp, Homo sapien
tctcactatccaaggctgagtgcgg

SEQ ID NO: 4857851 - DNA, 25 bp, Homo sapien
ccaaggctgagtgcggatgtactat

SEQ ID NO: 4857852 - DNA, 25 bp, Homo sapien
gatgtactatagaggtctccttttc

SEQ ID NO: 4857853 - DNA, 25 bp, Homo sapien
tgagtacttctcactatccaaggct

SEQ ID NO: 4857854 - DNA, 25 bp, Homo sapien
ctgagggatcaggtctagtcttttc

SEQ ID NO: 4857855 - DNA, 25 bp, Homo sapien
tggagtatcaattggctgccctgca

SEQ ID NO: 4857856 - DNA, 25 bp, Homo sapien
tatgaccagtgtctccaagacggta

SEQ ID NO: 4857857 - DNA, 25 bp, Homo sapien
tctggccagtgttcataaggcaata

SEQ ID NO: 4857858 - DNA, 25 bp, Homo sapien
gtttgccagtgattagactaccatg

SEQ ID NO: 4857859 - DNA, 25 bp, Homo sapien
cagtgattagactaccatggttgaa

SEQ ID NO: 4857860 - DNA, 25 bp, Homo sapien
taccatggttgaaaacgaagcggag

SEQ ID NO: 4857861 - DNA, 25 bp, Homo sapien
gaagcggagagagcgctcaaatgct

SEQ ID NO: 4857862 - DNA, 25 bp, Homo sapien
ctgcccattcttcagtttcacaact

SEQ ID NO: 4857863 - DNA, 25 bp, Homo sapien
cttgcagggcctgtagaatcacact

SEQ ID NO: 4857864 - DNA, 25 bp, Homo sapien
gaatcacactgttatggcaggtcaa

SEQ ID NO: 4857865 - DNA, 25 bp, Homo sapien
tgaagggcgatgagagacctgctcc

SEQ ID NO: 4857866 - DNA, 25 bp, Homo sapien
ggcaggtcaagtgaacaccgttggt

SEQ ID NO: 4857867 - DNA, 25 bp, Homo sapien
gatgaatatcgatacctggtgaaag

SEQ ID NO: 4857868 - DNA, 25 bp, Homo sapien
caatcctgttacatttgagagggca

SEQ ID NO: 4857869 - DNA, 25 bp, Homo sapien
tcctttgaggcactgaacatctatc

SEQ ID NO: 4857870 - DNA, 25 bp, Homo sapien
gaaatggtccctacacagaattgaa

SEQ ID NO: 4857871 - DNA, 25 bp, Homo sapien
ccagggtgattgttgaagatggcca

SEQ ID NO: 4857872 - DNA, 25 bp, Homo sapien
ccagagggctgcaagcttcatgaaa

SEQ ID NO: 4857873 - DNA, 25 bp, Homo sapien
caactaccagccattacaagtgggt

SEQ ID NO: 4857874 - DNA, 25 bp, Homo sapien
ggccactcaggagcgtagattcaag

SEQ ID NO: 4857875 - DNA, 25 bp, Homo sapien
gcctcaatttactgagggtaatggc

SEQ ID NO: 4857876 - DNA, 25 bp, Homo sapien
tccaagaccattcagattcagccaa

SEQ ID NO: 4857877 - DNA, 25 bp, Homo sapien
caacttcattggcacgtcctggaat

SEQ ID NO: 4857878 - DNA, 25 bp, Homo sapien
tgcctttgagacgtggagaattcac

SEQ ID NO: 4857879 - DNA, 25 bp, Homo sapien
gagaattcacataagcacaaagtcc

SEQ ID NO: 4857880 - DNA, 25 bp, Homo sapien
tatgaaatgggtgagaaggaattcc

SEQ ID NO: 4857881 - DNA, 25 bp, Homo sapien
gacactcatttacaaggactggaag

SEQ ID NO: 4857882 - DNA, 25 bp, Homo sapien
aaccttgtccaatctgggatcaggg

SEQ ID NO: 4857883 - DNA, 25 bp, Homo sapien
gatcagggttagaatgaccacaaag

SEQ ID NO: 4857884 - DNA, 25 bp, Homo sapien
agaggaactgcacataaactcaaac

SEQ ID NO: 4857885 - DNA, 25 bp, Homo sapien
gaatgcaggctgttccaaaagaata

SEQ ID NO: 4857886 - DNA, 25 bp, Homo sapien
tggtctacttgatgaatgttccagg

SEQ ID NO: 4857887 - DNA, 25 bp, Homo sapien
tggacaagttcctcaaagtgattgc

SEQ ID NO: 4857888 - DNA, 25 bp, Homo sapien
caaagcacatcttaagtggtcaaac

SEQ ID NO: 4857889 - DNA, 25 bp, Homo sapien
tatggatatcccatcttcaatggta

SEQ ID NO: 4857890 - DNA, 25 bp, Homo sapien
tccatgtttcttgtggcttgataac

SEQ ID NO: 4857891 - DNA, 25 bp, Homo sapien
gcaataatgtagctaggtaaaggat

SEQ ID NO: 4857892 - DNA, 25 bp, Homo sapien
tgactaaggtcaccatatttagacc

SEQ ID NO: 4857893 - DNA, 25 bp, Homo sapien
tttagacctggaagtcatcaacagg

SEQ ID NO: 4857894 - DNA, 25 bp, Homo sapien
catcaacaggttcacctgtgctgaa

SEQ ID NO: 4857895 - DNA, 25 bp, Homo sapien
tcaccatatttagacctggaagtca

SEQ ID NO: 4857896 - DNA, 25 bp, Homo sapien
tttgggatcattttcactcacaggt

SEQ ID NO: 4857897 - DNA, 25 bp, Homo sapien
tattttctctatacttttgggatca

SEQ ID NO: 4857898 - DNA, 25 bp, Homo sapien
ttattttctctatacttttgggatc

SEQ ID NO: 4857899 - DNA, 25 bp, Homo sapien
acttttgggatcattttcactcaca

SEQ ID NO: 4857900 - DNA, 25 bp, Homo sapien
caaagactgaagagttgtgagcact

SEQ ID NO: 4857901 - DNA, 25 bp, Homo sapien
gatgaattcagctaaaaattcaaga

SEQ ID NO: 4857902 - DNA, 25 bp, Homo sapien
tagtagtcaactgggaaatgtggtt

SEQ ID NO: 4857903 - DNA, 25 bp, Homo sapien
ttgattttattaccggtagtagtca

SEQ ID NO: 4857904 - DNA, 25 bp, Homo sapien
aaacatttcgcaccacattgcagcc

SEQ ID NO: 4857905 - DNA, 25 bp, Homo sapien
aaaacatttcgcaccacattgcagc

SEQ ID NO: 4857906 - DNA, 25 bp, Homo sapien
ttttggttctaatggctgcccgatt

SEQ ID NO: 4857907 - DNA, 25 bp, Homo sapien
gtgtctggccaaaatctactctttg

SEQ ID NO: 4857908 - DNA, 25 bp, Homo sapien
gacagcatcggggtgactttagcat

SEQ ID NO: 4857909 - DNA, 25 bp, Homo sapien
ggtgactttagcatcagtgtctggc

SEQ ID NO: 4857910 - DNA, 25 bp, Homo sapien
tagcatcagtgtctggccaaaatct

SEQ ID NO: 4857911 - DNA, 25 bp, Homo sapien
ggagacagagcctggtgatggatgg

SEQ ID NO: 4857912 - DNA, 25 bp, Homo sapien
agacagagcctggtgatggatggta

SEQ ID NO: 4857913 - DNA, 25 bp, Homo sapien
tggagacagagcctggtgatggatg

SEQ ID NO: 4857914 - DNA, 25 bp, Homo sapien
gagacagagcctggtgatggatggt

SEQ ID NO: 4857915 - DNA, 25 bp, Homo sapien
aacaggcacttggacagaggtttcc

SEQ ID NO: 4857916 - DNA, 25 bp, Homo sapien
tcttagtaacagcaatacgtgctcc

SEQ ID NO: 4857917 - DNA, 25 bp, Homo sapien
ggacagcattcctctttcacgcaag

SEQ ID NO: 4857918 - DNA, 25 bp, Homo sapien
caaaagaccgtagcaggacacaaat

SEQ ID NO: 4857919 - DNA, 25 bp, Homo sapien
taccatgctcagtctctaaatcttg

SEQ ID NO: 4857920 - DNA, 25 bp, Homo sapien
gatatatcctgtatgttgtgtcaca

SEQ ID NO: 4857921 - DNA, 25 bp, Homo sapien
taatcaggcaacagatccagaaggg

SEQ ID NO: 4857922 - DNA, 25 bp, Homo sapien
tgtccacaagttctgaccagctttc

SEQ ID NO: 4857923 - DNA, 25 bp, Homo sapien
gagcagaagctttgcggtcttcaag

SEQ ID NO: 4857924 - DNA, 25 bp, Homo sapien
gctttggagaggcttttatagcatc

SEQ ID NO: 4857925 - DNA, 25 bp, Homo sapien
tgcaaatgaacctggctttaagtga

SEQ ID NO: 4857926 - DNA, 25 bp, Homo sapien
cagatcattagtggaggagaagctc

SEQ ID NO: 4857927 - DNA, 25 bp, Homo sapien
atgtaaatactcatagcactgagaa

SEQ ID NO: 4857928 - DNA, 25 bp, Homo sapien
gatgtaaatactcatagcactgaga

SEQ ID NO: 4857929 - DNA, 25 bp, Homo sapien
gccatattctctcgcaactttccga

SEQ ID NO: 4857930 - DNA, 25 bp, Homo sapien
tggtcacagcgactaaagcagtatt

SEQ ID NO: 4857931 - DNA, 25 bp, Homo sapien
cagtattgttttctcggcaaggcca

SEQ ID NO: 4857932 - DNA, 25 bp, Homo sapien
gaaaatttggcatcccctgtcacta

SEQ ID NO: 4857933 - DNA, 25 bp, Homo sapien
tctaaaagctcgtctggccaacagc

SEQ ID NO: 4857934 - DNA, 25 bp, Homo sapien
tacgtcctctctatgtagcaagggt

SEQ ID NO: 4857935 - DNA, 25 bp, Homo sapien
ccttccttcactagccttgttgtgg

SEQ ID NO: 4857936 - DNA, 25 bp, Homo sapien
tgttgtgggcattcaccaaaaccaa

SEQ ID NO: 4857937 - DNA, 25 bp, Homo sapien
tatatcattgttcccaactttacgg

SEQ ID NO: 4857938 - DNA, 25 bp, Homo sapien
ctttccagatgggttagttgcagct

SEQ ID NO: 4857939 - DNA, 25 bp, Homo sapien
tggaatctttccaccaagcattggt

SEQ ID NO: 4857940 - DNA, 25 bp, Homo sapien
ctcagtgaagcctacataattccat

SEQ ID NO: 4857941 - DNA, 25 bp, Homo sapien
ttgtgcctgcttgttttaaactgcc

SEQ ID NO: 4857942 - DNA, 25 bp, Homo sapien
gctagatttctagataacatttctt

SEQ ID NO: 4857943 - DNA, 25 bp, Homo sapien
atgacacttaggtttctcaccctgg

SEQ ID NO: 4857944 - DNA, 25 bp, Homo sapien
cacttcctgatctccttgtgtgtca

SEQ ID NO: 4857945 - DNA, 25 bp, Homo sapien
gagtcatctgctaagtcatcagtag

SEQ ID NO: 4857946 - DNA, 25 bp, Homo sapien
tcagagtcatctgctaagtcatcag

SEQ ID NO: 4857947 - DNA, 25 bp, Homo sapien
gaaggatggcaaattgtcagctcag

SEQ ID NO: 4857948 - DNA, 25 bp, Homo sapien
tggcaaattgtcagctcagagtcat

SEQ ID NO: 4857949 - DNA, 25 bp, Homo sapien
tttttgaaaatctatgaggttggat

SEQ ID NO: 4857950 - DNA, 25 bp, Homo sapien
catgctggtaactgaatccctccta

SEQ ID NO: 4857951 - DNA, 25 bp, Homo sapien
tgctgtgcatgctggtaactgaatc

SEQ ID NO: 4857952 - DNA, 25 bp, Homo sapien
atctatgaggttggattctgctctg

SEQ ID NO: 4857953 - DNA, 25 bp, Homo sapien
gaacagaatgactaagggcctcttt

SEQ ID NO: 4857954 - DNA, 25 bp, Homo sapien
tacacttcgtctactaactgccttg

SEQ ID NO: 4857955 - DNA, 25 bp, Homo sapien
tactgtttacctaattgccaggatg

SEQ ID NO: 4857956 - DNA, 25 bp, Homo sapien
taagctagcaatgtcctcatacact

SEQ ID NO: 4857957 - DNA, 25 bp, Homo sapien
agaagcaaaccacaccactctgggt

SEQ ID NO: 4857958 - DNA, 25 bp, Homo sapien
cactctgggtggtatcaatggtaaa

SEQ ID NO: 4857959 - DNA, 25 bp, Homo sapien
gtcacagagataagagccaaccaaa

SEQ ID NO: 4857960 - DNA, 25 bp, Homo sapien
catgacaataacaatacacagctgg

SEQ ID NO: 4857961 - DNA, 25 bp, Homo sapien
gaggcaaagcataggcacatcaagt

SEQ ID NO: 4857962 - DNA, 25 bp, Homo sapien
ggagcacggtgcatggaatgactaa

SEQ ID NO: 4857963 - DNA, 25 bp, Homo sapien
tgactaagaactggctaagaggcaa

SEQ ID NO: 4857964 - DNA, 25 bp, Homo sapien
tctagcattgccatcaaacggtgta

SEQ ID NO: 4857965 - DNA, 25 bp, Homo sapien
gacaggtggcattggaacttcttta

SEQ ID NO: 4857966 - DNA, 25 bp, Homo sapien
tatctccgtggtcctcaaggcttgg

SEQ ID NO: 4857967 - DNA, 25 bp, Homo sapien
caatgcatggtgcactgggacaggt

SEQ ID NO: 4857968 - DNA, 25 bp, Homo sapien
ggcatgtggcagtcctctgtgcact

SEQ ID NO: 4857969 - DNA, 25 bp, Homo sapien
tcaaggtgttagttctgaggtgaca

SEQ ID NO: 4857970 - DNA, 25 bp, Homo sapien
caaaggatagggtgggagacaaaca

SEQ ID NO: 4857971 - DNA, 25 bp, Homo sapien
tggtggaaagataacaaggtccttg

SEQ ID NO: 4857972 - DNA, 25 bp, Homo sapien
caggaaaatatacgacagcttggga

SEQ ID NO: 4857973 - DNA, 25 bp, Homo sapien
ctcagttagcatcagacaagatgca

SEQ ID NO: 4857974 - DNA, 25 bp, Homo sapien
ctggtcaaactccaggtgcccttct

SEQ ID NO: 4857975 - DNA, 25 bp, Homo sapien
tcttcgatcagatggtgattcctag

SEQ ID NO: 4857976 - DNA, 25 bp, Homo sapien
catgagatgccacacttgtgaagtc

SEQ ID NO: 4857977 - DNA, 25 bp, Homo sapien
taggttttatatccagggcatgttc

SEQ ID NO: 4857978 - DNA, 25 bp, Homo sapien
gcatgttctttgctagacctgcaca

SEQ ID NO: 4857979 - DNA, 25 bp, Homo sapien
cttcaaattgtttcagtgtctcatc

SEQ ID NO: 4857980 - DNA, 25 bp, Homo sapien
cttcttgccctagggtgaagtcatt

SEQ ID NO: 4857981 - DNA, 25 bp, Homo sapien
tccttcttgccctagggtgaagtca

SEQ ID NO: 4857982 - DNA, 25 bp, Homo sapien
aagtccttcttgccctagggtgaag

SEQ ID NO: 4857983 - DNA, 25 bp, Homo sapien
ttcaacaactggtgtaaagctttgg

SEQ ID NO: 4857984 - DNA, 25 bp, Homo sapien
ggcctgtgatcaaggttcttcaaca

SEQ ID NO: 4857985 - DNA, 25 bp, Homo sapien
gcctgtgatcaaggttcttcaacaa

SEQ ID NO: 4857986 - DNA, 25 bp, Homo sapien
aaagctttggacctcagactctcac

SEQ ID NO: 4857987 - DNA, 25 bp, Homo sapien
gagcaacgctgctttgtgtgcatgc

SEQ ID NO: 4857988 - DNA, 25 bp, Homo sapien
tgcatgcaaggcataaggagtcctg

SEQ ID NO: 4857989 - DNA, 25 bp, Homo sapien
gaaactcttccactgagattgtgag

SEQ ID NO: 4857990 - DNA, 25 bp, Homo sapien
gagtcctgagtggaagattgccttg

SEQ ID NO: 4857991 - DNA, 25 bp, Homo sapien
gtctcaattactcttgaattgaggg

SEQ ID NO: 4857992 - DNA, 25 bp, Homo sapien
tatccatgaatgatgttggtctcaa

SEQ ID NO: 4857993 - DNA, 25 bp, Homo sapien
gatgttggtctcaattactcttgaa

SEQ ID NO: 4857994 - DNA, 25 bp, Homo sapien
ttaatatccatgaatgatgttggtc

SEQ ID NO: 4857995 - DNA, 25 bp, Homo sapien
tgagtaccatgactggcgatccagt

SEQ ID NO: 4857996 - DNA, 25 bp, Homo sapien
gaaaggtaattgtgagtaccatgac

SEQ ID NO: 4857997 - DNA, 25 bp, Homo sapien
cccagatggggcagttcaaaaggat

SEQ ID NO: 4857998 - DNA, 25 bp, Homo sapien
cgatccagtctttggttcagttccc

SEQ ID NO: 4857999 - DNA, 25 bp, Homo sapien
tcttcctgagtctatattggatatt

SEQ ID NO: 4858000 - DNA, 25 bp, Homo sapien
tgacaaaccctgtttactaggcaaa

SEQ ID NO: 4858001 - DNA, 25 bp, Homo sapien
cacttgacaaaccctgtttactagg

SEQ ID NO: 4858002 - DNA, 25 bp, Homo sapien
cttgacaaaccctgtttactaggca

SEQ ID NO: 4858003 - DNA, 25 bp, Homo sapien
gtgagtcttttacctccatttcctg

SEQ ID NO: 4858004 - DNA, 25 bp, Homo sapien
gggattcgctcaattttctcactcc

SEQ ID NO: 4858005 - DNA, 25 bp, Homo sapien
tcctgggattcgctcaattttctca

SEQ ID NO: 4858006 - DNA, 25 bp, Homo sapien
tgagtcttttacctccatttcctgt

SEQ ID NO: 4858007 - DNA, 25 bp, Homo sapien
catggccatctggagacacagttat

SEQ ID NO: 4858008 - DNA, 25 bp, Homo sapien
atttaccaatctcatggccatctgg

SEQ ID NO: 4858009 - DNA, 25 bp, Homo sapien
tcatttaccaatctcatggccatct

SEQ ID NO: 4858010 - DNA, 25 bp, Homo sapien
atggccatctggagacacagttatc

SEQ ID NO: 4858011 - DNA, 25 bp, Homo sapien
gaaagcttcccagagtttctcccca

SEQ ID NO: 4858012 - DNA, 25 bp, Homo sapien
ttagaaagcttcccagagtttctcc

SEQ ID NO: 4858013 - DNA, 25 bp, Homo sapien
aagcttcccagagtttctccccaag

SEQ ID NO: 4858014 - DNA, 25 bp, Homo sapien
gcttcccagagtttctccccaagtg

SEQ ID NO: 4858015 - DNA, 25 bp, Homo sapien
ggctctgaggatttgattcgtcatt

SEQ ID NO: 4858016 - DNA, 25 bp, Homo sapien
agaagtagcaattaattgcatggaa

SEQ ID NO: 4858017 - DNA, 25 bp, Homo sapien
tcattgttcgaacttggtgcatggc

SEQ ID NO: 4858018 - DNA, 25 bp, Homo sapien
gcatggaaatattagaacattgttc

SEQ ID NO: 4858019 - DNA, 25 bp, Homo sapien
ttaccatttccagctctaagaaggg

SEQ ID NO: 4858020 - DNA, 25 bp, Homo sapien
aagggggaatgctgtcttctgattg

SEQ ID NO: 4858021 - DNA, 25 bp, Homo sapien
caatgtgtcctggttaccatttcca

SEQ ID NO: 4858022 - DNA, 25 bp, Homo sapien
tctaagaagggggaatgctgtcttc

SEQ ID NO: 4858023 - DNA, 25 bp, Homo sapien
cataccaaggcactgaattagagga

SEQ ID NO: 4858024 - DNA, 25 bp, Homo sapien
gatatggtcagaatggttgcttgag

SEQ ID NO: 4858025 - DNA, 25 bp, Homo sapien
tgggtactcagtcaaaggcgcatgg

SEQ ID NO: 4858026 - DNA, 25 bp, Homo sapien
gaaaacttgactctgcatgtatctg

SEQ ID NO: 4858027 - DNA, 25 bp, Homo sapien
aatggcggtcaaaggactttcctca

SEQ ID NO: 4858028 - DNA, 25 bp, Homo sapien
caaagagacagttgcacttgatctt

SEQ ID NO: 4858029 - DNA, 25 bp, Homo sapien
gacagttgcacttgatcttgaataa

SEQ ID NO: 4858030 - DNA, 25 bp, Homo sapien
tcaaaggactttcctcaaagagaca

SEQ ID NO: 4858031 - DNA, 25 bp, Homo sapien
cattccattctttgtcagttaccag

SEQ ID NO: 4858032 - DNA, 25 bp, Homo sapien
caaggagaagggatggctaggcggt

SEQ ID NO: 4858033 - DNA, 25 bp, Homo sapien
ggctaggcggttctcgctcccattc

SEQ ID NO: 4858034 - DNA, 25 bp, Homo sapien
cagttaccaggtccttaagcagatc

SEQ ID NO: 4858035 - DNA, 25 bp, Homo sapien
tcctaatatctcattttattttatg

SEQ ID NO: 4858036 - DNA, 25 bp, Homo sapien
cctaatatctcattttattttatgg

SEQ ID NO: 4858037 - DNA, 25 bp, Homo sapien
taatatctcattttattttatggta

SEQ ID NO: 4858038 - DNA, 25 bp, Homo sapien
aatatctcattttattttatggtaa

SEQ ID NO: 4858039 - DNA, 25 bp, Homo sapien
tctgtgttgatgagccaatgcagca

SEQ ID NO: 4858040 - DNA, 25 bp, Homo sapien
gcacacaaatggcaggcagataatg

SEQ ID NO: 4858041 - DNA, 25 bp, Homo sapien
tgaaatcaaagtgcgatcaggtctg

SEQ ID NO: 4858042 - DNA, 25 bp, Homo sapien
ggagccctgcatagcaagatatgaa

SEQ ID NO: 4858043 - DNA, 25 bp, Homo sapien
gtctccactgccgattggcctgtga

SEQ ID NO: 4858044 - DNA, 25 bp, Homo sapien
ccactgccgattggcctgtgatgac

SEQ ID NO: 4858045 - DNA, 25 bp, Homo sapien
cagatgcctctgtgtgataagggcc

SEQ ID NO: 4858046 - DNA, 25 bp, Homo sapien
tgtgataagggccaccctgtctcca

SEQ ID NO: 4858047 - DNA, 25 bp, Homo sapien
ttgctttatgactgaagaagcttcc

SEQ ID NO: 4858048 - DNA, 25 bp, Homo sapien
agaagcttccagcagatcatggtcg

SEQ ID NO: 4858049 - DNA, 25 bp, Homo sapien
ttccagcagatcatggtcggcttgc

SEQ ID NO: 4858050 - DNA, 25 bp, Homo sapien
gcagatcatggtcggcttgcagctg

SEQ ID NO: 4858051 - DNA, 25 bp, Homo sapien
agaaggactagcctctcacgtttcc

SEQ ID NO: 4858052 - DNA, 25 bp, Homo sapien
tcctccttcccaaatctattaagtc

SEQ ID NO: 4858053 - DNA, 25 bp, Homo sapien
tattaagtcagacataactgaacta

SEQ ID NO: 4858054 - DNA, 25 bp, Homo sapien
gtcagacataactgaactatttata

SEQ ID NO: 4858055 - DNA, 25 bp, Homo sapien
gcagatgacatgtcgatgactccct

SEQ ID NO: 4858056 - DNA, 25 bp, Homo sapien
ttcttttcctcacaataagtgtggt

SEQ ID NO: 4858057 - DNA, 25 bp, Homo sapien
ctctaatccacagcgaggcagcact

SEQ ID NO: 4858058 - DNA, 25 bp, Homo sapien
tcacaataagtgtggttgatggcag

SEQ ID NO: 4858059 - DNA, 25 bp, Homo sapien
tgccttgcaatgaaaccagccatag

SEQ ID NO: 4858060 - DNA, 25 bp, Homo sapien
tgcacatggacctaactagaagata

SEQ ID NO: 4858061 - DNA, 25 bp, Homo sapien
taaacttaatgggtctgaaactggc

SEQ ID NO: 4858062 - DNA, 25 bp, Homo sapien
tggttattccatcagttgcagccta

SEQ ID NO: 4858063 - DNA, 25 bp, Homo sapien
acattccccagtgagataagcccag

SEQ ID NO: 4858064 - DNA, 25 bp, Homo sapien
ctttccaacattccccagtgagata

SEQ ID NO: 4858065 - DNA, 25 bp, Homo sapien
taagtataatttgctgaacaatttc

SEQ ID NO: 4858066 - DNA, 25 bp, Homo sapien
tctctcatcaaagtcatactccatc

SEQ ID NO: 4858067 - DNA, 25 bp, Homo sapien
aggatagaagtttgacacaggtctc

SEQ ID NO: 4858068 - DNA, 25 bp, Homo sapien
atatcaagatgccatccagggttgc

SEQ ID NO: 4858069 - DNA, 25 bp, Homo sapien
ctatctaggtgatgccatgtaacaa

SEQ ID NO: 4858070 - DNA, 25 bp, Homo sapien
ggtctccccaggctaatatcaagat

SEQ ID NO: 4858071 - DNA, 25 bp, Homo sapien
ggtgtgtacactacaacaagctaaa

SEQ ID NO: 4858072 - DNA, 25 bp, Homo sapien
caaaggagtaacctccccaagtctg

SEQ ID NO: 4858073 - DNA, 25 bp, Homo sapien
gggattatagcacccagcctgctca

SEQ ID NO: 4858074 - DNA, 25 bp, Homo sapien
cccaagtctgaagtgttcctgaaaa

SEQ ID NO: 4858075 - DNA, 25 bp, Homo sapien
agggctgcgttcaggaccacaaagc

SEQ ID NO: 4858076 - DNA, 25 bp, Homo sapien
taagctgaaccacagtatcacttgc

SEQ ID NO: 4858077 - DNA, 25 bp, Homo sapien
aagccagtggcagagtcagtgacag

SEQ ID NO: 4858078 - DNA, 25 bp, Homo sapien
gtgacagaagccaaattccagtatt

SEQ ID NO: 4858079 - DNA, 25 bp, Homo sapien
gagttagatggacgatcatgagctc

SEQ ID NO: 4858080 - DNA, 25 bp, Homo sapien
tgcttcacgagagccattaggtact

SEQ ID NO: 4858081 - DNA, 25 bp, Homo sapien
ttcagcaggataatgtaggataccc

SEQ ID NO: 4858082 - DNA, 25 bp, Homo sapien
ggcataggctccatgactttcactt

SEQ ID NO: 4858083 - DNA, 25 bp, Homo sapien
tatttaatggaacatctatattttc

SEQ ID NO: 4858084 - DNA, 25 bp, Homo sapien
tattgtaaatccaactgtcaggagc

SEQ ID NO: 4858085 - DNA, 25 bp, Homo sapien
ggagcatccgtatacataatctttt

SEQ ID NO: 4858086 - DNA, 25 bp, Homo sapien
atcttttactgcattgctgattata

SEQ ID NO: 4858087 - DNA, 25 bp, Homo sapien
tgcaattctttctggttaaaagccc

SEQ ID NO: 4858088 - DNA, 25 bp, Homo sapien
gtttccagcatccagagccgaccat

SEQ ID NO: 4858089 - DNA, 25 bp, Homo sapien
ggactgtgatgaattgcatattgct

SEQ ID NO: 4858090 - DNA, 25 bp, Homo sapien
tcagaatctgttaggaactgtgctt

SEQ ID NO: 4858091 - DNA, 25 bp, Homo sapien
tgaagctgtgttttggctggtcact

SEQ ID NO: 4858092 - DNA, 25 bp, Homo sapien
agaatctacttaaaacaggcaagac

SEQ ID NO: 4858093 - DNA, 25 bp, Homo sapien
tgcaggctgttctcggattggcaac

SEQ ID NO: 4858094 - DNA, 25 bp, Homo sapien
ttagtgctgtcaccggcaaaatgga

SEQ ID NO: 4858095 - DNA, 25 bp, Homo sapien
tgccaaggtgtactgcgacgtttcc

SEQ ID NO: 4858096 - DNA, 25 bp, Homo sapien
tcacttcgtggctgccaacaggaaa

SEQ ID NO: 4858097 - DNA, 25 bp, Homo sapien
ggtgcactaattgacctggtgatgc

SEQ ID NO: 4858098 - DNA, 25 bp, Homo sapien
gaagataatgcactctttaggaagg

SEQ ID NO: 4858099 - DNA, 25 bp, Homo sapien
ggtctttaacataatctttgatatt

SEQ ID NO: 4858100 - DNA, 25 bp, Homo sapien
ttggaatttgctggactggtatgct

SEQ ID NO: 4858101 - DNA, 25 bp, Homo sapien
gactggtatgctcagggttaaactc

SEQ ID NO: 4858102 - DNA, 25 bp, Homo sapien
gctcagggttaaactctggtcttta

SEQ ID NO: 4858103 - DNA, 25 bp, Homo sapien
ctttgagtcccgatgtcactttgcc

SEQ ID NO: 4858104 - DNA, 25 bp, Homo sapien
gtttttctttgagtcccgatgtcac

SEQ ID NO: 4858105 - DNA, 25 bp, Homo sapien
ttttctttgagtcccgatgtcactt

SEQ ID NO: 4858106 - DNA, 25 bp, Homo sapien
aaaggcttttatgtccataacgtgt

SEQ ID NO: 4858107 - DNA, 25 bp, Homo sapien
cagacgagatcgggcgcattcaggg

SEQ ID NO: 4858108 - DNA, 25 bp, Homo sapien
aggcaaacagggtctcccatccaag

SEQ ID NO: 4858109 - DNA, 25 bp, Homo sapien
cattcagggtggtatggccgtagac

SEQ ID NO: 4858110 - DNA, 25 bp, Homo sapien
tataaccaggcccgaccctgcttag

SEQ ID NO: 4858111 - DNA, 25 bp, Homo sapien
ggacttaccttatcgctcacacatg

SEQ ID NO: 4858112 - DNA, 25 bp, Homo sapien
tgattattgtctgtaccatggagct

SEQ ID NO: 4858113 - DNA, 25 bp, Homo sapien
tgccatctaggtactgtccgtgtaa

SEQ ID NO: 4858114 - DNA, 25 bp, Homo sapien
gataacaaaaagtgcgggtctgaca

SEQ ID NO: 4858115 - DNA, 25 bp, Homo sapien
gattcttaaataccctcagctctcc

SEQ ID NO: 4858116 - DNA, 25 bp, Homo sapien
aatagaacttcccagatagcaggca

SEQ ID NO: 4858117 - DNA, 25 bp, Homo sapien
gatgacgaattaagaaacagctgct

SEQ ID NO: 4858118 - DNA, 25 bp, Homo sapien
taaaagatccctagggtctcctcag

SEQ ID NO: 4858119 - DNA, 25 bp, Homo sapien
ctggtcatagaattctggaatttcc

SEQ ID NO: 4858120 - DNA, 25 bp, Homo sapien
atttcccagtcagtcctggcacagg

SEQ ID NO: 4858121 - DNA, 25 bp, Homo sapien
cccagtcagtcctggcacagggaag

SEQ ID NO: 4858122 - DNA, 25 bp, Homo sapien
tggaatttcccagtcagtcctggca

SEQ ID NO: 4858123 - DNA, 25 bp, Homo sapien
tatcagcccttaaaataaggcctct

SEQ ID NO: 4858124 - DNA, 25 bp, Homo sapien
actcctagagcttgggttggtttca

SEQ ID NO: 4858125 - DNA, 25 bp, Homo sapien
gcacagatcctgtattgaagatgca

SEQ ID NO: 4858126 - DNA, 25 bp, Homo sapien
gagccccattggttttctagaagca

SEQ ID NO: 4858127 - DNA, 25 bp, Homo sapien
ttcacacaaagcattggtgtgtgga

SEQ ID NO: 4858128 - DNA, 25 bp, Homo sapien
tggaggctttggagttgcatgtaac

SEQ ID NO: 4858129 - DNA, 25 bp, Homo sapien
ccagccacaagggaaagttgcacgt

SEQ ID NO: 4858130 - DNA, 25 bp, Homo sapien
tgtgtggaggacgaagccagccaca

SEQ ID NO: 4858131 - DNA, 25 bp, Homo sapien
tctgtgtatcagaacgttttcttcc

SEQ ID NO: 4858132 - DNA, 25 bp, Homo sapien
tgtgtatcagaacgttttcttccca

SEQ ID NO: 4858133 - DNA, 25 bp, Homo sapien
tgtatcagaacgttttcttcccata

SEQ ID NO: 4858134 - DNA, 25 bp, Homo sapien
gttctgtgtatcagaacgttttctt

SEQ ID NO: 4858135 - DNA, 25 bp, Homo sapien
agtgagaactcactggatcctgcca

SEQ ID NO: 4858136 - DNA, 25 bp, Homo sapien
ggccaggaaacttctactcatggtg

SEQ ID NO: 4858137 - DNA, 25 bp, Homo sapien
gaaggtaaagggtagcaggcatcat

SEQ ID NO: 4858138 - DNA, 25 bp, Homo sapien
cagccagatctctcaagaactaaga

SEQ ID NO: 4858139 - DNA, 25 bp, Homo sapien
taatccattgatatgactatgagga

SEQ ID NO: 4858140 - DNA, 25 bp, Homo sapien
tatcgtgaatatggtctgtgacatc

SEQ ID NO: 4858141 - DNA, 25 bp, Homo sapien
gtcggcagaaggtttagtaatgtgt

SEQ ID NO: 4858142 - DNA, 25 bp, Homo sapien
gtaatgtgtagcttcgatatcgtga

SEQ ID NO: 4858143 - DNA, 25 bp, Homo sapien
aacagatgttaggtgatggagcaga

SEQ ID NO: 4858144 - DNA, 25 bp, Homo sapien
taaatgatacaagtctgccagagcc

SEQ ID NO: 4858145 - DNA, 25 bp, Homo sapien
taatgatgtgtgcaactggtaggca

SEQ ID NO: 4858146 - DNA, 25 bp, Homo sapien
gtagcagctacgagaacaaagaatt

SEQ ID NO: 4858147 - DNA, 25 bp, Homo sapien
agttttgaacattacttccttgctt

SEQ ID NO: 4858148 - DNA, 25 bp, Homo sapien
tgcaacagggcagaacagcttaacc

SEQ ID NO: 4858149 - DNA, 25 bp, Homo sapien
tcagggctaaggcacaacaggttgg

SEQ ID NO: 4858150 - DNA, 25 bp, Homo sapien
gaccatatgcacctcacagactggg

SEQ ID NO: 4858151 - DNA, 25 bp, Homo sapien
gaagtacaacgtggaggtctaccta

SEQ ID NO: 4858152 - DNA, 25 bp, Homo sapien
attttatctatgtcttctagcatgg

SEQ ID NO: 4858153 - DNA, 25 bp, Homo sapien
ctatgtcttctagcatggcctctgt

SEQ ID NO: 4858154 - DNA, 25 bp, Homo sapien
gtcttctagcatggcctctgtactc

SEQ ID NO: 4858155 - DNA, 25 bp, Homo sapien
tttatctatgtcttctagcatggcc

SEQ ID NO: 4858156 - DNA, 25 bp, Homo sapien
ttcttctcctcttgaataggcagtt

SEQ ID NO: 4858157 - DNA, 25 bp, Homo sapien
agctgagtcttattgggcaaattta

SEQ ID NO: 4858158 - DNA, 25 bp, Homo sapien
tttctggaccagatccttctgcatc

SEQ ID NO: 4858159 - DNA, 25 bp, Homo sapien
cttctgcatcccaagaatgatttcc

SEQ ID NO: 4858160 - DNA, 25 bp, Homo sapien
ggcagatatccatgaagtacctaca

SEQ ID NO: 4858161 - DNA, 25 bp, Homo sapien
gaatggactgaaacagaggctaact

SEQ ID NO: 4858162 - DNA, 25 bp, Homo sapien
cattaatgcacaatctctgagagag

SEQ ID NO: 4858163 - DNA, 25 bp, Homo sapien
tacagctcttaagtagcagacctgg

SEQ ID NO: 4858164 - DNA, 25 bp, Homo sapien
gtccttcatgcctgaagccaatgtg

SEQ ID NO: 4858165 - DNA, 25 bp, Homo sapien
gagaagatgtgggatcaagtccttc

SEQ ID NO: 4858166 - DNA, 25 bp, Homo sapien
ccagggctggcttttataatgatca

SEQ ID NO: 4858167 - DNA, 25 bp, Homo sapien
tgcaggatataactccaggaataag

SEQ ID NO: 4858168 - DNA, 25 bp, Homo sapien
tttgggaaaattcgcatgcaccatg

SEQ ID NO: 4858169 - DNA, 25 bp, Homo sapien
gattttgggaaaattcgcatgcacc

SEQ ID NO: 4858170 - DNA, 25 bp, Homo sapien
tgggaaaattcgcatgcaccatgta

SEQ ID NO: 4858171 - DNA, 25 bp, Homo sapien
agattttgggaaaattcgcatgcac

SEQ ID NO: 4858172 - DNA, 25 bp, Homo sapien
gtgaaggattgccacccaaagctcg

SEQ ID NO: 4858173 - DNA, 25 bp, Homo sapien
ctctatctttgtggcctaaggagga

SEQ ID NO: 4858174 - DNA, 25 bp, Homo sapien
ccaaagctcgaggagcactgcctac

SEQ ID NO: 4858175 - DNA, 25 bp, Homo sapien
caggcccctaacactatattttgga

SEQ ID NO: 4858176 - DNA, 25 bp, Homo sapien
taggcttgttgtgtgaagtctgacc

SEQ ID NO: 4858177 - DNA, 25 bp, Homo sapien
tctggacaagccatgggtgccactt

SEQ ID NO: 4858178 - DNA, 25 bp, Homo sapien
gattctggattagaagaccactcct

SEQ ID NO: 4858179 - DNA, 25 bp, Homo sapien
caatttccggtgtgtgtatgataca

SEQ ID NO: 4858180 - DNA, 25 bp, Homo sapien
ctggttgttctctcgctgctccatg

SEQ ID NO: 4858181 - DNA, 25 bp, Homo sapien
gccctgttttccgcatctcactcat

SEQ ID NO: 4858182 - DNA, 25 bp, Homo sapien
tggttgttctctcgctgctccatgg

SEQ ID NO: 4858183 - DNA, 25 bp, Homo sapien
gctgccctgttttccgcatctcact

SEQ ID NO: 4858184 - DNA, 25 bp, Homo sapien
tcactagggaatcccctgaccacac

SEQ ID NO: 4858185 - DNA, 25 bp, Homo sapien
gacctcactagggaatcccctgacc

SEQ ID NO: 4858186 - DNA, 25 bp, Homo sapien
aacgacctcactagggaatcccctg

SEQ ID NO: 4858187 - DNA, 25 bp, Homo sapien
ctcactagggaatcccctgaccaca

SEQ ID NO: 4858188 - DNA, 25 bp, Homo sapien
tgaattcctctgaagtctgatggcc

SEQ ID NO: 4858189 - DNA, 25 bp, Homo sapien
gatggcctctacttataaaacagac

SEQ ID NO: 4858190 - DNA, 25 bp, Homo sapien
gtatgtggtccccattcaaaggcac

SEQ ID NO: 4858191 - DNA, 25 bp, Homo sapien
tcctgggaagggatagaatgaatca

SEQ ID NO: 4858192 - DNA, 25 bp, Homo sapien
gcagcagaggcagtctggattttcc

SEQ ID NO: 4858193 - DNA, 25 bp, Homo sapien
tcctcctgctcttggaactttgaaa

SEQ ID NO: 4858194 - DNA, 25 bp, Homo sapien
tgaggcactcaaactgtctaattgc

SEQ ID NO: 4858195 - DNA, 25 bp, Homo sapien
ccactggcctgtataggaacagttg

SEQ ID NO: 4858196 - DNA, 25 bp, Homo sapien
gcatgcttatggttatacacaaaac

SEQ ID NO: 4858197 - DNA, 25 bp, Homo sapien
agtggaccatctaaatgtagctgtt

SEQ ID NO: 4858198 - DNA, 25 bp, Homo sapien
ctaaatgtagctgttgatatgtata

SEQ ID NO: 4858199 - DNA, 25 bp, Homo sapien
cattctggggctgtagtaagtggac

SEQ ID NO: 4858200 - DNA, 25 bp, Homo sapien
gactttgcactaacgagtccactgc

SEQ ID NO: 4858201 - DNA, 25 bp, Homo sapien
cagtcctaagagtggtctgtgacca

SEQ ID NO: 4858202 - DNA, 25 bp, Homo sapien
gcttgcccagtgagaaaacttcgga

SEQ ID NO: 4858203 - DNA, 25 bp, Homo sapien
gagattgaagctggatgacatggca

SEQ ID NO: 4858204 - DNA, 25 bp, Homo sapien
gctttttcagataccagtgcaattt

SEQ ID NO: 4858205 - DNA, 25 bp, Homo sapien
ctttttcagataccagtgcaatttc

SEQ ID NO: 4858206 - DNA, 25 bp, Homo sapien
tgctttttcagataccagtgcaatt

SEQ ID NO: 4858207 - DNA, 25 bp, Homo sapien
ttttcagataccagtgcaatttctt

SEQ ID NO: 4858208 - DNA, 25 bp, Homo sapien
gacaccaggatttgagtgattgaaa

SEQ ID NO: 4858209 - DNA, 25 bp, Homo sapien
acaatgtaaatgacaccaggatttg

SEQ ID NO: 4858210 - DNA, 25 bp, Homo sapien
tcccagtagaaacaatgtaaatgac

SEQ ID NO: 4858211 - DNA, 25 bp, Homo sapien
ctttcccagtagaaacaatgtaaat

SEQ ID NO: 4858212 - DNA, 25 bp, Homo sapien
taaaaagcctcaggatgtagtggtc

SEQ ID NO: 4858213 - DNA, 25 bp, Homo sapien
tgtagtggtctgttacccctgaaaa

SEQ ID NO: 4858214 - DNA, 25 bp, Homo sapien
gaaaatgatccagcatcgacacatg

SEQ ID NO: 4858215 - DNA, 25 bp, Homo sapien
tttctttgcttatagcccctgcaga

SEQ ID NO: 4858216 - DNA, 25 bp, Homo sapien
tcattagtagctccagttgcaggac

SEQ ID NO: 4858217 - DNA, 25 bp, Homo sapien
tttaagggccgaccatactctgctg

SEQ ID NO: 4858218 - DNA, 25 bp, Homo sapien
cttaatacactatgaggcacagctc

SEQ ID NO: 4858219 - DNA, 25 bp, Homo sapien
ggtcacctgaccttgcaactggaag

SEQ ID NO: 4858220 - DNA, 25 bp, Homo sapien
ttccctcagtcaaacacatatagct

SEQ ID NO: 4858221 - DNA, 25 bp, Homo sapien
cctggtatgatatcccagttagaga

SEQ ID NO: 4858222 - DNA, 25 bp, Homo sapien
gagagtttgcacaggtaattcatca

SEQ ID NO: 4858223 - DNA, 25 bp, Homo sapien
gataggaccttgcaatagtgagagt

SEQ ID NO: 4858224 - DNA, 25 bp, Homo sapien
tgtaaactacatgaggacataggtt

SEQ ID NO: 4858225 - DNA, 25 bp, Homo sapien
acattttatgtgttcaaatagacaa

SEQ ID NO: 4858226 - DNA, 25 bp, Homo sapien
gacataggtttgtccgttttgtcca

SEQ ID NO: 4858227 - DNA, 25 bp, Homo sapien
taggccttagaatgtaaactacatg

SEQ ID NO: 4858228 - DNA, 25 bp, Homo sapien
gataggaccatagcaaggcacagag

SEQ ID NO: 4858229 - DNA, 25 bp, Homo sapien
ttatgtgcataagcctagctatggc

SEQ ID NO: 4858230 - DNA, 25 bp, Homo sapien
cattcttagaatgcaaaggctttca

SEQ ID NO: 4858231 - DNA, 25 bp, Homo sapien
tcttgtttgagatcagataggacca

SEQ ID NO: 4858232 - DNA, 25 bp, Homo sapien
ttaagttctctgatgccattgacca

SEQ ID NO: 4858233 - DNA, 25 bp, Homo sapien
taagttctctgatgccattgaccaa

SEQ ID NO: 4858234 - DNA, 25 bp, Homo sapien
tttaagttctctgatgccattgacc

SEQ ID NO: 4858235 - DNA, 25 bp, Homo sapien
gaaagtccttgtcatacgcttgcac

SEQ ID NO: 4858236 - DNA, 25 bp, Homo sapien
tacgagcagcaacgtggactctcta

SEQ ID NO: 4858237 - DNA, 25 bp, Homo sapien
ggaattaaacacagagagtacgagc

SEQ ID NO: 4858238 - DNA, 25 bp, Homo sapien
gctgatggtcacactgaaagtcctt

SEQ ID NO: 4858239 - DNA, 25 bp, Homo sapien
taaactgtaacaagatgattggcat

SEQ ID NO: 4858240 - DNA, 25 bp, Homo sapien
aagaaaatcaagtcacgcatgtaat

SEQ ID NO: 4858241 - DNA, 25 bp, Homo sapien
ctgctatggaaatctgcttgttggc

SEQ ID NO: 4858242 - DNA, 25 bp, Homo sapien
gcatattgacaaggctgttggcaca

SEQ ID NO: 4858243 - DNA, 25 bp, Homo sapien
tttctctaggtcttgaaccaactgg

SEQ ID NO: 4858244 - DNA, 25 bp, Homo sapien
aagacatcttcaagggaggtcaggg

SEQ ID NO: 4858245 - DNA, 25 bp, Homo sapien
ggaaaatatacagggccagatccaa

SEQ ID NO: 4858246 - DNA, 25 bp, Homo sapien
ctggtatgagagagtctgtagaaat

SEQ ID NO: 4858247 - DNA, 25 bp, Homo sapien
ttcctgatgtctcatcacttgttcc

SEQ ID NO: 4858248 - DNA, 25 bp, Homo sapien
tttcctgatgtctcatcacttgttc

SEQ ID NO: 4858249 - DNA, 25 bp, Homo sapien
tcgaagtgagttggaacttccttta

SEQ ID NO: 4858250 - DNA, 25 bp, Homo sapien
ccaggagcctgctatccataatctc

SEQ ID NO: 4858251 - DNA, 25 bp, Homo sapien
ggtgtcgaagtgagttggaacttcc

SEQ ID NO: 4858252 - DNA, 25 bp, Homo sapien
tgggattctgtcacctctttgctaa

SEQ ID NO: 4858253 - DNA, 25 bp, Homo sapien
gaatgccaggacgtttgcatctggt

SEQ ID NO: 4858254 - DNA, 25 bp, Homo sapien
cttggatggttgctaccacggagat

SEQ ID NO: 4858255 - DNA, 25 bp, Homo sapien
gcatctggttgttcatagaaacata

SEQ ID NO: 4858256 - DNA, 25 bp, Homo sapien
tgctaccacggagatggtacaaaca

SEQ ID NO: 4858257 - DNA, 25 bp, Homo sapien
ggctagcacgttcccaggtatataa

SEQ ID NO: 4858258 - DNA, 25 bp, Homo sapien
atagtgacatcaaagagtgacagga

SEQ ID NO: 4858259 - DNA, 25 bp, Homo sapien
ggctgcaaactgtctacatagtgac

SEQ ID NO: 4858260 - DNA, 25 bp, Homo sapien
ggtatataaaataattgactcatag

SEQ ID NO: 4858261 - DNA, 25 bp, Homo sapien
tggtgaactaagacttttggcccaa

SEQ ID NO: 4858262 - DNA, 25 bp, Homo sapien
tttggcccaatcacaggctttatga

SEQ ID NO: 4858263 - DNA, 25 bp, Homo sapien
tgttctgcgccctgagtgaagtgtt

SEQ ID NO: 4858264 - DNA, 25 bp, Homo sapien
tcgaatatctcagaagccacttggt

SEQ ID NO: 4858265 - DNA, 25 bp, Homo sapien
acttcagggccaaccatttccagtg

SEQ ID NO: 4858266 - DNA, 25 bp, Homo sapien
gcacttcagggccaaccatttccag

SEQ ID NO: 4858267 - DNA, 25 bp, Homo sapien
agggccaaccatttccagtgcttta

SEQ ID NO: 4858268 - DNA, 25 bp, Homo sapien
tcagggccaaccatttccagtgctt

SEQ ID NO: 4858269 - DNA, 25 bp, Homo sapien
tcacatcataccagttctggctgtc

SEQ ID NO: 4858270 - DNA, 25 bp, Homo sapien
ctaagaggcactgcagaagctctgt

SEQ ID NO: 4858271 - DNA, 25 bp, Homo sapien
aagaggcactgcagaagctctgtgc

SEQ ID NO: 4858272 - DNA, 25 bp, Homo sapien
agaggcactgcagaagctctgtgca

SEQ ID NO: 4858273 - DNA, 25 bp, Homo sapien
taagaggcactgcagaagctctgtg

SEQ ID NO: 4858274 - DNA, 25 bp, Homo sapien
gtgttgggtccagatgtttatcgtt

SEQ ID NO: 4858275 - DNA, 25 bp, Homo sapien
gtgttgtgtttatcgcctgctcgta

SEQ ID NO: 4858276 - DNA, 25 bp, Homo sapien
ttaatgtgttgtgtttatcgcctgc

SEQ ID NO: 4858277 - DNA, 25 bp, Homo sapien
cagatgtttatcgttgggattttca

SEQ ID NO: 4858278 - DNA, 25 bp, Homo sapien
tccattgcgttgtgaatcaactcct

SEQ ID NO: 4858279 - DNA, 25 bp, Homo sapien
gtccgacagtcccagtgtgcttgtt

SEQ ID NO: 4858280 - DNA, 25 bp, Homo sapien
tgcgttgtgaatcaactccttctgc

SEQ ID NO: 4858281 - DNA, 25 bp, Homo sapien
cactctcccctgaggtccgacagtc

SEQ ID NO: 4858282 - DNA, 25 bp, Homo sapien
ggaatgaatatttaactcaattggc

SEQ ID NO: 4858283 - DNA, 25 bp, Homo sapien
ctcaattggctttctgcttccataa

SEQ ID NO: 4858284 - DNA, 25 bp, Homo sapien
ctgcttccataatcatcaattctcc

SEQ ID NO: 4858285 - DNA, 25 bp, Homo sapien
tatttaactcaattggctttctgct

SEQ ID NO: 4858286 - DNA, 25 bp, Homo sapien
gatgaactctcagtggtggccgctg

SEQ ID NO: 4858287 - DNA, 25 bp, Homo sapien
tccagaatgagagcctccttgatgg

SEQ ID NO: 4858288 - DNA, 25 bp, Homo sapien
tacagaggcgaatacgatgaactct

SEQ ID NO: 4858289 - DNA, 25 bp, Homo sapien
tggttcatgccatcttgcagccggc

SEQ ID NO: 4858290 - DNA, 25 bp, Homo sapien
ttattaagacaggttctcaatgggt

SEQ ID NO: 4858291 - DNA, 25 bp, Homo sapien
taagacaggttctcaatgggttacc

SEQ ID NO: 4858292 - DNA, 25 bp, Homo sapien
acaggttctcaatgggttacccagg

SEQ ID NO: 4858293 - DNA, 25 bp, Homo sapien
caggttctcaatgggttacccaggc

SEQ ID NO: 4858294 - DNA, 25 bp, Homo sapien
gccgagcttgtagagtatcatcttc

SEQ ID NO: 4858295 - DNA, 25 bp, Homo sapien
ggacttcagatttgtcgccgaaaag

SEQ ID NO: 4858296 - DNA, 25 bp, Homo sapien
tttgtcgccgaaaagccgagcttgt

SEQ ID NO: 4858297 - DNA, 25 bp, Homo sapien
aagccgagcttgtagagtatcatct

SEQ ID NO: 4858298 - DNA, 25 bp, Homo sapien
catcaacatgtagtaatctaaggca

SEQ ID NO: 4858299 - DNA, 25 bp, Homo sapien
catatctagtcatgaagtaaagttt

SEQ ID NO: 4858300 - DNA, 25 bp, Homo sapien
tctacaccttagaaattgttacaaa

SEQ ID NO: 4858301 - DNA, 25 bp, Homo sapien
tctaaggcataggttatatctacaa

SEQ ID NO: 4858302 - DNA, 25 bp, Homo sapien
aaacatatcacagcctaaggattca

SEQ ID NO: 4858303 - DNA, 25 bp, Homo sapien
ccaatcatgaaggtgaatgctatat

SEQ ID NO: 4858304 - DNA, 25 bp, Homo sapien
taccatatgattatgaccaggtgaa

SEQ ID NO: 4858305 - DNA, 25 bp, Homo sapien
ggaggtccatggtcctgaaacagca

SEQ ID NO: 4858306 - DNA, 25 bp, Homo sapien
ttctcttatcatccctttctggatt

SEQ ID NO: 4858307 - DNA, 25 bp, Homo sapien
tctcttatcatccctttctggattt

SEQ ID NO: 4858308 - DNA, 25 bp, Homo sapien
cttctcttatcatccctttctggat

SEQ ID NO: 4858309 - DNA, 25 bp, Homo sapien
tttctgcctgctaaagttccattct

SEQ ID NO: 4858310 - DNA, 25 bp, Homo sapien
cccaaagggaaccagtgactgtgga

SEQ ID NO: 4858311 - DNA, 25 bp, Homo sapien
catgcagtaatgatgcctcaggaat

SEQ ID NO: 4858312 - DNA, 25 bp, Homo sapien
tgtctctctgccatgcagtaatgat

SEQ ID NO: 4858313 - DNA, 25 bp, Homo sapien
ttctcttaaatgctggcccatggtc

SEQ ID NO: 4858314 - DNA, 25 bp, Homo sapien
tacttgccactacctcaaatgttga

SEQ ID NO: 4858315 - DNA, 25 bp, Homo sapien
tgttttctaaactgcaagcctgtat

SEQ ID NO: 4858316 - DNA, 25 bp, Homo sapien
tccaagtacctgaaactaaacatgc

SEQ ID NO: 4858317 - DNA, 25 bp, Homo sapien
gatcccacaagaacctcttcaacgt

SEQ ID NO: 4858318 - DNA, 25 bp, Homo sapien
tttaagagtgatcccacaagaacct

SEQ ID NO: 4858319 - DNA, 25 bp, Homo sapien
tcttcaacgttcctatcttctttcc

SEQ ID NO: 4858320 - DNA, 25 bp, Homo sapien
tgatggcttttaagagtgatcccac

SEQ ID NO: 4858321 - DNA, 25 bp, Homo sapien
tcaattgccccgcagccacccacct

SEQ ID NO: 4858322 - DNA, 25 bp, Homo sapien
tttttcaattgccccgcagccaccc

SEQ ID NO: 4858323 - DNA, 25 bp, Homo sapien
ctttttcaattgccccgcagccacc

SEQ ID NO: 4858324 - DNA, 25 bp, Homo sapien
tttcaattgccccgcagccacccac

SEQ ID NO: 4858325 - DNA, 25 bp, Homo sapien
gcgcgagcccggagttccaacaagt

SEQ ID NO: 4858326 - DNA, 25 bp, Homo sapien
cgcgagcccggagttccaacaagtt

SEQ ID NO: 4858327 - DNA, 25 bp, Homo sapien
cgcgcgagcccggagttccaacaag

SEQ ID NO: 4858328 - DNA, 25 bp, Homo sapien
ggaagtcgtcgatgggtcccaccgc

SEQ ID NO: 4858329 - DNA, 25 bp, Homo sapien
gaggttatcaccgtcctgctcacgc

SEQ ID NO: 4858330 - DNA, 25 bp, Homo sapien
ggctgctcctgtcgccccgggaagt

SEQ ID NO: 4858331 - DNA, 25 bp, Homo sapien
ctggcggctcgcgtcctggcctctg

SEQ ID NO: 4858332 - DNA, 25 bp, Homo sapien
gttgcctgcagggagcgcggcgcgg

SEQ ID NO: 4858333 - DNA, 25 bp, Homo sapien
tctcccgttgcctgcagggagcgcg

SEQ ID NO: 4858334 - DNA, 25 bp, Homo sapien
ggggcgtctcccgttgcctgcaggg

SEQ ID NO: 4858335 - DNA, 25 bp, Homo sapien
cgggggcgtctcccgttgcctgcag

SEQ ID NO: 4858336 - DNA, 25 bp, Homo sapien
tccctcgagggggagagcgagcggc

SEQ ID NO: 4858337 - DNA, 25 bp, Homo sapien
cggccgcgctgaggcgctcgcgctg

SEQ ID NO: 4858338 - DNA, 25 bp, Homo sapien
ctcgccggagacggagcgctctacg

SEQ ID NO: 4858339 - DNA, 25 bp, Homo sapien
cggagcgctctacgcggacggctct

SEQ ID NO: 4858340 - DNA, 25 bp, Homo sapien
ttgccggagcctcgctccttcttct

SEQ ID NO: 4858341 - DNA, 25 bp, Homo sapien
ctctgccttctttgcgctcggacat

SEQ ID NO: 4858342 - DNA, 25 bp, Homo sapien
tcttgccggagcctcgctccttctt

SEQ ID NO: 4858343 - DNA, 25 bp, Homo sapien
gcggactccggcttcttgccggagc

SEQ ID NO: 4858344 - DNA, 25 bp, Homo sapien
ctagagggcacacggcccccgtgca

SEQ ID NO: 4858345 - DNA, 25 bp, Homo sapien
tagagggcacacggcccccgtgcaa

SEQ ID NO: 4858346 - DNA, 25 bp, Homo sapien
agagggcacacggcccccgtgcaaa

SEQ ID NO: 4858347 - DNA, 25 bp, Homo sapien
gagggcacacggcccccgtgcaaag

SEQ ID NO: 4858348 - DNA, 25 bp, Homo sapien
ctgtgccccaaaacgccgaagctaa

SEQ ID NO: 4858349 - DNA, 25 bp, Homo sapien
tccgtagcacaggactgaatcaaga

SEQ ID NO: 4858350 - DNA, 25 bp, Homo sapien
ctttaggaatccctgccgctgctct

SEQ ID NO: 4858351 - DNA, 25 bp, Homo sapien
ctgaatcaagatgaaccggcgcgca

SEQ ID NO: 4858352 - DNA, 25 bp, Homo sapien
tgggaaagtaaattatccatattta

SEQ ID NO: 4858353 - DNA, 25 bp, Homo sapien
caattgggttcaaaaattcagataa

SEQ ID NO: 4858354 - DNA, 25 bp, Homo sapien
ttattatatagataaccagcaaaca

SEQ ID NO: 4858355 - DNA, 25 bp, Homo sapien
cagataaacggttgttttcttacat

SEQ ID NO: 4858356 - DNA, 25 bp, Homo sapien
ttcattagaccatctacagaggacc

SEQ ID NO: 4858357 - DNA, 25 bp, Homo sapien
ctgaacaggatgctacttcagaccg

SEQ ID NO: 4858358 - DNA, 25 bp, Homo sapien
tcttaattcattagaccatctacag

SEQ ID NO: 4858359 - DNA, 25 bp, Homo sapien
aggatgctacttcagaccgctggcc

SEQ ID NO: 4858360 - DNA, 25 bp, Homo sapien
gctgctgggagcccttgacaaaatg

SEQ ID NO: 4858361 - DNA, 25 bp, Homo sapien
ccttgacaaaatgcacacctattac

SEQ ID NO: 4858362 - DNA, 25 bp, Homo sapien
ctgctgggagcccttgacaaaatgc

SEQ ID NO: 4858363 - DNA, 25 bp, Homo sapien
tgctgctgggagcccttgacaaaat

SEQ ID NO: 4858364 - DNA, 25 bp, Homo sapien
caatcggcagcttttaactttatta

SEQ ID NO: 4858365 - DNA, 25 bp, Homo sapien
tattaccctataatgtggtgaagcc

SEQ ID NO: 4858366 - DNA, 25 bp, Homo sapien
acaccttcctggagttgagccacag

SEQ ID NO: 4858367 - DNA, 25 bp, Homo sapien
tggtgaagccactgtactagaaata

SEQ ID NO: 4858368 - DNA, 25 bp, Homo sapien
tcacaccgaaggactagtttggaac

SEQ ID NO: 4858369 - DNA, 25 bp, Homo sapien
ttggaacctgcagccgattcctggc

SEQ ID NO: 4858370 - DNA, 25 bp, Homo sapien
gttttttcgattcaattcattccca

SEQ ID NO: 4858371 - DNA, 25 bp, Homo sapien
ctgagagaggagtattcagaactgg

SEQ ID NO: 4858372 - DNA, 25 bp, Homo sapien
cctgctgcagaaagtgatacaaccc

SEQ ID NO: 4858373 - DNA, 25 bp, Homo sapien
gtgctgctgaactgctacatattgg

SEQ ID NO: 4858374 - DNA, 25 bp, Homo sapien
aaccctgtgagatgtgagtgcagaa

SEQ ID NO: 4858375 - DNA, 25 bp, Homo sapien
tatctttgaagtaccacctgctgca

SEQ ID NO: 4858376 - DNA, 25 bp, Homo sapien
ctagagtaaaagtaagatgcatcac

SEQ ID NO: 4858377 - DNA, 25 bp, Homo sapien
gagtaaaagtaagatgcatcacatt

SEQ ID NO: 4858378 - DNA, 25 bp, Homo sapien
aaaagtaagatgcatcacatttaag

SEQ ID NO: 4858379 - DNA, 25 bp, Homo sapien
gtaagatgcatcacatttaagttgt

SEQ ID NO: 4858380 - DNA, 25 bp, Homo sapien
cacatatactctccagaatcagcca

SEQ ID NO: 4858381 - DNA, 25 bp, Homo sapien
ttgattccacgatggtgatattggc

SEQ ID NO: 4858382 - DNA, 25 bp, Homo sapien
tgctttgttaatgcgaagttctgac

SEQ ID NO: 4858383 - DNA, 25 bp, Homo sapien
ctttgcacatatactctccagaatc

SEQ ID NO: 4858384 - DNA, 25 bp, Homo sapien
taaagaagcattgctaggtcatcat

SEQ ID NO: 4858385 - DNA, 25 bp, Homo sapien
aaaagtgtttctgtgcaacgtctgc

SEQ ID NO: 4858386 - DNA, 25 bp, Homo sapien
ttctgtgcaacgtctgccctgattc

SEQ ID NO: 4858387 - DNA, 25 bp, Homo sapien
tgtttctgtgcaacgtctgccctga

SEQ ID NO: 4858388 - DNA, 25 bp, Homo sapien
agtgtttctgtgcaacgtctgccct

SEQ ID NO: 4858389 - DNA, 25 bp, Homo sapien
gataggacattatgatatataaaca

SEQ ID NO: 4858390 - DNA, 25 bp, Homo sapien
aaaaaaggtgataggacattatgat

SEQ ID NO: 4858391 - DNA, 25 bp, Homo sapien
aaaggtgataggacattatgatata

SEQ ID NO: 4858392 - DNA, 25 bp, Homo sapien
ctgccttggaactaaaagttaagtg

SEQ ID NO: 4858393 - DNA, 25 bp, Homo sapien
tgaggctggcataccagtgatgatc

SEQ ID NO: 4858394 - DNA, 25 bp, Homo sapien
gttgaggctggcataccagtgatga

SEQ ID NO: 4858395 - DNA, 25 bp, Homo sapien
gaggctggcataccagtgatgatct

SEQ ID NO: 4858396 - DNA, 25 bp, Homo sapien
cagttgaggctggcataccagtgat

SEQ ID NO: 4858397 - DNA, 25 bp, Homo sapien
tgtggatactgatattctaatggga

SEQ ID NO: 4858398 - DNA, 25 bp, Homo sapien
gtggatactgatattctaatgggag

SEQ ID NO: 4858399 - DNA, 25 bp, Homo sapien
tggatactgatattctaatgggaga

SEQ ID NO: 4858400 - DNA, 25 bp, Homo sapien
ctgtggatactgatattctaatggg

SEQ ID NO: 4858401 - DNA, 25 bp, Homo sapien
gctccaaacagctgggtatcatgcc

SEQ ID NO: 4858402 - DNA, 25 bp, Homo sapien
ccaaacagctgggtatcatgcctca

SEQ ID NO: 4858403 - DNA, 25 bp, Homo sapien
ctccaaacagctgggtatcatgcct

SEQ ID NO: 4858404 - DNA, 25 bp, Homo sapien
gaagctccaaacagctgggtatcat

SEQ ID NO: 4858405 - DNA, 25 bp, Homo sapien
taaatatcagtcctctttacaggca

SEQ ID NO: 4858406 - DNA, 25 bp, Homo sapien
tcacagataacttggagaaactctg

SEQ ID NO: 4858407 - DNA, 25 bp, Homo sapien
cgtttcacatacagtctcatttgca

SEQ ID NO: 4858408 - DNA, 25 bp, Homo sapien
ctgtggaacattagggaggtgaaat

SEQ ID NO: 4858409 - DNA, 25 bp, Homo sapien
gagtcgactcatctacagactactg

SEQ ID NO: 4858410 - DNA, 25 bp, Homo sapien
ggccttaagcaacttcattcgttcc

SEQ ID NO: 4858411 - DNA, 25 bp, Homo sapien
gactacaggtgagagtcgactcatc

SEQ ID NO: 4858412 - DNA, 25 bp, Homo sapien
acagactactgctcccggccttaag

SEQ ID NO: 4858413 - DNA, 25 bp, Homo sapien
taggtggaaacgttcaagatggctc

SEQ ID NO: 4858414 - DNA, 25 bp, Homo sapien
tgtgaaatggtgcaccaacctgtgg

SEQ ID NO: 4858415 - DNA, 25 bp, Homo sapien
catcctattggttaagcagtcaccg

SEQ ID NO: 4858416 - DNA, 25 bp, Homo sapien
gactaggacaacacatcagagagag

SEQ ID NO: 4858417 - DNA, 25 bp, Homo sapien
agtggtctttaacttacaccaagag

SEQ ID NO: 4858418 - DNA, 25 bp, Homo sapien
aggtggcctcaagtcaggcagatag

SEQ ID NO: 4858419 - DNA, 25 bp, Homo sapien
ggccaaggtcagctaaatttcaaag

SEQ ID NO: 4858420 - DNA, 25 bp, Homo sapien
gaaaataccaagcatgataacccat

SEQ ID NO: 4858421 - DNA, 25 bp, Homo sapien
gggcacaatctccactactttgagg

SEQ ID NO: 4858422 - DNA, 25 bp, Homo sapien
tgtgattggacatctaaacggtttc

SEQ ID NO: 4858423 - DNA, 25 bp, Homo sapien
tcttaatacagaccacaggcttccc

SEQ ID NO: 4858424 - DNA, 25 bp, Homo sapien
tgtttcagctttaaacggcaggaga

SEQ ID NO: 4858425 - DNA, 25 bp, Homo sapien
gaaaatagatcgacggagctgccgg

SEQ ID NO: 4858426 - DNA, 25 bp, Homo sapien
tgcaaacaggatcagagggctccgg

SEQ ID NO: 4858427 - DNA, 25 bp, Homo sapien
gataaatcgtccaagtccaaggcca

SEQ ID NO: 4858428 - DNA, 25 bp, Homo sapien
ttgtgttaacgcgacgacggctgaa

SEQ ID NO: 4858429 - DNA, 25 bp, Homo sapien
tacgattcttcggtgtcggtgccgc

SEQ ID NO: 4858430 - DNA, 25 bp, Homo sapien
cactttcagattgagccctagagac

SEQ ID NO: 4858431 - DNA, 25 bp, Homo sapien
cctagagacaggtgaagtgtatgcc

SEQ ID NO: 4858432 - DNA, 25 bp, Homo sapien
tcggtgccgctgatggttcaaagga

SEQ ID NO: 4858433 - DNA, 25 bp, Homo sapien
aaagtttaggagcagtttggagatt

SEQ ID NO: 4858434 - DNA, 25 bp, Homo sapien
agtttaggagcagtttggagattag

SEQ ID NO: 4858435 - DNA, 25 bp, Homo sapien
taggagcagtttggagattagtttc

SEQ ID NO: 4858436 - DNA, 25 bp, Homo sapien
gcagtttggagattagtttctgttg

SEQ ID NO: 4858437 - DNA, 25 bp, Homo sapien
gcaagtacttcaaagtcttagagct

SEQ ID NO: 4858438 - DNA, 25 bp, Homo sapien
aagtacttcaaagtcttagagctta

SEQ ID NO: 4858439 - DNA, 25 bp, Homo sapien
gtacttcaaagtcttagagcttata

SEQ ID NO: 4858440 - DNA, 25 bp, Homo sapien
tacttcaaagtcttagagcttatag

SEQ ID NO: 4858441 - DNA, 25 bp, Homo sapien
gcagggtctgaagcggtgaagcaca

SEQ ID NO: 4858442 - DNA, 25 bp, Homo sapien
tctgaagcggtgaagcacaatcagg

SEQ ID NO: 4858443 - DNA, 25 bp, Homo sapien
gagggcctcatagggcagggtctga

SEQ ID NO: 4858444 - DNA, 25 bp, Homo sapien
ccacattcatctgaacatgtgattc

SEQ ID NO: 4858445 - DNA, 25 bp, Homo sapien
tagcatgaggcaacccttctcctgg

SEQ ID NO: 4858446 - DNA, 25 bp, Homo sapien
caggatcctggctacaatgcatgtt

SEQ ID NO: 4858447 - DNA, 25 bp, Homo sapien
tccctgacagtactatagcccgtgt

SEQ ID NO: 4858448 - DNA, 25 bp, Homo sapien
tactatgccgaaaagtgcactctgt

SEQ ID NO: 4858449 - DNA, 25 bp, Homo sapien
agcctggcccatacattgagcacac

SEQ ID NO: 4858450 - DNA, 25 bp, Homo sapien
tctaaaccttgctcaatgtactcca

SEQ ID NO: 4858451 - DNA, 25 bp, Homo sapien
tcctgtgctttgtggtatcgctgta

SEQ ID NO: 4858452 - DNA, 25 bp, Homo sapien
ggtatcgctgtatcattaataccaa

SEQ ID NO: 4858453 - DNA, 25 bp, Homo sapien
aagaacagcttgtggtttggaccta

SEQ ID NO: 4858454 - DNA, 25 bp, Homo sapien
tgagctgcaggttgactacagttat

SEQ ID NO: 4858455 - DNA, 25 bp, Homo sapien
gaggcaacgaccattcctatgtgaa

SEQ ID NO: 4858456 - DNA, 25 bp, Homo sapien
gatgttctcatgatcctcatggaag

SEQ ID NO: 4858457 - DNA, 25 bp, Homo sapien
cagcacgtggataaagagctttact

SEQ ID NO: 4858458 - DNA, 25 bp, Homo sapien
tgttcagcacgtggataaagagctt

SEQ ID NO: 4858459 - DNA, 25 bp, Homo sapien
aaatgttcagcacgtggataaagag

SEQ ID NO: 4858460 - DNA, 25 bp, Homo sapien
ggataaagagctttacttgtactct

SEQ ID NO: 4858461 - DNA, 25 bp, Homo sapien
ggaatctgcatactttcctgctctt

SEQ ID NO: 4858462 - DNA, 25 bp, Homo sapien
tcttcaatgcttatgtgtttaggaa

SEQ ID NO: 4858463 - DNA, 25 bp, Homo sapien
atcttcaatgcttatgtgtttagga

SEQ ID NO: 4858464 - DNA, 25 bp, Homo sapien
atctgaaattattattcttgctctg

SEQ ID NO: 4858465 - DNA, 25 bp, Homo sapien
caggaataagttgtaattgtcggaa

SEQ ID NO: 4858466 - DNA, 25 bp, Homo sapien
ggaagaagccgggatggagatggtg

SEQ ID NO: 4858467 - DNA, 25 bp, Homo sapien
taagttgtaattgtcggaagaagcc

SEQ ID NO: 4858468 - DNA, 25 bp, Homo sapien
gatggtgattttcgccaggtttcct

SEQ ID NO: 4858469 - DNA, 25 bp, Homo sapien
tctccgcacattttacaagatggct

SEQ ID NO: 4858470 - DNA, 25 bp, Homo sapien
cacaagtatctcgaggggtttgaaa

SEQ ID NO: 4858471 - DNA, 25 bp, Homo sapien
gcttgtcccagtggtggatgtagat

SEQ ID NO: 4858472 - DNA, 25 bp, Homo sapien
gggtttgaaaggtctttcaccatga

SEQ ID NO: 4858473 - DNA, 25 bp, Homo sapien
caggtgatcactgggataagaaagc

SEQ ID NO: 4858474 - DNA, 25 bp, Homo sapien
gacataagcgacacacaggatttct

SEQ ID NO: 4858475 - DNA, 25 bp, Homo sapien
tacattggatgtagaagtagatacc

SEQ ID NO: 4858476 - DNA, 25 bp, Homo sapien
taccaaaagttataggcctctgtga

SEQ ID NO: 4858477 - DNA, 25 bp, Homo sapien
gaagtttcttgaggtttgcatatgc

SEQ ID NO: 4858478 - DNA, 25 bp, Homo sapien
ttagcgttctttctagcatcatctg

SEQ ID NO: 4858479 - DNA, 25 bp, Homo sapien
gatgaacctcattctgttatctacc

SEQ ID NO: 4858480 - DNA, 25 bp, Homo sapien
agctcagcattctgcccagaactcg

SEQ ID NO: 4858481 - DNA, 25 bp, Homo sapien
ctttcatgggcacattctcagtaca

SEQ ID NO: 4858482 - DNA, 25 bp, Homo sapien
gactttcatgggcacattctcagta

SEQ ID NO: 4858483 - DNA, 25 bp, Homo sapien
tcatgggcacattctcagtacatct

SEQ ID NO: 4858484 - DNA, 25 bp, Homo sapien
atgggcacattctcagtacatcttg

SEQ ID NO: 4858485 - DNA, 25 bp, Homo sapien
gccttgagaggttaagccataatta

SEQ ID NO: 4858486 - DNA, 25 bp, Homo sapien
aaagcaccaagtggtagtgattgtt

SEQ ID NO: 4858487 - DNA, 25 bp, Homo sapien
tcagttacgactgagctgtaaaagc

SEQ ID NO: 4858488 - DNA, 25 bp, Homo sapien
cactgaatgggtttatgccttgaga

SEQ ID NO: 4858489 - DNA, 25 bp, Homo sapien
gttggcttgcctgcaatagtttgtc

SEQ ID NO: 4858490 - DNA, 25 bp, Homo sapien
aatgtttctcggttggcttgcctgc

SEQ ID NO: 4858491 - DNA, 25 bp, Homo sapien
aatagtttgtcagcatcacgggcca

SEQ ID NO: 4858492 - DNA, 25 bp, Homo sapien
cctgcaatagtttgtcagcatcacg

SEQ ID NO: 4858493 - DNA, 25 bp, Homo sapien
cgtagttttggcagcgatcaccagt

SEQ ID NO: 4858494 - DNA, 25 bp, Homo sapien
tttggcagcgatcaccagtaaactc

SEQ ID NO: 4858495 - DNA, 25 bp, Homo sapien
ttacgtagttttggcagcgatcacc

SEQ ID NO: 4858496 - DNA, 25 bp, Homo sapien
agcgatcaccagtaaactcatttgg

SEQ ID NO: 4858497 - DNA, 25 bp, Homo sapien
ctattcaggcagagacagaaaggga

SEQ ID NO: 4858498 - DNA, 25 bp, Homo sapien
agagacagaaagggagtggacgtac

SEQ ID NO: 4858499 - DNA, 25 bp, Homo sapien
aggcagagacagaaagggagtggac

SEQ ID NO: 4858500 - DNA, 25 bp, Homo sapien
gcagagacagaaagggagtggacgt

SEQ ID NO: 4858501 - DNA, 25 bp, Homo sapien
taatgttctcatgcgacaggcagag

SEQ ID NO: 4858502 - DNA, 25 bp, Homo sapien
tccggagcctcacacacctattagt

SEQ ID NO: 4858503 - DNA, 25 bp, Homo sapien
gtatctcagagccaactagtcgcga

SEQ ID NO: 4858504 - DNA, 25 bp, Homo sapien
ggtaagacacatctagctctaggtg

SEQ ID NO: 4858505 - DNA, 25 bp, Homo sapien
ttaacttaccatcatttcaagtgca

SEQ ID NO: 4858506 - DNA, 25 bp, Homo sapien
tgtataaagaagatggactgttcag

SEQ ID NO: 4858507 - DNA, 25 bp, Homo sapien
caggatgtggtcattgtataaagaa

SEQ ID NO: 4858508 - DNA, 25 bp, Homo sapien
ttcaagtgcatatcggttacagctt

SEQ ID NO: 4858509 - DNA, 25 bp, Homo sapien
tcatttccatgaaggtgggacccag

SEQ ID NO: 4858510 - DNA, 25 bp, Homo sapien
tctagagccccctcccttcccttgc

SEQ ID NO: 4858511 - DNA, 25 bp, Homo sapien
ccttgcctttttctcctaccagtca

SEQ ID NO: 4858512 - DNA, 25 bp, Homo sapien
ccagattttctttctagagccccct

SEQ ID NO: 4858513 - DNA, 25 bp, Homo sapien
aggtcacttccacttgccaggactg

SEQ ID NO: 4858514 - DNA, 25 bp, Homo sapien
aaagggatgagagcagatgtcatca

SEQ ID NO: 4858515 - DNA, 25 bp, Homo sapien
cacaggtcacttccacttgccagga

SEQ ID NO: 4858516 - DNA, 25 bp, Homo sapien
tgagagcagatgtcatcacaggtca

SEQ ID NO: 4858517 - DNA, 25 bp, Homo sapien
cacacacatgatgccgaccacaagg

SEQ ID NO: 4858518 - DNA, 25 bp, Homo sapien
acatgatgccgaccacaaggagggc

SEQ ID NO: 4858519 - DNA, 25 bp, Homo sapien
gatgccggttatggtcagcactctc

SEQ ID NO: 4858520 - DNA, 25 bp, Homo sapien
atgcagatgccggttatggtcagca

SEQ ID NO: 4858521 - DNA, 25 bp, Homo sapien
gaaggctctgccgaagacggtcatg

SEQ ID NO: 4858522 - DNA, 25 bp, Homo sapien
tcatcatattgtttcgttcagaccg

SEQ ID NO: 4858523 - DNA, 25 bp, Homo sapien
gatggtgaggcccattggcaatgtt

SEQ ID NO: 4858524 - DNA, 25 bp, Homo sapien
gaagacggtcatgcagctttttccg

SEQ ID NO: 4858525 - DNA, 25 bp, Homo sapien
tgacagtagtggagtgatgggctgt

SEQ ID NO: 4858526 - DNA, 25 bp, Homo sapien
ggctgtggaagtatagtgactggtg

SEQ ID NO: 4858527 - DNA, 25 bp, Homo sapien
tggagatgacgtttttagatacgta

SEQ ID NO: 4858528 - DNA, 25 bp, Homo sapien
ctcaacaatatgctcactggagatg

SEQ ID NO: 4858529 - DNA, 25 bp, Homo sapien
ggctttcggaaaggatgctttcagt

SEQ ID NO: 4858530 - DNA, 25 bp, Homo sapien
tacggatgacatcacgattacagag

SEQ ID NO: 4858531 - DNA, 25 bp, Homo sapien
gatgacatcacgattacagagtggc

SEQ ID NO: 4858532 - DNA, 25 bp, Homo sapien
ggatgctttcagtgtgtccgttgct

SEQ ID NO: 4858533 - DNA, 25 bp, Homo sapien
tatgaggagagtctcggtaggaatc

SEQ ID NO: 4858534 - DNA, 25 bp, Homo sapien
gcctgaggaagctgttacattcacg

SEQ ID NO: 4858535 - DNA, 25 bp, Homo sapien
gccattaagacgtcctcttgggccc

SEQ ID NO: 4858536 - DNA, 25 bp, Homo sapien
cctgtgccattaagacgtcctcttg

SEQ ID NO: 4858537 - DNA, 25 bp, Homo sapien
tagcagataagaacacgaggccagc

SEQ ID NO: 4858538 - DNA, 25 bp, Homo sapien
taagagtctgttgcctgtcagtcac

SEQ ID NO: 4858539 - DNA, 25 bp, Homo sapien
tcactgggacgacgagagaagctca

SEQ ID NO: 4858540 - DNA, 25 bp, Homo sapien
tagatttcctgaggtgagaccgcag

SEQ ID NO: 4858541 - DNA, 25 bp, Homo sapien
gaagactgccagacgcagcatccaa

SEQ ID NO: 4858542 - DNA, 25 bp, Homo sapien
tgacattcagcaatgacatagccct

SEQ ID NO: 4858543 - DNA, 25 bp, Homo sapien
gacgcagcatccaagagatttattt

SEQ ID NO: 4858544 - DNA, 25 bp, Homo sapien
ctttgaaaaccacccgtgaagactg

SEQ ID NO: 4858545 - DNA, 25 bp, Homo sapien
ccccagtataagaagtcctgacttt

SEQ ID NO: 4858546 - DNA, 25 bp, Homo sapien
gcacaacactaaatgactcttttct

SEQ ID NO: 4858547 - DNA, 25 bp, Homo sapien
aagacgtggcttattcagagtcaca

SEQ ID NO: 4858548 - DNA, 25 bp, Homo sapien
aaaaatgttaccaacgcacaacact

SEQ ID NO: 4858549 - DNA, 25 bp, Homo sapien
ttggatctgtgtgccttgtttctcc

SEQ ID NO: 4858550 - DNA, 25 bp, Homo sapien
atgcatttggatctgtgtgccttgt

SEQ ID NO: 4858551 - DNA, 25 bp, Homo sapien
ccttagctcagctataaggttatgt

SEQ ID NO: 4858552 - DNA, 25 bp, Homo sapien
tccttagctcagctataaggttatg

SEQ ID NO: 4858553 - DNA, 25 bp, Homo sapien
cgagccggggtggtcatggctgaca

SEQ ID NO: 4858554 - DNA, 25 bp, Homo sapien
tacgagccggggtggtcatggctga

SEQ ID NO: 4858555 - DNA, 25 bp, Homo sapien
ctacaggtgacatacgagccggggt

SEQ ID NO: 4858556 - DNA, 25 bp, Homo sapien
agccggggtggtcatggctgacaca

SEQ ID NO: 4858557 - DNA, 25 bp, Homo sapien
ccggctattggcgagtttcttaaca

SEQ ID NO: 4858558 - DNA, 25 bp, Homo sapien
tcttctcccgcagccttggtggtgt

SEQ ID NO: 4858559 - DNA, 25 bp, Homo sapien
tctgggagcttgtgttgctgtccac

SEQ ID NO: 4858560 - DNA, 25 bp, Homo sapien
tggtgtcacgagaagtagaggtctc

SEQ ID NO: 4858561 - DNA, 25 bp, Homo sapien
cagggggttctgtatgcccaggaaa

SEQ ID NO: 4858562 - DNA, 25 bp, Homo sapien
tgccagggggttctgtatgcccagg

SEQ ID NO: 4858563 - DNA, 25 bp, Homo sapien
ttctgtatgcccaggaaaggcgtat

SEQ ID NO: 4858564 - DNA, 25 bp, Homo sapien
tatgcccaggaaaggcgtatcttca

SEQ ID NO: 4858565 - DNA, 25 bp, Homo sapien
aagcggcctgctgggttagtcctgc

SEQ ID NO: 4858566 - DNA, 25 bp, Homo sapien
gaagcggcctgctgggttagtcctg

SEQ ID NO: 4858567 - DNA, 25 bp, Homo sapien
cagccaggcggaaggcaggtgttgc

SEQ ID NO: 4858568 - DNA, 25 bp, Homo sapien
cctgctgtcagccaggcggaaggca

SEQ ID NO: 4858569 - DNA, 25 bp, Homo sapien
caatagggtcttggttagcaattac

SEQ ID NO: 4858570 - DNA, 25 bp, Homo sapien
ttggttagcaattacactagacagc

SEQ ID NO: 4858571 - DNA, 25 bp, Homo sapien
ttatacagcaatagggtcttggtta

SEQ ID NO: 4858572 - DNA, 25 bp, Homo sapien
gggtcttggttagcaattacactag

SEQ ID NO: 4858573 - DNA, 25 bp, Homo sapien
tttacaggtgaatctatgtgtttat

SEQ ID NO: 4858574 - DNA, 25 bp, Homo sapien
caggtgaatctatgtgtttatttag

SEQ ID NO: 4858575 - DNA, 25 bp, Homo sapien
gttttacaggtgaatctatgtgttt

SEQ ID NO: 4858576 - DNA, 25 bp, Homo sapien
ggtgaatctatgtgtttatttaggt

SEQ ID NO: 4858577 - DNA, 25 bp, Homo sapien
gatagcaggtttgggacacattcac

SEQ ID NO: 4858578 - DNA, 25 bp, Homo sapien
catactgatcgggtgctactacaag

SEQ ID NO: 4858579 - DNA, 25 bp, Homo sapien
tcatcgctatgtacagcaggcacgt

SEQ ID NO: 4858580 - DNA, 25 bp, Homo sapien
cctcagtgggatacgattttagacc

SEQ ID NO: 4858581 - DNA, 25 bp, Homo sapien
tcgtgattgaatggcacgttgacat

SEQ ID NO: 4858582 - DNA, 25 bp, Homo sapien
tacaaaagatagcaacagccaggat

SEQ ID NO: 4858583 - DNA, 25 bp, Homo sapien
gagtttcttactgccactacaaaag

SEQ ID NO: 4858584 - DNA, 25 bp, Homo sapien
attttcattagtctgaaggagtttc

SEQ ID NO: 4858585 - DNA, 25 bp, Homo sapien
tagggaccagaagacaagtattagc

SEQ ID NO: 4858586 - DNA, 25 bp, Homo sapien
gcaactcacttcaagacaagggctc

SEQ ID NO: 4858587 - DNA, 25 bp, Homo sapien
cacaaaagtacaaatcaaggaagcc

SEQ ID NO: 4858588 - DNA, 25 bp, Homo sapien
cactttaggctcaactgggagaaac

SEQ ID NO: 4858589 - DNA, 25 bp, Homo sapien
gggccgtaaccaggagattgacaca

SEQ ID NO: 4858590 - DNA, 25 bp, Homo sapien
tacaggtggtacatgaatatgtcaa

SEQ ID NO: 4858591 - DNA, 25 bp, Homo sapien
ggctggagacaagttatgagtgaca

SEQ ID NO: 4858592 - DNA, 25 bp, Homo sapien
gactagggtttcataaacactggtg

SEQ ID NO: 4858593 - DNA, 25 bp, Homo sapien
gagcagtgtggtatctgctatccca

SEQ ID NO: 4858594 - DNA, 25 bp, Homo sapien
gaaggtcacgagcagtgtggtatct

SEQ ID NO: 4858595 - DNA, 25 bp, Homo sapien
aatttagaaggtcacgagcagtgtg

SEQ ID NO: 4858596 - DNA, 25 bp, Homo sapien
gtcacgagcagtgtggtatctgcta

SEQ ID NO: 4858597 - DNA, 25 bp, Homo sapien
tatcttatagttgctctgctcctgc

SEQ ID NO: 4858598 - DNA, 25 bp, Homo sapien
agtccccttgcctgatcctgttgaa

SEQ ID NO: 4858599 - DNA, 25 bp, Homo sapien
ttggagcccattccgcagcacaagt

SEQ ID NO: 4858600 - DNA, 25 bp, Homo sapien
ttgccatagggcaaattggagccca

SEQ ID NO: 4858601 - DNA, 25 bp, Homo sapien
aagctagtagagttgatcagggatc

SEQ ID NO: 4858602 - DNA, 25 bp, Homo sapien
gattccatcataaataagctagtag

SEQ ID NO: 4858603 - DNA, 25 bp, Homo sapien
gtagagttgatcagggatcttgaac

SEQ ID NO: 4858604 - DNA, 25 bp, Homo sapien
tcttgaacttccaaatcccattagc

SEQ ID NO: 4858605 - DNA, 25 bp, Homo sapien
gatatgcagctctagggtaactggc

SEQ ID NO: 4858606 - DNA, 25 bp, Homo sapien
gctctagggtaactggctccaccag

SEQ ID NO: 4858607 - DNA, 25 bp, Homo sapien
tactctggagatatgcagctctagg

SEQ ID NO: 4858608 - DNA, 25 bp, Homo sapien
cttcctactctggagatatgcagct

SEQ ID NO: 4858609 - DNA, 25 bp, Homo sapien
cagatccttttcagccagttctatg

SEQ ID NO: 4858610 - DNA, 25 bp, Homo sapien
caaatatggaggtcctatttcctct

SEQ ID NO: 4858611 - DNA, 25 bp, Homo sapien
tggaaaataagtggacagcaagaaa

SEQ ID NO: 4858612 - DNA, 25 bp, Homo sapien
gagaatttgctgtcccattggtttt

SEQ ID NO: 4858613 - DNA, 25 bp, Homo sapien
cacaactgtgcccaagatgatagga

SEQ ID NO: 4858614 - DNA, 25 bp, Homo sapien
caaaatctattcctcagagcctggc

SEQ ID NO: 4858615 - DNA, 25 bp, Homo sapien
tgtctgactcggtgaatttggccca

SEQ ID NO: 4858616 - DNA, 25 bp, Homo sapien
tgccactgacatggacgaggctgga

SEQ ID NO: 4858617 - DNA, 25 bp, Homo sapien
cagaaggcttgaaatgtagtgtggt

SEQ ID NO: 4858618 - DNA, 25 bp, Homo sapien
gatagtctagatcaacaatctggac

SEQ ID NO: 4858619 - DNA, 25 bp, Homo sapien
cctaagagtaggattggcatttttc

SEQ ID NO: 4858620 - DNA, 25 bp, Homo sapien
caatctggacatatagttctacaga

SEQ ID NO: 4858621 - DNA, 25 bp, Homo sapien
aatggaagcgctgggttgctgccag

SEQ ID NO: 4858622 - DNA, 25 bp, Homo sapien
agtgtctctgctgcagtagaggaag

SEQ ID NO: 4858623 - DNA, 25 bp, Homo sapien
gaggtcggtagaggtcagcaatgga

SEQ ID NO: 4858624 - DNA, 25 bp, Homo sapien
ccacaggtagaggtcggtagaggtc

SEQ ID NO: 4858625 - DNA, 25 bp, Homo sapien
agtgacaggctgattattaacacct

SEQ ID NO: 4858626 - DNA, 25 bp, Homo sapien
tattaacaccttctattggcttcat

SEQ ID NO: 4858627 - DNA, 25 bp, Homo sapien
ttattaacaccttctattggcttca

SEQ ID NO: 4858628 - DNA, 25 bp, Homo sapien
gacaggctgattattaacaccttct

SEQ ID NO: 4858629 - DNA, 25 bp, Homo sapien
cttcactaactagtaatgctgaatt

SEQ ID NO: 4858630 - DNA, 25 bp, Homo sapien
tcttcactaactagtaatgctgaat

SEQ ID NO: 4858631 - DNA, 25 bp, Homo sapien
actaactagtaatgctgaatttcca

SEQ ID NO: 4858632 - DNA, 25 bp, Homo sapien
tcactaactagtaatgctgaatttc

SEQ ID NO: 4858633 - DNA, 25 bp, Homo sapien
ttttgaatcttgctaaaccaacagg

SEQ ID NO: 4858634 - DNA, 25 bp, Homo sapien
tttgaatcttgctaaaccaacaggt

SEQ ID NO: 4858635 - DNA, 25 bp, Homo sapien
ccttggccgcagtggagagtgtttc

SEQ ID NO: 4858636 - DNA, 25 bp, Homo sapien
tggccgcagtggagagtgtttctgt

SEQ ID NO: 4858637 - DNA, 25 bp, Homo sapien
cttggccgcagtggagagtgtttct

SEQ ID NO: 4858638 - DNA, 25 bp, Homo sapien
ccgcagtggagagtgtttctgtgcc

SEQ ID NO: 4858639 - DNA, 25 bp, Homo sapien
cttcttaacaatggactgtctaagc

SEQ ID NO: 4858640 - DNA, 25 bp, Homo sapien
tcttaacaatggactgtctaagcca

SEQ ID NO: 4858641 - DNA, 25 bp, Homo sapien
ttcttaacaatggactgtctaagcc

SEQ ID NO: 4858642 - DNA, 25 bp, Homo sapien
tccatttcttctgctatctaggtaa

SEQ ID NO: 4858643 - DNA, 25 bp, Homo sapien
tattacactgatcttttcccgttct

SEQ ID NO: 4858644 - DNA, 25 bp, Homo sapien
ccgttcttccgatgtgtctatgacc

SEQ ID NO: 4858645 - DNA, 25 bp, Homo sapien
gactcatggatcttcacttcaaacg

SEQ ID NO: 4858646 - DNA, 25 bp, Homo sapien
gttgtgcagacccatctagatattt

SEQ ID NO: 4858647 - DNA, 25 bp, Homo sapien
tggggttgtgcagacccatctagat

SEQ ID NO: 4858648 - DNA, 25 bp, Homo sapien
tttatggggttgtgcagacccatct

SEQ ID NO: 4858649 - DNA, 25 bp, Homo sapien
gggttgtgcagacccatctagatat

SEQ ID NO: 4858650 - DNA, 25 bp, Homo sapien
caggtcatgatggaatcctccaggt

SEQ ID NO: 4858651 - DNA, 25 bp, Homo sapien
tcctccaggtgtaagccagatacct

SEQ ID NO: 4858652 - DNA, 25 bp, Homo sapien
atcctccaggtgtaagccagatacc

SEQ ID NO: 4858653 - DNA, 25 bp, Homo sapien
ctccaggtgtaagccagataccttg

SEQ ID NO: 4858654 - DNA, 25 bp, Homo sapien
gtaaataggcgggacaagatttgcc

SEQ ID NO: 4858655 - DNA, 25 bp, Homo sapien
aataggcgggacaagatttgccaag

SEQ ID NO: 4858656 - DNA, 25 bp, Homo sapien
tggtaaataggcgggacaagatttg

SEQ ID NO: 4858657 - DNA, 25 bp, Homo sapien
taaataggcgggacaagatttgcca

SEQ ID NO: 4858658 - DNA, 25 bp, Homo sapien
tgaacaaacaaactcttaatagcgg

SEQ ID NO: 4858659 - DNA, 25 bp, Homo sapien
gcattaagatgtcctgattcagcat

SEQ ID NO: 4858660 - DNA, 25 bp, Homo sapien
tagtcatccctattgtcgctatgga

SEQ ID NO: 4858661 - DNA, 25 bp, Homo sapien
gattcagcatcgaggtagtcatccc

SEQ ID NO: 4858662 - DNA, 25 bp, Homo sapien
attataaagttttatgcaatttccg

SEQ ID NO: 4858663 - DNA, 25 bp, Homo sapien
aatttccggcctctgccatcttaag

SEQ ID NO: 4858664 - DNA, 25 bp, Homo sapien
agttttatgcaatttccggcctctg

SEQ ID NO: 4858665 - DNA, 25 bp, Homo sapien
tttatgcaatttccggcctctgcca

SEQ ID NO: 4858666 - DNA, 25 bp, Homo sapien
taggaagacagtagtagttaggaca

SEQ ID NO: 4858667 - DNA, 25 bp, Homo sapien
gctcggttagtttcgctagtatgga

SEQ ID NO: 4858668 - DNA, 25 bp, Homo sapien
tcaaaaagcgctcggttagtttcgc

SEQ ID NO: 4858669 - DNA, 25 bp, Homo sapien
cctcctctgttagatcaaaaagcgc

SEQ ID NO: 4858670 - DNA, 25 bp, Homo sapien
gagagattttaacctgtattgttta

SEQ ID NO: 4858671 - DNA, 25 bp, Homo sapien
aatgagagattttaacctgtattgt

SEQ ID NO: 4858672 - DNA, 25 bp, Homo sapien
atgagagattttaacctgtattgtt

SEQ ID NO: 4858673 - DNA, 25 bp, Homo sapien
tgagagattttaacctgtattgttt

SEQ ID NO: 4858674 - DNA, 25 bp, Homo sapien
caacagcttatttagctgaccttac

SEQ ID NO: 4858675 - DNA, 25 bp, Homo sapien
catttttggggtatgggcccaacag

SEQ ID NO: 4858676 - DNA, 25 bp, Homo sapien
ttggggtatgggcccaacagcttat

SEQ ID NO: 4858677 - DNA, 25 bp, Homo sapien
acagcttatttagctgaccttactc

SEQ ID NO: 4858678 - DNA, 25 bp, Homo sapien
aaatcagtgtgagcctagcattgtg

SEQ ID NO: 4858679 - DNA, 25 bp, Homo sapien
tatttctaggcctgttcagacgaga

SEQ ID NO: 4858680 - DNA, 25 bp, Homo sapien
ttaagattggggtaagggcgagcat

SEQ ID NO: 4858681 - DNA, 25 bp, Homo sapien
ggtaagggcgagcatgtttatttct

SEQ ID NO: 4858682 - DNA, 25 bp, Homo sapien
gctttgaaggcccttggtcttatgt

SEQ ID NO: 4858683 - DNA, 25 bp, Homo sapien
tgaaggcccttggtcttatgtaacc

SEQ ID NO: 4858684 - DNA, 25 bp, Homo sapien
ggctttgaaggcccttggtcttatg

SEQ ID NO: 4858685 - DNA, 25 bp, Homo sapien
tttgaaggcccttggtcttatgtaa

SEQ ID NO: 4858686 - DNA, 25 bp, Homo sapien
tcaggagaacagttgtcagagccac

SEQ ID NO: 4858687 - DNA, 25 bp, Homo sapien
gaaacaactgggatctaagcagcca

SEQ ID NO: 4858688 - DNA, 25 bp, Homo sapien
tcccaaagtttgagctcacagtctg

SEQ ID NO: 4858689 - DNA, 25 bp, Homo sapien
gatctcagacatcagagaacgctgc

SEQ ID NO: 4858690 - DNA, 25 bp, Homo sapien
tcatgttgtttgttagtgtgtgctc

SEQ ID NO: 4858691 - DNA, 25 bp, Homo sapien
aatattcagcaataagtcatgttgt

SEQ ID NO: 4858692 - DNA, 25 bp, Homo sapien
gttgtttgttagtgtgtgctcttga

SEQ ID NO: 4858693 - DNA, 25 bp, Homo sapien
gtgatcaagttcaatattcagcaat

SEQ ID NO: 4858694 - DNA, 25 bp, Homo sapien
ttacagagaaatctggcaaacacta

SEQ ID NO: 4858695 - DNA, 25 bp, Homo sapien
tacagagaaatctggcaaacactac

SEQ ID NO: 4858696 - DNA, 25 bp, Homo sapien
ctttacagagaaatctggcaaacac

SEQ ID NO: 4858697 - DNA, 25 bp, Homo sapien
tttacagagaaatctggcaaacact

SEQ ID NO: 4858698 - DNA, 25 bp, Homo sapien
gggctacaatcaacacaatttctat

SEQ ID NO: 4858699 - DNA, 25 bp, Homo sapien
ctatctgcataggtaaagaaaagtc

SEQ ID NO: 4858700 - DNA, 25 bp, Homo sapien
gggacatcaccctataactgttact

SEQ ID NO: 4858701 - DNA, 25 bp, Homo sapien
gatcaggtataactggtgtgctacc

SEQ ID NO: 4858702 - DNA, 25 bp, Homo sapien
gattccacaaccctgtataacttgg

SEQ ID NO: 4858703 - DNA, 25 bp, Homo sapien
cattctggtgaattggacccgaaca

SEQ ID NO: 4858704 - DNA, 25 bp, Homo sapien
taagaacacagatcctggaatcaga

SEQ ID NO: 4858705 - DNA, 25 bp, Homo sapien
gaccatgaccatgaagaagttcctg

SEQ ID NO: 4858706 - DNA, 25 bp, Homo sapien
cacatggttcatgttatgttcattc

SEQ ID NO: 4858707 - DNA, 25 bp, Homo sapien
taagtctaatgtatgtaggatctaa

SEQ ID NO: 4858708 - DNA, 25 bp, Homo sapien
tttcattttataggtgccacatggt

SEQ ID NO: 4858709 - DNA, 25 bp, Homo sapien
taaattctccatcgtttctcaattt

SEQ ID NO: 4858710 - DNA, 25 bp, Homo sapien
cagaaaagcactgcagtgtggtcca

SEQ ID NO: 4858711 - DNA, 25 bp, Homo sapien
gaaggaatacctcattaatgctggg

SEQ ID NO: 4858712 - DNA, 25 bp, Homo sapien
tctgaaaatagcaggtacggactct

SEQ ID NO: 4858713 - DNA, 25 bp, Homo sapien
tagcttgtcgcaacctcttgaggtg

SEQ ID NO: 4858714 - DNA, 25 bp, Homo sapien
tttaccatatagaaagtgtgtcatt

SEQ ID NO: 4858715 - DNA, 25 bp, Homo sapien
ttgcttttaccatatagaaagtgtg

SEQ ID NO: 4858716 - DNA, 25 bp, Homo sapien
taccatatagaaagtgtgtcatttt

SEQ ID NO: 4858717 - DNA, 25 bp, Homo sapien
gcttttaccatatagaaagtgtgtc

SEQ ID NO: 4858718 - DNA, 25 bp, Homo sapien
tgctggcattgggtctatttttcct

SEQ ID NO: 4858719 - DNA, 25 bp, Homo sapien
gctcagggtctatctttatatgtgt

SEQ ID NO: 4858720 - DNA, 25 bp, Homo sapien
aagcttaggttactggttgaagact

SEQ ID NO: 4858721 - DNA, 25 bp, Homo sapien
tgataaaggccccaactataatgaa

SEQ ID NO: 4858722 - DNA, 25 bp, Homo sapien
tttgcagtatacatttcagtatcag

SEQ ID NO: 4858723 - DNA, 25 bp, Homo sapien
catattgtgaagcattttttgtgtc

SEQ ID NO: 4858724 - DNA, 25 bp, Homo sapien
cagtatcagggtatttactagctcc

SEQ ID NO: 4858725 - DNA, 25 bp, Homo sapien
gagactgtatagaattgctgtcaaa

SEQ ID NO: 4858726 - DNA, 25 bp, Homo sapien
gctattaatatttgcactacatcga

SEQ ID NO: 4858727 - DNA, 25 bp, Homo sapien
tattgagccagtcttccattcttgg

SEQ ID NO: 4858728 - DNA, 25 bp, Homo sapien
caccttattctcaagctcaggaaga

SEQ ID NO: 4858729 - DNA, 25 bp, Homo sapien
cattagggatgataccctcacctta

SEQ ID NO: 4858730 - DNA, 25 bp, Homo sapien
ccatagtccaaccagagtattgaca

SEQ ID NO: 4858731 - DNA, 25 bp, Homo sapien
tctgatgcagcgtaattctccaaag

SEQ ID NO: 4858732 - DNA, 25 bp, Homo sapien
gacattgatagaaccaacatacaga

SEQ ID NO: 4858733 - DNA, 25 bp, Homo sapien
tgtttcaatcaccataaggatccct

SEQ ID NO: 4858734 - DNA, 25 bp, Homo sapien
tggctaaatgggctcctctttggtt

SEQ ID NO: 4858735 - DNA, 25 bp, Homo sapien
gtcttggctaaatgggctcctcttt

SEQ ID NO: 4858736 - DNA, 25 bp, Homo sapien
tgaggctaggtagcttatgattgtc

SEQ ID NO: 4858737 - DNA, 25 bp, Homo sapien
tatagtttgaggctaggtagcttat

SEQ ID NO: 4858738 - DNA, 25 bp, Homo sapien
agtatttgggttgtgatatgcgact

SEQ ID NO: 4858739 - DNA, 25 bp, Homo sapien
tgatatgcgactttgtcctgcagaa

SEQ ID NO: 4858740 - DNA, 25 bp, Homo sapien
tctgcagatcttcctgaaaggtgcc

SEQ ID NO: 4858741 - DNA, 25 bp, Homo sapien
tgggttgtgatatgcgactttgtcc

SEQ ID NO: 4858742 - DNA, 25 bp, Homo sapien
gatcaaagaggatgtgatgagccca

SEQ ID NO: 4858743 - DNA, 25 bp, Homo sapien
ccatctttatgatcaaagaggatgt

SEQ ID NO: 4858744 - DNA, 25 bp, Homo sapien
ctaacttttctctactgataggagc

SEQ ID NO: 4858745 - DNA, 25 bp, Homo sapien
caaaaaggacggttttgctttgcat

SEQ ID NO: 4858746 - DNA, 25 bp, Homo sapien
ggattgctatttgcatcacccctac

SEQ ID NO: 4858747 - DNA, 25 bp, Homo sapien
tgggcagatgccacatcggattgct

SEQ ID NO: 4858748 - DNA, 25 bp, Homo sapien
cagcagccataagcaggcttcacag

SEQ ID NO: 4858749 - DNA, 25 bp, Homo sapien
agcaggcttcacagctatctcttct

SEQ ID NO: 4858750 - DNA, 25 bp, Homo sapien
gttttagaataagcaatttctggga

SEQ ID NO: 4858751 - DNA, 25 bp, Homo sapien
ctttaatatcaagtcgaggtccctg

SEQ ID NO: 4858752 - DNA, 25 bp, Homo sapien
tttcctttaatatcaagtcgaggtc

SEQ ID NO: 4858753 - DNA, 25 bp, Homo sapien
tccctgtagttgagaatagaagctt

SEQ ID NO: 4858754 - DNA, 25 bp, Homo sapien
taggagagacgatgttagaatctgg

SEQ ID NO: 4858755 - DNA, 25 bp, Homo sapien
ctagtggctaggagagacgatgtta

SEQ ID NO: 4858756 - DNA, 25 bp, Homo sapien
accaaattcctctgaacagctctgc

SEQ ID NO: 4858757 - DNA, 25 bp, Homo sapien
aaattcctctgaacagctctgcaat

SEQ ID NO: 4858758 - DNA, 25 bp, Homo sapien
tcccttctagggcttcttagtctct

SEQ ID NO: 4858759 - DNA, 25 bp, Homo sapien
ccttctagggcttcttagtctcttc

SEQ ID NO: 4858760 - DNA, 25 bp, Homo sapien
gggagcgggagagtttctccatgct

SEQ ID NO: 4858761 - DNA, 25 bp, Homo sapien
agtttctccatgctggagtcggaga

SEQ ID NO: 4858762 - DNA, 25 bp, Homo sapien
tcaggaggaaatcagtagacttcac

SEQ ID NO: 4858763 - DNA, 25 bp, Homo sapien
tgccaacctcagctgacagacctgg

SEQ ID NO: 4858764 - DNA, 25 bp, Homo sapien
ccttggccacaatttccatggtgga

SEQ ID NO: 4858765 - DNA, 25 bp, Homo sapien
cctggatggaggttatgctgctgca

SEQ ID NO: 4858766 - DNA, 25 bp, Homo sapien
gcatgtacttcagaccctggaccta

SEQ ID NO: 4858767 - DNA, 25 bp, Homo sapien
gtgaacccacactaaggacaccagc

SEQ ID NO: 4858768 - DNA, 25 bp, Homo sapien
tgtatgtcagtaatccagaccccag

SEQ ID NO: 4858769 - DNA, 25 bp, Homo sapien
cacagctgttatgtaagtacctgca

SEQ ID NO: 4858770 - DNA, 25 bp, Homo sapien
cacaagcacccagttgagctgccct

SEQ ID NO: 4858771 - DNA, 25 bp, Homo sapien
caagcacccagttgagctgccctgg

SEQ ID NO: 4858772 - DNA, 25 bp, Homo sapien
tccacaagcacccagttgagctgcc

SEQ ID NO: 4858773 - DNA, 25 bp, Homo sapien
cctccacaagcacccagttgagctg

SEQ ID NO: 4858774 - DNA, 25 bp, Homo sapien
atgtaaagttgaaggatccagaagg

SEQ ID NO: 4858775 - DNA, 25 bp, Homo sapien
aatgtaaagttgaaggatccagaag

SEQ ID NO: 4858776 - DNA, 25 bp, Homo sapien
gagtcttgtcttcctatctgagcag

SEQ ID NO: 4858777 - DNA, 25 bp, Homo sapien
tcttttgggctcagtcgcagcctcc

SEQ ID NO: 4858778 - DNA, 25 bp, Homo sapien
gctgatataataggccacttcccca

SEQ ID NO: 4858779 - DNA, 25 bp, Homo sapien
cataacaatctctccagtccctgaa

SEQ ID NO: 4858780 - DNA, 25 bp, Homo sapien
gacatttgccctggaattcagaact

SEQ ID NO: 4858781 - DNA, 25 bp, Homo sapien
tttcctcccaaatgattcggtgcca

SEQ ID NO: 4858782 - DNA, 25 bp, Homo sapien
taaggtccctgaaatacccactaga

SEQ ID NO: 4858783 - DNA, 25 bp, Homo sapien
tagatctccgatctgggacatttgc

SEQ ID NO: 4858784 - DNA, 25 bp, Homo sapien
acagttagttgggaaataggcagga

SEQ ID NO: 4858785 - DNA, 25 bp, Homo sapien
tgaacataaagagccctttgtgaaa

SEQ ID NO: 4858786 - DNA, 25 bp, Homo sapien
ccttttgaacataaagagccctttg

SEQ ID NO: 4858787 - DNA, 25 bp, Homo sapien
gggaaataggcaggagtagaagtaa

SEQ ID NO: 4858788 - DNA, 25 bp, Homo sapien
ctggtggaatcccattgaacacaat

SEQ ID NO: 4858789 - DNA, 25 bp, Homo sapien
ctgcagcaaatagaagatgaacgtc

SEQ ID NO: 4858790 - DNA, 25 bp, Homo sapien
agaagggtaagactgctgcagcaaa

SEQ ID NO: 4858791 - DNA, 25 bp, Homo sapien
ctcaagactagaaggacagcgttaa

SEQ ID NO: 4858792 - DNA, 25 bp, Homo sapien
atccttctcctgaggaaagtggttt

SEQ ID NO: 4858793 - DNA, 25 bp, Homo sapien
cctgaggaaagtggttttctcccat

SEQ ID NO: 4858794 - DNA, 25 bp, Homo sapien
cttctcctgaggaaagtggttttct

SEQ ID NO: 4858795 - DNA, 25 bp, Homo sapien
tctcctgaggaaagtggttttctcc

SEQ ID NO: 4858796 - DNA, 25 bp, Homo sapien
caggtagtgggccactttccagtga

SEQ ID NO: 4858797 - DNA, 25 bp, Homo sapien
ggttaccagatgtttctgagttgac

SEQ ID NO: 4858798 - DNA, 25 bp, Homo sapien
gaagtagcaccatcaccagtcatca

SEQ ID NO: 4858799 - DNA, 25 bp, Homo sapien
gtcatcagcatggaacaagcgcagg

SEQ ID NO: 4858800 - DNA, 25 bp, Homo sapien
caggcttttagagtttaggccaggc

SEQ ID NO: 4858801 - DNA, 25 bp, Homo sapien
caatgcagctctagagaaaaaactc

SEQ ID NO: 4858802 - DNA, 25 bp, Homo sapien
aaaactcaagtgagagactcagggc

SEQ ID NO: 4858803 - DNA, 25 bp, Homo sapien
taaatgtaattgctctcactcagag

SEQ ID NO: 4858804 - DNA, 25 bp, Homo sapien
ttaggataaacatttggctcagttg

SEQ ID NO: 4858805 - DNA, 25 bp, Homo sapien
ggataaacatttggctcagttggca

SEQ ID NO: 4858806 - DNA, 25 bp, Homo sapien
tattaggataaacatttggctcagt

SEQ ID NO: 4858807 - DNA, 25 bp, Homo sapien
aggataaacatttggctcagttggc

SEQ ID NO: 4858808 - DNA, 25 bp, Homo sapien
ctttgaattgccatttgattccatg

SEQ ID NO: 4858809 - DNA, 25 bp, Homo sapien
gatacctacctctccagtgaggtca

SEQ ID NO: 4858810 - DNA, 25 bp, Homo sapien
catttgattccatgatacctacctc

SEQ ID NO: 4858811 - DNA, 25 bp, Homo sapien
gaggtcataatctatgaactccaaa

SEQ ID NO: 4858812 - DNA, 25 bp, Homo sapien
tattcagggatcaagatgagtttta

SEQ ID NO: 4858813 - DNA, 25 bp, Homo sapien
tcagggatcaagatgagttttaaaa

SEQ ID NO: 4858814 - DNA, 25 bp, Homo sapien
ctatattcagggatcaagatgagtt

SEQ ID NO: 4858815 - DNA, 25 bp, Homo sapien
tatattcagggatcaagatgagttt

SEQ ID NO: 4858816 - DNA, 25 bp, Homo sapien
gagagcaagaccaagatgtagcaag

SEQ ID NO: 4858817 - DNA, 25 bp, Homo sapien
tgcacagagaattccatcatggacc

SEQ ID NO: 4858818 - DNA, 25 bp, Homo sapien
atggacctgtcccaaccgatatcgc

SEQ ID NO: 4858819 - DNA, 25 bp, Homo sapien
ttaacaccccgtgaatataggcata

SEQ ID NO: 4858820 - DNA, 25 bp, Homo sapien
cgaagatgtattaattcctggaaaa

SEQ ID NO: 4858821 - DNA, 25 bp, Homo sapien
gacttcgaagatgtattaattcctg

SEQ ID NO: 4858822 - DNA, 25 bp, Homo sapien
tcgaagatgtattaattcctggaaa

SEQ ID NO: 4858823 - DNA, 25 bp, Homo sapien
cttcgaagatgtattaattcctgga

SEQ ID NO: 4858824 - DNA, 25 bp, Homo sapien
tcattggcgcaagctttctgctggg

SEQ ID NO: 4858825 - DNA, 25 bp, Homo sapien
cagaagcagctatccagaatgttat

SEQ ID NO: 4858826 - DNA, 25 bp, Homo sapien
aattctattcctcgcacccttccat

SEQ ID NO: 4858827 - DNA, 25 bp, Homo sapien
tttataatcccagggagggtcattg

SEQ ID NO: 4858828 - DNA, 25 bp, Homo sapien
gacatctctggaaagagtgttgtaa

SEQ ID NO: 4858829 - DNA, 25 bp, Homo sapien
taagagtggtgaataacaaagccct

SEQ ID NO: 4858830 - DNA, 25 bp, Homo sapien
ttaatgggtacttctttttgctgag

SEQ ID NO: 4858831 - DNA, 25 bp, Homo sapien
tctctctcgcctagtatttctggag

SEQ ID NO: 4858832 - DNA, 25 bp, Homo sapien
aattttgaagggatacaatggtagc

SEQ ID NO: 4858833 - DNA, 25 bp, Homo sapien
cagacctcgagtagaaattttgaag

SEQ ID NO: 4858834 - DNA, 25 bp, Homo sapien
tggtaaatggttgctatcagacctc

SEQ ID NO: 4858835 - DNA, 25 bp, Homo sapien
tggttgctatcagacctcgagtaga

SEQ ID NO: 4858836 - DNA, 25 bp, Homo sapien
tcagcttcatgtgagtagggcacca

SEQ ID NO: 4858837 - DNA, 25 bp, Homo sapien
cagcttcatgtgagtagggcaccat

SEQ ID NO: 4858838 - DNA, 25 bp, Homo sapien
cttcagcttcatgtgagtagggcac

SEQ ID NO: 4858839 - DNA, 25 bp, Homo sapien
ttcagcttcatgtgagtagggcacc

SEQ ID NO: 4858840 - DNA, 25 bp, Homo sapien
ggtttgtgaaccactccaaatggtc

SEQ ID NO: 4858841 - DNA, 25 bp, Homo sapien
tttattcaggaccataaatcttggg

SEQ ID NO: 4858842 - DNA, 25 bp, Homo sapien
attccatcctgagccctataaacag

SEQ ID NO: 4858843 - DNA, 25 bp, Homo sapien
ggctgttcctgaggttctgtcatca

SEQ ID NO: 4858844 - DNA, 25 bp, Homo sapien
ccctaaggaattggccctgagatat

SEQ ID NO: 4858845 - DNA, 25 bp, Homo sapien
cttacagcttgtacttcaaaagtct

SEQ ID NO: 4858846 - DNA, 25 bp, Homo sapien
tttccctaaggaattggccctgaga

SEQ ID NO: 4858847 - DNA, 25 bp, Homo sapien
tacagcttgtacttcaaaagtctgt

SEQ ID NO: 4858848 - DNA, 25 bp, Homo sapien
gtctctttttgctcagtgatgcaag

SEQ ID NO: 4858849 - DNA, 25 bp, Homo sapien
gcaagcccctagtgattttctcaac

SEQ ID NO: 4858850 - DNA, 25 bp, Homo sapien
tcagtgatgcaagcccctagtgatt

SEQ ID NO: 4858851 - DNA, 25 bp, Homo sapien
tttttgctcagtgatgcaagcccct

SEQ ID NO: 4858852 - DNA, 25 bp, Homo sapien
tgaaacaggtgagtagagccggaat

SEQ ID NO: 4858853 - DNA, 25 bp, Homo sapien
tgatcggagaagtcccacagaaggg

SEQ ID NO: 4858854 - DNA, 25 bp, Homo sapien
agccggaattggagaggatgctact

SEQ ID NO: 4858855 - DNA, 25 bp, Homo sapien
acagaagggagccagttcaggtgtt

SEQ ID NO: 4858856 - DNA, 25 bp, Homo sapien
tgagggagacaatccttgcagagga

SEQ ID NO: 4858857 - DNA, 25 bp, Homo sapien
gaggctgggccattgggctgacttt

SEQ ID NO: 4858858 - DNA, 25 bp, Homo sapien
tgggccattgggctgactttctcct

SEQ ID NO: 4858859 - DNA, 25 bp, Homo sapien
ggtgagggagacaatccttgcagag

SEQ ID NO: 4858860 - DNA, 25 bp, Homo sapien
tagtctcgtcatactcgacatccca

SEQ ID NO: 4858861 - DNA, 25 bp, Homo sapien
cccatactaagcctctggaatccat

SEQ ID NO: 4858862 - DNA, 25 bp, Homo sapien
tttcttattagtctcgtcatactcg

SEQ ID NO: 4858863 - DNA, 25 bp, Homo sapien
gtcatactcgacatcccatactaag

SEQ ID NO: 4858864 - DNA, 25 bp, Homo sapien
ctctatcaccccacacatcagctag

SEQ ID NO: 4858865 - DNA, 25 bp, Homo sapien
cactaccagtgttttgttgagcttc

SEQ ID NO: 4858866 - DNA, 25 bp, Homo sapien
cagctagtaatactttcactaccag

SEQ ID NO: 4858867 - DNA, 25 bp, Homo sapien
tgagcttctgactttgtatcttaga

SEQ ID NO: 4858868 - DNA, 25 bp, Homo sapien
aaatcaccaccgttcctccatgaga

SEQ ID NO: 4858869 - DNA, 25 bp, Homo sapien
cctggaaaaacaactcgaagtatgc

SEQ ID NO: 4858870 - DNA, 25 bp, Homo sapien
gcatcttattaacaacaggtcattg

SEQ ID NO: 4858871 - DNA, 25 bp, Homo sapien
gggcactcggcgaatcttgaccatt

SEQ ID NO: 4858872 - DNA, 25 bp, Homo sapien
atgaatttgcacgacatcctcatgc

SEQ ID NO: 4858873 - DNA, 25 bp, Homo sapien
atgcagtggccatagtaatctctgt

SEQ ID NO: 4858874 - DNA, 25 bp, Homo sapien
gcagtggccatagtaatctctgtat

SEQ ID NO: 4858875 - DNA, 25 bp, Homo sapien
agtggccatagtaatctctgtatca

SEQ ID NO: 4858876 - DNA, 25 bp, Homo sapien
tcttaccaagttcaggagctggccg

SEQ ID NO: 4858877 - DNA, 25 bp, Homo sapien
tagtcttaccaagttcaggagctgg

SEQ ID NO: 4858878 - DNA, 25 bp, Homo sapien
taccaagttcaggagctggccgtgg

SEQ ID NO: 4858879 - DNA, 25 bp, Homo sapien
agttcaggagctggccgtggatttt

SEQ ID NO: 4858880 - DNA, 25 bp, Homo sapien
gaaatgttgctctcctcttatgggc

SEQ ID NO: 4858881 - DNA, 25 bp, Homo sapien
caaagctttcgaaatgttgctctcc

SEQ ID NO: 4858882 - DNA, 25 bp, Homo sapien
atttacaaagctttcgaaatgttgc

SEQ ID NO: 4858883 - DNA, 25 bp, Homo sapien
gctttcgaaatgttgctctcctctt

SEQ ID NO: 4858884 - DNA, 25 bp, Homo sapien
gaatctccagacaaaacatgcgtga

SEQ ID NO: 4858885 - DNA, 25 bp, Homo sapien
tgttgggaagggatccctgtctgct

SEQ ID NO: 4858886 - DNA, 25 bp, Homo sapien
acagtcttcattgcactgggcttta

SEQ ID NO: 4858887 - DNA, 25 bp, Homo sapien
tgacatcatgtaggcacagtcttca

SEQ ID NO: 4858888 - DNA, 25 bp, Homo sapien
gaatttacctcgtgaatctctgtca

SEQ ID NO: 4858889 - DNA, 25 bp, Homo sapien
taaccacagctatcgatcaatgagt

SEQ ID NO: 4858890 - DNA, 25 bp, Homo sapien
gaatggaagtcacaaaattgctgcc

SEQ ID NO: 4858891 - DNA, 25 bp, Homo sapien
ttctgtcaacactgggcgatttaag

SEQ ID NO: 4858892 - DNA, 25 bp, Homo sapien
gctagttaatagtcttcgcctaaaa

SEQ ID NO: 4858893 - DNA, 25 bp, Homo sapien
aatgatcactaatgctagttaatag

SEQ ID NO: 4858894 - DNA, 25 bp, Homo sapien
tacaaagtggtcagaagccttttca

SEQ ID NO: 4858895 - DNA, 25 bp, Homo sapien
tcttcgcctaaaaatgaatgcaact

SEQ ID NO: 4858896 - DNA, 25 bp, Homo sapien
ccagcgtgtgagaaaggagaaccaa

SEQ ID NO: 4858897 - DNA, 25 bp, Homo sapien
tatgttattcaagggaagcacgctg

SEQ ID NO: 4858898 - DNA, 25 bp, Homo sapien
tctcattgtattgaaggctgtgccc

SEQ ID NO: 4858899 - DNA, 25 bp, Homo sapien
ttcatcatggaaagccacaagcctc

SEQ ID NO: 4858900 - DNA, 25 bp, Homo sapien
atcttaccacgacaaagcaggaggg

SEQ ID NO: 4858901 - DNA, 25 bp, Homo sapien
ttctgcatggcgagggaggtcttgg

SEQ ID NO: 4858902 - DNA, 25 bp, Homo sapien
tcaggttagtcaagagttgagctag

SEQ ID NO: 4858903 - DNA, 25 bp, Homo sapien
caaaccatattagggaggtagagtc

SEQ ID NO: 4858904 - DNA, 25 bp, Homo sapien
tacaccggtcagatctgtgcccaga

SEQ ID NO: 4858905 - DNA, 25 bp, Homo sapien
gacattttctcaaggcgatctcatc

SEQ ID NO: 4858906 - DNA, 25 bp, Homo sapien
gtccttatggtagcctgcgagcaca

SEQ ID NO: 4858907 - DNA, 25 bp, Homo sapien
ctgctcgcagccctcagacatggaa

SEQ ID NO: 4858908 - DNA, 25 bp, Homo sapien
gactgcatgctgcttcctctcgatg

SEQ ID NO: 4858909 - DNA, 25 bp, Homo sapien
cagtgcaggaaattggcgcccagat

SEQ ID NO: 4858910 - DNA, 25 bp, Homo sapien
catgtgaagttgtctcgggctctgg

SEQ ID NO: 4858911 - DNA, 25 bp, Homo sapien
gctgacgagagaacacctggtaacc

SEQ ID NO: 4858912 - DNA, 25 bp, Homo sapien
acgaaccctgctccgcgcgaggtga

SEQ ID NO: 4858913 - DNA, 25 bp, Homo sapien
tctgcgggacgaaccctgctccgcg

SEQ ID NO: 4858914 - DNA, 25 bp, Homo sapien
ctgctccgcgcgaggtgagtgcgag

SEQ ID NO: 4858915 - DNA, 25 bp, Homo sapien
cgcgaggtgagtgcgagcgccgcat

SEQ ID NO: 4858916 - DNA, 25 bp, Homo sapien
caggcggactgcgaaccaagatcat

SEQ ID NO: 4858917 - DNA, 25 bp, Homo sapien
ccaggcttgggctcatagggagaaa

SEQ ID NO: 4858918 - DNA, 25 bp, Homo sapien
tgatcggctcttcgggtcttcccgg

SEQ ID NO: 4858919 - DNA, 25 bp, Homo sapien
tgaacagggcacgagtgaaaacccg

SEQ ID NO: 4858920 - DNA, 25 bp, Homo sapien
gtgtccgcggctcagcgtgcaactt

SEQ ID NO: 4858921 - DNA, 25 bp, Homo sapien
gacatgctccttccgggaaaccagt

SEQ ID NO: 4858922 - DNA, 25 bp, Homo sapien
gatcgcgggcgcagacatgctcctt

SEQ ID NO: 4858923 - DNA, 25 bp, Homo sapien
tgcaacttccggtcggatcgcgggc

SEQ ID NO: 4858924 - DNA, 25 bp, Homo sapien
gacacgcgtgagaacctatgttgga

SEQ ID NO: 4858925 - DNA, 25 bp, Homo sapien
gacgtcctgcattggtaggcacgaa

SEQ ID NO: 4858926 - DNA, 25 bp, Homo sapien
gacagctgacagcatgacgcgacgt

SEQ ID NO: 4858927 - DNA, 25 bp, Homo sapien
cagtaaacccctgctagacacgcgt

SEQ ID NO: 4858928 - DNA, 25 bp, Homo sapien
tggatgagaaggacgcttaaacttg

SEQ ID NO: 4858929 - DNA, 25 bp, Homo sapien
ttggagtcagcttcgccaaatcccg

SEQ ID NO: 4858930 - DNA, 25 bp, Homo sapien
aaggacgcttaaacttggagtcagc

SEQ ID NO: 4858931 - DNA, 25 bp, Homo sapien
gcttaaacttggagtcagcttcgcc

SEQ ID NO: 4858932 - DNA, 25 bp, Homo sapien
aaacgcagatggaagagtaacgcgc

SEQ ID NO: 4858933 - DNA, 25 bp, Homo sapien
acgcagatggaagagtaacgcgcac

SEQ ID NO: 4858934 - DNA, 25 bp, Homo sapien
ggaaacgcagatggaagagtaacgc

SEQ ID NO: 4858935 - DNA, 25 bp, Homo sapien
aacgcagatggaagagtaacgcgca

SEQ ID NO: 4858936 - DNA, 25 bp, Homo sapien
gcttgtttcctagtgtatcccagat

SEQ ID NO: 4858937 - DNA, 25 bp, Homo sapien
cttgtttcctagtgtatcccagata

SEQ ID NO: 4858938 - DNA, 25 bp, Homo sapien
tgtttcctagtgtatcccagataac

SEQ ID NO: 4858939 - DNA, 25 bp, Homo sapien
ttgtttcctagtgtatcccagataa

SEQ ID NO: 4858940 - DNA, 25 bp, Homo sapien
tagtggcatactgactatttgccag

SEQ ID NO: 4858941 - DNA, 25 bp, Homo sapien
tattcatttcggcagaagctctgag

SEQ ID NO: 4858942 - DNA, 25 bp, Homo sapien
gggacaggatgaccgattacacagt

SEQ ID NO: 4858943 - DNA, 25 bp, Homo sapien
cagtcaggctatattcatttcggca

SEQ ID NO: 4858944 - DNA, 25 bp, Homo sapien
cgttcccagagacgccgaggaaaag

SEQ ID NO: 4858945 - DNA, 25 bp, Homo sapien
taaccttcatatacaagtagcactg

SEQ ID NO: 4858946 - DNA, 25 bp, Homo sapien
gaggaaaagccgctcgttctataac

SEQ ID NO: 4858947 - DNA, 25 bp, Homo sapien
gccgctcgttctataaccttcatat

SEQ ID NO: 4858948 - DNA, 25 bp, Homo sapien
aattcgaattaggtattgggtgatc

SEQ ID NO: 4858949 - DNA, 25 bp, Homo sapien
tctgcttacatttgtgtcgaatgaa

SEQ ID NO: 4858950 - DNA, 25 bp, Homo sapien
ggtgatcttggtgaatctctgctta

SEQ ID NO: 4858951 - DNA, 25 bp, Homo sapien
tgaaacggggccagtaaatcagatt

SEQ ID NO: 4858952 - DNA, 25 bp, Homo sapien
cttcttttctccctacgctccacct

SEQ ID NO: 4858953 - DNA, 25 bp, Homo sapien
cgctccaccttcttactcaaaggaa

SEQ ID NO: 4858954 - DNA, 25 bp, Homo sapien
ctacgctccaccttcttactcaaag

SEQ ID NO: 4858955 - DNA, 25 bp, Homo sapien
caccttcttactcaaaggaacaagt

SEQ ID NO: 4858956 - DNA, 25 bp, Homo sapien
gtttcagtctctccagtaattcctt

SEQ ID NO: 4858957 - DNA, 25 bp, Homo sapien
gctgagcagctattaatgccttttc

SEQ ID NO: 4858958 - DNA, 25 bp, Homo sapien
taattccttctcaatggcattgtcc

SEQ ID NO: 4858959 - DNA, 25 bp, Homo sapien
gtccagctgagcagctattaatgcc

SEQ ID NO: 4858960 - DNA, 25 bp, Homo sapien
gttccagggctttgtcgaaggcatg

SEQ ID NO: 4858961 - DNA, 25 bp, Homo sapien
aggcatgaatggggaagttgtagat

SEQ ID NO: 4858962 - DNA, 25 bp, Homo sapien
tccagggctttgtcgaaggcatgaa

SEQ ID NO: 4858963 - DNA, 25 bp, Homo sapien
cagggctttgtcgaaggcatgaatg

SEQ ID NO: 4858964 - DNA, 25 bp, Homo sapien
ctcaaaatcacttatgtcactctca

SEQ ID NO: 4858965 - DNA, 25 bp, Homo sapien
acttatgtcactctcatctacctca

SEQ ID NO: 4858966 - DNA, 25 bp, Homo sapien
accatcttcgacaaattctcttttc

SEQ ID NO: 4858967 - DNA, 25 bp, Homo sapien
aaatcacttatgtcactctcatcta

SEQ ID NO: 4858968 - DNA, 25 bp, Homo sapien
acataggctcgttttctctgcagtg

SEQ ID NO: 4858969 - DNA, 25 bp, Homo sapien
tggtcctctcaagggcattttgcct

SEQ ID NO: 4858970 - DNA, 25 bp, Homo sapien
tgtctcctgctcgtattctatttcc

SEQ ID NO: 4858971 - DNA, 25 bp, Homo sapien
ctttgtgtttcgcactaagggcctt

SEQ ID NO: 4858972 - DNA, 25 bp, Homo sapien
tgaaggcgcaccctacaatggaact

SEQ ID NO: 4858973 - DNA, 25 bp, Homo sapien
tatgtatgtgcctgaccaagtctgg

SEQ ID NO: 4858974 - DNA, 25 bp, Homo sapien
tgtgatgtagcaagggatccaaacc

SEQ ID NO: 4858975 - DNA, 25 bp, Homo sapien
tacacctgagtctgttaagagcgcc

SEQ ID NO: 4858976 - DNA, 25 bp, Homo sapien
catttcacattgtattttcacattg

SEQ ID NO: 4858977 - DNA, 25 bp, Homo sapien
tgtacatttcacattgtattttcac

SEQ ID NO: 4858978 - DNA, 25 bp, Homo sapien
ttattgtacatttcacattgtattt

SEQ ID NO: 4858979 - DNA, 25 bp, Homo sapien
tcacattgtaagttaaattattttc

SEQ ID NO: 4858980 - DNA, 25 bp, Homo sapien
gacgggtaatgtgcccacgtcgtaa

SEQ ID NO: 4858981 - DNA, 25 bp, Homo sapien
tctcacacaagcgtatgaacaccca

SEQ ID NO: 4858982 - DNA, 25 bp, Homo sapien
ggtcagacgggtaatgtgcccacgt

SEQ ID NO: 4858983 - DNA, 25 bp, Homo sapien
gcacatctcacacaagcgtatgaac

SEQ ID NO: 4858984 - DNA, 25 bp, Homo sapien
cacagttggacaacggaaaagcacc

SEQ ID NO: 4858985 - DNA, 25 bp, Homo sapien
gaaaagcacccgtgcgtgtagcata

SEQ ID NO: 4858986 - DNA, 25 bp, Homo sapien
caatctctcgaaaaccggaggtggg

SEQ ID NO: 4858987 - DNA, 25 bp, Homo sapien
gaaaacggtaaacacaaagccatga

SEQ ID NO: 4858988 - DNA, 25 bp, Homo sapien
tttctcgatctcatccatattggac

SEQ ID NO: 4858989 - DNA, 25 bp, Homo sapien
ttctcgatctcatccatattggact

SEQ ID NO: 4858990 - DNA, 25 bp, Homo sapien
ttgcttctcctgttcgatccattcc

SEQ ID NO: 4858991 - DNA, 25 bp, Homo sapien
cttctcctgttcgatccattccttg

SEQ ID NO: 4858992 - DNA, 25 bp, Homo sapien
tgcttctcctgttcgatccattcct

SEQ ID NO: 4858993 - DNA, 25 bp, Homo sapien
gcttctcctgttcgatccattcctt

SEQ ID NO: 4858994 - DNA, 25 bp, Homo sapien
tcatttaaacttgatttgacctctt

SEQ ID NO: 4858995 - DNA, 25 bp, Homo sapien
tgatttgacctctttgcatccttca

SEQ ID NO: 4858996 - DNA, 25 bp, Homo sapien
ttaaacttgatttgacctctttgca

SEQ ID NO: 4858997 - DNA, 25 bp, Homo sapien
acttgatttgacctctttgcatcct

SEQ ID NO: 4858998 - DNA, 25 bp, Homo sapien
agaaacaggccatgtacaccaccaa

SEQ ID NO: 4858999 - DNA, 25 bp, Homo sapien
gtcagagacatgaacgtacatttga

SEQ ID NO: 4859000 - DNA, 25 bp, Homo sapien
caaggtcagagacatgaacgtacat

SEQ ID NO: 4859001 - DNA, 25 bp, Homo sapien
ctacatcgggggtagtgcaaggtca

SEQ ID NO: 4859002 - DNA, 25 bp, Homo sapien
aggtcagagacatgaacgtacattt

SEQ ID NO: 4859003 - DNA, 25 bp, Homo sapien
cctgcatggcgcctcaatcacatgc

SEQ ID NO: 4859004 - DNA, 25 bp, Homo sapien
aacttggccctgcatggcgcctcaa

SEQ ID NO: 4859005 - DNA, 25 bp, Homo sapien
ttggtgcagatggacttaacttggc

SEQ ID NO: 4859006 - DNA, 25 bp, Homo sapien
ggcaccttgaatgcctgtttcgagc

SEQ ID NO: 4859007 - DNA, 25 bp, Homo sapien
cttggtaaagccccacttcttggag

SEQ ID NO: 4859008 - DNA, 25 bp, Homo sapien
tcattcatccacattgaacttggta

SEQ ID NO: 4859009 - DNA, 25 bp, Homo sapien
gtaaagccccacttcttggagatgt

SEQ ID NO: 4859010 - DNA, 25 bp, Homo sapien
gtggatcttctggtggccagggaac

SEQ ID NO: 4859011 - DNA, 25 bp, Homo sapien
ctcctgtggaatattaggacttatt

SEQ ID NO: 4859012 - DNA, 25 bp, Homo sapien
tattccttctaactacatgtttctc

SEQ ID NO: 4859013 - DNA, 25 bp, Homo sapien
tccttctaactacatgtttctctcc

SEQ ID NO: 4859014 - DNA, 25 bp, Homo sapien
tctctccattaatcaacccctcttt

SEQ ID NO: 4859015 - DNA, 25 bp, Homo sapien
tgtctacggttaagcaacagatacc

SEQ ID NO: 4859016 - DNA, 25 bp, Homo sapien
tcctcgcctctcaggctttagatac

SEQ ID NO: 4859017 - DNA, 25 bp, Homo sapien
gggtgtctacggttaagcaacagat

SEQ ID NO: 4859018 - DNA, 25 bp, Homo sapien
tagatacgaaatctccagaatggaa

SEQ ID NO: 4859019 - DNA, 25 bp, Homo sapien
gaaagtcctctttcaaggctcccat

SEQ ID NO: 4859020 - DNA, 25 bp, Homo sapien
ggagaaagtcctctttcaaggctcc

SEQ ID NO: 4859021 - DNA, 25 bp, Homo sapien
agaaagtcctctttcaaggctccca

SEQ ID NO: 4859022 - DNA, 25 bp, Homo sapien
gagaaagtcctctttcaaggctccc

SEQ ID NO: 4859023 - DNA, 25 bp, Homo sapien
aaggtgtccaccccgatcaagaaca

SEQ ID NO: 4859024 - DNA, 25 bp, Homo sapien
gggaaggtgtccaccccgatcaaga

SEQ ID NO: 4859025 - DNA, 25 bp, Homo sapien
ggaaggtgtccaccccgatcaagaa

SEQ ID NO: 4859026 - DNA, 25 bp, Homo sapien
aggtgtccaccccgatcaagaacat

SEQ ID NO: 4859027 - DNA, 25 bp, Homo sapien
tggtccctctgcacagctccaacca

SEQ ID NO: 4859028 - DNA, 25 bp, Homo sapien
ggatgtctggtccctctgcacagct

SEQ ID NO: 4859029 - DNA, 25 bp, Homo sapien
ctctgcacagctccaaccaacagga

SEQ ID NO: 4859030 - DNA, 25 bp, Homo sapien
gatgtctggtccctctgcacagctc

SEQ ID NO: 4859031 - DNA, 25 bp, Homo sapien
gaagttcgctgtgtctgccccatgt

SEQ ID NO: 4859032 - DNA, 25 bp, Homo sapien
tacaccgagacctggagaagacctc

SEQ ID NO: 4859033 - DNA, 25 bp, Homo sapien
aagcccattgctagtccctcagagg

SEQ ID NO: 4859034 - DNA, 25 bp, Homo sapien
gaggccacgcagaacattgggattc

SEQ ID NO: 4859035 - DNA, 25 bp, Homo sapien
gccccttatccgtgatgccccaggt

SEQ ID NO: 4859036 - DNA, 25 bp, Homo sapien
ttctatttgccccttatccgtgatg

SEQ ID NO: 4859037 - DNA, 25 bp, Homo sapien
tatttgccccttatccgtgatgccc

SEQ ID NO: 4859038 - DNA, 25 bp, Homo sapien
ccccttatccgtgatgccccaggtc

SEQ ID NO: 4859039 - DNA, 25 bp, Homo sapien
ccctgaggctaaaccccttcagtgt

SEQ ID NO: 4859040 - DNA, 25 bp, Homo sapien
tcagtgtctgaagtccggcttgccc

SEQ ID NO: 4859041 - DNA, 25 bp, Homo sapien
ccttcattggttgatactacctggc

SEQ ID NO: 4859042 - DNA, 25 bp, Homo sapien
gggactcccttcattggttgatact

SEQ ID NO: 4859043 - DNA, 25 bp, Homo sapien
tccccctctctcagagctgacctct

SEQ ID NO: 4859044 - DNA, 25 bp, Homo sapien
ccctctctcagagctgacctctgcc

SEQ ID NO: 4859045 - DNA, 25 bp, Homo sapien
cccctctctcagagctgacctctgc

SEQ ID NO: 4859046 - DNA, 25 bp, Homo sapien
tcttccccctctctcagagctgacc

SEQ ID NO: 4859047 - DNA, 25 bp, Homo sapien
cctcctcagccaaaataggccccac

SEQ ID NO: 4859048 - DNA, 25 bp, Homo sapien
tcctcagccaaaataggccccactt

SEQ ID NO: 4859049 - DNA, 25 bp, Homo sapien
tcagccaaaataggccccacttctg

SEQ ID NO: 4859050 - DNA, 25 bp, Homo sapien
cctggtgagctcagcggccaaggcc

SEQ ID NO: 4859051 - DNA, 25 bp, Homo sapien
ccactggtacatggtagcctgtgaa

SEQ ID NO: 4859052 - DNA, 25 bp, Homo sapien
tggtacatggtagcctgtgaatgtc

SEQ ID NO: 4859053 - DNA, 25 bp, Homo sapien
actggtacatggtagcctgtgaatg

SEQ ID NO: 4859054 - DNA, 25 bp, Homo sapien
acatggtagcctgtgaatgtctata

SEQ ID NO: 4859055 - DNA, 25 bp, Homo sapien
cctgccctggtctgtagcctgcctg

SEQ ID NO: 4859056 - DNA, 25 bp, Homo sapien
cctggtctgtagcctgcctgaagcc

SEQ ID NO: 4859057 - DNA, 25 bp, Homo sapien
caaagatttctttatgatgaggctg

SEQ ID NO: 4859058 - DNA, 25 bp, Homo sapien
agcaattcacacttaaatcctggag

SEQ ID NO: 4859059 - DNA, 25 bp, Homo sapien
gacagggatgaagatacaccaaata

SEQ ID NO: 4859060 - DNA, 25 bp, Homo sapien
tcccgcacacccgtgttaagcaatt

SEQ ID NO: 4859061 - DNA, 25 bp, Homo sapien
cagcaggagggaggagaccagggtt

SEQ ID NO: 4859062 - DNA, 25 bp, Homo sapien
caggagggaggagaccagggttgtg

SEQ ID NO: 4859063 - DNA, 25 bp, Homo sapien
ctgaccggggtgggagtccagcagg

SEQ ID NO: 4859064 - DNA, 25 bp, Homo sapien
tgaccggggtgggagtccagcagga

SEQ ID NO: 4859065 - DNA, 25 bp, Homo sapien
ctattttatcaggtgcgtggatccc

SEQ ID NO: 4859066 - DNA, 25 bp, Homo sapien
gaccttccgctcaacatctatatgg

SEQ ID NO: 4859067 - DNA, 25 bp, Homo sapien
tatatggtcatcttcggcacaggca

SEQ ID NO: 4859068 - DNA, 25 bp, Homo sapien
tgggactggttagcaccaacaagtc

SEQ ID NO: 4859069 - DNA, 25 bp, Homo sapien
cctgaaaatgaaccaagccgtgtgt

SEQ ID NO: 4859070 - DNA, 25 bp, Homo sapien
aagcagttcccagatcccctggtct

SEQ ID NO: 4859071 - DNA, 25 bp, Homo sapien
ggcccttgcaccctagcatctggga

SEQ ID NO: 4859072 - DNA, 25 bp, Homo sapien
gctggtcggatctcatttcctgaaa

SEQ ID NO: 4859073 - DNA, 25 bp, Homo sapien
ggtcctagtcttgaccgcgttgttc

SEQ ID NO: 4859074 - DNA, 25 bp, Homo sapien
tcaaaaccttggatactaatcgccc

SEQ ID NO: 4859075 - DNA, 25 bp, Homo sapien
ccgcgttgttccgatgcttggagag

SEQ ID NO: 4859076 - DNA, 25 bp, Homo sapien
taggtgtttctgagcgggacacttc

SEQ ID NO: 4859077 - DNA, 25 bp, Homo sapien
tcctcacttcccatcaattttccct

SEQ ID NO: 4859078 - DNA, 25 bp, Homo sapien
cgagtgggacgggaggtgttcctca

SEQ ID NO: 4859079 - DNA, 25 bp, Homo sapien
ctagtccaaaggcgagtgggacggg

SEQ ID NO: 4859080 - DNA, 25 bp, Homo sapien
ccaaaggcgagtgggacgggaggtg

SEQ ID NO: 4859081 - DNA, 25 bp, Homo sapien
ttctctgattgcactttccacgtgg

SEQ ID NO: 4859082 - DNA, 25 bp, Homo sapien
agtgttttcctccttagtcacacca

SEQ ID NO: 4859083 - DNA, 25 bp, Homo sapien
cacgtggttttcgagctgacaggaa

SEQ ID NO: 4859084 - DNA, 25 bp, Homo sapien
tccttagtcacaccaatgccttttt

SEQ ID NO: 4859085 - DNA, 25 bp, Homo sapien
aaaggaagtgacgtgagtctggata

SEQ ID NO: 4859086 - DNA, 25 bp, Homo sapien
ccgtcgcttgcattaggagaaagga

SEQ ID NO: 4859087 - DNA, 25 bp, Homo sapien
aggaaggggaccgtcgcttgcatta

SEQ ID NO: 4859088 - DNA, 25 bp, Homo sapien
gacgtgagtctggatagccagagca

SEQ ID NO: 4859089 - DNA, 25 bp, Homo sapien
ataaccttgacggagcctgagctct

SEQ ID NO: 4859090 - DNA, 25 bp, Homo sapien
tcagtctataaccttgacggagcct

SEQ ID NO: 4859091 - DNA, 25 bp, Homo sapien
ccttgacggagcctgagctcttgat

SEQ ID NO: 4859092 - DNA, 25 bp, Homo sapien
tctataaccttgacggagcctgagc

SEQ ID NO: 4859093 - DNA, 25 bp, Homo sapien
ctacattccagcctgcgcgatggga

SEQ ID NO: 4859094 - DNA, 25 bp, Homo sapien
acattccagcctgcgcgatgggagc

SEQ ID NO: 4859095 - DNA, 25 bp, Homo sapien
attccagcctgcgcgatgggagcga

SEQ ID NO: 4859096 - DNA, 25 bp, Homo sapien
ttccagcctgcgcgatgggagcgag

SEQ ID NO: 4859097 - DNA, 25 bp, Homo sapien
gaaaagaacagtcgtgactccctcg

SEQ ID NO: 4859098 - DNA, 25 bp, Homo sapien
gaagaagtctctagacccggcgcag

SEQ ID NO: 4859099 - DNA, 25 bp, Homo sapien
tgttcagagggcacaccctgtacct

SEQ ID NO: 4859100 - DNA, 25 bp, Homo sapien
tgctcctacagcgatatattgggct

SEQ ID NO: 4859101 - DNA, 25 bp, Homo sapien
tgggattcgaacaccgctgggatct

SEQ ID NO: 4859102 - DNA, 25 bp, Homo sapien
tgctccctgggattcacagtccctt

SEQ ID NO: 4859103 - DNA, 25 bp, Homo sapien
catctctgccctgcacttgtgcaga

SEQ ID NO: 4859104 - DNA, 25 bp, Homo sapien
cagaaagtcagggatacggcaagca

SEQ ID NO: 4859105 - DNA, 25 bp, Homo sapien
gccacaagcagtctcaaagctctct

SEQ ID NO: 4859106 - DNA, 25 bp, Homo sapien
ctcctccaagctgccacaagcagtc

SEQ ID NO: 4859107 - DNA, 25 bp, Homo sapien
caagctgccacaagcagtctcaaag

SEQ ID NO: 4859108 - DNA, 25 bp, Homo sapien
tgccacaagcagtctcaaagctctc

SEQ ID NO: 4859109 - DNA, 25 bp, Homo sapien
ccaaataaagtcacagctgtcggtc

SEQ ID NO: 4859110 - DNA, 25 bp, Homo sapien
accaaataaagtcacagctgtcggt

SEQ ID NO: 4859111 - DNA, 25 bp, Homo sapien
caccaaataaagtcacagctgtcgg

SEQ ID NO: 4859112 - DNA, 25 bp, Homo sapien
ttgcagtgggccgatcctgggtgat

SEQ ID NO: 4859113 - DNA, 25 bp, Homo sapien
atgcagcgagccaatcctgggtgac

SEQ ID NO: 4859114 - DNA, 25 bp, Homo sapien
gggtgatgcagcgagccaatcctgg

SEQ ID NO: 4859115 - DNA, 25 bp, Homo sapien
gcagtgggccgatcctgggtgatgc

SEQ ID NO: 4859116 - DNA, 25 bp, Homo sapien
gatggagcccgatttcggaaaatgc

SEQ ID NO: 4859117 - DNA, 25 bp, Homo sapien
aataatacacccacaccctaagtgc

SEQ ID NO: 4859118 - DNA, 25 bp, Homo sapien
ccctaagtgcaattaagcaaaagag

SEQ ID NO: 4859119 - DNA, 25 bp, Homo sapien
tctgttaaccttttggagatgcact

SEQ ID NO: 4859120 - DNA, 25 bp, Homo sapien
ttaatgttgaaacatcgttttcagc

SEQ ID NO: 4859121 - DNA, 25 bp, Homo sapien
tggtgaacccaaggtctcgtttctc

SEQ ID NO: 4859122 - DNA, 25 bp, Homo sapien
ccaaggtctcgtttctcaggacagc

SEQ ID NO: 4859123 - DNA, 25 bp, Homo sapien
caaggtgaattacttaatgttgaaa

SEQ ID NO: 4859124 - DNA, 25 bp, Homo sapien
ctgctccgttttcagcttgagccag

SEQ ID NO: 4859125 - DNA, 25 bp, Homo sapien
cacctgctccgttttcagcttgagc

SEQ ID NO: 4859126 - DNA, 25 bp, Homo sapien
caaacttagtatgggcacccaactg

SEQ ID NO: 4859127 - DNA, 25 bp, Homo sapien
tcaaacttagtatgggcacccaact

SEQ ID NO: 4859128 - DNA, 25 bp, Homo sapien
aaaagcgtggtcctgtggccgtgtc

SEQ ID NO: 4859129 - DNA, 25 bp, Homo sapien
acaaaagcgtggtcctgtggccgtg

SEQ ID NO: 4859130 - DNA, 25 bp, Homo sapien
gcgtggtcctgtggccgtgtccaca

SEQ ID NO: 4859131 - DNA, 25 bp, Homo sapien
aagcgtggtcctgtggccgtgtcca

SEQ ID NO: 4859132 - DNA, 25 bp, Homo sapien
tgctctgttctgtttacatcgtggc

SEQ ID NO: 4859133 - DNA, 25 bp, Homo sapien
ttctgtttacatcgtggcggcacct

SEQ ID NO: 4859134 - DNA, 25 bp, Homo sapien
tgtttacatcgtggcggcacctctc

SEQ ID NO: 4859135 - DNA, 25 bp, Homo sapien
ctggagggctcagctgctctgttct

SEQ ID NO: 4859136 - DNA, 25 bp, Homo sapien
ctctggcgtaccaccggccaagccc

SEQ ID NO: 4859137 - DNA, 25 bp, Homo sapien
gtcttctggccttgtcaatacctgc

SEQ ID NO: 4859138 - DNA, 25 bp, Homo sapien
cgtcttctggccttgtcaatacctg

SEQ ID NO: 4859139 - DNA, 25 bp, Homo sapien
tgggcagcctctggcgtaccaccgg

SEQ ID NO: 4859140 - DNA, 25 bp, Homo sapien
gcagctctcggacgtctagacaaaa

SEQ ID NO: 4859141 - DNA, 25 bp, Homo sapien
atgcagctctcggacgtctagacaa

SEQ ID NO: 4859142 - DNA, 25 bp, Homo sapien
tctggaacggaaaaggctggcaggg

SEQ ID NO: 4859143 - DNA, 25 bp, Homo sapien
agctctcggacgtctagacaaaaac

SEQ ID NO: 4859144 - DNA, 25 bp, Homo sapien
ctttggctccgtggactggctctcc

SEQ ID NO: 4859145 - DNA, 25 bp, Homo sapien
tggctccgtggactggctctcccag

SEQ ID NO: 4859146 - DNA, 25 bp, Homo sapien
agctttggctccgtggactggctct

SEQ ID NO: 4859147 - DNA, 25 bp, Homo sapien
ccagctttggctccgtggactggct

SEQ ID NO: 4859148 - DNA, 25 bp, Homo sapien
gatatgttaccagaaagaagtccca

SEQ ID NO: 4859149 - DNA, 25 bp, Homo sapien
tcccaaaagcgatttcccagaactg

SEQ ID NO: 4859150 - DNA, 25 bp, Homo sapien
tatatagggtacttctggacattgc

SEQ ID NO: 4859151 - DNA, 25 bp, Homo sapien
tgacagggccactcaactgagtata

SEQ ID NO: 4859152 - DNA, 25 bp, Homo sapien
cagctgtctcattagggatttccaa

SEQ ID NO: 4859153 - DNA, 25 bp, Homo sapien
cagtgatcgtggttccagctgtctc

SEQ ID NO: 4859154 - DNA, 25 bp, Homo sapien
tagggataagtttgccagtgatcgt

SEQ ID NO: 4859155 - DNA, 25 bp, Homo sapien
gaaggttctgagtgtccacgcaagg

SEQ ID NO: 4859156 - DNA, 25 bp, Homo sapien
gacctcagagttactccaaagtctt

SEQ ID NO: 4859157 - DNA, 25 bp, Homo sapien
ggacctcagagttactccaaagtct

SEQ ID NO: 4859158 - DNA, 25 bp, Homo sapien
cttccagcagatacacacatccatc

SEQ ID NO: 4859159 - DNA, 25 bp, Homo sapien
taatgagcaaagataccctcaatca

SEQ ID NO: 4859160 - DNA, 25 bp, Homo sapien
gctcacgtctttcataggaataatg

SEQ ID NO: 4859161 - DNA, 25 bp, Homo sapien
cgtctttcataggaataatgagcaa

SEQ ID NO: 4859162 - DNA, 25 bp, Homo sapien
cattcttggcaccttcgtttttggt

SEQ ID NO: 4859163 - DNA, 25 bp, Homo sapien
attcttggcaccttcgtttttggtg

SEQ ID NO: 4859164 - DNA, 25 bp, Homo sapien
ctttgtcttggcagtattgtttagt

SEQ ID NO: 4859165 - DNA, 25 bp, Homo sapien
taattttcacctttaatattctcac

SEQ ID NO: 4859166 - DNA, 25 bp, Homo sapien
ttaattttcacctttaatattctca

SEQ ID NO: 4859167 - DNA, 25 bp, Homo sapien
ctgccaaggaaagtaagtttcttct

SEQ ID NO: 4859168 - DNA, 25 bp, Homo sapien
ccctctggctgccaaggaaagtaag

SEQ ID NO: 4859169 - DNA, 25 bp, Homo sapien
ggaaagtaagtttcttcttgctctc

SEQ ID NO: 4859170 - DNA, 25 bp, Homo sapien
tctggctgccaaggaaagtaagttt

SEQ ID NO: 4859171 - DNA, 25 bp, Homo sapien
ccttattaagcatggcatgcacaga

SEQ ID NO: 4859172 - DNA, 25 bp, Homo sapien
attaagcatggcatgcacagagggc

SEQ ID NO: 4859173 - DNA, 25 bp, Homo sapien
tattaccttattaagcatggcatgc

SEQ ID NO: 4859174 - DNA, 25 bp, Homo sapien
taccttattaagcatggcatgcaca

SEQ ID NO: 4859175 - DNA, 25 bp, Homo sapien
gaatgggaaggataccatgacagca

SEQ ID NO: 4859176 - DNA, 25 bp, Homo sapien
tgggaaggataccatgacagcaaag

SEQ ID NO: 4859177 - DNA, 25 bp, Homo sapien
ggaatgggaaggataccatgacagc

SEQ ID NO: 4859178 - DNA, 25 bp, Homo sapien
gaaggataccatgacagcaaagcaa

SEQ ID NO: 4859179 - DNA, 25 bp, Homo sapien
taattctgccctctcggcatgtgcc

SEQ ID NO: 4859180 - DNA, 25 bp, Homo sapien
aatgctttggcagccaagaatgaga

SEQ ID NO: 4859181 - DNA, 25 bp, Homo sapien
tgcagaaaatggcttgctgtttcct

SEQ ID NO: 4859182 - DNA, 25 bp, Homo sapien
ttcagaagctaaaatgctttggcag

SEQ ID NO: 4859183 - DNA, 25 bp, Homo sapien
gaatgctgaacagtgcaggcctgac

SEQ ID NO: 4859184 - DNA, 25 bp, Homo sapien
ccagattaaaccaaacaggcagctc

SEQ ID NO: 4859185 - DNA, 25 bp, Homo sapien
taaacctgagatggtccatgtagct

SEQ ID NO: 4859186 - DNA, 25 bp, Homo sapien
ccaggagtggaatgcaagctactta

SEQ ID NO: 4859187 - DNA, 25 bp, Homo sapien
ctaatatgtcgaagttactgaagca

SEQ ID NO: 4859188 - DNA, 25 bp, Homo sapien
tgtcatagaggctctcatttctccc

SEQ ID NO: 4859189 - DNA, 25 bp, Homo sapien
ggagtgtctcaaggatttgtcatag

SEQ ID NO: 4859190 - DNA, 25 bp, Homo sapien
gaagcataagtttctacaccaccct

SEQ ID NO: 4859191 - DNA, 25 bp, Homo sapien
ctcattaacgggctccctgccatga

SEQ ID NO: 4859192 - DNA, 25 bp, Homo sapien
ttaacgggctccctgccatgacctt

SEQ ID NO: 4859193 - DNA, 25 bp, Homo sapien
cgggctccctgccatgaccttcttt

SEQ ID NO: 4859194 - DNA, 25 bp, Homo sapien
gggctccctgccatgaccttctttg

SEQ ID NO: 4859195 - DNA, 25 bp, Homo sapien
tgattctgaacctgtgaacaacttc

SEQ ID NO: 4859196 - DNA, 25 bp, Homo sapien
caacttcagtttgcaaagattcaat

SEQ ID NO: 4859197 - DNA, 25 bp, Homo sapien
tatgccacctccaccataaagtatt

SEQ ID NO: 4859198 - DNA, 25 bp, Homo sapien
taaagtattcactgatgatcgtact

SEQ ID NO: 4859199 - DNA, 25 bp, Homo sapien
cagaacactgctgtttatccctgct

SEQ ID NO: 4859200 - DNA, 25 bp, Homo sapien
gcttagccccaaagcaatcagttga

SEQ ID NO: 4859201 - DNA, 25 bp, Homo sapien
taatgacagcttaactggtgaagtg

SEQ ID NO: 4859202 - DNA, 25 bp, Homo sapien
gttgacaagtccagagaagacccct

SEQ ID NO: 4859203 - DNA, 25 bp, Homo sapien
cttccaaattatcttcaggtggtgt

SEQ ID NO: 4859204 - DNA, 25 bp, Homo sapien
tccaaattatcttcaggtggtgttt

SEQ ID NO: 4859205 - DNA, 25 bp, Homo sapien
caaattatcttcaggtggtgtttgg

SEQ ID NO: 4859206 - DNA, 25 bp, Homo sapien
aattatcttcaggtggtgtttggaa

SEQ ID NO: 4859207 - DNA, 25 bp, Homo sapien
ttggcctagggggatcattttccca

SEQ ID NO: 4859208 - DNA, 25 bp, Homo sapien
gaacactgcccaagctcattgtcca

SEQ ID NO: 4859209 - DNA, 25 bp, Homo sapien
cattgtccaagaccattggcctagg

SEQ ID NO: 4859210 - DNA, 25 bp, Homo sapien
caagctcattgtccaagaccattgg

SEQ ID NO: 4859211 - DNA, 25 bp, Homo sapien
cagcagcattgtcacagaagagctc

SEQ ID NO: 4859212 - DNA, 25 bp, Homo sapien
ggttacctgaggtggcagcagcatt

SEQ ID NO: 4859213 - DNA, 25 bp, Homo sapien
ttccactcaggttacctgaggtggc

SEQ ID NO: 4859214 - DNA, 25 bp, Homo sapien
caggtcactgaagatggaattgctt

SEQ ID NO: 4859215 - DNA, 25 bp, Homo sapien
gatattaatatctgacagtgactgc

SEQ ID NO: 4859216 - DNA, 25 bp, Homo sapien
taacaggccccatttatgtcttgtt

SEQ ID NO: 4859217 - DNA, 25 bp, Homo sapien
agatattaatatctgacagtgactg

SEQ ID NO: 4859218 - DNA, 25 bp, Homo sapien
tctgacctcctgtctaacaggcccc

SEQ ID NO: 4859219 - DNA, 25 bp, Homo sapien
taggttgctacaatctccattctta

SEQ ID NO: 4859220 - DNA, 25 bp, Homo sapien
taacaatgtcagtagaattaattaa

SEQ ID NO: 4859221 - DNA, 25 bp, Homo sapien
tttctaggttgctacaatctccatt

SEQ ID NO: 4859222 - DNA, 25 bp, Homo sapien
acaatgtcagtagaattaattaaat

SEQ ID NO: 4859223 - DNA, 25 bp, Homo sapien
atactcttacacagccgccaataag

SEQ ID NO: 4859224 - DNA, 25 bp, Homo sapien
ctccatggtcttttcaggtggaaga

SEQ ID NO: 4859225 - DNA, 25 bp, Homo sapien
tactcttacacagccgccaataaga

SEQ ID NO: 4859226 - DNA, 25 bp, Homo sapien
gcttcaagttgctgctcatccagcg

SEQ ID NO: 4859227 - DNA, 25 bp, Homo sapien
tagtgccaagactgcttcaagttgc

SEQ ID NO: 4859228 - DNA, 25 bp, Homo sapien
ttgctgctcatccagcggtacatcc

SEQ ID NO: 4859229 - DNA, 25 bp, Homo sapien
tttagtgccaagactgcttcaagtt

SEQ ID NO: 4859230 - DNA, 25 bp, Homo sapien
tattgaatctgtttccaatgcaaat

SEQ ID NO: 4859231 - DNA, 25 bp, Homo sapien
tagtcactcactagtatgaaagttt

SEQ ID NO: 4859232 - DNA, 25 bp, Homo sapien
agtgtttctgcacactccaaatagt

SEQ ID NO: 4859233 - DNA, 25 bp, Homo sapien
tctcttggctcaaggtaatcaagct

SEQ ID NO: 4859234 - DNA, 25 bp, Homo sapien
tgcctgcagccagactctcattctc

SEQ ID NO: 4859235 - DNA, 25 bp, Homo sapien
ctctcattctccaacttgctctgat

SEQ ID NO: 4859236 - DNA, 25 bp, Homo sapien
agactctcattctccaacttgctct

SEQ ID NO: 4859237 - DNA, 25 bp, Homo sapien
gactctcattctccaacttgctctg

SEQ ID NO: 4859238 - DNA, 25 bp, Homo sapien
agcgccttttctatcactattcctt

SEQ ID NO: 4859239 - DNA, 25 bp, Homo sapien
gcgccttttctatcactattccttc

SEQ ID NO: 4859240 - DNA, 25 bp, Homo sapien
cgccttttctatcactattccttct

SEQ ID NO: 4859241 - DNA, 25 bp, Homo sapien
ttccagagtcaaatgtcccactcat

SEQ ID NO: 4859242 - DNA, 25 bp, Homo sapien
cagagtcaaatgtcccactcatata

SEQ ID NO: 4859243 - DNA, 25 bp, Homo sapien
tccagagtcaaatgtcccactcata

SEQ ID NO: 4859244 - DNA, 25 bp, Homo sapien
gttccagagtcaaatgtcccactca

SEQ ID NO: 4859245 - DNA, 25 bp, Homo sapien
tccccaaaccaagcttcaggctagg

SEQ ID NO: 4859246 - DNA, 25 bp, Homo sapien
ccaaaccaagcttcaggctaggact

SEQ ID NO: 4859247 - DNA, 25 bp, Homo sapien
aaaccaagcttcaggctaggacttc

SEQ ID NO: 4859248 - DNA, 25 bp, Homo sapien
ttccccaaaccaagcttcaggctag

SEQ ID NO: 4859249 - DNA, 25 bp, Homo sapien
tacacaatcgaggaaaacacttttg

SEQ ID NO: 4859250 - DNA, 25 bp, Homo sapien
ctacacaatcgaggaaaacactttt

SEQ ID NO: 4859251 - DNA, 25 bp, Homo sapien
tcacccagaaagatccctgatggca

SEQ ID NO: 4859252 - DNA, 25 bp, Homo sapien
aagatccctgatggcatcctgtccc

SEQ ID NO: 4859253 - DNA, 25 bp, Homo sapien
ccagaaagatccctgatggcatcct

SEQ ID NO: 4859254 - DNA, 25 bp, Homo sapien
cagccagccatctcaaatgcctgct

SEQ ID NO: 4859255 - DNA, 25 bp, Homo sapien
ctcaacctctttcactcctcaccct

SEQ ID NO: 4859256 - DNA, 25 bp, Homo sapien
ctccaaacttcaggggaacacagtt

SEQ ID NO: 4859257 - DNA, 25 bp, Homo sapien
tcaccctccaaacttcaggggaaca

SEQ ID NO: 4859258 - DNA, 25 bp, Homo sapien
tcattcttctcaacctctttcactc

SEQ ID NO: 4859259 - DNA, 25 bp, Homo sapien
gatctggccattgtcacctctgaat

SEQ ID NO: 4859260 - DNA, 25 bp, Homo sapien
caaggttgatctggccattgtcacc

SEQ ID NO: 4859261 - DNA, 25 bp, Homo sapien
ttgatctggccattgtcacctctga

SEQ ID NO: 4859262 - DNA, 25 bp, Homo sapien
ggttgatctggccattgtcacctct

SEQ ID NO: 4859263 - DNA, 25 bp, Homo sapien
gcttttacaaaggagccaatcagaa

SEQ ID NO: 4859264 - DNA, 25 bp, Homo sapien
agggtgaggacgcatgcccatgaca

SEQ ID NO: 4859265 - DNA, 25 bp, Homo sapien
tcacttagtctatacatacgtctca

SEQ ID NO: 4859266 - DNA, 25 bp, Homo sapien
atacgtctcatacctccctcttaag

SEQ ID NO: 4859267 - DNA, 25 bp, Homo sapien
tagaattggtgactagagaccagag

SEQ ID NO: 4859268 - DNA, 25 bp, Homo sapien
tagactgagattctttaatgatggg

SEQ ID NO: 4859269 - DNA, 25 bp, Homo sapien
gaggcaataagcatcccacattaga

SEQ ID NO: 4859270 - DNA, 25 bp, Homo sapien
gattctttaatgatgggagccaggc

SEQ ID NO: 4859271 - DNA, 25 bp, Homo sapien
tctgtatacttgcagcatagaacac

SEQ ID NO: 4859272 - DNA, 25 bp, Homo sapien
gtatacttgcagcatagaacacaga

SEQ ID NO: 4859273 - DNA, 25 bp, Homo sapien
cacagaatccttaagccctcctgcc

SEQ ID NO: 4859274 - DNA, 25 bp, Homo sapien
agacttctgtatacttgcagcatag

SEQ ID NO: 4859275 - DNA, 25 bp, Homo sapien
cacggcacaagccctatggaggaac

SEQ ID NO: 4859276 - DNA, 25 bp, Homo sapien
ccctatggaggagctgttgacatcg

SEQ ID NO: 4859277 - DNA, 25 bp, Homo sapien
acggcacaagccctatggaggagct

SEQ ID NO: 4859278 - DNA, 25 bp, Homo sapien
gaggagctgttgacatcggttcctt

SEQ ID NO: 4859279 - DNA, 25 bp, Homo sapien
tcatatgggaatctgcttttgttgc

SEQ ID NO: 4859280 - DNA, 25 bp, Homo sapien
ttacacacaagaggccatagcagcg

SEQ ID NO: 4859281 - DNA, 25 bp, Homo sapien
tgtgctcactgttgtacaaatttgt

SEQ ID NO: 4859282 - DNA, 25 bp, Homo sapien
caggcaagcatgcttcctgatgggt

SEQ ID NO: 4859283 - DNA, 25 bp, Homo sapien
taatacactctgaggcaagtccgct

SEQ ID NO: 4859284 - DNA, 25 bp, Homo sapien
caagtccgctgaacatttctgggcc

SEQ ID NO: 4859285 - DNA, 25 bp, Homo sapien
tatcatctgatcaaaatctctactg

SEQ ID NO: 4859286 - DNA, 25 bp, Homo sapien
gggataccctaggagccattttgct

SEQ ID NO: 4859287 - DNA, 25 bp, Homo sapien
catgtccttgagcttccgaatcctg

SEQ ID NO: 4859288 - DNA, 25 bp, Homo sapien
agtaccaatgatggtcagcccataa

SEQ ID NO: 4859289 - DNA, 25 bp, Homo sapien
accaatgatggtcagcccataaacc

SEQ ID NO: 4859290 - DNA, 25 bp, Homo sapien
tgtgtgtgctcagtaccaatgatgg

SEQ ID NO: 4859291 - DNA, 25 bp, Homo sapien
gttctatgtgtgtgctcagtaccaa

SEQ ID NO: 4859292 - DNA, 25 bp, Homo sapien
tgtccaggcatacatgtcaagtctg

SEQ ID NO: 4859293 - DNA, 25 bp, Homo sapien
gatcagcaacaactgaagcttggaa

SEQ ID NO: 4859294 - DNA, 25 bp, Homo sapien
tgcaggttaaagctaaacgtatgtg

SEQ ID NO: 4859295 - DNA, 25 bp, Homo sapien
ggtcacaaatcttattgtccaggca

SEQ ID NO: 4859296 - DNA, 25 bp, Homo sapien
gaaactgattccaactcttaagtct

SEQ ID NO: 4859297 - DNA, 25 bp, Homo sapien
cttcctgtttcatagagtataagat

SEQ ID NO: 4859298 - DNA, 25 bp, Homo sapien
catagagtataagatgacaagcccc

SEQ ID NO: 4859299 - DNA, 25 bp, Homo sapien
aagcccccaggtcacccatattgtg

SEQ ID NO: 4859300 - DNA, 25 bp, Homo sapien
cacttcctttagagggtctgtgggt

SEQ ID NO: 4859301 - DNA, 25 bp, Homo sapien
agtccacttcctttagagggtctgt

SEQ ID NO: 4859302 - DNA, 25 bp, Homo sapien
gagcagtccacttcctttagagggt

SEQ ID NO: 4859303 - DNA, 25 bp, Homo sapien
cctgcaggagcagtccacttccttt

SEQ ID NO: 4859304 - DNA, 25 bp, Homo sapien
aacaaatggattagagacccaagtc

SEQ ID NO: 4859305 - DNA, 25 bp, Homo sapien
acatgcacatgtttctcagacctta

SEQ ID NO: 4859306 - DNA, 25 bp, Homo sapien
tcattcactccatggaccctgtgaa

SEQ ID NO: 4859307 - DNA, 25 bp, Homo sapien
tgtgactttcgggaagatacttgac

SEQ ID NO: 4859308 - DNA, 25 bp, Homo sapien
tttcctggagccttgttactctggc

SEQ ID NO: 4859309 - DNA, 25 bp, Homo sapien
ggagccttgttactctggctgattt

SEQ ID NO: 4859310 - DNA, 25 bp, Homo sapien
gtttctctaagggatgcacatagcc

SEQ ID NO: 4859311 - DNA, 25 bp, Homo sapien
gggatgcacatagccatgtggcttt

SEQ ID NO: 4859312 - DNA, 25 bp, Homo sapien
aggaagcctccaaagaaggtggtca

SEQ ID NO: 4859313 - DNA, 25 bp, Homo sapien
ggtcaggaaagctttgctgcagagg

SEQ ID NO: 4859314 - DNA, 25 bp, Homo sapien
gaagcctccaaagaaggtggtcagg

SEQ ID NO: 4859315 - DNA, 25 bp, Homo sapien
agcctccaaagaaggtggtcaggaa

SEQ ID NO: 4859316 - DNA, 25 bp, Homo sapien
gcatattgcttggtattaagctgca

SEQ ID NO: 4859317 - DNA, 25 bp, Homo sapien
caggttacagcttccagattccagc

SEQ ID NO: 4859318 - DNA, 25 bp, Homo sapien
cagccttagtgccttaaatttaatt

SEQ ID NO: 4859319 - DNA, 25 bp, Homo sapien
agaagtgactcaggttacagcttcc

SEQ ID NO: 4859320 - DNA, 25 bp, Homo sapien
atgaacatgacacccctagcggctg

SEQ ID NO: 4859321 - DNA, 25 bp, Homo sapien
tatcgatgatgagctatcttcagaa

SEQ ID NO: 4859322 - DNA, 25 bp, Homo sapien
gggaatctatcagtatatcgatgat

SEQ ID NO: 4859323 - DNA, 25 bp, Homo sapien
tagcggctgcaagacagccagatgg

SEQ ID NO: 4859324 - DNA, 25 bp, Homo sapien
gagagtaatgaagtggagtggtacc

SEQ ID NO: 4859325 - DNA, 25 bp, Homo sapien
gcaggatcatcgcaaagagagtaat

SEQ ID NO: 4859326 - DNA, 25 bp, Homo sapien
gtggtacccaattactgccactcca

SEQ ID NO: 4859327 - DNA, 25 bp, Homo sapien
cctcctactcgtggactgcgggaga

SEQ ID NO: 4859328 - DNA, 25 bp, Homo sapien
tggacaggtggcaaaccattcttcc

SEQ ID NO: 4859329 - DNA, 25 bp, Homo sapien
caggtggcaaaccattcttcctttg

SEQ ID NO: 4859330 - DNA, 25 bp, Homo sapien
gacaggtggcaaaccattcttcctt

SEQ ID NO: 4859331 - DNA, 25 bp, Homo sapien
aggtggcaaaccattcttcctttgg

SEQ ID NO: 4859332 - DNA, 25 bp, Homo sapien
ggtacacgcatttaatattatcctc

SEQ ID NO: 4859333 - DNA, 25 bp, Homo sapien
tcatttttcttggtacacgcattta

SEQ ID NO: 4859334 - DNA, 25 bp, Homo sapien
tattatcctcatatggaggattcgg

SEQ ID NO: 4859335 - DNA, 25 bp, Homo sapien
tcttggtacacgcatttaatattat

SEQ ID NO: 4859336 - DNA, 25 bp, Homo sapien
gattaaatgctgatgttcacaagtg

SEQ ID NO: 4859337 - DNA, 25 bp, Homo sapien
cacaagtgaatgcacacagcttcag

SEQ ID NO: 4859338 - DNA, 25 bp, Homo sapien
tagttcctctttatggattaaatgc

SEQ ID NO: 4859339 - DNA, 25 bp, Homo sapien
tactgatgcgtggattccattttca

SEQ ID NO: 4859340 - DNA, 25 bp, Homo sapien
taatctctaggtggaaacttctcac

SEQ ID NO: 4859341 - DNA, 25 bp, Homo sapien
cgtaccttacttccaaagctcacgg

SEQ ID NO: 4859342 - DNA, 25 bp, Homo sapien
aagctcacggtatcccattttcaag

SEQ ID NO: 4859343 - DNA, 25 bp, Homo sapien
tgttcaatgacaacagtgttcacca

SEQ ID NO: 4859344 - DNA, 25 bp, Homo sapien
cacacttagagaggcatacttcagg

SEQ ID NO: 4859345 - DNA, 25 bp, Homo sapien
cattaaagccatcaatatcatgagg

SEQ ID NO: 4859346 - DNA, 25 bp, Homo sapien
tatcatgaggtgctgtattcacact

SEQ ID NO: 4859347 - DNA, 25 bp, Homo sapien
ctgtattcacacttagagaggcata

SEQ ID NO: 4859348 - DNA, 25 bp, Homo sapien
ctcaaggaattacatgagtttcttg

SEQ ID NO: 4859349 - DNA, 25 bp, Homo sapien
gagacccttaactcaaggaattaca

SEQ ID NO: 4859350 - DNA, 25 bp, Homo sapien
catttgagacccttaactcaaggaa

SEQ ID NO: 4859351 - DNA, 25 bp, Homo sapien
ttgagacccttaactcaaggaatta

SEQ ID NO: 4859352 - DNA, 25 bp, Homo sapien
aacatatgcttgacatccattttct

SEQ ID NO: 4859353 - DNA, 25 bp, Homo sapien
cccctttctataggatggaacacca

SEQ ID NO: 4859354 - DNA, 25 bp, Homo sapien
caggctatagtttcaggaagccaga

SEQ ID NO: 4859355 - DNA, 25 bp, Homo sapien
gcaaaaaatagcaaccccttcagaa

SEQ ID NO: 4859356 - DNA, 25 bp, Homo sapien
caaacaggtatagtacttgaatgcc

SEQ ID NO: 4859357 - DNA, 25 bp, Homo sapien
taacgtggtacagctactagggaaa

SEQ ID NO: 4859358 - DNA, 25 bp, Homo sapien
taagcaaaatgtgctatttataacc

SEQ ID NO: 4859359 - DNA, 25 bp, Homo sapien
cttgaatgccagtgttccttgcagc

SEQ ID NO: 4859360 - DNA, 25 bp, Homo sapien
gagccacctgtcagagctgtccatt

SEQ ID NO: 4859361 - DNA, 25 bp, Homo sapien
gagctgtccatttggacatctttgg

SEQ ID NO: 4859362 - DNA, 25 bp, Homo sapien
ctgaggagccacctgtcagagctgt

SEQ ID NO: 4859363 - DNA, 25 bp, Homo sapien
tccatttggacatctttggtgaagt

SEQ ID NO: 4859364 - DNA, 25 bp, Homo sapien
tagccacagctagttagcctacagt

SEQ ID NO: 4859365 - DNA, 25 bp, Homo sapien
tggaggcactgcagacttcaataat

SEQ ID NO: 4859366 - DNA, 25 bp, Homo sapien
tctgtgcagcgttctagacaggccc

SEQ ID NO: 4859367 - DNA, 25 bp, Homo sapien
aatgtatgtcattaccctccaggaa

SEQ ID NO: 4859368 - DNA, 25 bp, Homo sapien
tttggcttccatgaggagtgggaca

SEQ ID NO: 4859369 - DNA, 25 bp, Homo sapien
tctgacatttggcttccatgaggag

SEQ ID NO: 4859370 - DNA, 25 bp, Homo sapien
aggttacagcgacacccagcagcca

SEQ ID NO: 4859371 - DNA, 25 bp, Homo sapien
agtgggacagaggttacagcgacac

SEQ ID NO: 4859372 - DNA, 25 bp, Homo sapien
ggttcttcgcataatcagcatttct

SEQ ID NO: 4859373 - DNA, 25 bp, Homo sapien
ctccaggttcttcgcataatcagca

SEQ ID NO: 4859374 - DNA, 25 bp, Homo sapien
ccaggttcttcgcataatcagcatt

SEQ ID NO: 4859375 - DNA, 25 bp, Homo sapien
caggttcttcgcataatcagcattt

SEQ ID NO: 4859376 - DNA, 25 bp, Homo sapien
cactctttttggcaaactccagcat

SEQ ID NO: 4859377 - DNA, 25 bp, Homo sapien
atttctagcaggtttaacaccaggt

SEQ ID NO: 4859378 - DNA, 25 bp, Homo sapien
ccagcattatagacatctgaagtga

SEQ ID NO: 4859379 - DNA, 25 bp, Homo sapien
cattgtgtgaatttctagcaggttt

SEQ ID NO: 4859380 - DNA, 25 bp, Homo sapien
tttggttccattctgggactctcct

SEQ ID NO: 4859381 - DNA, 25 bp, Homo sapien
tctgagctactaagccactatcagt

SEQ ID NO: 4859382 - DNA, 25 bp, Homo sapien
gaatgacaagaggtagctgcctaat

SEQ ID NO: 4859383 - DNA, 25 bp, Homo sapien
actgctctagaaataggtgagctgc

SEQ ID NO: 4859384 - DNA, 25 bp, Homo sapien
atgctctgcgttcccttgtccatcc

SEQ ID NO: 4859385 - DNA, 25 bp, Homo sapien
tgctctgcgttcccttgtccatcct

SEQ ID NO: 4859386 - DNA, 25 bp, Homo sapien
ccatgctctgcgttcccttgtccat

SEQ ID NO: 4859387 - DNA, 25 bp, Homo sapien
catgctctgcgttcccttgtccatc

SEQ ID NO: 4859388 - DNA, 25 bp, Homo sapien
cttgtccgttggtctcgtggggagc

SEQ ID NO: 4859389 - DNA, 25 bp, Homo sapien
ccgttggtctcgtggggagctgcag

SEQ ID NO: 4859390 - DNA, 25 bp, Homo sapien
tgtccgttggtctcgtggggagctg

SEQ ID NO: 4859391 - DNA, 25 bp, Homo sapien
tccgttggtctcgtggggagctgca

SEQ ID NO: 4859392 - DNA, 25 bp, Homo sapien
tgttacttgttggtaaagtgtcctc

SEQ ID NO: 4859393 - DNA, 25 bp, Homo sapien
tctcctggggtgttacttgttggta

SEQ ID NO: 4859394 - DNA, 25 bp, Homo sapien
tcagtcatctcctggggtgttactt

SEQ ID NO: 4859395 - DNA, 25 bp, Homo sapien
tacttgttggtaaagtgtcctcttg

SEQ ID NO: 4859396 - DNA, 25 bp, Homo sapien
ctccaatgttactaagactgctttt

SEQ ID NO: 4859397 - DNA, 25 bp, Homo sapien
acttgtgactcagggcctccttatt

SEQ ID NO: 4859398 - DNA, 25 bp, Homo sapien
ttacttgtgactcagggcctcctta

SEQ ID NO: 4859399 - DNA, 25 bp, Homo sapien
ccaatgttactaagactgcttttaa

SEQ ID NO: 4859400 - DNA, 25 bp, Homo sapien
aatataattgcataagagacctcct

SEQ ID NO: 4859401 - DNA, 25 bp, Homo sapien
tatacccaagcttagcaacagactg

SEQ ID NO: 4859402 - DNA, 25 bp, Homo sapien
gaagaccagaaacctagtagctcgg

SEQ ID NO: 4859403 - DNA, 25 bp, Homo sapien
cacagataacacaggcttagtctcc

SEQ ID NO: 4859404 - DNA, 25 bp, Homo sapien
gggaaaatgttgataccaggaacac

SEQ ID NO: 4859405 - DNA, 25 bp, Homo sapien
ggaaggccaccccaagttccatcaa

SEQ ID NO: 4859406 - DNA, 25 bp, Homo sapien
caagtcaaagcatcaagtcaaggcc

SEQ ID NO: 4859407 - DNA, 25 bp, Homo sapien
caaggcctaggatctttgggtgaac

SEQ ID NO: 4859408 - DNA, 25 bp, Homo sapien
gagcagtagtaaacgcattctctat

SEQ ID NO: 4859409 - DNA, 25 bp, Homo sapien
ggcatctaagagcagtagtaaacgc

SEQ ID NO: 4859410 - DNA, 25 bp, Homo sapien
tagtaaacgcattctctatgggcat

SEQ ID NO: 4859411 - DNA, 25 bp, Homo sapien
tctaagagcagtagtaaacgcattc

SEQ ID NO: 4859412 - DNA, 25 bp, Homo sapien
tcaattggcaggatcatctcttttg

SEQ ID NO: 4859413 - DNA, 25 bp, Homo sapien
acagggtttcaccttcatccatttc

SEQ ID NO: 4859414 - DNA, 25 bp, Homo sapien
gtttcaccttcatccatttcccagt

SEQ ID NO: 4859415 - DNA, 25 bp, Homo sapien
aattggcaggatcatctcttttgtt

SEQ ID NO: 4859416 - DNA, 25 bp, Homo sapien
aagagccacatggatttagcatttg

SEQ ID NO: 4859417 - DNA, 25 bp, Homo sapien
gggctgaagagccacatggatttag

SEQ ID NO: 4859418 - DNA, 25 bp, Homo sapien
catgtgtaagatggggctgaagagc

SEQ ID NO: 4859419 - DNA, 25 bp, Homo sapien
taagatggggctgaagagccacatg

SEQ ID NO: 4859420 - DNA, 25 bp, Homo sapien
tggcctgagaagtcctcagagcttc

SEQ ID NO: 4859421 - DNA, 25 bp, Homo sapien
tcctcagagcttcaatcaagcccat

SEQ ID NO: 4859422 - DNA, 25 bp, Homo sapien
gagaagtcctcagagcttcaatcaa

SEQ ID NO: 4859423 - DNA, 25 bp, Homo sapien
aagtcctcagagcttcaatcaagcc

SEQ ID NO: 4859424 - DNA, 25 bp, Homo sapien
tgtaatgtatccaggacaccaagga

SEQ ID NO: 4859425 - DNA, 25 bp, Homo sapien
tccaggacaccaaggataattctgg

SEQ ID NO: 4859426 - DNA, 25 bp, Homo sapien
caccaaggataattctgggctttat

SEQ ID NO: 4859427 - DNA, 25 bp, Homo sapien
tggctgatgtaatgtatccaggaca

SEQ ID NO: 4859428 - DNA, 25 bp, Homo sapien
tcctctgtactcattcttccaggca

SEQ ID NO: 4859429 - DNA, 25 bp, Homo sapien
tgagggtctgtactatccactggtt

SEQ ID NO: 4859430 - DNA, 25 bp, Homo sapien
ctattccttgcacagaagattcctg

SEQ ID NO: 4859431 - DNA, 25 bp, Homo sapien
tcctactaggacgactcttgtttcc

SEQ ID NO: 4859432 - DNA, 25 bp, Homo sapien
ctataaagttgtccaaccatatatt

SEQ ID NO: 4859433 - DNA, 25 bp, Homo sapien
taaagttgtccaaccatatattgac

SEQ ID NO: 4859434 - DNA, 25 bp, Homo sapien
tataaagttgtccaaccatatattg

SEQ ID NO: 4859435 - DNA, 25 bp, Homo sapien
ataaagttgtccaaccatatattga

SEQ ID NO: 4859436 - DNA, 25 bp, Homo sapien
tcagtggtggcactaaatttggagt

SEQ ID NO: 4859437 - DNA, 25 bp, Homo sapien
gatagggatcaaagtctgagctttg

SEQ ID NO: 4859438 - DNA, 25 bp, Homo sapien
ccaggtgaagaatgggatagggatc

SEQ ID NO: 4859439 - DNA, 25 bp, Homo sapien
tgtcaggtcctgtatatctcagtgg

SEQ ID NO: 4859440 - DNA, 25 bp, Homo sapien
tcctccatatctcctgccatctggt

SEQ ID NO: 4859441 - DNA, 25 bp, Homo sapien
agagaacttgtctcctccatatctc

SEQ ID NO: 4859442 - DNA, 25 bp, Homo sapien
cgctgaaggtgagagaacttgtctc

SEQ ID NO: 4859443 - DNA, 25 bp, Homo sapien
tccatatctcctgccatctggtaca

SEQ ID NO: 4859444 - DNA, 25 bp, Homo sapien
tgctacataatttcaaacgctgatg

SEQ ID NO: 4859445 - DNA, 25 bp, Homo sapien
gggctccctgctacataatttcaaa

SEQ ID NO: 4859446 - DNA, 25 bp, Homo sapien
tttcaaacgctgatgagaggatatc

SEQ ID NO: 4859447 - DNA, 25 bp, Homo sapien
tgagaggatatctgtgagaagcttc

SEQ ID NO: 4859448 - DNA, 25 bp, Homo sapien
ccatctctgagacagtaggccagga

SEQ ID NO: 4859449 - DNA, 25 bp, Homo sapien
tccatctctgagacagtaggccagg

SEQ ID NO: 4859450 - DNA, 25 bp, Homo sapien
ggtttaagcacagtagctcagccat

SEQ ID NO: 4859451 - DNA, 25 bp, Homo sapien
gttttgtggtttaagcacagtagct

SEQ ID NO: 4859452 - DNA, 25 bp, Homo sapien
gactgctgatgttggcaactgtgtt

SEQ ID NO: 4859453 - DNA, 25 bp, Homo sapien
tgactgctgatgttggcaactgtgt

SEQ ID NO: 4859454 - DNA, 25 bp, Homo sapien
taagattctcttacgaccaaaccga

SEQ ID NO: 4859455 - DNA, 25 bp, Homo sapien
caaaccgatatgtggcacagggcat

SEQ ID NO: 4859456 - DNA, 25 bp, Homo sapien
tacgaccaaaccgatatgtggcaca

SEQ ID NO: 4859457 - DNA, 25 bp, Homo sapien
tctcttacgaccaaaccgatatgtg

SEQ ID NO: 4859458 - DNA, 25 bp, Homo sapien
catggctagctgatcactctgctgc

SEQ ID NO: 4859459 - DNA, 25 bp, Homo sapien
tccagaatgattctgcaagaagctg

SEQ ID NO: 4859460 - DNA, 25 bp, Homo sapien
gccagttagcatctgggaggttttc

SEQ ID NO: 4859461 - DNA, 25 bp, Homo sapien
ggacacaggccctcaacaggatgac

SEQ ID NO: 4859462 - DNA, 25 bp, Homo sapien
ccttttgacgcatgacaaaggaagc

SEQ ID NO: 4859463 - DNA, 25 bp, Homo sapien
gagatcacagtttccttttgacgca

SEQ ID NO: 4859464 - DNA, 25 bp, Homo sapien
cacagtttccttttgacgcatgaca

SEQ ID NO: 4859465 - DNA, 25 bp, Homo sapien
gtttccttttgacgcatgacaaagg

SEQ ID NO: 4859466 - DNA, 25 bp, Homo sapien
atcaatgaggagcttgggatctgac

SEQ ID NO: 4859467 - DNA, 25 bp, Homo sapien
tagtcatcaatgaggagcttgggat

SEQ ID NO: 4859468 - DNA, 25 bp, Homo sapien
caaaaggttaccctgcacaagagtg

SEQ ID NO: 4859469 - DNA, 25 bp, Homo sapien
gattcttacaaaaggttaccctgca

SEQ ID NO: 4859470 - DNA, 25 bp, Homo sapien
aactcttctaacacactattgtcat

SEQ ID NO: 4859471 - DNA, 25 bp, Homo sapien
gaatctcccctcagatgatgtagtg

SEQ ID NO: 4859472 - DNA, 25 bp, Homo sapien
gatctttcattagataactcttcta

SEQ ID NO: 4859473 - DNA, 25 bp, Homo sapien
aagagctgaaaacattactgaatgg

SEQ ID NO: 4859474 - DNA, 25 bp, Homo sapien
actttggcgagggtaagattgtgtc

SEQ ID NO: 4859475 - DNA, 25 bp, Homo sapien
ttggcgagggtaagattgtgtctct

SEQ ID NO: 4859476 - DNA, 25 bp, Homo sapien
ctgaactttggcgagggtaagattg

SEQ ID NO: 4859477 - DNA, 25 bp, Homo sapien
tgaactttggcgagggtaagattgt

SEQ ID NO: 4859478 - DNA, 25 bp, Homo sapien
ccttcctcttgagagtaagctgtcc

SEQ ID NO: 4859479 - DNA, 25 bp, Homo sapien
cttcctcttgagagtaagctgtcca

SEQ ID NO: 4859480 - DNA, 25 bp, Homo sapien
cttgagagtaagctgtccacagaat

SEQ ID NO: 4859481 - DNA, 25 bp, Homo sapien
ttcctcttgagagtaagctgtccac

SEQ ID NO: 4859482 - DNA, 25 bp, Homo sapien
ctgactggtagaactgtagaaagga

SEQ ID NO: 4859483 - DNA, 25 bp, Homo sapien
cactcattccatcaggaggaaaaga

SEQ ID NO: 4859484 - DNA, 25 bp, Homo sapien
tcaccggtgatgtaatacacttcct

SEQ ID NO: 4859485 - DNA, 25 bp, Homo sapien
ggaggaaaagacaattggtctgact

SEQ ID NO: 4859486 - DNA, 25 bp, Homo sapien
tatttaaatcaaccatcagccagcc

SEQ ID NO: 4859487 - DNA, 25 bp, Homo sapien
gggatatttaaatcaaccatcagcc

SEQ ID NO: 4859488 - DNA, 25 bp, Homo sapien
tcaaaccaatggtcctgtgtgaatg

SEQ ID NO: 4859489 - DNA, 25 bp, Homo sapien
ttaaatcaaccatcagccagccatg

SEQ ID NO: 4859490 - DNA, 25 bp, Homo sapien
tgccctgactttggtggacatgaac

SEQ ID NO: 4859491 - DNA, 25 bp, Homo sapien
agagctctggtgagcataggtttca

SEQ ID NO: 4859492 - DNA, 25 bp, Homo sapien
tgccagaagctacatggcagctctt

SEQ ID NO: 4859493 - DNA, 25 bp, Homo sapien
tagttcacggaatgagagtattttc

SEQ ID NO: 4859494 - DNA, 25 bp, Homo sapien
tgggttaatggagaatcatccagcc

SEQ ID NO: 4859495 - DNA, 25 bp, Homo sapien
tctctcaggaccctggatagtcagt

SEQ ID NO: 4859496 - DNA, 25 bp, Homo sapien
tgctggcagaacaaataagaccctc

SEQ ID NO: 4859497 - DNA, 25 bp, Homo sapien
tgctcccctggagtttcattgtggg

SEQ ID NO: 4859498 - DNA, 25 bp, Homo sapien
tgcattgtacgccacaattctttca

SEQ ID NO: 4859499 - DNA, 25 bp, Homo sapien
tgatcaggaaacacccaaacagatt

SEQ ID NO: 4859500 - DNA, 25 bp, Homo sapien
catgttgtaacttgctgatcaggaa

SEQ ID NO: 4859501 - DNA, 25 bp, Homo sapien
caatggtaccaaaacaataagctgc

SEQ ID NO: 4859502 - DNA, 25 bp, Homo sapien
tgaacttaagtctccactcaatggt

SEQ ID NO: 4859503 - DNA, 25 bp, Homo sapien
gtgcaaaatgctttgatcaatcagt

SEQ ID NO: 4859504 - DNA, 25 bp, Homo sapien
tttgatagaatgcttcttgggttcc

SEQ ID NO: 4859505 - DNA, 25 bp, Homo sapien
tagactccatcaatacctctcgtaa

SEQ ID NO: 4859506 - DNA, 25 bp, Homo sapien
gggcagaactatgggagattttggg

SEQ ID NO: 4859507 - DNA, 25 bp, Homo sapien
gtgacacaaactggctgatgctgac

SEQ ID NO: 4859508 - DNA, 25 bp, Homo sapien
agcgtaggtgacacaaactggctga

SEQ ID NO: 4859509 - DNA, 25 bp, Homo sapien
cagaaagcgtaggtgacacaaactg

SEQ ID NO: 4859510 - DNA, 25 bp, Homo sapien
taggtgacacaaactggctgatgct

SEQ ID NO: 4859511 - DNA, 25 bp, Homo sapien
cttgagtgctttccgctttcagggc

SEQ ID NO: 4859512 - DNA, 25 bp, Homo sapien
ttcttgagtgctttccgctttcagg

SEQ ID NO: 4859513 - DNA, 25 bp, Homo sapien
tgctttccgctttcagggcactcca

SEQ ID NO: 4859514 - DNA, 25 bp, Homo sapien
gagtgctttccgctttcagggcact

SEQ ID NO: 4859515 - DNA, 25 bp, Homo sapien
tattcactttattcaccatcaccaa

SEQ ID NO: 4859516 - DNA, 25 bp, Homo sapien
tgtcctccggtacaagtaatcttga

SEQ ID NO: 4859517 - DNA, 25 bp, Homo sapien
tcatcatcacagtcagccttcaaca

SEQ ID NO: 4859518 - DNA, 25 bp, Homo sapien
catcatcaccttattcagtccaatg

SEQ ID NO: 4859519 - DNA, 25 bp, Homo sapien
tttaaggaatgtgtatgtctgaaac

SEQ ID NO: 4859520 - DNA, 25 bp, Homo sapien
tcaaagtcctacacgactctcttca

SEQ ID NO: 4859521 - DNA, 25 bp, Homo sapien
gcatgataagtttgatgtctagatt

SEQ ID NO: 4859522 - DNA, 25 bp, Homo sapien
cctacacgactctcttcatttagca

SEQ ID NO: 4859523 - DNA, 25 bp, Homo sapien
tcttcatttagcatgataagtttga

SEQ ID NO: 4859524 - DNA, 25 bp, Homo sapien
agaaatggtccatatgggatctctg

SEQ ID NO: 4859525 - DNA, 25 bp, Homo sapien
gaaatggtccatatgggatctctgt

SEQ ID NO: 4859526 - DNA, 25 bp, Homo sapien
taagaaatggtccatatgggatctc

SEQ ID NO: 4859527 - DNA, 25 bp, Homo sapien
tgtaagaaatggtccatatgggatc

SEQ ID NO: 4859528 - DNA, 25 bp, Homo sapien
tatttactacagacaactggaagtc

SEQ ID NO: 4859529 - DNA, 25 bp, Homo sapien
tgtagacttaaatcctccgctttgg

SEQ ID NO: 4859530 - DNA, 25 bp, Homo sapien
aacactgtgtagacttaaatcctcc

SEQ ID NO: 4859531 - DNA, 25 bp, Homo sapien
cactgtgtagacttaaatcctccgc

SEQ ID NO: 4859532 - DNA, 25 bp, Homo sapien
tgtgtagacttaaatcctccgcttt

SEQ ID NO: 4859533 - DNA, 25 bp, Homo sapien
tgcttaagttgttaccaatgttgct

SEQ ID NO: 4859534 - DNA, 25 bp, Homo sapien
acttgcttaagttgttaccaatgtt

SEQ ID NO: 4859535 - DNA, 25 bp, Homo sapien
ttgcttaagttgttaccaatgttgc

SEQ ID NO: 4859536 - DNA, 25 bp, Homo sapien
cttgcttaagttgttaccaatgttg

SEQ ID NO: 4859537 - DNA, 25 bp, Homo sapien
tggccctgaatgatgcaaggagtct

SEQ ID NO: 4859538 - DNA, 25 bp, Homo sapien
ccctggtgccatcaagttcatggcc

SEQ ID NO: 4859539 - DNA, 25 bp, Homo sapien
catgtggcatcgtcagcttctccac

SEQ ID NO: 4859540 - DNA, 25 bp, Homo sapien
gcaaggagtctagagaacctgttcc

SEQ ID NO: 4859541 - DNA, 25 bp, Homo sapien
agactgaggacacggcactgagaaa

SEQ ID NO: 4859542 - DNA, 25 bp, Homo sapien
gagaaatgtcggagactgaggacac

SEQ ID NO: 4859543 - DNA, 25 bp, Homo sapien
tgtcggagactgaggacacggcact

SEQ ID NO: 4859544 - DNA, 25 bp, Homo sapien
tctgagatagagaaatgtcggagac

SEQ ID NO: 4859545 - DNA, 25 bp, Homo sapien
tggaacacaggcattcccaatagcc

SEQ ID NO: 4859546 - DNA, 25 bp, Homo sapien
cccatgtgttttcttcgcattgagt

SEQ ID NO: 4859547 - DNA, 25 bp, Homo sapien
tcttattccataggtcaacccatgt

SEQ ID NO: 4859548 - DNA, 25 bp, Homo sapien
gagttaaattggtgtatgggacaca

SEQ ID NO: 4859549 - DNA, 25 bp, Homo sapien
caagccaggatctcatgtccagctt

SEQ ID NO: 4859550 - DNA, 25 bp, Homo sapien
caggatctcatgtccagctttgtat

SEQ ID NO: 4859551 - DNA, 25 bp, Homo sapien
tagccaagccaggatctcatgtcca

SEQ ID NO: 4859552 - DNA, 25 bp, Homo sapien
agtagccaagccaggatctcatgtc

SEQ ID NO: 4859553 - DNA, 25 bp, Homo sapien
ttcttgctgactaacaagtgttaac

SEQ ID NO: 4859554 - DNA, 25 bp, Homo sapien
cttgctgactaacaagtgttaacgt

SEQ ID NO: 4859555 - DNA, 25 bp, Homo sapien
tgctgactaacaagtgttaacgttt

SEQ ID NO: 4859556 - DNA, 25 bp, Homo sapien
tcttgctgactaacaagtgttaacg

SEQ ID NO: 4859557 - DNA, 25 bp, Homo sapien
ttcacatgcaaacaatacttcatat

SEQ ID NO: 4859558 - DNA, 25 bp, Homo sapien
ctgacactgagcctgtttagtaaga

SEQ ID NO: 4859559 - DNA, 25 bp, Homo sapien
caatacttcatatgtttccctactg

SEQ ID NO: 4859560 - DNA, 25 bp, Homo sapien
tagtaagagtgcagttagatttcac

SEQ ID NO: 4859561 - DNA, 25 bp, Homo sapien
ggaaagagttccattatgggttgtg

SEQ ID NO: 4859562 - DNA, 25 bp, Homo sapien
tcaatttaagtttgcttgtgcaact

SEQ ID NO: 4859563 - DNA, 25 bp, Homo sapien
tgtgcaactcgatgaaagggcaagg

SEQ ID NO: 4859564 - DNA, 25 bp, Homo sapien
aaggaaagagttccattatgggttg

SEQ ID NO: 4859565 - DNA, 25 bp, Homo sapien
taaggagttatgttctctcaagtca

SEQ ID NO: 4859566 - DNA, 25 bp, Homo sapien
tgattctcaagcagggagacctcat

SEQ ID NO: 4859567 - DNA, 25 bp, Homo sapien
cccacccacatgtataaggagttat

SEQ ID NO: 4859568 - DNA, 25 bp, Homo sapien
tgttctctcaagtcactgattctca

SEQ ID NO: 4859569 - DNA, 25 bp, Homo sapien
gaaagcacaggcagtctcttggatc

SEQ ID NO: 4859570 - DNA, 25 bp, Homo sapien
cacactctgttggtaggtggccctc

SEQ ID NO: 4859571 - DNA, 25 bp, Homo sapien
tcaaggccagggcattgagtggtgt

SEQ ID NO: 4859572 - DNA, 25 bp, Homo sapien
gatccttgcgtcttggtgcaaagtc

SEQ ID NO: 4859573 - DNA, 25 bp, Homo sapien
tcaagttccatcattaaacattgat

SEQ ID NO: 4859574 - DNA, 25 bp, Homo sapien
aatgtttcaagttccatcattaaac

SEQ ID NO: 4859575 - DNA, 25 bp, Homo sapien
taggttttcaaggattgccattaaa

SEQ ID NO: 4859576 - DNA, 25 bp, Homo sapien
tcataatgtttcaagttccatcatt

SEQ ID NO: 4859577 - DNA, 25 bp, Homo sapien
aggaggaccaaaccgatattgccaa

SEQ ID NO: 4859578 - DNA, 25 bp, Homo sapien
taaaggaggaccaaaccgatattgc

SEQ ID NO: 4859579 - DNA, 25 bp, Homo sapien
aaggaggaccaaaccgatattgcca

SEQ ID NO: 4859580 - DNA, 25 bp, Homo sapien
catgaagtcatcaaatccccttttc

SEQ ID NO: 4859581 - DNA, 25 bp, Homo sapien
gaagcatggtacatcgccatccacg

SEQ ID NO: 4859582 - DNA, 25 bp, Homo sapien
tccggtgtggaagcatggtacatcg

SEQ ID NO: 4859583 - DNA, 25 bp, Homo sapien
tccactgataaattggtgctaaatg

SEQ ID NO: 4859584 - DNA, 25 bp, Homo sapien
cttgtcttcattggatgcacatggt

SEQ ID NO: 4859585 - DNA, 25 bp, Homo sapien
cattggatgcacatggttaatgagg

SEQ ID NO: 4859586 - DNA, 25 bp, Homo sapien
tgctttgcttgctgcattcgtcctg

SEQ ID NO: 4859587 - DNA, 25 bp, Homo sapien
ggatgcacatggttaatgaggaaat

SEQ ID NO: 4859588 - DNA, 25 bp, Homo sapien
cttatagattcacatatatgtggcc

SEQ ID NO: 4859589 - DNA, 25 bp, Homo sapien
tatagattcacatatatgtggccaa

SEQ ID NO: 4859590 - DNA, 25 bp, Homo sapien
agattcacatatatgtggccaaagg

SEQ ID NO: 4859591 - DNA, 25 bp, Homo sapien
ttcttatagattcacatatatgtgg

SEQ ID NO: 4859592 - DNA, 25 bp, Homo sapien
tgaacagtgcccattcccttgacgt

SEQ ID NO: 4859593 - DNA, 25 bp, Homo sapien
agttttgccgtggtaacacttgtgg

SEQ ID NO: 4859594 - DNA, 25 bp, Homo sapien
tcttccagttttgccgtggtaacac

SEQ ID NO: 4859595 - DNA, 25 bp, Homo sapien
tccagttttgccgtggtaacacttg

SEQ ID NO: 4859596 - DNA, 25 bp, Homo sapien
cagttttgccgtggtaacacttgtg

SEQ ID NO: 4859597 - DNA, 25 bp, Homo sapien
ctggcactttagttgaacccaggta

SEQ ID NO: 4859598 - DNA, 25 bp, Homo sapien
ccttcacacatttcaggaagctatc

SEQ ID NO: 4859599 - DNA, 25 bp, Homo sapien
caggctggcactttagttgaaccca

SEQ ID NO: 4859600 - DNA, 25 bp, Homo sapien
atcattttccttcacacatttcagg

SEQ ID NO: 4859601 - DNA, 25 bp, Homo sapien
ttgtagcccagaggtcctttattta

SEQ ID NO: 4859602 - DNA, 25 bp, Homo sapien
tgtagcccagaggtcctttatttat

SEQ ID NO: 4859603 - DNA, 25 bp, Homo sapien
cctggacttgcaaatacggtacatt

SEQ ID NO: 4859604 - DNA, 25 bp, Homo sapien
cttgcaaatacggtacattcttgga

SEQ ID NO: 4859605 - DNA, 25 bp, Homo sapien
gagtcatctgatcctacctctgtag

SEQ ID NO: 4859606 - DNA, 25 bp, Homo sapien
tcctacctctgtaggtgtcgttaga

SEQ ID NO: 4859607 - DNA, 25 bp, Homo sapien
tggagcacataggactgggagattc

SEQ ID NO: 4859608 - DNA, 25 bp, Homo sapien
acagttgaagccatggagcacatag

SEQ ID NO: 4859609 - DNA, 25 bp, Homo sapien
ttcacagttgaagccatggagcaca

SEQ ID NO: 4859610 - DNA, 25 bp, Homo sapien
atggagcacataggactgggagatt

SEQ ID NO: 4859611 - DNA, 25 bp, Homo sapien
ctggaaaaggcttattcggctgtaa

SEQ ID NO: 4859612 - DNA, 25 bp, Homo sapien
cattatggttgctcttgtagccgcc

SEQ ID NO: 4859613 - DNA, 25 bp, Homo sapien
tgtagccgcctttcaagccctgttt

SEQ ID NO: 4859614 - DNA, 25 bp, Homo sapien
gtaaatattccagggcttttgctca

SEQ ID NO: 4859615 - DNA, 25 bp, Homo sapien
gaagctgtggggagaatagccacta

SEQ ID NO: 4859616 - DNA, 25 bp, Homo sapien
ccaggatgtttctgctgatttctga

SEQ ID NO: 4859617 - DNA, 25 bp, Homo sapien
gatgaaaactgagcgcaggggaagc

SEQ ID NO: 4859618 - DNA, 25 bp, Homo sapien
agaatagccactagttttctgcccc

SEQ ID NO: 4859619 - DNA, 25 bp, Homo sapien
aaatccatagccttggatttactct

SEQ ID NO: 4859620 - DNA, 25 bp, Homo sapien
gatcgactctcaatctgaatcagct

SEQ ID NO: 4859621 - DNA, 25 bp, Homo sapien
gctaggctgtctgtggatcgactct

SEQ ID NO: 4859622 - DNA, 25 bp, Homo sapien
tcttggattgctctgctaggctgtc

SEQ ID NO: 4859623 - DNA, 25 bp, Homo sapien
ctgtggaaaaggccctttctctcac

SEQ ID NO: 4859624 - DNA, 25 bp, Homo sapien
cctgtggaaaaggccctttctctca

SEQ ID NO: 4859625 - DNA, 25 bp, Homo sapien
ttacagatttcctgctgttcaactg

SEQ ID NO: 4859626 - DNA, 25 bp, Homo sapien
ctaagttacagatttcctgctgttc

SEQ ID NO: 4859627 - DNA, 25 bp, Homo sapien
tcctgctgttcaactgagatgcaga

SEQ ID NO: 4859628 - DNA, 25 bp, Homo sapien
ttcctgctgttcaactgagatgcag

SEQ ID NO: 4859629 - DNA, 25 bp, Homo sapien
tgccatgtgggtaaccacaccgctt

SEQ ID NO: 4859630 - DNA, 25 bp, Homo sapien
tgtgggtaaccacaccgcttaatta

SEQ ID NO: 4859631 - DNA, 25 bp, Homo sapien
taaccacaccgcttaattattctgt

SEQ ID NO: 4859632 - DNA, 25 bp, Homo sapien
tcagtgccatgtgggtaaccacacc

SEQ ID NO: 4859633 - DNA, 25 bp, Homo sapien
ctttagactcagcaccgttccccat

SEQ ID NO: 4859634 - DNA, 25 bp, Homo sapien
cagtctctttagactcagcaccgtt

SEQ ID NO: 4859635 - DNA, 25 bp, Homo sapien
tgcagtctctttagactcagcaccg

SEQ ID NO: 4859636 - DNA, 25 bp, Homo sapien
gtctctttagactcagcaccgttcc

SEQ ID NO: 4859637 - DNA, 25 bp, Homo sapien
ttcaggatcctcgaaaatctctttg

SEQ ID NO: 4859638 - DNA, 25 bp, Homo sapien
cggtttggccattgtgatggagttt

SEQ ID NO: 4859639 - DNA, 25 bp, Homo sapien
gaacttttggcatttggcataacgg

SEQ ID NO: 4859640 - DNA, 25 bp, Homo sapien
gccattgtgatggagttttgtggaa

SEQ ID NO: 4859641 - DNA, 25 bp, Homo sapien
caggaggcagggctggcagctgcac

SEQ ID NO: 4859642 - DNA, 25 bp, Homo sapien
tgaacaggaggcagggctggcagct

SEQ ID NO: 4859643 - DNA, 25 bp, Homo sapien
tcaagagccagcatgaacaggaggc

SEQ ID NO: 4859644 - DNA, 25 bp, Homo sapien
aacaggaggcagggctggcagctgc

SEQ ID NO: 4859645 - DNA, 25 bp, Homo sapien
tgtgatgcggaggttcaggcctcta

SEQ ID NO: 4859646 - DNA, 25 bp, Homo sapien
atagtacccaatagaaagttttcag

SEQ ID NO: 4859647 - DNA, 25 bp, Homo sapien
taatgatgtagtataggcagagtga

SEQ ID NO: 4859648 - DNA, 25 bp, Homo sapien
tttccacagggtctcagagtaatga

SEQ ID NO: 4859649 - DNA, 25 bp, Homo sapien
ccaaaattttgccactgcactcctg

SEQ ID NO: 4859650 - DNA, 25 bp, Homo sapien
tcctgcctggcaacagagctagact

SEQ ID NO: 4859651 - DNA, 25 bp, Homo sapien
ctgcctggcaacagagctagactct

SEQ ID NO: 4859652 - DNA, 25 bp, Homo sapien
actcctgcctggcaacagagctaga

SEQ ID NO: 4859653 - DNA, 25 bp, Homo sapien
gacattttagttgacttggagttgc

SEQ ID NO: 4859654 - DNA, 25 bp, Homo sapien
cattttagttgacttggagttgctc

SEQ ID NO: 4859655 - DNA, 25 bp, Homo sapien
gaagacattttagttgacttggagt

SEQ ID NO: 4859656 - DNA, 25 bp, Homo sapien
ttagttgacttggagttgctcattt

SEQ ID NO: 4859657 - DNA, 25 bp, Homo sapien
caatctttggcgaaatcttcagcaa

SEQ ID NO: 4859658 - DNA, 25 bp, Homo sapien
tggtcttctttctcgcagtgattgc

SEQ ID NO: 4859659 - DNA, 25 bp, Homo sapien
gtattgtgccaccattttccctctg

SEQ ID NO: 4859660 - DNA, 25 bp, Homo sapien
cgcagtgattgcttcataactcatt

SEQ ID NO: 4859661 - DNA, 25 bp, Homo sapien
tcaaatctattctgcccggagttca

SEQ ID NO: 4859662 - DNA, 25 bp, Homo sapien
gccagagaggctgcatccgaggtca

SEQ ID NO: 4859663 - DNA, 25 bp, Homo sapien
acttcacaggagtccaagattctgg

SEQ ID NO: 4859664 - DNA, 25 bp, Homo sapien
tggaatcctttcaggagcactgcaa

SEQ ID NO: 4859665 - DNA, 25 bp, Homo sapien
ggcctgagaagatgattgccctgca

SEQ ID NO: 4859666 - DNA, 25 bp, Homo sapien
gacagccaaagataactaaagtgca

SEQ ID NO: 4859667 - DNA, 25 bp, Homo sapien
cagtttctggtcaggaacagaatca

SEQ ID NO: 4859668 - DNA, 25 bp, Homo sapien
tggtaagctctatgcctcttggtgc

SEQ ID NO: 4859669 - DNA, 25 bp, Homo sapien
gcccagctcaagattcatgaacctg

SEQ ID NO: 4859670 - DNA, 25 bp, Homo sapien
agcccagctcaagattcatgaacct

SEQ ID NO: 4859671 - DNA, 25 bp, Homo sapien
tcttgagtgccaccagacacgtgaa

SEQ ID NO: 4859672 - DNA, 25 bp, Homo sapien
cacgtgaatgtctgtgcaagaagcc

SEQ ID NO: 4859673 - DNA, 25 bp, Homo sapien
cttgcggctcaataaaaggtttggg

SEQ ID NO: 4859674 - DNA, 25 bp, Homo sapien
tgtttcctccggtcgccttgcggct

SEQ ID NO: 4859675 - DNA, 25 bp, Homo sapien
atgtctcccgccaatgtgctacctg

SEQ ID NO: 4859676 - DNA, 25 bp, Homo sapien
tcactacccacgctcaacatcaagt

SEQ ID NO: 4859677 - DNA, 25 bp, Homo sapien
tggtttgaaaggcaaccttcccagc

SEQ ID NO: 4859678 - DNA, 25 bp, Homo sapien
ttcaaaaatccatgtctcccgccaa

SEQ ID NO: 4859679 - DNA, 25 bp, Homo sapien
gcggatgccggagtcgcccgcagtc

SEQ ID NO: 4859680 - DNA, 25 bp, Homo sapien
cgcgcagttcccagccctcgcgccg

SEQ ID NO: 4859681 - DNA, 25 bp, Homo sapien
agaaagggcgcgtccccatagcttc

SEQ ID NO: 4859682 - DNA, 25 bp, Homo sapien
ccatagcttcccacggcgcggcgac

SEQ ID NO: 4859683 - DNA, 25 bp, Homo sapien
cagggagctccgagccgccgctgaa

SEQ ID NO: 4859684 - DNA, 25 bp, Homo sapien
agggagctccgagccgccgctgaat

SEQ ID NO: 4859685 - DNA, 25 bp, Homo sapien
ggagctccgagccgccgctgaatgg

SEQ ID NO: 4859686 - DNA, 25 bp, Homo sapien
gctccgagccgccgctgaatgggca

SEQ ID NO: 4859687 - DNA, 25 bp, Homo sapien
gagggtcccgagtcgaatgggtctc

SEQ ID NO: 4859688 - DNA, 25 bp, Homo sapien
gcggctcttcttcacgctccgggag

SEQ ID NO: 4859689 - DNA, 25 bp, Homo sapien
aatgggtctcgggagtcttcagaga

SEQ ID NO: 4859690 - DNA, 25 bp, Homo sapien
gagcccgggaaagggtcggcgatga

SEQ ID NO: 4859691 - DNA, 25 bp, Homo sapien
ctgcggtggccgccgctctccccat

SEQ ID NO: 4859692 - DNA, 25 bp, Homo sapien
tgccgcccagaagcacagccccagc

SEQ ID NO: 4859693 - DNA, 25 bp, Homo sapien
acgggagccagcggcgcgcccctcc

SEQ ID NO: 4859694 - DNA, 25 bp, Homo sapien
acagccccagccacgggagccagcg

SEQ ID NO: 4859695 - DNA, 25 bp, Homo sapien
gtccctgccgcccagaagcacagcc

SEQ ID NO: 4859696 - DNA, 25 bp, Homo sapien
aggtgcagggcgcaagttgggaagc

SEQ ID NO: 4859697 - DNA, 25 bp, Homo sapien
ggcgcaagttgggaagccaacgcca

SEQ ID NO: 4859698 - DNA, 25 bp, Homo sapien
gttgggaagccaacgccatcggtgc

SEQ ID NO: 4859699 - DNA, 25 bp, Homo sapien
aagccaacgccatcggtgcaggtcc

SEQ ID NO: 4859700 - DNA, 25 bp, Homo sapien
gaactctccgacatcgctatgggcg

SEQ ID NO: 4859701 - DNA, 25 bp, Homo sapien
ccacctgtaggattgcggcagatcg

SEQ ID NO: 4859702 - DNA, 25 bp, Homo sapien
gctatgggcgctaactcatgaccaa

SEQ ID NO: 4859703 - DNA, 25 bp, Homo sapien
gattggagtgaagaccgggctactc

SEQ ID NO: 4859704 - DNA, 25 bp, Homo sapien
ggcaaatcatttaacggtatcacat

SEQ ID NO: 4859705 - DNA, 25 bp, Homo sapien
gccggactgcttttaacacgccata

SEQ ID NO: 4859706 - DNA, 25 bp, Homo sapien
tcaggagaccgaacagagcaggtga

SEQ ID NO: 4859707 - DNA, 25 bp, Homo sapien
tcccctggcaagtgtaaggcaaatc

SEQ ID NO: 4859708 - DNA, 25 bp, Homo sapien
gcagcctctggtgttaacaatctat

SEQ ID NO: 4859709 - DNA, 25 bp, Homo sapien
caaatagtctcgtgggatctgccgt

SEQ ID NO: 4859710 - DNA, 25 bp, Homo sapien
gatctgccgttccatggatggcgta

SEQ ID NO: 4859711 - DNA, 25 bp, Homo sapien
agcagcaggagtacccaaaacagca

SEQ ID NO: 4859712 - DNA, 25 bp, Homo sapien
tataaatgaatctagccatctgcct

SEQ ID NO: 4859713 - DNA, 25 bp, Homo sapien
taaatgaatctagccatctgcctca

SEQ ID NO: 4859714 - DNA, 25 bp, Homo sapien
aaatgaatctagccatctgcctcac

SEQ ID NO: 4859715 - DNA, 25 bp, Homo sapien
ctataaatgaatctagccatctgcc

SEQ ID NO: 4859716 - DNA, 25 bp, Homo sapien
tacaagctgctagtaatcactgcag

SEQ ID NO: 4859717 - DNA, 25 bp, Homo sapien
actgacaaaacctgtgaacatcctg

SEQ ID NO: 4859718 - DNA, 25 bp, Homo sapien
ctttggaaacctcccgatacaagct

SEQ ID NO: 4859719 - DNA, 25 bp, Homo sapien
tcacactgacaaaacctgtgaacat

SEQ ID NO: 4859720 - DNA, 25 bp, Homo sapien
ccattggtagttaggaacagggtag

SEQ ID NO: 4859721 - DNA, 25 bp, Homo sapien
ttaacagtagacagtgactagggcc

SEQ ID NO: 4859722 - DNA, 25 bp, Homo sapien
taaagaaccattggcgcctgtagtc

SEQ ID NO: 4859723 - DNA, 25 bp, Homo sapien
gaaagcttgctttagatgtaatgcc

SEQ ID NO: 4859724 - DNA, 25 bp, Homo sapien
ttgaggagatggaaatcaactccct

SEQ ID NO: 4859725 - DNA, 25 bp, Homo sapien
cacttgaaagtgtataccattagac

SEQ ID NO: 4859726 - DNA, 25 bp, Homo sapien
tcttcaaggtccaagtaatctactc

SEQ ID NO: 4859727 - DNA, 25 bp, Homo sapien
gactggaaatcactaggcctggaaa

SEQ ID NO: 4859728 - DNA, 25 bp, Homo sapien
taatagttcagccatttgatcatgg

SEQ ID NO: 4859729 - DNA, 25 bp, Homo sapien
aaagagacagtgatgcaaaaacata

SEQ ID NO: 4859730 - DNA, 25 bp, Homo sapien
gacactctggaataagctcaagaaa

SEQ ID NO: 4859731 - DNA, 25 bp, Homo sapien
tcatggaatggatattaaaagacac

SEQ ID NO: 4859732 - DNA, 25 bp, Homo sapien
ttctagcatcttcatattgctttac

SEQ ID NO: 4859733 - DNA, 25 bp, Homo sapien
catattgctttacacttctggacag

SEQ ID NO: 4859734 - DNA, 25 bp, Homo sapien
gtgtctcttcaacttttctagcatc

SEQ ID NO: 4859735 - DNA, 25 bp, Homo sapien
tatatgtgtctcttcaacttttcta

SEQ ID NO: 4859736 - DNA, 25 bp, Homo sapien
tctgaagagcttgctactggtggcc

SEQ ID NO: 4859737 - DNA, 25 bp, Homo sapien
cataccaggagtagaaaaaccagcc

SEQ ID NO: 4859738 - DNA, 25 bp, Homo sapien
tatcacataaaactcccgtcagggc

SEQ ID NO: 4859739 - DNA, 25 bp, Homo sapien
cattgcttagaggtgaggctatacc

SEQ ID NO: 4859740 - DNA, 25 bp, Homo sapien
tggattctatttatgccacatgcac

SEQ ID NO: 4859741 - DNA, 25 bp, Homo sapien
tctatttatgccacatgcacattgt

SEQ ID NO: 4859742 - DNA, 25 bp, Homo sapien
tatgccacatgcacattgttcatca

SEQ ID NO: 4859743 - DNA, 25 bp, Homo sapien
gccacatgcacattgttcatcatta

SEQ ID NO: 4859744 - DNA, 25 bp, Homo sapien
gatgttgttatccaagtctgccacc

SEQ ID NO: 4859745 - DNA, 25 bp, Homo sapien
cagaggtgctgaacttcatccaata

SEQ ID NO: 4859746 - DNA, 25 bp, Homo sapien
ttgtcatcaatccacaggccgtcgt

SEQ ID NO: 4859747 - DNA, 25 bp, Homo sapien
aggccgtcgtcttctaggctggaca

SEQ ID NO: 4859748 - DNA, 25 bp, Homo sapien
tcaggattggactaggcaaaactct

SEQ ID NO: 4859749 - DNA, 25 bp, Homo sapien
ctatggaggctagtgagacctggtc

SEQ ID NO: 4859750 - DNA, 25 bp, Homo sapien
tcttgcatacagacctacatgggag

SEQ ID NO: 4859751 - DNA, 25 bp, Homo sapien
tacagcctctgtataagagcactgg

SEQ ID NO: 4859752 - DNA, 25 bp, Homo sapien
gtgctagatgaagactggctttcac

SEQ ID NO: 4859753 - DNA, 25 bp, Homo sapien
gggaccagacatcagaactcagtgc

SEQ ID NO: 4859754 - DNA, 25 bp, Homo sapien
cagacatcagaactcagtgctagat

SEQ ID NO: 4859755 - DNA, 25 bp, Homo sapien
tgctagatgaagactggctttcacc

SEQ ID NO: 4859756 - DNA, 25 bp, Homo sapien
cccagtgcatctgggcggcacagca

SEQ ID NO: 4859757 - DNA, 25 bp, Homo sapien
cagaacttagttggattacctctcc

SEQ ID NO: 4859758 - DNA, 25 bp, Homo sapien
gaagatttcatgtgagcgccagaac

SEQ ID NO: 4859759 - DNA, 25 bp, Homo sapien
cactgctaggcttgggcaggaccag

SEQ ID NO: 4859760 - DNA, 25 bp, Homo sapien
gacatgcagttgcttctctcccaat

SEQ ID NO: 4859761 - DNA, 25 bp, Homo sapien
tcctggtttggggaagacataatga

SEQ ID NO: 4859762 - DNA, 25 bp, Homo sapien
ctcctggtttggggaagacataatg

SEQ ID NO: 4859763 - DNA, 25 bp, Homo sapien
cctcctggtttggggaagacataat

SEQ ID NO: 4859764 - DNA, 25 bp, Homo sapien
cacaaggtggacaaggccagaggat

SEQ ID NO: 4859765 - DNA, 25 bp, Homo sapien
tctagggtagagtagaacgccaagg

SEQ ID NO: 4859766 - DNA, 25 bp, Homo sapien
gacttgggcttacctactggtctag

SEQ ID NO: 4859767 - DNA, 25 bp, Homo sapien
gccctatagacatgtgtggacttgg

SEQ ID NO: 4859768 - DNA, 25 bp, Homo sapien
gctttctattgacttttagggttca

SEQ ID NO: 4859769 - DNA, 25 bp, Homo sapien
ggactcaaatgattagccgcctcag

SEQ ID NO: 4859770 - DNA, 25 bp, Homo sapien
tcagttattatatcctttatcacta

SEQ ID NO: 4859771 - DNA, 25 bp, Homo sapien
tggactcaaatgattagccgcctca

SEQ ID NO: 4859772 - DNA, 25 bp, Homo sapien
ccataggcccatggatgtgctgaat

SEQ ID NO: 4859773 - DNA, 25 bp, Homo sapien
ctgaattactaagcaagtgatggtc

SEQ ID NO: 4859774 - DNA, 25 bp, Homo sapien
gatggtcagacaccaaggatgtcat

SEQ ID NO: 4859775 - DNA, 25 bp, Homo sapien
ggcccatggatgtgctgaattacta

SEQ ID NO: 4859776 - DNA, 25 bp, Homo sapien
gagtaaaatcctcacataatagata

SEQ ID NO: 4859777 - DNA, 25 bp, Homo sapien
tagataaaggtaattagagatgcag

SEQ ID NO: 4859778 - DNA, 25 bp, Homo sapien
gagatgcagaacaaattctttttaa

SEQ ID NO: 4859779 - DNA, 25 bp, Homo sapien
gaatgcaattcggacactttacttc

SEQ ID NO: 4859780 - DNA, 25 bp, Homo sapien
caggacttgcatattcagagcagca

SEQ ID NO: 4859781 - DNA, 25 bp, Homo sapien
ctactggtgtgcagagtccagatca

SEQ ID NO: 4859782 - DNA, 25 bp, Homo sapien
tgcagagtccagatcattgggacag

SEQ ID NO: 4859783 - DNA, 25 bp, Homo sapien
cattgggacagagttctacacattc

SEQ ID NO: 4859784 - DNA, 25 bp, Homo sapien
tagtggtccctaatattgctaaccc

SEQ ID NO: 4859785 - DNA, 25 bp, Homo sapien
gctaacccatcggacagcatatttc

SEQ ID NO: 4859786 - DNA, 25 bp, Homo sapien
tcatggttgctttcgacgattaaat

SEQ ID NO: 4859787 - DNA, 25 bp, Homo sapien
aataaatgtcctctagtggtcccta

SEQ ID NO: 4859788 - DNA, 25 bp, Homo sapien
gcccttaaagaatcttggctgttct

SEQ ID NO: 4859789 - DNA, 25 bp, Homo sapien
taaaatgcggtctgaaaactgtagc

SEQ ID NO: 4859790 - DNA, 25 bp, Homo sapien
ctgtagcaaaccaatagtgtggagc

SEQ ID NO: 4859791 - DNA, 25 bp, Homo sapien
tctaacaagtagaggcatacattta

SEQ ID NO: 4859792 - DNA, 25 bp, Homo sapien
tcatcggcatgagatgggtcaacaa

SEQ ID NO: 4859793 - DNA, 25 bp, Homo sapien
caccagtggtatgcacgggtcatcg

SEQ ID NO: 4859794 - DNA, 25 bp, Homo sapien
tctcttaaaccttgaaatgtcgaag

SEQ ID NO: 4859795 - DNA, 25 bp, Homo sapien
caaacatgcaatgtgggaagcaggc

SEQ ID NO: 4859796 - DNA, 25 bp, Homo sapien
gagtagtgtatctaacagctgccac

SEQ ID NO: 4859797 - DNA, 25 bp, Homo sapien
cacctcaaacatccgaatctctggg

SEQ ID NO: 4859798 - DNA, 25 bp, Homo sapien
caactttcccaatcacatgggccaa

SEQ ID NO: 4859799 - DNA, 25 bp, Homo sapien
tctgggttcacgcttctgataaatg

SEQ ID NO: 4859800 - DNA, 25 bp, Homo sapien
gctctatagcatacccgatcatggc

SEQ ID NO: 4859801 - DNA, 25 bp, Homo sapien
tagctctatagcatacccgatcatg

SEQ ID NO: 4859802 - DNA, 25 bp, Homo sapien
ggtttagctctatagcatacccgat

SEQ ID NO: 4859803 - DNA, 25 bp, Homo sapien
aactggtttagctctatagcatacc

SEQ ID NO: 4859804 - DNA, 25 bp, Homo sapien
gccgggtctgatgtgtacagtcgca

SEQ ID NO: 4859805 - DNA, 25 bp, Homo sapien
gagatcatggaattgtactgccaaa

SEQ ID NO: 4859806 - DNA, 25 bp, Homo sapien
tagcccagaaggtcagccgggtctg

SEQ ID NO: 4859807 - DNA, 25 bp, Homo sapien
tacagtcgcatcttactacccggca

SEQ ID NO: 4859808 - DNA, 25 bp, Homo sapien
caacaatgttgtgatgaattacctc

SEQ ID NO: 4859809 - DNA, 25 bp, Homo sapien
ttttatccaccgacacgacaacagt

SEQ ID NO: 4859810 - DNA, 25 bp, Homo sapien
actgctctgcatttaattggaaccc

SEQ ID NO: 4859811 - DNA, 25 bp, Homo sapien
gcttttgccaatttggcgggtgaca

SEQ ID NO: 4859812 - DNA, 25 bp, Homo sapien
gagcccacatcttccataactctga

SEQ ID NO: 4859813 - DNA, 25 bp, Homo sapien
tgatttaatgaagttcgcaaaagct

SEQ ID NO: 4859814 - DNA, 25 bp, Homo sapien
aatatgccgagctgtgcatcaagcc

SEQ ID NO: 4859815 - DNA, 25 bp, Homo sapien
tccagagaatatgccgagctgtgca

SEQ ID NO: 4859816 - DNA, 25 bp, Homo sapien
gattgtgcctcctaatacaatgcag

SEQ ID NO: 4859817 - DNA, 25 bp, Homo sapien
gttcttaaagcacaaccatatgata

SEQ ID NO: 4859818 - DNA, 25 bp, Homo sapien
cagagaaggccacaacatcatatct

SEQ ID NO: 4859819 - DNA, 25 bp, Homo sapien
caaatgacttagtttagcatcacca

SEQ ID NO: 4859820 - DNA, 25 bp, Homo sapien
cattttctagtcctgttcactgaga

SEQ ID NO: 4859821 - DNA, 25 bp, Homo sapien
gaaggcctgaaaccaatggtactcc

SEQ ID NO: 4859822 - DNA, 25 bp, Homo sapien
tagaggtactgcgataaacttgtgg

SEQ ID NO: 4859823 - DNA, 25 bp, Homo sapien
gcctggaatagcttgtggtatcata

SEQ ID NO: 4859824 - DNA, 25 bp, Homo sapien
cgtctctcctactgctgaagataga

SEQ ID NO: 4859825 - DNA, 25 bp, Homo sapien
gacactaatgagattggctacacct

SEQ ID NO: 4859826 - DNA, 25 bp, Homo sapien
tgcatagcatgatccacactgaagt

SEQ ID NO: 4859827 - DNA, 25 bp, Homo sapien
tacacctaggagataatgggaatgg

SEQ ID NO: 4859828 - DNA, 25 bp, Homo sapien
gataaaagcccaactgcgggaggag

SEQ ID NO: 4859829 - DNA, 25 bp, Homo sapien
ataaaagcccaactgcgggaggagg

SEQ ID NO: 4859830 - DNA, 25 bp, Homo sapien
tcaggtcgatattctagtgccacag

SEQ ID NO: 4859831 - DNA, 25 bp, Homo sapien
ggacggtccaggcaagtcagagaaa

SEQ ID NO: 4859832 - DNA, 25 bp, Homo sapien
gcaccggtggaatttagtgcaggac

SEQ ID NO: 4859833 - DNA, 25 bp, Homo sapien
tagggataggtccataggaacacag

SEQ ID NO: 4859834 - DNA, 25 bp, Homo sapien
gaggcaccggctctgctaagtcaag

SEQ ID NO: 4859835 - DNA, 25 bp, Homo sapien
tagttaagacacataatcacggccc

SEQ ID NO: 4859836 - DNA, 25 bp, Homo sapien
tgttaacacagccagtgtagccggc

SEQ ID NO: 4859837 - DNA, 25 bp, Homo sapien
taatggcagtgcttcagactaggga

SEQ ID NO: 4859838 - DNA, 25 bp, Homo sapien
tgttgaacatgctccaagtatggtg

SEQ ID NO: 4859839 - DNA, 25 bp, Homo sapien
tttatagccacaacactgcatggag

SEQ ID NO: 4859840 - DNA, 25 bp, Homo sapien
aaccatactatgtacttgcccgtga

SEQ ID NO: 4859841 - DNA, 25 bp, Homo sapien
gcccgtgatctgtttgaccatataa

SEQ ID NO: 4859842 - DNA, 25 bp, Homo sapien
catttttcctgatgtgcgttaagac

SEQ ID NO: 4859843 - DNA, 25 bp, Homo sapien
taaacaagcagcgaaacgtcagcag

SEQ ID NO: 4859844 - DNA, 25 bp, Homo sapien
gacaaaatggtacacacagaaagga

SEQ ID NO: 4859845 - DNA, 25 bp, Homo sapien
ttgtggtagcattaaggcattcaac

SEQ ID NO: 4859846 - DNA, 25 bp, Homo sapien
aaccctgttggataagtccttgctg

SEQ ID NO: 4859847 - DNA, 25 bp, Homo sapien
cttgctggtcaagggttcaacacca

SEQ ID NO: 4859848 - DNA, 25 bp, Homo sapien
tagccgccaaacatcagcatagggt

SEQ ID NO: 4859849 - DNA, 25 bp, Homo sapien
catagggttcttatgctgcacagaa

SEQ ID NO: 4859850 - DNA, 25 bp, Homo sapien
cagactcaatgctacagacttccaa

SEQ ID NO: 4859851 - DNA, 25 bp, Homo sapien
cagccaagaggcctgcaaggagtga

SEQ ID NO: 4859852 - DNA, 25 bp, Homo sapien
tctcggtcctagaaaatgctactgg

SEQ ID NO: 4859853 - DNA, 25 bp, Homo sapien
tgatggagatagtgcacagatggtc

SEQ ID NO: 4859854 - DNA, 25 bp, Homo sapien
tgcaacactagtgcaaacaatgggg

SEQ ID NO: 4859855 - DNA, 25 bp, Homo sapien
gcaacactagtgcaaacaatgggga

SEQ ID NO: 4859856 - DNA, 25 bp, Homo sapien
ctgcaacactagtgcaaacaatggg

SEQ ID NO: 4859857 - DNA, 25 bp, Homo sapien
ggaaaaccaccctgatggactcatg

SEQ ID NO: 4859858 - DNA, 25 bp, Homo sapien
gctagggctgacataacatgatacc

SEQ ID NO: 4859859 - DNA, 25 bp, Homo sapien
tgttttgtagaagtagacagcacca

SEQ ID NO: 4859860 - DNA, 25 bp, Homo sapien
gacactgggtgttagaacttcaaca

SEQ ID NO: 4859861 - DNA, 25 bp, Homo sapien
gattattagctgtagagtaataaca

SEQ ID NO: 4859862 - DNA, 25 bp, Homo sapien
gcactgaaatatagactcacatttg

SEQ ID NO: 4859863 - DNA, 25 bp, Homo sapien
tttgacctaaacttggagctcattc

SEQ ID NO: 4859864 - DNA, 25 bp, Homo sapien
ataatggcactgaaatatagactca

SEQ ID NO: 4859865 - DNA, 25 bp, Homo sapien
catccatggcaagtacggagtcctc

SEQ ID NO: 4859866 - DNA, 25 bp, Homo sapien
aaactggaaggtcttagaagctgcc

SEQ ID NO: 4859867 - DNA, 25 bp, Homo sapien
tctcccggtgtatccaaatattggt

SEQ ID NO: 4859868 - DNA, 25 bp, Homo sapien
cctgccagggtatacgaatgatttg

SEQ ID NO: 4859869 - DNA, 25 bp, Homo sapien
gaaccctcagtctaagtcagcccta

SEQ ID NO: 4859870 - DNA, 25 bp, Homo sapien
gattgcacctgaaggattaccttgg

SEQ ID NO: 4859871 - DNA, 25 bp, Homo sapien
taaacattccccactatgatgaggt

SEQ ID NO: 4859872 - DNA, 25 bp, Homo sapien
caccacgtaaagttgcctgaaagaa

SEQ ID NO: 4859873 - DNA, 25 bp, Homo sapien
gagccggcaacataatccttctcat

SEQ ID NO: 4859874 - DNA, 25 bp, Homo sapien
cgacaggtggaaaattgttctgcca

SEQ ID NO: 4859875 - DNA, 25 bp, Homo sapien
ggatccacagtataaactttcagag

SEQ ID NO: 4859876 - DNA, 25 bp, Homo sapien
catcaaatatttgggcgacaggtgg

SEQ ID NO: 4859877 - DNA, 25 bp, Homo sapien
tagccaggccactaacttgacttgg

SEQ ID NO: 4859878 - DNA, 25 bp, Homo sapien
tctttgataagaaacctggagtcca

SEQ ID NO: 4859879 - DNA, 25 bp, Homo sapien
ggaagaactctcttgcatggcacat

SEQ ID NO: 4859880 - DNA, 25 bp, Homo sapien
tgctgcgaactttgtagagccagtg

SEQ ID NO: 4859881 - DNA, 25 bp, Homo sapien
ccagcatccagccaaggaggcgctg

SEQ ID NO: 4859882 - DNA, 25 bp, Homo sapien
ttccagcatccagccaaggaggcgc

SEQ ID NO: 4859883 - DNA, 25 bp, Homo sapien
gtggtggcttcagcggaggcaggcc

SEQ ID NO: 4859884 - DNA, 25 bp, Homo sapien
gctggtggtggcttcagcggaggca

SEQ ID NO: 4859885 - DNA, 25 bp, Homo sapien
ccccagataacatattacagctttt

SEQ ID NO: 4859886 - DNA, 25 bp, Homo sapien
cccccagataacatattacagcttt

SEQ ID NO: 4859887 - DNA, 25 bp, Homo sapien
ccagataacatattacagctttttt

SEQ ID NO: 4859888 - DNA, 25 bp, Homo sapien
cacccccagataacatattacagct

SEQ ID NO: 4859889 - DNA, 25 bp, Homo sapien
gagctttaactaacaccaggatcat

SEQ ID NO: 4859890 - DNA, 25 bp, Homo sapien
caacaggaacccggaagtcccagca

SEQ ID NO: 4859891 - DNA, 25 bp, Homo sapien
aactctccgaagagagtctgggaaa

SEQ ID NO: 4859892 - DNA, 25 bp, Homo sapien
catcagatccaactctccgaagaga

SEQ ID NO: 4859893 - DNA, 25 bp, Homo sapien
tcagatccaactctccgaagagagt

SEQ ID NO: 4859894 - DNA, 25 bp, Homo sapien
atccaactctccgaagagagtctgg

SEQ ID NO: 4859895 - DNA, 25 bp, Homo sapien
cacctgagtgcaatagggttgctct

SEQ ID NO: 4859896 - DNA, 25 bp, Homo sapien
gctggcctcgctttgcacctgagtg

SEQ ID NO: 4859897 - DNA, 25 bp, Homo sapien
tgaagaatatctgcatggctggcct

SEQ ID NO: 4859898 - DNA, 25 bp, Homo sapien
agagacgtgctcgttctgatggacc

SEQ ID NO: 4859899 - DNA, 25 bp, Homo sapien
tgcttctgactgctgcacgctccta

SEQ ID NO: 4859900 - DNA, 25 bp, Homo sapien
gctgcttctgactgctgcacgctcc

SEQ ID NO: 4859901 - DNA, 25 bp, Homo sapien
cagctgcttctgactgctgcacgct

SEQ ID NO: 4859902 - DNA, 25 bp, Homo sapien
ctaaagagtcaccacagctgcttct

SEQ ID NO: 4859903 - DNA, 25 bp, Homo sapien
taaattggctataggaaacaaggcc

SEQ ID NO: 4859904 - DNA, 25 bp, Homo sapien
aaacaaggccttcatactctaccag

SEQ ID NO: 4859905 - DNA, 25 bp, Homo sapien
ttttatccccagagagtgactccag

SEQ ID NO: 4859906 - DNA, 25 bp, Homo sapien
gagattatttctgtgctatgtggcc

SEQ ID NO: 4859907 - DNA, 25 bp, Homo sapien
caatgttgattgctgggattctcca

SEQ ID NO: 4859908 - DNA, 25 bp, Homo sapien
tccaagttgttctaagtgcccctac

SEQ ID NO: 4859909 - DNA, 25 bp, Homo sapien
cttgacttagtgctgtttgtctttc

SEQ ID NO: 4859910 - DNA, 25 bp, Homo sapien
tcctcatagattttacacaatgttg

SEQ ID NO: 4859911 - DNA, 25 bp, Homo sapien
cctgttgcctagtaacattgatgaa

SEQ ID NO: 4859912 - DNA, 25 bp, Homo sapien
ttggaggtacccaggtggctccacg

SEQ ID NO: 4859913 - DNA, 25 bp, Homo sapien
gcccatggaagtcctccacctgttg

SEQ ID NO: 4859914 - DNA, 25 bp, Homo sapien
acactggcaccaatagtcctcgggc

SEQ ID NO: 4859915 - DNA, 25 bp, Homo sapien
cacaggtatgtgtaatgccttccta

SEQ ID NO: 4859916 - DNA, 25 bp, Homo sapien
gagcaccaagcagtatcccacatgt

SEQ ID NO: 4859917 - DNA, 25 bp, Homo sapien
tgattaaccccatgccatctacgga

SEQ ID NO: 4859918 - DNA, 25 bp, Homo sapien
taaaaagttcctcgacacaggtatg

SEQ ID NO: 4859919 - DNA, 25 bp, Homo sapien
gacagatgtctactcacctaactac

SEQ ID NO: 4859920 - DNA, 25 bp, Homo sapien
tgttcaccccttgaccatttacaga

SEQ ID NO: 4859921 - DNA, 25 bp, Homo sapien
taactaccacctacttgccagtgac

SEQ ID NO: 4859922 - DNA, 25 bp, Homo sapien
agcagtccattgaatattccacagg

SEQ ID NO: 4859923 - DNA, 25 bp, Homo sapien
tctcttctcttgatgccaggcactg

SEQ ID NO: 4859924 - DNA, 25 bp, Homo sapien
acagcagggtgtttggctgatgcaa

SEQ ID NO: 4859925 - DNA, 25 bp, Homo sapien
ttggacggacgccactgaatcaccc

SEQ ID NO: 4859926 - DNA, 25 bp, Homo sapien
gaatcaccctacaactctccatgca

SEQ ID NO: 4859927 - DNA, 25 bp, Homo sapien
tctggtgggcggcagtgcagtacaa

SEQ ID NO: 4859928 - DNA, 25 bp, Homo sapien
ggcggcagtgcagtacaatcatgcc

SEQ ID NO: 4859929 - DNA, 25 bp, Homo sapien
gtgggcggcagtgcagtacaatcat

SEQ ID NO: 4859930 - DNA, 25 bp, Homo sapien
tccctctggtgggcggcagtgcagt

SEQ ID NO: 4859931 - DNA, 25 bp, Homo sapien
caagggccttgtgcaaacacagaag

SEQ ID NO: 4859932 - DNA, 25 bp, Homo sapien
gacaatttcttcaccgtgtttagca

SEQ ID NO: 4859933 - DNA, 25 bp, Homo sapien
gaatgacacctgcatgattcaaggt

SEQ ID NO: 4859934 - DNA, 25 bp, Homo sapien
gaagacaggtcaaatcctacccagg

SEQ ID NO: 4859935 - DNA, 25 bp, Homo sapien
gctcagatttgttccataagccaat

SEQ ID NO: 4859936 - DNA, 25 bp, Homo sapien
tacagctcagatttgttccataagc

SEQ ID NO: 4859937 - DNA, 25 bp, Homo sapien
cagctcagatttgttccataagcca

SEQ ID NO: 4859938 - DNA, 25 bp, Homo sapien
ttacagctcagatttgttccataag

SEQ ID NO: 4859939 - DNA, 25 bp, Homo sapien
tgacctttcctatgggctttttcat

SEQ ID NO: 4859940 - DNA, 25 bp, Homo sapien
gtgaaggaaggataacagatcagag

SEQ ID NO: 4859941 - DNA, 25 bp, Homo sapien
actgggtcttctgacctttcctatg

SEQ ID NO: 4859942 - DNA, 25 bp, Homo sapien
gaaggataacagatcagaggcctgt

SEQ ID NO: 4859943 - DNA, 25 bp, Homo sapien
ggtagaagttctagaaaacattcaa

SEQ ID NO: 4859944 - DNA, 25 bp, Homo sapien
caagaagcaaaaaacattgtgactc

SEQ ID NO: 4859945 - DNA, 25 bp, Homo sapien
aggtagaagttctagaaaacattca

SEQ ID NO: 4859946 - DNA, 25 bp, Homo sapien
aacattcaagaagcaaaaaacattg

SEQ ID NO: 4859947 - DNA, 25 bp, Homo sapien
taacagcgataaccattttacagcc

SEQ ID NO: 4859948 - DNA, 25 bp, Homo sapien
ggctgtattaacagcgataaccatt

SEQ ID NO: 4859949 - DNA, 25 bp, Homo sapien
taaccattttacagccaacatcagt

SEQ ID NO: 4859950 - DNA, 25 bp, Homo sapien
gccaacatcagtaaatcagggttta

SEQ ID NO: 4859951 - DNA, 25 bp, Homo sapien
cctcaaagcaaagtttatgtggact

SEQ ID NO: 4859952 - DNA, 25 bp, Homo sapien
caaagcaaagtttatgtggactatt

SEQ ID NO: 4859953 - DNA, 25 bp, Homo sapien
cattgtcagtctcctcaaagcaaag

SEQ ID NO: 4859954 - DNA, 25 bp, Homo sapien
ctcaaagcaaagtttatgtggacta

SEQ ID NO: 4859955 - DNA, 25 bp, Homo sapien
ttatgtggcggcatcccagactgct

SEQ ID NO: 4859956 - DNA, 25 bp, Homo sapien
aaagactgtttattgccgctaatgt

SEQ ID NO: 4859957 - DNA, 25 bp, Homo sapien
gctggccttcggatctttcctccaa

SEQ ID NO: 4859958 - DNA, 25 bp, Homo sapien
aatgcttactaccaactgactgctg

SEQ ID NO: 4859959 - DNA, 25 bp, Homo sapien
tttttgctgactctatcactaggag

SEQ ID NO: 4859960 - DNA, 25 bp, Homo sapien
agctgggatccattagtcatattga

SEQ ID NO: 4859961 - DNA, 25 bp, Homo sapien
tctagacgttccaccttgactggta

SEQ ID NO: 4859962 - DNA, 25 bp, Homo sapien
gcaatgacaaaatcaagttgttcac

SEQ ID NO: 4859963 - DNA, 25 bp, Homo sapien
ccaagatctataactaagtgtgtaa

SEQ ID NO: 4859964 - DNA, 25 bp, Homo sapien
gcaaatattgatattctaggcacac

SEQ ID NO: 4859965 - DNA, 25 bp, Homo sapien
gacatacattgcacactctgacttg

SEQ ID NO: 4859966 - DNA, 25 bp, Homo sapien
taggcacacataaaaaccaagatct

SEQ ID NO: 4859967 - DNA, 25 bp, Homo sapien
ccattggactgaccatgtgcactgt

SEQ ID NO: 4859968 - DNA, 25 bp, Homo sapien
cacaatgtccgcaagtgtgggcaca

SEQ ID NO: 4859969 - DNA, 25 bp, Homo sapien
gcccctctggcctgtaaagtggtaa

SEQ ID NO: 4859970 - DNA, 25 bp, Homo sapien
catctgagaagagcacaatgtccgc

SEQ ID NO: 4859971 - DNA, 25 bp, Homo sapien
gttttacaacataagctaactccca

SEQ ID NO: 4859972 - DNA, 25 bp, Homo sapien
aactcccagtggaatctgagtgatg

SEQ ID NO: 4859973 - DNA, 25 bp, Homo sapien
taactcccagtggaatctgagtgat

SEQ ID NO: 4859974 - DNA, 25 bp, Homo sapien
tacaacataagctaactcccagtgg

SEQ ID NO: 4859975 - DNA, 25 bp, Homo sapien
tcaggcattagatagatgggactcc

SEQ ID NO: 4859976 - DNA, 25 bp, Homo sapien
catgatcctggaactgtacgaccct

SEQ ID NO: 4859977 - DNA, 25 bp, Homo sapien
cgcatacgcagttcacaagagagtt

SEQ ID NO: 4859978 - DNA, 25 bp, Homo sapien
caaacttgtgactgcagagtgaccg

SEQ ID NO: 4859979 - DNA, 25 bp, Homo sapien
ctgttgctttgttaaccattgccaa

SEQ ID NO: 4859980 - DNA, 25 bp, Homo sapien
tgttgctttgttaaccattgccaac

SEQ ID NO: 4859981 - DNA, 25 bp, Homo sapien
tagccacgatgttggctgccatgca

SEQ ID NO: 4859982 - DNA, 25 bp, Homo sapien
taatttcctgagtccgagagccgtg

SEQ ID NO: 4859983 - DNA, 25 bp, Homo sapien
tgatgatcaggttatggtcagccct

SEQ ID NO: 4859984 - DNA, 25 bp, Homo sapien
tagaccacaacagtggccgacaggc

SEQ ID NO: 4859985 - DNA, 25 bp, Homo sapien
tcctctaccacagcgaacattgcag

SEQ ID NO: 4859986 - DNA, 25 bp, Homo sapien
gtgcaggtccgggaacgtttctgcc

SEQ ID NO: 4859987 - DNA, 25 bp, Homo sapien
acagcgaacattgcaggctgaccac

SEQ ID NO: 4859988 - DNA, 25 bp, Homo sapien
aggacaaagagaagtgcaggttatt

SEQ ID NO: 4859989 - DNA, 25 bp, Homo sapien
gatggcttagcccaaccaaatgcta

SEQ ID NO: 4859990 - DNA, 25 bp, Homo sapien
taaaggccacaagatgggagaaccc

SEQ ID NO: 4859991 - DNA, 25 bp, Homo sapien
tgccccaaaacattgcaccgtggta

SEQ ID NO: 4859992 - DNA, 25 bp, Homo sapien
caaatgctagcagtataacaagact

SEQ ID NO: 4859993 - DNA, 25 bp, Homo sapien
aaagcatcctgcacagtacctggca

SEQ ID NO: 4859994 - DNA, 25 bp, Homo sapien
gaaactccaagaatatgctgctagg

SEQ ID NO: 4859995 - DNA, 25 bp, Homo sapien
gagactctagtccagtgtccttgga

SEQ ID NO: 4859996 - DNA, 25 bp, Homo sapien
taaattgggttacagccagtaagag

SEQ ID NO: 4859997 - DNA, 25 bp, Homo sapien
ctggactgcagacggaccattcgct

SEQ ID NO: 4859998 - DNA, 25 bp, Homo sapien
atgcaaagaccatctgtgcagtttt

SEQ ID NO: 4859999 - DNA, 25 bp, Homo sapien
tcccggatccgcaaatgttcacact

SEQ ID NO: 4860000 - DNA, 25 bp, Homo sapien
gattcctggcttagaccttcacaga

SEQ ID NO: 4860001 - DNA, 25 bp, Homo sapien
tttaggaagcgggaaagctttctga

SEQ ID NO: 4860002 - DNA, 25 bp, Homo sapien
gagcatacccaaactacaactggtg

SEQ ID NO: 4860003 - DNA, 25 bp, Homo sapien
gtgggtaggtggtcttccattacag

SEQ ID NO: 4860004 - DNA, 25 bp, Homo sapien
ggtgtgcatttattggagagcatac

SEQ ID NO: 4860005 - DNA, 25 bp, Homo sapien
tgggcaaaaccacctgcatcttgtg

SEQ ID NO: 4860006 - DNA, 25 bp, Homo sapien
ttctctctgaagatctgatgccata

SEQ ID NO: 4860007 - DNA, 25 bp, Homo sapien
gatcctgaacagtcttagattaaca

SEQ ID NO: 4860008 - DNA, 25 bp, Homo sapien
tatttccttcctgctcgctgggcaa

SEQ ID NO: 4860009 - DNA, 25 bp, Homo sapien
caaacatgccgcctttttaacatct

SEQ ID NO: 4860010 - DNA, 25 bp, Homo sapien
ttaacatctactgatttctcagctc

SEQ ID NO: 4860011 - DNA, 25 bp, Homo sapien
cctgcctacaaacacagtctagtct

SEQ ID NO: 4860012 - DNA, 25 bp, Homo sapien
ttaatacttgttccataatctcccc

SEQ ID NO: 4860013 - DNA, 25 bp, Homo sapien
ccacacctccatcccattgttttct

SEQ ID NO: 4860014 - DNA, 25 bp, Homo sapien
ctttccaagagtacacagtggcttt

SEQ ID NO: 4860015 - DNA, 25 bp, Homo sapien
agagtacacagtggctttctttgta

SEQ ID NO: 4860016 - DNA, 25 bp, Homo sapien
ttccaagagtacacagtggctttct

SEQ ID NO: 4860017 - DNA, 25 bp, Homo sapien
tcctactccatcctattgaatgcat

SEQ ID NO: 4860018 - DNA, 25 bp, Homo sapien
ctctcctactccatcctattgaatg

SEQ ID NO: 4860019 - DNA, 25 bp, Homo sapien
ctcctactccatcctattgaatgca

SEQ ID NO: 4860020 - DNA, 25 bp, Homo sapien
tctcctactccatcctattgaatgc

SEQ ID NO: 4860021 - DNA, 25 bp, Homo sapien
cactctggctccgtctgtaaagggt

SEQ ID NO: 4860022 - DNA, 25 bp, Homo sapien
tggaagccacctgtcaatgcagaag

SEQ ID NO: 4860023 - DNA, 25 bp, Homo sapien
gacgtccacgccatagtcactctgg

SEQ ID NO: 4860024 - DNA, 25 bp, Homo sapien
gcccgagtacaaagcaatgtcgctg

SEQ ID NO: 4860025 - DNA, 25 bp, Homo sapien
ggaagcctgtctactcaatcactgc

SEQ ID NO: 4860026 - DNA, 25 bp, Homo sapien
gagacttctggttccgcgctgtagg

SEQ ID NO: 4860027 - DNA, 25 bp, Homo sapien
ttgaggcctaactctgaggtgccca

SEQ ID NO: 4860028 - DNA, 25 bp, Homo sapien
tcagttcttgaccagacccagtagc

SEQ ID NO: 4860029 - DNA, 25 bp, Homo sapien
ttacaatacacataagttgagttta

SEQ ID NO: 4860030 - DNA, 25 bp, Homo sapien
agtttggtaagactaatattgtctt

SEQ ID NO: 4860031 - DNA, 25 bp, Homo sapien
ttttcttgtatcattagttccatga

SEQ ID NO: 4860032 - DNA, 25 bp, Homo sapien
tacaatacacataagttgagtttaa

SEQ ID NO: 4860033 - DNA, 25 bp, Homo sapien
cagatgggtccgctgtatgtccggc

SEQ ID NO: 4860034 - DNA, 25 bp, Homo sapien
ggaatgattcttgccgtggtactca

SEQ ID NO: 4860035 - DNA, 25 bp, Homo sapien
tctgggatgcattgtactaaagctg

SEQ ID NO: 4860036 - DNA, 25 bp, Homo sapien
cccagggaaaccatgaacgagctct

SEQ ID NO: 4860037 - DNA, 25 bp, Homo sapien
taaatcatgcgtaggcattcacaca

SEQ ID NO: 4860038 - DNA, 25 bp, Homo sapien
gacacgtcgtgttctttagggcaag

SEQ ID NO: 4860039 - DNA, 25 bp, Homo sapien
caaaaccattcaattacggctgcca

SEQ ID NO: 4860040 - DNA, 25 bp, Homo sapien
caaagatccttaccatgtcctaaaa

SEQ ID NO: 4860041 - DNA, 25 bp, Homo sapien
ctgcatcttaaatgtcctctccttc

SEQ ID NO: 4860042 - DNA, 25 bp, Homo sapien
tccttcctctaaaacgctgtgaaga

SEQ ID NO: 4860043 - DNA, 25 bp, Homo sapien
cttcctctaaaacgctgtgaagaaa

SEQ ID NO: 4860044 - DNA, 25 bp, Homo sapien
cctctaaaacgctgtgaagaaaata

SEQ ID NO: 4860045 - DNA, 25 bp, Homo sapien
gaagcaagttgaaggtggtactcag

SEQ ID NO: 4860046 - DNA, 25 bp, Homo sapien
taggagccttatagattattgcaca

SEQ ID NO: 4860047 - DNA, 25 bp, Homo sapien
gggtgtcgcattttgtcaagaaagt

SEQ ID NO: 4860048 - DNA, 25 bp, Homo sapien
agtgaaagcatctgatgtacttagg

SEQ ID NO: 4860049 - DNA, 25 bp, Homo sapien
cctctgggatggcaccgtgtggtat

SEQ ID NO: 4860050 - DNA, 25 bp, Homo sapien
ccgtgtggtatgagtaagctcaccc

SEQ ID NO: 4860051 - DNA, 25 bp, Homo sapien
catataaatctcccaagaattctcc

SEQ ID NO: 4860052 - DNA, 25 bp, Homo sapien
ctgggttcaccttggttgatggaca

SEQ ID NO: 4860053 - DNA, 25 bp, Homo sapien
ggactcaggagcacctcagagccat

SEQ ID NO: 4860054 - DNA, 25 bp, Homo sapien
aggactcaggagcacctcagagcca

SEQ ID NO: 4860055 - DNA, 25 bp, Homo sapien
actcaggagcacctcagagccatct

SEQ ID NO: 4860056 - DNA, 25 bp, Homo sapien
tcaggactcaggagcacctcagagc

SEQ ID NO: 4860057 - DNA, 25 bp, Homo sapien
gacatctgcacagtgcgggatggtc

SEQ ID NO: 4860058 - DNA, 25 bp, Homo sapien
aatgcaaagggagtggtgacgatca

SEQ ID NO: 4860059 - DNA, 25 bp, Homo sapien
tttaaatggatattccaatgctcag

SEQ ID NO: 4860060 - DNA, 25 bp, Homo sapien
tcagaactgacatctgcacagtgcg

SEQ ID NO: 4860061 - DNA, 25 bp, Homo sapien
tcagttgcttcacggcacagtctgt

SEQ ID NO: 4860062 - DNA, 25 bp, Homo sapien
taatccagggagttacaggacatgc

SEQ ID NO: 4860063 - DNA, 25 bp, Homo sapien
gtccaggagcacatgacacgcaaag

SEQ ID NO: 4860064 - DNA, 25 bp, Homo sapien
ctccagtgagcgcataggtcccaaa

SEQ ID NO: 4860065 - DNA, 25 bp, Homo sapien
tccagactggttatgagggctgact

SEQ ID NO: 4860066 - DNA, 25 bp, Homo sapien
gaaagccaccccttttgtgagcagc

SEQ ID NO: 4860067 - DNA, 25 bp, Homo sapien
tagtagtgaccccaagatgaaccct

SEQ ID NO: 4860068 - DNA, 25 bp, Homo sapien
gaagtgtgcccttcacaatgacctg

SEQ ID NO: 4860069 - DNA, 25 bp, Homo sapien
tgaagactaaaggtattccctttga

SEQ ID NO: 4860070 - DNA, 25 bp, Homo sapien
atctgaagactaaaggtattccctt

SEQ ID NO: 4860071 - DNA, 25 bp, Homo sapien
aggaatgggggaatatcaaggacag

SEQ ID NO: 4860072 - DNA, 25 bp, Homo sapien
gaggaatgggggaatatcaaggaca

SEQ ID NO: 4860073 - DNA, 25 bp, Homo sapien
aagcagacccttgccaggatctgtg

SEQ ID NO: 4860074 - DNA, 25 bp, Homo sapien
ctgtgacagttttgaggtgaaatcc

SEQ ID NO: 4860075 - DNA, 25 bp, Homo sapien
tgtgacatgcttgccggttaaagca

SEQ ID NO: 4860076 - DNA, 25 bp, Homo sapien
tgcttgccggttaaagcaaagccgt

SEQ ID NO: 4860077 - DNA, 25 bp, Homo sapien
tgttatttatctgattgtcctcaat

SEQ ID NO: 4860078 - DNA, 25 bp, Homo sapien
gttatttatctgattgtcctcaatt

SEQ ID NO: 4860079 - DNA, 25 bp, Homo sapien
tttatctgattgtcctcaattcctg

SEQ ID NO: 4860080 - DNA, 25 bp, Homo sapien
tatttatctgattgtcctcaattcc

SEQ ID NO: 4860081 - DNA, 25 bp, Homo sapien
tagtgggcgtataacgctccaggga

SEQ ID NO: 4860082 - DNA, 25 bp, Homo sapien
tgagctgccgaatgcagattttgca

SEQ ID NO: 4860083 - DNA, 25 bp, Homo sapien
caccacacgcgggagaacgggactt

SEQ ID NO: 4860084 - DNA, 25 bp, Homo sapien
tgtctgcacttggaggatctgttca

SEQ ID NO: 4860085 - DNA, 25 bp, Homo sapien
gcagggaaagtgctgtcctcttgtg

SEQ ID NO: 4860086 - DNA, 25 bp, Homo sapien
tgtagcacaaatccgctgtctgatg

SEQ ID NO: 4860087 - DNA, 25 bp, Homo sapien
tccgctgtctgatggagtagggaat

SEQ ID NO: 4860088 - DNA, 25 bp, Homo sapien
cctcttgtgcgaagaaagtgatggt

SEQ ID NO: 4860089 - DNA, 25 bp, Homo sapien
attcttttcgggcttgcctgtctct

SEQ ID NO: 4860090 - DNA, 25 bp, Homo sapien
gagcccttcgttcttggcttctgga

SEQ ID NO: 4860091 - DNA, 25 bp, Homo sapien
gactgatttctagttgagcccttcg

SEQ ID NO: 4860092 - DNA, 25 bp, Homo sapien
tgccttttcaaacatatgtctattc

SEQ ID NO: 4860093 - DNA, 25 bp, Homo sapien
ttcaagatcccctgatgcttgttca

SEQ ID NO: 4860094 - DNA, 25 bp, Homo sapien
tcacagaagaatgatctaatagaat

SEQ ID NO: 4860095 - DNA, 25 bp, Homo sapien
tagcctgttttaagactcattttca

SEQ ID NO: 4860096 - DNA, 25 bp, Homo sapien
tcaggtactgttaagatctgaggga

SEQ ID NO: 4860097 - DNA, 25 bp, Homo sapien
tcatcagcttctccgttgctctcca

SEQ ID NO: 4860098 - DNA, 25 bp, Homo sapien
catcagcttctccgttgctctccat

SEQ ID NO: 4860099 - DNA, 25 bp, Homo sapien
gagagtttcgtgtgtgtcctcccaa

SEQ ID NO: 4860100 - DNA, 25 bp, Homo sapien
tgaagtcggcttcatcaagctggga

SEQ ID NO: 4860101 - DNA, 25 bp, Homo sapien
tgatgacgagcttcccacaggttca

SEQ ID NO: 4860102 - DNA, 25 bp, Homo sapien
caggccagggagtcaagatcaccat

SEQ ID NO: 4860103 - DNA, 25 bp, Homo sapien
taacttaccaagtactcgaggccac

SEQ ID NO: 4860104 - DNA, 25 bp, Homo sapien
tcaacacatttacagagggcagagg

SEQ ID NO: 4860105 - DNA, 25 bp, Homo sapien
tgtcaaattaagtgttcagccctgc

SEQ ID NO: 4860106 - DNA, 25 bp, Homo sapien
tacacactagtgactaacggccagg

SEQ ID NO: 4860107 - DNA, 25 bp, Homo sapien
cagcccgactgcatggggagaagtc

SEQ ID NO: 4860108 - DNA, 25 bp, Homo sapien
aagtcagcagaacagctctgggtcc

SEQ ID NO: 4860109 - DNA, 25 bp, Homo sapien
gctgcttgggctggtactgaaaaat

SEQ ID NO: 4860110 - DNA, 25 bp, Homo sapien
tccagctgcttgggctggtactgaa

SEQ ID NO: 4860111 - DNA, 25 bp, Homo sapien
actcattgaaattagcagcatgttc

SEQ ID NO: 4860112 - DNA, 25 bp, Homo sapien
aactcattgaaattagcagcatgtt

SEQ ID NO: 4860113 - DNA, 25 bp, Homo sapien
aaattgcttcttgattgaggacatt

SEQ ID NO: 4860114 - DNA, 25 bp, Homo sapien
tttctggtccttactgagagtcaca

SEQ ID NO: 4860115 - DNA, 25 bp, Homo sapien
caagatgcttgtaaaccgaattttc

SEQ ID NO: 4860116 - DNA, 25 bp, Homo sapien
caaaataccaggcttcaaagtctct

SEQ ID NO: 4860117 - DNA, 25 bp, Homo sapien
catcggcctcttgaaacaacagttt

SEQ ID NO: 4860118 - DNA, 25 bp, Homo sapien
tccttcattggcccttaatttctgc

SEQ ID NO: 4860119 - DNA, 25 bp, Homo sapien
ggctttcagatataacatagggtgg

SEQ ID NO: 4860120 - DNA, 25 bp, Homo sapien
tcagcaaagttctggtagcaccagg

SEQ ID NO: 4860121 - DNA, 25 bp, Homo sapien
taacatagggtggtacacttccttc

SEQ ID NO: 4860122 - DNA, 25 bp, Homo sapien
tggcaatattgccaagcataaaggt

SEQ ID NO: 4860123 - DNA, 25 bp, Homo sapien
tataacctcagtctgacagcttttg

SEQ ID NO: 4860124 - DNA, 25 bp, Homo sapien
gccaagcataaaggtgggcttcttt

SEQ ID NO: 4860125 - DNA, 25 bp, Homo sapien
ttccatataacctcagtctgacagc

SEQ ID NO: 4860126 - DNA, 25 bp, Homo sapien
acttttgggcatcctccattttact

SEQ ID NO: 4860127 - DNA, 25 bp, Homo sapien
cagtgccctaaaccgaacattgcta

SEQ ID NO: 4860128 - DNA, 25 bp, Homo sapien
taaaccgaacattgctagggctggg

SEQ ID NO: 4860129 - DNA, 25 bp, Homo sapien
cttccagtgccctaaaccgaacatt

SEQ ID NO: 4860130 - DNA, 25 bp, Homo sapien
accattagccacaacagacataatt

SEQ ID NO: 4860131 - DNA, 25 bp, Homo sapien
ttatcctccttcacgaccattagcc

SEQ ID NO: 4860132 - DNA, 25 bp, Homo sapien
atcctccttcacgaccattagccac

SEQ ID NO: 4860133 - DNA, 25 bp, Homo sapien
tatcctccttcacgaccattagcca

SEQ ID NO: 4860134 - DNA, 25 bp, Homo sapien
caaaggcaggagttttcgggtgtgg

SEQ ID NO: 4860135 - DNA, 25 bp, Homo sapien
ctccaaaggcaggagttttcgggtg

SEQ ID NO: 4860136 - DNA, 25 bp, Homo sapien
ctgcactccaaaggcaggagttttc

SEQ ID NO: 4860137 - DNA, 25 bp, Homo sapien
cactccaaaggcaggagttttcggg

SEQ ID NO: 4860138 - DNA, 25 bp, Homo sapien
cggcatctgagttttcattcagagg

SEQ ID NO: 4860139 - DNA, 25 bp, Homo sapien
gcggcatctgagttttcattcagag

SEQ ID NO: 4860140 - DNA, 25 bp, Homo sapien
ggtgtggaatgggtggcagaagcag

SEQ ID NO: 4860141 - DNA, 25 bp, Homo sapien
tcatattcaatgtcccctgtccact

SEQ ID NO: 4860142 - DNA, 25 bp, Homo sapien
ggcagaagcaggtcatattcaatgt

SEQ ID NO: 4860143 - DNA, 25 bp, Homo sapien
ctgtccactgactcatcaggcatgg

SEQ ID NO: 4860144 - DNA, 25 bp, Homo sapien
gataagacaccttttcgccaggcca

SEQ ID NO: 4860145 - DNA, 25 bp, Homo sapien
cactatggataagacaccttttcgc

SEQ ID NO: 4860146 - DNA, 25 bp, Homo sapien
tttcgccaggccattcggggtcacc

SEQ ID NO: 4860147 - DNA, 25 bp, Homo sapien
tgcaacttgggacctccaacactat

SEQ ID NO: 4860148 - DNA, 25 bp, Homo sapien
gaaataaactcttctgtggcttgtg

SEQ ID NO: 4860149 - DNA, 25 bp, Homo sapien
tatgctttggtttttgatcttgcac

SEQ ID NO: 4860150 - DNA, 25 bp, Homo sapien
gtgttttatgctttggtttttgatc

SEQ ID NO: 4860151 - DNA, 25 bp, Homo sapien
tcatttggggtcagaaataaactct

SEQ ID NO: 4860152 - DNA, 25 bp, Homo sapien
tgccccactgctcggagtgatcatc

SEQ ID NO: 4860153 - DNA, 25 bp, Homo sapien
ttggtcccacttgttatatcccatg

SEQ ID NO: 4860154 - DNA, 25 bp, Homo sapien
gagtgatcatcaggagactgcaata

SEQ ID NO: 4860155 - DNA, 25 bp, Homo sapien
aaacaccacatgacatacatcctct

SEQ ID NO: 4860156 - DNA, 25 bp, Homo sapien
tctttctcaacgctgtcttggcaac

SEQ ID NO: 4860157 - DNA, 25 bp, Homo sapien
tatatggtatgtaatatacagaggc

SEQ ID NO: 4860158 - DNA, 25 bp, Homo sapien
tatgtaatatacagaggcattcttt

SEQ ID NO: 4860159 - DNA, 25 bp, Homo sapien
gtttttctttctcaacgctgtcttg

SEQ ID NO: 4860160 - DNA, 25 bp, Homo sapien
cacttgatgcgagactgtttctttg

SEQ ID NO: 4860161 - DNA, 25 bp, Homo sapien
tctttcatcactgaggtttctatca

SEQ ID NO: 4860162 - DNA, 25 bp, Homo sapien
gtttctatcagcagaaatcaagaag

SEQ ID NO: 4860163 - DNA, 25 bp, Homo sapien
cagaaatcaagaagtagcctgtgca

SEQ ID NO: 4860164 - DNA, 25 bp, Homo sapien
gtattggccataaaaacagtcagcc

SEQ ID NO: 4860165 - DNA, 25 bp, Homo sapien
aaacagtcagccctagcataaatcc

SEQ ID NO: 4860166 - DNA, 25 bp, Homo sapien
gattaactttatcttagcataccaa

SEQ ID NO: 4860167 - DNA, 25 bp, Homo sapien
tagcataaatccaactccagtattt

SEQ ID NO: 4860168 - DNA, 25 bp, Homo sapien
tgagtccccctcaatacctaatgca

SEQ ID NO: 4860169 - DNA, 25 bp, Homo sapien
caatacctaatgcaaaccgggatcc

SEQ ID NO: 4860170 - DNA, 25 bp, Homo sapien
ccctcaatacctaatgcaaaccggg

SEQ ID NO: 4860171 - DNA, 25 bp, Homo sapien
ctcaatacctaatgcaaaccgggat

SEQ ID NO: 4860172 - DNA, 25 bp, Homo sapien
tccttgactcttccggttcctgcat

SEQ ID NO: 4860173 - DNA, 25 bp, Homo sapien
actcttccggttcctgcattcttca

SEQ ID NO: 4860174 - DNA, 25 bp, Homo sapien
agtccttgactcttccggttcctgc

SEQ ID NO: 4860175 - DNA, 25 bp, Homo sapien
ttgactcttccggttcctgcattct

SEQ ID NO: 4860176 - DNA, 25 bp, Homo sapien
tgctataagtctagagctattattt

SEQ ID NO: 4860177 - DNA, 25 bp, Homo sapien
gccattgggatacaggctccgggac

SEQ ID NO: 4860178 - DNA, 25 bp, Homo sapien
gaaataatttgtgagggtgcgtctg

SEQ ID NO: 4860179 - DNA, 25 bp, Homo sapien
ccgactaggccaacagggtctggct

SEQ ID NO: 4860180 - DNA, 25 bp, Homo sapien
gtaattatgactccctcgtcctcct

SEQ ID NO: 4860181 - DNA, 25 bp, Homo sapien
tcagctaaactctgaaacaagcaac

SEQ ID NO: 4860182 - DNA, 25 bp, Homo sapien
ccgcatgtatctaccaaattcataa

SEQ ID NO: 4860183 - DNA, 25 bp, Homo sapien
tcaccgcatgtatctaccaaattca

SEQ ID NO: 4860184 - DNA, 25 bp, Homo sapien
gggaaaaacatgcagcatcactttc

SEQ ID NO: 4860185 - DNA, 25 bp, Homo sapien
cgcatgtatctaccaaattcataac

SEQ ID NO: 4860186 - DNA, 25 bp, Homo sapien
tacttgatgcctgtagatatttgag

SEQ ID NO: 4860187 - DNA, 25 bp, Homo sapien
gggtggctactttctgtttgccaca

SEQ ID NO: 4860188 - DNA, 25 bp, Homo sapien
acacttcccattcttactcataact

SEQ ID NO: 4860189 - DNA, 25 bp, Homo sapien
catggcaaaccatgaaacgatgtag

SEQ ID NO: 4860190 - DNA, 25 bp, Homo sapien
tgactccagtatgctcactcttcat

SEQ ID NO: 4860191 - DNA, 25 bp, Homo sapien
tcaatgagaaaagccatgagtcttg

SEQ ID NO: 4860192 - DNA, 25 bp, Homo sapien
ttcattaattagatgagcgtgctgc

SEQ ID NO: 4860193 - DNA, 25 bp, Homo sapien
gagcgtgctgccacgtgactccagt

SEQ ID NO: 4860194 - DNA, 25 bp, Homo sapien
actccaaaccggctgatacttctga

SEQ ID NO: 4860195 - DNA, 25 bp, Homo sapien
tccaaaccggctgatacttctgatt

SEQ ID NO: 4860196 - DNA, 25 bp, Homo sapien
agtgtcctcccaatactccaaaccg

SEQ ID NO: 4860197 - DNA, 25 bp, Homo sapien
tcccaatactccaaaccggctgata

SEQ ID NO: 4860198 - DNA, 25 bp, Homo sapien
cactgtgctaaacacagggtccctc

SEQ ID NO: 4860199 - DNA, 25 bp, Homo sapien
tcactgtgctaaacacagggtccct

SEQ ID NO: 4860200 - DNA, 25 bp, Homo sapien
actgtgctaaacacagggtccctcc

SEQ ID NO: 4860201 - DNA, 25 bp, Homo sapien
aagtggaccttgaagtgtgggtagg

SEQ ID NO: 4860202 - DNA, 25 bp, Homo sapien
tgaagtggaccttgaagtgtgggta

SEQ ID NO: 4860203 - DNA, 25 bp, Homo sapien
gaagtggaccttgaagtgtgggtag

SEQ ID NO: 4860204 - DNA, 25 bp, Homo sapien
cttgatggtcaagagggtattggca

SEQ ID NO: 4860205 - DNA, 25 bp, Homo sapien
agggtattggcattcttcgtctctg

SEQ ID NO: 4860206 - DNA, 25 bp, Homo sapien
tggcatatcttgatggtcaagaggg

SEQ ID NO: 4860207 - DNA, 25 bp, Homo sapien
ttcgtctctgttcatgcctgctttg

SEQ ID NO: 4860208 - DNA, 25 bp, Homo sapien
ctttgtaggataattgggtttctct

SEQ ID NO: 4860209 - DNA, 25 bp, Homo sapien
tgtaggataattgggtttctctgtg

SEQ ID NO: 4860210 - DNA, 25 bp, Homo sapien
ggattgacatgctctgctctcaaaa

SEQ ID NO: 4860211 - DNA, 25 bp, Homo sapien
ctctgtgtcttttgattcaggattg

SEQ ID NO: 4860212 - DNA, 25 bp, Homo sapien
aattagaagttgttcctctgtcaac

SEQ ID NO: 4860213 - DNA, 25 bp, Homo sapien
atgaattagaagttgttcctctgtc

SEQ ID NO: 4860214 - DNA, 25 bp, Homo sapien
agaatgaattagaagttgttcctct

SEQ ID NO: 4860215 - DNA, 25 bp, Homo sapien
ctcaaaagtgtcatcagaatgaatt

SEQ ID NO: 4860216 - DNA, 25 bp, Homo sapien
gtccagggtttgaggtcactgttag

SEQ ID NO: 4860217 - DNA, 25 bp, Homo sapien
cactgttaggttctgtgagtaaaat

SEQ ID NO: 4860218 - DNA, 25 bp, Homo sapien
tagcccatttgggaggttagtccag

SEQ ID NO: 4860219 - DNA, 25 bp, Homo sapien
ggtttgaggtcactgttaggttctg

SEQ ID NO: 4860220 - DNA, 25 bp, Homo sapien
tccctgatttgaacaaccatggcag

SEQ ID NO: 4860221 - DNA, 25 bp, Homo sapien
ccatggcaggaatgaagacgaagca

SEQ ID NO: 4860222 - DNA, 25 bp, Homo sapien
caaagcatgtaagtgtccaggaccc

SEQ ID NO: 4860223 - DNA, 25 bp, Homo sapien
gagtccttttcaacatggatcgcca

SEQ ID NO: 4860224 - DNA, 25 bp, Homo sapien
gtgtttttgccgctatctttggtat

SEQ ID NO: 4860225 - DNA, 25 bp, Homo sapien
cgctatctttggtatggcatctgtc

SEQ ID NO: 4860226 - DNA, 25 bp, Homo sapien
gccagggctcggtcatccctccaaa

SEQ ID NO: 4860227 - DNA, 25 bp, Homo sapien
ctgtctctgagctcatgtcttgtcc

SEQ ID NO: 4860228 - DNA, 25 bp, Homo sapien
agtagattcagggaaacttgtttgg

SEQ ID NO: 4860229 - DNA, 25 bp, Homo sapien
gcacttctgccttggcagtaattca

SEQ ID NO: 4860230 - DNA, 25 bp, Homo sapien
ctggagtagattcagggaaacttgt

SEQ ID NO: 4860231 - DNA, 25 bp, Homo sapien
aacacagtaagggtcggagccaatg

SEQ ID NO: 4860232 - DNA, 25 bp, Homo sapien
accacaaagcttactaagttatttg

SEQ ID NO: 4860233 - DNA, 25 bp, Homo sapien
tactaccctgcatttaaccacaaag

SEQ ID NO: 4860234 - DNA, 25 bp, Homo sapien
ctactaccctgcatttaaccacaaa

SEQ ID NO: 4860235 - DNA, 25 bp, Homo sapien
agcttactaagttatttggaatttg

SEQ ID NO: 4860236 - DNA, 25 bp, Homo sapien
gaacatgcacccaaccataaatctt

SEQ ID NO: 4860237 - DNA, 25 bp, Homo sapien
ggcatggaaggcagccgaacatgca

SEQ ID NO: 4860238 - DNA, 25 bp, Homo sapien
tcttggccccctgataaacaaacaa

SEQ ID NO: 4860239 - DNA, 25 bp, Homo sapien
ggaaggcagccgaacatgcacccaa

SEQ ID NO: 4860240 - DNA, 25 bp, Homo sapien
gagagaaagcactcaacttcaccat

SEQ ID NO: 4860241 - DNA, 25 bp, Homo sapien
agattctaatttaaactaccctctg

SEQ ID NO: 4860242 - DNA, 25 bp, Homo sapien
gagaaagcactcaacttcaccatca

SEQ ID NO: 4860243 - DNA, 25 bp, Homo sapien
tcagagagaaagcactcaacttcac

SEQ ID NO: 4860244 - DNA, 25 bp, Homo sapien
ggatattcagttgacaagcctactc

SEQ ID NO: 4860245 - DNA, 25 bp, Homo sapien
caaacctattatccaccattccatg

SEQ ID NO: 4860246 - DNA, 25 bp, Homo sapien
tgaggtgccacagtaatcacaaacc

SEQ ID NO: 4860247 - DNA, 25 bp, Homo sapien
tccatgtatcggaactgaccttgtc

SEQ ID NO: 4860248 - DNA, 25 bp, Homo sapien
taatgacatgaaaaaccatagttgt

SEQ ID NO: 4860249 - DNA, 25 bp, Homo sapien
tcttcctacatggattataaccacg

SEQ ID NO: 4860250 - DNA, 25 bp, Homo sapien
gattataaccacgactaatgacatg

SEQ ID NO: 4860251 - DNA, 25 bp, Homo sapien
ttataaccacgactaatgacatgaa

SEQ ID NO: 4860252 - DNA, 25 bp, Homo sapien
gactattagacccatataagcccca

SEQ ID NO: 4860253 - DNA, 25 bp, Homo sapien
tctccctaaatagatcaaaaagact

SEQ ID NO: 4860254 - DNA, 25 bp, Homo sapien
aataatgccacctactacaccacta

SEQ ID NO: 4860255 - DNA, 25 bp, Homo sapien
gccccaccataatttagaacaataa

SEQ ID NO: 4860256 - DNA, 25 bp, Homo sapien
tattgaagccatcggacttcaacat

SEQ ID NO: 4860257 - DNA, 25 bp, Homo sapien
gggaaccaggtagatctcctttgct

SEQ ID NO: 4860258 - DNA, 25 bp, Homo sapien
ttatcaaagcttgccatgggaacca

SEQ ID NO: 4860259 - DNA, 25 bp, Homo sapien
aagggtggtccatttgtatattgaa

SEQ ID NO: 4860260 - DNA, 25 bp, Homo sapien
acccattgccattcttatacaagag

SEQ ID NO: 4860261 - DNA, 25 bp, Homo sapien
aacccattgccattcttatacaaga

SEQ ID NO: 4860262 - DNA, 25 bp, Homo sapien
aagcagcgctgagtgggcagtcctg

SEQ ID NO: 4860263 - DNA, 25 bp, Homo sapien
aaatctatgtcacaaaagcagcgct

SEQ ID NO: 4860264 - DNA, 25 bp, Homo sapien
aaaagcagcgctgagtgggcagtcc

SEQ ID NO: 4860265 - DNA, 25 bp, Homo sapien
aaagcagcgctgagtgggcagtcct

SEQ ID NO: 4860266 - DNA, 25 bp, Homo sapien
ctgtgagagccatgtccatttggaa

SEQ ID NO: 4860267 - DNA, 25 bp, Homo sapien
tgtgagagccatgtccatttggaac

SEQ ID NO: 4860268 - DNA, 25 bp, Homo sapien
tgctctgttgaggtacgtgtcacca

SEQ ID NO: 4860269 - DNA, 25 bp, Homo sapien
aagacactttaaccctgatgcccgg

SEQ ID NO: 4860270 - DNA, 25 bp, Homo sapien
tcagaatgtttggagaaggtagcca

SEQ ID NO: 4860271 - DNA, 25 bp, Homo sapien
cattcctcagggtgtctaggcttgc

SEQ ID NO: 4860272 - DNA, 25 bp, Homo sapien
aggcactgtatagtccctcagggag

SEQ ID NO: 4860273 - DNA, 25 bp, Homo sapien
ggcactgtatagtccctcagggagc

SEQ ID NO: 4860274 - DNA, 25 bp, Homo sapien
gaggcactgtatagtccctcaggga

SEQ ID NO: 4860275 - DNA, 25 bp, Homo sapien
cagaggcactgtatagtccctcagg

SEQ ID NO: 4860276 - DNA, 25 bp, Homo sapien
tcattatcccacatgatctgagtgg

SEQ ID NO: 4860277 - DNA, 25 bp, Homo sapien
aacctgttctagcatcattatccca

SEQ ID NO: 4860278 - DNA, 25 bp, Homo sapien
gccaatatctatcgcctttctcaaa

SEQ ID NO: 4860279 - DNA, 25 bp, Homo sapien
tgagtggcagccaatatctatcgcc

SEQ ID NO: 4860280 - DNA, 25 bp, Homo sapien
tctgacgcagctgtggcgaagctaa

SEQ ID NO: 4860281 - DNA, 25 bp, Homo sapien
gaagcttcgctgtactctctgacgc

SEQ ID NO: 4860282 - DNA, 25 bp, Homo sapien
agcaactgctccagaaaatgtacac

SEQ ID NO: 4860283 - DNA, 25 bp, Homo sapien
aaacagtgctcttcgataaataggc

SEQ ID NO: 4860284 - DNA, 25 bp, Homo sapien
tatgttgaaggttgccgaccattct

SEQ ID NO: 4860285 - DNA, 25 bp, Homo sapien
tctgcaagactctcatgtgttttgt

SEQ ID NO: 4860286 - DNA, 25 bp, Homo sapien
aaggttgccgaccattctccctgag

SEQ ID NO: 4860287 - DNA, 25 bp, Homo sapien
aaaagagtgtatgttgaaggttgcc

SEQ ID NO: 4860288 - DNA, 25 bp, Homo sapien
cgtgaacagaagatggtaattgaaa

SEQ ID NO: 4860289 - DNA, 25 bp, Homo sapien
tggcaatccgcgtggcaccaaggtt

SEQ ID NO: 4860290 - DNA, 25 bp, Homo sapien
caatccgcgtggcaccaaggttaaa

SEQ ID NO: 4860291 - DNA, 25 bp, Homo sapien
aggtgaagtcctgttaacgtgaaca

SEQ ID NO: 4860292 - DNA, 25 bp, Homo sapien
gctttcactgctttatacctgatgt

SEQ ID NO: 4860293 - DNA, 25 bp, Homo sapien
cactgctttatacctgatgtgaatg

SEQ ID NO: 4860294 - DNA, 25 bp, Homo sapien
acctgatgtgaatgcctgttcctcc

SEQ ID NO: 4860295 - DNA, 25 bp, Homo sapien
gctttatacctgatgtgaatgcctg

SEQ ID NO: 4860296 - DNA, 25 bp, Homo sapien
tggactcagtgtttggattggctct

SEQ ID NO: 4860297 - DNA, 25 bp, Homo sapien
aatctacgcattctgctggactcag

SEQ ID NO: 4860298 - DNA, 25 bp, Homo sapien
cagcagcaagcacacgacagagttc

SEQ ID NO: 4860299 - DNA, 25 bp, Homo sapien
gcagtggtcttggccgcagtctctt

SEQ ID NO: 4860300 - DNA, 25 bp, Homo sapien
atgttagtaaaatctaacatttggt

SEQ ID NO: 4860301 - DNA, 25 bp, Homo sapien
tcctgtgaccacaggaatgttagta

SEQ ID NO: 4860302 - DNA, 25 bp, Homo sapien
tgttagtaaaatctaacatttggta

SEQ ID NO: 4860303 - DNA, 25 bp, Homo sapien
ccatcctgtgaccacaggaatgtta

SEQ ID NO: 4860304 - DNA, 25 bp, Homo sapien
gacattgaaagcattaaacccagag

SEQ ID NO: 4860305 - DNA, 25 bp, Homo sapien
taacataagagtgatagcatagccg

SEQ ID NO: 4860306 - DNA, 25 bp, Homo sapien
gactgcaaaggaggctacaaagacc

SEQ ID NO: 4860307 - DNA, 25 bp, Homo sapien
agcatagccgagtttgtctcaaaga

SEQ ID NO: 4860308 - DNA, 25 bp, Homo sapien
tgcattcatgcactgtgtcccgctt

SEQ ID NO: 4860309 - DNA, 25 bp, Homo sapien
cagtggaaccagctatcagcaccat

SEQ ID NO: 4860310 - DNA, 25 bp, Homo sapien
ccgcttctcagtggaaccagctatc

SEQ ID NO: 4860311 - DNA, 25 bp, Homo sapien
ttcatgcactgtgtcccgcttctca

SEQ ID NO: 4860312 - DNA, 25 bp, Homo sapien
tccatagaaaagtgttttccatctt

SEQ ID NO: 4860313 - DNA, 25 bp, Homo sapien
tttggcataatagctactgtgttag

SEQ ID NO: 4860314 - DNA, 25 bp, Homo sapien
ctttcttcctgtgtgatctatgaac

SEQ ID NO: 4860315 - DNA, 25 bp, Homo sapien
agcagtaatgacctttctgctcttg

SEQ ID NO: 4860316 - DNA, 25 bp, Homo sapien
tctatgaaccattccactgtgaaga

SEQ ID NO: 4860317 - DNA, 25 bp, Homo sapien
tcaatttccacgattgaaactttct

SEQ ID NO: 4860318 - DNA, 25 bp, Homo sapien
cacgattgaaactttcttgaatctc

SEQ ID NO: 4860319 - DNA, 25 bp, Homo sapien
aatttccacgattgaaactttcttg

SEQ ID NO: 4860320 - DNA, 25 bp, Homo sapien
aatctcaaagactctagaacacagg

SEQ ID NO: 4860321 - DNA, 25 bp, Homo sapien
cagtggttccttaattgagtcttcc

SEQ ID NO: 4860322 - DNA, 25 bp, Homo sapien
tacacagtggttccttaattgagtc

SEQ ID NO: 4860323 - DNA, 25 bp, Homo sapien
aaggacccagttgtgactgctacac

SEQ ID NO: 4860324 - DNA, 25 bp, Homo sapien
gttgtgactgctacacagtggttcc

SEQ ID NO: 4860325 - DNA, 25 bp, Homo sapien
caaaagtacccccagataggaagag

SEQ ID NO: 4860326 - DNA, 25 bp, Homo sapien
gaagaggtggtgtttctcacttgac

SEQ ID NO: 4860327 - DNA, 25 bp, Homo sapien
gaacattcatcaaagtcccgctggc

SEQ ID NO: 4860328 - DNA, 25 bp, Homo sapien
ctcacttgacttatgaacattcatc

SEQ ID NO: 4860329 - DNA, 25 bp, Homo sapien
tcttgtttggattggaaacctctaa

SEQ ID NO: 4860330 - DNA, 25 bp, Homo sapien
cttggatatcagtattggctgcaaa

SEQ ID NO: 4860331 - DNA, 25 bp, Homo sapien
tatcagtattggctgcaaatcttgt

SEQ ID NO: 4860332 - DNA, 25 bp, Homo sapien
ctgttgatattcaatataatctgaa

SEQ ID NO: 4860333 - DNA, 25 bp, Homo sapien
tagcgtttgcttctgtcgagagtgc

SEQ ID NO: 4860334 - DNA, 25 bp, Homo sapien
gactgatgtttctttgagcgctctg

SEQ ID NO: 4860335 - DNA, 25 bp, Homo sapien
cccgaagatggctacgtgggccata

SEQ ID NO: 4860336 - DNA, 25 bp, Homo sapien
gagagtgcagtccacagatctggca

SEQ ID NO: 4860337 - DNA, 25 bp, Homo sapien
cctttccctttcgaagctgtcctgg

SEQ ID NO: 4860338 - DNA, 25 bp, Homo sapien
tggagaataacccatactctgtggg

SEQ ID NO: 4860339 - DNA, 25 bp, Homo sapien
tggcacattgagatctccatacccc

SEQ ID NO: 4860340 - DNA, 25 bp, Homo sapien
tttccttgatattccagtgtggcac

SEQ ID NO: 4860341 - DNA, 25 bp, Homo sapien
aacaccttcttttgcccactgtccg

SEQ ID NO: 4860342 - DNA, 25 bp, Homo sapien
tttgtgagactcttttattaacacc

SEQ ID NO: 4860343 - DNA, 25 bp, Homo sapien
ccactgtccggggagatttctcttg

SEQ ID NO: 4860344 - DNA, 25 bp, Homo sapien
tctcttgttttctcatagcatttca

SEQ ID NO: 4860345 - DNA, 25 bp, Homo sapien
gatctgctgcatttcttcattttcc

SEQ ID NO: 4860346 - DNA, 25 bp, Homo sapien
ggatctgctgcatttcttcattttc

SEQ ID NO: 4860347 - DNA, 25 bp, Homo sapien
tggatctgctgcatttcttcatttt

SEQ ID NO: 4860348 - DNA, 25 bp, Homo sapien
tctgctgcatttcttcattttccat

SEQ ID NO: 4860349 - DNA, 25 bp, Homo sapien
agaagcaacacaatgttgccaaaaa

SEQ ID NO: 4860350 - DNA, 25 bp, Homo sapien
gaagcaacacaatgttgccaaaaag

SEQ ID NO: 4860351 - DNA, 25 bp, Homo sapien
aagcaacacaatgttgccaaaaagg

SEQ ID NO: 4860352 - DNA, 25 bp, Homo sapien
tttcataaggaggtcaaacctagca

SEQ ID NO: 4860353 - DNA, 25 bp, Homo sapien
tcataaggaggtcaaacctagcact

SEQ ID NO: 4860354 - DNA, 25 bp, Homo sapien
taaggaggtcaaacctagcactaag

SEQ ID NO: 4860355 - DNA, 25 bp, Homo sapien
aaggaggtcaaacctagcactaaga

SEQ ID NO: 4860356 - DNA, 25 bp, Homo sapien
ttggtctgtgggcttaccaaacact

SEQ ID NO: 4860357 - DNA, 25 bp, Homo sapien
ctaaacaggtggaagtgattggtct

SEQ ID NO: 4860358 - DNA, 25 bp, Homo sapien
tctgtgggcttaccaaacacttata

SEQ ID NO: 4860359 - DNA, 25 bp, Homo sapien
taaacaggtggaagtgattggtctg

SEQ ID NO: 4860360 - DNA, 25 bp, Homo sapien
catcccgggctaagtgaataactgg

SEQ ID NO: 4860361 - DNA, 25 bp, Homo sapien
tccatcagaattgtgccatcccggg

SEQ ID NO: 4860362 - DNA, 25 bp, Homo sapien
gcatcaggctctacacaggtcctta

SEQ ID NO: 4860363 - DNA, 25 bp, Homo sapien
catggtactttggagtagacactac

SEQ ID NO: 4860364 - DNA, 25 bp, Homo sapien
tgagtgctacacactcttgcctttg

SEQ ID NO: 4860365 - DNA, 25 bp, Homo sapien
gtgctacacactcttgcctttgttt

SEQ ID NO: 4860366 - DNA, 25 bp, Homo sapien
ttgtttaccctggacatagttggct

SEQ ID NO: 4860367 - DNA, 25 bp, Homo sapien
cctggacatagttggctttcatctg

SEQ ID NO: 4860368 - DNA, 25 bp, Homo sapien
cctagttttctagctgaagtgtgag

SEQ ID NO: 4860369 - DNA, 25 bp, Homo sapien
tttctagctgaagtgtgagcttttc

SEQ ID NO: 4860370 - DNA, 25 bp, Homo sapien
tagttttctagctgaagtgtgagct

SEQ ID NO: 4860371 - DNA, 25 bp, Homo sapien
ctgggtctctgcaacgaaggaaccc

SEQ ID NO: 4860372 - DNA, 25 bp, Homo sapien
cctccacatccttccgttttttgca

SEQ ID NO: 4860373 - DNA, 25 bp, Homo sapien
tcagctgtgatatagggcccataaa

SEQ ID NO: 4860374 - DNA, 25 bp, Homo sapien
caccacattcagtgcttgggcagcc

SEQ ID NO: 4860375 - DNA, 25 bp, Homo sapien
aatcttgtcaggacccatctcacca

SEQ ID NO: 4860376 - DNA, 25 bp, Homo sapien
attttatccgtacagcagcccagaa

SEQ ID NO: 4860377 - DNA, 25 bp, Homo sapien
tagagagctgctcttgaagggcagg

SEQ ID NO: 4860378 - DNA, 25 bp, Homo sapien
cgcagccagcctgtcactgctgata

SEQ ID NO: 4860379 - DNA, 25 bp, Homo sapien
ggcatgcagccttgcagccatcatc

SEQ ID NO: 4860380 - DNA, 25 bp, Homo sapien
aagcagagatcaaagccggcactca

SEQ ID NO: 4860381 - DNA, 25 bp, Homo sapien
caaagccggcactcaggggaaagga

SEQ ID NO: 4860382 - DNA, 25 bp, Homo sapien
gcagagatcaaagccggcactcagg

SEQ ID NO: 4860383 - DNA, 25 bp, Homo sapien
gatcaaagccggcactcaggggaaa

SEQ ID NO: 4860384 - DNA, 25 bp, Homo sapien
ctgcatctgttctcccaccagagcc

SEQ ID NO: 4860385 - DNA, 25 bp, Homo sapien
ccctgcatctgttctcccaccagag

SEQ ID NO: 4860386 - DNA, 25 bp, Homo sapien
agcaagggcttttccctgcatctgt

SEQ ID NO: 4860387 - DNA, 25 bp, Homo sapien
ttttgcatcccagcaagggcttttc

SEQ ID NO: 4860388 - DNA, 25 bp, Homo sapien
gacaaagagaaggcatgaagtggct

SEQ ID NO: 4860389 - DNA, 25 bp, Homo sapien
aacaggatgtccctgtgctccagaa

SEQ ID NO: 4860390 - DNA, 25 bp, Homo sapien
aaatcagagagtggaggttcaaggt

SEQ ID NO: 4860391 - DNA, 25 bp, Homo sapien
catgaagtggctgcaagaggaacag

SEQ ID NO: 4860392 - DNA, 25 bp, Homo sapien
ttgggaaatgatagaaatatattct

SEQ ID NO: 4860393 - DNA, 25 bp, Homo sapien
cttgggaaatgatagaaatatattc

SEQ ID NO: 4860394 - DNA, 25 bp, Homo sapien
gaaatgatagaaatatattctaaca

SEQ ID NO: 4860395 - DNA, 25 bp, Homo sapien
gatagaaatatattctaacatatgt

SEQ ID NO: 4860396 - DNA, 25 bp, Homo sapien
ttgacatctgcagtacatgttctcc

SEQ ID NO: 4860397 - DNA, 25 bp, Homo sapien
cccagctccagctttgtagagtcct

SEQ ID NO: 4860398 - DNA, 25 bp, Homo sapien
tcccagctccagctttgtagagtcc

SEQ ID NO: 4860399 - DNA, 25 bp, Homo sapien
ttcccgcactggctttgacatctgc

SEQ ID NO: 4860400 - DNA, 25 bp, Homo sapien
ttaattgtagggtgtagtcaaagcc

SEQ ID NO: 4860401 - DNA, 25 bp, Homo sapien
taattgtagggtgtagtcaaagccc

SEQ ID NO: 4860402 - DNA, 25 bp, Homo sapien
aattgtagggtgtagtcaaagccca

SEQ ID NO: 4860403 - DNA, 25 bp, Homo sapien
ctttcccttttggtgatctcccagg

SEQ ID NO: 4860404 - DNA, 25 bp, Homo sapien
ggcttttgtactcaggtaaactctc

SEQ ID NO: 4860405 - DNA, 25 bp, Homo sapien
aagggaaggaaatgactgctagtag

SEQ ID NO: 4860406 - DNA, 25 bp, Homo sapien
cccagggataattcccttctgtact

SEQ ID NO: 4860407 - DNA, 25 bp, Homo sapien
cagcatgcttattgttaacccaaga

SEQ ID NO: 4860408 - DNA, 25 bp, Homo sapien
aatcagcatgcttattgttaaccca

SEQ ID NO: 4860409 - DNA, 25 bp, Homo sapien
tcagcatgcttattgttaacccaag

SEQ ID NO: 4860410 - DNA, 25 bp, Homo sapien
tataatcagcatgcttattgttaac

SEQ ID NO: 4860411 - DNA, 25 bp, Homo sapien
ttcttttcggtcaatttctctgtcc

SEQ ID NO: 4860412 - DNA, 25 bp, Homo sapien
tcttcaccattcgtgctttgagtgg

SEQ ID NO: 4860413 - DNA, 25 bp, Homo sapien
cttcctatcttcaccattcgtgctt

SEQ ID NO: 4860414 - DNA, 25 bp, Homo sapien
accattcgtgctttgagtggataac

SEQ ID NO: 4860415 - DNA, 25 bp, Homo sapien
tcaaggctctacagcactggttctg

SEQ ID NO: 4860416 - DNA, 25 bp, Homo sapien
ggttctgtctaaatctagtgtccat

SEQ ID NO: 4860417 - DNA, 25 bp, Homo sapien
gatgcagcagtccaattaacttatg

SEQ ID NO: 4860418 - DNA, 25 bp, Homo sapien
tgtagataaccggtcatcccagtcc

SEQ ID NO: 4860419 - DNA, 25 bp, Homo sapien
tatgtcacataggaatttctccgct

SEQ ID NO: 4860420 - DNA, 25 bp, Homo sapien
ctccgctttagacatgttgtttctg

SEQ ID NO: 4860421 - DNA, 25 bp, Homo sapien
gaatttctccgctttagacatgttg

SEQ ID NO: 4860422 - DNA, 25 bp, Homo sapien
cataggaatttctccgctttagaca

SEQ ID NO: 4860423 - DNA, 25 bp, Homo sapien
tttcttcactgttatctgcctatgc

SEQ ID NO: 4860424 - DNA, 25 bp, Homo sapien
ttcttcactgttatctgcctatgca

SEQ ID NO: 4860425 - DNA, 25 bp, Homo sapien
tcttcactgttatctgcctatgcat

SEQ ID NO: 4860426 - DNA, 25 bp, Homo sapien
gcagtaagtctgcttgttttcttaa

SEQ ID NO: 4860427 - DNA, 25 bp, Homo sapien
gaattgcatgcagtaagtctgcttg

SEQ ID NO: 4860428 - DNA, 25 bp, Homo sapien
gttcctgaattgcatgcagtaagtc

SEQ ID NO: 4860429 - DNA, 25 bp, Homo sapien
ccccagttcctgaattgcatgcagt

SEQ ID NO: 4860430 - DNA, 25 bp, Homo sapien
agtccatctgtttctggttttcaga

SEQ ID NO: 4860431 - DNA, 25 bp, Homo sapien
ttagtccatctgtttctggttttca

SEQ ID NO: 4860432 - DNA, 25 bp, Homo sapien
ccatctgtttctggttttcagaaac

SEQ ID NO: 4860433 - DNA, 25 bp, Homo sapien
gtccatctgtttctggttttcagaa

SEQ ID NO: 4860434 - DNA, 25 bp, Homo sapien
gcatatgtttgtgagggttgctccc

SEQ ID NO: 4860435 - DNA, 25 bp, Homo sapien
tttcaccaaactccggatgccaagg

SEQ ID NO: 4860436 - DNA, 25 bp, Homo sapien
agttaggtggcttgcgtcctccagg

SEQ ID NO: 4860437 - DNA, 25 bp, Homo sapien
tgctccctgcaacaatatctggtgt

SEQ ID NO: 4860438 - DNA, 25 bp, Homo sapien
aaataagcaaggcatcccggttggt

SEQ ID NO: 4860439 - DNA, 25 bp, Homo sapien
caaagagcctgtttacaaagagcct

SEQ ID NO: 4860440 - DNA, 25 bp, Homo sapien
cacagcttggctggaagagatttct

SEQ ID NO: 4860441 - DNA, 25 bp, Homo sapien
gagaagggtcgtaatcataggagcc

SEQ ID NO: 4860442 - DNA, 25 bp, Homo sapien
gatccagtggtggtcatttagcaac

SEQ ID NO: 4860443 - DNA, 25 bp, Homo sapien
gctcagaaagaaggtagatccagtg

SEQ ID NO: 4860444 - DNA, 25 bp, Homo sapien
acttgtggccccagtgaatgatccg

SEQ ID NO: 4860445 - DNA, 25 bp, Homo sapien
cctgctgctggtatgggtgacatga

SEQ ID NO: 4860446 - DNA, 25 bp, Homo sapien
tcaggcacttgcaaagctcatcaga

SEQ ID NO: 4860447 - DNA, 25 bp, Homo sapien
cacactccagagataagcacctttg

SEQ ID NO: 4860448 - DNA, 25 bp, Homo sapien
gataggatgccttacagcacactcc

SEQ ID NO: 4860449 - DNA, 25 bp, Homo sapien
atcagacacgcagacaggagccttt

SEQ ID NO: 4860450 - DNA, 25 bp, Homo sapien
cattgcttcgtgagccctttctgat

SEQ ID NO: 4860451 - DNA, 25 bp, Homo sapien
tcatgccttcttttatcacaccttg

SEQ ID NO: 4860452 - DNA, 25 bp, Homo sapien
tgctgtgaccaatttggcccatcac

SEQ ID NO: 4860453 - DNA, 25 bp, Homo sapien
tggcccatcactaacattcatgcct

SEQ ID NO: 4860454 - DNA, 25 bp, Homo sapien
ccccagtccaactgcttacaagtgt

SEQ ID NO: 4860455 - DNA, 25 bp, Homo sapien
tgcttacaagtgttaggtacaaaaa

SEQ ID NO: 4860456 - DNA, 25 bp, Homo sapien
caactgcttacaagtgttaggtaca

SEQ ID NO: 4860457 - DNA, 25 bp, Homo sapien
cagtccaactgcttacaagtgttag

SEQ ID NO: 4860458 - DNA, 25 bp, Homo sapien
ttatagaggataattcccctgattt

SEQ ID NO: 4860459 - DNA, 25 bp, Homo sapien
atagaggataattcccctgattttc

SEQ ID NO: 4860460 - DNA, 25 bp, Homo sapien
tatagaggataattcccctgatttt

SEQ ID NO: 4860461 - DNA, 25 bp, Homo sapien
tagccgacagtaagcgatgaacaca

SEQ ID NO: 4860462 - DNA, 25 bp, Homo sapien
gtggtgttagccgacagtaagcgat

SEQ ID NO: 4860463 - DNA, 25 bp, Homo sapien
tgaacacaggactcttctgctgccg

SEQ ID NO: 4860464 - DNA, 25 bp, Homo sapien
taagcgatgaacacaggactcttct

SEQ ID NO: 4860465 - DNA, 25 bp, Homo sapien
tgcggactttgcaaaatccaataca

SEQ ID NO: 4860466 - DNA, 25 bp, Homo sapien
cttgagtccacaaaagcctggaaat

SEQ ID NO: 4860467 - DNA, 25 bp, Homo sapien
gtagtatacctatggggcgaaatcc

SEQ ID NO: 4860468 - DNA, 25 bp, Homo sapien
gatccaggccctcttgagtccacaa

SEQ ID NO: 4860469 - DNA, 25 bp, Homo sapien
caactttgtcatggttgatcggtga

SEQ ID NO: 4860470 - DNA, 25 bp, Homo sapien
ctttggtcagagttagtcttaaggc

SEQ ID NO: 4860471 - DNA, 25 bp, Homo sapien
tgatcggtgacataggaaggcaatt

SEQ ID NO: 4860472 - DNA, 25 bp, Homo sapien
tctcacagtgcaaaaggtagacatg

SEQ ID NO: 4860473 - DNA, 25 bp, Homo sapien
gaacttcacagctagtacgtctact

SEQ ID NO: 4860474 - DNA, 25 bp, Homo sapien
agaacttcacagctagtacgtctac

SEQ ID NO: 4860475 - DNA, 25 bp, Homo sapien
cttataagaaatatgagtcccgtct

SEQ ID NO: 4860476 - DNA, 25 bp, Homo sapien
gagtcccgtctctgaacagtttaat

SEQ ID NO: 4860477 - DNA, 25 bp, Homo sapien
caaactcgcctacacctatgtgctg

SEQ ID NO: 4860478 - DNA, 25 bp, Homo sapien
cttcaaactcgcctacacctatgtg

SEQ ID NO: 4860479 - DNA, 25 bp, Homo sapien
gcctacacctatgtgctgtactaac

SEQ ID NO: 4860480 - DNA, 25 bp, Homo sapien
aactcgcctacacctatgtgctgta

SEQ ID NO: 4860481 - DNA, 25 bp, Homo sapien
gccatgtgaagccttcttccagtgt

SEQ ID NO: 4860482 - DNA, 25 bp, Homo sapien
ctggttgccatgtgaagccttcttc

SEQ ID NO: 4860483 - DNA, 25 bp, Homo sapien
cattgcagggctggttgccatgtga

SEQ ID NO: 4860484 - DNA, 25 bp, Homo sapien
agggctggttgccatgtgaagcctt

SEQ ID NO: 4860485 - DNA, 25 bp, Homo sapien
caatttatagatgtgaatagcccat

SEQ ID NO: 4860486 - DNA, 25 bp, Homo sapien
cttggaatcaatttatagatgtgaa

SEQ ID NO: 4860487 - DNA, 25 bp, Homo sapien
gaaaggctcttaccaataagaattc

SEQ ID NO: 4860488 - DNA, 25 bp, Homo sapien
ctgttttgcactttggggaaaggct

SEQ ID NO: 4860489 - DNA, 25 bp, Homo sapien
agctgatatttccttgcagatgctg

SEQ ID NO: 4860490 - DNA, 25 bp, Homo sapien
tcttggtagcattacaactcaaagg

SEQ ID NO: 4860491 - DNA, 25 bp, Homo sapien
tctgtcaggatatgccttctcttgg

SEQ ID NO: 4860492 - DNA, 25 bp, Homo sapien
gggcatattactccatctgtcagga

SEQ ID NO: 4860493 - DNA, 25 bp, Homo sapien
gcaagtcgatgggaaatttaatcct

SEQ ID NO: 4860494 - DNA, 25 bp, Homo sapien
taggactgatgagctgcccaagaaa

SEQ ID NO: 4860495 - DNA, 25 bp, Homo sapien
ctacaataatgggctctgtccctcc

SEQ ID NO: 4860496 - DNA, 25 bp, Homo sapien
cgaataggtatgctgctgtaggact

SEQ ID NO: 4860497 - DNA, 25 bp, Homo sapien
cattggttgggtcatgccagaaaaa

SEQ ID NO: 4860498 - DNA, 25 bp, Homo sapien
cagcctgatgctgttctccgcgttc

SEQ ID NO: 4860499 - DNA, 25 bp, Homo sapien
ctttccgtgatggctgctccttctg

SEQ ID NO: 4860500 - DNA, 25 bp, Homo sapien
ttccgtgatggctgctccttctgtc

SEQ ID NO: 4860501 - DNA, 25 bp, Homo sapien
atggctgctccttctgtctcatcat

SEQ ID NO: 4860502 - DNA, 25 bp, Homo sapien
tgatggctgctccttctgtctcatc

SEQ ID NO: 4860503 - DNA, 25 bp, Homo sapien
tgagatcgggcgtgttcagtgtggt

SEQ ID NO: 4860504 - DNA, 25 bp, Homo sapien
gatgagatcgggcgtgttcagtgtg

SEQ ID NO: 4860505 - DNA, 25 bp, Homo sapien
tcagatgagatcgggcgtgttcagt

SEQ ID NO: 4860506 - DNA, 25 bp, Homo sapien
cagatgagatcgggcgtgttcagtg

SEQ ID NO: 4860507 - DNA, 25 bp, Homo sapien
catcctccacaacatctagcaaaat

SEQ ID NO: 4860508 - DNA, 25 bp, Homo sapien
tgcatcctccacaacatctagcaaa

SEQ ID NO: 4860509 - DNA, 25 bp, Homo sapien
ttttgcatcctccacaacatctagc

SEQ ID NO: 4860510 - DNA, 25 bp, Homo sapien
tttgcatcctccacaacatctagca

SEQ ID NO: 4860511 - DNA, 25 bp, Homo sapien
agtcctcaattcatgcagccagtca

SEQ ID NO: 4860512 - DNA, 25 bp, Homo sapien
cagtcctcaattcatgcagccagtc

SEQ ID NO: 4860513 - DNA, 25 bp, Homo sapien
gaggcccaagaggaatcatcacgct

SEQ ID NO: 4860514 - DNA, 25 bp, Homo sapien
tcatcacgctgtccttgggagcccg

SEQ ID NO: 4860515 - DNA, 25 bp, Homo sapien
gaatcatcacgctgtccttgggagc

SEQ ID NO: 4860516 - DNA, 25 bp, Homo sapien
caagaggaatcatcacgctgtcctt

SEQ ID NO: 4860517 - DNA, 25 bp, Homo sapien
tgataaccagtgagaagttccagga

SEQ ID NO: 4860518 - DNA, 25 bp, Homo sapien
gtcatttgatgacgccgtggtcgcc

SEQ ID NO: 4860519 - DNA, 25 bp, Homo sapien
tgtaccacagtgttccaacattagg

SEQ ID NO: 4860520 - DNA, 25 bp, Homo sapien
gaatgaatacacaactggagatggc

SEQ ID NO: 4860521 - DNA, 25 bp, Homo sapien
cagatcagcctgaagatcaacagga

SEQ ID NO: 4860522 - DNA, 25 bp, Homo sapien
tcctgttcccttgatgatttgccat

SEQ ID NO: 4860523 - DNA, 25 bp, Homo sapien
gcttggatctcagttgtgcaggaca

SEQ ID NO: 4860524 - DNA, 25 bp, Homo sapien
gcaggacatttttggcaagtcttcc

SEQ ID NO: 4860525 - DNA, 25 bp, Homo sapien
gcaacatttctatatgatcacgaaa

SEQ ID NO: 4860526 - DNA, 25 bp, Homo sapien
tatatgatcacgaaattgtccctgg

SEQ ID NO: 4860527 - DNA, 25 bp, Homo sapien
cgatggtacctgatgtgaacagttc

SEQ ID NO: 4860528 - DNA, 25 bp, Homo sapien
ttcttacatggctcctagcgatggt

SEQ ID NO: 4860529 - DNA, 25 bp, Homo sapien
tgtgaggggggttactgctagagct

SEQ ID NO: 4860530 - DNA, 25 bp, Homo sapien
gaggggggttactgctagagctgct

SEQ ID NO: 4860531 - DNA, 25 bp, Homo sapien
tgccagatgtgaggggggttactgc

SEQ ID NO: 4860532 - DNA, 25 bp, Homo sapien
gatgtgaggggggttactgctagag

SEQ ID NO: 4860533 - DNA, 25 bp, Homo sapien
ctgtgcccctcgttgaccagccact

SEQ ID NO: 4860534 - DNA, 25 bp, Homo sapien
accaagtccctgtgcccctcgttga

SEQ ID NO: 4860535 - DNA, 25 bp, Homo sapien
gtccctgtgcccctcgttgaccagc

SEQ ID NO: 4860536 - DNA, 25 bp, Homo sapien
gcccctcgttgaccagccacttcct

SEQ ID NO: 4860537 - DNA, 25 bp, Homo sapien
cagcagaattgatgaaatagattat

SEQ ID NO: 4860538 - DNA, 25 bp, Homo sapien
tgatgaaatagattataagagaccc

SEQ ID NO: 4860539 - DNA, 25 bp, Homo sapien
aatgcttagtacaaagacaaggatc

SEQ ID NO: 4860540 - DNA, 25 bp, Homo sapien
gattataagagacccaatgcttagt

SEQ ID NO: 4860541 - DNA, 25 bp, Homo sapien
tcaataccatccgaagttgcttgaa

SEQ ID NO: 4860542 - DNA, 25 bp, Homo sapien
gagaaaccctgaaactacgacagcg

SEQ ID NO: 4860543 - DNA, 25 bp, Homo sapien
tttcctttctcaataccatccgaag

SEQ ID NO: 4860544 - DNA, 25 bp, Homo sapien
ctacgacagcgtttctgctccaaat

SEQ ID NO: 4860545 - DNA, 25 bp, Homo sapien
ttcatatgatgaacagcttccaaca

SEQ ID NO: 4860546 - DNA, 25 bp, Homo sapien
catatgatgaacagcttccaacagg

SEQ ID NO: 4860547 - DNA, 25 bp, Homo sapien
atatgatgaacagcttccaacaggg

SEQ ID NO: 4860548 - DNA, 25 bp, Homo sapien
gtcttcatatgatgaacagcttcca

SEQ ID NO: 4860549 - DNA, 25 bp, Homo sapien
tggtaaagatgtctacgattgaatt

SEQ ID NO: 4860550 - DNA, 25 bp, Homo sapien
tctacgattgaattcatctccagcc

SEQ ID NO: 4860551 - DNA, 25 bp, Homo sapien
gatgtctacgattgaattcatctcc

SEQ ID NO: 4860552 - DNA, 25 bp, Homo sapien
taaagatgtctacgattgaattcat

SEQ ID NO: 4860553 - DNA, 25 bp, Homo sapien
ggcgcaaggctcttaggaaccttaa

SEQ ID NO: 4860554 - DNA, 25 bp, Homo sapien
ggtcttgatggctcgtagaatttgc

SEQ ID NO: 4860555 - DNA, 25 bp, Homo sapien
ttgagggagttctagcaggcgcaag

SEQ ID NO: 4860556 - DNA, 25 bp, Homo sapien
aatttgcaagatttgagggagttct

SEQ ID NO: 4860557 - DNA, 25 bp, Homo sapien
gtgaatgaatcccgcagctgtgaac

SEQ ID NO: 4860558 - DNA, 25 bp, Homo sapien
cgcagctgtgaaccaggtactgaga

SEQ ID NO: 4860559 - DNA, 25 bp, Homo sapien
ccgcagctgtgaaccaggtactgag

SEQ ID NO: 4860560 - DNA, 25 bp, Homo sapien
caggtgaatgaatcccgcagctgtg

SEQ ID NO: 4860561 - DNA, 25 bp, Homo sapien
tagatttctcattatgtgggataag

SEQ ID NO: 4860562 - DNA, 25 bp, Homo sapien
ctttcctatagctgagatccatttc

SEQ ID NO: 4860563 - DNA, 25 bp, Homo sapien
tcaagaagtaaagtccaggagttcc

SEQ ID NO: 4860564 - DNA, 25 bp, Homo sapien
gctgagatccatttcctagatttct

SEQ ID NO: 4860565 - DNA, 25 bp, Homo sapien
tactcgtctttgaatgatatcatca

SEQ ID NO: 4860566 - DNA, 25 bp, Homo sapien
ggcacaggtgccatattgattcctt

SEQ ID NO: 4860567 - DNA, 25 bp, Homo sapien
tctagttaatactcgtctttgaatg

SEQ ID NO: 4860568 - DNA, 25 bp, Homo sapien
gcagaatttaggcacaggtgccata

SEQ ID NO: 4860569 - DNA, 25 bp, Homo sapien
caaagagagaagactcaggaaacat

SEQ ID NO: 4860570 - DNA, 25 bp, Homo sapien
ctgtccaaagagagaagactcagga

SEQ ID NO: 4860571 - DNA, 25 bp, Homo sapien
tccaaagagagaagactcaggaaac

SEQ ID NO: 4860572 - DNA, 25 bp, Homo sapien
tgtccaaagagagaagactcaggaa

SEQ ID NO: 4860573 - DNA, 25 bp, Homo sapien
acatctccaaatccaacggttgacg

SEQ ID NO: 4860574 - DNA, 25 bp, Homo sapien
cctaaggatgtcttggctaccacat

SEQ ID NO: 4860575 - DNA, 25 bp, Homo sapien
tgaccaggtaaattgactcaaaata

SEQ ID NO: 4860576 - DNA, 25 bp, Homo sapien
tccaacggttgacgttgttgccatg

SEQ ID NO: 4860577 - DNA, 25 bp, Homo sapien
ttcaggtatatagttcgcaaataat

SEQ ID NO: 4860578 - DNA, 25 bp, Homo sapien
caggtatatagttcgcaaataatat

SEQ ID NO: 4860579 - DNA, 25 bp, Homo sapien
tcaggtatatagttcgcaaataata

SEQ ID NO: 4860580 - DNA, 25 bp, Homo sapien
tttcctttgagtgcttcataggaac

SEQ ID NO: 4860581 - DNA, 25 bp, Homo sapien
ttcctttgagtgcttcataggaact

SEQ ID NO: 4860582 - DNA, 25 bp, Homo sapien
acagtgatgtttccacagaccacaa

SEQ ID NO: 4860583 - DNA, 25 bp, Homo sapien
tgacttgtcgcggaggaaattcctc

SEQ ID NO: 4860584 - DNA, 25 bp, Homo sapien
gaaattcctcaggaaagcggtcaca

SEQ ID NO: 4860585 - DNA, 25 bp, Homo sapien
gaaagcggtcacactgtccacagtg

SEQ ID NO: 4860586 - DNA, 25 bp, Homo sapien
tcccacttcattgcagatccagaaa

SEQ ID NO: 4860587 - DNA, 25 bp, Homo sapien
gaacgttgtgtaggccaagtagcat

SEQ ID NO: 4860588 - DNA, 25 bp, Homo sapien
tgtgtaggccaagtagcatttaaat

SEQ ID NO: 4860589 - DNA, 25 bp, Homo sapien
gcagatccagaaatgaacgttgtgt

SEQ ID NO: 4860590 - DNA, 25 bp, Homo sapien
aggattggctataatcaggcatgcc

SEQ ID NO: 4860591 - DNA, 25 bp, Homo sapien
gaatcactgcacaaaggattggcta

SEQ ID NO: 4860592 - DNA, 25 bp, Homo sapien
aaaggattggctataatcaggcatg

SEQ ID NO: 4860593 - DNA, 25 bp, Homo sapien
gcatgggaatcactgcacaaaggat

SEQ ID NO: 4860594 - DNA, 25 bp, Homo sapien
gattctggtggtagaatcatagttc

SEQ ID NO: 4860595 - DNA, 25 bp, Homo sapien
tatctgtatgatgattctggtggta

SEQ ID NO: 4860596 - DNA, 25 bp, Homo sapien
gcagtatctgtatgatgattctggt

SEQ ID NO: 4860597 - DNA, 25 bp, Homo sapien
tggtagaatcatagttcttgataga

SEQ ID NO: 4860598 - DNA, 25 bp, Homo sapien
attcagcaaagcagatgatgttgtc

SEQ ID NO: 4860599 - DNA, 25 bp, Homo sapien
gatgatgttgtctccggtgtcccag

SEQ ID NO: 4860600 - DNA, 25 bp, Homo sapien
ccagctgggaatctttggcagataa

SEQ ID NO: 4860601 - DNA, 25 bp, Homo sapien
gttgtctccggtgtcccagttccag

SEQ ID NO: 4860602 - DNA, 25 bp, Homo sapien
ttttgttttgctccacaaatagaga

SEQ ID NO: 4860603 - DNA, 25 bp, Homo sapien
gagatgttaggaaggtacacaagcc

SEQ ID NO: 4860604 - DNA, 25 bp, Homo sapien
atagagatgttaggaaggtacacaa

SEQ ID NO: 4860605 - DNA, 25 bp, Homo sapien
agatgttaggaaggtacacaagcct

SEQ ID NO: 4860606 - DNA, 25 bp, Homo sapien
cgggcaacttcaggaaagctcattc

SEQ ID NO: 4860607 - DNA, 25 bp, Homo sapien
aaagtcatcagagagacgttgggtc

SEQ ID NO: 4860608 - DNA, 25 bp, Homo sapien
agtcatcagagagacgttgggtcag

SEQ ID NO: 4860609 - DNA, 25 bp, Homo sapien
aagtcatcagagagacgttgggtca

SEQ ID NO: 4860610 - DNA, 25 bp, Homo sapien
agggacttgtattcgatggctatca

SEQ ID NO: 4860611 - DNA, 25 bp, Homo sapien
cagaaaccatccgtaaagagggact

SEQ ID NO: 4860612 - DNA, 25 bp, Homo sapien
tcgatggctatcaacaggaggtgca

SEQ ID NO: 4860613 - DNA, 25 bp, Homo sapien
aaagagggacttgtattcgatggct

SEQ ID NO: 4860614 - DNA, 25 bp, Homo sapien
tgcattatgtgataacttctcttac

SEQ ID NO: 4860615 - DNA, 25 bp, Homo sapien
aaatgctgatgtctggtgatgaggt

SEQ ID NO: 4860616 - DNA, 25 bp, Homo sapien
caaaagcctttgtccggtcggctgg

SEQ ID NO: 4860617 - DNA, 25 bp, Homo sapien
gatgaggtctcctttatcaactcta

SEQ ID NO: 4860618 - DNA, 25 bp, Homo sapien
ataaacacatggtaatgtttccctc

SEQ ID NO: 4860619 - DNA, 25 bp, Homo sapien
aataaacacatggtaatgtttccct

SEQ ID NO: 4860620 - DNA, 25 bp, Homo sapien
cctcacttgtggaggtggatttagt

SEQ ID NO: 4860621 - DNA, 25 bp, Homo sapien
tggaggtggatttagtatcagacca

SEQ ID NO: 4860622 - DNA, 25 bp, Homo sapien
ttggagtttcagcaataaagaaccc

SEQ ID NO: 4860623 - DNA, 25 bp, Homo sapien
cctaatgtgttcttacgtatcctca

SEQ ID NO: 4860624 - DNA, 25 bp, Homo sapien
ttgtaattagctcaggaatgaacac

SEQ ID NO: 4860625 - DNA, 25 bp, Homo sapien
gacagactgaacagtaaaacaaggc

SEQ ID NO: 4860626 - DNA, 25 bp, Homo sapien
agccacagtttgtaattagctcagg

SEQ ID NO: 4860627 - DNA, 25 bp, Homo sapien
catgacagactgaacagtaaaacaa

SEQ ID NO: 4860628 - DNA, 25 bp, Homo sapien
atacccttggcggagaatcctgccc

SEQ ID NO: 4860629 - DNA, 25 bp, Homo sapien
agtttgatatgctcgaagtgcttgc

SEQ ID NO: 4860630 - DNA, 25 bp, Homo sapien
cctgatatacgagaggagattccct

SEQ ID NO: 4860631 - DNA, 25 bp, Homo sapien
agtgcttgcagatacccttggcgga

SEQ ID NO: 4860632 - DNA, 25 bp, Homo sapien
caaagatcttcctggtatattatcc

SEQ ID NO: 4860633 - DNA, 25 bp, Homo sapien
tgtaatgccacagtataacgactct

SEQ ID NO: 4860634 - DNA, 25 bp, Homo sapien
gcaaagtgctttaaatacctaatct

SEQ ID NO: 4860635 - DNA, 25 bp, Homo sapien
tatatttacccttagataatcacag

SEQ ID NO: 4860636 - DNA, 25 bp, Homo sapien
ctaaaatgtgaaagaaagtggtagc

SEQ ID NO: 4860637 - DNA, 25 bp, Homo sapien
aatgtgaaagaaagtggtagcaaaa

SEQ ID NO: 4860638 - DNA, 25 bp, Homo sapien
tgtgaaagaaagtggtagcaaaaac

SEQ ID NO: 4860639 - DNA, 25 bp, Homo sapien
aaaatgtgaaagaaagtggtagcaa

SEQ ID NO: 4860640 - DNA, 25 bp, Homo sapien
cttgtcaggctggtggtctatagat

SEQ ID NO: 4860641 - DNA, 25 bp, Homo sapien
aaaaccctgctggtatgcttgtcag

SEQ ID NO: 4860642 - DNA, 25 bp, Homo sapien
aatcttgcgaggtcttgaactctgt

SEQ ID NO: 4860643 - DNA, 25 bp, Homo sapien
tactgcatcgtagatcttcactgaa

SEQ ID NO: 4860644 - DNA, 25 bp, Homo sapien
gcttaagagagctgccaacttgtaa

SEQ ID NO: 4860645 - DNA, 25 bp, Homo sapien
catgtgcttaagagagctgccaact

SEQ ID NO: 4860646 - DNA, 25 bp, Homo sapien
tttattgtcctgatcgttgcgcatg

SEQ ID NO: 4860647 - DNA, 25 bp, Homo sapien
tcgttgcgcatgtgcttaagagagc

SEQ ID NO: 4860648 - DNA, 25 bp, Homo sapien
aagcaattccaatatttacagctga

SEQ ID NO: 4860649 - DNA, 25 bp, Homo sapien
agcaattccaatatttacagctgac

SEQ ID NO: 4860650 - DNA, 25 bp, Homo sapien
caagcaattccaatatttacagctg

SEQ ID NO: 4860651 - DNA, 25 bp, Homo sapien
taccagaaccaaatgtagtggctgc

SEQ ID NO: 4860652 - DNA, 25 bp, Homo sapien
cagaaccaaatgtagtggctgcaag

SEQ ID NO: 4860653 - DNA, 25 bp, Homo sapien
aaaataccagaaccaaatgtagtgg

SEQ ID NO: 4860654 - DNA, 25 bp, Homo sapien
accaaatgtagtggctgcaaggtga

SEQ ID NO: 4860655 - DNA, 25 bp, Homo sapien
gctggtgccagatacagccacctca

SEQ ID NO: 4860656 - DNA, 25 bp, Homo sapien
tccaaccagctggtgggattggcct

SEQ ID NO: 4860657 - DNA, 25 bp, Homo sapien
tctcttgcttgaaacccaaacaggg

SEQ ID NO: 4860658 - DNA, 25 bp, Homo sapien
ggattggcctaaagcatctgacaaa

SEQ ID NO: 4860659 - DNA, 25 bp, Homo sapien
ctcccctttcagtaattaaatacat

SEQ ID NO: 4860660 - DNA, 25 bp, Homo sapien
gcccggctactggttttcaaatgtg

SEQ ID NO: 4860661 - DNA, 25 bp, Homo sapien
acggcataccctgccacgcatttaa

SEQ ID NO: 4860662 - DNA, 25 bp, Homo sapien
aaatgtggctcacatcacggcatac

SEQ ID NO: 4860663 - DNA, 25 bp, Homo sapien
gatgaaggtggcactagcttagcag

SEQ ID NO: 4860664 - DNA, 25 bp, Homo sapien
tgaaggtggcactagcttagcagaa

SEQ ID NO: 4860665 - DNA, 25 bp, Homo sapien
aaggtggcactagcttagcagaagc

SEQ ID NO: 4860666 - DNA, 25 bp, Homo sapien
ggagatgaaggtggcactagcttag

SEQ ID NO: 4860667 - DNA, 25 bp, Homo sapien
gcacagcccatttgtgatctcccag

SEQ ID NO: 4860668 - DNA, 25 bp, Homo sapien
gtgctttcagtaacttcatcctcag

SEQ ID NO: 4860669 - DNA, 25 bp, Homo sapien
tatcaacactagtgattatcgtgct

SEQ ID NO: 4860670 - DNA, 25 bp, Homo sapien
tttctgccaatgagtgagtcatcag

SEQ ID NO: 4860671 - DNA, 25 bp, Homo sapien
gatggtttgtaacaatatcaacact

SEQ ID NO: 4860672 - DNA, 25 bp, Homo sapien
caagtttttcgttgattgatttcat

SEQ ID NO: 4860673 - DNA, 25 bp, Homo sapien
aagtttttcgttgattgatttcatg

SEQ ID NO: 4860674 - DNA, 25 bp, Homo sapien
tcttcaagtttttcgttgattgatt

SEQ ID NO: 4860675 - DNA, 25 bp, Homo sapien
caaagatgtgcttgatttgttcttc

SEQ ID NO: 4860676 - DNA, 25 bp, Homo sapien
tcattcctgttataaaaagtttcac

SEQ ID NO: 4860677 - DNA, 25 bp, Homo sapien
ttcattcctgttataaaaagtttca

SEQ ID NO: 4860678 - DNA, 25 bp, Homo sapien
gcttgatttgttcttcattcctgtt

SEQ ID NO: 4860679 - DNA, 25 bp, Homo sapien
gccaggtggatttaggttttcacca

SEQ ID NO: 4860680 - DNA, 25 bp, Homo sapien
atgccaggtggatttaggttttcac

SEQ ID NO: 4860681 - DNA, 25 bp, Homo sapien
caggtggatttaggttttcaccaat

SEQ ID NO: 4860682 - DNA, 25 bp, Homo sapien
tgccaggtggatttaggttttcacc

SEQ ID NO: 4860683 - DNA, 25 bp, Homo sapien
taaaaaatcatatatggggtcatac

SEQ ID NO: 4860684 - DNA, 25 bp, Homo sapien
aaaaatcatatatggggtcatactg

SEQ ID NO: 4860685 - DNA, 25 bp, Homo sapien
aaccattccttaaaaaatcatatat

SEQ ID NO: 4860686 - DNA, 25 bp, Homo sapien
aaatcatatatggggtcatactgac

SEQ ID NO: 4860687 - DNA, 25 bp, Homo sapien
tgttgtgttgatgacaagtggcagc

SEQ ID NO: 4860688 - DNA, 25 bp, Homo sapien
ggtgttgtgttgatgacaagtggca

SEQ ID NO: 4860689 - DNA, 25 bp, Homo sapien
gtgttgtgttgatgacaagtggcag

SEQ ID NO: 4860690 - DNA, 25 bp, Homo sapien
tggtgttgtgttgatgacaagtggc

SEQ ID NO: 4860691 - DNA, 25 bp, Homo sapien
aaaagtcagagtctgtgccctcagc

SEQ ID NO: 4860692 - DNA, 25 bp, Homo sapien
tgtctcatgagcagaacgtgttgcc

SEQ ID NO: 4860693 - DNA, 25 bp, Homo sapien
tgtcacttgaacgtcttccagcagg

SEQ ID NO: 4860694 - DNA, 25 bp, Homo sapien
gtttttgcagcctatccacttgtgg

SEQ ID NO: 4860695 - DNA, 25 bp, Homo sapien
tgttgcctcatgagcagaacgtgtc

SEQ ID NO: 4860696 - DNA, 25 bp, Homo sapien
tgttgtatttctgtctgggagcatc

SEQ ID NO: 4860697 - DNA, 25 bp, Homo sapien
ttactgcccaagcaacagcgtgttg

SEQ ID NO: 4860698 - DNA, 25 bp, Homo sapien
tgggagcatccaggaagcaatgaac

SEQ ID NO: 4860699 - DNA, 25 bp, Homo sapien
tcacaagtcttgcttcttactgccc

SEQ ID NO: 4860700 - DNA, 25 bp, Homo sapien
aagaatggagagttagtttgagact

SEQ ID NO: 4860701 - DNA, 25 bp, Homo sapien
agaatggagagttagtttgagacta

SEQ ID NO: 4860702 - DNA, 25 bp, Homo sapien
gaatggagagttagtttgagactat

SEQ ID NO: 4860703 - DNA, 25 bp, Homo sapien
aagaggttggtttgcaccagtgaaa

SEQ ID NO: 4860704 - DNA, 25 bp, Homo sapien
ggtcagaatcttgttctacatcatg

SEQ ID NO: 4860705 - DNA, 25 bp, Homo sapien
gagtcaccttgtccaaagaggttgg

SEQ ID NO: 4860706 - DNA, 25 bp, Homo sapien
gaaacatcccactgctatcaagctg

SEQ ID NO: 4860707 - DNA, 25 bp, Homo sapien
ggctgagtgggcatctccaaataca

SEQ ID NO: 4860708 - DNA, 25 bp, Homo sapien
gaaacttatactttgacttgccagt

SEQ ID NO: 4860709 - DNA, 25 bp, Homo sapien
gagtgggcatctccaaatacacatg

SEQ ID NO: 4860710 - DNA, 25 bp, Homo sapien
catgctacaatatggttccgaaact

SEQ ID NO: 4860711 - DNA, 25 bp, Homo sapien
tgctggctctcaagggcattacaaa

SEQ ID NO: 4860712 - DNA, 25 bp, Homo sapien
tgtagatagtccagagacccaatga

SEQ ID NO: 4860713 - DNA, 25 bp, Homo sapien
gaaatcgccattctctctgtagata

SEQ ID NO: 4860714 - DNA, 25 bp, Homo sapien
aatgaacactatgtccttcagctcc

SEQ ID NO: 4860715 - DNA, 25 bp, Homo sapien
tatgttggccgcatggaggtctcca

SEQ ID NO: 4860716 - DNA, 25 bp, Homo sapien
acatggagcattgctctatgttggc

SEQ ID NO: 4860717 - DNA, 25 bp, Homo sapien
cattgctctatgttggccgcatgga

SEQ ID NO: 4860718 - DNA, 25 bp, Homo sapien
ctatgttggccgcatggaggtctcc

SEQ ID NO: 4860719 - DNA, 25 bp, Homo sapien
caatttgcaaggatccgatggtgag

SEQ ID NO: 4860720 - DNA, 25 bp, Homo sapien
gtgtctaccaaagtctggttgcttg

SEQ ID NO: 4860721 - DNA, 25 bp, Homo sapien
tgagggttgccatgatggcttctgt

SEQ ID NO: 4860722 - DNA, 25 bp, Homo sapien
tgacactgagggtgacgggtcagag

SEQ ID NO: 4860723 - DNA, 25 bp, Homo sapien
ttcttcttttcaggggtgctgttct

SEQ ID NO: 4860724 - DNA, 25 bp, Homo sapien
tcttcttttcaggggtgctgttctc

SEQ ID NO: 4860725 - DNA, 25 bp, Homo sapien
tggtgctgtccccatgagtgcttta

SEQ ID NO: 4860726 - DNA, 25 bp, Homo sapien
ctcctcactgggctgaggcactgct

SEQ ID NO: 4860727 - DNA, 25 bp, Homo sapien
cctgtctccatatggaaggctgtgg

SEQ ID NO: 4860728 - DNA, 25 bp, Homo sapien
catgagtgctttaggacacattgca

SEQ ID NO: 4860729 - DNA, 25 bp, Homo sapien
tgatttctcattatgtccatttgtg

SEQ ID NO: 4860730 - DNA, 25 bp, Homo sapien
ccatttgtgtaacctggagtctcct

SEQ ID NO: 4860731 - DNA, 25 bp, Homo sapien
tcagtaaggatagggacttttcggc

SEQ ID NO: 4860732 - DNA, 25 bp, Homo sapien
gacttttcggcagtttgatttctca

SEQ ID NO: 4860733 - DNA, 25 bp, Homo sapien
aagtgccatccatgcaggccaaggg

SEQ ID NO: 4860734 - DNA, 25 bp, Homo sapien
ggaaagacaagcagatcaggttaag

SEQ ID NO: 4860735 - DNA, 25 bp, Homo sapien
atcaggttaagaatataagaagtgc

SEQ ID NO: 4860736 - DNA, 25 bp, Homo sapien
caaggggcgaccacttgatcaaaag

SEQ ID NO: 4860737 - DNA, 25 bp, Homo sapien
gaaaaggcagtgctgagatgcagat

SEQ ID NO: 4860738 - DNA, 25 bp, Homo sapien
aagctgccggaaaaaacagtgcccg

SEQ ID NO: 4860739 - DNA, 25 bp, Homo sapien
aaaacagtgcccgtagaaaaggcag

SEQ ID NO: 4860740 - DNA, 25 bp, Homo sapien
cgtggccagcagagaatccaagaag

SEQ ID NO: 4860741 - DNA, 25 bp, Homo sapien
aagctgagaggccgacactcactct

SEQ ID NO: 4860742 - DNA, 25 bp, Homo sapien
tgagaggccgacactcactcttcct

SEQ ID NO: 4860743 - DNA, 25 bp, Homo sapien
gctgagaggccgacactcactcttc

SEQ ID NO: 4860744 - DNA, 25 bp, Homo sapien
gagaggccgacactcactcttcctg

SEQ ID NO: 4860745 - DNA, 25 bp, Homo sapien
gaagggaaagtggtatctcctgagc

SEQ ID NO: 4860746 - DNA, 25 bp, Homo sapien
atctcctgagctctgatgccaaggg

SEQ ID NO: 4860747 - DNA, 25 bp, Homo sapien
aagggaaagtggtatctcctgagct

SEQ ID NO: 4860748 - DNA, 25 bp, Homo sapien
ctgagctctgatgccaagggacctg

SEQ ID NO: 4860749 - DNA, 25 bp, Homo sapien
cttgaaactgggatccctttatggc

SEQ ID NO: 4860750 - DNA, 25 bp, Homo sapien
gaaactgggatccctttatggccaa

SEQ ID NO: 4860751 - DNA, 25 bp, Homo sapien
tgaaactgggatccctttatggcca

SEQ ID NO: 4860752 - DNA, 25 bp, Homo sapien
tccttgaaactgggatccctttatg

SEQ ID NO: 4860753 - DNA, 25 bp, Homo sapien
gcattgcttgcaggattaagtaaaa

SEQ ID NO: 4860754 - DNA, 25 bp, Homo sapien
aaatatactgcacacattgctaaat

SEQ ID NO: 4860755 - DNA, 25 bp, Homo sapien
tttatcattgcttctcatgtatctg

SEQ ID NO: 4860756 - DNA, 25 bp, Homo sapien
tctgaagtgatattaatgagtgtag

SEQ ID NO: 4860757 - DNA, 25 bp, Homo sapien
ccaggacatgataattgtagaaggc

SEQ ID NO: 4860758 - DNA, 25 bp, Homo sapien
tccaggacatgataattgtagaagg

SEQ ID NO: 4860759 - DNA, 25 bp, Homo sapien
tttcttccagacaagagcgacgtgc

SEQ ID NO: 4860760 - DNA, 25 bp, Homo sapien
taaaatggtttcgtgtaaggacaga

SEQ ID NO: 4860761 - DNA, 25 bp, Homo sapien
atccttatctaaatgttgttccagc

SEQ ID NO: 4860762 - DNA, 25 bp, Homo sapien
gttccagctgagaacttactcctcc

SEQ ID NO: 4860763 - DNA, 25 bp, Homo sapien
gtagtagaagcttggaaagccattt

SEQ ID NO: 4860764 - DNA, 25 bp, Homo sapien
tgtcgtttgctttatctggtagtag

SEQ ID NO: 4860765 - DNA, 25 bp, Homo sapien
ggagtgtcgtttgctttatctggta

SEQ ID NO: 4860766 - DNA, 25 bp, Homo sapien
tagtagaagcttggaaagccatttc

SEQ ID NO: 4860767 - DNA, 25 bp, Homo sapien
taatgagccacagaacagttgtcca

SEQ ID NO: 4860768 - DNA, 25 bp, Homo sapien
tgttttctgggttgagctcctcttc

SEQ ID NO: 4860769 - DNA, 25 bp, Homo sapien
tcatcaattattcggtataagccaa

SEQ ID NO: 4860770 - DNA, 25 bp, Homo sapien
agccaacacacaggattccaaaaag

SEQ ID NO: 4860771 - DNA, 25 bp, Homo sapien
agcagtgctgaagggtatggcacaa

SEQ ID NO: 4860772 - DNA, 25 bp, Homo sapien
tttataacaagcagtgctgaagggt

SEQ ID NO: 4860773 - DNA, 25 bp, Homo sapien
aacaagcagtgctgaagggtatggc

SEQ ID NO: 4860774 - DNA, 25 bp, Homo sapien
tataacaagcagtgctgaagggtat

SEQ ID NO: 4860775 - DNA, 25 bp, Homo sapien
taagcagcaagttaagagcacgtga

SEQ ID NO: 4860776 - DNA, 25 bp, Homo sapien
gctctgaatatgcaaagggatcctc

SEQ ID NO: 4860777 - DNA, 25 bp, Homo sapien
cacgtgaagaatatgggcaggtcta

SEQ ID NO: 4860778 - DNA, 25 bp, Homo sapien
tcatgaaccactaagcaatgggcag

SEQ ID NO: 4860779 - DNA, 25 bp, Homo sapien
ttgtctctactaaacctgctatgtg

SEQ ID NO: 4860780 - DNA, 25 bp, Homo sapien
ttttgaatatccatagagccaatcc

SEQ ID NO: 4860781 - DNA, 25 bp, Homo sapien
aatactgtctttgcaataggttttg

SEQ ID NO: 4860782 - DNA, 25 bp, Homo sapien
ttctttctcgggaacattttgtctc

SEQ ID NO: 4860783 - DNA, 25 bp, Homo sapien
catctgaggcatctagggtgagtgt

SEQ ID NO: 4860784 - DNA, 25 bp, Homo sapien
taaagcccctctgagcatgtcgagg

SEQ ID NO: 4860785 - DNA, 25 bp, Homo sapien
caattggtagtactagttgagggcc

SEQ ID NO: 4860786 - DNA, 25 bp, Homo sapien
tctgtcctgctggataagaagccac

SEQ ID NO: 4860787 - DNA, 25 bp, Homo sapien
aaacatctcattatcacctggaatt

SEQ ID NO: 4860788 - DNA, 25 bp, Homo sapien
aacatctcattatcacctggaattt

SEQ ID NO: 4860789 - DNA, 25 bp, Homo sapien
caccttgtctgctgatcccctctcc

SEQ ID NO: 4860790 - DNA, 25 bp, Homo sapien
ccaccttgtctgctgatcccctctc

SEQ ID NO: 4860791 - DNA, 25 bp, Homo sapien
ccttgtctgctgatcccctctcctg

SEQ ID NO: 4860792 - DNA, 25 bp, Homo sapien
accttgtctgctgatcccctctcct

SEQ ID NO: 4860793 - DNA, 25 bp, Homo sapien
aagtgcaacatttgatccatgccca

SEQ ID NO: 4860794 - DNA, 25 bp, Homo sapien
acagaagtgcaacatttgatccatg

SEQ ID NO: 4860795 - DNA, 25 bp, Homo sapien
agacagaagtgcaacatttgatcca

SEQ ID NO: 4860796 - DNA, 25 bp, Homo sapien
aggagacagaagtgcaacatttgat

SEQ ID NO: 4860797 - DNA, 25 bp, Homo sapien
cacataacgacacagcatgtggctg

SEQ ID NO: 4860798 - DNA, 25 bp, Homo sapien
taaaagcacataacgacacagcatg

SEQ ID NO: 4860799 - DNA, 25 bp, Homo sapien
tcataaaagcacataacgacacagc

SEQ ID NO: 4860800 - DNA, 25 bp, Homo sapien
taacgacacagcatgtggctgtctt

SEQ ID NO: 4860801 - DNA, 25 bp, Homo sapien
cttagcttggacaattcttcctgga

SEQ ID NO: 4860802 - DNA, 25 bp, Homo sapien
aggtgtcccttgttgcctgtaccac

SEQ ID NO: 4860803 - DNA, 25 bp, Homo sapien
aaatgaatcaaatagccccacaagc

SEQ ID NO: 4860804 - DNA, 25 bp, Homo sapien
gactaccttgtcagatgtgatgaag

SEQ ID NO: 4860805 - DNA, 25 bp, Homo sapien
tacacattgtattaagcaagtcacg

SEQ ID NO: 4860806 - DNA, 25 bp, Homo sapien
caagtcacgagtgttaaatgaatca

SEQ ID NO: 4860807 - DNA, 25 bp, Homo sapien
tcagcactcgcctgtttctcccagc

SEQ ID NO: 4860808 - DNA, 25 bp, Homo sapien
gtttgagttcagattcctcagcact

SEQ ID NO: 4860809 - DNA, 25 bp, Homo sapien
tttgagttcagattcctcagcactc

SEQ ID NO: 4860810 - DNA, 25 bp, Homo sapien
gaagttcatttggtggactcagctg

SEQ ID NO: 4860811 - DNA, 25 bp, Homo sapien
tagttctgcttggattaacaccagc

SEQ ID NO: 4860812 - DNA, 25 bp, Homo sapien
aagaaatgcctgactaacatctggc

SEQ ID NO: 4860813 - DNA, 25 bp, Homo sapien
gactcagctgtttgtggaacccaag

SEQ ID NO: 4860814 - DNA, 25 bp, Homo sapien
gagcttctctgggctagtcctacca

SEQ ID NO: 4860815 - DNA, 25 bp, Homo sapien
agcttctctgggctagtcctaccat

SEQ ID NO: 4860816 - DNA, 25 bp, Homo sapien
gatgacctgattggacagactttca

SEQ ID NO: 4860817 - DNA, 25 bp, Homo sapien
cctgattggacagactttcatcagc

SEQ ID NO: 4860818 - DNA, 25 bp, Homo sapien
tgggttatgggggtgacttcctgct

SEQ ID NO: 4860819 - DNA, 25 bp, Homo sapien
aacagatgacctgattggacagact

SEQ ID NO: 4860820 - DNA, 25 bp, Homo sapien
acaggaaggaaatcctcttggtatc

SEQ ID NO: 4860821 - DNA, 25 bp, Homo sapien
atggagcagccacaggaaggaaatc

SEQ ID NO: 4860822 - DNA, 25 bp, Homo sapien
ggaaggaaatcctcttggtatccat

SEQ ID NO: 4860823 - DNA, 25 bp, Homo sapien
gatggagcagccacaggaaggaaat

SEQ ID NO: 4860824 - DNA, 25 bp, Homo sapien
aggagggagctattgactgagtaat

SEQ ID NO: 4860825 - DNA, 25 bp, Homo sapien
taatcatagacaagattctgaacac

SEQ ID NO: 4860826 - DNA, 25 bp, Homo sapien
gactgagtaatcatagacaagattc

SEQ ID NO: 4860827 - DNA, 25 bp, Homo sapien
gctattgactgagtaatcatagaca

SEQ ID NO: 4860828 - DNA, 25 bp, Homo sapien
cagaactccaagttccagttcttct

SEQ ID NO: 4860829 - DNA, 25 bp, Homo sapien
cagtgcagaactccaagttccagtt

SEQ ID NO: 4860830 - DNA, 25 bp, Homo sapien
gggtttggttgataaagtctcacat

SEQ ID NO: 4860831 - DNA, 25 bp, Homo sapien
gttgataaagtctcacattttccag

SEQ ID NO: 4860832 - DNA, 25 bp, Homo sapien
ggttccacacaccgatgatgtcatg

SEQ ID NO: 4860833 - DNA, 25 bp, Homo sapien
tccacacaccgatgatgtcatgtgt

SEQ ID NO: 4860834 - DNA, 25 bp, Homo sapien
tcatgtgtgggacccttaggttgtg

SEQ ID NO: 4860835 - DNA, 25 bp, Homo sapien
tgatgtcatgtgtgggacccttagg

SEQ ID NO: 4860836 - DNA, 25 bp, Homo sapien
gggaatacattcttgactcattatc

SEQ ID NO: 4860837 - DNA, 25 bp, Homo sapien
cttgactcattatccgagcaagtgg

SEQ ID NO: 4860838 - DNA, 25 bp, Homo sapien
tgacagggaatacattcttgactca

SEQ ID NO: 4860839 - DNA, 25 bp, Homo sapien
ttatccgagcaagtggaatcccacc

SEQ ID NO: 4860840 - DNA, 25 bp, Homo sapien
ggcagttttccagttgccacagccc

SEQ ID NO: 4860841 - DNA, 25 bp, Homo sapien
tatattgtttctggcatccctgagc

SEQ ID NO: 4860842 - DNA, 25 bp, Homo sapien
gcttgcaagctgcactgtagctggg

SEQ ID NO: 4860843 - DNA, 25 bp, Homo sapien
tgtgcagcatattggcctgtcaggg

SEQ ID NO: 4860844 - DNA, 25 bp, Homo sapien
ttgagtctgccgctgatgttcatta

SEQ ID NO: 4860845 - DNA, 25 bp, Homo sapien
ctattgagtctgccgctgatgttca

SEQ ID NO: 4860846 - DNA, 25 bp, Homo sapien
tgagtctgccgctgatgttcattac

SEQ ID NO: 4860847 - DNA, 25 bp, Homo sapien
tattgagtctgccgctgatgttcat

SEQ ID NO: 4860848 - DNA, 25 bp, Homo sapien
ttaggatctcctcaacgtcaagtcg

SEQ ID NO: 4860849 - DNA, 25 bp, Homo sapien
cacatcacggtgcttagaattctta

SEQ ID NO: 4860850 - DNA, 25 bp, Homo sapien
tcaagtcgggtcacatcacggtgct

SEQ ID NO: 4860851 - DNA, 25 bp, Homo sapien
cggtgcttagaattcttagaggcca

SEQ ID NO: 4860852 - DNA, 25 bp, Homo sapien
tgtttgaagcagcatcagatacaat

SEQ ID NO: 4860853 - DNA, 25 bp, Homo sapien
tctcttcccgcgtagctatttttta

SEQ ID NO: 4860854 - DNA, 25 bp, Homo sapien
catcagatacaatggctggttcttt

SEQ ID NO: 4860855 - DNA, 25 bp, Homo sapien
acttctgtgatgaaatgtttgaagc

SEQ ID NO: 4860856 - DNA, 25 bp, Homo sapien
gaagactgttatgacagttagcaga

SEQ ID NO: 4860857 - DNA, 25 bp, Homo sapien
tccagtcatgcacgtatttagactt

SEQ ID NO: 4860858 - DNA, 25 bp, Homo sapien
gacagttagcagacataattttaga

SEQ ID NO: 4860859 - DNA, 25 bp, Homo sapien
gaaatacaacttcttatcaaataag

SEQ ID NO: 4860860 - DNA, 25 bp, Homo sapien
tcatagcctactgcgctccaggcct

SEQ ID NO: 4860861 - DNA, 25 bp, Homo sapien
tcttcatagcctactgcgctccagg

SEQ ID NO: 4860862 - DNA, 25 bp, Homo sapien
tgtcttcatagcctactgcgctcca

SEQ ID NO: 4860863 - DNA, 25 bp, Homo sapien
ttcatagcctactgcgctccaggcc

SEQ ID NO: 4860864 - DNA, 25 bp, Homo sapien
tttaacctgagagtcagttgactgg

SEQ ID NO: 4860865 - DNA, 25 bp, Homo sapien
gaaaacacgatggttctcagcaagc

SEQ ID NO: 4860866 - DNA, 25 bp, Homo sapien
gttggaccacccatgactgccttct

SEQ ID NO: 4860867 - DNA, 25 bp, Homo sapien
ttctcagcaagcatataaagcagtt

SEQ ID NO: 4860868 - DNA, 25 bp, Homo sapien
ctggcctggggtaagaagtggccat

SEQ ID NO: 4860869 - DNA, 25 bp, Homo sapien
ataagacggtctttccacgggcaga

SEQ ID NO: 4860870 - DNA, 25 bp, Homo sapien
gctgcagttccggcttcacttccct

SEQ ID NO: 4860871 - DNA, 25 bp, Homo sapien
agaggtggagcataagacggtcttt

SEQ ID NO: 4860872 - DNA, 25 bp, Homo sapien
gagcataagacggtctttccacggg

SEQ ID NO: 4860873 - DNA, 25 bp, Homo sapien
gtaatagcagaggatgctgtgacct

SEQ ID NO: 4860874 - DNA, 25 bp, Homo sapien
cctgggttcccttcaagcctgtagt

SEQ ID NO: 4860875 - DNA, 25 bp, Homo sapien
tatggtaatagcagaggatgctgtg

SEQ ID NO: 4860876 - DNA, 25 bp, Homo sapien
gcctgggttcccttcaagcctgtag

SEQ ID NO: 4860877 - DNA, 25 bp, Homo sapien
ttggtcccagacctttctgcctgta

SEQ ID NO: 4860878 - DNA, 25 bp, Homo sapien
tggtcccagacctttctgcctgtac

SEQ ID NO: 4860879 - DNA, 25 bp, Homo sapien
gtatatgggggatttatgataggcc

SEQ ID NO: 4860880 - DNA, 25 bp, Homo sapien
aggtatatgggggatttatgatagg

SEQ ID NO: 4860881 - DNA, 25 bp, Homo sapien
ggtatatgggggatttatgataggc

SEQ ID NO: 4860882 - DNA, 25 bp, Homo sapien
ggaaatgggcggtggctgtatgctt

SEQ ID NO: 4860883 - DNA, 25 bp, Homo sapien
atgggcggtggctgtatgcttcatt

SEQ ID NO: 4860884 - DNA, 25 bp, Homo sapien
aaatgggcggtggctgtatgcttca

SEQ ID NO: 4860885 - DNA, 25 bp, Homo sapien
aaagccatcgtcataatcatctgga

SEQ ID NO: 4860886 - DNA, 25 bp, Homo sapien
gtgctgttgctgtccgatccaatgt

SEQ ID NO: 4860887 - DNA, 25 bp, Homo sapien
gctgtccgatccaatgttactatca

SEQ ID NO: 4860888 - DNA, 25 bp, Homo sapien
gtccgatccaatgttactatcactg

SEQ ID NO: 4860889 - DNA, 25 bp, Homo sapien
gttgctgtccgatccaatgttacta

SEQ ID NO: 4860890 - DNA, 25 bp, Homo sapien
acaacacataaaacaaggcaagatt

SEQ ID NO: 4860891 - DNA, 25 bp, Homo sapien
tatgggatcttttggtggctcctgc

SEQ ID NO: 4860892 - DNA, 25 bp, Homo sapien
ttacaacacataaaacaaggcaaga

SEQ ID NO: 4860893 - DNA, 25 bp, Homo sapien
ataaaacaaggcaagatttactctt

SEQ ID NO: 4860894 - DNA, 25 bp, Homo sapien
tattaacaaggtaaggcagctatcc

SEQ ID NO: 4860895 - DNA, 25 bp, Homo sapien
tactcacttactagttcccagatgg

SEQ ID NO: 4860896 - DNA, 25 bp, Homo sapien
tgctatacaggcaagcaattgactt

SEQ ID NO: 4860897 - DNA, 25 bp, Homo sapien
tcttattgcattagatgggacgcca

SEQ ID NO: 4860898 - DNA, 25 bp, Homo sapien
gagatacagatggagtttaccgaca

SEQ ID NO: 4860899 - DNA, 25 bp, Homo sapien
ggaaaggtctttccctgatgcctgc

SEQ ID NO: 4860900 - DNA, 25 bp, Homo sapien
tttcttccattgacagagatacaga

SEQ ID NO: 4860901 - DNA, 25 bp, Homo sapien
tccttcgatctcagtaaattggaaa

SEQ ID NO: 4860902 - DNA, 25 bp, Homo sapien
tcttcgttatcagccaaagcagtag

SEQ ID NO: 4860903 - DNA, 25 bp, Homo sapien
aatttttgcaggtggacggccttgg

SEQ ID NO: 4860904 - DNA, 25 bp, Homo sapien
ggctgaagcaaacatggccctaatc

SEQ ID NO: 4860905 - DNA, 25 bp, Homo sapien
gcaatgcatcacagaggccgggtgt

SEQ ID NO: 4860906 - DNA, 25 bp, Homo sapien
ccttgctaatgtcttcttggaagag

SEQ ID NO: 4860907 - DNA, 25 bp, Homo sapien
aatccttgctaatgtcttcttggaa

SEQ ID NO: 4860908 - DNA, 25 bp, Homo sapien
caggctggctcctatgacgtctttt

SEQ ID NO: 4860909 - DNA, 25 bp, Homo sapien
tcctatgacgtcttttccaaatgcc

SEQ ID NO: 4860910 - DNA, 25 bp, Homo sapien
taacattgacaaatgagaggcaaac

SEQ ID NO: 4860911 - DNA, 25 bp, Homo sapien
ccacatgtggcagggatatgccagt

SEQ ID NO: 4860912 - DNA, 25 bp, Homo sapien
cattgatttatgtgtactactggca

SEQ ID NO: 4860913 - DNA, 25 bp, Homo sapien
caaatgagaggcaaacctggccaca

SEQ ID NO: 4860914 - DNA, 25 bp, Homo sapien
tggagctttgcaatttggacattgc

SEQ ID NO: 4860915 - DNA, 25 bp, Homo sapien
cttcgtggagctttgcaatttggac

SEQ ID NO: 4860916 - DNA, 25 bp, Homo sapien
ttgcttcgtggagctttgcaatttg

SEQ ID NO: 4860917 - DNA, 25 bp, Homo sapien
gctttgcaatttggacattgcccat

SEQ ID NO: 4860918 - DNA, 25 bp, Homo sapien
ggtgagttgctgtaacaatctgcac

SEQ ID NO: 4860919 - DNA, 25 bp, Homo sapien
ctggtgagttgctgtaacaatctgc

SEQ ID NO: 4860920 - DNA, 25 bp, Homo sapien
tggtgagttgctgtaacaatctgca

SEQ ID NO: 4860921 - DNA, 25 bp, Homo sapien
cagccattttggagccgacggtaat

SEQ ID NO: 4860922 - DNA, 25 bp, Homo sapien
catcactctcacaaggtaagcaagg

SEQ ID NO: 4860923 - DNA, 25 bp, Homo sapien
gagctgatgagccagcatcttctgc

SEQ ID NO: 4860924 - DNA, 25 bp, Homo sapien
tctagacgagtgatagctgtgggct

SEQ ID NO: 4860925 - DNA, 25 bp, Homo sapien
taagcttcaaaggtctgccaggacg

SEQ ID NO: 4860926 - DNA, 25 bp, Homo sapien
ctatgctgataaggcaccaaatgac

SEQ ID NO: 4860927 - DNA, 25 bp, Homo sapien
ggctaagctcactatctattccatg

SEQ ID NO: 4860928 - DNA, 25 bp, Homo sapien
tgccaggacggctaagctcactatc

SEQ ID NO: 4860929 - DNA, 25 bp, Homo sapien
gctgtcatggagcataaagaaataa

SEQ ID NO: 4860930 - DNA, 25 bp, Homo sapien
attctcacacttaatgtaattccaa

SEQ ID NO: 4860931 - DNA, 25 bp, Homo sapien
gcagcaaaagatctataattctcac

SEQ ID NO: 4860932 - DNA, 25 bp, Homo sapien
aatccctggctctgtcgtttctctg

SEQ ID NO: 4860933 - DNA, 25 bp, Homo sapien
cagccttccactttagcaagcaaag

SEQ ID NO: 4860934 - DNA, 25 bp, Homo sapien
caagtttgtctaattgaaccggaga

SEQ ID NO: 4860935 - DNA, 25 bp, Homo sapien
taacaaatgctgtgtaagggttcac

SEQ ID NO: 4860936 - DNA, 25 bp, Homo sapien
tccagcgttgttgagtggtcaattc

SEQ ID NO: 4860937 - DNA, 25 bp, Homo sapien
tttgtgtcaacataatacatccttt

SEQ ID NO: 4860938 - DNA, 25 bp, Homo sapien
gaacatctttgcatatatatcactg

SEQ ID NO: 4860939 - DNA, 25 bp, Homo sapien
tattatggtggaataacctgtctta

SEQ ID NO: 4860940 - DNA, 25 bp, Homo sapien
tttgaggcctttaatacatattatc

SEQ ID NO: 4860941 - DNA, 25 bp, Homo sapien
cacgaacatctctgcaccgtgtcca

SEQ ID NO: 4860942 - DNA, 25 bp, Homo sapien
ccagtggatggcaaatataacggca

SEQ ID NO: 4860943 - DNA, 25 bp, Homo sapien
tggatggcaaatataacggcaggca

SEQ ID NO: 4860944 - DNA, 25 bp, Homo sapien
gtccacagtcactgcttgcaggaca

SEQ ID NO: 4860945 - DNA, 25 bp, Homo sapien
tcaggcagaagcctgtatcacttag

SEQ ID NO: 4860946 - DNA, 25 bp, Homo sapien
ccattagtcttactggggcttccag

SEQ ID NO: 4860947 - DNA, 25 bp, Homo sapien
agaagcctgtatcacttagaaccca

SEQ ID NO: 4860948 - DNA, 25 bp, Homo sapien
ggcagaagcctgtatcacttagaac

SEQ ID NO: 4860949 - DNA, 25 bp, Homo sapien
caactcagtgtaattacttagatca

SEQ ID NO: 4860950 - DNA, 25 bp, Homo sapien
tggatcttggtggacccagaggtat

SEQ ID NO: 4860951 - DNA, 25 bp, Homo sapien
gatggattaattaggagttgctgct

SEQ ID NO: 4860952 - DNA, 25 bp, Homo sapien
agttgctgctttagggttgctccaa

SEQ ID NO: 4860953 - DNA, 25 bp, Homo sapien
ctgcctgttgaggagggcgatgatt

SEQ ID NO: 4860954 - DNA, 25 bp, Homo sapien
tgaggagggcgatgattcctccctg

SEQ ID NO: 4860955 - DNA, 25 bp, Homo sapien
gttgaggagggcgatgattcctccc

SEQ ID NO: 4860956 - DNA, 25 bp, Homo sapien
cctgttgaggagggcgatgattcct

SEQ ID NO: 4860957 - DNA, 25 bp, Homo sapien
gcacacaaacagctcagttacaata

SEQ ID NO: 4860958 - DNA, 25 bp, Homo sapien
gctcagttacaataaccagagtttc

SEQ ID NO: 4860959 - DNA, 25 bp, Homo sapien
tcttaagggagacaggccagtcccc

SEQ ID NO: 4860960 - DNA, 25 bp, Homo sapien
gctttctgagtcatgccccttcact

SEQ ID NO: 4860961 - DNA, 25 bp, Homo sapien
ccctggctgcacgtttgaatcatgg

SEQ ID NO: 4860962 - DNA, 25 bp, Homo sapien
caaaaagacgaatgctagggccacc

SEQ ID NO: 4860963 - DNA, 25 bp, Homo sapien
gacacatcagggcatggaggccttt

SEQ ID NO: 4860964 - DNA, 25 bp, Homo sapien
ctcagttgcggtcccacatggcaga

SEQ ID NO: 4860965 - DNA, 25 bp, Homo sapien
tcatgcgaatgtggtgcccccatgg

SEQ ID NO: 4860966 - DNA, 25 bp, Homo sapien
gagaaggtaatgtcttgctttggag

SEQ ID NO: 4860967 - DNA, 25 bp, Homo sapien
ggcaatacccccatcactgttggca

SEQ ID NO: 4860968 - DNA, 25 bp, Homo sapien
cataggcagcaagggtagagaaggt

SEQ ID NO: 4860969 - DNA, 25 bp, Homo sapien
tcaagaacatgacaaggcgacattg

SEQ ID NO: 4860970 - DNA, 25 bp, Homo sapien
tccgtaaaggcaggtgcatgtgtcc

SEQ ID NO: 4860971 - DNA, 25 bp, Homo sapien
gatgattaatctcagcgtggctgtg

SEQ ID NO: 4860972 - DNA, 25 bp, Homo sapien
tgtgtgtttaggctctccgtaaagg

SEQ ID NO: 4860973 - DNA, 25 bp, Homo sapien
tgcctcccacattcttggcgagccc

SEQ ID NO: 4860974 - DNA, 25 bp, Homo sapien
gcctcccacattcttggcgagccca

SEQ ID NO: 4860975 - DNA, 25 bp, Homo sapien
cctcccacattcttggcgagcccac

SEQ ID NO: 4860976 - DNA, 25 bp, Homo sapien
ttgcctcccacattcttggcgagcc

SEQ ID NO: 4860977 - DNA, 25 bp, Homo sapien
ggagatgggtagagattgatggcac

SEQ ID NO: 4860978 - DNA, 25 bp, Homo sapien
ctttgtgacagtcagcacaggtttg

SEQ ID NO: 4860979 - DNA, 25 bp, Homo sapien
tgtgacagtcagcacaggtttggag

SEQ ID NO: 4860980 - DNA, 25 bp, Homo sapien
agatgggtagagattgatggcacca

SEQ ID NO: 4860981 - DNA, 25 bp, Homo sapien
tggatgccacgtggaaggacatctg

SEQ ID NO: 4860982 - DNA, 25 bp, Homo sapien
caattctgtgactttgcggtgggaa

SEQ ID NO: 4860983 - DNA, 25 bp, Homo sapien
agagcccactggaaagtagctgtgg

SEQ ID NO: 4860984 - DNA, 25 bp, Homo sapien
tcctttaacatgctggaacaagaaa

SEQ ID NO: 4860985 - DNA, 25 bp, Homo sapien
tgagctcaagggcagccagtgctgg

SEQ ID NO: 4860986 - DNA, 25 bp, Homo sapien
cagccagtgctggaaaaatgatggt

SEQ ID NO: 4860987 - DNA, 25 bp, Homo sapien
tttctgaccttctcttctccacggg

SEQ ID NO: 4860988 - DNA, 25 bp, Homo sapien
tggaaaaatgatggtggagagccag

SEQ ID NO: 4860989 - DNA, 25 bp, Homo sapien
tgtgtggagaacacgtgaggttctc

SEQ ID NO: 4860990 - DNA, 25 bp, Homo sapien
gtggagaacacgtgaggttctctgt

SEQ ID NO: 4860991 - DNA, 25 bp, Homo sapien
ctgtgtggagaacacgtgaggttct

SEQ ID NO: 4860992 - DNA, 25 bp, Homo sapien
tgtggagaacacgtgaggttctctg

SEQ ID NO: 4860993 - DNA, 25 bp, Homo sapien
ttcccatcggccttcggtcttcagt

SEQ ID NO: 4860994 - DNA, 25 bp, Homo sapien
cccgtttgctggctgtctgtgccac

SEQ ID NO: 4860995 - DNA, 25 bp, Homo sapien
cagtccaagaagttctctgcaaggt

SEQ ID NO: 4860996 - DNA, 25 bp, Homo sapien
tgcaaggtcttctttgttcccagct

SEQ ID NO: 4860997 - DNA, 25 bp, Homo sapien
cttgttccactctcccattaggaca

SEQ ID NO: 4860998 - DNA, 25 bp, Homo sapien
tgttccactctcccattaggacatg

SEQ ID NO: 4860999 - DNA, 25 bp, Homo sapien
ggtcttgttccactctcccattagg

SEQ ID NO: 4861000 - DNA, 25 bp, Homo sapien
gtcttgttccactctcccattagga

SEQ ID NO: 4861001 - DNA, 25 bp, Homo sapien
agggctgcccaagacacatggattc

SEQ ID NO: 4861002 - DNA, 25 bp, Homo sapien
gatgctcagggtcgcttccgagcct

SEQ ID NO: 4861003 - DNA, 25 bp, Homo sapien
tcctgccttgtttgtggcctgaagc

SEQ ID NO: 4861004 - DNA, 25 bp, Homo sapien
gccacagcttttgggatttccttgg

SEQ ID NO: 4861005 - DNA, 25 bp, Homo sapien
cgatgacggggatgtacttttgagt

SEQ ID NO: 4861006 - DNA, 25 bp, Homo sapien
ttttgagtgtcatcttgacaaggag

SEQ ID NO: 4861007 - DNA, 25 bp, Homo sapien
atctcgcgctgacacaccactgaca

SEQ ID NO: 4861008 - DNA, 25 bp, Homo sapien
accactgacaacccgcgatgacggg

SEQ ID NO: 4861009 - DNA, 25 bp, Homo sapien
cagaaacaccagcaataaagagcac

SEQ ID NO: 4861010 - DNA, 25 bp, Homo sapien
aatgctccacagaaacaccagcaat

SEQ ID NO: 4861011 - DNA, 25 bp, Homo sapien
gatctgacatcattaatgacacatg

SEQ ID NO: 4861012 - DNA, 25 bp, Homo sapien
ttgatctgacatcattaatgacaca

SEQ ID NO: 4861013 - DNA, 25 bp, Homo sapien
cagagcgtagggtccttgtcctcca

SEQ ID NO: 4861014 - DNA, 25 bp, Homo sapien
cttggcggttgagaaaattgcagca

SEQ ID NO: 4861015 - DNA, 25 bp, Homo sapien
taggaactgggaagaccttacaggc

SEQ ID NO: 4861016 - DNA, 25 bp, Homo sapien
tcagagccatgacaattcggaaagg

SEQ ID NO: 4861017 - DNA, 25 bp, Homo sapien
tgcaaataggtctaaatgtgtccat

SEQ ID NO: 4861018 - DNA, 25 bp, Homo sapien
cgagtgttgccttcacactggtccc

SEQ ID NO: 4861019 - DNA, 25 bp, Homo sapien
cccatactcctggtcactgcaaata

SEQ ID NO: 4861020 - DNA, 25 bp, Homo sapien
tggtcactgcaaataggtctaaatg

SEQ ID NO: 4861021 - DNA, 25 bp, Homo sapien
tacgaagcacactcagttggaacct

SEQ ID NO: 4861022 - DNA, 25 bp, Homo sapien
agcaagacaaaacctctcctcgagg

SEQ ID NO: 4861023 - DNA, 25 bp, Homo sapien
tagtgaccatcgtgtgtacgaagca

SEQ ID NO: 4861024 - DNA, 25 bp, Homo sapien
tgtggcccagctggaatcagacaca

SEQ ID NO: 4861025 - DNA, 25 bp, Homo sapien
tgcagagtgccgagagctccttgga

SEQ ID NO: 4861026 - DNA, 25 bp, Homo sapien
aataagtccattatctgcagagtgc

SEQ ID NO: 4861027 - DNA, 25 bp, Homo sapien
ggtgctctaaggataaataagtcca

SEQ ID NO: 4861028 - DNA, 25 bp, Homo sapien
gaggaaggctttacataaatgcaca

SEQ ID NO: 4861029 - DNA, 25 bp, Homo sapien
ccagtgataggcgtgatgtaaacat

SEQ ID NO: 4861030 - DNA, 25 bp, Homo sapien
tcatcagagctgtgttaacatctcc

SEQ ID NO: 4861031 - DNA, 25 bp, Homo sapien
acttcccagcttgtttgtcaaaggc

SEQ ID NO: 4861032 - DNA, 25 bp, Homo sapien
taaacataggtagacacagagatcc

SEQ ID NO: 4861033 - DNA, 25 bp, Homo sapien
gctggtgtgacaatgtaaacccctc

SEQ ID NO: 4861034 - DNA, 25 bp, Homo sapien
ttgaagttgctggtgtgacaatgta

SEQ ID NO: 4861035 - DNA, 25 bp, Homo sapien
gctggccgtggggtcttttgcatca

SEQ ID NO: 4861036 - DNA, 25 bp, Homo sapien
gggattggataggaaatgctggccg

SEQ ID NO: 4861037 - DNA, 25 bp, Homo sapien
ggtcttttgcatcaggaaagtccag

SEQ ID NO: 4861038 - DNA, 25 bp, Homo sapien
ttcagaagcctacaacagccatcgg

SEQ ID NO: 4861039 - DNA, 25 bp, Homo sapien
ctccctgatttagatacactgtgtt

SEQ ID NO: 4861040 - DNA, 25 bp, Homo sapien
tggttcggggattttctttctctgc

SEQ ID NO: 4861041 - DNA, 25 bp, Homo sapien
ctgatttagatacactgtgtttaat

SEQ ID NO: 4861042 - DNA, 25 bp, Homo sapien
ccctgatttagatacactgtgttta

SEQ ID NO: 4861043 - DNA, 25 bp, Homo sapien
cttggacagaaagagtggctctaga

SEQ ID NO: 4861044 - DNA, 25 bp, Homo sapien
gacagaaagagtggctctagacatg

SEQ ID NO: 4861045 - DNA, 25 bp, Homo sapien
ggacagaaagagtggctctagacat

SEQ ID NO: 4861046 - DNA, 25 bp, Homo sapien
ttggacagaaagagtggctctagac

SEQ ID NO: 4861047 - DNA, 25 bp, Homo sapien
cagggaccgcgctttgtctgctgta

SEQ ID NO: 4861048 - DNA, 25 bp, Homo sapien
catgatttatggtccctgtcaggca

SEQ ID NO: 4861049 - DNA, 25 bp, Homo sapien
tgtcatctggaatggtataagctgt

SEQ ID NO: 4861050 - DNA, 25 bp, Homo sapien
tggacgatgaatgctccgctgtcat

SEQ ID NO: 4861051 - DNA, 25 bp, Homo sapien
ctggcactcggatgtcaagttgctc

SEQ ID NO: 4861052 - DNA, 25 bp, Homo sapien
gggaagaagaaccaactcataaaca

SEQ ID NO: 4861053 - DNA, 25 bp, Homo sapien
ttctgccctggcactcggatgtcaa

SEQ ID NO: 4861054 - DNA, 25 bp, Homo sapien
gaagaagaaccaactcataaacatg

SEQ ID NO: 4861055 - DNA, 25 bp, Homo sapien
agcttaaacccttgacagcattaag

SEQ ID NO: 4861056 - DNA, 25 bp, Homo sapien
cagcttaaacccttgacagcattaa

SEQ ID NO: 4861057 - DNA, 25 bp, Homo sapien
tcagcttaaacccttgacagcatta

SEQ ID NO: 4861058 - DNA, 25 bp, Homo sapien
agctgcctggcaagactgagtctag

SEQ ID NO: 4861059 - DNA, 25 bp, Homo sapien
taccttgagcgaagcctctttgggt

SEQ ID NO: 4861060 - DNA, 25 bp, Homo sapien
cttgaagggcaaacacagtgagggt

SEQ ID NO: 4861061 - DNA, 25 bp, Homo sapien
catctgaagctatccctgggctggg

SEQ ID NO: 4861062 - DNA, 25 bp, Homo sapien
ggactcttcctgttgtactgcgagg

SEQ ID NO: 4861063 - DNA, 25 bp, Homo sapien
tcttcctgttgtactgcgaggttct

SEQ ID NO: 4861064 - DNA, 25 bp, Homo sapien
tcagacggactcttcctgttgtact

SEQ ID NO: 4861065 - DNA, 25 bp, Homo sapien
tgttgtactgcgaggttctgcaaac

SEQ ID NO: 4861066 - DNA, 25 bp, Homo sapien
gtacctcctgagagaccaccaccct

SEQ ID NO: 4861067 - DNA, 25 bp, Homo sapien
gcaggatcttggcagtggactgcca

SEQ ID NO: 4861068 - DNA, 25 bp, Homo sapien
gggccattctccttttagcaggatc

SEQ ID NO: 4861069 - DNA, 25 bp, Homo sapien
cagttttcttcaacatgggccattc

SEQ ID NO: 4861070 - DNA, 25 bp, Homo sapien
ctggaagcgtcaagtgtctccttga

SEQ ID NO: 4861071 - DNA, 25 bp, Homo sapien
ctctggaagcgtcaagtgtctcctt

SEQ ID NO: 4861072 - DNA, 25 bp, Homo sapien
gaagcgtcaagtgtctccttgacat

SEQ ID NO: 4861073 - DNA, 25 bp, Homo sapien
ggaagcgtcaagtgtctccttgaca

SEQ ID NO: 4861074 - DNA, 25 bp, Homo sapien
taactaggatcttaggggacaccca

SEQ ID NO: 4861075 - DNA, 25 bp, Homo sapien
atcttaggggacacccaaccatggt

SEQ ID NO: 4861076 - DNA, 25 bp, Homo sapien
gacacccaaccatggttctttctca

SEQ ID NO: 4861077 - DNA, 25 bp, Homo sapien
ctgttaactaggatcttaggggaca

SEQ ID NO: 4861078 - DNA, 25 bp, Homo sapien
cctgactttggactttctgtgaaga

SEQ ID NO: 4861079 - DNA, 25 bp, Homo sapien
tggctttccttaactgtgagatcaa

SEQ ID NO: 4861080 - DNA, 25 bp, Homo sapien
gaagtacactttgccctccatgggc

SEQ ID NO: 4861081 - DNA, 25 bp, Homo sapien
tagttccatgcagatcagttgagag

SEQ ID NO: 4861082 - DNA, 25 bp, Homo sapien
tcgtgaagacttccctgtgtccgtg

SEQ ID NO: 4861083 - DNA, 25 bp, Homo sapien
tcctgactggcatgggactagcaag

SEQ ID NO: 4861084 - DNA, 25 bp, Homo sapien
ccctgcagagaacacgtgaagtcct

SEQ ID NO: 4861085 - DNA, 25 bp, Homo sapien
ttatttaaaagccacgatgtctccc

SEQ ID NO: 4861086 - DNA, 25 bp, Homo sapien
agtctctctcagacttctctttggg

SEQ ID NO: 4861087 - DNA, 25 bp, Homo sapien
cttctctgtctggttatcccattta

SEQ ID NO: 4861088 - DNA, 25 bp, Homo sapien
tctgtctggttatcccatttaccct

SEQ ID NO: 4861089 - DNA, 25 bp, Homo sapien
catttacccttgaaagtctctctca

SEQ ID NO: 4861090 - DNA, 25 bp, Homo sapien
tatccagtaggctgtctggcctcgc

SEQ ID NO: 4861091 - DNA, 25 bp, Homo sapien
ccagtgcagagaaaaccagacctca

SEQ ID NO: 4861092 - DNA, 25 bp, Homo sapien
ggcctcgctaagtcaatccactgaa

SEQ ID NO: 4861093 - DNA, 25 bp, Homo sapien
gcacctgcttcctgttgcgtgtatt

SEQ ID NO: 4861094 - DNA, 25 bp, Homo sapien
tctataaattgctcctctgacgttt

SEQ ID NO: 4861095 - DNA, 25 bp, Homo sapien
attcctaaagaatctggttctataa

SEQ ID NO: 4861096 - DNA, 25 bp, Homo sapien
ctggaggggcttggtcactgaattc

SEQ ID NO: 4861097 - DNA, 25 bp, Homo sapien
gaatctggttctataaattgctcct

SEQ ID NO: 4861098 - DNA, 25 bp, Homo sapien
gaatcaaacaggcacatggatgcta

SEQ ID NO: 4861099 - DNA, 25 bp, Homo sapien
caggcacatggatgctaagttcctt

SEQ ID NO: 4861100 - DNA, 25 bp, Homo sapien
aaaatgaatcaaacaggcacatgga

SEQ ID NO: 4861101 - DNA, 25 bp, Homo sapien
tcaaacaggcacatggatgctaagt

SEQ ID NO: 4861102 - DNA, 25 bp, Homo sapien
aagacagtacaagcctgtctaggtg

SEQ ID NO: 4861103 - DNA, 25 bp, Homo sapien
tgtgactccgatactccaaacaaaa

SEQ ID NO: 4861104 - DNA, 25 bp, Homo sapien
tctccccagtgtggggcatcttgga

SEQ ID NO: 4861105 - DNA, 25 bp, Homo sapien
tcaagctgtgactccgatactccaa

SEQ ID NO: 4861106 - DNA, 25 bp, Homo sapien
ctgtgtcagaaagggcggggttggg

SEQ ID NO: 4861107 - DNA, 25 bp, Homo sapien
ctgagttcctttcttcctgcgtttg

SEQ ID NO: 4861108 - DNA, 25 bp, Homo sapien
tcttcctgcgtttgcctgaacagtg

SEQ ID NO: 4861109 - DNA, 25 bp, Homo sapien
gcgtttgcctgaacagtgccaattg

SEQ ID NO: 4861110 - DNA, 25 bp, Homo sapien
cctgaacagtgccaattgttctcct

SEQ ID NO: 4861111 - DNA, 25 bp, Homo sapien
tgtgtattttcacggctgggccttt

SEQ ID NO: 4861112 - DNA, 25 bp, Homo sapien
gtattttcacggctgggcctttata

SEQ ID NO: 4861113 - DNA, 25 bp, Homo sapien
ggctgtgtattttcacggctgggcc

SEQ ID NO: 4861114 - DNA, 25 bp, Homo sapien
tattttcacggctgggcctttatac

SEQ ID NO: 4861115 - DNA, 25 bp, Homo sapien
tcattggccaaaaccagccccggag

SEQ ID NO: 4861116 - DNA, 25 bp, Homo sapien
gatccctggctgctgcgtggtgata

SEQ ID NO: 4861117 - DNA, 25 bp, Homo sapien
gccccggagacagcatgatcctgtc

SEQ ID NO: 4861118 - DNA, 25 bp, Homo sapien
gctttgggtagctgtcttaggagac

SEQ ID NO: 4861119 - DNA, 25 bp, Homo sapien
tccacctttgtaatgtgactccaat

SEQ ID NO: 4861120 - DNA, 25 bp, Homo sapien
ttgtaatgtgactccaatggcttga

SEQ ID NO: 4861121 - DNA, 25 bp, Homo sapien
cctttgtaatgtgactccaatggct

SEQ ID NO: 4861122 - DNA, 25 bp, Homo sapien
tcttccacctttgtaatgtgactcc

SEQ ID NO: 4861123 - DNA, 25 bp, Homo sapien
tattccgctgtgttattttggagcc

SEQ ID NO: 4861124 - DNA, 25 bp, Homo sapien
acaggccggaggtgtccactattcc

SEQ ID NO: 4861125 - DNA, 25 bp, Homo sapien
tacattcgttttcgtggcaggatct

SEQ ID NO: 4861126 - DNA, 25 bp, Homo sapien
gatctctgagcacctagtggcagca

SEQ ID NO: 4861127 - DNA, 25 bp, Homo sapien
ctgaaccagaaccctctgccgagct

SEQ ID NO: 4861128 - DNA, 25 bp, Homo sapien
ccctgaaccagaaccctctgccgag

SEQ ID NO: 4861129 - DNA, 25 bp, Homo sapien
cctgaaccagaaccctctgccgagc

SEQ ID NO: 4861130 - DNA, 25 bp, Homo sapien
tgaaccagaaccctctgccgagctt

SEQ ID NO: 4861131 - DNA, 25 bp, Homo sapien
caccaagaggccagcaaacgtttca

SEQ ID NO: 4861132 - DNA, 25 bp, Homo sapien
gcaaacgtttcaccccaatgtccag

SEQ ID NO: 4861133 - DNA, 25 bp, Homo sapien
aacgtttcaccccaatgtccagagt

SEQ ID NO: 4861134 - DNA, 25 bp, Homo sapien
aggccagcaaacgtttcaccccaat

SEQ ID NO: 4861135 - DNA, 25 bp, Homo sapien
aggtttcacattgctctttgctgtc

SEQ ID NO: 4861136 - DNA, 25 bp, Homo sapien
ttcacattgctctttgctgtcttgg

SEQ ID NO: 4861137 - DNA, 25 bp, Homo sapien
ggtttcacattgctctttgctgtct

SEQ ID NO: 4861138 - DNA, 25 bp, Homo sapien
tttcacattgctctttgctgtcttg

SEQ ID NO: 4861139 - DNA, 25 bp, Homo sapien
catagggtggagaggtgtgggagta

SEQ ID NO: 4861140 - DNA, 25 bp, Homo sapien
ccatcagacctgtgcttacaggaaa

SEQ ID NO: 4861141 - DNA, 25 bp, Homo sapien
gggcatcattgagtatattttgagc

SEQ ID NO: 4861142 - DNA, 25 bp, Homo sapien
tgagccttgcatgtcaccatcagac

SEQ ID NO: 4861143 - DNA, 25 bp, Homo sapien
cctgcattatggactttttgcagaa

SEQ ID NO: 4861144 - DNA, 25 bp, Homo sapien
gactttttgcagaaagaccagacag

SEQ ID NO: 4861145 - DNA, 25 bp, Homo sapien
tgatatctctgaatttgccaccgta

SEQ ID NO: 4861146 - DNA, 25 bp, Homo sapien
taatgcaattcgctaaatgcctgcg

SEQ ID NO: 4861147 - DNA, 25 bp, Homo sapien
gctttcattccttacaagtgcacgg

SEQ ID NO: 4861148 - DNA, 25 bp, Homo sapien
gcagccccgctgacagtgacatatt

SEQ ID NO: 4861149 - DNA, 25 bp, Homo sapien
aggaggtatcctttgtgtcttggta

SEQ ID NO: 4861150 - DNA, 25 bp, Homo sapien
ggtatttcctgatctccgcagtaag

SEQ ID NO: 4861151 - DNA, 25 bp, Homo sapien
gagtgaacacttcaatgagcacagt

SEQ ID NO: 4861152 - DNA, 25 bp, Homo sapien
gagttctacagcagtgtgggcactg

SEQ ID NO: 4861153 - DNA, 25 bp, Homo sapien
tagacacagcattaacgatatacgt

SEQ ID NO: 4861154 - DNA, 25 bp, Homo sapien
gaagactcacgtggccttcaggcct

SEQ ID NO: 4861155 - DNA, 25 bp, Homo sapien
tccagttctctgatctagacacagc

SEQ ID NO: 4861156 - DNA, 25 bp, Homo sapien
tagtcttgaattctcccctccagtg

SEQ ID NO: 4861157 - DNA, 25 bp, Homo sapien
gcctttggagccacggagagtgaga

SEQ ID NO: 4861158 - DNA, 25 bp, Homo sapien
ctctccaatgtgcctttggagccac

SEQ ID NO: 4861159 - DNA, 25 bp, Homo sapien
tgggaggtacccttcttgaccacca

SEQ ID NO: 4861160 - DNA, 25 bp, Homo sapien
gccacggagagtgagagccttcctg

SEQ ID NO: 4861161 - DNA, 25 bp, Homo sapien
ccactgtggaatgccactgcggaag

SEQ ID NO: 4861162 - DNA, 25 bp, Homo sapien
actgtggaatgccactgcggaagga

SEQ ID NO: 4861163 - DNA, 25 bp, Homo sapien
tgtggaatgccactgcggaaggagg

SEQ ID NO: 4861164 - DNA, 25 bp, Homo sapien
tccactgtggaatgccactgcggaa

SEQ ID NO: 4861165 - DNA, 25 bp, Homo sapien
aaaaccaaatagccaacacacccat

SEQ ID NO: 4861166 - DNA, 25 bp, Homo sapien
agcaaaaaccaaatagccaacacac

SEQ ID NO: 4861167 - DNA, 25 bp, Homo sapien
gcaaaaaccaaatagccaacacacc

SEQ ID NO: 4861168 - DNA, 25 bp, Homo sapien
ggtgacttgggcagccgataatgag

SEQ ID NO: 4861169 - DNA, 25 bp, Homo sapien
tctaagttggaagtgccaggtgact

SEQ ID NO: 4861170 - DNA, 25 bp, Homo sapien
ttacattaacgggagcatgatgggg

SEQ ID NO: 4861171 - DNA, 25 bp, Homo sapien
gacttgggcagccgataatgaggac

SEQ ID NO: 4861172 - DNA, 25 bp, Homo sapien
tgtgctatttcaaatgctctcattg

SEQ ID NO: 4861173 - DNA, 25 bp, Homo sapien
gctatttcaaatgctctcattggta

SEQ ID NO: 4861174 - DNA, 25 bp, Homo sapien
cttgaactctgaatggagcccagtg

SEQ ID NO: 4861175 - DNA, 25 bp, Homo sapien
gacttggaaaacactcaattcttgt

SEQ ID NO: 4861176 - DNA, 25 bp, Homo sapien
tgccctgagacctttcgaatatctt

SEQ ID NO: 4861177 - DNA, 25 bp, Homo sapien
gacctttcgaatatcttccatccaa

SEQ ID NO: 4861178 - DNA, 25 bp, Homo sapien
cctgagacctttcgaatatcttcca

SEQ ID NO: 4861179 - DNA, 25 bp, Homo sapien
cgtgccctgagacctttcgaatatc

SEQ ID NO: 4861180 - DNA, 25 bp, Homo sapien
gcatctccggtgaaataatcaactg

SEQ ID NO: 4861181 - DNA, 25 bp, Homo sapien
acaatgtagaaatgagcaaggctca

SEQ ID NO: 4861182 - DNA, 25 bp, Homo sapien
gaggaggataggttacgggaatcga

SEQ ID NO: 4861183 - DNA, 25 bp, Homo sapien
gttacgggaatcgagagggcatctc

SEQ ID NO: 4861184 - DNA, 25 bp, Homo sapien
ggagagattatcagaagggctggag

SEQ ID NO: 4861185 - DNA, 25 bp, Homo sapien
gagagattatcagaagggctggagc

SEQ ID NO: 4861186 - DNA, 25 bp, Homo sapien
agagattatcagaagggctggagca

SEQ ID NO: 4861187 - DNA, 25 bp, Homo sapien
tcagtgggagttccctccggcccca

SEQ ID NO: 4861188 - DNA, 25 bp, Homo sapien
cactcctctgtagaagtgcattcag

SEQ ID NO: 4861189 - DNA, 25 bp, Homo sapien
caggtggatccgagacttttcctcc

SEQ ID NO: 4861190 - DNA, 25 bp, Homo sapien
agtgccaggtggatccgagactttt

SEQ ID NO: 4861191 - DNA, 25 bp, Homo sapien
caaggcgaggacaagaagagttgaa

SEQ ID NO: 4861192 - DNA, 25 bp, Homo sapien
tgtagggaaagacctctatgggtgt

SEQ ID NO: 4861193 - DNA, 25 bp, Homo sapien
tatgggtgttgaaaagacaaggcga

SEQ ID NO: 4861194 - DNA, 25 bp, Homo sapien
tgaagggcaattccttggccatgac

SEQ ID NO: 4861195 - DNA, 25 bp, Homo sapien
gcttgctagagcttggtaaagagac

SEQ ID NO: 4861196 - DNA, 25 bp, Homo sapien
gcagcttgctagagcttggtaaaga

SEQ ID NO: 4861197 - DNA, 25 bp, Homo sapien
tgctagagcttggtaaagagacttg

SEQ ID NO: 4861198 - DNA, 25 bp, Homo sapien
gcagcagcttgctagagcttggtaa

SEQ ID NO: 4861199 - DNA, 25 bp, Homo sapien
cggaagagcagcaaccctgagttac

SEQ ID NO: 4861200 - DNA, 25 bp, Homo sapien
ttaaatgagcaaacggaagagcagc

SEQ ID NO: 4861201 - DNA, 25 bp, Homo sapien
acggaagagcagcaaccctgagtta

SEQ ID NO: 4861202 - DNA, 25 bp, Homo sapien
ccctgctgtggccctagtagcccat

SEQ ID NO: 4861203 - DNA, 25 bp, Homo sapien
cctgctgtggccctagtagcccatc

SEQ ID NO: 4861204 - DNA, 25 bp, Homo sapien
actgacagggtcatggtttctcctt

SEQ ID NO: 4861205 - DNA, 25 bp, Homo sapien
tagtacgtggaataacagcagctat

SEQ ID NO: 4861206 - DNA, 25 bp, Homo sapien
ctgtttagttatggttcggggctga

SEQ ID NO: 4861207 - DNA, 25 bp, Homo sapien
tccctgcctgtgacaaatgtggtgc

SEQ ID NO: 4861208 - DNA, 25 bp, Homo sapien
ccagtgggtgcctgaaagctgagct

SEQ ID NO: 4861209 - DNA, 25 bp, Homo sapien
tggtgctcctcttgtgttcgtttct

SEQ ID NO: 4861210 - DNA, 25 bp, Homo sapien
cctctgtgcatatgggtgctcacac

SEQ ID NO: 4861211 - DNA, 25 bp, Homo sapien
atgtgaagccctctgtgcatatggg

SEQ ID NO: 4861212 - DNA, 25 bp, Homo sapien
ggtgctcctcttgtgttcgtttctc

SEQ ID NO: 4861213 - DNA, 25 bp, Homo sapien
taaaagaaatcggacttcaactcca

SEQ ID NO: 4861214 - DNA, 25 bp, Homo sapien
cagtaaaagaaatcggacttcaact

SEQ ID NO: 4861215 - DNA, 25 bp, Homo sapien
ctgtagagatgaagccaaggagagt

SEQ ID NO: 4861216 - DNA, 25 bp, Homo sapien
tgtagagatgaagccaaggagagtt

SEQ ID NO: 4861217 - DNA, 25 bp, Homo sapien
cgcagcctcttttgtgaaggctggg

SEQ ID NO: 4861218 - DNA, 25 bp, Homo sapien
aagaatttccctgccgtggtctcca

SEQ ID NO: 4861219 - DNA, 25 bp, Homo sapien
agtctccccaggtttgaggagagca

SEQ ID NO: 4861220 - DNA, 25 bp, Homo sapien
gtgaggaggaaaatcagtctcccca

SEQ ID NO: 4861221 - DNA, 25 bp, Homo sapien
ttggtaagctggaaccacacaggcc

SEQ ID NO: 4861222 - DNA, 25 bp, Homo sapien
tctggggttggtaagctggaaccac

SEQ ID NO: 4861223 - DNA, 25 bp, Homo sapien
gctgatttaacctagatcccaaacc

SEQ ID NO: 4861224 - DNA, 25 bp, Homo sapien
caaaccattcttgcctgtgagagtg

SEQ ID NO: 4861225 - DNA, 25 bp, Homo sapien
catcatcccagtaccttcgatggtt

SEQ ID NO: 4861226 - DNA, 25 bp, Homo sapien
tcgatggttcctttccatttggcca

SEQ ID NO: 4861227 - DNA, 25 bp, Homo sapien
gagaccatagcacattccatcatcc

SEQ ID NO: 4861228 - DNA, 25 bp, Homo sapien
gggtctgcaactcccaatggaatgt

SEQ ID NO: 4861229 - DNA, 25 bp, Homo sapien
taggaaagggcttcctctaatctga

SEQ ID NO: 4861230 - DNA, 25 bp, Homo sapien
cttgatgcctactccctgacagctg

SEQ ID NO: 4861231 - DNA, 25 bp, Homo sapien
tctaatctgatcagtcaaatcccga

SEQ ID NO: 4861232 - DNA, 25 bp, Homo sapien
cagctttactttccatgggatttgg

SEQ ID NO: 4861233 - DNA, 25 bp, Homo sapien
agtagaaagagcgttcaggtccttg

SEQ ID NO: 4861234 - DNA, 25 bp, Homo sapien
tagaaagagcgttcaggtccttggg

SEQ ID NO: 4861235 - DNA, 25 bp, Homo sapien
aggcagtagaaagagcgttcaggtc

SEQ ID NO: 4861236 - DNA, 25 bp, Homo sapien
gcagtagaaagagcgttcaggtcct

SEQ ID NO: 4861237 - DNA, 25 bp, Homo sapien
ctggctgccctccaagccctcttga

SEQ ID NO: 4861238 - DNA, 25 bp, Homo sapien
tggctgccctccaagccctcttgac

SEQ ID NO: 4861239 - DNA, 25 bp, Homo sapien
ggctgccctccaagccctcttgact

SEQ ID NO: 4861240 - DNA, 25 bp, Homo sapien
ctgccctccaagccctcttgactcc

SEQ ID NO: 4861241 - DNA, 25 bp, Homo sapien
tctggctaagggtggcctttgaagg

SEQ ID NO: 4861242 - DNA, 25 bp, Homo sapien
gcagaaatgagcagccgggaggaag

SEQ ID NO: 4861243 - DNA, 25 bp, Homo sapien
cagatgcttgcagcttggtccagga

SEQ ID NO: 4861244 - DNA, 25 bp, Homo sapien
tgccttccagatgcttgcagcttgg

SEQ ID NO: 4861245 - DNA, 25 bp, Homo sapien
agagaagaccacagcgacacatggg

SEQ ID NO: 4861246 - DNA, 25 bp, Homo sapien
tgctcagggtggacctcaaatgctg

SEQ ID NO: 4861247 - DNA, 25 bp, Homo sapien
gaggaagtacttggagaacctccag

SEQ ID NO: 4861248 - DNA, 25 bp, Homo sapien
tgctgagttgcggttttatcccagt

SEQ ID NO: 4861249 - DNA, 25 bp, Homo sapien
gaagtacttggagaacctccagtgc

SEQ ID NO: 4861250 - DNA, 25 bp, Homo sapien
atgtgcacagcacacctagaagacg

SEQ ID NO: 4861251 - DNA, 25 bp, Homo sapien
cagagcaagtgcgatgagccagaag

SEQ ID NO: 4861252 - DNA, 25 bp, Homo sapien
gaagcagagcaagtgcgatgagcca

SEQ ID NO: 4861253 - DNA, 25 bp, Homo sapien
gcacacctagaagacgcgatctgta

SEQ ID NO: 4861254 - DNA, 25 bp, Homo sapien
taggcctggatgcatgagtaggatt

SEQ ID NO: 4861255 - DNA, 25 bp, Homo sapien
cttgagataggcctggatgcatgag

SEQ ID NO: 4861256 - DNA, 25 bp, Homo sapien
tgagataggcctggatgcatgagta

SEQ ID NO: 4861257 - DNA, 25 bp, Homo sapien
tctgcattagtggatgaggaaggct

SEQ ID NO: 4861258 - DNA, 25 bp, Homo sapien
cttctgagtcatggtgattgtagca

SEQ ID NO: 4861259 - DNA, 25 bp, Homo sapien
cattgctaatggtaaacgtgggtgg

SEQ ID NO: 4861260 - DNA, 25 bp, Homo sapien
gtagcaatgtgggttgaaggcttaa

SEQ ID NO: 4861261 - DNA, 25 bp, Homo sapien
ggcttaaattgagcttgattgttta

SEQ ID NO: 4861262 - DNA, 25 bp, Homo sapien
gagggcccctaataaatctccgcag

SEQ ID NO: 4861263 - DNA, 25 bp, Homo sapien
gatcctgttccagaggagtaataag

SEQ ID NO: 4861264 - DNA, 25 bp, Homo sapien
aatatttcactcagtcgtggcaggc

SEQ ID NO: 4861265 - DNA, 25 bp, Homo sapien
tagctaatggcgctgtagggctaag

SEQ ID NO: 4861266 - DNA, 25 bp, Homo sapien
ccgggttggtcggagcatcctgcca

SEQ ID NO: 4861267 - DNA, 25 bp, Homo sapien
aactgagggcggaagtcaagaagca

SEQ ID NO: 4861268 - DNA, 25 bp, Homo sapien
tctgctgggcttagcacatctcctc

SEQ ID NO: 4861269 - DNA, 25 bp, Homo sapien
agtgttcctcaagggtgggcccagc

SEQ ID NO: 4861270 - DNA, 25 bp, Homo sapien
tgctgacccaatgccgttcttgtac

SEQ ID NO: 4861271 - DNA, 25 bp, Homo sapien
cccaatgccgttcttgtacctcata

SEQ ID NO: 4861272 - DNA, 25 bp, Homo sapien
aaaatgctgacccaatgccgttctt

SEQ ID NO: 4861273 - DNA, 25 bp, Homo sapien
caccaaacagcaggttacaaacaca

SEQ ID NO: 4861274 - DNA, 25 bp, Homo sapien
gtatacaaatagatccacggcaggg

SEQ ID NO: 4861275 - DNA, 25 bp, Homo sapien
caaatagatccacggcagggcccct

SEQ ID NO: 4861276 - DNA, 25 bp, Homo sapien
atagatccacggcagggcccctaga

SEQ ID NO: 4861277 - DNA, 25 bp, Homo sapien
tacaaatagatccacggcagggccc

SEQ ID NO: 4861278 - DNA, 25 bp, Homo sapien
tttccttgcagctcaatttttagct

SEQ ID NO: 4861279 - DNA, 25 bp, Homo sapien
ctgagtgtttgggtagtaaatatgg

SEQ ID NO: 4861280 - DNA, 25 bp, Homo sapien
tgttttgtgcttcccacctcaaggc

SEQ ID NO: 4861281 - DNA, 25 bp, Homo sapien
tatggtttacaccaactgtgttgga

SEQ ID NO: 4861282 - DNA, 25 bp, Homo sapien
tctgtatttaatttagagtagggaa

SEQ ID NO: 4861283 - DNA, 25 bp, Homo sapien
gctccccacaggcagtctgtattta

SEQ ID NO: 4861284 - DNA, 25 bp, Homo sapien
caggcagtctgtatttaatttagag

SEQ ID NO: 4861285 - DNA, 25 bp, Homo sapien
tagagtagggaattactaatcgaat

SEQ ID NO: 4861286 - DNA, 25 bp, Homo sapien
gaagaatcaacatccgcatcaggct

SEQ ID NO: 4861287 - DNA, 25 bp, Homo sapien
tggtggtagaagaatcaacatccgc

SEQ ID NO: 4861288 - DNA, 25 bp, Homo sapien
aatcaacatccgcatcaggctggca

SEQ ID NO: 4861289 - DNA, 25 bp, Homo sapien
gagcactttccgggtctgggcccac

SEQ ID NO: 4861290 - DNA, 25 bp, Homo sapien
gctttgctgctctagacccaggtcc

SEQ ID NO: 4861291 - DNA, 25 bp, Homo sapien
ctttgctgctctagacccaggtccc

SEQ ID NO: 4861292 - DNA, 25 bp, Homo sapien
tgctttgctgctctagacccaggtc

SEQ ID NO: 4861293 - DNA, 25 bp, Homo sapien
gtgctttgctgctctagacccaggt

SEQ ID NO: 4861294 - DNA, 25 bp, Homo sapien
tgccggggacttgcagtaaaattta

SEQ ID NO: 4861295 - DNA, 25 bp, Homo sapien
tggtgacggcactttccattagagc

SEQ ID NO: 4861296 - DNA, 25 bp, Homo sapien
cagcgagctttctgcacctaataaa

SEQ ID NO: 4861297 - DNA, 25 bp, Homo sapien
cctaataaatcatcccctccgggag

SEQ ID NO: 4861298 - DNA, 25 bp, Homo sapien
agacagtcataaataatgctttgct

SEQ ID NO: 4861299 - DNA, 25 bp, Homo sapien
ttacagacagtcataaataatgctt

SEQ ID NO: 4861300 - DNA, 25 bp, Homo sapien
tacagacagtcataaataatgcttt

SEQ ID NO: 4861301 - DNA, 25 bp, Homo sapien
cagacagtcataaataatgctttgc

SEQ ID NO: 4861302 - DNA, 25 bp, Homo sapien
gatgatgaatttcccccgaacggca

SEQ ID NO: 4861303 - DNA, 25 bp, Homo sapien
agcagggaggcgatgatgaatttcc

SEQ ID NO: 4861304 - DNA, 25 bp, Homo sapien
tgctgtccctgcgtgcaaggagcag

SEQ ID NO: 4861305 - DNA, 25 bp, Homo sapien
cagggaggcgatgatgaatttcccc

SEQ ID NO: 4861306 - DNA, 25 bp, Homo sapien
ggaacacgcttcttggtccagttgg

SEQ ID NO: 4861307 - DNA, 25 bp, Homo sapien
tagggcagggcatccctccaaatgt

SEQ ID NO: 4861308 - DNA, 25 bp, Homo sapien
ggactccagcctcgtgagctccttg

SEQ ID NO: 4861309 - DNA, 25 bp, Homo sapien
gggcagggaacacgcttcttggtcc

SEQ ID NO: 4861310 - DNA, 25 bp, Homo sapien
ttgtgatcagcatcagcaactccat

SEQ ID NO: 4861311 - DNA, 25 bp, Homo sapien
gactgtgggtataggctcatcatca

SEQ ID NO: 4861312 - DNA, 25 bp, Homo sapien
caagagctcacattcccataacatt

SEQ ID NO: 4861313 - DNA, 25 bp, Homo sapien
taaacttcagtggattgattttggt

SEQ ID NO: 4861314 - DNA, 25 bp, Homo sapien
tctttaaacgagaacttcttctgtg

SEQ ID NO: 4861315 - DNA, 25 bp, Homo sapien
ccagttgtatctccaaattctggag

SEQ ID NO: 4861316 - DNA, 25 bp, Homo sapien
tctctttaaacgagaacttcttctg

SEQ ID NO: 4861317 - DNA, 25 bp, Homo sapien
gtatctccaaattctggagcttcag

SEQ ID NO: 4861318 - DNA, 25 bp, Homo sapien
caccattagcataaatgtctgtagc

SEQ ID NO: 4861319 - DNA, 25 bp, Homo sapien
tcagaggaggtgaaagctaggcccg

SEQ ID NO: 4861320 - DNA, 25 bp, Homo sapien
tggtcagggagagcctccgggttga

SEQ ID NO: 4861321 - DNA, 25 bp, Homo sapien
gaccaagaaagaggcttacttctcc

SEQ ID NO: 4861322 - DNA, 25 bp, Homo sapien
taactgagatcaccgagtagggagc

SEQ ID NO: 4861323 - DNA, 25 bp, Homo sapien
gggagcggttatggagatcaactca

SEQ ID NO: 4861324 - DNA, 25 bp, Homo sapien
ggaaaactggcaaggagaggctaac

SEQ ID NO: 4861325 - DNA, 25 bp, Homo sapien
cggttatggagatcaactcagtcat

SEQ ID NO: 4861326 - DNA, 25 bp, Homo sapien
gaggagagccaccatataacctgat

SEQ ID NO: 4861327 - DNA, 25 bp, Homo sapien
tttaggagttatggaacctgcctca

SEQ ID NO: 4861328 - DNA, 25 bp, Homo sapien
ctgaagacgtgaggagagccaccat

SEQ ID NO: 4861329 - DNA, 25 bp, Homo sapien
gttatggaacctgcctcacctatca

SEQ ID NO: 4861330 - DNA, 25 bp, Homo sapien
ctaaagaggacacataataagtctt

SEQ ID NO: 4861331 - DNA, 25 bp, Homo sapien
gggcaatcattaggggtgatgaggg

SEQ ID NO: 4861332 - DNA, 25 bp, Homo sapien
cattaggggtgatgagggttgaatt

SEQ ID NO: 4861333 - DNA, 25 bp, Homo sapien
cttagggggcaatcattaggggtga

SEQ ID NO: 4861334 - DNA, 25 bp, Homo sapien
ggggtgatgagggttgaattgatcc

SEQ ID NO: 4861335 - DNA, 25 bp, Homo sapien
catcctttattcttgatctcatttc

SEQ ID NO: 4861336 - DNA, 25 bp, Homo sapien
tattcttgatctcatttccccagca

SEQ ID NO: 4861337 - DNA, 25 bp, Homo sapien
gcatctttcttcttcgtggccttct

SEQ ID NO: 4861338 - DNA, 25 bp, Homo sapien
cctttattcttgatctcatttcccc

SEQ ID NO: 4861339 - DNA, 25 bp, Homo sapien
tgctgagcaggccagagttcctggt

SEQ ID NO: 4861340 - DNA, 25 bp, Homo sapien
caggccagagttcctggtgtaaggt

SEQ ID NO: 4861341 - DNA, 25 bp, Homo sapien
tgcttggctattgctgagcaggcca

SEQ ID NO: 4861342 - DNA, 25 bp, Homo sapien
aacatgtttcttgatttggcccaag

SEQ ID NO: 4861343 - DNA, 25 bp, Homo sapien
aggacagcacagtttgccaaaggac

SEQ ID NO: 4861344 - DNA, 25 bp, Homo sapien
actcagagggacaactgaggcacag

SEQ ID NO: 4861345 - DNA, 25 bp, Homo sapien
tgagagaggacagcacagtttgcca

SEQ ID NO: 4861346 - DNA, 25 bp, Homo sapien
agcacagtttgccaaaggactcaga

SEQ ID NO: 4861347 - DNA, 25 bp, Homo sapien
gtgcactctcactcaaccttgcctg

SEQ ID NO: 4861348 - DNA, 25 bp, Homo sapien
tgagtctgaaagacccgtgcactct

SEQ ID NO: 4861349 - DNA, 25 bp, Homo sapien
gaaagacccgtgcactctcactcaa

SEQ ID NO: 4861350 - DNA, 25 bp, Homo sapien
tctcactcaaccttgcctgcccctc

SEQ ID NO: 4861351 - DNA, 25 bp, Homo sapien
gatggagtcattgcttgagagttca

SEQ ID NO: 4861352 - DNA, 25 bp, Homo sapien
cacagtcctaggaggagacacagca

SEQ ID NO: 4861353 - DNA, 25 bp, Homo sapien
cacacggaagacagtgagagctcag

SEQ ID NO: 4861354 - DNA, 25 bp, Homo sapien
tgtaggaattttcagtgccctcagc

SEQ ID NO: 4861355 - DNA, 25 bp, Homo sapien
tggtgaatctggaccaggctccttg

SEQ ID NO: 4861356 - DNA, 25 bp, Homo sapien
tatttgagctcttagagtccttatc

SEQ ID NO: 4861357 - DNA, 25 bp, Homo sapien
gccaccttggccatcatgagaataa

SEQ ID NO: 4861358 - DNA, 25 bp, Homo sapien
tccttgcacacggtgagcaggagct

SEQ ID NO: 4861359 - DNA, 25 bp, Homo sapien
tcagcataatcaggaggggccctca

SEQ ID NO: 4861360 - DNA, 25 bp, Homo sapien
tctccttcccggagtgaatagggcc

SEQ ID NO: 4861361 - DNA, 25 bp, Homo sapien
ctatgggaaaacacatcctggtgaa

SEQ ID NO: 4861362 - DNA, 25 bp, Homo sapien
ggtgaagcaaaggtcgtggagggca

SEQ ID NO: 4861363 - DNA, 25 bp, Homo sapien
gtacttcgcaaaggtcactggctcc

SEQ ID NO: 4861364 - DNA, 25 bp, Homo sapien
taatgactgacagacgatctcgccc

SEQ ID NO: 4861365 - DNA, 25 bp, Homo sapien
tgtgaacagacaccttgcatggtgc

SEQ ID NO: 4861366 - DNA, 25 bp, Homo sapien
ggctcctgttttatgtaatgactga

SEQ ID NO: 4861367 - DNA, 25 bp, Homo sapien
cctgggcttagatgacagcttgaac

SEQ ID NO: 4861368 - DNA, 25 bp, Homo sapien
tgaactctgcggctgatggaattgt

SEQ ID NO: 4861369 - DNA, 25 bp, Homo sapien
tagatgacagcttgaactctgcggc

SEQ ID NO: 4861370 - DNA, 25 bp, Homo sapien
gacagcttgaactctgcggctgatg

SEQ ID NO: 4861371 - DNA, 25 bp, Homo sapien
gggcttggggtagtcagtgattatc

SEQ ID NO: 4861372 - DNA, 25 bp, Homo sapien
cagcccacagccagtcgcattctct

SEQ ID NO: 4861373 - DNA, 25 bp, Homo sapien
gcccacagccagtcgcattctctgg

SEQ ID NO: 4861374 - DNA, 25 bp, Homo sapien
tacagcccacagccagtcgcattct

SEQ ID NO: 4861375 - DNA, 25 bp, Homo sapien
ggaggactttctcgaagagaagttg

SEQ ID NO: 4861376 - DNA, 25 bp, Homo sapien
tggggagcacgtaccaggggaggac

SEQ ID NO: 4861377 - DNA, 25 bp, Homo sapien
gagcacgtaccaggggaggactttc

SEQ ID NO: 4861378 - DNA, 25 bp, Homo sapien
ggactttctcgaagagaagttgctg

SEQ ID NO: 4861379 - DNA, 25 bp, Homo sapien
tcctgtccccacaagttgggcattg

SEQ ID NO: 4861380 - DNA, 25 bp, Homo sapien
gagctgcacggttcagccatgggtt

SEQ ID NO: 4861381 - DNA, 25 bp, Homo sapien
gcattgtgcgtggagctcattgaaa

SEQ ID NO: 4861382 - DNA, 25 bp, Homo sapien
cgtggagctcattgaaaggcagcag

SEQ ID NO: 4861383 - DNA, 25 bp, Homo sapien
tggcctctgctgaaaagcgctccac

SEQ ID NO: 4861384 - DNA, 25 bp, Homo sapien
gtatgcacatgtgtgcagatgcagg

SEQ ID NO: 4861385 - DNA, 25 bp, Homo sapien
gcgcacatctgcagcttctagcccc

SEQ ID NO: 4861386 - DNA, 25 bp, Homo sapien
tgtgtgcagatgcaggcgcacatct

SEQ ID NO: 4861387 - DNA, 25 bp, Homo sapien
gccaggctctccatagaggcaggag

SEQ ID NO: 4861388 - DNA, 25 bp, Homo sapien
cctgtccacagagccgggagccagg

SEQ ID NO: 4861389 - DNA, 25 bp, Homo sapien
tcctgctgttccaagagccctgcct

SEQ ID NO: 4861390 - DNA, 25 bp, Homo sapien
cctgcctgccgtcacctcttccccc

SEQ ID NO: 4861391 - DNA, 25 bp, Homo sapien
tcatctatctgtgtggctacccggg

SEQ ID NO: 4861392 - DNA, 25 bp, Homo sapien
gctggaagacgccaagtaaagctgt

SEQ ID NO: 4861393 - DNA, 25 bp, Homo sapien
ttctcaggacggcattgggagccac

SEQ ID NO: 4861394 - DNA, 25 bp, Homo sapien
gggctcaatattcctacaacctcac

SEQ ID NO: 4861395 - DNA, 25 bp, Homo sapien
ctgtatgcctttccgaatcctgtgg

SEQ ID NO: 4861396 - DNA, 25 bp, Homo sapien
tccgaatcctgtgggttgtaagctt

SEQ ID NO: 4861397 - DNA, 25 bp, Homo sapien
gcttggtgaacctggctatttgcag

SEQ ID NO: 4861398 - DNA, 25 bp, Homo sapien
cctgtgggttgtaagcttggtgaac

SEQ ID NO: 4861399 - DNA, 25 bp, Homo sapien
tcctggtagcattcacaatctttgc

SEQ ID NO: 4861400 - DNA, 25 bp, Homo sapien
cactctctcgagctttgctttctac

SEQ ID NO: 4861401 - DNA, 25 bp, Homo sapien
ttctaccctgataaacttctctctc

SEQ ID NO: 4861402 - DNA, 25 bp, Homo sapien
atgggtgtttagatgtaagtcccat

SEQ ID NO: 4861403 - DNA, 25 bp, Homo sapien
tttcgctgaaacaccagccccctct

SEQ ID NO: 4861404 - DNA, 25 bp, Homo sapien
cctctgcaaaatttgtcttcttcac

SEQ ID NO: 4861405 - DNA, 25 bp, Homo sapien
tctcctctgcaaaatttgtcttctt

SEQ ID NO: 4861406 - DNA, 25 bp, Homo sapien
ccctctcctctgcaaaatttgtctt

SEQ ID NO: 4861407 - DNA, 25 bp, Homo sapien
tgtccccactgctagctgcccttga

SEQ ID NO: 4861408 - DNA, 25 bp, Homo sapien
aggcagagccatccgcaagtgattc

SEQ ID NO: 4861409 - DNA, 25 bp, Homo sapien
gagccatccgcaagtgattctctcc

SEQ ID NO: 4861410 - DNA, 25 bp, Homo sapien
tgctagctgcccttgaatgcaggca

SEQ ID NO: 4861411 - DNA, 25 bp, Homo sapien
tgtgctggacatagcgacccacgca

SEQ ID NO: 4861412 - DNA, 25 bp, Homo sapien
tgacacgctgtttttactgggagac

SEQ ID NO: 4861413 - DNA, 25 bp, Homo sapien
tccgtgtttgccctgacatgtgctg

SEQ ID NO: 4861414 - DNA, 25 bp, Homo sapien
caggtggcaacgtgcctgagctcag

SEQ ID NO: 4861415 - DNA, 25 bp, Homo sapien
catgcaaatccttggtgcccagtcg

SEQ ID NO: 4861416 - DNA, 25 bp, Homo sapien
gaacgcaaggtcctgaatcgagccg

SEQ ID NO: 4861417 - DNA, 25 bp, Homo sapien
caaatccttggtgcccagtcgggaa

SEQ ID NO: 4861418 - DNA, 25 bp, Homo sapien
tgcccagtcgggaacgcaaggtcct

SEQ ID NO: 4861419 - DNA, 25 bp, Homo sapien
tctgtggtggcaaggacagcgatcc

SEQ ID NO: 4861420 - DNA, 25 bp, Homo sapien
agcgatccccagcaagaggtagcag

SEQ ID NO: 4861421 - DNA, 25 bp, Homo sapien
ctgcactgcagagcctgcggttctc

SEQ ID NO: 4861422 - DNA, 25 bp, Homo sapien
gtagcagcgccctgtgtcctggcag

SEQ ID NO: 4861423 - DNA, 25 bp, Homo sapien
tgcaaacatacaagtgaggagccat

SEQ ID NO: 4861424 - DNA, 25 bp, Homo sapien
gcaaacatacaagtgaggagccata

SEQ ID NO: 4861425 - DNA, 25 bp, Homo sapien
gctgcaaacatacaagtgaggagcc

SEQ ID NO: 4861426 - DNA, 25 bp, Homo sapien
aaacatacaagtgaggagccataac

SEQ ID NO: 4861427 - DNA, 25 bp, Homo sapien
acatcacctgtgtcccagtgctgcg

SEQ ID NO: 4861428 - DNA, 25 bp, Homo sapien
ctgttctgttctctgcctagggctt

SEQ ID NO: 4861429 - DNA, 25 bp, Homo sapien
gcctagggctttcctcagggagatt

SEQ ID NO: 4861430 - DNA, 25 bp, Homo sapien
ttcttcgtggctttggctggctgca

SEQ ID NO: 4861431 - DNA, 25 bp, Homo sapien
cctttggagagtgcatgaggtcacc

SEQ ID NO: 4861432 - DNA, 25 bp, Homo sapien
gcacccatcttggagctgaagcatg

SEQ ID NO: 4861433 - DNA, 25 bp, Homo sapien
ggtcaccgggtgctgcatgtttctt

SEQ ID NO: 4861434 - DNA, 25 bp, Homo sapien
tgaagcatggcttgacctggctggt

SEQ ID NO: 4861435 - DNA, 25 bp, Homo sapien
gagggatacaggctccgatgactag

SEQ ID NO: 4861436 - DNA, 25 bp, Homo sapien
ctgggagggatacaggctccgatga

SEQ ID NO: 4861437 - DNA, 25 bp, Homo sapien
tacaggctccgatgactagcagcaa

SEQ ID NO: 4861438 - DNA, 25 bp, Homo sapien
ggctccgatgactagcagcaaagag

SEQ ID NO: 4861439 - DNA, 25 bp, Homo sapien
tctcccaagagttcagccagaacac

SEQ ID NO: 4861440 - DNA, 25 bp, Homo sapien
cccaagagttcagccagaacacagg

SEQ ID NO: 4861441 - DNA, 25 bp, Homo sapien
ggaacaataagaatgtctcccaaga

SEQ ID NO: 4861442 - DNA, 25 bp, Homo sapien
aacaataagaatgtctcccaagagt

SEQ ID NO: 4861443 - DNA, 25 bp, Homo sapien
tcttcagtgagttggtgatgacgct

SEQ ID NO: 4861444 - DNA, 25 bp, Homo sapien
gatctctttcgctcatgacttccac

SEQ ID NO: 4861445 - DNA, 25 bp, Homo sapien
taactccgtagccatatttgaagcg

SEQ ID NO: 4861446 - DNA, 25 bp, Homo sapien
acaacaggctaatttgttcccagat

SEQ ID NO: 4861447 - DNA, 25 bp, Homo sapien
ccgagtttgatctccttgtgagtca

SEQ ID NO: 4861448 - DNA, 25 bp, Homo sapien
tctttgatctgcagggtttctcagg

SEQ ID NO: 4861449 - DNA, 25 bp, Homo sapien
tcaggcggtctgattaatcgtggcc

SEQ ID NO: 4861450 - DNA, 25 bp, Homo sapien
ctgattaatcgtggcctgtggagga

SEQ ID NO: 4861451 - DNA, 25 bp, Homo sapien
gctgctgcaggttgatggatggctt

SEQ ID NO: 4861452 - DNA, 25 bp, Homo sapien
ctcccgccgggcttgcctccccgca

SEQ ID NO: 4861453 - DNA, 25 bp, Homo sapien
tcccgccgggcttgcctccccgcag

SEQ ID NO: 4861454 - DNA, 25 bp, Homo sapien
ggctgctgcaggttgatggatggct

SEQ ID NO: 4861455 - DNA, 25 bp, Homo sapien
aggggagtggctgtggtgcccatgt

SEQ ID NO: 4861456 - DNA, 25 bp, Homo sapien
gagtggctgtggtgcccatgtcagg

SEQ ID NO: 4861457 - DNA, 25 bp, Homo sapien
gctgtggtgcccatgtcaggcccgc

SEQ ID NO: 4861458 - DNA, 25 bp, Homo sapien
tggtgcccatgtcaggcccgcccat

SEQ ID NO: 4861459 - DNA, 25 bp, Homo sapien
catgagctcctgctaagtcacatag

SEQ ID NO: 4861460 - DNA, 25 bp, Homo sapien
tttggtatcaggagttgcagggccc

SEQ ID NO: 4861461 - DNA, 25 bp, Homo sapien
aacagtcctctctggtttggtatca

SEQ ID NO: 4861462 - DNA, 25 bp, Homo sapien
tggctcggtatgacaagatcctgac

SEQ ID NO: 4861463 - DNA, 25 bp, Homo sapien
ctgctccaggcagaagctcttttgg

SEQ ID NO: 4861464 - DNA, 25 bp, Homo sapien
tgcaacattgcccaaagggctggac

SEQ ID NO: 4861465 - DNA, 25 bp, Homo sapien
ttttgggggatcttttgcaacattg

SEQ ID NO: 4861466 - DNA, 25 bp, Homo sapien
tgctccaggcagaagctcttttggg

SEQ ID NO: 4861467 - DNA, 25 bp, Homo sapien
gaagccttcttggaatggctctgtt

SEQ ID NO: 4861468 - DNA, 25 bp, Homo sapien
ggaagccttcttggaatggctctgt

SEQ ID NO: 4861469 - DNA, 25 bp, Homo sapien
aagccttcttggaatggctctgttc

SEQ ID NO: 4861470 - DNA, 25 bp, Homo sapien
ccttttggcttgctgggcccagagc

SEQ ID NO: 4861471 - DNA, 25 bp, Homo sapien
gagctctgacacgtgagcaaaccac

SEQ ID NO: 4861472 - DNA, 25 bp, Homo sapien
tcatctgcaggggaaatcgaagtct

SEQ ID NO: 4861473 - DNA, 25 bp, Homo sapien
ttcctagtgcccgtgtcaaaggcgt

SEQ ID NO: 4861474 - DNA, 25 bp, Homo sapien
gaaatcccctgatgggagactgtgc

SEQ ID NO: 4861475 - DNA, 25 bp, Homo sapien
gctgtcctgaagtcctacagctgtg

SEQ ID NO: 4861476 - DNA, 25 bp, Homo sapien
cctagcactagggttcttatagaac

SEQ ID NO: 4861477 - DNA, 25 bp, Homo sapien
gctgatgggtggcattccaatccca

SEQ ID NO: 4861478 - DNA, 25 bp, Homo sapien
actgtaagtggcctcatgggaatga

SEQ ID NO: 4861479 - DNA, 25 bp, Homo sapien
agtgccggtgtgtttctgattctct

SEQ ID NO: 4861480 - DNA, 25 bp, Homo sapien
tcatgggtcacatttcacggacatc

SEQ ID NO: 4861481 - DNA, 25 bp, Homo sapien
tcaagcgacgttttacccactgtaa

SEQ ID NO: 4861482 - DNA, 25 bp, Homo sapien
gcctctctccttatcctgttccaac

SEQ ID NO: 4861483 - DNA, 25 bp, Homo sapien
ccttatcctgttccaacttcctctc

SEQ ID NO: 4861484 - DNA, 25 bp, Homo sapien
ttcccacatccatctgccttgccat

SEQ ID NO: 4861485 - DNA, 25 bp, Homo sapien
tcttcccacatccatctgccttgcc

SEQ ID NO: 4861486 - DNA, 25 bp, Homo sapien
agcttggacaaaccagtccttgcct

SEQ ID NO: 4861487 - DNA, 25 bp, Homo sapien
tggggcgtcctggagagccagggag

SEQ ID NO: 4861488 - DNA, 25 bp, Homo sapien
tccctggccctttcactctttgctc

SEQ ID NO: 4861489 - DNA, 25 bp, Homo sapien
cagcttggacaaaccagtccttgcc

SEQ ID NO: 4861490 - DNA, 25 bp, Homo sapien
agagggcagacgttcttgtttttag

SEQ ID NO: 4861491 - DNA, 25 bp, Homo sapien
gaaactatcatttcagcgggaggat

SEQ ID NO: 4861492 - DNA, 25 bp, Homo sapien
taactcccaggaggacgtgcttctc

SEQ ID NO: 4861493 - DNA, 25 bp, Homo sapien
gtcaggctgctgacgtaactcccag

SEQ ID NO: 4861494 - DNA, 25 bp, Homo sapien
taaatgagaagaagcgcctcggcct

SEQ ID NO: 4861495 - DNA, 25 bp, Homo sapien
ggaaatgatgggagaatcttctcgg

SEQ ID NO: 4861496 - DNA, 25 bp, Homo sapien
gagaatttgtcaactgcgccaagcc

SEQ ID NO: 4861497 - DNA, 25 bp, Homo sapien
gcagcaagatccagagagacgggaa

SEQ ID NO: 4861498 - DNA, 25 bp, Homo sapien
gacccaggtggatcctaaatcaccc

SEQ ID NO: 4861499 - DNA, 25 bp, Homo sapien
cctgcttgactcaaacgtttctaag

SEQ ID NO: 4861500 - DNA, 25 bp, Homo sapien
gactcaaacgtttctaagtggagat

SEQ ID NO: 4861501 - DNA, 25 bp, Homo sapien
ttctcccctgcttgactcaaacgtt

SEQ ID NO: 4861502 - DNA, 25 bp, Homo sapien
gcttgactcaaacgtttctaagtgg

SEQ ID NO: 4861503 - DNA, 25 bp, Homo sapien
ctgttattgaccatgagaaatattt

SEQ ID NO: 4861504 - DNA, 25 bp, Homo sapien
tagcccagtcgctgatgcagccatg

SEQ ID NO: 4861505 - DNA, 25 bp, Homo sapien
ttgaaggcttgggaacctgtttcca

SEQ ID NO: 4861506 - DNA, 25 bp, Homo sapien
gatggcttggcagctcttgaaggct

SEQ ID NO: 4861507 - DNA, 25 bp, Homo sapien
gagggtaatttcactagtggagcta

SEQ ID NO: 4861508 - DNA, 25 bp, Homo sapien
gacagcacactggagactaacacca

SEQ ID NO: 4861509 - DNA, 25 bp, Homo sapien
ggacggggagacagcacactggaga

SEQ ID NO: 4861510 - DNA, 25 bp, Homo sapien
gggagacagcacactggagactaac

SEQ ID NO: 4861511 - DNA, 25 bp, Homo sapien
ctgtggacggggagacagcacactg

SEQ ID NO: 4861512 - DNA, 25 bp, Homo sapien
catctttaacacctggcttctgaag

SEQ ID NO: 4861513 - DNA, 25 bp, Homo sapien
gagaggtctctatccagggagtaca

SEQ ID NO: 4861514 - DNA, 25 bp, Homo sapien
ctgccattttgtgatgacaccatct

SEQ ID NO: 4861515 - DNA, 25 bp, Homo sapien
agtacattggatactttcgcggtct

SEQ ID NO: 4861516 - DNA, 25 bp, Homo sapien
cttcttcctgccagacactctctgc

SEQ ID NO: 4861517 - DNA, 25 bp, Homo sapien
tcctgtgtgatgaccacgtcttctt

SEQ ID NO: 4861518 - DNA, 25 bp, Homo sapien
catctgccctgcattacttttccag

SEQ ID NO: 4861519 - DNA, 25 bp, Homo sapien
ccctgcattacttttccagggcttc

SEQ ID NO: 4861520 - DNA, 25 bp, Homo sapien
tctgtctctttccttgccccatttg

SEQ ID NO: 4861521 - DNA, 25 bp, Homo sapien
ttcacaaacacccactctctgtctc

SEQ ID NO: 4861522 - DNA, 25 bp, Homo sapien
ccatttgagtttcaaagccctctgt

SEQ ID NO: 4861523 - DNA, 25 bp, Homo sapien
tccttgccccatttgagtttcaaag

SEQ ID NO: 4861524 - DNA, 25 bp, Homo sapien
tgctggtcacggcacagcatccccg

SEQ ID NO: 4861525 - DNA, 25 bp, Homo sapien
gggtgagaggactggagccttctct

SEQ ID NO: 4861526 - DNA, 25 bp, Homo sapien
ggtgagaggactggagccttctctg

SEQ ID NO: 4861527 - DNA, 25 bp, Homo sapien
acagcatccccgcagagacagtggc

SEQ ID NO: 4861528 - DNA, 25 bp, Homo sapien
tgtagaagcaatcccgccagcgtgg

SEQ ID NO: 4861529 - DNA, 25 bp, Homo sapien
gatcctgtagaagcaatcccgccag

SEQ ID NO: 4861530 - DNA, 25 bp, Homo sapien
cctgtagaagcaatcccgccagcgt

SEQ ID NO: 4861531 - DNA, 25 bp, Homo sapien
cagcgtggggccagtgtgcccgtgg

SEQ ID NO: 4861532 - DNA, 25 bp, Homo sapien
gtcaaaaggcctgtcgccagcgagg

SEQ ID NO: 4861533 - DNA, 25 bp, Homo sapien
tattaatttgagctgtcagaatcga

SEQ ID NO: 4861534 - DNA, 25 bp, Homo sapien
gtcgccagcgaggatcacagcatct

SEQ ID NO: 4861535 - DNA, 25 bp, Homo sapien
tcgatatgtgtaacggagacgtgga

SEQ ID NO: 4861536 - DNA, 25 bp, Homo sapien
ctggctgtggataactgggaaagca

SEQ ID NO: 4861537 - DNA, 25 bp, Homo sapien
tcagatgctagtctcctccagtcca

SEQ ID NO: 4861538 - DNA, 25 bp, Homo sapien
cagtccactctgcccggcttggggc

SEQ ID NO: 4861539 - DNA, 25 bp, Homo sapien
tccactctgcccggcttggggctgg

SEQ ID NO: 4861540 - DNA, 25 bp, Homo sapien
gagactgggatcaaagctatccagg

SEQ ID NO: 4861541 - DNA, 25 bp, Homo sapien
ggttgacagccctttggacctcaaa

SEQ ID NO: 4861542 - DNA, 25 bp, Homo sapien
tcctgatgtttatcggagactggga

SEQ ID NO: 4861543 - DNA, 25 bp, Homo sapien
gaagccatggctgggccgttccatt

SEQ ID NO: 4861544 - DNA, 25 bp, Homo sapien
cattagacccaatttggttctcagc

SEQ ID NO: 4861545 - DNA, 25 bp, Homo sapien
agctgctcacgctcgtcgtctgaca

SEQ ID NO: 4861546 - DNA, 25 bp, Homo sapien
tcaggatgaccctgcgagacaggcc

SEQ ID NO: 4861547 - DNA, 25 bp, Homo sapien
gctcgtcgtctgacatcagctattt

SEQ ID NO: 4861548 - DNA, 25 bp, Homo sapien
ctggccctgccaggcctgggcttgc

SEQ ID NO: 4861549 - DNA, 25 bp, Homo sapien
ggccctgccaggcctgggcttgcac

SEQ ID NO: 4861550 - DNA, 25 bp, Homo sapien
tggccctgccaggcctgggcttgca

SEQ ID NO: 4861551 - DNA, 25 bp, Homo sapien
gggattacaactatcattttggtgt

SEQ ID NO: 4861552 - DNA, 25 bp, Homo sapien
tctctgtgtacttttggggattaca

SEQ ID NO: 4861553 - DNA, 25 bp, Homo sapien
ccgttcatcatgataagtgtcatag

SEQ ID NO: 4861554 - DNA, 25 bp, Homo sapien
catcatgataagtgtcatagtaaaa

SEQ ID NO: 4861555 - DNA, 25 bp, Homo sapien
ggagccacatccagaacatctgcag

SEQ ID NO: 4861556 - DNA, 25 bp, Homo sapien
aatacaagttcccaggccttgcgtc

SEQ ID NO: 4861557 - DNA, 25 bp, Homo sapien
gaacatctgcagtcgtttgcaaaat

SEQ ID NO: 4861558 - DNA, 25 bp, Homo sapien
ccttgcgtcggcactattttctttc

SEQ ID NO: 4861559 - DNA, 25 bp, Homo sapien
catggtgcagctctgattcttcatc

SEQ ID NO: 4861560 - DNA, 25 bp, Homo sapien
gaataacgtccatgagaataacagc

SEQ ID NO: 4861561 - DNA, 25 bp, Homo sapien
ctggatatgttagccatgaggcaac

SEQ ID NO: 4861562 - DNA, 25 bp, Homo sapien
catcaaaagagttaggactaagtcc

SEQ ID NO: 4861563 - DNA, 25 bp, Homo sapien
catgtcaggtatgagctgagcacaa

SEQ ID NO: 4861564 - DNA, 25 bp, Homo sapien
ggcgttgtatattccacttgtgaca

SEQ ID NO: 4861565 - DNA, 25 bp, Homo sapien
gaaaatggtgaaatatggcgttgta

SEQ ID NO: 4861566 - DNA, 25 bp, Homo sapien
taatgggcgtgcatttctgcagcca

SEQ ID NO: 4861567 - DNA, 25 bp, Homo sapien
tccctggaagtttctatggccattg

SEQ ID NO: 4861568 - DNA, 25 bp, Homo sapien
gctcttccctggaagtttctatggc

SEQ ID NO: 4861569 - DNA, 25 bp, Homo sapien
cctggaagtttctatggccattgac

SEQ ID NO: 4861570 - DNA, 25 bp, Homo sapien
tcttccctggaagtttctatggcca

SEQ ID NO: 4861571 - DNA, 25 bp, Homo sapien
cccgggagcttcttctgtgatccgt

SEQ ID NO: 4861572 - DNA, 25 bp, Homo sapien
aggcctgcccgggagcttcttctgt

SEQ ID NO: 4861573 - DNA, 25 bp, Homo sapien
ttaggagggccagtcctcgaagcag

SEQ ID NO: 4861574 - DNA, 25 bp, Homo sapien
ctttaggagggccagtcctcgaagc

SEQ ID NO: 4861575 - DNA, 25 bp, Homo sapien
ccttccatgcaaggaactgggtgac

SEQ ID NO: 4861576 - DNA, 25 bp, Homo sapien
gacagagctagatcttgatcgagtt

SEQ ID NO: 4861577 - DNA, 25 bp, Homo sapien
ttctgatgcttggatgggttgaaga

SEQ ID NO: 4861578 - DNA, 25 bp, Homo sapien
gtctttctgatgcttggatgggttg

SEQ ID NO: 4861579 - DNA, 25 bp, Homo sapien
gccctgcacgaagaatgactgaacg

SEQ ID NO: 4861580 - DNA, 25 bp, Homo sapien
gaacgtgccgtgcatgtgtcctgga

SEQ ID NO: 4861581 - DNA, 25 bp, Homo sapien
ttccatggacctgccacacgaggat

SEQ ID NO: 4861582 - DNA, 25 bp, Homo sapien
tgtaagacacgtggtagacaatcag

SEQ ID NO: 4861583 - DNA, 25 bp, Homo sapien
tctccattcggaggccaccgctgcc

SEQ ID NO: 4861584 - DNA, 25 bp, Homo sapien
gtctgctctccattcggaggccacc

SEQ ID NO: 4861585 - DNA, 25 bp, Homo sapien
ctgctctccattcggaggccaccgc

SEQ ID NO: 4861586 - DNA, 25 bp, Homo sapien
gctctccattcggaggccaccgctg

SEQ ID NO: 4861587 - DNA, 25 bp, Homo sapien
cctgtgggcaattccgggcagtcct

SEQ ID NO: 4861588 - DNA, 25 bp, Homo sapien
gaacctcctgagacgtgctctggtg

SEQ ID NO: 4861589 - DNA, 25 bp, Homo sapien
tgcatgcccggagctaagtcctttt

SEQ ID NO: 4861590 - DNA, 25 bp, Homo sapien
ctaagtaggcgaggacactagacca

SEQ ID NO: 4861591 - DNA, 25 bp, Homo sapien
gcctgggcctgctaccttgcccact

SEQ ID NO: 4861592 - DNA, 25 bp, Homo sapien
tgggcctgctaccttgcccactcac

SEQ ID NO: 4861593 - DNA, 25 bp, Homo sapien
ccaggaggttagtgtggctaaggag

SEQ ID NO: 4861594 - DNA, 25 bp, Homo sapien
tctccaggaggttagtgtggctaag

SEQ ID NO: 4861595 - DNA, 25 bp, Homo sapien
aggttagtgtggctaaggagggagg

SEQ ID NO: 4861596 - DNA, 25 bp, Homo sapien
cttctccaggaggttagtgtggcta

SEQ ID NO: 4861597 - DNA, 25 bp, Homo sapien
agagactcctgaaggaaccagccct

SEQ ID NO: 4861598 - DNA, 25 bp, Homo sapien
caccagcagaagctaagaaaagagg

SEQ ID NO: 4861599 - DNA, 25 bp, Homo sapien
aagtcgaggagtgccaaggattgcc

SEQ ID NO: 4861600 - DNA, 25 bp, Homo sapien
taatgatgcagctacaagtcgagga

SEQ ID NO: 4861601 - DNA, 25 bp, Homo sapien
gtcataatggaagcccagggtgaca

SEQ ID NO: 4861602 - DNA, 25 bp, Homo sapien
cggcccggcatgatataaacactta

SEQ ID NO: 4861603 - DNA, 25 bp, Homo sapien
aagggcccatgagggcaagtgccta

SEQ ID NO: 4861604 - DNA, 25 bp, Homo sapien
caagtgcctaggtttcataaaagtc

SEQ ID NO: 4861605 - DNA, 25 bp, Homo sapien
aagagggagatgactcatagccacc

SEQ ID NO: 4861606 - DNA, 25 bp, Homo sapien
cctggttgggccacattgagtgcct

SEQ ID NO: 4861607 - DNA, 25 bp, Homo sapien
tgcctgtttacatcttgctgagctg

SEQ ID NO: 4861608 - DNA, 25 bp, Homo sapien
tgggccatacttgaactttccagaa

SEQ ID NO: 4861609 - DNA, 25 bp, Homo sapien
tttgcctgccatctttgctcaaggg

SEQ ID NO: 4861610 - DNA, 25 bp, Homo sapien
gaatttgcctgccatctttgctcaa

SEQ ID NO: 4861611 - DNA, 25 bp, Homo sapien
attcttcccattttagtgtatatgt

SEQ ID NO: 4861612 - DNA, 25 bp, Homo sapien
cttcccattttagtgtatatgttgc

SEQ ID NO: 4861613 - DNA, 25 bp, Homo sapien
tctgtaagtaaatcaacgcctatca

SEQ ID NO: 4861614 - DNA, 25 bp, Homo sapien
cctatcaggcttgtcacatcaaaca

SEQ ID NO: 4861615 - DNA, 25 bp, Homo sapien
tcaaacaaacgattattaccccagc

SEQ ID NO: 4861616 - DNA, 25 bp, Homo sapien
tcagggtcagggcagcgtaaatcct

SEQ ID NO: 4861617 - DNA, 25 bp, Homo sapien
tcaggcctgaatgggctctcccagg

SEQ ID NO: 4861618 - DNA, 25 bp, Homo sapien
ttcccatcaggcctgaatgggctct

SEQ ID NO: 4861619 - DNA, 25 bp, Homo sapien
taaaaaccatgagtcgaatgtgtcc

SEQ ID NO: 4861620 - DNA, 25 bp, Homo sapien
gaaaagcgacagcagttaaaaacca

SEQ ID NO: 4861621 - DNA, 25 bp, Homo sapien
tctgtgtcacccactgcgtctgtgt

SEQ ID NO: 4861622 - DNA, 25 bp, Homo sapien
tctcgaggcctgacattgatgaggt

SEQ ID NO: 4861623 - DNA, 25 bp, Homo sapien
tgccccgtgtgctgaagaacagtca

SEQ ID NO: 4861624 - DNA, 25 bp, Homo sapien
tagagtcaggatgagtggaaattcc

SEQ ID NO: 4861625 - DNA, 25 bp, Homo sapien
cttcaccatcagtcccgggcttggg

SEQ ID NO: 4861626 - DNA, 25 bp, Homo sapien
gggtcaaactgcactctttgtgagt

SEQ ID NO: 4861627 - DNA, 25 bp, Homo sapien
ctctgtgacactgggaagaaggatc

SEQ ID NO: 4861628 - DNA, 25 bp, Homo sapien
ccagtagctgaagcccaactttcgt

SEQ ID NO: 4861629 - DNA, 25 bp, Homo sapien
ctgagggcattgtgccccccagcat

SEQ ID NO: 4861630 - DNA, 25 bp, Homo sapien
tctccaagcctgtgcgtttgatccc

SEQ ID NO: 4861631 - DNA, 25 bp, Homo sapien
tttgatcccggtccttgagcagctg

SEQ ID NO: 4861632 - DNA, 25 bp, Homo sapien
gtggtttggtttatctcctatcagc

SEQ ID NO: 4861633 - DNA, 25 bp, Homo sapien
ggtttatctcctatcagctcctggg

SEQ ID NO: 4861634 - DNA, 25 bp, Homo sapien
gttggaaggcccgagtaagacatcc

SEQ ID NO: 4861635 - DNA, 25 bp, Homo sapien
tgtgtttatggagggcgatgtggtt

SEQ ID NO: 4861636 - DNA, 25 bp, Homo sapien
atccctgttcaggacatatgacaca

SEQ ID NO: 4861637 - DNA, 25 bp, Homo sapien
ggaatgtggctctgtattcagatgg

SEQ ID NO: 4861638 - DNA, 25 bp, Homo sapien
gcatgcaaggcgggagggacacact

SEQ ID NO: 4861639 - DNA, 25 bp, Homo sapien
gacacactttgagctgctggtcagg

SEQ ID NO: 4861640 - DNA, 25 bp, Homo sapien
gcagggtttctttggctggatccat

SEQ ID NO: 4861641 - DNA, 25 bp, Homo sapien
gcagcagggtttctttggctggatc

SEQ ID NO: 4861642 - DNA, 25 bp, Homo sapien
gactgctgtgtagagcgggaagggc

SEQ ID NO: 4861643 - DNA, 25 bp, Homo sapien
ccattttgccttcgggagactgctg

SEQ ID NO: 4861644 - DNA, 25 bp, Homo sapien
aggctggcctttgcaggaacgcaga

SEQ ID NO: 4861645 - DNA, 25 bp, Homo sapien
tgtccacccacaagccattttgcct

SEQ ID NO: 4861646 - DNA, 25 bp, Homo sapien
ggggagaggtgatttcaaaggagct

SEQ ID NO: 4861647 - DNA, 25 bp, Homo sapien
caagatggggagaggtgatttcaaa

SEQ ID NO: 4861648 - DNA, 25 bp, Homo sapien
agatggggagaggtgatttcaaagg

SEQ ID NO: 4861649 - DNA, 25 bp, Homo sapien
tggggagaggtgatttcaaaggagc

SEQ ID NO: 4861650 - DNA, 25 bp, Homo sapien
tccatcactccggttgtcagggctg

SEQ ID NO: 4861651 - DNA, 25 bp, Homo sapien
cgcgctgaccgacgccttgagatga

SEQ ID NO: 4861652 - DNA, 25 bp, Homo sapien
tggtcctttgggtgccgaactctgg

SEQ ID NO: 4861653 - DNA, 25 bp, Homo sapien
tctaggatggcaggttcccgactct

SEQ ID NO: 4861654 - DNA, 25 bp, Homo sapien
gggatctctctctaagcgctgctcg

SEQ ID NO: 4861655 - DNA, 25 bp, Homo sapien
tacagtgtgcattgctagcttcgcc

SEQ ID NO: 4861656 - DNA, 25 bp, Homo sapien
aggagagaccgagatcacgggcgag

SEQ ID NO: 4861657 - DNA, 25 bp, Homo sapien
gactccctgcgcctttctgatacag

SEQ ID NO: 4861658 - DNA, 25 bp, Homo sapien
gggcgtgaagttcctcactgtaccg

SEQ ID NO: 4861659 - DNA, 25 bp, Homo sapien
gtgaagttcctcactgtaccgcgcc

SEQ ID NO: 4861660 - DNA, 25 bp, Homo sapien
tgctgaggggcgtgaagttcctcac

SEQ ID NO: 4861661 - DNA, 25 bp, Homo sapien
gcgtgaagttcctcactgtaccgcg

SEQ ID NO: 4861662 - DNA, 25 bp, Homo sapien
tcaaatagccgcgatcggcagccac

SEQ ID NO: 4861663 - DNA, 25 bp, Homo sapien
ttcctcgagccgcacgtcaaatagc

SEQ ID NO: 4861664 - DNA, 25 bp, Homo sapien
cagccacacttcaaagggatcgccg

SEQ ID NO: 4861665 - DNA, 25 bp, Homo sapien
tgaggccggctccatcggtgggcgg

SEQ ID NO: 4861666 - DNA, 25 bp, Homo sapien
ggtgggctcgctccgcagcgtcgat

SEQ ID NO: 4861667 - DNA, 25 bp, Homo sapien
gggcgggtgggctcgctccgcagcg

SEQ ID NO: 4861668 - DNA, 25 bp, Homo sapien
tccgcagcgtcgatcgcggtgcagc

SEQ ID NO: 4861669 - DNA, 25 bp, Homo sapien
gagcaccggggaggcgagctcccgg

SEQ ID NO: 4861670 - DNA, 25 bp, Homo sapien
cgctgccgctgctttcgggtgtcct

SEQ ID NO: 4861671 - DNA, 25 bp, Homo sapien
cgctgctttcgggtgtccttgggtt

SEQ ID NO: 4861672 - DNA, 25 bp, Homo sapien
tgtccttgggttagatccagcgggc

SEQ ID NO: 4861673 - DNA, 25 bp, Homo sapien
ttgggttagatccagcgggcgaatc

SEQ ID NO: 4861674 - DNA, 25 bp, Homo sapien
caagagggacaccgctgccggcacc

SEQ ID NO: 4861675 - DNA, 25 bp, Homo sapien
aagagggacaccgctgccggcaccg

SEQ ID NO: 4861676 - DNA, 25 bp, Homo sapien
gcaagagggacaccgctgccggcac

SEQ ID NO: 4861677 - DNA, 25 bp, Homo sapien
gagtggaggacagcggctgcaggta

SEQ ID NO: 4861678 - DNA, 25 bp, Homo sapien
acagcggctgcaggtactccgggtg

SEQ ID NO: 4861679 - DNA, 25 bp, Homo sapien
agcatcttcaggaccctgatcggga

SEQ ID NO: 4861680 - DNA, 25 bp, Homo sapien
gtgaccggtgtgagcgctcagcatc

SEQ ID NO: 4861681 - DNA, 25 bp, Homo sapien
ctctaatgtccccctcctccaggcc

SEQ ID NO: 4861682 - DNA, 25 bp, Homo sapien
tctaatgtccccctcctccaggccc

SEQ ID NO: 4861683 - DNA, 25 bp, Homo sapien
tgtccccctcctccaggcccaggaa

SEQ ID NO: 4861684 - DNA, 25 bp, Homo sapien
ccaaggggctcttcttggcgtccag

SEQ ID NO: 4861685 - DNA, 25 bp, Homo sapien
ccgccgccaccgagttgagtttgga

SEQ ID NO: 4861686 - DNA, 25 bp, Homo sapien
gccgatctgcgagcaggtctgagcc

SEQ ID NO: 4861687 - DNA, 25 bp, Homo sapien
ggcgggtccggcttgccgatctgcg

SEQ ID NO: 4861688 - DNA, 25 bp, Homo sapien
tgaagcccgccttgtctcccgggga

SEQ ID NO: 4861689 - DNA, 25 bp, Homo sapien
agcccttggagtagggcttgaagct

SEQ ID NO: 4861690 - DNA, 25 bp, Homo sapien
aggtggaagacaccgaggaggagcc

SEQ ID NO: 4861691 - DNA, 25 bp, Homo sapien
ctgtctttgcgggagtcgccgccgc

SEQ ID NO: 4861692 - DNA, 25 bp, Homo sapien
ctccatgcgggggaaagggcgggca

SEQ ID NO: 4861693 - DNA, 25 bp, Homo sapien
tccatgcgggggaaagggcgggcag

SEQ ID NO: 4861694 - DNA, 25 bp, Homo sapien
catgcgggggaaagggcgggcaggc

SEQ ID NO: 4861695 - DNA, 25 bp, Homo sapien
atgcgggggaaagggcgggcaggcg

SEQ ID NO: 4861696 - DNA, 25 bp, Homo sapien
gaggacgaggatgcggagaccggcg

SEQ ID NO: 4861697 - DNA, 25 bp, Homo sapien
ggaacaccgagtggcccggcttgta

SEQ ID NO: 4861698 - DNA, 25 bp, Homo sapien
agggcggctcggacttgcgcccgga

SEQ ID NO: 4861699 - DNA, 25 bp, Homo sapien
ggcttgggctcctggtctttcttgt

SEQ ID NO: 4861700 - DNA, 25 bp, Homo sapien
ttgtagggagacaccggcgccacgt

SEQ ID NO: 4861701 - DNA, 25 bp, Homo sapien
cacgatggagccgtggtagccaatg

SEQ ID NO: 4861702 - DNA, 25 bp, Homo sapien
cggacttgctaggatccaggccagg

SEQ ID NO: 4861703 - DNA, 25 bp, Homo sapien
gtagccggcgtaggcgcccacgatg

SEQ ID NO: 4861704 - DNA, 25 bp, Homo sapien
ccaggcacgaactgagacgggtagc

SEQ ID NO: 4861705 - DNA, 25 bp, Homo sapien
ggaggccccggtgagcgggctggag

SEQ ID NO: 4861706 - DNA, 25 bp, Homo sapien
gaggccccggtgagcgggctggagc

SEQ ID NO: 4861707 - DNA, 25 bp, Homo sapien
ggccccggtgagcgggctggagctg

SEQ ID NO: 4861708 - DNA, 25 bp, Homo sapien
aggccccggtgagcgggctggagct

SEQ ID NO: 4861709 - DNA, 25 bp, Homo sapien
caagcaataggggtcgcggcataat

SEQ ID NO: 4861710 - DNA, 25 bp, Homo sapien
gctggagccgccgaggtgcgaggcg

SEQ ID NO: 4861711 - DNA, 25 bp, Homo sapien
cggcagggtcgtgcgcgctgcaggt

SEQ ID NO: 4861712 - DNA, 25 bp, Homo sapien
gccgtggtaacctcccaagcaatag

SEQ ID NO: 4861713 - DNA, 25 bp, Homo sapien
cagctgtgcggcagcggttcgttct

SEQ ID NO: 4861714 - DNA, 25 bp, Homo sapien
acccagttgcagctgtgcggcagcg

SEQ ID NO: 4861715 - DNA, 25 bp, Homo sapien
tgccacccagttgcagctgtgcggc

SEQ ID NO: 4861716 - DNA, 25 bp, Homo sapien
tggctgccacccagttgcagctgtg

SEQ ID NO: 4861717 - DNA, 25 bp, Homo sapien
taggcggccagaagtttctcggctc

SEQ ID NO: 4861718 - DNA, 25 bp, Homo sapien
tgtggattccgcaaggacagcgacc

SEQ ID NO: 4861719 - DNA, 25 bp, Homo sapien
cgtgtgggtccgtaggtggctgagc

SEQ ID NO: 4861720 - DNA, 25 bp, Homo sapien
ccccgctgtggataagtggctcttg

SEQ ID NO: 4861721 - DNA, 25 bp, Homo sapien
ctgaagctagtctctgtccatacag

SEQ ID NO: 4861722 - DNA, 25 bp, Homo sapien
tacagcgcgtatggcgaatagtagg

SEQ ID NO: 4861723 - DNA, 25 bp, Homo sapien
ttactggtatcccagcgccgaggct

SEQ ID NO: 4861724 - DNA, 25 bp, Homo sapien
tagtctctgtccatacagcgcgtat

SEQ ID NO: 4861725 - DNA, 25 bp, Homo sapien
tcccggagcagtgtaccaggtcaat

SEQ ID NO: 4861726 - DNA, 25 bp, Homo sapien
aattcaaccaggtgagcgctccagg

SEQ ID NO: 4861727 - DNA, 25 bp, Homo sapien
atcccggcagggtcaagcagtagtg

SEQ ID NO: 4861728 - DNA, 25 bp, Homo sapien
agactcatgcaagaaactccccagg

SEQ ID NO: 4861729 - DNA, 25 bp, Homo sapien
gacatccgctgacatcgccaccggt

SEQ ID NO: 4861730 - DNA, 25 bp, Homo sapien
tgtgatccgagagctccctgacgcc

SEQ ID NO: 4861731 - DNA, 25 bp, Homo sapien
gctgtgatccgagagctccctgacg

SEQ ID NO: 4861732 - DNA, 25 bp, Homo sapien
gggctgctgtgatccgagagctccc

SEQ ID NO: 4861733 - DNA, 25 bp, Homo sapien
ctgctgtgatccgagagctccctga

SEQ ID NO: 4861734 - DNA, 25 bp, Homo sapien
cgcgctgccgcatcagaccagaagg

SEQ ID NO: 4861735 - DNA, 25 bp, Homo sapien
gggagagctctgttcgtcccaaaca

SEQ ID NO: 4861736 - DNA, 25 bp, Homo sapien
gagctctgttcgtcccaaacaggcc

SEQ ID NO: 4861737 - DNA, 25 bp, Homo sapien
caagggagagctctgttcgtcccaa

SEQ ID NO: 4861738 - DNA, 25 bp, Homo sapien
gccaagtattccatttattaacaaa

SEQ ID NO: 4861739 - DNA, 25 bp, Homo sapien
caagtattccatttattaacaaaat

SEQ ID NO: 4861740 - DNA, 25 bp, Homo sapien
gtgaggctgggagctacataaccaa

SEQ ID NO: 4861741 - DNA, 25 bp, Homo sapien
tctggtcaggagagaggaaacgccc

SEQ ID NO: 4861742 - DNA, 25 bp, Homo sapien
caggtgcctttaccctctggtcagg

SEQ ID NO: 4861743 - DNA, 25 bp, Homo sapien
aggtcgacaacccagcgatggctga

SEQ ID NO: 4861744 - DNA, 25 bp, Homo sapien
gaatccttcgcgttcagaagatgag

SEQ ID NO: 4861745 - DNA, 25 bp, Homo sapien
tcgggcagccgaagtctgagccgcc

SEQ ID NO: 4861746 - DNA, 25 bp, Homo sapien
gccttggacactcgcgcagggcctg

SEQ ID NO: 4861747 - DNA, 25 bp, Homo sapien
aacgacagatcccacgaggagcgcg

SEQ ID NO: 4861748 - DNA, 25 bp, Homo sapien
gaggcggttttgcagagcgtcccat

SEQ ID NO: 4861749 - DNA, 25 bp, Homo sapien
gcacgaactcccaagtcgcattcct

SEQ ID NO: 4861750 - DNA, 25 bp, Homo sapien
tcagagcacgaactcccaagtcgca

SEQ ID NO: 4861751 - DNA, 25 bp, Homo sapien
agagcacgaactcccaagtcgcatt

SEQ ID NO: 4861752 - DNA, 25 bp, Homo sapien
acgaactcccaagtcgcattcctta

SEQ ID NO: 4861753 - DNA, 25 bp, Homo sapien
cattatgtgaatacaaaggcttcat

SEQ ID NO: 4861754 - DNA, 25 bp, Homo sapien
tgcattatgtgaatacaaaggcttc

SEQ ID NO: 4861755 - DNA, 25 bp, Homo sapien
gcattatgtgaatacaaaggcttca

SEQ ID NO: 4861756 - DNA, 25 bp, Homo sapien
ctgcattatgtgaatacaaaggctt

SEQ ID NO: 4861757 - DNA, 25 bp, Homo sapien
acagggcccagttgtgaagtgccct

SEQ ID NO: 4861758 - DNA, 25 bp, Homo sapien
gcccagttgtgaagtgccctgactt

SEQ ID NO: 4861759 - DNA, 25 bp, Homo sapien
cagttgtgaagtgccctgacttcgc

SEQ ID NO: 4861760 - DNA, 25 bp, Homo sapien
tgaagtgccctgacttcgcacacac

SEQ ID NO: 4861761 - DNA, 25 bp, Homo sapien
gaagggagagactttaggctgttcc

SEQ ID NO: 4861762 - DNA, 25 bp, Homo sapien
agggagagactttaggctgttccct

SEQ ID NO: 4861763 - DNA, 25 bp, Homo sapien
actgtcggagaaaatgtgggcatgc

SEQ ID NO: 4861764 - DNA, 25 bp, Homo sapien
ttggaaccgagtgaccagggacgac

SEQ ID NO: 4861765 - DNA, 25 bp, Homo sapien
gggccatggtgcgtctccactgacc

SEQ ID NO: 4861766 - DNA, 25 bp, Homo sapien
ctgagagtcacaatagggcgggctt

SEQ ID NO: 4861767 - DNA, 25 bp, Homo sapien
tcaatttaccgcaatgacaccccct

SEQ ID NO: 4861768 - DNA, 25 bp, Homo sapien
ggggtggctctgcttatgtttttcc

SEQ ID NO: 4861769 - DNA, 25 bp, Homo sapien
atttaccgcaatgacaccccctgcc

SEQ ID NO: 4861770 - DNA, 25 bp, Homo sapien
taccgcaatgacaccccctgcccta

SEQ ID NO: 4861771 - DNA, 25 bp, Homo sapien
ggggaggtataagctgattagggag

SEQ ID NO: 4861772 - DNA, 25 bp, Homo sapien
ggaggtataagctgattagggagag

SEQ ID NO: 4861773 - DNA, 25 bp, Homo sapien
ctgtgggggaggtataagctgatta

SEQ ID NO: 4861774 - DNA, 25 bp, Homo sapien
tgggggaggtataagctgattaggg

SEQ ID NO: 4861775 - DNA, 25 bp, Homo sapien
cactcattgctgaggtgaagtcatg

SEQ ID NO: 4861776 - DNA, 25 bp, Homo sapien
ctacccactcattgctgaggtgaag

SEQ ID NO: 4861777 - DNA, 25 bp, Homo sapien
attgctgaggtgaagtcatgagcct

SEQ ID NO: 4861778 - DNA, 25 bp, Homo sapien
gaggtgaagtcatgagccttctttt

SEQ ID NO: 4861779 - DNA, 25 bp, Homo sapien
tgtacatagtcaactggtcccaaca

SEQ ID NO: 4861780 - DNA, 25 bp, Homo sapien
catttgaattgtacatagtcaactg

SEQ ID NO: 4861781 - DNA, 25 bp, Homo sapien
gtcaactggtcccaacacacacagg

SEQ ID NO: 4861782 - DNA, 25 bp, Homo sapien
acaggcacagccagaactttccagg

SEQ ID NO: 4861783 - DNA, 25 bp, Homo sapien
aactagtatgtgcttgtatgggttt

SEQ ID NO: 4861784 - DNA, 25 bp, Homo sapien
ctagtatgtgcttgtatgggtttcc

SEQ ID NO: 4861785 - DNA, 25 bp, Homo sapien
actagtatgtgcttgtatgggtttc

SEQ ID NO: 4861786 - DNA, 25 bp, Homo sapien
ttgtgctctccgcacacagaagctg

SEQ ID NO: 4861787 - DNA, 25 bp, Homo sapien
tgtgggtccccttcacttgtgatcg

SEQ ID NO: 4861788 - DNA, 25 bp, Homo sapien
agtgggagaggtgtcccgcaacaca

SEQ ID NO: 4861789 - DNA, 25 bp, Homo sapien
gctgagtgaatgatgatcccttcca

SEQ ID NO: 4861790 - DNA, 25 bp, Homo sapien
tgtggccctgaagacctgaattcct

SEQ ID NO: 4861791 - DNA, 25 bp, Homo sapien
agacctgaattccttaagttatact

SEQ ID NO: 4861792 - DNA, 25 bp, Homo sapien
ctgtgtgccctgaagcagtcacaga

SEQ ID NO: 4861793 - DNA, 25 bp, Homo sapien
agtgtgaccatcacgagcctcctga

SEQ ID NO: 4861794 - DNA, 25 bp, Homo sapien
ctgtcagtgtgaccatcacgagcct

SEQ ID NO: 4861795 - DNA, 25 bp, Homo sapien
atcacgagcctcctgagacctcctc

SEQ ID NO: 4861796 - DNA, 25 bp, Homo sapien
tctgttcaaggggtcctgactccca

SEQ ID NO: 4861797 - DNA, 25 bp, Homo sapien
tgtcaggcggactgtgacagacaag

SEQ ID NO: 4861798 - DNA, 25 bp, Homo sapien
gactcccacagcctgtcatatcaag

SEQ ID NO: 4861799 - DNA, 25 bp, Homo sapien
acagacaaggcccactctgttcaag

SEQ ID NO: 4861800 - DNA, 25 bp, Homo sapien
acccaaaatagagttgaaaatgtgc

SEQ ID NO: 4861801 - DNA, 25 bp, Homo sapien
gagttgaaaatgtgctgggccctac

SEQ ID NO: 4861802 - DNA, 25 bp, Homo sapien
aaatagagttgaaaatgtgctgggc

SEQ ID NO: 4861803 - DNA, 25 bp, Homo sapien
tagagttgaaaatgtgctgggccct

SEQ ID NO: 4861804 - DNA, 25 bp, Homo sapien
cagccgtgatgcctaactttttcca

SEQ ID NO: 4861805 - DNA, 25 bp, Homo sapien
gctgctcccgcttcagaaacacgag

SEQ ID NO: 4861806 - DNA, 25 bp, Homo sapien
tttttccatatgcaaaggctgctcc

SEQ ID NO: 4861807 - DNA, 25 bp, Homo sapien
agagggccgcgggagatgcacagcc

SEQ ID NO: 4861808 - DNA, 25 bp, Homo sapien
ttgaaaccccaaagaagctgtgggc

SEQ ID NO: 4861809 - DNA, 25 bp, Homo sapien
tgttcccaaaggattctgagcttga

SEQ ID NO: 4861810 - DNA, 25 bp, Homo sapien
tccccaagtatgaatgagctgctgt

SEQ ID NO: 4861811 - DNA, 25 bp, Homo sapien
ggcaccattcttttccccaagtatg

SEQ ID NO: 4861812 - DNA, 25 bp, Homo sapien
cttgagggcatcatttcagctgcca

SEQ ID NO: 4861813 - DNA, 25 bp, Homo sapien
tagagatggaggtcactgaccaccc

SEQ ID NO: 4861814 - DNA, 25 bp, Homo sapien
catggattatggtgtttttgcagga

SEQ ID NO: 4861815 - DNA, 25 bp, Homo sapien
cactgatgtattaacagggctgtct

SEQ ID NO: 4861816 - DNA, 25 bp, Homo sapien
attcccttcagacgctgcctctgtt

SEQ ID NO: 4861817 - DNA, 25 bp, Homo sapien
agggtgccaatcctgaagctgccct

SEQ ID NO: 4861818 - DNA, 25 bp, Homo sapien
ttctccccttcaatggtctcctgtc

SEQ ID NO: 4861819 - DNA, 25 bp, Homo sapien
gtttttctagatactggctattccc

SEQ ID NO: 4861820 - DNA, 25 bp, Homo sapien
cctcttggtaatcagtcttggaaaa

SEQ ID NO: 4861821 - DNA, 25 bp, Homo sapien
tgcaaaggcctctgtcctggcgagg

SEQ ID NO: 4861822 - DNA, 25 bp, Homo sapien
aaagttttctttgactccctgcctg

SEQ ID NO: 4861823 - DNA, 25 bp, Homo sapien
gcacagggtcactgggctttctccc

SEQ ID NO: 4861824 - DNA, 25 bp, Homo sapien
aacaataaggtgaattctgttcatc

SEQ ID NO: 4861825 - DNA, 25 bp, Homo sapien
ggacagccaggatcccatgaacact

SEQ ID NO: 4861826 - DNA, 25 bp, Homo sapien
ttgtaaggttcagccacgacactgt

SEQ ID NO: 4861827 - DNA, 25 bp, Homo sapien
ccttgctcagttggcccagagagcc

SEQ ID NO: 4861828 - DNA, 25 bp, Homo sapien
cccatgtctatgctgctttgagtcc

SEQ ID NO: 4861829 - DNA, 25 bp, Homo sapien
ccatttttcggacccctttgcatgg

SEQ ID NO: 4861830 - DNA, 25 bp, Homo sapien
cggttgacccctccgaggacttgca

SEQ ID NO: 4861831 - DNA, 25 bp, Homo sapien
aataatggtcttctcagtgctttcc

SEQ ID NO: 4861832 - DNA, 25 bp, Homo sapien
ggagttcgtgggaatgaatttatcc

SEQ ID NO: 4861833 - DNA, 25 bp, Homo sapien
cttagaggaacgagcctttcaaagg

SEQ ID NO: 4861834 - DNA, 25 bp, Homo sapien
aatccatgcttagaggaacgagcct

SEQ ID NO: 4861835 - DNA, 25 bp, Homo sapien
tcgtgggaatgaatttatcccaaac

SEQ ID NO: 4861836 - DNA, 25 bp, Homo sapien
cacgaacggaattcctcagcatggg

SEQ ID NO: 4861837 - DNA, 25 bp, Homo sapien
cccaggagcaaggtgttcgcccctt

SEQ ID NO: 4861838 - DNA, 25 bp, Homo sapien
tgctgacgttccaaccactggctgg

SEQ ID NO: 4861839 - DNA, 25 bp, Homo sapien
ggcccaataatgtcctgctgtcctg

SEQ ID NO: 4861840 - DNA, 25 bp, Homo sapien
tttagcgggtcgttttcagcacgga

SEQ ID NO: 4861841 - DNA, 25 bp, Homo sapien
ttcagcacggagaggctacaggttg

SEQ ID NO: 4861842 - DNA, 25 bp, Homo sapien
tatatgtggttcacggctgtgtgct

SEQ ID NO: 4861843 - DNA, 25 bp, Homo sapien
tcttcgtgtatatgtggttcacggc

SEQ ID NO: 4861844 - DNA, 25 bp, Homo sapien
tcagctagaaggcacctaaaggtcc

SEQ ID NO: 4861845 - DNA, 25 bp, Homo sapien
cattgggtaaagagatcaaagagcc

SEQ ID NO: 4861846 - DNA, 25 bp, Homo sapien
ctaaaggtccttttgtgattacaca

SEQ ID NO: 4861847 - DNA, 25 bp, Homo sapien
agtataatgaacacatgcatcatgg

SEQ ID NO: 4861848 - DNA, 25 bp, Homo sapien
aaattgttagtgagagtgccatgcc

SEQ ID NO: 4861849 - DNA, 25 bp, Homo sapien
gttcagttcagtatcacaagagtgg

SEQ ID NO: 4861850 - DNA, 25 bp, Homo sapien
ttaagccaataagcaggtccaaagg

SEQ ID NO: 4861851 - DNA, 25 bp, Homo sapien
tgccatgccaaagaagagacccctt

SEQ ID NO: 4861852 - DNA, 25 bp, Homo sapien
ctttatatttttctgggagctttgg

SEQ ID NO: 4861853 - DNA, 25 bp, Homo sapien
atatttttctgggagctttggccct

SEQ ID NO: 4861854 - DNA, 25 bp, Homo sapien
tctgggagctttggcccttgggatc

SEQ ID NO: 4861855 - DNA, 25 bp, Homo sapien
tttctgggagctttggcccttggga

SEQ ID NO: 4861856 - DNA, 25 bp, Homo sapien
cctcggtcttgggtatccgtcctgg

SEQ ID NO: 4861857 - DNA, 25 bp, Homo sapien
ggccgtcgcttcgatgacgccatca

SEQ ID NO: 4861858 - DNA, 25 bp, Homo sapien
gacgccatcaattcacgcgagaaga

SEQ ID NO: 4861859 - DNA, 25 bp, Homo sapien
tcccagcggtcaatggccgtagctg

SEQ ID NO: 4861860 - DNA, 25 bp, Homo sapien
gcccacgagcaagaaaaccgtcaca

SEQ ID NO: 4861861 - DNA, 25 bp, Homo sapien
tgcaggcgctccgtactcgtccgag

SEQ ID NO: 4861862 - DNA, 25 bp, Homo sapien
tcgtccgagcccacgagcaagaaaa

SEQ ID NO: 4861863 - DNA, 25 bp, Homo sapien
gtactcgtccgagcccacgagcaag

SEQ ID NO: 4861864 - DNA, 25 bp, Homo sapien
tgaggttcccgaaagtgacgggtca

SEQ ID NO: 4861865 - DNA, 25 bp, Homo sapien
ctcgcaaggagaggacgcgacagaa

SEQ ID NO: 4861866 - DNA, 25 bp, Homo sapien
ggcctccggctaccgatctgcagtt

SEQ ID NO: 4861867 - DNA, 25 bp, Homo sapien
agagagggtcaagcgccctggtctg

SEQ ID NO: 4861868 - DNA, 25 bp, Homo sapien
tgagcgcagggcgtggattctgcct

SEQ ID NO: 4861869 - DNA, 25 bp, Homo sapien
ctgtgcgtgcgtgggcccgtgagcg

SEQ ID NO: 4861870 - DNA, 25 bp, Homo sapien
tgcaaagttcagctgtgcgtgcgtg

SEQ ID NO: 4861871 - DNA, 25 bp, Homo sapien
cgcagggcgtggattctgcctccca

SEQ ID NO: 4861872 - DNA, 25 bp, Homo sapien
agagagatgcacaaaagaaactgga

SEQ ID NO: 4861873 - DNA, 25 bp, Homo sapien
tataccccaatatgtccctcttcta

SEQ ID NO: 4861874 - DNA, 25 bp, Homo sapien
tgtaatataccccaatatgtccctc

SEQ ID NO: 4861875 - DNA, 25 bp, Homo sapien
ctgagaagagagatgcacaaaagaa

SEQ ID NO: 4861876 - DNA, 25 bp, Homo sapien
aaggctctgttagatcaatatcatg

SEQ ID NO: 4861877 - DNA, 25 bp, Homo sapien
gatcaatatcatgagggtcaacttt

SEQ ID NO: 4861878 - DNA, 25 bp, Homo sapien
gctctgttagatcaatatcatgagg

SEQ ID NO: 4861879 - DNA, 25 bp, Homo sapien
tgttagatcaatatcatgagggtca

SEQ ID NO: 4861880 - DNA, 25 bp, Homo sapien
ccagggccgctggtcgaagtcagca

SEQ ID NO: 4861881 - DNA, 25 bp, Homo sapien
agggccgctggtcgaagtcagcagg

SEQ ID NO: 4861882 - DNA, 25 bp, Homo sapien
ggccgctggtcgaagtcagcagggc

SEQ ID NO: 4861883 - DNA, 25 bp, Homo sapien
cgctggtcgaagtcagcagggcacc

SEQ ID NO: 4861884 - DNA, 25 bp, Homo sapien
tcttctatttatgttaggcaccgct

SEQ ID NO: 4861885 - DNA, 25 bp, Homo sapien
gcaccgctttatgttcgaaggcccc

SEQ ID NO: 4861886 - DNA, 25 bp, Homo sapien
ttaagacttgtgcttgcttctacct

SEQ ID NO: 4861887 - DNA, 25 bp, Homo sapien
tggattgggcatcttaagacttgtg

SEQ ID NO: 4861888 - DNA, 25 bp, Homo sapien
cacaaggtacattcttcacctcatc

SEQ ID NO: 4861889 - DNA, 25 bp, Homo sapien
ccacaaggtacattcttcacctcat

SEQ ID NO: 4861890 - DNA, 25 bp, Homo sapien
ctagtcccacaaggtacattcttca

SEQ ID NO: 4861891 - DNA, 25 bp, Homo sapien
cccacaaggtacattcttcacctca

SEQ ID NO: 4861892 - DNA, 25 bp, Homo sapien
tcaccacttcaattctgtcaaagta

SEQ ID NO: 4861893 - DNA, 25 bp, Homo sapien
gggaccaggaagttcaccacttcaa

SEQ ID NO: 4861894 - DNA, 25 bp, Homo sapien
gtcaaagtagatcatcacaccacca

SEQ ID NO: 4861895 - DNA, 25 bp, Homo sapien
ctgcgttcgggaccaggaagttcac

SEQ ID NO: 4861896 - DNA, 25 bp, Homo sapien
caacagacacgggagtggcatgctg

SEQ ID NO: 4861897 - DNA, 25 bp, Homo sapien
acagacacgggagtggcatgctggg

SEQ ID NO: 4861898 - DNA, 25 bp, Homo sapien
ctacaacagacacgggagtggcatg

SEQ ID NO: 4861899 - DNA, 25 bp, Homo sapien
tacaacagacacgggagtggcatgc

SEQ ID NO: 4861900 - DNA, 25 bp, Homo sapien
agaaaaggcaagactcaaaatgccc

SEQ ID NO: 4861901 - DNA, 25 bp, Homo sapien
cctcagacacggcagctctcctttt

SEQ ID NO: 4861902 - DNA, 25 bp, Homo sapien
tcagacacggcagctctccttttcc

SEQ ID NO: 4861903 - DNA, 25 bp, Homo sapien
aaggcaagactcaaaatgccctcag

SEQ ID NO: 4861904 - DNA, 25 bp, Homo sapien
agctcaatgtagacctcttgaagcg

SEQ ID NO: 4861905 - DNA, 25 bp, Homo sapien
catagtcagcagtatagttcttcac

SEQ ID NO: 4861906 - DNA, 25 bp, Homo sapien
gaagcgtgtgcacactgcagaactg

SEQ ID NO: 4861907 - DNA, 25 bp, Homo sapien
tcttgttgaagatgagggccttgtc

SEQ ID NO: 4861908 - DNA, 25 bp, Homo sapien
tccaggaaccctgcttaagcacggc

SEQ ID NO: 4861909 - DNA, 25 bp, Homo sapien
catttcctgtccataagtgaccatc

SEQ ID NO: 4861910 - DNA, 25 bp, Homo sapien
tcctgagcacaagattctttaacat

SEQ ID NO: 4861911 - DNA, 25 bp, Homo sapien
gttgcatagctatcagcattctcca

SEQ ID NO: 4861912 - DNA, 25 bp, Homo sapien
gattgaggccagaagtgaatactct

SEQ ID NO: 4861913 - DNA, 25 bp, Homo sapien
ggaaggagctatggttctcatctca

SEQ ID NO: 4861914 - DNA, 25 bp, Homo sapien
gtcacagtaccctcagcttaaaatg

SEQ ID NO: 4861915 - DNA, 25 bp, Homo sapien
tatctacttaggcacgtggaatctt

SEQ ID NO: 4861916 - DNA, 25 bp, Homo sapien
ttatgaagattcctgggaaaaatca

SEQ ID NO: 4861917 - DNA, 25 bp, Homo sapien
tcctgggaaaaatcattttccagtc

SEQ ID NO: 4861918 - DNA, 25 bp, Homo sapien
gattcctgggaaaaatcattttcca

SEQ ID NO: 4861919 - DNA, 25 bp, Homo sapien
tgaagattcctgggaaaaatcattt

SEQ ID NO: 4861920 - DNA, 25 bp, Homo sapien
cctcttcagggacattagggatcct

SEQ ID NO: 4861921 - DNA, 25 bp, Homo sapien
ttgctggcgatgtggatgagtcctc

SEQ ID NO: 4861922 - DNA, 25 bp, Homo sapien
ggactagagacatgagctcctcctt

SEQ ID NO: 4861923 - DNA, 25 bp, Homo sapien
gcttgctagcaagactgagatgtaa

SEQ ID NO: 4861924 - DNA, 25 bp, Homo sapien
tactttaataacatgggcaaagagg

SEQ ID NO: 4861925 - DNA, 25 bp, Homo sapien
cactgcttcagtgataactatatcc

SEQ ID NO: 4861926 - DNA, 25 bp, Homo sapien
cagaggagtgttgtatacataggta

SEQ ID NO: 4861927 - DNA, 25 bp, Homo sapien
tactaagtacacacaaagaggttct

SEQ ID NO: 4861928 - DNA, 25 bp, Homo sapien
gggtaagacagctcagatccgaatg

SEQ ID NO: 4861929 - DNA, 25 bp, Homo sapien
tggtacgtcatagagaaaagcagcg

SEQ ID NO: 4861930 - DNA, 25 bp, Homo sapien
tctgaataagtaacccaagggagct

SEQ ID NO: 4861931 - DNA, 25 bp, Homo sapien
caagttgcagtgagcgggtaagaca

SEQ ID NO: 4861932 - DNA, 25 bp, Homo sapien
cggtcccgtgtgattgatgctgcca

SEQ ID NO: 4861933 - DNA, 25 bp, Homo sapien
tatgtatctgcggagacctgaaggc

SEQ ID NO: 4861934 - DNA, 25 bp, Homo sapien
gactgtcagttagagaaattgccca

SEQ ID NO: 4861935 - DNA, 25 bp, Homo sapien
gaagttgctgactcgtatgcacaga

SEQ ID NO: 4861936 - DNA, 25 bp, Homo sapien
tatctgtcaaggtggaaacctgtgg

SEQ ID NO: 4861937 - DNA, 25 bp, Homo sapien
taaatggcccgtatcctccataagt

SEQ ID NO: 4861938 - DNA, 25 bp, Homo sapien
gctagtagcttaccggaaaaatgtg

SEQ ID NO: 4861939 - DNA, 25 bp, Homo sapien
taataacgtcattcctcagaccaaa

SEQ ID NO: 4861940 - DNA, 25 bp, Homo sapien
actgcatctctcctttgctgtcagc

SEQ ID NO: 4861941 - DNA, 25 bp, Homo sapien
tctctcctttgctgtcagccgccat

SEQ ID NO: 4861942 - DNA, 25 bp, Homo sapien
catctctcctttgctgtcagccgcc

SEQ ID NO: 4861943 - DNA, 25 bp, Homo sapien
tgcatctctcctttgctgtcagccg

SEQ ID NO: 4861944 - DNA, 25 bp, Homo sapien
ctgttgcaaagccagtttgagattt

SEQ ID NO: 4861945 - DNA, 25 bp, Homo sapien
gtcctgttgcaaagccagtttgaga

SEQ ID NO: 4861946 - DNA, 25 bp, Homo sapien
ggtcctgttgcaaagccagtttgag

SEQ ID NO: 4861947 - DNA, 25 bp, Homo sapien
tcctgttgcaaagccagtttgagat

SEQ ID NO: 4861948 - DNA, 25 bp, Homo sapien
gagaagggaagcagtgtcagagaga

SEQ ID NO: 4861949 - DNA, 25 bp, Homo sapien
tcagagagagaggggctgctcccat

SEQ ID NO: 4861950 - DNA, 25 bp, Homo sapien
gggagaagggaagcagtgtcagaga

SEQ ID NO: 4861951 - DNA, 25 bp, Homo sapien
cttgggagaagggaagcagtgtcag

SEQ ID NO: 4861952 - DNA, 25 bp, Homo sapien
ccagctcccactgggccttgatctt

SEQ ID NO: 4861953 - DNA, 25 bp, Homo sapien
ccttgatcttcctgcacaaaaagga

SEQ ID NO: 4861954 - DNA, 25 bp, Homo sapien
atcttcctgcacaaaaaggacatcc

SEQ ID NO: 4861955 - DNA, 25 bp, Homo sapien
tgatcttcctgcacaaaaaggacat

SEQ ID NO: 4861956 - DNA, 25 bp, Homo sapien
aaacagcagctgatgggaaagtgag

SEQ ID NO: 4861957 - DNA, 25 bp, Homo sapien
aaagtgagggtagtgagggacacac

SEQ ID NO: 4861958 - DNA, 25 bp, Homo sapien
ctggagagagattaaaacagcagct

SEQ ID NO: 4861959 - DNA, 25 bp, Homo sapien
gagagattaaaacagcagctgatgg

SEQ ID NO: 4861960 - DNA, 25 bp, Homo sapien
aactcgtagtttctgcggattgcct

SEQ ID NO: 4861961 - DNA, 25 bp, Homo sapien
tgcctctggtatgttgggctttgtt

SEQ ID NO: 4861962 - DNA, 25 bp, Homo sapien
cgtagtttctgcggattgcctctgg

SEQ ID NO: 4861963 - DNA, 25 bp, Homo sapien
ctcgtagtttctgcggattgcctct

SEQ ID NO: 4861964 - DNA, 25 bp, Homo sapien
cagcccaggcggagggtatactcac

SEQ ID NO: 4861965 - DNA, 25 bp, Homo sapien
caatgggctgtagcaaatcctccag

SEQ ID NO: 4861966 - DNA, 25 bp, Homo sapien
gctttggttacctctgggatgggac

SEQ ID NO: 4861967 - DNA, 25 bp, Homo sapien
ttctcaatcacaggtagggagcccc

SEQ ID NO: 4861968 - DNA, 25 bp, Homo sapien
tttctgggcggcaatgagaagcttt

SEQ ID NO: 4861969 - DNA, 25 bp, Homo sapien
tgtttctgggcggcaatgagaagct

SEQ ID NO: 4861970 - DNA, 25 bp, Homo sapien
caatgagcgccttcttccgctctgt

SEQ ID NO: 4861971 - DNA, 25 bp, Homo sapien
cttctgtttctgggcggcaatgaga

SEQ ID NO: 4861972 - DNA, 25 bp, Homo sapien
cctttcacccgagctgagtgtcctg

SEQ ID NO: 4861973 - DNA, 25 bp, Homo sapien
agctgtgagtgcacacaagggcaga

SEQ ID NO: 4861974 - DNA, 25 bp, Homo sapien
actaatttcacctttcacccgagct

SEQ ID NO: 4861975 - DNA, 25 bp, Homo sapien
gaggattacggttctggcatttcag

SEQ ID NO: 4861976 - DNA, 25 bp, Homo sapien
ccatcaccttctgcccgtaggtgat

SEQ ID NO: 4861977 - DNA, 25 bp, Homo sapien
taatatctgcatagacctggagaac

SEQ ID NO: 4861978 - DNA, 25 bp, Homo sapien
ttgagcccaaaaccgtggcactgac

SEQ ID NO: 4861979 - DNA, 25 bp, Homo sapien
cactgaccaactttggagcagaagt

SEQ ID NO: 4861980 - DNA, 25 bp, Homo sapien
cctggagaacagactttgagcccaa

SEQ ID NO: 4861981 - DNA, 25 bp, Homo sapien
ctattttcatagcagtgtagcactc

SEQ ID NO: 4861982 - DNA, 25 bp, Homo sapien
tggcttcggctattttcatagcagt

SEQ ID NO: 4861983 - DNA, 25 bp, Homo sapien
ttcatagcagtgtagcactcagcat

SEQ ID NO: 4861984 - DNA, 25 bp, Homo sapien
gtagcactcagcatctgcctttgcc

SEQ ID NO: 4861985 - DNA, 25 bp, Homo sapien
ccaaagtaaatcttgctgttggaag

SEQ ID NO: 4861986 - DNA, 25 bp, Homo sapien
gaacatgttaggaatgtctttgcca

SEQ ID NO: 4861987 - DNA, 25 bp, Homo sapien
ctgcccgcagagtccatgaacatgt

SEQ ID NO: 4861988 - DNA, 25 bp, Homo sapien
gcagatattcaggggttagcttcag

SEQ ID NO: 4861989 - DNA, 25 bp, Homo sapien
gtggccgtctccaagggttcatctt

SEQ ID NO: 4861990 - DNA, 25 bp, Homo sapien
caattctccttagtggccgtctcca

SEQ ID NO: 4861991 - DNA, 25 bp, Homo sapien
tcttctaagccaaagcttagcttgt

SEQ ID NO: 4861992 - DNA, 25 bp, Homo sapien
gcttgtcagctagcccctcaaactg

SEQ ID NO: 4861993 - DNA, 25 bp, Homo sapien
tgctcatgggacaagctatcgcagg

SEQ ID NO: 4861994 - DNA, 25 bp, Homo sapien
tgtctagaggtcaaaggtcaagccc

SEQ ID NO: 4861995 - DNA, 25 bp, Homo sapien
caggatgttagtaccggagaggccc

SEQ ID NO: 4861996 - DNA, 25 bp, Homo sapien
tagcaccagtacttccttatgaggg

SEQ ID NO: 4861997 - DNA, 25 bp, Homo sapien
gaagtactggttacattcacagaca

SEQ ID NO: 4861998 - DNA, 25 bp, Homo sapien
cacggcaatcaatccagcagtatca

SEQ ID NO: 4861999 - DNA, 25 bp, Homo sapien
gatacatagaaccataggaacagtg

SEQ ID NO: 4862000 - DNA, 25 bp, Homo sapien
taatcatcagtctacacaaaggcag

SEQ ID NO: 4862001 - DNA, 25 bp, Homo sapien
tatttttagagagatcttgtactta

SEQ ID NO: 4862002 - DNA, 25 bp, Homo sapien
tttttagagagatcttgtacttaac

SEQ ID NO: 4862003 - DNA, 25 bp, Homo sapien
gtttatttttagagagatcttgtac

SEQ ID NO: 4862004 - DNA, 25 bp, Homo sapien
agattttcatctgtttatttttaga

SEQ ID NO: 4862005 - DNA, 25 bp, Homo sapien
tgggctagggttgccggacttaaca

SEQ ID NO: 4862006 - DNA, 25 bp, Homo sapien
acacacctaagaagtagtagagcag

SEQ ID NO: 4862007 - DNA, 25 bp, Homo sapien
tagagcagtgatttgaactttggca

SEQ ID NO: 4862008 - DNA, 25 bp, Homo sapien
caatagaaaaagcttgggatccctg

SEQ ID NO: 4862009 - DNA, 25 bp, Homo sapien
tgtagaggtatgtatcctcaatact

SEQ ID NO: 4862010 - DNA, 25 bp, Homo sapien
tttgtagaggtatgtatcctcaata

SEQ ID NO: 4862011 - DNA, 25 bp, Homo sapien
acatttttgtagaggtatgtatcct

SEQ ID NO: 4862012 - DNA, 25 bp, Homo sapien
tttttgtagaggtatgtatcctcaa

SEQ ID NO: 4862013 - DNA, 25 bp, Homo sapien
aaatcgtatgtgtttctgaaacccg

SEQ ID NO: 4862014 - DNA, 25 bp, Homo sapien
tatttcgagaggttagcggccacct

SEQ ID NO: 4862015 - DNA, 25 bp, Homo sapien
tctgaaacccggtgtagtgttgact

SEQ ID NO: 4862016 - DNA, 25 bp, Homo sapien
tgcatatgtctcaattcgggccatc

SEQ ID NO: 4862017 - DNA, 25 bp, Homo sapien
gtcacccgcgaacctggaaatggag

SEQ ID NO: 4862018 - DNA, 25 bp, Homo sapien
ggcagaaacgcatcctatactcggg

SEQ ID NO: 4862019 - DNA, 25 bp, Homo sapien
cccaagggacttttgtgaggcagaa

SEQ ID NO: 4862020 - DNA, 25 bp, Homo sapien
tcttgcgaggaacccctaagcgata

SEQ ID NO: 4862021 - DNA, 25 bp, Homo sapien
gcgccgtgtgaaccaatcattgctc

SEQ ID NO: 4862022 - DNA, 25 bp, Homo sapien
gccgtgtgaaccaatcattgctcat

SEQ ID NO: 4862023 - DNA, 25 bp, Homo sapien
tcttccggttccgcccagcttgcgc

SEQ ID NO: 4862024 - DNA, 25 bp, Homo sapien
catcttccggttccgcccagcttgc

SEQ ID NO: 4862025 - DNA, 25 bp, Homo sapien
ctcgttcaccgcccgcaatgcgcac

SEQ ID NO: 4862026 - DNA, 25 bp, Homo sapien
ccgcaatgcgcacccgactcccagc

SEQ ID NO: 4862027 - DNA, 25 bp, Homo sapien
gttcaccgcccgcaatgcgcacccg

SEQ ID NO: 4862028 - DNA, 25 bp, Homo sapien
accgcccgcaatgcgcacccgactc

SEQ ID NO: 4862029 - DNA, 25 bp, Homo sapien
gcggccgccgcgccacagcctgctg

SEQ ID NO: 4862030 - DNA, 25 bp, Homo sapien
ccgccgcgccacagcctgctgcacg

SEQ ID NO: 4862031 - DNA, 25 bp, Homo sapien
cgccgcgccacagcctgctgcacgc

SEQ ID NO: 4862032 - DNA, 25 bp, Homo sapien
ggccgccgcgccacagcctgctgca

SEQ ID NO: 4862033 - DNA, 25 bp, Homo sapien
gctgagggccggaatagttacctga

SEQ ID NO: 4862034 - DNA, 25 bp, Homo sapien
taaccggcttgggattggacttctc

SEQ ID NO: 4862035 - DNA, 25 bp, Homo sapien
tatacacaaaagacgaaagctcccc

SEQ ID NO: 4862036 - DNA, 25 bp, Homo sapien
taggcactaagtcattttcccgagg

SEQ ID NO: 4862037 - DNA, 25 bp, Homo sapien
caggtttggttttgctgaccgccac

SEQ ID NO: 4862038 - DNA, 25 bp, Homo sapien
tttggttttgctgaccgccactagc

SEQ ID NO: 4862039 - DNA, 25 bp, Homo sapien
tggttttgctgaccgccactagccg

SEQ ID NO: 4862040 - DNA, 25 bp, Homo sapien
ggtttggttttgctgaccgccacta

SEQ ID NO: 4862041 - DNA, 25 bp, Homo sapien
ctgcccatgtccataggcctcgatc

SEQ ID NO: 4862042 - DNA, 25 bp, Homo sapien
cccatgtccataggcctcgatcacc

SEQ ID NO: 4862043 - DNA, 25 bp, Homo sapien
tgcccatgtccataggcctcgatca

SEQ ID NO: 4862044 - DNA, 25 bp, Homo sapien
catgtccataggcctcgatcaccat

SEQ ID NO: 4862045 - DNA, 25 bp, Homo sapien
tttgggatttgatgctttttctagc

SEQ ID NO: 4862046 - DNA, 25 bp, Homo sapien
tgggatttgatgctttttctagcag

SEQ ID NO: 4862047 - DNA, 25 bp, Homo sapien
gggatttgatgctttttctagcagt

SEQ ID NO: 4862048 - DNA, 25 bp, Homo sapien
gatttgatgctttttctagcagttc

SEQ ID NO: 4862049 - DNA, 25 bp, Homo sapien
ttgtttctgtaggtggccaatgaag

SEQ ID NO: 4862050 - DNA, 25 bp, Homo sapien
gtttctgtaggtggccaatgaagtg

SEQ ID NO: 4862051 - DNA, 25 bp, Homo sapien
tctgtaggtggccaatgaagtgcca

SEQ ID NO: 4862052 - DNA, 25 bp, Homo sapien
taggtggccaatgaagtgccatttg

SEQ ID NO: 4862053 - DNA, 25 bp, Homo sapien
gggctattctaaaagttgctctctc

SEQ ID NO: 4862054 - DNA, 25 bp, Homo sapien
tctcttccacaaagggtagtagaag

SEQ ID NO: 4862055 - DNA, 25 bp, Homo sapien
ttgctctctcttccacaaagggtag

SEQ ID NO: 4862056 - DNA, 25 bp, Homo sapien
tagtagaagcaatacaatgacagaa

SEQ ID NO: 4862057 - DNA, 25 bp, Homo sapien
tgggtaggtttccaagtatatataa

SEQ ID NO: 4862058 - DNA, 25 bp, Homo sapien
acatgaggttgggtaggtttccaag

SEQ ID NO: 4862059 - DNA, 25 bp, Homo sapien
taataataaacatgaggttgggtag

SEQ ID NO: 4862060 - DNA, 25 bp, Homo sapien
ataacccagaaaatggtgaattcat

SEQ ID NO: 4862061 - DNA, 25 bp, Homo sapien
accacgctcagctatttttttgcat

SEQ ID NO: 4862062 - DNA, 25 bp, Homo sapien
ctgtgtagctgggacttgacaggca

SEQ ID NO: 4862063 - DNA, 25 bp, Homo sapien
cctgtgtagctgggacttgacaggc

SEQ ID NO: 4862064 - DNA, 25 bp, Homo sapien
tgcaccaccacgctcagctattttt

SEQ ID NO: 4862065 - DNA, 25 bp, Homo sapien
tacaggtatgaacatgatgaatcac

SEQ ID NO: 4862066 - DNA, 25 bp, Homo sapien
aatcagaagcaacccaacattcatc

SEQ ID NO: 4862067 - DNA, 25 bp, Homo sapien
tgtaaactcacgtacattaacagtg

SEQ ID NO: 4862068 - DNA, 25 bp, Homo sapien
caaaggctcgtacacaaatattcat

SEQ ID NO: 4862069 - DNA, 25 bp, Homo sapien
aacttacaacagtccaccttcaagg

SEQ ID NO: 4862070 - DNA, 25 bp, Homo sapien
taataagattaatagagacccagcc

SEQ ID NO: 4862071 - DNA, 25 bp, Homo sapien
tcaaggtgtgttacactacttcaca

SEQ ID NO: 4862072 - DNA, 25 bp, Homo sapien
gatttatcctaggagtgcagggttg

SEQ ID NO: 4862073 - DNA, 25 bp, Homo sapien
ggaactgttcactttgtctgccaac

SEQ ID NO: 4862074 - DNA, 25 bp, Homo sapien
tctcttctccgctggtgttaatctg

SEQ ID NO: 4862075 - DNA, 25 bp, Homo sapien
cactgtttccagcatgaagagattg

SEQ ID NO: 4862076 - DNA, 25 bp, Homo sapien
tcttctccgctggtgttaatctgga

SEQ ID NO: 4862077 - DNA, 25 bp, Homo sapien
cttcaagaaaagaaacagaaaacag

SEQ ID NO: 4862078 - DNA, 25 bp, Homo sapien
tccttgactaagatcatgcccaaag

SEQ ID NO: 4862079 - DNA, 25 bp, Homo sapien
ccaaagcttcctatggtcatcagcc

SEQ ID NO: 4862080 - DNA, 25 bp, Homo sapien
gaagtctggatttggtccttgacta

SEQ ID NO: 4862081 - DNA, 25 bp, Homo sapien
aactccaggttaggacacttggcgt

SEQ ID NO: 4862082 - DNA, 25 bp, Homo sapien
gttcagctttttacacagctcctcc

SEQ ID NO: 4862083 - DNA, 25 bp, Homo sapien
gctcagctcaacctggtcagcaggg

SEQ ID NO: 4862084 - DNA, 25 bp, Homo sapien
cgcatgctggaaatccgcggacatg

SEQ ID NO: 4862085 - DNA, 25 bp, Homo sapien
gctcctcccggagggacaataacag

SEQ ID NO: 4862086 - DNA, 25 bp, Homo sapien
tgcgttgccaatctagcacacctgt

SEQ ID NO: 4862087 - DNA, 25 bp, Homo sapien
cacgcacttacgtaatgaaatgcct

SEQ ID NO: 4862088 - DNA, 25 bp, Homo sapien
tcatcgtgatttgctgtgatacagc

SEQ ID NO: 4862089 - DNA, 25 bp, Homo sapien
cacataagattaagcctcggacggg

SEQ ID NO: 4862090 - DNA, 25 bp, Homo sapien
aaaaatcgtgcttcctattcggaca

SEQ ID NO: 4862091 - DNA, 25 bp, Homo sapien
tttctttgagtaatcccgctctcca

SEQ ID NO: 4862092 - DNA, 25 bp, Homo sapien
taatcccgctctccaaaaatcgtgc

SEQ ID NO: 4862093 - DNA, 25 bp, Homo sapien
ttcctattcggacatttgtagatcc

SEQ ID NO: 4862094 - DNA, 25 bp, Homo sapien
cagcggggccttcacgtctgctgcg

SEQ ID NO: 4862095 - DNA, 25 bp, Homo sapien
ctccagcggggccttcacgtctgct

SEQ ID NO: 4862096 - DNA, 25 bp, Homo sapien
tccagcggggccttcacgtctgctg

SEQ ID NO: 4862097 - DNA, 25 bp, Homo sapien
gcggggccttcacgtctgctgcgca

SEQ ID NO: 4862098 - DNA, 25 bp, Homo sapien
gttgaaaccatgtgcctgaaaaggc

SEQ ID NO: 4862099 - DNA, 25 bp, Homo sapien
tgatgtcagaaaggcccaagtcctc

SEQ ID NO: 4862100 - DNA, 25 bp, Homo sapien
tatctaccggctagggaagaatctg

SEQ ID NO: 4862101 - DNA, 25 bp, Homo sapien
gacaaggaatgtcaaagccaggctt

SEQ ID NO: 4862102 - DNA, 25 bp, Homo sapien
taattgctttgtaattggcacagat

SEQ ID NO: 4862103 - DNA, 25 bp, Homo sapien
ttaattgctttgtaattggcacaga

SEQ ID NO: 4862104 - DNA, 25 bp, Homo sapien
attgctttgtaattggcacagatgg

SEQ ID NO: 4862105 - DNA, 25 bp, Homo sapien
aattgctttgtaattggcacagatg

SEQ ID NO: 4862106 - DNA, 25 bp, Homo sapien
caggctggcacaatgccaaggcacc

SEQ ID NO: 4862107 - DNA, 25 bp, Homo sapien
tggcacaatgccaaggcaccagcat

SEQ ID NO: 4862108 - DNA, 25 bp, Homo sapien
ttggctgcgtctgtgaccccaggga

SEQ ID NO: 4862109 - DNA, 25 bp, Homo sapien
atggtgtagctttggctgcgtctgt

SEQ ID NO: 4862110 - DNA, 25 bp, Homo sapien
gaattggtaagcgagtacttcctcc

SEQ ID NO: 4862111 - DNA, 25 bp, Homo sapien
tgcaagtagctgcttaaccacacag

SEQ ID NO: 4862112 - DNA, 25 bp, Homo sapien
tttggtgggatgcacacgaccactt

SEQ ID NO: 4862113 - DNA, 25 bp, Homo sapien
tacacacgttggtgcaaactgggtg

SEQ ID NO: 4862114 - DNA, 25 bp, Homo sapien
tgcaggagatgctcccggggaaacc

SEQ ID NO: 4862115 - DNA, 25 bp, Homo sapien
cagcggctctctctgcacgatggtg

SEQ ID NO: 4862116 - DNA, 25 bp, Homo sapien
gcacagcggctctctctgcacgatg

SEQ ID NO: 4862117 - DNA, 25 bp, Homo sapien
atgcaggagatgctcccggggaaac

SEQ ID NO: 4862118 - DNA, 25 bp, Homo sapien
caaggcatcccaaataggagggcac

SEQ ID NO: 4862119 - DNA, 25 bp, Homo sapien
ccaaggcatcccaaataggagggca

SEQ ID NO: 4862120 - DNA, 25 bp, Homo sapien
ccaaggggctgccctctacgatggc

SEQ ID NO: 4862121 - DNA, 25 bp, Homo sapien
gggctgccctctacgatggcgcagg

SEQ ID NO: 4862122 - DNA, 25 bp, Homo sapien
aggggctgccctctacgatggcgca

SEQ ID NO: 4862123 - DNA, 25 bp, Homo sapien
ggctgccctctacgatggcgcaggc

SEQ ID NO: 4862124 - DNA, 25 bp, Homo sapien
agcaggacgggacctgtacgcaggc

SEQ ID NO: 4862125 - DNA, 25 bp, Homo sapien
gacgggacctgtacgcaggccgcac

SEQ ID NO: 4862126 - DNA, 25 bp, Homo sapien
ggagcaggacgggacctgtacgcag

SEQ ID NO: 4862127 - DNA, 25 bp, Homo sapien
caacgtggagcaggacgggacctgt

SEQ ID NO: 4862128 - DNA, 25 bp, Homo sapien
gggcctgtgagcagtcttggagaca

SEQ ID NO: 4862129 - DNA, 25 bp, Homo sapien
gacaggcctgtgaccggtcacaagg

SEQ ID NO: 4862130 - DNA, 25 bp, Homo sapien
ttggagacaggcctgtgaccggtca

SEQ ID NO: 4862131 - DNA, 25 bp, Homo sapien
gctggggacagcacactccgctgct

SEQ ID NO: 4862132 - DNA, 25 bp, Homo sapien
cactcagaggcccaaccagcaccct

SEQ ID NO: 4862133 - DNA, 25 bp, Homo sapien
actgcataaagcccttttgatgact

SEQ ID NO: 4862134 - DNA, 25 bp, Homo sapien
tgactggttccttaacacggacaca

SEQ ID NO: 4862135 - DNA, 25 bp, Homo sapien
ggttccttaacacggacacagtgag

SEQ ID NO: 4862136 - DNA, 25 bp, Homo sapien
aggtgggggctggtgcgagtgaggg

SEQ ID NO: 4862137 - DNA, 25 bp, Homo sapien
gctggtgcgagtgaggggtgggaac

SEQ ID NO: 4862138 - DNA, 25 bp, Homo sapien
gggctggtgcgagtgaggggtggga

SEQ ID NO: 4862139 - DNA, 25 bp, Homo sapien
tggtgcgagtgaggggtgggaaccc

SEQ ID NO: 4862140 - DNA, 25 bp, Homo sapien
accccgggcagcttggagcgtttgg

SEQ ID NO: 4862141 - DNA, 25 bp, Homo sapien
tgaaccgccatggaagggaaccgga

SEQ ID NO: 4862142 - DNA, 25 bp, Homo sapien
ttggcaggtgcggatctctgctccg

SEQ ID NO: 4862143 - DNA, 25 bp, Homo sapien
gtcgcaggcgttcttccaggcagga

SEQ ID NO: 4862144 - DNA, 25 bp, Homo sapien
gccagcacccctttccctgagcccc

SEQ ID NO: 4862145 - DNA, 25 bp, Homo sapien
ctgccgcaggccagcacccctttcc

SEQ ID NO: 4862146 - DNA, 25 bp, Homo sapien
gccgcaggccagcacccctttccct

SEQ ID NO: 4862147 - DNA, 25 bp, Homo sapien
cagcacccctttccctgagccccat

SEQ ID NO: 4862148 - DNA, 25 bp, Homo sapien
tcctttcgggggattgaggaggctg

SEQ ID NO: 4862149 - DNA, 25 bp, Homo sapien
gtctgtaacctgttccaggcccatg

SEQ ID NO: 4862150 - DNA, 25 bp, Homo sapien
cagaggcagccaagatgatgagtcc

SEQ ID NO: 4862151 - DNA, 25 bp, Homo sapien
gtaacctgttccaggcccatgcaag

SEQ ID NO: 4862152 - DNA, 25 bp, Homo sapien
ggcctagatgttggcttcttcactt

SEQ ID NO: 4862153 - DNA, 25 bp, Homo sapien
cttctcttgcccgttggcgttggcg

SEQ ID NO: 4862154 - DNA, 25 bp, Homo sapien
ctttcttctcttgcccgttggcgtt

SEQ ID NO: 4862155 - DNA, 25 bp, Homo sapien
caggcaggggcctagatgttggctt

SEQ ID NO: 4862156 - DNA, 25 bp, Homo sapien
ttctgttgcttaatagagctgccgg

SEQ ID NO: 4862157 - DNA, 25 bp, Homo sapien
tccttcactctaccacccaagcggt

SEQ ID NO: 4862158 - DNA, 25 bp, Homo sapien
gttgcttaatagagctgccgggatg

SEQ ID NO: 4862159 - DNA, 25 bp, Homo sapien
cggtccccaaggtgaatgccacatt

SEQ ID NO: 4862160 - DNA, 25 bp, Homo sapien
tcgtccgtgccggtgcagcttgcgt

SEQ ID NO: 4862161 - DNA, 25 bp, Homo sapien
aggatggcagccgagacaaggaggc

SEQ ID NO: 4862162 - DNA, 25 bp, Homo sapien
cacgatgatcagtctggaagtcggc

SEQ ID NO: 4862163 - DNA, 25 bp, Homo sapien
ttcctttggcccctgacacgatgat

SEQ ID NO: 4862164 - DNA, 25 bp, Homo sapien
ggggcatgtcctgcgagcgccccgg

SEQ ID NO: 4862165 - DNA, 25 bp, Homo sapien
aggacgtcggcgcggctgtcagcgc

SEQ ID NO: 4862166 - DNA, 25 bp, Homo sapien
gccggagtctcagcgcccggccctc

SEQ ID NO: 4862167 - DNA, 25 bp, Homo sapien
gggacctagcggatcgcgccgggct

SEQ ID NO: 4862168 - DNA, 25 bp, Homo sapien
cctgcgtcccccggcgcccatcaac

SEQ ID NO: 4862169 - DNA, 25 bp, Homo sapien
cgccggccggagggacccaggcgtg

SEQ ID NO: 4862170 - DNA, 25 bp, Homo sapien
ccccggcgcccatcaacccatcgcc

SEQ ID NO: 4862171 - DNA, 25 bp, Homo sapien
tcccccggcgcccatcaacccatcg

SEQ ID NO: 4862172 - DNA, 25 bp, Homo sapien
agcacttgcagctgcggatggatag

SEQ ID NO: 4862173 - DNA, 25 bp, Homo sapien
gccgctcccccgagcacttgcagct

SEQ ID NO: 4862174 - DNA, 25 bp, Homo sapien
tgcggatggatagcgggcagccggg

SEQ ID NO: 4862175 - DNA, 25 bp, Homo sapien
ccgggccagggacgccgccgctcag

SEQ ID NO: 4862176 - DNA, 25 bp, Homo sapien
cggtgccgttaggcagaaggccggg

SEQ ID NO: 4862177 - DNA, 25 bp, Homo sapien
taacggtgccgttaggcagaaggcc

SEQ ID NO: 4862178 - DNA, 25 bp, Homo sapien
aacggtgccgttaggcagaaggccg

SEQ ID NO: 4862179 - DNA, 25 bp, Homo sapien
gtaacggtgccgttaggcagaaggc

SEQ ID NO: 4862180 - DNA, 25 bp, Homo sapien
agcccagtccgggacgcgaccgtag

SEQ ID NO: 4862181 - DNA, 25 bp, Homo sapien
aaggccagccaggtaaatccggaga

SEQ ID NO: 4862182 - DNA, 25 bp, Homo sapien
cacgagcgtcgatctttcctgagca

SEQ ID NO: 4862183 - DNA, 25 bp, Homo sapien
gacgcgaccgtagtggttaggacca

SEQ ID NO: 4862184 - DNA, 25 bp, Homo sapien
agcaaagcaaaggcgtactgaggcc

SEQ ID NO: 4862185 - DNA, 25 bp, Homo sapien
cagcaaagcaaaggcgtactgaggc

SEQ ID NO: 4862186 - DNA, 25 bp, Homo sapien
tggacacaatcgaaaagactgggcc

SEQ ID NO: 4862187 - DNA, 25 bp, Homo sapien
gaccctcaaatccacggcgtgcgtg

SEQ ID NO: 4862188 - DNA, 25 bp, Homo sapien
gcgttactgtattgttctggacaca

SEQ ID NO: 4862189 - DNA, 25 bp, Homo sapien
cgtggtcggcgcaggaaatctctgc

SEQ ID NO: 4862190 - DNA, 25 bp, Homo sapien
taagcctgatggctcagtggcctgg

SEQ ID NO: 4862191 - DNA, 25 bp, Homo sapien
gccagccggttctaatgtattctta

SEQ ID NO: 4862192 - DNA, 25 bp, Homo sapien
taaagggtatcctatcctaagcctg

SEQ ID NO: 4862193 - DNA, 25 bp, Homo sapien
tgtattcttaccaagagctggccca

SEQ ID NO: 4862194 - DNA, 25 bp, Homo sapien
ggaaggaacctttgcccagcttctg

SEQ ID NO: 4862195 - DNA, 25 bp, Homo sapien
gattccattaccctccaggctgaag

SEQ ID NO: 4862196 - DNA, 25 bp, Homo sapien
gagagctaagcagtaagtctgtggc

SEQ ID NO: 4862197 - DNA, 25 bp, Homo sapien
tgaaggagagcctgggttctttttc

SEQ ID NO: 4862198 - DNA, 25 bp, Homo sapien
acacccaggttctccctgtcataag

SEQ ID NO: 4862199 - DNA, 25 bp, Homo sapien
tgtcataagccaccccccgtgggac

SEQ ID NO: 4862200 - DNA, 25 bp, Homo sapien
tgctctctctgttcagaagcacggg

SEQ ID NO: 4862201 - DNA, 25 bp, Homo sapien
tgttcagaagcacgggtgcccacag

SEQ ID NO: 4862202 - DNA, 25 bp, Homo sapien
gctgctgtctctgcgcccagacctt

SEQ ID NO: 4862203 - DNA, 25 bp, Homo sapien
tgtctctgcgcccagaccttatgag

SEQ ID NO: 4862204 - DNA, 25 bp, Homo sapien
gcccagaccttatgagaaccatatg

SEQ ID NO: 4862205 - DNA, 25 bp, Homo sapien
tctgcgcccagaccttatgagaacc

SEQ ID NO: 4862206 - DNA, 25 bp, Homo sapien
ggtctttcccatcctggatgctgag

SEQ ID NO: 4862207 - DNA, 25 bp, Homo sapien
cctgaagcctgaagtcatagtttct

SEQ ID NO: 4862208 - DNA, 25 bp, Homo sapien
tggagaccccacatcttatctttga

SEQ ID NO: 4862209 - DNA, 25 bp, Homo sapien
cttgatacacaattcccagcaaggc

SEQ ID NO: 4862210 - DNA, 25 bp, Homo sapien
tcatctttgacctttcctccataga

SEQ ID NO: 4862211 - DNA, 25 bp, Homo sapien
taagctggtacctgtctccaggaga

SEQ ID NO: 4862212 - DNA, 25 bp, Homo sapien
cctgtccggcgttgtaagctggtac

SEQ ID NO: 4862213 - DNA, 25 bp, Homo sapien
gctatatttgctaccctgatcctgt

SEQ ID NO: 4862214 - DNA, 25 bp, Homo sapien
ccatactccctagggagtctgatcc

SEQ ID NO: 4862215 - DNA, 25 bp, Homo sapien
gggatatccatactccctagggagt

SEQ ID NO: 4862216 - DNA, 25 bp, Homo sapien
tgccaaccactcagacccaatgagc

SEQ ID NO: 4862217 - DNA, 25 bp, Homo sapien
ctggacttgggatatccatactccc

SEQ ID NO: 4862218 - DNA, 25 bp, Homo sapien
cctgcaggagtcacgtgggcacata

SEQ ID NO: 4862219 - DNA, 25 bp, Homo sapien
taaatgtttctcacatgtgcgggaa

SEQ ID NO: 4862220 - DNA, 25 bp, Homo sapien
gcacatagcacatgcctgaactaaa

SEQ ID NO: 4862221 - DNA, 25 bp, Homo sapien
cacatgtgcgggaagagtcatgcat

SEQ ID NO: 4862222 - DNA, 25 bp, Homo sapien
tctattctccagagggtgccttgtg

SEQ ID NO: 4862223 - DNA, 25 bp, Homo sapien
tcttttggccttaacaacctggaga

SEQ ID NO: 4862224 - DNA, 25 bp, Homo sapien
ttggaaagacctcaggcagattgct

SEQ ID NO: 4862225 - DNA, 25 bp, Homo sapien
gattcgagtcctcagatacccaggg

SEQ ID NO: 4862226 - DNA, 25 bp, Homo sapien
cccaatatcccgaagagagtggtgg

SEQ ID NO: 4862227 - DNA, 25 bp, Homo sapien
ttcctcggaggctcgcacactctca

SEQ ID NO: 4862228 - DNA, 25 bp, Homo sapien
tgatgccccgtttccactctggaac

SEQ ID NO: 4862229 - DNA, 25 bp, Homo sapien
gggtgaccctgtgatgccccgtttc

SEQ ID NO: 4862230 - DNA, 25 bp, Homo sapien
ttccggagattacagggagaagctg

SEQ ID NO: 4862231 - DNA, 25 bp, Homo sapien
agaagctggccaacggtccacccag

SEQ ID NO: 4862232 - DNA, 25 bp, Homo sapien
ttctccagcagtgacagtcccagga

SEQ ID NO: 4862233 - DNA, 25 bp, Homo sapien
gcggagccccgtgatcttgttattg

SEQ ID NO: 4862234 - DNA, 25 bp, Homo sapien
ggagccattgcggagccccgtgatc

SEQ ID NO: 4862235 - DNA, 25 bp, Homo sapien
cgtgatcttgttattgctcaagagc

SEQ ID NO: 4862236 - DNA, 25 bp, Homo sapien
gcagtcagtcgctttaagctgccct

SEQ ID NO: 4862237 - DNA, 25 bp, Homo sapien
ctgccctccgcccttttatgctggg

SEQ ID NO: 4862238 - DNA, 25 bp, Homo sapien
agaggcttggaaatgatcggacttc

SEQ ID NO: 4862239 - DNA, 25 bp, Homo sapien
ggaaaagggccgcagtcagtcgctt

SEQ ID NO: 4862240 - DNA, 25 bp, Homo sapien
tagcggggaacgcccagacctggct

SEQ ID NO: 4862241 - DNA, 25 bp, Homo sapien
agcggggaacgcccagacctggctg

SEQ ID NO: 4862242 - DNA, 25 bp, Homo sapien
ctagcggggaacgcccagacctggc

SEQ ID NO: 4862243 - DNA, 25 bp, Homo sapien
gcggggaacgcccagacctggctgg

SEQ ID NO: 4862244 - DNA, 25 bp, Homo sapien
cagctcctcctcgataaccctcttc

SEQ ID NO: 4862245 - DNA, 25 bp, Homo sapien
ccagctcctcctcgataaccctctt

SEQ ID NO: 4862246 - DNA, 25 bp, Homo sapien
accagctcctcctcgataaccctct

SEQ ID NO: 4862247 - DNA, 25 bp, Homo sapien
tgaaggatgaggagacaggggcaag

SEQ ID NO: 4862248 - DNA, 25 bp, Homo sapien
gaaggatgaggagacaggggcaagg

SEQ ID NO: 4862249 - DNA, 25 bp, Homo sapien
ctgaaggatgaggagacaggggcaa

SEQ ID NO: 4862250 - DNA, 25 bp, Homo sapien
aggacaggccgtcttttcatcttca

SEQ ID NO: 4862251 - DNA, 25 bp, Homo sapien
cgcacgactcggcatcaagccagat

SEQ ID NO: 4862252 - DNA, 25 bp, Homo sapien
tgcacttgctatgcagcctccagag

SEQ ID NO: 4862253 - DNA, 25 bp, Homo sapien
tgctggagaaggacaggccgtcttt

SEQ ID NO: 4862254 - DNA, 25 bp, Homo sapien
attcccactgggcatccgctctgtg

SEQ ID NO: 4862255 - DNA, 25 bp, Homo sapien
atctctgacacattcccactgggca

SEQ ID NO: 4862256 - DNA, 25 bp, Homo sapien
tctctggatgatcatctctgacaca

SEQ ID NO: 4862257 - DNA, 25 bp, Homo sapien
cccactgggcatccgctctgtggcc

SEQ ID NO: 4862258 - DNA, 25 bp, Homo sapien
gaaaagtcttcctgtggcctagtcc

SEQ ID NO: 4862259 - DNA, 25 bp, Homo sapien
ccaaggctgggaactgtaggcaaat

SEQ ID NO: 4862260 - DNA, 25 bp, Homo sapien
gactctttcctttagccgtgcacga

SEQ ID NO: 4862261 - DNA, 25 bp, Homo sapien
tgaatcaccagctgtacttggagca

SEQ ID NO: 4862262 - DNA, 25 bp, Homo sapien
ccacagacctccctgcttgtgggtt

SEQ ID NO: 4862263 - DNA, 25 bp, Homo sapien
caggacaccctgcaggtatagaagt

SEQ ID NO: 4862264 - DNA, 25 bp, Homo sapien
ttccctgggcctacaagacttccag

SEQ ID NO: 4862265 - DNA, 25 bp, Homo sapien
ccaaattataggttcggaggccaca

SEQ ID NO: 4862266 - DNA, 25 bp, Homo sapien
ctgtttgtgcacagtcccgcttggg

SEQ ID NO: 4862267 - DNA, 25 bp, Homo sapien
ttcccataggaaggactcgaaggac

SEQ ID NO: 4862268 - DNA, 25 bp, Homo sapien
aggactcgaaggactcagccggcct

SEQ ID NO: 4862269 - DNA, 25 bp, Homo sapien
agccggcctccatgaccccaagtcc

SEQ ID NO: 4862270 - DNA, 25 bp, Homo sapien
ttcaggacggggaggtactgtccca

SEQ ID NO: 4862271 - DNA, 25 bp, Homo sapien
gtgttcaggacggggaggtactgtc

SEQ ID NO: 4862272 - DNA, 25 bp, Homo sapien
tcaggacggggaggtactgtcccac

SEQ ID NO: 4862273 - DNA, 25 bp, Homo sapien
tgttcaggacggggaggtactgtcc

SEQ ID NO: 4862274 - DNA, 25 bp, Homo sapien
cacaacctcatcaacgtctctggat

SEQ ID NO: 4862275 - DNA, 25 bp, Homo sapien
aacgtctctggattactgggcagga

SEQ ID NO: 4862276 - DNA, 25 bp, Homo sapien
cctcatcaacgtctctggattactg

SEQ ID NO: 4862277 - DNA, 25 bp, Homo sapien
catcaacgtctctggattactgggc

SEQ ID NO: 4862278 - DNA, 25 bp, Homo sapien
ggctctttcctgagctaaaccagga

SEQ ID NO: 4862279 - DNA, 25 bp, Homo sapien
ggctccatagagctcatgggcctca

SEQ ID NO: 4862280 - DNA, 25 bp, Homo sapien
tttcctgagctaaaccaggacaggc

SEQ ID NO: 4862281 - DNA, 25 bp, Homo sapien
cccactggcaggagattgtgaggca

SEQ ID NO: 4862282 - DNA, 25 bp, Homo sapien
agaccaaggtgggtgcctgctcact

SEQ ID NO: 4862283 - DNA, 25 bp, Homo sapien
aggcaggaccacagaagaccaaggt

SEQ ID NO: 4862284 - DNA, 25 bp, Homo sapien
tccctcaccctgtcctctgtgccct

SEQ ID NO: 4862285 - DNA, 25 bp, Homo sapien
tgggtgcctgctcactggccttctc

SEQ ID NO: 4862286 - DNA, 25 bp, Homo sapien
tctctgtctgacaggcgaggaaaca

SEQ ID NO: 4862287 - DNA, 25 bp, Homo sapien
tcatggcctaggcacaactctctgc

SEQ ID NO: 4862288 - DNA, 25 bp, Homo sapien
cagggaagtgacagcttgttcaagg

SEQ ID NO: 4862289 - DNA, 25 bp, Homo sapien
cacaggcgacctgctgggtatctgc

SEQ ID NO: 4862290 - DNA, 25 bp, Homo sapien
tgccctgcaggtcgctggggttgcc

SEQ ID NO: 4862291 - DNA, 25 bp, Homo sapien
tccggactgccctgcaggtcgctgg

SEQ ID NO: 4862292 - DNA, 25 bp, Homo sapien
ctccggactgccctgcaggtcgctg

SEQ ID NO: 4862293 - DNA, 25 bp, Homo sapien
gactgccctgcaggtcgctggggtt

SEQ ID NO: 4862294 - DNA, 25 bp, Homo sapien
aggaaggcgcccggctgcactgtgc

SEQ ID NO: 4862295 - DNA, 25 bp, Homo sapien
caggaaggcgcccggctgcactgtg

SEQ ID NO: 4862296 - DNA, 25 bp, Homo sapien
gaaggcgcccggctgcactgtgctg

SEQ ID NO: 4862297 - DNA, 25 bp, Homo sapien
ggaaggcgcccggctgcactgtgct

SEQ ID NO: 4862298 - DNA, 25 bp, Homo sapien
tcggaggtgagacagccaatccggt

SEQ ID NO: 4862299 - DNA, 25 bp, Homo sapien
gccaatccggttgttggagagatct

SEQ ID NO: 4862300 - DNA, 25 bp, Homo sapien
gagacagccaatccggttgttggag

SEQ ID NO: 4862301 - DNA, 25 bp, Homo sapien
aggtctcggaggtgagacagccaat

SEQ ID NO: 4862302 - DNA, 25 bp, Homo sapien
acaaccttaagggctggcagctcat

SEQ ID NO: 4862303 - DNA, 25 bp, Homo sapien
aaagaccccaggttgcagactggag

SEQ ID NO: 4862304 - DNA, 25 bp, Homo sapien
atcaaagaccccaggttgcagactg

SEQ ID NO: 4862305 - DNA, 25 bp, Homo sapien
agaccccaggttgcagactggagaa

SEQ ID NO: 4862306 - DNA, 25 bp, Homo sapien
tggccactcgtgagaccagtcctgg

SEQ ID NO: 4862307 - DNA, 25 bp, Homo sapien
gggccatcgcgggaaggtgatcatg

SEQ ID NO: 4862308 - DNA, 25 bp, Homo sapien
gatacttatacatctctcctgggca

SEQ ID NO: 4862309 - DNA, 25 bp, Homo sapien
tctgctgtggccactcgtgagacca

SEQ ID NO: 4862310 - DNA, 25 bp, Homo sapien
aggtcaggaactcggtgcccaagtc

SEQ ID NO: 4862311 - DNA, 25 bp, Homo sapien
gctgcagggagcgattctgggccca

SEQ ID NO: 4862312 - DNA, 25 bp, Homo sapien
ggtaagcacagagcgtgtgttccga

SEQ ID NO: 4862313 - DNA, 25 bp, Homo sapien
cagagcgtgtgttccgacagctgca

SEQ ID NO: 4862314 - DNA, 25 bp, Homo sapien
gctgcccagggcctgagcatgcagg

SEQ ID NO: 4862315 - DNA, 25 bp, Homo sapien
cccagggcctgagcatgcagggcac

SEQ ID NO: 4862316 - DNA, 25 bp, Homo sapien
gggcctcctggaggctgcccagggc

SEQ ID NO: 4862317 - DNA, 25 bp, Homo sapien
aggctgcccagggcctgagcatgca

SEQ ID NO: 4862318 - DNA, 25 bp, Homo sapien
gctgggatagtaaatgtgattcttt

SEQ ID NO: 4862319 - DNA, 25 bp, Homo sapien
cgctgggatagtaaatgtgattctt

SEQ ID NO: 4862320 - DNA, 25 bp, Homo sapien
tgatgaaggtgcagtcgtggatgag

SEQ ID NO: 4862321 - DNA, 25 bp, Homo sapien
tgcgggtgtcgttgcccaggtagct

SEQ ID NO: 4862322 - DNA, 25 bp, Homo sapien
gggctcggttgtggtaccagcggat

SEQ ID NO: 4862323 - DNA, 25 bp, Homo sapien
tggaacaccacttggcgtagggacg

SEQ ID NO: 4862324 - DNA, 25 bp, Homo sapien
atggacacggtgcactcccactcgc

SEQ ID NO: 4862325 - DNA, 25 bp, Homo sapien
cacacgccgatgtgagacagcgtca

SEQ ID NO: 4862326 - DNA, 25 bp, Homo sapien
ttcttgctggcgttgccttgggcca

SEQ ID NO: 4862327 - DNA, 25 bp, Homo sapien
gcctgaggcccacacgccgatgtga

SEQ ID NO: 4862328 - DNA, 25 bp, Homo sapien
ctgaagtccccgcggttgttggcaa

SEQ ID NO: 4862329 - DNA, 25 bp, Homo sapien
tgaagtccccgcggttgttggcaac

SEQ ID NO: 4862330 - DNA, 25 bp, Homo sapien
ccctctacagggtggagtgggccaa

SEQ ID NO: 4862331 - DNA, 25 bp, Homo sapien
ctctacagggtggagtgggccaaac

SEQ ID NO: 4862332 - DNA, 25 bp, Homo sapien
gctgggcagccctctacagggtgga

SEQ ID NO: 4862333 - DNA, 25 bp, Homo sapien
ggcagccctctacagggtggagtgg

SEQ ID NO: 4862334 - DNA, 25 bp, Homo sapien
ctgaggtgaagggatactgcaggca

SEQ ID NO: 4862335 - DNA, 25 bp, Homo sapien
aggtgaagggatactgcaggcagga

SEQ ID NO: 4862336 - DNA, 25 bp, Homo sapien
gcaggcaggactggtaggctgtgat

SEQ ID NO: 4862337 - DNA, 25 bp, Homo sapien
aggactggtaggctgtgatgccagc

SEQ ID NO: 4862338 - DNA, 25 bp, Homo sapien
tcacaccggcgggaggctcgggtgc

SEQ ID NO: 4862339 - DNA, 25 bp, Homo sapien
cagcacgaaggtgtacagcaccctg

SEQ ID NO: 4862340 - DNA, 25 bp, Homo sapien
accctggtgatgtcgttggtgtaga

SEQ ID NO: 4862341 - DNA, 25 bp, Homo sapien
tagagacagtgggagtagtcccctg

SEQ ID NO: 4862342 - DNA, 25 bp, Homo sapien
ctttgatctggtcgacataacccaa

SEQ ID NO: 4862343 - DNA, 25 bp, Homo sapien
ccagggtcagcgcattggaggcatt

SEQ ID NO: 4862344 - DNA, 25 bp, Homo sapien
catgtctgaaaagctagcggcctcg

SEQ ID NO: 4862345 - DNA, 25 bp, Homo sapien
tcggctgtgtacacgcgcagctggt

SEQ ID NO: 4862346 - DNA, 25 bp, Homo sapien
cccaatgcgctccagggcacccacg

SEQ ID NO: 4862347 - DNA, 25 bp, Homo sapien
ccacgatgcggctgcaggccttgtc

SEQ ID NO: 4862348 - DNA, 25 bp, Homo sapien
aggttgctggccatgtccaccatca

SEQ ID NO: 4862349 - DNA, 25 bp, Homo sapien
aatgcgctccagggcacccacgatg

SEQ ID NO: 4862350 - DNA, 25 bp, Homo sapien
taagtatgccagttctgttgcccga

SEQ ID NO: 4862351 - DNA, 25 bp, Homo sapien
tgttatcagattggagcactcacct

SEQ ID NO: 4862352 - DNA, 25 bp, Homo sapien
tgttgcccgactcagctgtagagca

SEQ ID NO: 4862353 - DNA, 25 bp, Homo sapien
gaacatacacgatgctgtactgtgg

SEQ ID NO: 4862354 - DNA, 25 bp, Homo sapien
ggtaggcctccaatgccacgttcct

SEQ ID NO: 4862355 - DNA, 25 bp, Homo sapien
gcttgatgaggtaggcctccaatgc

SEQ ID NO: 4862356 - DNA, 25 bp, Homo sapien
gtggaaggacgacagagaaacattg

SEQ ID NO: 4862357 - DNA, 25 bp, Homo sapien
aacattgggcctcccggtggtgcag

SEQ ID NO: 4862358 - DNA, 25 bp, Homo sapien
cagccggaagggatgagaatagact

SEQ ID NO: 4862359 - DNA, 25 bp, Homo sapien
gctccagggcgggaggtgttgctgt

SEQ ID NO: 4862360 - DNA, 25 bp, Homo sapien
aagaggcggccatttcggaagacga

SEQ ID NO: 4862361 - DNA, 25 bp, Homo sapien
gggtggccacgccacgcctcttgcc

SEQ ID NO: 4862362 - DNA, 25 bp, Homo sapien
tggctccaccaagcggccacaggtt

SEQ ID NO: 4862363 - DNA, 25 bp, Homo sapien
cagtgcagggcgctgacattgggct

SEQ ID NO: 4862364 - DNA, 25 bp, Homo sapien
acggccactggctctgtcaggtttc

SEQ ID NO: 4862365 - DNA, 25 bp, Homo sapien
agtgccgcagcgaaacggccactgg

SEQ ID NO: 4862366 - DNA, 25 bp, Homo sapien
caggggtataccacggggtgcagcc

SEQ ID NO: 4862367 - DNA, 25 bp, Homo sapien
gtgatgatggtggcgaagaggcaga

SEQ ID NO: 4862368 - DNA, 25 bp, Homo sapien
cagcaaggccgtgcaggggtatacc

SEQ ID NO: 4862369 - DNA, 25 bp, Homo sapien
acctccctgggaaaggcgctcagct

SEQ ID NO: 4862370 - DNA, 25 bp, Homo sapien
gcctttccgggacacacggatggag

SEQ ID NO: 4862371 - DNA, 25 bp, Homo sapien
cgcctggcagaccatctggtagttg

SEQ ID NO: 4862372 - DNA, 25 bp, Homo sapien
tatgtggaagcacaagttcagcagc

SEQ ID NO: 4862373 - DNA, 25 bp, Homo sapien
agttcagcagcatgtgccagccttt

SEQ ID NO: 4862374 - DNA, 25 bp, Homo sapien
ccaggtgagctccttatggagcact

SEQ ID NO: 4862375 - DNA, 25 bp, Homo sapien
cagagcagcgtggatagggaggagt

SEQ ID NO: 4862376 - DNA, 25 bp, Homo sapien
ttatggagcactcgcgccttcacgc

SEQ ID NO: 4862377 - DNA, 25 bp, Homo sapien
aggagtagtgcagggtgatgcccac

SEQ ID NO: 4862378 - DNA, 25 bp, Homo sapien
ccctccccaattgcaaagctggaat

SEQ ID NO: 4862379 - DNA, 25 bp, Homo sapien
ggagtccctccccaattgcaaagct

SEQ ID NO: 4862380 - DNA, 25 bp, Homo sapien
tttcctacgcctgcgttggagtccc

SEQ ID NO: 4862381 - DNA, 25 bp, Homo sapien
cttgggaggtttcctacgcctgcgt

SEQ ID NO: 4862382 - DNA, 25 bp, Homo sapien
ggaatccctccagcgatcaaataga

SEQ ID NO: 4862383 - DNA, 25 bp, Homo sapien
tgatgccacagataatgagtggaat

SEQ ID NO: 4862384 - DNA, 25 bp, Homo sapien
cccggtagttgtggatgttgactgc

SEQ ID NO: 4862385 - DNA, 25 bp, Homo sapien
tagttgtggatgttgactgcagctg

SEQ ID NO: 4862386 - DNA, 25 bp, Homo sapien
gtagcccggcgcacaggaaatagat

SEQ ID NO: 4862387 - DNA, 25 bp, Homo sapien
agggatgtagaaggcgccaaggctt

SEQ ID NO: 4862388 - DNA, 25 bp, Homo sapien
cagaatcaaagccacagggatgtag

SEQ ID NO: 4862389 - DNA, 25 bp, Homo sapien
tccaggtgatgagcagaatcaaagc

SEQ ID NO: 4862390 - DNA, 25 bp, Homo sapien
tcccagtagcaagaagggaacctga

SEQ ID NO: 4862391 - DNA, 25 bp, Homo sapien
gtggtcaccagcgcccctagctgga

SEQ ID NO: 4862392 - DNA, 25 bp, Homo sapien
gcagccagcgctgggacactgccag

SEQ ID NO: 4862393 - DNA, 25 bp, Homo sapien
gactcccggagaatagaggctgtca

SEQ ID NO: 4862394 - DNA, 25 bp, Homo sapien
ggcggaggctgccaccccgtacaag

SEQ ID NO: 4862395 - DNA, 25 bp, Homo sapien
ggaggctgccaccccgtacaagcag

SEQ ID NO: 4862396 - DNA, 25 bp, Homo sapien
ggctgccaccccgtacaagcagctg

SEQ ID NO: 4862397 - DNA, 25 bp, Homo sapien
gccaccccgtacaagcagctgcaca

SEQ ID NO: 4862398 - DNA, 25 bp, Homo sapien
gcagcaggcgcgccacgaggctctc

SEQ ID NO: 4862399 - DNA, 25 bp, Homo sapien
ggcagcaggcgcgccacgaggctct

SEQ ID NO: 4862400 - DNA, 25 bp, Homo sapien
gcccagagccagcggatggccgctg

SEQ ID NO: 4862401 - DNA, 25 bp, Homo sapien
gagccagcggatggccgctgctgcc

SEQ ID NO: 4862402 - DNA, 25 bp, Homo sapien
cagagccagcggatggccgctgctg

SEQ ID NO: 4862403 - DNA, 25 bp, Homo sapien
ccagagccagcggatggccgctgct

SEQ ID NO: 4862404 - DNA, 25 bp, Homo sapien
ccgcgcggtgtcccttggcccggct

SEQ ID NO: 4862405 - DNA, 25 bp, Homo sapien
cccgacgcccgtggtgcacgttgtt

SEQ ID NO: 4862406 - DNA, 25 bp, Homo sapien
ttggcccggctcttgtgcgcccgac

SEQ ID NO: 4862407 - DNA, 25 bp, Homo sapien
tcttgtgcgcccgacgcccgtggtg

SEQ ID NO: 4862408 - DNA, 25 bp, Homo sapien
tgcccaggtagctgtcggtggggct

SEQ ID NO: 4862409 - DNA, 25 bp, Homo sapien
tgcagactgccgctctcgctggaca

SEQ ID NO: 4862410 - DNA, 25 bp, Homo sapien
ctgttgtgcagactgccgctctcgc

SEQ ID NO: 4862411 - DNA, 25 bp, Homo sapien
ccaggtagctgtcggtggggctgtt

SEQ ID NO: 4862412 - DNA, 25 bp, Homo sapien
tacgagcggcgatggctctccttct

SEQ ID NO: 4862413 - DNA, 25 bp, Homo sapien
ccttgagactgtcgcggctggcgct

SEQ ID NO: 4862414 - DNA, 25 bp, Homo sapien
gcccatcagggtgacgtcgtcgtac

SEQ ID NO: 4862415 - DNA, 25 bp, Homo sapien
ctcttccagagtccggtcttcatgc

SEQ ID NO: 4862416 - DNA, 25 bp, Homo sapien
gatgtctagagctgcctttcacgtg

SEQ ID NO: 4862417 - DNA, 25 bp, Homo sapien
tgttcctagttgtgcccggttccca

SEQ ID NO: 4862418 - DNA, 25 bp, Homo sapien
tgccccgggctggacggaaatgtat

SEQ ID NO: 4862419 - DNA, 25 bp, Homo sapien
tgctgactacggagacaccttggag

SEQ ID NO: 4862420 - DNA, 25 bp, Homo sapien
ggagtaaaggcataggcccctcatg

SEQ ID NO: 4862421 - DNA, 25 bp, Homo sapien
gaagtgctcttccttagtcccgtgg

SEQ ID NO: 4862422 - DNA, 25 bp, Homo sapien
tacaggactagctttagggcatgac

SEQ ID NO: 4862423 - DNA, 25 bp, Homo sapien
tcccgtggtgttgtaaggctgagac

SEQ ID NO: 4862424 - DNA, 25 bp, Homo sapien
tcaaccctcagaggagcgggaactg

SEQ ID NO: 4862425 - DNA, 25 bp, Homo sapien
ggaattctggccctacgtgcattca

SEQ ID NO: 4862426 - DNA, 25 bp, Homo sapien
acagtgggtagactaaggcagtagc

SEQ ID NO: 4862427 - DNA, 25 bp, Homo sapien
tctacctcataacaaaaggacagtg

SEQ ID NO: 4862428 - DNA, 25 bp, Homo sapien
gatggaagtgtacaccagtccgtag

SEQ ID NO: 4862429 - DNA, 25 bp, Homo sapien
tttgaattggacacactgctgcggc

SEQ ID NO: 4862430 - DNA, 25 bp, Homo sapien
gactataggtaggagagattcccat

SEQ ID NO: 4862431 - DNA, 25 bp, Homo sapien
gctctgccattagttggaccctggg

SEQ ID NO: 4862432 - DNA, 25 bp, Homo sapien
tctgtggtgaagcacatcggtgacc

SEQ ID NO: 4862433 - DNA, 25 bp, Homo sapien
cagtatttgcgtacccctcaggaag

SEQ ID NO: 4862434 - DNA, 25 bp, Homo sapien
gaggcgcccaataaatgttcgtgct

SEQ ID NO: 4862435 - DNA, 25 bp, Homo sapien
tgcatgttgaagtccccgaagcgga

SEQ ID NO: 4862436 - DNA, 25 bp, Homo sapien
taccaacaggcatatcggcactctg

SEQ ID NO: 4862437 - DNA, 25 bp, Homo sapien
tttgtcgagttctgcagttgccacc

SEQ ID NO: 4862438 - DNA, 25 bp, Homo sapien
tgcagatagtgaagctcctgggact

SEQ ID NO: 4862439 - DNA, 25 bp, Homo sapien
aacatttgaggataccgcggttgcc

SEQ ID NO: 4862440 - DNA, 25 bp, Homo sapien
cacatgccggtatgaagaagacaca

SEQ ID NO: 4862441 - DNA, 25 bp, Homo sapien
gacatgtctggtcccttcggatgca

SEQ ID NO: 4862442 - DNA, 25 bp, Homo sapien
gaaactgagttggaacgtgctgccc

SEQ ID NO: 4862443 - DNA, 25 bp, Homo sapien
tgaacagctgtggaccccgattggt

SEQ ID NO: 4862444 - DNA, 25 bp, Homo sapien
cattggagagctggcgtagagatct

SEQ ID NO: 4862445 - DNA, 25 bp, Homo sapien
gacaattgactcaagggtgcctggc

SEQ ID NO: 4862446 - DNA, 25 bp, Homo sapien
tactgtgatagtccaagtgccctgg

SEQ ID NO: 4862447 - DNA, 25 bp, Homo sapien
aaatgtacatgtatggctggacgcg

SEQ ID NO: 4862448 - DNA, 25 bp, Homo sapien
ctgtgcagagcaagaagatgatact

SEQ ID NO: 4862449 - DNA, 25 bp, Homo sapien
agtcagtagaaaacaggtgcctcag

SEQ ID NO: 4862450 - DNA, 25 bp, Homo sapien
ttccctcatgaatagactcaccagc

SEQ ID NO: 4862451 - DNA, 25 bp, Homo sapien
gacaggagaccatggattggacccc

SEQ ID NO: 4862452 - DNA, 25 bp, Homo sapien
caatacgattgcttggccttttccc

SEQ ID NO: 4862453 - DNA, 25 bp, Homo sapien
ctgtgcctttgctcggtgctctggt

SEQ ID NO: 4862454 - DNA, 25 bp, Homo sapien
tcctcagcaacactccttgtaaggg

SEQ ID NO: 4862455 - DNA, 25 bp, Homo sapien
tgaagaagccccttcaggccagtcg

SEQ ID NO: 4862456 - DNA, 25 bp, Homo sapien
taaatattgcaaaactaggctcttc

SEQ ID NO: 4862457 - DNA, 25 bp, Homo sapien
attgcaaaactaggctcttctaatg

SEQ ID NO: 4862458 - DNA, 25 bp, Homo sapien
ttttaaatattgcaaaactaggctc

SEQ ID NO: 4862459 - DNA, 25 bp, Homo sapien
tattgcaaaactaggctcttctaat

SEQ ID NO: 4862460 - DNA, 25 bp, Homo sapien
ttccttctagctctggccaggcatc

SEQ ID NO: 4862461 - DNA, 25 bp, Homo sapien
gaagtgtctccagaggcgcaaccca

SEQ ID NO: 4862462 - DNA, 25 bp, Homo sapien
tttgtctctcgtgatgcatctgcac

SEQ ID NO: 4862463 - DNA, 25 bp, Homo sapien
ggcatctgtcccctctgaattggga

SEQ ID NO: 4862464 - DNA, 25 bp, Homo sapien
cgcaaactcagaggccacaaaagaa

SEQ ID NO: 4862465 - DNA, 25 bp, Homo sapien
ccccgcaaactcagaggccacaaaa

SEQ ID NO: 4862466 - DNA, 25 bp, Homo sapien
tcagggaaaacatggcccccgcaaa

SEQ ID NO: 4862467 - DNA, 25 bp, Homo sapien
atggcccccgcaaactcagaggcca

SEQ ID NO: 4862468 - DNA, 25 bp, Homo sapien
cttggaaggagcctgctgaaggagg

SEQ ID NO: 4862469 - DNA, 25 bp, Homo sapien
tgagatcaaggatagcagcccgtcc

SEQ ID NO: 4862470 - DNA, 25 bp, Homo sapien
caagggcttcagaaagaagcatttg

SEQ ID NO: 4862471 - DNA, 25 bp, Homo sapien
aatgatgtcctttcccgctctaatg

SEQ ID NO: 4862472 - DNA, 25 bp, Homo sapien
tttcttggtggccttcggtctaaga

SEQ ID NO: 4862473 - DNA, 25 bp, Homo sapien
tatgaaagacaagtctcggaatcca

SEQ ID NO: 4862474 - DNA, 25 bp, Homo sapien
ccagcatgtttgacctttctatgaa

SEQ ID NO: 4862475 - DNA, 25 bp, Homo sapien
gacaaggagcgaggagaaattgagg

SEQ ID NO: 4862476 - DNA, 25 bp, Homo sapien
taaggacagtgggtcagacaccgcc

SEQ ID NO: 4862477 - DNA, 25 bp, Homo sapien
ggatcctatctttgtctagcgcgtg

SEQ ID NO: 4862478 - DNA, 25 bp, Homo sapien
caggatttgaggtgattatacgcta

SEQ ID NO: 4862479 - DNA, 25 bp, Homo sapien
tacgctaagcacaacactggatcct

SEQ ID NO: 4862480 - DNA, 25 bp, Homo sapien
ctagcgcgtgtcttctcaaaaataa

SEQ ID NO: 4862481 - DNA, 25 bp, Homo sapien
gatctgcaccgcgaccagggccgca

SEQ ID NO: 4862482 - DNA, 25 bp, Homo sapien
atctgcaccgcgaccagggccgcag

SEQ ID NO: 4862483 - DNA, 25 bp, Homo sapien
ctgcaccgcgaccagggccgcagga

SEQ ID NO: 4862484 - DNA, 25 bp, Homo sapien
cgggatctgcaccgcgaccagggcc

SEQ ID NO: 4862485 - DNA, 25 bp, Homo sapien
cttgttgttgtccctgtgcatcccc

SEQ ID NO: 4862486 - DNA, 25 bp, Homo sapien
ggattctgggtctggaaaattggga

SEQ ID NO: 4862487 - DNA, 25 bp, Homo sapien
agagtcatgggaacaacgtgctctg

SEQ ID NO: 4862488 - DNA, 25 bp, Homo sapien
ttgtcactgcccttgttgttgtccc

SEQ ID NO: 4862489 - DNA, 25 bp, Homo sapien
accaaatcaacctagtgccctacag

SEQ ID NO: 4862490 - DNA, 25 bp, Homo sapien
caccaaatcaacctagtgccctaca

SEQ ID NO: 4862491 - DNA, 25 bp, Homo sapien
ccttatgggctttcgaacagtgacc

SEQ ID NO: 4862492 - DNA, 25 bp, Homo sapien
gatggactaaaacattggccgttgt

SEQ ID NO: 4862493 - DNA, 25 bp, Homo sapien
gtggagcttccatggtctctctggg

SEQ ID NO: 4862494 - DNA, 25 bp, Homo sapien
tgttataaaaggatgcaactcagga

SEQ ID NO: 4862495 - DNA, 25 bp, Homo sapien
tattgcctgagaagtggactggagc

SEQ ID NO: 4862496 - DNA, 25 bp, Homo sapien
ggacctgtgggacaaaagcctatca

SEQ ID NO: 4862497 - DNA, 25 bp, Homo sapien
aaagcaccggcagaactatattgga

SEQ ID NO: 4862498 - DNA, 25 bp, Homo sapien
aaattatcaaatactatgggccagc

SEQ ID NO: 4862499 - DNA, 25 bp, Homo sapien
tatatgaggcaaccaaagtgggaga

SEQ ID NO: 4862500 - DNA, 25 bp, Homo sapien
taactactcgctcctagcaaagcct

SEQ ID NO: 4862501 - DNA, 25 bp, Homo sapien
ttgccacatatggattcctaactac

SEQ ID NO: 4862502 - DNA, 25 bp, Homo sapien
cagccagacacaaggtggcaagtgt

SEQ ID NO: 4862503 - DNA, 25 bp, Homo sapien
tgaccataatggaatgacccatagc

SEQ ID NO: 4862504 - DNA, 25 bp, Homo sapien
atagccccatatgggcccataactg

SEQ ID NO: 4862505 - DNA, 25 bp, Homo sapien
gggcccataactgaacaccaaccag

SEQ ID NO: 4862506 - DNA, 25 bp, Homo sapien
tggaatgacccatagccccatatgg

SEQ ID NO: 4862507 - DNA, 25 bp, Homo sapien
aagccccagtgtggcacagctgaag

SEQ ID NO: 4862508 - DNA, 25 bp, Homo sapien
ctgaagcagaatcacttccatgccc

SEQ ID NO: 4862509 - DNA, 25 bp, Homo sapien
gccttgcagggatttccaagcccca

SEQ ID NO: 4862510 - DNA, 25 bp, Homo sapien
ttagccttgcagggatttccaagcc

SEQ ID NO: 4862511 - DNA, 25 bp, Homo sapien
tgtgtgcccatgtcctaaatttcct

SEQ ID NO: 4862512 - DNA, 25 bp, Homo sapien
cctgagatgaccaaccccgggtatt

SEQ ID NO: 4862513 - DNA, 25 bp, Homo sapien
taaaatctagtgcatccgctgccgg

SEQ ID NO: 4862514 - DNA, 25 bp, Homo sapien
tatttacccgagacaacgtaactgc

SEQ ID NO: 4862515 - DNA, 25 bp, Homo sapien
tgtcacccagttacaaagttgcttg

SEQ ID NO: 4862516 - DNA, 25 bp, Homo sapien
cagcaacactgatacaagaggtggg

SEQ ID NO: 4862517 - DNA, 25 bp, Homo sapien
tccagtgtgagcgtcatagccatca

SEQ ID NO: 4862518 - DNA, 25 bp, Homo sapien
gctttgccccatggctttacagggt

SEQ ID NO: 4862519 - DNA, 25 bp, Homo sapien
tgaacggaaacatgcatctgaggtt

SEQ ID NO: 4862520 - DNA, 25 bp, Homo sapien
tattatagggaacaggagaccaagg

SEQ ID NO: 4862521 - DNA, 25 bp, Homo sapien
gcacaaagctacgtaagagtcacag

SEQ ID NO: 4862522 - DNA, 25 bp, Homo sapien
agggaaaatactggacactggaagg

SEQ ID NO: 4862523 - DNA, 25 bp, Homo sapien
gaggttgaacatataggagagaaga

SEQ ID NO: 4862524 - DNA, 25 bp, Homo sapien
gagccagaggttgaacatataggag

SEQ ID NO: 4862525 - DNA, 25 bp, Homo sapien
gaacatataggagagaagatggttg

SEQ ID NO: 4862526 - DNA, 25 bp, Homo sapien
catataggagagaagatggttgatg

SEQ ID NO: 4862527 - DNA, 25 bp, Homo sapien
taaatctttgtttactacatggttc

SEQ ID NO: 4862528 - DNA, 25 bp, Homo sapien
gtctgttaaatctttgtttactaca

SEQ ID NO: 4862529 - DNA, 25 bp, Homo sapien
actacatggttctctgtacttttta

SEQ ID NO: 4862530 - DNA, 25 bp, Homo sapien
aattgggaagggagtgcaggattgg

SEQ ID NO: 4862531 - DNA, 25 bp, Homo sapien
cattttgcaatgacccagtatacac

SEQ ID NO: 4862532 - DNA, 25 bp, Homo sapien
tgttttagccacaactcacataaga

SEQ ID NO: 4862533 - DNA, 25 bp, Homo sapien
tggtgaccctagcaatatgaaacgc

SEQ ID NO: 4862534 - DNA, 25 bp, Homo sapien
tgctaatgcttacaatccacatgaa

SEQ ID NO: 4862535 - DNA, 25 bp, Homo sapien
ttgcatttgcgaccgctcctgggcc

SEQ ID NO: 4862536 - DNA, 25 bp, Homo sapien
gaactgggctcaactgtcggagcag

SEQ ID NO: 4862537 - DNA, 25 bp, Homo sapien
cctgttgcatttgcgaccgctcctg

SEQ ID NO: 4862538 - DNA, 25 bp, Homo sapien
actgtcggagcagcagagatcccct

SEQ ID NO: 4862539 - DNA, 25 bp, Homo sapien
cctgccagggtgcaaggatcagaga

SEQ ID NO: 4862540 - DNA, 25 bp, Homo sapien
tcccgttaaagtgtgagctaccagc

SEQ ID NO: 4862541 - DNA, 25 bp, Homo sapien
ggaatatgtgaaggcctcccgttaa

SEQ ID NO: 4862542 - DNA, 25 bp, Homo sapien
ggatcagagataacgacaggagcct

SEQ ID NO: 4862543 - DNA, 25 bp, Homo sapien
gattctgtctccaagccaccgctta

SEQ ID NO: 4862544 - DNA, 25 bp, Homo sapien
atgattctgtctccaagccaccgct

SEQ ID NO: 4862545 - DNA, 25 bp, Homo sapien
aagccaccgcttacatcgaccaagt

SEQ ID NO: 4862546 - DNA, 25 bp, Homo sapien
accgcttacatcgaccaagtttgcc

SEQ ID NO: 4862547 - DNA, 25 bp, Homo sapien
acctctgatgtatccccagcacctt

SEQ ID NO: 4862548 - DNA, 25 bp, Homo sapien
cacctctgatgtatccccagcacct

SEQ ID NO: 4862549 - DNA, 25 bp, Homo sapien
cctctgatgtatccccagcaccttc

SEQ ID NO: 4862550 - DNA, 25 bp, Homo sapien
ttctcttcatccacggagcccgcct

SEQ ID NO: 4862551 - DNA, 25 bp, Homo sapien
ttcatccacggagcccgcctgagta

SEQ ID NO: 4862552 - DNA, 25 bp, Homo sapien
tctcttcatccacggagcccgcctg

SEQ ID NO: 4862553 - DNA, 25 bp, Homo sapien
tcttcatccacggagcccgcctgag

SEQ ID NO: 4862554 - DNA, 25 bp, Homo sapien
aatcccacattgcagctctacctca

SEQ ID NO: 4862555 - DNA, 25 bp, Homo sapien
attttgtacaaatcccacattgcag

SEQ ID NO: 4862556 - DNA, 25 bp, Homo sapien
atctatgccaaatgtgtcagccgtg

SEQ ID NO: 4862557 - DNA, 25 bp, Homo sapien
atgtgtcagccgtgaaccattttgt

SEQ ID NO: 4862558 - DNA, 25 bp, Homo sapien
gattaatttcacgataatgcagcct

SEQ ID NO: 4862559 - DNA, 25 bp, Homo sapien
cactagaagaggtacatgattggaa

SEQ ID NO: 4862560 - DNA, 25 bp, Homo sapien
tgctgaggagagtagacaatatacc

SEQ ID NO: 4862561 - DNA, 25 bp, Homo sapien
gagagcgagcagtacaattattcca

SEQ ID NO: 4862562 - DNA, 25 bp, Homo sapien
tacaaactgttgtctccaaagctac

SEQ ID NO: 4862563 - DNA, 25 bp, Homo sapien
gaattcctcccagttatctctctag

SEQ ID NO: 4862564 - DNA, 25 bp, Homo sapien
gataccactgataggatctaactgg

SEQ ID NO: 4862565 - DNA, 25 bp, Homo sapien
taccaaaactttgaactgtgatttg

SEQ ID NO: 4862566 - DNA, 25 bp, Homo sapien
gcagacttgacgttccctggctcag

SEQ ID NO: 4862567 - DNA, 25 bp, Homo sapien
caattcagcatctagaaggttctca

SEQ ID NO: 4862568 - DNA, 25 bp, Homo sapien
ccaggctagctgtagaagaggacaa

SEQ ID NO: 4862569 - DNA, 25 bp, Homo sapien
caggctgtacgcctctttatgagaa

SEQ ID NO: 4862570 - DNA, 25 bp, Homo sapien
tgatggcagacgttgcaatgaaaac

SEQ ID NO: 4862571 - DNA, 25 bp, Homo sapien
ctgtgatggcagacgttgcaatgaa

SEQ ID NO: 4862572 - DNA, 25 bp, Homo sapien
tggcagacgttgcaatgaaaactgt

SEQ ID NO: 4862573 - DNA, 25 bp, Homo sapien
cagacgttgcaatgaaaactgtagt

SEQ ID NO: 4862574 - DNA, 25 bp, Homo sapien
ttgcttccggaggaaataggtattc

SEQ ID NO: 4862575 - DNA, 25 bp, Homo sapien
gcttgcttccggaggaaataggtat

SEQ ID NO: 4862576 - DNA, 25 bp, Homo sapien
ttgcttgcttccggaggaaataggt

SEQ ID NO: 4862577 - DNA, 25 bp, Homo sapien
tgcttccggaggaaataggtattcc

SEQ ID NO: 4862578 - DNA, 25 bp, Homo sapien
agctactaggcaaaggtctcctgat

SEQ ID NO: 4862579 - DNA, 25 bp, Homo sapien
taggcaaaggtctcctgattctgct

SEQ ID NO: 4862580 - DNA, 25 bp, Homo sapien
tctcctgattctgctacgcccagat

SEQ ID NO: 4862581 - DNA, 25 bp, Homo sapien
caaaggtctcctgattctgctacgc

SEQ ID NO: 4862582 - DNA, 25 bp, Homo sapien
ctgtgttcgggactgccatgtcagg

SEQ ID NO: 4862583 - DNA, 25 bp, Homo sapien
tgtcttcggatgttcatcctgtgtt

SEQ ID NO: 4862584 - DNA, 25 bp, Homo sapien
tcgggactgccatgtcaggttggcc

SEQ ID NO: 4862585 - DNA, 25 bp, Homo sapien
tttggagaacattgtcttcggatgt

SEQ ID NO: 4862586 - DNA, 25 bp, Homo sapien
gggtgcactgagctgagatcgcatc

SEQ ID NO: 4862587 - DNA, 25 bp, Homo sapien
agaatctctgggacccaggaggcag

SEQ ID NO: 4862588 - DNA, 25 bp, Homo sapien
gagggtgcactgagctgagatcgca

SEQ ID NO: 4862589 - DNA, 25 bp, Homo sapien
ggagaatctctgggacccaggaggc

SEQ ID NO: 4862590 - DNA, 25 bp, Homo sapien
ttcccaggtctctgtctggttgtca

SEQ ID NO: 4862591 - DNA, 25 bp, Homo sapien
tggttgtcatgcactcccagtattt

SEQ ID NO: 4862592 - DNA, 25 bp, Homo sapien
taacaatgttatttggccaagtcat

SEQ ID NO: 4862593 - DNA, 25 bp, Homo sapien
tgttttaacaatgttatttggccaa

SEQ ID NO: 4862594 - DNA, 25 bp, Homo sapien
aaaaccaggtgtatgcgggcaatgt

SEQ ID NO: 4862595 - DNA, 25 bp, Homo sapien
tattcttggaaaagtactgtggaca

SEQ ID NO: 4862596 - DNA, 25 bp, Homo sapien
caaagagtgcccaagtttttcataa

SEQ ID NO: 4862597 - DNA, 25 bp, Homo sapien
tataagacaatatgcatctcactga

SEQ ID NO: 4862598 - DNA, 25 bp, Homo sapien
gaagtagtgttttactattaatgaa

SEQ ID NO: 4862599 - DNA, 25 bp, Homo sapien
aataatcaaccactaactctaaaag

SEQ ID NO: 4862600 - DNA, 25 bp, Homo sapien
ggaattaataatcaaccactaactc

SEQ ID NO: 4862601 - DNA, 25 bp, Homo sapien
atggaattaataatcaaccactaac

SEQ ID NO: 4862602 - DNA, 25 bp, Homo sapien
ccaaatttggggtaatcttcttctg

SEQ ID NO: 4862603 - DNA, 25 bp, Homo sapien
ggatctttactgcctggatctgggt

SEQ ID NO: 4862604 - DNA, 25 bp, Homo sapien
caaatttggggtaatcttcttctgg

SEQ ID NO: 4862605 - DNA, 25 bp, Homo sapien
atctttactgcctggatctgggtgt

SEQ ID NO: 4862606 - DNA, 25 bp, Homo sapien
atttaaattcccactagtagacaca

SEQ ID NO: 4862607 - DNA, 25 bp, Homo sapien
ttaaattcccactagtagacacagc

SEQ ID NO: 4862608 - DNA, 25 bp, Homo sapien
tttaaattcccactagtagacacag

SEQ ID NO: 4862609 - DNA, 25 bp, Homo sapien
tggttgtcataagcaggaccaatgt

SEQ ID NO: 4862610 - DNA, 25 bp, Homo sapien
gccatgttaggcagaatatgacaac

SEQ ID NO: 4862611 - DNA, 25 bp, Homo sapien
gaacagagcaaacagtacagaagtg

SEQ ID NO: 4862612 - DNA, 25 bp, Homo sapien
ttaagtgctattgccgccattttca

SEQ ID NO: 4862613 - DNA, 25 bp, Homo sapien
cctcgcgtggccacaattacatttt

SEQ ID NO: 4862614 - DNA, 25 bp, Homo sapien
gctgtttgcgcttggctcctcgtcc

SEQ ID NO: 4862615 - DNA, 25 bp, Homo sapien
cgtccttttccgctgcttcctgctg

SEQ ID NO: 4862616 - DNA, 25 bp, Homo sapien
ttgcgcttggctcctcgtccttttc

SEQ ID NO: 4862617 - DNA, 25 bp, Homo sapien
ccatcctgctgtttgcgcttggctc

SEQ ID NO: 4862618 - DNA, 25 bp, Homo sapien
tcagctagaatataccgatagccat

SEQ ID NO: 4862619 - DNA, 25 bp, Homo sapien
gatagccatctttgttaaacgggtg

SEQ ID NO: 4862620 - DNA, 25 bp, Homo sapien
aacgggtgttccaatgggtagccat

SEQ ID NO: 4862621 - DNA, 25 bp, Homo sapien
ctcgatcatgtagggctaacaaaac

SEQ ID NO: 4862622 - DNA, 25 bp, Homo sapien
tttcgtatatgtgatatatggaagt

SEQ ID NO: 4862623 - DNA, 25 bp, Homo sapien
ttcgtatatgtgatatatggaagtg

SEQ ID NO: 4862624 - DNA, 25 bp, Homo sapien
attttcgtatatgtgatatatggaa

SEQ ID NO: 4862625 - DNA, 25 bp, Homo sapien
ttttcgtatatgtgatatatggaag

SEQ ID NO: 4862626 - DNA, 25 bp, Homo sapien
tgtggctagcctcttgactagtttt

SEQ ID NO: 4862627 - DNA, 25 bp, Homo sapien
gccactgtggctagcctcttgacta

SEQ ID NO: 4862628 - DNA, 25 bp, Homo sapien
cttactcagtcgcacaaccacagct

SEQ ID NO: 4862629 - DNA, 25 bp, Homo sapien
gagccactgtggctagcctcttgac

SEQ ID NO: 4862630 - DNA, 25 bp, Homo sapien
cggtcatctgagatctttaactggg

SEQ ID NO: 4862631 - DNA, 25 bp, Homo sapien
acctttccgtactccatgagaggcc

SEQ ID NO: 4862632 - DNA, 25 bp, Homo sapien
tcaccatagagtagcccttctctcc

SEQ ID NO: 4862633 - DNA, 25 bp, Homo sapien
aggcacctttccgtactccatgaga

SEQ ID NO: 4862634 - DNA, 25 bp, Homo sapien
ttatcataacctaaaggagcttgaa

SEQ ID NO: 4862635 - DNA, 25 bp, Homo sapien
tgtgtctggcaatgacttggctgtc

SEQ ID NO: 4862636 - DNA, 25 bp, Homo sapien
tggttccctttttgctccgccaaga

SEQ ID NO: 4862637 - DNA, 25 bp, Homo sapien
ggacgtctccctgtccatagccaga

SEQ ID NO: 4862638 - DNA, 25 bp, Homo sapien
tcactatggggagtctgcttcaggc

SEQ ID NO: 4862639 - DNA, 25 bp, Homo sapien
ggctcttctctgctttatccacaaa

SEQ ID NO: 4862640 - DNA, 25 bp, Homo sapien
ctcactatggggagtctgcttcagg

SEQ ID NO: 4862641 - DNA, 25 bp, Homo sapien
ctctgctttatccacaaagtctttt

SEQ ID NO: 4862642 - DNA, 25 bp, Homo sapien
tacactgaatatcctctcttgacca

SEQ ID NO: 4862643 - DNA, 25 bp, Homo sapien
cttctattagtgtcctgggtggcct

SEQ ID NO: 4862644 - DNA, 25 bp, Homo sapien
taagcgtgcttgtttatcaattcct

SEQ ID NO: 4862645 - DNA, 25 bp, Homo sapien
cttgggaccacacctgtttaagcgt

SEQ ID NO: 4862646 - DNA, 25 bp, Homo sapien
aatatctttgtaagccacaccttga

SEQ ID NO: 4862647 - DNA, 25 bp, Homo sapien
gatggctgggaagtaaaccccctca

SEQ ID NO: 4862648 - DNA, 25 bp, Homo sapien
cgtgcagctcttgtacagtgagatg

SEQ ID NO: 4862649 - DNA, 25 bp, Homo sapien
cacaccttgattgacaccattttta

SEQ ID NO: 4862650 - DNA, 25 bp, Homo sapien
aaccaacaggccctaatgatagtac

SEQ ID NO: 4862651 - DNA, 25 bp, Homo sapien
caacaggccctaatgatagtaccct

SEQ ID NO: 4862652 - DNA, 25 bp, Homo sapien
gccctaatgatagtacccttcttca

SEQ ID NO: 4862653 - DNA, 25 bp, Homo sapien
ttaaaaccaacaggccctaatgata

SEQ ID NO: 4862654 - DNA, 25 bp, Homo sapien
tcaatggtgcctactgacagactaa

SEQ ID NO: 4862655 - DNA, 25 bp, Homo sapien
ttacaggcaggtccttaactttggc

SEQ ID NO: 4862656 - DNA, 25 bp, Homo sapien
aaagtacatggaaatcttcatgcat

SEQ ID NO: 4862657 - DNA, 25 bp, Homo sapien
gagatctgtctcagatagttttggt

SEQ ID NO: 4862658 - DNA, 25 bp, Homo sapien
ttactaaaagtggtcaacatcctga

SEQ ID NO: 4862659 - DNA, 25 bp, Homo sapien
gatttaccgggcatgagatgaatac

SEQ ID NO: 4862660 - DNA, 25 bp, Homo sapien
aacgttaaatatccccacaggcagc

SEQ ID NO: 4862661 - DNA, 25 bp, Homo sapien
cttatgtgaagtgccgatttaccgg

SEQ ID NO: 4862662 - DNA, 25 bp, Homo sapien
ggaggatacttgaagcatggtccaa

SEQ ID NO: 4862663 - DNA, 25 bp, Homo sapien
gtaagtgagatccttcggaggatac

SEQ ID NO: 4862664 - DNA, 25 bp, Homo sapien
tgagatccttcggaggatacttgaa

SEQ ID NO: 4862665 - DNA, 25 bp, Homo sapien
ccttcggaggatacttgaagcatgg

SEQ ID NO: 4862666 - DNA, 25 bp, Homo sapien
tccacgtgatacaagacgtcagcca

SEQ ID NO: 4862667 - DNA, 25 bp, Homo sapien
agccagggtgtgctctaccacggcg

SEQ ID NO: 4862668 - DNA, 25 bp, Homo sapien
acgtgatacaagacgtcagccaggg

SEQ ID NO: 4862669 - DNA, 25 bp, Homo sapien
tgtctccacgtgatacaagacgtca

SEQ ID NO: 4862670 - DNA, 25 bp, Homo sapien
tacggatctcagtgttcaaaagtgt

SEQ ID NO: 4862671 - DNA, 25 bp, Homo sapien
taggataacaagtcacagctggcag

SEQ ID NO: 4862672 - DNA, 25 bp, Homo sapien
tatgcaatcctggagtcagcggttg

SEQ ID NO: 4862673 - DNA, 25 bp, Homo sapien
aaacaggtgggatacagtcaatgcc

SEQ ID NO: 4862674 - DNA, 25 bp, Homo sapien
catccatgttccaagggaagaccgg

SEQ ID NO: 4862675 - DNA, 25 bp, Homo sapien
tttctgaacactgtcaccaagaggc

SEQ ID NO: 4862676 - DNA, 25 bp, Homo sapien
caagaggcacccaatctgaagggaa

SEQ ID NO: 4862677 - DNA, 25 bp, Homo sapien
aagaccgggagggagatcattagcc

SEQ ID NO: 4862678 - DNA, 25 bp, Homo sapien
ttttttactgagaagggatcttgct

SEQ ID NO: 4862679 - DNA, 25 bp, Homo sapien
aactcctggtcttgagcaatctttc

SEQ ID NO: 4862680 - DNA, 25 bp, Homo sapien
atttttttactgagaagggatcttg

SEQ ID NO: 4862681 - DNA, 25 bp, Homo sapien
ctcctggtcttgagcaatctttctg

SEQ ID NO: 4862682 - DNA, 25 bp, Homo sapien
taataggtgtctagggctgagcctc

SEQ ID NO: 4862683 - DNA, 25 bp, Homo sapien
tggagggcaattcgaaaccagtctg

SEQ ID NO: 4862684 - DNA, 25 bp, Homo sapien
tagaagctttataaccaggtctgcc

SEQ ID NO: 4862685 - DNA, 25 bp, Homo sapien
gagccactctacttattaaccgagg

SEQ ID NO: 4862686 - DNA, 25 bp, Homo sapien
tacatgtgcacaaagcagaatctca

SEQ ID NO: 4862687 - DNA, 25 bp, Homo sapien
tagctatgacatgagggttcaggcc

SEQ ID NO: 4862688 - DNA, 25 bp, Homo sapien
ggtacacacgctcatcaggagaatc

SEQ ID NO: 4862689 - DNA, 25 bp, Homo sapien
gaatccctactggaagcctgcaagt

SEQ ID NO: 4862690 - DNA, 25 bp, Homo sapien
ggctcaggaaggacgaagaaccacc

SEQ ID NO: 4862691 - DNA, 25 bp, Homo sapien
gggctcaggaaggacgaagaaccac

SEQ ID NO: 4862692 - DNA, 25 bp, Homo sapien
ggggctcaggaaggacgaagaacca

SEQ ID NO: 4862693 - DNA, 25 bp, Homo sapien
gattgcaccattgcactccagcctg

SEQ ID NO: 4862694 - DNA, 25 bp, Homo sapien
gaaggcagaggttgcggagagccaa

SEQ ID NO: 4862695 - DNA, 25 bp, Homo sapien
catatcccaaattagagtttacagg

SEQ ID NO: 4862696 - DNA, 25 bp, Homo sapien
gaaacagtggcatagactccttcac

SEQ ID NO: 4862697 - DNA, 25 bp, Homo sapien
tgtggcaccagcaactacttcttta

SEQ ID NO: 4862698 - DNA, 25 bp, Homo sapien
atgaagaaatcgtgtaggtgggttt

SEQ ID NO: 4862699 - DNA, 25 bp, Homo sapien
tggtggagttagttagggtctcact

SEQ ID NO: 4862700 - DNA, 25 bp, Homo sapien
tttggtggagttagttagggtctca

SEQ ID NO: 4862701 - DNA, 25 bp, Homo sapien
ttggtggagttagttagggtctcac

SEQ ID NO: 4862702 - DNA, 25 bp, Homo sapien
tcgccatttatccaatggagtttcc

SEQ ID NO: 4862703 - DNA, 25 bp, Homo sapien
aggaagacaccgtgttccttaagag

SEQ ID NO: 4862704 - DNA, 25 bp, Homo sapien
taagagggagtatacgtttcctcgc

SEQ ID NO: 4862705 - DNA, 25 bp, Homo sapien
ctgccgaaccccgaaagctgaggga

SEQ ID NO: 4862706 - DNA, 25 bp, Homo sapien
gtagcggccgtaggacggaccgtca

SEQ ID NO: 4862707 - DNA, 25 bp, Homo sapien
tcagggcgaagaggatataagggtg

SEQ ID NO: 4862708 - DNA, 25 bp, Homo sapien
agcggccgtaggacggaccgtcact

SEQ ID NO: 4862709 - DNA, 25 bp, Homo sapien
ttcagggcgaagaggatataagggt

SEQ ID NO: 4862710 - DNA, 25 bp, Homo sapien
aattttgcagagcatcccattctac

SEQ ID NO: 4862711 - DNA, 25 bp, Homo sapien
gagatagtctcgctaggcagcccag

SEQ ID NO: 4862712 - DNA, 25 bp, Homo sapien
gagaccaatagctgtcaatgcccct

SEQ ID NO: 4862713 - DNA, 25 bp, Homo sapien
taagatgacctagcttcctactcca

SEQ ID NO: 4862714 - DNA, 25 bp, Homo sapien
cagtgaaagtctgtagctcatggcc

SEQ ID NO: 4862715 - DNA, 25 bp, Homo sapien
ttatcatgtgcctaactctttccaa

SEQ ID NO: 4862716 - DNA, 25 bp, Homo sapien
atggccctcccaacatgacactaat

SEQ ID NO: 4862717 - DNA, 25 bp, Homo sapien
gcatttggtttcacaggaaactggc

SEQ ID NO: 4862718 - DNA, 25 bp, Homo sapien
cctgctttacgaagtggagtaccca

SEQ ID NO: 4862719 - DNA, 25 bp, Homo sapien
tgcatctccagtgaatctaaccagt

SEQ ID NO: 4862720 - DNA, 25 bp, Homo sapien
gacttagggcttctcggcttgaaaa

SEQ ID NO: 4862721 - DNA, 25 bp, Homo sapien
tctgataccaaagggctcctcctag

SEQ ID NO: 4862722 - DNA, 25 bp, Homo sapien
gctcatttgtttagtaaccagctgg

SEQ ID NO: 4862723 - DNA, 25 bp, Homo sapien
ccaccttaggcttgttattgtcatt

SEQ ID NO: 4862724 - DNA, 25 bp, Homo sapien
tcttctgtcagttctagcctattga

SEQ ID NO: 4862725 - DNA, 25 bp, Homo sapien
gacatctggtcactttcacaatcag

SEQ ID NO: 4862726 - DNA, 25 bp, Homo sapien
gcttgaacaggaccttcgacatttt

SEQ ID NO: 4862727 - DNA, 25 bp, Homo sapien
actgtgcccgcccaagtatagtttt

SEQ ID NO: 4862728 - DNA, 25 bp, Homo sapien
tgcccgcccaagtatagttttaagc

SEQ ID NO: 4862729 - DNA, 25 bp, Homo sapien
gtatagttttaagcttgaacaggac

SEQ ID NO: 4862730 - DNA, 25 bp, Homo sapien
tgtagctaggatatggtggctgctc

SEQ ID NO: 4862731 - DNA, 25 bp, Homo sapien
ggtaaggagccctagatctcgcagt

SEQ ID NO: 4862732 - DNA, 25 bp, Homo sapien
gaattccaatagttagaattgtagc

SEQ ID NO: 4862733 - DNA, 25 bp, Homo sapien
caggatatgtacttgggtaaggagc

SEQ ID NO: 4862734 - DNA, 25 bp, Homo sapien
ctccatttgtataagaattcaaact

SEQ ID NO: 4862735 - DNA, 25 bp, Homo sapien
tatgaggcagtatttgccccagggc

SEQ ID NO: 4862736 - DNA, 25 bp, Homo sapien
gaggcagtatttgccccagggcctg

SEQ ID NO: 4862737 - DNA, 25 bp, Homo sapien
gagtatgaggcagtatttgccccag

SEQ ID NO: 4862738 - DNA, 25 bp, Homo sapien
ctgagtatgaggcagtatttgcccc

SEQ ID NO: 4862739 - DNA, 25 bp, Homo sapien
tagatccaacgagagactggagttg

SEQ ID NO: 4862740 - DNA, 25 bp, Homo sapien
aaggcggatatcctggaacctgccc

SEQ ID NO: 4862741 - DNA, 25 bp, Homo sapien
ctgtgaaggcggatatcctggaacc

SEQ ID NO: 4862742 - DNA, 25 bp, Homo sapien
tgttgccagatgaacggtaagtact

SEQ ID NO: 4862743 - DNA, 25 bp, Homo sapien
gagaagcccacgcatcttcttgtgg

SEQ ID NO: 4862744 - DNA, 25 bp, Homo sapien
ccactgctaggccatggtgaagtac

SEQ ID NO: 4862745 - DNA, 25 bp, Homo sapien
tgaagtactttcagtcatgtagaga

SEQ ID NO: 4862746 - DNA, 25 bp, Homo sapien
tcttgtggtcgtacagtcggtcctg

SEQ ID NO: 4862747 - DNA, 25 bp, Homo sapien
actcggaggagtactttcatctgaa

SEQ ID NO: 4862748 - DNA, 25 bp, Homo sapien
tcattgttcactgtccccgaggatt

SEQ ID NO: 4862749 - DNA, 25 bp, Homo sapien
cccgaggattcgtactgatggacac

SEQ ID NO: 4862750 - DNA, 25 bp, Homo sapien
gaggctcagcactatactggacttg

SEQ ID NO: 4862751 - DNA, 25 bp, Homo sapien
tctggcctgccgtacagagtcctgg

SEQ ID NO: 4862752 - DNA, 25 bp, Homo sapien
tccagtatggcctgaatcttacaaa

SEQ ID NO: 4862753 - DNA, 25 bp, Homo sapien
agttccttggttagcatttcttcca

SEQ ID NO: 4862754 - DNA, 25 bp, Homo sapien
cagaagccagtatgctttgtctgtc

SEQ ID NO: 4862755 - DNA, 25 bp, Homo sapien
gaaacgggacatttgcatagtctcc

SEQ ID NO: 4862756 - DNA, 25 bp, Homo sapien
aattggcatcttgggcactcagtca

SEQ ID NO: 4862757 - DNA, 25 bp, Homo sapien
tactcataggcctgacagtctaggg

SEQ ID NO: 4862758 - DNA, 25 bp, Homo sapien
catagtctccgggtatctccagcaa

SEQ ID NO: 4862759 - DNA, 25 bp, Homo sapien
tgtaaaatatacagcgaagtacagt

SEQ ID NO: 4862760 - DNA, 25 bp, Homo sapien
aaatatacagcgaagtacagtggct

SEQ ID NO: 4862761 - DNA, 25 bp, Homo sapien
taatgtaaaatatacagcgaagtac

SEQ ID NO: 4862762 - DNA, 25 bp, Homo sapien
caagtacctcaaaaactataatgta

SEQ ID NO: 4862763 - DNA, 25 bp, Homo sapien
ggccccagacagaattacactattg

SEQ ID NO: 4862764 - DNA, 25 bp, Homo sapien
accagcagcctcacatgttctcagg

SEQ ID NO: 4862765 - DNA, 25 bp, Homo sapien
gggagatcaatgcaggaaggcacca

SEQ ID NO: 4862766 - DNA, 25 bp, Homo sapien
tttcacacttggagagagccacgct

SEQ ID NO: 4862767 - DNA, 25 bp, Homo sapien
ccacggcgctcccagtgggcgagta

SEQ ID NO: 4862768 - DNA, 25 bp, Homo sapien
agcgcggcgcgcgaccgcgggtggg

SEQ ID NO: 4862769 - DNA, 25 bp, Homo sapien
gcccggatgccaggcgaaaaggtga

SEQ ID NO: 4862770 - DNA, 25 bp, Homo sapien
ggctcgcgccgaacaccaggcgcca

SEQ ID NO: 4862771 - DNA, 25 bp, Homo sapien
cctggcctccctcggtccagccgcc

SEQ ID NO: 4862772 - DNA, 25 bp, Homo sapien
gtccagccgcccgcccgacgcggtc

SEQ ID NO: 4862773 - DNA, 25 bp, Homo sapien
agccgcccgcccgacgcggtctcac

SEQ ID NO: 4862774 - DNA, 25 bp, Homo sapien
tccagccgcccgcccgacgcggtct

SEQ ID NO: 4862775 - DNA, 25 bp, Homo sapien
gaccacagggttcacagggtgccca

SEQ ID NO: 4862776 - DNA, 25 bp, Homo sapien
gagctcgggctcaggtcgtccgccc

SEQ ID NO: 4862777 - DNA, 25 bp, Homo sapien
cagaccacagggttcacagggtgcc

SEQ ID NO: 4862778 - DNA, 25 bp, Homo sapien
tcgggctcaggtcgtccgcccgcag

SEQ ID NO: 4862779 - DNA, 25 bp, Homo sapien
tgccctgtcctagtaacgccaaggt

SEQ ID NO: 4862780 - DNA, 25 bp, Homo sapien
cttctaagctgcctcgtagggcggg

SEQ ID NO: 4862781 - DNA, 25 bp, Homo sapien
tcagatgaaagctaacaagcgacct

SEQ ID NO: 4862782 - DNA, 25 bp, Homo sapien
gaatcacaggaccacatgctcgaaa

SEQ ID NO: 4862783 - DNA, 25 bp, Homo sapien
gcatccatgtctattagctcaaagg

SEQ ID NO: 4862784 - DNA, 25 bp, Homo sapien
tttggtgacggagatggatctgact

SEQ ID NO: 4862785 - DNA, 25 bp, Homo sapien
gatggatctgactgggacaactgct

SEQ ID NO: 4862786 - DNA, 25 bp, Homo sapien
gctcctgttgtgactgcactgatga

SEQ ID NO: 4862787 - DNA, 25 bp, Homo sapien
tgctgtgaatcctcagagttgaaag

SEQ ID NO: 4862788 - DNA, 25 bp, Homo sapien
gctgctgtgaatcctcagagttgaa

SEQ ID NO: 4862789 - DNA, 25 bp, Homo sapien
ccagctgctgtgaatcctcagagtt

SEQ ID NO: 4862790 - DNA, 25 bp, Homo sapien
gagttgaaaggaatccatgtctcct

SEQ ID NO: 4862791 - DNA, 25 bp, Homo sapien
attccaagtcataattttcacctac

SEQ ID NO: 4862792 - DNA, 25 bp, Homo sapien
tctattccaagtcataattttcacc

SEQ ID NO: 4862793 - DNA, 25 bp, Homo sapien
tattccaagtcataattttcaccta

SEQ ID NO: 4862794 - DNA, 25 bp, Homo sapien
ctattccaagtcataattttcacct

SEQ ID NO: 4862795 - DNA, 25 bp, Homo sapien
atagcactcactataaggaccatta

SEQ ID NO: 4862796 - DNA, 25 bp, Homo sapien
catagcactcactataaggaccatt

SEQ ID NO: 4862797 - DNA, 25 bp, Homo sapien
tcatagcactcactataaggaccat

SEQ ID NO: 4862798 - DNA, 25 bp, Homo sapien
tagcactcactataaggaccattat

SEQ ID NO: 4862799 - DNA, 25 bp, Homo sapien
tattgggtaactatgcagaaataat

SEQ ID NO: 4862800 - DNA, 25 bp, Homo sapien
attgggtaactatgcagaaataata

SEQ ID NO: 4862801 - DNA, 25 bp, Homo sapien
attattgggtaactatgcagaaata

SEQ ID NO: 4862802 - DNA, 25 bp, Homo sapien
ttattgggtaactatgcagaaataa

SEQ ID NO: 4862803 - DNA, 25 bp, Homo sapien
aacataagctagaacattaaagata

SEQ ID NO: 4862804 - DNA, 25 bp, Homo sapien
aaaacataagctagaacattaaaga

SEQ ID NO: 4862805 - DNA, 25 bp, Homo sapien
aaacataagctagaacattaaagat

SEQ ID NO: 4862806 - DNA, 25 bp, Homo sapien
gacaagtgacaagttagagagttca

SEQ ID NO: 4862807 - DNA, 25 bp, Homo sapien
tgaatttgcttgaggaaccataagg

SEQ ID NO: 4862808 - DNA, 25 bp, Homo sapien
gggaaagatagcagtgccccttaaa

SEQ ID NO: 4862809 - DNA, 25 bp, Homo sapien
agagttcattcttctgcaccccact

SEQ ID NO: 4862810 - DNA, 25 bp, Homo sapien
tcagtaggaacaactctcccattac

SEQ ID NO: 4862811 - DNA, 25 bp, Homo sapien
aaatgaacatcatatctgcccccat

SEQ ID NO: 4862812 - DNA, 25 bp, Homo sapien
taggaacaactctcccattacaacc

SEQ ID NO: 4862813 - DNA, 25 bp, Homo sapien
ccatcagtaggaacaactctcccat

SEQ ID NO: 4862814 - DNA, 25 bp, Homo sapien
gatgccagttcatcccagtatacag

SEQ ID NO: 4862815 - DNA, 25 bp, Homo sapien
ccgagtagggaacatacttattgtc

SEQ ID NO: 4862816 - DNA, 25 bp, Homo sapien
ctgaagctctccgagtagggaacat

SEQ ID NO: 4862817 - DNA, 25 bp, Homo sapien
cacgtacatcgtctcacttccgatg

SEQ ID NO: 4862818 - DNA, 25 bp, Homo sapien
tccattcatccaaagttacagcaag

SEQ ID NO: 4862819 - DNA, 25 bp, Homo sapien
aataatttctctgttgggagattcc

SEQ ID NO: 4862820 - DNA, 25 bp, Homo sapien
aagttacagcaagcatgtaagtttc

SEQ ID NO: 4862821 - DNA, 25 bp, Homo sapien
tcatccaaagttacagcaagcatgt

SEQ ID NO: 4862822 - DNA, 25 bp, Homo sapien
tttttatcccgacaagagaaatgct

SEQ ID NO: 4862823 - DNA, 25 bp, Homo sapien
caattgagttctccctaatagcgca

SEQ ID NO: 4862824 - DNA, 25 bp, Homo sapien
aatttgacaaaggttatcctacaca

SEQ ID NO: 4862825 - DNA, 25 bp, Homo sapien
cctacacagagtgcttagcaaaaga

SEQ ID NO: 4862826 - DNA, 25 bp, Homo sapien
gttgaaccccaatcatcagaccctg

SEQ ID NO: 4862827 - DNA, 25 bp, Homo sapien
cctgctccgtgggtgttgaacccca

SEQ ID NO: 4862828 - DNA, 25 bp, Homo sapien
ttcacagttcttggtcgaccctgct

SEQ ID NO: 4862829 - DNA, 25 bp, Homo sapien
gcaactggctggtaatgcaccataa

SEQ ID NO: 4862830 - DNA, 25 bp, Homo sapien
taagtgaccctacctagatagcagt

SEQ ID NO: 4862831 - DNA, 25 bp, Homo sapien
gatagcagtgcataatcaggtcctg

SEQ ID NO: 4862832 - DNA, 25 bp, Homo sapien
tctagtcaagtaggtggaatcacac

SEQ ID NO: 4862833 - DNA, 25 bp, Homo sapien
tacatcatcaggttgcatgcaccat

SEQ ID NO: 4862834 - DNA, 25 bp, Homo sapien
ttattctgtataattagtcatgtat

SEQ ID NO: 4862835 - DNA, 25 bp, Homo sapien
tattctgtataattagtcatgtatt

SEQ ID NO: 4862836 - DNA, 25 bp, Homo sapien
attattctgtataattagtcatgta

SEQ ID NO: 4862837 - DNA, 25 bp, Homo sapien
attctgtataattagtcatgtattc

SEQ ID NO: 4862838 - DNA, 25 bp, Homo sapien
gaaagcggagatcacaagctggtcc

SEQ ID NO: 4862839 - DNA, 25 bp, Homo sapien
cacactgtacaatgcttcgaaagcg

SEQ ID NO: 4862840 - DNA, 25 bp, Homo sapien
ccaagtgatctatttgtaaaggttc

SEQ ID NO: 4862841 - DNA, 25 bp, Homo sapien
aagctggtccaatcccatggactac

SEQ ID NO: 4862842 - DNA, 25 bp, Homo sapien
cttatgcagctaagacaatagacca

SEQ ID NO: 4862843 - DNA, 25 bp, Homo sapien
caggaatttcctagcacttcaggtc

SEQ ID NO: 4862844 - DNA, 25 bp, Homo sapien
gaaataggaccaccacatcataaaa

SEQ ID NO: 4862845 - DNA, 25 bp, Homo sapien
gaagctttactaccttgccacctgt

SEQ ID NO: 4862846 - DNA, 25 bp, Homo sapien
gcaacaaatcatgtaattatactct

SEQ ID NO: 4862847 - DNA, 25 bp, Homo sapien
tatactctaactacatttgcacaga

SEQ ID NO: 4862848 - DNA, 25 bp, Homo sapien
aatgaagtaacaaatctgtagaatc

SEQ ID NO: 4862849 - DNA, 25 bp, Homo sapien
attaacttatgcatcaacaatgaag

SEQ ID NO: 4862850 - DNA, 25 bp, Homo sapien
aaaatgtgtctgtagcaagttcaag

SEQ ID NO: 4862851 - DNA, 25 bp, Homo sapien
gaaattctaccctcccaatctgctg

SEQ ID NO: 4862852 - DNA, 25 bp, Homo sapien
aaaggactgtgccagttgactggaa

SEQ ID NO: 4862853 - DNA, 25 bp, Homo sapien
tcaaggaaacactgcgaaaatcatt

SEQ ID NO: 4862854 - DNA, 25 bp, Homo sapien
gaattgtgtcattggtgaagtgcct

SEQ ID NO: 4862855 - DNA, 25 bp, Homo sapien
tgaagtgcctgaggcggttaatgct

SEQ ID NO: 4862856 - DNA, 25 bp, Homo sapien
gggactattgtagaagaagacatcc

SEQ ID NO: 4862857 - DNA, 25 bp, Homo sapien
ctgtgtccacaatagtctgacagta

SEQ ID NO: 4862858 - DNA, 25 bp, Homo sapien
aactatgaccagcaatggatacacc

SEQ ID NO: 4862859 - DNA, 25 bp, Homo sapien
ctatgaccagcaatggatacacccc

SEQ ID NO: 4862860 - DNA, 25 bp, Homo sapien
gcaatggatacaccccctttgaaat

SEQ ID NO: 4862861 - DNA, 25 bp, Homo sapien
ctaaactatgaccagcaatggatac

SEQ ID NO: 4862862 - DNA, 25 bp, Homo sapien
tgttaggatatcaaacaatataagc

SEQ ID NO: 4862863 - DNA, 25 bp, Homo sapien
ctttctgatttgttaggatatcaaa

SEQ ID NO: 4862864 - DNA, 25 bp, Homo sapien
tcactgtcaatatcccccaaagaat

SEQ ID NO: 4862865 - DNA, 25 bp, Homo sapien
aggatatcaaacaatataagcgaac

SEQ ID NO: 4862866 - DNA, 25 bp, Homo sapien
ggtaccaaatcaatcctacagatga

SEQ ID NO: 4862867 - DNA, 25 bp, Homo sapien
gaggttccaaggttttgcaacttca

SEQ ID NO: 4862868 - DNA, 25 bp, Homo sapien
catttgctgaattttaagggagctc

SEQ ID NO: 4862869 - DNA, 25 bp, Homo sapien
tggtccaacaggagaaataggtacc

SEQ ID NO: 4862870 - DNA, 25 bp, Homo sapien
cttgatccattacaatatttagcga

SEQ ID NO: 4862871 - DNA, 25 bp, Homo sapien
ccttgatccattacaatatttagcg

SEQ ID NO: 4862872 - DNA, 25 bp, Homo sapien
agagcttccttatctactttctcct

SEQ ID NO: 4862873 - DNA, 25 bp, Homo sapien
aagatatcaaagaattcagagagct

SEQ ID NO: 4862874 - DNA, 25 bp, Homo sapien
tctccttctcaaagatatcaaagaa

SEQ ID NO: 4862875 - DNA, 25 bp, Homo sapien
cagagagctgaagtttcttcaaatc

SEQ ID NO: 4862876 - DNA, 25 bp, Homo sapien
gaagatctcggtctgtacataaagc

SEQ ID NO: 4862877 - DNA, 25 bp, Homo sapien
ggtgctgaaatagtttaatatcttc

SEQ ID NO: 4862878 - DNA, 25 bp, Homo sapien
atttcctgaagatctcggtctgtac

SEQ ID NO: 4862879 - DNA, 25 bp, Homo sapien
aaggaattcctatttcctgaagatc

SEQ ID NO: 4862880 - DNA, 25 bp, Homo sapien
caaagcacaaggacacactatggac

SEQ ID NO: 4862881 - DNA, 25 bp, Homo sapien
aacacagcgagatttcatttccagg

SEQ ID NO: 4862882 - DNA, 25 bp, Homo sapien
gaagtcagacacatggctcaaaagg

SEQ ID NO: 4862883 - DNA, 25 bp, Homo sapien
cccttgggaaagttctgaaatggca

SEQ ID NO: 4862884 - DNA, 25 bp, Homo sapien
tgcccaatgccaacatccagatagt

SEQ ID NO: 4862885 - DNA, 25 bp, Homo sapien
tactgctactgcagaactcagattc

SEQ ID NO: 4862886 - DNA, 25 bp, Homo sapien
tagtcaccatttctagtattactgc

SEQ ID NO: 4862887 - DNA, 25 bp, Homo sapien
gctgcggggctggtctcttaatacc

SEQ ID NO: 4862888 - DNA, 25 bp, Homo sapien
ccaatgggagatccaaaggcaaaga

SEQ ID NO: 4862889 - DNA, 25 bp, Homo sapien
tagttgggatcaattctttttagtc

SEQ ID NO: 4862890 - DNA, 25 bp, Homo sapien
tcggacagtaaggaacattccaatg

SEQ ID NO: 4862891 - DNA, 25 bp, Homo sapien
gaaacctttgcacgttggaaatctg

SEQ ID NO: 4862892 - DNA, 25 bp, Homo sapien
caaccagaactatgtatcttaaaca

SEQ ID NO: 4862893 - DNA, 25 bp, Homo sapien
aaatcctatgttctttaacaataag

SEQ ID NO: 4862894 - DNA, 25 bp, Homo sapien
cattagtcaccatgtacaaccagaa

SEQ ID NO: 4862895 - DNA, 25 bp, Homo sapien
gttgtctcattgctagacaatggaa

SEQ ID NO: 4862896 - DNA, 25 bp, Homo sapien
aattccactcctgggaccaccattg

SEQ ID NO: 4862897 - DNA, 25 bp, Homo sapien
tggttcaatcctataggccacagga

SEQ ID NO: 4862898 - DNA, 25 bp, Homo sapien
taagtgcatccgcttcctgccttta

SEQ ID NO: 4862899 - DNA, 25 bp, Homo sapien
ctgcctttatgatgtgggatcagca

SEQ ID NO: 4862900 - DNA, 25 bp, Homo sapien
ggtatggagctctggtaaaagactt

SEQ ID NO: 4862901 - DNA, 25 bp, Homo sapien
aaggtccatactcatcctggtcaag

SEQ ID NO: 4862902 - DNA, 25 bp, Homo sapien
catccgcagcgaacctagcaagttg

SEQ ID NO: 4862903 - DNA, 25 bp, Homo sapien
tctctgaagttgattcaggttctgc

SEQ ID NO: 4862904 - DNA, 25 bp, Homo sapien
aatgcgttggcctccattcagcatc

SEQ ID NO: 4862905 - DNA, 25 bp, Homo sapien
cacattgataggcaggacttcttct

SEQ ID NO: 4862906 - DNA, 25 bp, Homo sapien
ccccacattgataggcaggacttct

SEQ ID NO: 4862907 - DNA, 25 bp, Homo sapien
tcctgtagcacatagtcaatgcgtt

SEQ ID NO: 4862908 - DNA, 25 bp, Homo sapien
tttggtagatctctttgaggacgag

SEQ ID NO: 4862909 - DNA, 25 bp, Homo sapien
gataccctgggtttggtagatctct

SEQ ID NO: 4862910 - DNA, 25 bp, Homo sapien
tctctttgaggacgagcaatactgt

SEQ ID NO: 4862911 - DNA, 25 bp, Homo sapien
ctttgaggacgagcaatactgtatc

SEQ ID NO: 4862912 - DNA, 25 bp, Homo sapien
attaagcagccatagatgggtcatt

SEQ ID NO: 4862913 - DNA, 25 bp, Homo sapien
ttaagcagccatagatgggtcattt

SEQ ID NO: 4862914 - DNA, 25 bp, Homo sapien
gagcttgaggctccatagttcatta

SEQ ID NO: 4862915 - DNA, 25 bp, Homo sapien
agcttgaggctccatagttcattat

SEQ ID NO: 4862916 - DNA, 25 bp, Homo sapien
gcttgaggctccatagttcattata

SEQ ID NO: 4862917 - DNA, 25 bp, Homo sapien
gccacagtaactcttagataacaga

SEQ ID NO: 4862918 - DNA, 25 bp, Homo sapien
gataacagaaccattaaaactctga

SEQ ID NO: 4862919 - DNA, 25 bp, Homo sapien
aaatctcaggatgggtggttggtaa

SEQ ID NO: 4862920 - DNA, 25 bp, Homo sapien
cagagaatgccagagtcgaatacac

SEQ ID NO: 4862921 - DNA, 25 bp, Homo sapien
tccagaaagggataaagaccactgc

SEQ ID NO: 4862922 - DNA, 25 bp, Homo sapien
tataaacaataaaccacagctcgcc

SEQ ID NO: 4862923 - DNA, 25 bp, Homo sapien
taagtgatactagttctgcagctgg

SEQ ID NO: 4862924 - DNA, 25 bp, Homo sapien
gaatagctgtttcttggaccctaca

SEQ ID NO: 4862925 - DNA, 25 bp, Homo sapien
gtcttttatgtgtatgttcctatat

SEQ ID NO: 4862926 - DNA, 25 bp, Homo sapien
gatgccataggacctacagctccct

SEQ ID NO: 4862927 - DNA, 25 bp, Homo sapien
agaatggatgccataggacctacag

SEQ ID NO: 4862928 - DNA, 25 bp, Homo sapien
aggaacaattatgggatgtcatcag

SEQ ID NO: 4862929 - DNA, 25 bp, Homo sapien
catctatcttgaggagttacggttc

SEQ ID NO: 4862930 - DNA, 25 bp, Homo sapien
taaccggaccatgcacaagacaaga

SEQ ID NO: 4862931 - DNA, 25 bp, Homo sapien
tagccaggagttgtgtgccgtaatc

SEQ ID NO: 4862932 - DNA, 25 bp, Homo sapien
caaggtgcaagtgaggacataagcc

SEQ ID NO: 4862933 - DNA, 25 bp, Homo sapien
tatgctatgtgtatgtaataggatt

SEQ ID NO: 4862934 - DNA, 25 bp, Homo sapien
tgctatgtgtatgtaataggattta

SEQ ID NO: 4862935 - DNA, 25 bp, Homo sapien
tctatgctatgtgtatgtaatagga

SEQ ID NO: 4862936 - DNA, 25 bp, Homo sapien
cctctatgctatgtgtatgtaatag

SEQ ID NO: 4862937 - DNA, 25 bp, Homo sapien
tgcccggcgagaagcaactcttaaa

SEQ ID NO: 4862938 - DNA, 25 bp, Homo sapien
taatttagtacactctgaacaaagc

SEQ ID NO: 4862939 - DNA, 25 bp, Homo sapien
gtgttcagaaagcaacctgacaatg

SEQ ID NO: 4862940 - DNA, 25 bp, Homo sapien
tgaatagcaataagtggacctttgt

SEQ ID NO: 4862941 - DNA, 25 bp, Homo sapien
tcattgtcataggacttttgttcaa

SEQ ID NO: 4862942 - DNA, 25 bp, Homo sapien
caagttaaactgcatctacaggaaa

SEQ ID NO: 4862943 - DNA, 25 bp, Homo sapien
ttcaatttactctcttaaaaatcag

SEQ ID NO: 4862944 - DNA, 25 bp, Homo sapien
gatggtctgggttctgtactaagta

SEQ ID NO: 4862945 - DNA, 25 bp, Homo sapien
caatgacttacactataagtataca

SEQ ID NO: 4862946 - DNA, 25 bp, Homo sapien
acactataagtatacacaaaaaagg

SEQ ID NO: 4862947 - DNA, 25 bp, Homo sapien
gacttacactataagtatacacaaa

SEQ ID NO: 4862948 - DNA, 25 bp, Homo sapien
tcacaatgacttacactataagtat

SEQ ID NO: 4862949 - DNA, 25 bp, Homo sapien
gtttcttcgtgctgggaacctagga

SEQ ID NO: 4862950 - DNA, 25 bp, Homo sapien
cagggacttggttacgcaggctaca

SEQ ID NO: 4862951 - DNA, 25 bp, Homo sapien
cactgagttctgcattcctaaagga

SEQ ID NO: 4862952 - DNA, 25 bp, Homo sapien
gattcagccacggtgagcctgtgtg

SEQ ID NO: 4862953 - DNA, 25 bp, Homo sapien
gagactcctgcatgagataccagca

SEQ ID NO: 4862954 - DNA, 25 bp, Homo sapien
cccaaaatgtgggtaatccgtgtct

SEQ ID NO: 4862955 - DNA, 25 bp, Homo sapien
tagatcctgtgaaccattactttgc

SEQ ID NO: 4862956 - DNA, 25 bp, Homo sapien
tgagaattgcctgtccttcagtagg

SEQ ID NO: 4862957 - DNA, 25 bp, Homo sapien
aggaccctcagatgggacaggctat

SEQ ID NO: 4862958 - DNA, 25 bp, Homo sapien
tcatctatagaactggctgagttgg

SEQ ID NO: 4862959 - DNA, 25 bp, Homo sapien
taattctcaaaaatgatctggcctc

SEQ ID NO: 4862960 - DNA, 25 bp, Homo sapien
tatctaatcatgtaaaggaccctca

SEQ ID NO: 4862961 - DNA, 25 bp, Homo sapien
ccactgctgcgagggaagaatcaga

SEQ ID NO: 4862962 - DNA, 25 bp, Homo sapien
gaccgccactgctgcgagggaagaa

SEQ ID NO: 4862963 - DNA, 25 bp, Homo sapien
cgccactgctgcgagggaagaatca

SEQ ID NO: 4862964 - DNA, 25 bp, Homo sapien
ggctggaccgccactgctgcgaggg

SEQ ID NO: 4862965 - DNA, 25 bp, Homo sapien
atgagtatacatgcactgtgcctgt

SEQ ID NO: 4862966 - DNA, 25 bp, Homo sapien
gcatgagtatacatgcactgtgcct

SEQ ID NO: 4862967 - DNA, 25 bp, Homo sapien
catgagtatacatgcactgtgcctg

SEQ ID NO: 4862968 - DNA, 25 bp, Homo sapien
taaccatagttctgaagtctttggc

SEQ ID NO: 4862969 - DNA, 25 bp, Homo sapien
gtctttggccatgaatgttctttaa

SEQ ID NO: 4862970 - DNA, 25 bp, Homo sapien
taaaaagcggttttagtcatgctgg

SEQ ID NO: 4862971 - DNA, 25 bp, Homo sapien
tcacacctccatagcgtcaatgttg

SEQ ID NO: 4862972 - DNA, 25 bp, Homo sapien
ccagggtacatcctatatactacag

SEQ ID NO: 4862973 - DNA, 25 bp, Homo sapien
atctccttgcttttagacttagtgc

SEQ ID NO: 4862974 - DNA, 25 bp, Homo sapien
gttcttgaaacagtatccaacatga

SEQ ID NO: 4862975 - DNA, 25 bp, Homo sapien
gacttttctatggtaagccagggta

SEQ ID NO: 4862976 - DNA, 25 bp, Homo sapien
gatgcgagtataccaagatgtctgc

SEQ ID NO: 4862977 - DNA, 25 bp, Homo sapien
gatgcttgactcttatagatgcgag

SEQ ID NO: 4862978 - DNA, 25 bp, Homo sapien
ggaagcacttggagaaaactcccaa

SEQ ID NO: 4862979 - DNA, 25 bp, Homo sapien
gactgcttacaattgctggtacctg

SEQ ID NO: 4862980 - DNA, 25 bp, Homo sapien
cagttggtggtgtctggtttttgtt

SEQ ID NO: 4862981 - DNA, 25 bp, Homo sapien
agtgccattgcagcttgaaaaagaa

SEQ ID NO: 4862982 - DNA, 25 bp, Homo sapien
ctgccttattaaagcaaaaatggga

SEQ ID NO: 4862983 - DNA, 25 bp, Homo sapien
aaaatgggaaaccagttcatgcagg

SEQ ID NO: 4862984 - DNA, 25 bp, Homo sapien
tctttcctgccagtcggcatgtgcg

SEQ ID NO: 4862985 - DNA, 25 bp, Homo sapien
aatgcaaggttgcagggttttcctg

SEQ ID NO: 4862986 - DNA, 25 bp, Homo sapien
gcatgtgcgtcaacaaatgaagaga

SEQ ID NO: 4862987 - DNA, 25 bp, Homo sapien
gcagcataaggcctcctgatgtttt

SEQ ID NO: 4862988 - DNA, 25 bp, Homo sapien
acaaaacattagccatgtgtggcag

SEQ ID NO: 4862989 - DNA, 25 bp, Homo sapien
cattagccatgtgtggcagcacgtg

SEQ ID NO: 4862990 - DNA, 25 bp, Homo sapien
aaacattagccatgtgtggcagcac

SEQ ID NO: 4862991 - DNA, 25 bp, Homo sapien
aaaaagtcaatgaaaggctgaggcg

SEQ ID NO: 4862992 - DNA, 25 bp, Homo sapien
tgggtagatctcaagagaatctgcc

SEQ ID NO: 4862993 - DNA, 25 bp, Homo sapien
aaaggttctgtactatatcattcca

SEQ ID NO: 4862994 - DNA, 25 bp, Homo sapien
gaacaacctgttgatatactcagca

SEQ ID NO: 4862995 - DNA, 25 bp, Homo sapien
caatctcaaaaggttctgtactata

SEQ ID NO: 4862996 - DNA, 25 bp, Homo sapien
ctgtgcctagccactgactgacttg

SEQ ID NO: 4862997 - DNA, 25 bp, Homo sapien
agttcagctctctgttagcataaca

SEQ ID NO: 4862998 - DNA, 25 bp, Homo sapien
gagctctaacctaagtcttaaagga

SEQ ID NO: 4862999 - DNA, 25 bp, Homo sapien
gaaagcactcacatgttagagctct

SEQ ID NO: 4863000 - DNA, 25 bp, Homo sapien
tcactcagcctgttgcggatcttca

SEQ ID NO: 4863001 - DNA, 25 bp, Homo sapien
ccatagcttgctgggttgatctaga

SEQ ID NO: 4863002 - DNA, 25 bp, Homo sapien
gactgcacacttccaccatagcttg

SEQ ID NO: 4863003 - DNA, 25 bp, Homo sapien
tggtattcaccgtgcctgatctgca

SEQ ID NO: 4863004 - DNA, 25 bp, Homo sapien
tagtgccgttatcatggagaacagc

SEQ ID NO: 4863005 - DNA, 25 bp, Homo sapien
gaaactcatcggaaatggcggtacc

SEQ ID NO: 4863006 - DNA, 25 bp, Homo sapien
taatctgagcagtctaacgaggccc

SEQ ID NO: 4863007 - DNA, 25 bp, Homo sapien
tcagcattaacatgggcaggcaccc

SEQ ID NO: 4863008 - DNA, 25 bp, Homo sapien
gaaactccagacttgtagtctccat

SEQ ID NO: 4863009 - DNA, 25 bp, Homo sapien
gtcggcggcttgataaacagtttct

SEQ ID NO: 4863010 - DNA, 25 bp, Homo sapien
tcgattttgatttcgccaatcatca

SEQ ID NO: 4863011 - DNA, 25 bp, Homo sapien
agattcctgtacaatttcatcccag

SEQ ID NO: 4863012 - DNA, 25 bp, Homo sapien
ccgcagcgattgaggaaactgtgga

SEQ ID NO: 4863013 - DNA, 25 bp, Homo sapien
cattccacagggtcggcggaccggg

SEQ ID NO: 4863014 - DNA, 25 bp, Homo sapien
gctccgtctccgcagcgattgagga

SEQ ID NO: 4863015 - DNA, 25 bp, Homo sapien
tctccgcagcgattgaggaaactgt

SEQ ID NO: 4863016 - DNA, 25 bp, Homo sapien
ttaggaggcctgattgcgttgtgtt

SEQ ID NO: 4863017 - DNA, 25 bp, Homo sapien
ggaggcctgattgcgttgtgtttcc

SEQ ID NO: 4863018 - DNA, 25 bp, Homo sapien
aggcctgattgcgttgtgtttccac

SEQ ID NO: 4863019 - DNA, 25 bp, Homo sapien
aggaggcctgattgcgttgtgtttc

SEQ ID NO: 4863020 - DNA, 25 bp, Homo sapien
gcttataaactagggatgtgacgaa

SEQ ID NO: 4863021 - DNA, 25 bp, Homo sapien
gaacacaacgtagacttgatactgt

SEQ ID NO: 4863022 - DNA, 25 bp, Homo sapien
tataaactagggatgtgacgaatcc

SEQ ID NO: 4863023 - DNA, 25 bp, Homo sapien
aaattggagaacacaacgtagactt

SEQ ID NO: 4863024 - DNA, 25 bp, Homo sapien
agttgtgattttgccagctggttcc

SEQ ID NO: 4863025 - DNA, 25 bp, Homo sapien
gctctgtggtatcaccaagcaagtg

SEQ ID NO: 4863026 - DNA, 25 bp, Homo sapien
cccaaaatcagtctgtgaccagtca

SEQ ID NO: 4863027 - DNA, 25 bp, Homo sapien
taaaagctaactttgtgggtgctct

SEQ ID NO: 4863028 - DNA, 25 bp, Homo sapien
gcctaattgtcctaatgtaacctgt

SEQ ID NO: 4863029 - DNA, 25 bp, Homo sapien
tgtgctagatactagtagctgaggg

SEQ ID NO: 4863030 - DNA, 25 bp, Homo sapien
tcagtaagattgtgcctttggaatg

SEQ ID NO: 4863031 - DNA, 25 bp, Homo sapien
taaaggagaagtgactgtattcagt

SEQ ID NO: 4863032 - DNA, 25 bp, Homo sapien
tgaagaggctttatcccaagcaaaa

SEQ ID NO: 4863033 - DNA, 25 bp, Homo sapien
gagccaccgcctgttaaaatagcct

SEQ ID NO: 4863034 - DNA, 25 bp, Homo sapien
aaaacccgacgaccaagatctgtgc

SEQ ID NO: 4863035 - DNA, 25 bp, Homo sapien
agaacgtgctcagtgggatattggc

SEQ ID NO: 4863036 - DNA, 25 bp, Homo sapien
tgtttttgagatggattgttgccca

SEQ ID NO: 4863037 - DNA, 25 bp, Homo sapien
tctcatatcataaaattcacctgtt

SEQ ID NO: 4863038 - DNA, 25 bp, Homo sapien
gtttttgagatggattgttgcccag

SEQ ID NO: 4863039 - DNA, 25 bp, Homo sapien
attgaaatataattctcatatcata

SEQ ID NO: 4863040 - DNA, 25 bp, Homo sapien
ggtccttgttcactcttctgaaggg

SEQ ID NO: 4863041 - DNA, 25 bp, Homo sapien
tgtgctgcataaccaagaatctctc

SEQ ID NO: 4863042 - DNA, 25 bp, Homo sapien
tatagaaggccatctggctcaacca

SEQ ID NO: 4863043 - DNA, 25 bp, Homo sapien
gcacatttgtgataggatcagccat

SEQ ID NO: 4863044 - DNA, 25 bp, Homo sapien
tcaggttggcgatcttgtgtggtcc

SEQ ID NO: 4863045 - DNA, 25 bp, Homo sapien
caagtgatccccagcttgaggttca

SEQ ID NO: 4863046 - DNA, 25 bp, Homo sapien
taggttcagccaatactatcttctg

SEQ ID NO: 4863047 - DNA, 25 bp, Homo sapien
ccttggtggccttgtatggtttcaa

SEQ ID NO: 4863048 - DNA, 25 bp, Homo sapien
tacaggcaagtgagcacacgaaatc

SEQ ID NO: 4863049 - DNA, 25 bp, Homo sapien
taaatgaagtacaggcaagtgagca

SEQ ID NO: 4863050 - DNA, 25 bp, Homo sapien
tgagcacacgaaatcaaagcatgaa

SEQ ID NO: 4863051 - DNA, 25 bp, Homo sapien
gaatggcagggaattgtttgagtct

SEQ ID NO: 4863052 - DNA, 25 bp, Homo sapien
tatgaagctactttgcagcaaggct

SEQ ID NO: 4863053 - DNA, 25 bp, Homo sapien
taatcagtatcctaatgggtcagcc

SEQ ID NO: 4863054 - DNA, 25 bp, Homo sapien
cctccactcacaaatgggtatccat

SEQ ID NO: 4863055 - DNA, 25 bp, Homo sapien
ggtgcagttagaaactttagcccca

SEQ ID NO: 4863056 - DNA, 25 bp, Homo sapien
gcaacaaagcgaagacagttgaggt

SEQ ID NO: 4863057 - DNA, 25 bp, Homo sapien
tgggtgtggtcagcaacaaagcgaa

SEQ ID NO: 4863058 - DNA, 25 bp, Homo sapien
ttccttcaagtggtaataccatgtc

SEQ ID NO: 4863059 - DNA, 25 bp, Homo sapien
taccatgtctgttgttgctgggtgt

SEQ ID NO: 4863060 - DNA, 25 bp, Homo sapien
ggccctcctcagtgccggccgccat

SEQ ID NO: 4863061 - DNA, 25 bp, Homo sapien
ccggcccggccgtggccctcctcag

SEQ ID NO: 4863062 - DNA, 25 bp, Homo sapien
ttcctcttcccgcagcacgcccggc

SEQ ID NO: 4863063 - DNA, 25 bp, Homo sapien
agccttcctcttcccgcagcacgcc

SEQ ID NO: 4863064 - DNA, 25 bp, Homo sapien
aggccgggctgccagccgcaggctc

SEQ ID NO: 4863065 - DNA, 25 bp, Homo sapien
caggctcctctctggcagcagcggc

SEQ ID NO: 4863066 - DNA, 25 bp, Homo sapien
ggctgccagccgcaggctcctctct

SEQ ID NO: 4863067 - DNA, 25 bp, Homo sapien
gccagccgcaggctcctctctggca

SEQ ID NO: 4863068 - DNA, 25 bp, Homo sapien
cggcggcggccagcacggaggcgga

SEQ ID NO: 4863069 - DNA, 25 bp, Homo sapien
ggcggcggccagcacggaggcggag

SEQ ID NO: 4863070 - DNA, 25 bp, Homo sapien
ggcggcggcggccagcacggaggcg

SEQ ID NO: 4863071 - DNA, 25 bp, Homo sapien
gcggcggcggcggccagcacggagg

SEQ ID NO: 4863072 - DNA, 25 bp, Homo sapien
agggactgcatttcccggcaggcgc

SEQ ID NO: 4863073 - DNA, 25 bp, Homo sapien
cagacgctagctgccgcgggcgttc

SEQ ID NO: 4863074 - DNA, 25 bp, Homo sapien
ggtctccctagtcgtccagacgcta

SEQ ID NO: 4863075 - DNA, 25 bp, Homo sapien
tgtgtgtcactctcccacgtacagt

SEQ ID NO: 4863076 - DNA, 25 bp, Homo sapien
ccttccctgacagccgtaggacggg

SEQ ID NO: 4863077 - DNA, 25 bp, Homo sapien
cgccctcgcgcggtgacccaccggg

SEQ ID NO: 4863078 - DNA, 25 bp, Homo sapien
gaccgtgcgagggtcgcttctaacc

SEQ ID NO: 4863079 - DNA, 25 bp, Homo sapien
ccctgacagccgtaggacgggagac

SEQ ID NO: 4863080 - DNA, 25 bp, Homo sapien
gcggtcttgcatcgcccccggcttt

SEQ ID NO: 4863081 - DNA, 25 bp, Homo sapien
ccggctttccaaatgcagaccctac

SEQ ID NO: 4863082 - DNA, 25 bp, Homo sapien
ctgagagggagacgacgccaaggcg

SEQ ID NO: 4863083 - DNA, 25 bp, Homo sapien
gccaaggcggtcttgcatcgccccc

SEQ ID NO: 4863084 - DNA, 25 bp, Homo sapien
gggaccatccgacagctcagccggg

SEQ ID NO: 4863085 - DNA, 25 bp, Homo sapien
gcctccggcacgtgacggtcacgga

SEQ ID NO: 4863086 - DNA, 25 bp, Homo sapien
gggtctcctactgcttgcaaccggg

SEQ ID NO: 4863087 - DNA, 25 bp, Homo sapien
ggcgctgacgtcgtcctcccggtta

SEQ ID NO: 4863088 - DNA, 25 bp, Homo sapien
cagaacagagtatcggtttcctcat

SEQ ID NO: 4863089 - DNA, 25 bp, Homo sapien
cctttttacgttcacgtctctgtgc

SEQ ID NO: 4863090 - DNA, 25 bp, Homo sapien
ttccatacgtttcctaggatgcggg

SEQ ID NO: 4863091 - DNA, 25 bp, Homo sapien
tgtgctgtaaccttccaaatcctta

SEQ ID NO: 4863092 - DNA, 25 bp, Homo sapien
tataacgtctacagagtatgacgtc

SEQ ID NO: 4863093 - DNA, 25 bp, Homo sapien
ccaaagacatccagcactataacgt

SEQ ID NO: 4863094 - DNA, 25 bp, Homo sapien
tgtaatagtaccaaagacatccagc

SEQ ID NO: 4863095 - DNA, 25 bp, Homo sapien
tccagcactataacgtctacagagt

SEQ ID NO: 4863096 - DNA, 25 bp, Homo sapien
cataaaccagatgaacgattccatg

SEQ ID NO: 4863097 - DNA, 25 bp, Homo sapien
gaacgattccatgcccagtatttga

SEQ ID NO: 4863098 - DNA, 25 bp, Homo sapien
ccagatgaacgattccatgcccagt

SEQ ID NO: 4863099 - DNA, 25 bp, Homo sapien
gattccatgcccagtatttgaaaga

SEQ ID NO: 4863100 - DNA, 25 bp, Homo sapien
ggaatactgtgaaatcttcatatgg

SEQ ID NO: 4863101 - DNA, 25 bp, Homo sapien
agaggatttgatggtgtcgcagaaa

SEQ ID NO: 4863102 - DNA, 25 bp, Homo sapien
tggtgtcgcagaaagggcgggaatc

SEQ ID NO: 4863103 - DNA, 25 bp, Homo sapien
cgggaatcggaaggagcgcattcct

SEQ ID NO: 4863104 - DNA, 25 bp, Homo sapien
tctgatagtcgccatggtaaccatt

SEQ ID NO: 4863105 - DNA, 25 bp, Homo sapien
gaggaaacccgtgattgaagactgg

SEQ ID NO: 4863106 - DNA, 25 bp, Homo sapien
gcccgaaggtgacgtttttctgcca

SEQ ID NO: 4863107 - DNA, 25 bp, Homo sapien
ccaggaagccgcaaagtcgcgttta

SEQ ID NO: 4863108 - DNA, 25 bp, Homo sapien
aaccaataagctctcaagttctggg

SEQ ID NO: 4863109 - DNA, 25 bp, Homo sapien
gacatcgccaaccaataagctctca

SEQ ID NO: 4863110 - DNA, 25 bp, Homo sapien
tcactctgagtgacgacatcgccaa

SEQ ID NO: 4863111 - DNA, 25 bp, Homo sapien
tcgcccctgacgtcactctgagtga

SEQ ID NO: 4863112 - DNA, 25 bp, Homo sapien
ctcctcggccgggctccgcggaacg

SEQ ID NO: 4863113 - DNA, 25 bp, Homo sapien
cccaagctagaagggcccgaagcca

SEQ ID NO: 4863114 - DNA, 25 bp, Homo sapien
gctagaagggcccgaagccaagtct

SEQ ID NO: 4863115 - DNA, 25 bp, Homo sapien
gccgcctaggtcctcccagctcctt

SEQ ID NO: 4863116 - DNA, 25 bp, Homo sapien
ggaggagaggccgagcttcagagtt

SEQ ID NO: 4863117 - DNA, 25 bp, Homo sapien
agcttcagagttcgcgctgtgctgg

SEQ ID NO: 4863118 - DNA, 25 bp, Homo sapien
gcgcggtgggaactggaagctgtca

SEQ ID NO: 4863119 - DNA, 25 bp, Homo sapien
agctgtcagaagcctggatcatgct

SEQ ID NO: 4863120 - DNA, 25 bp, Homo sapien
gaacgacgaccctcgtggatgatcg

SEQ ID NO: 4863121 - DNA, 25 bp, Homo sapien
gtttcgcgggcaggagacgacacct

SEQ ID NO: 4863122 - DNA, 25 bp, Homo sapien
tatgctttggttttctggtgcggag

SEQ ID NO: 4863123 - DNA, 25 bp, Homo sapien
gacgacacctgaggcggcggttaat

SEQ ID NO: 4863124 - DNA, 25 bp, Homo sapien
cttttctgctaagggccgcgaggaa

SEQ ID NO: 4863125 - DNA, 25 bp, Homo sapien
ttgctctcttgtggttgggaaaaga

SEQ ID NO: 4863126 - DNA, 25 bp, Homo sapien
cgaggaacggcagaagagctgacat

SEQ ID NO: 4863127 - DNA, 25 bp, Homo sapien
caggggctcgaaacctgtggaccca

SEQ ID NO: 4863128 - DNA, 25 bp, Homo sapien
cctactaatcgctcaagtggaggta

SEQ ID NO: 4863129 - DNA, 25 bp, Homo sapien
tgctactgattctccagagcccaaa

SEQ ID NO: 4863130 - DNA, 25 bp, Homo sapien
ccctgaatattggacgtacccacta

SEQ ID NO: 4863131 - DNA, 25 bp, Homo sapien
cagtggatgaaggtagacatgcaac

SEQ ID NO: 4863132 - DNA, 25 bp, Homo sapien
ggtacaaaacctccttcaagctcat

SEQ ID NO: 4863133 - DNA, 25 bp, Homo sapien
tttgagattccaacaaacggtaatg

SEQ ID NO: 4863134 - DNA, 25 bp, Homo sapien
caacaatcagatattttcgtagctc

SEQ ID NO: 4863135 - DNA, 25 bp, Homo sapien
ctggacttgagaatggtactttgag

SEQ ID NO: 4863136 - DNA, 25 bp, Homo sapien
gccagaactgaattataactgtaga

SEQ ID NO: 4863137 - DNA, 25 bp, Homo sapien
cttgttcgagcaatagccagaactg

SEQ ID NO: 4863138 - DNA, 25 bp, Homo sapien
tttgtctcaagtagttaacataggg

SEQ ID NO: 4863139 - DNA, 25 bp, Homo sapien
tgaattataactgtagaaggccata

SEQ ID NO: 4863140 - DNA, 25 bp, Homo sapien
gcaggtaggatggacaaaatggcta

SEQ ID NO: 4863141 - DNA, 25 bp, Homo sapien
gaaatgcacatgatggggaataaga

SEQ ID NO: 4863142 - DNA, 25 bp, Homo sapien
ataagaagagcaggtaggatggaca

SEQ ID NO: 4863143 - DNA, 25 bp, Homo sapien
taggatggacaaaatggctagggaa

SEQ ID NO: 4863144 - DNA, 25 bp, Homo sapien
tattgcctggctgactaggatccga

SEQ ID NO: 4863145 - DNA, 25 bp, Homo sapien
tgagggcttgtcacctgtggatgtt

SEQ ID NO: 4863146 - DNA, 25 bp, Homo sapien
ctccagctgaggtttgccaggaact

SEQ ID NO: 4863147 - DNA, 25 bp, Homo sapien
ttcctgggtgaagtactgtattgcc

SEQ ID NO: 4863148 - DNA, 25 bp, Homo sapien
agcctccaaaccattctggcagcaa

SEQ ID NO: 4863149 - DNA, 25 bp, Homo sapien
ccaaagtaagtagaatccattgtaa

SEQ ID NO: 4863150 - DNA, 25 bp, Homo sapien
tctcgtctggtcaggacctgtccat

SEQ ID NO: 4863151 - DNA, 25 bp, Homo sapien
ggcagcaactttggcgtcaatccaa

SEQ ID NO: 4863152 - DNA, 25 bp, Homo sapien
taaagttgtacagtaagtcggttgc

SEQ ID NO: 4863153 - DNA, 25 bp, Homo sapien
tcggttgcagacaagaaactggttc

SEQ ID NO: 4863154 - DNA, 25 bp, Homo sapien
tagagggtccatactttaatagcat

SEQ ID NO: 4863155 - DNA, 25 bp, Homo sapien
aacagttgaaacatgaagcccctca

SEQ ID NO: 4863156 - DNA, 25 bp, Homo sapien
ggaaccaggcggaagaaatcaacac

SEQ ID NO: 4863157 - DNA, 25 bp, Homo sapien
tggaaccaggcggaagaaatcaaca

SEQ ID NO: 4863158 - DNA, 25 bp, Homo sapien
atggaaccaggcggaagaaatcaac

SEQ ID NO: 4863159 - DNA, 25 bp, Homo sapien
ttttggattcactttcaaaagttga

SEQ ID NO: 4863160 - DNA, 25 bp, Homo sapien
ctttcaaaagttgatggcaacatct

SEQ ID NO: 4863161 - DNA, 25 bp, Homo sapien
cactttcaaaagttgatggcaacat

SEQ ID NO: 4863162 - DNA, 25 bp, Homo sapien
gattcactttcaaaagttgatggca

SEQ ID NO: 4863163 - DNA, 25 bp, Homo sapien
taattacaggagaaattgggatggg

SEQ ID NO: 4863164 - DNA, 25 bp, Homo sapien
tttaatcattacaaatatagcacac

SEQ ID NO: 4863165 - DNA, 25 bp, Homo sapien
gagaagtagtactttctgcccaagt

SEQ ID NO: 4863166 - DNA, 25 bp, Homo sapien
gcacactaatgcaagatattaatta

SEQ ID NO: 4863167 - DNA, 25 bp, Homo sapien
catgaagagtggaccctaaagtatg

SEQ ID NO: 4863168 - DNA, 25 bp, Homo sapien
aatgcttcaacatgaagagtggacc

SEQ ID NO: 4863169 - DNA, 25 bp, Homo sapien
tcaacatgaagagtggaccctaaag

SEQ ID NO: 4863170 - DNA, 25 bp, Homo sapien
agaaatgcttcaacatgaagagtgg

SEQ ID NO: 4863171 - DNA, 25 bp, Homo sapien
gcagtgacactatcataggtcattg

SEQ ID NO: 4863172 - DNA, 25 bp, Homo sapien
ccctgtcacccagtgcctctggagt

SEQ ID NO: 4863173 - DNA, 25 bp, Homo sapien
gtgacactatcataggtcattgcag

SEQ ID NO: 4863174 - DNA, 25 bp, Homo sapien
gacactatcataggtcattgcagcc

SEQ ID NO: 4863175 - DNA, 25 bp, Homo sapien
tgactaaatcatacctactgttcca

SEQ ID NO: 4863176 - DNA, 25 bp, Homo sapien
tgaactgtctgttgggctgactaaa

SEQ ID NO: 4863177 - DNA, 25 bp, Homo sapien
ctgtctgttgggctgactaaatcat

SEQ ID NO: 4863178 - DNA, 25 bp, Homo sapien
tgctgaactgtctgttgggctgact

SEQ ID NO: 4863179 - DNA, 25 bp, Homo sapien
tgtctagtagagtggcacagaacgg

SEQ ID NO: 4863180 - DNA, 25 bp, Homo sapien
caacgctgtctagtagagtggcaca

SEQ ID NO: 4863181 - DNA, 25 bp, Homo sapien
tgctgtcaacgctgtctagtagagt

SEQ ID NO: 4863182 - DNA, 25 bp, Homo sapien
catatgctgtcaacgctgtctagta

SEQ ID NO: 4863183 - DNA, 25 bp, Homo sapien
attttgctagttccaactttacagc

SEQ ID NO: 4863184 - DNA, 25 bp, Homo sapien
tcacgtaggatgagagctgtgtaga

SEQ ID NO: 4863185 - DNA, 25 bp, Homo sapien
cttcacgtaggatgagagctgtgta

SEQ ID NO: 4863186 - DNA, 25 bp, Homo sapien
acgtaggatgagagctgtgtagagg

SEQ ID NO: 4863187 - DNA, 25 bp, Homo sapien
tgcttcacgtaggatgagagctgtg

SEQ ID NO: 4863188 - DNA, 25 bp, Homo sapien
tcggcattacataaaagatggacac

SEQ ID NO: 4863189 - DNA, 25 bp, Homo sapien
tttctgcaaactactatcaatgttt

SEQ ID NO: 4863190 - DNA, 25 bp, Homo sapien
gcccagccccgaagttgttcggcat

SEQ ID NO: 4863191 - DNA, 25 bp, Homo sapien
gcgtttttcatagaacgcccagccc

SEQ ID NO: 4863192 - DNA, 25 bp, Homo sapien
cagctgagggcgatctaagtgttcc

SEQ ID NO: 4863193 - DNA, 25 bp, Homo sapien
aagcgaactatctcctttgtgctgg

SEQ ID NO: 4863194 - DNA, 25 bp, Homo sapien
agctggtcctcaaatagtttggaga

SEQ ID NO: 4863195 - DNA, 25 bp, Homo sapien
tcatcatctgcttttatagacttca

SEQ ID NO: 4863196 - DNA, 25 bp, Homo sapien
tagttctgatacactcaatgctgtc

SEQ ID NO: 4863197 - DNA, 25 bp, Homo sapien
gagacccagtgatctcatccctcgg

SEQ ID NO: 4863198 - DNA, 25 bp, Homo sapien
gatacactcaatgctgtcacccctt

SEQ ID NO: 4863199 - DNA, 25 bp, Homo sapien
gccctacaggcagcctgtagttctg

SEQ ID NO: 4863200 - DNA, 25 bp, Homo sapien
tgtaggagagagttctagggaagag

SEQ ID NO: 4863201 - DNA, 25 bp, Homo sapien
atcacataaggaggtctgcatattg

SEQ ID NO: 4863202 - DNA, 25 bp, Homo sapien
cataaggaggtctgcatattgtagg

SEQ ID NO: 4863203 - DNA, 25 bp, Homo sapien
cacataaggaggtctgcatattgta

SEQ ID NO: 4863204 - DNA, 25 bp, Homo sapien
cgggaggggaacaacacgtgagaat

SEQ ID NO: 4863205 - DNA, 25 bp, Homo sapien
tagaaggtgcgggacaggagcaaaa

SEQ ID NO: 4863206 - DNA, 25 bp, Homo sapien
tctccttcaggtggaggtcctgcca

SEQ ID NO: 4863207 - DNA, 25 bp, Homo sapien
tccccactgagtggtatctcaatcg

SEQ ID NO: 4863208 - DNA, 25 bp, Homo sapien
tgggcttcacatctatcaggtagaa

SEQ ID NO: 4863209 - DNA, 25 bp, Homo sapien
ccttcagttgaggtgcaagatccac

SEQ ID NO: 4863210 - DNA, 25 bp, Homo sapien
gatccaccatgttctctttagattc

SEQ ID NO: 4863211 - DNA, 25 bp, Homo sapien
ggtaattccacaagaatatcagtct

SEQ ID NO: 4863212 - DNA, 25 bp, Homo sapien
gattcagtgaaagtaggtaattcca

SEQ ID NO: 4863213 - DNA, 25 bp, Homo sapien
aacatcagaactgagagttgggtta

SEQ ID NO: 4863214 - DNA, 25 bp, Homo sapien
ttaaacatcagaactgagagttggg

SEQ ID NO: 4863215 - DNA, 25 bp, Homo sapien
cttaaacatcagaactgagagttgg

SEQ ID NO: 4863216 - DNA, 25 bp, Homo sapien
taaacatcagaactgagagttgggt

SEQ ID NO: 4863217 - DNA, 25 bp, Homo sapien
aactggtggcggctgtataaagtct

SEQ ID NO: 4863218 - DNA, 25 bp, Homo sapien
atggtgttatgggtgatgatgtaac

SEQ ID NO: 4863219 - DNA, 25 bp, Homo sapien
tgttatgggtgatgatgtaactggt

SEQ ID NO: 4863220 - DNA, 25 bp, Homo sapien
atgatgtaactggtggcggctgtat

SEQ ID NO: 4863221 - DNA, 25 bp, Homo sapien
tgctcttgccccaaatcccttcacc

SEQ ID NO: 4863222 - DNA, 25 bp, Homo sapien
agccacttcccacttcaactctccc

SEQ ID NO: 4863223 - DNA, 25 bp, Homo sapien
ccactgtttactctcttcatgccct

SEQ ID NO: 4863224 - DNA, 25 bp, Homo sapien
acttcccacttcaactctcccacaa

SEQ ID NO: 4863225 - DNA, 25 bp, Homo sapien
ttgctgttctgggccgtcatttgtg

SEQ ID NO: 4863226 - DNA, 25 bp, Homo sapien
ttatgctccttttgaactagccttg

SEQ ID NO: 4863227 - DNA, 25 bp, Homo sapien
ccgtcatttgtgatttggcctggag

SEQ ID NO: 4863228 - DNA, 25 bp, Homo sapien
gctccttttgaactagccttgctgt

SEQ ID NO: 4863229 - DNA, 25 bp, Homo sapien
cagacagtcttatctgggaggtcct

SEQ ID NO: 4863230 - DNA, 25 bp, Homo sapien
aaggactgccccacgggctaaacag

SEQ ID NO: 4863231 - DNA, 25 bp, Homo sapien
taaacagctgatccgctctctgaag

SEQ ID NO: 4863232 - DNA, 25 bp, Homo sapien
tggaatggttaccaggcctcaaagg

SEQ ID NO: 4863233 - DNA, 25 bp, Homo sapien
tctctgaagggacgtacacatgaaa

SEQ ID NO: 4863234 - DNA, 25 bp, Homo sapien
gacaggtatctaaggtgccaagctg

SEQ ID NO: 4863235 - DNA, 25 bp, Homo sapien
ttccaagccataggagacaggtatc

SEQ ID NO: 4863236 - DNA, 25 bp, Homo sapien
ttccaagttcttactcagaattcca

SEQ ID NO: 4863237 - DNA, 25 bp, Homo sapien
caggtccctggcttcgtttcttgtt

SEQ ID NO: 4863238 - DNA, 25 bp, Homo sapien
tcacctgaggctagttttgcattca

SEQ ID NO: 4863239 - DNA, 25 bp, Homo sapien
tgaaacccagacatgtgtctgcccc

SEQ ID NO: 4863240 - DNA, 25 bp, Homo sapien
cctctatgtgggcatggttttgcca

SEQ ID NO: 4863241 - DNA, 25 bp, Homo sapien
cagtgattaagaggaaagcaagggc

SEQ ID NO: 4863242 - DNA, 25 bp, Homo sapien
gaaccccatccatgcagtagaggcg

SEQ ID NO: 4863243 - DNA, 25 bp, Homo sapien
tgctcccggcgcaggttccttgtaa

SEQ ID NO: 4863244 - DNA, 25 bp, Homo sapien
gcacctacctaggaatagccacggg

SEQ ID NO: 4863245 - DNA, 25 bp, Homo sapien
caatggcggactcaaacgccgctga

SEQ ID NO: 4863246 - DNA, 25 bp, Homo sapien
caggtgccttgtcctcagggctaca

SEQ ID NO: 4863247 - DNA, 25 bp, Homo sapien
tctgccccagataggtggtgccagt

SEQ ID NO: 4863248 - DNA, 25 bp, Homo sapien
tcgtgcctcgattgaaggtgacctc

SEQ ID NO: 4863249 - DNA, 25 bp, Homo sapien
cctccaagggcaacctgcgggagta

SEQ ID NO: 4863250 - DNA, 25 bp, Homo sapien
ttctttgaggtgaagccaaacctgc

SEQ ID NO: 4863251 - DNA, 25 bp, Homo sapien
gaaggtgtggaacctgaaggctccc

SEQ ID NO: 4863252 - DNA, 25 bp, Homo sapien
gcaggtcccttgtatgtcatcgtgg

SEQ ID NO: 4863253 - DNA, 25 bp, Homo sapien
tccccaagggctgcttagaagtgca

SEQ ID NO: 4863254 - DNA, 25 bp, Homo sapien
tccccacgggaggaaatggtacaga

SEQ ID NO: 4863255 - DNA, 25 bp, Homo sapien
tagtgtagcccgtgaatttcctgca

SEQ ID NO: 4863256 - DNA, 25 bp, Homo sapien
gagtctgtttcaagctagtgtagcc

SEQ ID NO: 4863257 - DNA, 25 bp, Homo sapien
gagttgcttgctaattcctaggaga

SEQ ID NO: 4863258 - DNA, 25 bp, Homo sapien
ggaaaattataacaggtacgtctgc

SEQ ID NO: 4863259 - DNA, 25 bp, Homo sapien
cttgctaattcctaggagagacttg

SEQ ID NO: 4863260 - DNA, 25 bp, Homo sapien
ggtacgtctgcgctgagttgcttgc

SEQ ID NO: 4863261 - DNA, 25 bp, Homo sapien
ctgttggcttgttggaagtacaagc

SEQ ID NO: 4863262 - DNA, 25 bp, Homo sapien
gaagagaaggtgtcaggtgactgct

SEQ ID NO: 4863263 - DNA, 25 bp, Homo sapien
cagctcttttgcctcgtgttcttaa

SEQ ID NO: 4863264 - DNA, 25 bp, Homo sapien
tgtaagctgtaatcaacggtgaggg

SEQ ID NO: 4863265 - DNA, 25 bp, Homo sapien
tcatcaggggtcatcagctgtaagc

SEQ ID NO: 4863266 - DNA, 25 bp, Homo sapien
cccatggcaacgcacggggggacct

SEQ ID NO: 4863267 - DNA, 25 bp, Homo sapien
tattgccggccctctggcaaacaca

SEQ ID NO: 4863268 - DNA, 25 bp, Homo sapien
cccctttgttgtgagctttattgcc

SEQ ID NO: 4863269 - DNA, 25 bp, Homo sapien
aggccattcagtctgccattgtccc

SEQ ID NO: 4863270 - DNA, 25 bp, Homo sapien
actttaaggtcagagctcagtggag

SEQ ID NO: 4863271 - DNA, 25 bp, Homo sapien
acctgaccgaactttaaggtcagag

SEQ ID NO: 4863272 - DNA, 25 bp, Homo sapien
ggagggcgatacattcttttcctta

SEQ ID NO: 4863273 - DNA, 25 bp, Homo sapien
gaactttaaggtcagagctcagtgg

SEQ ID NO: 4863274 - DNA, 25 bp, Homo sapien
tcatcagcaagtttagggagcggca

SEQ ID NO: 4863275 - DNA, 25 bp, Homo sapien
ggagcggcaacttttccctgcccag

SEQ ID NO: 4863276 - DNA, 25 bp, Homo sapien
gaagcctctactaattcatcagcaa

SEQ ID NO: 4863277 - DNA, 25 bp, Homo sapien
tcaagcacccatgtcgggcttgggg

SEQ ID NO: 4863278 - DNA, 25 bp, Homo sapien
cattatgtaacgaccaaatcatggt

SEQ ID NO: 4863279 - DNA, 25 bp, Homo sapien
tatgtataatcgtcgggtacggtat

SEQ ID NO: 4863280 - DNA, 25 bp, Homo sapien
taaaatttattcacgctgtgtagcc

SEQ ID NO: 4863281 - DNA, 25 bp, Homo sapien
tatgatgttttgatccacgcacaca

SEQ ID NO: 4863282 - DNA, 25 bp, Homo sapien
ttgcaggcaggcaatcccttctccc

SEQ ID NO: 4863283 - DNA, 25 bp, Homo sapien
ggctctttcaccaacttgcaggcag

SEQ ID NO: 4863284 - DNA, 25 bp, Homo sapien
ctgggctcctgaacggggcggccca

SEQ ID NO: 4863285 - DNA, 25 bp, Homo sapien
ctgggcctggctctttcaccaactt

SEQ ID NO: 4863286 - DNA, 25 bp, Homo sapien
cctgttgaccggggaagtccagctg

SEQ ID NO: 4863287 - DNA, 25 bp, Homo sapien
tgttgaccggggaagtccagctgct

SEQ ID NO: 4863288 - DNA, 25 bp, Homo sapien
ccctgttgaccggggaagtccagct

SEQ ID NO: 4863289 - DNA, 25 bp, Homo sapien
ctgttgaccggggaagtccagctgc

SEQ ID NO: 4863290 - DNA, 25 bp, Homo sapien
tggccctattttcacaatgcctcgt

SEQ ID NO: 4863291 - DNA, 25 bp, Homo sapien
gccctattttcacaatgcctcgttc

SEQ ID NO: 4863292 - DNA, 25 bp, Homo sapien
tttcacaatgcctcgttcctccggg

SEQ ID NO: 4863293 - DNA, 25 bp, Homo sapien
tattttcacaatgcctcgttcctcc

SEQ ID NO: 4863294 - DNA, 25 bp, Homo sapien
ctggggagtcattatccgggagggc

SEQ ID NO: 4863295 - DNA, 25 bp, Homo sapien
ggggagtcattatccgggagggcga

SEQ ID NO: 4863296 - DNA, 25 bp, Homo sapien
tcctggggagtcattatccgggagg

SEQ ID NO: 4863297 - DNA, 25 bp, Homo sapien
gggagtcattatccgggagggcgag

SEQ ID NO: 4863298 - DNA, 25 bp, Homo sapien
tggcttgtgtctgggcggtgatgaa

SEQ ID NO: 4863299 - DNA, 25 bp, Homo sapien
tgtgtctgggcggtgatgaatggcc

SEQ ID NO: 4863300 - DNA, 25 bp, Homo sapien
cttgtgtctgggcggtgatgaatgg

SEQ ID NO: 4863301 - DNA, 25 bp, Homo sapien
gatggcttgtgtctgggcggtgatg

SEQ ID NO: 4863302 - DNA, 25 bp, Homo sapien
agacagcatcagggattctttggga

SEQ ID NO: 4863303 - DNA, 25 bp, Homo sapien
gacagcatcagggattctttgggag

SEQ ID NO: 4863304 - DNA, 25 bp, Homo sapien
agtcgggtcagcaggaactggagag

SEQ ID NO: 4863305 - DNA, 25 bp, Homo sapien
ctggagtcgggtcagcaggaactgg

SEQ ID NO: 4863306 - DNA, 25 bp, Homo sapien
aagccactccgaggctgtgttcttg

SEQ ID NO: 4863307 - DNA, 25 bp, Homo sapien
accaagctggggcaagcgcagcaaa

SEQ ID NO: 4863308 - DNA, 25 bp, Homo sapien
tctgcattgctacaccattagcttc

SEQ ID NO: 4863309 - DNA, 25 bp, Homo sapien
tgtgttcttggctccggcttctgca

SEQ ID NO: 4863310 - DNA, 25 bp, Homo sapien
tcattcaacctggatggtaagagga

SEQ ID NO: 4863311 - DNA, 25 bp, Homo sapien
ccctgccagaaggcgaatggaattc

SEQ ID NO: 4863312 - DNA, 25 bp, Homo sapien
gccagaaggcgaatggaattccatg

SEQ ID NO: 4863313 - DNA, 25 bp, Homo sapien
cattcaacctggatggtaagaggag

SEQ ID NO: 4863314 - DNA, 25 bp, Homo sapien
tctaactgcagaactgggatgtgga

SEQ ID NO: 4863315 - DNA, 25 bp, Homo sapien
cctgaacaaggtaaggtgctggctg

SEQ ID NO: 4863316 - DNA, 25 bp, Homo sapien
cccgaccttgcctgaacaaggtaag

SEQ ID NO: 4863317 - DNA, 25 bp, Homo sapien
tggagatgtggagccttgtcaccaa

SEQ ID NO: 4863318 - DNA, 25 bp, Homo sapien
ggagctgagagagggcggtctgcag

SEQ ID NO: 4863319 - DNA, 25 bp, Homo sapien
atttgaagtgcattgaccagggagc

SEQ ID NO: 4863320 - DNA, 25 bp, Homo sapien
gagagggcggtctgcagccagccca

SEQ ID NO: 4863321 - DNA, 25 bp, Homo sapien
gaatttgaagtgcattgaccaggga

SEQ ID NO: 4863322 - DNA, 25 bp, Homo sapien
tattcgccgccgctggtgggtggcg

SEQ ID NO: 4863323 - DNA, 25 bp, Homo sapien
cggcggtccgggtgctttctggatt

SEQ ID NO: 4863324 - DNA, 25 bp, Homo sapien
caagttattcgccgccgctggtggg

SEQ ID NO: 4863325 - DNA, 25 bp, Homo sapien
tctggattgcgcagtaaagaggcat

SEQ ID NO: 4863326 - DNA, 25 bp, Homo sapien
ttatgacttggacggtctctgaaag

SEQ ID NO: 4863327 - DNA, 25 bp, Homo sapien
tatgacttggacggtctctgaaagg

SEQ ID NO: 4863328 - DNA, 25 bp, Homo sapien
ccacggtcgttaagccgaggtgtgg

SEQ ID NO: 4863329 - DNA, 25 bp, Homo sapien
cccacggtcgttaagccgaggtgtg

SEQ ID NO: 4863330 - DNA, 25 bp, Homo sapien
cgctgcttgaaaagccgcggaaccc

SEQ ID NO: 4863331 - DNA, 25 bp, Homo sapien
caaaccgctgctatgtctagggcct

SEQ ID NO: 4863332 - DNA, 25 bp, Homo sapien
acggtacccgtgctgcagtcgggca

SEQ ID NO: 4863333 - DNA, 25 bp, Homo sapien
aacgccaaaggagaccaggctgtag

SEQ ID NO: 4863334 - DNA, 25 bp, Homo sapien
acctcaaggctgcggcgtctcttca

SEQ ID NO: 4863335 - DNA, 25 bp, Homo sapien
caggtacaacctcaaggctgcggcg

SEQ ID NO: 4863336 - DNA, 25 bp, Homo sapien
gtacaacctcaaggctgcggcgtct

SEQ ID NO: 4863337 - DNA, 25 bp, Homo sapien
caacctcaaggctgcggcgtctctt

SEQ ID NO: 4863338 - DNA, 25 bp, Homo sapien
ctctgttcagctgccatcagctctt

SEQ ID NO: 4863339 - DNA, 25 bp, Homo sapien
tctctgttcagctgccatcagctct

SEQ ID NO: 4863340 - DNA, 25 bp, Homo sapien
tgttcagctgccatcagctctttcc

SEQ ID NO: 4863341 - DNA, 25 bp, Homo sapien
cttctctgttcagctgccatcagct

SEQ ID NO: 4863342 - DNA, 25 bp, Homo sapien
tcattcctggtaggcacagctgagc

SEQ ID NO: 4863343 - DNA, 25 bp, Homo sapien
gggtgatcattcctggtaggcacag

SEQ ID NO: 4863344 - DNA, 25 bp, Homo sapien
aattgttaattctgcagtatcgacc

SEQ ID NO: 4863345 - DNA, 25 bp, Homo sapien
tctgcagtatcgacccagggtagtg

SEQ ID NO: 4863346 - DNA, 25 bp, Homo sapien
cttgccccatgtcaatggtgcttac

SEQ ID NO: 4863347 - DNA, 25 bp, Homo sapien
cacatcctggggactcttgaagcct

SEQ ID NO: 4863348 - DNA, 25 bp, Homo sapien
cctggggactcttgaagcctgggct

SEQ ID NO: 4863349 - DNA, 25 bp, Homo sapien
gggctggaagttctgcaaccttgcc

SEQ ID NO: 4863350 - DNA, 25 bp, Homo sapien
tgaaccatccactttgtagggaaaa

SEQ ID NO: 4863351 - DNA, 25 bp, Homo sapien
ggtgactgactgctgctccctaact

SEQ ID NO: 4863352 - DNA, 25 bp, Homo sapien
agacaggggtcaccaaatggtggcc

SEQ ID NO: 4863353 - DNA, 25 bp, Homo sapien
ccttccctgacatgctgaagctgct

SEQ ID NO: 4863354 - DNA, 25 bp, Homo sapien
ttcaggcatcgcttcccctgagtca

SEQ ID NO: 4863355 - DNA, 25 bp, Homo sapien
agattcaggcatcgcttcccctgag

SEQ ID NO: 4863356 - DNA, 25 bp, Homo sapien
tcaagattcaggcatcgcttcccct

SEQ ID NO: 4863357 - DNA, 25 bp, Homo sapien
tcaggcatcgcttcccctgagtcat

SEQ ID NO: 4863358 - DNA, 25 bp, Homo sapien
gtgtcagaaagaggagagcctttgg

SEQ ID NO: 4863359 - DNA, 25 bp, Homo sapien
tgtgtcagaaagaggagagcctttg

SEQ ID NO: 4863360 - DNA, 25 bp, Homo sapien
ctgcggagtgaccttggatgacact

SEQ ID NO: 4863361 - DNA, 25 bp, Homo sapien
tgaccttggatgacacttcaagctg

SEQ ID NO: 4863362 - DNA, 25 bp, Homo sapien
gagtgaccttggatgacacttcaag

SEQ ID NO: 4863363 - DNA, 25 bp, Homo sapien
cggagtgaccttggatgacacttca

SEQ ID NO: 4863364 - DNA, 25 bp, Homo sapien
ccctcctcccagttgctaggcccat

SEQ ID NO: 4863365 - DNA, 25 bp, Homo sapien
taggatgttgagctgcctctaagag

SEQ ID NO: 4863366 - DNA, 25 bp, Homo sapien
ctaggatgttgagctgcctctaaga

SEQ ID NO: 4863367 - DNA, 25 bp, Homo sapien
tctaggatgttgagctgcctctaag

SEQ ID NO: 4863368 - DNA, 25 bp, Homo sapien
ttcatgtctctccagagccaacccg

SEQ ID NO: 4863369 - DNA, 25 bp, Homo sapien
gtcttagcttgggattggatattcc

SEQ ID NO: 4863370 - DNA, 25 bp, Homo sapien
gaagttgccttgacaacccatcctt

SEQ ID NO: 4863371 - DNA, 25 bp, Homo sapien
tccagaggactagactcttcatgtc

SEQ ID NO: 4863372 - DNA, 25 bp, Homo sapien
tcagcttcgcgtcttgcggaagatt

SEQ ID NO: 4863373 - DNA, 25 bp, Homo sapien
tcttgcggaagatttggcctcccac

SEQ ID NO: 4863374 - DNA, 25 bp, Homo sapien
gcttcgcgtcttgcggaagatttgg

SEQ ID NO: 4863375 - DNA, 25 bp, Homo sapien
tcgcgtcttgcggaagatttggcct

SEQ ID NO: 4863376 - DNA, 25 bp, Homo sapien
caggggccagggctgagccggggag

SEQ ID NO: 4863377 - DNA, 25 bp, Homo sapien
gggagcccaggagacccagacccat

SEQ ID NO: 4863378 - DNA, 25 bp, Homo sapien
ggggccagggctgagccggggagcc

SEQ ID NO: 4863379 - DNA, 25 bp, Homo sapien
gccagggctgagccggggagcccag

SEQ ID NO: 4863380 - DNA, 25 bp, Homo sapien
tggagagggaatcccattagccact

SEQ ID NO: 4863381 - DNA, 25 bp, Homo sapien
ctgtggagagggaatcccattagcc

SEQ ID NO: 4863382 - DNA, 25 bp, Homo sapien
gagggaatcccattagccactgctg

SEQ ID NO: 4863383 - DNA, 25 bp, Homo sapien
gagagggaatcccattagccactgc

SEQ ID NO: 4863384 - DNA, 25 bp, Homo sapien
gacgagcagcctgacaggaaggctc

SEQ ID NO: 4863385 - DNA, 25 bp, Homo sapien
ctgggcattcaggacgagcagcctg

SEQ ID NO: 4863386 - DNA, 25 bp, Homo sapien
gaggtacgataaacacaggtcacag

SEQ ID NO: 4863387 - DNA, 25 bp, Homo sapien
tcccgtaggctctggaggtacgata

SEQ ID NO: 4863388 - DNA, 25 bp, Homo sapien
tacagactgtgtgggcgtttttgga

SEQ ID NO: 4863389 - DNA, 25 bp, Homo sapien
tgggagtcgtgttctcttccgcagc

SEQ ID NO: 4863390 - DNA, 25 bp, Homo sapien
gataaagttccttgtcgatgtgaag

SEQ ID NO: 4863391 - DNA, 25 bp, Homo sapien
tctccagagtcgctaggatacagac

SEQ ID NO: 4863392 - DNA, 25 bp, Homo sapien
cctttggtgtctaatggcaaattca

SEQ ID NO: 4863393 - DNA, 25 bp, Homo sapien
gagcgggaaaccactttccagcatc

SEQ ID NO: 4863394 - DNA, 25 bp, Homo sapien
cagtgggtgctggacgacttgacct

SEQ ID NO: 4863395 - DNA, 25 bp, Homo sapien
ctccagaggtttggcacgtggcctg

SEQ ID NO: 4863396 - DNA, 25 bp, Homo sapien
tagggagtgccgatcaatccgtcct

SEQ ID NO: 4863397 - DNA, 25 bp, Homo sapien
tctgcatgcatctgagacctgggag

SEQ ID NO: 4863398 - DNA, 25 bp, Homo sapien
gaaagtatttcgcaaccctaagctg

SEQ ID NO: 4863399 - DNA, 25 bp, Homo sapien
caatttcaggcgtgtctttgtggcc

SEQ ID NO: 4863400 - DNA, 25 bp, Homo sapien
ttcaggtgatgaaatcttctagaat

SEQ ID NO: 4863401 - DNA, 25 bp, Homo sapien
ggaaataaaggcgttctcaagtgaa

SEQ ID NO: 4863402 - DNA, 25 bp, Homo sapien
aggcgttctcaagtgaaaaatcaag

SEQ ID NO: 4863403 - DNA, 25 bp, Homo sapien
gatatcaggaatgactgcttcatgg

SEQ ID NO: 4863404 - DNA, 25 bp, Homo sapien
gagtatcagccctctactggagtgg

SEQ ID NO: 4863405 - DNA, 25 bp, Homo sapien
gagtgggtgcaaacaaggcgtccat

SEQ ID NO: 4863406 - DNA, 25 bp, Homo sapien
cacacagtgctaggagtaggaagca

SEQ ID NO: 4863407 - DNA, 25 bp, Homo sapien
tgagcagagaacgagcacacagtgc

SEQ ID NO: 4863408 - DNA, 25 bp, Homo sapien
ctagggggaattgccccactcgtct

SEQ ID NO: 4863409 - DNA, 25 bp, Homo sapien
tacactgtccccgtccaagcccaac

SEQ ID NO: 4863410 - DNA, 25 bp, Homo sapien
tctccccagtacactgtccccgtcc

SEQ ID NO: 4863411 - DNA, 25 bp, Homo sapien
aattgccccactcgtctccccagta

SEQ ID NO: 4863412 - DNA, 25 bp, Homo sapien
gaggagtcggcatggaagtctcctt

SEQ ID NO: 4863413 - DNA, 25 bp, Homo sapien
cagggtaaaccaggagaggagtcgg

SEQ ID NO: 4863414 - DNA, 25 bp, Homo sapien
ccccggcctcgagacaggaagagct

SEQ ID NO: 4863415 - DNA, 25 bp, Homo sapien
cagcctcaaaacctaacacagggta

SEQ ID NO: 4863416 - DNA, 25 bp, Homo sapien
ttccctgtatctgccccaaaggcag

SEQ ID NO: 4863417 - DNA, 25 bp, Homo sapien
tggtagtgaggacaataactcctgg

SEQ ID NO: 4863418 - DNA, 25 bp, Homo sapien
cagaattccccctagtgaacctggt

SEQ ID NO: 4863419 - DNA, 25 bp, Homo sapien
gatcaaagtggtcttcactgcccca

SEQ ID NO: 4863420 - DNA, 25 bp, Homo sapien
ccataagcatgtggaagcctcaagc

SEQ ID NO: 4863421 - DNA, 25 bp, Homo sapien
gatcagctgatcagagccaggctcc

SEQ ID NO: 4863422 - DNA, 25 bp, Homo sapien
aaaactggtgccctcttgccagccg

SEQ ID NO: 4863423 - DNA, 25 bp, Homo sapien
tacattcccgctttgaacccataag

SEQ ID NO: 4863424 - DNA, 25 bp, Homo sapien
cagctctctactgtcctgggccgat

SEQ ID NO: 4863425 - DNA, 25 bp, Homo sapien
tctctactgtcctgggccgatgcct

SEQ ID NO: 4863426 - DNA, 25 bp, Homo sapien
cacagcagccaccggagtggagaga

SEQ ID NO: 4863427 - DNA, 25 bp, Homo sapien
agcagccaccggagtggagagaggc

SEQ ID NO: 4863428 - DNA, 25 bp, Homo sapien
aagtcaccaaagccaggggagcaca

SEQ ID NO: 4863429 - DNA, 25 bp, Homo sapien
tcttagggaggacatcagaggtccc

SEQ ID NO: 4863430 - DNA, 25 bp, Homo sapien
ttagggaggacatcagaggtccccc

SEQ ID NO: 4863431 - DNA, 25 bp, Homo sapien
caagtcaccaaagccaggggagcac

SEQ ID NO: 4863432 - DNA, 25 bp, Homo sapien
tgagtcctagatcccgctcagctct

SEQ ID NO: 4863433 - DNA, 25 bp, Homo sapien
tgctggtgccaagacaagaacctgg

SEQ ID NO: 4863434 - DNA, 25 bp, Homo sapien
cacctgagttcgctgtgggatccgc

SEQ ID NO: 4863435 - DNA, 25 bp, Homo sapien
ggatccgccctcttgaaatgtgtca

SEQ ID NO: 4863436 - DNA, 25 bp, Homo sapien
aatccagtccttcaggctcccattc

SEQ ID NO: 4863437 - DNA, 25 bp, Homo sapien
tcacacctacccgttctctcccaag

SEQ ID NO: 4863438 - DNA, 25 bp, Homo sapien
attcagaaaacacagccttttccca

SEQ ID NO: 4863439 - DNA, 25 bp, Homo sapien
ccgaggatatgggaggctcctcaga

SEQ ID NO: 4863440 - DNA, 25 bp, Homo sapien
ggtaagggagagattcccattcttg

SEQ ID NO: 4863441 - DNA, 25 bp, Homo sapien
ttcccattcttgtctttgggattcc

SEQ ID NO: 4863442 - DNA, 25 bp, Homo sapien
gagattcccattcttgtctttggga

SEQ ID NO: 4863443 - DNA, 25 bp, Homo sapien
ggagagattcccattcttgtctttg

SEQ ID NO: 4863444 - DNA, 25 bp, Homo sapien
tattctcgagtccataggatggccg

SEQ ID NO: 4863445 - DNA, 25 bp, Homo sapien
atggccgaccagctcagcaaccaga

SEQ ID NO: 4863446 - DNA, 25 bp, Homo sapien
gaagtgccacaccagtcgagagtgg

SEQ ID NO: 4863447 - DNA, 25 bp, Homo sapien
tggaggcctccaagcgtagctgaag

SEQ ID NO: 4863448 - DNA, 25 bp, Homo sapien
ttgaaggagagagtaggtaccaagc

SEQ ID NO: 4863449 - DNA, 25 bp, Homo sapien
tggaggaaactgcaactgctgtggt

SEQ ID NO: 4863450 - DNA, 25 bp, Homo sapien
tcatgagtgaccaaaactggacaca

SEQ ID NO: 4863451 - DNA, 25 bp, Homo sapien
gagagtaggtaccaagcaggactga

SEQ ID NO: 4863452 - DNA, 25 bp, Homo sapien
ttgctgaactcttaggggagcaatg

SEQ ID NO: 4863453 - DNA, 25 bp, Homo sapien
aatggttcctgttagggctgagcca

SEQ ID NO: 4863454 - DNA, 25 bp, Homo sapien
ctcttaggggagcaatggttcctgt

SEQ ID NO: 4863455 - DNA, 25 bp, Homo sapien
gagcaatggttcctgttagggctga

SEQ ID NO: 4863456 - DNA, 25 bp, Homo sapien
agtgttcccttgtcgaagaatttca

SEQ ID NO: 4863457 - DNA, 25 bp, Homo sapien
gagaagtgttcccttgtcgaagaat

SEQ ID NO: 4863458 - DNA, 25 bp, Homo sapien
tgaaagagaagtgttcccttgtcga

SEQ ID NO: 4863459 - DNA, 25 bp, Homo sapien
tcccttgtcgaagaatttcatttca

SEQ ID NO: 4863460 - DNA, 25 bp, Homo sapien
tggaaattagcccaacccactccca

SEQ ID NO: 4863461 - DNA, 25 bp, Homo sapien
tctggccctggaaattagcccaacc

SEQ ID NO: 4863462 - DNA, 25 bp, Homo sapien
ttctggccctggaaattagcccaac

SEQ ID NO: 4863463 - DNA, 25 bp, Homo sapien
attagcccaacccactcccaagctg

SEQ ID NO: 4863464 - DNA, 25 bp, Homo sapien
caaggtgataggcactttgggccat

SEQ ID NO: 4863465 - DNA, 25 bp, Homo sapien
gaatgcagaggagtaacagaccaca

SEQ ID NO: 4863466 - DNA, 25 bp, Homo sapien
gggatccctgacctgctattgagaa

SEQ ID NO: 4863467 - DNA, 25 bp, Homo sapien
tgggccatccaaaggaagtacttgc

SEQ ID NO: 4863468 - DNA, 25 bp, Homo sapien
tgtttagctctaccgctgcccattc

SEQ ID NO: 4863469 - DNA, 25 bp, Homo sapien
tgtctcatcagcctcatgtttagct

SEQ ID NO: 4863470 - DNA, 25 bp, Homo sapien
tcagcctcatgtttagctctaccgc

SEQ ID NO: 4863471 - DNA, 25 bp, Homo sapien
tcatgtttagctctaccgctgccca

SEQ ID NO: 4863472 - DNA, 25 bp, Homo sapien
tcacggtgcgaaacactgtggctaa

SEQ ID NO: 4863473 - DNA, 25 bp, Homo sapien
ctggaggaagaatgagtctcacggt

SEQ ID NO: 4863474 - DNA, 25 bp, Homo sapien
ggctaatggtgcctccatcaggacc

SEQ ID NO: 4863475 - DNA, 25 bp, Homo sapien
gaaacactgtggctaatggtgcctc

SEQ ID NO: 4863476 - DNA, 25 bp, Homo sapien
ccccatctaggcagagctcctcacc

SEQ ID NO: 4863477 - DNA, 25 bp, Homo sapien
aggccatgggcagcccatgagttgg

SEQ ID NO: 4863478 - DNA, 25 bp, Homo sapien
gggcagcccatgagttggctgcttt

SEQ ID NO: 4863479 - DNA, 25 bp, Homo sapien
ctcaccccaagactcccacaggcca

SEQ ID NO: 4863480 - DNA, 25 bp, Homo sapien
tctcatccccaccagataatgactg

SEQ ID NO: 4863481 - DNA, 25 bp, Homo sapien
ctacagcgcctattggagtggaggt

SEQ ID NO: 4863482 - DNA, 25 bp, Homo sapien
cccaccagataatgactgagctaca

SEQ ID NO: 4863483 - DNA, 25 bp, Homo sapien
actgagctacagcgcctattggagt

SEQ ID NO: 4863484 - DNA, 25 bp, Homo sapien
gagagctcggggcaggaagccagtt

SEQ ID NO: 4863485 - DNA, 25 bp, Homo sapien
agctcggggcaggaagccagttccc

SEQ ID NO: 4863486 - DNA, 25 bp, Homo sapien
ggaccgggacgccacatggccccag

SEQ ID NO: 4863487 - DNA, 25 bp, Homo sapien
gggacgccacatggccccagagagc

SEQ ID NO: 4863488 - DNA, 25 bp, Homo sapien
aaagagaaggttgggaagctggtca

SEQ ID NO: 4863489 - DNA, 25 bp, Homo sapien
attctgcccatctgacgagcttcct

SEQ ID NO: 4863490 - DNA, 25 bp, Homo sapien
caaccctcgagcaggcctggaatga

SEQ ID NO: 4863491 - DNA, 25 bp, Homo sapien
tccacatttggcatagacaaaaaga

SEQ ID NO: 4863492 - DNA, 25 bp, Homo sapien
agtgtccccagcagtaaaagaaaga

SEQ ID NO: 4863493 - DNA, 25 bp, Homo sapien
cacagaagtgtcactacaggttgag

SEQ ID NO: 4863494 - DNA, 25 bp, Homo sapien
cagagactggcaactgtgctataag

SEQ ID NO: 4863495 - DNA, 25 bp, Homo sapien
taactagccactaactagctttggc

SEQ ID NO: 4863496 - DNA, 25 bp, Homo sapien
cagcagaccccccagaagctgcttc

SEQ ID NO: 4863497 - DNA, 25 bp, Homo sapien
acagcagaccccccagaagctgctt

SEQ ID NO: 4863498 - DNA, 25 bp, Homo sapien
agcagaccccccagaagctgcttca

SEQ ID NO: 4863499 - DNA, 25 bp, Homo sapien
gcagaccccccagaagctgcttcag

SEQ ID NO: 4863500 - DNA, 25 bp, Homo sapien
aacatccacgtgtccaagatggctg

SEQ ID NO: 4863501 - DNA, 25 bp, Homo sapien
gatccagactgattgtgtccactca

SEQ ID NO: 4863502 - DNA, 25 bp, Homo sapien
tgcggcattggcatgaggacaaacc

SEQ ID NO: 4863503 - DNA, 25 bp, Homo sapien
tccaagaggccgtggttgtcaccag

SEQ ID NO: 4863504 - DNA, 25 bp, Homo sapien
tgctgaatgaaaccccttccgttgg

SEQ ID NO: 4863505 - DNA, 25 bp, Homo sapien
cgttggtcccttggcgaagcttgga

SEQ ID NO: 4863506 - DNA, 25 bp, Homo sapien
gaagcttggatgagaggattccacc

SEQ ID NO: 4863507 - DNA, 25 bp, Homo sapien
tactcggttggacactgctgaatga

SEQ ID NO: 4863508 - DNA, 25 bp, Homo sapien
cagcctgtcaaagaggacccaggcc

SEQ ID NO: 4863509 - DNA, 25 bp, Homo sapien
ctctttgttcaccaatgaacagtac

SEQ ID NO: 4863510 - DNA, 25 bp, Homo sapien
aatgaacagtactcaggggacagcc

SEQ ID NO: 4863511 - DNA, 25 bp, Homo sapien
gggacagcctgtcaaagaggaccca

SEQ ID NO: 4863512 - DNA, 25 bp, Homo sapien
acaagaagtgggcaggtcgcaggca

SEQ ID NO: 4863513 - DNA, 25 bp, Homo sapien
ctcactcacttgagcagactccaag

SEQ ID NO: 4863514 - DNA, 25 bp, Homo sapien
tcttggatttgacaagaagtgggca

SEQ ID NO: 4863515 - DNA, 25 bp, Homo sapien
gcaggggtttcttccatcaacagcc

SEQ ID NO: 4863516 - DNA, 25 bp, Homo sapien
tggaatttaacgtgcatctcaacag

SEQ ID NO: 4863517 - DNA, 25 bp, Homo sapien
taacgtgcatctcaacagagagttc

SEQ ID NO: 4863518 - DNA, 25 bp, Homo sapien
ttgtcttggaatttaacgtgcatct

SEQ ID NO: 4863519 - DNA, 25 bp, Homo sapien
ggaggagaggcatgttatcagcaac

SEQ ID NO: 4863520 - DNA, 25 bp, Homo sapien
taaatgaggtagaatgctggcattc

SEQ ID NO: 4863521 - DNA, 25 bp, Homo sapien
cacgtccttggggacatctacgcat

SEQ ID NO: 4863522 - DNA, 25 bp, Homo sapien
tgctggcattctcacgtccttgggg

SEQ ID NO: 4863523 - DNA, 25 bp, Homo sapien
tcctgccccgtgagtctcctctggt

SEQ ID NO: 4863524 - DNA, 25 bp, Homo sapien
cggttccaacaagaggtaattcctg

SEQ ID NO: 4863525 - DNA, 25 bp, Homo sapien
ttccaacaagaggtaattcctgggc

SEQ ID NO: 4863526 - DNA, 25 bp, Homo sapien
tccaacaagaggtaattcctgggct

SEQ ID NO: 4863527 - DNA, 25 bp, Homo sapien
ccaacaagaggtaattcctgggctg

SEQ ID NO: 4863528 - DNA, 25 bp, Homo sapien
ggaaactgcctctggagttggaagc

SEQ ID NO: 4863529 - DNA, 25 bp, Homo sapien
gtgccccaccccagcatgagggaat

SEQ ID NO: 4863530 - DNA, 25 bp, Homo sapien
taatcttgtagcagggctgcagggc

SEQ ID NO: 4863531 - DNA, 25 bp, Homo sapien
agggctggaaactgcctctggagtt

SEQ ID NO: 4863532 - DNA, 25 bp, Homo sapien
taaccagttggatttcggagctagg

SEQ ID NO: 4863533 - DNA, 25 bp, Homo sapien
tcggagctaggcagagcctagttgc

SEQ ID NO: 4863534 - DNA, 25 bp, Homo sapien
tggatttcggagctaggcagagcct

SEQ ID NO: 4863535 - DNA, 25 bp, Homo sapien
tgtggctgctcctaaccagttggat

SEQ ID NO: 4863536 - DNA, 25 bp, Homo sapien
gagacttgtggccgcctttggggac

SEQ ID NO: 4863537 - DNA, 25 bp, Homo sapien
ctagagacttgtggccgcctttggg

SEQ ID NO: 4863538 - DNA, 25 bp, Homo sapien
tagagacttgtggccgcctttgggg

SEQ ID NO: 4863539 - DNA, 25 bp, Homo sapien
agagacttgtggccgcctttgggga

SEQ ID NO: 4863540 - DNA, 25 bp, Homo sapien
tcagtcacatgtatggagccgttcc

SEQ ID NO: 4863541 - DNA, 25 bp, Homo sapien
ggaacaagctactgttagcaccagc

SEQ ID NO: 4863542 - DNA, 25 bp, Homo sapien
tttgagcatcgctgtgtgccgggcc

SEQ ID NO: 4863543 - DNA, 25 bp, Homo sapien
cattaaatggcatagggcacttcgc

SEQ ID NO: 4863544 - DNA, 25 bp, Homo sapien
caggctgtggtgtctagttgtttcc

SEQ ID NO: 4863545 - DNA, 25 bp, Homo sapien
ccaggctgtggtgtctagttgtttc

SEQ ID NO: 4863546 - DNA, 25 bp, Homo sapien
aggtttgtgcaaggctagccctact

SEQ ID NO: 4863547 - DNA, 25 bp, Homo sapien
tagccctactaggagcttgctctcc

SEQ ID NO: 4863548 - DNA, 25 bp, Homo sapien
ctgcaagaggtagagaaaggtttgt

SEQ ID NO: 4863549 - DNA, 25 bp, Homo sapien
gactcctcttgacttgttggcctga

SEQ ID NO: 4863550 - DNA, 25 bp, Homo sapien
gatggagtccacagagcatatccga

SEQ ID NO: 4863551 - DNA, 25 bp, Homo sapien
tcaccctccgtgctattctttcatt

SEQ ID NO: 4863552 - DNA, 25 bp, Homo sapien
gccaaaagctgctctcaagggagaa

SEQ ID NO: 4863553 - DNA, 25 bp, Homo sapien
catatccgagctgacctttgggcct

SEQ ID NO: 4863554 - DNA, 25 bp, Homo sapien
tctacttcgtctcttggctggacgg

SEQ ID NO: 4863555 - DNA, 25 bp, Homo sapien
tggaggtatttcaatgccgaggtgc

SEQ ID NO: 4863556 - DNA, 25 bp, Homo sapien
gccgaggtgcctgttgtctgataaa

SEQ ID NO: 4863557 - DNA, 25 bp, Homo sapien
ggcaggccaagctgtagcacccctt

SEQ ID NO: 4863558 - DNA, 25 bp, Homo sapien
atgaacacaacacctcctcagcagc

SEQ ID NO: 4863559 - DNA, 25 bp, Homo sapien
gagaacccctcattacagaaagctt

SEQ ID NO: 4863560 - DNA, 25 bp, Homo sapien
gaacacaacacctcctcagcagcag

SEQ ID NO: 4863561 - DNA, 25 bp, Homo sapien
tcatattcccgaaccctgccgctgg

SEQ ID NO: 4863562 - DNA, 25 bp, Homo sapien
gagaaacaaagtcatcttctatccg

SEQ ID NO: 4863563 - DNA, 25 bp, Homo sapien
catcttctatccgtaggtccttaag

SEQ ID NO: 4863564 - DNA, 25 bp, Homo sapien
cgtaggtccttaagcctgagtgcta

SEQ ID NO: 4863565 - DNA, 25 bp, Homo sapien
aaagtcatcttctatccgtaggtcc

SEQ ID NO: 4863566 - DNA, 25 bp, Homo sapien
cattgcagctgtcacgcttcaaggg

SEQ ID NO: 4863567 - DNA, 25 bp, Homo sapien
tggaagtcattgcagctgtcacgct

SEQ ID NO: 4863568 - DNA, 25 bp, Homo sapien
tcattgcagctgtcacgcttcaagg

SEQ ID NO: 4863569 - DNA, 25 bp, Homo sapien
catctggaagtcattgcagctgtca

SEQ ID NO: 4863570 - DNA, 25 bp, Homo sapien
tccatcgcggagtttaccacatcca

SEQ ID NO: 4863571 - DNA, 25 bp, Homo sapien
ttggtttccatcgcggagtttacca

SEQ ID NO: 4863572 - DNA, 25 bp, Homo sapien
agtttaccacatccaccccagtcgg

SEQ ID NO: 4863573 - DNA, 25 bp, Homo sapien
gtttccatcgcggagtttaccacat

SEQ ID NO: 4863574 - DNA, 25 bp, Homo sapien
cgggaaagccgccatttgttctggg

SEQ ID NO: 4863575 - DNA, 25 bp, Homo sapien
ttaaccggggaacgctgactagctg

SEQ ID NO: 4863576 - DNA, 25 bp, Homo sapien
ctggcggccggcattgaagccagat

SEQ ID NO: 4863577 - DNA, 25 bp, Homo sapien
cggcattgaagccagatgtgcgcga

SEQ ID NO: 4863578 - DNA, 25 bp, Homo sapien
cggcagcgccgcgaggaaagagcgc

SEQ ID NO: 4863579 - DNA, 25 bp, Homo sapien
gcgccgcgaggaaagagcgcccggg

SEQ ID NO: 4863580 - DNA, 25 bp, Homo sapien
gtcccgcagcccctcgttctgccct

SEQ ID NO: 4863581 - DNA, 25 bp, Homo sapien
cgcacgattttcttccgaacaccgt

SEQ ID NO: 4863582 - DNA, 25 bp, Homo sapien
gatcacagtataggaaactttgcac

SEQ ID NO: 4863583 - DNA, 25 bp, Homo sapien
cacactttatattgcctgcgttttg

SEQ ID NO: 4863584 - DNA, 25 bp, Homo sapien
tattgcctgcgttttgatctccagt

SEQ ID NO: 4863585 - DNA, 25 bp, Homo sapien
tttccaacttgatcacagtatagga

SEQ ID NO: 4863586 - DNA, 25 bp, Homo sapien
ctgagaaaggatgtagaaggcttct

SEQ ID NO: 4863587 - DNA, 25 bp, Homo sapien
aatatctgaaagtgacctgtaggta

SEQ ID NO: 4863588 - DNA, 25 bp, Homo sapien
aaagtgacctgtaggtatggactca

SEQ ID NO: 4863589 - DNA, 25 bp, Homo sapien
agggctttgatacagtggtggaata

SEQ ID NO: 4863590 - DNA, 25 bp, Homo sapien
cctgcagggtctgccatcgtctcct

SEQ ID NO: 4863591 - DNA, 25 bp, Homo sapien
cacccatgaggctggttgaggttag

SEQ ID NO: 4863592 - DNA, 25 bp, Homo sapien
gcagggtctgccatcgtctcctgca

SEQ ID NO: 4863593 - DNA, 25 bp, Homo sapien
catgaggctggttgaggttaggagt

SEQ ID NO: 4863594 - DNA, 25 bp, Homo sapien
gaaatcagcctgacttttgggaggg

SEQ ID NO: 4863595 - DNA, 25 bp, Homo sapien
tccgggcttggaaatcagcctgact

SEQ ID NO: 4863596 - DNA, 25 bp, Homo sapien
taattgattccactggcggcagcac

SEQ ID NO: 4863597 - DNA, 25 bp, Homo sapien
tgggagggagcctaattgattccac

SEQ ID NO: 4863598 - DNA, 25 bp, Homo sapien
taactttttagctgattttgtgcta

SEQ ID NO: 4863599 - DNA, 25 bp, Homo sapien
ttaactttttagctgattttgtgct

SEQ ID NO: 4863600 - DNA, 25 bp, Homo sapien
tttaactttttagctgattttgtgc

SEQ ID NO: 4863601 - DNA, 25 bp, Homo sapien
catttaactttttagctgattttgt

SEQ ID NO: 4863602 - DNA, 25 bp, Homo sapien
catcacgtcttcttaggttggctct

SEQ ID NO: 4863603 - DNA, 25 bp, Homo sapien
agcagcaagagcctgaccatcacgt

SEQ ID NO: 4863604 - DNA, 25 bp, Homo sapien
caagagcctgaccatcacgtcttct

SEQ ID NO: 4863605 - DNA, 25 bp, Homo sapien
cagcaagagcctgaccatcacgtct

SEQ ID NO: 4863606 - DNA, 25 bp, Homo sapien
tgccacctggttagtgggtgacagt

SEQ ID NO: 4863607 - DNA, 25 bp, Homo sapien
ctgccacctggttagtgggtgacag

SEQ ID NO: 4863608 - DNA, 25 bp, Homo sapien
caggatgatggcagaggaagaaagc

SEQ ID NO: 4863609 - DNA, 25 bp, Homo sapien
ctgagcaggatgatggcagaggaag

SEQ ID NO: 4863610 - DNA, 25 bp, Homo sapien
gcaggatgatggcagaggaagaaag

SEQ ID NO: 4863611 - DNA, 25 bp, Homo sapien
gagcaggatgatggcagaggaagaa

SEQ ID NO: 4863612 - DNA, 25 bp, Homo sapien
aaacagcagcatatcaaaggggata

SEQ ID NO: 4863613 - DNA, 25 bp, Homo sapien
tgtggtgaacaacgggttcctgtat

SEQ ID NO: 4863614 - DNA, 25 bp, Homo sapien
tcaaaggggataacggtacactgtg

SEQ ID NO: 4863615 - DNA, 25 bp, Homo sapien
ggataacggtacactgtgtggtgaa

SEQ ID NO: 4863616 - DNA, 25 bp, Homo sapien
gctatgagcctccagtggcactcca

SEQ ID NO: 4863617 - DNA, 25 bp, Homo sapien
ttctctcctgtcaagcaggtctcct

SEQ ID NO: 4863618 - DNA, 25 bp, Homo sapien
tcttcttatgcctatgccttcattg

SEQ ID NO: 4863619 - DNA, 25 bp, Homo sapien
gccctggttcttgggtcctccattc

SEQ ID NO: 4863620 - DNA, 25 bp, Homo sapien
tatccaacgcattctgatgtggggt

SEQ ID NO: 4863621 - DNA, 25 bp, Homo sapien
tgatgtggtttctgttccagtaagt

SEQ ID NO: 4863622 - DNA, 25 bp, Homo sapien
gtttgggttcctcatgtgagaagct

SEQ ID NO: 4863623 - DNA, 25 bp, Homo sapien
tctaagtgccaaccaagcatgcacg

SEQ ID NO: 4863624 - DNA, 25 bp, Homo sapien
ctagcatagtgtgacgtcagtactg

SEQ ID NO: 4863625 - DNA, 25 bp, Homo sapien
ggacatttcaacatgacttcgagca

SEQ ID NO: 4863626 - DNA, 25 bp, Homo sapien
ccaaggttaagcgaggtatgggcct

SEQ ID NO: 4863627 - DNA, 25 bp, Homo sapien
tcaaagggaaggtatgtgaaaccac

SEQ ID NO: 4863628 - DNA, 25 bp, Homo sapien
tgggacgcagctggattgcaattcc

SEQ ID NO: 4863629 - DNA, 25 bp, Homo sapien
gctggattgcaattccatggccgtc

SEQ ID NO: 4863630 - DNA, 25 bp, Homo sapien
gacgcagctggattgcaattccatg

SEQ ID NO: 4863631 - DNA, 25 bp, Homo sapien
gattgcaattccatggccgtccact

SEQ ID NO: 4863632 - DNA, 25 bp, Homo sapien
ttgcatttggggagcgggtatacct

SEQ ID NO: 4863633 - DNA, 25 bp, Homo sapien
cgggtatacctctcaaatccccatt

SEQ ID NO: 4863634 - DNA, 25 bp, Homo sapien
gggagcgggtatacctctcaaatcc

SEQ ID NO: 4863635 - DNA, 25 bp, Homo sapien
tttggggagcgggtatacctctcaa

SEQ ID NO: 4863636 - DNA, 25 bp, Homo sapien
cctctagaggaactgtctgaattgt

SEQ ID NO: 4863637 - DNA, 25 bp, Homo sapien
ttctggtgacaatactgtgcctcta

SEQ ID NO: 4863638 - DNA, 25 bp, Homo sapien
ttgtggggatttgaggcagcaactt

SEQ ID NO: 4863639 - DNA, 25 bp, Homo sapien
tgacaatactgtgcctctagaggaa

SEQ ID NO: 4863640 - DNA, 25 bp, Homo sapien
taaggctacccgtacaaagagacat

SEQ ID NO: 4863641 - DNA, 25 bp, Homo sapien
gatgtgtcagatccaaagtgtttgg

SEQ ID NO: 4863642 - DNA, 25 bp, Homo sapien
taaactccgtgctcaatgagtatgg

SEQ ID NO: 4863643 - DNA, 25 bp, Homo sapien
gagtaacccgttgttctggcatcca

SEQ ID NO: 4863644 - DNA, 25 bp, Homo sapien
cgtctcattgcttgatttcataact

SEQ ID NO: 4863645 - DNA, 25 bp, Homo sapien
actgggctaaatgtcaccatggggg

SEQ ID NO: 4863646 - DNA, 25 bp, Homo sapien
cattgcttgatttcataactgggct

SEQ ID NO: 4863647 - DNA, 25 bp, Homo sapien
tgcttgatttcataactgggctaaa

SEQ ID NO: 4863648 - DNA, 25 bp, Homo sapien
cctaagatactacttctcacccctg

SEQ ID NO: 4863649 - DNA, 25 bp, Homo sapien
ctaagatactacttctcacccctgt

SEQ ID NO: 4863650 - DNA, 25 bp, Homo sapien
tgagcaaatgccaaatgtgccggca

SEQ ID NO: 4863651 - DNA, 25 bp, Homo sapien
atgagcaaatgccaaatgtgccggc

SEQ ID NO: 4863652 - DNA, 25 bp, Homo sapien
aaatgagcaaatgccaaatgtgccg

SEQ ID NO: 4863653 - DNA, 25 bp, Homo sapien
aatgagcaaatgccaaatgtgccgg

SEQ ID NO: 4863654 - DNA, 25 bp, Homo sapien
tcattgctttgaagtcagtctgagt

SEQ ID NO: 4863655 - DNA, 25 bp, Homo sapien
cattgtgggtctactgtggactgca

SEQ ID NO: 4863656 - DNA, 25 bp, Homo sapien
gcatcttctgtgtaagatgcactaa

SEQ ID NO: 4863657 - DNA, 25 bp, Homo sapien
tgcacgttgatttgagactcttgtc

SEQ ID NO: 4863658 - DNA, 25 bp, Homo sapien
ctggtgagtataattgcgtgaaaca

SEQ ID NO: 4863659 - DNA, 25 bp, Homo sapien
caataggagtttgtgtacgggagta

SEQ ID NO: 4863660 - DNA, 25 bp, Homo sapien
gctttcagcacaggtgcttgtgatg

SEQ ID NO: 4863661 - DNA, 25 bp, Homo sapien
gttgttactggatgctctggtgagt

SEQ ID NO: 4863662 - DNA, 25 bp, Homo sapien
tctggactctcacattcagacagga

SEQ ID NO: 4863663 - DNA, 25 bp, Homo sapien
tacccaagccaatcagacttggagt

SEQ ID NO: 4863664 - DNA, 25 bp, Homo sapien
acaccttgcctgaagcacctgggcg

SEQ ID NO: 4863665 - DNA, 25 bp, Homo sapien
cctacccaagccaatcagacttgga

SEQ ID NO: 4863666 - DNA, 25 bp, Homo sapien
tgaagggagacaccttgcctgaagc

SEQ ID NO: 4863667 - DNA, 25 bp, Homo sapien
attgccgctgagcaccggagggact

SEQ ID NO: 4863668 - DNA, 25 bp, Homo sapien
ccagtaggtggaggcattgctgttc

SEQ ID NO: 4863669 - DNA, 25 bp, Homo sapien
ttgccattgccgctgagcaccggag

SEQ ID NO: 4863670 - DNA, 25 bp, Homo sapien
tggtctgattgccattgccgctgag

SEQ ID NO: 4863671 - DNA, 25 bp, Homo sapien
tatacgacgtggcaaatctgctgga

SEQ ID NO: 4863672 - DNA, 25 bp, Homo sapien
tcataggcggttctgggcactataa

SEQ ID NO: 4863673 - DNA, 25 bp, Homo sapien
gatatagcggtatgataacggccca

SEQ ID NO: 4863674 - DNA, 25 bp, Homo sapien
tgtctgtggccaataaggagctcct

SEQ ID NO: 4863675 - DNA, 25 bp, Homo sapien
tagatcagtcacctctttttcaatt

SEQ ID NO: 4863676 - DNA, 25 bp, Homo sapien
acttgctttgatatcatgaatatag

SEQ ID NO: 4863677 - DNA, 25 bp, Homo sapien
aatatagacacaagtataaaaatct

SEQ ID NO: 4863678 - DNA, 25 bp, Homo sapien
tggagagcaagattcactagatcag

SEQ ID NO: 4863679 - DNA, 25 bp, Homo sapien
gggagggcatggtctcccaaccaag

SEQ ID NO: 4863680 - DNA, 25 bp, Homo sapien
ttttcttaatggaacgtcagcttcg

SEQ ID NO: 4863681 - DNA, 25 bp, Homo sapien
caacgctggccctgtctggaattta

SEQ ID NO: 4863682 - DNA, 25 bp, Homo sapien
tcaagtgcgaagtcagctgggtctc

SEQ ID NO: 4863683 - DNA, 25 bp, Homo sapien
cttcggcgagggtccccagagtcgg

SEQ ID NO: 4863684 - DNA, 25 bp, Homo sapien
tcttcggcgagggtccccagagtcg

SEQ ID NO: 4863685 - DNA, 25 bp, Homo sapien
tcggcgagggtccccagagtcggtc

SEQ ID NO: 4863686 - DNA, 25 bp, Homo sapien
ctcttcggcgagggtccccagagtc

SEQ ID NO: 4863687 - DNA, 25 bp, Homo sapien
cgcgccccgttcaccgtggtgagaa

SEQ ID NO: 4863688 - DNA, 25 bp, Homo sapien
agaaaagagcaaaatcagggattca

SEQ ID NO: 4863689 - DNA, 25 bp, Homo sapien
ggtatttatgactgctcctgggcat

SEQ ID NO: 4863690 - DNA, 25 bp, Homo sapien
ccagaagaatacatggcccaggtcc

SEQ ID NO: 4863691 - DNA, 25 bp, Homo sapien
cacccggagaaacaactcaaggtag

SEQ ID NO: 4863692 - DNA, 25 bp, Homo sapien
ctgagttctgtccataaacgcaggg

SEQ ID NO: 4863693 - DNA, 25 bp, Homo sapien
cctgcacccggagaaacaactcaag

SEQ ID NO: 4863694 - DNA, 25 bp, Homo sapien
tccataaacgcagggcactgatgct

SEQ ID NO: 4863695 - DNA, 25 bp, Homo sapien
ttccagagaccgactgccgggtgtc

SEQ ID NO: 4863696 - DNA, 25 bp, Homo sapien
agttctctgagcaggtccagtgtca

SEQ ID NO: 4863697 - DNA, 25 bp, Homo sapien
ggtagaccagttagctctgccccag

SEQ ID NO: 4863698 - DNA, 25 bp, Homo sapien
gggtgtccctcacgaagccaaggac

SEQ ID NO: 4863699 - DNA, 25 bp, Homo sapien
agctgcctggaacagtctccttgct

SEQ ID NO: 4863700 - DNA, 25 bp, Homo sapien
cttgctcagatgcaattatgccgtg

SEQ ID NO: 4863701 - DNA, 25 bp, Homo sapien
tgcctggaacagtctccttgctcag

SEQ ID NO: 4863702 - DNA, 25 bp, Homo sapien
gctcagatgcaattatgccgtgcat

SEQ ID NO: 4863703 - DNA, 25 bp, Homo sapien
ggccagtgtgcgttttaaggttgtc

SEQ ID NO: 4863704 - DNA, 25 bp, Homo sapien
ccgtgaattaagagcctcgaggctt

SEQ ID NO: 4863705 - DNA, 25 bp, Homo sapien
taaggttgtcccgtgaattaagagc

SEQ ID NO: 4863706 - DNA, 25 bp, Homo sapien
gcttggccagtgtgcgttttaaggt

SEQ ID NO: 4863707 - DNA, 25 bp, Homo sapien
gagagggagactatcctgaattatc

SEQ ID NO: 4863708 - DNA, 25 bp, Homo sapien
tatcttatttggaacaatgttttat

SEQ ID NO: 4863709 - DNA, 25 bp, Homo sapien
tgggccttaaatgcaaccccaagca

SEQ ID NO: 4863710 - DNA, 25 bp, Homo sapien
aattaaggatttctgagagagggag

SEQ ID NO: 4863711 - DNA, 25 bp, Homo sapien
tcctcatcgcggcccactatgttgt

SEQ ID NO: 4863712 - DNA, 25 bp, Homo sapien
tttttgtgtcctcatcgcggcccac

SEQ ID NO: 4863713 - DNA, 25 bp, Homo sapien
tgggcccttccacaatttttgtgtc

SEQ ID NO: 4863714 - DNA, 25 bp, Homo sapien
ttgtgtcctcatcgcggcccactat

SEQ ID NO: 4863715 - DNA, 25 bp, Homo sapien
gccagggttcaaggaagctctttaa

SEQ ID NO: 4863716 - DNA, 25 bp, Homo sapien
cacagtctagtcttggacgggcagg

SEQ ID NO: 4863717 - DNA, 25 bp, Homo sapien
ctggctttagtcattccactgagaa

SEQ ID NO: 4863718 - DNA, 25 bp, Homo sapien
aaacatcttggacccagtaaccgca

SEQ ID NO: 4863719 - DNA, 25 bp, Homo sapien
agcaatcaagaccaggacctctctc

SEQ ID NO: 4863720 - DNA, 25 bp, Homo sapien
gatctcagtgtacttggaagagtaa

SEQ ID NO: 4863721 - DNA, 25 bp, Homo sapien
gagtaaacatgccagcaatcaagac

SEQ ID NO: 4863722 - DNA, 25 bp, Homo sapien
ttgatctcagtgtacttggaagagt

SEQ ID NO: 4863723 - DNA, 25 bp, Homo sapien
gtgaaactctgtctcgaaataaaat

SEQ ID NO: 4863724 - DNA, 25 bp, Homo sapien
gacctgtcgagtgcattagtgagaa

SEQ ID NO: 4863725 - DNA, 25 bp, Homo sapien
acctgtcgagtgcattagtgagaag

SEQ ID NO: 4863726 - DNA, 25 bp, Homo sapien
cctgtcgagtgcattagtgagaagg

SEQ ID NO: 4863727 - DNA, 25 bp, Homo sapien
acatgcaacagcagaggcgatccac

SEQ ID NO: 4863728 - DNA, 25 bp, Homo sapien
gaggcagctctactctgagtgcaga

SEQ ID NO: 4863729 - DNA, 25 bp, Homo sapien
tgcatagcctacatgcagccccgtg

SEQ ID NO: 4863730 - DNA, 25 bp, Homo sapien
gctgggcctgaactgcgagctctgt

SEQ ID NO: 4863731 - DNA, 25 bp, Homo sapien
cttttaagtttcaatatattattca

SEQ ID NO: 4863732 - DNA, 25 bp, Homo sapien
tatagtttgacccatccagtacaca

SEQ ID NO: 4863733 - DNA, 25 bp, Homo sapien
tttcaagcccttgccggctgggcag

SEQ ID NO: 4863734 - DNA, 25 bp, Homo sapien
taactgagcatgctagctgaggcaa

SEQ ID NO: 4863735 - DNA, 25 bp, Homo sapien
tagacaaacactaagcagaagggac

SEQ ID NO: 4863736 - DNA, 25 bp, Homo sapien
gttggttactctatcaacttctgag

SEQ ID NO: 4863737 - DNA, 25 bp, Homo sapien
tcaaagtgactgataatgttgttca

SEQ ID NO: 4863738 - DNA, 25 bp, Homo sapien
tatgtcatcttgatcaattattcct

SEQ ID NO: 4863739 - DNA, 25 bp, Homo sapien
aatttgagactattattaggcacaa

SEQ ID NO: 4863740 - DNA, 25 bp, Homo sapien
cattgcacaaattttgaaatgtgta

SEQ ID NO: 4863741 - DNA, 25 bp, Homo sapien
ttccctcaaagtgctatgttagcta

SEQ ID NO: 4863742 - DNA, 25 bp, Homo sapien
tttccccacttcgtataggctttca

SEQ ID NO: 4863743 - DNA, 25 bp, Homo sapien
tgcttgctttgagttcaatttactc

SEQ ID NO: 4863744 - DNA, 25 bp, Homo sapien
ttaattgatacagggctgttcaagc

SEQ ID NO: 4863745 - DNA, 25 bp, Homo sapien
tcatcaatgaagcatctaaacccag

SEQ ID NO: 4863746 - DNA, 25 bp, Homo sapien
catcaatgaagcatctaaacccaga

SEQ ID NO: 4863747 - DNA, 25 bp, Homo sapien
gctttgttgcactgactaggcactc

SEQ ID NO: 4863748 - DNA, 25 bp, Homo sapien
tgcaaccttgtacctctaatagctt

SEQ ID NO: 4863749 - DNA, 25 bp, Homo sapien
tgaatccatgaacacggtatagctg

SEQ ID NO: 4863750 - DNA, 25 bp, Homo sapien
tacaatgtcacttgtagataaggac

SEQ ID NO: 4863751 - DNA, 25 bp, Homo sapien
ttcaaacctgggtaagatagctcca

SEQ ID NO: 4863752 - DNA, 25 bp, Homo sapien
gaaatgcaataaaacgagcagtgct

SEQ ID NO: 4863753 - DNA, 25 bp, Homo sapien
gaaaatggccaagctagattcaaac

SEQ ID NO: 4863754 - DNA, 25 bp, Homo sapien
taaaaaatgctgacacagagacatg

SEQ ID NO: 4863755 - DNA, 25 bp, Homo sapien
agaatgctacttatgctctgcagag

SEQ ID NO: 4863756 - DNA, 25 bp, Homo sapien
gaaagtaaccacattcgggcctcat

SEQ ID NO: 4863757 - DNA, 25 bp, Homo sapien
caagattgcctataagattgcgaaa

SEQ ID NO: 4863758 - DNA, 25 bp, Homo sapien
tggatactaggaactacgcttggtg

SEQ ID NO: 4863759 - DNA, 25 bp, Homo sapien
ggagcctcccatggcgcagaacttg

SEQ ID NO: 4863760 - DNA, 25 bp, Homo sapien
cggcgggcggctgtgcccagaccct

SEQ ID NO: 4863761 - DNA, 25 bp, Homo sapien
gtgggagcctcccatggcgcagaac

SEQ ID NO: 4863762 - DNA, 25 bp, Homo sapien
gagagtgggagcctcccatggcgca

SEQ ID NO: 4863763 - DNA, 25 bp, Homo sapien
tccgtgggtctcgggtgcctctccc

SEQ ID NO: 4863764 - DNA, 25 bp, Homo sapien
ctccgtgggtctcgggtgcctctcc

SEQ ID NO: 4863765 - DNA, 25 bp, Homo sapien
gaagtgttttgcacatgtcatgtgc

SEQ ID NO: 4863766 - DNA, 25 bp, Homo sapien
caagaactatagtaattcaatggct

SEQ ID NO: 4863767 - DNA, 25 bp, Homo sapien
gttacttgatcgttctgtgcttcag

SEQ ID NO: 4863768 - DNA, 25 bp, Homo sapien
gctctgccagttgagacaagttttg

SEQ ID NO: 4863769 - DNA, 25 bp, Homo sapien
tattcaaggtgcatgcagagcctca

SEQ ID NO: 4863770 - DNA, 25 bp, Homo sapien
gtctacacatacagatgaggccagt

SEQ ID NO: 4863771 - DNA, 25 bp, Homo sapien
ggtaaaacaagtaggctgccaagcc

SEQ ID NO: 4863772 - DNA, 25 bp, Homo sapien
gagtctttcacctggacatgccaaa

SEQ ID NO: 4863773 - DNA, 25 bp, Homo sapien
ggtcagcgttatccatgacagccat

SEQ ID NO: 4863774 - DNA, 25 bp, Homo sapien
cctggagagacttgtcgcttgtaca

SEQ ID NO: 4863775 - DNA, 25 bp, Homo sapien
gcaggaagtctgtagccgggtaaca

SEQ ID NO: 4863776 - DNA, 25 bp, Homo sapien
tgacagccatatgttcggcaggaag

SEQ ID NO: 4863777 - DNA, 25 bp, Homo sapien
tgctcttaatcaccttcctgtacgg

SEQ ID NO: 4863778 - DNA, 25 bp, Homo sapien
cctgtacggcctccttgaataaatg

SEQ ID NO: 4863779 - DNA, 25 bp, Homo sapien
gcttttaccaaagctggctcattgg

SEQ ID NO: 4863780 - DNA, 25 bp, Homo sapien
taacctcctaagtgatctagctggg

SEQ ID NO: 4863781 - DNA, 25 bp, Homo sapien
tcaatgaagacgtcagaaactcctc

SEQ ID NO: 4863782 - DNA, 25 bp, Homo sapien
tagaaaacctaccttggccacatcg

SEQ ID NO: 4863783 - DNA, 25 bp, Homo sapien
cacagtgatgtgctcattaaaaggc

SEQ ID NO: 4863784 - DNA, 25 bp, Homo sapien
ggcacttcaccctagctgttgctga

SEQ ID NO: 4863785 - DNA, 25 bp, Homo sapien
tgccattactatggcccacggggca

SEQ ID NO: 4863786 - DNA, 25 bp, Homo sapien
tggtcccaagtgccattactatggc

SEQ ID NO: 4863787 - DNA, 25 bp, Homo sapien
ccacggggcacttattaggaatcat

SEQ ID NO: 4863788 - DNA, 25 bp, Homo sapien
gcccacggggcacttattaggaatc

SEQ ID NO: 4863789 - DNA, 25 bp, Homo sapien
tgggtatcaactgtaaagggcccag

SEQ ID NO: 4863790 - DNA, 25 bp, Homo sapien
ttgggtatcaactgtaaagggccca

SEQ ID NO: 4863791 - DNA, 25 bp, Homo sapien
ctgctttgggtatcaactgtaaagg

SEQ ID NO: 4863792 - DNA, 25 bp, Homo sapien
gctttgggtatcaactgtaaagggc

SEQ ID NO: 4863793 - DNA, 25 bp, Homo sapien
catcaacacatttgtgtgtgaagag

SEQ ID NO: 4863794 - DNA, 25 bp, Homo sapien
caacacatttgtgtgtgaagagaat

SEQ ID NO: 4863795 - DNA, 25 bp, Homo sapien
cgtccatcaacacatttgtgtgtga

SEQ ID NO: 4863796 - DNA, 25 bp, Homo sapien
tccatcaacacatttgtgtgtgaag

SEQ ID NO: 4863797 - DNA, 25 bp, Homo sapien
gcagcgcagggagcacgcatgttca

SEQ ID NO: 4863798 - DNA, 25 bp, Homo sapien
cggcagcgcagggagcacgcatgtt

SEQ ID NO: 4863799 - DNA, 25 bp, Homo sapien
gcgcagggagcacgcatgttcacat

SEQ ID NO: 4863800 - DNA, 25 bp, Homo sapien
agcgcagggagcacgcatgttcaca

SEQ ID NO: 4863801 - DNA, 25 bp, Homo sapien
gcgggctcctgacatctgtggccaa

SEQ ID NO: 4863802 - DNA, 25 bp, Homo sapien
agagggctcttagctcagcagggaa

SEQ ID NO: 4863803 - DNA, 25 bp, Homo sapien
cctctctgcttcgtaaagggcgtga

SEQ ID NO: 4863804 - DNA, 25 bp, Homo sapien
gctatagtgacaccacaaggcctga

SEQ ID NO: 4863805 - DNA, 25 bp, Homo sapien
gataccgaagagactcctggcgctg

SEQ ID NO: 4863806 - DNA, 25 bp, Homo sapien
tgacaactggtagaggcattccctg

SEQ ID NO: 4863807 - DNA, 25 bp, Homo sapien
aagacatctatcgtgcggctctcag

SEQ ID NO: 4863808 - DNA, 25 bp, Homo sapien
ttttcaatgagccagcaaggtgggc

SEQ ID NO: 4863809 - DNA, 25 bp, Homo sapien
tggggtctgctgaaagacccttgcc

SEQ ID NO: 4863810 - DNA, 25 bp, Homo sapien
ctggggtctgctgaaagacccttgc

SEQ ID NO: 4863811 - DNA, 25 bp, Homo sapien
gtctgctgaaagacccttgcccaga

SEQ ID NO: 4863812 - DNA, 25 bp, Homo sapien
gggtctgctgaaagacccttgccca

SEQ ID NO: 4863813 - DNA, 25 bp, Homo sapien
ctggctgatcagtgactcgtgctct

SEQ ID NO: 4863814 - DNA, 25 bp, Homo sapien
gatcagtgactcgtgctctaatctt

SEQ ID NO: 4863815 - DNA, 25 bp, Homo sapien
gcctggctgatcagtgactcgtgct

SEQ ID NO: 4863816 - DNA, 25 bp, Homo sapien
gctgatcagtgactcgtgctctaat

SEQ ID NO: 4863817 - DNA, 25 bp, Homo sapien
ccctccctaaccctggcagcgtggg

SEQ ID NO: 4863818 - DNA, 25 bp, Homo sapien
cttcgcggccgctgtggactgttgt

SEQ ID NO: 4863819 - DNA, 25 bp, Homo sapien
ctggcagcgtgggggatttcagcct

SEQ ID NO: 4863820 - DNA, 25 bp, Homo sapien
cagcgtgggggatttcagcctgttc

SEQ ID NO: 4863821 - DNA, 25 bp, Homo sapien
ggagattcggtcataccccacaggt

SEQ ID NO: 4863822 - DNA, 25 bp, Homo sapien
gcgccagcaagcgtttccagcagag

SEQ ID NO: 4863823 - DNA, 25 bp, Homo sapien
cagaggaggaccgttttctgagccg

SEQ ID NO: 4863824 - DNA, 25 bp, Homo sapien
cggatgtggttaaacgagtgccgtc

SEQ ID NO: 4863825 - DNA, 25 bp, Homo sapien
gcaggggaatgggtggggagagcct

SEQ ID NO: 4863826 - DNA, 25 bp, Homo sapien
caggggaatgggtggggagagcctt

SEQ ID NO: 4863827 - DNA, 25 bp, Homo sapien
gagcgcggctcctccggctccagct

SEQ ID NO: 4863828 - DNA, 25 bp, Homo sapien
agcgcggctcctccggctccagctc

SEQ ID NO: 4863829 - DNA, 25 bp, Homo sapien
catttcgcccactgcacgggggaca

SEQ ID NO: 4863830 - DNA, 25 bp, Homo sapien
tttcgcccactgcacgggggacagg

SEQ ID NO: 4863831 - DNA, 25 bp, Homo sapien
tcgcccactgcacgggggacaggat

SEQ ID NO: 4863832 - DNA, 25 bp, Homo sapien
ccatttcgcccactgcacgggggac

SEQ ID NO: 4863833 - DNA, 25 bp, Homo sapien
atttggtctcggcttgcgaatcctc

SEQ ID NO: 4863834 - DNA, 25 bp, Homo sapien
ttggtctcggcttgcgaatcctcct

SEQ ID NO: 4863835 - DNA, 25 bp, Homo sapien
ggcttgcgaatcctcctcctcgggg

SEQ ID NO: 4863836 - DNA, 25 bp, Homo sapien
caaggatttggtctcggcttgcgaa

SEQ ID NO: 4863837 - DNA, 25 bp, Homo sapien
gtctgcatctcagcggggacgccgt

SEQ ID NO: 4863838 - DNA, 25 bp, Homo sapien
agggagtcgcagatggatggaggca

SEQ ID NO: 4863839 - DNA, 25 bp, Homo sapien
gcaagcgcgtctgcatctcagcggg

SEQ ID NO: 4863840 - DNA, 25 bp, Homo sapien
tggatggaggcaagcgcgtctgcat

SEQ ID NO: 4863841 - DNA, 25 bp, Homo sapien
aagcttagagaaagtgaccgaggcc

SEQ ID NO: 4863842 - DNA, 25 bp, Homo sapien
gatcctgaactttcggacgcacacg

SEQ ID NO: 4863843 - DNA, 25 bp, Homo sapien
gatcagtgacgttgctccagtgtgg

SEQ ID NO: 4863844 - DNA, 25 bp, Homo sapien
tgcggaactctcctagcgaaacggg

SEQ ID NO: 4863845 - DNA, 25 bp, Homo sapien
gggcctgtcatcacgcgaccttctt

SEQ ID NO: 4863846 - DNA, 25 bp, Homo sapien
accgcggctgcgttttgggtacacg

SEQ ID NO: 4863847 - DNA, 25 bp, Homo sapien
acgcggatgacagcccggcagagac

SEQ ID NO: 4863848 - DNA, 25 bp, Homo sapien
gccttccgcaatcacgcggatgaca

SEQ ID NO: 4863849 - DNA, 25 bp, Homo sapien
tgggcccgaggctaagaatggtgtc

SEQ ID NO: 4863850 - DNA, 25 bp, Homo sapien
ctccctgggcccgaggctaagaatg

SEQ ID NO: 4863851 - DNA, 25 bp, Homo sapien
ggcccgaggctaagaatggtgtcac

SEQ ID NO: 4863852 - DNA, 25 bp, Homo sapien
gaactccctgggcccgaggctaaga

SEQ ID NO: 4863853 - DNA, 25 bp, Homo sapien
tgtctaacttcacaaccaaccggtc

SEQ ID NO: 4863854 - DNA, 25 bp, Homo sapien
catattcacagaggctaaaagtcca

SEQ ID NO: 4863855 - DNA, 25 bp, Homo sapien
gcattcctctttgctcggtaggcct

SEQ ID NO: 4863856 - DNA, 25 bp, Homo sapien
ccgagttaggccgatgctaggcatt

SEQ ID NO: 4863857 - DNA, 25 bp, Homo sapien
atgaggaattaccactttcaacggt

SEQ ID NO: 4863858 - DNA, 25 bp, Homo sapien
aatgaggaattaccactttcaacgg

SEQ ID NO: 4863859 - DNA, 25 bp, Homo sapien
tgaggaattaccactttcaacggta

SEQ ID NO: 4863860 - DNA, 25 bp, Homo sapien
gggtttcagcttcaggagtctcaaa

SEQ ID NO: 4863861 - DNA, 25 bp, Homo sapien
ctccttgaaaggtgatcggatcggg

SEQ ID NO: 4863862 - DNA, 25 bp, Homo sapien
aggtcctgccaatccgagtgatgga

SEQ ID NO: 4863863 - DNA, 25 bp, Homo sapien
ggagtctcaaaattaccttcagaat

SEQ ID NO: 4863864 - DNA, 25 bp, Homo sapien
agtgattccgaaaaagcctcttaag

SEQ ID NO: 4863865 - DNA, 25 bp, Homo sapien
taagtagactgaagggctctcacca

SEQ ID NO: 4863866 - DNA, 25 bp, Homo sapien
taagtgagacaacggaagctcctgc

SEQ ID NO: 4863867 - DNA, 25 bp, Homo sapien
cagtagaaagcaacttagcctgagg

SEQ ID NO: 4863868 - DNA, 25 bp, Homo sapien
tagctccggatgttgcacccaagga

SEQ ID NO: 4863869 - DNA, 25 bp, Homo sapien
cattggcggtactctggactagctc

SEQ ID NO: 4863870 - DNA, 25 bp, Homo sapien
tctggactagctccggatgttgcac

SEQ ID NO: 4863871 - DNA, 25 bp, Homo sapien
gtgtatgtgtgacaaggccattggc

SEQ ID NO: 4863872 - DNA, 25 bp, Homo sapien
atatgaaatgactctgaagggcttt

SEQ ID NO: 4863873 - DNA, 25 bp, Homo sapien
tgcccactgaaatcctctccaggca

SEQ ID NO: 4863874 - DNA, 25 bp, Homo sapien
aatatgaaatgactctgaagggctt

SEQ ID NO: 4863875 - DNA, 25 bp, Homo sapien
gagaaagggaacttatccagtccca

SEQ ID NO: 4863876 - DNA, 25 bp, Homo sapien
caaaacaatcaataattttgggaga

SEQ ID NO: 4863877 - DNA, 25 bp, Homo sapien
agaaagggaacttatccagtcccag

SEQ ID NO: 4863878 - DNA, 25 bp, Homo sapien
gaaagggaacttatccagtcccaga

SEQ ID NO: 4863879 - DNA, 25 bp, Homo sapien
taaatgtagcccacacgtttgaggg

SEQ ID NO: 4863880 - DNA, 25 bp, Homo sapien
tataatttataactgcggtccaacc

SEQ ID NO: 4863881 - DNA, 25 bp, Homo sapien
gccattatgtaccaggaagccagaa

SEQ ID NO: 4863882 - DNA, 25 bp, Homo sapien
aagtcagcacaggagccatgggtat

SEQ ID NO: 4863883 - DNA, 25 bp, Homo sapien
gcttggtctatgagtcacagtttgc

SEQ ID NO: 4863884 - DNA, 25 bp, Homo sapien
caaacaacttggcattccctcacag

SEQ ID NO: 4863885 - DNA, 25 bp, Homo sapien
taatcgtgtgaccattgatgggccc

SEQ ID NO: 4863886 - DNA, 25 bp, Homo sapien
tctgatcgagactaccaaaattgtg

SEQ ID NO: 4863887 - DNA, 25 bp, Homo sapien
ctgcctcttctcaaccatgcatgac

SEQ ID NO: 4863888 - DNA, 25 bp, Homo sapien
ccatgcatgactcaggtggagacag

SEQ ID NO: 4863889 - DNA, 25 bp, Homo sapien
agaatgcaaaggctagtactgaatt

SEQ ID NO: 4863890 - DNA, 25 bp, Homo sapien
aatgcaaaggctagtactgaatttg

SEQ ID NO: 4863891 - DNA, 25 bp, Homo sapien
tgctgggtgcatgagacacatccat

SEQ ID NO: 4863892 - DNA, 25 bp, Homo sapien
caaagtagcaaccacccacatggag

SEQ ID NO: 4863893 - DNA, 25 bp, Homo sapien
cagacagagcaatctcagccagcat

SEQ ID NO: 4863894 - DNA, 25 bp, Homo sapien
tggcaggaccacaagccaataggcg

SEQ ID NO: 4863895 - DNA, 25 bp, Homo sapien
atctgtcgcatactgagaaggccta

SEQ ID NO: 4863896 - DNA, 25 bp, Homo sapien
ctcatctgtcgcatactgagaaggc

SEQ ID NO: 4863897 - DNA, 25 bp, Homo sapien
agctcagctctaggctaacggctgg

SEQ ID NO: 4863898 - DNA, 25 bp, Homo sapien
aattgttcagtgatgccgcagctca

SEQ ID NO: 4863899 - DNA, 25 bp, Homo sapien
gccaagtatggtatatgaaacatcc

SEQ ID NO: 4863900 - DNA, 25 bp, Homo sapien
cttgagagaggtggtaggtctcacc

SEQ ID NO: 4863901 - DNA, 25 bp, Homo sapien
tccacaacagatgtagccaagtatg

SEQ ID NO: 4863902 - DNA, 25 bp, Homo sapien
cttgaggaagcccacatgtgctaca

SEQ ID NO: 4863903 - DNA, 25 bp, Homo sapien
tacaaaacggactgagacaacttat

SEQ ID NO: 4863904 - DNA, 25 bp, Homo sapien
cggactgagacaacttatactataa

SEQ ID NO: 4863905 - DNA, 25 bp, Homo sapien
caaaacggactgagacaacttatac

SEQ ID NO: 4863906 - DNA, 25 bp, Homo sapien
aacggactgagacaacttatactat

SEQ ID NO: 4863907 - DNA, 25 bp, Homo sapien
tccccttctacccacttctcctctg

SEQ ID NO: 4863908 - DNA, 25 bp, Homo sapien
tctgcttccatttcatcacaggacc

SEQ ID NO: 4863909 - DNA, 25 bp, Homo sapien
cttccatttcatcacaggaccccat

SEQ ID NO: 4863910 - DNA, 25 bp, Homo sapien
cccttctacccacttctcctctgct

SEQ ID NO: 4863911 - DNA, 25 bp, Homo sapien
cggagcactcgtaggtcactgcagc

SEQ ID NO: 4863912 - DNA, 25 bp, Homo sapien
gtgatatccattctacactttcatc

SEQ ID NO: 4863913 - DNA, 25 bp, Homo sapien
taataataagtgatatccattctac

SEQ ID NO: 4863914 - DNA, 25 bp, Homo sapien
tagagtacaacggagcactcgtagg

SEQ ID NO: 4863915 - DNA, 25 bp, Homo sapien
gatagtaagtatggcaaaatcttgg

SEQ ID NO: 4863916 - DNA, 25 bp, Homo sapien
tactaaaatgtgttaaaacgtctca

SEQ ID NO: 4863917 - DNA, 25 bp, Homo sapien
ctcagtgcttcataatcagaatttg

SEQ ID NO: 4863918 - DNA, 25 bp, Homo sapien
aagcattcacacacctttctcatga

SEQ ID NO: 4863919 - DNA, 25 bp, Homo sapien
gactgccgagatatccgtggaatcc

SEQ ID NO: 4863920 - DNA, 25 bp, Homo sapien
atgctgccttctgtcatcgcctcgt

SEQ ID NO: 4863921 - DNA, 25 bp, Homo sapien
catgagctgcttttgttccgaggac

SEQ ID NO: 4863922 - DNA, 25 bp, Homo sapien
tctgaaggtttagaacaagtcttag

SEQ ID NO: 4863923 - DNA, 25 bp, Homo sapien
tcaagcttgagaggtgagctcctcg

SEQ ID NO: 4863924 - DNA, 25 bp, Homo sapien
ccactgggtctgtaggctgttctaa

SEQ ID NO: 4863925 - DNA, 25 bp, Homo sapien
gaacctggcatctcctagcaaagga

SEQ ID NO: 4863926 - DNA, 25 bp, Homo sapien
taaacctgctgacttactgatgcca

SEQ ID NO: 4863927 - DNA, 25 bp, Homo sapien
catggattcgtcaaagttatctggg

SEQ ID NO: 4863928 - DNA, 25 bp, Homo sapien
atccatggattcgtcaaagttatct

SEQ ID NO: 4863929 - DNA, 25 bp, Homo sapien
tcgtcaaagttatctgggtcaaagt

SEQ ID NO: 4863930 - DNA, 25 bp, Homo sapien
gattcgtcaaagttatctgggtcaa

SEQ ID NO: 4863931 - DNA, 25 bp, Homo sapien
taagctttgtatgaacctcggtgca

SEQ ID NO: 4863932 - DNA, 25 bp, Homo sapien
gccaaactcaacagacaagacacag

SEQ ID NO: 4863933 - DNA, 25 bp, Homo sapien
tctgattccacacaacagttaagcc

SEQ ID NO: 4863934 - DNA, 25 bp, Homo sapien
cctcggtgcacctcaaaggtaaatt

SEQ ID NO: 4863935 - DNA, 25 bp, Homo sapien
agacccttttggatcatttcccacg

SEQ ID NO: 4863936 - DNA, 25 bp, Homo sapien
tccatagagtatgaagacggtggcc

SEQ ID NO: 4863937 - DNA, 25 bp, Homo sapien
tataacacgactcctaacagtccag

SEQ ID NO: 4863938 - DNA, 25 bp, Homo sapien
gacgctacagaggtaagttacagga

SEQ ID NO: 4863939 - DNA, 25 bp, Homo sapien
ttcacttgacgatgttcacacaaca

SEQ ID NO: 4863940 - DNA, 25 bp, Homo sapien
tgtggcttaccctgtggctaagtga

SEQ ID NO: 4863941 - DNA, 25 bp, Homo sapien
cacacctagcacctattcagtacaa

SEQ ID NO: 4863942 - DNA, 25 bp, Homo sapien
catctactcaagttttgtgataaag

SEQ ID NO: 4863943 - DNA, 25 bp, Homo sapien
gatgcaccaacaaaattagagacag

SEQ ID NO: 4863944 - DNA, 25 bp, Homo sapien
aattctttctatgaggtgagataca

SEQ ID NO: 4863945 - DNA, 25 bp, Homo sapien
caaattaaaaatgtcgtattcatga

SEQ ID NO: 4863946 - DNA, 25 bp, Homo sapien
gaatattcaactctagtctggcaga

SEQ ID NO: 4863947 - DNA, 25 bp, Homo sapien
gaaaacagagaaatttcacttgttc

SEQ ID NO: 4863948 - DNA, 25 bp, Homo sapien
agaaaacagagaaatttcacttgtt

SEQ ID NO: 4863949 - DNA, 25 bp, Homo sapien
gcacctaaggtgtaaaggccaagcc

SEQ ID NO: 4863950 - DNA, 25 bp, Homo sapien
tatggacaactgcaaggctaagctg

SEQ ID NO: 4863951 - DNA, 25 bp, Homo sapien
tggtattgtcaaagcgccacgtgac

SEQ ID NO: 4863952 - DNA, 25 bp, Homo sapien
ggctaagctgactcatgaagtgact

SEQ ID NO: 4863953 - DNA, 25 bp, Homo sapien
cacaaagcctgaaactggggaagct

SEQ ID NO: 4863954 - DNA, 25 bp, Homo sapien
gctgcacaaagcctgaaactgggga

SEQ ID NO: 4863955 - DNA, 25 bp, Homo sapien
tggggaagcttgaaccatctgttat

SEQ ID NO: 4863956 - DNA, 25 bp, Homo sapien
gcttgaaccatctgttatttgtaga

SEQ ID NO: 4863957 - DNA, 25 bp, Homo sapien
aaacagttccagttagacttgtgtg

SEQ ID NO: 4863958 - DNA, 25 bp, Homo sapien
aaagccatagacgtctcataaaaca

SEQ ID NO: 4863959 - DNA, 25 bp, Homo sapien
tccagttagacttgtgtgctcacag

SEQ ID NO: 4863960 - DNA, 25 bp, Homo sapien
tagacgtctcataaaacagttccag

SEQ ID NO: 4863961 - DNA, 25 bp, Homo sapien
tgtcaaggtatgaaatggagcagac

SEQ ID NO: 4863962 - DNA, 25 bp, Homo sapien
gagcagacagcagtgtgtgcggata

SEQ ID NO: 4863963 - DNA, 25 bp, Homo sapien
acaagccagtttgcaatcacactga

SEQ ID NO: 4863964 - DNA, 25 bp, Homo sapien
cggatagaagccaaagcatacagca

SEQ ID NO: 4863965 - DNA, 25 bp, Homo sapien
tgcatccagggcgagagactgagtt

SEQ ID NO: 4863966 - DNA, 25 bp, Homo sapien
aacatgcatccagggcgagagactg

SEQ ID NO: 4863967 - DNA, 25 bp, Homo sapien
gaacatgcatccagggcgagagact

SEQ ID NO: 4863968 - DNA, 25 bp, Homo sapien
atccagggcgagagactgagtttca

SEQ ID NO: 4863969 - DNA, 25 bp, Homo sapien
ctcatcagtagcatggccatcccta

SEQ ID NO: 4863970 - DNA, 25 bp, Homo sapien
catcagtagcatggccatccctatt

SEQ ID NO: 4863971 - DNA, 25 bp, Homo sapien
agtagcatggccatccctattagaa

SEQ ID NO: 4863972 - DNA, 25 bp, Homo sapien
ttctcctcatcagtagcatggccat

SEQ ID NO: 4863973 - DNA, 25 bp, Homo sapien
ttctgaggatgaaaacgcatgattt

SEQ ID NO: 4863974 - DNA, 25 bp, Homo sapien
catgatttatggtagacacaggaac

SEQ ID NO: 4863975 - DNA, 25 bp, Homo sapien
tgaggatgaaaacgcatgatttatg

SEQ ID NO: 4863976 - DNA, 25 bp, Homo sapien
tgaaaacgcatgatttatggtagac

SEQ ID NO: 4863977 - DNA, 25 bp, Homo sapien
tcaggcatttccatgcttatgtaca

SEQ ID NO: 4863978 - DNA, 25 bp, Homo sapien
catttccatgcttatgtacattaga

SEQ ID NO: 4863979 - DNA, 25 bp, Homo sapien
tccatgcttatgtacattagaaaga

SEQ ID NO: 4863980 - DNA, 25 bp, Homo sapien
gcttatgtacattagaaagatgaag

SEQ ID NO: 4863981 - DNA, 25 bp, Homo sapien
gacctgaagggatgtgcagatctgt

SEQ ID NO: 4863982 - DNA, 25 bp, Homo sapien
ccctggcttaatggcagatcatgac

SEQ ID NO: 4863983 - DNA, 25 bp, Homo sapien
gaatactcaggattaaccccaagaa

SEQ ID NO: 4863984 - DNA, 25 bp, Homo sapien
gggaataaattgctccaagtcctga

SEQ ID NO: 4863985 - DNA, 25 bp, Homo sapien
gagtggtagtctctaacctcagtaa

SEQ ID NO: 4863986 - DNA, 25 bp, Homo sapien
tcctctagtgaggaagaatataatt

SEQ ID NO: 4863987 - DNA, 25 bp, Homo sapien
ccccagctctctacataaattttta

SEQ ID NO: 4863988 - DNA, 25 bp, Homo sapien
tttaccatgtactgtgtcaaaggtg

SEQ ID NO: 4863989 - DNA, 25 bp, Homo sapien
aagcacagtggacccgtcttcttcc

SEQ ID NO: 4863990 - DNA, 25 bp, Homo sapien
agcacagtggacccgtcttcttcca

SEQ ID NO: 4863991 - DNA, 25 bp, Homo sapien
gcacagtggacccgtcttcttccat

SEQ ID NO: 4863992 - DNA, 25 bp, Homo sapien
cagagtccccaggttaagtcaactt

SEQ ID NO: 4863993 - DNA, 25 bp, Homo sapien
tttccatggctaccaagttcgtgag

SEQ ID NO: 4863994 - DNA, 25 bp, Homo sapien
cttgcctaaagggaggtaatacagg

SEQ ID NO: 4863995 - DNA, 25 bp, Homo sapien
taacaacatttcatgggtcagtctc

SEQ ID NO: 4863996 - DNA, 25 bp, Homo sapien
gcctggatatgactgcagccctgat

SEQ ID NO: 4863997 - DNA, 25 bp, Homo sapien
agcagatagctgatacacccctgga

SEQ ID NO: 4863998 - DNA, 25 bp, Homo sapien
gatcaacacctggattgcacagcct

SEQ ID NO: 4863999 - DNA, 25 bp, Homo sapien
gcaaagctgcccaagattcctgacg

SEQ ID NO: 4864000 - DNA, 25 bp, Homo sapien
taccactagaaccagaaggcacttg

SEQ ID NO: 4864001 - DNA, 25 bp, Homo sapien
cccacgtggcaaggagccgatgtct

SEQ ID NO: 4864002 - DNA, 25 bp, Homo sapien
ggcacttgcagtgggcagcctctaa

SEQ ID NO: 4864003 - DNA, 25 bp, Homo sapien
catgccaacagaagtccaaggtacc

SEQ ID NO: 4864004 - DNA, 25 bp, Homo sapien
cctttcacccggatgattcaggatc

SEQ ID NO: 4864005 - DNA, 25 bp, Homo sapien
gcagcgacctcctgctgtaacccag

SEQ ID NO: 4864006 - DNA, 25 bp, Homo sapien
gatcatcctgaacttccgctgctcc

SEQ ID NO: 4864007 - DNA, 25 bp, Homo sapien
tgaacttccgctgctccgcagcgac

SEQ ID NO: 4864008 - DNA, 25 bp, Homo sapien
cttctctgcagaggactccagcagc

SEQ ID NO: 4864009 - DNA, 25 bp, Homo sapien
cgacacaggggccttctctgcagag

SEQ ID NO: 4864010 - DNA, 25 bp, Homo sapien
ctccacaggacaccgacacaggggc

SEQ ID NO: 4864011 - DNA, 25 bp, Homo sapien
aggacaccgacacaggggccttctc

SEQ ID NO: 4864012 - DNA, 25 bp, Homo sapien
ttaaggtgagcacggctgtcttgtc

SEQ ID NO: 4864013 - DNA, 25 bp, Homo sapien
ctgtcttgtctgattcgctgaggca

SEQ ID NO: 4864014 - DNA, 25 bp, Homo sapien
tattaaggtgagcacggctgtcttg

SEQ ID NO: 4864015 - DNA, 25 bp, Homo sapien
gagcacggctgtcttgtctgattcg

SEQ ID NO: 4864016 - DNA, 25 bp, Homo sapien
tacaggaatcggagagttgaacggt

SEQ ID NO: 4864017 - DNA, 25 bp, Homo sapien
cctacagctgaggtgcttaaccact

SEQ ID NO: 4864018 - DNA, 25 bp, Homo sapien
cactgatttagttacacatgggagc

SEQ ID NO: 4864019 - DNA, 25 bp, Homo sapien
ttcagataaccaggaaaggcctagc

SEQ ID NO: 4864020 - DNA, 25 bp, Homo sapien
ttggtccagggtctagctctcagct

SEQ ID NO: 4864021 - DNA, 25 bp, Homo sapien
gaacagagccatctgattggcaggt

SEQ ID NO: 4864022 - DNA, 25 bp, Homo sapien
taaggccatgtaatcacggctgatg

SEQ ID NO: 4864023 - DNA, 25 bp, Homo sapien
caaagtcagaccactggaagttggc

SEQ ID NO: 4864024 - DNA, 25 bp, Homo sapien
aacttcttgccgggtctcttcgtat

SEQ ID NO: 4864025 - DNA, 25 bp, Homo sapien
tgccgggtctcttcgtatttcttct

SEQ ID NO: 4864026 - DNA, 25 bp, Homo sapien
tcttgccgggtctcttcgtatttct

SEQ ID NO: 4864027 - DNA, 25 bp, Homo sapien
acttcttgccgggtctcttcgtatt

SEQ ID NO: 4864028 - DNA, 25 bp, Homo sapien
aaaaagtattatggaccaggcgctg

SEQ ID NO: 4864029 - DNA, 25 bp, Homo sapien
gctgggtgctctgtgagtcgcatca

SEQ ID NO: 4864030 - DNA, 25 bp, Homo sapien
tatggatggctaccgctctctaaga

SEQ ID NO: 4864031 - DNA, 25 bp, Homo sapien
gaatgacaatgtccttctgacccag

SEQ ID NO: 4864032 - DNA, 25 bp, Homo sapien
gcaatagtcttttcatattcagcta

SEQ ID NO: 4864033 - DNA, 25 bp, Homo sapien
ttgagcaatagtcttttcatattca

SEQ ID NO: 4864034 - DNA, 25 bp, Homo sapien
atagtcttttcatattcagctacaa

SEQ ID NO: 4864035 - DNA, 25 bp, Homo sapien
gagcaatagtcttttcatattcagc

SEQ ID NO: 4864036 - DNA, 25 bp, Homo sapien
ggttctcatatctcctgaagagatc

SEQ ID NO: 4864037 - DNA, 25 bp, Homo sapien
caggttctcatatctcctgaagaga

SEQ ID NO: 4864038 - DNA, 25 bp, Homo sapien
ctgagaggtcatacttgtcctttgt

SEQ ID NO: 4864039 - DNA, 25 bp, Homo sapien
agaacacctttcaggttctcatatc

SEQ ID NO: 4864040 - DNA, 25 bp, Homo sapien
taactctggctaagtaatcctgagc

SEQ ID NO: 4864041 - DNA, 25 bp, Homo sapien
tttaactctggctaagtaatcctga

SEQ ID NO: 4864042 - DNA, 25 bp, Homo sapien
aactctggctaagtaatcctgagca

SEQ ID NO: 4864043 - DNA, 25 bp, Homo sapien
ctctggctaagtaatcctgagcaca

SEQ ID NO: 4864044 - DNA, 25 bp, Homo sapien
cataaaaatacaacctggagttgcg

SEQ ID NO: 4864045 - DNA, 25 bp, Homo sapien
cacaacatcatgaagagtgaaattc

SEQ ID NO: 4864046 - DNA, 25 bp, Homo sapien
tcaatcttcccacaacatcatgaag

SEQ ID NO: 4864047 - DNA, 25 bp, Homo sapien
cctggagttgcgaaacagtgatttt

SEQ ID NO: 4864048 - DNA, 25 bp, Homo sapien
ccaatgggcggctgaaaactggcgc

SEQ ID NO: 4864049 - DNA, 25 bp, Homo sapien
gcaaaaattaacaaggacagtcctg

SEQ ID NO: 4864050 - DNA, 25 bp, Homo sapien
aacagtgagtgcacaggatgttcgc

SEQ ID NO: 4864051 - DNA, 25 bp, Homo sapien
gcaatgtggtagtcaccagggcaat

SEQ ID NO: 4864052 - DNA, 25 bp, Homo sapien
tcaaagccagtcaggatactaacca

SEQ ID NO: 4864053 - DNA, 25 bp, Homo sapien
tggtgtttgggtgtaataaagagac

SEQ ID NO: 4864054 - DNA, 25 bp, Homo sapien
gaggcacaggcctcaaagaattgac

SEQ ID NO: 4864055 - DNA, 25 bp, Homo sapien
taaccactgacatctgtgaggcaca

SEQ ID NO: 4864056 - DNA, 25 bp, Homo sapien
tgctctttgcggagtccagcatgga

SEQ ID NO: 4864057 - DNA, 25 bp, Homo sapien
ctgctctttgcggagtccagcatgg

SEQ ID NO: 4864058 - DNA, 25 bp, Homo sapien
tctcagcctttgcttttgttcgaac

SEQ ID NO: 4864059 - DNA, 25 bp, Homo sapien
cctttgcttttgttcgaacctgagc

SEQ ID NO: 4864060 - DNA, 25 bp, Homo sapien
gaccccaactaggaagctgttctga

SEQ ID NO: 4864061 - DNA, 25 bp, Homo sapien
cctgctgatgttttaggatgggtaa

SEQ ID NO: 4864062 - DNA, 25 bp, Homo sapien
tggcttcctgcactagataccagca

SEQ ID NO: 4864063 - DNA, 25 bp, Homo sapien
aacagggattgttgctagtcctggt

SEQ ID NO: 4864064 - DNA, 25 bp, Homo sapien
gcaaatagagttaactagtcccaag

SEQ ID NO: 4864065 - DNA, 25 bp, Homo sapien
agtcccaagtctggatctaccctac

SEQ ID NO: 4864066 - DNA, 25 bp, Homo sapien
tgacataattatgcaggccactttg

SEQ ID NO: 4864067 - DNA, 25 bp, Homo sapien
tgtcaaaaacataagtatctgggtc

SEQ ID NO: 4864068 - DNA, 25 bp, Homo sapien
cagctttgcaatcagctcatcacag

SEQ ID NO: 4864069 - DNA, 25 bp, Homo sapien
ccagctttgcaatcagctcatcaca

SEQ ID NO: 4864070 - DNA, 25 bp, Homo sapien
tcagctcatcacagatttttgtcag

SEQ ID NO: 4864071 - DNA, 25 bp, Homo sapien
catcacagatttttgtcagttcttc

SEQ ID NO: 4864072 - DNA, 25 bp, Homo sapien
taaatgactctagggcagacttgcc

SEQ ID NO: 4864073 - DNA, 25 bp, Homo sapien
tcaaaatagggtctcacatccaagg

SEQ ID NO: 4864074 - DNA, 25 bp, Homo sapien
acccattaaagctgaggagtgtcca

SEQ ID NO: 4864075 - DNA, 25 bp, Homo sapien
ggagggagtcccatattgccgttca

SEQ ID NO: 4864076 - DNA, 25 bp, Homo sapien
gagacacgtgcccttggtactatga

SEQ ID NO: 4864077 - DNA, 25 bp, Homo sapien
gatcgatacagggaaggttcaggcc

SEQ ID NO: 4864078 - DNA, 25 bp, Homo sapien
tcataacggtcatggctgagaggcc

SEQ ID NO: 4864079 - DNA, 25 bp, Homo sapien
gaaaagtttactgctacctctgaga

SEQ ID NO: 4864080 - DNA, 25 bp, Homo sapien
tgctcttgggaaaacggcaccggta

SEQ ID NO: 4864081 - DNA, 25 bp, Homo sapien
tgtaacagagggacgcaaagtgagc

SEQ ID NO: 4864082 - DNA, 25 bp, Homo sapien
ggtagacccgctcaatgcaggcttg

SEQ ID NO: 4864083 - DNA, 25 bp, Homo sapien
tggatgtggattgtggcaccccaaa

SEQ ID NO: 4864084 - DNA, 25 bp, Homo sapien
catggtttttctggatgtacagtgt

SEQ ID NO: 4864085 - DNA, 25 bp, Homo sapien
tcacctgcatcctacccataggatt

SEQ ID NO: 4864086 - DNA, 25 bp, Homo sapien
cacagtttgacccatgcctggctct

SEQ ID NO: 4864087 - DNA, 25 bp, Homo sapien
agacatcccagcatgccgtctcttg

SEQ ID NO: 4864088 - DNA, 25 bp, Homo sapien
tgaataagtgtagtgcaccactcgg

SEQ ID NO: 4864089 - DNA, 25 bp, Homo sapien
gtgtagtgcaccactcggaattctg

SEQ ID NO: 4864090 - DNA, 25 bp, Homo sapien
taagtgtagtgcaccactcggaatt

SEQ ID NO: 4864091 - DNA, 25 bp, Homo sapien
tagtgcaccactcggaattctgcat

SEQ ID NO: 4864092 - DNA, 25 bp, Homo sapien
gaacccagagttgactaccttagaa

SEQ ID NO: 4864093 - DNA, 25 bp, Homo sapien
caaaaaaggacgtttcatgtgagct

SEQ ID NO: 4864094 - DNA, 25 bp, Homo sapien
gtattggtatagaaaccttgccacc

SEQ ID NO: 4864095 - DNA, 25 bp, Homo sapien
tttggtcagtgcaataaacagccct

SEQ ID NO: 4864096 - DNA, 25 bp, Homo sapien
agcccctggtcaccactaacttgct

SEQ ID NO: 4864097 - DNA, 25 bp, Homo sapien
gcccctggtcaccactaacttgctt

SEQ ID NO: 4864098 - DNA, 25 bp, Homo sapien
gagtctgtgccctgctatgttttgc

SEQ ID NO: 4864099 - DNA, 25 bp, Homo sapien
tgaagcaggcgtcaagtgagtctgt

SEQ ID NO: 4864100 - DNA, 25 bp, Homo sapien
tactgctacacttgtccctggccag

SEQ ID NO: 4864101 - DNA, 25 bp, Homo sapien
tgtagtggcattcggtaaattcaca

SEQ ID NO: 4864102 - DNA, 25 bp, Homo sapien
ccaggaacatgttgggctgagggaa

SEQ ID NO: 4864103 - DNA, 25 bp, Homo sapien
acttagatggatacagtttgacacc

SEQ ID NO: 4864104 - DNA, 25 bp, Homo sapien
agtgggctttgaaatgggacttaga

SEQ ID NO: 4864105 - DNA, 25 bp, Homo sapien
gaaatgggacttagatggatacagt

SEQ ID NO: 4864106 - DNA, 25 bp, Homo sapien
ctcataaaactctactccccgtggg

SEQ ID NO: 4864107 - DNA, 25 bp, Homo sapien
ccctgggaatggcacagagagtaag

SEQ ID NO: 4864108 - DNA, 25 bp, Homo sapien
caagcaaatccgactggaactgagg

SEQ ID NO: 4864109 - DNA, 25 bp, Homo sapien
gggtttccagcatgagcaatgaggt

SEQ ID NO: 4864110 - DNA, 25 bp, Homo sapien
ggatttctgggtctgcctgccaaac

SEQ ID NO: 4864111 - DNA, 25 bp, Homo sapien
cttctctcccgtccctcggctcttt

SEQ ID NO: 4864112 - DNA, 25 bp, Homo sapien
cgggcggggcgcgttacatcgggcg

SEQ ID NO: 4864113 - DNA, 25 bp, Homo sapien
cgcgcctctcgctcccctcgctctg

SEQ ID NO: 4864114 - DNA, 25 bp, Homo sapien
gggtcggtgccccagcgccagaacc

SEQ ID NO: 4864115 - DNA, 25 bp, Homo sapien
gaacccgcagagaagtttcgctgct

SEQ ID NO: 4864116 - DNA, 25 bp, Homo sapien
gcagagaagtttcgctgctgcaaac

SEQ ID NO: 4864117 - DNA, 25 bp, Homo sapien
cgccagaacccgcagagaagtttcg

SEQ ID NO: 4864118 - DNA, 25 bp, Homo sapien
tatttttgagggaacttttgcaaga

SEQ ID NO: 4864119 - DNA, 25 bp, Homo sapien
agggtgtgctgatttcagttaccca

SEQ ID NO: 4864120 - DNA, 25 bp, Homo sapien
cagccaatatgagtatttttgaggg

SEQ ID NO: 4864121 - DNA, 25 bp, Homo sapien
ccattcaaaagggtgtgctgatttc

SEQ ID NO: 4864122 - DNA, 25 bp, Homo sapien
tacttcgtatggcaacatcctctga

SEQ ID NO: 4864123 - DNA, 25 bp, Homo sapien
gagccagatatctacctgcccagag

SEQ ID NO: 4864124 - DNA, 25 bp, Homo sapien
tccaaatcttctacagggagcatgt

SEQ ID NO: 4864125 - DNA, 25 bp, Homo sapien
tctcctgctggtgtggtcccttgct

SEQ ID NO: 4864126 - DNA, 25 bp, Homo sapien
tggagccatctcggcacacttcaac

SEQ ID NO: 4864127 - DNA, 25 bp, Homo sapien
ctctgccagttacatggttggtttt

SEQ ID NO: 4864128 - DNA, 25 bp, Homo sapien
gagccatctcggcacacttcaacct

SEQ ID NO: 4864129 - DNA, 25 bp, Homo sapien
tcacaacactctgccagttacatgg

SEQ ID NO: 4864130 - DNA, 25 bp, Homo sapien
gaaacttgccgctgttctcatgctc

SEQ ID NO: 4864131 - DNA, 25 bp, Homo sapien
tcggttctgccgatccacataaggc

SEQ ID NO: 4864132 - DNA, 25 bp, Homo sapien
atgctcctcgatgtccagaaaccca

SEQ ID NO: 4864133 - DNA, 25 bp, Homo sapien
tgtccagaatgaagtacctccgcag

SEQ ID NO: 4864134 - DNA, 25 bp, Homo sapien
aagtcagttcgggtaaagcacagcc

SEQ ID NO: 4864135 - DNA, 25 bp, Homo sapien
ttccccaagcaagtcagttcgggta

SEQ ID NO: 4864136 - DNA, 25 bp, Homo sapien
gacagcacaactctcagtctgtgac

SEQ ID NO: 4864137 - DNA, 25 bp, Homo sapien
actgacagcacaactctcagtctgt

SEQ ID NO: 4864138 - DNA, 25 bp, Homo sapien
gcagacaaagaggaggttgcacact

SEQ ID NO: 4864139 - DNA, 25 bp, Homo sapien
tacaagaccttgcacgggctgagca

SEQ ID NO: 4864140 - DNA, 25 bp, Homo sapien
tctacaagaccttgcacgggctgag

SEQ ID NO: 4864141 - DNA, 25 bp, Homo sapien
cacttgagtcgatggacctggctcc

SEQ ID NO: 4864142 - DNA, 25 bp, Homo sapien
caacataccaaagagaagttttgag

SEQ ID NO: 4864143 - DNA, 25 bp, Homo sapien
aaacttagaatagtcatcactatgg

SEQ ID NO: 4864144 - DNA, 25 bp, Homo sapien
cttggactttaatactgagtagtgc

SEQ ID NO: 4864145 - DNA, 25 bp, Homo sapien
gcttctatctgtttagctgcttgga

SEQ ID NO: 4864146 - DNA, 25 bp, Homo sapien
tctgctgaggactaagggtccacca

SEQ ID NO: 4864147 - DNA, 25 bp, Homo sapien
tgccttagaagggaatgagaaccgc

SEQ ID NO: 4864148 - DNA, 25 bp, Homo sapien
taggaagagacaggccttatagccc

SEQ ID NO: 4864149 - DNA, 25 bp, Homo sapien
cataattggtggcagagcctaaacc

SEQ ID NO: 4864150 - DNA, 25 bp, Homo sapien
taggtcagctgcaaagctccaacag

SEQ ID NO: 4864151 - DNA, 25 bp, Homo sapien
agctgcaaagctccaacagctcctg

SEQ ID NO: 4864152 - DNA, 25 bp, Homo sapien
cttcgagatgtaggtcagctgcaaa

SEQ ID NO: 4864153 - DNA, 25 bp, Homo sapien
gatgtaggtcagctgcaaagctcca

SEQ ID NO: 4864154 - DNA, 25 bp, Homo sapien
caaggcatgcacaaattgccggcag

SEQ ID NO: 4864155 - DNA, 25 bp, Homo sapien
tgcatcttgtgcctttgtactgggc

SEQ ID NO: 4864156 - DNA, 25 bp, Homo sapien
cagctgtgctagcaaggctggactt

SEQ ID NO: 4864157 - DNA, 25 bp, Homo sapien
tctctccctctttaatccgccctga

SEQ ID NO: 4864158 - DNA, 25 bp, Homo sapien
cctatgcatttacctggagaaggca

SEQ ID NO: 4864159 - DNA, 25 bp, Homo sapien
tctgtacacctatgcatttacctgg

SEQ ID NO: 4864160 - DNA, 25 bp, Homo sapien
ggcaaaagcagggtgtgtctgtaca

SEQ ID NO: 4864161 - DNA, 25 bp, Homo sapien
tgtgtctgtacacctatgcatttac

SEQ ID NO: 4864162 - DNA, 25 bp, Homo sapien
caaaacaaggtctcctagctctgct

SEQ ID NO: 4864163 - DNA, 25 bp, Homo sapien
tctgcccatggccggaagaggagct

SEQ ID NO: 4864164 - DNA, 25 bp, Homo sapien
aaaacaaggtctcctagctctgctg

SEQ ID NO: 4864165 - DNA, 25 bp, Homo sapien
tgtctgcccatggccggaagaggag

SEQ ID NO: 4864166 - DNA, 25 bp, Homo sapien
caggagctgcaagctcgtcagcggc

SEQ ID NO: 4864167 - DNA, 25 bp, Homo sapien
tcaacagactctcaggaacttgcgc

SEQ ID NO: 4864168 - DNA, 25 bp, Homo sapien
tagagtgacgcagacagggctgctc

SEQ ID NO: 4864169 - DNA, 25 bp, Homo sapien
gaggcgctacccagcagtggttgac

SEQ ID NO: 4864170 - DNA, 25 bp, Homo sapien
tacttccagctttagaatgacattg

SEQ ID NO: 4864171 - DNA, 25 bp, Homo sapien
aactgggcactccaagaccctttct

SEQ ID NO: 4864172 - DNA, 25 bp, Homo sapien
ggcactccaagaccctttctggctt

SEQ ID NO: 4864173 - DNA, 25 bp, Homo sapien
tatgcccaacctacttccagcttta

SEQ ID NO: 4864174 - DNA, 25 bp, Homo sapien
gctgtatttcatcttgctctggcaa

SEQ ID NO: 4864175 - DNA, 25 bp, Homo sapien
gatggaatcggagaacattcctata

SEQ ID NO: 4864176 - DNA, 25 bp, Homo sapien
ggtatttctatacctcctgttgctg

SEQ ID NO: 4864177 - DNA, 25 bp, Homo sapien
cattcctatatatctcagggaaggg

SEQ ID NO: 4864178 - DNA, 25 bp, Homo sapien
gaatccccaccgtcagagataacca

SEQ ID NO: 4864179 - DNA, 25 bp, Homo sapien
agaatccccaccgtcagagataacc

SEQ ID NO: 4864180 - DNA, 25 bp, Homo sapien
aagagtacattaaacatatgtctac

SEQ ID NO: 4864181 - DNA, 25 bp, Homo sapien
ttcttattgtgaaatttctcatata

SEQ ID NO: 4864182 - DNA, 25 bp, Homo sapien
gagtacattaaacatatgtctacat

SEQ ID NO: 4864183 - DNA, 25 bp, Homo sapien
ttgtgaaatttctcatatataaaga

SEQ ID NO: 4864184 - DNA, 25 bp, Homo sapien
agcaaaatggagtttttggtttctg

SEQ ID NO: 4864185 - DNA, 25 bp, Homo sapien
ggtttctgttttggggtagctatgc

SEQ ID NO: 4864186 - DNA, 25 bp, Homo sapien
caagaaatagaagaatgagcatgcc

SEQ ID NO: 4864187 - DNA, 25 bp, Homo sapien
ctgagatcaaatctgtgaccttggc

SEQ ID NO: 4864188 - DNA, 25 bp, Homo sapien
caaaacgtgagagtcatttctgagc

SEQ ID NO: 4864189 - DNA, 25 bp, Homo sapien
ctctgagcattccattaggtcaaca

SEQ ID NO: 4864190 - DNA, 25 bp, Homo sapien
tctggcacaactggtctggactggg

SEQ ID NO: 4864191 - DNA, 25 bp, Homo sapien
ctctggcacaactggtctggactgg

SEQ ID NO: 4864192 - DNA, 25 bp, Homo sapien
caacacctgaccatgttaacagcag

SEQ ID NO: 4864193 - DNA, 25 bp, Homo sapien
gcctcagtgtgctgttctgcggtga

SEQ ID NO: 4864194 - DNA, 25 bp, Homo sapien
cacaactgtgaaccgcattctggcg

SEQ ID NO: 4864195 - DNA, 25 bp, Homo sapien
gctggtctgccgtcaacaagacaca

SEQ ID NO: 4864196 - DNA, 25 bp, Homo sapien
ttgcctggatatctaggaagcccca

SEQ ID NO: 4864197 - DNA, 25 bp, Homo sapien
gcctggatatctaggaagccccagg

SEQ ID NO: 4864198 - DNA, 25 bp, Homo sapien
ctggatatctaggaagccccaggcc

SEQ ID NO: 4864199 - DNA, 25 bp, Homo sapien
tgcctggatatctaggaagccccag

SEQ ID NO: 4864200 - DNA, 25 bp, Homo sapien
ctacaaaagccacagaaaagaaggg

SEQ ID NO: 4864201 - DNA, 25 bp, Homo sapien
aagccacagaaaagaagggaagaca

SEQ ID NO: 4864202 - DNA, 25 bp, Homo sapien
tacaaaagccacagaaaagaaggga

SEQ ID NO: 4864203 - DNA, 25 bp, Homo sapien
ccacagaaaagaagggaagacattc

SEQ ID NO: 4864204 - DNA, 25 bp, Homo sapien
ttcagggcttcaacccagtccttca

SEQ ID NO: 4864205 - DNA, 25 bp, Homo sapien
tggcttggttcagggcttcaaccca

SEQ ID NO: 4864206 - DNA, 25 bp, Homo sapien
tggttcagggcttcaacccagtcct

SEQ ID NO: 4864207 - DNA, 25 bp, Homo sapien
atcttgctggcttggttcagggctt

SEQ ID NO: 4864208 - DNA, 25 bp, Homo sapien
cgaaacatgactgatcgggagccct

SEQ ID NO: 4864209 - DNA, 25 bp, Homo sapien
gtaggacagtccatgaacgagctct

SEQ ID NO: 4864210 - DNA, 25 bp, Homo sapien
gaagccatgatctatataagccagg

SEQ ID NO: 4864211 - DNA, 25 bp, Homo sapien
taatagtcactactggaagcccctc

SEQ ID NO: 4864212 - DNA, 25 bp, Homo sapien
aagagcaccctgattatgctgggcc

SEQ ID NO: 4864213 - DNA, 25 bp, Homo sapien
ctaaggatccgagctcagagctata

SEQ ID NO: 4864214 - DNA, 25 bp, Homo sapien
gagagataccagcagttacagtttc

SEQ ID NO: 4864215 - DNA, 25 bp, Homo sapien
cactcagtttacatagacaaggacg

SEQ ID NO: 4864216 - DNA, 25 bp, Homo sapien
ttcaggagaacgcaacaccctacat

SEQ ID NO: 4864217 - DNA, 25 bp, Homo sapien
ccgggacttcgagagaaaagctaag

SEQ ID NO: 4864218 - DNA, 25 bp, Homo sapien
tatctgccgggacgtcaccgggact

SEQ ID NO: 4864219 - DNA, 25 bp, Homo sapien
cctacatctatctgccgggacgtca

SEQ ID NO: 4864220 - DNA, 25 bp, Homo sapien
gctgaatgtctactaaactctgact

SEQ ID NO: 4864221 - DNA, 25 bp, Homo sapien
acagctgaatgtctactaaactctg

SEQ ID NO: 4864222 - DNA, 25 bp, Homo sapien
atgtctactaaactctgacttccca

SEQ ID NO: 4864223 - DNA, 25 bp, Homo sapien
gaatgtctactaaactctgacttcc

SEQ ID NO: 4864224 - DNA, 25 bp, Homo sapien
ccttccctggctagaaaccaaagat

SEQ ID NO: 4864225 - DNA, 25 bp, Homo sapien
aagccttccacagtccaaatctgaa

SEQ ID NO: 4864226 - DNA, 25 bp, Homo sapien
ttacagtcagacttgcgtgtcctcc

SEQ ID NO: 4864227 - DNA, 25 bp, Homo sapien
ttgagcgcctacttatgagccagcc

SEQ ID NO: 4864228 - DNA, 25 bp, Homo sapien
gatgggtgtgtggaccaccacccct

SEQ ID NO: 4864229 - DNA, 25 bp, Homo sapien
tccgtcttgtaggccacctgtggct

SEQ ID NO: 4864230 - DNA, 25 bp, Homo sapien
tggctgatgggtgtgtggaccacca

SEQ ID NO: 4864231 - DNA, 25 bp, Homo sapien
cacccctccaatgatctccgtcttg

SEQ ID NO: 4864232 - DNA, 25 bp, Homo sapien
tgccgtcactaacacccatgaatgg

SEQ ID NO: 4864233 - DNA, 25 bp, Homo sapien
ggccacatggcttcaagatgcagca

SEQ ID NO: 4864234 - DNA, 25 bp, Homo sapien
gaaggatagggaatgtgaaccagca

SEQ ID NO: 4864235 - DNA, 25 bp, Homo sapien
tcttctgtgtctcccgtgttcggca

SEQ ID NO: 4864236 - DNA, 25 bp, Homo sapien
gaattacccaggcgtgtagtcccag

SEQ ID NO: 4864237 - DNA, 25 bp, Homo sapien
ctgcaataagccgtgattatgtgta

SEQ ID NO: 4864238 - DNA, 25 bp, Homo sapien
gcagacgctgcaataagccgtgatt

SEQ ID NO: 4864239 - DNA, 25 bp, Homo sapien
taagccgtgattatgtgtatatgca

SEQ ID NO: 4864240 - DNA, 25 bp, Homo sapien
aggcccagtggaagcacggcagcct

SEQ ID NO: 4864241 - DNA, 25 bp, Homo sapien
taactctgagaccttcgaaggatgg

SEQ ID NO: 4864242 - DNA, 25 bp, Homo sapien
cgaaggatggtgtgggacccgggct

SEQ ID NO: 4864243 - DNA, 25 bp, Homo sapien
acgcagtaaccactcttaatgaggg

SEQ ID NO: 4864244 - DNA, 25 bp, Homo sapien
tagcagatggtaaagtcatcaagtg

SEQ ID NO: 4864245 - DNA, 25 bp, Homo sapien
agaagcgacgtttccagctcttccg

SEQ ID NO: 4864246 - DNA, 25 bp, Homo sapien
taaagtcatcaagtgcaaagaagcg

SEQ ID NO: 4864247 - DNA, 25 bp, Homo sapien
tcatcaagtgcaaagaagcgacgtt

SEQ ID NO: 4864248 - DNA, 25 bp, Homo sapien
taagaaatatggtgcgcagtggttc

SEQ ID NO: 4864249 - DNA, 25 bp, Homo sapien
aagaaatatggtgcgcagtggttct

SEQ ID NO: 4864250 - DNA, 25 bp, Homo sapien
agaaatatggtgcgcagtggttctc

SEQ ID NO: 4864251 - DNA, 25 bp, Homo sapien
ccagacattcatgggtcttcagaac

SEQ ID NO: 4864252 - DNA, 25 bp, Homo sapien
agaagatgactcttgcatagagtct

SEQ ID NO: 4864253 - DNA, 25 bp, Homo sapien
gaagaagatgactcttgcatagagt

SEQ ID NO: 4864254 - DNA, 25 bp, Homo sapien
tgtgcctggctcttggaagaagatg

SEQ ID NO: 4864255 - DNA, 25 bp, Homo sapien
ttggaagaagatgactcttgcatag

SEQ ID NO: 4864256 - DNA, 25 bp, Homo sapien
caggttgtccctcattaagagatca

SEQ ID NO: 4864257 - DNA, 25 bp, Homo sapien
ggtcctggagcttgttattatttca

SEQ ID NO: 4864258 - DNA, 25 bp, Homo sapien
aacaggttgtccctcattaagagat

SEQ ID NO: 4864259 - DNA, 25 bp, Homo sapien
ctgtacgtagaaggtcctggagctt

SEQ ID NO: 4864260 - DNA, 25 bp, Homo sapien
tctgtgcttttgtccttccgcacac

SEQ ID NO: 4864261 - DNA, 25 bp, Homo sapien
cacagacgagacttataaataccct

SEQ ID NO: 4864262 - DNA, 25 bp, Homo sapien
aagtgaaatcattgaccggttctcc

SEQ ID NO: 4864263 - DNA, 25 bp, Homo sapien
ttccgcacacagtgatgtccacaca

SEQ ID NO: 4864264 - DNA, 25 bp, Homo sapien
caaatggatatagccccgagatgac

SEQ ID NO: 4864265 - DNA, 25 bp, Homo sapien
gagttgtgacaggaattgctgccca

SEQ ID NO: 4864266 - DNA, 25 bp, Homo sapien
gaattagtagctccgatgcccatgg

SEQ ID NO: 4864267 - DNA, 25 bp, Homo sapien
ggttaaaccttgtccctgagtggca

SEQ ID NO: 4864268 - DNA, 25 bp, Homo sapien
cctgcgccatgccacagtttaactg

SEQ ID NO: 4864269 - DNA, 25 bp, Homo sapien
tgcctatggacttgacgagctctct

SEQ ID NO: 4864270 - DNA, 25 bp, Homo sapien
tctctcttgggttcgggatctgttc

SEQ ID NO: 4864271 - DNA, 25 bp, Homo sapien
catacggaatcgtttcactgtctgc

SEQ ID NO: 4864272 - DNA, 25 bp, Homo sapien
tgatatggcttcagattgtacattg

SEQ ID NO: 4864273 - DNA, 25 bp, Homo sapien
cttgatatggcttcagattgtacat

SEQ ID NO: 4864274 - DNA, 25 bp, Homo sapien
gatatggcttcagattgtacattgt

SEQ ID NO: 4864275 - DNA, 25 bp, Homo sapien
tatggcttcagattgtacattgtac

SEQ ID NO: 4864276 - DNA, 25 bp, Homo sapien
gacactttggcatggtgggtaaaac

SEQ ID NO: 4864277 - DNA, 25 bp, Homo sapien
gatgaacggttctttctggcagatt

SEQ ID NO: 4864278 - DNA, 25 bp, Homo sapien
tcagtcaaacttattccgagttagg

SEQ ID NO: 4864279 - DNA, 25 bp, Homo sapien
agttaaacgaccaagatctaagtgg

SEQ ID NO: 4864280 - DNA, 25 bp, Homo sapien
tctacctgcttagatacctggttat

SEQ ID NO: 4864281 - DNA, 25 bp, Homo sapien
atcactggcctttctacctgcttag

SEQ ID NO: 4864282 - DNA, 25 bp, Homo sapien
tacctggttatttccagatcttgga

SEQ ID NO: 4864283 - DNA, 25 bp, Homo sapien
ttgctgaaatcactggcctttctac

SEQ ID NO: 4864284 - DNA, 25 bp, Homo sapien
tgcgctttgaagtactgcctcccca

SEQ ID NO: 4864285 - DNA, 25 bp, Homo sapien
gggtgttaagctatctccatgctcc

SEQ ID NO: 4864286 - DNA, 25 bp, Homo sapien
gacaatccgataatcagtttccagg

SEQ ID NO: 4864287 - DNA, 25 bp, Homo sapien
gaaatgctctccgtcatgtcaaatg

SEQ ID NO: 4864288 - DNA, 25 bp, Homo sapien
cctggacagctgcgccaatctcctt

SEQ ID NO: 4864289 - DNA, 25 bp, Homo sapien
ggcctggacagctgcgccaatctcc

SEQ ID NO: 4864290 - DNA, 25 bp, Homo sapien
gacagctgcgccaatctccttaatc

SEQ ID NO: 4864291 - DNA, 25 bp, Homo sapien
tggacagctgcgccaatctccttaa

SEQ ID NO: 4864292 - DNA, 25 bp, Homo sapien
tgcacaggatagagttgggcccact

SEQ ID NO: 4864293 - DNA, 25 bp, Homo sapien
cccctgcacaggatagagttgggcc

SEQ ID NO: 4864294 - DNA, 25 bp, Homo sapien
gctggagcttccaggtcgggtcaaa

SEQ ID NO: 4864295 - DNA, 25 bp, Homo sapien
cttccaggtcgggtcaaagaaatgg

SEQ ID NO: 4864296 - DNA, 25 bp, Homo sapien
agtcctctgaagtgtctccaggtgg

SEQ ID NO: 4864297 - DNA, 25 bp, Homo sapien
gacgaggcgtgaacaaggagtcctc

SEQ ID NO: 4864298 - DNA, 25 bp, Homo sapien
ctccccaggacgaggcgtgaacaag

SEQ ID NO: 4864299 - DNA, 25 bp, Homo sapien
cgtgaacaaggagtcctctgaagtg

SEQ ID NO: 4864300 - DNA, 25 bp, Homo sapien
tcacacatcagaggtccgtatgttt

SEQ ID NO: 4864301 - DNA, 25 bp, Homo sapien
tcagaggtccgtatgttttcatcat

SEQ ID NO: 4864302 - DNA, 25 bp, Homo sapien
caaggttgaacataaacggcttctc

SEQ ID NO: 4864303 - DNA, 25 bp, Homo sapien
gctccgatctgtgccttatccggga

SEQ ID NO: 4864304 - DNA, 25 bp, Homo sapien
ttccaaaagagctgcgaggcacctg

SEQ ID NO: 4864305 - DNA, 25 bp, Homo sapien
ccaggaagacctcagaatagttaga

SEQ ID NO: 4864306 - DNA, 25 bp, Homo sapien
tattacagggtctgatcatgcaagc

SEQ ID NO: 4864307 - DNA, 25 bp, Homo sapien
gagcatccacaggaatatgagtgac

SEQ ID NO: 4864308 - DNA, 25 bp, Homo sapien
tcctttagggaacgctggtggcaat

SEQ ID NO: 4864309 - DNA, 25 bp, Homo sapien
aatttctgagggcaaaagcacacca

SEQ ID NO: 4864310 - DNA, 25 bp, Homo sapien
cacaccagcgtgtataggaaaggca

SEQ ID NO: 4864311 - DNA, 25 bp, Homo sapien
ttatcaaatggaaggaggtacgccc

SEQ ID NO: 4864312 - DNA, 25 bp, Homo sapien
tttgccaattgacaagaagatttcc

SEQ ID NO: 4864313 - DNA, 25 bp, Homo sapien
gacagtcttagtgtcctcgtttccc

SEQ ID NO: 4864314 - DNA, 25 bp, Homo sapien
caagcaatgctctaatgtggaattc

SEQ ID NO: 4864315 - DNA, 25 bp, Homo sapien
tgtggaattcccaagtgtttgccaa

SEQ ID NO: 4864316 - DNA, 25 bp, Homo sapien
gccgcaggcaataacacagagagga

SEQ ID NO: 4864317 - DNA, 25 bp, Homo sapien
tcagcctagagcttacagcgagtgc

SEQ ID NO: 4864318 - DNA, 25 bp, Homo sapien
cattaacgatgttctggctaggtgc

SEQ ID NO: 4864319 - DNA, 25 bp, Homo sapien
gaaaatagcacaactcaggcaaggc

SEQ ID NO: 4864320 - DNA, 25 bp, Homo sapien
aaatgagagacactttctcccggcc

SEQ ID NO: 4864321 - DNA, 25 bp, Homo sapien
atgagagacactttctcccggccac

SEQ ID NO: 4864322 - DNA, 25 bp, Homo sapien
ctaaatgagagacactttctcccgg

SEQ ID NO: 4864323 - DNA, 25 bp, Homo sapien
taaatgagagacactttctcccggc

SEQ ID NO: 4864324 - DNA, 25 bp, Homo sapien
gtgactttactctggacctgcaaac

SEQ ID NO: 4864325 - DNA, 25 bp, Homo sapien
agtgactttactctggacctgcaaa

SEQ ID NO: 4864326 - DNA, 25 bp, Homo sapien
cttcagtgactttactctggacctg

SEQ ID NO: 4864327 - DNA, 25 bp, Homo sapien
tcagtgactttactctggacctgca

SEQ ID NO: 4864328 - DNA, 25 bp, Homo sapien
gggcagacgcggcaacagcggcaca

SEQ ID NO: 4864329 - DNA, 25 bp, Homo sapien
ccagcgcgcaggtgggcagcgcggg

SEQ ID NO: 4864330 - DNA, 25 bp, Homo sapien
tgggtatgtagcttttcagccccgg

SEQ ID NO: 4864331 - DNA, 25 bp, Homo sapien
agcgcgtgggctggcagaccgcggg

SEQ ID NO: 4864332 - DNA, 25 bp, Homo sapien
tcccagcgtcgggcaaccgcaggtg

SEQ ID NO: 4864333 - DNA, 25 bp, Homo sapien
gcagcggctggaggcactgcagccc

SEQ ID NO: 4864334 - DNA, 25 bp, Homo sapien
cgcagcggctggaggcactgcagcc

SEQ ID NO: 4864335 - DNA, 25 bp, Homo sapien
cacacggcccctcccagcgtcgggc

SEQ ID NO: 4864336 - DNA, 25 bp, Homo sapien
tgtatccccgcagttcccccactgc

SEQ ID NO: 4864337 - DNA, 25 bp, Homo sapien
tcggcccggagcgcgcacatgctgg

SEQ ID NO: 4864338 - DNA, 25 bp, Homo sapien
ggaccttgcccaggcggcgcgcggc

SEQ ID NO: 4864339 - DNA, 25 bp, Homo sapien
actgcacaggcacggccgggacctt

SEQ ID NO: 4864340 - DNA, 25 bp, Homo sapien
tctccaccaccgcggcgatgaagtt

SEQ ID NO: 4864341 - DNA, 25 bp, Homo sapien
ttctccaccaccgcggcgatgaagt

SEQ ID NO: 4864342 - DNA, 25 bp, Homo sapien
cagctgcacgtgaaccaccgatggc

SEQ ID NO: 4864343 - DNA, 25 bp, Homo sapien
tgcacgtgaaccaccgatggcgcca

SEQ ID NO: 4864344 - DNA, 25 bp, Homo sapien
ggaacaagcctgctgccgtgaagta

SEQ ID NO: 4864345 - DNA, 25 bp, Homo sapien
aacaagcctgctgccgtgaagtaac

SEQ ID NO: 4864346 - DNA, 25 bp, Homo sapien
ctgtacacaggaacaagcctgctgc

SEQ ID NO: 4864347 - DNA, 25 bp, Homo sapien
gtacacaggaacaagcctgctgccg

SEQ ID NO: 4864348 - DNA, 25 bp, Homo sapien
caccgcaagatccaatttaaggtca

SEQ ID NO: 4864349 - DNA, 25 bp, Homo sapien
gtcctcagacactatgaacccagag

SEQ ID NO: 4864350 - DNA, 25 bp, Homo sapien
ttgacaacagcttcataacgggccc

SEQ ID NO: 4864351 - DNA, 25 bp, Homo sapien
cattggtaataatgagcccgtcctc

SEQ ID NO: 4864352 - DNA, 25 bp, Homo sapien
atgatcttcccagcatcagtacagg

SEQ ID NO: 4864353 - DNA, 25 bp, Homo sapien
cccctcgctgtttggtgctgacaat

SEQ ID NO: 4864354 - DNA, 25 bp, Homo sapien
tgtggcatcaatctggacgtagtcc

SEQ ID NO: 4864355 - DNA, 25 bp, Homo sapien
acaaactctccagcccgaaggtcag

SEQ ID NO: 4864356 - DNA, 25 bp, Homo sapien
gacagactctaacaaagtggcattc

SEQ ID NO: 4864357 - DNA, 25 bp, Homo sapien
tacaacagaccacctaatagcatgg

SEQ ID NO: 4864358 - DNA, 25 bp, Homo sapien
acagtgattcaaccaaacctggaca

SEQ ID NO: 4864359 - DNA, 25 bp, Homo sapien
atggatgccagcgatcacagcgaac

SEQ ID NO: 4864360 - DNA, 25 bp, Homo sapien
ttcaccagaggaccaccagaattcc

SEQ ID NO: 4864361 - DNA, 25 bp, Homo sapien
ccagaggaccaccagaattcccata

SEQ ID NO: 4864362 - DNA, 25 bp, Homo sapien
caagttcaccagaggaccaccagaa

SEQ ID NO: 4864363 - DNA, 25 bp, Homo sapien
agttcaccagaggaccaccagaatt

SEQ ID NO: 4864364 - DNA, 25 bp, Homo sapien
gaattgacgccaatcacatcaccat

SEQ ID NO: 4864365 - DNA, 25 bp, Homo sapien
gaactgcctaactcgatctgaagga

SEQ ID NO: 4864366 - DNA, 25 bp, Homo sapien
ccatcagtcaccctcaatgaattga

SEQ ID NO: 4864367 - DNA, 25 bp, Homo sapien
gtgctcatggtattctgccaagaac

SEQ ID NO: 4864368 - DNA, 25 bp, Homo sapien
ggcacagtgagggacagcatttgca

SEQ ID NO: 4864369 - DNA, 25 bp, Homo sapien
ggacagcatttgcagacccagatat

SEQ ID NO: 4864370 - DNA, 25 bp, Homo sapien
cagtgagggacagcatttgcagacc

SEQ ID NO: 4864371 - DNA, 25 bp, Homo sapien
catttgcagacccagatatttctta

SEQ ID NO: 4864372 - DNA, 25 bp, Homo sapien
cacaagggccgaggaagattccatc

SEQ ID NO: 4864373 - DNA, 25 bp, Homo sapien
cattctcctctcagttcgggctgag

SEQ ID NO: 4864374 - DNA, 25 bp, Homo sapien
cctgaaattcttagtaggtactctg

SEQ ID NO: 4864375 - DNA, 25 bp, Homo sapien
tatagttagtgctgatgcaggcaga

SEQ ID NO: 4864376 - DNA, 25 bp, Homo sapien
atacataaaccccagaactcacatc

SEQ ID NO: 4864377 - DNA, 25 bp, Homo sapien
aaaccccagaactcacatcagggaa

SEQ ID NO: 4864378 - DNA, 25 bp, Homo sapien
cataaaccccagaactcacatcagg

SEQ ID NO: 4864379 - DNA, 25 bp, Homo sapien
taaaccccagaactcacatcaggga

SEQ ID NO: 4864380 - DNA, 25 bp, Homo sapien
gattgtttcaggtatgactgtcagg

SEQ ID NO: 4864381 - DNA, 25 bp, Homo sapien
gaacagccatggaaagggaatcact

SEQ ID NO: 4864382 - DNA, 25 bp, Homo sapien
gggaatcactgtcaagagctttaac

SEQ ID NO: 4864383 - DNA, 25 bp, Homo sapien
tacatcgtgatctctcaatccagag

SEQ ID NO: 4864384 - DNA, 25 bp, Homo sapien
ggcatttgggttgataaccatccat

SEQ ID NO: 4864385 - DNA, 25 bp, Homo sapien
tctccaatacaaaccacgtgatata

SEQ ID NO: 4864386 - DNA, 25 bp, Homo sapien
ctctaccctacccactgccaggccc

SEQ ID NO: 4864387 - DNA, 25 bp, Homo sapien
cttgccatgtttggcacatctccaa

SEQ ID NO: 4864388 - DNA, 25 bp, Homo sapien
catcagtattcctatgtgacaatcc

SEQ ID NO: 4864389 - DNA, 25 bp, Homo sapien
cctggccaaatgtgatacaacctga

SEQ ID NO: 4864390 - DNA, 25 bp, Homo sapien
cgctgctagagtggtaatttgagaa

SEQ ID NO: 4864391 - DNA, 25 bp, Homo sapien
aatactacagtgtccttccctcaag

SEQ ID NO: 4864392 - DNA, 25 bp, Homo sapien
cctgagtcttcatgcaaggagatct

SEQ ID NO: 4864393 - DNA, 25 bp, Homo sapien
cctttggagcaagtggacctaacaa

SEQ ID NO: 4864394 - DNA, 25 bp, Homo sapien
cccagattttaccttgcagacggaa

SEQ ID NO: 4864395 - DNA, 25 bp, Homo sapien
caaaacataaaggatagtggcgagt

SEQ ID NO: 4864396 - DNA, 25 bp, Homo sapien
ttcctctcagcactcggtcgcctcc

SEQ ID NO: 4864397 - DNA, 25 bp, Homo sapien
ctcggccgattccgcaggttcctct

SEQ ID NO: 4864398 - DNA, 25 bp, Homo sapien
cggccgattccgcaggttcctctca

SEQ ID NO: 4864399 - DNA, 25 bp, Homo sapien
tctcagcactcggtcgcctccacct

SEQ ID NO: 4864400 - DNA, 25 bp, Homo sapien
tccccgagggaaagcgcgcgccaga

SEQ ID NO: 4864401 - DNA, 25 bp, Homo sapien
cagcaaccaccggacacgaagggtc

SEQ ID NO: 4864402 - DNA, 25 bp, Homo sapien
ggccaagcaacagcaaccaccggac

SEQ ID NO: 4864403 - DNA, 25 bp, Homo sapien
tggccgcgccgcaccgaggactggg

SEQ ID NO: 4864404 - DNA, 25 bp, Homo sapien
gggcatacacatgccgaagtgagga

SEQ ID NO: 4864405 - DNA, 25 bp, Homo sapien
gcttagcatatttggtcaccttctg

SEQ ID NO: 4864406 - DNA, 25 bp, Homo sapien
cataaacggtggctaaactttgaag

SEQ ID NO: 4864407 - DNA, 25 bp, Homo sapien
tgcccctctacaatcaactgtgtgg

SEQ ID NO: 4864408 - DNA, 25 bp, Homo sapien
tatgaattttttacccagactgcca

SEQ ID NO: 4864409 - DNA, 25 bp, Homo sapien
ttcaacctgtaagggcgctgtcctg

SEQ ID NO: 4864410 - DNA, 25 bp, Homo sapien
tagtagcagtttctcatgggaacca

SEQ ID NO: 4864411 - DNA, 25 bp, Homo sapien
gacagctaaaagtttcaggccaaga

SEQ ID NO: 4864412 - DNA, 25 bp, Homo sapien
tctggtttgggattaaaaagataca

SEQ ID NO: 4864413 - DNA, 25 bp, Homo sapien
tttacctggtctccctactctcata

SEQ ID NO: 4864414 - DNA, 25 bp, Homo sapien
tatatcatatccaatgtactgcatg

SEQ ID NO: 4864415 - DNA, 25 bp, Homo sapien
gatgactatgatacctttttacctg

SEQ ID NO: 4864416 - DNA, 25 bp, Homo sapien
catgtgggagtccaatacatagtct

SEQ ID NO: 4864417 - DNA, 25 bp, Homo sapien
tctcgataagtccaacacaacctct

SEQ ID NO: 4864418 - DNA, 25 bp, Homo sapien
caatacatagtctctcgataagtcc

SEQ ID NO: 4864419 - DNA, 25 bp, Homo sapien
tgggagtccaatacatagtctctcg

SEQ ID NO: 4864420 - DNA, 25 bp, Homo sapien
agaaagatgtgaggtctgttgaaag

SEQ ID NO: 4864421 - DNA, 25 bp, Homo sapien
gaaagatgtgaggtctgttgaaagc

SEQ ID NO: 4864422 - DNA, 25 bp, Homo sapien
tctccaaggagttataatttcataa

SEQ ID NO: 4864423 - DNA, 25 bp, Homo sapien
catcctgcatgggaatccaagaacc

SEQ ID NO: 4864424 - DNA, 25 bp, Homo sapien
ccacatcctgcatgggaatccaaga

SEQ ID NO: 4864425 - DNA, 25 bp, Homo sapien
atcctgcatgggaatccaagaaccc

SEQ ID NO: 4864426 - DNA, 25 bp, Homo sapien
cacatcctgcatgggaatccaagaa

SEQ ID NO: 4864427 - DNA, 25 bp, Homo sapien
ccttcagcctgaataacataagata

SEQ ID NO: 4864428 - DNA, 25 bp, Homo sapien
tccttcagcctgaataacataagat

SEQ ID NO: 4864429 - DNA, 25 bp, Homo sapien
cttcagcctgaataacataagatac

SEQ ID NO: 4864430 - DNA, 25 bp, Homo sapien
ttccttcagcctgaataacataaga

SEQ ID NO: 4864431 - DNA, 25 bp, Homo sapien
gtcagtgattaaagtcccttccttg

SEQ ID NO: 4864432 - DNA, 25 bp, Homo sapien
ttgggatggtcagtgattaaagtcc

SEQ ID NO: 4864433 - DNA, 25 bp, Homo sapien
tatattgggatggtcagtgattaaa

SEQ ID NO: 4864434 - DNA, 25 bp, Homo sapien
ggatggtcagtgattaaagtccctt

SEQ ID NO: 4864435 - DNA, 25 bp, Homo sapien
tgtgtaaaatgaccctgtggaagac

SEQ ID NO: 4864436 - DNA, 25 bp, Homo sapien
ttttaaagcgaagataccaaggcac

SEQ ID NO: 4864437 - DNA, 25 bp, Homo sapien
tgctgcaaaagtgcgctaccaacag

SEQ ID NO: 4864438 - DNA, 25 bp, Homo sapien
cagatagtggaccagaagataggcc

SEQ ID NO: 4864439 - DNA, 25 bp, Homo sapien
ctgagtccaaaacagtcgctaagag

SEQ ID NO: 4864440 - DNA, 25 bp, Homo sapien
acagtcgctaagagcaatggatgaa

SEQ ID NO: 4864441 - DNA, 25 bp, Homo sapien
ggatgaattatgaactccctccaca

SEQ ID NO: 4864442 - DNA, 25 bp, Homo sapien
gaattatgaactccctccacatagc

SEQ ID NO: 4864443 - DNA, 25 bp, Homo sapien
tgcaggggttcaatcccataactcg

SEQ ID NO: 4864444 - DNA, 25 bp, Homo sapien
ataactcgcattctctaaatgcagc

SEQ ID NO: 4864445 - DNA, 25 bp, Homo sapien
gggttcaatcccataactcgcattc

SEQ ID NO: 4864446 - DNA, 25 bp, Homo sapien
caatcccataactcgcattctctaa

SEQ ID NO: 4864447 - DNA, 25 bp, Homo sapien
cacatttcagaggctctttgtagac

SEQ ID NO: 4864448 - DNA, 25 bp, Homo sapien
catccattcgataaatgatgtgctc

SEQ ID NO: 4864449 - DNA, 25 bp, Homo sapien
ctatatccttgttggaaactccaca

SEQ ID NO: 4864450 - DNA, 25 bp, Homo sapien
tgatgtgctcaaaatgagagctgtt

SEQ ID NO: 4864451 - DNA, 25 bp, Homo sapien
tgaacagctccacataccgggtctg

SEQ ID NO: 4864452 - DNA, 25 bp, Homo sapien
ttgtctacgacaatgaacagctcca

SEQ ID NO: 4864453 - DNA, 25 bp, Homo sapien
cataccgggtctgtggcaagacagc

SEQ ID NO: 4864454 - DNA, 25 bp, Homo sapien
cctttccttgtctacgacaatgaac

SEQ ID NO: 4864455 - DNA, 25 bp, Homo sapien
gccctcatgtgatcctatacacgga

SEQ ID NO: 4864456 - DNA, 25 bp, Homo sapien
caagagcctgataggcagtacagat

SEQ ID NO: 4864457 - DNA, 25 bp, Homo sapien
tattcccttctaaagcatgccagga

SEQ ID NO: 4864458 - DNA, 25 bp, Homo sapien
aagccaaaccttttagagccacagc

SEQ ID NO: 4864459 - DNA, 25 bp, Homo sapien
caagtagtttgccaggagaatcatc

SEQ ID NO: 4864460 - DNA, 25 bp, Homo sapien
ccaagtagtttgccaggagaatcat

SEQ ID NO: 4864461 - DNA, 25 bp, Homo sapien
aagtagtttgccaggagaatcatct

SEQ ID NO: 4864462 - DNA, 25 bp, Homo sapien
catgtctccgacgtgtgataagaaa

SEQ ID NO: 4864463 - DNA, 25 bp, Homo sapien
ccaactatgttgatcaggtttccat

SEQ ID NO: 4864464 - DNA, 25 bp, Homo sapien
tgataagaaacttttcccgccactg

SEQ ID NO: 4864465 - DNA, 25 bp, Homo sapien
tccagtccaactagcacaattcgaa

SEQ ID NO: 4864466 - DNA, 25 bp, Homo sapien
ctgcagttccaccaaaacctttctt

SEQ ID NO: 4864467 - DNA, 25 bp, Homo sapien
tgcgtggctccttgaacacactgtt

SEQ ID NO: 4864468 - DNA, 25 bp, Homo sapien
gcctgcgtggctccttgaacacact

SEQ ID NO: 4864469 - DNA, 25 bp, Homo sapien
tggctccttgaacacactgttccca

SEQ ID NO: 4864470 - DNA, 25 bp, Homo sapien
caatggaagcaaatgtctccacagt

SEQ ID NO: 4864471 - DNA, 25 bp, Homo sapien
gattcattccaagattatgacccaa

SEQ ID NO: 4864472 - DNA, 25 bp, Homo sapien
aatgtctccacagtgatttgtccaa

SEQ ID NO: 4864473 - DNA, 25 bp, Homo sapien
caatctctcccatcatcgtgattca

SEQ ID NO: 4864474 - DNA, 25 bp, Homo sapien
ctgctgcctctgtagatcccacctc

SEQ ID NO: 4864475 - DNA, 25 bp, Homo sapien
caatgacacctcacacaggcgggtg

SEQ ID NO: 4864476 - DNA, 25 bp, Homo sapien
ctacgcccacagagctttgctcact

SEQ ID NO: 4864477 - DNA, 25 bp, Homo sapien
ggcagcaggcagattgacctgtgag

SEQ ID NO: 4864478 - DNA, 25 bp, Homo sapien
caattacagtaaggttataggatac

SEQ ID NO: 4864479 - DNA, 25 bp, Homo sapien
tcaattactttcctatatgccagca

SEQ ID NO: 4864480 - DNA, 25 bp, Homo sapien
aagactcctggaactaaaaagcaat

SEQ ID NO: 4864481 - DNA, 25 bp, Homo sapien
cataatatcatgtacattaggaccc

SEQ ID NO: 4864482 - DNA, 25 bp, Homo sapien
caacttattaccacaggagggagca

SEQ ID NO: 4864483 - DNA, 25 bp, Homo sapien
agggagcactataggcttcatcagg

SEQ ID NO: 4864484 - DNA, 25 bp, Homo sapien
cacaggagggagcactataggcttc

SEQ ID NO: 4864485 - DNA, 25 bp, Homo sapien
gcgtccaccaacttattaccacagg

SEQ ID NO: 4864486 - DNA, 25 bp, Homo sapien
caagatcaaggttcctactagttca

SEQ ID NO: 4864487 - DNA, 25 bp, Homo sapien
gctgtgtgctgacatagcccttcct

SEQ ID NO: 4864488 - DNA, 25 bp, Homo sapien
tcagctgcaagtataagtctcaaca

SEQ ID NO: 4864489 - DNA, 25 bp, Homo sapien
gattgtagcagttaccctccagaaa

SEQ ID NO: 4864490 - DNA, 25 bp, Homo sapien
cagtcaccatatgcacactcagcaa

SEQ ID NO: 4864491 - DNA, 25 bp, Homo sapien
aacagtcaccatatgcacactcagc

SEQ ID NO: 4864492 - DNA, 25 bp, Homo sapien
aaatgatttaagcttacaggtactt

SEQ ID NO: 4864493 - DNA, 25 bp, Homo sapien
tacttccttcgcagcaagggtccaa

SEQ ID NO: 4864494 - DNA, 25 bp, Homo sapien
aaacatctggctgacagaactgaga

SEQ ID NO: 4864495 - DNA, 25 bp, Homo sapien
tcggcataaagtacctcctggaagg

SEQ ID NO: 4864496 - DNA, 25 bp, Homo sapien
tgacattgagcatcataatactggc

SEQ ID NO: 4864497 - DNA, 25 bp, Homo sapien
tattctggcaaggatatccattctg

SEQ ID NO: 4864498 - DNA, 25 bp, Homo sapien
gggactaaccctgcattgcctgagg

SEQ ID NO: 4864499 - DNA, 25 bp, Homo sapien
gatgagtcgtctttgccagtggaaa

SEQ ID NO: 4864500 - DNA, 25 bp, Homo sapien
catatcgccggtagttgcagagctg

SEQ ID NO: 4864501 - DNA, 25 bp, Homo sapien
gaaactgtaatagcctccctggagg

SEQ ID NO: 4864502 - DNA, 25 bp, Homo sapien
aatgagttcccagattgaatgtacc

SEQ ID NO: 4864503 - DNA, 25 bp, Homo sapien
tgaagaggtcattctccaagctttt

SEQ ID NO: 4864504 - DNA, 25 bp, Homo sapien
aaaccattttcacacttgcaggatc

SEQ ID NO: 4864505 - DNA, 25 bp, Homo sapien
taccgaaaggaaagctccatgaaag

SEQ ID NO: 4864506 - DNA, 25 bp, Homo sapien
caatacattaggtattgatgggaca

SEQ ID NO: 4864507 - DNA, 25 bp, Homo sapien
ataatccagcatataaacggaacca

SEQ ID NO: 4864508 - DNA, 25 bp, Homo sapien
acattaggtattgatgggacatatc

SEQ ID NO: 4864509 - DNA, 25 bp, Homo sapien
aaccacatggttatctcaacagatg

SEQ ID NO: 4864510 - DNA, 25 bp, Homo sapien
tcagttaacaagcctcccccatgag

SEQ ID NO: 4864511 - DNA, 25 bp, Homo sapien
agctgtatcatcctataggaaagct

SEQ ID NO: 4864512 - DNA, 25 bp, Homo sapien
ggaccagggactatgggagagctga

SEQ ID NO: 4864513 - DNA, 25 bp, Homo sapien
tccctaattaaaaagttcagctgta

SEQ ID NO: 4864514 - DNA, 25 bp, Homo sapien
cagacaatggaactgggaaaggaga

SEQ ID NO: 4864515 - DNA, 25 bp, Homo sapien
aagaagtctgaatacatgcacgtat

SEQ ID NO: 4864516 - DNA, 25 bp, Homo sapien
tcagaagccatcaacaaacttcagg

SEQ ID NO: 4864517 - DNA, 25 bp, Homo sapien
cttagaagccgaaaagaaattggtg

SEQ ID NO: 4864518 - DNA, 25 bp, Homo sapien
ttcatcagctcaccatgctcacggt

SEQ ID NO: 4864519 - DNA, 25 bp, Homo sapien
gacctcaggcaaaccatttagctct

SEQ ID NO: 4864520 - DNA, 25 bp, Homo sapien
ggccaaatttgatagtaagcgtcaa

SEQ ID NO: 4864521 - DNA, 25 bp, Homo sapien
tgctcacggtggatgagatcatggt

SEQ ID NO: 4864522 - DNA, 25 bp, Homo sapien
tagaattcacttcaatgaaacaatc

SEQ ID NO: 4864523 - DNA, 25 bp, Homo sapien
tgaaacaatctttgggggcagcctt

SEQ ID NO: 4864524 - DNA, 25 bp, Homo sapien
aattgccaaatctgtcacctttaga

SEQ ID NO: 4864525 - DNA, 25 bp, Homo sapien
ccagtggcacacttcttgtattcat

SEQ ID NO: 4864526 - DNA, 25 bp, Homo sapien
tagatactgtacttctattaagttc

SEQ ID NO: 4864527 - DNA, 25 bp, Homo sapien
ttgtgctgctattaagtcttcatct

SEQ ID NO: 4864528 - DNA, 25 bp, Homo sapien
tattaagttcaagattacaatagct

SEQ ID NO: 4864529 - DNA, 25 bp, Homo sapien
atatcactaaaactcctaatttttg

SEQ ID NO: 4864530 - DNA, 25 bp, Homo sapien
gacgctccctcctaaatatgttcca

SEQ ID NO: 4864531 - DNA, 25 bp, Homo sapien
tcttgaagcatagtgctcagaatgg

SEQ ID NO: 4864532 - DNA, 25 bp, Homo sapien
ggtcactatcctacaatcacttttc

SEQ ID NO: 4864533 - DNA, 25 bp, Homo sapien
ttttcatgcaacaaggacgctccct

SEQ ID NO: 4864534 - DNA, 25 bp, Homo sapien
gctggaaatccacaccccaacattt

SEQ ID NO: 4864535 - DNA, 25 bp, Homo sapien
gaacatctgatcctagctggaaatc

SEQ ID NO: 4864536 - DNA, 25 bp, Homo sapien
cccaacatttggtgcctcgactagg

SEQ ID NO: 4864537 - DNA, 25 bp, Homo sapien
tgtgccttcgttaaccatcccagga

SEQ ID NO: 4864538 - DNA, 25 bp, Homo sapien
gtttataacagctgcaacgatcaag

SEQ ID NO: 4864539 - DNA, 25 bp, Homo sapien
gctgcctaggctgggatatagattg

SEQ ID NO: 4864540 - DNA, 25 bp, Homo sapien
gtgaagtaacttgaaggcccaccca

SEQ ID NO: 4864541 - DNA, 25 bp, Homo sapien
tatatggcttaaggctgccacatcc

SEQ ID NO: 4864542 - DNA, 25 bp, Homo sapien
tcacagtcataattcagaacagaag

SEQ ID NO: 4864543 - DNA, 25 bp, Homo sapien
cagaagcatctacacactggaagtt

SEQ ID NO: 4864544 - DNA, 25 bp, Homo sapien
acatcacagtcataattcagaacag

SEQ ID NO: 4864545 - DNA, 25 bp, Homo sapien
gtccatgacactttttctgaacatc

SEQ ID NO: 4864546 - DNA, 25 bp, Homo sapien
ccgtatcctttagtctcacaatttg

SEQ ID NO: 4864547 - DNA, 25 bp, Homo sapien
acttcctccgtatcctttagtctca

SEQ ID NO: 4864548 - DNA, 25 bp, Homo sapien
tgtccacacttcctccgtatccttt

SEQ ID NO: 4864549 - DNA, 25 bp, Homo sapien
agtctcacaatttgggggagcccag

SEQ ID NO: 4864550 - DNA, 25 bp, Homo sapien
taatttccctaaagcagaaatgctg

SEQ ID NO: 4864551 - DNA, 25 bp, Homo sapien
taggtattgtcaaattgtctttcaa

SEQ ID NO: 4864552 - DNA, 25 bp, Homo sapien
tgttgtatcatattagtgcaggtat

SEQ ID NO: 4864553 - DNA, 25 bp, Homo sapien
ccggatttttgccaaccaggcaggt

SEQ ID NO: 4864554 - DNA, 25 bp, Homo sapien
ttctccacagttgatccctcttgat

SEQ ID NO: 4864555 - DNA, 25 bp, Homo sapien
agaagaagaccagaagtccgtccct

SEQ ID NO: 4864556 - DNA, 25 bp, Homo sapien
ccagaagtccgtccctcaatgcagt

SEQ ID NO: 4864557 - DNA, 25 bp, Homo sapien
gttgatccctcttgatgaagataaa

SEQ ID NO: 4864558 - DNA, 25 bp, Homo sapien
agaaacatgtcgaggaacactcccc

SEQ ID NO: 4864559 - DNA, 25 bp, Homo sapien
aggtgtcactggagaaacatgtcga

SEQ ID NO: 4864560 - DNA, 25 bp, Homo sapien
aacactccccggctgtctagaaggg

SEQ ID NO: 4864561 - DNA, 25 bp, Homo sapien
aagggtttgcttgatttttgccatc

SEQ ID NO: 4864562 - DNA, 25 bp, Homo sapien
gcacataaaaggatatttcccaatg

SEQ ID NO: 4864563 - DNA, 25 bp, Homo sapien
aaactcaggacctgataaagtcaca

SEQ ID NO: 4864564 - DNA, 25 bp, Homo sapien
attaaagaaactcaggacctgataa

SEQ ID NO: 4864565 - DNA, 25 bp, Homo sapien
cagcagcacataaaaggatatttcc

SEQ ID NO: 4864566 - DNA, 25 bp, Homo sapien
tagaaccagaagagtttcaaatttc

SEQ ID NO: 4864567 - DNA, 25 bp, Homo sapien
tcattgatgtttcatataggcctca

SEQ ID NO: 4864568 - DNA, 25 bp, Homo sapien
ggttgtttggctcaccatcactcct

SEQ ID NO: 4864569 - DNA, 25 bp, Homo sapien
taaggttattaccactatgtgctca

SEQ ID NO: 4864570 - DNA, 25 bp, Homo sapien
ctgcaaatctgtttgcatatatagg

SEQ ID NO: 4864571 - DNA, 25 bp, Homo sapien
actgctgaggttgcttggctgcata

SEQ ID NO: 4864572 - DNA, 25 bp, Homo sapien
cttgatgggaactgctgaggttgct

SEQ ID NO: 4864573 - DNA, 25 bp, Homo sapien
ggaactgctgaggttgcttggctgc

SEQ ID NO: 4864574 - DNA, 25 bp, Homo sapien
ttgatgggaactgctgaggttgctt

SEQ ID NO: 4864575 - DNA, 25 bp, Homo sapien
cccaaagctgggatcatttctagat

SEQ ID NO: 4864576 - DNA, 25 bp, Homo sapien
tagttcactcttacttctgggtccc

SEQ ID NO: 4864577 - DNA, 25 bp, Homo sapien
gaacaggtaaactcatctaggaagg

SEQ ID NO: 4864578 - DNA, 25 bp, Homo sapien
tgacgggaaggctgttccaacccat

SEQ ID NO: 4864579 - DNA, 25 bp, Homo sapien
ggcaggaattaagtttccctgagat

SEQ ID NO: 4864580 - DNA, 25 bp, Homo sapien
gggcaggaattaagtttccctgaga

SEQ ID NO: 4864581 - DNA, 25 bp, Homo sapien
cgggcaggaattaagtttccctgag

SEQ ID NO: 4864582 - DNA, 25 bp, Homo sapien
gattagtgcattaacctcaccgatg

SEQ ID NO: 4864583 - DNA, 25 bp, Homo sapien
tgacccagcacaccttagtaaatgt

SEQ ID NO: 4864584 - DNA, 25 bp, Homo sapien
gagtaactgcgtgaatacacacaca

SEQ ID NO: 4864585 - DNA, 25 bp, Homo sapien
cataaaaatggaagcgagtaactgc

SEQ ID NO: 4864586 - DNA, 25 bp, Homo sapien
tgagtgaacagcacaaacgtttgag

SEQ ID NO: 4864587 - DNA, 25 bp, Homo sapien
taggaagctactaggagacacaaaa

SEQ ID NO: 4864588 - DNA, 25 bp, Homo sapien
aaaactgaggctacatgagtgaaca

SEQ ID NO: 4864589 - DNA, 25 bp, Homo sapien
gaaacgatggaccttcatttgagat

SEQ ID NO: 4864590 - DNA, 25 bp, Homo sapien
cagcgttctccggaggccccggaga

SEQ ID NO: 4864591 - DNA, 25 bp, Homo sapien
gtgctctcggtgtttagcgtccgga

SEQ ID NO: 4864592 - DNA, 25 bp, Homo sapien
tccccgcacgttcatgggacagcgt

SEQ ID NO: 4864593 - DNA, 25 bp, Homo sapien
gcgtccggaacacgaagggcccgca

SEQ ID NO: 4864594 - DNA, 25 bp, Homo sapien
gggtcttgacgccaggaggccgcag

SEQ ID NO: 4864595 - DNA, 25 bp, Homo sapien
ccagcagcaaccagaggcggaacat

SEQ ID NO: 4864596 - DNA, 25 bp, Homo sapien
tcttgacgccaggaggccgcagagc

SEQ ID NO: 4864597 - DNA, 25 bp, Homo sapien
ccggccagcagcaaccagaggcgga

SEQ ID NO: 4864598 - DNA, 25 bp, Homo sapien
catattctactgtttacatgaggag

SEQ ID NO: 4864599 - DNA, 25 bp, Homo sapien
gaatagccaactcattattggggga

SEQ ID NO: 4864600 - DNA, 25 bp, Homo sapien
gactatcctaatcaaaatctaagca

SEQ ID NO: 4864601 - DNA, 25 bp, Homo sapien
ttcccaatttgttctatgtcaagac

SEQ ID NO: 4864602 - DNA, 25 bp, Homo sapien
cgatctgtagaagtgaattttgaaa

SEQ ID NO: 4864603 - DNA, 25 bp, Homo sapien
ttctgaactgtcatttgtatttgtt

SEQ ID NO: 4864604 - DNA, 25 bp, Homo sapien
ctggaattacgatctgtagaagtga

SEQ ID NO: 4864605 - DNA, 25 bp, Homo sapien
tttctctggaattacgatctgtaga

SEQ ID NO: 4864606 - DNA, 25 bp, Homo sapien
ccagttctattctgttcataatgat

SEQ ID NO: 4864607 - DNA, 25 bp, Homo sapien
gatatgtatattccctaagacgata

SEQ ID NO: 4864608 - DNA, 25 bp, Homo sapien
tacctttagcatccatatttctacc

SEQ ID NO: 4864609 - DNA, 25 bp, Homo sapien
gatccttcattagaattacctttag

SEQ ID NO: 4864610 - DNA, 25 bp, Homo sapien
aaggtgcacagtgtacagtttctca

SEQ ID NO: 4864611 - DNA, 25 bp, Homo sapien
ctttgtttaaggtgcacagtgtaca

SEQ ID NO: 4864612 - DNA, 25 bp, Homo sapien
tttaaggtgcacagtgtacagtttc

SEQ ID NO: 4864613 - DNA, 25 bp, Homo sapien
tctcatctattggaataatatagga

SEQ ID NO: 4864614 - DNA, 25 bp, Homo sapien
ctgaagagtggcatatagctaggac

SEQ ID NO: 4864615 - DNA, 25 bp, Homo sapien
tctgccctgatgatataggtcctgc

SEQ ID NO: 4864616 - DNA, 25 bp, Homo sapien
gctctgcaacactataaggtctgta

SEQ ID NO: 4864617 - DNA, 25 bp, Homo sapien
tgggcttgcatcagagaattaaacc

SEQ ID NO: 4864618 - DNA, 25 bp, Homo sapien
tccttgattgtacaaatagatcata

SEQ ID NO: 4864619 - DNA, 25 bp, Homo sapien
catagatccttgattgtacaaatag

SEQ ID NO: 4864620 - DNA, 25 bp, Homo sapien
ataagtattcatagatccttgattg

SEQ ID NO: 4864621 - DNA, 25 bp, Homo sapien
tattcatagatccttgattgtacaa

SEQ ID NO: 4864622 - DNA, 25 bp, Homo sapien
tatttccttgatagtagcattgagt

SEQ ID NO: 4864623 - DNA, 25 bp, Homo sapien
ttagtccagagcacgtgctgagtgt

SEQ ID NO: 4864624 - DNA, 25 bp, Homo sapien
cgtgctgagtgtgaccatggaatct

SEQ ID NO: 4864625 - DNA, 25 bp, Homo sapien
catggaatctggatatccttcaata

SEQ ID NO: 4864626 - DNA, 25 bp, Homo sapien
ggtgttctgtaatcaacaacagaaa

SEQ ID NO: 4864627 - DNA, 25 bp, Homo sapien
tctgtaatcaacaacagaaaacaac

SEQ ID NO: 4864628 - DNA, 25 bp, Homo sapien
ctaaggtgttctgtaatcaacaaca

SEQ ID NO: 4864629 - DNA, 25 bp, Homo sapien
aaggtgttctgtaatcaacaacaga

SEQ ID NO: 4864630 - DNA, 25 bp, Homo sapien
tgcagattccagaggctcaattcca

SEQ ID NO: 4864631 - DNA, 25 bp, Homo sapien
ccagaggctcaattccataagaaac

SEQ ID NO: 4864632 - DNA, 25 bp, Homo sapien
gaaattcaactgcagattccagagg

SEQ ID NO: 4864633 - DNA, 25 bp, Homo sapien
ggctcaattccataagaaacatttt

SEQ ID NO: 4864634 - DNA, 25 bp, Homo sapien
catccattggttgttctttcaggct

SEQ ID NO: 4864635 - DNA, 25 bp, Homo sapien
aaaaatgttgtcatccattggttgt

SEQ ID NO: 4864636 - DNA, 25 bp, Homo sapien
ttataaaaatgttgtcatccattgg

SEQ ID NO: 4864637 - DNA, 25 bp, Homo sapien
tgtcatccattggttgttctttcag

SEQ ID NO: 4864638 - DNA, 25 bp, Homo sapien
gaggaaataaatctggaacagctgg

SEQ ID NO: 4864639 - DNA, 25 bp, Homo sapien
aagaggaaataaatctggaacagct

SEQ ID NO: 4864640 - DNA, 25 bp, Homo sapien
gaaataaatctggaacagctggttc

SEQ ID NO: 4864641 - DNA, 25 bp, Homo sapien
ataaatctggaacagctggttctga

SEQ ID NO: 4864642 - DNA, 25 bp, Homo sapien
tttgcaaggccaacaatttcgatga

SEQ ID NO: 4864643 - DNA, 25 bp, Homo sapien
ggccaacaatttcgatgactttatt

SEQ ID NO: 4864644 - DNA, 25 bp, Homo sapien
caaggccaacaatttcgatgacttt

SEQ ID NO: 4864645 - DNA, 25 bp, Homo sapien
tgaatttgcaaggccaacaatttcg

SEQ ID NO: 4864646 - DNA, 25 bp, Homo sapien
tgaccataactccaatgatgacagc

SEQ ID NO: 4864647 - DNA, 25 bp, Homo sapien
cacaatagtaactttaaattgggtg

SEQ ID NO: 4864648 - DNA, 25 bp, Homo sapien
tcatctgaccataactccaatgatg

SEQ ID NO: 4864649 - DNA, 25 bp, Homo sapien
tgacagcacaatagtaactttaaat

SEQ ID NO: 4864650 - DNA, 25 bp, Homo sapien
gtagatatgcaatatcatgaggcct

SEQ ID NO: 4864651 - DNA, 25 bp, Homo sapien
tatgcaatatcatgaggccttaggt

SEQ ID NO: 4864652 - DNA, 25 bp, Homo sapien
gcaatatcatgaggccttaggttaa

SEQ ID NO: 4864653 - DNA, 25 bp, Homo sapien
catgaggccttaggttaagataaga

SEQ ID NO: 4864654 - DNA, 25 bp, Homo sapien
aataatcaaagcatggatattcaga

SEQ ID NO: 4864655 - DNA, 25 bp, Homo sapien
gccacataattatcacaggtctttg

SEQ ID NO: 4864656 - DNA, 25 bp, Homo sapien
taattatcacaggtctttgttttct

SEQ ID NO: 4864657 - DNA, 25 bp, Homo sapien
ataatcaaagcatggatattcagaa

SEQ ID NO: 4864658 - DNA, 25 bp, Homo sapien
gcagaataacgagtaatacacattg

SEQ ID NO: 4864659 - DNA, 25 bp, Homo sapien
ggaaacactgctcccaaataacgag

SEQ ID NO: 4864660 - DNA, 25 bp, Homo sapien
gctcccaaataacgaggataatcca

SEQ ID NO: 4864661 - DNA, 25 bp, Homo sapien
caatgcaactcctgcagaataacga

SEQ ID NO: 4864662 - DNA, 25 bp, Homo sapien
tgaatagacaacttacagaggggga

SEQ ID NO: 4864663 - DNA, 25 bp, Homo sapien
ggtctaatctacagagtctacaagg

SEQ ID NO: 4864664 - DNA, 25 bp, Homo sapien
ggcaacgtcattcaggacagaggca

SEQ ID NO: 4864665 - DNA, 25 bp, Homo sapien
tatccatctcataaaggtctaatct

SEQ ID NO: 4864666 - DNA, 25 bp, Homo sapien
gcaaatgcctccagagttatctcct

SEQ ID NO: 4864667 - DNA, 25 bp, Homo sapien
aatgcctccagagttatctccttgg

SEQ ID NO: 4864668 - DNA, 25 bp, Homo sapien
aaatgcctccagagttatctccttg

SEQ ID NO: 4864669 - DNA, 25 bp, Homo sapien
ctgcaaatgcctccagagttatctc

SEQ ID NO: 4864670 - DNA, 25 bp, Homo sapien
gattcattatacaggtggattctga

SEQ ID NO: 4864671 - DNA, 25 bp, Homo sapien
aacttctggattcattatacaggtg

SEQ ID NO: 4864672 - DNA, 25 bp, Homo sapien
tctttgggtcgtcatatgatattcc

SEQ ID NO: 4864673 - DNA, 25 bp, Homo sapien
cattgacatttctttgggtcgtcat

SEQ ID NO: 4864674 - DNA, 25 bp, Homo sapien
gaatccatataatgtcattggcagt

SEQ ID NO: 4864675 - DNA, 25 bp, Homo sapien
ctaaagatgaatccatataatgtca

SEQ ID NO: 4864676 - DNA, 25 bp, Homo sapien
aagatgaatccatataatgtcattg

SEQ ID NO: 4864677 - DNA, 25 bp, Homo sapien
gatgaatccatataatgtcattggc

SEQ ID NO: 4864678 - DNA, 25 bp, Homo sapien
tgaagacatttgacacccacatttg

SEQ ID NO: 4864679 - DNA, 25 bp, Homo sapien
aattttgaaagctcctcaaactgca

SEQ ID NO: 4864680 - DNA, 25 bp, Homo sapien
ctcaaactgcaactgctaaaagtct

SEQ ID NO: 4864681 - DNA, 25 bp, Homo sapien
aaaagtcttcacaccattggattgc

SEQ ID NO: 4864682 - DNA, 25 bp, Homo sapien
cacagactggtttcggagatttttt

SEQ ID NO: 4864683 - DNA, 25 bp, Homo sapien
ccacagactggtttcggagattttt

SEQ ID NO: 4864684 - DNA, 25 bp, Homo sapien
cagtaccacaatcacagatttcatt

SEQ ID NO: 4864685 - DNA, 25 bp, Homo sapien
tcagtaccacaatcacagatttcat

SEQ ID NO: 4864686 - DNA, 25 bp, Homo sapien
cctcagtaccacaatcacagatttc

SEQ ID NO: 4864687 - DNA, 25 bp, Homo sapien
agcctcagtaccacaatcacagatt

SEQ ID NO: 4864688 - DNA, 25 bp, Homo sapien
caacacctcactcagtaatggaaag

SEQ ID NO: 4864689 - DNA, 25 bp, Homo sapien
tggtccccatatactactaaagtag

SEQ ID NO: 4864690 - DNA, 25 bp, Homo sapien
gaatggataaaaagcgagacctcac

SEQ ID NO: 4864691 - DNA, 25 bp, Homo sapien
taatacctggacaattcaacacctc

SEQ ID NO: 4864692 - DNA, 25 bp, Homo sapien
tataacattttgctccgtctttcag

SEQ ID NO: 4864693 - DNA, 25 bp, Homo sapien
tacacaagttcgaaaatcacaacag

SEQ ID NO: 4864694 - DNA, 25 bp, Homo sapien
aaatcacaacagcttgcaggtccac

SEQ ID NO: 4864695 - DNA, 25 bp, Homo sapien
ccgtctttcagtacacaagttcgaa

SEQ ID NO: 4864696 - DNA, 25 bp, Homo sapien
tcacaacgtgcatcgagatcatggc

SEQ ID NO: 4864697 - DNA, 25 bp, Homo sapien
ggcagtctccgtcataacaaataaa

SEQ ID NO: 4864698 - DNA, 25 bp, Homo sapien
cacattctggtgaggttccattaca

SEQ ID NO: 4864699 - DNA, 25 bp, Homo sapien
cattcaggatgtgctttcggcctac

SEQ ID NO: 4864700 - DNA, 25 bp, Homo sapien
ttccagctttggtgaagacagagca

SEQ ID NO: 4864701 - DNA, 25 bp, Homo sapien
atcttactccatgggtgggaaaaag

SEQ ID NO: 4864702 - DNA, 25 bp, Homo sapien
aagggtagagttggatggttccagc

SEQ ID NO: 4864703 - DNA, 25 bp, Homo sapien
taacaaagattccagggggtcctga

SEQ ID NO: 4864704 - DNA, 25 bp, Homo sapien
gttcccaaatctgtctgattgagat

SEQ ID NO: 4864705 - DNA, 25 bp, Homo sapien
tatccctaccacagttcccaaatct

SEQ ID NO: 4864706 - DNA, 25 bp, Homo sapien
ccacagttcccaaatctgtctgatt

SEQ ID NO: 4864707 - DNA, 25 bp, Homo sapien
tatttctatccctaccacagttccc

SEQ ID NO: 4864708 - DNA, 25 bp, Homo sapien
ggtaggtacaaactaatcttccaca

SEQ ID NO: 4864709 - DNA, 25 bp, Homo sapien
tacaaactaatcttccacatataag

SEQ ID NO: 4864710 - DNA, 25 bp, Homo sapien
tcttgatggaaaggctttcgagtag

SEQ ID NO: 4864711 - DNA, 25 bp, Homo sapien
ttttcttgatggaaaggctttcgag

SEQ ID NO: 4864712 - DNA, 25 bp, Homo sapien
tctcgtacgaaagcataaatcacat

SEQ ID NO: 4864713 - DNA, 25 bp, Homo sapien
ttttgacagccagtggatctggaac

SEQ ID NO: 4864714 - DNA, 25 bp, Homo sapien
cacactgagagccatttttgacagc

SEQ ID NO: 4864715 - DNA, 25 bp, Homo sapien
ctggaactgttcgaggcaatttgta

SEQ ID NO: 4864716 - DNA, 25 bp, Homo sapien
atttgggctgaatgatatggttagg

SEQ ID NO: 4864717 - DNA, 25 bp, Homo sapien
ccttgattctacacattcacgattt

SEQ ID NO: 4864718 - DNA, 25 bp, Homo sapien
gaacactgttgtgaacaaacatgtg

SEQ ID NO: 4864719 - DNA, 25 bp, Homo sapien
tgtgctgaagccttaattatccttg

SEQ ID NO: 4864720 - DNA, 25 bp, Homo sapien
acactgttgtgaacaaacatgtgct

SEQ ID NO: 4864721 - DNA, 25 bp, Homo sapien
aatcctttggaacgtatttggcagt

SEQ ID NO: 4864722 - DNA, 25 bp, Homo sapien
ttggaggcttatagcctggcgaaca

SEQ ID NO: 4864723 - DNA, 25 bp, Homo sapien
ggcacttgtttctggaatcacacac

SEQ ID NO: 4864724 - DNA, 25 bp, Homo sapien
ccatatcttcctcaggaaatatgga

SEQ ID NO: 4864725 - DNA, 25 bp, Homo sapien
agccaggtgttttcagtcttcccag

SEQ ID NO: 4864726 - DNA, 25 bp, Homo sapien
tcccagatgctctttccatgattga

SEQ ID NO: 4864727 - DNA, 25 bp, Homo sapien
caggtgttttcagtcttcccagatg

SEQ ID NO: 4864728 - DNA, 25 bp, Homo sapien
gaagccaggtgttttcagtcttccc

SEQ ID NO: 4864729 - DNA, 25 bp, Homo sapien
tccttgccaaaactattgcggttgt

SEQ ID NO: 4864730 - DNA, 25 bp, Homo sapien
tcttccttggcgaaccactttttca

SEQ ID NO: 4864731 - DNA, 25 bp, Homo sapien
aactattgcggttgttacaatgaga

SEQ ID NO: 4864732 - DNA, 25 bp, Homo sapien
caatgagaataggaagagcaatgag

SEQ ID NO: 4864733 - DNA, 25 bp, Homo sapien
tctgtgtgctaccttccgatttaga

SEQ ID NO: 4864734 - DNA, 25 bp, Homo sapien
ctgtgtgctaccttccgatttagat

SEQ ID NO: 4864735 - DNA, 25 bp, Homo sapien
gtctgtgtgctaccttccgatttag

SEQ ID NO: 4864736 - DNA, 25 bp, Homo sapien
ggctggcatatgtctgagtgctgcc

SEQ ID NO: 4864737 - DNA, 25 bp, Homo sapien
catatgtctgagtgctgccttctga

SEQ ID NO: 4864738 - DNA, 25 bp, Homo sapien
tggctggcatatgtctgagtgctgc

SEQ ID NO: 4864739 - DNA, 25 bp, Homo sapien
tggcatatgtctgagtgctgccttc

SEQ ID NO: 4864740 - DNA, 25 bp, Homo sapien
ccgcgacacgactccggccagcacg

SEQ ID NO: 4864741 - DNA, 25 bp, Homo sapien
cgtgctggccggagtcgtgtcgcgg

SEQ ID NO: 4864742 - DNA, 25 bp, Homo sapien
tttcaacatgtatcttaaaaacctc

SEQ ID NO: 4864743 - DNA, 25 bp, Homo sapien
aaattcttaattttcaacatgtatc

SEQ ID NO: 4864744 - DNA, 25 bp, Homo sapien
aaattgtgaattatcaataaattct

SEQ ID NO: 4864745 - DNA, 25 bp, Homo sapien
caacatgtatcttaaaaacctcttc

SEQ ID NO: 4864746 - DNA, 25 bp, Homo sapien
gctagtatcagcttgactgctgctt

SEQ ID NO: 4864747 - DNA, 25 bp, Homo sapien
ttgctagtatcagcttgactgctgc

SEQ ID NO: 4864748 - DNA, 25 bp, Homo sapien
ctagtatcagcttgactgctgcttt

SEQ ID NO: 4864749 - DNA, 25 bp, Homo sapien
tgctagtatcagcttgactgctgct

SEQ ID NO: 4864750 - DNA, 25 bp, Homo sapien
tctatgcgagcattcactcagttat

SEQ ID NO: 4864751 - DNA, 25 bp, Homo sapien
tattaactaaactgcaggaaagaag

SEQ ID NO: 4864752 - DNA, 25 bp, Homo sapien
tactttactaattgtggctactcag

SEQ ID NO: 4864753 - DNA, 25 bp, Homo sapien
tagacaaatactcgcaagttactag

SEQ ID NO: 4864754 - DNA, 25 bp, Homo sapien
tcagctgctcagttccactactcgc

SEQ ID NO: 4864755 - DNA, 25 bp, Homo sapien
agctgctcagttccactactcgcaa

SEQ ID NO: 4864756 - DNA, 25 bp, Homo sapien
ctgctcagttccactactcgcaaat

SEQ ID NO: 4864757 - DNA, 25 bp, Homo sapien
gctgctcagttccactactcgcaaa

SEQ ID NO: 4864758 - DNA, 25 bp, Homo sapien
ctgctagtatatgcttcagcactat

SEQ ID NO: 4864759 - DNA, 25 bp, Homo sapien
gctagtatatgcttcagcactatct

SEQ ID NO: 4864760 - DNA, 25 bp, Homo sapien
ttcagcactatcttctgatttggat

SEQ ID NO: 4864761 - DNA, 25 bp, Homo sapien
tagtatatgcttcagcactatcttc

SEQ ID NO: 4864762 - DNA, 25 bp, Homo sapien
actgctttgtgtttgggtactgtcc

SEQ ID NO: 4864763 - DNA, 25 bp, Homo sapien
ctgctttgtgtttgggtactgtcct

SEQ ID NO: 4864764 - DNA, 25 bp, Homo sapien
tgaccacggaaggaaagacagaatt

SEQ ID NO: 4864765 - DNA, 25 bp, Homo sapien
gaattttcatttcttagcgagactc

SEQ ID NO: 4864766 - DNA, 25 bp, Homo sapien
gagactctcgatgttatccgttgcc

SEQ ID NO: 4864767 - DNA, 25 bp, Homo sapien
gatgttatccgttgccttctgaagg

SEQ ID NO: 4864768 - DNA, 25 bp, Homo sapien
cagatatccggaaaccataagcaaa

SEQ ID NO: 4864769 - DNA, 25 bp, Homo sapien
caaatatccagatatccggaaacca

SEQ ID NO: 4864770 - DNA, 25 bp, Homo sapien
ccataagcaaataccttcatgtatg

SEQ ID NO: 4864771 - DNA, 25 bp, Homo sapien
catgtatgtgtctaagtagttattc

SEQ ID NO: 4864772 - DNA, 25 bp, Homo sapien
aaagataggattggacatattctta

SEQ ID NO: 4864773 - DNA, 25 bp, Homo sapien
agataggattggacatattcttaca

SEQ ID NO: 4864774 - DNA, 25 bp, Homo sapien
gataggattggacatattcttacag

SEQ ID NO: 4864775 - DNA, 25 bp, Homo sapien
taggattggacatattcttacagaa

SEQ ID NO: 4864776 - DNA, 25 bp, Homo sapien
tgaacaatacggttgatgggcagac

SEQ ID NO: 4864777 - DNA, 25 bp, Homo sapien
caatacggttgatgggcagacaaaa

SEQ ID NO: 4864778 - DNA, 25 bp, Homo sapien
tgggcagacaaaacctataggctct

SEQ ID NO: 4864779 - DNA, 25 bp, Homo sapien
tataggctctctgacacgacaaaca

SEQ ID NO: 4864780 - DNA, 25 bp, Homo sapien
tgaattaggtcacgtgcaacctgaa

SEQ ID NO: 4864781 - DNA, 25 bp, Homo sapien
ctgaattaggtcacgtgcaacctga

SEQ ID NO: 4864782 - DNA, 25 bp, Homo sapien
aattaggtcacgtgcaacctgaaaa

SEQ ID NO: 4864783 - DNA, 25 bp, Homo sapien
gaattaggtcacgtgcaacctgaaa

SEQ ID NO: 4864784 - DNA, 25 bp, Homo sapien
gcgcagggctgagcgcgcgtgaggc

SEQ ID NO: 4864785 - DNA, 25 bp, Homo sapien
gctgagcgcgcgtgaggcggcccag

SEQ ID NO: 4864786 - DNA, 25 bp, Homo sapien
ggctgagcgcgcgtgaggcggccca

SEQ ID NO: 4864787 - DNA, 25 bp, Homo sapien
cagctcgcgcagggctgagcgcgcg

SEQ ID NO: 4864788 - DNA, 25 bp, Homo sapien
cgatgaacagcagttgagacgttga

SEQ ID NO: 4864789 - DNA, 25 bp, Homo sapien
tcttagagccctggcgatgaacagc

SEQ ID NO: 4864790 - DNA, 25 bp, Homo sapien
catggctcgctgtcttagagccctg

SEQ ID NO: 4864791 - DNA, 25 bp, Homo sapien
aaggaacatggctcgctgtcttaga

SEQ ID NO: 4864792 - DNA, 25 bp, Homo sapien
tctctgcctttttggccacagacct

SEQ ID NO: 4864793 - DNA, 25 bp, Homo sapien
cccagagaagttaaacgattttctg

SEQ ID NO: 4864794 - DNA, 25 bp, Homo sapien
tttccgcatcaggaagccatcccag

SEQ ID NO: 4864795 - DNA, 25 bp, Homo sapien
ccgtggaaagagtgaacaaggtctc

SEQ ID NO: 4864796 - DNA, 25 bp, Homo sapien
gatctgtttttgcatccgatgatga

SEQ ID NO: 4864797 - DNA, 25 bp, Homo sapien
aatcttctctggaattgtggtctgc

SEQ ID NO: 4864798 - DNA, 25 bp, Homo sapien
gtctgcaggaagattttatgaggat

SEQ ID NO: 4864799 - DNA, 25 bp, Homo sapien
gtttttgcatccgatgatgaaatct

SEQ ID NO: 4864800 - DNA, 25 bp, Homo sapien
ggctttccctatggtaatcatgtaa

SEQ ID NO: 4864801 - DNA, 25 bp, Homo sapien
acaaaatatggctttccctatggta

SEQ ID NO: 4864802 - DNA, 25 bp, Homo sapien
ttttgagatggacaaaatatggctt

SEQ ID NO: 4864803 - DNA, 25 bp, Homo sapien
tatggctttccctatggtaatcatg

SEQ ID NO: 4864804 - DNA, 25 bp, Homo sapien
ctgaactagcagaggtttggaatga

SEQ ID NO: 4864805 - DNA, 25 bp, Homo sapien
ctagcagaggtttggaatgacggat

SEQ ID NO: 4864806 - DNA, 25 bp, Homo sapien
gacggatgtcattttcgtcataaga

SEQ ID NO: 4864807 - DNA, 25 bp, Homo sapien
ggaatgacggatgtcattttcgtca

SEQ ID NO: 4864808 - DNA, 25 bp, Homo sapien
gaatacccgcaacatatccattata

SEQ ID NO: 4864809 - DNA, 25 bp, Homo sapien
gctgagagtcacaagagaatttgga

SEQ ID NO: 4864810 - DNA, 25 bp, Homo sapien
ctgagtcctgaacatacgctgagag

SEQ ID NO: 4864811 - DNA, 25 bp, Homo sapien
caagagaatttggaatacccgcaac

SEQ ID NO: 4864812 - DNA, 25 bp, Homo sapien
gctagcaggatataatactggcaaa

SEQ ID NO: 4864813 - DNA, 25 bp, Homo sapien
ttatagaattagaacagatacatgg

SEQ ID NO: 4864814 - DNA, 25 bp, Homo sapien
ggagaattaattcataggctagcag

SEQ ID NO: 4864815 - DNA, 25 bp, Homo sapien
caaaggtgattatagaattagaaca

SEQ ID NO: 4864816 - DNA, 25 bp, Homo sapien
tatcaacaggtagcctctcatcagg

SEQ ID NO: 4864817 - DNA, 25 bp, Homo sapien
tgtgcacttaaacaggttgaaaccc

SEQ ID NO: 4864818 - DNA, 25 bp, Homo sapien
tgactgcagagccagcgtccattag

SEQ ID NO: 4864819 - DNA, 25 bp, Homo sapien
tatcttcaagaaagcatggtggtgg

SEQ ID NO: 4864820 - DNA, 25 bp, Homo sapien
ccatcggttcaattccatatgagat

SEQ ID NO: 4864821 - DNA, 25 bp, Homo sapien
taaaccaagtataagtgtcattttc

SEQ ID NO: 4864822 - DNA, 25 bp, Homo sapien
gacttgatactctgaattaaaccaa

SEQ ID NO: 4864823 - DNA, 25 bp, Homo sapien
aaatcttgtgtataaatcctgatac

SEQ ID NO: 4864824 - DNA, 25 bp, Homo sapien
catttcaatatatcgagggaataac

SEQ ID NO: 4864825 - DNA, 25 bp, Homo sapien
tcaatatatcgagggaataacttaa

SEQ ID NO: 4864826 - DNA, 25 bp, Homo sapien
tgcatttcaatatatcgagggaata

SEQ ID NO: 4864827 - DNA, 25 bp, Homo sapien
atatgcatttcaatatatcgaggga

SEQ ID NO: 4864828 - DNA, 25 bp, Homo sapien
aacagttgcaggtgcttttcctgga

SEQ ID NO: 4864829 - DNA, 25 bp, Homo sapien
tttcttctacggcagaagcaatgca

SEQ ID NO: 4864830 - DNA, 25 bp, Homo sapien
tcatctcggaatactggtttaacgc

SEQ ID NO: 4864831 - DNA, 25 bp, Homo sapien
gaagcaatgcatttagtcatctcgg

SEQ ID NO: 4864832 - DNA, 25 bp, Homo sapien
taggccattgcctgctcagtcccga

SEQ ID NO: 4864833 - DNA, 25 bp, Homo sapien
ttgcctgctcagtcccgacagcatt

SEQ ID NO: 4864834 - DNA, 25 bp, Homo sapien
ttaggccattgcctgctcagtcccg

SEQ ID NO: 4864835 - DNA, 25 bp, Homo sapien
ccattgcctgctcagtcccgacagc

SEQ ID NO: 4864836 - DNA, 25 bp, Homo sapien
aattatctgaataaccttctgcgtt

SEQ ID NO: 4864837 - DNA, 25 bp, Homo sapien
actgttaacaaggccaattatctga

SEQ ID NO: 4864838 - DNA, 25 bp, Homo sapien
gaataaccttctgcgttacagtgtt

SEQ ID NO: 4864839 - DNA, 25 bp, Homo sapien
ccttctgcgttacagtgtttatatc

SEQ ID NO: 4864840 - DNA, 25 bp, Homo sapien
tagctgaaccaattgaaatgtctgt

SEQ ID NO: 4864841 - DNA, 25 bp, Homo sapien
tcacttccttccaacaacccattgc

SEQ ID NO: 4864842 - DNA, 25 bp, Homo sapien
atatttaaagtcatccaagctacag

SEQ ID NO: 4864843 - DNA, 25 bp, Homo sapien
cccattgccacatattctcctgtgt

SEQ ID NO: 4864844 - DNA, 25 bp, Homo sapien
ttccaacaacccattgccacatatt

SEQ ID NO: 4864845 - DNA, 25 bp, Homo sapien
tattttactaatagataaggcattt

SEQ ID NO: 4864846 - DNA, 25 bp, Homo sapien
ctattttactaatagataaggcatt

SEQ ID NO: 4864847 - DNA, 25 bp, Homo sapien
aacagtatggaaggtccccattgca

SEQ ID NO: 4864848 - DNA, 25 bp, Homo sapien
tgtttgtcaaaagtccgacactttc

SEQ ID NO: 4864849 - DNA, 25 bp, Homo sapien
cacgtacataagtgtcaggcaaaca

SEQ ID NO: 4864850 - DNA, 25 bp, Homo sapien
cctacaaatcatattagccggtttg

SEQ ID NO: 4864851 - DNA, 25 bp, Homo sapien
gctgtagacaatatttagagatcta

SEQ ID NO: 4864852 - DNA, 25 bp, Homo sapien
ttaaattcctggcagtcacattgct

SEQ ID NO: 4864853 - DNA, 25 bp, Homo sapien
ccttaaattcctggcagtcacattg

SEQ ID NO: 4864854 - DNA, 25 bp, Homo sapien
acattgctgtagacaatatttagag

SEQ ID NO: 4864855 - DNA, 25 bp, Homo sapien
acagtgtgcagtgccacagtttcca

SEQ ID NO: 4864856 - DNA, 25 bp, Homo sapien
agacagtgtgcagtgccacagtttc

SEQ ID NO: 4864857 - DNA, 25 bp, Homo sapien
tctcctctggtattaatttcatcat

SEQ ID NO: 4864858 - DNA, 25 bp, Homo sapien
aaagacagtgtgcagtgccacagtt

SEQ ID NO: 4864859 - DNA, 25 bp, Homo sapien
tagacacacatgtttggtctcgtac

SEQ ID NO: 4864860 - DNA, 25 bp, Homo sapien
ggaccacacatggaaccatcttgta

SEQ ID NO: 4864861 - DNA, 25 bp, Homo sapien
cgtgatattaagtctctgtgttccc

SEQ ID NO: 4864862 - DNA, 25 bp, Homo sapien
tggcgtcctcctgggtaggtatgta

SEQ ID NO: 4864863 - DNA, 25 bp, Homo sapien
tcacaatgattagaagcatcacaca

SEQ ID NO: 4864864 - DNA, 25 bp, Homo sapien
gtttacaatgcatttcgaaacaata

SEQ ID NO: 4864865 - DNA, 25 bp, Homo sapien
ttcatcaggaatctaacatgtttac

SEQ ID NO: 4864866 - DNA, 25 bp, Homo sapien
tccatgacgatcacaatgattagaa

SEQ ID NO: 4864867 - DNA, 25 bp, Homo sapien
aagtgtccatcatcaatacttccaa

SEQ ID NO: 4864868 - DNA, 25 bp, Homo sapien
tgtccatcatcaatacttccaaatg

SEQ ID NO: 4864869 - DNA, 25 bp, Homo sapien
cttttcacaatggcaatggttaaaa

SEQ ID NO: 4864870 - DNA, 25 bp, Homo sapien
ggcagtaaggaggattatatccctt

SEQ ID NO: 4864871 - DNA, 25 bp, Homo sapien
cttccctcctccatgtaacttctct

SEQ ID NO: 4864872 - DNA, 25 bp, Homo sapien
tatcttccctcctccatgtaacttc

SEQ ID NO: 4864873 - DNA, 25 bp, Homo sapien
ctatcttccctcctccatgtaactt

SEQ ID NO: 4864874 - DNA, 25 bp, Homo sapien
tcttccctcctccatgtaacttctc

SEQ ID NO: 4864875 - DNA, 25 bp, Homo sapien
atagcatagctctctcaattttttc

SEQ ID NO: 4864876 - DNA, 25 bp, Homo sapien
tcattttcccctctatagcatagct

SEQ ID NO: 4864877 - DNA, 25 bp, Homo sapien
tgtagaaaatgagttgaaaccgttg

SEQ ID NO: 4864878 - DNA, 25 bp, Homo sapien
tggcagtagtaataagaagcacagg

SEQ ID NO: 4864879 - DNA, 25 bp, Homo sapien
cactgagggatgacttgctgttact

SEQ ID NO: 4864880 - DNA, 25 bp, Homo sapien
tgagggatgacttgctgttactgct

SEQ ID NO: 4864881 - DNA, 25 bp, Homo sapien
ctttcactgagggatgacttgctgt

SEQ ID NO: 4864882 - DNA, 25 bp, Homo sapien
ttcactgagggatgacttgctgtta

SEQ ID NO: 4864883 - DNA, 25 bp, Homo sapien
tataagcacctatgacatcatttag

SEQ ID NO: 4864884 - DNA, 25 bp, Homo sapien
cagaactataagcacctatgacatc

SEQ ID NO: 4864885 - DNA, 25 bp, Homo sapien
gcacctatgacatcatttagagcag

SEQ ID NO: 4864886 - DNA, 25 bp, Homo sapien
ctgaaataatagcagaactataagc

SEQ ID NO: 4864887 - DNA, 25 bp, Homo sapien
gacaagagcaatgagagagaaattg

SEQ ID NO: 4864888 - DNA, 25 bp, Homo sapien
agcattcaaggttgttagagactgg

SEQ ID NO: 4864889 - DNA, 25 bp, Homo sapien
taaatgtcactgtaaccagtcacag

SEQ ID NO: 4864890 - DNA, 25 bp, Homo sapien
cacagaatacctagacgctaggaac

SEQ ID NO: 4864891 - DNA, 25 bp, Homo sapien
accagtcacagaatacctagacgct

SEQ ID NO: 4864892 - DNA, 25 bp, Homo sapien
cagataccatctgcataaatgtcac

SEQ ID NO: 4864893 - DNA, 25 bp, Homo sapien
tcggttgtcacctcgagggtccttg

SEQ ID NO: 4864894 - DNA, 25 bp, Homo sapien
tggacagcacactatactctgaagt

SEQ ID NO: 4864895 - DNA, 25 bp, Homo sapien
taatgctgagccaactcaggcagaa

SEQ ID NO: 4864896 - DNA, 25 bp, Homo sapien
tatactctgaagtggccctttggcc

SEQ ID NO: 4864897 - DNA, 25 bp, Homo sapien
gatatgtgacaataggcccattagg

SEQ ID NO: 4864898 - DNA, 25 bp, Homo sapien
cccctactgtagatagtctggacca

SEQ ID NO: 4864899 - DNA, 25 bp, Homo sapien
tggaccatagcatccagacgtggaa

SEQ ID NO: 4864900 - DNA, 25 bp, Homo sapien
aatacgtgaggcacccgttttgaga

SEQ ID NO: 4864901 - DNA, 25 bp, Homo sapien
cctcgggatccacggagctgggtcc

SEQ ID NO: 4864902 - DNA, 25 bp, Homo sapien
gcggggctgtaggatccacccgcct

SEQ ID NO: 4864903 - DNA, 25 bp, Homo sapien
acccgcctcgggatccacggagctg

SEQ ID NO: 4864904 - DNA, 25 bp, Homo sapien
gctgcagccgttccaaggacaacgg

SEQ ID NO: 4864905 - DNA, 25 bp, Homo sapien
aataatttctgtagcaacctgaatg

SEQ ID NO: 4864906 - DNA, 25 bp, Homo sapien
aaacaataatttctgtagcaacctg

SEQ ID NO: 4864907 - DNA, 25 bp, Homo sapien
aatttctgtagcaacctgaatgttc

SEQ ID NO: 4864908 - DNA, 25 bp, Homo sapien
gtagcaacctgaatgttcttataaa

SEQ ID NO: 4864909 - DNA, 25 bp, Homo sapien
tactgggatggtaagaaggtatatg

SEQ ID NO: 4864910 - DNA, 25 bp, Homo sapien
gttactgggatggtaagaaggtata

SEQ ID NO: 4864911 - DNA, 25 bp, Homo sapien
attgttactgggatggtaagaaggt

SEQ ID NO: 4864912 - DNA, 25 bp, Homo sapien
tgttactgggatggtaagaaggtat

SEQ ID NO: 4864913 - DNA, 25 bp, Homo sapien
ccaaagatatggacaactttctcag

SEQ ID NO: 4864914 - DNA, 25 bp, Homo sapien
caaagatatggacaactttctcagc

SEQ ID NO: 4864915 - DNA, 25 bp, Homo sapien
gatagcgtaatacttgttttaagct

SEQ ID NO: 4864916 - DNA, 25 bp, Homo sapien
aaagaagatagcgtaatacttgttt

SEQ ID NO: 4864917 - DNA, 25 bp, Homo sapien
agtacatcatcagcaaccccattag

SEQ ID NO: 4864918 - DNA, 25 bp, Homo sapien
gcaaccccattagttgaaatcttat

SEQ ID NO: 4864919 - DNA, 25 bp, Homo sapien
agttacagttgtagatgtcatcata

SEQ ID NO: 4864920 - DNA, 25 bp, Homo sapien
ctgaaaatccctctaaagttactgt

SEQ ID NO: 4864921 - DNA, 25 bp, Homo sapien
tgaaaatccctctaaagttactgtc

SEQ ID NO: 4864922 - DNA, 25 bp, Homo sapien
actgaaaatccctctaaagttactg

SEQ ID NO: 4864923 - DNA, 25 bp, Homo sapien
gagaacacactccctagtgttagaa

SEQ ID NO: 4864924 - DNA, 25 bp, Homo sapien
gttagaactgtaccaaggagaatag

SEQ ID NO: 4864925 - DNA, 25 bp, Homo sapien
taccaaggagaatagtgctaaacca

SEQ ID NO: 4864926 - DNA, 25 bp, Homo sapien
ccctagtgttagaactgtaccaagg

SEQ ID NO: 4864927 - DNA, 25 bp, Homo sapien
caaagagctaaaatgacctattgct

SEQ ID NO: 4864928 - DNA, 25 bp, Homo sapien
tgcacactgtggactaaaaaagcaa

SEQ ID NO: 4864929 - DNA, 25 bp, Homo sapien
aaacaaagattcacttagcaggagg

SEQ ID NO: 4864930 - DNA, 25 bp, Homo sapien
cagtgatagtacagtgatgggaaat

SEQ ID NO: 4864931 - DNA, 25 bp, Homo sapien
gtccaaataattgcatgcactgtcc

SEQ ID NO: 4864932 - DNA, 25 bp, Homo sapien
ggcagtcttattgcatagctcataa

SEQ ID NO: 4864933 - DNA, 25 bp, Homo sapien
tggaatattcctctaagacaatagg

SEQ ID NO: 4864934 - DNA, 25 bp, Homo sapien
cacacagatctatgcttttcctgca

SEQ ID NO: 4864935 - DNA, 25 bp, Homo sapien
ttgttggcatgcaaattcacttctt

SEQ ID NO: 4864936 - DNA, 25 bp, Homo sapien
gtgaacacagataaggagcaccctg

SEQ ID NO: 4864937 - DNA, 25 bp, Homo sapien
aatgtgtactcgaaattataggaac

SEQ ID NO: 4864938 - DNA, 25 bp, Homo sapien
cacagataaggagcaccctgagcaa

SEQ ID NO: 4864939 - DNA, 25 bp, Homo sapien
gaccctctgaaatacacacgcacat

SEQ ID NO: 4864940 - DNA, 25 bp, Homo sapien
taagtgaccctctgaaatacacacg

SEQ ID NO: 4864941 - DNA, 25 bp, Homo sapien
tgtatatgctacatctctcatttgt

SEQ ID NO: 4864942 - DNA, 25 bp, Homo sapien
tttgtattaagtgaccctctgaaat

SEQ ID NO: 4864943 - DNA, 25 bp, Homo sapien
tatgtcgtattagttctgtactttt

SEQ ID NO: 4864944 - DNA, 25 bp, Homo sapien
ctttatgtcgtattagttctgtact

SEQ ID NO: 4864945 - DNA, 25 bp, Homo sapien
tttatgtcgtattagttctgtactt

SEQ ID NO: 4864946 - DNA, 25 bp, Homo sapien
ttatgtcgtattagttctgtacttt

SEQ ID NO: 4864947 - DNA, 25 bp, Homo sapien
tgttatgcgtatgcagaaacacacc

SEQ ID NO: 4864948 - DNA, 25 bp, Homo sapien
ggagttatcctttatgctaccacat

SEQ ID NO: 4864949 - DNA, 25 bp, Homo sapien
gaaacacaccatatagtatcaagta

SEQ ID NO: 4864950 - DNA, 25 bp, Homo sapien
catacatggtttccaaggtaagtat

SEQ ID NO: 4864951 - DNA, 25 bp, Homo sapien
gaggagaatatgcaacatcacgttg

SEQ ID NO: 4864952 - DNA, 25 bp, Homo sapien
cgttgacaattattcagagtattgc

SEQ ID NO: 4864953 - DNA, 25 bp, Homo sapien
catcacgttgacaattattcagagt

SEQ ID NO: 4864954 - DNA, 25 bp, Homo sapien
ggtgatgaactatcttgcctacaag

SEQ ID NO: 4864955 - DNA, 25 bp, Homo sapien
ctaaaatccaaaacccatcatcaat

SEQ ID NO: 4864956 - DNA, 25 bp, Homo sapien
tttttctgaggaacagcatgtcatt

SEQ ID NO: 4864957 - DNA, 25 bp, Homo sapien
aaatgtagcaactgattaaaggcca

SEQ ID NO: 4864958 - DNA, 25 bp, Homo sapien
tgttccatttaagaccaatgatggc

SEQ ID NO: 4864959 - DNA, 25 bp, Homo sapien
gcaactgattaaaggccatttttct

SEQ ID NO: 4864960 - DNA, 25 bp, Homo sapien
ctctatgactggttgctgtcactac

SEQ ID NO: 4864961 - DNA, 25 bp, Homo sapien
tatgactggttgctgtcactactgc

SEQ ID NO: 4864962 - DNA, 25 bp, Homo sapien
ttgctgtcactactgctgttactgt

SEQ ID NO: 4864963 - DNA, 25 bp, Homo sapien
ctggttgctgtcactactgctgtta

SEQ ID NO: 4864964 - DNA, 25 bp, Homo sapien
catggctccagccagtccctccatt

SEQ ID NO: 4864965 - DNA, 25 bp, Homo sapien
gccatggctccagccagtccctcca

SEQ ID NO: 4864966 - DNA, 25 bp, Homo sapien
gttcctctgccatggctccagccag

SEQ ID NO: 4864967 - DNA, 25 bp, Homo sapien
ctctgccatggctccagccagtccc

SEQ ID NO: 4864968 - DNA, 25 bp, Homo sapien
gttttcattgttgaatcaagccagt

SEQ ID NO: 4864969 - DNA, 25 bp, Homo sapien
ttcattgttgaatcaagccagttaa

SEQ ID NO: 4864970 - DNA, 25 bp, Homo sapien
tcctttctctatcttatggcttttg

SEQ ID NO: 4864971 - DNA, 25 bp, Homo sapien
ttttcattgttgaatcaagccagtt

SEQ ID NO: 4864972 - DNA, 25 bp, Homo sapien
tgagctcgcgggcaggctctcggcc

SEQ ID NO: 4864973 - DNA, 25 bp, Homo sapien
gaccgttgagcagcgttgagctcgc

SEQ ID NO: 4864974 - DNA, 25 bp, Homo sapien
cagagaccgttgagcagcgttgagc

SEQ ID NO: 4864975 - DNA, 25 bp, Homo sapien
ccaaggacagagaccgttgagcagc

SEQ ID NO: 4864976 - DNA, 25 bp, Homo sapien
gtcttccaagctcagtgaggagggc

SEQ ID NO: 4864977 - DNA, 25 bp, Homo sapien
cagtcttccaagctcagtgaggagg

SEQ ID NO: 4864978 - DNA, 25 bp, Homo sapien
gcttgcagtcttccaagctcagtga

SEQ ID NO: 4864979 - DNA, 25 bp, Homo sapien
tgcagtcttccaagctcagtgagga

SEQ ID NO: 4864980 - DNA, 25 bp, Homo sapien
caagaaactgctcccagtaagagcc

SEQ ID NO: 4864981 - DNA, 25 bp, Homo sapien
tgacaagaaactgctcccagtaaga

SEQ ID NO: 4864982 - DNA, 25 bp, Homo sapien
cagaatgacaagaaactgctcccag

SEQ ID NO: 4864983 - DNA, 25 bp, Homo sapien
gaaactgctcccagtaagagcccag

SEQ ID NO: 4864984 - DNA, 25 bp, Homo sapien
gaagatgccagaagacgcactgcgt

SEQ ID NO: 4864985 - DNA, 25 bp, Homo sapien
gccactgagaccatgggcgctgatg

SEQ ID NO: 4864986 - DNA, 25 bp, Homo sapien
gatgcagagcgctaacaggtcctcc

SEQ ID NO: 4864987 - DNA, 25 bp, Homo sapien
caggtcctccgctaaggcctttagt

SEQ ID NO: 4864988 - DNA, 25 bp, Homo sapien
ctgaggagttcgctgaaggcagtta

SEQ ID NO: 4864989 - DNA, 25 bp, Homo sapien
ctctgaggagttcgctgaaggcagt

SEQ ID NO: 4864990 - DNA, 25 bp, Homo sapien
tgaggagttcgctgaaggcagttag

SEQ ID NO: 4864991 - DNA, 25 bp, Homo sapien
gactctgaggagttcgctgaaggca

SEQ ID NO: 4864992 - DNA, 25 bp, Homo sapien
gtcaagcacgggttcttatcccgga

SEQ ID NO: 4864993 - DNA, 25 bp, Homo sapien
gtctttgttttgcatcaacaatcgt

SEQ ID NO: 4864994 - DNA, 25 bp, Homo sapien
cgtctcagtcaagcacgggttctta

SEQ ID NO: 4864995 - DNA, 25 bp, Homo sapien
tgcatcaacaatcgtctcagtcaag

SEQ ID NO: 4864996 - DNA, 25 bp, Homo sapien
cgtggaactgtgacatgcagaaata

SEQ ID NO: 4864997 - DNA, 25 bp, Homo sapien
ttccgtggaactgtgacatgcagaa

SEQ ID NO: 4864998 - DNA, 25 bp, Homo sapien
acttaatcttccgtggaactgtgac

SEQ ID NO: 4864999 - DNA, 25 bp, Homo sapien
cttaatcttccgtggaactgtgaca

SEQ ID NO: 4865000 - DNA, 25 bp, Homo sapien
gctctacaggcatgggaccaacatc

SEQ ID NO: 4865001 - DNA, 25 bp, Homo sapien
ggctctacaggcatgggaccaacat

SEQ ID NO: 4865002 - DNA, 25 bp, Homo sapien
tcatgtaaccaaataccacctgctc

SEQ ID NO: 4865003 - DNA, 25 bp, Homo sapien
taaccaaataccacctgctccccaa

SEQ ID NO: 4865004 - DNA, 25 bp, Homo sapien
tgtaaccaaataccacctgctcccc

SEQ ID NO: 4865005 - DNA, 25 bp, Homo sapien
catgtaaccaaataccacctgctcc

SEQ ID NO: 4865006 - DNA, 25 bp, Homo sapien
gagtgtaaggttgtccatcaattgt

SEQ ID NO: 4865007 - DNA, 25 bp, Homo sapien
gatgtagagtgtaaggttgtccatc

SEQ ID NO: 4865008 - DNA, 25 bp, Homo sapien
tgtagagtgtaaggttgtccatcaa

SEQ ID NO: 4865009 - DNA, 25 bp, Homo sapien
taaggttgtccatcaattgtaatga

SEQ ID NO: 4865010 - DNA, 25 bp, Homo sapien
taaaatatggagacacagaatgcaa

SEQ ID NO: 4865011 - DNA, 25 bp, Homo sapien
atccagtttcattatatgtataaac

SEQ ID NO: 4865012 - DNA, 25 bp, Homo sapien
tccagtttcattatatgtataaacc

SEQ ID NO: 4865013 - DNA, 25 bp, Homo sapien
catatccttggtaatggcaatgcat

SEQ ID NO: 4865014 - DNA, 25 bp, Homo sapien
aatgaatttggaaattcggcagcat

SEQ ID NO: 4865015 - DNA, 25 bp, Homo sapien
ctgagaccagaacatatactgagtg

SEQ ID NO: 4865016 - DNA, 25 bp, Homo sapien
tatactgagtgtcacaaatgaattt

SEQ ID NO: 4865017 - DNA, 25 bp, Homo sapien
ttctactggttcaattccataactg

SEQ ID NO: 4865018 - DNA, 25 bp, Homo sapien
ctgtgagtttaaaggaactttgtag

SEQ ID NO: 4865019 - DNA, 25 bp, Homo sapien
attatatgctcaaatcttgctgaag

SEQ ID NO: 4865020 - DNA, 25 bp, Homo sapien
caaatcttgctgaagattctactgg

SEQ ID NO: 4865021 - DNA, 25 bp, Homo sapien
ataacatcagaatgatgacagtcac

SEQ ID NO: 4865022 - DNA, 25 bp, Homo sapien
cataacatcagaatgatgacagtca

SEQ ID NO: 4865023 - DNA, 25 bp, Homo sapien
tcataacatcagaatgatgacagtc

SEQ ID NO: 4865024 - DNA, 25 bp, Homo sapien
actacacaggcaatgttctagtatg

SEQ ID NO: 4865025 - DNA, 25 bp, Homo sapien
aactacacaggcaatgttctagtat

SEQ ID NO: 4865026 - DNA, 25 bp, Homo sapien
aaactacacaggcaatgttctagta

SEQ ID NO: 4865027 - DNA, 25 bp, Homo sapien
cagcaaattaagagcatctggcaac

SEQ ID NO: 4865028 - DNA, 25 bp, Homo sapien
tctctaggaaccatacagatagttg

SEQ ID NO: 4865029 - DNA, 25 bp, Homo sapien
taagcacactgccataagacaaagg

SEQ ID NO: 4865030 - DNA, 25 bp, Homo sapien
tctggcaacatgcaaatggctgtgc

SEQ ID NO: 4865031 - DNA, 25 bp, Homo sapien
tgtatatttccagatattggggtaa

SEQ ID NO: 4865032 - DNA, 25 bp, Homo sapien
ccagatattggggtaatagttttga

SEQ ID NO: 4865033 - DNA, 25 bp, Homo sapien
caaagctttttccactataatgtat

SEQ ID NO: 4865034 - DNA, 25 bp, Homo sapien
tatttccagatattggggtaatagt

SEQ ID NO: 4865035 - DNA, 25 bp, Homo sapien
tgacaagcccaataacctggacaat

SEQ ID NO: 4865036 - DNA, 25 bp, Homo sapien
caagcccaataacctggacaatttt

SEQ ID NO: 4865037 - DNA, 25 bp, Homo sapien
gtgttgacaagcccaataacctgga

SEQ ID NO: 4865038 - DNA, 25 bp, Homo sapien
ccaataacctggacaattttttgtg

SEQ ID NO: 4865039 - DNA, 25 bp, Homo sapien
gatagtcccgtttccatgccaaaaa

SEQ ID NO: 4865040 - DNA, 25 bp, Homo sapien
caattccaaggaagacagtataaca

SEQ ID NO: 4865041 - DNA, 25 bp, Homo sapien
cccactggtggaaatctggttttca

SEQ ID NO: 4865042 - DNA, 25 bp, Homo sapien
tttgtaatatatcatcagcatcccc

SEQ ID NO: 4865043 - DNA, 25 bp, Homo sapien
catagcttttattgcatacagtgcc

SEQ ID NO: 4865044 - DNA, 25 bp, Homo sapien
catagcaatacctgcatcatagctt

SEQ ID NO: 4865045 - DNA, 25 bp, Homo sapien
atagcttttattgcatacagtgcca

SEQ ID NO: 4865046 - DNA, 25 bp, Homo sapien
tgctcccacatatttaggatgtttc

SEQ ID NO: 4865047 - DNA, 25 bp, Homo sapien
cgaaaatccctccaaacctattgca

SEQ ID NO: 4865048 - DNA, 25 bp, Homo sapien
gattcatgatgcatgtagctctcag

SEQ ID NO: 4865049 - DNA, 25 bp, Homo sapien
tacattaaggccaagcagttgagct

SEQ ID NO: 4865050 - DNA, 25 bp, Homo sapien
tgagctataataaccgaaaatccct

SEQ ID NO: 4865051 - DNA, 25 bp, Homo sapien
tgctaaaaatctttctaccactggc

SEQ ID NO: 4865052 - DNA, 25 bp, Homo sapien
gttgctaaaaatctttctaccactg

SEQ ID NO: 4865053 - DNA, 25 bp, Homo sapien
gcagttgctaaaaatctttctacca

SEQ ID NO: 4865054 - DNA, 25 bp, Homo sapien
ctgcagttgctaaaaatctttctac

SEQ ID NO: 4865055 - DNA, 25 bp, Homo sapien
cattcttcattggattccaaaatcc

SEQ ID NO: 4865056 - DNA, 25 bp, Homo sapien
attcttcattggattccaaaatccc

SEQ ID NO: 4865057 - DNA, 25 bp, Homo sapien
aaagcttctgaaggcatttagtctc

SEQ ID NO: 4865058 - DNA, 25 bp, Homo sapien
cttctgaaggcatttagtctcaaat

SEQ ID NO: 4865059 - DNA, 25 bp, Homo sapien
tctaggtagtctttgtcgaaagggc

SEQ ID NO: 4865060 - DNA, 25 bp, Homo sapien
aagacgctctccctgtaccacaata

SEQ ID NO: 4865061 - DNA, 25 bp, Homo sapien
tcgaaagggcattgacacctgtatc

SEQ ID NO: 4865062 - DNA, 25 bp, Homo sapien
taagcctaatttgtaacactacgga

SEQ ID NO: 4865063 - DNA, 25 bp, Homo sapien
tactaaggattccaattgtaaataa

SEQ ID NO: 4865064 - DNA, 25 bp, Homo sapien
gcagtcaattattattcaaataggg

SEQ ID NO: 4865065 - DNA, 25 bp, Homo sapien
ctgcatttacaccatatttttatat

SEQ ID NO: 4865066 - DNA, 25 bp, Homo sapien
tcaagggtctcatgggtgatttgtt

SEQ ID NO: 4865067 - DNA, 25 bp, Homo sapien
cacattttactgagcccttcagttt

SEQ ID NO: 4865068 - DNA, 25 bp, Homo sapien
tactgagcccttcagtttacatgtg

SEQ ID NO: 4865069 - DNA, 25 bp, Homo sapien
gatgtacaacatggtccagaaccac

SEQ ID NO: 4865070 - DNA, 25 bp, Homo sapien
aacatggtccagaaccacattttac

SEQ ID NO: 4865071 - DNA, 25 bp, Homo sapien
tccgttatagcaataggcagttccc

SEQ ID NO: 4865072 - DNA, 25 bp, Homo sapien
tcaatgcataagtgtcaggaacaca

SEQ ID NO: 4865073 - DNA, 25 bp, Homo sapien
ggcagttcccaacttgcacaaacgg

SEQ ID NO: 4865074 - DNA, 25 bp, Homo sapien
tactctttctacatggagtgcctgc

SEQ ID NO: 4865075 - DNA, 25 bp, Homo sapien
caggcaaatggagcaccttgagcac

SEQ ID NO: 4865076 - DNA, 25 bp, Homo sapien
ttaaaacaggcaaatggagcacctt

SEQ ID NO: 4865077 - DNA, 25 bp, Homo sapien
tccgttcacaaggtaatggttgtga

SEQ ID NO: 4865078 - DNA, 25 bp, Homo sapien
aacaggcaaatggagcaccttgagc

SEQ ID NO: 4865079 - DNA, 25 bp, Homo sapien
tggcccctggtgctctgtattaata

SEQ ID NO: 4865080 - DNA, 25 bp, Homo sapien
tattaatatccaataggtgtggctg

SEQ ID NO: 4865081 - DNA, 25 bp, Homo sapien
ttcttctttccatgtactaatcctc

SEQ ID NO: 4865082 - DNA, 25 bp, Homo sapien
tgtggctgattatgccgggtctcct

SEQ ID NO: 4865083 - DNA, 25 bp, Homo sapien
ggaaccagtggctatagatacacat

SEQ ID NO: 4865084 - DNA, 25 bp, Homo sapien
cacaagctaattttccacagagaac

SEQ ID NO: 4865085 - DNA, 25 bp, Homo sapien
tctggaccacacatggtgccatcag

SEQ ID NO: 4865086 - DNA, 25 bp, Homo sapien
gaataaactgtagattgagcgtcac

SEQ ID NO: 4865087 - DNA, 25 bp, Homo sapien
tgcattatagcaaaccgctcttcaa

SEQ ID NO: 4865088 - DNA, 25 bp, Homo sapien
tatcgggtatgactccactgggccc

SEQ ID NO: 4865089 - DNA, 25 bp, Homo sapien
ttcacctggacttcaaaggatgccc

SEQ ID NO: 4865090 - DNA, 25 bp, Homo sapien
tgttcttctggacggcacattcaaa

SEQ ID NO: 4865091 - DNA, 25 bp, Homo sapien
tgtggtggcattacagttatatccc

SEQ ID NO: 4865092 - DNA, 25 bp, Homo sapien
tttgtggtggcattacagttatatc

SEQ ID NO: 4865093 - DNA, 25 bp, Homo sapien
ggtggcattacagttatatcccatt

SEQ ID NO: 4865094 - DNA, 25 bp, Homo sapien
ggcattacagttatatcccattaaa

SEQ ID NO: 4865095 - DNA, 25 bp, Homo sapien
cagggaagcattgacaattaccaaa

SEQ ID NO: 4865096 - DNA, 25 bp, Homo sapien
atttacaatctggaggtctatgtcc

SEQ ID NO: 4865097 - DNA, 25 bp, Homo sapien
ccagggaagcattgacaattaccaa

SEQ ID NO: 4865098 - DNA, 25 bp, Homo sapien
aatctggaggtctatgtccagggaa

SEQ ID NO: 4865099 - DNA, 25 bp, Homo sapien
cctagcaggatagttagtcctccat

SEQ ID NO: 4865100 - DNA, 25 bp, Homo sapien
tcctgacaacataactgccagtgta

SEQ ID NO: 4865101 - DNA, 25 bp, Homo sapien
cctagttgaactaccatgttgacga

SEQ ID NO: 4865102 - DNA, 25 bp, Homo sapien
gaagcagcaaacctaatggctttca

SEQ ID NO: 4865103 - DNA, 25 bp, Homo sapien
accagttgttccagtgtgtattgta

SEQ ID NO: 4865104 - DNA, 25 bp, Homo sapien
tgttccagtgtgtattgtagccttt

SEQ ID NO: 4865105 - DNA, 25 bp, Homo sapien
tgaaaaacggcagaaaaatgcagaa

SEQ ID NO: 4865106 - DNA, 25 bp, Homo sapien
aactatgaaaaacggcagaaaaatg

SEQ ID NO: 4865107 - DNA, 25 bp, Homo sapien
accatgtgcttttcgttgtgatata

SEQ ID NO: 4865108 - DNA, 25 bp, Homo sapien
taatgactttctgactctctatgac

SEQ ID NO: 4865109 - DNA, 25 bp, Homo sapien
ttctgaagtctactatacatcactg

SEQ ID NO: 4865110 - DNA, 25 bp, Homo sapien
tctctgttcatcagtcaagtaatca

SEQ ID NO: 4865111 - DNA, 25 bp, Homo sapien
ttaatgtcccacgtcatcgctttct

SEQ ID NO: 4865112 - DNA, 25 bp, Homo sapien
aatgtcccacgtcatcgctttctga

SEQ ID NO: 4865113 - DNA, 25 bp, Homo sapien
cgctttctgatacaacggatgaatt

SEQ ID NO: 4865114 - DNA, 25 bp, Homo sapien
cacgtcatcgctttctgatacaacg

SEQ ID NO: 4865115 - DNA, 25 bp, Homo sapien
cacattcgttcctttaggttatttg

SEQ ID NO: 4865116 - DNA, 25 bp, Homo sapien
caatgcattggggataacgtaaggt

SEQ ID NO: 4865117 - DNA, 25 bp, Homo sapien
tttacaatgcattggggataacgta

SEQ ID NO: 4865118 - DNA, 25 bp, Homo sapien
cgttcctttaggttatttgctatgg

SEQ ID NO: 4865119 - DNA, 25 bp, Homo sapien
atgtgtatagatacatcaacattat

SEQ ID NO: 4865120 - DNA, 25 bp, Homo sapien
tgaatgtgtatagatacatcaacat

SEQ ID NO: 4865121 - DNA, 25 bp, Homo sapien
tcttaatattctgtggccatacaat

SEQ ID NO: 4865122 - DNA, 25 bp, Homo sapien
gaatgtgtatagatacatcaacatt

SEQ ID NO: 4865123 - DNA, 25 bp, Homo sapien
attttctctacagggcgggcttcca

SEQ ID NO: 4865124 - DNA, 25 bp, Homo sapien
ctctcccatggagagtgcaaggcct

SEQ ID NO: 4865125 - DNA, 25 bp, Homo sapien
gcaaggccttcactgattaacaaag

SEQ ID NO: 4865126 - DNA, 25 bp, Homo sapien
tgtgacttatacttatggtcaagtg

SEQ ID NO: 4865127 - DNA, 25 bp, Homo sapien
cgttcaggctgtatttggaggaatt

SEQ ID NO: 4865128 - DNA, 25 bp, Homo sapien
gttcaggctgtatttggaggaattt

SEQ ID NO: 4865129 - DNA, 25 bp, Homo sapien
aggctgtatttggaggaattttttg

SEQ ID NO: 4865130 - DNA, 25 bp, Homo sapien
tcaggctgtatttggaggaattttt

SEQ ID NO: 4865131 - DNA, 25 bp, Homo sapien
gggtttccaactcagcaattccaag

SEQ ID NO: 4865132 - DNA, 25 bp, Homo sapien
tccacgtagaataagggctttccca

SEQ ID NO: 4865133 - DNA, 25 bp, Homo sapien
tcatccccgacattgccgccttccc

SEQ ID NO: 4865134 - DNA, 25 bp, Homo sapien
caattccaagctcatccccgacatt

SEQ ID NO: 4865135 - DNA, 25 bp, Homo sapien
ctctcccagccgcctacctcttcca

SEQ ID NO: 4865136 - DNA, 25 bp, Homo sapien
tctcccagccgcctacctcttccag

SEQ ID NO: 4865137 - DNA, 25 bp, Homo sapien
cccttttgagtttggcaatgcgagc

SEQ ID NO: 4865138 - DNA, 25 bp, Homo sapien
gagagctcatcatatctgttgttgt

SEQ ID NO: 4865139 - DNA, 25 bp, Homo sapien
tgatgggagagctcatcatatctgt

SEQ ID NO: 4865140 - DNA, 25 bp, Homo sapien
ccttttgagtttggcaatgcgagcc

SEQ ID NO: 4865141 - DNA, 25 bp, Homo sapien
gcgctcagtgcttaatcttggccct

SEQ ID NO: 4865142 - DNA, 25 bp, Homo sapien
tcttggccctttttcgagagtagga

SEQ ID NO: 4865143 - DNA, 25 bp, Homo sapien
tgaatgtggttattgcgctcagtgc

SEQ ID NO: 4865144 - DNA, 25 bp, Homo sapien
ttggtctggagcatgcattttcttc

SEQ ID NO: 4865145 - DNA, 25 bp, Homo sapien
tggaattatccgatataagagttga

SEQ ID NO: 4865146 - DNA, 25 bp, Homo sapien
taggatttggaattatccgatataa

SEQ ID NO: 4865147 - DNA, 25 bp, Homo sapien
gcagttctttgggtgagaactctga

SEQ ID NO: 4865148 - DNA, 25 bp, Homo sapien
gagaacagtgaagggtccattagga

SEQ ID NO: 4865149 - DNA, 25 bp, Homo sapien
cttctgctggcttgccgggtcccag

SEQ ID NO: 4865150 - DNA, 25 bp, Homo sapien
ttctgctggcttgccgggtcccagg

SEQ ID NO: 4865151 - DNA, 25 bp, Homo sapien
caggttccctgactgcaattttcgg

SEQ ID NO: 4865152 - DNA, 25 bp, Homo sapien
gactgcaattttcggaagagcagag

SEQ ID NO: 4865153 - DNA, 25 bp, Homo sapien
gcggggggctgatgaggcaacagtc

SEQ ID NO: 4865154 - DNA, 25 bp, Homo sapien
ggggctgatgaggcaacagtctggc

SEQ ID NO: 4865155 - DNA, 25 bp, Homo sapien
gggggctgatgaggcaacagtctgg

SEQ ID NO: 4865156 - DNA, 25 bp, Homo sapien
cggggggctgatgaggcaacagtct

SEQ ID NO: 4865157 - DNA, 25 bp, Homo sapien
catagtaactctccacttccttatt

SEQ ID NO: 4865158 - DNA, 25 bp, Homo sapien
atagtaactctccacttccttattt

SEQ ID NO: 4865159 - DNA, 25 bp, Homo sapien
acatagtaactctccacttccttat

SEQ ID NO: 4865160 - DNA, 25 bp, Homo sapien
gaactatgaaaacaggtggccggag

SEQ ID NO: 4865161 - DNA, 25 bp, Homo sapien
gcagcccggaaacacaacctgtgtt

SEQ ID NO: 4865162 - DNA, 25 bp, Homo sapien
tagtgtcatgtttcagcagcccgga

SEQ ID NO: 4865163 - DNA, 25 bp, Homo sapien
tatactcaactattagtcaatggct

SEQ ID NO: 4865164 - DNA, 25 bp, Homo sapien
cctctggtgcccctcagtgtctgaa

SEQ ID NO: 4865165 - DNA, 25 bp, Homo sapien
tcttataatagttgctgccacagcc

SEQ ID NO: 4865166 - DNA, 25 bp, Homo sapien
tcttactgccatataggaagccaga

SEQ ID NO: 4865167 - DNA, 25 bp, Homo sapien
actgaaagttcgtattccatatgaa

SEQ ID NO: 4865168 - DNA, 25 bp, Homo sapien
tactgattgtccaggagttttccat

SEQ ID NO: 4865169 - DNA, 25 bp, Homo sapien
ctttactgattgtccaggagttttc

SEQ ID NO: 4865170 - DNA, 25 bp, Homo sapien
tttactgattgtccaggagttttcc

SEQ ID NO: 4865171 - DNA, 25 bp, Homo sapien
ttactgattgtccaggagttttcca

SEQ ID NO: 4865172 - DNA, 25 bp, Homo sapien
tttggcagagcaaagcccacttctt

SEQ ID NO: 4865173 - DNA, 25 bp, Homo sapien
cccacttcttcatcaatatggtact

SEQ ID NO: 4865174 - DNA, 25 bp, Homo sapien
ctgtggatttggcagagcaaagccc

SEQ ID NO: 4865175 - DNA, 25 bp, Homo sapien
tggatttggcagagcaaagcccact

SEQ ID NO: 4865176 - DNA, 25 bp, Homo sapien
ccgtatccatgttaggtaagtaaga

SEQ ID NO: 4865177 - DNA, 25 bp, Homo sapien
tctccgtatccatgttaggtaagta

SEQ ID NO: 4865178 - DNA, 25 bp, Homo sapien
ggtaagtaagaaatgcatagatgac

SEQ ID NO: 4865179 - DNA, 25 bp, Homo sapien
cactctccgtatccatgttaggtaa

SEQ ID NO: 4865180 - DNA, 25 bp, Homo sapien
gcatttttgtagatctgcgggcaaa

SEQ ID NO: 4865181 - DNA, 25 bp, Homo sapien
gcacagttaggttgaaatctctgac

SEQ ID NO: 4865182 - DNA, 25 bp, Homo sapien
tgtggactgtaactgtttgagctac

SEQ ID NO: 4865183 - DNA, 25 bp, Homo sapien
taaaggtgctctctagtatgtggac

SEQ ID NO: 4865184 - DNA, 25 bp, Homo sapien
ccagactctatgagatcaggcagat

SEQ ID NO: 4865185 - DNA, 25 bp, Homo sapien
gagatcaggcagatgtttagcaatg

SEQ ID NO: 4865186 - DNA, 25 bp, Homo sapien
actctttctcgaagctggccagact

SEQ ID NO: 4865187 - DNA, 25 bp, Homo sapien
tcgaagctggccagactctatgaga

SEQ ID NO: 4865188 - DNA, 25 bp, Homo sapien
gtgacttgtggtctgtgagatgatc

SEQ ID NO: 4865189 - DNA, 25 bp, Homo sapien
ctgtgacttgtggtctgtgagatga

SEQ ID NO: 4865190 - DNA, 25 bp, Homo sapien
gacttgtggtctgtgagatgatcaa

SEQ ID NO: 4865191 - DNA, 25 bp, Homo sapien
tgacttgtggtctgtgagatgatca

SEQ ID NO: 4865192 - DNA, 25 bp, Homo sapien
atgccatggtgatgcatcccagaac

SEQ ID NO: 4865193 - DNA, 25 bp, Homo sapien
atcccagaactagacgtgcaaggcg

SEQ ID NO: 4865194 - DNA, 25 bp, Homo sapien
catggtgatgcatcccagaactaga

SEQ ID NO: 4865195 - DNA, 25 bp, Homo sapien
tgatgcatcccagaactagacgtgc

SEQ ID NO: 4865196 - DNA, 25 bp, Homo sapien
gcataagaaatctgagaaaatctcc

SEQ ID NO: 4865197 - DNA, 25 bp, Homo sapien
atagcataagaaatctgagaaaatc

SEQ ID NO: 4865198 - DNA, 25 bp, Homo sapien
tcacatagcataagaaatctgagaa

SEQ ID NO: 4865199 - DNA, 25 bp, Homo sapien
cataagaaatctgagaaaatctcca

SEQ ID NO: 4865200 - DNA, 25 bp, Homo sapien
agtttgccaagacacagtctgcata

SEQ ID NO: 4865201 - DNA, 25 bp, Homo sapien
ggaggcagttccagtttcttggaga

SEQ ID NO: 4865202 - DNA, 25 bp, Homo sapien
tgcataaaccaaaataggaggcagt

SEQ ID NO: 4865203 - DNA, 25 bp, Homo sapien
tttcttggagagttggcagtaagga

SEQ ID NO: 4865204 - DNA, 25 bp, Homo sapien
atgaaagcagccatgaagcaatgga

SEQ ID NO: 4865205 - DNA, 25 bp, Homo sapien
cttatgaaagcagccatgaagcaat

SEQ ID NO: 4865206 - DNA, 25 bp, Homo sapien
tatgaaagcagccatgaagcaatgg

SEQ ID NO: 4865207 - DNA, 25 bp, Homo sapien
tgaaagcagccatgaagcaatggac

SEQ ID NO: 4865208 - DNA, 25 bp, Homo sapien
actgcagtctccatcacgaaatgag

SEQ ID NO: 4865209 - DNA, 25 bp, Homo sapien
cacgaaatgagaacaaaacgtccat

SEQ ID NO: 4865210 - DNA, 25 bp, Homo sapien
agctgctatttccaccaatagagag

SEQ ID NO: 4865211 - DNA, 25 bp, Homo sapien
gagaccaggaagaatcctttactgc

SEQ ID NO: 4865212 - DNA, 25 bp, Homo sapien
aattttgaagtgaggatagacgtac

SEQ ID NO: 4865213 - DNA, 25 bp, Homo sapien
aaattttgaagtgaggatagacgta

SEQ ID NO: 4865214 - DNA, 25 bp, Homo sapien
taaattttgaagtgaggatagacgt

SEQ ID NO: 4865215 - DNA, 25 bp, Homo sapien
tgatcccatgttgtacttgttaagg

SEQ ID NO: 4865216 - DNA, 25 bp, Homo sapien
taggctccgaagtgattgctctgct

SEQ ID NO: 4865217 - DNA, 25 bp, Homo sapien
cctacagaggtttcaagttggattt

SEQ ID NO: 4865218 - DNA, 25 bp, Homo sapien
catgcttagtatagtttaggctccg

SEQ ID NO: 4865219 - DNA, 25 bp, Homo sapien
tttgcattgccttgaatacagtagg

SEQ ID NO: 4865220 - DNA, 25 bp, Homo sapien
gaagctatttccaacagcgccttta

SEQ ID NO: 4865221 - DNA, 25 bp, Homo sapien
aaagtgtcccgttcttgcatttgca

SEQ ID NO: 4865222 - DNA, 25 bp, Homo sapien
ttgccttgaatacagtaggaattac

SEQ ID NO: 4865223 - DNA, 25 bp, Homo sapien
tcaccgcctgtggaatctgaagtca

SEQ ID NO: 4865224 - DNA, 25 bp, Homo sapien
tagtgttaaatagacccagcttgga

SEQ ID NO: 4865225 - DNA, 25 bp, Homo sapien
tctctaaggtttttagcgggaggca

SEQ ID NO: 4865226 - DNA, 25 bp, Homo sapien
cacctggaacatttgacttgtcagc

SEQ ID NO: 4865227 - DNA, 25 bp, Homo sapien
actgaaaaatgcttttgggttcaca

SEQ ID NO: 4865228 - DNA, 25 bp, Homo sapien
gacaaatatatgcgaagaacactga

SEQ ID NO: 4865229 - DNA, 25 bp, Homo sapien
ccagacaaatatatgcgaagaacac

SEQ ID NO: 4865230 - DNA, 25 bp, Homo sapien
ctgaaaaatgcttttgggttcacat

SEQ ID NO: 4865231 - DNA, 25 bp, Homo sapien
tggatgcccagcaggacgtcaaagc

SEQ ID NO: 4865232 - DNA, 25 bp, Homo sapien
actgaaagacgctgctttggcctgc

SEQ ID NO: 4865233 - DNA, 25 bp, Homo sapien
ccttcatacaccagaccgtctgata

SEQ ID NO: 4865234 - DNA, 25 bp, Homo sapien
cccagcaggacgtcaaagcactgaa

SEQ ID NO: 4865235 - DNA, 25 bp, Homo sapien
ctttaaactttggtgcaggcattgc

SEQ ID NO: 4865236 - DNA, 25 bp, Homo sapien
tgagggatttgactctaatgagcac

SEQ ID NO: 4865237 - DNA, 25 bp, Homo sapien
ggactgagggatttgactctaatga

SEQ ID NO: 4865238 - DNA, 25 bp, Homo sapien
ctgagggatttgactctaatgagca

SEQ ID NO: 4865239 - DNA, 25 bp, Homo sapien
actgagggatttgactctaatgagc

SEQ ID NO: 4865240 - DNA, 25 bp, Homo sapien
gatttgcagatggtagctcctcagg

SEQ ID NO: 4865241 - DNA, 25 bp, Homo sapien
acaggcgtcataagcttcccgcagg

SEQ ID NO: 4865242 - DNA, 25 bp, Homo sapien
gatgtacttagtcacgatttgcaga

SEQ ID NO: 4865243 - DNA, 25 bp, Homo sapien
ctggcttgcaggaatcaggatgtac

SEQ ID NO: 4865244 - DNA, 25 bp, Homo sapien
gtattgcattattggtaaaacattg

SEQ ID NO: 4865245 - DNA, 25 bp, Homo sapien
tgtctctgctatgataaaatgtgct

SEQ ID NO: 4865246 - DNA, 25 bp, Homo sapien
caggaatgcatacagatgtctctgc

SEQ ID NO: 4865247 - DNA, 25 bp, Homo sapien
gctctgttacaatgggtaatgacag

SEQ ID NO: 4865248 - DNA, 25 bp, Homo sapien
cgcgcccagccgacagaatatatct

SEQ ID NO: 4865249 - DNA, 25 bp, Homo sapien
agcctttgcattcattgggctcagt

SEQ ID NO: 4865250 - DNA, 25 bp, Homo sapien
tggcaaagtcacaatatttccaggc

SEQ ID NO: 4865251 - DNA, 25 bp, Homo sapien
ctttgcattcattgggctcagttct

SEQ ID NO: 4865252 - DNA, 25 bp, Homo sapien
caggcagatttccaactttaaaatt

SEQ ID NO: 4865253 - DNA, 25 bp, Homo sapien
gcagatttccaactttaaaattctc

SEQ ID NO: 4865254 - DNA, 25 bp, Homo sapien
cagtgtgtatggactcaactttgca

SEQ ID NO: 4865255 - DNA, 25 bp, Homo sapien
tgtgtatggactcaactttgcagac

SEQ ID NO: 4865256 - DNA, 25 bp, Homo sapien
aaaccagtgtgtatggactcaactt

SEQ ID NO: 4865257 - DNA, 25 bp, Homo sapien
tcatctggactgaaatttccaaacc

SEQ ID NO: 4865258 - DNA, 25 bp, Homo sapien
tcatctcattgtggactctctgtat

SEQ ID NO: 4865259 - DNA, 25 bp, Homo sapien
tgtcaagcttcatttcctaagaagg

SEQ ID NO: 4865260 - DNA, 25 bp, Homo sapien
ggtgtccattgccttctgtattatg

SEQ ID NO: 4865261 - DNA, 25 bp, Homo sapien
agctccagtgtaggaggatgtttca

SEQ ID NO: 4865262 - DNA, 25 bp, Homo sapien
agttcccttgatctttgttgtctca

SEQ ID NO: 4865263 - DNA, 25 bp, Homo sapien
taagattgtttgcatggtctacaag

SEQ ID NO: 4865264 - DNA, 25 bp, Homo sapien
cattgtaaggactaaagttcccttg

SEQ ID NO: 4865265 - DNA, 25 bp, Homo sapien
tacaagcaatgttatgttgattatc

SEQ ID NO: 4865266 - DNA, 25 bp, Homo sapien
ggaagttggctagagacaattgtgc

SEQ ID NO: 4865267 - DNA, 25 bp, Homo sapien
ctaagaggaagttggctagagacaa

SEQ ID NO: 4865268 - DNA, 25 bp, Homo sapien
taagaggaagttggctagagacaat

SEQ ID NO: 4865269 - DNA, 25 bp, Homo sapien
ttggctagagacaattgtgcttaga

SEQ ID NO: 4865270 - DNA, 25 bp, Homo sapien
gaaactcagggctgtaccctgcatg

SEQ ID NO: 4865271 - DNA, 25 bp, Homo sapien
agggctgtaccctgcatgaagccct

SEQ ID NO: 4865272 - DNA, 25 bp, Homo sapien
cagggctgtaccctgcatgaagccc

SEQ ID NO: 4865273 - DNA, 25 bp, Homo sapien
actcagggctgtaccctgcatgaag

SEQ ID NO: 4865274 - DNA, 25 bp, Homo sapien
cgtgtccggtagaactttgtactgc

SEQ ID NO: 4865275 - DNA, 25 bp, Homo sapien
ttcggtcacgctgctttactcccag

SEQ ID NO: 4865276 - DNA, 25 bp, Homo sapien
tcatatttgtaggaccgggatctgc

SEQ ID NO: 4865277 - DNA, 25 bp, Homo sapien
tttgtactgctttcggtcacgctgc

SEQ ID NO: 4865278 - DNA, 25 bp, Homo sapien
gctgtcttcacattcggtctgtggg

SEQ ID NO: 4865279 - DNA, 25 bp, Homo sapien
agaaagccatactcttcagatatgt

SEQ ID NO: 4865280 - DNA, 25 bp, Homo sapien
gatatgtgatagctttccaaagaca

SEQ ID NO: 4865281 - DNA, 25 bp, Homo sapien
tcttcagatatgtgatagctttcca

SEQ ID NO: 4865282 - DNA, 25 bp, Homo sapien
aagattgctagccactattagtggc

SEQ ID NO: 4865283 - DNA, 25 bp, Homo sapien
aatcagctgtcgtagcttgctccgg

SEQ ID NO: 4865284 - DNA, 25 bp, Homo sapien
tagtggctgtccaaatcagctgtcg

SEQ ID NO: 4865285 - DNA, 25 bp, Homo sapien
cactattagtggctgtccaaatcag

SEQ ID NO: 4865286 - DNA, 25 bp, Homo sapien
caaggcctataatgatctggaagtt

SEQ ID NO: 4865287 - DNA, 25 bp, Homo sapien
ctggtgagcatcaatcaattgagga

SEQ ID NO: 4865288 - DNA, 25 bp, Homo sapien
ttgttggcaatttccatccaaggcc

SEQ ID NO: 4865289 - DNA, 25 bp, Homo sapien
ttgtccacatgagcttgaagctggt

SEQ ID NO: 4865290 - DNA, 25 bp, Homo sapien
catggacttccgcaattatgtggta

SEQ ID NO: 4865291 - DNA, 25 bp, Homo sapien
ggatttctttggtcatgtcaacaca

SEQ ID NO: 4865292 - DNA, 25 bp, Homo sapien
tacaaggttctagtgctttgcacaa

SEQ ID NO: 4865293 - DNA, 25 bp, Homo sapien
gacattgaagccagtcccttactca

SEQ ID NO: 4865294 - DNA, 25 bp, Homo sapien
agcctgtcttatccaaacactgtgg

SEQ ID NO: 4865295 - DNA, 25 bp, Homo sapien
ggtgggtgttcctctctctatcaaa

SEQ ID NO: 4865296 - DNA, 25 bp, Homo sapien
tgtggcctgcttgctatcgctgacc

SEQ ID NO: 4865297 - DNA, 25 bp, Homo sapien
tcccaggactgagcggacttatttc

SEQ ID NO: 4865298 - DNA, 25 bp, Homo sapien
gccagacataacccatggtgaggaa

SEQ ID NO: 4865299 - DNA, 25 bp, Homo sapien
ttcctgccagacataacccatggtg

SEQ ID NO: 4865300 - DNA, 25 bp, Homo sapien
cagacataacccatggtgaggaagc

SEQ ID NO: 4865301 - DNA, 25 bp, Homo sapien
cttcctgccagacataacccatggt

SEQ ID NO: 4865302 - DNA, 25 bp, Homo sapien
aaatccagacaaatagcatattcta

SEQ ID NO: 4865303 - DNA, 25 bp, Homo sapien
ataaatccagacaaatagcatattc

SEQ ID NO: 4865304 - DNA, 25 bp, Homo sapien
taaatccagacaaatagcatattct

SEQ ID NO: 4865305 - DNA, 25 bp, Homo sapien
caagttcctggagacttcgacaaat

SEQ ID NO: 4865306 - DNA, 25 bp, Homo sapien
cagcaccaagtctgagtggaccagg

SEQ ID NO: 4865307 - DNA, 25 bp, Homo sapien
ttttttggtccagttcgtcagcacc

SEQ ID NO: 4865308 - DNA, 25 bp, Homo sapien
tcgacaaatggaagggcaagattcc

SEQ ID NO: 4865309 - DNA, 25 bp, Homo sapien
agcctgcattgatgtcatttctctg

SEQ ID NO: 4865310 - DNA, 25 bp, Homo sapien
ttttactgacttgtaaagcctgcat

SEQ ID NO: 4865311 - DNA, 25 bp, Homo sapien
ttactgacttgtaaagcctgcattg

SEQ ID NO: 4865312 - DNA, 25 bp, Homo sapien
actgacttgtaaagcctgcattgat

SEQ ID NO: 4865313 - DNA, 25 bp, Homo sapien
tcgaggattcgataccagactggcc

SEQ ID NO: 4865314 - DNA, 25 bp, Homo sapien
taaagggtgagcgacatttccactc

SEQ ID NO: 4865315 - DNA, 25 bp, Homo sapien
tggattatgaggtcgaggattcgat

SEQ ID NO: 4865316 - DNA, 25 bp, Homo sapien
ctatgtgataaagggtgagcgacat

SEQ ID NO: 4865317 - DNA, 25 bp, Homo sapien
tttgaattctgcaagttgtggctgg

SEQ ID NO: 4865318 - DNA, 25 bp, Homo sapien
caagttgtggctggactatggggtg

SEQ ID NO: 4865319 - DNA, 25 bp, Homo sapien
ttgaattctgcaagttgtggctgga

SEQ ID NO: 4865320 - DNA, 25 bp, Homo sapien
ctgcaagttgtggctggactatggg

SEQ ID NO: 4865321 - DNA, 25 bp, Homo sapien
actattaaacttcaactgggtgcag

SEQ ID NO: 4865322 - DNA, 25 bp, Homo sapien
gagaggcaacactggatcagaggct

SEQ ID NO: 4865323 - DNA, 25 bp, Homo sapien
cagttattgatgaccaccaagagag

SEQ ID NO: 4865324 - DNA, 25 bp, Homo sapien
tctgtagacaatctgcaatctggcc

SEQ ID NO: 4865325 - DNA, 25 bp, Homo sapien
gactgaggcaagaggttgcagagag

SEQ ID NO: 4865326 - DNA, 25 bp, Homo sapien
agagccgagatgacaccactgcact

SEQ ID NO: 4865327 - DNA, 25 bp, Homo sapien
agagactgaggcaagaggttgcaga

SEQ ID NO: 4865328 - DNA, 25 bp, Homo sapien
ccagcctgggagatagagtgagact

SEQ ID NO: 4865329 - DNA, 25 bp, Homo sapien
tgccgagttagataactgcagggtg

SEQ ID NO: 4865330 - DNA, 25 bp, Homo sapien
gtgtggagactgtaccgtgagtact

SEQ ID NO: 4865331 - DNA, 25 bp, Homo sapien
tgagtactcactgcccagagttccc

SEQ ID NO: 4865332 - DNA, 25 bp, Homo sapien
gaaggagaggagcacatgattagag

SEQ ID NO: 4865333 - DNA, 25 bp, Homo sapien
agtataaaaccatgcaggctctctc

SEQ ID NO: 4865334 - DNA, 25 bp, Homo sapien
ataaaaccatgcaggctctctcccc

SEQ ID NO: 4865335 - DNA, 25 bp, Homo sapien
tataaaaccatgcaggctctctccc

SEQ ID NO: 4865336 - DNA, 25 bp, Homo sapien
gtataaaaccatgcaggctctctcc

SEQ ID NO: 4865337 - DNA, 25 bp, Homo sapien
gggctgcaagatagcattcgtggcc

SEQ ID NO: 4865338 - DNA, 25 bp, Homo sapien
gaatagacagtctcagtcgctgcag

SEQ ID NO: 4865339 - DNA, 25 bp, Homo sapien
cctaaggttttggtgatgtcctgaa

SEQ ID NO: 4865340 - DNA, 25 bp, Homo sapien
gatagcattcgtggcctgaacaaga

SEQ ID NO: 4865341 - DNA, 25 bp, Homo sapien
gggatccttcaggagcttcggaagc

SEQ ID NO: 4865342 - DNA, 25 bp, Homo sapien
cttcaggagcttcggaagcatctta

SEQ ID NO: 4865343 - DNA, 25 bp, Homo sapien
gacccctgggggatccttcaggagc

SEQ ID NO: 4865344 - DNA, 25 bp, Homo sapien
cctgggggatccttcaggagcttcg

SEQ ID NO: 4865345 - DNA, 25 bp, Homo sapien
ttcttgtaaacactctcttttccca

SEQ ID NO: 4865346 - DNA, 25 bp, Homo sapien
ctgcttcttgtaaacactctctttt

SEQ ID NO: 4865347 - DNA, 25 bp, Homo sapien
ccagtcctgcttcttgtaaacactc

SEQ ID NO: 4865348 - DNA, 25 bp, Homo sapien
gtcctgcttcttgtaaacactctct

SEQ ID NO: 4865349 - DNA, 25 bp, Homo sapien
ttagacgatgagacctcctgcagaa

SEQ ID NO: 4865350 - DNA, 25 bp, Homo sapien
tagacgatgagacctcctgcagaag

SEQ ID NO: 4865351 - DNA, 25 bp, Homo sapien
gcgccgatgggtcaagcaaaagctg

SEQ ID NO: 4865352 - DNA, 25 bp, Homo sapien
tgccaatgcgccgatgggtcaagca

SEQ ID NO: 4865353 - DNA, 25 bp, Homo sapien
attcttaacgctgccaatgcgccga

SEQ ID NO: 4865354 - DNA, 25 bp, Homo sapien
ccttcaccttttccaagaagaacat

SEQ ID NO: 4865355 - DNA, 25 bp, Homo sapien
caacgggggatagaatgttctcttc

SEQ ID NO: 4865356 - DNA, 25 bp, Homo sapien
tgtcccggagttccttccctatctg

SEQ ID NO: 4865357 - DNA, 25 bp, Homo sapien
tctgatatgcatggagacctggaat

SEQ ID NO: 4865358 - DNA, 25 bp, Homo sapien
aagctgcagcaacgggggatagaat

SEQ ID NO: 4865359 - DNA, 25 bp, Homo sapien
agaagcaatcaaaatgtgaacttta

SEQ ID NO: 4865360 - DNA, 25 bp, Homo sapien
ctggagaagcaatcaaaatgtgaac

SEQ ID NO: 4865361 - DNA, 25 bp, Homo sapien
tggagaagcaatcaaaatgtgaact

SEQ ID NO: 4865362 - DNA, 25 bp, Homo sapien
ggagaagcaatcaaaatgtgaactt

SEQ ID NO: 4865363 - DNA, 25 bp, Homo sapien
cagagagaaagatccggatgcctgc

SEQ ID NO: 4865364 - DNA, 25 bp, Homo sapien
aaagatccggatgcctgcataaaat

SEQ ID NO: 4865365 - DNA, 25 bp, Homo sapien
agagagaaagatccggatgcctgca

SEQ ID NO: 4865366 - DNA, 25 bp, Homo sapien
gagaaagatccggatgcctgcataa

SEQ ID NO: 4865367 - DNA, 25 bp, Homo sapien
gaaagcttcgatgctatccaactct

SEQ ID NO: 4865368 - DNA, 25 bp, Homo sapien
ctcaccatcacaattaggttttaac

SEQ ID NO: 4865369 - DNA, 25 bp, Homo sapien
acattcgttcaaaccacagtgtagc

SEQ ID NO: 4865370 - DNA, 25 bp, Homo sapien
aactctatactacactccccagcct

SEQ ID NO: 4865371 - DNA, 25 bp, Homo sapien
ctccacgtccaaggtaatgcctcaa

SEQ ID NO: 4865372 - DNA, 25 bp, Homo sapien
ggtctccacgtccaaggtaatgcct

SEQ ID NO: 4865373 - DNA, 25 bp, Homo sapien
ctggtctccacgtccaaggtaatgc

SEQ ID NO: 4865374 - DNA, 25 bp, Homo sapien
gtctccacgtccaaggtaatgcctc

SEQ ID NO: 4865375 - DNA, 25 bp, Homo sapien
tgcagctattaggagcaaggcctct

SEQ ID NO: 4865376 - DNA, 25 bp, Homo sapien
tcactggataaacagcacagtggcc

SEQ ID NO: 4865377 - DNA, 25 bp, Homo sapien
tgtaaggagccaggttgttttcact

SEQ ID NO: 4865378 - DNA, 25 bp, Homo sapien
gagccttggcttagttcattaacct

SEQ ID NO: 4865379 - DNA, 25 bp, Homo sapien
gacatgcagaaaggctgggactggg

SEQ ID NO: 4865380 - DNA, 25 bp, Homo sapien
gggacatgcagaaaggctgggactg

SEQ ID NO: 4865381 - DNA, 25 bp, Homo sapien
acatgcagaaaggctgggactgggc

SEQ ID NO: 4865382 - DNA, 25 bp, Homo sapien
ctgaagtcagggacatgcagaaagg

SEQ ID NO: 4865383 - DNA, 25 bp, Homo sapien
caaatactttgttgaccacaggtat

SEQ ID NO: 4865384 - DNA, 25 bp, Homo sapien
ctgactttgaggatgcctttatcaa

SEQ ID NO: 4865385 - DNA, 25 bp, Homo sapien
aaggatggataagaagagtaacagc

SEQ ID NO: 4865386 - DNA, 25 bp, Homo sapien
caggtattgataataaggatggata

SEQ ID NO: 4865387 - DNA, 25 bp, Homo sapien
tcatacatcagccctgcaggcattg

SEQ ID NO: 4865388 - DNA, 25 bp, Homo sapien
tttccttgctatgacgaatgcctaa

SEQ ID NO: 4865389 - DNA, 25 bp, Homo sapien
gcactcccgccggagtatttcaggg

SEQ ID NO: 4865390 - DNA, 25 bp, Homo sapien
taagaactcatcaaaggcatgaagc

SEQ ID NO: 4865391 - DNA, 25 bp, Homo sapien
tccagatgacaggatgtagtccctc

SEQ ID NO: 4865392 - DNA, 25 bp, Homo sapien
catggtgatgtgatagctccgcagc

SEQ ID NO: 4865393 - DNA, 25 bp, Homo sapien
cacacactggttataagctgtcagc

SEQ ID NO: 4865394 - DNA, 25 bp, Homo sapien
cagcaagtggtcctgtccagatgac

SEQ ID NO: 4865395 - DNA, 25 bp, Homo sapien
ctaaccacgtgggtgaaggattgac

SEQ ID NO: 4865396 - DNA, 25 bp, Homo sapien
gaaggattgactccaaggtcttatc

SEQ ID NO: 4865397 - DNA, 25 bp, Homo sapien
agaaagctcataactgcggttccac

SEQ ID NO: 4865398 - DNA, 25 bp, Homo sapien
aggtcttatccctgacactcttaag

SEQ ID NO: 4865399 - DNA, 25 bp, Homo sapien
tacatgccgttaagcagtgatcagg

SEQ ID NO: 4865400 - DNA, 25 bp, Homo sapien
ggtaccacgtggaaagtctcatccg

SEQ ID NO: 4865401 - DNA, 25 bp, Homo sapien
gaatttgcaaatctaggtaccacgt

SEQ ID NO: 4865402 - DNA, 25 bp, Homo sapien
aatggcatacagtcactcctctggg

SEQ ID NO: 4865403 - DNA, 25 bp, Homo sapien
ccttccttctgggcgtctcttaggg

SEQ ID NO: 4865404 - DNA, 25 bp, Homo sapien
cattatgaaaggaggactctttttc

SEQ ID NO: 4865405 - DNA, 25 bp, Homo sapien
tcctctccatcattatgaaaggagg

SEQ ID NO: 4865406 - DNA, 25 bp, Homo sapien
tcttaggggacagctacactcttca

SEQ ID NO: 4865407 - DNA, 25 bp, Homo sapien
gaaccaagttctcgatgaagccact

SEQ ID NO: 4865408 - DNA, 25 bp, Homo sapien
caggagtaaagcaaccacgagctgg

SEQ ID NO: 4865409 - DNA, 25 bp, Homo sapien
tgagaaaggctgacttgcaacatac

SEQ ID NO: 4865410 - DNA, 25 bp, Homo sapien
tcccagagctgcatagaaactcaga

SEQ ID NO: 4865411 - DNA, 25 bp, Homo sapien
aattgctgtggccattgcccctggc

SEQ ID NO: 4865412 - DNA, 25 bp, Homo sapien
ctgtgagggaacttcttgcaattgc

SEQ ID NO: 4865413 - DNA, 25 bp, Homo sapien
tgaattaaagattagagttaagtgg

SEQ ID NO: 4865414 - DNA, 25 bp, Homo sapien
taaagacgtctgagtgaatgaaact

SEQ ID NO: 4865415 - DNA, 25 bp, Homo sapien
attgattttagcgtgcagacgggag

SEQ ID NO: 4865416 - DNA, 25 bp, Homo sapien
tgattttagcgtgcagacgggagtg

SEQ ID NO: 4865417 - DNA, 25 bp, Homo sapien
ttgattttagcgtgcagacgggagt

SEQ ID NO: 4865418 - DNA, 25 bp, Homo sapien
gattttagcgtgcagacgggagtgg

SEQ ID NO: 4865419 - DNA, 25 bp, Homo sapien
gatcgatgtggccttgctttaaaaa

SEQ ID NO: 4865420 - DNA, 25 bp, Homo sapien
cagactatagatagagcagattttc

SEQ ID NO: 4865421 - DNA, 25 bp, Homo sapien
aaaaatgctaagaaggcttccaagc

SEQ ID NO: 4865422 - DNA, 25 bp, Homo sapien
ctattcggcagactatagatagagc

SEQ ID NO: 4865423 - DNA, 25 bp, Homo sapien
ctgggtcatgcagctcaaaacatga

SEQ ID NO: 4865424 - DNA, 25 bp, Homo sapien
tgggtcatgcagctcaaaacatgac

SEQ ID NO: 4865425 - DNA, 25 bp, Homo sapien
catgtggttattcatggaccatgga

SEQ ID NO: 4865426 - DNA, 25 bp, Homo sapien
tattgaacgatgcaggtgcttctgt

SEQ ID NO: 4865427 - DNA, 25 bp, Homo sapien
ttcaaaatcttccatgtggttattc

SEQ ID NO: 4865428 - DNA, 25 bp, Homo sapien
tgttcctccttcagtgtgagtcaaa

SEQ ID NO: 4865429 - DNA, 25 bp, Homo sapien
tctaatgacgactctggtggcctgt

SEQ ID NO: 4865430 - DNA, 25 bp, Homo sapien
tcaggacaatgcgaaggctttaccg

SEQ ID NO: 4865431 - DNA, 25 bp, Homo sapien
tctctgccctagttctatgcccagg

SEQ ID NO: 4865432 - DNA, 25 bp, Homo sapien
tgtgtggaaatgcaccatggcatcc

SEQ ID NO: 4865433 - DNA, 25 bp, Homo sapien
cagtttcccgtgtgtcttgagtaag

SEQ ID NO: 4865434 - DNA, 25 bp, Homo sapien
agtttcccgtgtgtcttgagtaaga

SEQ ID NO: 4865435 - DNA, 25 bp, Homo sapien
ctggcccctgatctttcgtgttgat

SEQ ID NO: 4865436 - DNA, 25 bp, Homo sapien
ctcatctacaccaagcactagcttg

SEQ ID NO: 4865437 - DNA, 25 bp, Homo sapien
gatcttcctcatctacaccaagcac

SEQ ID NO: 4865438 - DNA, 25 bp, Homo sapien
tcctcatctacaccaagcactagct

SEQ ID NO: 4865439 - DNA, 25 bp, Homo sapien
caagaggtcttttccccagctgctt

SEQ ID NO: 4865440 - DNA, 25 bp, Homo sapien
tccaggttgactgcaggcttgagag

SEQ ID NO: 4865441 - DNA, 25 bp, Homo sapien
actccaggttgactgcaggcttgag

SEQ ID NO: 4865442 - DNA, 25 bp, Homo sapien
tgtttgttggtaggtcaagaggtct

SEQ ID NO: 4865443 - DNA, 25 bp, Homo sapien
taatctggcagtcaattcactggtg

SEQ ID NO: 4865444 - DNA, 25 bp, Homo sapien
ttagacacatgaattttatactctc

SEQ ID NO: 4865445 - DNA, 25 bp, Homo sapien
gttgtttactcttgtaattagacac

SEQ ID NO: 4865446 - DNA, 25 bp, Homo sapien
tgtgcacatgctgtatttcaaaatt

SEQ ID NO: 4865447 - DNA, 25 bp, Homo sapien
agctggctcctgactcggcaaaaga

SEQ ID NO: 4865448 - DNA, 25 bp, Homo sapien
cccgactggcttcaccaatagcagg

SEQ ID NO: 4865449 - DNA, 25 bp, Homo sapien
agaaagcctctcttgccgggcacaa

SEQ ID NO: 4865450 - DNA, 25 bp, Homo sapien
gagcaaagtaagaaacccgactggc

SEQ ID NO: 4865451 - DNA, 25 bp, Homo sapien
agagaggcaagcactttattgttct

SEQ ID NO: 4865452 - DNA, 25 bp, Homo sapien
tactcgtgtcaagtttcaggtggct

SEQ ID NO: 4865453 - DNA, 25 bp, Homo sapien
ggattcagcttgcttaagagaggca

SEQ ID NO: 4865454 - DNA, 25 bp, Homo sapien
gccttggtgccactattccagacat

SEQ ID NO: 4865455 - DNA, 25 bp, Homo sapien
ttcctgtagatcagtagaaccaaac

SEQ ID NO: 4865456 - DNA, 25 bp, Homo sapien
gacatatgggaagactgtcccttga

SEQ ID NO: 4865457 - DNA, 25 bp, Homo sapien
tcatttgcgagagctggtaaagaca

SEQ ID NO: 4865458 - DNA, 25 bp, Homo sapien
gaaccaaactcgaagtgactcaggg

SEQ ID NO: 4865459 - DNA, 25 bp, Homo sapien
tctgaatgacatagacaggctctgt

SEQ ID NO: 4865460 - DNA, 25 bp, Homo sapien
cacagacatacatagaagaaagaca

SEQ ID NO: 4865461 - DNA, 25 bp, Homo sapien
gacatacatagaagaaagacaatct

SEQ ID NO: 4865462 - DNA, 25 bp, Homo sapien
cagtctgaatgacatagacaggctc

SEQ ID NO: 4865463 - DNA, 25 bp, Homo sapien
tcaactgcggctggttctctctttt

SEQ ID NO: 4865464 - DNA, 25 bp, Homo sapien
cccagctcattaccaacattctgtt

SEQ ID NO: 4865465 - DNA, 25 bp, Homo sapien
aagacacttcagaacaccgagttcc

SEQ ID NO: 4865466 - DNA, 25 bp, Homo sapien
tcagaacaccgagttcccggacatt

SEQ ID NO: 4865467 - DNA, 25 bp, Homo sapien
ggctgagctttgtgacgttgccaca

SEQ ID NO: 4865468 - DNA, 25 bp, Homo sapien
gcttcccagatgttataagtagtat

SEQ ID NO: 4865469 - DNA, 25 bp, Homo sapien
aattcgctcaatgtgtgcttctggc

SEQ ID NO: 4865470 - DNA, 25 bp, Homo sapien
tatcgtaaatgatacccagcgccat

SEQ ID NO: 4865471 - DNA, 25 bp, Homo sapien
atgtggggatcttccggaattcagc

SEQ ID NO: 4865472 - DNA, 25 bp, Homo sapien
gtggggatcttccggaattcagctc

SEQ ID NO: 4865473 - DNA, 25 bp, Homo sapien
cgatgtggggatcttccggaattca

SEQ ID NO: 4865474 - DNA, 25 bp, Homo sapien
tggggatcttccggaattcagctcc

SEQ ID NO: 4865475 - DNA, 25 bp, Homo sapien
ggctgactcgtagcgacgtggacat

SEQ ID NO: 4865476 - DNA, 25 bp, Homo sapien
gttgcccacggctttcttacgagag

SEQ ID NO: 4865477 - DNA, 25 bp, Homo sapien
tgtgttttcaaagatgttgcccacg

SEQ ID NO: 4865478 - DNA, 25 bp, Homo sapien
gccatcagggcacgcgttttctcct

SEQ ID NO: 4865479 - DNA, 25 bp, Homo sapien
gaatgtccattcttggataacgtcc

SEQ ID NO: 4865480 - DNA, 25 bp, Homo sapien
tccatgtggtgcactttttcaggca

SEQ ID NO: 4865481 - DNA, 25 bp, Homo sapien
caatcctttcctgcagggacggaag

SEQ ID NO: 4865482 - DNA, 25 bp, Homo sapien
tcgatttaagtcctagggcctgaca

SEQ ID NO: 4865483 - DNA, 25 bp, Homo sapien
tgagaccaagcatcacagaccaaaa

SEQ ID NO: 4865484 - DNA, 25 bp, Homo sapien
tttgagaccaagcatcacagaccaa

SEQ ID NO: 4865485 - DNA, 25 bp, Homo sapien
ctttgagaccaagcatcacagacca

SEQ ID NO: 4865486 - DNA, 25 bp, Homo sapien
ttgagaccaagcatcacagaccaaa

SEQ ID NO: 4865487 - DNA, 25 bp, Homo sapien
tattgttagagacacatctttagaa

SEQ ID NO: 4865488 - DNA, 25 bp, Homo sapien
aacttttattgttagagacacatct

SEQ ID NO: 4865489 - DNA, 25 bp, Homo sapien
gacacatctttagaaaagtttgtaa

SEQ ID NO: 4865490 - DNA, 25 bp, Homo sapien
tttgtaaatatcaacatttaccatc

SEQ ID NO: 4865491 - DNA, 25 bp, Homo sapien
aatgccaaggagtcaatctatgaac

SEQ ID NO: 4865492 - DNA, 25 bp, Homo sapien
cacacagaatcttggtcatcactca

SEQ ID NO: 4865493 - DNA, 25 bp, Homo sapien
gtacacatgtacatagctactgtaa

SEQ ID NO: 4865494 - DNA, 25 bp, Homo sapien
taagattgggacagagaaacttccc

SEQ ID NO: 4865495 - DNA, 25 bp, Homo sapien
taaatagacaaacatacccaggtca

SEQ ID NO: 4865496 - DNA, 25 bp, Homo sapien
gaaagcctgtatctaagcacatcct

SEQ ID NO: 4865497 - DNA, 25 bp, Homo sapien
tagcacgtgtaacaaataaatagac

SEQ ID NO: 4865498 - DNA, 25 bp, Homo sapien
gacgctttccccatgtagcacgtgt

SEQ ID NO: 4865499 - DNA, 25 bp, Homo sapien
cactctccttgtatgattaaaacca

SEQ ID NO: 4865500 - DNA, 25 bp, Homo sapien
tgccactctccttgtatgattaaaa

SEQ ID NO: 4865501 - DNA, 25 bp, Homo sapien
ctccttgtatgattaaaaccacacg

SEQ ID NO: 4865502 - DNA, 25 bp, Homo sapien
ttgtatgattaaaaccacacgatct

SEQ ID NO: 4865503 - DNA, 25 bp, Homo sapien
tgcccagcgctgtgacatatgaccc

SEQ ID NO: 4865504 - DNA, 25 bp, Homo sapien
ccaaatgaaatgcccagcgctgtga

SEQ ID NO: 4865505 - DNA, 25 bp, Homo sapien
aaatgcccagcgctgtgacatatga

SEQ ID NO: 4865506 - DNA, 25 bp, Homo sapien
cccagcgctgtgacatatgaccctg

SEQ ID NO: 4865507 - DNA, 25 bp, Homo sapien
ggtgcaagccactttaccaggactg

SEQ ID NO: 4865508 - DNA, 25 bp, Homo sapien
tggagagaaaaacggcactgatgcc

SEQ ID NO: 4865509 - DNA, 25 bp, Homo sapien
ggagcaagtatttaaggcccaactc

SEQ ID NO: 4865510 - DNA, 25 bp, Homo sapien
caaggagccttcagttcattgagga

SEQ ID NO: 4865511 - DNA, 25 bp, Homo sapien
cttaatcactctgacagcatttcct

SEQ ID NO: 4865512 - DNA, 25 bp, Homo sapien
gcagaatgggaatgatgatagatac

SEQ ID NO: 4865513 - DNA, 25 bp, Homo sapien
acttaatcactctgacagcatttcc

SEQ ID NO: 4865514 - DNA, 25 bp, Homo sapien
ttaatcactctgacagcatttcctc

SEQ ID NO: 4865515 - DNA, 25 bp, Homo sapien
gagccaacgaatgatgcaccaggat

SEQ ID NO: 4865516 - DNA, 25 bp, Homo sapien
tcacgtatagaagagcaagcctctg

SEQ ID NO: 4865517 - DNA, 25 bp, Homo sapien
gacaagttacttataggctcacgta

SEQ ID NO: 4865518 - DNA, 25 bp, Homo sapien
ggttaaacgatgtgcccattgtcac

SEQ ID NO: 4865519 - DNA, 25 bp, Homo sapien
gatgtcggtcctgtgtggcagagcc

SEQ ID NO: 4865520 - DNA, 25 bp, Homo sapien
tttggcctctgggatgtcggtcctg

SEQ ID NO: 4865521 - DNA, 25 bp, Homo sapien
ctcagtttatagcaggttgctttgg

SEQ ID NO: 4865522 - DNA, 25 bp, Homo sapien
tctgggatgtcggtcctgtgtggca

SEQ ID NO: 4865523 - DNA, 25 bp, Homo sapien
tattgtacatggtgactgactgcag

SEQ ID NO: 4865524 - DNA, 25 bp, Homo sapien
tgatggttgggtcagcattgcttca

SEQ ID NO: 4865525 - DNA, 25 bp, Homo sapien
gcaagctggtgtcatgttttgatgg

SEQ ID NO: 4865526 - DNA, 25 bp, Homo sapien
gcattgcttcatgggctaggttcac

SEQ ID NO: 4865527 - DNA, 25 bp, Homo sapien
gaagaagagtacacgcattaagcca

SEQ ID NO: 4865528 - DNA, 25 bp, Homo sapien
tcagggcagcccttgacaaaagtaa

SEQ ID NO: 4865529 - DNA, 25 bp, Homo sapien
gcatctgattcactcctcagggcag

SEQ ID NO: 4865530 - DNA, 25 bp, Homo sapien
tattaggccttgtacccactgagct

SEQ ID NO: 4865531 - DNA, 25 bp, Homo sapien
tgagccttaggcacgagagaagact

SEQ ID NO: 4865532 - DNA, 25 bp, Homo sapien
gagagaagactctacttcagtgaag

SEQ ID NO: 4865533 - DNA, 25 bp, Homo sapien
ctggctgtgagccttaggcacgaga

SEQ ID NO: 4865534 - DNA, 25 bp, Homo sapien
ggcacgagagaagactctacttcag

SEQ ID NO: 4865535 - DNA, 25 bp, Homo sapien
ctagaactttccagtagggccacca

SEQ ID NO: 4865536 - DNA, 25 bp, Homo sapien
ctgaagggttgctgtattcctagaa

SEQ ID NO: 4865537 - DNA, 25 bp, Homo sapien
tgaagggttgctgtattcctagaag

SEQ ID NO: 4865538 - DNA, 25 bp, Homo sapien
aactttccagtagggccaccaggag

SEQ ID NO: 4865539 - DNA, 25 bp, Homo sapien
tctctgaataactgaataaccttgg

SEQ ID NO: 4865540 - DNA, 25 bp, Homo sapien
tctgaataactgaataaccttggaa

SEQ ID NO: 4865541 - DNA, 25 bp, Homo sapien
taactgaataaccttggaagtttca

SEQ ID NO: 4865542 - DNA, 25 bp, Homo sapien
ctctgaataactgaataaccttgga

SEQ ID NO: 4865543 - DNA, 25 bp, Homo sapien
tcagtcctagacagtggcacttcct

SEQ ID NO: 4865544 - DNA, 25 bp, Homo sapien
tccgaccttgtacatctgaagaggc

SEQ ID NO: 4865545 - DNA, 25 bp, Homo sapien
atagcgttgggacttggagattgcc

SEQ ID NO: 4865546 - DNA, 25 bp, Homo sapien
ggtagacctcttgcacgtagtgggc

SEQ ID NO: 4865547 - DNA, 25 bp, Homo sapien
tataaccacatacgtcaaaaaataa

SEQ ID NO: 4865548 - DNA, 25 bp, Homo sapien
ctataaccacatacgtcaaaaaata

SEQ ID NO: 4865549 - DNA, 25 bp, Homo sapien
ccctggaagggtaattagtcataag

SEQ ID NO: 4865550 - DNA, 25 bp, Homo sapien
gtccctggaagggtaattagtcata

SEQ ID NO: 4865551 - DNA, 25 bp, Homo sapien
cataagggttctggcattgagtgcc

SEQ ID NO: 4865552 - DNA, 25 bp, Homo sapien
ggtaattagtcataagggttctggc

SEQ ID NO: 4865553 - DNA, 25 bp, Homo sapien
caggtcttcgggcactaaacaagga

SEQ ID NO: 4865554 - DNA, 25 bp, Homo sapien
gctttcccatcaggacacgaattct

SEQ ID NO: 4865555 - DNA, 25 bp, Homo sapien
tggctgtgttagaatcctatctgca

SEQ ID NO: 4865556 - DNA, 25 bp, Homo sapien
ctctccccgtcctccctgtcctcac

SEQ ID NO: 4865557 - DNA, 25 bp, Homo sapien
cacttctttgatctgataactggtt

SEQ ID NO: 4865558 - DNA, 25 bp, Homo sapien
ggtttttatgctagcggtaacagga

SEQ ID NO: 4865559 - DNA, 25 bp, Homo sapien
gctagcggtaacaggaatgataact

SEQ ID NO: 4865560 - DNA, 25 bp, Homo sapien
aatgataactatggggtggatagca

SEQ ID NO: 4865561 - DNA, 25 bp, Homo sapien
agtgtctgattgggctgagagttca

SEQ ID NO: 4865562 - DNA, 25 bp, Homo sapien
agcagtgtctgattgggctgagagt

SEQ ID NO: 4865563 - DNA, 25 bp, Homo sapien
cagcagtgtctgattgggctgagag

SEQ ID NO: 4865564 - DNA, 25 bp, Homo sapien
ataccgagaaatgctcgaagcttct

SEQ ID NO: 4865565 - DNA, 25 bp, Homo sapien
tcaaggataccgagaaatgctcgaa

SEQ ID NO: 4865566 - DNA, 25 bp, Homo sapien
ggataccgagaaatgctcgaagctt

SEQ ID NO: 4865567 - DNA, 25 bp, Homo sapien
aaggataccgagaaatgctcgaagc

SEQ ID NO: 4865568 - DNA, 25 bp, Homo sapien
aaaccaaactgactcagacgatctg

SEQ ID NO: 4865569 - DNA, 25 bp, Homo sapien
tccggatgtccttccgaagaacagt

SEQ ID NO: 4865570 - DNA, 25 bp, Homo sapien
gacgatctgtcctcattgaattaag

SEQ ID NO: 4865571 - DNA, 25 bp, Homo sapien
taagtggcatccaggctttaggcat

SEQ ID NO: 4865572 - DNA, 25 bp, Homo sapien
ttacgtccagtgtgttcctctataa

SEQ ID NO: 4865573 - DNA, 25 bp, Homo sapien
aataaattacgtccagtgtgttcct

SEQ ID NO: 4865574 - DNA, 25 bp, Homo sapien
caactgtagcgtttccgtattggtt

SEQ ID NO: 4865575 - DNA, 25 bp, Homo sapien
gcgtttccgtattggttttcatcac

SEQ ID NO: 4865576 - DNA, 25 bp, Homo sapien
caaggattggcggaatctccaggtc

SEQ ID NO: 4865577 - DNA, 25 bp, Homo sapien
gggtccatgactgttgcacaaatct

SEQ ID NO: 4865578 - DNA, 25 bp, Homo sapien
ccactttaaatattgctggagccag

SEQ ID NO: 4865579 - DNA, 25 bp, Homo sapien
aaatctgtccttgtccgggcagtgt

SEQ ID NO: 4865580 - DNA, 25 bp, Homo sapien
gattccaaatccaaacaagtaagct

SEQ ID NO: 4865581 - DNA, 25 bp, Homo sapien
atccaaacaagtaagctgaccccat

SEQ ID NO: 4865582 - DNA, 25 bp, Homo sapien
ctgattccaaatccaaacaagtaag

SEQ ID NO: 4865583 - DNA, 25 bp, Homo sapien
ccaaatccaaacaagtaagctgacc

SEQ ID NO: 4865584 - DNA, 25 bp, Homo sapien
tgtgggtggcctgcattgctgaact

SEQ ID NO: 4865585 - DNA, 25 bp, Homo sapien
acttccacagtcacgtttgtcttca

SEQ ID NO: 4865586 - DNA, 25 bp, Homo sapien
tgaagcggagctacgataacagtga

SEQ ID NO: 4865587 - DNA, 25 bp, Homo sapien
tgtgtagaacatgagtccattggca

SEQ ID NO: 4865588 - DNA, 25 bp, Homo sapien
tcatcacttttttgtttagagccaa

SEQ ID NO: 4865589 - DNA, 25 bp, Homo sapien
tagccaagaagtataaacttccacg

SEQ ID NO: 4865590 - DNA, 25 bp, Homo sapien
gccctgagcccttgcaagtgggcat

SEQ ID NO: 4865591 - DNA, 25 bp, Homo sapien
ttagagccaaacatagccaagaagt

SEQ ID NO: 4865592 - DNA, 25 bp, Homo sapien
gccatgaatgaaccaagagtcctga

SEQ ID NO: 4865593 - DNA, 25 bp, Homo sapien
caggtagtacaagccatgaatgaac

SEQ ID NO: 4865594 - DNA, 25 bp, Homo sapien
aggtagtacaagccatgaatgaacc

SEQ ID NO: 4865595 - DNA, 25 bp, Homo sapien
ccatgaatgaaccaagagtcctgaa

SEQ ID NO: 4865596 - DNA, 25 bp, Homo sapien
caggacccaatccagcaggtgcaaa

SEQ ID NO: 4865597 - DNA, 25 bp, Homo sapien
tataggatgaagttatcccaggacc

SEQ ID NO: 4865598 - DNA, 25 bp, Homo sapien
caacttagagcatccaaatgctttc

SEQ ID NO: 4865599 - DNA, 25 bp, Homo sapien
aactctgatcagtaggttctggcga

SEQ ID NO: 4865600 - DNA, 25 bp, Homo sapien
ggaagatgtcacacaggagatgcga

SEQ ID NO: 4865601 - DNA, 25 bp, Homo sapien
aggagatgcgatgcttctgtattta

SEQ ID NO: 4865602 - DNA, 25 bp, Homo sapien
acaggagatgcgatgcttctgtatt

SEQ ID NO: 4865603 - DNA, 25 bp, Homo sapien
aattagatttaccacggggaagatg

SEQ ID NO: 4865604 - DNA, 25 bp, Homo sapien
gaagcaaagtctcatgcacatgtct

SEQ ID NO: 4865605 - DNA, 25 bp, Homo sapien
gctcttagaagattaactgccaaga

SEQ ID NO: 4865606 - DNA, 25 bp, Homo sapien
cttcttccaaaaggtagctcttaga

SEQ ID NO: 4865607 - DNA, 25 bp, Homo sapien
catgcacatgtctgtaggcatattt

SEQ ID NO: 4865608 - DNA, 25 bp, Homo sapien
cattataacagaacccgtgtcaggt

SEQ ID NO: 4865609 - DNA, 25 bp, Homo sapien
ccgtgtcaggtaagataaccctcat

SEQ ID NO: 4865610 - DNA, 25 bp, Homo sapien
taggatgtgacaacccttcccatta

SEQ ID NO: 4865611 - DNA, 25 bp, Homo sapien
ttgagggcagcggagtagtttaacc

SEQ ID NO: 4865612 - DNA, 25 bp, Homo sapien
cacataacagcctcgtggaacagga

SEQ ID NO: 4865613 - DNA, 25 bp, Homo sapien
aattaaagcgactgccaagtagagc

SEQ ID NO: 4865614 - DNA, 25 bp, Homo sapien
gatgctgaagagcacattccggtgt

SEQ ID NO: 4865615 - DNA, 25 bp, Homo sapien
ggtctgacaaggtcctcacccatat

SEQ ID NO: 4865616 - DNA, 25 bp, Homo sapien
catccctatctagttgcaaaacatt

SEQ ID NO: 4865617 - DNA, 25 bp, Homo sapien
catcatccctatctagttgcaaaac

SEQ ID NO: 4865618 - DNA, 25 bp, Homo sapien
tcatccctatctagttgcaaaacat

SEQ ID NO: 4865619 - DNA, 25 bp, Homo sapien
gccatcatccctatctagttgcaaa

SEQ ID NO: 4865620 - DNA, 25 bp, Homo sapien
ctagttgccgtgagccgcgattgca

SEQ ID NO: 4865621 - DNA, 25 bp, Homo sapien
ggtgtgctcccctttatgctctgta

SEQ ID NO: 4865622 - DNA, 25 bp, Homo sapien
tacatccagatctaaaggccatgtg

SEQ ID NO: 4865623 - DNA, 25 bp, Homo sapien
tatcccacagctcaagtacatccag

SEQ ID NO: 4865624 - DNA, 25 bp, Homo sapien
ttgcaccaacaagccaccaggcact

SEQ ID NO: 4865625 - DNA, 25 bp, Homo sapien
ggttgcaccaacaagccaccaggca

SEQ ID NO: 4865626 - DNA, 25 bp, Homo sapien
gttgcaccaacaagccaccaggcac

SEQ ID NO: 4865627 - DNA, 25 bp, Homo sapien
taaatgtgacccctacttctgcttt

SEQ ID NO: 4865628 - DNA, 25 bp, Homo sapien
gctgtggtcctttactaaatgtgac

SEQ ID NO: 4865629 - DNA, 25 bp, Homo sapien
ggaataatgttctcagcaaagctgc

SEQ ID NO: 4865630 - DNA, 25 bp, Homo sapien
tctgctttgtgacctgagataggca

SEQ ID NO: 4865631 - DNA, 25 bp, Homo sapien
ctgctagggttccagctcaagatca

SEQ ID NO: 4865632 - DNA, 25 bp, Homo sapien
tctgctagggttccagctcaagatc

SEQ ID NO: 4865633 - DNA, 25 bp, Homo sapien
gctagggttccagctcaagatcaca

SEQ ID NO: 4865634 - DNA, 25 bp, Homo sapien
tgctagggttccagctcaagatcac

SEQ ID NO: 4865635 - DNA, 25 bp, Homo sapien
tcacttaaggcctctggtgccattc

SEQ ID NO: 4865636 - DNA, 25 bp, Homo sapien
ctggtgccattcatgccggaaatgc

SEQ ID NO: 4865637 - DNA, 25 bp, Homo sapien
tgccggaaatgcatctccaggagcc

SEQ ID NO: 4865638 - DNA, 25 bp, Homo sapien
ctctggtgccattcatgccggaaat

SEQ ID NO: 4865639 - DNA, 25 bp, Homo sapien
ttatgagacaagaacctagatttat

SEQ ID NO: 4865640 - DNA, 25 bp, Homo sapien
tttcaatttgtcggcatgtctaatt

SEQ ID NO: 4865641 - DNA, 25 bp, Homo sapien
ctttcaatttgtcggcatgtctaat

SEQ ID NO: 4865642 - DNA, 25 bp, Homo sapien
gcagtgtctggtctctatcaggatc

SEQ ID NO: 4865643 - DNA, 25 bp, Homo sapien
caccttcaatctgtggtgggaacac

SEQ ID NO: 4865644 - DNA, 25 bp, Homo sapien
gatcctgccaggttataagtgagtt

SEQ ID NO: 4865645 - DNA, 25 bp, Homo sapien
tctatgctagcagaggaagagcagt

SEQ ID NO: 4865646 - DNA, 25 bp, Homo sapien
gggacaatcgatagccttgctttgc

SEQ ID NO: 4865647 - DNA, 25 bp, Homo sapien
tcatcatgggacaatcgatagcctt

SEQ ID NO: 4865648 - DNA, 25 bp, Homo sapien
gatatcgcaaaatgcgccacatcct

SEQ ID NO: 4865649 - DNA, 25 bp, Homo sapien
actgttgctaataggtcggattgat

SEQ ID NO: 4865650 - DNA, 25 bp, Homo sapien
agccgagagggaacagtgtgtctga

SEQ ID NO: 4865651 - DNA, 25 bp, Homo sapien
ggatttacaaggaatggtgggcacc

SEQ ID NO: 4865652 - DNA, 25 bp, Homo sapien
cacgtttcgggttgaagaagccgag

SEQ ID NO: 4865653 - DNA, 25 bp, Homo sapien
ggaaaactcccgctcctgcagtttc

SEQ ID NO: 4865654 - DNA, 25 bp, Homo sapien
ttctccagtagcaaatggattgtgt

SEQ ID NO: 4865655 - DNA, 25 bp, Homo sapien
cattcttgaagttgatggtaggatt

SEQ ID NO: 4865656 - DNA, 25 bp, Homo sapien
tcttgaagttgatggtaggatttac

SEQ ID NO: 4865657 - DNA, 25 bp, Homo sapien
ggaacattcttgaagttgatggtag

SEQ ID NO: 4865658 - DNA, 25 bp, Homo sapien
tctggaacattcttgaagttgatgg

SEQ ID NO: 4865659 - DNA, 25 bp, Homo sapien
caaagccaagctcttgaacagctgc

SEQ ID NO: 4865660 - DNA, 25 bp, Homo sapien
tagggcaaatgtccataaatcatta

SEQ ID NO: 4865661 - DNA, 25 bp, Homo sapien
catattcccgcacaatttttagggc

SEQ ID NO: 4865662 - DNA, 25 bp, Homo sapien
gacaatactggaaatatacttcaaa

SEQ ID NO: 4865663 - DNA, 25 bp, Homo sapien
gccctcacgactccacctttcaata

SEQ ID NO: 4865664 - DNA, 25 bp, Homo sapien
cacgactccacctttcaatatattc

SEQ ID NO: 4865665 - DNA, 25 bp, Homo sapien
ttagcaccaaagtagccctcacgac

SEQ ID NO: 4865666 - DNA, 25 bp, Homo sapien
tagcaccaaagtagccctcacgact

SEQ ID NO: 4865667 - DNA, 25 bp, Homo sapien
ttgtttaatctggtattgcagtaac

SEQ ID NO: 4865668 - DNA, 25 bp, Homo sapien
gtttaatctggtattgcagtaacca

SEQ ID NO: 4865669 - DNA, 25 bp, Homo sapien
ttttgtttaatctggtattgcagta

SEQ ID NO: 4865670 - DNA, 25 bp, Homo sapien
taatctggtattgcagtaaccagct

SEQ ID NO: 4865671 - DNA, 25 bp, Homo sapien
gatgggaattgtaactcttggctgc

SEQ ID NO: 4865672 - DNA, 25 bp, Homo sapien
ggatcaatggaggtctgaagcctct

SEQ ID NO: 4865673 - DNA, 25 bp, Homo sapien
aggaagccctgttgtagcactgatg

SEQ ID NO: 4865674 - DNA, 25 bp, Homo sapien
tgagaaacaacaactggatcaatgg

SEQ ID NO: 4865675 - DNA, 25 bp, Homo sapien
gggattccatgcatccacttcacca

SEQ ID NO: 4865676 - DNA, 25 bp, Homo sapien
tggagggagtgagtctcccgccacc

SEQ ID NO: 4865677 - DNA, 25 bp, Homo sapien
tcaccactgcagtcaggaatggatt

SEQ ID NO: 4865678 - DNA, 25 bp, Homo sapien
cactgcgtgctctggcttatgcgga

SEQ ID NO: 4865679 - DNA, 25 bp, Homo sapien
gcaccatcgaatccccaatcttgga

SEQ ID NO: 4865680 - DNA, 25 bp, Homo sapien
caatcttggatgtcggtcattctct

SEQ ID NO: 4865681 - DNA, 25 bp, Homo sapien
tcaaagaaaaagcaccatcgaatcc

SEQ ID NO: 4865682 - DNA, 25 bp, Homo sapien
gaatccccaatcttggatgtcggtc

SEQ ID NO: 4865683 - DNA, 25 bp, Homo sapien
gaaatgtaccttcaagggtgggaca

SEQ ID NO: 4865684 - DNA, 25 bp, Homo sapien
gaaggacttgtctcagctttctcta

SEQ ID NO: 4865685 - DNA, 25 bp, Homo sapien
ggtaggaagtacctccctgtgaggc

SEQ ID NO: 4865686 - DNA, 25 bp, Homo sapien
ggctaggatgcttactgggctctct

SEQ ID NO: 4865687 - DNA, 25 bp, Homo sapien
atcctgccggcacgactaatgctcg

SEQ ID NO: 4865688 - DNA, 25 bp, Homo sapien
tccctgcagcagtatgagaatccac

SEQ ID NO: 4865689 - DNA, 25 bp, Homo sapien
caaagcagaatcactgggtggacca

SEQ ID NO: 4865690 - DNA, 25 bp, Homo sapien
ttcaaggacaggttctcagaggccc

SEQ ID NO: 4865691 - DNA, 25 bp, Homo sapien
tggcaggctcatcctgcgtttttcc

SEQ ID NO: 4865692 - DNA, 25 bp, Homo sapien
tgccaatctgcaagatcatctcctt

SEQ ID NO: 4865693 - DNA, 25 bp, Homo sapien
tcctggtaacctgatgcagtcctgg

SEQ ID NO: 4865694 - DNA, 25 bp, Homo sapien
gcagtcctggtttgttattattccc

SEQ ID NO: 4865695 - DNA, 25 bp, Homo sapien
gagttcgcatcaagccatttcttcc

SEQ ID NO: 4865696 - DNA, 25 bp, Homo sapien
ctgggctggcagttagagttcgcat

SEQ ID NO: 4865697 - DNA, 25 bp, Homo sapien
gcctaatggatcagctgtcactccc

SEQ ID NO: 4865698 - DNA, 25 bp, Homo sapien
aaactagaaggcctaatggatcagc

SEQ ID NO: 4865699 - DNA, 25 bp, Homo sapien
tgaatagctagaatggaggttagag

SEQ ID NO: 4865700 - DNA, 25 bp, Homo sapien
tggaaggtgaataagactcccaaac

SEQ ID NO: 4865701 - DNA, 25 bp, Homo sapien
aatgttgaactatccaaaagattaa

SEQ ID NO: 4865702 - DNA, 25 bp, Homo sapien
tgttccccactgtaaacagcgagcc

SEQ ID NO: 4865703 - DNA, 25 bp, Homo sapien
tggtggatggctaaagggaagttaa

SEQ ID NO: 4865704 - DNA, 25 bp, Homo sapien
acccatacgctcctggcttcacagg

SEQ ID NO: 4865705 - DNA, 25 bp, Homo sapien
agcaatgatctctaacctctccatg

SEQ ID NO: 4865706 - DNA, 25 bp, Homo sapien
aggctcagcaatgatctctaacctc

SEQ ID NO: 4865707 - DNA, 25 bp, Homo sapien
ggacgtgatggggatttgaaatcct

SEQ ID NO: 4865708 - DNA, 25 bp, Homo sapien
gacccagtgatggtaagggatctgc

SEQ ID NO: 4865709 - DNA, 25 bp, Homo sapien
gatctgctttgggtctttcactcat

SEQ ID NO: 4865710 - DNA, 25 bp, Homo sapien
ttgggtctttcactcatgacaaaag

SEQ ID NO: 4865711 - DNA, 25 bp, Homo sapien
cccagtgatggtaagggatctgctt

SEQ ID NO: 4865712 - DNA, 25 bp, Homo sapien
gcagacgtggcagccgcaacaggcc

SEQ ID NO: 4865713 - DNA, 25 bp, Homo sapien
ccactccagagaagtgaaacatgtt

SEQ ID NO: 4865714 - DNA, 25 bp, Homo sapien
gttctgcattggctgtgtaatgagg

SEQ ID NO: 4865715 - DNA, 25 bp, Homo sapien
ttggctgtgtaatgaggatcaccag

SEQ ID NO: 4865716 - DNA, 25 bp, Homo sapien
aaaggcatgtagagagttagaatca

SEQ ID NO: 4865717 - DNA, 25 bp, Homo sapien
gggcccaatccagagggctgatgac

SEQ ID NO: 4865718 - DNA, 25 bp, Homo sapien
tgtgggatgcagtccaaatcacatg

SEQ ID NO: 4865719 - DNA, 25 bp, Homo sapien
ccagaactgggctgactgtctttgt

SEQ ID NO: 4865720 - DNA, 25 bp, Homo sapien
gagtatccctggaattgttctcatg

SEQ ID NO: 4865721 - DNA, 25 bp, Homo sapien
caactggtactaggaggtacccaga

SEQ ID NO: 4865722 - DNA, 25 bp, Homo sapien
tggaattgttctcatgaacagagct

SEQ ID NO: 4865723 - DNA, 25 bp, Homo sapien
atgctgccagtgcttggctacttga

SEQ ID NO: 4865724 - DNA, 25 bp, Homo sapien
tcacactgccctggctggggccagg

SEQ ID NO: 4865725 - DNA, 25 bp, Homo sapien
cactgccctggctggggccaggagc

SEQ ID NO: 4865726 - DNA, 25 bp, Homo sapien
gccctggctggggccaggagcccac

SEQ ID NO: 4865727 - DNA, 25 bp, Homo sapien
actgccctggctggggccaggagcc

SEQ ID NO: 4865728 - DNA, 25 bp, Homo sapien
tcattgcaacagtccaatggttcat

SEQ ID NO: 4865729 - DNA, 25 bp, Homo sapien
atttccataagcacacgaagtatct

SEQ ID NO: 4865730 - DNA, 25 bp, Homo sapien
agaatcattgcaacagtccaatggt

SEQ ID NO: 4865731 - DNA, 25 bp, Homo sapien
ttccataagcacacgaagtatctgt

SEQ ID NO: 4865732 - DNA, 25 bp, Homo sapien
gaattgcatgaaggaccattgagtg

SEQ ID NO: 4865733 - DNA, 25 bp, Homo sapien
ttgcaaactctggtgggatttggga

SEQ ID NO: 4865734 - DNA, 25 bp, Homo sapien
ctcatgacagcaagaattgcatgaa

SEQ ID NO: 4865735 - DNA, 25 bp, Homo sapien
aggaccattgagtgatttccaaaac

SEQ ID NO: 4865736 - DNA, 25 bp, Homo sapien
gaatgccttcccaagtgagataccc

SEQ ID NO: 4865737 - DNA, 25 bp, Homo sapien
tgaggcactgccttggaataatgag

SEQ ID NO: 4865738 - DNA, 25 bp, Homo sapien
ctggacggaaactaaggagactgac

SEQ ID NO: 4865739 - DNA, 25 bp, Homo sapien
gagatacccagagacctgaacatca

SEQ ID NO: 4865740 - DNA, 25 bp, Homo sapien
ctcagctgtccccattcggagggca

SEQ ID NO: 4865741 - DNA, 25 bp, Homo sapien
gtccccattcggagggcatccactg

SEQ ID NO: 4865742 - DNA, 25 bp, Homo sapien
gggcatccactgttggctttagggc

SEQ ID NO: 4865743 - DNA, 25 bp, Homo sapien
gcatccactgttggctttagggcca

SEQ ID NO: 4865744 - DNA, 25 bp, Homo sapien
cctgccgtgaaaccaaagctcctac

SEQ ID NO: 4865745 - DNA, 25 bp, Homo sapien
gaatcacggacagtcactatgcaag

SEQ ID NO: 4865746 - DNA, 25 bp, Homo sapien
tcactatgcaaggaaggcattctac

SEQ ID NO: 4865747 - DNA, 25 bp, Homo sapien
tttgagaataatggaatcacggaca

SEQ ID NO: 4865748 - DNA, 25 bp, Homo sapien
gaaggcattctacagcagcccctat

SEQ ID NO: 4865749 - DNA, 25 bp, Homo sapien
tgtgatggtgtttcttcggatgtgt

SEQ ID NO: 4865750 - DNA, 25 bp, Homo sapien
tgtttcttcggatgtgtaaaataag

SEQ ID NO: 4865751 - DNA, 25 bp, Homo sapien
gatggtgtttcttcggatgtgtaaa

SEQ ID NO: 4865752 - DNA, 25 bp, Homo sapien
ggtgtttcttcggatgtgtaaaata

SEQ ID NO: 4865753 - DNA, 25 bp, Homo sapien
gaaagcacacagccgacctacaaac

SEQ ID NO: 4865754 - DNA, 25 bp, Homo sapien
ttggaaagcacacagccgacctaca

SEQ ID NO: 4865755 - DNA, 25 bp, Homo sapien
ggaaagcacacagccgacctacaaa

SEQ ID NO: 4865756 - DNA, 25 bp, Homo sapien
tggaaagcacacagccgacctacaa

SEQ ID NO: 4865757 - DNA, 25 bp, Homo sapien
agagagacgaagccccacgagccac

SEQ ID NO: 4865758 - DNA, 25 bp, Homo sapien
cagagagacgaagccccacgagcca

SEQ ID NO: 4865759 - DNA, 25 bp, Homo sapien
tgcagagagacgaagccccacgagc

SEQ ID NO: 4865760 - DNA, 25 bp, Homo sapien
gcagagagacgaagccccacgagcc

SEQ ID NO: 4865761 - DNA, 25 bp, Homo sapien
tggcaccattcccttgagcagggcc

SEQ ID NO: 4865762 - DNA, 25 bp, Homo sapien
tcaaaatctggcaccattcccttga

SEQ ID NO: 4865763 - DNA, 25 bp, Homo sapien
aaatctggcaccattcccttgagca

SEQ ID NO: 4865764 - DNA, 25 bp, Homo sapien
tctggcaccattcccttgagcaggg

SEQ ID NO: 4865765 - DNA, 25 bp, Homo sapien
gacacccactgttttccaccaagag

SEQ ID NO: 4865766 - DNA, 25 bp, Homo sapien
tcttttccatggtgaccggacttgg

SEQ ID NO: 4865767 - DNA, 25 bp, Homo sapien
tgacgatgccctgcatggaccagct

SEQ ID NO: 4865768 - DNA, 25 bp, Homo sapien
tgaagtcctactgctgagccaagac

SEQ ID NO: 4865769 - DNA, 25 bp, Homo sapien
caagtcctccttgcaagttgccaaa

SEQ ID NO: 4865770 - DNA, 25 bp, Homo sapien
catgttggacacagttgagggtgac

SEQ ID NO: 4865771 - DNA, 25 bp, Homo sapien
caggagccaggtttaccatctgaac

SEQ ID NO: 4865772 - DNA, 25 bp, Homo sapien
cagtttctcaaggttaagccaagtc

SEQ ID NO: 4865773 - DNA, 25 bp, Homo sapien
ccaacgtggagtgggattgagctct

SEQ ID NO: 4865774 - DNA, 25 bp, Homo sapien
ctgccaacgtggagtgggattgagc

SEQ ID NO: 4865775 - DNA, 25 bp, Homo sapien
gtggagtgggattgagctctgtata

SEQ ID NO: 4865776 - DNA, 25 bp, Homo sapien
cgtggagtgggattgagctctgtat

SEQ ID NO: 4865777 - DNA, 25 bp, Homo sapien
tgctggatggcacgtaaactctgag

SEQ ID NO: 4865778 - DNA, 25 bp, Homo sapien
taagttacagtttggccctgtctgc

SEQ ID NO: 4865779 - DNA, 25 bp, Homo sapien
taatggatatggacgtctgctgaaa

SEQ ID NO: 4865780 - DNA, 25 bp, Homo sapien
agagcctccgcaagcatgtgctggc

SEQ ID NO: 4865781 - DNA, 25 bp, Homo sapien
ctggatgccctgggggttgccacac

SEQ ID NO: 4865782 - DNA, 25 bp, Homo sapien
tgactacagcagacgctacacccat

SEQ ID NO: 4865783 - DNA, 25 bp, Homo sapien
tctacaacattgagtttgactacag

SEQ ID NO: 4865784 - DNA, 25 bp, Homo sapien
taattcccagacgtggctgaactgt

SEQ ID NO: 4865785 - DNA, 25 bp, Homo sapien
tcagggtggattttgactaagataa

SEQ ID NO: 4865786 - DNA, 25 bp, Homo sapien
gttgagctctggtacgtctccatag

SEQ ID NO: 4865787 - DNA, 25 bp, Homo sapien
gagctctggtacgtctccatagaac

SEQ ID NO: 4865788 - DNA, 25 bp, Homo sapien
tcagagttgagctctggtacgtctc

SEQ ID NO: 4865789 - DNA, 25 bp, Homo sapien
cacattcagagttgagctctggtac

SEQ ID NO: 4865790 - DNA, 25 bp, Homo sapien
agctcacaccgagctctggagggcc

SEQ ID NO: 4865791 - DNA, 25 bp, Homo sapien
ctacagcaactggttaggagcagag

SEQ ID NO: 4865792 - DNA, 25 bp, Homo sapien
tacagcaactggttaggagcagagt

SEQ ID NO: 4865793 - DNA, 25 bp, Homo sapien
acaccgagctctggagggcctttct

SEQ ID NO: 4865794 - DNA, 25 bp, Homo sapien
ttctggactagttttcagagtcaag

SEQ ID NO: 4865795 - DNA, 25 bp, Homo sapien
tcatatcctttaccctctgtcacaa

SEQ ID NO: 4865796 - DNA, 25 bp, Homo sapien
aatcatatcctttaccctctgtcac

SEQ ID NO: 4865797 - DNA, 25 bp, Homo sapien
aaatcatatcctttaccctctgtca

SEQ ID NO: 4865798 - DNA, 25 bp, Homo sapien
cagccactgggtggaaactcattgg

SEQ ID NO: 4865799 - DNA, 25 bp, Homo sapien
tctgacaatccgagggagcctggga

SEQ ID NO: 4865800 - DNA, 25 bp, Homo sapien
gctggtggagattagatgtgtggtc

SEQ ID NO: 4865801 - DNA, 25 bp, Homo sapien
tggtctctgacaatccgagggagcc

SEQ ID NO: 4865802 - DNA, 25 bp, Homo sapien
cattcacgtattttctctttttgga

SEQ ID NO: 4865803 - DNA, 25 bp, Homo sapien
tattttctctttttggaggacagac

SEQ ID NO: 4865804 - DNA, 25 bp, Homo sapien
tcattcacgtattttctctttttgg

SEQ ID NO: 4865805 - DNA, 25 bp, Homo sapien
cgtattttctctttttggaggacag

SEQ ID NO: 4865806 - DNA, 25 bp, Homo sapien
ttgggtgactgggcaccaacatgga

SEQ ID NO: 4865807 - DNA, 25 bp, Homo sapien
cctggagtcctattagcagctgtca

SEQ ID NO: 4865808 - DNA, 25 bp, Homo sapien
tcaggagtgtggtgttgggtgactg

SEQ ID NO: 4865809 - DNA, 25 bp, Homo sapien
tgaaggtcctggagtcctattagca

SEQ ID NO: 4865810 - DNA, 25 bp, Homo sapien
tcagattagtcctccagtaccaatc

SEQ ID NO: 4865811 - DNA, 25 bp, Homo sapien
tctccaggggtgcaaggtcattacc

SEQ ID NO: 4865812 - DNA, 25 bp, Homo sapien
aggtcattacccgatgtggttctga

SEQ ID NO: 4865813 - DNA, 25 bp, Homo sapien
agtaccaatctccaggggtgcaagg

SEQ ID NO: 4865814 - DNA, 25 bp, Homo sapien
caggggattgtcgaaaagcctgaat

SEQ ID NO: 4865815 - DNA, 25 bp, Homo sapien
aggggattgtcgaaaagcctgaatc

SEQ ID NO: 4865816 - DNA, 25 bp, Homo sapien
tcaggggattgtcgaaaagcctgaa

SEQ ID NO: 4865817 - DNA, 25 bp, Homo sapien
ggggattgtcgaaaagcctgaatca

SEQ ID NO: 4865818 - DNA, 25 bp, Homo sapien
tgaagccaggaactcggatgaccat

SEQ ID NO: 4865819 - DNA, 25 bp, Homo sapien
tttgcctagagtaggctccagaatc

SEQ ID NO: 4865820 - DNA, 25 bp, Homo sapien
cacatcatcctagtgcctgccatga

SEQ ID NO: 4865821 - DNA, 25 bp, Homo sapien
gtgccatattctacaccacatcatc

SEQ ID NO: 4865822 - DNA, 25 bp, Homo sapien
tatgacctggaattagtaggcccag

SEQ ID NO: 4865823 - DNA, 25 bp, Homo sapien
agcaagccaagaaaattgatgtttc

SEQ ID NO: 4865824 - DNA, 25 bp, Homo sapien
tatagaccagtgaagcaagccaaga

SEQ ID NO: 4865825 - DNA, 25 bp, Homo sapien
gaggaaattgcagaatactagaagc

SEQ ID NO: 4865826 - DNA, 25 bp, Homo sapien
gtgtagaatattgaagttttccagt

SEQ ID NO: 4865827 - DNA, 25 bp, Homo sapien
cagcaactgtgtagaatattgaagt

SEQ ID NO: 4865828 - DNA, 25 bp, Homo sapien
cttcagcaactgtgtagaatattga

SEQ ID NO: 4865829 - DNA, 25 bp, Homo sapien
actgtgtagaatattgaagttttcc

SEQ ID NO: 4865830 - DNA, 25 bp, Homo sapien
ctatgttggcatttttctctagtgg

SEQ ID NO: 4865831 - DNA, 25 bp, Homo sapien
ctgtatagtagagatctatgttggc

SEQ ID NO: 4865832 - DNA, 25 bp, Homo sapien
tctctagtggatacttcttattttc

SEQ ID NO: 4865833 - DNA, 25 bp, Homo sapien
tcatagaaacgcaatcttcatttcc

SEQ ID NO: 4865834 - DNA, 25 bp, Homo sapien
ctaagctgctttccgaaaacgggca

SEQ ID NO: 4865835 - DNA, 25 bp, Homo sapien
tcgctgaggtaactcatagctaagc

SEQ ID NO: 4865836 - DNA, 25 bp, Homo sapien
gacttcccaggagatgtcactcagc

SEQ ID NO: 4865837 - DNA, 25 bp, Homo sapien
catttggagttgtcgctgaggtaac

SEQ ID NO: 4865838 - DNA, 25 bp, Homo sapien
aaaaatgtgcttgggtgcatgtgga

SEQ ID NO: 4865839 - DNA, 25 bp, Homo sapien
atgtggacagcagtggttcatgtga

SEQ ID NO: 4865840 - DNA, 25 bp, Homo sapien
atgtgcttgggtgcatgtggacagc

SEQ ID NO: 4865841 - DNA, 25 bp, Homo sapien
tgtggacagcagtggttcatgtgac

SEQ ID NO: 4865842 - DNA, 25 bp, Homo sapien
gagcctctggtttgtgttccatttt

SEQ ID NO: 4865843 - DNA, 25 bp, Homo sapien
ctccataggatcagaaactttttct

SEQ ID NO: 4865844 - DNA, 25 bp, Homo sapien
cagagcctctggtttgtgttccatt

SEQ ID NO: 4865845 - DNA, 25 bp, Homo sapien
ccattttctccataggatcagaaac

SEQ ID NO: 4865846 - DNA, 25 bp, Homo sapien
ggctccaggtccagcagagctctca

SEQ ID NO: 4865847 - DNA, 25 bp, Homo sapien
ctgctgctattgagggttcctctgg

SEQ ID NO: 4865848 - DNA, 25 bp, Homo sapien
ctgctattgagggttcctctggctc

SEQ ID NO: 4865849 - DNA, 25 bp, Homo sapien
gctccaggtccagcagagctctcat

SEQ ID NO: 4865850 - DNA, 25 bp, Homo sapien
gacccagattagtgaggtgggccac

SEQ ID NO: 4865851 - DNA, 25 bp, Homo sapien
gctgaacgaagggacccagattagt

SEQ ID NO: 4865852 - DNA, 25 bp, Homo sapien
ccagattagtgaggtgggccacgct

SEQ ID NO: 4865853 - DNA, 25 bp, Homo sapien
ctgaacgaagggacccagattagtg

SEQ ID NO: 4865854 - DNA, 25 bp, Homo sapien
tccatgacttggagggcctggctgt

SEQ ID NO: 4865855 - DNA, 25 bp, Homo sapien
ggttgcaggttgtttggaagtccac

SEQ ID NO: 4865856 - DNA, 25 bp, Homo sapien
cctggctgttgtcagggttgcaggt

SEQ ID NO: 4865857 - DNA, 25 bp, Homo sapien
tccacatggcatgtaaatggaccca

SEQ ID NO: 4865858 - DNA, 25 bp, Homo sapien
ggcagaaaacattcgtgttgatgcc

SEQ ID NO: 4865859 - DNA, 25 bp, Homo sapien
tataaaaccacaggcgcttataggc

SEQ ID NO: 4865860 - DNA, 25 bp, Homo sapien
tgggcagaaaacattcgtgttgatg

SEQ ID NO: 4865861 - DNA, 25 bp, Homo sapien
caggcgcttataggcttgggcagaa

SEQ ID NO: 4865862 - DNA, 25 bp, Homo sapien
gcattcatccagagccacaataaag

SEQ ID NO: 4865863 - DNA, 25 bp, Homo sapien
attcatccagagccacaataaagag

SEQ ID NO: 4865864 - DNA, 25 bp, Homo sapien
tcatccagagccacaataaagagtc

SEQ ID NO: 4865865 - DNA, 25 bp, Homo sapien
ctgcattcatccagagccacaataa

SEQ ID NO: 4865866 - DNA, 25 bp, Homo sapien
aaaccattctggaggtgcttcgtgc

SEQ ID NO: 4865867 - DNA, 25 bp, Homo sapien
ccggtgtctgattccacctctgtct

SEQ ID NO: 4865868 - DNA, 25 bp, Homo sapien
ttctcccggtagagtcaaaccattc

SEQ ID NO: 4865869 - DNA, 25 bp, Homo sapien
gaggtgcttcgtgcagcctgctaca

SEQ ID NO: 4865870 - DNA, 25 bp, Homo sapien
ccactttccctcctttttcttgcat

SEQ ID NO: 4865871 - DNA, 25 bp, Homo sapien
tccactttccctcctttttcttgca

SEQ ID NO: 4865872 - DNA, 25 bp, Homo sapien
tggatagctatagactgtccttcct

SEQ ID NO: 4865873 - DNA, 25 bp, Homo sapien
tattttggatagctatagactgtcc

SEQ ID NO: 4865874 - DNA, 25 bp, Homo sapien
ttggatagctatagactgtccttcc

SEQ ID NO: 4865875 - DNA, 25 bp, Homo sapien
ttttggatagctatagactgtcctt

SEQ ID NO: 4865876 - DNA, 25 bp, Homo sapien
cccacagttgaggccactggggcat

SEQ ID NO: 4865877 - DNA, 25 bp, Homo sapien
ttcccacagttgaggccactggggc

SEQ ID NO: 4865878 - DNA, 25 bp, Homo sapien
cagatgtccctggttcccagtgtct

SEQ ID NO: 4865879 - DNA, 25 bp, Homo sapien
ccagatgtccctggttcccagtgtc

SEQ ID NO: 4865880 - DNA, 25 bp, Homo sapien
ctgtaataagaacaatggcagtcat

SEQ ID NO: 4865881 - DNA, 25 bp, Homo sapien
tttccaacccatccaatactgactt

SEQ ID NO: 4865882 - DNA, 25 bp, Homo sapien
gcttttctttccaacccatccaata

SEQ ID NO: 4865883 - DNA, 25 bp, Homo sapien
ccttagaccagtcttttgccagcat

SEQ ID NO: 4865884 - DNA, 25 bp, Homo sapien
tttgcttctcttttcgcagctctcc

SEQ ID NO: 4865885 - DNA, 25 bp, Homo sapien
tactcgtctaattctccaactcctg

SEQ ID NO: 4865886 - DNA, 25 bp, Homo sapien
ctactcgtctaattctccaactcct

SEQ ID NO: 4865887 - DNA, 25 bp, Homo sapien
attaatacagatttaatcactagca

SEQ ID NO: 4865888 - DNA, 25 bp, Homo sapien
tgataggcaaaaatgcaatttcttt

SEQ ID NO: 4865889 - DNA, 25 bp, Homo sapien
ttgataggcaaaaatgcaatttctt

SEQ ID NO: 4865890 - DNA, 25 bp, Homo sapien
aatacagatttaatcactagcaaga

SEQ ID NO: 4865891 - DNA, 25 bp, Homo sapien
acagcctttgagctgtgtagccagg

SEQ ID NO: 4865892 - DNA, 25 bp, Homo sapien
caatgcaatgcacatttcacagcct

SEQ ID NO: 4865893 - DNA, 25 bp, Homo sapien
tagagacagtccgacacttgtcatt

SEQ ID NO: 4865894 - DNA, 25 bp, Homo sapien
tgccacaattcaatgcaatgcacat

SEQ ID NO: 4865895 - DNA, 25 bp, Homo sapien
ctgtggcttcacgccggaatcggcc

SEQ ID NO: 4865896 - DNA, 25 bp, Homo sapien
ctccctgcccatgccgctatcccaa

SEQ ID NO: 4865897 - DNA, 25 bp, Homo sapien
ccatgccgctatcccaattctgttt

SEQ ID NO: 4865898 - DNA, 25 bp, Homo sapien
ttcacgccggaatcggccgctccct

SEQ ID NO: 4865899 - DNA, 25 bp, Homo sapien
taccaccatgatctgtggctccaga

SEQ ID NO: 4865900 - DNA, 25 bp, Homo sapien
tgtccccattaccaccatgatctgt

SEQ ID NO: 4865901 - DNA, 25 bp, Homo sapien
gatctgtggctccagaatcggccgc

SEQ ID NO: 4865902 - DNA, 25 bp, Homo sapien
gtggctccagaatcggccgctcctt

SEQ ID NO: 4865903 - DNA, 25 bp, Homo sapien
acctgtaccacgaaggccaccgtga

SEQ ID NO: 4865904 - DNA, 25 bp, Homo sapien
taccacgaaggccaccgtgatctgt

SEQ ID NO: 4865905 - DNA, 25 bp, Homo sapien
tcaaacagcacctgtaccacgaagg

SEQ ID NO: 4865906 - DNA, 25 bp, Homo sapien
gaaggccaccgtgatctgtggctcc

SEQ ID NO: 4865907 - DNA, 25 bp, Homo sapien
cattgtcctaagttaaggaatgtgc

SEQ ID NO: 4865908 - DNA, 25 bp, Homo sapien
gcagatctggctctgaacattgtcc

SEQ ID NO: 4865909 - DNA, 25 bp, Homo sapien
gatgatcttagagataggcgtagga

SEQ ID NO: 4865910 - DNA, 25 bp, Homo sapien
agataggcgtaggagaaatccatcc

SEQ ID NO: 4865911 - DNA, 25 bp, Homo sapien
ggcagcagaaggttgtctggatggc

SEQ ID NO: 4865912 - DNA, 25 bp, Homo sapien
cctggtgtcacaaagtagggcagca

SEQ ID NO: 4865913 - DNA, 25 bp, Homo sapien
tgggttccagataggtgccaagtga

SEQ ID NO: 4865914 - DNA, 25 bp, Homo sapien
tggtgtcacaaagtagggcagcaga

SEQ ID NO: 4865915 - DNA, 25 bp, Homo sapien
cagccaagggggtagtgggcagcct

SEQ ID NO: 4865916 - DNA, 25 bp, Homo sapien
gcttcctttaagccaagactttctc

SEQ ID NO: 4865917 - DNA, 25 bp, Homo sapien
agcttcctttaagccaagactttct

SEQ ID NO: 4865918 - DNA, 25 bp, Homo sapien
agcctggtagaagggactgggcaaa

SEQ ID NO: 4865919 - DNA, 25 bp, Homo sapien
ggtcacagggatgctgatctttaag

SEQ ID NO: 4865920 - DNA, 25 bp, Homo sapien
gtaggtaaaaatagatgaatgggat

SEQ ID NO: 4865921 - DNA, 25 bp, Homo sapien
gaattggaacgttgctgtcccgtcc

SEQ ID NO: 4865922 - DNA, 25 bp, Homo sapien
gataattagtgtaagaccaaaggag

SEQ ID NO: 4865923 - DNA, 25 bp, Homo sapien
ctagagcctggggtatgtttgggga

SEQ ID NO: 4865924 - DNA, 25 bp, Homo sapien
ctgggttggccagtaggaggggctc

SEQ ID NO: 4865925 - DNA, 25 bp, Homo sapien
agggtgctgcgaagcagggctagag

SEQ ID NO: 4865926 - DNA, 25 bp, Homo sapien
tgctgcgaagcagggctagagcctg

SEQ ID NO: 4865927 - DNA, 25 bp, Homo sapien
gtaggaattgtagtctagtccagat

SEQ ID NO: 4865928 - DNA, 25 bp, Homo sapien
ctgagaactttgcaggtgtaggaat

SEQ ID NO: 4865929 - DNA, 25 bp, Homo sapien
ggtaccacgtgatatcctcagatga

SEQ ID NO: 4865930 - DNA, 25 bp, Homo sapien
caagaggctccggtcagaaaatgtg

SEQ ID NO: 4865931 - DNA, 25 bp, Homo sapien
ttcatttttggaacgcaacgggatc

SEQ ID NO: 4865932 - DNA, 25 bp, Homo sapien
aacgcaacgggatctgtaacaacat

SEQ ID NO: 4865933 - DNA, 25 bp, Homo sapien
tggaacgcaacgggatctgtaacaa

SEQ ID NO: 4865934 - DNA, 25 bp, Homo sapien
tcatttttggaacgcaacgggatct

SEQ ID NO: 4865935 - DNA, 25 bp, Homo sapien
cctctctgacctgtactgcagccat

SEQ ID NO: 4865936 - DNA, 25 bp, Homo sapien
tgctgagacgtttcctccaccgtgc

SEQ ID NO: 4865937 - DNA, 25 bp, Homo sapien
aatgccgcttaggactatctctggt

SEQ ID NO: 4865938 - DNA, 25 bp, Homo sapien
caccgtgcactctgtcaaatgcctg

SEQ ID NO: 4865939 - DNA, 25 bp, Homo sapien
tgccctgtggttgagggcactgcct

SEQ ID NO: 4865940 - DNA, 25 bp, Homo sapien
gagtggcagctcagtgtagaccctt

SEQ ID NO: 4865941 - DNA, 25 bp, Homo sapien
cactgcctgtggtatcccagagtct

SEQ ID NO: 4865942 - DNA, 25 bp, Homo sapien
tttgctctcctctacaagaaaagcc

SEQ ID NO: 4865943 - DNA, 25 bp, Homo sapien
cagttggttgtataatgaggaagga

SEQ ID NO: 4865944 - DNA, 25 bp, Homo sapien
tggagattcctattaaccaggtcat

SEQ ID NO: 4865945 - DNA, 25 bp, Homo sapien
agtgtgcagtgagtttggagattcc

SEQ ID NO: 4865946 - DNA, 25 bp, Homo sapien
ggtcatccgtgaatctatttttgtg

SEQ ID NO: 4865947 - DNA, 25 bp, Homo sapien
aaagctgagatctggcaaccgctta

SEQ ID NO: 4865948 - DNA, 25 bp, Homo sapien
acccgtacaacatcttctaaagcaa

SEQ ID NO: 4865949 - DNA, 25 bp, Homo sapien
cactaacatcagttaccgtcgttaa

SEQ ID NO: 4865950 - DNA, 25 bp, Homo sapien
cgtcgttaataacagaatgagcacc

SEQ ID NO: 4865951 - DNA, 25 bp, Homo sapien
actgtttagtgccatgacccagaga

SEQ ID NO: 4865952 - DNA, 25 bp, Homo sapien
ggagcatgggtctgttccaaaccag

SEQ ID NO: 4865953 - DNA, 25 bp, Homo sapien
tctgcaaggcaccaacaccaatgtg

SEQ ID NO: 4865954 - DNA, 25 bp, Homo sapien
ttcaaatgagaaatcgagcggtact

SEQ ID NO: 4865955 - DNA, 25 bp, Homo sapien
gcacagctgcctgtcgctggccctt

SEQ ID NO: 4865956 - DNA, 25 bp, Homo sapien
tggcccttgctttcgtctcgccagc

SEQ ID NO: 4865957 - DNA, 25 bp, Homo sapien
gcatctctgcaccattgcttctgct

SEQ ID NO: 4865958 - DNA, 25 bp, Homo sapien
tcgccagcctctggggatctgacct

SEQ ID NO: 4865959 - DNA, 25 bp, Homo sapien
ttgtaagtttctggagggtggcaga

SEQ ID NO: 4865960 - DNA, 25 bp, Homo sapien
gggtggcagaagaggcaaggcacac

SEQ ID NO: 4865961 - DNA, 25 bp, Homo sapien
gagggtggcagaagaggcaaggcac

SEQ ID NO: 4865962 - DNA, 25 bp, Homo sapien
tggagggtggcagaagaggcaaggc

SEQ ID NO: 4865963 - DNA, 25 bp, Homo sapien
tggactcttcttaacaatgttcagg

SEQ ID NO: 4865964 - DNA, 25 bp, Homo sapien
tgatctctttaggaccaccctctgg

SEQ ID NO: 4865965 - DNA, 25 bp, Homo sapien
gaagcgcatcctgcaggtgatctct

SEQ ID NO: 4865966 - DNA, 25 bp, Homo sapien
ttaacaatgttcagggtaagaccca

SEQ ID NO: 4865967 - DNA, 25 bp, Homo sapien
cagttgtacatctggggcctttgtc

SEQ ID NO: 4865968 - DNA, 25 bp, Homo sapien
agttgtacatctggggcctttgtca

SEQ ID NO: 4865969 - DNA, 25 bp, Homo sapien
gccagctcttggtcagttgtacatc

SEQ ID NO: 4865970 - DNA, 25 bp, Homo sapien
gctcttggtcagttgtacatctggg

SEQ ID NO: 4865971 - DNA, 25 bp, Homo sapien
ttaaacattggaacggacggtagca

SEQ ID NO: 4865972 - DNA, 25 bp, Homo sapien
cggacggtagcagctctctctgaga

SEQ ID NO: 4865973 - DNA, 25 bp, Homo sapien
gagtcagtctcaacctggaaagatg

SEQ ID NO: 4865974 - DNA, 25 bp, Homo sapien
gctgtgcgggtctgccctgccaagt

SEQ ID NO: 4865975 - DNA, 25 bp, Homo sapien
gccctgcagacatcggtttgattaa

SEQ ID NO: 4865976 - DNA, 25 bp, Homo sapien
acggacttcagctgccacagagagg

SEQ ID NO: 4865977 - DNA, 25 bp, Homo sapien
ggcttgcactggtggacggacttca

SEQ ID NO: 4865978 - DNA, 25 bp, Homo sapien
ctcagggttttctgttggagccctg

SEQ ID NO: 4865979 - DNA, 25 bp, Homo sapien
ctgacccctgaattccacttcctcc

SEQ ID NO: 4865980 - DNA, 25 bp, Homo sapien
ttgcgctgacccctgaattccactt

SEQ ID NO: 4865981 - DNA, 25 bp, Homo sapien
cgctgacccctgaattccacttcct

SEQ ID NO: 4865982 - DNA, 25 bp, Homo sapien
ctttgcgctgacccctgaattccac

SEQ ID NO: 4865983 - DNA, 25 bp, Homo sapien
gagttctctcttccttttgctttct

SEQ ID NO: 4865984 - DNA, 25 bp, Homo sapien
ctggagttctctcttccttttgctt

SEQ ID NO: 4865985 - DNA, 25 bp, Homo sapien
agttctctcttccttttgctttctt

SEQ ID NO: 4865986 - DNA, 25 bp, Homo sapien
ggagttctctcttccttttgctttc

SEQ ID NO: 4865987 - DNA, 25 bp, Homo sapien
ccatcctgtgcaaatttctctgtcc

SEQ ID NO: 4865988 - DNA, 25 bp, Homo sapien
cctgtgcaaatttctctgtccacat

SEQ ID NO: 4865989 - DNA, 25 bp, Homo sapien
ctccatgctttaacctgtactcctg

SEQ ID NO: 4865990 - DNA, 25 bp, Homo sapien
tcctgccaagtggtacacagaccat

SEQ ID NO: 4865991 - DNA, 25 bp, Homo sapien
ggaacacacaatccttctgaagttg

SEQ ID NO: 4865992 - DNA, 25 bp, Homo sapien
aatctaatttcccaggaacacacaa

SEQ ID NO: 4865993 - DNA, 25 bp, Homo sapien
tgctgaggtcaggaccggaaaggca

SEQ ID NO: 4865994 - DNA, 25 bp, Homo sapien
cttgaaggcacaggacttcactggg

SEQ ID NO: 4865995 - DNA, 25 bp, Homo sapien
cataggaaggaatattgctgttgtc

SEQ ID NO: 4865996 - DNA, 25 bp, Homo sapien
ggaagctcataggaaggaatattgc

SEQ ID NO: 4865997 - DNA, 25 bp, Homo sapien
gcctggaagctcataggaaggaata

SEQ ID NO: 4865998 - DNA, 25 bp, Homo sapien
gaaggaatattgctgttgtccaatg

SEQ ID NO: 4865999 - DNA, 25 bp, Homo sapien
tgcagactccaggacgaccaggcag

SEQ ID NO: 4866000 - DNA, 25 bp, Homo sapien
tcattggtccgattgcactgcatgt

SEQ ID NO: 4866001 - DNA, 25 bp, Homo sapien
gattgcactgcatgtagctctccac

SEQ ID NO: 4866002 - DNA, 25 bp, Homo sapien
atttcaaacagacaaggggtcgctc

SEQ ID NO: 4866003 - DNA, 25 bp, Homo sapien
catggcccagatctgcacggcctag

SEQ ID NO: 4866004 - DNA, 25 bp, Homo sapien
tgccattggtcatttccaactcctc

SEQ ID NO: 4866005 - DNA, 25 bp, Homo sapien
gatctgcacggcctagcacaggctg

SEQ ID NO: 4866006 - DNA, 25 bp, Homo sapien
tgcagtggtgatgcaggccgaattc

SEQ ID NO: 4866007 - DNA, 25 bp, Homo sapien
taaaaattggttgggacgatcagat

SEQ ID NO: 4866008 - DNA, 25 bp, Homo sapien
aaaaattggttgggacgatcagatt

SEQ ID NO: 4866009 - DNA, 25 bp, Homo sapien
aaaattggttgggacgatcagattg

SEQ ID NO: 4866010 - DNA, 25 bp, Homo sapien
ctaaaaattggttgggacgatcaga

SEQ ID NO: 4866011 - DNA, 25 bp, Homo sapien
gggccgaggctttgtcgaatccagt

SEQ ID NO: 4866012 - DNA, 25 bp, Homo sapien
gcttgcatcgtagctctcttttctt

SEQ ID NO: 4866013 - DNA, 25 bp, Homo sapien
cagctggaaagttagttggtttggc

SEQ ID NO: 4866014 - DNA, 25 bp, Homo sapien
ttcttttgagcagctggaaagttag

SEQ ID NO: 4866015 - DNA, 25 bp, Homo sapien
gactgtcagttccttttgcacccat

SEQ ID NO: 4866016 - DNA, 25 bp, Homo sapien
atttttgttgccaagatggtagggg

SEQ ID NO: 4866017 - DNA, 25 bp, Homo sapien
ctgcaagcaccaatatgctgtattg

SEQ ID NO: 4866018 - DNA, 25 bp, Homo sapien
cacactctagcctgctttcccactg

SEQ ID NO: 4866019 - DNA, 25 bp, Homo sapien
ggtacagagctcttctaattcaaca

SEQ ID NO: 4866020 - DNA, 25 bp, Homo sapien
gtcctgggccagatggatgcacaga

SEQ ID NO: 4866021 - DNA, 25 bp, Homo sapien
tcaaggccatgacatatccgtcgtc

SEQ ID NO: 4866022 - DNA, 25 bp, Homo sapien
tcgtggacacctacaaggaaagtct

SEQ ID NO: 4866023 - DNA, 25 bp, Homo sapien
ttttactgaaaataggacacacttg

SEQ ID NO: 4866024 - DNA, 25 bp, Homo sapien
tctgatatatctggtttcaaatcag

SEQ ID NO: 4866025 - DNA, 25 bp, Homo sapien
gaaaataggacacacttgctttaga

SEQ ID NO: 4866026 - DNA, 25 bp, Homo sapien
tgatatatctggtttcaaatcagaa

SEQ ID NO: 4866027 - DNA, 25 bp, Homo sapien
tgggtgttctgataccatgggcttt

SEQ ID NO: 4866028 - DNA, 25 bp, Homo sapien
agaatgggtgttctgataccatggg

SEQ ID NO: 4866029 - DNA, 25 bp, Homo sapien
aatgggtgttctgataccatgggct

SEQ ID NO: 4866030 - DNA, 25 bp, Homo sapien
ggtgttctgataccatgggctttgg

SEQ ID NO: 4866031 - DNA, 25 bp, Homo sapien
tccttccaaatattgccggccaggg

SEQ ID NO: 4866032 - DNA, 25 bp, Homo sapien
caccggagaggaacaaggtagcgtt

SEQ ID NO: 4866033 - DNA, 25 bp, Homo sapien
gcgttgccagggtagcaccttcaga

SEQ ID NO: 4866034 - DNA, 25 bp, Homo sapien
ctgtgtccgactttcacagctccag

SEQ ID NO: 4866035 - DNA, 25 bp, Homo sapien
cacactgggttcacttagacggcaa

SEQ ID NO: 4866036 - DNA, 25 bp, Homo sapien
taagcagggaagagaactcacacat

SEQ ID NO: 4866037 - DNA, 25 bp, Homo sapien
tggccctgggtctgtcaatttctct

SEQ ID NO: 4866038 - DNA, 25 bp, Homo sapien
tgttgcaaagggtccagcacactgg

SEQ ID NO: 4866039 - DNA, 25 bp, Homo sapien
ggagactgctctgcccaggactgag

SEQ ID NO: 4866040 - DNA, 25 bp, Homo sapien
aatgactttttgtggagactgctct

SEQ ID NO: 4866041 - DNA, 25 bp, Homo sapien
gagaatgactttttgtggagactgc

SEQ ID NO: 4866042 - DNA, 25 bp, Homo sapien
actttttgtggagactgctctgccc

SEQ ID NO: 4866043 - DNA, 25 bp, Homo sapien
tgatttctccatgaggcaaacaatg

SEQ ID NO: 4866044 - DNA, 25 bp, Homo sapien
gatttctccatgaggcaaacaatgt

SEQ ID NO: 4866045 - DNA, 25 bp, Homo sapien
ttctccatgaggcaaacaatgtgct

SEQ ID NO: 4866046 - DNA, 25 bp, Homo sapien
tccatgaggcaaacaatgtgcttct

SEQ ID NO: 4866047 - DNA, 25 bp, Homo sapien
tctttagcaagggacaccctggctc

SEQ ID NO: 4866048 - DNA, 25 bp, Homo sapien
ggcttcagtctctttagcaagggac

SEQ ID NO: 4866049 - DNA, 25 bp, Homo sapien
tcagtctctttagcaagggacaccc

SEQ ID NO: 4866050 - DNA, 25 bp, Homo sapien
tggggactgtttggcttcagtctct

SEQ ID NO: 4866051 - DNA, 25 bp, Homo sapien
aggactccaagctgcgtgactctgg

SEQ ID NO: 4866052 - DNA, 25 bp, Homo sapien
gactccaagctgcgtgactctggag

SEQ ID NO: 4866053 - DNA, 25 bp, Homo sapien
ggactccaagctgcgtgactctgga

SEQ ID NO: 4866054 - DNA, 25 bp, Homo sapien
tctttcccctctgccgtgtctctgg

SEQ ID NO: 4866055 - DNA, 25 bp, Homo sapien
gttctttcccctctgccgtgtctct

SEQ ID NO: 4866056 - DNA, 25 bp, Homo sapien
gggttttgttcctgttgagaatgca

SEQ ID NO: 4866057 - DNA, 25 bp, Homo sapien
tgttcctgttgagaatgcaattgct

SEQ ID NO: 4866058 - DNA, 25 bp, Homo sapien
gtctctcctgtttattacacctgca

SEQ ID NO: 4866059 - DNA, 25 bp, Homo sapien
ccagcattccaggatctgtctcaga

SEQ ID NO: 4866060 - DNA, 25 bp, Homo sapien
gacctggcgtgaactttgtgtggct

SEQ ID NO: 4866061 - DNA, 25 bp, Homo sapien
tctggagctgagacctggcgtgaac

SEQ ID NO: 4866062 - DNA, 25 bp, Homo sapien
gaaggatgagggcctcatgggaggc

SEQ ID NO: 4866063 - DNA, 25 bp, Homo sapien
ctgagcattgaaggatgagggcctc

SEQ ID NO: 4866064 - DNA, 25 bp, Homo sapien
aaggatgagggcctcatgggaggca

SEQ ID NO: 4866065 - DNA, 25 bp, Homo sapien
agcattgaaggatgagggcctcatg

SEQ ID NO: 4866066 - DNA, 25 bp, Homo sapien
aggattcatggaggcagagggtccc

SEQ ID NO: 4866067 - DNA, 25 bp, Homo sapien
gattcatggaggcagagggtcccaa

SEQ ID NO: 4866068 - DNA, 25 bp, Homo sapien
tcatggaggcagagggtcccaagcc

SEQ ID NO: 4866069 - DNA, 25 bp, Homo sapien
attcatggaggcagagggtcccaag

SEQ ID NO: 4866070 - DNA, 25 bp, Homo sapien
gaaggagttaagagtaagagatgac

SEQ ID NO: 4866071 - DNA, 25 bp, Homo sapien
tcggccctggcctatgctgaaggag

SEQ ID NO: 4866072 - DNA, 25 bp, Homo sapien
tattcagctgaggtagagtgtaggt

SEQ ID NO: 4866073 - DNA, 25 bp, Homo sapien
agatgactttgggtccaagggtgta

SEQ ID NO: 4866074 - DNA, 25 bp, Homo sapien
agtgtgcaagatccctgtgcaggga

SEQ ID NO: 4866075 - DNA, 25 bp, Homo sapien
agccaggtgtgaagtgtgcaagatc

SEQ ID NO: 4866076 - DNA, 25 bp, Homo sapien
tgaaatgcggcaagtgccgcctgct

SEQ ID NO: 4866077 - DNA, 25 bp, Homo sapien
ctgctttgtcagtaagggctggacc

SEQ ID NO: 4866078 - DNA, 25 bp, Homo sapien
tgtgttggtttgagccaagtaggaa

SEQ ID NO: 4866079 - DNA, 25 bp, Homo sapien
agaatgaggccgtgaccagctgtgg

SEQ ID NO: 4866080 - DNA, 25 bp, Homo sapien
tgagccaagtaggaagcaagataaa

SEQ ID NO: 4866081 - DNA, 25 bp, Homo sapien
gcaagataaattggtgaactgagca

SEQ ID NO: 4866082 - DNA, 25 bp, Homo sapien
tgtcagtgaagttgggaagtctcac

SEQ ID NO: 4866083 - DNA, 25 bp, Homo sapien
gacccaaaggcaggctgtcagtgaa

SEQ ID NO: 4866084 - DNA, 25 bp, Homo sapien
cacacacgtggtggcctagctccgg

SEQ ID NO: 4866085 - DNA, 25 bp, Homo sapien
ccagtggagagtgcacaccgccaca

SEQ ID NO: 4866086 - DNA, 25 bp, Homo sapien
ggaaacattagcatgcagggaaatt

SEQ ID NO: 4866087 - DNA, 25 bp, Homo sapien
aacattagcatgcagggaaatttgc

SEQ ID NO: 4866088 - DNA, 25 bp, Homo sapien
gaaacattagcatgcagggaaattt

SEQ ID NO: 4866089 - DNA, 25 bp, Homo sapien
cattagcatgcagggaaatttgcct

SEQ ID NO: 4866090 - DNA, 25 bp, Homo sapien
gagagtcccaccagccgcaagccct

SEQ ID NO: 4866091 - DNA, 25 bp, Homo sapien
gtcctgtctgacacctggagagtcc

SEQ ID NO: 4866092 - DNA, 25 bp, Homo sapien
cctgtctgacacctggagagtccca

SEQ ID NO: 4866093 - DNA, 25 bp, Homo sapien
cagtcctgtctgacacctggagagt

SEQ ID NO: 4866094 - DNA, 25 bp, Homo sapien
tgtcattttgtgctgatttttctgt

SEQ ID NO: 4866095 - DNA, 25 bp, Homo sapien
tttgatcttgtcattttgtgctgat

SEQ ID NO: 4866096 - DNA, 25 bp, Homo sapien
tgtgctgatttttctgttaaagaaa

SEQ ID NO: 4866097 - DNA, 25 bp, Homo sapien
gatcttgtcattttgtgctgatttt

SEQ ID NO: 4866098 - DNA, 25 bp, Homo sapien
agaggaaatcacataattaattagc

SEQ ID NO: 4866099 - DNA, 25 bp, Homo sapien
ggtgacacgccagcaaaacagttct

SEQ ID NO: 4866100 - DNA, 25 bp, Homo sapien
tagctcccgaaaactctggaagact

SEQ ID NO: 4866101 - DNA, 25 bp, Homo sapien
gtgacaacttggtgacacgccagca

SEQ ID NO: 4866102 - DNA, 25 bp, Homo sapien
ctctgcctcgcggaaaaggtacctc

SEQ ID NO: 4866103 - DNA, 25 bp, Homo sapien
agcgcctgcgtctccattgccagtg

SEQ ID NO: 4866104 - DNA, 25 bp, Homo sapien
ggaacgtgtaatcctcagcgtgctc

SEQ ID NO: 4866105 - DNA, 25 bp, Homo sapien
agcttcgctctactgctcggcaggg

SEQ ID NO: 4866106 - DNA, 25 bp, Homo sapien
ggcgtcggagccagcagataattgc

SEQ ID NO: 4866107 - DNA, 25 bp, Homo sapien
caatgagtgaggtcggctgaaacca

SEQ ID NO: 4866108 - DNA, 25 bp, Homo sapien
tggagagccaatcgcaagagcagag

SEQ ID NO: 4866109 - DNA, 25 bp, Homo sapien
cagttggtccgagctgccgaaaggt

SEQ ID NO: 4866110 - DNA, 25 bp, Homo sapien
ttaggcaacaatttcccgcagctgt

SEQ ID NO: 4866111 - DNA, 25 bp, Homo sapien
gtcccaccccaagagcggatgtaac

SEQ ID NO: 4866112 - DNA, 25 bp, Homo sapien
tgcccctatgtccagagcagctttc

SEQ ID NO: 4866113 - DNA, 25 bp, Homo sapien
ccccaagagcggatgtaacatctgg

SEQ ID NO: 4866114 - DNA, 25 bp, Homo sapien
cccagctgtgaatagagccgatctg

SEQ ID NO: 4866115 - DNA, 25 bp, Homo sapien
taaagtggtcagtttcccccagctg

SEQ ID NO: 4866116 - DNA, 25 bp, Homo sapien
tagagccgatctgcccactttctca

SEQ ID NO: 4866117 - DNA, 25 bp, Homo sapien
ttctcatcaactctccagtgctggg

SEQ ID NO: 4866118 - DNA, 25 bp, Homo sapien
tagttgcaggctaggttagggaccc

SEQ ID NO: 4866119 - DNA, 25 bp, Homo sapien
tttgagacgatgaatgcaagcacac

SEQ ID NO: 4866120 - DNA, 25 bp, Homo sapien
tagggacccttcaacatttggtgga

SEQ ID NO: 4866121 - DNA, 25 bp, Homo sapien
caagcagcgatgaggtgaagtacat

SEQ ID NO: 4866122 - DNA, 25 bp, Homo sapien
gaacaggctgtaggacttggaatga

SEQ ID NO: 4866123 - DNA, 25 bp, Homo sapien
ctttgtataagaccctcctccagag

SEQ ID NO: 4866124 - DNA, 25 bp, Homo sapien
cttggaatgacagagcatgccagga

SEQ ID NO: 4866125 - DNA, 25 bp, Homo sapien
aatttaaggagaagtgtgcagaccg

SEQ ID NO: 4866126 - DNA, 25 bp, Homo sapien
taaaggaggcccacaccatattttg

SEQ ID NO: 4866127 - DNA, 25 bp, Homo sapien
gaagagaccacgctcctgttgctct

SEQ ID NO: 4866128 - DNA, 25 bp, Homo sapien
ggcattgagaccatctcagctgaga

SEQ ID NO: 4866129 - DNA, 25 bp, Homo sapien
ggatcttgcaggctacacgttgttt

SEQ ID NO: 4866130 - DNA, 25 bp, Homo sapien
tttgccgctgaccatccaaagatga

SEQ ID NO: 4866131 - DNA, 25 bp, Homo sapien
gccgctgaccatccaaagatgagaa

SEQ ID NO: 4866132 - DNA, 25 bp, Homo sapien
cagttctactgaccaccacactttc

SEQ ID NO: 4866133 - DNA, 25 bp, Homo sapien
gggtctttgccgctgaccatccaaa

SEQ ID NO: 4866134 - DNA, 25 bp, Homo sapien
cagggagcagtctattactgacagc

SEQ ID NO: 4866135 - DNA, 25 bp, Homo sapien
gaagggcacacgcagagactttctg

SEQ ID NO: 4866136 - DNA, 25 bp, Homo sapien
tgagtggtcgcattcatggaggccc

SEQ ID NO: 4866137 - DNA, 25 bp, Homo sapien
tgcggttctgtacaaggctgtgccc

SEQ ID NO: 4866138 - DNA, 25 bp, Homo sapien
catgagcttgcgtggaacctggaga

SEQ ID NO: 4866139 - DNA, 25 bp, Homo sapien
cctggagagggtggtcctcggtaga

SEQ ID NO: 4866140 - DNA, 25 bp, Homo sapien
agctatgcaggactgccctgctgaa

SEQ ID NO: 4866141 - DNA, 25 bp, Homo sapien
tgcagggccaacttttcaacattgt

SEQ ID NO: 4866142 - DNA, 25 bp, Homo sapien
tgtgctctctctgtgtaggcagatg

SEQ ID NO: 4866143 - DNA, 25 bp, Homo sapien
tctctctgtgtaggcagatgactgg

SEQ ID NO: 4866144 - DNA, 25 bp, Homo sapien
cagaagaagagccacagtaagatgc

SEQ ID NO: 4866145 - DNA, 25 bp, Homo sapien
agatgcaagtgggtgatgactccca

SEQ ID NO: 4866146 - DNA, 25 bp, Homo sapien
ctcctttctagctcccgattactca

SEQ ID NO: 4866147 - DNA, 25 bp, Homo sapien
tcctttctagctcccgattactcat

SEQ ID NO: 4866148 - DNA, 25 bp, Homo sapien
gaatcgctgaggtggaaaacgtcgt

SEQ ID NO: 4866149 - DNA, 25 bp, Homo sapien
gctctgctctcacggaaggcatggg

SEQ ID NO: 4866150 - DNA, 25 bp, Homo sapien
ccatgccagctgcagatattcctgg

SEQ ID NO: 4866151 - DNA, 25 bp, Homo sapien
taatacagaagcctgaacagcgtgc

SEQ ID NO: 4866152 - DNA, 25 bp, Homo sapien
tagcaagcttctcaagagccttctc

SEQ ID NO: 4866153 - DNA, 25 bp, Homo sapien
ccctagcaagcttctcaagagcctt

SEQ ID NO: 4866154 - DNA, 25 bp, Homo sapien
gcaggaggccctagcaagcttctca

SEQ ID NO: 4866155 - DNA, 25 bp, Homo sapien
gaggccctagcaagcttctcaagag

SEQ ID NO: 4866156 - DNA, 25 bp, Homo sapien
gaatgaagtatcctaagtagcaacc

SEQ ID NO: 4866157 - DNA, 25 bp, Homo sapien
gctatgatggaatctgcagtcgcag

SEQ ID NO: 4866158 - DNA, 25 bp, Homo sapien
cagatcggtgtgtgacacggaagac

SEQ ID NO: 4866159 - DNA, 25 bp, Homo sapien
agtagcaaccatggctgcgctgctg

SEQ ID NO: 4866160 - DNA, 25 bp, Homo sapien
gagatgctaccagcgtttcccagtc

SEQ ID NO: 4866161 - DNA, 25 bp, Homo sapien
gaagggagatgctaccagcgtttcc

SEQ ID NO: 4866162 - DNA, 25 bp, Homo sapien
agggagatgctaccagcgtttccca

SEQ ID NO: 4866163 - DNA, 25 bp, Homo sapien
cagaagggagatgctaccagcgttt

SEQ ID NO: 4866164 - DNA, 25 bp, Homo sapien
ctctctggtgcccacgtcacacacc

SEQ ID NO: 4866165 - DNA, 25 bp, Homo sapien
tggtgcccacgtcacacaccctcat

SEQ ID NO: 4866166 - DNA, 25 bp, Homo sapien
acacaccctcatgagcagcgtgcat

SEQ ID NO: 4866167 - DNA, 25 bp, Homo sapien
ccacgtcacacaccctcatgagcag

SEQ ID NO: 4866168 - DNA, 25 bp, Homo sapien
gaaaggtgacggcagagcaacccaa

SEQ ID NO: 4866169 - DNA, 25 bp, Homo sapien
tcttggtgtggttgtaaaaatcgcc

SEQ ID NO: 4866170 - DNA, 25 bp, Homo sapien
ccaagctgcataggggacaatctgt

SEQ ID NO: 4866171 - DNA, 25 bp, Homo sapien
tcgcctttgtcggctttaccttcta

SEQ ID NO: 4866172 - DNA, 25 bp, Homo sapien
gggatcccagacatctaaatgtgga

SEQ ID NO: 4866173 - DNA, 25 bp, Homo sapien
catgcaggggatcccagacatctaa

SEQ ID NO: 4866174 - DNA, 25 bp, Homo sapien
catctaaatgtggagttgtatcgag

SEQ ID NO: 4866175 - DNA, 25 bp, Homo sapien
tgtggagttgtatcgagtttaaagt

SEQ ID NO: 4866176 - DNA, 25 bp, Homo sapien
ctgaatatctgccgactaactccct

SEQ ID NO: 4866177 - DNA, 25 bp, Homo sapien
tgaatatctgccgactaactccctt

SEQ ID NO: 4866178 - DNA, 25 bp, Homo sapien
gggagccctgaggtcgcaggttgaa

SEQ ID NO: 4866179 - DNA, 25 bp, Homo sapien
ggagacagaggtgcatgtccccggt

SEQ ID NO: 4866180 - DNA, 25 bp, Homo sapien
caggttgaagctgtccatgtggtgg

SEQ ID NO: 4866181 - DNA, 25 bp, Homo sapien
cagaggtgcatgtccccggtggagg

SEQ ID NO: 4866182 - DNA, 25 bp, Homo sapien
gttcagggagcggcttccccttcac

SEQ ID NO: 4866183 - DNA, 25 bp, Homo sapien
cttccccttcacttgcagtgggaag

SEQ ID NO: 4866184 - DNA, 25 bp, Homo sapien
cttaaatactataggagcaaaagcg

SEQ ID NO: 4866185 - DNA, 25 bp, Homo sapien
tgcggatcttaaatactataggagc

SEQ ID NO: 4866186 - DNA, 25 bp, Homo sapien
gataaaaaagttgatgcggatctta

SEQ ID NO: 4866187 - DNA, 25 bp, Homo sapien
taaaaaagttgatgcggatcttaaa

SEQ ID NO: 4866188 - DNA, 25 bp, Homo sapien
tccaaccacccgaaggagaaggaga

SEQ ID NO: 4866189 - DNA, 25 bp, Homo sapien
cagactctggcttttgagcagggag

SEQ ID NO: 4866190 - DNA, 25 bp, Homo sapien
gctggcaggccatatggcagactct

SEQ ID NO: 4866191 - DNA, 25 bp, Homo sapien
ggagcagcaaaacccttgaggtaca

SEQ ID NO: 4866192 - DNA, 25 bp, Homo sapien
tgtctgccggctagggctcaaatct

SEQ ID NO: 4866193 - DNA, 25 bp, Homo sapien
gggacatacccccagggatctgcca

SEQ ID NO: 4866194 - DNA, 25 bp, Homo sapien
gacctgtgaccacagatgcaagagg

SEQ ID NO: 4866195 - DNA, 25 bp, Homo sapien
gactgggctctgcccgggacatacc

SEQ ID NO: 4866196 - DNA, 25 bp, Homo sapien
caaaaagcacttcttatggggtgca

SEQ ID NO: 4866197 - DNA, 25 bp, Homo sapien
ggtctggtccatgctgcatgtttgc

SEQ ID NO: 4866198 - DNA, 25 bp, Homo sapien
gagcctcaggtctagtgggtcacag

SEQ ID NO: 4866199 - DNA, 25 bp, Homo sapien
ggggacatacacagcaaactgagct

SEQ ID NO: 4866200 - DNA, 25 bp, Homo sapien
ttgttccactgccaaggtctagagg

SEQ ID NO: 4866201 - DNA, 25 bp, Homo sapien
caaatcctactgaaattcctggtag

SEQ ID NO: 4866202 - DNA, 25 bp, Homo sapien
ggtatctatgtttgtctctggcttg

SEQ ID NO: 4866203 - DNA, 25 bp, Homo sapien
ggtctagaggcctctacatctgggt

SEQ ID NO: 4866204 - DNA, 25 bp, Homo sapien
aaagggttgtggagaaaatcttcag

SEQ ID NO: 4866205 - DNA, 25 bp, Homo sapien
gttttgtgaggatgtggaaatatcc

SEQ ID NO: 4866206 - DNA, 25 bp, Homo sapien
agggttgtggagaaaatcttcagtc

SEQ ID NO: 4866207 - DNA, 25 bp, Homo sapien
tcagtccatccaaactacccttttc

SEQ ID NO: 4866208 - DNA, 25 bp, Homo sapien
atattttatacaagcctcaccctct

SEQ ID NO: 4866209 - DNA, 25 bp, Homo sapien
attttatacaagcctcaccctctcc

SEQ ID NO: 4866210 - DNA, 25 bp, Homo sapien
tattttatacaagcctcaccctctc

SEQ ID NO: 4866211 - DNA, 25 bp, Homo sapien
cattgctggtctcacattggatgtt

SEQ ID NO: 4866212 - DNA, 25 bp, Homo sapien
ggttatactgcataagctggccttc

SEQ ID NO: 4866213 - DNA, 25 bp, Homo sapien
ttcaaacccattgctggtctcacat

SEQ ID NO: 4866214 - DNA, 25 bp, Homo sapien
agtgctgggaaatggttatactgca

SEQ ID NO: 4866215 - DNA, 25 bp, Homo sapien
caacaggggtaggtgatcacaggct

SEQ ID NO: 4866216 - DNA, 25 bp, Homo sapien
gagtcccaccgtgtcagtaaggatg

SEQ ID NO: 4866217 - DNA, 25 bp, Homo sapien
tcccaccgtgtcagtaaggatgcgt

SEQ ID NO: 4866218 - DNA, 25 bp, Homo sapien
gggtaggtgatcacaggctgcagtg

SEQ ID NO: 4866219 - DNA, 25 bp, Homo sapien
gctggaagtctgaaaactacatttc

SEQ ID NO: 4866220 - DNA, 25 bp, Homo sapien
tctaagacatctactggcaagagat

SEQ ID NO: 4866221 - DNA, 25 bp, Homo sapien
ctgtcccagttaacaggagcaggaa

SEQ ID NO: 4866222 - DNA, 25 bp, Homo sapien
gaagtcactgtgagattctgctgtc

SEQ ID NO: 4866223 - DNA, 25 bp, Homo sapien
tgcacatcatcctcatgcagggccc

SEQ ID NO: 4866224 - DNA, 25 bp, Homo sapien
cacatcatcctcatgcagggcccat

SEQ ID NO: 4866225 - DNA, 25 bp, Homo sapien
acatcatcctcatgcagggcccatg

SEQ ID NO: 4866226 - DNA, 25 bp, Homo sapien
tttgcacatcatcctcatgcagggc

SEQ ID NO: 4866227 - DNA, 25 bp, Homo sapien
aacacctggccacactcatccctct

SEQ ID NO: 4866228 - DNA, 25 bp, Homo sapien
tcttctgcttcatgccagaacacct

SEQ ID NO: 4866229 - DNA, 25 bp, Homo sapien
tctgcttcatgccagaacacctggc

SEQ ID NO: 4866230 - DNA, 25 bp, Homo sapien
tgcttcatgccagaacacctggcca

SEQ ID NO: 4866231 - DNA, 25 bp, Homo sapien
ttgtctgatgatatctgggtcatgc

SEQ ID NO: 4866232 - DNA, 25 bp, Homo sapien
tgatactaacatagcacagttgttt

SEQ ID NO: 4866233 - DNA, 25 bp, Homo sapien
ttttgatgacctgaactcttagaaa

SEQ ID NO: 4866234 - DNA, 25 bp, Homo sapien
ggtgttagtgttgtagtcattctca

SEQ ID NO: 4866235 - DNA, 25 bp, Homo sapien
ccctatgtccctagattcttattaa

SEQ ID NO: 4866236 - DNA, 25 bp, Homo sapien
taactttggtcgctggtacctgata

SEQ ID NO: 4866237 - DNA, 25 bp, Homo sapien
ggctctcttggatcaatccctatgt

SEQ ID NO: 4866238 - DNA, 25 bp, Homo sapien
tttttgatggtttctcagactctct

SEQ ID NO: 4866239 - DNA, 25 bp, Homo sapien
tcaggcttatattggtgaaacttca

SEQ ID NO: 4866240 - DNA, 25 bp, Homo sapien
aatgtgtggaatggatcaaaattgc

SEQ ID NO: 4866241 - DNA, 25 bp, Homo sapien
tgagccctgataggattgtacattt

SEQ ID NO: 4866242 - DNA, 25 bp, Homo sapien
caatggtttcaaccccttcgtctct

SEQ ID NO: 4866243 - DNA, 25 bp, Homo sapien
tcccagaacgattgctgataaaact

SEQ ID NO: 4866244 - DNA, 25 bp, Homo sapien
cttcccagaacgattgctgataaaa

SEQ ID NO: 4866245 - DNA, 25 bp, Homo sapien
cacttcccagaacgattgctgataa

SEQ ID NO: 4866246 - DNA, 25 bp, Homo sapien
tcccacttcccagaacgattgctga

SEQ ID NO: 4866247 - DNA, 25 bp, Homo sapien
cctcatatggctcgagaggaacttc

SEQ ID NO: 4866248 - DNA, 25 bp, Homo sapien
tggctcgagaggaacttcagcacag

SEQ ID NO: 4866249 - DNA, 25 bp, Homo sapien
tatggctcgagaggaacttcagcac

SEQ ID NO: 4866250 - DNA, 25 bp, Homo sapien
catatggctcgagaggaacttcagc

SEQ ID NO: 4866251 - DNA, 25 bp, Homo sapien
tacaaataaatcatgcgggacccac

SEQ ID NO: 4866252 - DNA, 25 bp, Homo sapien
tagggacttgtgctcagattgtaag

SEQ ID NO: 4866253 - DNA, 25 bp, Homo sapien
aggctcttggaaaaggctccgcagg

SEQ ID NO: 4866254 - DNA, 25 bp, Homo sapien
catgtttctgaagctcgtttaggga

SEQ ID NO: 4866255 - DNA, 25 bp, Homo sapien
atgaggctgaagaggagtcgggctc

SEQ ID NO: 4866256 - DNA, 25 bp, Homo sapien
tgaggctgaagaggagtcgggctca

SEQ ID NO: 4866257 - DNA, 25 bp, Homo sapien
ctgaagaggagtcgggctcagccca

SEQ ID NO: 4866258 - DNA, 25 bp, Homo sapien
aggctgaagaggagtcgggctcagc

SEQ ID NO: 4866259 - DNA, 25 bp, Homo sapien
gaggccgcgtctcctagcatcatca

SEQ ID NO: 4866260 - DNA, 25 bp, Homo sapien
agcatcatcacacacccacaggttg

SEQ ID NO: 4866261 - DNA, 25 bp, Homo sapien
gttgttacaatttctgaacgtggag

SEQ ID NO: 4866262 - DNA, 25 bp, Homo sapien
gaagtagactgaccacgtcccaaaa

SEQ ID NO: 4866263 - DNA, 25 bp, Homo sapien
gggagttctgactcttctctggagt

SEQ ID NO: 4866264 - DNA, 25 bp, Homo sapien
tgtctgtcctagcaggtcaacagcg

SEQ ID NO: 4866265 - DNA, 25 bp, Homo sapien
cgatgactggatgtctggtagcctc

SEQ ID NO: 4866266 - DNA, 25 bp, Homo sapien
aaaatgcatagcaaaggcagccaca

SEQ ID NO: 4866267 - DNA, 25 bp, Homo sapien
atgcaaatgctgtcttgtaggaggt

SEQ ID NO: 4866268 - DNA, 25 bp, Homo sapien
caaatgctgtcttgtaggaggtctc

SEQ ID NO: 4866269 - DNA, 25 bp, Homo sapien
tgtcttgtaggaggtctcccagcat

SEQ ID NO: 4866270 - DNA, 25 bp, Homo sapien
atgctgtcttgtaggaggtctccca

SEQ ID NO: 4866271 - DNA, 25 bp, Homo sapien
ccagggagttgtgagcatcctggac

SEQ ID NO: 4866272 - DNA, 25 bp, Homo sapien
tcaccccagggagttgtgagcatcc

SEQ ID NO: 4866273 - DNA, 25 bp, Homo sapien
agttgtgagcatcctggactgtctt

SEQ ID NO: 4866274 - DNA, 25 bp, Homo sapien
gttgtgagcatcctggactgtcttc

SEQ ID NO: 4866275 - DNA, 25 bp, Homo sapien
aaaatgtttcagggccgggagcgat

SEQ ID NO: 4866276 - DNA, 25 bp, Homo sapien
catgccagacacgaacttcaagttc

SEQ ID NO: 4866277 - DNA, 25 bp, Homo sapien
ggcggggcctagagcacttcacatg

SEQ ID NO: 4866278 - DNA, 25 bp, Homo sapien
atgtttcacgaaccacatttgagcc

SEQ ID NO: 4866279 - DNA, 25 bp, Homo sapien
tgcctccggatgtagcctcttcatc

SEQ ID NO: 4866280 - DNA, 25 bp, Homo sapien
tctgcctccggatgtagcctcttca

SEQ ID NO: 4866281 - DNA, 25 bp, Homo sapien
ctgcctccggatgtagcctcttcat

SEQ ID NO: 4866282 - DNA, 25 bp, Homo sapien
gcctccggatgtagcctcttcatcc

SEQ ID NO: 4866283 - DNA, 25 bp, Homo sapien
gagcttctccctcttgctaatgttg

SEQ ID NO: 4866284 - DNA, 25 bp, Homo sapien
gggggcgacgctttcctcatttgga

SEQ ID NO: 4866285 - DNA, 25 bp, Homo sapien
cagaggatttgaagtggccacaccc

SEQ ID NO: 4866286 - DNA, 25 bp, Homo sapien
tttggactgcaggtgtccctggtgc

SEQ ID NO: 4866287 - DNA, 25 bp, Homo sapien
atcataatcctgattgatttcccca

SEQ ID NO: 4866288 - DNA, 25 bp, Homo sapien
atcccataatcataatcctgattga

SEQ ID NO: 4866289 - DNA, 25 bp, Homo sapien
atcctgattgatttccccatttggc

SEQ ID NO: 4866290 - DNA, 25 bp, Homo sapien
taatcataatcctgattgatttccc

SEQ ID NO: 4866291 - DNA, 25 bp, Homo sapien
cagattgactggaaaactgtcgtga

SEQ ID NO: 4866292 - DNA, 25 bp, Homo sapien
gctgggggctctttttagagcatcc

SEQ ID NO: 4866293 - DNA, 25 bp, Homo sapien
tgactggaaaactgtcgtgaacgct

SEQ ID NO: 4866294 - DNA, 25 bp, Homo sapien
ctggaaaactgtcgtgaacgctggg

SEQ ID NO: 4866295 - DNA, 25 bp, Homo sapien
cctcgccatgaatctttctcaaggg

SEQ ID NO: 4866296 - DNA, 25 bp, Homo sapien
tagcaagagttctattctcagttgg

SEQ ID NO: 4866297 - DNA, 25 bp, Homo sapien
ctggaaggtgtccttaaacagtcgg

SEQ ID NO: 4866298 - DNA, 25 bp, Homo sapien
tctcagttgggtaccaaatatgccc

SEQ ID NO: 4866299 - DNA, 25 bp, Homo sapien
caccacctgctacccggagaccctt

SEQ ID NO: 4866300 - DNA, 25 bp, Homo sapien
tgctacccggagacccttgaaagct

SEQ ID NO: 4866301 - DNA, 25 bp, Homo sapien
ctcccagagccttagcggagcctcc

SEQ ID NO: 4866302 - DNA, 25 bp, Homo sapien
agagccttagcggagcctccaccac

SEQ ID NO: 4866303 - DNA, 25 bp, Homo sapien
tgagaaagggctgagtgagccctta

SEQ ID NO: 4866304 - DNA, 25 bp, Homo sapien
gctggccggtcctgtaggctgtggt

SEQ ID NO: 4866305 - DNA, 25 bp, Homo sapien
gaatggctggccggtcctgtaggct

SEQ ID NO: 4866306 - DNA, 25 bp, Homo sapien
ctgtcagaatggctggccggtcctg

SEQ ID NO: 4866307 - DNA, 25 bp, Homo sapien
cggtcctgtaggctgtggtcccacg

SEQ ID NO: 4866308 - DNA, 25 bp, Homo sapien
cacaatgcatctggcacagagtgtc

SEQ ID NO: 4866309 - DNA, 25 bp, Homo sapien
tgtccttgtgagagagggagcccct

SEQ ID NO: 4866310 - DNA, 25 bp, Homo sapien
tcagcacgttcaggctctgagcttc

SEQ ID NO: 4866311 - DNA, 25 bp, Homo sapien
gagccccttgtgtcagcacgttcag

SEQ ID NO: 4866312 - DNA, 25 bp, Homo sapien
acaagtcttctgtgcaccatgggaa

SEQ ID NO: 4866313 - DNA, 25 bp, Homo sapien
actaccaccatggtcacactgtctc

SEQ ID NO: 4866314 - DNA, 25 bp, Homo sapien
tgtctccattatcccaaatcaggac

SEQ ID NO: 4866315 - DNA, 25 bp, Homo sapien
gggaaatcctgaggttagagcctgc

SEQ ID NO: 4866316 - DNA, 25 bp, Homo sapien
ggcgaggttcctgttctttagacaa

SEQ ID NO: 4866317 - DNA, 25 bp, Homo sapien
tgaggaaccagaatccagaataagg

SEQ ID NO: 4866318 - DNA, 25 bp, Homo sapien
gaataaggaataggagaaggtcgct

SEQ ID NO: 4866319 - DNA, 25 bp, Homo sapien
ctgaagggtcaggacagtgcattgc

SEQ ID NO: 4866320 - DNA, 25 bp, Homo sapien
tctggctttctagagctgcgtagcc

SEQ ID NO: 4866321 - DNA, 25 bp, Homo sapien
cagctggctgtacccacttccttgg

SEQ ID NO: 4866322 - DNA, 25 bp, Homo sapien
ttccttggctaccattgcttgcggc

SEQ ID NO: 4866323 - DNA, 25 bp, Homo sapien
cattgcttgcggctcagggaatttg

SEQ ID NO: 4866324 - DNA, 25 bp, Homo sapien
gccaagctgtgcacagggggtcctg

SEQ ID NO: 4866325 - DNA, 25 bp, Homo sapien
aaggctggccgggtctctccagccc

SEQ ID NO: 4866326 - DNA, 25 bp, Homo sapien
ggagatgaatgtcagggctcctcct

SEQ ID NO: 4866327 - DNA, 25 bp, Homo sapien
gtgctcttcacccacaccctggaga

SEQ ID NO: 4866328 - DNA, 25 bp, Homo sapien
aagaccacttctcgtcttcatctgt

SEQ ID NO: 4866329 - DNA, 25 bp, Homo sapien
acgtggaagaccacttctcgtcttc

SEQ ID NO: 4866330 - DNA, 25 bp, Homo sapien
gattcccccaaacataacatagttg

SEQ ID NO: 4866331 - DNA, 25 bp, Homo sapien
cataacatagttggactttccgttt

SEQ ID NO: 4866332 - DNA, 25 bp, Homo sapien
aaggcactgaagaaaggcggccctt

SEQ ID NO: 4866333 - DNA, 25 bp, Homo sapien
gaagaaggatatttgaagccgcaga

SEQ ID NO: 4866334 - DNA, 25 bp, Homo sapien
aagccgcagagtcttcccattgagc

SEQ ID NO: 4866335 - DNA, 25 bp, Homo sapien
ctggattgcgtaaaccccaggatgt

SEQ ID NO: 4866336 - DNA, 25 bp, Homo sapien
tgggtaggatgagtgtggagatgtc

SEQ ID NO: 4866337 - DNA, 25 bp, Homo sapien
gtctgtggcttgaacaggaacacta

SEQ ID NO: 4866338 - DNA, 25 bp, Homo sapien
tgtctgtggcttgaacaggaacact

SEQ ID NO: 4866339 - DNA, 25 bp, Homo sapien
agatgtctgtggcttgaacaggaac

SEQ ID NO: 4866340 - DNA, 25 bp, Homo sapien
agggctctgtgttccgagagctgga

SEQ ID NO: 4866341 - DNA, 25 bp, Homo sapien
ggtttatccaagagctggaggactt

SEQ ID NO: 4866342 - DNA, 25 bp, Homo sapien
ttatccaagagctggaggactttca

SEQ ID NO: 4866343 - DNA, 25 bp, Homo sapien
ctgtgttccgagagctggacttccc

SEQ ID NO: 4866344 - DNA, 25 bp, Homo sapien
catgcttgctgagattctgcctcat

SEQ ID NO: 4866345 - DNA, 25 bp, Homo sapien
tctgcctcattttaagccttggtaa

SEQ ID NO: 4866346 - DNA, 25 bp, Homo sapien
aaacacaaggttagagctttcagca

SEQ ID NO: 4866347 - DNA, 25 bp, Homo sapien
gcaaactcgccaaaacatgcttgct

SEQ ID NO: 4866348 - DNA, 25 bp, Homo sapien
tgaggcagatcccacagtcgttagg

SEQ ID NO: 4866349 - DNA, 25 bp, Homo sapien
aagaaagtctgaaagcctcgcctgg

SEQ ID NO: 4866350 - DNA, 25 bp, Homo sapien
cagagtacttcgagaacagcatgca

SEQ ID NO: 4866351 - DNA, 25 bp, Homo sapien
tcgttaggagctggatgagcacgtt

SEQ ID NO: 4866352 - DNA, 25 bp, Homo sapien
cttctgctcgggtggtaactgtgga

SEQ ID NO: 4866353 - DNA, 25 bp, Homo sapien
cttcgcaagggtagcatgagcaggt

SEQ ID NO: 4866354 - DNA, 25 bp, Homo sapien
ggcatgaatgggagcccaaggaaga

SEQ ID NO: 4866355 - DNA, 25 bp, Homo sapien
gaagctccttttagagctcccagaa

SEQ ID NO: 4866356 - DNA, 25 bp, Homo sapien
ccaaccacagaatccctcatttctt

SEQ ID NO: 4866357 - DNA, 25 bp, Homo sapien
cccaaccacagaatccctcatttct

SEQ ID NO: 4866358 - DNA, 25 bp, Homo sapien
tcttttcacttaccacagttgattc

SEQ ID NO: 4866359 - DNA, 25 bp, Homo sapien
gcccttgggtcagagcaaactttaa

SEQ ID NO: 4866360 - DNA, 25 bp, Homo sapien
gttaatgaggttgtgcatatttgca

SEQ ID NO: 4866361 - DNA, 25 bp, Homo sapien
catatttgcataaactttcaaggtg

SEQ ID NO: 4866362 - DNA, 25 bp, Homo sapien
tattctgggtgcagttctaatgccc

SEQ ID NO: 4866363 - DNA, 25 bp, Homo sapien
ctgggtgcagttctaatgcccagac

SEQ ID NO: 4866364 - DNA, 25 bp, Homo sapien
ctcctgtgttattctgggtgcagtt

SEQ ID NO: 4866365 - DNA, 25 bp, Homo sapien
ctgtgttattctgggtgcagttcta

SEQ ID NO: 4866366 - DNA, 25 bp, Homo sapien
tttagcctcatggtcaagatgagga

SEQ ID NO: 4866367 - DNA, 25 bp, Homo sapien
ctcttttccagagcgtgtcagagga

SEQ ID NO: 4866368 - DNA, 25 bp, Homo sapien
gacaggctgtcacgaaggcaggctt

SEQ ID NO: 4866369 - DNA, 25 bp, Homo sapien
gaggaatctcagagtggactgcagc

SEQ ID NO: 4866370 - DNA, 25 bp, Homo sapien
tgttagttgaacactgagccagcag

SEQ ID NO: 4866371 - DNA, 25 bp, Homo sapien
tggccacatcaacctgtggcactag

SEQ ID NO: 4866372 - DNA, 25 bp, Homo sapien
tgggaatggccacatcaacctgtgg

SEQ ID NO: 4866373 - DNA, 25 bp, Homo sapien
ctgccttggtcactatgttagttga

SEQ ID NO: 4866374 - DNA, 25 bp, Homo sapien
agcaaaggacaagttggagcccctt

SEQ ID NO: 4866375 - DNA, 25 bp, Homo sapien
aaggacaagttggagcccctttcag

SEQ ID NO: 4866376 - DNA, 25 bp, Homo sapien
aagcaaaggacaagttggagcccct

SEQ ID NO: 4866377 - DNA, 25 bp, Homo sapien
gaagcaaaggacaagttggagcccc

SEQ ID NO: 4866378 - DNA, 25 bp, Homo sapien
acatctctgtcgctccccctttaac

SEQ ID NO: 4866379 - DNA, 25 bp, Homo sapien
ccatagcatagaggagagtctcttg

SEQ ID NO: 4866380 - DNA, 25 bp, Homo sapien
gtgactcttctcaaagacttcttcc

SEQ ID NO: 4866381 - DNA, 25 bp, Homo sapien
catttcagcaatggagcctgggtga

SEQ ID NO: 4866382 - DNA, 25 bp, Homo sapien
ctgccatcccttggggtgtcagtgt

SEQ ID NO: 4866383 - DNA, 25 bp, Homo sapien
aggaagaacctaaatgaactccagg

SEQ ID NO: 4866384 - DNA, 25 bp, Homo sapien
tgccacactgccatcccttggggtg

SEQ ID NO: 4866385 - DNA, 25 bp, Homo sapien
gaagagcccaggtaaacaagggctg

SEQ ID NO: 4866386 - DNA, 25 bp, Homo sapien
ctgggggcacatccaagtctccaac

SEQ ID NO: 4866387 - DNA, 25 bp, Homo sapien
gacagaggtggctatagccttctgg

SEQ ID NO: 4866388 - DNA, 25 bp, Homo sapien
gcttgggcccccatatctgctcttt

SEQ ID NO: 4866389 - DNA, 25 bp, Homo sapien
ggaccaggatagctccatctacaag

SEQ ID NO: 4866390 - DNA, 25 bp, Homo sapien
gggccagatttgagaagctttgact

SEQ ID NO: 4866391 - DNA, 25 bp, Homo sapien
gcttgggggagttggaatctattct

SEQ ID NO: 4866392 - DNA, 25 bp, Homo sapien
cacaccaagggatgggagacacatt

SEQ ID NO: 4866393 - DNA, 25 bp, Homo sapien
cacattggggtagtccagtggggcc

SEQ ID NO: 4866394 - DNA, 25 bp, Homo sapien
ccatgatgggctccccacaagcatg

SEQ ID NO: 4866395 - DNA, 25 bp, Homo sapien
catgctgacgcacggtttggaaact

SEQ ID NO: 4866396 - DNA, 25 bp, Homo sapien
gaatgtttactaaacgccctgtcac

SEQ ID NO: 4866397 - DNA, 25 bp, Homo sapien
cctgtcacttccacttctactgata

SEQ ID NO: 4866398 - DNA, 25 bp, Homo sapien
ttaagctcccttggttgaatgttta

SEQ ID NO: 4866399 - DNA, 25 bp, Homo sapien
aaatgctgtgcgctgtgatgctgcc

SEQ ID NO: 4866400 - DNA, 25 bp, Homo sapien
taagtgtgacactgccagaatgggt

SEQ ID NO: 4866401 - DNA, 25 bp, Homo sapien
ccttctagagcaaagaagggccagc

SEQ ID NO: 4866402 - DNA, 25 bp, Homo sapien
cacattctcgtcactctggtcatca

SEQ ID NO: 4866403 - DNA, 25 bp, Homo sapien
aagactgggttgcaatcccattggt

SEQ ID NO: 4866404 - DNA, 25 bp, Homo sapien
tagcattgctggaacggtttgtcat

SEQ ID NO: 4866405 - DNA, 25 bp, Homo sapien
ggttgcaatcccattggtagcattg

SEQ ID NO: 4866406 - DNA, 25 bp, Homo sapien
caatcccattggtagcattgctgga

SEQ ID NO: 4866407 - DNA, 25 bp, Homo sapien
tgtacttgggtcgtttcttcctcca

SEQ ID NO: 4866408 - DNA, 25 bp, Homo sapien
catctagccagagggagttccctgg

SEQ ID NO: 4866409 - DNA, 25 bp, Homo sapien
agttccctggggatgtgtctcatcc

SEQ ID NO: 4866410 - DNA, 25 bp, Homo sapien
tcatctagccagagggagttccctg

SEQ ID NO: 4866411 - DNA, 25 bp, Homo sapien
gggatgtgtctcatccaccctagac

SEQ ID NO: 4866412 - DNA, 25 bp, Homo sapien
agaaagtccttccataagcggagat

SEQ ID NO: 4866413 - DNA, 25 bp, Homo sapien
ctcccctgagtggatgttttgagtt

SEQ ID NO: 4866414 - DNA, 25 bp, Homo sapien
tgttttgagtttggagagttatggc

SEQ ID NO: 4866415 - DNA, 25 bp, Homo sapien
taagcggagatttatctcccctgag

SEQ ID NO: 4866416 - DNA, 25 bp, Homo sapien
cttgggacaactggcagcgggctct

SEQ ID NO: 4866417 - DNA, 25 bp, Homo sapien
acaactggcagcgggctctgacacc

SEQ ID NO: 4866418 - DNA, 25 bp, Homo sapien
tgggacaactggcagcgggctctga

SEQ ID NO: 4866419 - DNA, 25 bp, Homo sapien
ggacaactggcagcgggctctgaca

SEQ ID NO: 4866420 - DNA, 25 bp, Homo sapien
actgagctatcttccatctgtcggg

SEQ ID NO: 4866421 - DNA, 25 bp, Homo sapien
acagcactgagctatcttccatctg

SEQ ID NO: 4866422 - DNA, 25 bp, Homo sapien
acaaaagccgtttcccttcacacag

SEQ ID NO: 4866423 - DNA, 25 bp, Homo sapien
ttcacacagcactgagctatcttcc

SEQ ID NO: 4866424 - DNA, 25 bp, Homo sapien
tggggaccctctcgcaggcagcgct

SEQ ID NO: 4866425 - DNA, 25 bp, Homo sapien
cttggcacaggactcgggttctgag

SEQ ID NO: 4866426 - DNA, 25 bp, Homo sapien
ctgaggagtgacacagcaggagttc

SEQ ID NO: 4866427 - DNA, 25 bp, Homo sapien
gctgcacatagggaacctgtcccgg

SEQ ID NO: 4866428 - DNA, 25 bp, Homo sapien
tcttgtgcctcccaggactttggct

SEQ ID NO: 4866429 - DNA, 25 bp, Homo sapien
tttcttgtgcctcccaggactttgg

SEQ ID NO: 4866430 - DNA, 25 bp, Homo sapien
ttgtgcctcccaggactttggctgc

SEQ ID NO: 4866431 - DNA, 25 bp, Homo sapien
cttgtgcctcccaggactttggctg

SEQ ID NO: 4866432 - DNA, 25 bp, Homo sapien
cctgagactgaacctatagcagggc

SEQ ID NO: 4866433 - DNA, 25 bp, Homo sapien
gtcctgagactgaacctatagcagg

SEQ ID NO: 4866434 - DNA, 25 bp, Homo sapien
actgaacctatagcagggccagaga

SEQ ID NO: 4866435 - DNA, 25 bp, Homo sapien
gagactgaacctatagcagggccag

SEQ ID NO: 4866436 - DNA, 25 bp, Homo sapien
ctgagttggagaagacaggcctttt

SEQ ID NO: 4866437 - DNA, 25 bp, Homo sapien
tgagttggagaagacaggccttttc

SEQ ID NO: 4866438 - DNA, 25 bp, Homo sapien
gagttggagaagacaggccttttcc

SEQ ID NO: 4866439 - DNA, 25 bp, Homo sapien
tatgtcctggtacgtttggctccct

SEQ ID NO: 4866440 - DNA, 25 bp, Homo sapien
ctttcgaaccctagaatgagcttca

SEQ ID NO: 4866441 - DNA, 25 bp, Homo sapien
ttcgaaccctagaatgagcttcact

SEQ ID NO: 4866442 - DNA, 25 bp, Homo sapien
aagctggtatgtcctggtacgtttg

SEQ ID NO: 4866443 - DNA, 25 bp, Homo sapien
tccccacttgccaaccactgccacg

SEQ ID NO: 4866444 - DNA, 25 bp, Homo sapien
ggctgccgccttattttcagatgcc

SEQ ID NO: 4866445 - DNA, 25 bp, Homo sapien
cactgccacgcagaaactccctgca

SEQ ID NO: 4866446 - DNA, 25 bp, Homo sapien
gctgccgccttattttcagatgcct

SEQ ID NO: 4866447 - DNA, 25 bp, Homo sapien
tccggtgaaccacatgtatctttct

SEQ ID NO: 4866448 - DNA, 25 bp, Homo sapien
tcaccctttccggtgaaccacatgt

SEQ ID NO: 4866449 - DNA, 25 bp, Homo sapien
cttgcaaatggtaactgggtgtggg

SEQ ID NO: 4866450 - DNA, 25 bp, Homo sapien
cctttccggtgaaccacatgtatct

SEQ ID NO: 4866451 - DNA, 25 bp, Homo sapien
aacacttggctcttggtacctgtgg

SEQ ID NO: 4866452 - DNA, 25 bp, Homo sapien
gcctgcagggaataacatactggcc

SEQ ID NO: 4866453 - DNA, 25 bp, Homo sapien
cctgtgggttagcatcaagttctcc

SEQ ID NO: 4866454 - DNA, 25 bp, Homo sapien
tcataacttcatagatgcaggaggc

SEQ ID NO: 4866455 - DNA, 25 bp, Homo sapien
gcacagagctgcactatcacgagcc

SEQ ID NO: 4866456 - DNA, 25 bp, Homo sapien
ggttttagacccatagcagctttgt

SEQ ID NO: 4866457 - DNA, 25 bp, Homo sapien
gtcccaggaccttgagtgtcattag

SEQ ID NO: 4866458 - DNA, 25 bp, Homo sapien
ctatcacgagcctttgtttttctcc

SEQ ID NO: 4866459 - DNA, 25 bp, Homo sapien
ctggaacattagtagttaccacaga

SEQ ID NO: 4866460 - DNA, 25 bp, Homo sapien
cacagaatacggaagagcaggtgac

SEQ ID NO: 4866461 - DNA, 25 bp, Homo sapien
ctgcggcagagtccttagtggaggg

SEQ ID NO: 4866462 - DNA, 25 bp, Homo sapien
gctgtgcagctctctaaatgggaat

SEQ ID NO: 4866463 - DNA, 25 bp, Homo sapien
tgcagtgaggctgtaaagtggcccc

SEQ ID NO: 4866464 - DNA, 25 bp, Homo sapien
acatttatgattgtccctctgggcc

SEQ ID NO: 4866465 - DNA, 25 bp, Homo sapien
gaaaatcagcatgcccgcctagtta

SEQ ID NO: 4866466 - DNA, 25 bp, Homo sapien
ggccaatgcttatacccagtgagga

SEQ ID NO: 4866467 - DNA, 25 bp, Homo sapien
aaaggtgtgctagaacaaggtctcc

SEQ ID NO: 4866468 - DNA, 25 bp, Homo sapien
aagtcacgttgttttcaggtccaga

SEQ ID NO: 4866469 - DNA, 25 bp, Homo sapien
gaagagtccgtggttgccctagaac

SEQ ID NO: 4866470 - DNA, 25 bp, Homo sapien
ccagcaaattgctagtcagggtgaa

SEQ ID NO: 4866471 - DNA, 25 bp, Homo sapien
taaagcaagggccatttagattagg

SEQ ID NO: 4866472 - DNA, 25 bp, Homo sapien
gtaaagcaagggccatttagattag

SEQ ID NO: 4866473 - DNA, 25 bp, Homo sapien
aaagcaagggccatttagattagga

SEQ ID NO: 4866474 - DNA, 25 bp, Homo sapien
ttagtctaacctaatgaagcctacc

SEQ ID NO: 4866475 - DNA, 25 bp, Homo sapien
tctaacctaatgaagcctacctcct

SEQ ID NO: 4866476 - DNA, 25 bp, Homo sapien
taacctaatgaagcctacctcctct

SEQ ID NO: 4866477 - DNA, 25 bp, Homo sapien
tagtctaacctaatgaagcctacct

SEQ ID NO: 4866478 - DNA, 25 bp, Homo sapien
ggccggtttccataatagccactgt

SEQ ID NO: 4866479 - DNA, 25 bp, Homo sapien
acagtgtggccggtttccataatag

SEQ ID NO: 4866480 - DNA, 25 bp, Homo sapien
gtgtggccggtttccataatagcca

SEQ ID NO: 4866481 - DNA, 25 bp, Homo sapien
ttcccacagtgtggccggtttccat

SEQ ID NO: 4866482 - DNA, 25 bp, Homo sapien
ccatcacagagccaccagagcactg

SEQ ID NO: 4866483 - DNA, 25 bp, Homo sapien
tgggtatttgcagcccagcatctcc

SEQ ID NO: 4866484 - DNA, 25 bp, Homo sapien
ggtccctgctgacgctctcagccat

SEQ ID NO: 4866485 - DNA, 25 bp, Homo sapien
ccatgctggaggtccgtgggtattt

SEQ ID NO: 4866486 - DNA, 25 bp, Homo sapien
ctgtggggcgtagggaagagtgagt

SEQ ID NO: 4866487 - DNA, 25 bp, Homo sapien
gggcgtagggaagagtgagtgtctg

SEQ ID NO: 4866488 - DNA, 25 bp, Homo sapien
tggggcgtagggaagagtgagtgtc

SEQ ID NO: 4866489 - DNA, 25 bp, Homo sapien
gcgtagggaagagtgagtgtctgac

SEQ ID NO: 4866490 - DNA, 25 bp, Homo sapien
ggcttggcctccacttactcttgcg

SEQ ID NO: 4866491 - DNA, 25 bp, Homo sapien
gggactgagtgtcgggctggcttgg

SEQ ID NO: 4866492 - DNA, 25 bp, Homo sapien
acaggccaccaggtcggaagcggag

SEQ ID NO: 4866493 - DNA, 25 bp, Homo sapien
tccattgtggaaaaccaggcagcac

SEQ ID NO: 4866494 - DNA, 25 bp, Homo sapien
agcatttcctgagttggaagggttg

SEQ ID NO: 4866495 - DNA, 25 bp, Homo sapien
gggctcagcatttcctgagttggaa

SEQ ID NO: 4866496 - DNA, 25 bp, Homo sapien
agccctgctgttgtatctgactgtg

SEQ ID NO: 4866497 - DNA, 25 bp, Homo sapien
cctgctgttgtatctgactgtggtc

SEQ ID NO: 4866498 - DNA, 25 bp, Homo sapien
gatgccacgcttggggcactcactg

SEQ ID NO: 4866499 - DNA, 25 bp, Homo sapien
acaggactctttttcagcccttcag

SEQ ID NO: 4866500 - DNA, 25 bp, Homo sapien
agttggctgtgttggtgggtgaacc

SEQ ID NO: 4866501 - DNA, 25 bp, Homo sapien
ggtgaaccttccttctggtggagat

SEQ ID NO: 4866502 - DNA, 25 bp, Homo sapien
tcttgggctgatccccgcatttgca

SEQ ID NO: 4866503 - DNA, 25 bp, Homo sapien
gaagagaagtcgctatgtgcctgag

SEQ ID NO: 4866504 - DNA, 25 bp, Homo sapien
cctgaatgtgtctctgagctgctgc

SEQ ID NO: 4866505 - DNA, 25 bp, Homo sapien
ttggagggcgtaggaccactgcaaa

SEQ ID NO: 4866506 - DNA, 25 bp, Homo sapien
ctgcgtgtgcagagcgggagccaga

SEQ ID NO: 4866507 - DNA, 25 bp, Homo sapien
tcagtgcccccgggacacctgtgtt

SEQ ID NO: 4866508 - DNA, 25 bp, Homo sapien
atctgctgcggtcagtgcccccggg

SEQ ID NO: 4866509 - DNA, 25 bp, Homo sapien
ggggccatctgctgcggtcagtgcc

SEQ ID NO: 4866510 - DNA, 25 bp, Homo sapien
tgctgcggtcagtgcccccgggaca

SEQ ID NO: 4866511 - DNA, 25 bp, Homo sapien
gctggtctccaaggaaatggtcaag

SEQ ID NO: 4866512 - DNA, 25 bp, Homo sapien
gccacgggagcatacagaagggagc

SEQ ID NO: 4866513 - DNA, 25 bp, Homo sapien
cctccatggagctggtaggcatttg

SEQ ID NO: 4866514 - DNA, 25 bp, Homo sapien
cagagatgcccgtgatagagaagag

SEQ ID NO: 4866515 - DNA, 25 bp, Homo sapien
taatttcatgttagtgtcagagacc

SEQ ID NO: 4866516 - DNA, 25 bp, Homo sapien
tccgcgctggtgagtgtccagaaaa

SEQ ID NO: 4866517 - DNA, 25 bp, Homo sapien
tcaaggctgactgcgtggtgtgtgt

SEQ ID NO: 4866518 - DNA, 25 bp, Homo sapien
tagtgtcagagacccagtcaaggct

SEQ ID NO: 4866519 - DNA, 25 bp, Homo sapien
ttctccaaggtgcctctgtccgtgc

SEQ ID NO: 4866520 - DNA, 25 bp, Homo sapien
tctccaaggtgcctctgtccgtgct

SEQ ID NO: 4866521 - DNA, 25 bp, Homo sapien
ctgcagtgagcctcgggctggccac

SEQ ID NO: 4866522 - DNA, 25 bp, Homo sapien
tggccacgtaggagctggtgagttt

SEQ ID NO: 4866523 - DNA, 25 bp, Homo sapien
tgagggtgtctgtattggggtgccc

SEQ ID NO: 4866524 - DNA, 25 bp, Homo sapien
gaagccctgcagtgagcctcgggct

SEQ ID NO: 4866525 - DNA, 25 bp, Homo sapien
ggaatgaatggcccatgtgtttcag

SEQ ID NO: 4866526 - DNA, 25 bp, Homo sapien
gccatgggcctgagtcagatatgac

SEQ ID NO: 4866527 - DNA, 25 bp, Homo sapien
gagtcagatatgacacccagggagt

SEQ ID NO: 4866528 - DNA, 25 bp, Homo sapien
ggcctgagtcagatatgacacccag

SEQ ID NO: 4866529 - DNA, 25 bp, Homo sapien
agaagatgaggatctaactgtcagg

SEQ ID NO: 4866530 - DNA, 25 bp, Homo sapien
gcctggagaaattcagggaactttc

SEQ ID NO: 4866531 - DNA, 25 bp, Homo sapien
gaaattcagggaactttcctagaga

SEQ ID NO: 4866532 - DNA, 25 bp, Homo sapien
cttcggtggggcctggagaaattca

SEQ ID NO: 4866533 - DNA, 25 bp, Homo sapien
cgaactcacgtgttatccttgcatg

SEQ ID NO: 4866534 - DNA, 25 bp, Homo sapien
gaacacttcacgaactcacgtgtta

SEQ ID NO: 4866535 - DNA, 25 bp, Homo sapien
tacggaacacttcacgaactcacgt

SEQ ID NO: 4866536 - DNA, 25 bp, Homo sapien
tcacgaactcacgtgttatccttgc

SEQ ID NO: 4866537 - DNA, 25 bp, Homo sapien
caaagtcaccgcatcgaacatggcg

SEQ ID NO: 4866538 - DNA, 25 bp, Homo sapien
tctctgtgagctccgggaacaaggg

SEQ ID NO: 4866539 - DNA, 25 bp, Homo sapien
gagaaacgtgtttcctagctcagct

SEQ ID NO: 4866540 - DNA, 25 bp, Homo sapien
caaactttgcattaagtggccctga

SEQ ID NO: 4866541 - DNA, 25 bp, Homo sapien
aagtcactctccatcgaaagagaat

SEQ ID NO: 4866542 - DNA, 25 bp, Homo sapien
ccgcgaggcaaagaaaaatggacat

SEQ ID NO: 4866543 - DNA, 25 bp, Homo sapien
gggtcctcatcaggttccgcgaggc

SEQ ID NO: 4866544 - DNA, 25 bp, Homo sapien
gaattctgaaccagcactcgcagct

SEQ ID NO: 4866545 - DNA, 25 bp, Homo sapien
tctactggcccgagatgcttaagtg

SEQ ID NO: 4866546 - DNA, 25 bp, Homo sapien
cacaacgtgggctacaagaagatgg

SEQ ID NO: 4866547 - DNA, 25 bp, Homo sapien
gcttaagtgtgacaagttccccgag

SEQ ID NO: 4866548 - DNA, 25 bp, Homo sapien
tacgtgagcttccagtcggacatcg

SEQ ID NO: 4866549 - DNA, 25 bp, Homo sapien
ggagccacctgctcggtgcaagccc

SEQ ID NO: 4866550 - DNA, 25 bp, Homo sapien
aatcggatgtggcatctgtccacag

SEQ ID NO: 4866551 - DNA, 25 bp, Homo sapien
gggagagaggagtgaatcggatgtg

SEQ ID NO: 4866552 - DNA, 25 bp, Homo sapien
acctgctcggtgcaagccctgggga

SEQ ID NO: 4866553 - DNA, 25 bp, Homo sapien
tgacatgcgtggctcacgtttttgt

SEQ ID NO: 4866554 - DNA, 25 bp, Homo sapien
ttgtacagtctctggtggaggtcca

SEQ ID NO: 4866555 - DNA, 25 bp, Homo sapien
catcttcttgtagcggtcacgggtc

SEQ ID NO: 4866556 - DNA, 25 bp, Homo sapien
aatgaatggacaatcagatgttgct

SEQ ID NO: 4866557 - DNA, 25 bp, Homo sapien
cccagaactccttgaaaaacttctg

SEQ ID NO: 4866558 - DNA, 25 bp, Homo sapien
ccagaactccttgaaaaacttctgt

SEQ ID NO: 4866559 - DNA, 25 bp, Homo sapien
ttgaaacttgctgaaagttatcctt

SEQ ID NO: 4866560 - DNA, 25 bp, Homo sapien
tgaaacttgctgaaagttatccttg

SEQ ID NO: 4866561 - DNA, 25 bp, Homo sapien
ggaaggagattccactggcaattgt

SEQ ID NO: 4866562 - DNA, 25 bp, Homo sapien
aaggagattccactggcaattgtct

SEQ ID NO: 4866563 - DNA, 25 bp, Homo sapien
gaaggagattccactggcaattgtc

SEQ ID NO: 4866564 - DNA, 25 bp, Homo sapien
ggtgcctctgctcttagcaccagtg

SEQ ID NO: 4866565 - DNA, 25 bp, Homo sapien
cagattggggatttaggatcttcac

SEQ ID NO: 4866566 - DNA, 25 bp, Homo sapien
atggcttggtgcctctgctcttagc

SEQ ID NO: 4866567 - DNA, 25 bp, Homo sapien
ttaggatcttcactataaaccccat

SEQ ID NO: 4866568 - DNA, 25 bp, Homo sapien
ctttagcctcatgcgtgatcgggcc

SEQ ID NO: 4866569 - DNA, 25 bp, Homo sapien
ctcatgcgtgatcgggcctgggcac

SEQ ID NO: 4866570 - DNA, 25 bp, Homo sapien
cgtctttagcctcatgcgtgatcgg

SEQ ID NO: 4866571 - DNA, 25 bp, Homo sapien
tagcctcatgcgtgatcgggcctgg

SEQ ID NO: 4866572 - DNA, 25 bp, Homo sapien
caaggttgacttttgccatgtggtt

SEQ ID NO: 4866573 - DNA, 25 bp, Homo sapien
tgtgcacaggcttagacacgatgtg

SEQ ID NO: 4866574 - DNA, 25 bp, Homo sapien
gcagcattgtttgggcaaggttgac

SEQ ID NO: 4866575 - DNA, 25 bp, Homo sapien
tgtgtactcacggttcatagctgct

SEQ ID NO: 4866576 - DNA, 25 bp, Homo sapien
tccgaatagctgtggcaagcgtcag

SEQ ID NO: 4866577 - DNA, 25 bp, Homo sapien
ccccactccgaatagctgtggcaag

SEQ ID NO: 4866578 - DNA, 25 bp, Homo sapien
ggaagacccccactccgaatagctg

SEQ ID NO: 4866579 - DNA, 25 bp, Homo sapien
tagctgtggcaagcgtcagctccat

SEQ ID NO: 4866580 - DNA, 25 bp, Homo sapien
tgcagaccggcagagggcgctccgg

SEQ ID NO: 4866581 - DNA, 25 bp, Homo sapien
ccgggcagtcggcaaacagtccagg

SEQ ID NO: 4866582 - DNA, 25 bp, Homo sapien
ccacttcttccgtgtggtgtgggaa

SEQ ID NO: 4866583 - DNA, 25 bp, Homo sapien
gcgctccgggcagtcggcaaacagt

SEQ ID NO: 4866584 - DNA, 25 bp, Homo sapien
ggctcggtcatctctgggcatgtct

SEQ ID NO: 4866585 - DNA, 25 bp, Homo sapien
tcaggtatgagaatcgtcctggggc

SEQ ID NO: 4866586 - DNA, 25 bp, Homo sapien
tatgagaatcgtcctggggctcggt

SEQ ID NO: 4866587 - DNA, 25 bp, Homo sapien
tgagaatcgtcctggggctcggtca

SEQ ID NO: 4866588 - DNA, 25 bp, Homo sapien
acaccctctttacttgggcaccaag

SEQ ID NO: 4866589 - DNA, 25 bp, Homo sapien
gaaagccaagtctgagccaaccaac

SEQ ID NO: 4866590 - DNA, 25 bp, Homo sapien
ccaaccaaccaaggtgaagtgggag

SEQ ID NO: 4866591 - DNA, 25 bp, Homo sapien
ggagcatgttgggtgttgacaccct

SEQ ID NO: 4866592 - DNA, 25 bp, Homo sapien
tagcccagacttgagcactatgtgc

SEQ ID NO: 4866593 - DNA, 25 bp, Homo sapien
ctctgcaggtggcatattagcccag

SEQ ID NO: 4866594 - DNA, 25 bp, Homo sapien
tatctaagtgtggaaggtgcacaca

SEQ ID NO: 4866595 - DNA, 25 bp, Homo sapien
tgctggttttcaggtagtagaggta

SEQ ID NO: 4866596 - DNA, 25 bp, Homo sapien
tcctctgatcttctattaaatggca

SEQ ID NO: 4866597 - DNA, 25 bp, Homo sapien
aaactgctagtttgaaatggccacg

SEQ ID NO: 4866598 - DNA, 25 bp, Homo sapien
ttctgtgcccttttgcgtaaactgc

SEQ ID NO: 4866599 - DNA, 25 bp, Homo sapien
tctctctcagtctaatatgttcctc

SEQ ID NO: 4866600 - DNA, 25 bp, Homo sapien
caaattcttcattgggcctccaggg

SEQ ID NO: 4866601 - DNA, 25 bp, Homo sapien
atcaaattcttcattgggcctccag

SEQ ID NO: 4866602 - DNA, 25 bp, Homo sapien
gctttgagttccacgaggtcccatg

SEQ ID NO: 4866603 - DNA, 25 bp, Homo sapien
ccatggttccaggaagactctggca

SEQ ID NO: 4866604 - DNA, 25 bp, Homo sapien
tacatcacgcattgtttttactctt

SEQ ID NO: 4866605 - DNA, 25 bp, Homo sapien
actaagtagcaagcggtaactgctc

SEQ ID NO: 4866606 - DNA, 25 bp, Homo sapien
ctgagccacactaagtagcaagcgg

SEQ ID NO: 4866607 - DNA, 25 bp, Homo sapien
gagccacactaagtagcaagcggta

SEQ ID NO: 4866608 - DNA, 25 bp, Homo sapien
cacactaagtagcaagcggtaactg

SEQ ID NO: 4866609 - DNA, 25 bp, Homo sapien
tgggacggaagccttccctgagccc

SEQ ID NO: 4866610 - DNA, 25 bp, Homo sapien
ggacggaagccttccctgagcccag

SEQ ID NO: 4866611 - DNA, 25 bp, Homo sapien
gacggaagccttccctgagcccagc

SEQ ID NO: 4866612 - DNA, 25 bp, Homo sapien
ctgggacggaagccttccctgagcc

SEQ ID NO: 4866613 - DNA, 25 bp, Homo sapien
tctgttctgccctgatccaaggaga

SEQ ID NO: 4866614 - DNA, 25 bp, Homo sapien
ggtgtcagccctttcgtctttctgg

SEQ ID NO: 4866615 - DNA, 25 bp, Homo sapien
tcgtctgtggtggacctcctggtgt

SEQ ID NO: 4866616 - DNA, 25 bp, Homo sapien
gcccatgtgaactccacagcgatgg

SEQ ID NO: 4866617 - DNA, 25 bp, Homo sapien
caggggctcatcttttgtgctgatc

SEQ ID NO: 4866618 - DNA, 25 bp, Homo sapien
aggggctcatcttttgtgctgatct

SEQ ID NO: 4866619 - DNA, 25 bp, Homo sapien
tgatcttcagtgcctgcctacccag

SEQ ID NO: 4866620 - DNA, 25 bp, Homo sapien
gggctcatcttttgtgctgatcttc

SEQ ID NO: 4866621 - DNA, 25 bp, Homo sapien
caaggttgatactgcaatgtggctt

SEQ ID NO: 4866622 - DNA, 25 bp, Homo sapien
ttctcaaggttgatactgcaatgtg

SEQ ID NO: 4866623 - DNA, 25 bp, Homo sapien
aaattctcaaggttgatactgcaat

SEQ ID NO: 4866624 - DNA, 25 bp, Homo sapien
aggttgatactgcaatgtggcttct

SEQ ID NO: 4866625 - DNA, 25 bp, Homo sapien
tctctctttatacccagcacgtact

SEQ ID NO: 4866626 - DNA, 25 bp, Homo sapien
gtccttcatgaatgtctgatgaatg

SEQ ID NO: 4866627 - DNA, 25 bp, Homo sapien
gaatgaataagcacatgcacgtgta

SEQ ID NO: 4866628 - DNA, 25 bp, Homo sapien
cgtgtacaccgtgaatgtttttgtg

SEQ ID NO: 4866629 - DNA, 25 bp, Homo sapien
ttctgcaggggacaagttgaaacca

SEQ ID NO: 4866630 - DNA, 25 bp, Homo sapien
agttgcaatagggagttgctcctta

SEQ ID NO: 4866631 - DNA, 25 bp, Homo sapien
gcaatagggagttgctccttaggaa

SEQ ID NO: 4866632 - DNA, 25 bp, Homo sapien
aatagggagttgctccttaggaagg

SEQ ID NO: 4866633 - DNA, 25 bp, Homo sapien
gactgtatattgcttggcttgcaca

SEQ ID NO: 4866634 - DNA, 25 bp, Homo sapien
cgtcccatccgggagagactgtata

SEQ ID NO: 4866635 - DNA, 25 bp, Homo sapien
ggtttgtcagtgtctcagcgccgtc

SEQ ID NO: 4866636 - DNA, 25 bp, Homo sapien
tccaatttgggtcaagagggagaag

SEQ ID NO: 4866637 - DNA, 25 bp, Homo sapien
ctcgaggccccacagcttggggcat

SEQ ID NO: 4866638 - DNA, 25 bp, Homo sapien
agctcgaggccccacagcttggggc

SEQ ID NO: 4866639 - DNA, 25 bp, Homo sapien
gctcgaggccccacagcttggggca

SEQ ID NO: 4866640 - DNA, 25 bp, Homo sapien
ggcggatccctcatgtatgtatggc

SEQ ID NO: 4866641 - DNA, 25 bp, Homo sapien
ttcccttggtggagtgagtactcgc

SEQ ID NO: 4866642 - DNA, 25 bp, Homo sapien
ctcatgtatgtatggcttggtgcca

SEQ ID NO: 4866643 - DNA, 25 bp, Homo sapien
tggagtgagtactcgctctattagt

SEQ ID NO: 4866644 - DNA, 25 bp, Homo sapien
cttccatgaacctcgaatccagatt

SEQ ID NO: 4866645 - DNA, 25 bp, Homo sapien
tccatgaacctcgaatccagattca

SEQ ID NO: 4866646 - DNA, 25 bp, Homo sapien
atgaacctcgaatccagattcaggc

SEQ ID NO: 4866647 - DNA, 25 bp, Homo sapien
catgaacctcgaatccagattcagg

SEQ ID NO: 4866648 - DNA, 25 bp, Homo sapien
tcgggttcagcgtcagtctctgctg

SEQ ID NO: 4866649 - DNA, 25 bp, Homo sapien
ggtccaggtgagagctcgggttcag

SEQ ID NO: 4866650 - DNA, 25 bp, Homo sapien
ggcaaggttgtcaaggcagagtttc

SEQ ID NO: 4866651 - DNA, 25 bp, Homo sapien
gaactgggatgacccactggcaagg

SEQ ID NO: 4866652 - DNA, 25 bp, Homo sapien
taagagccagctcagagccaatcac

SEQ ID NO: 4866653 - DNA, 25 bp, Homo sapien
atctgctatgctgggtaagagccag

SEQ ID NO: 4866654 - DNA, 25 bp, Homo sapien
tcagagccaatcactgcgggaagac

SEQ ID NO: 4866655 - DNA, 25 bp, Homo sapien
cctactccagggatatgggctagag

SEQ ID NO: 4866656 - DNA, 25 bp, Homo sapien
ggtgtgttcattacaccatcaaagt

SEQ ID NO: 4866657 - DNA, 25 bp, Homo sapien
cattacaccatcaaagtgttcagcc

SEQ ID NO: 4866658 - DNA, 25 bp, Homo sapien
aagtcacttagagatggtgtgttca

SEQ ID NO: 4866659 - DNA, 25 bp, Homo sapien
aatgtctttcgggatgctgtctaag

SEQ ID NO: 4866660 - DNA, 25 bp, Homo sapien
ttggaggggcctggtaaacatctgg

SEQ ID NO: 4866661 - DNA, 25 bp, Homo sapien
ccaggtgtccttcttagaatctggc

SEQ ID NO: 4866662 - DNA, 25 bp, Homo sapien
gacctctagggatgaaaacttcaca

SEQ ID NO: 4866663 - DNA, 25 bp, Homo sapien
tttatgacctctagggatgaaaact

SEQ ID NO: 4866664 - DNA, 25 bp, Homo sapien
tctaaagctttgaggcatgactggg

SEQ ID NO: 4866665 - DNA, 25 bp, Homo sapien
gaagccatccccgtttcgtctaaca

SEQ ID NO: 4866666 - DNA, 25 bp, Homo sapien
tcaaatccattttcctcgttttcag

SEQ ID NO: 4866667 - DNA, 25 bp, Homo sapien
tttcagttctagtgtctaccatgca

SEQ ID NO: 4866668 - DNA, 25 bp, Homo sapien
attttaaactgtcctccttggccat

SEQ ID NO: 4866669 - DNA, 25 bp, Homo sapien
ttttaaactgtcctccttggccatg

SEQ ID NO: 4866670 - DNA, 25 bp, Homo sapien
gaagaggatcgatcccaggtgaaag

SEQ ID NO: 4866671 - DNA, 25 bp, Homo sapien
ggcagttaccagcaatccttggaat

SEQ ID NO: 4866672 - DNA, 25 bp, Homo sapien
ggttcccgactgacatggattttgg

SEQ ID NO: 4866673 - DNA, 25 bp, Homo sapien
taccaaccaaatagcttctggcagt

SEQ ID NO: 4866674 - DNA, 25 bp, Homo sapien
ctgggccgaggaagggaaatgatgt

SEQ ID NO: 4866675 - DNA, 25 bp, Homo sapien
tgggccgaggaagggaaatgatgtg

SEQ ID NO: 4866676 - DNA, 25 bp, Homo sapien
gaagggaaatgatgtgggcggggcc

SEQ ID NO: 4866677 - DNA, 25 bp, Homo sapien
gccgaggaagggaaatgatgtgggc

SEQ ID NO: 4866678 - DNA, 25 bp, Homo sapien
tccggccgtaaagccaccctgccga

SEQ ID NO: 4866679 - DNA, 25 bp, Homo sapien
ctcctccggccgtaaagccaccctg

SEQ ID NO: 4866680 - DNA, 25 bp, Homo sapien
gtaaagccaccctgccgaagctgcg

SEQ ID NO: 4866681 - DNA, 25 bp, Homo sapien
accctgccgaagctgcgcgctgtgg

SEQ ID NO: 4866682 - DNA, 25 bp, Homo sapien
tcctgccgcaaaaagcctcttcccc

SEQ ID NO: 4866683 - DNA, 25 bp, Homo sapien
gtcctgccgcaaaaagcctcttccc

SEQ ID NO: 4866684 - DNA, 25 bp, Homo sapien
tctgccctccagctgctgtcgcacc

SEQ ID NO: 4866685 - DNA, 25 bp, Homo sapien
cctctgccctccagctgctgtcgca

SEQ ID NO: 4866686 - DNA, 25 bp, Homo sapien
tgccctccagctgctgtcgcaccgc

SEQ ID NO: 4866687 - DNA, 25 bp, Homo sapien
ccctccagctgctgtcgcaccgcct

SEQ ID NO: 4866688 - DNA, 25 bp, Homo sapien
tggacccgggactctgacccgccag

SEQ ID NO: 4866689 - DNA, 25 bp, Homo sapien
cccatgctgtcaccgcgggccttag

SEQ ID NO: 4866690 - DNA, 25 bp, Homo sapien
aacaccaaccgcgagtcagagcccc

SEQ ID NO: 4866691 - DNA, 25 bp, Homo sapien
cacccgccgccgaaaacagcccaag

SEQ ID NO: 4866692 - DNA, 25 bp, Homo sapien
tagtctcgctgaatgaacacctttc

SEQ ID NO: 4866693 - DNA, 25 bp, Homo sapien
gctgtagtctcgctgaatgaacacc

SEQ ID NO: 4866694 - DNA, 25 bp, Homo sapien
cactgctgtagtctcgctgaatgaa

SEQ ID NO: 4866695 - DNA, 25 bp, Homo sapien
tgtagtctcgctgaatgaacacctt

SEQ ID NO: 4866696 - DNA, 25 bp, Homo sapien
ctcaaaggcccggttgtcgcccaca

SEQ ID NO: 4866697 - DNA, 25 bp, Homo sapien
ttcccgtccccggtgagtctctctc

SEQ ID NO: 4866698 - DNA, 25 bp, Homo sapien
ctccccagaactgcgggaccctcaa

SEQ ID NO: 4866699 - DNA, 25 bp, Homo sapien
cagaactgcgggaccctcaaaggcc

SEQ ID NO: 4866700 - DNA, 25 bp, Homo sapien
ttgcttagtggctctcttcttacac

SEQ ID NO: 4866701 - DNA, 25 bp, Homo sapien
cttgcttagtggctctcttcttaca

SEQ ID NO: 4866702 - DNA, 25 bp, Homo sapien
tcttcttacacgtttggccaaggcc

SEQ ID NO: 4866703 - DNA, 25 bp, Homo sapien
ctctcttcttacacgtttggccaag

SEQ ID NO: 4866704 - DNA, 25 bp, Homo sapien
accttcgagatatgactggccgccg

SEQ ID NO: 4866705 - DNA, 25 bp, Homo sapien
cgagatatgactggccgccgagctt

SEQ ID NO: 4866706 - DNA, 25 bp, Homo sapien
ttcgagatatgactggccgccgagc

SEQ ID NO: 4866707 - DNA, 25 bp, Homo sapien
ccttcgagatatgactggccgccga

SEQ ID NO: 4866708 - DNA, 25 bp, Homo sapien
agcatcaatgtgtaataaacttgcc

SEQ ID NO: 4866709 - DNA, 25 bp, Homo sapien
taagcatcaatgtgtaataaacttg

SEQ ID NO: 4866710 - DNA, 25 bp, Homo sapien
catcaatgtgtaataaacttgcctt

SEQ ID NO: 4866711 - DNA, 25 bp, Homo sapien
catgtaagcatcaatgtgtaataaa

SEQ ID NO: 4866712 - DNA, 25 bp, Homo sapien
gaaatcagcaattcgggagctagta

SEQ ID NO: 4866713 - DNA, 25 bp, Homo sapien
taagttgagaaatcagcaattcggg

SEQ ID NO: 4866714 - DNA, 25 bp, Homo sapien
gttgagaaatcagcaattcgggagc

SEQ ID NO: 4866715 - DNA, 25 bp, Homo sapien
cagcaattcgggagctagtaggcag

SEQ ID NO: 4866716 - DNA, 25 bp, Homo sapien
tctttctgccttaatgccccaggct

SEQ ID NO: 4866717 - DNA, 25 bp, Homo sapien
ccttcatgcaacagcttaaatgtca

SEQ ID NO: 4866718 - DNA, 25 bp, Homo sapien
taggtcccgcttattattttcaagc

SEQ ID NO: 4866719 - DNA, 25 bp, Homo sapien
tgaccacacaccctagattaggtcc

SEQ ID NO: 4866720 - DNA, 25 bp, Homo sapien
agattacagcacataggcagaaggg

SEQ ID NO: 4866721 - DNA, 25 bp, Homo sapien
tagagattacagcacataggcagaa

SEQ ID NO: 4866722 - DNA, 25 bp, Homo sapien
tctagagattacagcacataggcag

SEQ ID NO: 4866723 - DNA, 25 bp, Homo sapien
tccttctagagattacagcacatag

SEQ ID NO: 4866724 - DNA, 25 bp, Homo sapien
caccacagcttcttacaaacttcat

SEQ ID NO: 4866725 - DNA, 25 bp, Homo sapien
tacaaacttcatcagatttcccttt

SEQ ID NO: 4866726 - DNA, 25 bp, Homo sapien
taagtgttagtgagatctcaaaata

SEQ ID NO: 4866727 - DNA, 25 bp, Homo sapien
tccctttaagtgttagtgagatctc

SEQ ID NO: 4866728 - DNA, 25 bp, Homo sapien
gtcctcgctcaatagggtctgtcag

SEQ ID NO: 4866729 - DNA, 25 bp, Homo sapien
aactcgcagtcctcgctcaataggg

SEQ ID NO: 4866730 - DNA, 25 bp, Homo sapien
tcgcagtcctcgctcaatagggtct

SEQ ID NO: 4866731 - DNA, 25 bp, Homo sapien
gcagtcctcgctcaatagggtctgt

SEQ ID NO: 4866732 - DNA, 25 bp, Homo sapien
ggaggtaatgaattcagggatttaa

SEQ ID NO: 4866733 - DNA, 25 bp, Homo sapien
ggcctgggattatgtgacctaggtt

SEQ ID NO: 4866734 - DNA, 25 bp, Homo sapien
tgttgcagagtataacaaaactgct

SEQ ID NO: 4866735 - DNA, 25 bp, Homo sapien
aattattatcagctggaaggcctgg

SEQ ID NO: 4866736 - DNA, 25 bp, Homo sapien
tcatgcctctgtcttcataaatggt

SEQ ID NO: 4866737 - DNA, 25 bp, Homo sapien
catgcctctgtcttcataaatggta

SEQ ID NO: 4866738 - DNA, 25 bp, Homo sapien
gcctctgtcttcataaatggtaatt

SEQ ID NO: 4866739 - DNA, 25 bp, Homo sapien
tctgtcttcataaatggtaatttca

SEQ ID NO: 4866740 - DNA, 25 bp, Homo sapien
ccatttgtcatataggtagacatct

SEQ ID NO: 4866741 - DNA, 25 bp, Homo sapien
gcttattaaagccatttgtcatata

SEQ ID NO: 4866742 - DNA, 25 bp, Homo sapien
taggtagacatctctgaactcattc

SEQ ID NO: 4866743 - DNA, 25 bp, Homo sapien
gtctgaagccacttaaacataataa

SEQ ID NO: 4866744 - DNA, 25 bp, Homo sapien
catgaaagagggtatccagaagtta

SEQ ID NO: 4866745 - DNA, 25 bp, Homo sapien
gaaagcgtatggacaagtaacacta

SEQ ID NO: 4866746 - DNA, 25 bp, Homo sapien
tgagtcatgacaaatgggctgtgcc

SEQ ID NO: 4866747 - DNA, 25 bp, Homo sapien
gggctgtgccaagtcatcgcagctg

SEQ ID NO: 4866748 - DNA, 25 bp, Homo sapien
ctgtaattagagggagaagtaaagg

SEQ ID NO: 4866749 - DNA, 25 bp, Homo sapien
gcagatagaaaggaatgatgctctg

SEQ ID NO: 4866750 - DNA, 25 bp, Homo sapien
ggagaggaggtagggacactctgcg

SEQ ID NO: 4866751 - DNA, 25 bp, Homo sapien
gcagcagatagaaaggaatgatgct

SEQ ID NO: 4866752 - DNA, 25 bp, Homo sapien
ctgcggtcggccagtggatacatga

SEQ ID NO: 4866753 - DNA, 25 bp, Homo sapien
tgctgagcgactagaggtcactcca

SEQ ID NO: 4866754 - DNA, 25 bp, Homo sapien
tcaaaagattacagagtcctacaca

SEQ ID NO: 4866755 - DNA, 25 bp, Homo sapien
ggtcactccaggtgtggaattttag

SEQ ID NO: 4866756 - DNA, 25 bp, Homo sapien
caatttggagacacaaagtggatgc

SEQ ID NO: 4866757 - DNA, 25 bp, Homo sapien
acctgagaagctggcccaaggaatg

SEQ ID NO: 4866758 - DNA, 25 bp, Homo sapien
tactggtggcagataacaagctttg

SEQ ID NO: 4866759 - DNA, 25 bp, Homo sapien
gcttgttgaggtctaaagccacctg

SEQ ID NO: 4866760 - DNA, 25 bp, Homo sapien
cactggtgaagatacggcttgttga

SEQ ID NO: 4866761 - DNA, 25 bp, Homo sapien
taggcataattgctataataaaaca

SEQ ID NO: 4866762 - DNA, 25 bp, Homo sapien
catggtaaaaccagtaattctttga

SEQ ID NO: 4866763 - DNA, 25 bp, Homo sapien
cagatcttaagatttgagtcatggt

SEQ ID NO: 4866764 - DNA, 25 bp, Homo sapien
gtttgaggaactgaatagtagaaac

SEQ ID NO: 4866765 - DNA, 25 bp, Homo sapien
aattctgtgggtcataaggtttgcc

SEQ ID NO: 4866766 - DNA, 25 bp, Homo sapien
taaacgaaaggcataagcagccccg

SEQ ID NO: 4866767 - DNA, 25 bp, Homo sapien
tccagggacacagcgggaacattta

SEQ ID NO: 4866768 - DNA, 25 bp, Homo sapien
cgatcctaggaacgtacagccaaaa

SEQ ID NO: 4866769 - DNA, 25 bp, Homo sapien
gtgaagctcatgctgtccggggaag

SEQ ID NO: 4866770 - DNA, 25 bp, Homo sapien
tgaagctcatgctgtccggggaaga

SEQ ID NO: 4866771 - DNA, 25 bp, Homo sapien
aagctcatgctgtccggggaagaga

SEQ ID NO: 4866772 - DNA, 25 bp, Homo sapien
gctcatgctgtccggggaagagagc

SEQ ID NO: 4866773 - DNA, 25 bp, Homo sapien
ccccagaaactggtagaacaggaca

SEQ ID NO: 4866774 - DNA, 25 bp, Homo sapien
gccgccccagaaactggtagaacag

SEQ ID NO: 4866775 - DNA, 25 bp, Homo sapien
gaaactggtagaacaggacatggag

SEQ ID NO: 4866776 - DNA, 25 bp, Homo sapien
ccaagccgccccagaaactggtaga

SEQ ID NO: 4866777 - DNA, 25 bp, Homo sapien
caggtagtccaggtggtcgttcagg

SEQ ID NO: 4866778 - DNA, 25 bp, Homo sapien
tgtccaggtagtccaggtggtcgtt

SEQ ID NO: 4866779 - DNA, 25 bp, Homo sapien
acatggggtctcttctccagatact

SEQ ID NO: 4866780 - DNA, 25 bp, Homo sapien
agtctctgacatggggtctcttctc

SEQ ID NO: 4866781 - DNA, 25 bp, Homo sapien
tctgcagaatgatgtggacattgtc

SEQ ID NO: 4866782 - DNA, 25 bp, Homo sapien
tgtcgatctgcagaatgatgtggac

SEQ ID NO: 4866783 - DNA, 25 bp, Homo sapien
gatctgcagaatgatgtggacattg

SEQ ID NO: 4866784 - DNA, 25 bp, Homo sapien
gcagaatgatgtggacattgtccac

SEQ ID NO: 4866785 - DNA, 25 bp, Homo sapien
cccatggatgttgctctccacagac

SEQ ID NO: 4866786 - DNA, 25 bp, Homo sapien
gcccatggatgttgctctccacaga

SEQ ID NO: 4866787 - DNA, 25 bp, Homo sapien
gcagagcccatggatgttgctctcc

SEQ ID NO: 4866788 - DNA, 25 bp, Homo sapien
cttgcagagcccatggatgttgctc

SEQ ID NO: 4866789 - DNA, 25 bp, Homo sapien
cagcagagtgacattggtgtcatca

SEQ ID NO: 4866790 - DNA, 25 bp, Homo sapien
gcagagtgacattggtgtcatcaat

SEQ ID NO: 4866791 - DNA, 25 bp, Homo sapien
gcagcagagtgacattggtgtcatc

SEQ ID NO: 4866792 - DNA, 25 bp, Homo sapien
ctgcagcagagtgacattggtgtca

SEQ ID NO: 4866793 - DNA, 25 bp, Homo sapien
gccaacccagagttggcaatctgga

SEQ ID NO: 4866794 - DNA, 25 bp, Homo sapien
cccagagttggcaatctggacttgc

SEQ ID NO: 4866795 - DNA, 25 bp, Homo sapien
ggcaatctggacttgcaagcctttt

SEQ ID NO: 4866796 - DNA, 25 bp, Homo sapien
ggacttgcaagccttttacttcctc

SEQ ID NO: 4866797 - DNA, 25 bp, Homo sapien
ggcgaggacttgagatttgggggca

SEQ ID NO: 4866798 - DNA, 25 bp, Homo sapien
cttggcgaggacttgagatttgggg

SEQ ID NO: 4866799 - DNA, 25 bp, Homo sapien
ggacttgagatttgggggcatctac

SEQ ID NO: 4866800 - DNA, 25 bp, Homo sapien
aggacttgagatttgggggcatcta

SEQ ID NO: 4866801 - DNA, 25 bp, Homo sapien
ctgcagggcgtagcgggcctccacc

SEQ ID NO: 4866802 - DNA, 25 bp, Homo sapien
gtagcgggcctccacctccctcagg

SEQ ID NO: 4866803 - DNA, 25 bp, Homo sapien
cagggcgtagcgggcctccacctcc

SEQ ID NO: 4866804 - DNA, 25 bp, Homo sapien
cgtagcgggcctccacctccctcag

SEQ ID NO: 4866805 - DNA, 25 bp, Homo sapien
ccctgatgttcagcaagtccttgta

SEQ ID NO: 4866806 - DNA, 25 bp, Homo sapien
gagagtaggcatctttacaaagcgc

SEQ ID NO: 4866807 - DNA, 25 bp, Homo sapien
tgacaatagaataagccgagtgaga

SEQ ID NO: 4866808 - DNA, 25 bp, Homo sapien
tttacaaagcgctgtgtaagctggg

SEQ ID NO: 4866809 - DNA, 25 bp, Homo sapien
ctgcctgattacaatcctgttatga

SEQ ID NO: 4866810 - DNA, 25 bp, Homo sapien
tgttttctgtgcaaagcgttgcttc

SEQ ID NO: 4866811 - DNA, 25 bp, Homo sapien
tcaatctgagggctctttgcaaagc

SEQ ID NO: 4866812 - DNA, 25 bp, Homo sapien
gcacaaaaacccatgtctgtatatg

SEQ ID NO: 4866813 - DNA, 25 bp, Homo sapien
tctttgtgtgatccagtttttcttc

SEQ ID NO: 4866814 - DNA, 25 bp, Homo sapien
ctgggggccggccgctccgctgtgc

SEQ ID NO: 4866815 - DNA, 25 bp, Homo sapien
gggggccggccgctccgctgtgcgg

SEQ ID NO: 4866816 - DNA, 25 bp, Homo sapien
ccggccgctccgctgtgcggtccgg

SEQ ID NO: 4866817 - DNA, 25 bp, Homo sapien
gggccggccgctccgctgtgcggtc

SEQ ID NO: 4866818 - DNA, 25 bp, Homo sapien
caaactgctcaaggacttgccggga

SEQ ID NO: 4866819 - DNA, 25 bp, Homo sapien
gctcaaggacttgccgggaccaact

SEQ ID NO: 4866820 - DNA, 25 bp, Homo sapien
ctgggagacagcgaggcactccaca

SEQ ID NO: 4866821 - DNA, 25 bp, Homo sapien
ctgcaacttctcagctcccgcgcta

SEQ ID NO: 4866822 - DNA, 25 bp, Homo sapien
cctttagcaagtggtgagagaacgc

SEQ ID NO: 4866823 - DNA, 25 bp, Homo sapien
tccaaggcttaggtcaggtatccgt

SEQ ID NO: 4866824 - DNA, 25 bp, Homo sapien
aagggccggcgacattagaccagtc

SEQ ID NO: 4866825 - DNA, 25 bp, Homo sapien
tcggcgatcccaaaggcctaaggag

SEQ ID NO: 4866826 - DNA, 25 bp, Homo sapien
tctgcaggagttaggaccacttcct

SEQ ID NO: 4866827 - DNA, 25 bp, Homo sapien
ccaggaaatccacttcttcggtcat

SEQ ID NO: 4866828 - DNA, 25 bp, Homo sapien
aggagttaggaccacttcctcacta

SEQ ID NO: 4866829 - DNA, 25 bp, Homo sapien
tcactacccccatcagagtcctgtc

SEQ ID NO: 4866830 - DNA, 25 bp, Homo sapien
tttgatatgatgaggtctctaacag

SEQ ID NO: 4866831 - DNA, 25 bp, Homo sapien
ttgcttcccgtttccatgtagatgg

SEQ ID NO: 4866832 - DNA, 25 bp, Homo sapien
tctaacagaggatgtccttcttgct

SEQ ID NO: 4866833 - DNA, 25 bp, Homo sapien
gatggtaagatccagtccctgttct

SEQ ID NO: 4866834 - DNA, 25 bp, Homo sapien
tactgggccgcaggtatgtgcacct

SEQ ID NO: 4866835 - DNA, 25 bp, Homo sapien
agtgtgccacatcacccaagggtgg

SEQ ID NO: 4866836 - DNA, 25 bp, Homo sapien
ggcggctctgccttgaacaataatt

SEQ ID NO: 4866837 - DNA, 25 bp, Homo sapien
gatgtctcctagagtacatgcggaa

SEQ ID NO: 4866838 - DNA, 25 bp, Homo sapien
aggtgcaggggtccacacagaggca

SEQ ID NO: 4866839 - DNA, 25 bp, Homo sapien
gaaggtgcaggggtccacacagagg

SEQ ID NO: 4866840 - DNA, 25 bp, Homo sapien
ctggaaggtgcaggggtccacacag

SEQ ID NO: 4866841 - DNA, 25 bp, Homo sapien
ggtgcaggggtccacacagaggcat

SEQ ID NO: 4866842 - DNA, 25 bp, Homo sapien
ggaccccgatgatgctcacttgaaa

SEQ ID NO: 4866843 - DNA, 25 bp, Homo sapien
tcacttgaaaaagtaaccagcctgg

SEQ ID NO: 4866844 - DNA, 25 bp, Homo sapien
cctttcaaggaccccgatgatgctc

SEQ ID NO: 4866845 - DNA, 25 bp, Homo sapien
gctcacttgaaaaagtaaccagcct

SEQ ID NO: 4866846 - DNA, 25 bp, Homo sapien
tgcactcagggcactgcactagagc

SEQ ID NO: 4866847 - DNA, 25 bp, Homo sapien
ggcatgagatgttactgcagcttac

SEQ ID NO: 4866848 - DNA, 25 bp, Homo sapien
agcatcaggcatgagatgttactgc

SEQ ID NO: 4866849 - DNA, 25 bp, Homo sapien
tgcaggtggcgggtcacttccttgg

SEQ ID NO: 4866850 - DNA, 25 bp, Homo sapien
ttcaaatagtgcctttgccaggcag

SEQ ID NO: 4866851 - DNA, 25 bp, Homo sapien
gacaccacctggtgttcaaatagtg

SEQ ID NO: 4866852 - DNA, 25 bp, Homo sapien
ttcagttagtgtgacgcttggtgct

SEQ ID NO: 4866853 - DNA, 25 bp, Homo sapien
cagttagtgtgacgcttggtgctga

SEQ ID NO: 4866854 - DNA, 25 bp, Homo sapien
catgacacattctacaatctcaggc

SEQ ID NO: 4866855 - DNA, 25 bp, Homo sapien
cacattctacaatctcaggcttgct

SEQ ID NO: 4866856 - DNA, 25 bp, Homo sapien
acattctacaatctcaggcttgctc

SEQ ID NO: 4866857 - DNA, 25 bp, Homo sapien
gacacattctacaatctcaggcttg

SEQ ID NO: 4866858 - DNA, 25 bp, Homo sapien
tgtcaacccaagacaagcgactctt

SEQ ID NO: 4866859 - DNA, 25 bp, Homo sapien
tcaacccaagacaagcgactcttac

SEQ ID NO: 4866860 - DNA, 25 bp, Homo sapien
ttgtcaacccaagacaagcgactct

SEQ ID NO: 4866861 - DNA, 25 bp, Homo sapien
ctttgtcaacccaagacaagcgact

SEQ ID NO: 4866862 - DNA, 25 bp, Homo sapien
cttcatgaggcgacaccgcaagtag

SEQ ID NO: 4866863 - DNA, 25 bp, Homo sapien
tgctgaggacgtagcggatcctctc

SEQ ID NO: 4866864 - DNA, 25 bp, Homo sapien
ggacgtagcggatcctctccatctc

SEQ ID NO: 4866865 - DNA, 25 bp, Homo sapien
caccgcaagtagctgctgaggacgt

SEQ ID NO: 4866866 - DNA, 25 bp, Homo sapien
gaaacaagttctcctctagtcagca

SEQ ID NO: 4866867 - DNA, 25 bp, Homo sapien
gggaaccactcactcggcaggtgaa

SEQ ID NO: 4866868 - DNA, 25 bp, Homo sapien
actgacgttggccatctgacagaca

SEQ ID NO: 4866869 - DNA, 25 bp, Homo sapien
ctaaaaatgtgtgcggtgtccccgc

SEQ ID NO: 4866870 - DNA, 25 bp, Homo sapien
aaggccaactcttccggcgagaggc

SEQ ID NO: 4866871 - DNA, 25 bp, Homo sapien
caactcttccggcgagaggctggaa

SEQ ID NO: 4866872 - DNA, 25 bp, Homo sapien
tggaaggctccccctcaggacgtgt

SEQ ID NO: 4866873 - DNA, 25 bp, Homo sapien
gccaactcttccggcgagaggctgg

SEQ ID NO: 4866874 - DNA, 25 bp, Homo sapien
tgcccgaaagaggtccaccttctgt

SEQ ID NO: 4866875 - DNA, 25 bp, Homo sapien
gataggactctgtgttcgccatgaa

SEQ ID NO: 4866876 - DNA, 25 bp, Homo sapien
gcttcaaggcgacatttttcagata

SEQ ID NO: 4866877 - DNA, 25 bp, Homo sapien
gggcatgtgcttcaaggcgacattt

SEQ ID NO: 4866878 - DNA, 25 bp, Homo sapien
gccacctgcagggagaacgtcctgt

SEQ ID NO: 4866879 - DNA, 25 bp, Homo sapien
cacctgcagggagaacgtcctgttt

SEQ ID NO: 4866880 - DNA, 25 bp, Homo sapien
cctgcagggagaacgtcctgtttac

SEQ ID NO: 4866881 - DNA, 25 bp, Homo sapien
ctgaggatgggtgggccacctgcag

SEQ ID NO: 4866882 - DNA, 25 bp, Homo sapien
aagagaggatcctaccctgggacac

SEQ ID NO: 4866883 - DNA, 25 bp, Homo sapien
tgaagagaggatcctaccctgggac

SEQ ID NO: 4866884 - DNA, 25 bp, Homo sapien
gaagagaggatcctaccctgggaca

SEQ ID NO: 4866885 - DNA, 25 bp, Homo sapien
aatgttggtgtaggctctgcagtgc

SEQ ID NO: 4866886 - DNA, 25 bp, Homo sapien
agatggctactgaaggcgaacgcgg

SEQ ID NO: 4866887 - DNA, 25 bp, Homo sapien
tactgaaggcgaacgcggctccatg

SEQ ID NO: 4866888 - DNA, 25 bp, Homo sapien
cccctctaagcaggggcaatgttgg

SEQ ID NO: 4866889 - DNA, 25 bp, Homo sapien
aaacaacaatgtgattaggaaatcc

SEQ ID NO: 4866890 - DNA, 25 bp, Homo sapien
ctgccaggaaaacaacaatgtgatt

SEQ ID NO: 4866891 - DNA, 25 bp, Homo sapien
attaggaaatcctcggccaacaaag

SEQ ID NO: 4866892 - DNA, 25 bp, Homo sapien
acaatgtgattaggaaatcctcggc

SEQ ID NO: 4866893 - DNA, 25 bp, Homo sapien
aacacgtaagaatctagatctggtt

SEQ ID NO: 4866894 - DNA, 25 bp, Homo sapien
ttcttgtcgttctctcactctcaga

SEQ ID NO: 4866895 - DNA, 25 bp, Homo sapien
cgtaagaatctagatctggtttggg

SEQ ID NO: 4866896 - DNA, 25 bp, Homo sapien
tgtgtctggttctaccagtatgttt

SEQ ID NO: 4866897 - DNA, 25 bp, Homo sapien
gccctccatcgggaggaatgtgccc

SEQ ID NO: 4866898 - DNA, 25 bp, Homo sapien
gaggaatgtgcccactgtgaaagat

SEQ ID NO: 4866899 - DNA, 25 bp, Homo sapien
cactgtgaaagatgcacgccactca

SEQ ID NO: 4866900 - DNA, 25 bp, Homo sapien
tcggctggccctccatcgggaggaa

SEQ ID NO: 4866901 - DNA, 25 bp, Homo sapien
tgtatcggatcaagtgctgtgagcc

SEQ ID NO: 4866902 - DNA, 25 bp, Homo sapien
gatgcaaccagaggtgcaatggttt

SEQ ID NO: 4866903 - DNA, 25 bp, Homo sapien
ccagaggtgcaatggttttgtatcg

SEQ ID NO: 4866904 - DNA, 25 bp, Homo sapien
aatggttttgtatcggatcaagtgc

SEQ ID NO: 4866905 - DNA, 25 bp, Homo sapien
gacttaaaccagaaaagcggccaca

SEQ ID NO: 4866906 - DNA, 25 bp, Homo sapien
tgggcttagcactacagggagaacg

SEQ ID NO: 4866907 - DNA, 25 bp, Homo sapien
acatcttaaggcgagctccaggcga

SEQ ID NO: 4866908 - DNA, 25 bp, Homo sapien
tcattaaactacaagccgggagccg

SEQ ID NO: 4866909 - DNA, 25 bp, Homo sapien
gtcattcaatgtggtccccgggcca

SEQ ID NO: 4866910 - DNA, 25 bp, Homo sapien
tagaggatgtaaagtgctccgtgca

SEQ ID NO: 4866911 - DNA, 25 bp, Homo sapien
gcaactgcacaacatgggagctcct

SEQ ID NO: 4866912 - DNA, 25 bp, Homo sapien
cagttggacatgtacagggcagcag

SEQ ID NO: 4866913 - DNA, 25 bp, Homo sapien
tgatgcctctgagggcgatgccaaa

SEQ ID NO: 4866914 - DNA, 25 bp, Homo sapien
catggagtaaatgcagcaaggtcac

SEQ ID NO: 4866915 - DNA, 25 bp, Homo sapien
gcggcctgcaagcacgtctcaggaa

SEQ ID NO: 4866916 - DNA, 25 bp, Homo sapien
tgatgactgcggtgggaaaacccac

SEQ ID NO: 4866917 - DNA, 25 bp, Homo sapien
tgcttaaaaatgcactctgcagctg

SEQ ID NO: 4866918 - DNA, 25 bp, Homo sapien
aaagaacactatatgaagaattgac

SEQ ID NO: 4866919 - DNA, 25 bp, Homo sapien
gggatatttggcttcccaagataaa

SEQ ID NO: 4866920 - DNA, 25 bp, Homo sapien
aatataatgagagggctttcatagc

SEQ ID NO: 4866921 - DNA, 25 bp, Homo sapien
gattgaggaccaaatcacttgtccg

SEQ ID NO: 4866922 - DNA, 25 bp, Homo sapien
gtccggaggttgagggcagccacgt

SEQ ID NO: 4866923 - DNA, 25 bp, Homo sapien
ctggattgaggaccaaatcacttgt

SEQ ID NO: 4866924 - DNA, 25 bp, Homo sapien
gaccaaatcacttgtccggaggttg

SEQ ID NO: 4866925 - DNA, 25 bp, Homo sapien
tatttatttgctcccgaaccgtcgc

SEQ ID NO: 4866926 - DNA, 25 bp, Homo sapien
cactcaactccaggcggcaggcgtg

SEQ ID NO: 4866927 - DNA, 25 bp, Homo sapien
aacagcttcccagcgggaattattt

SEQ ID NO: 4866928 - DNA, 25 bp, Homo sapien
gctcctgtctgagaaacagcttccc

SEQ ID NO: 4866929 - DNA, 25 bp, Homo sapien
ccccgggctcgcacaccccacggtg

SEQ ID NO: 4866930 - DNA, 25 bp, Homo sapien
cgctcccccgggctcgcacacccca

SEQ ID NO: 4866931 - DNA, 25 bp, Homo sapien
ctcccccgggctcgcacaccccacg

SEQ ID NO: 4866932 - DNA, 25 bp, Homo sapien
cccgggctcgcacaccccacggtgt

SEQ ID NO: 4866933 - DNA, 25 bp, Homo sapien
gggcacacagctgcaggctcgcccc

SEQ ID NO: 4866934 - DNA, 25 bp, Homo sapien
gggcatccctgaatacccgctagtc

SEQ ID NO: 4866935 - DNA, 25 bp, Homo sapien
ccccgagagtgcgggcatccctgaa

SEQ ID NO: 4866936 - DNA, 25 bp, Homo sapien
gagtgcgggcatccctgaatacccg

SEQ ID NO: 4866937 - DNA, 25 bp, Homo sapien
tgcgctcacggtgccccgcaggaag

SEQ ID NO: 4866938 - DNA, 25 bp, Homo sapien
gcatccagggggtgcgcatctgcac

SEQ ID NO: 4866939 - DNA, 25 bp, Homo sapien
gggacccggcattccaacacagggc

SEQ ID NO: 4866940 - DNA, 25 bp, Homo sapien
acggcccgcttgtccccacctgcgc

SEQ ID NO: 4866941 - DNA, 25 bp, Homo sapien
ggtactcggcggcaacaccacctgg

SEQ ID NO: 4866942 - DNA, 25 bp, Homo sapien
ggccagggtactcggcggcaacacc

SEQ ID NO: 4866943 - DNA, 25 bp, Homo sapien
agaagcagaactggacggtggcccg

SEQ ID NO: 4866944 - DNA, 25 bp, Homo sapien
acctggaaggcgaagccgaccctct

SEQ ID NO: 4866945 - DNA, 25 bp, Homo sapien
gcgaacccggcacccagctgtagtt

SEQ ID NO: 4866946 - DNA, 25 bp, Homo sapien
ttactgtccccgaaaggccgctgag

SEQ ID NO: 4866947 - DNA, 25 bp, Homo sapien
ttttgcctttgattactgtccccga

SEQ ID NO: 4866948 - DNA, 25 bp, Homo sapien
cattctgatgagcaggacggcgaac

SEQ ID NO: 4866949 - DNA, 25 bp, Homo sapien
aaaacctcatcccttgtagtcagga

SEQ ID NO: 4866950 - DNA, 25 bp, Homo sapien
tgactatttcaagttaccaggaaag

SEQ ID NO: 4866951 - DNA, 25 bp, Homo sapien
aagaatgcaaggcattcgaggcctt

SEQ ID NO: 4866952 - DNA, 25 bp, Homo sapien
gcatttcttcggtttcccgactcca

SEQ ID NO: 4866953 - DNA, 25 bp, Homo sapien
tcgctgtgaatatgggctgtcttta

SEQ ID NO: 4866954 - DNA, 25 bp, Homo sapien
tcctgcccatagcatgaccgagcta

SEQ ID NO: 4866955 - DNA, 25 bp, Homo sapien
gagctatagccaacactgaacttct

SEQ ID NO: 4866956 - DNA, 25 bp, Homo sapien
ggctgtctttagattattgttggca

SEQ ID NO: 4866957 - DNA, 25 bp, Homo sapien
taaaagacagtttgcctttagtgcc

SEQ ID NO: 4866958 - DNA, 25 bp, Homo sapien
tacacggctgtcagattgtcattcc

SEQ ID NO: 4866959 - DNA, 25 bp, Homo sapien
tctccgccggtttacgctgtacacg

SEQ ID NO: 4866960 - DNA, 25 bp, Homo sapien
gattgtcattccgtgctaaatgcat

SEQ ID NO: 4866961 - DNA, 25 bp, Homo sapien
cgcgggaagaggctagagtcactaa

SEQ ID NO: 4866962 - DNA, 25 bp, Homo sapien
cctgcgttaggacccgatactggct

SEQ ID NO: 4866963 - DNA, 25 bp, Homo sapien
aaagcggagcgcttccctgcgttag

SEQ ID NO: 4866964 - DNA, 25 bp, Homo sapien
cctccccggaggttcgcttgtgtgt

SEQ ID NO: 4866965 - DNA, 25 bp, Homo sapien
aggctaggcagctccaaatcccgcg

SEQ ID NO: 4866966 - DNA, 25 bp, Homo sapien
accgcgaggctaggcagctccaaat

SEQ ID NO: 4866967 - DNA, 25 bp, Homo sapien
gcgaggctaggcagctccaaatccc

SEQ ID NO: 4866968 - DNA, 25 bp, Homo sapien
cgaccgcgaggctaggcagctccaa

SEQ ID NO: 4866969 - DNA, 25 bp, Homo sapien
gagccgggctcggagagcaggcgag

SEQ ID NO: 4866970 - DNA, 25 bp, Homo sapien
agccgggctcggagagcaggcgagc

SEQ ID NO: 4866971 - DNA, 25 bp, Homo sapien
gccgggctcggagagcaggcgagcg

SEQ ID NO: 4866972 - DNA, 25 bp, Homo sapien
aggagccgggctcggagagcaggcg

SEQ ID NO: 4866973 - DNA, 25 bp, Homo sapien
tcatgaatgtaagcgtcttcatcca

SEQ ID NO: 4866974 - DNA, 25 bp, Homo sapien
catccacagccttcctacaccattt

SEQ ID NO: 4866975 - DNA, 25 bp, Homo sapien
atccttcatgaatgtaagcgtcttc

SEQ ID NO: 4866976 - DNA, 25 bp, Homo sapien
aatgtaagcgtcttcatccacagcc

SEQ ID NO: 4866977 - DNA, 25 bp, Homo sapien
tatctaagatcattatgccctccag

SEQ ID NO: 4866978 - DNA, 25 bp, Homo sapien
gaactggataagtaacacggcactg

SEQ ID NO: 4866979 - DNA, 25 bp, Homo sapien
ggcactggtaccaagttcaccccaa

SEQ ID NO: 4866980 - DNA, 25 bp, Homo sapien
aaagcaacggaaccatctcttgaag

SEQ ID NO: 4866981 - DNA, 25 bp, Homo sapien
caaattatccatacgtaaaaggcat

SEQ ID NO: 4866982 - DNA, 25 bp, Homo sapien
gcacaaattatccatacgtaaaagg

SEQ ID NO: 4866983 - DNA, 25 bp, Homo sapien
ctgagcacaaattatccatacgtaa

SEQ ID NO: 4866984 - DNA, 25 bp, Homo sapien
tatccatacgtaaaaggcatctagt

SEQ ID NO: 4866985 - DNA, 25 bp, Homo sapien
tcagggccaacgttcccccacaggc

SEQ ID NO: 4866986 - DNA, 25 bp, Homo sapien
atcagggccaacgttcccccacagg

SEQ ID NO: 4866987 - DNA, 25 bp, Homo sapien
caacgttcccccacaggccaaacat

SEQ ID NO: 4866988 - DNA, 25 bp, Homo sapien
tcatcagggccaacgttcccccaca

SEQ ID NO: 4866989 - DNA, 25 bp, Homo sapien
caaggtgattgacaccagggtcact

SEQ ID NO: 4866990 - DNA, 25 bp, Homo sapien
cagacccaaggtgattgacaccagg

SEQ ID NO: 4866991 - DNA, 25 bp, Homo sapien
tccacagacccaaggtgattgacac

SEQ ID NO: 4866992 - DNA, 25 bp, Homo sapien
gagttccacagacccaaggtgattg

SEQ ID NO: 4866993 - DNA, 25 bp, Homo sapien
tgtccgcggctagtcctgttgcatt

SEQ ID NO: 4866994 - DNA, 25 bp, Homo sapien
tgttcttgtccgcggctagtcctgt

SEQ ID NO: 4866995 - DNA, 25 bp, Homo sapien
gtttttgaagacgtgagtccactga

SEQ ID NO: 4866996 - DNA, 25 bp, Homo sapien
ttgaagacgtgagtccactgatgct

SEQ ID NO: 4866997 - DNA, 25 bp, Homo sapien
ccagcatcgtgccatgggcctagta

SEQ ID NO: 4866998 - DNA, 25 bp, Homo sapien
gagtatcctatcaagtctctctggc

SEQ ID NO: 4866999 - DNA, 25 bp, Homo sapien
tggcttcacactaatcaccttcagg

SEQ ID NO: 4867000 - DNA, 25 bp, Homo sapien
aatctgcgcaatgttttaagggagg

SEQ ID NO: 4867001 - DNA, 25 bp, Homo sapien
ggcaaacagctgcttacatgctgcc

SEQ ID NO: 4867002 - DNA, 25 bp, Homo sapien
gcaaacagctgcttacatgctgcca

SEQ ID NO: 4867003 - DNA, 25 bp, Homo sapien
aacagctgcttacatgctgccaaag

SEQ ID NO: 4867004 - DNA, 25 bp, Homo sapien
caaacagctgcttacatgctgccaa

SEQ ID NO: 4867005 - DNA, 25 bp, Homo sapien
gagagctacagtctttgccagaagg

SEQ ID NO: 4867006 - DNA, 25 bp, Homo sapien
caatgtctcatactgcgagtgctga

SEQ ID NO: 4867007 - DNA, 25 bp, Homo sapien
gcatctggcattggtatcctctgga

SEQ ID NO: 4867008 - DNA, 25 bp, Homo sapien
cgaaggcaccctttcttagcagtga

SEQ ID NO: 4867009 - DNA, 25 bp, Homo sapien
tatcaaaaggcagcaacaggaacat

SEQ ID NO: 4867010 - DNA, 25 bp, Homo sapien
cccagaaggttgacaatcaggctat

SEQ ID NO: 4867011 - DNA, 25 bp, Homo sapien
tgatgaaaacgagaaggagggtgaa

SEQ ID NO: 4867012 - DNA, 25 bp, Homo sapien
caatcaggctatcaaaaggcagcaa

SEQ ID NO: 4867013 - DNA, 25 bp, Homo sapien
aaggagactccaaaaatggctggca

SEQ ID NO: 4867014 - DNA, 25 bp, Homo sapien
tttgcggataccaaaggagactcca

SEQ ID NO: 4867015 - DNA, 25 bp, Homo sapien
gatttttaacagacttttcatgtag

SEQ ID NO: 4867016 - DNA, 25 bp, Homo sapien
tttcatgtagagtttgcggatacca

SEQ ID NO: 4867017 - DNA, 25 bp, Homo sapien
aaccagctgcttggcgatgctcatg

SEQ ID NO: 4867018 - DNA, 25 bp, Homo sapien
cagaagagaagtagtgacacgtgct

SEQ ID NO: 4867019 - DNA, 25 bp, Homo sapien
acacgtgctacgatgctgatgaacc

SEQ ID NO: 4867020 - DNA, 25 bp, Homo sapien
aaatgcacgtacacgcaggtccaca

SEQ ID NO: 4867021 - DNA, 25 bp, Homo sapien
cttattccctattgaattgcttccc

SEQ ID NO: 4867022 - DNA, 25 bp, Homo sapien
cctcttgcttccctccgatccacat

SEQ ID NO: 4867023 - DNA, 25 bp, Homo sapien
cccttattccctattgaattgcttc

SEQ ID NO: 4867024 - DNA, 25 bp, Homo sapien
ccctcccttattccctattgaattg

SEQ ID NO: 4867025 - DNA, 25 bp, Homo sapien
gttggtgtagggcttgtaaagctgg

SEQ ID NO: 4867026 - DNA, 25 bp, Homo sapien
ttggtgtagggcttgtaaagctggt

SEQ ID NO: 4867027 - DNA, 25 bp, Homo sapien
aagaatgtgtccctgtcaagcagca

SEQ ID NO: 4867028 - DNA, 25 bp, Homo sapien
ctgcaaaagaatgtgtccctgtcaa

SEQ ID NO: 4867029 - DNA, 25 bp, Homo sapien
gcaaaagaatgtgtccctgtcaagc

SEQ ID NO: 4867030 - DNA, 25 bp, Homo sapien
gaatgtgtccctgtcaagcagcacg

SEQ ID NO: 4867031 - DNA, 25 bp, Homo sapien
cccacaggaccgtgagccgaaggct

SEQ ID NO: 4867032 - DNA, 25 bp, Homo sapien
gcagtaccgaatcagcactcctaac

SEQ ID NO: 4867033 - DNA, 25 bp, Homo sapien
gcagaaagcagtaccgaatcagcac

SEQ ID NO: 4867034 - DNA, 25 bp, Homo sapien
gccgaaggctgatgtactggaagtt

SEQ ID NO: 4867035 - DNA, 25 bp, Homo sapien
gaaatgtaagcaggcctatcagaac

SEQ ID NO: 4867036 - DNA, 25 bp, Homo sapien
tagaaatgtaagcaggcctatcaga

SEQ ID NO: 4867037 - DNA, 25 bp, Homo sapien
agaaatgtaagcaggcctatcagaa

SEQ ID NO: 4867038 - DNA, 25 bp, Homo sapien
ctagaaatgtaagcaggcctatcag

SEQ ID NO: 4867039 - DNA, 25 bp, Homo sapien
aaatcattctaccaagtacagaact

SEQ ID NO: 4867040 - DNA, 25 bp, Homo sapien
tctaccaagtacagaactgaaggtg

SEQ ID NO: 4867041 - DNA, 25 bp, Homo sapien
aaggtgtgaaaatcaaagggggcat

SEQ ID NO: 4867042 - DNA, 25 bp, Homo sapien
cattctaccaagtacagaactgaag

SEQ ID NO: 4867043 - DNA, 25 bp, Homo sapien
tggcaagtatcccaccacagttgtg

SEQ ID NO: 4867044 - DNA, 25 bp, Homo sapien
catttggcaagtatcccaccacagt

SEQ ID NO: 4867045 - DNA, 25 bp, Homo sapien
tttggcaagtatcccaccacagttg

SEQ ID NO: 4867046 - DNA, 25 bp, Homo sapien
ggcaagtatcccaccacagttgtgc

SEQ ID NO: 4867047 - DNA, 25 bp, Homo sapien
tcagcgctcgcacgcagatccggta

SEQ ID NO: 4867048 - DNA, 25 bp, Homo sapien
cgcagatccggtaacacattaagtg

SEQ ID NO: 4867049 - DNA, 25 bp, Homo sapien
tggctgtcagcgctcgcacgcagat

SEQ ID NO: 4867050 - DNA, 25 bp, Homo sapien
atgatggctgtcagcgctcgcacgc

SEQ ID NO: 4867051 - DNA, 25 bp, Homo sapien
ccatttggctaagtataggtgggtg

SEQ ID NO: 4867052 - DNA, 25 bp, Homo sapien
ttcctatcaatacaaagcgctctca

SEQ ID NO: 4867053 - DNA, 25 bp, Homo sapien
ggtggtgtttcctgcagcgccatct

SEQ ID NO: 4867054 - DNA, 25 bp, Homo sapien
tcatctgctctaactaaaagctcag

SEQ ID NO: 4867055 - DNA, 25 bp, Homo sapien
catcgatcggtgaggtatgattggc

SEQ ID NO: 4867056 - DNA, 25 bp, Homo sapien
gtgaggtatgattggccacacagat

SEQ ID NO: 4867057 - DNA, 25 bp, Homo sapien
gatcggtgaggtatgattggccaca

SEQ ID NO: 4867058 - DNA, 25 bp, Homo sapien
tcacatcgatcggtgaggtatgatt

SEQ ID NO: 4867059 - DNA, 25 bp, Homo sapien
tttatgtgaagggtccaggagcctc

SEQ ID NO: 4867060 - DNA, 25 bp, Homo sapien
gtcttgcctcaagaacgcaccggaa

SEQ ID NO: 4867061 - DNA, 25 bp, Homo sapien
gggcctggcccacgcataaatgtgt

SEQ ID NO: 4867062 - DNA, 25 bp, Homo sapien
cactctaaagcaggaagtcttgcct

SEQ ID NO: 4867063 - DNA, 25 bp, Homo sapien
tgctggtctgcctgactgcccttgg

SEQ ID NO: 4867064 - DNA, 25 bp, Homo sapien
gctggtctgcctgactgcccttggc

SEQ ID NO: 4867065 - DNA, 25 bp, Homo sapien
tgcctgactgcccttggcatcctct

SEQ ID NO: 4867066 - DNA, 25 bp, Homo sapien
ctgcctgactgcccttggcatcctc

SEQ ID NO: 4867067 - DNA, 25 bp, Homo sapien
gcccctccctgggcagattctcaga

SEQ ID NO: 4867068 - DNA, 25 bp, Homo sapien
tctaggaagaaccacatctcacaaa

SEQ ID NO: 4867069 - DNA, 25 bp, Homo sapien
agcgcaggcacaggactcattagta

SEQ ID NO: 4867070 - DNA, 25 bp, Homo sapien
aacttctcacttctaacgcttgccg

SEQ ID NO: 4867071 - DNA, 25 bp, Homo sapien
tgccggctgaaggttgctcactgcc

SEQ ID NO: 4867072 - DNA, 25 bp, Homo sapien
aaccagacgtgtgggcaggccttca

SEQ ID NO: 4867073 - DNA, 25 bp, Homo sapien
ctcaaaccagacgtgtgggcaggcc

SEQ ID NO: 4867074 - DNA, 25 bp, Homo sapien
tcaaaccagacgtgtgggcaggcct

SEQ ID NO: 4867075 - DNA, 25 bp, Homo sapien
catgagtcccccgtgcacttgaccc

SEQ ID NO: 4867076 - DNA, 25 bp, Homo sapien
actgtggagggataactaccctgaa

SEQ ID NO: 4867077 - DNA, 25 bp, Homo sapien
cactgtggagggataactaccctga

SEQ ID NO: 4867078 - DNA, 25 bp, Homo sapien
ctgtggagggataactaccctgaaa

SEQ ID NO: 4867079 - DNA, 25 bp, Homo sapien
tgtggagggataactaccctgaaac

SEQ ID NO: 4867080 - DNA, 25 bp, Homo sapien
aattattatgaaagcagtataggct

SEQ ID NO: 4867081 - DNA, 25 bp, Homo sapien
catttaattcacagaactgttcaat

SEQ ID NO: 4867082 - DNA, 25 bp, Homo sapien
atttaattcacagaactgttcaatt

SEQ ID NO: 4867083 - DNA, 25 bp, Homo sapien
tgcttttatcttgcacatgttcagt

SEQ ID NO: 4867084 - DNA, 25 bp, Homo sapien
aagatgaggataggcagcttgcttt

SEQ ID NO: 4867085 - DNA, 25 bp, Homo sapien
tctgggaagatgaggataggcagct

SEQ ID NO: 4867086 - DNA, 25 bp, Homo sapien
ttttatcttgcacatgttcagtcag

SEQ ID NO: 4867087 - DNA, 25 bp, Homo sapien
cagggtaaactgtggctccaatttc

SEQ ID NO: 4867088 - DNA, 25 bp, Homo sapien
agggtaaactgtggctccaatttca

SEQ ID NO: 4867089 - DNA, 25 bp, Homo sapien
tcatcaccgatgtattattgatgca

SEQ ID NO: 4867090 - DNA, 25 bp, Homo sapien
ttgaacatcatcaccgatgtattat

SEQ ID NO: 4867091 - DNA, 25 bp, Homo sapien
atcgaccacagactggtgaccccag

SEQ ID NO: 4867092 - DNA, 25 bp, Homo sapien
cagcagctccagtaatgacagtgtg

SEQ ID NO: 4867093 - DNA, 25 bp, Homo sapien
cagtgtgtaccatcggaggtcttat

SEQ ID NO: 4867094 - DNA, 25 bp, Homo sapien
tctgctgagggcatcgaccacagac

SEQ ID NO: 4867095 - DNA, 25 bp, Homo sapien
cagctaggtttatgaagcaaggtaa

SEQ ID NO: 4867096 - DNA, 25 bp, Homo sapien
agggcttgccatttcccgaatggtg

SEQ ID NO: 4867097 - DNA, 25 bp, Homo sapien
catgcaggcgggaatctggctgtcc

SEQ ID NO: 4867098 - DNA, 25 bp, Homo sapien
catttcccgaatggtggcggcagca

SEQ ID NO: 4867099 - DNA, 25 bp, Homo sapien
ctaatcacatcctatagctctgggt

SEQ ID NO: 4867100 - DNA, 25 bp, Homo sapien
gaggagcagttcctaaagggtcgac

SEQ ID NO: 4867101 - DNA, 25 bp, Homo sapien
tcctaaagggtcgacgtagactaga

SEQ ID NO: 4867102 - DNA, 25 bp, Homo sapien
tagataaactcccagggtccatctc

SEQ ID NO: 4867103 - DNA, 25 bp, Homo sapien
tactttaaccacactgaggatggcc

SEQ ID NO: 4867104 - DNA, 25 bp, Homo sapien
ttttgtaggtgtcatgatgtgaggc

SEQ ID NO: 4867105 - DNA, 25 bp, Homo sapien
tgttttgtaggtgtcatgatgtgag

SEQ ID NO: 4867106 - DNA, 25 bp, Homo sapien
aatactttaaccacactgaggatgg

SEQ ID NO: 4867107 - DNA, 25 bp, Homo sapien
caggagcaacacctctccagtggca

SEQ ID NO: 4867108 - DNA, 25 bp, Homo sapien
tacagatcagtaaggaaggctcccc

SEQ ID NO: 4867109 - DNA, 25 bp, Homo sapien
tgtgagcaacactgatctcccccga

SEQ ID NO: 4867110 - DNA, 25 bp, Homo sapien
gtttcaggtcttactcataggtata

SEQ ID NO: 4867111 - DNA, 25 bp, Homo sapien
gaggaacccggcctctgctacagat

SEQ ID NO: 4867112 - DNA, 25 bp, Homo sapien
gagtagttctcacaacgtttgcgag

SEQ ID NO: 4867113 - DNA, 25 bp, Homo sapien
ctggaggtaagacatgagtagttct

SEQ ID NO: 4867114 - DNA, 25 bp, Homo sapien
agtgactgctgtgagtgactccact

SEQ ID NO: 4867115 - DNA, 25 bp, Homo sapien
gaccttgcatgagtactgtggaagc

SEQ ID NO: 4867116 - DNA, 25 bp, Homo sapien
tccagaaggcatcgccaaattgagg

SEQ ID NO: 4867117 - DNA, 25 bp, Homo sapien
cgtcaccatcccgtatttgctgctg

SEQ ID NO: 4867118 - DNA, 25 bp, Homo sapien
aggcatcgccaaattgagggtcata

SEQ ID NO: 4867119 - DNA, 25 bp, Homo sapien
agaaggcatcgccaaattgagggtc

SEQ ID NO: 4867120 - DNA, 25 bp, Homo sapien
ggcttgacgttacacagagcaggcg

SEQ ID NO: 4867121 - DNA, 25 bp, Homo sapien
tcagccccggcttgacgttacacag

SEQ ID NO: 4867122 - DNA, 25 bp, Homo sapien
gttacacagagcaggcgcagacctg

SEQ ID NO: 4867123 - DNA, 25 bp, Homo sapien
atgagaccactcagccccggcttga

SEQ ID NO: 4867124 - DNA, 25 bp, Homo sapien
ggcaatggcagatttcaccctattc

SEQ ID NO: 4867125 - DNA, 25 bp, Homo sapien
tggcagatttcaccctattcgcaaa

SEQ ID NO: 4867126 - DNA, 25 bp, Homo sapien
ccctattcgcaaactggacagcatc

SEQ ID NO: 4867127 - DNA, 25 bp, Homo sapien
gatttcaccctattcgcaaactgga

SEQ ID NO: 4867128 - DNA, 25 bp, Homo sapien
catgtaagtgaagtcaatgacacag

SEQ ID NO: 4867129 - DNA, 25 bp, Homo sapien
taattctccacaccacggggaatga

SEQ ID NO: 4867130 - DNA, 25 bp, Homo sapien
agagtcaaactgctctctctagagc

SEQ ID NO: 4867131 - DNA, 25 bp, Homo sapien
actcagctgaaaaggcctggctcta

SEQ ID NO: 4867132 - DNA, 25 bp, Homo sapien
tccccaaggtcaaggaagcacaggg

SEQ ID NO: 4867133 - DNA, 25 bp, Homo sapien
ccccagaaaggtacacagaatcaac

SEQ ID NO: 4867134 - DNA, 25 bp, Homo sapien
tggaagactggttcaaaccccagaa

SEQ ID NO: 4867135 - DNA, 25 bp, Homo sapien
gaatcaactgcctcagtccaggcat

SEQ ID NO: 4867136 - DNA, 25 bp, Homo sapien
cttcttgaagttttcagatcagtag

SEQ ID NO: 4867137 - DNA, 25 bp, Homo sapien
ccttcttgaagttttcagatcagta

SEQ ID NO: 4867138 - DNA, 25 bp, Homo sapien
tttctaagaatggttcaattttgcc

SEQ ID NO: 4867139 - DNA, 25 bp, Homo sapien
cagatacactgggacctgggaaagt

SEQ ID NO: 4867140 - DNA, 25 bp, Homo sapien
tgctcctccttgaacgtgtccttca

SEQ ID NO: 4867141 - DNA, 25 bp, Homo sapien
gatcatcttgctgtacagcttctgc

SEQ ID NO: 4867142 - DNA, 25 bp, Homo sapien
tcctccttgaacgtgtccttcacct

SEQ ID NO: 4867143 - DNA, 25 bp, Homo sapien
tgctgctcctccttgaacgtgtcct

SEQ ID NO: 4867144 - DNA, 25 bp, Homo sapien
tcaggagcggctcctgtccttgtgg

SEQ ID NO: 4867145 - DNA, 25 bp, Homo sapien
aaacaaggcatctcgtcctgggtcg

SEQ ID NO: 4867146 - DNA, 25 bp, Homo sapien
tctctagcacaagaccatggccaca

SEQ ID NO: 4867147 - DNA, 25 bp, Homo sapien
tggcacacgggcttgcataacagac

SEQ ID NO: 4867148 - DNA, 25 bp, Homo sapien
cagcatccgtttagaccaccaaggg

SEQ ID NO: 4867149 - DNA, 25 bp, Homo sapien
tccctttagtaaccccatcagcagc

SEQ ID NO: 4867150 - DNA, 25 bp, Homo sapien
cctttagtaaccccatcagcagcag

SEQ ID NO: 4867151 - DNA, 25 bp, Homo sapien
cctccctttagtaaccccatcagca

SEQ ID NO: 4867152 - DNA, 25 bp, Homo sapien
gtacgaacacacgttctccccatgg

SEQ ID NO: 4867153 - DNA, 25 bp, Homo sapien
cacacattcaacaaagcgcgcatca

SEQ ID NO: 4867154 - DNA, 25 bp, Homo sapien
caggcctgccgtgccccgttttgtg

SEQ ID NO: 4867155 - DNA, 25 bp, Homo sapien
ttagcctggagtacgaacacacgtt

SEQ ID NO: 4867156 - DNA, 25 bp, Homo sapien
gagaaaaggagattgcagggccaac

SEQ ID NO: 4867157 - DNA, 25 bp, Homo sapien
tctgcaagcatctgagacgagctgt

SEQ ID NO: 4867158 - DNA, 25 bp, Homo sapien
gaacgggaatcctcacgagaagcct

SEQ ID NO: 4867159 - DNA, 25 bp, Homo sapien
catcatgactgtgccacgagggagc

SEQ ID NO: 4867160 - DNA, 25 bp, Homo sapien
cctaactggtgggtggaaagtctca

SEQ ID NO: 4867161 - DNA, 25 bp, Homo sapien
tccctagttatgactcaggagacgg

SEQ ID NO: 4867162 - DNA, 25 bp, Homo sapien
tctctgaggtcatctagccaagtcc

SEQ ID NO: 4867163 - DNA, 25 bp, Homo sapien
ggttagttccactagccctgatgtt

SEQ ID NO: 4867164 - DNA, 25 bp, Homo sapien
cacccctggcgcaatgaaaagttcc

SEQ ID NO: 4867165 - DNA, 25 bp, Homo sapien
tcccatcggagagagacatattgac

SEQ ID NO: 4867166 - DNA, 25 bp, Homo sapien
aaaatgcctgtcactggtctgggaa

SEQ ID NO: 4867167 - DNA, 25 bp, Homo sapien
gacacggtgaagcatcaagtcccaa

SEQ ID NO: 4867168 - DNA, 25 bp, Homo sapien
aagaccattaatagcaggtactgaa

SEQ ID NO: 4867169 - DNA, 25 bp, Homo sapien
agtgattatttatcaaaagaccatt

SEQ ID NO: 4867170 - DNA, 25 bp, Homo sapien
gaaatgatgtgttactgggtggtgc

SEQ ID NO: 4867171 - DNA, 25 bp, Homo sapien
taataggaaatcaatgcagctggcc

SEQ ID NO: 4867172 - DNA, 25 bp, Homo sapien
ctcccagacaaacacggtcggattt

SEQ ID NO: 4867173 - DNA, 25 bp, Homo sapien
gagataaagtttgcctgggcccaag

SEQ ID NO: 4867174 - DNA, 25 bp, Homo sapien
tccacttcaattcggcatccctttt

SEQ ID NO: 4867175 - DNA, 25 bp, Homo sapien
gctccgcgtcaggaagatgtatgaa

SEQ ID NO: 4867176 - DNA, 25 bp, Homo sapien
tgtcttcagcaggtcggggcgaggg

SEQ ID NO: 4867177 - DNA, 25 bp, Homo sapien
ttagcaggacctgggatatgtcttc

SEQ ID NO: 4867178 - DNA, 25 bp, Homo sapien
gtcttcagcaggtcggggcgagggt

SEQ ID NO: 4867179 - DNA, 25 bp, Homo sapien
gggacggattctgccatagctgtca

SEQ ID NO: 4867180 - DNA, 25 bp, Homo sapien
ccaccaagtagggacggattctgcc

SEQ ID NO: 4867181 - DNA, 25 bp, Homo sapien
caagtagggacggattctgccatag

SEQ ID NO: 4867182 - DNA, 25 bp, Homo sapien
ggctccaccaagtagggacggattc

SEQ ID NO: 4867183 - DNA, 25 bp, Homo sapien
acagctgtggtgtctgctctgacag

SEQ ID NO: 4867184 - DNA, 25 bp, Homo sapien
aaattaagtcccacgtccatgacag

SEQ ID NO: 4867185 - DNA, 25 bp, Homo sapien
aaagaaattaagtcccacgtccatg

SEQ ID NO: 4867186 - DNA, 25 bp, Homo sapien
gacagctgtggtgtctgctctgaca

SEQ ID NO: 4867187 - DNA, 25 bp, Homo sapien
tttttcacccgggtgatctgagctg

SEQ ID NO: 4867188 - DNA, 25 bp, Homo sapien
agaacggcacccctccaacaaggca

SEQ ID NO: 4867189 - DNA, 25 bp, Homo sapien
gacgctggccaacagggtggtattt

SEQ ID NO: 4867190 - DNA, 25 bp, Homo sapien
tgctgggaatcacggcccttccttt

SEQ ID NO: 4867191 - DNA, 25 bp, Homo sapien
catcatttggtgctgatataaggac

SEQ ID NO: 4867192 - DNA, 25 bp, Homo sapien
tgggcatcatttggtgctgatataa

SEQ ID NO: 4867193 - DNA, 25 bp, Homo sapien
tttggtgctgatataaggacaggcc

SEQ ID NO: 4867194 - DNA, 25 bp, Homo sapien
tgctgatataaggacaggcccaccc

SEQ ID NO: 4867195 - DNA, 25 bp, Homo sapien
tcaatacctctgagaccgctgtgcc

SEQ ID NO: 4867196 - DNA, 25 bp, Homo sapien
gggtcaatacctctgagaccgctgt

SEQ ID NO: 4867197 - DNA, 25 bp, Homo sapien
ggtcaatacctctgagaccgctgtg

SEQ ID NO: 4867198 - DNA, 25 bp, Homo sapien
aatacctctgagaccgctgtgccct

SEQ ID NO: 4867199 - DNA, 25 bp, Homo sapien
acagaggactaaaatgaccaggctc

SEQ ID NO: 4867200 - DNA, 25 bp, Homo sapien
tcccagacatgccactgtgatccag

SEQ ID NO: 4867201 - DNA, 25 bp, Homo sapien
cagccaagaaactggctgtggggtc

SEQ ID NO: 4867202 - DNA, 25 bp, Homo sapien
gttctgcagattcacaagtggacag

SEQ ID NO: 4867203 - DNA, 25 bp, Homo sapien
ctgggagcgcacagcgtctgacgcc

SEQ ID NO: 4867204 - DNA, 25 bp, Homo sapien
tgacgcccgccgtccaggcccggga

SEQ ID NO: 4867205 - DNA, 25 bp, Homo sapien
tgggagcgcacagcgtctgacgccc

SEQ ID NO: 4867206 - DNA, 25 bp, Homo sapien
gtctgacgcccgccgtccaggcccg

SEQ ID NO: 4867207 - DNA, 25 bp, Homo sapien
aggacgacgagtacaacaagccgct

SEQ ID NO: 4867208 - DNA, 25 bp, Homo sapien
acgacgagaagatccgcctgctgct

SEQ ID NO: 4867209 - DNA, 25 bp, Homo sapien
cgcgcaccctcggagaacgaggacg

SEQ ID NO: 4867210 - DNA, 25 bp, Homo sapien
tcggagaacgaggacgacgagtaca

SEQ ID NO: 4867211 - DNA, 25 bp, Homo sapien
gacagtcactccgttgttgagccat

SEQ ID NO: 4867212 - DNA, 25 bp, Homo sapien
tttctcatcgcaggtgtggttccag

SEQ ID NO: 4867213 - DNA, 25 bp, Homo sapien
caacagaaacgtgaatgtgacagtc

SEQ ID NO: 4867214 - DNA, 25 bp, Homo sapien
ccaagtggcggaagaagagcgccct

SEQ ID NO: 4867215 - DNA, 25 bp, Homo sapien
tccccggaccgcatggccggtgaga

SEQ ID NO: 4867216 - DNA, 25 bp, Homo sapien
ctccccggaccgcatggccggtgag

SEQ ID NO: 4867217 - DNA, 25 bp, Homo sapien
ccggtgagagtagagtcggaggcgg

SEQ ID NO: 4867218 - DNA, 25 bp, Homo sapien
catggccggtgagagtagagtcgga

SEQ ID NO: 4867219 - DNA, 25 bp, Homo sapien
tgccaggctcgaggctgttccctgt

SEQ ID NO: 4867220 - DNA, 25 bp, Homo sapien
cagggtctcccagagtgaacttggt

SEQ ID NO: 4867221 - DNA, 25 bp, Homo sapien
gtcttagaagtcaggaccacccagg

SEQ ID NO: 4867222 - DNA, 25 bp, Homo sapien
tgaacttggtgctctaagtccaggc

SEQ ID NO: 4867223 - DNA, 25 bp, Homo sapien
tacctgtaggactcaaagggagcca

SEQ ID NO: 4867224 - DNA, 25 bp, Homo sapien
tgcgaacgcaaaagtgaatgagggc

SEQ ID NO: 4867225 - DNA, 25 bp, Homo sapien
gatagaaaacaagcgcaggagagcc

SEQ ID NO: 4867226 - DNA, 25 bp, Homo sapien
cttaagaatctgaggcgaggacccc

SEQ ID NO: 4867227 - DNA, 25 bp, Homo sapien
ctttggctcaggctctatggatgct

SEQ ID NO: 4867228 - DNA, 25 bp, Homo sapien
ggctcaggctctatggatgctcctg

SEQ ID NO: 4867229 - DNA, 25 bp, Homo sapien
tctttggctcaggctctatggatgc

SEQ ID NO: 4867230 - DNA, 25 bp, Homo sapien
tggctcaggctctatggatgctcct

SEQ ID NO: 4867231 - DNA, 25 bp, Homo sapien
tacagccggacctgatagagggcag

SEQ ID NO: 4867232 - DNA, 25 bp, Homo sapien
tctcgggaggtaacgctgcccttct

SEQ ID NO: 4867233 - DNA, 25 bp, Homo sapien
tgcctgtgttctgcccgtctttgcg

SEQ ID NO: 4867234 - DNA, 25 bp, Homo sapien
cgcagatagtgaagcgggccagcct

SEQ ID NO: 4867235 - DNA, 25 bp, Homo sapien
gagcacgaggaggtgactgtagagg

SEQ ID NO: 4867236 - DNA, 25 bp, Homo sapien
gatcattcgcaaggtggttcgacag

SEQ ID NO: 4867237 - DNA, 25 bp, Homo sapien
aggtggttcgacagatagacttgtc

SEQ ID NO: 4867238 - DNA, 25 bp, Homo sapien
ctttcctagatcattcgcaaggtgg

SEQ ID NO: 4867239 - DNA, 25 bp, Homo sapien
gcccttaggctcatgggagtagaat

SEQ ID NO: 4867240 - DNA, 25 bp, Homo sapien
aggtcacacccagtcacaccttggt

SEQ ID NO: 4867241 - DNA, 25 bp, Homo sapien
cagggctgtctagcagagggttttc

SEQ ID NO: 4867242 - DNA, 25 bp, Homo sapien
tgaaatgacactgccaaggcccctt

SEQ ID NO: 4867243 - DNA, 25 bp, Homo sapien
gtgacagaggagcaattcacggatg

SEQ ID NO: 4867244 - DNA, 25 bp, Homo sapien
cattgtcaccaagaaggtgggtgca

SEQ ID NO: 4867245 - DNA, 25 bp, Homo sapien
ttcagaatattccaggggagcaggt

SEQ ID NO: 4867246 - DNA, 25 bp, Homo sapien
caattcacggatgagcagggcaaca

SEQ ID NO: 4867247 - DNA, 25 bp, Homo sapien
gggtttcaagcaagtcacattctgg

SEQ ID NO: 4867248 - DNA, 25 bp, Homo sapien
cgtgagccaccatgggattgcaccc

SEQ ID NO: 4867249 - DNA, 25 bp, Homo sapien
gattgcacccggatcgtcctgtttc

SEQ ID NO: 4867250 - DNA, 25 bp, Homo sapien
gtttctgtcaccaactggctctggg

SEQ ID NO: 4867251 - DNA, 25 bp, Homo sapien
gatgtggactttcgtcacccagctg

SEQ ID NO: 4867252 - DNA, 25 bp, Homo sapien
cagtgagagaccaagagagcaaacc

SEQ ID NO: 4867253 - DNA, 25 bp, Homo sapien
tcagtgacgacgaggagaccatctc

SEQ ID NO: 4867254 - DNA, 25 bp, Homo sapien
tcagaacgtgatgcacattgtcagg

SEQ ID NO: 4867255 - DNA, 25 bp, Homo sapien
tataggagcgtgatgtcacccgggc

SEQ ID NO: 4867256 - DNA, 25 bp, Homo sapien
tgcttcagccgagagggccattcgg

SEQ ID NO: 4867257 - DNA, 25 bp, Homo sapien
ggcttccttctagcccggttggaca

SEQ ID NO: 4867258 - DNA, 25 bp, Homo sapien
acttgtgctttcagtgctcaggaca

SEQ ID NO: 4867259 - DNA, 25 bp, Homo sapien
cgtgagcaactctatcagggcacat

SEQ ID NO: 4867260 - DNA, 25 bp, Homo sapien
gcacaggaaacacgtgagcaactct

SEQ ID NO: 4867261 - DNA, 25 bp, Homo sapien
aaatgtgttatgtacaagggaacca

SEQ ID NO: 4867262 - DNA, 25 bp, Homo sapien
actgcatgcacaggaaacacgtgag

SEQ ID NO: 4867263 - DNA, 25 bp, Homo sapien
tggtccaccccagacctgtgagatg

SEQ ID NO: 4867264 - DNA, 25 bp, Homo sapien
gatctgcctatggtctggtccaccc

SEQ ID NO: 4867265 - DNA, 25 bp, Homo sapien
tgtgcttctgcaagtattgctgcag

SEQ ID NO: 4867266 - DNA, 25 bp, Homo sapien
cctcatgaggatgcacttgtgcttc

SEQ ID NO: 4867267 - DNA, 25 bp, Homo sapien
ccaagaggaggcctctagactgagg

SEQ ID NO: 4867268 - DNA, 25 bp, Homo sapien
gggctgcatgagactaccagagaga

SEQ ID NO: 4867269 - DNA, 25 bp, Homo sapien
gcatgagactaccagagagacagac

SEQ ID NO: 4867270 - DNA, 25 bp, Homo sapien
ttctccaacatgtagccccaagagg

SEQ ID NO: 4867271 - DNA, 25 bp, Homo sapien
ctctgggtcagcacagaaccagggc

SEQ ID NO: 4867272 - DNA, 25 bp, Homo sapien
gtcagcacagaaccagggcagtgac

SEQ ID NO: 4867273 - DNA, 25 bp, Homo sapien
tgggtcagcacagaaccagggcagt

SEQ ID NO: 4867274 - DNA, 25 bp, Homo sapien
ggtcagcacagaaccagggcagtga

SEQ ID NO: 4867275 - DNA, 25 bp, Homo sapien
gcccaaccagcccaatgcactgatg

SEQ ID NO: 4867276 - DNA, 25 bp, Homo sapien
gaccttggctcctctgtgcttttcc

SEQ ID NO: 4867277 - DNA, 25 bp, Homo sapien
cacagtcggaccttggctcctctgt

SEQ ID NO: 4867278 - DNA, 25 bp, Homo sapien
aaccagcccaatgcactgatgccca

SEQ ID NO: 4867279 - DNA, 25 bp, Homo sapien
tggcaggtccccggtagacccagct

SEQ ID NO: 4867280 - DNA, 25 bp, Homo sapien
caccgatgccctgctttgtccagaa

SEQ ID NO: 4867281 - DNA, 25 bp, Homo sapien
tctgtgccccagcagactcatgcac

SEQ ID NO: 4867282 - DNA, 25 bp, Homo sapien
tcacagtcgaatgttctgtgcttcc

SEQ ID NO: 4867283 - DNA, 25 bp, Homo sapien
gtttgatccacctaacaacttcgag

SEQ ID NO: 4867284 - DNA, 25 bp, Homo sapien
gtctaggtcatggaacatcttgccc

SEQ ID NO: 4867285 - DNA, 25 bp, Homo sapien
tgccaggtgcatgtcccttaaacca

SEQ ID NO: 4867286 - DNA, 25 bp, Homo sapien
cacacaggtagttaacagtggagtg

SEQ ID NO: 4867287 - DNA, 25 bp, Homo sapien
ggaacacggccctgcacatcgctgc

SEQ ID NO: 4867288 - DNA, 25 bp, Homo sapien
taattcacatctgggagtggcgggc

SEQ ID NO: 4867289 - DNA, 25 bp, Homo sapien
ccatctctgctctgttgtgacctga

SEQ ID NO: 4867290 - DNA, 25 bp, Homo sapien
caccatgggtgttgtgagagcttac

SEQ ID NO: 4867291 - DNA, 25 bp, Homo sapien
gaatggcttgcatctggcttctaag

SEQ ID NO: 4867292 - DNA, 25 bp, Homo sapien
cccacgggtcgagtatttggcaata

SEQ ID NO: 4867293 - DNA, 25 bp, Homo sapien
tgaacgatcacaaaagcatacacga

SEQ ID NO: 4867294 - DNA, 25 bp, Homo sapien
cagcccaggaaagcacgtgaaacca

SEQ ID NO: 4867295 - DNA, 25 bp, Homo sapien
atttccagtgcgaaaacccagccca

SEQ ID NO: 4867296 - DNA, 25 bp, Homo sapien
tgcggcacgtctggcccctaaaact

SEQ ID NO: 4867297 - DNA, 25 bp, Homo sapien
cagcctggccgggtagattcagcag

SEQ ID NO: 4867298 - DNA, 25 bp, Homo sapien
ccccaggtagcaggaaatgaatggg

SEQ ID NO: 4867299 - DNA, 25 bp, Homo sapien
aggaaggcagacctgttgggcgccc

SEQ ID NO: 4867300 - DNA, 25 bp, Homo sapien
cagagcttgccacgttttagagaaa

SEQ ID NO: 4867301 - DNA, 25 bp, Homo sapien
tctcgtgaattctgcctaaaaggcg

SEQ ID NO: 4867302 - DNA, 25 bp, Homo sapien
gcttgtgtgtggtccagagcttgcc

SEQ ID NO: 4867303 - DNA, 25 bp, Homo sapien
ggcgtctctcggaattgcctggcat

SEQ ID NO: 4867304 - DNA, 25 bp, Homo sapien
tctgcgttttcttcttggccatgca

SEQ ID NO: 4867305 - DNA, 25 bp, Homo sapien
ctgcgttttcttcttggccatgcat

SEQ ID NO: 4867306 - DNA, 25 bp, Homo sapien
ctctgcgttttcttcttggccatgc

SEQ ID NO: 4867307 - DNA, 25 bp, Homo sapien
actgacttatccaaatgtcgtctaa

SEQ ID NO: 4867308 - DNA, 25 bp, Homo sapien
gacttatccaaatgtcgtctaattt

SEQ ID NO: 4867309 - DNA, 25 bp, Homo sapien
tcacttaattaggtgcactactact

SEQ ID NO: 4867310 - DNA, 25 bp, Homo sapien
tatccaaatgtcgtctaatttcttc

SEQ ID NO: 4867311 - DNA, 25 bp, Homo sapien
ccgacagggcgtgcgccctggctca

SEQ ID NO: 4867312 - DNA, 25 bp, Homo sapien
ctagtgaaagcacgcggagaacaga

SEQ ID NO: 4867313 - DNA, 25 bp, Homo sapien
cagaaggactcctgcgccccacacc

SEQ ID NO: 4867314 - DNA, 25 bp, Homo sapien
ggaggctccccggccttggagagct

SEQ ID NO: 4867315 - DNA, 25 bp, Homo sapien
ctgcaaatcggccactaagcagcat

SEQ ID NO: 4867316 - DNA, 25 bp, Homo sapien
taagattgtgcccagattccctgca

SEQ ID NO: 4867317 - DNA, 25 bp, Homo sapien
tttggccctggtgttattaagattg

SEQ ID NO: 4867318 - DNA, 25 bp, Homo sapien
gattccctgcaaatcggccactaag

SEQ ID NO: 4867319 - DNA, 25 bp, Homo sapien
tcggggtcacctgttccctctgcca

SEQ ID NO: 4867320 - DNA, 25 bp, Homo sapien
accaactgccattccaggatatggt

SEQ ID NO: 4867321 - DNA, 25 bp, Homo sapien
tatggtgttctcactgataaagcca

SEQ ID NO: 4867322 - DNA, 25 bp, Homo sapien
tcctcggggtcacctgttccctctg

SEQ ID NO: 4867323 - DNA, 25 bp, Homo sapien
aagctgatctcggtggcatctttcc

SEQ ID NO: 4867324 - DNA, 25 bp, Homo sapien
gtgccctcatggcaaggccagtttg

SEQ ID NO: 4867325 - DNA, 25 bp, Homo sapien
tcggtggcatctttccgcagcagct

SEQ ID NO: 4867326 - DNA, 25 bp, Homo sapien
cacagacgggtcatgaagctgatct

SEQ ID NO: 4867327 - DNA, 25 bp, Homo sapien
agcgtccatggggtgcgctccagct

SEQ ID NO: 4867328 - DNA, 25 bp, Homo sapien
ggggagatggcccagcgtccatggg

SEQ ID NO: 4867329 - DNA, 25 bp, Homo sapien
gcccagcgtccatggggtgcgctcc

SEQ ID NO: 4867330 - DNA, 25 bp, Homo sapien
gatggcccagcgtccatggggtgcg

SEQ ID NO: 4867331 - DNA, 25 bp, Homo sapien
tgctgtggtagacatggcggttcct

SEQ ID NO: 4867332 - DNA, 25 bp, Homo sapien
cacatgtggcctagaactctgtcag

SEQ ID NO: 4867333 - DNA, 25 bp, Homo sapien
agtgcttcaaaaggctcctgcttaa

SEQ ID NO: 4867334 - DNA, 25 bp, Homo sapien
cattgttttgagtccaagtgcttca

SEQ ID NO: 4867335 - DNA, 25 bp, Homo sapien
ggtgttctcataatccgggagcaaa

SEQ ID NO: 4867336 - DNA, 25 bp, Homo sapien
tcagagactcgagggaaacaaggta

SEQ ID NO: 4867337 - DNA, 25 bp, Homo sapien
ctatggcagataacttgggaagctc

SEQ ID NO: 4867338 - DNA, 25 bp, Homo sapien
ggtctcaagcacatcgtgagtccgg

SEQ ID NO: 4867339 - DNA, 25 bp, Homo sapien
cgatggaatcccatgaaagactggg

SEQ ID NO: 4867340 - DNA, 25 bp, Homo sapien
cagaccctagatccaaatggcttgg

SEQ ID NO: 4867341 - DNA, 25 bp, Homo sapien
cctggcaccgtgtcttcttaagtag

SEQ ID NO: 4867342 - DNA, 25 bp, Homo sapien
tctttgttagctgggtcatgggcac

SEQ ID NO: 4867343 - DNA, 25 bp, Homo sapien
tgtgtactatttgcctacaatggga

SEQ ID NO: 4867344 - DNA, 25 bp, Homo sapien
gatggggtcactgcactacaagcct

SEQ ID NO: 4867345 - DNA, 25 bp, Homo sapien
aaacagctcaaattgcattagcagt

SEQ ID NO: 4867346 - DNA, 25 bp, Homo sapien
tttgtggccttagcaactcaggagg

SEQ ID NO: 4867347 - DNA, 25 bp, Homo sapien
tctgtaactgaatgtgaccaattag

SEQ ID NO: 4867348 - DNA, 25 bp, Homo sapien
tgaatgtgaccaattagttgtaaac

SEQ ID NO: 4867349 - DNA, 25 bp, Homo sapien
actgaatgtgaccaattagttgtaa

SEQ ID NO: 4867350 - DNA, 25 bp, Homo sapien
gtaactgaatgtgaccaattagttg

SEQ ID NO: 4867351 - DNA, 25 bp, Homo sapien
tgcaggaaaaagctggagtggccat

SEQ ID NO: 4867352 - DNA, 25 bp, Homo sapien
ctgaggggtgcaggaaaaagctgga

SEQ ID NO: 4867353 - DNA, 25 bp, Homo sapien
tgaggggtgcaggaaaaagctggag

SEQ ID NO: 4867354 - DNA, 25 bp, Homo sapien
gggtgcaggaaaaagctggagtggc

SEQ ID NO: 4867355 - DNA, 25 bp, Homo sapien
cttctgtggaggtcagatccacggc

SEQ ID NO: 4867356 - DNA, 25 bp, Homo sapien
cctttgcacggctgtagggcagcct

SEQ ID NO: 4867357 - DNA, 25 bp, Homo sapien
cgtggaaacacgttccttctgtgga

SEQ ID NO: 4867358 - DNA, 25 bp, Homo sapien
cagatggcttcaccgtggaaacacg

SEQ ID NO: 4867359 - DNA, 25 bp, Homo sapien
tggcccgatggacctgcagccactg

SEQ ID NO: 4867360 - DNA, 25 bp, Homo sapien
tgtgtggcccgatggacctgcagcc

SEQ ID NO: 4867361 - DNA, 25 bp, Homo sapien
cctgtgtggcccgatggacctgcag

SEQ ID NO: 4867362 - DNA, 25 bp, Homo sapien
tgtggcccgatggacctgcagccac

SEQ ID NO: 4867363 - DNA, 25 bp, Homo sapien
cagttgccacaaagagacttgcgga

SEQ ID NO: 4867364 - DNA, 25 bp, Homo sapien
tgttggtggccaaaacgacttctga

SEQ ID NO: 4867365 - DNA, 25 bp, Homo sapien
gacttctgactgtacggtggacatg

SEQ ID NO: 4867366 - DNA, 25 bp, Homo sapien
gagaagctcagcttggtcaacagga

SEQ ID NO: 4867367 - DNA, 25 bp, Homo sapien
taggagaaggcatcgactgcacgct

SEQ ID NO: 4867368 - DNA, 25 bp, Homo sapien
aatgaaatgtagctccccgtatgcc

SEQ ID NO: 4867369 - DNA, 25 bp, Homo sapien
gaagaggcctcggtatgggaatccc

SEQ ID NO: 4867370 - DNA, 25 bp, Homo sapien
ataaacagcacgtggttggagcgcc

SEQ ID NO: 4867371 - DNA, 25 bp, Homo sapien
gggacgcattctgacctaacatctg

SEQ ID NO: 4867372 - DNA, 25 bp, Homo sapien
cataatgtcttgcaggatctgggct

SEQ ID NO: 4867373 - DNA, 25 bp, Homo sapien
aaaattctcttgtgctgcccctcag

SEQ ID NO: 4867374 - DNA, 25 bp, Homo sapien
caccctgctggctgtaaacctttag

SEQ ID NO: 4867375 - DNA, 25 bp, Homo sapien
tcagcagtgcttgggtagatgattt

SEQ ID NO: 4867376 - DNA, 25 bp, Homo sapien
tgtagcgagaattgctcagcagtgc

SEQ ID NO: 4867377 - DNA, 25 bp, Homo sapien
tgtttgcacccgaggtcatcactgt

SEQ ID NO: 4867378 - DNA, 25 bp, Homo sapien
gtccgagcagttcccttggcactga

SEQ ID NO: 4867379 - DNA, 25 bp, Homo sapien
caaagtctggtatccacaggcctgt

SEQ ID NO: 4867380 - DNA, 25 bp, Homo sapien
taggttcagggcaccttgctagcat

SEQ ID NO: 4867381 - DNA, 25 bp, Homo sapien
gcaggcttctgttggtagcagtgca

SEQ ID NO: 4867382 - DNA, 25 bp, Homo sapien
gctagcattttgatcacttgggcca

SEQ ID NO: 4867383 - DNA, 25 bp, Homo sapien
cacacagtatctactgagccccagc

SEQ ID NO: 4867384 - DNA, 25 bp, Homo sapien
gtgagttcagtcctgtgttaggcat

SEQ ID NO: 4867385 - DNA, 25 bp, Homo sapien
gagccccagctgtgagttcagtcct

SEQ ID NO: 4867386 - DNA, 25 bp, Homo sapien
agctgtgagttcagtcctgtgttag

SEQ ID NO: 4867387 - DNA, 25 bp, Homo sapien
cacatcctagggaagctggcaatgc

SEQ ID NO: 4867388 - DNA, 25 bp, Homo sapien
ccttaaggtgtaatccaggctgaga

SEQ ID NO: 4867389 - DNA, 25 bp, Homo sapien
ctgagaattgtaaggtgagcacccc

SEQ ID NO: 4867390 - DNA, 25 bp, Homo sapien
tggcaatgcatctgcggctggacgc

SEQ ID NO: 4867391 - DNA, 25 bp, Homo sapien
ccaagaagctgcagagtctttaggg

SEQ ID NO: 4867392 - DNA, 25 bp, Homo sapien
tgccaagaagctgcagagtctttag

SEQ ID NO: 4867393 - DNA, 25 bp, Homo sapien
ggtgccaagaagctgcagagtcttt

SEQ ID NO: 4867394 - DNA, 25 bp, Homo sapien
cccggtgccaagaagctgcagagtc

SEQ ID NO: 4867395 - DNA, 25 bp, Homo sapien
gctgctgccagcctctaaactggga

SEQ ID NO: 4867396 - DNA, 25 bp, Homo sapien
ctgctgccagcctctaaactgggac

SEQ ID NO: 4867397 - DNA, 25 bp, Homo sapien
tgctgctgccagcctctaaactggg

SEQ ID NO: 4867398 - DNA, 25 bp, Homo sapien
gcgccgctgctgagtcgcggccaga

SEQ ID NO: 4867399 - DNA, 25 bp, Homo sapien
gggcacgatcagtgtcagcccctct

SEQ ID NO: 4867400 - DNA, 25 bp, Homo sapien
ccccagggggcacgatcagtgtcag

SEQ ID NO: 4867401 - DNA, 25 bp, Homo sapien
ccgctgctgagtcgcggccagagaa

SEQ ID NO: 4867402 - DNA, 25 bp, Homo sapien
aagcaactaaggcaatcccacagcc

SEQ ID NO: 4867403 - DNA, 25 bp, Homo sapien
tcaatgtaaggtgactggctctgtc

SEQ ID NO: 4867404 - DNA, 25 bp, Homo sapien
ggcagaatggtgtctgttttcaatg

SEQ ID NO: 4867405 - DNA, 25 bp, Homo sapien
tcctctgtggagcttgtaggagcgt

SEQ ID NO: 4867406 - DNA, 25 bp, Homo sapien
gggcagttagttgatgacttccact

SEQ ID NO: 4867407 - DNA, 25 bp, Homo sapien
tttgggcagttagttgatgacttcc

SEQ ID NO: 4867408 - DNA, 25 bp, Homo sapien
catttgggcagttagttgatgactt

SEQ ID NO: 4867409 - DNA, 25 bp, Homo sapien
tcagatgccaacaggggccccttct

SEQ ID NO: 4867410 - DNA, 25 bp, Homo sapien
gtggtggcaagagaatttggagtgc

SEQ ID NO: 4867411 - DNA, 25 bp, Homo sapien
caagtgcgtccgtaggttccgtggt

SEQ ID NO: 4867412 - DNA, 25 bp, Homo sapien
cagggagtcagatccaagtgcgtcc

SEQ ID NO: 4867413 - DNA, 25 bp, Homo sapien
tgcagtagggctgcacccggaagta

SEQ ID NO: 4867414 - DNA, 25 bp, Homo sapien
ccatgacccttggaggacagggaga

SEQ ID NO: 4867415 - DNA, 25 bp, Homo sapien
ctggctgtggcggttgagtgggaca

SEQ ID NO: 4867416 - DNA, 25 bp, Homo sapien
gagtgggacaacaaactcagagccc

SEQ ID NO: 4867417 - DNA, 25 bp, Homo sapien
ccaaggagagtgctcaggcgacatc

SEQ ID NO: 4867418 - DNA, 25 bp, Homo sapien
gggctggccgctcaactgtgctctg

SEQ ID NO: 4867419 - DNA, 25 bp, Homo sapien
gagcccatagcggcaatcggaaact

SEQ ID NO: 4867420 - DNA, 25 bp, Homo sapien
taggagcccatagcggcaatcggaa

SEQ ID NO: 4867421 - DNA, 25 bp, Homo sapien
ggagcccatagcggcaatcggaaac

SEQ ID NO: 4867422 - DNA, 25 bp, Homo sapien
ctaggagcccatagcggcaatcgga

SEQ ID NO: 4867423 - DNA, 25 bp, Homo sapien
tggagccaccacttggccgctcggg

SEQ ID NO: 4867424 - DNA, 25 bp, Homo sapien
ctgtgggctgatctgggaggaagat

SEQ ID NO: 4867425 - DNA, 25 bp, Homo sapien
ggaggaagattcctccctcccctga

SEQ ID NO: 4867426 - DNA, 25 bp, Homo sapien
tcaggcgtgtgtgatgggcacaggg

SEQ ID NO: 4867427 - DNA, 25 bp, Homo sapien
ttcgtggctagcaggaaggtgggtt

SEQ ID NO: 4867428 - DNA, 25 bp, Homo sapien
caagtgagggatcaggggagcttga

SEQ ID NO: 4867429 - DNA, 25 bp, Homo sapien
gggtctaaagggttcgtggctagca

SEQ ID NO: 4867430 - DNA, 25 bp, Homo sapien
cctgagagcagggtcaagtgaggga

SEQ ID NO: 4867431 - DNA, 25 bp, Homo sapien
tgtgtgaatagagctccagatgcct

SEQ ID NO: 4867432 - DNA, 25 bp, Homo sapien
gaagccacgtctatcctgtctgttt

SEQ ID NO: 4867433 - DNA, 25 bp, Homo sapien
tctaaaagccgcatgtacaaaggaa

SEQ ID NO: 4867434 - DNA, 25 bp, Homo sapien
aagagatctctagcgtgtgtgaata

SEQ ID NO: 4867435 - DNA, 25 bp, Homo sapien
gcacagtagggcagatctggacagc

SEQ ID NO: 4867436 - DNA, 25 bp, Homo sapien
tatacatctcaagggttaaccagac

SEQ ID NO: 4867437 - DNA, 25 bp, Homo sapien
tgagatcctgagttcatcccctgtg

SEQ ID NO: 4867438 - DNA, 25 bp, Homo sapien
agtccccagtgatttgcctcttagg

SEQ ID NO: 4867439 - DNA, 25 bp, Homo sapien
cgccgccgccacaaccacaaccagc

SEQ ID NO: 4867440 - DNA, 25 bp, Homo sapien
gccacaaccacaaccagcaccacag

SEQ ID NO: 4867441 - DNA, 25 bp, Homo sapien
ccacaaccacaaccagcaccacagc

SEQ ID NO: 4867442 - DNA, 25 bp, Homo sapien
gccgccacaaccacaaccagcacca

SEQ ID NO: 4867443 - DNA, 25 bp, Homo sapien
tgaacttttccctagagaatacttc

SEQ ID NO: 4867444 - DNA, 25 bp, Homo sapien
tagccactgtagtccaacctgcgtg

SEQ ID NO: 4867445 - DNA, 25 bp, Homo sapien
gtaaatagccactgtagtccaacct

SEQ ID NO: 4867446 - DNA, 25 bp, Homo sapien
gtagtccaacctgcgtgacatagca

SEQ ID NO: 4867447 - DNA, 25 bp, Homo sapien
cactgtagtccaacctgcgtgacat

SEQ ID NO: 4867448 - DNA, 25 bp, Homo sapien
ggctccagtcagttctacacgtttg

SEQ ID NO: 4867449 - DNA, 25 bp, Homo sapien
gcaaacaagtccttcctcatgatag

SEQ ID NO: 4867450 - DNA, 25 bp, Homo sapien
ttcctgcaaatagccagccatctcg

SEQ ID NO: 4867451 - DNA, 25 bp, Homo sapien
tctaaaatcaggtgggaaagtctgt

SEQ ID NO: 4867452 - DNA, 25 bp, Homo sapien
tcccgggttctcgccattctttgta

SEQ ID NO: 4867453 - DNA, 25 bp, Homo sapien
cgggttctcgccattctttgtattt

SEQ ID NO: 4867454 - DNA, 25 bp, Homo sapien
ggatggtctcgatcgtgatccgccg

SEQ ID NO: 4867455 - DNA, 25 bp, Homo sapien
atggtctcgatcgtgatccgccggc

SEQ ID NO: 4867456 - DNA, 25 bp, Homo sapien
aagtctgagtgtagagcaaaaaggc

SEQ ID NO: 4867457 - DNA, 25 bp, Homo sapien
ggtcacaatatccagaatcctgaaa

SEQ ID NO: 4867458 - DNA, 25 bp, Homo sapien
tctgagtgtagagcaaaaaggctta

SEQ ID NO: 4867459 - DNA, 25 bp, Homo sapien
aagggaaagataggtcacaatatcc

SEQ ID NO: 4867460 - DNA, 25 bp, Homo sapien
gtagtccggattctttttagcacag

SEQ ID NO: 4867461 - DNA, 25 bp, Homo sapien
ttggtagtccggattctttttagca

SEQ ID NO: 4867462 - DNA, 25 bp, Homo sapien
ggtagtccggattctttttagcaca

SEQ ID NO: 4867463 - DNA, 25 bp, Homo sapien
tggtagtccggattctttttagcac

SEQ ID NO: 4867464 - DNA, 25 bp, Homo sapien
ccactactacctctctgctttggtg

SEQ ID NO: 4867465 - DNA, 25 bp, Homo sapien
actctttaaagaagattgtctgtgt

SEQ ID NO: 4867466 - DNA, 25 bp, Homo sapien
cgatttgccgtagtatattagaatg

SEQ ID NO: 4867467 - DNA, 25 bp, Homo sapien
ctcatagaggtcaaacgatttgccg

SEQ ID NO: 4867468 - DNA, 25 bp, Homo sapien
gaggtcaaacgatttgccgtagtat

SEQ ID NO: 4867469 - DNA, 25 bp, Homo sapien
actttggggaaaatctcatgaccat

SEQ ID NO: 4867470 - DNA, 25 bp, Homo sapien
ccaacctctctgctttaactttggg

SEQ ID NO: 4867471 - DNA, 25 bp, Homo sapien
gaaaatctcatgaccatgtggtggg

SEQ ID NO: 4867472 - DNA, 25 bp, Homo sapien
atcgtgcccaacctctctgctttaa

SEQ ID NO: 4867473 - DNA, 25 bp, Homo sapien
caaactcctgattggcttcccaaag

SEQ ID NO: 4867474 - DNA, 25 bp, Homo sapien
atctcaaactcctgattggcttccc

SEQ ID NO: 4867475 - DNA, 25 bp, Homo sapien
ctgtgttggccagacgaatctcaaa

SEQ ID NO: 4867476 - DNA, 25 bp, Homo sapien
actgtgttggccagacgaatctcaa

SEQ ID NO: 4867477 - DNA, 25 bp, Homo sapien
gaagtagagctttgacaggaattta

SEQ ID NO: 4867478 - DNA, 25 bp, Homo sapien
tgggtaacctggagcagaaagatcc

SEQ ID NO: 4867479 - DNA, 25 bp, Homo sapien
tactctaagttacatctcaatttgg

SEQ ID NO: 4867480 - DNA, 25 bp, Homo sapien
tcaatttggtcaactcttagtagag

SEQ ID NO: 4867481 - DNA, 25 bp, Homo sapien
tttggggcatctccgcggtccggcc

SEQ ID NO: 4867482 - DNA, 25 bp, Homo sapien
aagatggcggccgtgtcagtttggg

SEQ ID NO: 4867483 - DNA, 25 bp, Homo sapien
gagctcactgtctccaagatggcgg

SEQ ID NO: 4867484 - DNA, 25 bp, Homo sapien
ggccccgggatctcggctgtccttc

SEQ ID NO: 4867485 - DNA, 25 bp, Homo sapien
taaaggtcaggcagcaggatacacg

SEQ ID NO: 4867486 - DNA, 25 bp, Homo sapien
ggaggcccttaaaagctaaagctga

SEQ ID NO: 4867487 - DNA, 25 bp, Homo sapien
cagaagttcagaaaaggaagtcagc

SEQ ID NO: 4867488 - DNA, 25 bp, Homo sapien
taaaatgaggtattgcgggcgacag

SEQ ID NO: 4867489 - DNA, 25 bp, Homo sapien
atttgtcagtgaaataatctgtgcc

SEQ ID NO: 4867490 - DNA, 25 bp, Homo sapien
acatattgccataaagttgttcaca

SEQ ID NO: 4867491 - DNA, 25 bp, Homo sapien
catgaaggacatccgttttcttgga

SEQ ID NO: 4867492 - DNA, 25 bp, Homo sapien
taaagcagccttgcattcctaggac

SEQ ID NO: 4867493 - DNA, 25 bp, Homo sapien
aagggcagttccctgggctctgcat

SEQ ID NO: 4867494 - DNA, 25 bp, Homo sapien
gaaaagggcagttccctgggctctg

SEQ ID NO: 4867495 - DNA, 25 bp, Homo sapien
aaaagggcagttccctgggctctgc

SEQ ID NO: 4867496 - DNA, 25 bp, Homo sapien
aaagggcagttccctgggctctgca

SEQ ID NO: 4867497 - DNA, 25 bp, Homo sapien
tgtaacacagtggaagatgcaggtt

SEQ ID NO: 4867498 - DNA, 25 bp, Homo sapien
tcatgtaacacagtggaagatgcag

SEQ ID NO: 4867499 - DNA, 25 bp, Homo sapien
gtaacacagtggaagatgcaggttc

SEQ ID NO: 4867500 - DNA, 25 bp, Homo sapien
catgtaacacagtggaagatgcagg

SEQ ID NO: 4867501 - DNA, 25 bp, Homo sapien
gagaccctgatcaatccactagtga

SEQ ID NO: 4867502 - DNA, 25 bp, Homo sapien
actggagaccctgatcaatccacta

SEQ ID NO: 4867503 - DNA, 25 bp, Homo sapien
tggagaccctgatcaatccactagt

SEQ ID NO: 4867504 - DNA, 25 bp, Homo sapien
tgatcaatccactagtgatccccat

SEQ ID NO: 4867505 - DNA, 25 bp, Homo sapien
ttataaagagttgcttccggaggtg

SEQ ID NO: 4867506 - DNA, 25 bp, Homo sapien
tctggttagccttattgctggcaac

SEQ ID NO: 4867507 - DNA, 25 bp, Homo sapien
gcaatctggaactgaacctacagta

SEQ ID NO: 4867508 - DNA, 25 bp, Homo sapien
ggcagtaccactctgtgagggcaga

SEQ ID NO: 4867509 - DNA, 25 bp, Homo sapien
tgttatctgaactaagcccatggca

SEQ ID NO: 4867510 - DNA, 25 bp, Homo sapien
tttaatcaaaaacaggataattcca

SEQ ID NO: 4867511 - DNA, 25 bp, Homo sapien
tcatccatctgaggtcatttccaca

SEQ ID NO: 4867512 - DNA, 25 bp, Homo sapien
caaatgacaaactaagcatgaacgg

SEQ ID NO: 4867513 - DNA, 25 bp, Homo sapien
cgtgagctctctcagtttgataggc

SEQ ID NO: 4867514 - DNA, 25 bp, Homo sapien
tcttgggacagcaataattcatcac

SEQ ID NO: 4867515 - DNA, 25 bp, Homo sapien
caaattcttaaggtcagcattactc

SEQ ID NO: 4867516 - DNA, 25 bp, Homo sapien
gggggctttgttcgccttcatgtgc

SEQ ID NO: 4867517 - DNA, 25 bp, Homo sapien
ttattcctgagccataactttttgt

SEQ ID NO: 4867518 - DNA, 25 bp, Homo sapien
tacctcctcttccagtttaggaaca

SEQ ID NO: 4867519 - DNA, 25 bp, Homo sapien
tattcctgagccataactttttgtt

SEQ ID NO: 4867520 - DNA, 25 bp, Homo sapien
ttcttctgtgctacctcctcttcca

SEQ ID NO: 4867521 - DNA, 25 bp, Homo sapien
ggcagcaggcattggtttcgtgggt

SEQ ID NO: 4867522 - DNA, 25 bp, Homo sapien
cgtgggtgtgaattgcagcaggtgc

SEQ ID NO: 4867523 - DNA, 25 bp, Homo sapien
gtgcagcacggctttggagctgact

SEQ ID NO: 4867524 - DNA, 25 bp, Homo sapien
tgcagcacggctttggagctgactg

SEQ ID NO: 4867525 - DNA, 25 bp, Homo sapien
caatcccttcgggttgctgtcatga

SEQ ID NO: 4867526 - DNA, 25 bp, Homo sapien
gtcagacaccatgaattttacttcg

SEQ ID NO: 4867527 - DNA, 25 bp, Homo sapien
tctgcgatgcagttaagtttgttgg

SEQ ID NO: 4867528 - DNA, 25 bp, Homo sapien
ttttacttcgctgggtgctggatat

SEQ ID NO: 4867529 - DNA, 25 bp, Homo sapien
tcttccttgttagagctatatatcc

SEQ ID NO: 4867530 - DNA, 25 bp, Homo sapien
agtctctaacaccttctccttaggc

SEQ ID NO: 4867531 - DNA, 25 bp, Homo sapien
tagttacccctatctgtacttcctc

SEQ ID NO: 4867532 - DNA, 25 bp, Homo sapien
tctccacaatagttacccctatctg

SEQ ID NO: 4867533 - DNA, 25 bp, Homo sapien
actgaaggagtttactagccagcct

SEQ ID NO: 4867534 - DNA, 25 bp, Homo sapien
gaaggagtttactagccagcctttg

SEQ ID NO: 4867535 - DNA, 25 bp, Homo sapien
gagtttactagccagcctttgtagc

SEQ ID NO: 4867536 - DNA, 25 bp, Homo sapien
ttactagccagcctttgtagcagcc

SEQ ID NO: 4867537 - DNA, 25 bp, Homo sapien
atcaggagcctctgatggacaaact

SEQ ID NO: 4867538 - DNA, 25 bp, Homo sapien
caggagcctctgatggacaaacttc

SEQ ID NO: 4867539 - DNA, 25 bp, Homo sapien
gatggacaaacttccagctgtaact

SEQ ID NO: 4867540 - DNA, 25 bp, Homo sapien
ttctcaggtgcattagatcaggagc

SEQ ID NO: 4867541 - DNA, 25 bp, Homo sapien
tgacagaacaacgtggccctctttc

SEQ ID NO: 4867542 - DNA, 25 bp, Homo sapien
acagaacaacgtggccctctttcca

SEQ ID NO: 4867543 - DNA, 25 bp, Homo sapien
aggtgacagaacaacgtggccctct

SEQ ID NO: 4867544 - DNA, 25 bp, Homo sapien
ggtgacagaacaacgtggccctctt

SEQ ID NO: 4867545 - DNA, 25 bp, Homo sapien
tattacgtttcttgtccctgcctga

SEQ ID NO: 4867546 - DNA, 25 bp, Homo sapien
tcaaatattacgtttcttgtccctg

SEQ ID NO: 4867547 - DNA, 25 bp, Homo sapien
tacgtttcttgtccctgcctgatcc

SEQ ID NO: 4867548 - DNA, 25 bp, Homo sapien
aatattacgtttcttgtccctgcct

SEQ ID NO: 4867549 - DNA, 25 bp, Homo sapien
gatgtttgaccagccccaatctggg

SEQ ID NO: 4867550 - DNA, 25 bp, Homo sapien
ggtcttccacgggtttgcccagagc

SEQ ID NO: 4867551 - DNA, 25 bp, Homo sapien
ccaatctgggagtttaaggaggtct

SEQ ID NO: 4867552 - DNA, 25 bp, Homo sapien
atggccagaccaccgagaagccaca

SEQ ID NO: 4867553 - DNA, 25 bp, Homo sapien
ttgcagtcgtgctggaaggaaaagc

SEQ ID NO: 4867554 - DNA, 25 bp, Homo sapien
taacagggcagcgttgcaatgttgc

SEQ ID NO: 4867555 - DNA, 25 bp, Homo sapien
ggaaaagcagaacggaatcacagga

SEQ ID NO: 4867556 - DNA, 25 bp, Homo sapien
tccacaaataactcgctgaggtctg

SEQ ID NO: 4867557 - DNA, 25 bp, Homo sapien
cgctgcatacggagggcagcgccgc

SEQ ID NO: 4867558 - DNA, 25 bp, Homo sapien
cgcgctgcatacggagggcagcgcc

SEQ ID NO: 4867559 - DNA, 25 bp, Homo sapien
tgcatacggagggcagcgccgcctc

SEQ ID NO: 4867560 - DNA, 25 bp, Homo sapien
gctgcatacggagggcagcgccgcc

SEQ ID NO: 4867561 - DNA, 25 bp, Homo sapien
gtctccgcgggagtttcacaccagg

SEQ ID NO: 4867562 - DNA, 25 bp, Homo sapien
gagcgtctccgcgggagtttcacac

SEQ ID NO: 4867563 - DNA, 25 bp, Homo sapien
ctccgcgggagtttcacaccagggc

SEQ ID NO: 4867564 - DNA, 25 bp, Homo sapien
gcgtctccgcgggagtttcacacca

SEQ ID NO: 4867565 - DNA, 25 bp, Homo sapien
gctgctcgggttgtgcctgttccta

SEQ ID NO: 4867566 - DNA, 25 bp, Homo sapien
tgccatggtgacgggccaggcatct

SEQ ID NO: 4867567 - DNA, 25 bp, Homo sapien
gggcccggctgctcgggttgtgcct

SEQ ID NO: 4867568 - DNA, 25 bp, Homo sapien
atggtgacgggccaggcatctaaag

SEQ ID NO: 4867569 - DNA, 25 bp, Homo sapien
agcccgggaggagagcgtctaaggc

SEQ ID NO: 4867570 - DNA, 25 bp, Homo sapien
cccgggaggagagcgtctaaggcgg

SEQ ID NO: 4867571 - DNA, 25 bp, Homo sapien
gcccgggaggagagcgtctaaggcg

SEQ ID NO: 4867572 - DNA, 25 bp, Homo sapien
gagcccgggaggagagcgtctaagg

SEQ ID NO: 4867573 - DNA, 25 bp, Homo sapien
cccctggagacaaagaggtgccttc

SEQ ID NO: 4867574 - DNA, 25 bp, Homo sapien
gagatccggcttgcgctgaaacagc

SEQ ID NO: 4867575 - DNA, 25 bp, Homo sapien
gacagggagacacacaactggtcct

SEQ ID NO: 4867576 - DNA, 25 bp, Homo sapien
gcggattcccttcgctgggacacaa

SEQ ID NO: 4867577 - DNA, 25 bp, Homo sapien
taatgagccgctagtctcggaaggt

SEQ ID NO: 4867578 - DNA, 25 bp, Homo sapien
aatgtttatcaagttcctccgcaga

SEQ ID NO: 4867579 - DNA, 25 bp, Homo sapien
taatgtttatcaagttcctccgcag

SEQ ID NO: 4867580 - DNA, 25 bp, Homo sapien
tttaatgtttatcaagttcctccgc

SEQ ID NO: 4867581 - DNA, 25 bp, Homo sapien
ttaatgtttatcaagttcctccgca

SEQ ID NO: 4867582 - DNA, 25 bp, Homo sapien
gcccccacactgggagtaatgtttc

SEQ ID NO: 4867583 - DNA, 25 bp, Homo sapien
cctattttggaaattcgctccagcc

SEQ ID NO: 4867584 - DNA, 25 bp, Homo sapien
attttggaaattcgctccagcccgc

SEQ ID NO: 4867585 - DNA, 25 bp, Homo sapien
aagtctgtttgaagcttcttgcccc

SEQ ID NO: 4867586 - DNA, 25 bp, Homo sapien
ccagtgacgcaggaagtcaagccca

SEQ ID NO: 4867587 - DNA, 25 bp, Homo sapien
tcaagcccagatgcggtgaggcgtc

SEQ ID NO: 4867588 - DNA, 25 bp, Homo sapien
tgacagtggcgacctcgccgatgag

SEQ ID NO: 4867589 - DNA, 25 bp, Homo sapien
ccacgaaggcgtggagtggaagtca

SEQ ID NO: 4867590 - DNA, 25 bp, Homo sapien
cgctttggagacctcaggacttgga

SEQ ID NO: 4867591 - DNA, 25 bp, Homo sapien
tccaccgctttggagacctcaggac

SEQ ID NO: 4867592 - DNA, 25 bp, Homo sapien
caggacttggatacgcttttgagtg

SEQ ID NO: 4867593 - DNA, 25 bp, Homo sapien
gggcgggtctctccaccgctttgga

SEQ ID NO: 4867594 - DNA, 25 bp, Homo sapien
tgataaatcctgagggcggcggcta

SEQ ID NO: 4867595 - DNA, 25 bp, Homo sapien
ggcttccgggcacgagttgctgaca

SEQ ID NO: 4867596 - DNA, 25 bp, Homo sapien
cactcatccagtcacaaagggctgg

SEQ ID NO: 4867597 - DNA, 25 bp, Homo sapien
tgctgacagcgcctcgcggttgata

SEQ ID NO: 4867598 - DNA, 25 bp, Homo sapien
tctccgattggtacagctccgagac

SEQ ID NO: 4867599 - DNA, 25 bp, Homo sapien
tcatctccgattggtacagctccga

SEQ ID NO: 4867600 - DNA, 25 bp, Homo sapien
gattggtacagctccgagaccccga

SEQ ID NO: 4867601 - DNA, 25 bp, Homo sapien
tggtacagctccgagaccccgagtc

SEQ ID NO: 4867602 - DNA, 25 bp, Homo sapien
ttgccctgttgtcgggctcgagtcc

SEQ ID NO: 4867603 - DNA, 25 bp, Homo sapien
attgatcgctgttggcggcttgccc

SEQ ID NO: 4867604 - DNA, 25 bp, Homo sapien
tgattgggtatctgggagccgctcc

SEQ ID NO: 4867605 - DNA, 25 bp, Homo sapien
agtcccccgattggccctgttgagg

SEQ ID NO: 4867606 - DNA, 25 bp, Homo sapien
gccgcgcgcgctgaggcagccgctc

SEQ ID NO: 4867607 - DNA, 25 bp, Homo sapien
ccgccgcgcgcgctgaggcagccgc

SEQ ID NO: 4867608 - DNA, 25 bp, Homo sapien
ccactgctcctaggcgcggacaggc

SEQ ID NO: 4867609 - DNA, 25 bp, Homo sapien
cgcgcgcgctgaggcagccgctcgc

SEQ ID NO: 4867610 - DNA, 25 bp, Homo sapien
ctccaggctcggggtcgtccctact

SEQ ID NO: 4867611 - DNA, 25 bp, Homo sapien
cctctccaggctcggggtcgtccct

SEQ ID NO: 4867612 - DNA, 25 bp, Homo sapien
caggctcggggtcgtccctactcct

SEQ ID NO: 4867613 - DNA, 25 bp, Homo sapien
gctcggggtcgtccctactcctcac

SEQ ID NO: 4867614 - DNA, 25 bp, Homo sapien
tctgaacccggcccctcacctctcc

SEQ ID NO: 4867615 - DNA, 25 bp, Homo sapien
ctcacctctccccgccgcgtccgca

SEQ ID NO: 4867616 - DNA, 25 bp, Homo sapien
acctctccccgccgcgtccgcagcc

SEQ ID NO: 4867617 - DNA, 25 bp, Homo sapien
ctctccccgccgcgtccgcagccct

SEQ ID NO: 4867618 - DNA, 25 bp, Homo sapien
cgttccggggtgaagagcgcagggg

SEQ ID NO: 4867619 - DNA, 25 bp, Homo sapien
gggtgccgggccgcgccagcgagcg

SEQ ID NO: 4867620 - DNA, 25 bp, Homo sapien
gcgcgttccggggtgaagagcgcag

SEQ ID NO: 4867621 - DNA, 25 bp, Homo sapien
gggtgaagagcgcaggggtgccggg

SEQ ID NO: 4867622 - DNA, 25 bp, Homo sapien
cgcgggtggtcaaaacgcagaggcc

SEQ ID NO: 4867623 - DNA, 25 bp, Homo sapien
ccaaggccctcagacggttgcatct

SEQ ID NO: 4867624 - DNA, 25 bp, Homo sapien
gatgtggccattccgcgaaccggcg

SEQ ID NO: 4867625 - DNA, 25 bp, Homo sapien
tctctctggtgccagtcgccaggat

SEQ ID NO: 4867626 - DNA, 25 bp, Homo sapien
tgcatgagcctgaagatagccctcc

SEQ ID NO: 4867627 - DNA, 25 bp, Homo sapien
tctttcaagaccaggcccaatcttc

SEQ ID NO: 4867628 - DNA, 25 bp, Homo sapien
tgacagaagaaagcctttttcagtc

SEQ ID NO: 4867629 - DNA, 25 bp, Homo sapien
tggcgattgtcagtgacagaagaaa

SEQ ID NO: 4867630 - DNA, 25 bp, Homo sapien
ggtggcgattgtcagtgacagaaga

SEQ ID NO: 4867631 - DNA, 25 bp, Homo sapien
gtgacagaagaaagcctttttcagt

SEQ ID NO: 4867632 - DNA, 25 bp, Homo sapien
gttgatcaagaaaagactatggatc

SEQ ID NO: 4867633 - DNA, 25 bp, Homo sapien
acagaacggctgaccacacttttcc

SEQ ID NO: 4867634 - DNA, 25 bp, Homo sapien
aagtaatcacaaacagaacggctga

SEQ ID NO: 4867635 - DNA, 25 bp, Homo sapien
tcagtagctctctcttgcgcctcaa

SEQ ID NO: 4867636 - DNA, 25 bp, Homo sapien
gggacctccgtctggatcacggcca

SEQ ID NO: 4867637 - DNA, 25 bp, Homo sapien
ccaccactcggtgaagaaactcaat

SEQ ID NO: 4867638 - DNA, 25 bp, Homo sapien
tcaatgacaaacagaggggggacct

SEQ ID NO: 4867639 - DNA, 25 bp, Homo sapien
ggatcacggccacaaaaaagatctt

SEQ ID NO: 4867640 - DNA, 25 bp, Homo sapien
caaagacactttacggtttacatat

SEQ ID NO: 4867641 - DNA, 25 bp, Homo sapien
tggaaacaggactacaaagacactt

SEQ ID NO: 4867642 - DNA, 25 bp, Homo sapien
ttacatatatgaactttcccacatt

SEQ ID NO: 4867643 - DNA, 25 bp, Homo sapien
ggctttacacaatggaaacaggact

SEQ ID NO: 4867644 - DNA, 25 bp, Homo sapien
cctgtgctgcaaatggtgtcgtgtc

SEQ ID NO: 4867645 - DNA, 25 bp, Homo sapien
tcgtgtcctggtatcactgacctcc

SEQ ID NO: 4867646 - DNA, 25 bp, Homo sapien
gaagttgttctagacgtggtgcaga

SEQ ID NO: 4867647 - DNA, 25 bp, Homo sapien
tccagacctcatatgacacagaagt

SEQ ID NO: 4867648 - DNA, 25 bp, Homo sapien
ttttcactgtgcaaaggggccggta

SEQ ID NO: 4867649 - DNA, 25 bp, Homo sapien
caaaggggccggtatgttgcatgag

SEQ ID NO: 4867650 - DNA, 25 bp, Homo sapien
tcactgtgcaaaggggccggtatgt

SEQ ID NO: 4867651 - DNA, 25 bp, Homo sapien
aaaggggccggtatgttgcatgaga

SEQ ID NO: 4867652 - DNA, 25 bp, Homo sapien
gagaataaggatctggcctgtccat

SEQ ID NO: 4867653 - DNA, 25 bp, Homo sapien
gtttggtagaaagcactagactggc

SEQ ID NO: 4867654 - DNA, 25 bp, Homo sapien
tctgggctactcttctacaacgagg

SEQ ID NO: 4867655 - DNA, 25 bp, Homo sapien
tacaacgagggaatgcagcataacc

SEQ ID NO: 4867656 - DNA, 25 bp, Homo sapien
gacaaccgttcgaaggatggtagga

SEQ ID NO: 4867657 - DNA, 25 bp, Homo sapien
tttaagaatgttcgactcggtagcc

SEQ ID NO: 4867658 - DNA, 25 bp, Homo sapien
ggaaaaccattgtcaagcatctctt

SEQ ID NO: 4867659 - DNA, 25 bp, Homo sapien
ggctctgaacagactccaaaataat

SEQ ID NO: 4867660 - DNA, 25 bp, Homo sapien
atatttcaccccagtccgtcgccaa

SEQ ID NO: 4867661 - DNA, 25 bp, Homo sapien
gtccgtcgccaaggcaccactgaca

SEQ ID NO: 4867662 - DNA, 25 bp, Homo sapien
tatatttcaccccagtccgtcgcca

SEQ ID NO: 4867663 - DNA, 25 bp, Homo sapien
ccagtccgtcgccaaggcaccactg

SEQ ID NO: 4867664 - DNA, 25 bp, Homo sapien
ccagtcagcttgacacaggcatcaa

SEQ ID NO: 4867665 - DNA, 25 bp, Homo sapien
ggaaagtgtaaggtctggcatgcca

SEQ ID NO: 4867666 - DNA, 25 bp, Homo sapien
ggtctggcatgccagtcagcttgac

SEQ ID NO: 4867667 - DNA, 25 bp, Homo sapien
agtcagcttgacacaggcatcaatc

SEQ ID NO: 4867668 - DNA, 25 bp, Homo sapien
tagaaaattcaagcctgagacaagc

SEQ ID NO: 4867669 - DNA, 25 bp, Homo sapien
gaagtgggcattaaacacccgcagt

SEQ ID NO: 4867670 - DNA, 25 bp, Homo sapien
gagacaagcttcgtggctgtcctaa

SEQ ID NO: 4867671 - DNA, 25 bp, Homo sapien
caagaacttaatctctggcccagga

SEQ ID NO: 4867672 - DNA, 25 bp, Homo sapien
ggtaagacagcaggcggaagtttcc

SEQ ID NO: 4867673 - DNA, 25 bp, Homo sapien
aacgaacacaaggatggaagctgac

SEQ ID NO: 4867674 - DNA, 25 bp, Homo sapien
gctgacatcatccaacaacctaggg

SEQ ID NO: 4867675 - DNA, 25 bp, Homo sapien
gaaggagaggatgcgctcagattcc

SEQ ID NO: 4867676 - DNA, 25 bp, Homo sapien
tgaacccaggtaactctagagcctg

SEQ ID NO: 4867677 - DNA, 25 bp, Homo sapien
caattagtaaccacagaagctggaa

SEQ ID NO: 4867678 - DNA, 25 bp, Homo sapien
cacagatacggtttccacatacatg

SEQ ID NO: 4867679 - DNA, 25 bp, Homo sapien
tcacctgaggttacccaattagtaa

SEQ ID NO: 4867680 - DNA, 25 bp, Homo sapien
ttagaccagggacattgaacacagt

SEQ ID NO: 4867681 - DNA, 25 bp, Homo sapien
cacatcacacgggaagggactggtg

SEQ ID NO: 4867682 - DNA, 25 bp, Homo sapien
tgaacacagtatgcccagattctga

SEQ ID NO: 4867683 - DNA, 25 bp, Homo sapien
gagtctgattccagaggctttgacc

SEQ ID NO: 4867684 - DNA, 25 bp, Homo sapien
tcatctggtccttacaaaaacccca

SEQ ID NO: 4867685 - DNA, 25 bp, Homo sapien
gaagtcacggaataaccctgaagta

SEQ ID NO: 4867686 - DNA, 25 bp, Homo sapien
cctgaagtaataacagttcctaaca

SEQ ID NO: 4867687 - DNA, 25 bp, Homo sapien
cataaggtagggtaggctgtcatga

SEQ ID NO: 4867688 - DNA, 25 bp, Homo sapien
ttgaaaagctactgtctagtaacta

SEQ ID NO: 4867689 - DNA, 25 bp, Homo sapien
gagtcatttcattcgtgcactggga

SEQ ID NO: 4867690 - DNA, 25 bp, Homo sapien
gctactgtctagtaactaaattaac

SEQ ID NO: 4867691 - DNA, 25 bp, Homo sapien
gcactgggaaaatggtagttcttcc

SEQ ID NO: 4867692 - DNA, 25 bp, Homo sapien
ggtgacagtcactccctcaatggtc

SEQ ID NO: 4867693 - DNA, 25 bp, Homo sapien
tgactgggtcgaatgtgtgtgtccc

SEQ ID NO: 4867694 - DNA, 25 bp, Homo sapien
tgcttgggtcccaccgttatttcaa

SEQ ID NO: 4867695 - DNA, 25 bp, Homo sapien
tcaaagcgtccaagggaactactgt

SEQ ID NO: 4867696 - DNA, 25 bp, Homo sapien
actcatggtccccttcaaacttggt

SEQ ID NO: 4867697 - DNA, 25 bp, Homo sapien
tcatggtccccttcaaacttggtag

SEQ ID NO: 4867698 - DNA, 25 bp, Homo sapien
atggtccccttcaaacttggtagct

SEQ ID NO: 4867699 - DNA, 25 bp, Homo sapien
aattgtggggttttcatctggtttg

SEQ ID NO: 4867700 - DNA, 25 bp, Homo sapien
tcaggttcgaacttggaacttccca

SEQ ID NO: 4867701 - DNA, 25 bp, Homo sapien
catatccagacgattcaccttgagt

SEQ ID NO: 4867702 - DNA, 25 bp, Homo sapien
catgtattttatgcccttaaagggt

SEQ ID NO: 4867703 - DNA, 25 bp, Homo sapien
ggaacttcccagctttggtcatgta

SEQ ID NO: 4867704 - DNA, 25 bp, Homo sapien
tgcaagactattccctcagcaaatg

SEQ ID NO: 4867705 - DNA, 25 bp, Homo sapien
gaaaaaatgtgcaagactattccct

SEQ ID NO: 4867706 - DNA, 25 bp, Homo sapien
caggaggggactgacctaggagaca

SEQ ID NO: 4867707 - DNA, 25 bp, Homo sapien
gagacaggctgatatttttttttac

SEQ ID NO: 4867708 - DNA, 25 bp, Homo sapien
cctcccttgattagttccatggcac

SEQ ID NO: 4867709 - DNA, 25 bp, Homo sapien
ctcccttgattagttccatggcact

SEQ ID NO: 4867710 - DNA, 25 bp, Homo sapien
ccatttccagaagtacaagtgtttt

SEQ ID NO: 4867711 - DNA, 25 bp, Homo sapien
tccttaaggtagagtccgactgctt

SEQ ID NO: 4867712 - DNA, 25 bp, Homo sapien
gcaacaggcagtgtctgaaaactag

SEQ ID NO: 4867713 - DNA, 25 bp, Homo sapien
gaaaactagtccgataccatcatgg

SEQ ID NO: 4867714 - DNA, 25 bp, Homo sapien
caggtaacaggaaaatggccggtga

SEQ ID NO: 4867715 - DNA, 25 bp, Homo sapien
taaaaatcctgtagaaggatcaggt

SEQ ID NO: 4867716 - DNA, 25 bp, Homo sapien
ttcatgggaagagtcggccctctac

SEQ ID NO: 4867717 - DNA, 25 bp, Homo sapien
tccagtacgatgacacacaaaccct

SEQ ID NO: 4867718 - DNA, 25 bp, Homo sapien
aaggatcaaccacaccctcgatggt

SEQ ID NO: 4867719 - DNA, 25 bp, Homo sapien
gacaaatggagatatgagctcactc

SEQ ID NO: 4867720 - DNA, 25 bp, Homo sapien
cgaccaacgggaaggttacgatctg

SEQ ID NO: 4867721 - DNA, 25 bp, Homo sapien
tagggcgacagatggaaaagtttcc

SEQ ID NO: 4867722 - DNA, 25 bp, Homo sapien
cactgaactaggacaaaaatgaccc

SEQ ID NO: 4867723 - DNA, 25 bp, Homo sapien
gtgtacagtacactatcccagagga

SEQ ID NO: 4867724 - DNA, 25 bp, Homo sapien
tgtcactccaggacaaactgcggag

SEQ ID NO: 4867725 - DNA, 25 bp, Homo sapien
tggagacaccctgcactgcttatgg

SEQ ID NO: 4867726 - DNA, 25 bp, Homo sapien
gaataaagacgccagagtactgcga

SEQ ID NO: 4867727 - DNA, 25 bp, Homo sapien
tatcttgtaagaagcctctcctgga

SEQ ID NO: 4867728 - DNA, 25 bp, Homo sapien
tgtggcgtaacaatcgactcgcagt

SEQ ID NO: 4867729 - DNA, 25 bp, Homo sapien
gaaaattgttacaggtgtggcgtaa

SEQ ID NO: 4867730 - DNA, 25 bp, Homo sapien
tacctagactggattcgtgacaaca

SEQ ID NO: 4867731 - DNA, 25 bp, Homo sapien
gatgtcccgggtgtgtacaccaagg

SEQ ID NO: 4867732 - DNA, 25 bp, Homo sapien
ttcagaagacactgcaaaggcgcag

SEQ ID NO: 4867733 - DNA, 25 bp, Homo sapien
gtgtgtctgaacgatggccgcatga

SEQ ID NO: 4867734 - DNA, 25 bp, Homo sapien
aacaatcacaaatagggcaggctcc

SEQ ID NO: 4867735 - DNA, 25 bp, Homo sapien
gagaataagtgaatgatggcggcca

SEQ ID NO: 4867736 - DNA, 25 bp, Homo sapien
cataatagtggtgggttaattcagg

SEQ ID NO: 4867737 - DNA, 25 bp, Homo sapien
catgcattcgtgtatttagcacaga

SEQ ID NO: 4867738 - DNA, 25 bp, Homo sapien
tctcagatttcgtgtgccagtgccc

SEQ ID NO: 4867739 - DNA, 25 bp, Homo sapien
gcacgtgaaacgagctgaaatccca

SEQ ID NO: 4867740 - DNA, 25 bp, Homo sapien
cagcgagccaaggtgtttcaacggg

SEQ ID NO: 4867741 - DNA, 25 bp, Homo sapien
tttatacttgacaggttgcagcgag

SEQ ID NO: 4867742 - DNA, 25 bp, Homo sapien
tctcctctcatacagtgattctgga

SEQ ID NO: 4867743 - DNA, 25 bp, Homo sapien
ctttgatgatcctgagaagctacta

SEQ ID NO: 4867744 - DNA, 25 bp, Homo sapien
gttctttgatgatcctgagaagcta

SEQ ID NO: 4867745 - DNA, 25 bp, Homo sapien
ctaaatatagcaaaagggagataac

SEQ ID NO: 4867746 - DNA, 25 bp, Homo sapien
cttcatcacggaagatgacattcat

SEQ ID NO: 4867747 - DNA, 25 bp, Homo sapien
gaggaacgaacgaccttcatcacgg

SEQ ID NO: 4867748 - DNA, 25 bp, Homo sapien
tgatgtttgctttagggagtggaag

SEQ ID NO: 4867749 - DNA, 25 bp, Homo sapien
gaaggaacatgaggaacgaacgacc

SEQ ID NO: 4867750 - DNA, 25 bp, Homo sapien
tgtgcctggaaaggtagaagctact

SEQ ID NO: 4867751 - DNA, 25 bp, Homo sapien
taatgtcactttcacctaaggccag

SEQ ID NO: 4867752 - DNA, 25 bp, Homo sapien
tttctcaggcaacaataatgtcact

SEQ ID NO: 4867753 - DNA, 25 bp, Homo sapien
gctggagaattgtcaaatcattgcg

SEQ ID NO: 4867754 - DNA, 25 bp, Homo sapien
ttataggctaacacaggtggtcgga

SEQ ID NO: 4867755 - DNA, 25 bp, Homo sapien
ttcaagttgttccagggagaagcgg

SEQ ID NO: 4867756 - DNA, 25 bp, Homo sapien
catgaggaccccatgaagcgtggca

SEQ ID NO: 4867757 - DNA, 25 bp, Homo sapien
tcggatgatctaggaagcaggattc

SEQ ID NO: 4867758 - DNA, 25 bp, Homo sapien
aggagatgggaagcgggatgagggc

SEQ ID NO: 4867759 - DNA, 25 bp, Homo sapien
agagggcggctaaagggagcgagaa

SEQ ID NO: 4867760 - DNA, 25 bp, Homo sapien
cagtggcccagagggcggctaaagg

SEQ ID NO: 4867761 - DNA, 25 bp, Homo sapien
aaggagatgggaagcgggatgaggg

SEQ ID NO: 4867762 - DNA, 25 bp, Homo sapien
ggatgggggccaagcaggtcgggcc

SEQ ID NO: 4867763 - DNA, 25 bp, Homo sapien
ggccaagcaggtcgggccaggccac

SEQ ID NO: 4867764 - DNA, 25 bp, Homo sapien
gggatgggggccaagcaggtcgggc

SEQ ID NO: 4867765 - DNA, 25 bp, Homo sapien
gatgggggccaagcaggtcgggcca

SEQ ID NO: 4867766 - DNA, 25 bp, Homo sapien
ggaaggactgtaggcatcagccgca

SEQ ID NO: 4867767 - DNA, 25 bp, Homo sapien
agaggtggccctggctatacaagcc

SEQ ID NO: 4867768 - DNA, 25 bp, Homo sapien
gtggccctggctatacaagccagag

SEQ ID NO: 4867769 - DNA, 25 bp, Homo sapien
ggactgtaggcatcagccgcagatg

SEQ ID NO: 4867770 - DNA, 25 bp, Homo sapien
tcttgtaaactaagggctgtctttc

SEQ ID NO: 4867771 - DNA, 25 bp, Homo sapien
ctttctgagctttagagtacttgat

SEQ ID NO: 4867772 - DNA, 25 bp, Homo sapien
ctcaggtcttgtaaactaagggctg

SEQ ID NO: 4867773 - DNA, 25 bp, Homo sapien
tacattttccgggtaagggctctca

SEQ ID NO: 4867774 - DNA, 25 bp, Homo sapien
agagtgcctagctcagcccagggca

SEQ ID NO: 4867775 - DNA, 25 bp, Homo sapien
ccagagtgcctagctcagcccaggg

SEQ ID NO: 4867776 - DNA, 25 bp, Homo sapien
cagccagagtgcctagctcagccca

SEQ ID NO: 4867777 - DNA, 25 bp, Homo sapien
gagtgcctagctcagcccagggcat

SEQ ID NO: 4867778 - DNA, 25 bp, Homo sapien
tgaggaaaccgtgaggcgctcagcc

SEQ ID NO: 4867779 - DNA, 25 bp, Homo sapien
attaaaatgcgggaatcttaacgcg

SEQ ID NO: 4867780 - DNA, 25 bp, Homo sapien
atgcgggaatcttaacgcgggcagc

SEQ ID NO: 4867781 - DNA, 25 bp, Homo sapien
ggcggccaaacccggggctatgaca

SEQ ID NO: 4867782 - DNA, 25 bp, Homo sapien
gcgcggcgcgacttcctcaaacact

SEQ ID NO: 4867783 - DNA, 25 bp, Homo sapien
ctgcaggtggcacccgggccgcacc

SEQ ID NO: 4867784 - DNA, 25 bp, Homo sapien
aagtgaaacgctccccagtccgcaa

SEQ ID NO: 4867785 - DNA, 25 bp, Homo sapien
acagaggggtcttccgggccttgca

SEQ ID NO: 4867786 - DNA, 25 bp, Homo sapien
agtccgcaagctgcgacttcccagc

SEQ ID NO: 4867787 - DNA, 25 bp, Homo sapien
gccgaggtcacgtgtttctttacaa

SEQ ID NO: 4867788 - DNA, 25 bp, Homo sapien
ccatccggttgctgtggcatcaggc

SEQ ID NO: 4867789 - DNA, 25 bp, Homo sapien
caatgttcccataaatcgcaggttc

SEQ ID NO: 4867790 - DNA, 25 bp, Homo sapien
agaacctacttctgagcatcgccga

SEQ ID NO: 4867791 - DNA, 25 bp, Homo sapien
cctgtcccaaggcgctctttcattt

SEQ ID NO: 4867792 - DNA, 25 bp, Homo sapien
ctgattgtgccatcggatgacattt

SEQ ID NO: 4867793 - DNA, 25 bp, Homo sapien
ggccccacatgtctgcgttgtcagg

SEQ ID NO: 4867794 - DNA, 25 bp, Homo sapien
gtgccatcggatgacatttccaaat

SEQ ID NO: 4867795 - DNA, 25 bp, Homo sapien
tatattagtacatgatattctactg

SEQ ID NO: 4867796 - DNA, 25 bp, Homo sapien
tataatagagactaagagcttaact

SEQ ID NO: 4867797 - DNA, 25 bp, Homo sapien
cccctattcactgtcccaagatgac

SEQ ID NO: 4867798 - DNA, 25 bp, Homo sapien
gcatggagaccactaacctggagtc

SEQ ID NO: 4867799 - DNA, 25 bp, Homo sapien
catcccagacgcatatgaggaggag

SEQ ID NO: 4867800 - DNA, 25 bp, Homo sapien
cgggagaaccagttgccacagaaca

SEQ ID NO: 4867801 - DNA, 25 bp, Homo sapien
aaagccatcccagacgcatatgagg

SEQ ID NO: 4867802 - DNA, 25 bp, Homo sapien
ggagaaccagttgccacagaacaaa

SEQ ID NO: 4867803 - DNA, 25 bp, Homo sapien
agacaggaagggcggcacaggaacc

SEQ ID NO: 4867804 - DNA, 25 bp, Homo sapien
tctgcccacctgagtcggcttctgt

SEQ ID NO: 4867805 - DNA, 25 bp, Homo sapien
atgaaacacagcatccgaccacagg

SEQ ID NO: 4867806 - DNA, 25 bp, Homo sapien
ggagccgggaataaacgaccgcagc

SEQ ID NO: 4867807 - DNA, 25 bp, Homo sapien
tcttgccaggccctcgaaagtgtac

SEQ ID NO: 4867808 - DNA, 25 bp, Homo sapien
ccataagatggggatggctccatcc

SEQ ID NO: 4867809 - DNA, 25 bp, Homo sapien
gcactcgggctcaggagacaagcag

SEQ ID NO: 4867810 - DNA, 25 bp, Homo sapien
ccccaccgcctggtaaaggtgcgat

SEQ ID NO: 4867811 - DNA, 25 bp, Homo sapien
gtaaaggtgcgatagaagcccatgg

SEQ ID NO: 4867812 - DNA, 25 bp, Homo sapien
tctacgctaagagggccatgacttc

SEQ ID NO: 4867813 - DNA, 25 bp, Homo sapien
ccatgacttcttcaccctactccct

SEQ ID NO: 4867814 - DNA, 25 bp, Homo sapien
gcagtttcacccctggctcagcagg

SEQ ID NO: 4867815 - DNA, 25 bp, Homo sapien
agcatcgcctggtctacgctaagag

SEQ ID NO: 4867816 - DNA, 25 bp, Homo sapien
gaaacactggctggttcaaattcca

SEQ ID NO: 4867817 - DNA, 25 bp, Homo sapien
gctgctgtattaggctgacccatgg

SEQ ID NO: 4867818 - DNA, 25 bp, Homo sapien
tactgaccattcctgcgcagagagg

SEQ ID NO: 4867819 - DNA, 25 bp, Homo sapien
tgacccatgggacactgctgataat

SEQ ID NO: 4867820 - DNA, 25 bp, Homo sapien
ctgcccgcctcgcactctcaatgtg

SEQ ID NO: 4867821 - DNA, 25 bp, Homo sapien
atctgcccgcctcgcactctcaatg

SEQ ID NO: 4867822 - DNA, 25 bp, Homo sapien
ccgcctcgcactctcaatgtgctgg

SEQ ID NO: 4867823 - DNA, 25 bp, Homo sapien
gcccgcctcgcactctcaatgtgct

SEQ ID NO: 4867824 - DNA, 25 bp, Homo sapien
aggcaccaccgctctcggttccggg

SEQ ID NO: 4867825 - DNA, 25 bp, Homo sapien
gggctgagctcctgccggcactgct

SEQ ID NO: 4867826 - DNA, 25 bp, Homo sapien
tcatgatctggatctccaggcacca

SEQ ID NO: 4867827 - DNA, 25 bp, Homo sapien
agctcctgccggcactgcttgatgg

SEQ ID NO: 4867828 - DNA, 25 bp, Homo sapien
tgaaattgatgaacagcccttgaca

SEQ ID NO: 4867829 - DNA, 25 bp, Homo sapien
aaggcccagtgtggactttagctgc

SEQ ID NO: 4867830 - DNA, 25 bp, Homo sapien
gaagcagcagagtcaccgtggagac

SEQ ID NO: 4867831 - DNA, 25 bp, Homo sapien
aattttcggcaggttggttcacgca

SEQ ID NO: 4867832 - DNA, 25 bp, Homo sapien
ttgggcgccaagttctgcatcccct

SEQ ID NO: 4867833 - DNA, 25 bp, Homo sapien
gggcaggtcattgggcgccaagttc

SEQ ID NO: 4867834 - DNA, 25 bp, Homo sapien
tcccctcagggacatctcgggcagc

SEQ ID NO: 4867835 - DNA, 25 bp, Homo sapien
gccaagttctgcatcccctcaggga

SEQ ID NO: 4867836 - DNA, 25 bp, Homo sapien
ctgaacaggaataaacgcctgggct

SEQ ID NO: 4867837 - DNA, 25 bp, Homo sapien
ggaggaacagtgagaacagcacctg

SEQ ID NO: 4867838 - DNA, 25 bp, Homo sapien
agtgaagaggtgcactcgcagagca

SEQ ID NO: 4867839 - DNA, 25 bp, Homo sapien
tttttaagaggcacaagggcctgga

SEQ ID NO: 4867840 - DNA, 25 bp, Homo sapien
aggaaataggaattctctgtgcatg

SEQ ID NO: 4867841 - DNA, 25 bp, Homo sapien
ggaaataggaattctctgtgcatga

SEQ ID NO: 4867842 - DNA, 25 bp, Homo sapien
aaggcaggctgaagtctaagcacag

SEQ ID NO: 4867843 - DNA, 25 bp, Homo sapien
caggaaataggaattctctgtgcat

SEQ ID NO: 4867844 - DNA, 25 bp, Homo sapien
ggatggcaccttcccgcagaccaca

SEQ ID NO: 4867845 - DNA, 25 bp, Homo sapien
accttcccgcagaccacagcagttc

SEQ ID NO: 4867846 - DNA, 25 bp, Homo sapien
caatgtcactcagcaaggtgaggat

SEQ ID NO: 4867847 - DNA, 25 bp, Homo sapien
cccgcagaccacagcagttctcaaa

SEQ ID NO: 4867848 - DNA, 25 bp, Homo sapien
ctccctgaaggacacggcctgaatt

SEQ ID NO: 4867849 - DNA, 25 bp, Homo sapien
gaaggacacggcctgaattccggga

SEQ ID NO: 4867850 - DNA, 25 bp, Homo sapien
cacggcctgaattccgggactggga

SEQ ID NO: 4867851 - DNA, 25 bp, Homo sapien
gacacggcctgaattccgggactgg

SEQ ID NO: 4867852 - DNA, 25 bp, Homo sapien
tgttctttaacgctgaagtcctgga

SEQ ID NO: 4867853 - DNA, 25 bp, Homo sapien
gctgaagtcctggatgcctgctagg

SEQ ID NO: 4867854 - DNA, 25 bp, Homo sapien
ctctgttctttaacgctgaagtcct

SEQ ID NO: 4867855 - DNA, 25 bp, Homo sapien
agtcctggatgcctgctaggagcag

SEQ ID NO: 4867856 - DNA, 25 bp, Homo sapien
aggccaccagctggcggatgtcaga

SEQ ID NO: 4867857 - DNA, 25 bp, Homo sapien
tgtcagagatgtcccggggccacca

SEQ ID NO: 4867858 - DNA, 25 bp, Homo sapien
gtgggaagcagttaggccaccagct

SEQ ID NO: 4867859 - DNA, 25 bp, Homo sapien
cagctggcggatgtcagagatgtcc

SEQ ID NO: 4867860 - DNA, 25 bp, Homo sapien
ttctgggaacaatatggtgagaaac

SEQ ID NO: 4867861 - DNA, 25 bp, Homo sapien
gactttaggatgagttcagggttga

SEQ ID NO: 4867862 - DNA, 25 bp, Homo sapien
acggccagggaaacagaacgtcgag

SEQ ID NO: 4867863 - DNA, 25 bp, Homo sapien
tgagaaacaggccacaagaacggcc

SEQ ID NO: 4867864 - DNA, 25 bp, Homo sapien
gtaatgcaaggctatgagcaggagc

SEQ ID NO: 4867865 - DNA, 25 bp, Homo sapien
tgtgagaccaggttcgacacggaca

SEQ ID NO: 4867866 - DNA, 25 bp, Homo sapien
tctgacattgaatcagcagaagcag

SEQ ID NO: 4867867 - DNA, 25 bp, Homo sapien
gacacggacacttggtcctgggcag

SEQ ID NO: 4867868 - DNA, 25 bp, Homo sapien
gctgggcctttatctaagagtggac

SEQ ID NO: 4867869 - DNA, 25 bp, Homo sapien
agtggactgtgatggaagtgccctt

SEQ ID NO: 4867870 - DNA, 25 bp, Homo sapien
ggttctgtgggtcatacacagagat

SEQ ID NO: 4867871 - DNA, 25 bp, Homo sapien
gttccaagggtcacacacagaggtt

SEQ ID NO: 4867872 - DNA, 25 bp, Homo sapien
gggcaacgcgtgcaaggccagcaag

SEQ ID NO: 4867873 - DNA, 25 bp, Homo sapien
ccagcaagggacaggtgggtttgga

SEQ ID NO: 4867874 - DNA, 25 bp, Homo sapien
tttggaatcacgcacggaggctggc

SEQ ID NO: 4867875 - DNA, 25 bp, Homo sapien
ccaaaggacgggcaggctcagggtc

SEQ ID NO: 4867876 - DNA, 25 bp, Homo sapien
tgaagaacgctgacaatcctgtggg

SEQ ID NO: 4867877 - DNA, 25 bp, Homo sapien
gacttgccataggaagataacagcc

SEQ ID NO: 4867878 - DNA, 25 bp, Homo sapien
cagcgaggctctattgagtgtccac

SEQ ID NO: 4867879 - DNA, 25 bp, Homo sapien
caattaatcagtgaggcagcaaggc

SEQ ID NO: 4867880 - DNA, 25 bp, Homo sapien
gagctgtgagaagcaccacattgca

SEQ ID NO: 4867881 - DNA, 25 bp, Homo sapien
taaatccctggcaatagcagtaaga

SEQ ID NO: 4867882 - DNA, 25 bp, Homo sapien
gcaccacattgcaaactattaagct

SEQ ID NO: 4867883 - DNA, 25 bp, Homo sapien
tattcacaactacacagtgaggcca

SEQ ID NO: 4867884 - DNA, 25 bp, Homo sapien
tactggcatattcctaatgaaccca

SEQ ID NO: 4867885 - DNA, 25 bp, Homo sapien
tccagccttcgaccatgtggttcca

SEQ ID NO: 4867886 - DNA, 25 bp, Homo sapien
cagcttaggtccaattaatgtccag

SEQ ID NO: 4867887 - DNA, 25 bp, Homo sapien
tagggatgctctatctgtggtgcca

SEQ ID NO: 4867888 - DNA, 25 bp, Homo sapien
gactgcacaacactggctacggaag

SEQ ID NO: 4867889 - DNA, 25 bp, Homo sapien
gggcatgatccccaactttaaagag

SEQ ID NO: 4867890 - DNA, 25 bp, Homo sapien
gctacggaagcatttgataccaaga

SEQ ID NO: 4867891 - DNA, 25 bp, Homo sapien
tgggaggttctgtgagggacataaa

SEQ ID NO: 4867892 - DNA, 25 bp, Homo sapien
ctccttgctgcaggacgatgttttc

SEQ ID NO: 4867893 - DNA, 25 bp, Homo sapien
tgctgcaggacgatgttttctggct

SEQ ID NO: 4867894 - DNA, 25 bp, Homo sapien
ccttgctgcaggacgatgttttctg

SEQ ID NO: 4867895 - DNA, 25 bp, Homo sapien
ctgcaggacgatgttttctggcttt

SEQ ID NO: 4867896 - DNA, 25 bp, Homo sapien
catatcctaggtcaataattttgtg

SEQ ID NO: 4867897 - DNA, 25 bp, Homo sapien
ccagctccttggcatatcctaggtc

SEQ ID NO: 4867898 - DNA, 25 bp, Homo sapien
cacgaatgatgtgcaaagactgccc

SEQ ID NO: 4867899 - DNA, 25 bp, Homo sapien
gcagggtccccacgaatgatgtgca

SEQ ID NO: 4867900 - DNA, 25 bp, Homo sapien
ttatgggtgtgacctcatgcatctc

SEQ ID NO: 4867901 - DNA, 25 bp, Homo sapien
ggcaaaaaatgctgactcgaccagg

SEQ ID NO: 4867902 - DNA, 25 bp, Homo sapien
ggacatcagagaagacgaccacatc

SEQ ID NO: 4867903 - DNA, 25 bp, Homo sapien
ccacagggcatctggtggcaaaaaa

SEQ ID NO: 4867904 - DNA, 25 bp, Homo sapien
atattcagaccaaataacgtaaaca

SEQ ID NO: 4867905 - DNA, 25 bp, Homo sapien
cacagactacactccatcaatatgc

SEQ ID NO: 4867906 - DNA, 25 bp, Homo sapien
ctctgaaggccgaaaagggcttgtc

SEQ ID NO: 4867907 - DNA, 25 bp, Homo sapien
gagctctgacccctactcagtggcc

SEQ ID NO: 4867908 - DNA, 25 bp, Homo sapien
aggagggggtacacctgagctgctc

SEQ ID NO: 4867909 - DNA, 25 bp, Homo sapien
caggagggggtacacctgagctgct

SEQ ID NO: 4867910 - DNA, 25 bp, Homo sapien
gagggggtacacctgagctgctcct

SEQ ID NO: 4867911 - DNA, 25 bp, Homo sapien
agggggtacacctgagctgctcctc

SEQ ID NO: 4867912 - DNA, 25 bp, Homo sapien
ggccggaagcccgtgatgcactcaa

SEQ ID NO: 4867913 - DNA, 25 bp, Homo sapien
aagcccgtgatgcactcaaaggcca

SEQ ID NO: 4867914 - DNA, 25 bp, Homo sapien
tcaaaggccagggtgccgaagctcc

SEQ ID NO: 4867915 - DNA, 25 bp, Homo sapien
cagtagtcgacggtcactgtgtact

SEQ ID NO: 4867916 - DNA, 25 bp, Homo sapien
cagcattctcagtgtaagtgcgtat

SEQ ID NO: 4867917 - DNA, 25 bp, Homo sapien
cctcctgacttgtcatgtgtacacg

SEQ ID NO: 4867918 - DNA, 25 bp, Homo sapien
acatatttcctcctgacttgtcatg

SEQ ID NO: 4867919 - DNA, 25 bp, Homo sapien
tcaggttgtagtaacatttgtcaac

SEQ ID NO: 4867920 - DNA, 25 bp, Homo sapien
cactgtacccggccacattcttacg

SEQ ID NO: 4867921 - DNA, 25 bp, Homo sapien
ccactgtacccggccacattcttac

SEQ ID NO: 4867922 - DNA, 25 bp, Homo sapien
ttaggttcacaatttcagctacatt

SEQ ID NO: 4867923 - DNA, 25 bp, Homo sapien
cattcttatgctttatgctcagctg

SEQ ID NO: 4867924 - DNA, 25 bp, Homo sapien
tatgctttatgctcagctgttgttt

SEQ ID NO: 4867925 - DNA, 25 bp, Homo sapien
tttgtgtaatttattaggttcacaa

SEQ ID NO: 4867926 - DNA, 25 bp, Homo sapien
cagttcattcacatcgagtcaggca

SEQ ID NO: 4867927 - DNA, 25 bp, Homo sapien
cccagagttctgcagatagtaccac

SEQ ID NO: 4867928 - DNA, 25 bp, Homo sapien
tatacaggagacttatagccccagt

SEQ ID NO: 4867929 - DNA, 25 bp, Homo sapien
gtttaagactggtcaggactgcctg

SEQ ID NO: 4867930 - DNA, 25 bp, Homo sapien
gaatcttgttaggtgcagtcacacg

SEQ ID NO: 4867931 - DNA, 25 bp, Homo sapien
tactgtaggccagggtaacacaatg

SEQ ID NO: 4867932 - DNA, 25 bp, Homo sapien
gggacacattctaagaaattcgtca

SEQ ID NO: 4867933 - DNA, 25 bp, Homo sapien
gtatcgtacaccctattgctcctag

SEQ ID NO: 4867934 - DNA, 25 bp, Homo sapien
tccattcaagtcttcgctaacaaca

SEQ ID NO: 4867935 - DNA, 25 bp, Homo sapien
cttgaaaacttcaccgttccattca

SEQ ID NO: 4867936 - DNA, 25 bp, Homo sapien
actcttctgccgcacttttgaatgc

SEQ ID NO: 4867937 - DNA, 25 bp, Homo sapien
taacaacaatgtccacctcactctt

SEQ ID NO: 4867938 - DNA, 25 bp, Homo sapien
cacttctccagtcgctcagccagga

SEQ ID NO: 4867939 - DNA, 25 bp, Homo sapien
cgtgggatccgtgcccctctgtcgg

SEQ ID NO: 4867940 - DNA, 25 bp, Homo sapien
gggtgccacatcagcatcagttgca

SEQ ID NO: 4867941 - DNA, 25 bp, Homo sapien
agccattgggcccatacgtgggatc

SEQ ID NO: 4867942 - DNA, 25 bp, Homo sapien
gccttcaagctctgcagactctcat

SEQ ID NO: 4867943 - DNA, 25 bp, Homo sapien
atgcccgtgtcctgttggattctgg

SEQ ID NO: 4867944 - DNA, 25 bp, Homo sapien
tacactgagtggcaggcttatcggg

SEQ ID NO: 4867945 - DNA, 25 bp, Homo sapien
ttatcggggatcaacgccaggcccg

SEQ ID NO: 4867946 - DNA, 25 bp, Homo sapien
tgattaacagactacatgacaaagc

SEQ ID NO: 4867947 - DNA, 25 bp, Homo sapien
gtgtttcctatcaggccacacagag

SEQ ID NO: 4867948 - DNA, 25 bp, Homo sapien
tgcaataaaggcaagagaccggtct

SEQ ID NO: 4867949 - DNA, 25 bp, Homo sapien
taaacaggatggtgtgtacgaagcc

SEQ ID NO: 4867950 - DNA, 25 bp, Homo sapien
gagtctcataggtgattttactgtt

SEQ ID NO: 4867951 - DNA, 25 bp, Homo sapien
tccatgtccaatgtgtggccctcat

SEQ ID NO: 4867952 - DNA, 25 bp, Homo sapien
aaaacaagatccatgtccaatgtgt

SEQ ID NO: 4867953 - DNA, 25 bp, Homo sapien
ggagatctgagtctcataggtgatt

SEQ ID NO: 4867954 - DNA, 25 bp, Homo sapien
cagccggttgcaatcttccttcagg

SEQ ID NO: 4867955 - DNA, 25 bp, Homo sapien
ggatgctgtgccagacctggcccca

SEQ ID NO: 4867956 - DNA, 25 bp, Homo sapien
gtctggatgctgtgccagacctggc

SEQ ID NO: 4867957 - DNA, 25 bp, Homo sapien
tgctgcagccggttgcaatcttcct

SEQ ID NO: 4867958 - DNA, 25 bp, Homo sapien
tctaaaggggcctccgtcagtccag

SEQ ID NO: 4867959 - DNA, 25 bp, Homo sapien
ttcccgtccatccaaaccagtgtct

SEQ ID NO: 4867960 - DNA, 25 bp, Homo sapien
ccttttgttgctcataacggttgct

SEQ ID NO: 4867961 - DNA, 25 bp, Homo sapien
ctcataacggttgcttctgggtccc

SEQ ID NO: 4867962 - DNA, 25 bp, Homo sapien
ccaaactcggtttgctcgctgtact

SEQ ID NO: 4867963 - DNA, 25 bp, Homo sapien
gctgttgtttcggaggagattcatc

SEQ ID NO: 4867964 - DNA, 25 bp, Homo sapien
tggagaggcagctgttgtttcggag

SEQ ID NO: 4867965 - DNA, 25 bp, Homo sapien
tgatcccaaactcggtttgctcgct

SEQ ID NO: 4867966 - DNA, 25 bp, Homo sapien
caggccagcagcagtttatctgatg

SEQ ID NO: 4867967 - DNA, 25 bp, Homo sapien
tccaggccagcagcagtttatctga

SEQ ID NO: 4867968 - DNA, 25 bp, Homo sapien
cctccaggccagcagcagtttatct

SEQ ID NO: 4867969 - DNA, 25 bp, Homo sapien
tgctccatttccctccaggccagca

SEQ ID NO: 4867970 - DNA, 25 bp, Homo sapien
tccgaaacccaaaatgagtctccta

SEQ ID NO: 4867971 - DNA, 25 bp, Homo sapien
aaatcgatactaagacacaggtgaa

SEQ ID NO: 4867972 - DNA, 25 bp, Homo sapien
tctatcctgatgctacccgggcagg

SEQ ID NO: 4867973 - DNA, 25 bp, Homo sapien
aagatccttgcccaagtacacaggg

SEQ ID NO: 4867974 - DNA, 25 bp, Homo sapien
cacagattatgagtcccaagatggg

SEQ ID NO: 4867975 - DNA, 25 bp, Homo sapien
ggaccctcaatggactggctcaaag

SEQ ID NO: 4867976 - DNA, 25 bp, Homo sapien
gcatctagggtccaccgctttctag

SEQ ID NO: 4867977 - DNA, 25 bp, Homo sapien
tggctcaaaggaatgtggactgtgg

SEQ ID NO: 4867978 - DNA, 25 bp, Homo sapien
gggtctgaatggctgcgcctgcatc

SEQ ID NO: 4867979 - DNA, 25 bp, Homo sapien
aactgatgtggtaggcgcatgctga

SEQ ID NO: 4867980 - DNA, 25 bp, Homo sapien
tggaaaagctgtgctaatgtcaact

SEQ ID NO: 4867981 - DNA, 25 bp, Homo sapien
gctaatgtcaactgatgtggtaggc

SEQ ID NO: 4867982 - DNA, 25 bp, Homo sapien
tgtcaactgatgtggtaggcgcatg

SEQ ID NO: 4867983 - DNA, 25 bp, Homo sapien
tccacaatgtcggtctgcagagcca

SEQ ID NO: 4867984 - DNA, 25 bp, Homo sapien
tctaccaggagtttcacttcgttct

SEQ ID NO: 4867985 - DNA, 25 bp, Homo sapien
gctcctctgtaagtccacaatgtcg

SEQ ID NO: 4867986 - DNA, 25 bp, Homo sapien
gagccatcatccgttctaccaggag

SEQ ID NO: 4867987 - DNA, 25 bp, Homo sapien
catgctctagagaatggtcccgcac

SEQ ID NO: 4867988 - DNA, 25 bp, Homo sapien
tgtacgccaggagcacatgtgatct

SEQ ID NO: 4867989 - DNA, 25 bp, Homo sapien
acactgctgagctcacggtgacaca

SEQ ID NO: 4867990 - DNA, 25 bp, Homo sapien
tcctagtgagagaatcagggaacac

SEQ ID NO: 4867991 - DNA, 25 bp, Homo sapien
cttagtctcctgtacagctcccttg

SEQ ID NO: 4867992 - DNA, 25 bp, Homo sapien
tttcccttagtctcctgtacagctc

SEQ ID NO: 4867993 - DNA, 25 bp, Homo sapien
gtctcctgtacagctcccttgcttg

SEQ ID NO: 4867994 - DNA, 25 bp, Homo sapien
ttttcccttagtctcctgtacagct

SEQ ID NO: 4867995 - DNA, 25 bp, Homo sapien
gcagccgtaccatttcctgactgtc

SEQ ID NO: 4867996 - DNA, 25 bp, Homo sapien
tcactcgcactttcttctcgaagct

SEQ ID NO: 4867997 - DNA, 25 bp, Homo sapien
tctcgaagctctgaattgcctgaag

SEQ ID NO: 4867998 - DNA, 25 bp, Homo sapien
ctgagctgcgtatagatcactcgca

SEQ ID NO: 4867999 - DNA, 25 bp, Homo sapien
tcctgcagccggacaacagtcttct

SEQ ID NO: 4868000 - DNA, 25 bp, Homo sapien
tgggcaacagttccagcgccttctg

SEQ ID NO: 4868001 - DNA, 25 bp, Homo sapien
accttgggcaacagttccagcgcct

SEQ ID NO: 4868002 - DNA, 25 bp, Homo sapien
tcattcattaagctcaccacctctt

SEQ ID NO: 4868003 - DNA, 25 bp, Homo sapien
tgttttccaggtagaagacagacac

SEQ ID NO: 4868004 - DNA, 25 bp, Homo sapien
acacacacaaaggctatgggaattc

SEQ ID NO: 4868005 - DNA, 25 bp, Homo sapien
gttttccaggtagaagacagacaca

SEQ ID NO: 4868006 - DNA, 25 bp, Homo sapien
tcttaggagacaactggctggctgc

SEQ ID NO: 4868007 - DNA, 25 bp, Homo sapien
cctgcgggtcaactggtgcttcaca

SEQ ID NO: 4868008 - DNA, 25 bp, Homo sapien
gctaaccctacagcctaccagttgg

SEQ ID NO: 4868009 - DNA, 25 bp, Homo sapien
gacctgggtgcctacattaatttgc

SEQ ID NO: 4868010 - DNA, 25 bp, Homo sapien
ccaggctggctaagtcgagaggcat

SEQ ID NO: 4868011 - DNA, 25 bp, Homo sapien
tcttggctggctcaggtaagctgtt

SEQ ID NO: 4868012 - DNA, 25 bp, Homo sapien
tgctatccgggcttccactgacagg

SEQ ID NO: 4868013 - DNA, 25 bp, Homo sapien
ggccgtggagggctgagacatcagc

SEQ ID NO: 4868014 - DNA, 25 bp, Homo sapien
ccttgatggtcacacttggcactgc

SEQ ID NO: 4868015 - DNA, 25 bp, Homo sapien
gatctcctgacgtgcccttgatggt

SEQ ID NO: 4868016 - DNA, 25 bp, Homo sapien
taagtttcaagggactatgagagcc

SEQ ID NO: 4868017 - DNA, 25 bp, Homo sapien
catccagagaggtggtaataccatc

SEQ ID NO: 4868018 - DNA, 25 bp, Homo sapien
cagagtggtatttcgtgaagattaa

SEQ ID NO: 4868019 - DNA, 25 bp, Homo sapien
tgaagattaattcaaccacacaggg

SEQ ID NO: 4868020 - DNA, 25 bp, Homo sapien
ggaacaccttggtcagagtggtatt

SEQ ID NO: 4868021 - DNA, 25 bp, Homo sapien
gaagattaattcaaccacacagggc

SEQ ID NO: 4868022 - DNA, 25 bp, Homo sapien
aagcaaacagatctcaataaaagtc

SEQ ID NO: 4868023 - DNA, 25 bp, Homo sapien
gctttctgacttactagatagctga

SEQ ID NO: 4868024 - DNA, 25 bp, Homo sapien
tgcactttccacatatgagcgttac

SEQ ID NO: 4868025 - DNA, 25 bp, Homo sapien
aaacaccaacccactgactaatact

SEQ ID NO: 4868026 - DNA, 25 bp, Homo sapien
ttatgtgcttcagccaccagttctt

SEQ ID NO: 4868027 - DNA, 25 bp, Homo sapien
ttttctagcagggtgcagaggttat

SEQ ID NO: 4868028 - DNA, 25 bp, Homo sapien
cagggtgcagaggttatgtgcttca

SEQ ID NO: 4868029 - DNA, 25 bp, Homo sapien
tgcagaggttatgtgcttcagccac

SEQ ID NO: 4868030 - DNA, 25 bp, Homo sapien
gcaggagtctcacacaagctgttac

SEQ ID NO: 4868031 - DNA, 25 bp, Homo sapien
ctgaggttgaggataatgccagatt

SEQ ID NO: 4868032 - DNA, 25 bp, Homo sapien
gaaagaaaggacatggaatcgcagg

SEQ ID NO: 4868033 - DNA, 25 bp, Homo sapien
aggttgaggataatgccagattgca

SEQ ID NO: 4868034 - DNA, 25 bp, Homo sapien
gcatacatgtagttgtaagccttca

SEQ ID NO: 4868035 - DNA, 25 bp, Homo sapien
cttaatgtacctgtaacttggctag

SEQ ID NO: 4868036 - DNA, 25 bp, Homo sapien
tactacctaccactaagctccaagg

SEQ ID NO: 4868037 - DNA, 25 bp, Homo sapien
tcctcatcatcggaattaagtgttc

SEQ ID NO: 4868038 - DNA, 25 bp, Homo sapien
tagaaagtcgacgtcagtaccactg

SEQ ID NO: 4868039 - DNA, 25 bp, Homo sapien
gagcagcaagagatatagaatgtcc

SEQ ID NO: 4868040 - DNA, 25 bp, Homo sapien
ggaggacatgcgactacatcagcaa

SEQ ID NO: 4868041 - DNA, 25 bp, Homo sapien
tgtgactgcagggtactcttaagct

SEQ ID NO: 4868042 - DNA, 25 bp, Homo sapien
tcttcttcttccgtctgtaaccagc

SEQ ID NO: 4868043 - DNA, 25 bp, Homo sapien
ttcttcttccgtctgtaaccagctc

SEQ ID NO: 4868044 - DNA, 25 bp, Homo sapien
ctcttcttcttccgtctgtaaccag

SEQ ID NO: 4868045 - DNA, 25 bp, Homo sapien
cttcttcttccgtctgtaaccagct

SEQ ID NO: 4868046 - DNA, 25 bp, Homo sapien
accaccatgtgagagccgcggccag

SEQ ID NO: 4868047 - DNA, 25 bp, Homo sapien
ctgctatgggctgccccatgtcagg

SEQ ID NO: 4868048 - DNA, 25 bp, Homo sapien
gggccatcagtgcagcaggaaccac

SEQ ID NO: 4868049 - DNA, 25 bp, Homo sapien
cccactgcacaaggcctgctatggg

SEQ ID NO: 4868050 - DNA, 25 bp, Homo sapien
tccagtgtgcagacaaggcgccggc

SEQ ID NO: 4868051 - DNA, 25 bp, Homo sapien
tggctgtacccctgaacgtttgtgg

SEQ ID NO: 4868052 - DNA, 25 bp, Homo sapien
tctgtaatggaggacctccagtgtg

SEQ ID NO: 4868053 - DNA, 25 bp, Homo sapien
gcgatgtgcgctgggcctctgtaat

SEQ ID NO: 4868054 - DNA, 25 bp, Homo sapien
aaccgtactccaagcacttttctca

SEQ ID NO: 4868055 - DNA, 25 bp, Homo sapien
tggcaaaccgtactccaagcacttt

SEQ ID NO: 4868056 - DNA, 25 bp, Homo sapien
gcaaaccgtactccaagcacttttc

SEQ ID NO: 4868057 - DNA, 25 bp, Homo sapien
gtgtggcaaaccgtactccaagcac

SEQ ID NO: 4868058 - DNA, 25 bp, Homo sapien
tatgagtcgctcttggcagaaagga

SEQ ID NO: 4868059 - DNA, 25 bp, Homo sapien
gggccaggccgcaactataattaaa

SEQ ID NO: 4868060 - DNA, 25 bp, Homo sapien
cagcacacacgcttgagcaggaatg

SEQ ID NO: 4868061 - DNA, 25 bp, Homo sapien
gctggtggtcagcagataccctttc

SEQ ID NO: 4868062 - DNA, 25 bp, Homo sapien
tctaacagtggattgtggaacccag

SEQ ID NO: 4868063 - DNA, 25 bp, Homo sapien
gtgtgaatctccacaaagcaagtga

SEQ ID NO: 4868064 - DNA, 25 bp, Homo sapien
gcaagtgaaacatgaatagctccct

SEQ ID NO: 4868065 - DNA, 25 bp, Homo sapien
tatggcactagtaatgatccaggca

SEQ ID NO: 4868066 - DNA, 25 bp, Homo sapien
gaaaatgtttctatagccaaatgac

SEQ ID NO: 4868067 - DNA, 25 bp, Homo sapien
gacattgataaacagtgttcttaca

SEQ ID NO: 4868068 - DNA, 25 bp, Homo sapien
tattaaatgctagttcattggaatg

SEQ ID NO: 4868069 - DNA, 25 bp, Homo sapien
gctagttcattggaatgttaataca

SEQ ID NO: 4868070 - DNA, 25 bp, Homo sapien
tccctccccaatctgcccgtccttg

SEQ ID NO: 4868071 - DNA, 25 bp, Homo sapien
atgactgctttggttggcattttct

SEQ ID NO: 4868072 - DNA, 25 bp, Homo sapien
tgcctgtaacataagctcacagccc

SEQ ID NO: 4868073 - DNA, 25 bp, Homo sapien
taacataagctcacagcccttagcc

SEQ ID NO: 4868074 - DNA, 25 bp, Homo sapien
gagaaccccagagtgttcagaacca

SEQ ID NO: 4868075 - DNA, 25 bp, Homo sapien
tcagaaccagggactagagccctct

SEQ ID NO: 4868076 - DNA, 25 bp, Homo sapien
tctcccagcttgaaggaggtaccag

SEQ ID NO: 4868077 - DNA, 25 bp, Homo sapien
cgcgaccggcggaacaatggttgcc

SEQ ID NO: 4868078 - DNA, 25 bp, Homo sapien
cctgcggcgccttccgtttgctcat

SEQ ID NO: 4868079 - DNA, 25 bp, Homo sapien
cgttgagagtctcctgcggcgcctt

SEQ ID NO: 4868080 - DNA, 25 bp, Homo sapien
ggtgattcccccgttgagagtctcc

SEQ ID NO: 4868081 - DNA, 25 bp, Homo sapien
ctgtgagcatgtcggtgattccccc

SEQ ID NO: 4868082 - DNA, 25 bp, Homo sapien
ggagagaaggaaggcaggggaagag

SEQ ID NO: 4868083 - DNA, 25 bp, Homo sapien
gggagagaaggaaggcaggggaaga

SEQ ID NO: 4868084 - DNA, 25 bp, Homo sapien
ctggactgtcggtgtgggagagaag

SEQ ID NO: 4868085 - DNA, 25 bp, Homo sapien
ccactggactgtcggtgtgggagag

SEQ ID NO: 4868086 - DNA, 25 bp, Homo sapien
gtaagcattgtacttgtggatagct

SEQ ID NO: 4868087 - DNA, 25 bp, Homo sapien
gatagcttggctcacgttcttctca

SEQ ID NO: 4868088 - DNA, 25 bp, Homo sapien
tgtacttgtggatagcttggctcac

SEQ ID NO: 4868089 - DNA, 25 bp, Homo sapien
acgttcttctcaaagtttgcgagtt

SEQ ID NO: 4868090 - DNA, 25 bp, Homo sapien
caataaagtttttggtgacctggat

SEQ ID NO: 4868091 - DNA, 25 bp, Homo sapien
taaagtttttggtgacctggatgga

SEQ ID NO: 4868092 - DNA, 25 bp, Homo sapien
ggaggcttgtctatccctcaaagta

SEQ ID NO: 4868093 - DNA, 25 bp, Homo sapien
tcaaagtaccaaatgattccctggt

SEQ ID NO: 4868094 - DNA, 25 bp, Homo sapien
atagaggatgatagttcatataaca

SEQ ID NO: 4868095 - DNA, 25 bp, Homo sapien
agaggatgatagttcatataacaaa

SEQ ID NO: 4868096 - DNA, 25 bp, Homo sapien
aaatagaggatgatagttcatataa

SEQ ID NO: 4868097 - DNA, 25 bp, Homo sapien
ccaaatagaggatgatagttcatat

SEQ ID NO: 4868098 - DNA, 25 bp, Homo sapien
ctggcctaattttctacctccatat

SEQ ID NO: 4868099 - DNA, 25 bp, Homo sapien
tacaggcgcgccttcttgtatttta

SEQ ID NO: 4868100 - DNA, 25 bp, Homo sapien
ttctacctccatatggaacttaaaa

SEQ ID NO: 4868101 - DNA, 25 bp, Homo sapien
ctacaggcgcgccttcttgtatttt

SEQ ID NO: 4868102 - DNA, 25 bp, Homo sapien
tcttagcttcagctccactctttat

SEQ ID NO: 4868103 - DNA, 25 bp, Homo sapien
gggtattttgctataacagatgctg

SEQ ID NO: 4868104 - DNA, 25 bp, Homo sapien
ggtattttgctataacagatgctgc

SEQ ID NO: 4868105 - DNA, 25 bp, Homo sapien
tttccagttgctaaaaactcatcaa

SEQ ID NO: 4868106 - DNA, 25 bp, Homo sapien
cagtttacgtaattttccagttgct

SEQ ID NO: 4868107 - DNA, 25 bp, Homo sapien
tgctaaaaactcatcaatcttttca

SEQ ID NO: 4868108 - DNA, 25 bp, Homo sapien
taattttccagttgctaaaaactca

SEQ ID NO: 4868109 - DNA, 25 bp, Homo sapien
gagctatttacatttgcctgggtga

SEQ ID NO: 4868110 - DNA, 25 bp, Homo sapien
tcacaagtaacctaaggagtaatag

SEQ ID NO: 4868111 - DNA, 25 bp, Homo sapien
tcttattggaaacataccagtctgc

SEQ ID NO: 4868112 - DNA, 25 bp, Homo sapien
cagtctgctaaaagacatgaagagc

SEQ ID NO: 4868113 - DNA, 25 bp, Homo sapien
ctaactcgagtcaggaaattgatgg

SEQ ID NO: 4868114 - DNA, 25 bp, Homo sapien
gatgaactcgtatcatcctgccgaa

SEQ ID NO: 4868115 - DNA, 25 bp, Homo sapien
ggaaattgatggatgaactcgtatc

SEQ ID NO: 4868116 - DNA, 25 bp, Homo sapien
ccaatgccactaactcgagtcagga

SEQ ID NO: 4868117 - DNA, 25 bp, Homo sapien
gcatgtaatttactttggctaacag

SEQ ID NO: 4868118 - DNA, 25 bp, Homo sapien
tcggcctcagatcataagctatgga

SEQ ID NO: 4868119 - DNA, 25 bp, Homo sapien
ggtgaactgtatggctaaggtacag

SEQ ID NO: 4868120 - DNA, 25 bp, Homo sapien
taaactaactgacgattgtgtctgc

SEQ ID NO: 4868121 - DNA, 25 bp, Homo sapien
tacaaacttccttgcagcagatgga

SEQ ID NO: 4868122 - DNA, 25 bp, Homo sapien
ttgtcataacatcccatattaagtc

SEQ ID NO: 4868123 - DNA, 25 bp, Homo sapien
gtgtccctttactgggcatgaatcc

SEQ ID NO: 4868124 - DNA, 25 bp, Homo sapien
actgggcatgaatccagctgtgagc

SEQ ID NO: 4868125 - DNA, 25 bp, Homo sapien
gtctaaaagtgactcagttccattc

SEQ ID NO: 4868126 - DNA, 25 bp, Homo sapien
atagaagataaataaagttgacatg

SEQ ID NO: 4868127 - DNA, 25 bp, Homo sapien
ctgtatagaagataaataaagttga

SEQ ID NO: 4868128 - DNA, 25 bp, Homo sapien
gaagataaataaagttgacatgtta

SEQ ID NO: 4868129 - DNA, 25 bp, Homo sapien
tgtatagaagataaataaagttgac

SEQ ID NO: 4868130 - DNA, 25 bp, Homo sapien
ttcagcccaattcgctgatgatggt

SEQ ID NO: 4868131 - DNA, 25 bp, Homo sapien
ccaattcgctgatgatggttcaatt

SEQ ID NO: 4868132 - DNA, 25 bp, Homo sapien
cagcccaattcgctgatgatggttc

SEQ ID NO: 4868133 - DNA, 25 bp, Homo sapien
gcccaattcgctgatgatggttcaa

SEQ ID NO: 4868134 - DNA, 25 bp, Homo sapien
taacatctcttcacgaggaattctt

SEQ ID NO: 4868135 - DNA, 25 bp, Homo sapien
catctcttcacgaggaattcttttt

SEQ ID NO: 4868136 - DNA, 25 bp, Homo sapien
atttgtaacatctcttcacgaggaa

SEQ ID NO: 4868137 - DNA, 25 bp, Homo sapien
tgtaacatctcttcacgaggaattc

SEQ ID NO: 4868138 - DNA, 25 bp, Homo sapien
tgccacagactgtagcaatgtattc

SEQ ID NO: 4868139 - DNA, 25 bp, Homo sapien
ctgccacagactgtagcaatgtatt

SEQ ID NO: 4868140 - DNA, 25 bp, Homo sapien
ccacagactgtagcaatgtattcag

SEQ ID NO: 4868141 - DNA, 25 bp, Homo sapien
gccacagactgtagcaatgtattca

SEQ ID NO: 4868142 - DNA, 25 bp, Homo sapien
caggatgaatttcccctagttacat

SEQ ID NO: 4868143 - DNA, 25 bp, Homo sapien
gccaaagacaaccattactagcatt

SEQ ID NO: 4868144 - DNA, 25 bp, Homo sapien
tatcatccagccaaaaggccaaaga

SEQ ID NO: 4868145 - DNA, 25 bp, Homo sapien
tattaggcaattttaacatcagggc

SEQ ID NO: 4868146 - DNA, 25 bp, Homo sapien
gataggccatcacctacttcctaga

SEQ ID NO: 4868147 - DNA, 25 bp, Homo sapien
tacccagagtattcctgataggcca

SEQ ID NO: 4868148 - DNA, 25 bp, Homo sapien
tagtggtagatttggcctcagaccc

SEQ ID NO: 4868149 - DNA, 25 bp, Homo sapien
tctagattcttacagcagctaccca

SEQ ID NO: 4868150 - DNA, 25 bp, Homo sapien
agaacatccatgtcaccactggact

SEQ ID NO: 4868151 - DNA, 25 bp, Homo sapien
acatccatgtcaccactggactctg

SEQ ID NO: 4868152 - DNA, 25 bp, Homo sapien
gatgggtcaggagaacatccatgtc

SEQ ID NO: 4868153 - DNA, 25 bp, Homo sapien
agctgggatgggtcaggagaacatc

SEQ ID NO: 4868154 - DNA, 25 bp, Homo sapien
tcaccattgattataaactctgagg

SEQ ID NO: 4868155 - DNA, 25 bp, Homo sapien
aatgttagactgtcctcccagcaac

SEQ ID NO: 4868156 - DNA, 25 bp, Homo sapien
gcagaattcaatcagtacaaagctc

SEQ ID NO: 4868157 - DNA, 25 bp, Homo sapien
cttcagacttttcaggaaggcgaaa

SEQ ID NO: 4868158 - DNA, 25 bp, Homo sapien
gtaattactttgtaatggcaagaaa

SEQ ID NO: 4868159 - DNA, 25 bp, Homo sapien
taattactttgtaatggcaagaaaa

SEQ ID NO: 4868160 - DNA, 25 bp, Homo sapien
aaatgaaccttttgtaactgctcca

SEQ ID NO: 4868161 - DNA, 25 bp, Homo sapien
ccacaacctgatgtaacagttttgg

SEQ ID NO: 4868162 - DNA, 25 bp, Homo sapien
tttgtaactgctccacaacctgatg

SEQ ID NO: 4868163 - DNA, 25 bp, Homo sapien
tgctccacaacctgatgtaacagtt

SEQ ID NO: 4868164 - DNA, 25 bp, Homo sapien
gatgtgctaactctaacaagtactt

SEQ ID NO: 4868165 - DNA, 25 bp, Homo sapien
ttggtgactgtaattcaaagctacc

SEQ ID NO: 4868166 - DNA, 25 bp, Homo sapien
agtcacacactcagaatggctactg

SEQ ID NO: 4868167 - DNA, 25 bp, Homo sapien
ctttaaagtctcatggatactctat

SEQ ID NO: 4868168 - DNA, 25 bp, Homo sapien
ttcagtcatatcacccgggaaaagt

SEQ ID NO: 4868169 - DNA, 25 bp, Homo sapien
taattttagcacatccactctccaa

SEQ ID NO: 4868170 - DNA, 25 bp, Homo sapien
ttgtcaaatctatgcactgagactc

SEQ ID NO: 4868171 - DNA, 25 bp, Homo sapien
ggtgttgagaaaatggactcgaatg

SEQ ID NO: 4868172 - DNA, 25 bp, Homo sapien
tagtgtggaactaccttcctggtca

SEQ ID NO: 4868173 - DNA, 25 bp, Homo sapien
tctactgtgcacaacatccaacttg

SEQ ID NO: 4868174 - DNA, 25 bp, Homo sapien
tatgcccagacgtagcaagatactt

SEQ ID NO: 4868175 - DNA, 25 bp, Homo sapien
cacagggatgatacttgaggaagat

SEQ ID NO: 4868176 - DNA, 25 bp, Homo sapien
cctatagcttctgttggtttttcct

SEQ ID NO: 4868177 - DNA, 25 bp, Homo sapien
gctggattcctatagcttctgttgg

SEQ ID NO: 4868178 - DNA, 25 bp, Homo sapien
tcttgctagctggattcctatagct

SEQ ID NO: 4868179 - DNA, 25 bp, Homo sapien
cttgtattcttgctagctggattcc

SEQ ID NO: 4868180 - DNA, 25 bp, Homo sapien
cactgagatggattcctatgtcgca

SEQ ID NO: 4868181 - DNA, 25 bp, Homo sapien
ttcaggttacatccagcccactaga

SEQ ID NO: 4868182 - DNA, 25 bp, Homo sapien
cagggaagtcaagatagggtctatc

SEQ ID NO: 4868183 - DNA, 25 bp, Homo sapien
cctgtggcacatgtactgggataac

SEQ ID NO: 4868184 - DNA, 25 bp, Homo sapien
tcccaagcttcgagaacagtgcctg

SEQ ID NO: 4868185 - DNA, 25 bp, Homo sapien
gctctctttgtacaactcttggaag

SEQ ID NO: 4868186 - DNA, 25 bp, Homo sapien
tcttctgacgtagggcaaatatcaa

SEQ ID NO: 4868187 - DNA, 25 bp, Homo sapien
tgatctgcataacggtcttctgacg

SEQ ID NO: 4868188 - DNA, 25 bp, Homo sapien
tcttccctcagataccggcttagct

SEQ ID NO: 4868189 - DNA, 25 bp, Homo sapien
gaggctgcctccaaccacactattt

SEQ ID NO: 4868190 - DNA, 25 bp, Homo sapien
tgaaaaacacatgaagaggcatacc

SEQ ID NO: 4868191 - DNA, 25 bp, Homo sapien
cataggcttggtgctcggactcctg

SEQ ID NO: 4868192 - DNA, 25 bp, Homo sapien
cttgcggatgcggatgtctagatac

SEQ ID NO: 4868193 - DNA, 25 bp, Homo sapien
ctagataccacagggaatgatgttc

SEQ ID NO: 4868194 - DNA, 25 bp, Homo sapien
gatgcggatgtctagataccacagg

SEQ ID NO: 4868195 - DNA, 25 bp, Homo sapien
gatgtctagataccacagggaatga

SEQ ID NO: 4868196 - DNA, 25 bp, Homo sapien
gcttctgtgagcaatacactatccc

SEQ ID NO: 4868197 - DNA, 25 bp, Homo sapien
caaaaaagctaccagtatagtctca

SEQ ID NO: 4868198 - DNA, 25 bp, Homo sapien
gaaacgatgattatgcaggaagaag

SEQ ID NO: 4868199 - DNA, 25 bp, Homo sapien
gaattctgagcacttttaacttagc

SEQ ID NO: 4868200 - DNA, 25 bp, Homo sapien
tttcatcatttttactgggaagctg

SEQ ID NO: 4868201 - DNA, 25 bp, Homo sapien
gtttggaaaagttaacaggtcagca

SEQ ID NO: 4868202 - DNA, 25 bp, Homo sapien
gaacatatggctcttgggagtaaaa

SEQ ID NO: 4868203 - DNA, 25 bp, Homo sapien
gtgaactccaagatacaaacaggga

SEQ ID NO: 4868204 - DNA, 25 bp, Homo sapien
catcatggtgaggtgcaaatctaga

SEQ ID NO: 4868205 - DNA, 25 bp, Homo sapien
agggcatgagccctcatattcttat

SEQ ID NO: 4868206 - DNA, 25 bp, Homo sapien
gtgaaacccttttctagggcatgag

SEQ ID NO: 4868207 - DNA, 25 bp, Homo sapien
cagtgactcccaagggacggatggt

SEQ ID NO: 4868208 - DNA, 25 bp, Homo sapien
cggatggtgtactcattgattgtga

SEQ ID NO: 4868209 - DNA, 25 bp, Homo sapien
gtctttttcactatccactggcagg

SEQ ID NO: 4868210 - DNA, 25 bp, Homo sapien
tcattcgctccggtccttgggttcc

SEQ ID NO: 4868211 - DNA, 25 bp, Homo sapien
ctttttcactatccactggcagggg

SEQ ID NO: 4868212 - DNA, 25 bp, Homo sapien
atgtctttttcactatccactggca

SEQ ID NO: 4868213 - DNA, 25 bp, Homo sapien
cttacatagcaaaggttaagaaata

SEQ ID NO: 4868214 - DNA, 25 bp, Homo sapien
aagactcctattgggttgtgtctgc

SEQ ID NO: 4868215 - DNA, 25 bp, Homo sapien
aaacaccaaagacccttacatagca

SEQ ID NO: 4868216 - DNA, 25 bp, Homo sapien
ataaattaagactcctattgggttg

SEQ ID NO: 4868217 - DNA, 25 bp, Homo sapien
gcttttcacatcattcggccatacg

SEQ ID NO: 4868218 - DNA, 25 bp, Homo sapien
caatttgagataggtgaaacattcc

SEQ ID NO: 4868219 - DNA, 25 bp, Homo sapien
catcctggtaggatcagtggcctta

SEQ ID NO: 4868220 - DNA, 25 bp, Homo sapien
tatgaaatgtcttacctagcaggta

SEQ ID NO: 4868221 - DNA, 25 bp, Homo sapien
taggcgctcactgcaaaacttgaag

SEQ ID NO: 4868222 - DNA, 25 bp, Homo sapien
gggcatcagtatggcagcaccttgg

SEQ ID NO: 4868223 - DNA, 25 bp, Homo sapien
ttggccagaacttcgcacgacggct

SEQ ID NO: 4868224 - DNA, 25 bp, Homo sapien
ccaaatcatggagatgcgggctcct

SEQ ID NO: 4868225 - DNA, 25 bp, Homo sapien
cgtgtcgcgccacggtcgcgcgctt

SEQ ID NO: 4868226 - DNA, 25 bp, Homo sapien
gcgcttcggagcaaggcgcggagac

SEQ ID NO: 4868227 - DNA, 25 bp, Homo sapien
cggagacgaacagccgggccaagcc

SEQ ID NO: 4868228 - DNA, 25 bp, Homo sapien
cgagagcgcctgtgcgccggcgtgt

SEQ ID NO: 4868229 - DNA, 25 bp, Homo sapien
gcccgcgcggcctcagctctcctca

SEQ ID NO: 4868230 - DNA, 25 bp, Homo sapien
cgctctccgggactggagcccgcgc

SEQ ID NO: 4868231 - DNA, 25 bp, Homo sapien
ggagcccgcgcggcctcagctctcc

SEQ ID NO: 4868232 - DNA, 25 bp, Homo sapien
ggactggagcccgcgcggcctcagc

SEQ ID NO: 4868233 - DNA, 25 bp, Homo sapien
tactatgcaaaagtcacgtagctgg

SEQ ID NO: 4868234 - DNA, 25 bp, Homo sapien
ggttcgaggatccaacttccctaga

SEQ ID NO: 4868235 - DNA, 25 bp, Homo sapien
cctttctagctgacccctgggagga

SEQ ID NO: 4868236 - DNA, 25 bp, Homo sapien
ttttgaattgcacgcagggcaccct

SEQ ID NO: 4868237 - DNA, 25 bp, Homo sapien
ctctctcaggctcttatgaaaccaa

SEQ ID NO: 4868238 - DNA, 25 bp, Homo sapien
tgttgaagacatccttagcagcctt

SEQ ID NO: 4868239 - DNA, 25 bp, Homo sapien
cacagtacgttggtgtgttacacat

SEQ ID NO: 4868240 - DNA, 25 bp, Homo sapien
tcctaggtcacagtacgttggtgtg

SEQ ID NO: 4868241 - DNA, 25 bp, Homo sapien
cagcctttcctaggtcacagtacgt

SEQ ID NO: 4868242 - DNA, 25 bp, Homo sapien
aactggaaagttacaatagcatact

SEQ ID NO: 4868243 - DNA, 25 bp, Homo sapien
ctggaaagttacaatagcatactta

SEQ ID NO: 4868244 - DNA, 25 bp, Homo sapien
actggaaagttacaatagcatactt

SEQ ID NO: 4868245 - DNA, 25 bp, Homo sapien
aaactggaaagttacaatagcatac

SEQ ID NO: 4868246 - DNA, 25 bp, Homo sapien
aggtctatcttgaccatgccaaagc

SEQ ID NO: 4868247 - DNA, 25 bp, Homo sapien
ctccactacaagacttggttttcag

SEQ ID NO: 4868248 - DNA, 25 bp, Homo sapien
cactccactacaagacttggttttc

SEQ ID NO: 4868249 - DNA, 25 bp, Homo sapien
ttggttttcaggtctatcttgacca

SEQ ID NO: 4868250 - DNA, 25 bp, Homo sapien
catctgaatgaatattaccacacaa

SEQ ID NO: 4868251 - DNA, 25 bp, Homo sapien
tcactgcctgcaacatgaatcctct

SEQ ID NO: 4868252 - DNA, 25 bp, Homo sapien
tctagttctacaggcagatgagaca

SEQ ID NO: 4868253 - DNA, 25 bp, Homo sapien
gagagtatcatgctgcacatttagg

SEQ ID NO: 4868254 - DNA, 25 bp, Homo sapien
agtaatgagatgctgccaaccctga

SEQ ID NO: 4868255 - DNA, 25 bp, Homo sapien
tactttaaaattagctcatcaaata

SEQ ID NO: 4868256 - DNA, 25 bp, Homo sapien
tggaaagcagtgttcaatgtatcaa

SEQ ID NO: 4868257 - DNA, 25 bp, Homo sapien
gcagtgttcaatgtatcaaaaacaa

SEQ ID NO: 4868258 - DNA, 25 bp, Homo sapien
ataccatttactgcttgccacagcc

SEQ ID NO: 4868259 - DNA, 25 bp, Homo sapien
cctgtatcagtgtaagcatgaccag

SEQ ID NO: 4868260 - DNA, 25 bp, Homo sapien
ggtaagtccatagttacagacctta

SEQ ID NO: 4868261 - DNA, 25 bp, Homo sapien
gtgaaggtaagtccatagttacaga

SEQ ID NO: 4868262 - DNA, 25 bp, Homo sapien
tctaggttgcctgatgctttccctg

SEQ ID NO: 4868263 - DNA, 25 bp, Homo sapien
tccaactcaagaaaccaattctaaa

SEQ ID NO: 4868264 - DNA, 25 bp, Homo sapien
aatatggtatcaagagtcagtttca

SEQ ID NO: 4868265 - DNA, 25 bp, Homo sapien
caaatatggtatcaagagtcagttt

SEQ ID NO: 4868266 - DNA, 25 bp, Homo sapien
gagtcagtttcaacccttcagccaa

SEQ ID NO: 4868267 - DNA, 25 bp, Homo sapien
cctgtgttcggtacaaatatggtat

SEQ ID NO: 4868268 - DNA, 25 bp, Homo sapien
agccagcaagccacccttcgaaggc

SEQ ID NO: 4868269 - DNA, 25 bp, Homo sapien
tagccagcaagccacccttcgaagg

SEQ ID NO: 4868270 - DNA, 25 bp, Homo sapien
gttttgctatgaggatagcaccgca

SEQ ID NO: 4868271 - DNA, 25 bp, Homo sapien
ggcatgctaaatctgagtaccatca

SEQ ID NO: 4868272 - DNA, 25 bp, Homo sapien
tagcaccgcaaggatggatattcac

SEQ ID NO: 4868273 - DNA, 25 bp, Homo sapien
cacttctcagcatgctaatggctac

SEQ ID NO: 4868274 - DNA, 25 bp, Homo sapien
caaaggcagacacctcgggtaagta

SEQ ID NO: 4868275 - DNA, 25 bp, Homo sapien
tgaaacctccacagaattaccggga

SEQ ID NO: 4868276 - DNA, 25 bp, Homo sapien
tgggttccaaccgagaataccagta

SEQ ID NO: 4868277 - DNA, 25 bp, Homo sapien
tctgaatgcattagcggtacctggg

SEQ ID NO: 4868278 - DNA, 25 bp, Homo sapien
cattttgtaactatagatttcagca

SEQ ID NO: 4868279 - DNA, 25 bp, Homo sapien
aatatctagtttgtaccattgttat

SEQ ID NO: 4868280 - DNA, 25 bp, Homo sapien
ccattgttattatggtatgaaaaca

SEQ ID NO: 4868281 - DNA, 25 bp, Homo sapien
taagactatctaaacaaggatccca

SEQ ID NO: 4868282 - DNA, 25 bp, Homo sapien
ccaagcaaggtttatggatgtttca

SEQ ID NO: 4868283 - DNA, 25 bp, Homo sapien
cagatccaatctggcagcacattct

SEQ ID NO: 4868284 - DNA, 25 bp, Homo sapien
caatgagctggcttattaaaattaa

SEQ ID NO: 4868285 - DNA, 25 bp, Homo sapien
gaacaagcaaactacactcatatca

SEQ ID NO: 4868286 - DNA, 25 bp, Homo sapien
ggcgtgagcctggccacattatatt

SEQ ID NO: 4868287 - DNA, 25 bp, Homo sapien
tgacccaccgtgcccagccggaatt

SEQ ID NO: 4868288 - DNA, 25 bp, Homo sapien
cctccgcttcccgggtccaagccat

SEQ ID NO: 4868289 - DNA, 25 bp, Homo sapien
cgtgacccaccgtgcccagccggaa

SEQ ID NO: 4868290 - DNA, 25 bp, Homo sapien
ggcgtgacccaccgtgcccagccgg

SEQ ID NO: 4868291 - DNA, 25 bp, Homo sapien
tcgaagggtctgagtataacccagt

SEQ ID NO: 4868292 - DNA, 25 bp, Homo sapien
tgagtataacccagtccaatcaggc

SEQ ID NO: 4868293 - DNA, 25 bp, Homo sapien
gggtctgagtataacccagtccaat

SEQ ID NO: 4868294 - DNA, 25 bp, Homo sapien
ggtcgaagggtctgagtataaccca

SEQ ID NO: 4868295 - DNA, 25 bp, Homo sapien
tgaagttcagggttaagggcaatga

SEQ ID NO: 4868296 - DNA, 25 bp, Homo sapien
tggattgtagctgggtatacgagct

SEQ ID NO: 4868297 - DNA, 25 bp, Homo sapien
caaacagctattactcaatcggtta

SEQ ID NO: 4868298 - DNA, 25 bp, Homo sapien
acaacagatggaatcaatggtgtgg

SEQ ID NO: 4868299 - DNA, 25 bp, Homo sapien
aacaagtattacaattagatctgaa

SEQ ID NO: 4868300 - DNA, 25 bp, Homo sapien
caagtattacaattagatctgaact

SEQ ID NO: 4868301 - DNA, 25 bp, Homo sapien
acaccacaatcacttgaaacaagta

SEQ ID NO: 4868302 - DNA, 25 bp, Homo sapien
caatcacttgaaacaagtattacaa

SEQ ID NO: 4868303 - DNA, 25 bp, Homo sapien
cttgtgacctcctgcactgaagttc

SEQ ID NO: 4868304 - DNA, 25 bp, Homo sapien
gttcttcccatcgattaaagctgat

SEQ ID NO: 4868305 - DNA, 25 bp, Homo sapien
cactgaagttcttcccatcgattaa

SEQ ID NO: 4868306 - DNA, 25 bp, Homo sapien
taaagctgataaagtcaatttgact

SEQ ID NO: 4868307 - DNA, 25 bp, Homo sapien
ttaagcttccagttcaaatcccaag

SEQ ID NO: 4868308 - DNA, 25 bp, Homo sapien
cttccagttcaaatcccaagccaac

SEQ ID NO: 4868309 - DNA, 25 bp, Homo sapien
aagcttccagttcaaatcccaagcc

SEQ ID NO: 4868310 - DNA, 25 bp, Homo sapien
gcttccagttcaaatcccaagccaa

SEQ ID NO: 4868311 - DNA, 25 bp, Homo sapien
aaatctgatgctttcctcaaaccac

SEQ ID NO: 4868312 - DNA, 25 bp, Homo sapien
caacccctagacttcagtgtgggga

SEQ ID NO: 4868313 - DNA, 25 bp, Homo sapien
ttcacttccagggacaaatctgatg

SEQ ID NO: 4868314 - DNA, 25 bp, Homo sapien
tccagggacaaatctgatgctttcc

SEQ ID NO: 4868315 - DNA, 25 bp, Homo sapien
caggacgtgatgtacaaactggtgg

SEQ ID NO: 4868316 - DNA, 25 bp, Homo sapien
gctacactgtcgctgaggaacacat

SEQ ID NO: 4868317 - DNA, 25 bp, Homo sapien
tattacaaggtcatgaaaaaatggt

SEQ ID NO: 4868318 - DNA, 25 bp, Homo sapien
cacagagaccagtatattacaaggt

SEQ ID NO: 4868319 - DNA, 25 bp, Homo sapien
cacaacagatgtgccactccccagc

SEQ ID NO: 4868320 - DNA, 25 bp, Homo sapien
cagcaggcaggacagcagaggcagc

SEQ ID NO: 4868321 - DNA, 25 bp, Homo sapien
ctgggagccccggcccggcccagca

SEQ ID NO: 4868322 - DNA, 25 bp, Homo sapien
gagccccggcccggcccagcaggca

SEQ ID NO: 4868323 - DNA, 25 bp, Homo sapien
ccggcccggcccagcaggcaggaca

SEQ ID NO: 4868324 - DNA, 25 bp, Homo sapien
cgtgtggctgagcactacatgtcaa

SEQ ID NO: 4868325 - DNA, 25 bp, Homo sapien
gaagtacgactaatgttggagcctg

SEQ ID NO: 4868326 - DNA, 25 bp, Homo sapien
tctagcacttcagggatgagaggga

SEQ ID NO: 4868327 - DNA, 25 bp, Homo sapien
tgcagcctgaagaacggatccttgt

SEQ ID NO: 4868328 - DNA, 25 bp, Homo sapien
caacagtgcatctttttgtcggtta

SEQ ID NO: 4868329 - DNA, 25 bp, Homo sapien
tgcacctggccgacaatttgtatat

SEQ ID NO: 4868330 - DNA, 25 bp, Homo sapien
tcacagattatggatgacactacat

SEQ ID NO: 4868331 - DNA, 25 bp, Homo sapien
ccttgaagtagaactccatgtgaga

SEQ ID NO: 4868332 - DNA, 25 bp, Homo sapien
ctgtgaaatcgcccatctccaacgg

SEQ ID NO: 4868333 - DNA, 25 bp, Homo sapien
cgcccatctccaacggcaccttcgg

SEQ ID NO: 4868334 - DNA, 25 bp, Homo sapien
atcgcccatctccaacggcaccttc

SEQ ID NO: 4868335 - DNA, 25 bp, Homo sapien
gtgaaatcgcccatctccaacggca

SEQ ID NO: 4868336 - DNA, 25 bp, Homo sapien
gaatgctaaagttcatggcatgccc

SEQ ID NO: 4868337 - DNA, 25 bp, Homo sapien
tttgaacagtcgaagcaggtcaccc

SEQ ID NO: 4868338 - DNA, 25 bp, Homo sapien
ccttctaaggcaatgtgtggtccct

SEQ ID NO: 4868339 - DNA, 25 bp, Homo sapien
cagttaagcctctggtaggcacctt

SEQ ID NO: 4868340 - DNA, 25 bp, Homo sapien
cacttctgtattctagggcccagca

SEQ ID NO: 4868341 - DNA, 25 bp, Homo sapien
gagacaggtcaaacaagaagtctgt

SEQ ID NO: 4868342 - DNA, 25 bp, Homo sapien
gcttagcacttacaagacacttggt

SEQ ID NO: 4868343 - DNA, 25 bp, Homo sapien
tcacggcacttagcatgtcatatgg

SEQ ID NO: 4868344 - DNA, 25 bp, Homo sapien
gaatcatgatgaccttaggagtcct

SEQ ID NO: 4868345 - DNA, 25 bp, Homo sapien
taccttgtaagcctgcctggcaggg

SEQ ID NO: 4868346 - DNA, 25 bp, Homo sapien
gagtcctgggtcaaatgggatccct

SEQ ID NO: 4868347 - DNA, 25 bp, Homo sapien
tctaacaagttagtgcctggctctg

SEQ ID NO: 4868348 - DNA, 25 bp, Homo sapien
tagataatatgacctagccaatatc

SEQ ID NO: 4868349 - DNA, 25 bp, Homo sapien
ctttctgtgttcattcgagacttta

SEQ ID NO: 4868350 - DNA, 25 bp, Homo sapien
gacctagccaatatctggtcctttt

SEQ ID NO: 4868351 - DNA, 25 bp, Homo sapien
tctgtgttcattcgagactttaatc

SEQ ID NO: 4868352 - DNA, 25 bp, Homo sapien
ttagggaagccacgctgaagacctc

SEQ ID NO: 4868353 - DNA, 25 bp, Homo sapien
gacagaagggttcatgaacaaggct

SEQ ID NO: 4868354 - DNA, 25 bp, Homo sapien
tgaagacctccgtgtgacagaaggg

SEQ ID NO: 4868355 - DNA, 25 bp, Homo sapien
ataaactttagaggcatggttctgc

SEQ ID NO: 4868356 - DNA, 25 bp, Homo sapien
caatatttgaaaccaccggctccgt

SEQ ID NO: 4868357 - DNA, 25 bp, Homo sapien
gctccgtgttactaggcgccaaagt

SEQ ID NO: 4868358 - DNA, 25 bp, Homo sapien
ccaactcctttggtacagccgtggg

SEQ ID NO: 4868359 - DNA, 25 bp, Homo sapien
gaccttgaggcaggcatgcatttta

SEQ ID NO: 4868360 - DNA, 25 bp, Homo sapien
gacagcatgtacagtagtacagcca

SEQ ID NO: 4868361 - DNA, 25 bp, Homo sapien
cagcatgtacagtagtacagccact

SEQ ID NO: 4868362 - DNA, 25 bp, Homo sapien
tttgacagcatgtacagtagtacag

SEQ ID NO: 4868363 - DNA, 25 bp, Homo sapien
catgtacagtagtacagccactgcc

SEQ ID NO: 4868364 - DNA, 25 bp, Homo sapien
gtcagtgtctgcgtgttgaggaaga

SEQ ID NO: 4868365 - DNA, 25 bp, Homo sapien
aggtcagtgtctgcgtgttgaggaa

SEQ ID NO: 4868366 - DNA, 25 bp, Homo sapien
ggtcagtgtctgcgtgttgaggaag

SEQ ID NO: 4868367 - DNA, 25 bp, Homo sapien
tcagtgtctgcgtgttgaggaagaa

SEQ ID NO: 4868368 - DNA, 25 bp, Homo sapien
taaacatagcggaggtcatatggct

SEQ ID NO: 4868369 - DNA, 25 bp, Homo sapien
gagaagtgcaattaacctttgggct

SEQ ID NO: 4868370 - DNA, 25 bp, Homo sapien
catgtttcacctaggatcactgtgt

SEQ ID NO: 4868371 - DNA, 25 bp, Homo sapien
gaagcgtcttccagtgataaaagtg

SEQ ID NO: 4868372 - DNA, 25 bp, Homo sapien
tcatcagactgcacattggatctgt

SEQ ID NO: 4868373 - DNA, 25 bp, Homo sapien
catcagactgcacattggatctgtc

SEQ ID NO: 4868374 - DNA, 25 bp, Homo sapien
agactgcacattggatctgtcaggg

SEQ ID NO: 4868375 - DNA, 25 bp, Homo sapien
tcagactgcacattggatctgtcag

SEQ ID NO: 4868376 - DNA, 25 bp, Homo sapien
ggtccaaatgcaggccttgtgctta

SEQ ID NO: 4868377 - DNA, 25 bp, Homo sapien
agtcgtgtgccctgttcacctcttg

SEQ ID NO: 4868378 - DNA, 25 bp, Homo sapien
gccagggtgccctttggtccaaatg

SEQ ID NO: 4868379 - DNA, 25 bp, Homo sapien
gccagctgcatggccgagatgctca

SEQ ID NO: 4868380 - DNA, 25 bp, Homo sapien
ctttctctcgggcctgatttttgcc

SEQ ID NO: 4868381 - DNA, 25 bp, Homo sapien
tttctctcgggcctgatttttgcca

SEQ ID NO: 4868382 - DNA, 25 bp, Homo sapien
tataagtgttagtgccggaattcct

SEQ ID NO: 4868383 - DNA, 25 bp, Homo sapien
gaccttgggcgacaaatcatgatga

SEQ ID NO: 4868384 - DNA, 25 bp, Homo sapien
aattcctcgtgtttgccggtgctgc

SEQ ID NO: 4868385 - DNA, 25 bp, Homo sapien
cccgtgtgcctggtgaaatgatgct

SEQ ID NO: 4868386 - DNA, 25 bp, Homo sapien
tgaagtcgttgaaatggaattaccc

SEQ ID NO: 4868387 - DNA, 25 bp, Homo sapien
tccagggttggttgaagtcgttgaa

SEQ ID NO: 4868388 - DNA, 25 bp, Homo sapien
tgatccagggttggttgaagtcgtt

SEQ ID NO: 4868389 - DNA, 25 bp, Homo sapien
atggaattaccctgtcttttacctg

SEQ ID NO: 4868390 - DNA, 25 bp, Homo sapien
catgtctagcaatgaaattcttctt

SEQ ID NO: 4868391 - DNA, 25 bp, Homo sapien
gtgtgatcttggcagtggcatgatc

SEQ ID NO: 4868392 - DNA, 25 bp, Homo sapien
gcctggccaccaatttttattatat

SEQ ID NO: 4868393 - DNA, 25 bp, Homo sapien
taactaaaatttcatgtctagcaat

SEQ ID NO: 4868394 - DNA, 25 bp, Homo sapien
ctgtttctgtactccaaagcatgta

SEQ ID NO: 4868395 - DNA, 25 bp, Homo sapien
tatcatagatatgcctccaggtcaa

SEQ ID NO: 4868396 - DNA, 25 bp, Homo sapien
aatatgaatagccatttggtatggc

SEQ ID NO: 4868397 - DNA, 25 bp, Homo sapien
tctgaacatgattctgaagccggat

SEQ ID NO: 4868398 - DNA, 25 bp, Homo sapien
ttttatatctcatgcaaggatatgc

SEQ ID NO: 4868399 - DNA, 25 bp, Homo sapien
tttatatctcatgcaaggatatgca

SEQ ID NO: 4868400 - DNA, 25 bp, Homo sapien
acaaagcagacagagactggccagg

SEQ ID NO: 4868401 - DNA, 25 bp, Homo sapien
aagtatcagtacttccgttaactag

SEQ ID NO: 4868402 - DNA, 25 bp, Homo sapien
aactagctttagtattgggtcattt

SEQ ID NO: 4868403 - DNA, 25 bp, Homo sapien
cagtacttccgttaactagctttag

SEQ ID NO: 4868404 - DNA, 25 bp, Homo sapien
cacacacgttgcaggtacagtattc

SEQ ID NO: 4868405 - DNA, 25 bp, Homo sapien
cagtcactgaatctaaatggctcca

SEQ ID NO: 4868406 - DNA, 25 bp, Homo sapien
catatatttcgggatggcctgcata

SEQ ID NO: 4868407 - DNA, 25 bp, Homo sapien
tatccaatttgcacgttagccctaa

SEQ ID NO: 4868408 - DNA, 25 bp, Homo sapien
gcagcagcgcgatcttgcctcactg

SEQ ID NO: 4868409 - DNA, 25 bp, Homo sapien
ccggagtgcagcagcgcgatcttgc

SEQ ID NO: 4868410 - DNA, 25 bp, Homo sapien
tttaaacagactccggctctgttgc

SEQ ID NO: 4868411 - DNA, 25 bp, Homo sapien
ttttaaacagactccggctctgttg

SEQ ID NO: 4868412 - DNA, 25 bp, Homo sapien
cgctgtgcgcgcttggggtgggact

SEQ ID NO: 4868413 - DNA, 25 bp, Homo sapien
tccgctgtgcgcgcttggggtggga

SEQ ID NO: 4868414 - DNA, 25 bp, Homo sapien
gctccgctgtgcgcgcttggggtgg

SEQ ID NO: 4868415 - DNA, 25 bp, Homo sapien
tcctgctccgctgtgcgcgcttggg

SEQ ID NO: 4868416 - DNA, 25 bp, Homo sapien
ttaccgagcggacctggacgccctc

SEQ ID NO: 4868417 - DNA, 25 bp, Homo sapien
ccagcgctgctccgctccggggctc

SEQ ID NO: 4868418 - DNA, 25 bp, Homo sapien
accgagcggacctggacgccctctg

SEQ ID NO: 4868419 - DNA, 25 bp, Homo sapien
ggctccggaggcggcacgcggccag

SEQ ID NO: 4868420 - DNA, 25 bp, Homo sapien
cgaggctctagggacgtttccgccg

SEQ ID NO: 4868421 - DNA, 25 bp, Homo sapien
caggctgcgcgtgattcagcctcaa

SEQ ID NO: 4868422 - DNA, 25 bp, Homo sapien
ggagaaaatgtaatcctctcccagg

SEQ ID NO: 4868423 - DNA, 25 bp, Homo sapien
tccttccggaagaaagtcaagtgga

SEQ ID NO: 4868424 - DNA, 25 bp, Homo sapien
attatcccaacaaccctgctgggcg

SEQ ID NO: 4868425 - DNA, 25 bp, Homo sapien
ggcgcggggctgttatacacacgac

SEQ ID NO: 4868426 - DNA, 25 bp, Homo sapien
gtggcggcggtggttatataacttg

SEQ ID NO: 4868427 - DNA, 25 bp, Homo sapien
caggaaagcaattcacaggtgctgg

SEQ ID NO: 4868428 - DNA, 25 bp, Homo sapien
taaaattgaccaccgcttgtcatcg

SEQ ID NO: 4868429 - DNA, 25 bp, Homo sapien
tattctgaagccaaagggtacatac

SEQ ID NO: 4868430 - DNA, 25 bp, Homo sapien
cacttagttcctagagtcccttaca

SEQ ID NO: 4868431 - DNA, 25 bp, Homo sapien
ctctgaaacactaaaggcttggtat

SEQ ID NO: 4868432 - DNA, 25 bp, Homo sapien
gattttgggttcctgatgtcacgtc

SEQ ID NO: 4868433 - DNA, 25 bp, Homo sapien
gggttcctgatgtcacgtctaggtg

SEQ ID NO: 4868434 - DNA, 25 bp, Homo sapien
aatctgtgtcgtgattttgggttcc

SEQ ID NO: 4868435 - DNA, 25 bp, Homo sapien
tcgtgattttgggttcctgatgtca

SEQ ID NO: 4868436 - DNA, 25 bp, Homo sapien
gtgcccagccgagaactactttttc

SEQ ID NO: 4868437 - DNA, 25 bp, Homo sapien
cgtgcccagccgagaactacttttt

SEQ ID NO: 4868438 - DNA, 25 bp, Homo sapien
tactcaaaagcgctacttcctcctg

SEQ ID NO: 4868439 - DNA, 25 bp, Homo sapien
taattactgctgacatagaacggta

SEQ ID NO: 4868440 - DNA, 25 bp, Homo sapien
tataaggctgccaggagtaaggagt

SEQ ID NO: 4868441 - DNA, 25 bp, Homo sapien
gatcaatggcatgactttataaggc

SEQ ID NO: 4868442 - DNA, 25 bp, Homo sapien
gagtccatgctgtaaacctccaaag

SEQ ID NO: 4868443 - DNA, 25 bp, Homo sapien
tggtcacagcaagtgcatcaaacag

SEQ ID NO: 4868444 - DNA, 25 bp, Homo sapien
tacaaaagtgttgcacagcagccta

SEQ ID NO: 4868445 - DNA, 25 bp, Homo sapien
gcctagcaaggatgtgacagccaga

SEQ ID NO: 4868446 - DNA, 25 bp, Homo sapien
tatatcgggacttgggcatctacgg

SEQ ID NO: 4868447 - DNA, 25 bp, Homo sapien
ccacctgtttgtgtgcggcccatga

SEQ ID NO: 4868448 - DNA, 25 bp, Homo sapien
tctatctgacggttctgcatccaca

SEQ ID NO: 4868449 - DNA, 25 bp, Homo sapien
cacccagaggaaagtaacagaatac

SEQ ID NO: 4868450 - DNA, 25 bp, Homo sapien
tgaagagaccgaagctaacaaggat

SEQ ID NO: 4868451 - DNA, 25 bp, Homo sapien
taactatcaagtaaacattggtggc

SEQ ID NO: 4868452 - DNA, 25 bp, Homo sapien
ccaggcttcgtgaacagtataatca

SEQ ID NO: 4868453 - DNA, 25 bp, Homo sapien
taatcaatagaaccatcgtcaccca

SEQ ID NO: 4868454 - DNA, 25 bp, Homo sapien
aacacaacaaagtgaagttcctcca

SEQ ID NO: 4868455 - DNA, 25 bp, Homo sapien
tgtaatatgctcatgatcctggtca

SEQ ID NO: 4868456 - DNA, 25 bp, Homo sapien
gagaaaagtagctgaacacatccat

SEQ ID NO: 4868457 - DNA, 25 bp, Homo sapien
catcagaagctgtggtaaaaggact

SEQ ID NO: 4868458 - DNA, 25 bp, Homo sapien
gtcataaaagttgggctctgacaaa

SEQ ID NO: 4868459 - DNA, 25 bp, Homo sapien
tgtcttaaacgaatcttgcttatcg

SEQ ID NO: 4868460 - DNA, 25 bp, Homo sapien
atggaatacatttccagttgttgtc

SEQ ID NO: 4868461 - DNA, 25 bp, Homo sapien
cgaatcttgcttatcgtgtcataaa

SEQ ID NO: 4868462 - DNA, 25 bp, Homo sapien
tgcaaaatgattactacttaacaat

SEQ ID NO: 4868463 - DNA, 25 bp, Homo sapien
actacttaacaatattacattacag

SEQ ID NO: 4868464 - DNA, 25 bp, Homo sapien
aatgattactacttaacaatattac

SEQ ID NO: 4868465 - DNA, 25 bp, Homo sapien
gattactacttaacaatattacatt

SEQ ID NO: 4868466 - DNA, 25 bp, Homo sapien
ggctgctgatagtcgtactttcttg

SEQ ID NO: 4868467 - DNA, 25 bp, Homo sapien
tcattccaatgagagttgcacactg

SEQ ID NO: 4868468 - DNA, 25 bp, Homo sapien
cagcttggttttgtggctgctgata

SEQ ID NO: 4868469 - DNA, 25 bp, Homo sapien
gagttgcacactgtcagcttggttt

SEQ ID NO: 4868470 - DNA, 25 bp, Homo sapien
tgtgcaggttccctgtgtcaaggcc

SEQ ID NO: 4868471 - DNA, 25 bp, Homo sapien
caaggccttttgagccacttggaga

SEQ ID NO: 4868472 - DNA, 25 bp, Homo sapien
caggattcccacttcccaagatgtg

SEQ ID NO: 4868473 - DNA, 25 bp, Homo sapien
ggaatcacaggtcttggcaaggtca

SEQ ID NO: 4868474 - DNA, 25 bp, Homo sapien
tcactcacagaatacaatgaaacag

SEQ ID NO: 4868475 - DNA, 25 bp, Homo sapien
tatcactcacagaatacaatgaaac

SEQ ID NO: 4868476 - DNA, 25 bp, Homo sapien
ttgatctgacacttatcactcacag

SEQ ID NO: 4868477 - DNA, 25 bp, Homo sapien
aattaatctgttattgatctgacac

SEQ ID NO: 4868478 - DNA, 25 bp, Homo sapien
tcgctcctgggagcataatgaggaa

SEQ ID NO: 4868479 - DNA, 25 bp, Homo sapien
tctaccatacaagttctgaagaagc

SEQ ID NO: 4868480 - DNA, 25 bp, Homo sapien
gataaaaacaaactcgctcctggga

SEQ ID NO: 4868481 - DNA, 25 bp, Homo sapien
cacaggagtatgcatcatgctgtag

SEQ ID NO: 4868482 - DNA, 25 bp, Homo sapien
gcagcagtaaccagacagcaacatt

SEQ ID NO: 4868483 - DNA, 25 bp, Homo sapien
cagtaatactgcctcgccagtggta

SEQ ID NO: 4868484 - DNA, 25 bp, Homo sapien
cagcaggtccccagtatggcctaaa

SEQ ID NO: 4868485 - DNA, 25 bp, Homo sapien
agagttgccaacaccaatacacagg

SEQ ID NO: 4868486 - DNA, 25 bp, Homo sapien
attgtacagtacagcatgggaaaag

SEQ ID NO: 4868487 - DNA, 25 bp, Homo sapien
ttcattgtacagtacagcatgggaa

SEQ ID NO: 4868488 - DNA, 25 bp, Homo sapien
cattgtacagtacagcatgggaaaa

SEQ ID NO: 4868489 - DNA, 25 bp, Homo sapien
ttgtacagtacagcatgggaaaaga

SEQ ID NO: 4868490 - DNA, 25 bp, Homo sapien
tataattgaaaatagctctagttca

SEQ ID NO: 4868491 - DNA, 25 bp, Homo sapien
ccctgaatgattttatttggtctaa

SEQ ID NO: 4868492 - DNA, 25 bp, Homo sapien
gcccagccagctcactcttataatt

SEQ ID NO: 4868493 - DNA, 25 bp, Homo sapien
cggattcttttgacttatgtggaca

SEQ ID NO: 4868494 - DNA, 25 bp, Homo sapien
atgtagcatcaagcagccgtgaagg

SEQ ID NO: 4868495 - DNA, 25 bp, Homo sapien
ccgatgatcagggattgagactgag

SEQ ID NO: 4868496 - DNA, 25 bp, Homo sapien
catcaagcagccgtgaagggaaagc

SEQ ID NO: 4868497 - DNA, 25 bp, Homo sapien
gaagggaaagctgtgccgatgatca

SEQ ID NO: 4868498 - DNA, 25 bp, Homo sapien
tacttgtgtataacgcttgcgcgtc

SEQ ID NO: 4868499 - DNA, 25 bp, Homo sapien
tctcctctggtatgagcattacttg

SEQ ID NO: 4868500 - DNA, 25 bp, Homo sapien
tgagtgttatcatctcctcagacac

SEQ ID NO: 4868501 - DNA, 25 bp, Homo sapien
tcttgttggtgtaaagggatcatgg

SEQ ID NO: 4868502 - DNA, 25 bp, Homo sapien
caggctctcggtgcagacaatttga

SEQ ID NO: 4868503 - DNA, 25 bp, Homo sapien
cagacggcagcagggacttgcagaa

SEQ ID NO: 4868504 - DNA, 25 bp, Homo sapien
gaggtgtcaatgtcacccataggtt

SEQ ID NO: 4868505 - DNA, 25 bp, Homo sapien
tcttggaagttatcactgggaagcc

SEQ ID NO: 4868506 - DNA, 25 bp, Homo sapien
tgccctctgatgaatacccacagtg

SEQ ID NO: 4868507 - DNA, 25 bp, Homo sapien
gtttctcatgaaccaggacttgctg

SEQ ID NO: 4868508 - DNA, 25 bp, Homo sapien
tacaaagtgtgctaccaaagggtag

SEQ ID NO: 4868509 - DNA, 25 bp, Homo sapien
caaagggtagcgcacttttgccaca

SEQ ID NO: 4868510 - DNA, 25 bp, Homo sapien
gggacccacccaattagataatcag

SEQ ID NO: 4868511 - DNA, 25 bp, Homo sapien
gacgtaaaccagagtgaccacaggc

SEQ ID NO: 4868512 - DNA, 25 bp, Homo sapien
cagcctttgatagaggcgggaccca

SEQ ID NO: 4868513 - DNA, 25 bp, Homo sapien
aaacatgcctgggttcgttgctggt

SEQ ID NO: 4868514 - DNA, 25 bp, Homo sapien
ggcaccttagggagagccagacctt

SEQ ID NO: 4868515 - DNA, 25 bp, Homo sapien
cagtccctcttgacaggcaccttag

SEQ ID NO: 4868516 - DNA, 25 bp, Homo sapien
ttgacaggcaccttagggagagcca

SEQ ID NO: 4868517 - DNA, 25 bp, Homo sapien
tagggagagccagaccttcagtctc

SEQ ID NO: 4868518 - DNA, 25 bp, Homo sapien
aaacaacagagcctggaaaggccac

SEQ ID NO: 4868519 - DNA, 25 bp, Homo sapien
agagcctggaaaggccacgtcaagt

SEQ ID NO: 4868520 - DNA, 25 bp, Homo sapien
acaacagagcctggaaaggccacgt

SEQ ID NO: 4868521 - DNA, 25 bp, Homo sapien
acagagcctggaaaggccacgtcaa

SEQ ID NO: 4868522 - DNA, 25 bp, Homo sapien
gtgctgccaaatctcactccgtggg

SEQ ID NO: 4868523 - DNA, 25 bp, Homo sapien
ggaaaacagaggcattgaagcatgc

SEQ ID NO: 4868524 - DNA, 25 bp, Homo sapien
atctcactccgtgggagtcccggaa

SEQ ID NO: 4868525 - DNA, 25 bp, Homo sapien
aaacagaggcattgaagcatgcagc

SEQ ID NO: 4868526 - DNA, 25 bp, Homo sapien
tggctttgctaaagtcaggcaagca

SEQ ID NO: 4868527 - DNA, 25 bp, Homo sapien
gcgagaagccacctgatggcctgag

SEQ ID NO: 4868528 - DNA, 25 bp, Homo sapien
ggctttgctaaagtcaggcaagcag

SEQ ID NO: 4868529 - DNA, 25 bp, Homo sapien
tgtcaccccagaagcgagaagccac

SEQ ID NO: 4868530 - DNA, 25 bp, Homo sapien
caccacacgctggccagctgatcat

SEQ ID NO: 4868531 - DNA, 25 bp, Homo sapien
taaccaagtatgttcccacctgcta

SEQ ID NO: 4868532 - DNA, 25 bp, Homo sapien
aaacatgaagtaggaataaccaagt

SEQ ID NO: 4868533 - DNA, 25 bp, Homo sapien
ggcaagtataaaacttcacgtgtag

SEQ ID NO: 4868534 - DNA, 25 bp, Homo sapien
ctgaagcaatactaagttggcaagt

SEQ ID NO: 4868535 - DNA, 25 bp, Homo sapien
gatgggactgtagtcacctgcatgc

SEQ ID NO: 4868536 - DNA, 25 bp, Homo sapien
gccgggggatgggactgtagtcacc

SEQ ID NO: 4868537 - DNA, 25 bp, Homo sapien
cttctgtaccactgtgagataacgc

SEQ ID NO: 4868538 - DNA, 25 bp, Homo sapien
ccactgtgagataacgccgggggat

SEQ ID NO: 4868539 - DNA, 25 bp, Homo sapien
ctgcgggtgtattgggcttctggcc

SEQ ID NO: 4868540 - DNA, 25 bp, Homo sapien
gtccacagcagatggacgcccagag

SEQ ID NO: 4868541 - DNA, 25 bp, Homo sapien
tgcgggtgtattgggcttctggccc

SEQ ID NO: 4868542 - DNA, 25 bp, Homo sapien
tgacaggagcgtccacactttgtcc

SEQ ID NO: 4868543 - DNA, 25 bp, Homo sapien
ttgaagaagctttgtcccagcaact

SEQ ID NO: 4868544 - DNA, 25 bp, Homo sapien
gaagtgtcctgctcagactggccag

SEQ ID NO: 4868545 - DNA, 25 bp, Homo sapien
gactggccaggcactaaagtctgct

SEQ ID NO: 4868546 - DNA, 25 bp, Homo sapien
atacaggggttcaaaatccgaagtg

SEQ ID NO: 4868547 - DNA, 25 bp, Homo sapien
caacagagcatttccactggaaaag

SEQ ID NO: 4868548 - DNA, 25 bp, Homo sapien
tcaaaatccgaagtggaacccaaga

SEQ ID NO: 4868549 - DNA, 25 bp, Homo sapien
taacaacagagcatttccactggaa

SEQ ID NO: 4868550 - DNA, 25 bp, Homo sapien
tgagaaccagcataaaatctgggag

SEQ ID NO: 4868551 - DNA, 25 bp, Homo sapien
aagggatgccaaggacgatgagaac

SEQ ID NO: 4868552 - DNA, 25 bp, Homo sapien
caaggacgatgagaaccagcataaa

SEQ ID NO: 4868553 - DNA, 25 bp, Homo sapien
atgccaaggacgatgagaaccagca

SEQ ID NO: 4868554 - DNA, 25 bp, Homo sapien
gcacagcatacatctccacctgtgt

SEQ ID NO: 4868555 - DNA, 25 bp, Homo sapien
cactgtcagaaggtgcactttccgt

SEQ ID NO: 4868556 - DNA, 25 bp, Homo sapien
ctgtgttaccactgtcagaaggtgc

SEQ ID NO: 4868557 - DNA, 25 bp, Homo sapien
tcctgctcctcaccaagatccaggg

SEQ ID NO: 4868558 - DNA, 25 bp, Homo sapien
caggtttgcccactcaaaatccagg

SEQ ID NO: 4868559 - DNA, 25 bp, Homo sapien
tccaggtttgcccactcaaaatcca

SEQ ID NO: 4868560 - DNA, 25 bp, Homo sapien
ccaggtttgcccactcaaaatccag

SEQ ID NO: 4868561 - DNA, 25 bp, Homo sapien
tgtctgttcagcacccgattaatat

SEQ ID NO: 4868562 - DNA, 25 bp, Homo sapien
acccgattaatatcctacagcaact

SEQ ID NO: 4868563 - DNA, 25 bp, Homo sapien
ctccttgtctgttcagcacccgatt

SEQ ID NO: 4868564 - DNA, 25 bp, Homo sapien
tcagcacccgattaatatcctacag

SEQ ID NO: 4868565 - DNA, 25 bp, Homo sapien
gagggcatcttcattttcggcgatt

SEQ ID NO: 4868566 - DNA, 25 bp, Homo sapien
catctacaagctgggatattttcaa

SEQ ID NO: 4868567 - DNA, 25 bp, Homo sapien
cttttatggtgtcattagaatgtaa

SEQ ID NO: 4868568 - DNA, 25 bp, Homo sapien
aatacagggcggacccatttctgat

SEQ ID NO: 4868569 - DNA, 25 bp, Homo sapien
ctgtttgagccacacattggttgtc

SEQ ID NO: 4868570 - DNA, 25 bp, Homo sapien
cacacattggttgtcatcagctgat

SEQ ID NO: 4868571 - DNA, 25 bp, Homo sapien
gagccacacattggttgtcatcagc

SEQ ID NO: 4868572 - DNA, 25 bp, Homo sapien
cattggttgtcatcagctgattctt

SEQ ID NO: 4868573 - DNA, 25 bp, Homo sapien
tcggcgcccactcttttgtgtctaa

SEQ ID NO: 4868574 - DNA, 25 bp, Homo sapien
ctgtagctgaggccctcagggtcct

SEQ ID NO: 4868575 - DNA, 25 bp, Homo sapien
ttctggtggcacactttgtgggaag

SEQ ID NO: 4868576 - DNA, 25 bp, Homo sapien
tgggattctggtggcacactttgtg

SEQ ID NO: 4868577 - DNA, 25 bp, Homo sapien
gaatgtgaagcttcgtttctcctgc

SEQ ID NO: 4868578 - DNA, 25 bp, Homo sapien
caatctgtgcaaatggacgtcgcaa

SEQ ID NO: 4868579 - DNA, 25 bp, Homo sapien
gtcgcaatgactatatcctctgtag

SEQ ID NO: 4868580 - DNA, 25 bp, Homo sapien
cattgtctgtgccataacagcgcgt

SEQ ID NO: 4868581 - DNA, 25 bp, Homo sapien
catcgccatggcaatacccggaagt

SEQ ID NO: 4868582 - DNA, 25 bp, Homo sapien
tgtctcagctacagtgaagccgggt

SEQ ID NO: 4868583 - DNA, 25 bp, Homo sapien
tttttatatgcaacagcgcccagct

SEQ ID NO: 4868584 - DNA, 25 bp, Homo sapien
gaactagctaaacagggtcgggcag

SEQ ID NO: 4868585 - DNA, 25 bp, Homo sapien
tgagtaagaagtccaaacttggcct

SEQ ID NO: 4868586 - DNA, 25 bp, Homo sapien
acttgagtaagaagtccaaacttgg

SEQ ID NO: 4868587 - DNA, 25 bp, Homo sapien
gagtaagaagtccaaacttggcctc

SEQ ID NO: 4868588 - DNA, 25 bp, Homo sapien
ttgagtaagaagtccaaacttggcc

SEQ ID NO: 4868589 - DNA, 25 bp, Homo sapien
tgaccttcaacagcaggattaacag

SEQ ID NO: 4868590 - DNA, 25 bp, Homo sapien
ctgaccttcaacagcaggattaaca

SEQ ID NO: 4868591 - DNA, 25 bp, Homo sapien
tccagcgtaacttgtggtctgtcca

SEQ ID NO: 4868592 - DNA, 25 bp, Homo sapien
taatcatcaggattccagcgtaact

SEQ ID NO: 4868593 - DNA, 25 bp, Homo sapien
gaatggatcccaccataatcatcag

SEQ ID NO: 4868594 - DNA, 25 bp, Homo sapien
caaagagaactatgtcaggaagcca

SEQ ID NO: 4868595 - DNA, 25 bp, Homo sapien
accttggtcatcagggagccttcga

SEQ ID NO: 4868596 - DNA, 25 bp, Homo sapien
catggagcagttctgtcggtcgaac

SEQ ID NO: 4868597 - DNA, 25 bp, Homo sapien
tcagagaaaccaagaccgatgtgga

SEQ ID NO: 4868598 - DNA, 25 bp, Homo sapien
tagaataaaggcaggcgtctcagga

SEQ ID NO: 4868599 - DNA, 25 bp, Homo sapien
tacctttacggcagcattatcagga

SEQ ID NO: 4868600 - DNA, 25 bp, Homo sapien
ttgtctttggcctacctttacggca

SEQ ID NO: 4868601 - DNA, 25 bp, Homo sapien
tggcctacctttacggcagcattat

SEQ ID NO: 4868602 - DNA, 25 bp, Homo sapien
ggcagcattatcaggaataccagtt

SEQ ID NO: 4868603 - DNA, 25 bp, Homo sapien
ggtaactatgtagccacatcttcaa

SEQ ID NO: 4868604 - DNA, 25 bp, Homo sapien
aaaatcagaaccgagcctgttactg

SEQ ID NO: 4868605 - DNA, 25 bp, Homo sapien
aacttgagctacaaatttccagtct

SEQ ID NO: 4868606 - DNA, 25 bp, Homo sapien
ggaagattcggtcaagaacttgagc

SEQ ID NO: 4868607 - DNA, 25 bp, Homo sapien
cacatgtgagctcaagcctggacct

SEQ ID NO: 4868608 - DNA, 25 bp, Homo sapien
ggttcgtagaacaagcacatgcatt

SEQ ID NO: 4868609 - DNA, 25 bp, Homo sapien
gaataacacctgcttcggtaggcca

SEQ ID NO: 4868610 - DNA, 25 bp, Homo sapien
tttccacaaagacaacgcattcggg

SEQ ID NO: 4868611 - DNA, 25 bp, Homo sapien
gggagagcttcaaaggtcatgcatg

SEQ ID NO: 4868612 - DNA, 25 bp, Homo sapien
tcccatcctgaagtactgataaagc

SEQ ID NO: 4868613 - DNA, 25 bp, Homo sapien
cccaaaggaacaaagttacactgag

SEQ ID NO: 4868614 - DNA, 25 bp, Homo sapien
ttccagatagaaccattgtagaccg

SEQ ID NO: 4868615 - DNA, 25 bp, Homo sapien
gattaggctctaacccagagcggca

SEQ ID NO: 4868616 - DNA, 25 bp, Homo sapien
gagtttgaatttccaagccctgatt

SEQ ID NO: 4868617 - DNA, 25 bp, Homo sapien
gggtcagttttagaatccggtgcat

SEQ ID NO: 4868618 - DNA, 25 bp, Homo sapien
tgaccactgtggttgatccgaaaca

SEQ ID NO: 4868619 - DNA, 25 bp, Homo sapien
aactgggacctgatctatgatacgc

SEQ ID NO: 4868620 - DNA, 25 bp, Homo sapien
agttccccagctgtagttatgtatc

SEQ ID NO: 4868621 - DNA, 25 bp, Homo sapien
tcttgcacttgactgagttgggaca

SEQ ID NO: 4868622 - DNA, 25 bp, Homo sapien
gatcgttgaagagcaatagaacctt

SEQ ID NO: 4868623 - DNA, 25 bp, Homo sapien
ttcagagcactttactccagactgc

SEQ ID NO: 4868624 - DNA, 25 bp, Homo sapien
tttaaacccaccaagtatagcagta

SEQ ID NO: 4868625 - DNA, 25 bp, Homo sapien
gagccacatgacaaggtaatatgca

SEQ ID NO: 4868626 - DNA, 25 bp, Homo sapien
tccagactgctttaagagagagtgc

SEQ ID NO: 4868627 - DNA, 25 bp, Homo sapien
ccttttaaagaaatgggcgcaatca

SEQ ID NO: 4868628 - DNA, 25 bp, Homo sapien
ggtccgcatcaattaacccacggga

SEQ ID NO: 4868629 - DNA, 25 bp, Homo sapien
tttacacctgttctccaagaggccc

SEQ ID NO: 4868630 - DNA, 25 bp, Homo sapien
tgttccctactgtaagctgccccag

SEQ ID NO: 4868631 - DNA, 25 bp, Homo sapien
gaaaggactatgtggatcccttgtg

SEQ ID NO: 4868632 - DNA, 25 bp, Homo sapien
ggctatgcagatacctacctcacag

SEQ ID NO: 4868633 - DNA, 25 bp, Homo sapien
tggttcaaaccttgtgattaaagag

SEQ ID NO: 4868634 - DNA, 25 bp, Homo sapien
gaacagtggtttcaactactacaat

SEQ ID NO: 4868635 - DNA, 25 bp, Homo sapien
gggtatgtgctaacatctcagaact

SEQ ID NO: 4868636 - DNA, 25 bp, Homo sapien
cctgaaagaggtgtattgtaccaaa

SEQ ID NO: 4868637 - DNA, 25 bp, Homo sapien
gatcttaaagcttcctaaattgtga

SEQ ID NO: 4868638 - DNA, 25 bp, Homo sapien
taaagcaagtagagtcaatcagagt

SEQ ID NO: 4868639 - DNA, 25 bp, Homo sapien
acccaggaggtggattgcgccactg

SEQ ID NO: 4868640 - DNA, 25 bp, Homo sapien
tgaagttctaatattaagtttagaa

SEQ ID NO: 4868641 - DNA, 25 bp, Homo sapien
gtttagaattataatgatctacagt

SEQ ID NO: 4868642 - DNA, 25 bp, Homo sapien
catgtttgaagttctaatattaagt

SEQ ID NO: 4868643 - DNA, 25 bp, Homo sapien
taagtttagaattataatgatctac

SEQ ID NO: 4868644 - DNA, 25 bp, Homo sapien
cctgaagccttgtttggaattctag

SEQ ID NO: 4868645 - DNA, 25 bp, Homo sapien
ttatgtatcgagaagtgataaccca

SEQ ID NO: 4868646 - DNA, 25 bp, Homo sapien
ggacccatggcagtataaagcaatg

SEQ ID NO: 4868647 - DNA, 25 bp, Homo sapien
tgataacccaaaggctaactagatg

SEQ ID NO: 4868648 - DNA, 25 bp, Homo sapien
gcttgggcaacaaaatgagattcca

SEQ ID NO: 4868649 - DNA, 25 bp, Homo sapien
atgagctatgatcatgggactgcac

SEQ ID NO: 4868650 - DNA, 25 bp, Homo sapien
acttgaagctgggagttcgatacca

SEQ ID NO: 4868651 - DNA, 25 bp, Homo sapien
tcacttgaagctgggagttcgatac

SEQ ID NO: 4868652 - DNA, 25 bp, Homo sapien
agaccatgacagttagcatcgaagc

SEQ ID NO: 4868653 - DNA, 25 bp, Homo sapien
atgagataccacgcccagcccacga

SEQ ID NO: 4868654 - DNA, 25 bp, Homo sapien
gcatgagataccacgcccagcccac

SEQ ID NO: 4868655 - DNA, 25 bp, Homo sapien
tgagataccacgcccagcccacgat

SEQ ID NO: 4868656 - DNA, 25 bp, Homo sapien
catgagataccacgcccagcccacg

SEQ ID NO: 4868657 - DNA, 25 bp, Homo sapien
tactggcgatatggttcatggcttg

SEQ ID NO: 4868658 - DNA, 25 bp, Homo sapien
tgtctattaggtgcctgcattattg

SEQ ID NO: 4868659 - DNA, 25 bp, Homo sapien
tccaatctgtagacaaacggtaatg

SEQ ID NO: 4868660 - DNA, 25 bp, Homo sapien
tagcagaacttcatttatccaaatc

SEQ ID NO: 4868661 - DNA, 25 bp, Homo sapien
cacccaagtggcatattgcattaca

SEQ ID NO: 4868662 - DNA, 25 bp, Homo sapien
gtgcagacacccaagtggcatattg

SEQ ID NO: 4868663 - DNA, 25 bp, Homo sapien
ggcatattgcattacagcttagaag

SEQ ID NO: 4868664 - DNA, 25 bp, Homo sapien
cattacagcttagaagtcctgggct

SEQ ID NO: 4868665 - DNA, 25 bp, Homo sapien
tctcctttcactcgggaccgcgcgc

SEQ ID NO: 4868666 - DNA, 25 bp, Homo sapien
aggcagcgcctaccgcctggccaga

SEQ ID NO: 4868667 - DNA, 25 bp, Homo sapien
agccgcgcgcgacttcggacacgcc

SEQ ID NO: 4868668 - DNA, 25 bp, Homo sapien
cgcgcagctgactcggcctcaggcc

SEQ ID NO: 4868669 - DNA, 25 bp, Homo sapien
gtgaggaggctctcgcacagctccg

SEQ ID NO: 4868670 - DNA, 25 bp, Homo sapien
caagtgaggaggctctcgcacagct

SEQ ID NO: 4868671 - DNA, 25 bp, Homo sapien
gcccgctccagcgactctacgctga

SEQ ID NO: 4868672 - DNA, 25 bp, Homo sapien
gctccagcgactctacgctgaacat

SEQ ID NO: 4868673 - DNA, 25 bp, Homo sapien
ccgcgaacgcggcaacaaaggcgag

SEQ ID NO: 4868674 - DNA, 25 bp, Homo sapien
ccgtcctccgcgaacgcggcaacaa

SEQ ID NO: 4868675 - DNA, 25 bp, Homo sapien
acgcggcaacaaaggcgaggagcgg

SEQ ID NO: 4868676 - DNA, 25 bp, Homo sapien
gtcctccgcgaacgcggcaacaaag

SEQ ID NO: 4868677 - DNA, 25 bp, Homo sapien
acagcagtgaaagccatctccttgc

SEQ ID NO: 4868678 - DNA, 25 bp, Homo sapien
cctcttttctgaaatacagcagtga

SEQ ID NO: 4868679 - DNA, 25 bp, Homo sapien
aaatacagcagtgaaagccatctcc

SEQ ID NO: 4868680 - DNA, 25 bp, Homo sapien
cttcctcttttctgaaatacagcag

SEQ ID NO: 4868681 - DNA, 25 bp, Homo sapien
tagaccaagctaagctaccgtttgg

SEQ ID NO: 4868682 - DNA, 25 bp, Homo sapien
tgagcacgtttaaggtagaccaagc

SEQ ID NO: 4868683 - DNA, 25 bp, Homo sapien
taaagggaagcactacttgcacagt

SEQ ID NO: 4868684 - DNA, 25 bp, Homo sapien
gacggttaggcgtatgaaatgcatt

SEQ ID NO: 4868685 - DNA, 25 bp, Homo sapien
gcctttaagggaaatgtcctgccaa

SEQ ID NO: 4868686 - DNA, 25 bp, Homo sapien
tcaatctatgaaaatcacggcacgt

SEQ ID NO: 4868687 - DNA, 25 bp, Homo sapien
tcatcttaagattaggccaatgcag

SEQ ID NO: 4868688 - DNA, 25 bp, Homo sapien
tctcctgttgatttaagtatgctgc

SEQ ID NO: 4868689 - DNA, 25 bp, Homo sapien
ccattcgttaaatcttccacggtct

SEQ ID NO: 4868690 - DNA, 25 bp, Homo sapien
aaatcttccacggtctggcatggtg

SEQ ID NO: 4868691 - DNA, 25 bp, Homo sapien
tctggcatggtgcatccacattaaa

SEQ ID NO: 4868692 - DNA, 25 bp, Homo sapien
tgggccatcacaaccccattcgtta

SEQ ID NO: 4868693 - DNA, 25 bp, Homo sapien
gcaaaatctggccactaacaagaaa

SEQ ID NO: 4868694 - DNA, 25 bp, Homo sapien
gagtaagcatcttagatacccctgt

SEQ ID NO: 4868695 - DNA, 25 bp, Homo sapien
caggtgccactgatgagatgatatt

SEQ ID NO: 4868696 - DNA, 25 bp, Homo sapien
tatatgggtactcagggcaggtgcc

SEQ ID NO: 4868697 - DNA, 25 bp, Homo sapien
tcaacagaaatgcagggcaacccag

SEQ ID NO: 4868698 - DNA, 25 bp, Homo sapien
cgttgctccggtaaagactgttgaa

SEQ ID NO: 4868699 - DNA, 25 bp, Homo sapien
taatgttcaaacacgagtccccagt

SEQ ID NO: 4868700 - DNA, 25 bp, Homo sapien
aaagttcacttagctaggcccacag

SEQ ID NO: 4868701 - DNA, 25 bp, Homo sapien
tgtatggctctttcaccttgttggt

SEQ ID NO: 4868702 - DNA, 25 bp, Homo sapien
ttcctttgtcatgcaaaagttttca

SEQ ID NO: 4868703 - DNA, 25 bp, Homo sapien
tgcatgtggcgtgagataagggtct

SEQ ID NO: 4868704 - DNA, 25 bp, Homo sapien
tcaaattcagtaggtatgtttaaaa

SEQ ID NO: 4868705 - DNA, 25 bp, Homo sapien
taagtttcttatacagactggatag

SEQ ID NO: 4868706 - DNA, 25 bp, Homo sapien
ttccacataagtgagatggtgtttg

SEQ ID NO: 4868707 - DNA, 25 bp, Homo sapien
tccctcagaattgcaaaatacacag

SEQ ID NO: 4868708 - DNA, 25 bp, Homo sapien
tgatatcgtatacaatgtggacaca

SEQ ID NO: 4868709 - DNA, 25 bp, Homo sapien
caagctaattagtatccattgcctc

SEQ ID NO: 4868710 - DNA, 25 bp, Homo sapien
gccaaacttcaaggctcagggtaca

SEQ ID NO: 4868711 - DNA, 25 bp, Homo sapien
gtagcttctcacttgtcagctcaga

SEQ ID NO: 4868712 - DNA, 25 bp, Homo sapien
cctaagtaggagacatgaatgaatc

SEQ ID NO: 4868713 - DNA, 25 bp, Homo sapien
caaagagagatgtcaacagcaataa

SEQ ID NO: 4868714 - DNA, 25 bp, Homo sapien
gactgtactgctgccatctcgactc

SEQ ID NO: 4868715 - DNA, 25 bp, Homo sapien
ccctctgatgccgagccaaggctgg

SEQ ID NO: 4868716 - DNA, 25 bp, Homo sapien
gatgccgagccaaggctggactgta

SEQ ID NO: 4868717 - DNA, 25 bp, Homo sapien
tggactgtactgctgccatctcgac

SEQ ID NO: 4868718 - DNA, 25 bp, Homo sapien
taacaagtggtaatcttactggaga

SEQ ID NO: 4868719 - DNA, 25 bp, Homo sapien
gctgctcgctatgtcctaactcctg

SEQ ID NO: 4868720 - DNA, 25 bp, Homo sapien
tttgtaccactcacagcttaagcta

SEQ ID NO: 4868721 - DNA, 25 bp, Homo sapien
tctcaaaactaggaagagatgacag

SEQ ID NO: 4868722 - DNA, 25 bp, Homo sapien
ctttagcctccaattatctcctact

SEQ ID NO: 4868723 - DNA, 25 bp, Homo sapien
tgtttagccaattttcatcaaaata

SEQ ID NO: 4868724 - DNA, 25 bp, Homo sapien
tcagttttgattctgtttagccaat

SEQ ID NO: 4868725 - DNA, 25 bp, Homo sapien
caattatctcctacttcagttttga

SEQ ID NO: 4868726 - DNA, 25 bp, Homo sapien
ctcatgattataatccaagattcct

SEQ ID NO: 4868727 - DNA, 25 bp, Homo sapien
tgattataatccaagattcctttta

SEQ ID NO: 4868728 - DNA, 25 bp, Homo sapien
gattataatccaagattccttttaa

SEQ ID NO: 4868729 - DNA, 25 bp, Homo sapien
catgattataatccaagattccttt

SEQ ID NO: 4868730 - DNA, 25 bp, Homo sapien
cactcagtgccaatggtgcctgggc

SEQ ID NO: 4868731 - DNA, 25 bp, Homo sapien
ctcagtgccaatggtgcctgggctg

SEQ ID NO: 4868732 - DNA, 25 bp, Homo sapien
cagtgccaatggtgcctgggctgga

SEQ ID NO: 4868733 - DNA, 25 bp, Homo sapien
tcactcagtgccaatggtgcctggg

SEQ ID NO: 4868734 - DNA, 25 bp, Homo sapien
gcatcagaatgctccccaataaggt

SEQ ID NO: 4868735 - DNA, 25 bp, Homo sapien
catccttccaagctctgctgcatca

SEQ ID NO: 4868736 - DNA, 25 bp, Homo sapien
gttcacatcaggaagggtaaagtca

SEQ ID NO: 4868737 - DNA, 25 bp, Homo sapien
taagatgagctgaagcatccttcca

SEQ ID NO: 4868738 - DNA, 25 bp, Homo sapien
catctgttacagatatatgttggga

SEQ ID NO: 4868739 - DNA, 25 bp, Homo sapien
gtcaaggcactatctaaaatttaag

SEQ ID NO: 4868740 - DNA, 25 bp, Homo sapien
gtcagggagtgatttcttaaggaaa

SEQ ID NO: 4868741 - DNA, 25 bp, Homo sapien
taaacattgcatataatgatactct

SEQ ID NO: 4868742 - DNA, 25 bp, Homo sapien
tggctgtcatgacaacatgttgaac

SEQ ID NO: 4868743 - DNA, 25 bp, Homo sapien
aacatgttgaacagattcctccatc

SEQ ID NO: 4868744 - DNA, 25 bp, Homo sapien
tgacaacatgttgaacagattcctc

SEQ ID NO: 4868745 - DNA, 25 bp, Homo sapien
catgttgaacagattcctccatcat

SEQ ID NO: 4868746 - DNA, 25 bp, Homo sapien
taaatctgtgaagtttggcccaact

SEQ ID NO: 4868747 - DNA, 25 bp, Homo sapien
tgttatcggcctgacctctgggaaa

SEQ ID NO: 4868748 - DNA, 25 bp, Homo sapien
aggagatgactccagatggcagctg

SEQ ID NO: 4868749 - DNA, 25 bp, Homo sapien
cacagtgggcccttagatagtttaa

SEQ ID NO: 4868750 - DNA, 25 bp, Homo sapien
catgtattaagaacggcacagcagc

SEQ ID NO: 4868751 - DNA, 25 bp, Homo sapien
tctggctaacaggagtgagaattcc

SEQ ID NO: 4868752 - DNA, 25 bp, Homo sapien
tctacttgcaggaggtggataactc

SEQ ID NO: 4868753 - DNA, 25 bp, Homo sapien
cactaaggcagaatggttggcggtc

SEQ ID NO: 4868754 - DNA, 25 bp, Homo sapien
aggtcaacataggcatcatttccag

SEQ ID NO: 4868755 - DNA, 25 bp, Homo sapien
ggtcaacataggcatcatttccagc

SEQ ID NO: 4868756 - DNA, 25 bp, Homo sapien
gtcaacataggcatcatttccagca

SEQ ID NO: 4868757 - DNA, 25 bp, Homo sapien
ctgcatatccagttcatggcatctt

SEQ ID NO: 4868758 - DNA, 25 bp, Homo sapien
gctggactgttagggtcttctatag

SEQ ID NO: 4868759 - DNA, 25 bp, Homo sapien
gagtctttccattaatacctgattc

SEQ ID NO: 4868760 - DNA, 25 bp, Homo sapien
aattgagtctggagctgcaaatgcc

SEQ ID NO: 4868761 - DNA, 25 bp, Homo sapien
cttggagctgttctaattgagtctg

SEQ ID NO: 4868762 - DNA, 25 bp, Homo sapien
tcagcacgtcgatctcatctttcag

SEQ ID NO: 4868763 - DNA, 25 bp, Homo sapien
ccaaagtggtcagttcatcattctg

SEQ ID NO: 4868764 - DNA, 25 bp, Homo sapien
catctttcagagactgagcttcatc

SEQ ID NO: 4868765 - DNA, 25 bp, Homo sapien
tctgttgccgaagttcagagatctc

SEQ ID NO: 4868766 - DNA, 25 bp, Homo sapien
ggtttcaagttgacttcgcgctgcg

SEQ ID NO: 4868767 - DNA, 25 bp, Homo sapien
tgccgccttaaatcaccaaggtctt

SEQ ID NO: 4868768 - DNA, 25 bp, Homo sapien
cttctaagagtttaacctgccgcct

SEQ ID NO: 4868769 - DNA, 25 bp, Homo sapien
tcgcgctgcgttggcctttcttaac

SEQ ID NO: 4868770 - DNA, 25 bp, Homo sapien
taaaagtacctgctatggagagttt

SEQ ID NO: 4868771 - DNA, 25 bp, Homo sapien
tcagtctcctaaatgaatcaataca

SEQ ID NO: 4868772 - DNA, 25 bp, Homo sapien
tatttactgaactatgcttttacat

SEQ ID NO: 4868773 - DNA, 25 bp, Homo sapien
tttattcaagcatgaatatttactg

SEQ ID NO: 4868774 - DNA, 25 bp, Homo sapien
ttctagcaatagagataaccaggta

SEQ ID NO: 4868775 - DNA, 25 bp, Homo sapien
ggtaccatgaggtgtcaactgccga

SEQ ID NO: 4868776 - DNA, 25 bp, Homo sapien
gcatagctaagcttacaagaaaata

SEQ ID NO: 4868777 - DNA, 25 bp, Homo sapien
cagggcgattctaattgcatagcta

SEQ ID NO: 4868778 - DNA, 25 bp, Homo sapien
cttcggataatctgttttgtagttc

SEQ ID NO: 4868779 - DNA, 25 bp, Homo sapien
tcttttagccgcttatattcaaaat

SEQ ID NO: 4868780 - DNA, 25 bp, Homo sapien
ttcttttagccgcttatattcaaaa

SEQ ID NO: 4868781 - DNA, 25 bp, Homo sapien
tttctttgattcttcggataatctg

SEQ ID NO: 4868782 - DNA, 25 bp, Homo sapien
tgagcttgtacacaacgaagctctt

SEQ ID NO: 4868783 - DNA, 25 bp, Homo sapien
ttgtacacaacgaagctcttcaatg

SEQ ID NO: 4868784 - DNA, 25 bp, Homo sapien
cccttcttgagcttgtacacaacga

SEQ ID NO: 4868785 - DNA, 25 bp, Homo sapien
atggtttccttcagagaatcccttt

SEQ ID NO: 4868786 - DNA, 25 bp, Homo sapien
ttgggtctaggcttaaattgtctgc

SEQ ID NO: 4868787 - DNA, 25 bp, Homo sapien
cttatggcacttggattaaaaaata

SEQ ID NO: 4868788 - DNA, 25 bp, Homo sapien
gtaggaattagacttaaatcacctc

SEQ ID NO: 4868789 - DNA, 25 bp, Homo sapien
gcccctaacctgaatagcactgttg

SEQ ID NO: 4868790 - DNA, 25 bp, Homo sapien
taacactattcaccatgcagtaaga

SEQ ID NO: 4868791 - DNA, 25 bp, Homo sapien
tccattatcctatgccagagggcct

SEQ ID NO: 4868792 - DNA, 25 bp, Homo sapien
acctttctgagccatgtccccagag

SEQ ID NO: 4868793 - DNA, 25 bp, Homo sapien
cccaacatgcaaagtgaggaaatga

SEQ ID NO: 4868794 - DNA, 25 bp, Homo sapien
tcctgacttccaagaggcattaacc

SEQ ID NO: 4868795 - DNA, 25 bp, Homo sapien
cagctagactgtctgaagactcctg

SEQ ID NO: 4868796 - DNA, 25 bp, Homo sapien
ggtgtaacaatctctgcagctagac

SEQ ID NO: 4868797 - DNA, 25 bp, Homo sapien
tttcaggtgtaacaatctctgcagc

SEQ ID NO: 4868798 - DNA, 25 bp, Homo sapien
ctcccgaagcgctggcattttggat

SEQ ID NO: 4868799 - DNA, 25 bp, Homo sapien
tcccgaagcgctggcattttggatg

SEQ ID NO: 4868800 - DNA, 25 bp, Homo sapien
cattgtccgaaccttcttggttaag

SEQ ID NO: 4868801 - DNA, 25 bp, Homo sapien
ccagttcattcttgcgtagatttgc

SEQ ID NO: 4868802 - DNA, 25 bp, Homo sapien
gaaggctctgcaataaggctatttt

SEQ ID NO: 4868803 - DNA, 25 bp, Homo sapien
catgctgaagacgaataagtttctc

SEQ ID NO: 4868804 - DNA, 25 bp, Homo sapien
aagagggaaatttatgggcacaagt

SEQ ID NO: 4868805 - DNA, 25 bp, Homo sapien
gagggaaatttatgggcacaagtac

SEQ ID NO: 4868806 - DNA, 25 bp, Homo sapien
agagggaaatttatgggcacaagta

SEQ ID NO: 4868807 - DNA, 25 bp, Homo sapien
cttgtgactgtacttccagaagtct

SEQ ID NO: 4868808 - DNA, 25 bp, Homo sapien
tcttcaacttgtgactgtacttcca

SEQ ID NO: 4868809 - DNA, 25 bp, Homo sapien
ttccagaagtctttgattcaccagc

SEQ ID NO: 4868810 - DNA, 25 bp, Homo sapien
gatttttgtaattcttcaacttgtg

SEQ ID NO: 4868811 - DNA, 25 bp, Homo sapien
cattcccgagatgcaacactttaag

SEQ ID NO: 4868812 - DNA, 25 bp, Homo sapien
tactccgacttaagatcacatgaaa

SEQ ID NO: 4868813 - DNA, 25 bp, Homo sapien
taaaaatgtgcaaccccttctactc

SEQ ID NO: 4868814 - DNA, 25 bp, Homo sapien
ggcaggttgctttatgtgttgcaca

SEQ ID NO: 4868815 - DNA, 25 bp, Homo sapien
caagcttcttttttagaaggactga

SEQ ID NO: 4868816 - DNA, 25 bp, Homo sapien
tgttcttcaagcttcttttttagaa

SEQ ID NO: 4868817 - DNA, 25 bp, Homo sapien
agatgttcttcaagcttctttttta

SEQ ID NO: 4868818 - DNA, 25 bp, Homo sapien
tcaagcttcttttttagaaggactg

SEQ ID NO: 4868819 - DNA, 25 bp, Homo sapien
gaagtcaaagcggtaacaatgtacg

SEQ ID NO: 4868820 - DNA, 25 bp, Homo sapien
cacagaatgtcgaacaaaggaagtc

SEQ ID NO: 4868821 - DNA, 25 bp, Homo sapien
tagatagacctgcataaagagaggg

SEQ ID NO: 4868822 - DNA, 25 bp, Homo sapien
cattgcatgcaagtgatatgaaaca

SEQ ID NO: 4868823 - DNA, 25 bp, Homo sapien
taaatcttggctcgagatcttcaat

SEQ ID NO: 4868824 - DNA, 25 bp, Homo sapien
gtagttcattattggcctcatgcag

SEQ ID NO: 4868825 - DNA, 25 bp, Homo sapien
tagttcattattggcctcatgcagc

SEQ ID NO: 4868826 - DNA, 25 bp, Homo sapien
cgagatcttcaataatggctctctt

SEQ ID NO: 4868827 - DNA, 25 bp, Homo sapien
gacacatgctatgatatggagacat

SEQ ID NO: 4868828 - DNA, 25 bp, Homo sapien
caggtctggatgacttacatggaac

SEQ ID NO: 4868829 - DNA, 25 bp, Homo sapien
caaaatcaagctacctacaggagta

SEQ ID NO: 4868830 - DNA, 25 bp, Homo sapien
agaacttcggtttgagatgatacag

SEQ ID NO: 4868831 - DNA, 25 bp, Homo sapien
agtattttttgtatcgttcttccat

SEQ ID NO: 4868832 - DNA, 25 bp, Homo sapien
aatgagtggaacagtcggtctcgtt

SEQ ID NO: 4868833 - DNA, 25 bp, Homo sapien
agtcggtctcgttcctggagctgat

SEQ ID NO: 4868834 - DNA, 25 bp, Homo sapien
gtttaggatctaaagtacggatgac

SEQ ID NO: 4868835 - DNA, 25 bp, Homo sapien
taagagcttgtatttctggtgctgc

SEQ ID NO: 4868836 - DNA, 25 bp, Homo sapien
tttattgtacagtatagtaaactac

SEQ ID NO: 4868837 - DNA, 25 bp, Homo sapien
ttttattgtacagtatagtaaacta

SEQ ID NO: 4868838 - DNA, 25 bp, Homo sapien
accaggcactaacaatatatttctc

SEQ ID NO: 4868839 - DNA, 25 bp, Homo sapien
ccaggcactaacaatatatttctct

SEQ ID NO: 4868840 - DNA, 25 bp, Homo sapien
caggcactaacaatatatttctctt

SEQ ID NO: 4868841 - DNA, 25 bp, Homo sapien
cctgggtatgatcttctgctgctgg

SEQ ID NO: 4868842 - DNA, 25 bp, Homo sapien
gtggcctgggtatgatcttctgctg

SEQ ID NO: 4868843 - DNA, 25 bp, Homo sapien
tgtgcttgccagtctatcttcagct

SEQ ID NO: 4868844 - DNA, 25 bp, Homo sapien
tctgcctcgccagaaatgactgccc

SEQ ID NO: 4868845 - DNA, 25 bp, Homo sapien
caactacggcttctgaggacaaaca

SEQ ID NO: 4868846 - DNA, 25 bp, Homo sapien
tcctcaggctatttgtgaaacacgg

SEQ ID NO: 4868847 - DNA, 25 bp, Homo sapien
caaaaaatgggctacgttgcaagaa

SEQ ID NO: 4868848 - DNA, 25 bp, Homo sapien
cagttgatcaggtctgcgtagcctc

SEQ ID NO: 4868849 - DNA, 25 bp, Homo sapien
aaagtcagaagtacgactgggcgcg

SEQ ID NO: 4868850 - DNA, 25 bp, Homo sapien
ttctcctatgtaatgaaactaatac

SEQ ID NO: 4868851 - DNA, 25 bp, Homo sapien
atataatttctcctatgtaatgaaa

SEQ ID NO: 4868852 - DNA, 25 bp, Homo sapien
aaataatagcatacaacagatgctg

SEQ ID NO: 4868853 - DNA, 25 bp, Homo sapien
gctggacaccggacatggagttgcc

SEQ ID NO: 4868854 - DNA, 25 bp, Homo sapien
tctcaccctggttagaaggaaaaca

SEQ ID NO: 4868855 - DNA, 25 bp, Homo sapien
tggtgacagtgtgctccaacccaac

SEQ ID NO: 4868856 - DNA, 25 bp, Homo sapien
tcactcacgatgaggcaaagctcct

SEQ ID NO: 4868857 - DNA, 25 bp, Homo sapien
caacctagctcatctttcacttaac

SEQ ID NO: 4868858 - DNA, 25 bp, Homo sapien
tcactactgatctatttgcacagca

SEQ ID NO: 4868859 - DNA, 25 bp, Homo sapien
ggagagatagcaaagtggctcatca

SEQ ID NO: 4868860 - DNA, 25 bp, Homo sapien
cactcactcactactgatctatttg

SEQ ID NO: 4868861 - DNA, 25 bp, Homo sapien
tgctttctcagataaatcacacatg

SEQ ID NO: 4868862 - DNA, 25 bp, Homo sapien
taactggagttatcctggactcaga

SEQ ID NO: 4868863 - DNA, 25 bp, Homo sapien
tagcaaacgagaataaaccaaactg

SEQ ID NO: 4868864 - DNA, 25 bp, Homo sapien
ggactcagagatctagataatagga

SEQ ID NO: 4868865 - DNA, 25 bp, Homo sapien
cactgttgagaagtacaatgctaca

SEQ ID NO: 4868866 - DNA, 25 bp, Homo sapien
tgacggccactgctaggcaaagaat

SEQ ID NO: 4868867 - DNA, 25 bp, Homo sapien
gacgacagatacattgagaatagcc

SEQ ID NO: 4868868 - DNA, 25 bp, Homo sapien
catgttgttattttgccctcagcaa

SEQ ID NO: 4868869 - DNA, 25 bp, Homo sapien
cgagtcttacagagtattactggaa

SEQ ID NO: 4868870 - DNA, 25 bp, Homo sapien
caaactattgctttgggaacatctg

SEQ ID NO: 4868871 - DNA, 25 bp, Homo sapien
cacacagcatgcaaaccgagtctta

SEQ ID NO: 4868872 - DNA, 25 bp, Homo sapien
cattgtattaggacttccctctgcc

SEQ ID NO: 4868873 - DNA, 25 bp, Homo sapien
taataccgtaacaagttggcagtcg

SEQ ID NO: 4868874 - DNA, 25 bp, Homo sapien
tttcaggaggcaggcaaaccaaagg

SEQ ID NO: 4868875 - DNA, 25 bp, Homo sapien
tgcaaagcacgtcagtagaacaggg

SEQ ID NO: 4868876 - DNA, 25 bp, Homo sapien
tttaggtacatgcagtgacggaggc

SEQ ID NO: 4868877 - DNA, 25 bp, Homo sapien
cagcaaagatcgcattgaggagttg

SEQ ID NO: 4868878 - DNA, 25 bp, Homo sapien
tcagttgaaaggagatggaggttca

SEQ ID NO: 4868879 - DNA, 25 bp, Homo sapien
tcagcagcaaagatcgcattgagga

SEQ ID NO: 4868880 - DNA, 25 bp, Homo sapien
caaagatcgcattgaggagttggga

SEQ ID NO: 4868881 - DNA, 25 bp, Homo sapien
tttcctaccatagaggtgcgggcca

SEQ ID NO: 4868882 - DNA, 25 bp, Homo sapien
gagtttgcgcggctctcccgagatc

SEQ ID NO: 4868883 - DNA, 25 bp, Homo sapien
gccagagagtcttggcgggctgccg

SEQ ID NO: 4868884 - DNA, 25 bp, Homo sapien
ggtatgggtgggagtgtgcgggtgc

SEQ ID NO: 4868885 - DNA, 25 bp, Homo sapien
gtccatgggggacgccacggcttcc

SEQ ID NO: 4868886 - DNA, 25 bp, Homo sapien
cgtcgtccatgggggacgccacggc

SEQ ID NO: 4868887 - DNA, 25 bp, Homo sapien
catgggggacgccacggcttcccca

SEQ ID NO: 4868888 - DNA, 25 bp, Homo sapien
atgggggacgccacggcttccccag

SEQ ID NO: 4868889 - DNA, 25 bp, Homo sapien
ggagggcgagtccaggctcacaaac

SEQ ID NO: 4868890 - DNA, 25 bp, Homo sapien
aggagggcgagtccaggctcacaaa

SEQ ID NO: 4868891 - DNA, 25 bp, Homo sapien
ttaaagcaggcggaaagccgagacc

SEQ ID NO: 4868892 - DNA, 25 bp, Homo sapien
gttgttagcgacacagcgttctggg

SEQ ID NO: 4868893 - DNA, 25 bp, Homo sapien
tatatttacgaatcgcgacgcctga

SEQ ID NO: 4868894 - DNA, 25 bp, Homo sapien
cagtttccgcgtggcttaaagcagg

SEQ ID NO: 4868895 - DNA, 25 bp, Homo sapien
gagtatttcacaatccagagagcag

SEQ ID NO: 4868896 - DNA, 25 bp, Homo sapien
taagacgtgacacctagagcctggg

SEQ ID NO: 4868897 - DNA, 25 bp, Homo sapien
caagtgaaatcatgacctaagacgt

SEQ ID NO: 4868898 - DNA, 25 bp, Homo sapien
tcaaggtaaacaagccatcgaatgg

SEQ ID NO: 4868899 - DNA, 25 bp, Homo sapien
gtggttacattcaaatacagaagaa

SEQ ID NO: 4868900 - DNA, 25 bp, Homo sapien
gacattccccaaccagtggttacat

SEQ ID NO: 4868901 - DNA, 25 bp, Homo sapien
acagacattccccaaccagtggtta

SEQ ID NO: 4868902 - DNA, 25 bp, Homo sapien
gaaaacagacattccccaaccagtg

SEQ ID NO: 4868903 - DNA, 25 bp, Homo sapien
gggccatcattctgcggcaccggat

SEQ ID NO: 4868904 - DNA, 25 bp, Homo sapien
tgcggcaccggatctatatcagccc

SEQ ID NO: 4868905 - DNA, 25 bp, Homo sapien
taaatgatctggaccacgggattgg

SEQ ID NO: 4868906 - DNA, 25 bp, Homo sapien
cggatctatatcagcccattctgct

SEQ ID NO: 4868907 - DNA, 25 bp, Homo sapien
ctcaatggaaacatatgattatatt

SEQ ID NO: 4868908 - DNA, 25 bp, Homo sapien
tcctcaatggaaacatatgattata

SEQ ID NO: 4868909 - DNA, 25 bp, Homo sapien
tttatcctcaatggaaacatatgat

SEQ ID NO: 4868910 - DNA, 25 bp, Homo sapien
atttatcctcaatggaaacatatga

SEQ ID NO: 4868911 - DNA, 25 bp, Homo sapien
ggcaactagttggtgtctacagaaa

SEQ ID NO: 4868912 - DNA, 25 bp, Homo sapien
ttaatcgggcgtggtgatccaggcc

SEQ ID NO: 4868913 - DNA, 25 bp, Homo sapien
aaaagttgaatttgagcagtggctc

SEQ ID NO: 4868914 - DNA, 25 bp, Homo sapien
gatgttgcagcactgatcccttggc

SEQ ID NO: 4868915 - DNA, 25 bp, Homo sapien
gcctcagccacaaaaagcatggact

SEQ ID NO: 4868916 - DNA, 25 bp, Homo sapien
taataatgccctagtgcctcagcca

SEQ ID NO: 4868917 - DNA, 25 bp, Homo sapien
gacccagtaattccagctctagaaa

SEQ ID NO: 4868918 - DNA, 25 bp, Homo sapien
tatgcaaacgagatcccatcacact

SEQ ID NO: 4868919 - DNA, 25 bp, Homo sapien
gatgaaagaagtgaacgagctttta

SEQ ID NO: 4868920 - DNA, 25 bp, Homo sapien
atgaaagaagtgaacgagcttttaa

SEQ ID NO: 4868921 - DNA, 25 bp, Homo sapien
tgaaagaagtgaacgagcttttaag

SEQ ID NO: 4868922 - DNA, 25 bp, Homo sapien
ttaaatgcagccaattatacagtgt

SEQ ID NO: 4868923 - DNA, 25 bp, Homo sapien
gagttaaatgcagccaattatacag

SEQ ID NO: 4868924 - DNA, 25 bp, Homo sapien
gttaaatgcagccaattatacagtg

SEQ ID NO: 4868925 - DNA, 25 bp, Homo sapien
tgagttaaatgcagccaattataca

SEQ ID NO: 4868926 - DNA, 25 bp, Homo sapien
taaatgcagccaattatacagtgtg

SEQ ID NO: 4868927 - DNA, 25 bp, Homo sapien
ttgagttaaatgcagccaattatac

SEQ ID NO: 4868928 - DNA, 25 bp, Homo sapien
tgtataattggctgcatttaactca

SEQ ID NO: 4868929 - DNA, 25 bp, Homo sapien
acactgtataattggctgcatttaa

SEQ ID NO: 4868930 - DNA, 25 bp, Homo sapien
gtataattggctgcatttaactcaa

SEQ ID NO: 4868931 - DNA, 25 bp, Homo sapien
cactgtataattggctgcatttaac

SEQ ID NO: 4868932 - DNA, 25 bp, Homo sapien
ctgtataattggctgcatttaactc

SEQ ID NO: 4868933 - DNA, 25 bp, Homo sapien
cacactgtataattggctgcattta

SEQ ID NO: 4868934 - DNA, 25 bp, Homo sapien
cttaaaagctcgttcacttctttca

SEQ ID NO: 4868935 - DNA, 25 bp, Homo sapien
taaaagctcgttcacttctttcatc

SEQ ID NO: 4868936 - DNA, 25 bp, Homo sapien
ttaaaagctcgttcacttctttcat

SEQ ID NO: 4868937 - DNA, 25 bp, Homo sapien
acttctttcatcacgctgcaggaca

SEQ ID NO: 4868938 - DNA, 25 bp, Homo sapien
gcatcccgggttagcttaaaagctc

SEQ ID NO: 4868939 - DNA, 25 bp, Homo sapien
taaaagctcgttcacttctttcatc

SEQ ID NO: 4868940 - DNA, 25 bp, Homo sapien
caggacagctcggaagtaatcataa

SEQ ID NO: 4868941 - DNA, 25 bp, Homo sapien
gcatttaactcaatagcatcccggg

SEQ ID NO: 4868942 - DNA, 25 bp, Homo sapien
cacactgtataattggctgcattta

SEQ ID NO: 4868943 - DNA, 25 bp, Homo sapien
cagatgctctgctatatgtgaagta

SEQ ID NO: 4868944 - DNA, 25 bp, Homo sapien
cctgtgtcctagatcgtataccttt

SEQ ID NO: 4868945 - DNA, 25 bp, Homo sapien
tcatgtgttagatcccctgtgtcct

SEQ ID NO: 4868946 - DNA, 25 bp, Homo sapien
cacggctgctgacccacatttaata

SEQ ID NO: 4868947 - DNA, 25 bp, Homo sapien
taggtaatttgtcgtccagatgctc

SEQ ID NO: 4868948 - DNA, 25 bp, Homo sapien
tattgaacacaggtcatccttcagt

SEQ ID NO: 4868949 - DNA, 25 bp, Homo sapien
gaaggatgacctgtgttcaatagaa

SEQ ID NO: 4868950 - DNA, 25 bp, Homo sapien
gaaaggtatacgatctaggacacag

SEQ ID NO: 4868951 - DNA, 25 bp, Homo sapien
tacttcacatatagcagagcatctg

SEQ ID NO: 4868952 - DNA, 25 bp, Homo sapien
gagcatctggacgacaaattaccta

SEQ ID NO: 4868953 - DNA, 25 bp, Homo sapien
aatgagctgaaaaccaggtatgcag

SEQ ID NO: 4868954 - DNA, 25 bp, Homo sapien
tattaaatgtgggtcagcagccgtg

SEQ ID NO: 4868955 - DNA, 25 bp, Homo sapien
ccttttagttctatgttgtatctcc

SEQ ID NO: 4868956 - DNA, 25 bp, Homo sapien
ctatgttgtatctcctcaatttttc

SEQ ID NO: 4868957 - DNA, 25 bp, Homo sapien
tctggaatgccttttagttctatgt

SEQ ID NO: 4868958 - DNA, 25 bp, Homo sapien
tattttctaactctcgtatggattt

SEQ ID NO: 4868959 - DNA, 25 bp, Homo sapien
tagttctatgttgtatctcctcaat

SEQ ID NO: 4868960 - DNA, 25 bp, Homo sapien
gaatgccttttagttctatgttgta

SEQ ID NO: 4868961 - DNA, 25 bp, Homo sapien
gaaaaattgaggagatacaacatag

SEQ ID NO: 4868962 - DNA, 25 bp, Homo sapien
catagaactaaaaggcattccagaa

SEQ ID NO: 4868963 - DNA, 25 bp, Homo sapien
aaatccatacgagagttagaaaata

SEQ ID NO: 4868964 - DNA, 25 bp, Homo sapien
gagatacaacatagaactaaaaggc

SEQ ID NO: 4868965 - DNA, 25 bp, Homo sapien
tacaacatagaactaaaaggcattc

SEQ ID NO: 4868966 - DNA, 25 bp, Homo sapien
tgaggagatacaacatagaactaaa

SEQ ID NO: 4868967 - DNA, 25 bp, Homo sapien
ggaaatgaactacatcactgcaata

SEQ ID NO: 4868968 - DNA, 25 bp, Homo sapien
ggagcagcccaaaaactatcaagtt

SEQ ID NO: 4868969 - DNA, 25 bp, Homo sapien
gcatttccggagagttcttttgaag

SEQ ID NO: 4868970 - DNA, 25 bp, Homo sapien
cactgcaataattgaggagcagccc

SEQ ID NO: 4868971 - DNA, 25 bp, Homo sapien
gaaggatctacatgaggaaatgaac

SEQ ID NO: 4868972 - DNA, 25 bp, Homo sapien
ttgaagtcacttcagaaggatctac

SEQ ID NO: 4868973 - DNA, 25 bp, Homo sapien
aacttgatagtttttgggctgctcc

SEQ ID NO: 4868974 - DNA, 25 bp, Homo sapien
tgtagatccttctgaagtgacttca

SEQ ID NO: 4868975 - DNA, 25 bp, Homo sapien
gaagtgacttcaaaagaactctccg

SEQ ID NO: 4868976 - DNA, 25 bp, Homo sapien
gggctgctcctcaattattgcagtg

SEQ ID NO: 4868977 - DNA, 25 bp, Homo sapien
tattgcagtgatgtagttcatttcc

SEQ ID NO: 4868978 - DNA, 25 bp, Homo sapien
cttcaaaagaactctccggaaatgc

SEQ ID NO: 4868979 - DNA, 25 bp, Homo sapien
aggctgtcaggataatcacttgaac

SEQ ID NO: 4868980 - DNA, 25 bp, Homo sapien
tactcaaggagcgtgcctgtaatcc

SEQ ID NO: 4868981 - DNA, 25 bp, Homo sapien
tcccagctactcaaggagcgtgcct

SEQ ID NO: 4868982 - DNA, 25 bp, Homo sapien
ccagctactcaaggagcgtgcctgt

SEQ ID NO: 4868983 - DNA, 25 bp, Homo sapien
gaggctgtcaggataatcacttgaa

SEQ ID NO: 4868984 - DNA, 25 bp, Homo sapien
tcaggaggctgtcaggataatcact

SEQ ID NO: 4868985 - DNA, 25 bp, Homo sapien
gttcaagtgattatcctgacagcct

SEQ ID NO: 4868986 - DNA, 25 bp, Homo sapien
aagtgattatcctgacagcctcctg

SEQ ID NO: 4868987 - DNA, 25 bp, Homo sapien
aggcacgctccttgagtagctggga

SEQ ID NO: 4868988 - DNA, 25 bp, Homo sapien
ggattacaggcacgctccttgagta

SEQ ID NO: 4868989 - DNA, 25 bp, Homo sapien
caggcacgctccttgagtagctggg

SEQ ID NO: 4868990 - DNA, 25 bp, Homo sapien
agtgattatcctgacagcctcctga

SEQ ID NO: 4868991 - DNA, 25 bp, Homo sapien
atcataggcgagtattagtggaatg

SEQ ID NO: 4868992 - DNA, 25 bp, Homo sapien
tcataggcgagtattagtggaatgg

SEQ ID NO: 4868993 - DNA, 25 bp, Homo sapien
gcatcataggcgagtattagtggaa

SEQ ID NO: 4868994 - DNA, 25 bp, Homo sapien
catcataggcgagtattagtggaat

SEQ ID NO: 4868995 - DNA, 25 bp, Homo sapien
tctcaggagcttgaatttattgctg

SEQ ID NO: 4868996 - DNA, 25 bp, Homo sapien
ctcaggagcttgaatttattgctga

SEQ ID NO: 4868997 - DNA, 25 bp, Homo sapien
gcagcatcgacaatgggttattcag

SEQ ID NO: 4868998 - DNA, 25 bp, Homo sapien
tgcctggcagcatcgacaatgggtt

SEQ ID NO: 4868999 - DNA, 25 bp, Homo sapien
tagtggaatggctaagagatccatc

SEQ ID NO: 4869000 - DNA, 25 bp, Homo sapien
gaatggctaagagatccatctcagg

SEQ ID NO: 4869001 - DNA, 25 bp, Homo sapien
cctggcagcatcgacaatgggttat

SEQ ID NO: 4869002 - DNA, 25 bp, Homo sapien
cttaatcaggatgcaaagaattatc

SEQ ID NO: 4869003 - DNA, 25 bp, Homo sapien
aataacccattgtcgatgctgccag

SEQ ID NO: 4869004 - DNA, 25 bp, Homo sapien
gataattctttgcatcctgattaag

SEQ ID NO: 4869005 - DNA, 25 bp, Homo sapien
ctgaataacccattgtcgatgctgc

SEQ ID NO: 4869006 - DNA, 25 bp, Homo sapien
aacccattgtcgatgctgccaggca

SEQ ID NO: 4869007 - DNA, 25 bp, Homo sapien
cctgagatggatctcttagccattc

SEQ ID NO: 4869008 - DNA, 25 bp, Homo sapien
gatggatctcttagccattccacta

SEQ ID NO: 4869009 - DNA, 25 bp, Homo sapien
cattccactaatactcgcctatgat

SEQ ID NO: 4869010 - DNA, 25 bp, Homo sapien
tcagcaataaattcaagctcctgag

SEQ ID NO: 4869011 - DNA, 25 bp, Homo sapien
cagcaataaattcaagctcctgaga

SEQ ID NO: 4869012 - DNA, 25 bp, Homo sapien
ccattccactaatactcgcctatga

SEQ ID NO: 4869013 - DNA, 25 bp, Homo sapien
ttccactaatactcgcctatgatgc

SEQ ID NO: 4869014 - DNA, 25 bp, Homo sapien
attccactaatactcgcctatgatg

SEQ ID NO: 4869015 - DNA, 25 bp, Homo sapien
agttgtaactcccactctgggtatt

SEQ ID NO: 4869016 - DNA, 25 bp, Homo sapien
tttctacccatgtgtcaaagtttta

SEQ ID NO: 4869017 - DNA, 25 bp, Homo sapien
tctgaatagaatagttgtaactccc

SEQ ID NO: 4869018 - DNA, 25 bp, Homo sapien
taacatacttaaaacctgacatcct

SEQ ID NO: 4869019 - DNA, 25 bp, Homo sapien
tgacatccttcatgttagctaacct

SEQ ID NO: 4869020 - DNA, 25 bp, Homo sapien
tattttaactaacaaaggcatatta

SEQ ID NO: 4869021 - DNA, 25 bp, Homo sapien
taaaatacccagagtgggagttaca

SEQ ID NO: 4869022 - DNA, 25 bp, Homo sapien
taaaactttgacacatgggtagaaa

SEQ ID NO: 4869023 - DNA, 25 bp, Homo sapien
gagattataaaggttagctaacatg

SEQ ID NO: 4869024 - DNA, 25 bp, Homo sapien
ggttagctaacatgaaggatgtcag

SEQ ID NO: 4869025 - DNA, 25 bp, Homo sapien
gggagttacaactattctattcaga

SEQ ID NO: 4869026 - DNA, 25 bp, Homo sapien
gaaggatgtcaggttttaagtatgt

SEQ ID NO: 4869027 - DNA, 25 bp, Homo sapien
ggaagatatgatcaccaaggtgcct

SEQ ID NO: 4869028 - DNA, 25 bp, Homo sapien
agggaagatatgatcaccaaggtgc

SEQ ID NO: 4869029 - DNA, 25 bp, Homo sapien
atttgtgatagggggactgtgtggc

SEQ ID NO: 4869030 - DNA, 25 bp, Homo sapien
cagggaagatatgatcaccaaggtg

SEQ ID NO: 4869031 - DNA, 25 bp, Homo sapien
gggaagatatgatcaccaaggtgcc

SEQ ID NO: 4869032 - DNA, 25 bp, Homo sapien
gaagatatgatcaccaaggtgcctt

SEQ ID NO: 4869033 - DNA, 25 bp, Homo sapien
aggcaccttggtgatcatatcttcc

SEQ ID NO: 4869034 - DNA, 25 bp, Homo sapien
caccttggtgatcatatcttccctg

SEQ ID NO: 4869035 - DNA, 25 bp, Homo sapien
gccacacagtccccctatcacaaat

SEQ ID NO: 4869036 - DNA, 25 bp, Homo sapien
gcaccttggtgatcatatcttccct

SEQ ID NO: 4869037 - DNA, 25 bp, Homo sapien
aaggcaccttggtgatcatatcttc

SEQ ID NO: 4869038 - DNA, 25 bp, Homo sapien
ggcaccttggtgatcatatcttccc

SEQ ID NO: 4869039 - DNA, 25 bp, Homo sapien
cacagtccccctatcacaaattatg

SEQ ID NO: 4869040 - DNA, 25 bp, Homo sapien
ggtgatcatatcttccctgccaggt

SEQ ID NO: 4869041 - DNA, 25 bp, Homo sapien
aaggcaccttggtgatcatatcttc

SEQ ID NO: 4869042 - DNA, 25 bp, Homo sapien
cagaggaaagtgccacacagtcccc

SEQ ID NO: 4869043 - DNA, 25 bp, Homo sapien
ggcaccttggtgatcatatcttccc

SEQ ID NO: 4869044 - DNA, 25 bp, Homo sapien
tgcaatgaatgtgaaaggcaccttg

SEQ ID NO: 4869045 - DNA, 25 bp, Homo sapien
taaactttgggataatgagctgcag

SEQ ID NO: 4869046 - DNA, 25 bp, Homo sapien
ctgcagctcattatcccaaagttta

SEQ ID NO: 4869047 - DNA, 25 bp, Homo sapien
tctggaaccaaagatacttcgttat

SEQ ID NO: 4869048 - DNA, 25 bp, Homo sapien
caaagatacttcgttatttctaaca

SEQ ID NO: 4869049 - DNA, 25 bp, Homo sapien
ctggaaccaaagatacttcgttatt

SEQ ID NO: 4869050 - DNA, 25 bp, Homo sapien
agatacttcgttatttctaacacca

SEQ ID NO: 4869051 - DNA, 25 bp, Homo sapien
gtctggaaccaaagatacttcgtta

SEQ ID NO: 4869052 - DNA, 25 bp, Homo sapien
tgtgagaaataactctgtctggaac

SEQ ID NO: 4869053 - DNA, 25 bp, Homo sapien
atgtgagaaataactctgtctggaa

SEQ ID NO: 4869054 - DNA, 25 bp, Homo sapien
gtgagaaataactctgtctggaacc

SEQ ID NO: 4869055 - DNA, 25 bp, Homo sapien
gatgtgagaaataactctgtctgga

SEQ ID NO: 4869056 - DNA, 25 bp, Homo sapien
ggatgtgagaaataactctgtctgg

SEQ ID NO: 4869057 - DNA, 25 bp, Homo sapien
ccagacagagttatttctcacatcc

SEQ ID NO: 4869058 - DNA, 25 bp, Homo sapien
gttccagacagagttatttctcaca

SEQ ID NO: 4869059 - DNA, 25 bp, Homo sapien
ttccagacagagttatttctcacat

SEQ ID NO: 4869060 - DNA, 25 bp, Homo sapien
tccagacagagttatttctcacatc

SEQ ID NO: 4869061 - DNA, 25 bp, Homo sapien
ggttccagacagagttatttctcac

SEQ ID NO: 4869062 - DNA, 25 bp, Homo sapien
taacgaagtatctttggttccagac

SEQ ID NO: 4869063 - DNA, 25 bp, Homo sapien
aataacgaagtatctttggttccag

SEQ ID NO: 4869064 - DNA, 25 bp, Homo sapien
ataacgaagtatctttggttccaga

SEQ ID NO: 4869065 - DNA, 25 bp, Homo sapien
tgttagaaataacgaagtatctttg

SEQ ID NO: 4869066 - DNA, 25 bp, Homo sapien
tggtgttagaaataacgaagtatct

SEQ ID NO: 4869067 - DNA, 25 bp, Homo sapien
tgcctaccatatctcaggcactggg

SEQ ID NO: 4869068 - DNA, 25 bp, Homo sapien
gcagatcaagatcctaccccatgga

SEQ ID NO: 4869069 - DNA, 25 bp, Homo sapien
gatcctaccccatggaactaaaaga

SEQ ID NO: 4869070 - DNA, 25 bp, Homo sapien
gaggacagagtactgagtggaacat

SEQ ID NO: 4869071 - DNA, 25 bp, Homo sapien
ttcacttgctcattcgttacaaaca

SEQ ID NO: 4869072 - DNA, 25 bp, Homo sapien
gtttgcatgcctaccatatctcagg

SEQ ID NO: 4869073 - DNA, 25 bp, Homo sapien
ccccagtgcctgagatatggtaggc

SEQ ID NO: 4869074 - DNA, 25 bp, Homo sapien
cctgagatatggtaggcatgcaaac

SEQ ID NO: 4869075 - DNA, 25 bp, Homo sapien
tgtttgtaacgaatgagcaagtgaa

SEQ ID NO: 4869076 - DNA, 25 bp, Homo sapien
tatgttccactcagtactctgtcct

SEQ ID NO: 4869077 - DNA, 25 bp, Homo sapien
tccatggggtaggatcttgatctgc

SEQ ID NO: 4869078 - DNA, 25 bp, Homo sapien
tcttttagttccatggggtaggatc

SEQ ID NO: 4869079 - DNA, 25 bp, Homo sapien
cttttgtctggagcgtgcactaccc

SEQ ID NO: 4869080 - DNA, 25 bp, Homo sapien
tgattgttcatggacaacggacctc

SEQ ID NO: 4869081 - DNA, 25 bp, Homo sapien
ttttagataatcgtccccagatgcc

SEQ ID NO: 4869082 - DNA, 25 bp, Homo sapien
gaatctaatcctggcaacgacgttg

SEQ ID NO: 4869083 - DNA, 25 bp, Homo sapien
tataaagctgtacaggcatacctgg

SEQ ID NO: 4869084 - DNA, 25 bp, Homo sapien
gatgccatgttaccctagtgcagag

SEQ ID NO: 4869085 - DNA, 25 bp, Homo sapien
gaggtccgttgtccatgaacaatca

SEQ ID NO: 4869086 - DNA, 25 bp, Homo sapien
tactgaggagtaccaaaatgtgaca

SEQ ID NO: 4869087 - DNA, 25 bp, Homo sapien
cacaacgtcgttgccaggattagat

SEQ ID NO: 4869088 - DNA, 25 bp, Homo sapien
ggtagtgcacgctccagacaaaagc

SEQ ID NO: 4869089 - DNA, 25 bp, Homo sapien
agaagagcaagctgcctcgatccag

SEQ ID NO: 4869090 - DNA, 25 bp, Homo sapien
caaactctgcactagggtaacatgg

SEQ ID NO: 4869091 - DNA, 25 bp, Homo sapien
aagaatctaaaagagcttcctatac

SEQ ID NO: 4869092 - DNA, 25 bp, Homo sapien
taaaagagcttcctatacttaggat

SEQ ID NO: 4869093 - DNA, 25 bp, Homo sapien
taggtatctagaatttacagtttgt

SEQ ID NO: 4869094 - DNA, 25 bp, Homo sapien
agccttttcagaggcagatcactgg

SEQ ID NO: 4869095 - DNA, 25 bp, Homo sapien
cttttcagaggcagatcactggctt

SEQ ID NO: 4869096 - DNA, 25 bp, Homo sapien
gagtagctgtaggtatctagaattt

SEQ ID NO: 4869097 - DNA, 25 bp, Homo sapien
tagttagcggtaacaaagcatttta

SEQ ID NO: 4869098 - DNA, 25 bp, Homo sapien
taaaatgctttgttaccgctaacta

SEQ ID NO: 4869099 - DNA, 25 bp, Homo sapien
ccagtgatctgcctctgaaaaggct

SEQ ID NO: 4869100 - DNA, 25 bp, Homo sapien
taacaaactgtaaattctagatacc

SEQ ID NO: 4869101 - DNA, 25 bp, Homo sapien
aagccagtgatctgcctctgaaaag

SEQ ID NO: 4869102 - DNA, 25 bp, Homo sapien
aataaatcctaagtataggaagctc

SEQ ID NO: 4869103 - DNA, 25 bp, Homo sapien
cctaagtataggaagctcttttaga

SEQ ID NO: 4869104 - DNA, 25 bp, Homo sapien
taaattctagatacctacagctact

SEQ ID NO: 4869105 - DNA, 25 bp, Homo sapien
gcagcctgacctcaaagttcatcgg

SEQ ID NO: 4869106 - DNA, 25 bp, Homo sapien
taaacaaggaccagctaagacctgc

SEQ ID NO: 4869107 - DNA, 25 bp, Homo sapien
tcccattttccagagtgagctataa

SEQ ID NO: 4869108 - DNA, 25 bp, Homo sapien
cagtcttcccgctttgatctctgaa

SEQ ID NO: 4869109 - DNA, 25 bp, Homo sapien
ttatgggaccaggatttgaagcgag

SEQ ID NO: 4869110 - DNA, 25 bp, Homo sapien
catggccctttttctagactatgag

SEQ ID NO: 4869111 - DNA, 25 bp, Homo sapien
aattatttgcgaaaccatgtccccg

SEQ ID NO: 4869112 - DNA, 25 bp, Homo sapien
ttatagctcactctggaaaatggga

SEQ ID NO: 4869113 - DNA, 25 bp, Homo sapien
cgatgaactttgaggtcaggctgcc

SEQ ID NO: 4869114 - DNA, 25 bp, Homo sapien
catgtccccgcaggtcttagctggt

SEQ ID NO: 4869115 - DNA, 25 bp, Homo sapien
tcagagatcaaagcgggaagactgc

SEQ ID NO: 4869116 - DNA, 25 bp, Homo sapien
ctcatagtctagaaaaagggccatg

SEQ ID NO: 4869117 - DNA, 25 bp, Homo sapien
gaaagtgtgtttacaaagctgtgcc

SEQ ID NO: 4869118 - DNA, 25 bp, Homo sapien
gtgccacagtacactaagaaacgct

SEQ ID NO: 4869119 - DNA, 25 bp, Homo sapien
tccctagaactgaattgacagctgc

SEQ ID NO: 4869120 - DNA, 25 bp, Homo sapien
taagaaacgctgacacaagtgaaag

SEQ ID NO: 4869121 - DNA, 25 bp, Homo sapien
gctgtgccacagtcttagtaaaact

SEQ ID NO: 4869122 - DNA, 25 bp, Homo sapien
cagctgcagccttaagggattctcg

SEQ ID NO: 4869123 - DNA, 25 bp, Homo sapien
tcatatttaaatcacgagaatccct

SEQ ID NO: 4869124 - DNA, 25 bp, Homo sapien
cagcgtttcttagtgtactgtggca

SEQ ID NO: 4869125 - DNA, 25 bp, Homo sapien
gcagctgtcaattcagttctaggga

SEQ ID NO: 4869126 - DNA, 25 bp, Homo sapien
tgtggcacagctttgtaaacacact

SEQ ID NO: 4869127 - DNA, 25 bp, Homo sapien
cagttttactaagactgtggcacag

SEQ ID NO: 4869128 - DNA, 25 bp, Homo sapien
gagaatcccttaaggctgcagctgt

SEQ ID NO: 4869129 - DNA, 25 bp, Homo sapien
gtctcatcattgcactgttctttta

SEQ ID NO: 4869130 - DNA, 25 bp, Homo sapien
tctcatcattgcactgttcttttaa

SEQ ID NO: 4869131 - DNA, 25 bp, Homo sapien
tgtctcatcattgcactgttctttt

SEQ ID NO: 4869132 - DNA, 25 bp, Homo sapien
taaaagaacagtgcaatgatgagac

SEQ ID NO: 4869133 - DNA, 25 bp, Homo sapien
ttaaaagaacagtgcaatgatgaga

SEQ ID NO: 4869134 - DNA, 25 bp, Homo sapien
aaaagaacagtgcaatgatgagaca

SEQ ID NO: 4869135 - DNA, 25 bp, Homo sapien
ctcatcattgcactgttcttttaaa

SEQ ID NO: 4869136 - DNA, 25 bp, Homo sapien
gtctcatcattgcactgttctttta

SEQ ID NO: 4869137 - DNA, 25 bp, Homo sapien
tctcatcattgcactgttcttttaa

SEQ ID NO: 4869138 - DNA, 25 bp, Homo sapien
tgtctcatcattgcactgttctttt

SEQ ID NO: 4869139 - DNA, 25 bp, Homo sapien
aaactgtgtctcatcattgcactgt

SEQ ID NO: 4869140 - DNA, 25 bp, Homo sapien
aaaactgtgtctcatcattgcactg

SEQ ID NO: 4869141 - DNA, 25 bp, Homo sapien
taaaagaacagtgcaatgatgagac

SEQ ID NO: 4869142 - DNA, 25 bp, Homo sapien
tttaaaagaacagtgcaatgatgag

SEQ ID NO: 4869143 - DNA, 25 bp, Homo sapien
agaacagtgcaatgatgagacacag

SEQ ID NO: 4869144 - DNA, 25 bp, Homo sapien
ttaaaagaacagtgcaatgatgaga

SEQ ID NO: 4869145 - DNA, 25 bp, Homo sapien
aaaagaacagtgcaatgatgagaca

SEQ ID NO: 4869146 - DNA, 25 bp, Homo sapien
cagtgcaatgatgagacacagtttt

SEQ ID NO: 4869147 - DNA, 25 bp, Homo sapien
taccacataatgaaagtgcatggaa

SEQ ID NO: 4869148 - DNA, 25 bp, Homo sapien
cacataatgaaagtgcatggaacta

SEQ ID NO: 4869149 - DNA, 25 bp, Homo sapien
tagtaccacataatgaaagtgcatg

SEQ ID NO: 4869150 - DNA, 25 bp, Homo sapien
taatgaaagtgcatggaactatttg

SEQ ID NO: 4869151 - DNA, 25 bp, Homo sapien
ctctggaaatgattaaactagtacc

SEQ ID NO: 4869152 - DNA, 25 bp, Homo sapien
aaagtgcatggaactatttgaaagg

SEQ ID NO: 4869153 - DNA, 25 bp, Homo sapien
caaatagttccatgcactttcatta

SEQ ID NO: 4869154 - DNA, 25 bp, Homo sapien
ggtactagtttaatcatttccagag

SEQ ID NO: 4869155 - DNA, 25 bp, Homo sapien
catgcactttcattatgtggtacta

SEQ ID NO: 4869156 - DNA, 25 bp, Homo sapien
tagttccatgcactttcattatgtg

SEQ ID NO: 4869157 - DNA, 25 bp, Homo sapien
cctttcaaatagttccatgcacttt

SEQ ID NO: 4869158 - DNA, 25 bp, Homo sapien
tccatgcactttcattatgtggtac

SEQ ID NO: 4869159 - DNA, 25 bp, Homo sapien
ccttcacaaaatcaagtctttgttt

SEQ ID NO: 4869160 - DNA, 25 bp, Homo sapien
cttccttcacaaaatcaagtctttg

SEQ ID NO: 4869161 - DNA, 25 bp, Homo sapien
gttcttccttcacaaaatcaagtct

SEQ ID NO: 4869162 - DNA, 25 bp, Homo sapien
cacaaaatcaagtctttgttttttg

SEQ ID NO: 4869163 - DNA, 25 bp, Homo sapien
tttctactgcttttgttcttccttc

SEQ ID NO: 4869164 - DNA, 25 bp, Homo sapien
tttgttcttccttcacaaaatcaag

SEQ ID NO: 4869165 - DNA, 25 bp, Homo sapien
caaaaaacaaagacttgattttgtg

SEQ ID NO: 4869166 - DNA, 25 bp, Homo sapien
aaacaaagacttgattttgtgaagg

SEQ ID NO: 4869167 - DNA, 25 bp, Homo sapien
gaaggaagaacaaaagcagtagaaa

SEQ ID NO: 4869168 - DNA, 25 bp, Homo sapien
caaagacttgattttgtgaaggaag

SEQ ID NO: 4869169 - DNA, 25 bp, Homo sapien
agacttgattttgtgaaggaagaac

SEQ ID NO: 4869170 - DNA, 25 bp, Homo sapien
gattttgtgaaggaagaacaaaagc

SEQ ID NO: 4869171 - DNA, 25 bp, Homo sapien
tttgcaggatcgtggtctttccaaa

SEQ ID NO: 4869172 - DNA, 25 bp, Homo sapien
ttgcaggatcgtggtctttccaaat

SEQ ID NO: 4869173 - DNA, 25 bp, Homo sapien
caggatcgtggtctttccaaatatc

SEQ ID NO: 4869174 - DNA, 25 bp, Homo sapien
tgcaggatcgtggtctttccaaata

SEQ ID NO: 4869175 - DNA, 25 bp, Homo sapien
gcaggatcgtggtctttccaaatat

SEQ ID NO: 4869176 - DNA, 25 bp, Homo sapien
tttggaaagaccacgatcctgcaaa

SEQ ID NO: 4869177 - DNA, 25 bp, Homo sapien
tatttggaaagaccacgatcctgca

SEQ ID NO: 4869178 - DNA, 25 bp, Homo sapien
atttggaaagaccacgatcctgcaa

SEQ ID NO: 4869179 - DNA, 25 bp, Homo sapien
atatttggaaagaccacgatcctgc

SEQ ID NO: 4869180 - DNA, 25 bp, Homo sapien
gatatttggaaagaccacgatcctg

SEQ ID NO: 4869181 - DNA, 25 bp, Homo sapien
cctagctaaagaaaaggacactata

SEQ ID NO: 4869182 - DNA, 25 bp, Homo sapien
tcccttcaaagcaaacacagcacag

SEQ ID NO: 4869183 - DNA, 25 bp, Homo sapien
tacattggaagatcccttcaaagca

SEQ ID NO: 4869184 - DNA, 25 bp, Homo sapien
tattggagatacattggaagatccc

SEQ ID NO: 4869185 - DNA, 25 bp, Homo sapien
gcacagaaaatgactcaccaacaaa

SEQ ID NO: 4869186 - DNA, 25 bp, Homo sapien
cactataagaaaggaatattggaga

SEQ ID NO: 4869187 - DNA, 25 bp, Homo sapien
tatagtgtccttttctttagctagg

SEQ ID NO: 4869188 - DNA, 25 bp, Homo sapien
tgctttgaagggatcttccaatgta

SEQ ID NO: 4869189 - DNA, 25 bp, Homo sapien
tgttggtgagtcattttctgtgctg

SEQ ID NO: 4869190 - DNA, 25 bp, Homo sapien
tctgtgctgtgtttgctttgaaggg

SEQ ID NO: 4869191 - DNA, 25 bp, Homo sapien
ccaatattcctttcttatagtgtcc

SEQ ID NO: 4869192 - DNA, 25 bp, Homo sapien
gaagggatcttccaatgtatctcca

SEQ ID NO: 4869193 - DNA, 25 bp, Homo sapien
ccctttgcctgtggtgtaaaagtgc

SEQ ID NO: 4869194 - DNA, 25 bp, Homo sapien
gagtttcacacgagagtggtccttc

SEQ ID NO: 4869195 - DNA, 25 bp, Homo sapien
taaaagtgcatcacacaggtattgc

SEQ ID NO: 4869196 - DNA, 25 bp, Homo sapien
catccagaagaacttgatggaatgc

SEQ ID NO: 4869197 - DNA, 25 bp, Homo sapien
cacgagagtggtccttccctttgcc

SEQ ID NO: 4869198 - DNA, 25 bp, Homo sapien
gaccctgcaggagtttcacacgaga

SEQ ID NO: 4869199 - DNA, 25 bp, Homo sapien
gcacttttacaccacaggcaaaggg

SEQ ID NO: 4869200 - DNA, 25 bp, Homo sapien
ggaaggaccactctcgtgtgaaact

SEQ ID NO: 4869201 - DNA, 25 bp, Homo sapien
gcattccatcaagttcttctggatg

SEQ ID NO: 4869202 - DNA, 25 bp, Homo sapien
gcaaagggaaggaccactctcgtgt

SEQ ID NO: 4869203 - DNA, 25 bp, Homo sapien
tctcgtgtgaaactcctgcagggtc

SEQ ID NO: 4869204 - DNA, 25 bp, Homo sapien
gcaatacctgtgtgatgcactttta

SEQ ID NO: 4869205 - DNA, 25 bp, Homo sapien
atataatctaatcccttagcatcag

SEQ ID NO: 4869206 - DNA, 25 bp, Homo sapien
aaagcaaagtcattggatgggagga

SEQ ID NO: 4869207 - DNA, 25 bp, Homo sapien
gtaatgtgattcttctaaagcaaag

SEQ ID NO: 4869208 - DNA, 25 bp, Homo sapien
gaacttttgtagtcttatcaacata

SEQ ID NO: 4869209 - DNA, 25 bp, Homo sapien
gattcttctaaagcaaagtcattgg

SEQ ID NO: 4869210 - DNA, 25 bp, Homo sapien
aatctaatcccttagcatcagctcc

SEQ ID NO: 4869211 - DNA, 25 bp, Homo sapien
tcctcccatccaatgactttgcttt

SEQ ID NO: 4869212 - DNA, 25 bp, Homo sapien
ggagctgatgctaagggattagatt

SEQ ID NO: 4869213 - DNA, 25 bp, Homo sapien
gactttgctttagaagaatcacatt

SEQ ID NO: 4869214 - DNA, 25 bp, Homo sapien
ggattagattatatgttgataagac

SEQ ID NO: 4869215 - DNA, 25 bp, Homo sapien
tatgttgataagactacaaaagttc

SEQ ID NO: 4869216 - DNA, 25 bp, Homo sapien
catccaatgactttgctttagaaga

SEQ ID NO: 4869217 - DNA, 25 bp, Homo sapien
gtttggttcagtaagcagggaatac

SEQ ID NO: 4869218 - DNA, 25 bp, Homo sapien
tttggttcagtaagcagggaataca

SEQ ID NO: 4869219 - DNA, 25 bp, Homo sapien
gaagtttggttcagtaagcagggaa

SEQ ID NO: 4869220 - DNA, 25 bp, Homo sapien
agtttggttcagtaagcagggaata

SEQ ID NO: 4869221 - DNA, 25 bp, Homo sapien
aagtttggttcagtaagcagggaat

SEQ ID NO: 4869222 - DNA, 25 bp, Homo sapien
ttccctgcttactgaaccaaacttc

SEQ ID NO: 4869223 - DNA, 25 bp, Homo sapien
tattccctgcttactgaaccaaact

SEQ ID NO: 4869224 - DNA, 25 bp, Homo sapien
tgtattccctgcttactgaaccaaa

SEQ ID NO: 4869225 - DNA, 25 bp, Homo sapien
gtattccctgcttactgaaccaaac

SEQ ID NO: 4869226 - DNA, 25 bp, Homo sapien
attccctgcttactgaaccaaactt

SEQ ID NO: 4869227 - DNA, 25 bp, Homo sapien
ctgcggctcctgccaccccgggcca

SEQ ID NO: 4869228 - DNA, 25 bp, Homo sapien
ctgcagcccaagcctctgcggctcc

SEQ ID NO: 4869229 - DNA, 25 bp, Homo sapien
cagcccaagcctctgcggctcctgc

SEQ ID NO: 4869230 - DNA, 25 bp, Homo sapien
tgcggctcctgccaccccgggccag

SEQ ID NO: 4869231 - DNA, 25 bp, Homo sapien
cttgcagtccattctcaggattaca

SEQ ID NO: 4869232 - DNA, 25 bp, Homo sapien
tcttgcagtccattctcaggattac

SEQ ID NO: 4869233 - DNA, 25 bp, Homo sapien
ttcccaagcagacgcccagtttttc

SEQ ID NO: 4869234 - DNA, 25 bp, Homo sapien
caatagattcccaagcagacgccca

SEQ ID NO: 4869235 - DNA, 25 bp, Homo sapien
gtccatactctagttggcgcccagg

SEQ ID NO: 4869236 - DNA, 25 bp, Homo sapien
tggtcagtccatactctagttggcg

SEQ ID NO: 4869237 - DNA, 25 bp, Homo sapien
caggtacctggtcagtccatactct

SEQ ID NO: 4869238 - DNA, 25 bp, Homo sapien
gcgcccagggactggtcgggaaaca

SEQ ID NO: 4869239 - DNA, 25 bp, Homo sapien
ctgctgttctggggctgcttttcca

SEQ ID NO: 4869240 - DNA, 25 bp, Homo sapien
tgctgttctggggctgcttttccat

SEQ ID NO: 4869241 - DNA, 25 bp, Homo sapien
ctatcctgaagtgaccatagggaca

SEQ ID NO: 4869242 - DNA, 25 bp, Homo sapien
ccacagtggattgtcgaggagcgat

SEQ ID NO: 4869243 - DNA, 25 bp, Homo sapien
gagcagagtattcatcagggccatg

SEQ ID NO: 4869244 - DNA, 25 bp, Homo sapien
tgaagaagtggtcgaggcagaggta

SEQ ID NO: 4869245 - DNA, 25 bp, Homo sapien
ggactccctgactccttacgcttcc

SEQ ID NO: 4869246 - DNA, 25 bp, Homo sapien
agggactccctgactccttacgctt

SEQ ID NO: 4869247 - DNA, 25 bp, Homo sapien
aagggactccctgactccttacgct

SEQ ID NO: 4869248 - DNA, 25 bp, Homo sapien
gggactccctgactccttacgcttc

SEQ ID NO: 4869249 - DNA, 25 bp, Homo sapien
taagcttttacagatactactacct

SEQ ID NO: 4869250 - DNA, 25 bp, Homo sapien
tgtgggcataatacctacacttgtg

SEQ ID NO: 4869251 - DNA, 25 bp, Homo sapien
ctgttatactaatggcgttataaca

SEQ ID NO: 4869252 - DNA, 25 bp, Homo sapien
ctcagaaatcctttccatatataca

SEQ ID NO: 4869253 - DNA, 25 bp, Homo sapien
tcaggcctgaactctcacctaattt

SEQ ID NO: 4869254 - DNA, 25 bp, Homo sapien
aggcctgaactctcacctaatttag

SEQ ID NO: 4869255 - DNA, 25 bp, Homo sapien
caggcctgaactctcacctaattta

SEQ ID NO: 4869256 - DNA, 25 bp, Homo sapien
catcaggcctgaactctcacctaat

SEQ ID NO: 4869257 - DNA, 25 bp, Homo sapien
catgagatcatcgtggaaaggcacg

SEQ ID NO: 4869258 - DNA, 25 bp, Homo sapien
tagccaagcagcgtgacaacatgtg

SEQ ID NO: 4869259 - DNA, 25 bp, Homo sapien
ggtaaggcgtccaagtcatttgcca

SEQ ID NO: 4869260 - DNA, 25 bp, Homo sapien
tcttcggcaggtcgttggagtcgca

SEQ ID NO: 4869261 - DNA, 25 bp, Homo sapien
caataaaacacgaaactcaggcaaa

SEQ ID NO: 4869262 - DNA, 25 bp, Homo sapien
tggacaacgaaccacatggctaagc

SEQ ID NO: 4869263 - DNA, 25 bp, Homo sapien
tccaccatcagagtagaatgctgta

SEQ ID NO: 4869264 - DNA, 25 bp, Homo sapien
catacaaacgtacatgtggatgtgg

SEQ ID NO: 4869265 - DNA, 25 bp, Homo sapien
ggcttaaaactcactaatagaacag

SEQ ID NO: 4869266 - DNA, 25 bp, Homo sapien
caaaagaagataggtgaaaccccat

SEQ ID NO: 4869267 - DNA, 25 bp, Homo sapien
taaacaatacaaaagaagataggtg

SEQ ID NO: 4869268 - DNA, 25 bp, Homo sapien
ggaatcaaacattatgactatttaa

SEQ ID NO: 4869269 - DNA, 25 bp, Homo sapien
ggacaactagcgattgcacccaagg

SEQ ID NO: 4869270 - DNA, 25 bp, Homo sapien
tgtgagggagcaccatcaagggtcc

SEQ ID NO: 4869271 - DNA, 25 bp, Homo sapien
acaggcagtatagcacaccagggag

SEQ ID NO: 4869272 - DNA, 25 bp, Homo sapien
tcatagtgaggcattatacaggtcc

SEQ ID NO: 4869273 - DNA, 25 bp, Homo sapien
aaataatgctgggatacctggacag

SEQ ID NO: 4869274 - DNA, 25 bp, Homo sapien
tggtagtagcaaaggtccaactgcc

SEQ ID NO: 4869275 - DNA, 25 bp, Homo sapien
taaagaagtgtaggcatttcaacaa

SEQ ID NO: 4869276 - DNA, 25 bp, Homo sapien
caactgccttggttagaggagtcaa

SEQ ID NO: 4869277 - DNA, 25 bp, Homo sapien
gagtcattgtttggagccagcaaag

SEQ ID NO: 4869278 - DNA, 25 bp, Homo sapien
gatgggacacataggaaattgccgg

SEQ ID NO: 4869279 - DNA, 25 bp, Homo sapien
gaaatcagatgtatgctgtgccacc

SEQ ID NO: 4869280 - DNA, 25 bp, Homo sapien
tgagaacagaaccttcaggagcacc

SEQ ID NO: 4869281 - DNA, 25 bp, Homo sapien
caaagatgtggatcaaatggaactc

SEQ ID NO: 4869282 - DNA, 25 bp, Homo sapien
gaccaatcaggtatttgctcaagac

SEQ ID NO: 4869283 - DNA, 25 bp, Homo sapien
aatggaactcatacatcgctagtgg

SEQ ID NO: 4869284 - DNA, 25 bp, Homo sapien
gacatatgaccatctgaccaatcag

SEQ ID NO: 4869285 - DNA, 25 bp, Homo sapien
acaactggatgttgacactgaaaaa

SEQ ID NO: 4869286 - DNA, 25 bp, Homo sapien
ctggacataaacaactggatgttga

SEQ ID NO: 4869287 - DNA, 25 bp, Homo sapien
aatgggacaatctcgattcaccaca

SEQ ID NO: 4869288 - DNA, 25 bp, Homo sapien
gcaatgggacaatctcgattcacca

SEQ ID NO: 4869289 - DNA, 25 bp, Homo sapien
aacttggtaagctgttttgtgtgcc

SEQ ID NO: 4869290 - DNA, 25 bp, Homo sapien
cttggtaagctgttttgtgtgccag

SEQ ID NO: 4869291 - DNA, 25 bp, Homo sapien
ggtaagctgttttgtgtgccagatg

SEQ ID NO: 4869292 - DNA, 25 bp, Homo sapien
aaaacttggtaagctgttttgtgtg

SEQ ID NO: 4869293 - DNA, 25 bp, Homo sapien
tctgtgactagccaaatgtccaggt

SEQ ID NO: 4869294 - DNA, 25 bp, Homo sapien
aagaagtttggctatctctgtggtt

SEQ ID NO: 4869295 - DNA, 25 bp, Homo sapien
tcttggatatttcaggggcactcca

SEQ ID NO: 4869296 - DNA, 25 bp, Homo sapien
caaatgatcctgtttacctatttct

SEQ ID NO: 4869297 - DNA, 25 bp, Homo sapien
tgctgtcagtagtcttggagttccc

SEQ ID NO: 4869298 - DNA, 25 bp, Homo sapien
gataaatggctacccacatagaaag

SEQ ID NO: 4869299 - DNA, 25 bp, Homo sapien
cttcgaaagtgctaccatgggtgcc

SEQ ID NO: 4869300 - DNA, 25 bp, Homo sapien
gctggttggttcacaagcagggtca

SEQ ID NO: 4869301 - DNA, 25 bp, Homo sapien
agaccagcctggccaacatggtgaa

SEQ ID NO: 4869302 - DNA, 25 bp, Homo sapien
tccagcctggcaggtcaggagttca

SEQ ID NO: 4869303 - DNA, 25 bp, Homo sapien
attagccagcagtggtggtgcctgc

SEQ ID NO: 4869304 - DNA, 25 bp, Homo sapien
gagaatcgtttgaacggaggttgca

SEQ ID NO: 4869305 - DNA, 25 bp, Homo sapien
gaagtctatctaactgccactagga

SEQ ID NO: 4869306 - DNA, 25 bp, Homo sapien
gccatggtccgagcttccagtagca

SEQ ID NO: 4869307 - DNA, 25 bp, Homo sapien
cacaggccagttggagttttaccag

SEQ ID NO: 4869308 - DNA, 25 bp, Homo sapien
ttcagctaaagacggtggaggtcct

SEQ ID NO: 4869309 - DNA, 25 bp, Homo sapien
caggctgacgaagtggaagggagca

SEQ ID NO: 4869310 - DNA, 25 bp, Homo sapien
gagcaggtcgaggagtgtgcacacc

SEQ ID NO: 4869311 - DNA, 25 bp, Homo sapien
ccccggccaggctgacgaagtggaa

SEQ ID NO: 4869312 - DNA, 25 bp, Homo sapien
agcccccggccaggctgacgaagtg

SEQ ID NO: 4869313 - DNA, 25 bp, Homo sapien
tcagcacggacgcggccagcagcag

SEQ ID NO: 4869314 - DNA, 25 bp, Homo sapien
ccgaagagccgccgggggccagcag

SEQ ID NO: 4869315 - DNA, 25 bp, Homo sapien
cgctcagcacggacgcggccagcag

SEQ ID NO: 4869316 - DNA, 25 bp, Homo sapien
agcagcgcggcgctcagcacggacg

SEQ ID NO: 4869317 - DNA, 25 bp, Homo sapien
gcggcggtaggaggtgtgcactcac

SEQ ID NO: 4869318 - DNA, 25 bp, Homo sapien
ggcgccgcggagaggagacgctgcg

SEQ ID NO: 4869319 - DNA, 25 bp, Homo sapien
gctgcgctcgtagccggccgggcgg

SEQ ID NO: 4869320 - DNA, 25 bp, Homo sapien
gccgggcggcggtaggaggtgtgca

SEQ ID NO: 4869321 - DNA, 25 bp, Homo sapien
tcagggaagggaccctgctctaagt

SEQ ID NO: 4869322 - DNA, 25 bp, Homo sapien
agtccctccgaacagtggactgggt

SEQ ID NO: 4869323 - DNA, 25 bp, Homo sapien
tgctctaagtccctccgaacagtgg

SEQ ID NO: 4869324 - DNA, 25 bp, Homo sapien
ctaagtccctccgaacagtggactg

SEQ ID NO: 4869325 - DNA, 25 bp, Homo sapien
ccaaaggacccaattactaagccat

SEQ ID NO: 4869326 - DNA, 25 bp, Homo sapien
caaaggacccaattactaagccatc

SEQ ID NO: 4869327 - DNA, 25 bp, Homo sapien
cacttagctgtgaggctgcatacac

SEQ ID NO: 4869328 - DNA, 25 bp, Homo sapien
tatcacaaggaaacggcaaaatcag

SEQ ID NO: 4869329 - DNA, 25 bp, Homo sapien
gaatctaagctttgtcttcagagcc

SEQ ID NO: 4869330 - DNA, 25 bp, Homo sapien
gttcctgagtgccttatatcacaag

SEQ ID NO: 4869331 - DNA, 25 bp, Homo sapien
gccgggcctcaatccctcattttta

SEQ ID NO: 4869332 - DNA, 25 bp, Homo sapien
taatccactagagctggcttttcct

SEQ ID NO: 4869333 - DNA, 25 bp, Homo sapien
tataaaactcttaatccactagagc

SEQ ID NO: 4869334 - DNA, 25 bp, Homo sapien
tgtgccgggcctcaatccctcattt

SEQ ID NO: 4869335 - DNA, 25 bp, Homo sapien
atttccagtagacggtcaagttggt

SEQ ID NO: 4869336 - DNA, 25 bp, Homo sapien
cagagaagttcattatggatgagta

SEQ ID NO: 4869337 - DNA, 25 bp, Homo sapien
agtagacggtcaagttggtccagag

SEQ ID NO: 4869338 - DNA, 25 bp, Homo sapien
tccagtagacggtcaagttggtcca

SEQ ID NO: 4869339 - DNA, 25 bp, Homo sapien
ttaaggatcatatcaaacaagcccc

SEQ ID NO: 4869340 - DNA, 25 bp, Homo sapien
aaatagatgctgtgcattcctaggc

SEQ ID NO: 4869341 - DNA, 25 bp, Homo sapien
catagtctatcaaggttgttcatcc

SEQ ID NO: 4869342 - DNA, 25 bp, Homo sapien
gaactgagtgtgaactgatacatac

SEQ ID NO: 4869343 - DNA, 25 bp, Homo sapien
gaataccctggtgtctcactccttc

SEQ ID NO: 4869344 - DNA, 25 bp, Homo sapien
ggcccctggagaataccctggtgtc

SEQ ID NO: 4869345 - DNA, 25 bp, Homo sapien
tgccactccctcaacttgcaccact

SEQ ID NO: 4869346 - DNA, 25 bp, Homo sapien
tttacatgaaagaatagccttgtcc

SEQ ID NO: 4869347 - DNA, 25 bp, Homo sapien
tggtgagcacagtacctagtaggta

SEQ ID NO: 4869348 - DNA, 25 bp, Homo sapien
agtactgcttgggtactgcagccca

SEQ ID NO: 4869349 - DNA, 25 bp, Homo sapien
tctgatggtaggtataacgaagctc

SEQ ID NO: 4869350 - DNA, 25 bp, Homo sapien
tcagctctagtacccaagtttttca

SEQ ID NO: 4869351 - DNA, 25 bp, Homo sapien
cagtctcgtgtagttaattccttta

SEQ ID NO: 4869352 - DNA, 25 bp, Homo sapien
aaaccctgtgtcacttctttataca

SEQ ID NO: 4869353 - DNA, 25 bp, Homo sapien
tatcagtctctagttaaaagagtca

SEQ ID NO: 4869354 - DNA, 25 bp, Homo sapien
tgattaaatacaaaccctgtgtcac

SEQ ID NO: 4869355 - DNA, 25 bp, Homo sapien
gtagctttgccacctaacagctagg

SEQ ID NO: 4869356 - DNA, 25 bp, Homo sapien
ggatagaatctctctactggagtgt

SEQ ID NO: 4869357 - DNA, 25 bp, Homo sapien
gattagacgtatgaaccactgcatc

SEQ ID NO: 4869358 - DNA, 25 bp, Homo sapien
tgagacagacctaaaacactgaaca

SEQ ID NO: 4869359 - DNA, 25 bp, Homo sapien
tattggctatctctccacttaacct

SEQ ID NO: 4869360 - DNA, 25 bp, Homo sapien
aatggttattggctatctctccact

SEQ ID NO: 4869361 - DNA, 25 bp, Homo sapien
gactatataatgaattctatttaca

SEQ ID NO: 4869362 - DNA, 25 bp, Homo sapien
tatcaatggttattggctatctctc

SEQ ID NO: 4869363 - DNA, 25 bp, Homo sapien
ataacccacaatactcagaccaatt

SEQ ID NO: 4869364 - DNA, 25 bp, Homo sapien
taacccacaatactcagaccaattt

SEQ ID NO: 4869365 - DNA, 25 bp, Homo sapien
agcatggttgtcgggggagacaata

SEQ ID NO: 4869366 - DNA, 25 bp, Homo sapien
tggttgtcgggggagacaatattaa

SEQ ID NO: 4869367 - DNA, 25 bp, Homo sapien
tcttccaaggtgtcgttcagctgca

SEQ ID NO: 4869368 - DNA, 25 bp, Homo sapien
gctgcagcactaggcttccctgctt

SEQ ID NO: 4869369 - DNA, 25 bp, Homo sapien
tccctgcttttggactctgaggaac

SEQ ID NO: 4869370 - DNA, 25 bp, Homo sapien
tcagctgcaggatagatccgtgctg

SEQ ID NO: 4869371 - DNA, 25 bp, Homo sapien
ggtcacaggcaatttcactaactcc

SEQ ID NO: 4869372 - DNA, 25 bp, Homo sapien
actccattatggatgttctttacca

SEQ ID NO: 4869373 - DNA, 25 bp, Homo sapien
cagccaggtcacaggcaatttcact

SEQ ID NO: 4869374 - DNA, 25 bp, Homo sapien
tatcaactggatcctcgttcacagc

SEQ ID NO: 4869375 - DNA, 25 bp, Homo sapien
gcaagaccaataaggaatgcaatgc

SEQ ID NO: 4869376 - DNA, 25 bp, Homo sapien
ctcaacaagagcctcagaaaggata

SEQ ID NO: 4869377 - DNA, 25 bp, Homo sapien
gaaaggatatcacaatgatgacagc

SEQ ID NO: 4869378 - DNA, 25 bp, Homo sapien
ccaataaggaatgcaatgctcacag

SEQ ID NO: 4869379 - DNA, 25 bp, Homo sapien
taaatgattggatattatatggaaa

SEQ ID NO: 4869380 - DNA, 25 bp, Homo sapien
taaaattaaagctcatattctatat

SEQ ID NO: 4869381 - DNA, 25 bp, Homo sapien
caattttcagcagctctacttataa

SEQ ID NO: 4869382 - DNA, 25 bp, Homo sapien
tattactaagtaattaaacattcta

SEQ ID NO: 4869383 - DNA, 25 bp, Homo sapien
gatcagtttctcgagaacttatggc

SEQ ID NO: 4869384 - DNA, 25 bp, Homo sapien
aattgatgaggcgatcagtttctcg

SEQ ID NO: 4869385 - DNA, 25 bp, Homo sapien
cttatggctttagaaatccaattgt

SEQ ID NO: 4869386 - DNA, 25 bp, Homo sapien
tcgagaacttatggctttagaaatc

SEQ ID NO: 4869387 - DNA, 25 bp, Homo sapien
cggcagggcagatagacgccacgtt

SEQ ID NO: 4869388 - DNA, 25 bp, Homo sapien
tgaacatcaccatcgagagggtctg

SEQ ID NO: 4869389 - DNA, 25 bp, Homo sapien
catcaccatcgagagggtctgtcct

SEQ ID NO: 4869390 - DNA, 25 bp, Homo sapien
tagacgccacgttgctggctgaaca

SEQ ID NO: 4869391 - DNA, 25 bp, Homo sapien
ctgtgctacagggaggcccacatac

SEQ ID NO: 4869392 - DNA, 25 bp, Homo sapien
acccactgtgctacagggaggccca

SEQ ID NO: 4869393 - DNA, 25 bp, Homo sapien
cactgtgctacagggaggcccacat

SEQ ID NO: 4869394 - DNA, 25 bp, Homo sapien
ctgcacccactgtgctacagggagg

SEQ ID NO: 4869395 - DNA, 25 bp, Homo sapien
tactcctctgtcaatacagacactg

SEQ ID NO: 4869396 - DNA, 25 bp, Homo sapien
gcagagtttacttttacatccaaga

SEQ ID NO: 4869397 - DNA, 25 bp, Homo sapien
tcttccagactggagaggctgcaga

SEQ ID NO: 4869398 - DNA, 25 bp, Homo sapien
tatccaagtggacactggctctggc

SEQ ID NO: 4869399 - DNA, 25 bp, Homo sapien
tagaagaagccaacaaagagaagcc

SEQ ID NO: 4869400 - DNA, 25 bp, Homo sapien
gaagccaacaaagagaagcctttca

SEQ ID NO: 4869401 - DNA, 25 bp, Homo sapien
ctagaagaagccaacaaagagaagc

SEQ ID NO: 4869402 - DNA, 25 bp, Homo sapien
gccaacaaagagaagcctttcaggg

SEQ ID NO: 4869403 - DNA, 25 bp, Homo sapien
cattccaacttgcatgtttgaagta

SEQ ID NO: 4869404 - DNA, 25 bp, Homo sapien
tttcctcctccataattgacaaaga

SEQ ID NO: 4869405 - DNA, 25 bp, Homo sapien
ctcctccataattgacaaagaccat

SEQ ID NO: 4869406 - DNA, 25 bp, Homo sapien
catgtttgaagtaccaatattttcc

SEQ ID NO: 4869407 - DNA, 25 bp, Homo sapien
acgggaacacgaggtcagccactgt

SEQ ID NO: 4869408 - DNA, 25 bp, Homo sapien
cacgggaacacgaggtcagccactg

SEQ ID NO: 4869409 - DNA, 25 bp, Homo sapien
aacacgaggtcagccactgtcagcc

SEQ ID NO: 4869410 - DNA, 25 bp, Homo sapien
ggaacacgaggtcagccactgtcag

SEQ ID NO: 4869411 - DNA, 25 bp, Homo sapien
tatgagaactatccagtaacaggac

SEQ ID NO: 4869412 - DNA, 25 bp, Homo sapien
gattggagtcaacccgtggaagaga

SEQ ID NO: 4869413 - DNA, 25 bp, Homo sapien
tatacacacgtgtaggcactgggtc

SEQ ID NO: 4869414 - DNA, 25 bp, Homo sapien
caaggtttcaggatctggcatacca

SEQ ID NO: 4869415 - DNA, 25 bp, Homo sapien
actgaactcagggcgatagaaggat

SEQ ID NO: 4869416 - DNA, 25 bp, Homo sapien
ccatcaacagacacttagaaagaaa

SEQ ID NO: 4869417 - DNA, 25 bp, Homo sapien
caagatctggaagcagactaagcat

SEQ ID NO: 4869418 - DNA, 25 bp, Homo sapien
gatctggaagcagactaagcatcca

SEQ ID NO: 4869419 - DNA, 25 bp, Homo sapien
ctaattacttggcaagggatcacag

SEQ ID NO: 4869420 - DNA, 25 bp, Homo sapien
cttggcaagggatcacagagatgaa

SEQ ID NO: 4869421 - DNA, 25 bp, Homo sapien
cagagatgaaagtttgctcttgctg

SEQ ID NO: 4869422 - DNA, 25 bp, Homo sapien
agagatgaaagtttgctcttgctgc

SEQ ID NO: 4869423 - DNA, 25 bp, Homo sapien
gaaatgatgattcgaagccacagta

SEQ ID NO: 4869424 - DNA, 25 bp, Homo sapien
agtgcaccttcaagtcctgtcttag

SEQ ID NO: 4869425 - DNA, 25 bp, Homo sapien
gctggaaggtttttgacagtgcacc

SEQ ID NO: 4869426 - DNA, 25 bp, Homo sapien
agagttcagaatatagccccatggg

SEQ ID NO: 4869427 - DNA, 25 bp, Homo sapien
atggaagatcccataataaatacaa

SEQ ID NO: 4869428 - DNA, 25 bp, Homo sapien
cgatagaaaaatggaagatcccata

SEQ ID NO: 4869429 - DNA, 25 bp, Homo sapien
ggaagatcccataataaatacaaac

SEQ ID NO: 4869430 - DNA, 25 bp, Homo sapien
gaaaaatggaagatcccataataaa

SEQ ID NO: 4869431 - DNA, 25 bp, Homo sapien
tgaattttgaacacccccgttgcag

SEQ ID NO: 4869432 - DNA, 25 bp, Homo sapien
gattaacaggaaactcctccatgca

SEQ ID NO: 4869433 - DNA, 25 bp, Homo sapien
gaccaaggcaataattgggattcac

SEQ ID NO: 4869434 - DNA, 25 bp, Homo sapien
gataattcctatgcagattaacagg

SEQ ID NO: 4869435 - DNA, 25 bp, Homo sapien
tgctgggccgcagccctgtctggga

SEQ ID NO: 4869436 - DNA, 25 bp, Homo sapien
gaggagtgcctctgctgggccgcag

SEQ ID NO: 4869437 - DNA, 25 bp, Homo sapien
cttggcctcccggagagccgagatt

SEQ ID NO: 4869438 - DNA, 25 bp, Homo sapien
tgccttggcctcccggagagccgag

SEQ ID NO: 4869439 - DNA, 25 bp, Homo sapien
caaaacaggaagctggccagatgag

SEQ ID NO: 4869440 - DNA, 25 bp, Homo sapien
ccaaagcgtcttactcaggtgtggg

SEQ ID NO: 4869441 - DNA, 25 bp, Homo sapien
tatatacggtcaagagacatgggct

SEQ ID NO: 4869442 - DNA, 25 bp, Homo sapien
cagtcagggacatggctcaaactca

SEQ ID NO: 4869443 - DNA, 25 bp, Homo sapien
gtatgtcactcccaatcgctgcagc

SEQ ID NO: 4869444 - DNA, 25 bp, Homo sapien
gcacaatgttcaggcacaggtttag

SEQ ID NO: 4869445 - DNA, 25 bp, Homo sapien
gcaaccacaaagtatgtcactccca

SEQ ID NO: 4869446 - DNA, 25 bp, Homo sapien
gcagcacaccaggaatgcgcacctt

SEQ ID NO: 4869447 - DNA, 25 bp, Homo sapien
caccaggatgagcagccactggggc

SEQ ID NO: 4869448 - DNA, 25 bp, Homo sapien
cagctggacgtgatgtctcgaagag

SEQ ID NO: 4869449 - DNA, 25 bp, Homo sapien
gtgatgtctcgaagagaaaggcagc

SEQ ID NO: 4869450 - DNA, 25 bp, Homo sapien
gactggcaggaggaatgtcaagccc

SEQ ID NO: 4869451 - DNA, 25 bp, Homo sapien
ggtgaaaagcatatgtaaatgacaa

SEQ ID NO: 4869452 - DNA, 25 bp, Homo sapien
aaggtgaaaagcatatgtaaatgac

SEQ ID NO: 4869453 - DNA, 25 bp, Homo sapien
gaaaagcatatgtaaatgacaagac

SEQ ID NO: 4869454 - DNA, 25 bp, Homo sapien
ctaggaaggtgaaaagcatatgtaa

SEQ ID NO: 4869455 - DNA, 25 bp, Homo sapien
agtgcaatttggatacttgccaaaa

SEQ ID NO: 4869456 - DNA, 25 bp, Homo sapien
gtaaaggtgatcgtctcccagcagc

SEQ ID NO: 4869457 - DNA, 25 bp, Homo sapien
cagcaggcggtcgatgtagcctgca

SEQ ID NO: 4869458 - DNA, 25 bp, Homo sapien
aatgcccccaggaccaagataacca

SEQ ID NO: 4869459 - DNA, 25 bp, Homo sapien
agttctaagcgaactcgagtctcac

SEQ ID NO: 4869460 - DNA, 25 bp, Homo sapien
agttccagttctaagcgaactcgag

SEQ ID NO: 4869461 - DNA, 25 bp, Homo sapien
ccagttctaagcgaactcgagtctc

SEQ ID NO: 4869462 - DNA, 25 bp, Homo sapien
ctgagttccagttctaagcgaactc

SEQ ID NO: 4869463 - DNA, 25 bp, Homo sapien
gcccttgactaaagagagctacctc

SEQ ID NO: 4869464 - DNA, 25 bp, Homo sapien
ggaaatccgacctgagacgtacaga

SEQ ID NO: 4869465 - DNA, 25 bp, Homo sapien
gctacctacaaagttgaccgtgcag

SEQ ID NO: 4869466 - DNA, 25 bp, Homo sapien
cagctgctggaagtattcatgacca

SEQ ID NO: 4869467 - DNA, 25 bp, Homo sapien
taggccacctcggtgtggtaaagta

SEQ ID NO: 4869468 - DNA, 25 bp, Homo sapien
gtcataggccacctcggtgtggtaa

SEQ ID NO: 4869469 - DNA, 25 bp, Homo sapien
aaaggccatcacgatggagttgatg

SEQ ID NO: 4869470 - DNA, 25 bp, Homo sapien
tgaactcctaaaaaggccatcacga

SEQ ID NO: 4869471 - DNA, 25 bp, Homo sapien
agaaactgccgtgctaagataagcc

SEQ ID NO: 4869472 - DNA, 25 bp, Homo sapien
tatattaggcccatagcacaagaga

SEQ ID NO: 4869473 - DNA, 25 bp, Homo sapien
tggttctgcacaatctgtcaaagat

SEQ ID NO: 4869474 - DNA, 25 bp, Homo sapien
cataaattgtcagaaaaagtaacct

SEQ ID NO: 4869475 - DNA, 25 bp, Homo sapien
ccatgccccgaggtgttccagggtc

SEQ ID NO: 4869476 - DNA, 25 bp, Homo sapien
aaatgctcaacagcgaccctggcta

SEQ ID NO: 4869477 - DNA, 25 bp, Homo sapien
tagggactgtcccactagatagcac

SEQ ID NO: 4869478 - DNA, 25 bp, Homo sapien
cctgtgtatgcttcagatctgcact

SEQ ID NO: 4869479 - DNA, 25 bp, Homo sapien
aggcctgtttggtgacccagtctgg

SEQ ID NO: 4869480 - DNA, 25 bp, Homo sapien
cacaaaggtgacaagggttccgtca

SEQ ID NO: 4869481 - DNA, 25 bp, Homo sapien
gacaagggttccgtcagacaggcct

SEQ ID NO: 4869482 - DNA, 25 bp, Homo sapien
cgtcagacaggcctgtttggtgacc

SEQ ID NO: 4869483 - DNA, 25 bp, Homo sapien
tgaccaaaagaatcgccaaagggat

SEQ ID NO: 4869484 - DNA, 25 bp, Homo sapien
ggagataacacagtgtgaccaaaag

SEQ ID NO: 4869485 - DNA, 25 bp, Homo sapien
cactgtcttaactacctgacaaaga

SEQ ID NO: 4869486 - DNA, 25 bp, Homo sapien
gattcacttgctgggcacgctacta

SEQ ID NO: 4869487 - DNA, 25 bp, Homo sapien
tggtccgagccttgtaatacaatag

SEQ ID NO: 4869488 - DNA, 25 bp, Homo sapien
tacaacaccaagcagtgaatcgaat

SEQ ID NO: 4869489 - DNA, 25 bp, Homo sapien
caagcagtgaatcgaatcaggatgt

SEQ ID NO: 4869490 - DNA, 25 bp, Homo sapien
atcgaatcaggatgtctttggtccg

SEQ ID NO: 4869491 - DNA, 25 bp, Homo sapien
ttagcgaggaatgctgcttacttac

SEQ ID NO: 4869492 - DNA, 25 bp, Homo sapien
ggaaaggaattttagcgaggaatgc

SEQ ID NO: 4869493 - DNA, 25 bp, Homo sapien
aattttagcgaggaatgctgcttac

SEQ ID NO: 4869494 - DNA, 25 bp, Homo sapien
ggaattttagcgaggaatgctgctt

SEQ ID NO: 4869495 - DNA, 25 bp, Homo sapien
tgccatgtggtgacaatggctagct

SEQ ID NO: 4869496 - DNA, 25 bp, Homo sapien
tgtggtgacaatggctagctcagtg

SEQ ID NO: 4869497 - DNA, 25 bp, Homo sapien
tgacaatggctagctcagtgttgct

SEQ ID NO: 4869498 - DNA, 25 bp, Homo sapien
aatggctagctcagtgttgctaaac

SEQ ID NO: 4869499 - DNA, 25 bp, Homo sapien
ctggctatctgatggcaaacactgc

SEQ ID NO: 4869500 - DNA, 25 bp, Homo sapien
agttgatgtctgcaacctggtctga

SEQ ID NO: 4869501 - DNA, 25 bp, Homo sapien
tctactgagttgaagagggtaagct

SEQ ID NO: 4869502 - DNA, 25 bp, Homo sapien
agttatttaatcacgtagagagggc

SEQ ID NO: 4869503 - DNA, 25 bp, Homo sapien
tttgtttactggaataaagccttca

SEQ ID NO: 4869504 - DNA, 25 bp, Homo sapien
ttgtttactggaataaagccttcat

SEQ ID NO: 4869505 - DNA, 25 bp, Homo sapien
tgtttactggaataaagccttcatt

SEQ ID NO: 4869506 - DNA, 25 bp, Homo sapien
tgaacagtcatccataaaatcatgc

SEQ ID NO: 4869507 - DNA, 25 bp, Homo sapien
ggcaaaagaactgagcgtagtgaca

SEQ ID NO: 4869508 - DNA, 25 bp, Homo sapien
gagcgtagtgacatacgaaagggac

SEQ ID NO: 4869509 - DNA, 25 bp, Homo sapien
aagaatggggttcctgtccacagcc

SEQ ID NO: 4869510 - DNA, 25 bp, Homo sapien
gaagaaggcaaaagaactgagcgta

SEQ ID NO: 4869511 - DNA, 25 bp, Homo sapien
tggccgacatataccagaatggaat

SEQ ID NO: 4869512 - DNA, 25 bp, Homo sapien
gccgacatataccagaatggaattc

SEQ ID NO: 4869513 - DNA, 25 bp, Homo sapien
cgtggccgacatataccagaatgga

SEQ ID NO: 4869514 - DNA, 25 bp, Homo sapien
ctcgtggccgacatataccagaatg

SEQ ID NO: 4869515 - DNA, 25 bp, Homo sapien
tgaaaggggaagtagttctcaaaca

SEQ ID NO: 4869516 - DNA, 25 bp, Homo sapien
ggatgtaggcaatgagcacccagag

SEQ ID NO: 4869517 - DNA, 25 bp, Homo sapien
cagtggcgacgatgttctgagtcag

SEQ ID NO: 4869518 - DNA, 25 bp, Homo sapien
tccaaaaaatcttctttctatagag

SEQ ID NO: 4869519 - DNA, 25 bp, Homo sapien
tccttgtgggactggttgtccttca

SEQ ID NO: 4869520 - DNA, 25 bp, Homo sapien
cagcagcacatctcagtgggagcca

SEQ ID NO: 4869521 - DNA, 25 bp, Homo sapien
cagagttctggcgagccgtgtcaca

SEQ ID NO: 4869522 - DNA, 25 bp, Homo sapien
ggctgccatccagatacacagagat

SEQ ID NO: 4869523 - DNA, 25 bp, Homo sapien
catttcgtgttggtgtgcgcgtaca

SEQ ID NO: 4869524 - DNA, 25 bp, Homo sapien
gatgcctcccatgaacaatgccgtg

SEQ ID NO: 4869525 - DNA, 25 bp, Homo sapien
caatgccgtgtgtctctgtttgtcc

SEQ ID NO: 4869526 - DNA, 25 bp, Homo sapien
tgacaagtaggaacgctgcctccat

SEQ ID NO: 4869527 - DNA, 25 bp, Homo sapien
ccattgtggaggatcatcttgaaaa

SEQ ID NO: 4869528 - DNA, 25 bp, Homo sapien
tacaagccggatgagagttcagggc

SEQ ID NO: 4869529 - DNA, 25 bp, Homo sapien
cacatgatccattcacaaagccagg

SEQ ID NO: 4869530 - DNA, 25 bp, Homo sapien
caagggtccagactcagtgatgcag

SEQ ID NO: 4869531 - DNA, 25 bp, Homo sapien
taagccgggtggaaagatgatgtca

SEQ ID NO: 4869532 - DNA, 25 bp, Homo sapien
tgctgtgagattgataccaacatta

SEQ ID NO: 4869533 - DNA, 25 bp, Homo sapien
agagattagagaagttcccttagaa

SEQ ID NO: 4869534 - DNA, 25 bp, Homo sapien
agcaggaggtacttctgtgatgtga

SEQ ID NO: 4869535 - DNA, 25 bp, Homo sapien
catgacagatcaaatgtagatagga

SEQ ID NO: 4869536 - DNA, 25 bp, Homo sapien
tattcagcgcctgcaatgtagaagg

SEQ ID NO: 4869537 - DNA, 25 bp, Homo sapien
cacagtctagcgtgggaaattagaa

SEQ ID NO: 4869538 - DNA, 25 bp, Homo sapien
catgcacacaggtaactgtcacacc

SEQ ID NO: 4869539 - DNA, 25 bp, Homo sapien
gaaggcactgtgtttggcaccatga

SEQ ID NO: 4869540 - DNA, 25 bp, Homo sapien
tacattttatgatctacagcggcag

SEQ ID NO: 4869541 - DNA, 25 bp, Homo sapien
aagaacatttcatgggcaccccgga

SEQ ID NO: 4869542 - DNA, 25 bp, Homo sapien
caggaggaggaatgacgactgtccc

SEQ ID NO: 4869543 - DNA, 25 bp, Homo sapien
cgaggcgcttctagctgataggaca

SEQ ID NO: 4869544 - DNA, 25 bp, Homo sapien
ccgtcgggcggaccgcctggctcgg

SEQ ID NO: 4869545 - DNA, 25 bp, Homo sapien
cgtcctcctctgacggagctcggga

SEQ ID NO: 4869546 - DNA, 25 bp, Homo sapien
cctctgacggagctcgggaccgctg

SEQ ID NO: 4869547 - DNA, 25 bp, Homo sapien
ggaccgctggccagaagcagtccgc

SEQ ID NO: 4869548 - DNA, 25 bp, Homo sapien
tcgatggagcaggaccgcctggccc

SEQ ID NO: 4869549 - DNA, 25 bp, Homo sapien
gcgatccacccaaaaaccgcaatct

SEQ ID NO: 4869550 - DNA, 25 bp, Homo sapien
cgacttctcagacgctcaacaaccc

SEQ ID NO: 4869551 - DNA, 25 bp, Homo sapien
ccagaagctgaagcgcttcctcgtg

SEQ ID NO: 4869552 - DNA, 25 bp, Homo sapien
ctctgcggcggcgctccacctctgc

SEQ ID NO: 4869553 - DNA, 25 bp, Homo sapien
tgcggcggcgctccacctctgcggc

SEQ ID NO: 4869554 - DNA, 25 bp, Homo sapien
tctgcggcggcgctccacctctgcg

SEQ ID NO: 4869555 - DNA, 25 bp, Homo sapien
cggcggcgctccacctctgcggcgt

SEQ ID NO: 4869556 - DNA, 25 bp, Homo sapien
ttctgcgcatctggcggcgctcgac

SEQ ID NO: 4869557 - DNA, 25 bp, Homo sapien
gtcccggcttctgcgcatctggcgg

SEQ ID NO: 4869558 - DNA, 25 bp, Homo sapien
tcgcgggcgtacaagtcccggcttc

SEQ ID NO: 4869559 - DNA, 25 bp, Homo sapien
tacaagtcccggcttctgcgcatct

SEQ ID NO: 4869560 - DNA, 25 bp, Homo sapien
tcagaggcatcgaacggacgagtgt

SEQ ID NO: 4869561 - DNA, 25 bp, Homo sapien
tgacctggaaagatcgcctagcggc

SEQ ID NO: 4869562 - DNA, 25 bp, Homo sapien
caaatatccgggtcacaagggagct

SEQ ID NO: 4869563 - DNA, 25 bp, Homo sapien
tcctgcacgtgagatgctgacctgg

SEQ ID NO: 4869564 - DNA, 25 bp, Homo sapien
gggtcgaggagaagcctcccatcca

SEQ ID NO: 4869565 - DNA, 25 bp, Homo sapien
ctgaaatctggactcccattgagga

SEQ ID NO: 4869566 - DNA, 25 bp, Homo sapien
tggagtaaggaccttcaacgggcca

SEQ ID NO: 4869567 - DNA, 25 bp, Homo sapien
ggactcccattgaggatctgctcct

SEQ ID NO: 4869568 - DNA, 25 bp, Homo sapien
taaggaccttcaacgggccaggtga

SEQ ID NO: 4869569 - DNA, 25 bp, Homo sapien
tggcgtgagctgccgaaagaccgca

SEQ ID NO: 4869570 - DNA, 25 bp, Homo sapien
acctccctggttacgccatggcggt

SEQ ID NO: 4869571 - DNA, 25 bp, Homo sapien
catggtggcgtgagctgccgaaaga

SEQ ID NO: 4869572 - DNA, 25 bp, Homo sapien
ccatggcggtggaatggcctccgta

SEQ ID NO: 4869573 - DNA, 25 bp, Homo sapien
tgagaacaaaaacgttcccatagcg

SEQ ID NO: 4869574 - DNA, 25 bp, Homo sapien
caaaaacgttcccatagcggctcct

SEQ ID NO: 4869575 - DNA, 25 bp, Homo sapien
actgagaacaaaaacgttcccatag

SEQ ID NO: 4869576 - DNA, 25 bp, Homo sapien
gttcccatagcggctcctcctggag

SEQ ID NO: 4869577 - DNA, 25 bp, Homo sapien
tcaacagcctggtagtagcgagcag

SEQ ID NO: 4869578 - DNA, 25 bp, Homo sapien
ggcttcttcataggggaggcagcca

SEQ ID NO: 4869579 - DNA, 25 bp, Homo sapien
agctttggagaaacctcagccacca

SEQ ID NO: 4869580 - DNA, 25 bp, Homo sapien
ggcagccagctttggagaaacctca

SEQ ID NO: 4869581 - DNA, 25 bp, Homo sapien
cttgcccctgaagccaaagggcttc

SEQ ID NO: 4869582 - DNA, 25 bp, Homo sapien
cgacggacgtgataccttggctccg

SEQ ID NO: 4869583 - DNA, 25 bp, Homo sapien
tgataccttggctccgtgaaggcgc

SEQ ID NO: 4869584 - DNA, 25 bp, Homo sapien
gcacccatgttgttcttgccgcttc

SEQ ID NO: 4869585 - DNA, 25 bp, Homo sapien
tcgtggtctctccaagcacccatgt

SEQ ID NO: 4869586 - DNA, 25 bp, Homo sapien
gacttttttaggaaattgtaatgca

SEQ ID NO: 4869587 - DNA, 25 bp, Homo sapien
tgagagacttttttaggaaattgta

SEQ ID NO: 4869588 - DNA, 25 bp, Homo sapien
agagagtgagagacttttttaggaa

SEQ ID NO: 4869589 - DNA, 25 bp, Homo sapien
ctaagagagtgagagacttttttag

SEQ ID NO: 4869590 - DNA, 25 bp, Homo sapien
cttctgaattgccattggcacaggc

SEQ ID NO: 4869591 - DNA, 25 bp, Homo sapien
tctgaattgccattggcacaggcca

SEQ ID NO: 4869592 - DNA, 25 bp, Homo sapien
tacttctgaattgccattggcacag

SEQ ID NO: 4869593 - DNA, 25 bp, Homo sapien
tgaattgccattggcacaggccaag

SEQ ID NO: 4869594 - DNA, 25 bp, Homo sapien
gtcaaagacatgaagttgacattgt

SEQ ID NO: 4869595 - DNA, 25 bp, Homo sapien
agacatgaagttgacattgtctgtc

SEQ ID NO: 4869596 - DNA, 25 bp, Homo sapien
ctttttgctgtcaaagacatgaagt

SEQ ID NO: 4869597 - DNA, 25 bp, Homo sapien
gacattgtctgtccagcagaagact

SEQ ID NO: 4869598 - DNA, 25 bp, Homo sapien
ctcatgctgatatagttggctactg

SEQ ID NO: 4869599 - DNA, 25 bp, Homo sapien
tgtcagcaccgtataaaagcagtgt

SEQ ID NO: 4869600 - DNA, 25 bp, Homo sapien
tattcccatacatatctggaagatt

SEQ ID NO: 4869601 - DNA, 25 bp, Homo sapien
tgattcaatgtcagcaccgtataaa

SEQ ID NO: 4869602 - DNA, 25 bp, Homo sapien
tacatatctggaagatttggatcag

SEQ ID NO: 4869603 - DNA, 25 bp, Homo sapien
tttgaaaataaaattggtagatctg

SEQ ID NO: 4869604 - DNA, 25 bp, Homo sapien
gaaaataaaattggtagatctgtac

SEQ ID NO: 4869605 - DNA, 25 bp, Homo sapien
aaaacaaatgtatttcagtattttg

SEQ ID NO: 4869606 - DNA, 25 bp, Homo sapien
aacaaatgtatttcagtattttgaa

SEQ ID NO: 4869607 - DNA, 25 bp, Homo sapien
aatttcaccattcgctgtttttgtc

SEQ ID NO: 4869608 - DNA, 25 bp, Homo sapien
tttcaccattcgctgtttttgtcca

SEQ ID NO: 4869609 - DNA, 25 bp, Homo sapien
accattcgctgtttttgtccatgta

SEQ ID NO: 4869610 - DNA, 25 bp, Homo sapien
tcaccattcgctgtttttgtccatg

SEQ ID NO: 4869611 - DNA, 25 bp, Homo sapien
tcagcagtttgtccaaatacatctt

SEQ ID NO: 4869612 - DNA, 25 bp, Homo sapien
cagtttgtccaaatacatcttgaga

SEQ ID NO: 4869613 - DNA, 25 bp, Homo sapien
atactatgatgactagaaactgcat

SEQ ID NO: 4869614 - DNA, 25 bp, Homo sapien
tgatgactagaaactgcataatctt

SEQ ID NO: 4869615 - DNA, 25 bp, Homo sapien
ttggaatccttcaaaaattggttca

SEQ ID NO: 4869616 - DNA, 25 bp, Homo sapien
aatccttcaaaaattggttcagcct

SEQ ID NO: 4869617 - DNA, 25 bp, Homo sapien
aattggttcagcctccttatgcagg

SEQ ID NO: 4869618 - DNA, 25 bp, Homo sapien
cttcaaaaattggttcagcctcctt

SEQ ID NO: 4869619 - DNA, 25 bp, Homo sapien
atttccagaagagttgtttggcatc

SEQ ID NO: 4869620 - DNA, 25 bp, Homo sapien
ttcctttaagcctttgtggctcttc

SEQ ID NO: 4869621 - DNA, 25 bp, Homo sapien
cacttcctttaagcctttgtggctc

SEQ ID NO: 4869622 - DNA, 25 bp, Homo sapien
ttcacttcctttaagcctttgtggc

SEQ ID NO: 4869623 - DNA, 25 bp, Homo sapien
cttcctctgatgtcagctttaagtc

SEQ ID NO: 4869624 - DNA, 25 bp, Homo sapien
ctatcgcaatccttatttatgtctg

SEQ ID NO: 4869625 - DNA, 25 bp, Homo sapien
tcgcaatccttatttatgtctggtt

SEQ ID NO: 4869626 - DNA, 25 bp, Homo sapien
tatcgcaatccttatttatgtctgg

SEQ ID NO: 4869627 - DNA, 25 bp, Homo sapien
atcgcaatccttatttatgtctggt

SEQ ID NO: 4869628 - DNA, 25 bp, Homo sapien
gagtggaagtttgatattaaggaca

SEQ ID NO: 4869629 - DNA, 25 bp, Homo sapien
tgagtggaagtttgatattaaggac

SEQ ID NO: 4869630 - DNA, 25 bp, Homo sapien
gaagtttgatattaaggacagttat

SEQ ID NO: 4869631 - DNA, 25 bp, Homo sapien
gtggaagtttgatattaaggacagt

SEQ ID NO: 4869632 - DNA, 25 bp, Homo sapien
tctttctttgtggaactaatccacc

SEQ ID NO: 4869633 - DNA, 25 bp, Homo sapien
tactcttcaatctctgtgttaggaa

SEQ ID NO: 4869634 - DNA, 25 bp, Homo sapien
gatactcttcaatctctgtgttagg

SEQ ID NO: 4869635 - DNA, 25 bp, Homo sapien
gtgatactcttcaatctctgtgtta

SEQ ID NO: 4869636 - DNA, 25 bp, Homo sapien
tcttttcattagatttcttttcagg

SEQ ID NO: 4869637 - DNA, 25 bp, Homo sapien
cttgttcttttcattagatttcttt

SEQ ID NO: 4869638 - DNA, 25 bp, Homo sapien
cttttcattagatttcttttcaggc

SEQ ID NO: 4869639 - DNA, 25 bp, Homo sapien
gttcttttcattagatttcttttca

SEQ ID NO: 4869640 - DNA, 25 bp, Homo sapien
aaagcaaatcataatcctctgacgc

SEQ ID NO: 4869641 - DNA, 25 bp, Homo sapien
atccattttgagttgttcaatgagc

SEQ ID NO: 4869642 - DNA, 25 bp, Homo sapien
cctctgacgctatttctgatggcca

SEQ ID NO: 4869643 - DNA, 25 bp, Homo sapien
tgttatgtcatcaaggttatccact

SEQ ID NO: 4869644 - DNA, 25 bp, Homo sapien
tactgtaagttgctcatagtggcta

SEQ ID NO: 4869645 - DNA, 25 bp, Homo sapien
tctactgtaagttgctcatagtggc

SEQ ID NO: 4869646 - DNA, 25 bp, Homo sapien
ctgtaagttgctcatagtggctatt

SEQ ID NO: 4869647 - DNA, 25 bp, Homo sapien
gctatttttgagttctagtaagtgt

SEQ ID NO: 4869648 - DNA, 25 bp, Homo sapien
ttctgaggagctaactgtaattgtg

SEQ ID NO: 4869649 - DNA, 25 bp, Homo sapien
aattttcatgagatactgaaggtat

SEQ ID NO: 4869650 - DNA, 25 bp, Homo sapien
ttttcatgagatactgaaggtatcc

SEQ ID NO: 4869651 - DNA, 25 bp, Homo sapien
attttcatgagatactgaaggtatc

SEQ ID NO: 4869652 - DNA, 25 bp, Homo sapien
taattttcatgagatactgaaggta

SEQ ID NO: 4869653 - DNA, 25 bp, Homo sapien
aatattctagcattctgttccttgg

SEQ ID NO: 4869654 - DNA, 25 bp, Homo sapien
tgtaatattctagcattctgttcct

SEQ ID NO: 4869655 - DNA, 25 bp, Homo sapien
gtaatattctagcattctgttcctt

SEQ ID NO: 4869656 - DNA, 25 bp, Homo sapien
taatattctagcattctgttccttg

SEQ ID NO: 4869657 - DNA, 25 bp, Homo sapien
tcacacttttaatgtactccagata

SEQ ID NO: 4869658 - DNA, 25 bp, Homo sapien
acacttttaatgtactccagatatt

SEQ ID NO: 4869659 - DNA, 25 bp, Homo sapien
ttcacacttttaatgtactccagat

SEQ ID NO: 4869660 - DNA, 25 bp, Homo sapien
cacacttttaatgtactccagatat

SEQ ID NO: 4869661 - DNA, 25 bp, Homo sapien
aaaatgacatgattgaatttccatt

SEQ ID NO: 4869662 - DNA, 25 bp, Homo sapien
gccagtctaaaatgacatgattgaa

SEQ ID NO: 4869663 - DNA, 25 bp, Homo sapien
gcagtagccagtctaaaatgacatg

SEQ ID NO: 4869664 - DNA, 25 bp, Homo sapien
cagtcacaatcatgtagagcagtag

SEQ ID NO: 4869665 - DNA, 25 bp, Homo sapien
attgtctcctgtaaataaacctgtt

SEQ ID NO: 4869666 - DNA, 25 bp, Homo sapien
gatatatgagaattcattgtctcct

SEQ ID NO: 4869667 - DNA, 25 bp, Homo sapien
aagaagtctctttctgctatctgac

SEQ ID NO: 4869668 - DNA, 25 bp, Homo sapien
aacctgttcatgtcttgttctctgg

SEQ ID NO: 4869669 - DNA, 25 bp, Homo sapien
gagtgctagcggatgcaaaagtgcc

SEQ ID NO: 4869670 - DNA, 25 bp, Homo sapien
aaagtgcggcaactgcagcagagtg

SEQ ID NO: 4869671 - DNA, 25 bp, Homo sapien
acagtggtccctcaggatataagag

SEQ ID NO: 4869672 - DNA, 25 bp, Homo sapien
tctgcagcattaggtcaagggtgag

SEQ ID NO: 4869673 - DNA, 25 bp, Homo sapien
gcttctagggcctaacatgaaggca

SEQ ID NO: 4869674 - DNA, 25 bp, Homo sapien
aaagttcagttaagatggccaagga

SEQ ID NO: 4869675 - DNA, 25 bp, Homo sapien
catgaaggcacagctgtaaggcaga

SEQ ID NO: 4869676 - DNA, 25 bp, Homo sapien
taaacagttattagtgaggcaattc

SEQ ID NO: 4869677 - DNA, 25 bp, Homo sapien
tagatgaggactatcttataattat

SEQ ID NO: 4869678 - DNA, 25 bp, Homo sapien
tctgtcacttactggttccctttac

SEQ ID NO: 4869679 - DNA, 25 bp, Homo sapien
taatgatccagacatctaatatcta

SEQ ID NO: 4869680 - DNA, 25 bp, Homo sapien
tacattgtttcataaggaatccttc

SEQ ID NO: 4869681 - DNA, 25 bp, Homo sapien
aatgacccatgaaagtatagcatta

SEQ ID NO: 4869682 - DNA, 25 bp, Homo sapien
ccctcttacactcctagaggaagcg

SEQ ID NO: 4869683 - DNA, 25 bp, Homo sapien
gaagcgatgcattgccatcaatggc

SEQ ID NO: 4869684 - DNA, 25 bp, Homo sapien
caaaagctggcttcccgttcaggag

SEQ ID NO: 4869685 - DNA, 25 bp, Homo sapien
tggagatcaactgagtgacagatgt

SEQ ID NO: 4869686 - DNA, 25 bp, Homo sapien
gaagggaaagtgtgcctggccagcc

SEQ ID NO: 4869687 - DNA, 25 bp, Homo sapien
ggaagggaaagtgtgcctggccagc

SEQ ID NO: 4869688 - DNA, 25 bp, Homo sapien
tccaacttacaaggtatgtgaagga

SEQ ID NO: 4869689 - DNA, 25 bp, Homo sapien
ggaatccaacttacaaggtatgtga

SEQ ID NO: 4869690 - DNA, 25 bp, Homo sapien
ggaagaacatttcatgctcatgggt

SEQ ID NO: 4869691 - DNA, 25 bp, Homo sapien
tggaagaacatttcatgctcatggg

SEQ ID NO: 4869692 - DNA, 25 bp, Homo sapien
gaatgtagactctttgggaccagtc

SEQ ID NO: 4869693 - DNA, 25 bp, Homo sapien
aatgtagactctttgggaccagtct

SEQ ID NO: 4869694 - DNA, 25 bp, Homo sapien
tgaatgtagactctttgggaccagt

SEQ ID NO: 4869695 - DNA, 25 bp, Homo sapien
cacaatgtttgtaagatccgagttc

SEQ ID NO: 4869696 - DNA, 25 bp, Homo sapien
ttttactttggcattgctctcaggc

SEQ ID NO: 4869697 - DNA, 25 bp, Homo sapien
tgccaagtaggatcacaatgtttgt

SEQ ID NO: 4869698 - DNA, 25 bp, Homo sapien
tttactttggcattgctctcaggcc

SEQ ID NO: 4869699 - DNA, 25 bp, Homo sapien
gaagagatcccaaatggtttccagg

SEQ ID NO: 4869700 - DNA, 25 bp, Homo sapien
caggtgtgccctttatatagtacgt

SEQ ID NO: 4869701 - DNA, 25 bp, Homo sapien
ttgagaggtttttagcatgaggcac

SEQ ID NO: 4869702 - DNA, 25 bp, Homo sapien
tttccaggttcatagcaagatgcag

SEQ ID NO: 4869703 - DNA, 25 bp, Homo sapien
gtccaggcaagtgctagaaccccag

SEQ ID NO: 4869704 - DNA, 25 bp, Homo sapien
gttgatggtgcagacacattgtcca

SEQ ID NO: 4869705 - DNA, 25 bp, Homo sapien
cataggtgatgttgatggtgcagac

SEQ ID NO: 4869706 - DNA, 25 bp, Homo sapien
ggcaagtgctagaaccccagcaaca

SEQ ID NO: 4869707 - DNA, 25 bp, Homo sapien
tacagaggctatctcaaaaatagat

SEQ ID NO: 4869708 - DNA, 25 bp, Homo sapien
atacagaggctatctcaaaaataga

SEQ ID NO: 4869709 - DNA, 25 bp, Homo sapien
aatataccaaagagataccttaggc

SEQ ID NO: 4869710 - DNA, 25 bp, Homo sapien
ggctaacaacattggcactcagaag

SEQ ID NO: 4869711 - DNA, 25 bp, Homo sapien
tcttttagttcttggatggaggagg

SEQ ID NO: 4869712 - DNA, 25 bp, Homo sapien
gaagtgacacataccactaaattat

SEQ ID NO: 4869713 - DNA, 25 bp, Homo sapien
tctgcatcactgaggcaccttgagt

SEQ ID NO: 4869714 - DNA, 25 bp, Homo sapien
ggaacctgattgcatgaagataaca

SEQ ID NO: 4869715 - DNA, 25 bp, Homo sapien
tctcgtctttgtcagggtagtgtgg

SEQ ID NO: 4869716 - DNA, 25 bp, Homo sapien
ctgcgaagggaacctgattgcatga

SEQ ID NO: 4869717 - DNA, 25 bp, Homo sapien
gcctacattccacaagcttctcaat

SEQ ID NO: 4869718 - DNA, 25 bp, Homo sapien
cctacattccacaagcttctcaata

SEQ ID NO: 4869719 - DNA, 25 bp, Homo sapien
acagcagtggccagtctacaattat

SEQ ID NO: 4869720 - DNA, 25 bp, Homo sapien
cagtggccagtctacaattatatga

SEQ ID NO: 4869721 - DNA, 25 bp, Homo sapien
gctgttcattgtagtgaaatacctc

SEQ ID NO: 4869722 - DNA, 25 bp, Homo sapien
aaatatacagcagtggccagtctac

SEQ ID NO: 4869723 - DNA, 25 bp, Homo sapien
gtctgtgtttggcatagatctcttt

SEQ ID NO: 4869724 - DNA, 25 bp, Homo sapien
agtcttttctccgagtgtttatctt

SEQ ID NO: 4869725 - DNA, 25 bp, Homo sapien
ccgagtgtttatcttgtgtgatgga

SEQ ID NO: 4869726 - DNA, 25 bp, Homo sapien
ttctccgagtgtttatcttgtgtga

SEQ ID NO: 4869727 - DNA, 25 bp, Homo sapien
ctgccaaagcaaattattttcactt

SEQ ID NO: 4869728 - DNA, 25 bp, Homo sapien
actttgtagttgagaaaatctgtct

SEQ ID NO: 4869729 - DNA, 25 bp, Homo sapien
ttttcactttgtagttgagaaaatc

SEQ ID NO: 4869730 - DNA, 25 bp, Homo sapien
ttcactttgtagttgagaaaatctg

SEQ ID NO: 4869731 - DNA, 25 bp, Homo sapien
gaagatttctgacaacagcatggaa

SEQ ID NO: 4869732 - DNA, 25 bp, Homo sapien
ttctgacaacagcatggaattgctc

SEQ ID NO: 4869733 - DNA, 25 bp, Homo sapien
gctagaagatttctgacaacagcat

SEQ ID NO: 4869734 - DNA, 25 bp, Homo sapien
tctcagctagaagatttctgacaac

SEQ ID NO: 4869735 - DNA, 25 bp, Homo sapien
ttgatatattctttctttcaaggga

SEQ ID NO: 4869736 - DNA, 25 bp, Homo sapien
cattgatatattctttctttcaagg

SEQ ID NO: 4869737 - DNA, 25 bp, Homo sapien
tttttcccactgtctctttttcaca

SEQ ID NO: 4869738 - DNA, 25 bp, Homo sapien
tttttcacattgatatattctttct

SEQ ID NO: 4869739 - DNA, 25 bp, Homo sapien
ctagggaaggctctgacaggttttt

SEQ ID NO: 4869740 - DNA, 25 bp, Homo sapien
ctctagggaaggctctgacaggttt

SEQ ID NO: 4869741 - DNA, 25 bp, Homo sapien
ataatacagcttgataatgcagtag

SEQ ID NO: 4869742 - DNA, 25 bp, Homo sapien
catcaaactgcatgaatgaaataat

SEQ ID NO: 4869743 - DNA, 25 bp, Homo sapien
aataatacagcttgataatgcagta

SEQ ID NO: 4869744 - DNA, 25 bp, Homo sapien
ctgtgagatcatcaaactgcatgaa

SEQ ID NO: 4869745 - DNA, 25 bp, Homo sapien
ttgtaaagatacagcttccaattct

SEQ ID NO: 4869746 - DNA, 25 bp, Homo sapien
gttttcagccaaatagacacattgt

SEQ ID NO: 4869747 - DNA, 25 bp, Homo sapien
acacattgtaaagatacagcttcca

SEQ ID NO: 4869748 - DNA, 25 bp, Homo sapien
tgtcataagatttactattccttct

SEQ ID NO: 4869749 - DNA, 25 bp, Homo sapien
cgtgttaatggatttcttctatttt

SEQ ID NO: 4869750 - DNA, 25 bp, Homo sapien
acgtgttaatggatttcttctattt

SEQ ID NO: 4869751 - DNA, 25 bp, Homo sapien
aacacaaggtggctctgagcctggc

SEQ ID NO: 4869752 - DNA, 25 bp, Homo sapien
tccactctttctccatatggagctt

SEQ ID NO: 4869753 - DNA, 25 bp, Homo sapien
tgagcctggcctcatagaaagagca

SEQ ID NO: 4869754 - DNA, 25 bp, Homo sapien
gcactgagaaaagctttcatccact

SEQ ID NO: 4869755 - DNA, 25 bp, Homo sapien
agtaggaattcttacaggtgttttg

SEQ ID NO: 4869756 - DNA, 25 bp, Homo sapien
tccatcttcttggtgtagcattcga

SEQ ID NO: 4869757 - DNA, 25 bp, Homo sapien
gcattcgattcctaaaggttgaagg

SEQ ID NO: 4869758 - DNA, 25 bp, Homo sapien
tcttcttggtgtagcattcgattcc

SEQ ID NO: 4869759 - DNA, 25 bp, Homo sapien
tggtgtagcattcgattcctaaagg

SEQ ID NO: 4869760 - DNA, 25 bp, Homo sapien
tgatggtgttgctggcacctctggt

SEQ ID NO: 4869761 - DNA, 25 bp, Homo sapien
ttgctggcacctctggtgaagtgga

SEQ ID NO: 4869762 - DNA, 25 bp, Homo sapien
tggtgttgctggcacctctggtgaa

SEQ ID NO: 4869763 - DNA, 25 bp, Homo sapien
tgttgctggcacctctggtgaagtg

SEQ ID NO: 4869764 - DNA, 25 bp, Homo sapien
agacaacaataacaggtgcatcatg

SEQ ID NO: 4869765 - DNA, 25 bp, Homo sapien
ggccttgttgggacagattggcaga

SEQ ID NO: 4869766 - DNA, 25 bp, Homo sapien
gccttgttgggacagattggcagag

SEQ ID NO: 4869767 - DNA, 25 bp, Homo sapien
caataacaggtgcatcatggggtcc

SEQ ID NO: 4869768 - DNA, 25 bp, Homo sapien
ctttggcaagagcttccttgggtac

SEQ ID NO: 4869769 - DNA, 25 bp, Homo sapien
tctgcttcctttctgccacatgttg

SEQ ID NO: 4869770 - DNA, 25 bp, Homo sapien
agcttccttgggtacatggatgatg

SEQ ID NO: 4869771 - DNA, 25 bp, Homo sapien
ttggcaagagcttccttgggtacat

SEQ ID NO: 4869772 - DNA, 25 bp, Homo sapien
caagtctacagtggttcaaagtttc

SEQ ID NO: 4869773 - DNA, 25 bp, Homo sapien
cataggtagttcaatgcaggcagga

SEQ ID NO: 4869774 - DNA, 25 bp, Homo sapien
gtttggtcacacataagagcatagg

SEQ ID NO: 4869775 - DNA, 25 bp, Homo sapien
tatgacaaaacaaactaaccttggc

SEQ ID NO: 4869776 - DNA, 25 bp, Homo sapien
agttcatcagactcacccagcacag

SEQ ID NO: 4869777 - DNA, 25 bp, Homo sapien
gagttcatcagactcacccagcaca

SEQ ID NO: 4869778 - DNA, 25 bp, Homo sapien
gttcatcagactcacccagcacagg

SEQ ID NO: 4869779 - DNA, 25 bp, Homo sapien
catcgtagtcacttctagaacagct

SEQ ID NO: 4869780 - DNA, 25 bp, Homo sapien
tgaactgatgaaagcccctcctata

SEQ ID NO: 4869781 - DNA, 25 bp, Homo sapien
caggatgaactgatgaaagcccctc

SEQ ID NO: 4869782 - DNA, 25 bp, Homo sapien
tgcatttgccccatcgtagtcactt

SEQ ID NO: 4869783 - DNA, 25 bp, Homo sapien
cctgaggaaagtgtcacacagtgca

SEQ ID NO: 4869784 - DNA, 25 bp, Homo sapien
ctgaacatgacatcgagagcacacc

SEQ ID NO: 4869785 - DNA, 25 bp, Homo sapien
gcaggagctgtgcttgatccctgaa

SEQ ID NO: 4869786 - DNA, 25 bp, Homo sapien
tgggagactactgggatctgacacc

SEQ ID NO: 4869787 - DNA, 25 bp, Homo sapien
tcctatcttaatcgacagggccagg

SEQ ID NO: 4869788 - DNA, 25 bp, Homo sapien
cacacaaggtactccattctgctgg

SEQ ID NO: 4869789 - DNA, 25 bp, Homo sapien
gggtcttctccagacaggtcctctc

SEQ ID NO: 4869790 - DNA, 25 bp, Homo sapien
aagagtcatagagccagagtaaagg

SEQ ID NO: 4869791 - DNA, 25 bp, Homo sapien
tgttgggcaccactgggccatccca

SEQ ID NO: 4869792 - DNA, 25 bp, Homo sapien
ctgttgggcaccactgggccatccc

SEQ ID NO: 4869793 - DNA, 25 bp, Homo sapien
ggcaccactgggccatcccaggtgt

SEQ ID NO: 4869794 - DNA, 25 bp, Homo sapien
ttgggcaccactgggccatcccagg

SEQ ID NO: 4869795 - DNA, 25 bp, Homo sapien
ttattctgtcggaatctctgagcaa

SEQ ID NO: 4869796 - DNA, 25 bp, Homo sapien
tacctttattctgtcggaatctctg

SEQ ID NO: 4869797 - DNA, 25 bp, Homo sapien
ctttacctttattctgtcggaatct

SEQ ID NO: 4869798 - DNA, 25 bp, Homo sapien
cctttattctgtcggaatctctgag

SEQ ID NO: 4869799 - DNA, 25 bp, Homo sapien
agtctcctccccaagtggacctgag

SEQ ID NO: 4869800 - DNA, 25 bp, Homo sapien
accaggctgggagcaagtctcctcc

SEQ ID NO: 4869801 - DNA, 25 bp, Homo sapien
tgaggaagtactctccctgtcccca

SEQ ID NO: 4869802 - DNA, 25 bp, Homo sapien
tgtccccatccaccacaggtctcag

SEQ ID NO: 4869803 - DNA, 25 bp, Homo sapien
ggaaacactgtaccctgtgttcttg

SEQ ID NO: 4869804 - DNA, 25 bp, Homo sapien
ttcaccttctcgacatgcagcaggg

SEQ ID NO: 4869805 - DNA, 25 bp, Homo sapien
gactcccttacagagcagccaaaac

SEQ ID NO: 4869806 - DNA, 25 bp, Homo sapien
tgtaccctgtgttcttggctttcac

SEQ ID NO: 4869807 - DNA, 25 bp, Homo sapien
gggctatctgcacatttttgctggg

SEQ ID NO: 4869808 - DNA, 25 bp, Homo sapien
tccagggctatctgcacatttttgc

SEQ ID NO: 4869809 - DNA, 25 bp, Homo sapien
cagggctatctgcacatttttgctg

SEQ ID NO: 4869810 - DNA, 25 bp, Homo sapien
gtccagggctatctgcacatttttg

SEQ ID NO: 4869811 - DNA, 25 bp, Homo sapien
cctcagcagtgacgtagtacagaaa

SEQ ID NO: 4869812 - DNA, 25 bp, Homo sapien
ctcagcagtgacgtagtacagaaag

SEQ ID NO: 4869813 - DNA, 25 bp, Homo sapien
cccctcagcagtgacgtagtacaga

SEQ ID NO: 4869814 - DNA, 25 bp, Homo sapien
ccctcagcagtgacgtagtacagaa

SEQ ID NO: 4869815 - DNA, 25 bp, Homo sapien
tgaagttgtgcaccacaacacaggc

SEQ ID NO: 4869816 - DNA, 25 bp, Homo sapien
gttattaactccctggctagtgagg

SEQ ID NO: 4869817 - DNA, 25 bp, Homo sapien
ctgtgaccttcaggaagttattaac

SEQ ID NO: 4869818 - DNA, 25 bp, Homo sapien
agtcttgaatgtggctgtgaccttc

SEQ ID NO: 4869819 - DNA, 25 bp, Homo sapien
tgtccagcacaagcacatcaatgaa

SEQ ID NO: 4869820 - DNA, 25 bp, Homo sapien
ctcctgaattaagatcccagagaag

SEQ ID NO: 4869821 - DNA, 25 bp, Homo sapien
ctgaattaagatcccagagaagccc

SEQ ID NO: 4869822 - DNA, 25 bp, Homo sapien
cctgaattaagatcccagagaagcc

SEQ ID NO: 4869823 - DNA, 25 bp, Homo sapien
gaattaagatcccagagaagcccac

SEQ ID NO: 4869824 - DNA, 25 bp, Homo sapien
cacatccctgggattgagagatccc

SEQ ID NO: 4869825 - DNA, 25 bp, Homo sapien
gggattgagagatccctgttcccac

SEQ ID NO: 4869826 - DNA, 25 bp, Homo sapien
ttatgtgcttatctgacaacttccc

SEQ ID NO: 4869827 - DNA, 25 bp, Homo sapien
tatgtgcttatctgacaacttccca

SEQ ID NO: 4869828 - DNA, 25 bp, Homo sapien
agatgtacaggacccagaagaggcc

SEQ ID NO: 4869829 - DNA, 25 bp, Homo sapien
tacttgtcttgtgaagatgtacagg

SEQ ID NO: 4869830 - DNA, 25 bp, Homo sapien
tgctgtcatatcctgcgaggccgcc

SEQ ID NO: 4869831 - DNA, 25 bp, Homo sapien
catatcctgcgaggccgccagcagg

SEQ ID NO: 4869832 - DNA, 25 bp, Homo sapien
ctcaagaaaggacccagggatctgc

SEQ ID NO: 4869833 - DNA, 25 bp, Homo sapien
gaaggtgagttcctgaggctcaaga

SEQ ID NO: 4869834 - DNA, 25 bp, Homo sapien
tcttcagggaagatgagatggaagg

SEQ ID NO: 4869835 - DNA, 25 bp, Homo sapien
aggctcaagaaaggacccagggatc

SEQ ID NO: 4869836 - DNA, 25 bp, Homo sapien
cacctgtagcattgatggccaatgt

SEQ ID NO: 4869837 - DNA, 25 bp, Homo sapien
caagctctgcatgggcacctgtagc

SEQ ID NO: 4869838 - DNA, 25 bp, Homo sapien
ctcataaagcctcatgtgaaggtgg

SEQ ID NO: 4869839 - DNA, 25 bp, Homo sapien
ggaaagatgagacctgtccacctca

SEQ ID NO: 4869840 - DNA, 25 bp, Homo sapien
ttctcagacttaggagttcctccag

SEQ ID NO: 4869841 - DNA, 25 bp, Homo sapien
gaggttgccgaatacacaggaaaga

SEQ ID NO: 4869842 - DNA, 25 bp, Homo sapien
tctgacccccgtgaaattggagatg

SEQ ID NO: 4869843 - DNA, 25 bp, Homo sapien
ggccttggattcaggccacttagga

SEQ ID NO: 4869844 - DNA, 25 bp, Homo sapien
gcaggcctcggaaaaatagtggcga

SEQ ID NO: 4869845 - DNA, 25 bp, Homo sapien
tcctggtaggacctgtgctggactg

SEQ ID NO: 4869846 - DNA, 25 bp, Homo sapien
tttcagggaagcattgagacgggcc

SEQ ID NO: 4869847 - DNA, 25 bp, Homo sapien
gcaggcttgcaggaaaacattgagg

SEQ ID NO: 4869848 - DNA, 25 bp, Homo sapien
tggttcttgattgggtgtcccagtg

SEQ ID NO: 4869849 - DNA, 25 bp, Homo sapien
atggttcttgattgggtgtcccagt

SEQ ID NO: 4869850 - DNA, 25 bp, Homo sapien
ggttcttgattgggtgtcccagtgg

SEQ ID NO: 4869851 - DNA, 25 bp, Homo sapien
ttcttgtctgtccacgggggtggct

SEQ ID NO: 4869852 - DNA, 25 bp, Homo sapien
tcgtagatatatttggtttcttgtc

SEQ ID NO: 4869853 - DNA, 25 bp, Homo sapien
cacgggggtggcttttgcaaagata

SEQ ID NO: 4869854 - DNA, 25 bp, Homo sapien
tggcttttgcaaagataactggcat

SEQ ID NO: 4869855 - DNA, 25 bp, Homo sapien
gggcctctccatttggtttgtacac

SEQ ID NO: 4869856 - DNA, 25 bp, Homo sapien
gcctctccatttggtttgtacacag

SEQ ID NO: 4869857 - DNA, 25 bp, Homo sapien
tggggcctctccatttggtttgtac

SEQ ID NO: 4869858 - DNA, 25 bp, Homo sapien
ggcctctccatttggtttgtacaca

SEQ ID NO: 4869859 - DNA, 25 bp, Homo sapien
acacttcttgcagcagagccactct

SEQ ID NO: 4869860 - DNA, 25 bp, Homo sapien
tacacttcttgcagcagagccactc

SEQ ID NO: 4869861 - DNA, 25 bp, Homo sapien
ttacacttcttgcagcagagccact

SEQ ID NO: 4869862 - DNA, 25 bp, Homo sapien
ccaccgctgtgtttgtgagtacgtc

SEQ ID NO: 4869863 - DNA, 25 bp, Homo sapien
tgagtacgtcctgaagaggtcgctg

SEQ ID NO: 4869864 - DNA, 25 bp, Homo sapien
tcacgtgcctgagaataaaagatgg

SEQ ID NO: 4869865 - DNA, 25 bp, Homo sapien
tgtgttgtgccaacgacaactgccc

SEQ ID NO: 4869866 - DNA, 25 bp, Homo sapien
acgccatccggatctgctttgctga

SEQ ID NO: 4869867 - DNA, 25 bp, Homo sapien
gctttgctgatgttcgcgacggttg

SEQ ID NO: 4869868 - DNA, 25 bp, Homo sapien
ggctgtctggctccatctggcggct

SEQ ID NO: 4869869 - DNA, 25 bp, Homo sapien
tatagttctcttggcttccggagct

SEQ ID NO: 4869870 - DNA, 25 bp, Homo sapien
cagtctatgcagagacacttttggg

SEQ ID NO: 4869871 - DNA, 25 bp, Homo sapien
gtcttttgattctgtcgcagtctat

SEQ ID NO: 4869872 - DNA, 25 bp, Homo sapien
ttcaaacacccacacgccattggtt

SEQ ID NO: 4869873 - DNA, 25 bp, Homo sapien
cgacccacgaccaagtcctgtttct

SEQ ID NO: 4869874 - DNA, 25 bp, Homo sapien
ttctccccagatgttgttaaagcag

SEQ ID NO: 4869875 - DNA, 25 bp, Homo sapien
tcatgtgtttgacccgcgtggactc

SEQ ID NO: 4869876 - DNA, 25 bp, Homo sapien
gcagctcaactctaggccttttcgt

SEQ ID NO: 4869877 - DNA, 25 bp, Homo sapien
taaagcaggtggatttcaagcatgt

SEQ ID NO: 4869878 - DNA, 25 bp, Homo sapien
tttggtatattgtggacagttgagg

SEQ ID NO: 4869879 - DNA, 25 bp, Homo sapien
tctgtatccccctgtgtatcacaag

SEQ ID NO: 4869880 - DNA, 25 bp, Homo sapien
tcactgttcgtttattttggtatat

SEQ ID NO: 4869881 - DNA, 25 bp, Homo sapien
caaaaaatgtattcactgttcgttt

SEQ ID NO: 4869882 - DNA, 25 bp, Homo sapien
tcagccagatgtctgcggtgagcgt

SEQ ID NO: 4869883 - DNA, 25 bp, Homo sapien
ggtctgaacgcttccatccgcgagc

SEQ ID NO: 4869884 - DNA, 25 bp, Homo sapien
cgttggacttgaccatcaaattggg

SEQ ID NO: 4869885 - DNA, 25 bp, Homo sapien
gccggctcggtgtgaaaagtttcca

SEQ ID NO: 4869886 - DNA, 25 bp, Homo sapien
gatttccgtgagagacaggcaccct

SEQ ID NO: 4869887 - DNA, 25 bp, Homo sapien
ggaggccttttgcaggagacccagt

SEQ ID NO: 4869888 - DNA, 25 bp, Homo sapien
gaggccttttactgagactcccagc

SEQ ID NO: 4869889 - DNA, 25 bp, Homo sapien
cggccacgttttcgcttgtgggaga

SEQ ID NO: 4869890 - DNA, 25 bp, Homo sapien
ttgacaacaagctagtaagaaggct

SEQ ID NO: 4869891 - DNA, 25 bp, Homo sapien
ttttctgcccgccatgggtgggcca

SEQ ID NO: 4869892 - DNA, 25 bp, Homo sapien
cagatttagggacctgttcgcaaca

SEQ ID NO: 4869893 - DNA, 25 bp, Homo sapien
cagtggcctgacagcttttggagct

SEQ ID NO: 4869894 - DNA, 25 bp, Homo sapien
tgtgtggtcccagggatgcctctcc

SEQ ID NO: 4869895 - DNA, 25 bp, Homo sapien
gggcagaaactcagggggacattga

SEQ ID NO: 4869896 - DNA, 25 bp, Homo sapien
aaactcagggggacattgaggcagg

SEQ ID NO: 4869897 - DNA, 25 bp, Homo sapien
gtggtcccagggatgcctctccctt

SEQ ID NO: 4869898 - DNA, 25 bp, Homo sapien
ccaatagagaaaacgaggctgcagg

SEQ ID NO: 4869899 - DNA, 25 bp, Homo sapien
catgctttgaagcagtgtgcctgtg

SEQ ID NO: 4869900 - DNA, 25 bp, Homo sapien
gaagcggcgagatctcagaaaataa

SEQ ID NO: 4869901 - DNA, 25 bp, Homo sapien
ctgtcccgggcaggctgcaaatgcc

SEQ ID NO: 4869902 - DNA, 25 bp, Homo sapien
aaacctccctgtggtgggagatgag

SEQ ID NO: 4869903 - DNA, 25 bp, Homo sapien
aaagacctgaccgacccgcggcctg

SEQ ID NO: 4869904 - DNA, 25 bp, Homo sapien
cctccctgtggtgggagatgagaca

SEQ ID NO: 4869905 - DNA, 25 bp, Homo sapien
cctgtggtgggagatgagacacatt

SEQ ID NO: 4869906 - DNA, 25 bp, Homo sapien
tagtcacatagtatggagccttttc

SEQ ID NO: 4869907 - DNA, 25 bp, Homo sapien
ttgtttcacctagcagtatacactt

SEQ ID NO: 4869908 - DNA, 25 bp, Homo sapien
tgtcatataatagttgtagtcacat

SEQ ID NO: 4869909 - DNA, 25 bp, Homo sapien
gcagtatacacttagggttcttctg

SEQ ID NO: 4869910 - DNA, 25 bp, Homo sapien
tcattccaccacgtgtggcatttgg

SEQ ID NO: 4869911 - DNA, 25 bp, Homo sapien
tcagtgtctgagtgctatgtagatt

SEQ ID NO: 4869912 - DNA, 25 bp, Homo sapien
tttggccctgtttggcagtgatgac

SEQ ID NO: 4869913 - DNA, 25 bp, Homo sapien
gatgaccgcctttctgttcagtgtc

SEQ ID NO: 4869914 - DNA, 25 bp, Homo sapien
caagagggtgcggaaggacctctct

SEQ ID NO: 4869915 - DNA, 25 bp, Homo sapien
gtcctggtacactgaggcatgaagg

SEQ ID NO: 4869916 - DNA, 25 bp, Homo sapien
ggaaggacctctctgtcctggtaca

SEQ ID NO: 4869917 - DNA, 25 bp, Homo sapien
ctggcagcaagagggtgcggaagga

SEQ ID NO: 4869918 - DNA, 25 bp, Homo sapien
cctgacctgtttgcgccctggtgag

SEQ ID NO: 4869919 - DNA, 25 bp, Homo sapien
tcttcagcttggcacccggcagacg

SEQ ID NO: 4869920 - DNA, 25 bp, Homo sapien
agcccagccggtataagcgccagca

SEQ ID NO: 4869921 - DNA, 25 bp, Homo sapien
gaggcgaggatgcgctcttcagctt

SEQ ID NO: 4869922 - DNA, 25 bp, Homo sapien
ggcatgatgaaacttcccgcacgca

SEQ ID NO: 4869923 - DNA, 25 bp, Homo sapien
tgtcctttaacacgcgcactgagaa

SEQ ID NO: 4869924 - DNA, 25 bp, Homo sapien
tcagaacagcgggtaacctgggcag

SEQ ID NO: 4869925 - DNA, 25 bp, Homo sapien
gctggttgatcctcgcaggcatgat

SEQ ID NO: 4869926 - DNA, 25 bp, Homo sapien
gatattctggatcacagccaaatgc

SEQ ID NO: 4869927 - DNA, 25 bp, Homo sapien
tattctggatcacagccaaatgctg

SEQ ID NO: 4869928 - DNA, 25 bp, Homo sapien
ccagatattctggatcacagccaaa

SEQ ID NO: 4869929 - DNA, 25 bp, Homo sapien
ttctggatcacagccaaatgctgtg

SEQ ID NO: 4869930 - DNA, 25 bp, Homo sapien
gaagcaagctcaatgtgtccactgt

SEQ ID NO: 4869931 - DNA, 25 bp, Homo sapien
tgaagcaagctcaatgtgtccactg

SEQ ID NO: 4869932 - DNA, 25 bp, Homo sapien
gcctgaagcaagctcaatgtgtcca

SEQ ID NO: 4869933 - DNA, 25 bp, Homo sapien
cctgaagcaagctcaatgtgtccac

SEQ ID NO: 4869934 - DNA, 25 bp, Homo sapien
agtctgatgtgtgccattgctacgg

SEQ ID NO: 4869935 - DNA, 25 bp, Homo sapien
ccgtcacgttgttagaagctgggaa

SEQ ID NO: 4869936 - DNA, 25 bp, Homo sapien
attgctacggaaccccactgaaggt

SEQ ID NO: 4869937 - DNA, 25 bp, Homo sapien
ggagtgacctggtaccttagtctga

SEQ ID NO: 4869938 - DNA, 25 bp, Homo sapien
tccagccttccaaggtttcatcttt

SEQ ID NO: 4869939 - DNA, 25 bp, Homo sapien
tgtggataattaacatagtcgccct

SEQ ID NO: 4869940 - DNA, 25 bp, Homo sapien
tagcatcaggttttgttaattggag

SEQ ID NO: 4869941 - DNA, 25 bp, Homo sapien
atctaacttaagctttaaggcacag

SEQ ID NO: 4869942 - DNA, 25 bp, Homo sapien
tctagaaatgggactctcagttcaa

SEQ ID NO: 4869943 - DNA, 25 bp, Homo sapien
ctagaaatgggactctcagttcaag

SEQ ID NO: 4869944 - DNA, 25 bp, Homo sapien
gaagttatttgatcactgaaggctc

SEQ ID NO: 4869945 - DNA, 25 bp, Homo sapien
tcttaaaccaggaattcttaactga

SEQ ID NO: 4869946 - DNA, 25 bp, Homo sapien
ctgatgttcaatgtattcctgtaaa

SEQ ID NO: 4869947 - DNA, 25 bp, Homo sapien
caatgtattcctgtaaaatcttaaa

SEQ ID NO: 4869948 - DNA, 25 bp, Homo sapien
gcatttgccatcattgcatcatcaa

SEQ ID NO: 4869949 - DNA, 25 bp, Homo sapien
tctgggctgcatttgccatcattgc

SEQ ID NO: 4869950 - DNA, 25 bp, Homo sapien
taggaatattgaagggaaatttctg

SEQ ID NO: 4869951 - DNA, 25 bp, Homo sapien
ccttctttgcttttaggaatattga

SEQ ID NO: 4869952 - DNA, 25 bp, Homo sapien
agaacaaagtttatcatattttaag

SEQ ID NO: 4869953 - DNA, 25 bp, Homo sapien
tagagaacaaagtttatcatatttt

SEQ ID NO: 4869954 - DNA, 25 bp, Homo sapien
catcctgttctggggttaaacttag

SEQ ID NO: 4869955 - DNA, 25 bp, Homo sapien
gagaacaaagtttatcatattttaa

SEQ ID NO: 4869956 - DNA, 25 bp, Homo sapien
ttgccagcgtctgcaaagaacaatc

SEQ ID NO: 4869957 - DNA, 25 bp, Homo sapien
tcccaggatgtctcttgccagcgtc

SEQ ID NO: 4869958 - DNA, 25 bp, Homo sapien
cccaggatgtctcttgccagcgtct

SEQ ID NO: 4869959 - DNA, 25 bp, Homo sapien
aagaccagagtgattccatagagta

SEQ ID NO: 4869960 - DNA, 25 bp, Homo sapien
cacaataatcagcacctctagtgct

SEQ ID NO: 4869961 - DNA, 25 bp, Homo sapien
tccatagagtagaagaaatggagag

SEQ ID NO: 4869962 - DNA, 25 bp, Homo sapien
taatcagcacctctagtgctatctt

SEQ ID NO: 4869963 - DNA, 25 bp, Homo sapien
acactatgttggataggagtggcaa

SEQ ID NO: 4869964 - DNA, 25 bp, Homo sapien
cactatgttggataggagtggcaag

SEQ ID NO: 4869965 - DNA, 25 bp, Homo sapien
ttctttatgctttctaggacaaatt

SEQ ID NO: 4869966 - DNA, 25 bp, Homo sapien
ttttccagtttcctcaggcggggca

SEQ ID NO: 4869967 - DNA, 25 bp, Homo sapien
aggacaaattcatggctttttccag

SEQ ID NO: 4869968 - DNA, 25 bp, Homo sapien
caggcggggcacttgtaaactccaa

SEQ ID NO: 4869969 - DNA, 25 bp, Homo sapien
caggtttagctatgggtagttgaca

SEQ ID NO: 4869970 - DNA, 25 bp, Homo sapien
tatgttcagtaaaggttgagcataa

SEQ ID NO: 4869971 - DNA, 25 bp, Homo sapien
taaaggttgagcataactcaaaagc

SEQ ID NO: 4869972 - DNA, 25 bp, Homo sapien
catgtattacattgacaggtttagc

SEQ ID NO: 4869973 - DNA, 25 bp, Homo sapien
tgtatagtaaaatctgagaacaacc

SEQ ID NO: 4869974 - DNA, 25 bp, Homo sapien
atagtaaaatctgagaacaacctac

SEQ ID NO: 4869975 - DNA, 25 bp, Homo sapien
gtatagtaaaatctgagaacaacct

SEQ ID NO: 4869976 - DNA, 25 bp, Homo sapien
ctgtatagtaaaatctgagaacaac

SEQ ID NO: 4869977 - DNA, 25 bp, Homo sapien
gatctactagtaacgtttgagaact

SEQ ID NO: 4869978 - DNA, 25 bp, Homo sapien
attttcttatgatctactagtaacg

SEQ ID NO: 4869979 - DNA, 25 bp, Homo sapien
tcttatgatctactagtaacgtttg

SEQ ID NO: 4869980 - DNA, 25 bp, Homo sapien
cttatgattaataaggtctgaaaaa

SEQ ID NO: 4869981 - DNA, 25 bp, Homo sapien
aggccattgcacagtgcccacactg

SEQ ID NO: 4869982 - DNA, 25 bp, Homo sapien
tattgcctgcgcttcaaaaggctgg

SEQ ID NO: 4869983 - DNA, 25 bp, Homo sapien
ccaggtattgcctgcgcttcaaaag

SEQ ID NO: 4869984 - DNA, 25 bp, Homo sapien
atctctgggctgagtaccgtgccct

SEQ ID NO: 4869985 - DNA, 25 bp, Homo sapien
ctgaccacggtatgcttcttcttca

SEQ ID NO: 4869986 - DNA, 25 bp, Homo sapien
ccacggtatgcttcttcttcatcat

SEQ ID NO: 4869987 - DNA, 25 bp, Homo sapien
gaccacggtatgcttcttcttcatc

SEQ ID NO: 4869988 - DNA, 25 bp, Homo sapien
tgaccacggtatgcttcttcttcat

SEQ ID NO: 4869989 - DNA, 25 bp, Homo sapien
tgaagccagaaagtgatgacagaat

SEQ ID NO: 4869990 - DNA, 25 bp, Homo sapien
ccagaaagtgatgacagaatttaag

SEQ ID NO: 4869991 - DNA, 25 bp, Homo sapien
aagccagaaagtgatgacagaattt

SEQ ID NO: 4869992 - DNA, 25 bp, Homo sapien
gccagaaagtgatgacagaatttaa

SEQ ID NO: 4869993 - DNA, 25 bp, Homo sapien
gcacatttgtctaccttcccagttg

SEQ ID NO: 4869994 - DNA, 25 bp, Homo sapien
ggaaattgtttccatcagacctact

SEQ ID NO: 4869995 - DNA, 25 bp, Homo sapien
tactcatctccctttcataggtttt

SEQ ID NO: 4869996 - DNA, 25 bp, Homo sapien
gatgaggagttatactatgctgccc

SEQ ID NO: 4869997 - DNA, 25 bp, Homo sapien
tggctgctgagctcatcaatatgta

SEQ ID NO: 4869998 - DNA, 25 bp, Homo sapien
gctgctgagctcatcaatatgtaaa

SEQ ID NO: 4869999 - DNA, 25 bp, Homo sapien
ggctgctgagctcatcaatatgtaa

SEQ ID NO: 4870000 - DNA, 25 bp, Homo sapien
gtgctacttattacaccatgtcgta

SEQ ID NO: 4870001 - DNA, 25 bp, Homo sapien
tgctacttattacaccatgtcgtaa

SEQ ID NO: 4870002 - DNA, 25 bp, Homo sapien
tgtgctacttattacaccatgtcgt

SEQ ID NO: 4870003 - DNA, 25 bp, Homo sapien
ctgtgctacttattacaccatgtcg

SEQ ID NO: 4870004 - DNA, 25 bp, Homo sapien
gcatatgtgctgccgaagtgagcat

SEQ ID NO: 4870005 - DNA, 25 bp, Homo sapien
gtatgtttccagttttagcatatgt

SEQ ID NO: 4870006 - DNA, 25 bp, Homo sapien
tctgtatgtttccagttttagcata

SEQ ID NO: 4870007 - DNA, 25 bp, Homo sapien
agcatatgtgctgccgaagtgagca

SEQ ID NO: 4870008 - DNA, 25 bp, Homo sapien
tgccgaatcagctgtagacgaactc

SEQ ID NO: 4870009 - DNA, 25 bp, Homo sapien
catcgcggacgccctggtacctgcc

SEQ ID NO: 4870010 - DNA, 25 bp, Homo sapien
ctggtacctgccgaatcagctgtag

SEQ ID NO: 4870011 - DNA, 25 bp, Homo sapien
cagctgtagacgaactcggatttga

SEQ ID NO: 4870012 - DNA, 25 bp, Homo sapien
tcatcatcctgcttgggagtactaa

SEQ ID NO: 4870013 - DNA, 25 bp, Homo sapien
ttatcaacatggatatcccctacta

SEQ ID NO: 4870014 - DNA, 25 bp, Homo sapien
taatccaccaacctccttgaaatca

SEQ ID NO: 4870015 - DNA, 25 bp, Homo sapien
tcaagaaatcccttatcaacatgga

SEQ ID NO: 4870016 - DNA, 25 bp, Homo sapien
agcattcccacttcatcgtcaacaa

SEQ ID NO: 4870017 - DNA, 25 bp, Homo sapien
cacttcatcgtcaacaaccaaagct

SEQ ID NO: 4870018 - DNA, 25 bp, Homo sapien
ggaaaaagcattcccacttcatcgt

SEQ ID NO: 4870019 - DNA, 25 bp, Homo sapien
acttcatcgtcaacaaccaaagctg

SEQ ID NO: 4870020 - DNA, 25 bp, Homo sapien
gtatctatcatgtacttctctacca

SEQ ID NO: 4870021 - DNA, 25 bp, Homo sapien
ggcagccagtccaataatcttttat

SEQ ID NO: 4870022 - DNA, 25 bp, Homo sapien
tgccatcagacagacagtatctatc

SEQ ID NO: 4870023 - DNA, 25 bp, Homo sapien
ttttattgccatcagacagacagta

SEQ ID NO: 4870024 - DNA, 25 bp, Homo sapien
atatcattctgaggccctacaggaa

SEQ ID NO: 4870025 - DNA, 25 bp, Homo sapien
gaggccctacaggaattacaaatct

SEQ ID NO: 4870026 - DNA, 25 bp, Homo sapien
tatattggaactgacattgtacaac

SEQ ID NO: 4870027 - DNA, 25 bp, Homo sapien
gacattgtacaacgaatctgaggca

SEQ ID NO: 4870028 - DNA, 25 bp, Homo sapien
cccacatgaactataaaaatgacta

SEQ ID NO: 4870029 - DNA, 25 bp, Homo sapien
tattcccacatgaactataaaaatg

SEQ ID NO: 4870030 - DNA, 25 bp, Homo sapien
ttcccacatgaactataaaaatgac

SEQ ID NO: 4870031 - DNA, 25 bp, Homo sapien
catttttgtactacatttataagaa

SEQ ID NO: 4870032 - DNA, 25 bp, Homo sapien
catatcaaaccgctctctgtgggaa

SEQ ID NO: 4870033 - DNA, 25 bp, Homo sapien
gtgacatatcaaaccgctctctgtg

SEQ ID NO: 4870034 - DNA, 25 bp, Homo sapien
tggtttcagtgacatatcaaaccgc

SEQ ID NO: 4870035 - DNA, 25 bp, Homo sapien
caaaccgctctctgtgggaaggact

SEQ ID NO: 4870036 - DNA, 25 bp, Homo sapien
catatgagttgtaattaggcttttg

SEQ ID NO: 4870037 - DNA, 25 bp, Homo sapien
tccaggcatatgagttgtaattagg

SEQ ID NO: 4870038 - DNA, 25 bp, Homo sapien
tgagttgtaattaggcttttgttag

SEQ ID NO: 4870039 - DNA, 25 bp, Homo sapien
caggcatatgagttgtaattaggct

SEQ ID NO: 4870040 - DNA, 25 bp, Homo sapien
ggctttgcaatatgttactatcatt

SEQ ID NO: 4870041 - DNA, 25 bp, Homo sapien
ctttgcaatatgttactatcattcc

SEQ ID NO: 4870042 - DNA, 25 bp, Homo sapien
tctggctttgcaatatgttactatc

SEQ ID NO: 4870043 - DNA, 25 bp, Homo sapien
ctggctttgcaatatgttactatca

SEQ ID NO: 4870044 - DNA, 25 bp, Homo sapien
tcccaatataacttggaccatcatg

SEQ ID NO: 4870045 - DNA, 25 bp, Homo sapien
cccaatataacttggaccatcatgg

SEQ ID NO: 4870046 - DNA, 25 bp, Homo sapien
ctattgtcctaagcttagggatgac

SEQ ID NO: 4870047 - DNA, 25 bp, Homo sapien
taagcttagggatgacaggcaaaat

SEQ ID NO: 4870048 - DNA, 25 bp, Homo sapien
agtcacaatcgcacctgtggcccga

SEQ ID NO: 4870049 - DNA, 25 bp, Homo sapien
tgccgggccttgttatgaaactgtc

SEQ ID NO: 4870050 - DNA, 25 bp, Homo sapien
cacctgggtgtgtaattgagagtca

SEQ ID NO: 4870051 - DNA, 25 bp, Homo sapien
tagactcagtactgcaacagtgggc

SEQ ID NO: 4870052 - DNA, 25 bp, Homo sapien
agatgtcacaatctttcttgtgggc

SEQ ID NO: 4870053 - DNA, 25 bp, Homo sapien
tgtcacaatctttcttgtgggcagg

SEQ ID NO: 4870054 - DNA, 25 bp, Homo sapien
tgagatgtcacaatctttcttgtgg

SEQ ID NO: 4870055 - DNA, 25 bp, Homo sapien
cacaatctttcttgtgggcaggacc

SEQ ID NO: 4870056 - DNA, 25 bp, Homo sapien
cacaatttctttggtgagcaggacc

SEQ ID NO: 4870057 - DNA, 25 bp, Homo sapien
tcacaatttctttggtgagcaggac

SEQ ID NO: 4870058 - DNA, 25 bp, Homo sapien
gtcacaatttctttggtgagcagga

SEQ ID NO: 4870059 - DNA, 25 bp, Homo sapien
gaaaaagatgagagtcactccacct

SEQ ID NO: 4870060 - DNA, 25 bp, Homo sapien
ccaagctggctatatacggggtaga

SEQ ID NO: 4870061 - DNA, 25 bp, Homo sapien
tagactcaaatagtaggtcaccaag

SEQ ID NO: 4870062 - DNA, 25 bp, Homo sapien
ctgggtatagactcaaatagtaggt

SEQ ID NO: 4870063 - DNA, 25 bp, Homo sapien
atattgtttaggtgtttgttccaca

SEQ ID NO: 4870064 - DNA, 25 bp, Homo sapien
tggttgatggtcccagtgatatata

SEQ ID NO: 4870065 - DNA, 25 bp, Homo sapien
ggttgatggtcccagtgatatataa

SEQ ID NO: 4870066 - DNA, 25 bp, Homo sapien
tatattgtttaggtgtttgttccac

SEQ ID NO: 4870067 - DNA, 25 bp, Homo sapien
ggagaatcacatcgtctgtgtgcag

SEQ ID NO: 4870068 - DNA, 25 bp, Homo sapien
catgacgggcctaggtatacgacac

SEQ ID NO: 4870069 - DNA, 25 bp, Homo sapien
acaatgcactgtaagtgcagggcca

SEQ ID NO: 4870070 - DNA, 25 bp, Homo sapien
gactgacatcacttacatgacgggc

SEQ ID NO: 4870071 - DNA, 25 bp, Homo sapien
gcttatgtgaagtaccacggctgga

SEQ ID NO: 4870072 - DNA, 25 bp, Homo sapien
gcaattggcctagatacatgtcaca

SEQ ID NO: 4870073 - DNA, 25 bp, Homo sapien
tgtcacaatccacctagtacgcagg

SEQ ID NO: 4870074 - DNA, 25 bp, Homo sapien
catgacctacatggttgcgggtcca

SEQ ID NO: 4870075 - DNA, 25 bp, Homo sapien
cagacatacgtcttgttattaggct

SEQ ID NO: 4870076 - DNA, 25 bp, Homo sapien
catcctgtgcatatcggggctccag

SEQ ID NO: 4870077 - DNA, 25 bp, Homo sapien
gatacggtctcagttatatggcaca

SEQ ID NO: 4870078 - DNA, 25 bp, Homo sapien
ttattaggcttttgatacggtctca

SEQ ID NO: 4870079 - DNA, 25 bp, Homo sapien
ctgggcttgcaatatgtcactatcc

SEQ ID NO: 4870080 - DNA, 25 bp, Homo sapien
gggcttgcaatatgtcactatcctt

SEQ ID NO: 4870081 - DNA, 25 bp, Homo sapien
gcttgcaatatgtcactatccttcc

SEQ ID NO: 4870082 - DNA, 25 bp, Homo sapien
ttcctttgtgtggggcccattccag

SEQ ID NO: 4870083 - DNA, 25 bp, Homo sapien
ttcacatcagctgggcgctggtctc

SEQ ID NO: 4870084 - DNA, 25 bp, Homo sapien
aaagtgccctcgattccattgccaa

SEQ ID NO: 4870085 - DNA, 25 bp, Homo sapien
ccattgccaaatgaggtgttataca

SEQ ID NO: 4870086 - DNA, 25 bp, Homo sapien
tatgtaatggagctagataaaagcc

SEQ ID NO: 4870087 - DNA, 25 bp, Homo sapien
ggcaattggcctgtatatatgtcac

SEQ ID NO: 4870088 - DNA, 25 bp, Homo sapien
caatatgcctcaatctctgtgctgg

SEQ ID NO: 4870089 - DNA, 25 bp, Homo sapien
cctgtatatatgtcacaagggtccc

SEQ ID NO: 4870090 - DNA, 25 bp, Homo sapien
ccctgtgtgcaggatcaaggcagga

SEQ ID NO: 4870091 - DNA, 25 bp, Homo sapien
catgtcctggctctaggtaaaagag

SEQ ID NO: 4870092 - DNA, 25 bp, Homo sapien
ctaggtaaaagagtcattattaggc

SEQ ID NO: 4870093 - DNA, 25 bp, Homo sapien
ggtaaaagagtcattattaggccat

SEQ ID NO: 4870094 - DNA, 25 bp, Homo sapien
aaagagtcattattaggccattgat

SEQ ID NO: 4870095 - DNA, 25 bp, Homo sapien
tgtttggccctgttacgacactccc

SEQ ID NO: 4870096 - DNA, 25 bp, Homo sapien
caaaacttggttgctagctctagct

SEQ ID NO: 4870097 - DNA, 25 bp, Homo sapien
cataatgccccttgtggagagtgtc

SEQ ID NO: 4870098 - DNA, 25 bp, Homo sapien
caatgccttctgttgaaacggccca

SEQ ID NO: 4870099 - DNA, 25 bp, Homo sapien
tcagagatatatcccaatgtcccca

SEQ ID NO: 4870100 - DNA, 25 bp, Homo sapien
taatcccccaattgtaaagatcagg

SEQ ID NO: 4870101 - DNA, 25 bp, Homo sapien
caatctaagatgtgggcagaaacca

SEQ ID NO: 4870102 - DNA, 25 bp, Homo sapien
ggagagtcatctcacaaaggtgctt

SEQ ID NO: 4870103 - DNA, 25 bp, Homo sapien
aaccaaggattgtgttttatattgc

SEQ ID NO: 4870104 - DNA, 25 bp, Homo sapien
agaaccaaggattgtgttttatatt

SEQ ID NO: 4870105 - DNA, 25 bp, Homo sapien
gaaccaaggattgtgttttatattg

SEQ ID NO: 4870106 - DNA, 25 bp, Homo sapien
aagagtaacatcagctgtgtgcctg

SEQ ID NO: 4870107 - DNA, 25 bp, Homo sapien
tattcatggcccgttccagagagga

SEQ ID NO: 4870108 - DNA, 25 bp, Homo sapien
gcatggctctggcaaaagagtaaca

SEQ ID NO: 4870109 - DNA, 25 bp, Homo sapien
gcctggcctagaaatatgtcactgt

SEQ ID NO: 4870110 - DNA, 25 bp, Homo sapien
tgtgggcaggacctaagcaggagag

SEQ ID NO: 4870111 - DNA, 25 bp, Homo sapien
taggttttgcactcagtgatatgtc

SEQ ID NO: 4870112 - DNA, 25 bp, Homo sapien
gatgctacatccagcgatgtcacaa

SEQ ID NO: 4870113 - DNA, 25 bp, Homo sapien
gtcacatttcgtagatgctacatcc

SEQ ID NO: 4870114 - DNA, 25 bp, Homo sapien
ttagttccagaactaaggagttcag

SEQ ID NO: 4870115 - DNA, 25 bp, Homo sapien
agttccagaactaaggagttcagca

SEQ ID NO: 4870116 - DNA, 25 bp, Homo sapien
gccaactggcattccggagtccaga

SEQ ID NO: 4870117 - DNA, 25 bp, Homo sapien
ccaactggcattccggagtccagaa

SEQ ID NO: 4870118 - DNA, 25 bp, Homo sapien
catccaatggaaattaagcagaagg

SEQ ID NO: 4870119 - DNA, 25 bp, Homo sapien
tgttcacttcctagagaccaatggg

SEQ ID NO: 4870120 - DNA, 25 bp, Homo sapien
tagggacttcttggtgctccaggaa

SEQ ID NO: 4870121 - DNA, 25 bp, Homo sapien
gctccaggaaggctctattcagcac

SEQ ID NO: 4870122 - DNA, 25 bp, Homo sapien
tctgtgggagaatcatgggttccca

SEQ ID NO: 4870123 - DNA, 25 bp, Homo sapien
tagctacgtttttggagaagcctgg

SEQ ID NO: 4870124 - DNA, 25 bp, Homo sapien
tatgtacaggtgtgtaacctcctgc

SEQ ID NO: 4870125 - DNA, 25 bp, Homo sapien
tgagggtatctcctcacctgagagt

SEQ ID NO: 4870126 - DNA, 25 bp, Homo sapien
tatgattaccattctcacacatgaa

SEQ ID NO: 4870127 - DNA, 25 bp, Homo sapien
agcagttgaaggttgaaataattac

SEQ ID NO: 4870128 - DNA, 25 bp, Homo sapien
tacaccaagctgatatgattaccat

SEQ ID NO: 4870129 - DNA, 25 bp, Homo sapien
tgaacagggtctaggaatttggtac

SEQ ID NO: 4870130 - DNA, 25 bp, Homo sapien
taagccgtgtgcaagttggagaccc

SEQ ID NO: 4870131 - DNA, 25 bp, Homo sapien
cagggaagcccatatgtaactctca

SEQ ID NO: 4870132 - DNA, 25 bp, Homo sapien
caggctcaatgtctgggaatccagt

SEQ ID NO: 4870133 - DNA, 25 bp, Homo sapien
caagggcagaagtgtgtcctaactc

SEQ ID NO: 4870134 - DNA, 25 bp, Homo sapien
tagtaagaggctggcacaagcagac

SEQ ID NO: 4870135 - DNA, 25 bp, Homo sapien
tagtcctaaggattaaagcccagag

SEQ ID NO: 4870136 - DNA, 25 bp, Homo sapien
gacctctgctagaagggctgacact

SEQ ID NO: 4870137 - DNA, 25 bp, Homo sapien
gaacctggaaactaggctgaacctg

SEQ ID NO: 4870138 - DNA, 25 bp, Homo sapien
ctgagatataaacaagctgcctcat

SEQ ID NO: 4870139 - DNA, 25 bp, Homo sapien
actgagatataaacaagctgcctca

SEQ ID NO: 4870140 - DNA, 25 bp, Homo sapien
aacttaacgtaatggctgtcttctc

SEQ ID NO: 4870141 - DNA, 25 bp, Homo sapien
tataacagaacttaacgtaatggct

SEQ ID NO: 4870142 - DNA, 25 bp, Homo sapien
ctctataacagaacttaacgtaatg

SEQ ID NO: 4870143 - DNA, 25 bp, Homo sapien
tctccttagggggtttatcagctgt

SEQ ID NO: 4870144 - DNA, 25 bp, Homo sapien
gctgggcatgtgcaggctcaaactc

SEQ ID NO: 4870145 - DNA, 25 bp, Homo sapien
tgagggcagacatccgcatgggttc

SEQ ID NO: 4870146 - DNA, 25 bp, Homo sapien
caagagaaggcctccgcagctgaca

SEQ ID NO: 4870147 - DNA, 25 bp, Homo sapien
catccgcatgggttctccatgtcca

SEQ ID NO: 4870148 - DNA, 25 bp, Homo sapien
agcccagttcagagcagagttgcag

SEQ ID NO: 4870149 - DNA, 25 bp, Homo sapien
ctcctggccacagcaaaggatggtg

SEQ ID NO: 4870150 - DNA, 25 bp, Homo sapien
gccctggagcccagttcagagcaga

SEQ ID NO: 4870151 - DNA, 25 bp, Homo sapien
gtcaccccaacatcaccatggcttt

SEQ ID NO: 4870152 - DNA, 25 bp, Homo sapien
atcctggtgggcaccctactgggga

SEQ ID NO: 4870153 - DNA, 25 bp, Homo sapien
gatggcacagctgacgtggtgggac

SEQ ID NO: 4870154 - DNA, 25 bp, Homo sapien
gctgctgcccttgcaacacctgggg

SEQ ID NO: 4870155 - DNA, 25 bp, Homo sapien
ggcaccctactggggagatggcaca

SEQ ID NO: 4870156 - DNA, 25 bp, Homo sapien
tgtggagatagggagcatccagggg

SEQ ID NO: 4870157 - DNA, 25 bp, Homo sapien
gtggagatagggagcatccaggggg

SEQ ID NO: 4870158 - DNA, 25 bp, Homo sapien
tggagatagggagcatccaggggga

SEQ ID NO: 4870159 - DNA, 25 bp, Homo sapien
ggagatagggagcatccagggggac

SEQ ID NO: 4870160 - DNA, 25 bp, Homo sapien
ttcagctgaattggcacctggggga

SEQ ID NO: 4870161 - DNA, 25 bp, Homo sapien
cagggatagtctttccaggcctagg

SEQ ID NO: 4870162 - DNA, 25 bp, Homo sapien
caggcctagggctatcacagcaggg

SEQ ID NO: 4870163 - DNA, 25 bp, Homo sapien
agtgtggatgagttggctggtcctg

SEQ ID NO: 4870164 - DNA, 25 bp, Homo sapien
ctaagtagcaggtgcaagggcagcc

SEQ ID NO: 4870165 - DNA, 25 bp, Homo sapien
aagtagcaggtgcaagggcagccag

SEQ ID NO: 4870166 - DNA, 25 bp, Homo sapien
taagtagcaggtgcaagggcagcca

SEQ ID NO: 4870167 - DNA, 25 bp, Homo sapien
caggagcgacctctgcatggaaact

SEQ ID NO: 4870168 - DNA, 25 bp, Homo sapien
gagcgacctctgcatggaaactctc

SEQ ID NO: 4870169 - DNA, 25 bp, Homo sapien
gaaatggggcctaggctgtgggtct

SEQ ID NO: 4870170 - DNA, 25 bp, Homo sapien
tgtgggtctttgtctgtggtgaggc

SEQ ID NO: 4870171 - DNA, 25 bp, Homo sapien
accaccccgtgagccccgtgctctg

SEQ ID NO: 4870172 - DNA, 25 bp, Homo sapien
ctccggagaggcttgagtgcaccag

SEQ ID NO: 4870173 - DNA, 25 bp, Homo sapien
ccgcctccggagaggcttgagtgca

SEQ ID NO: 4870174 - DNA, 25 bp, Homo sapien
cggccgcctccggagaggcttgagt

SEQ ID NO: 4870175 - DNA, 25 bp, Homo sapien
tgcgccggcgatcaccctggaggcc

SEQ ID NO: 4870176 - DNA, 25 bp, Homo sapien
cctgcgcccagaaaggcagcggctc

SEQ ID NO: 4870177 - DNA, 25 bp, Homo sapien
agcctccctgcaccgcagtcgctgg

SEQ ID NO: 4870178 - DNA, 25 bp, Homo sapien
tcctcctgcagatacttcgcagcct

SEQ ID NO: 4870179 - DNA, 25 bp, Homo sapien
ggttggttgtgaccatgaaagttca

SEQ ID NO: 4870180 - DNA, 25 bp, Homo sapien
tgggccacaggaccgggtccactgc

SEQ ID NO: 4870181 - DNA, 25 bp, Homo sapien
catgaaagttcagggcttccggcca

SEQ ID NO: 4870182 - DNA, 25 bp, Homo sapien
actgctccaatgtgggacgccggct

SEQ ID NO: 4870183 - DNA, 25 bp, Homo sapien
ttgagagacaccccagcatgctgat

SEQ ID NO: 4870184 - DNA, 25 bp, Homo sapien
tttgagagacaccccagcatgctga

SEQ ID NO: 4870185 - DNA, 25 bp, Homo sapien
tgagagacaccccagcatgctgatt

SEQ ID NO: 4870186 - DNA, 25 bp, Homo sapien
ctttgagagacaccccagcatgctg

SEQ ID NO: 4870187 - DNA, 25 bp, Homo sapien
acagccctggtagcggagtcgcctg

SEQ ID NO: 4870188 - DNA, 25 bp, Homo sapien
gggaagcccgttggatctctcttct

SEQ ID NO: 4870189 - DNA, 25 bp, Homo sapien
tggctcccgtgattgtcctacagtg

SEQ ID NO: 4870190 - DNA, 25 bp, Homo sapien
cattgccttgctctcggttctgtgc

SEQ ID NO: 4870191 - DNA, 25 bp, Homo sapien
gatctctgtgcagttgaaccttccc

SEQ ID NO: 4870192 - DNA, 25 bp, Homo sapien
ccccagcacgccattcccagacttt

SEQ ID NO: 4870193 - DNA, 25 bp, Homo sapien
cagcacgccattcccagacttttgg

SEQ ID NO: 4870194 - DNA, 25 bp, Homo sapien
cttcccccagcacgccattcccaga

SEQ ID NO: 4870195 - DNA, 25 bp, Homo sapien
cccctcctgtgataagaccccaagt

SEQ ID NO: 4870196 - DNA, 25 bp, Homo sapien
tggcccctcctgtgataagacccca

SEQ ID NO: 4870197 - DNA, 25 bp, Homo sapien
ctggcccctcctgtgataagacccc

SEQ ID NO: 4870198 - DNA, 25 bp, Homo sapien
taagaccccaagtgctcctcttggc

SEQ ID NO: 4870199 - DNA, 25 bp, Homo sapien
agatatagtagaggaccccaccgag

SEQ ID NO: 4870200 - DNA, 25 bp, Homo sapien
ctgcatggagctctgtagtgacaat

SEQ ID NO: 4870201 - DNA, 25 bp, Homo sapien
gcatggagctctgtagtgacaattc

SEQ ID NO: 4870202 - DNA, 25 bp, Homo sapien
ctgccctcgtggagggagatatagt

SEQ ID NO: 4870203 - DNA, 25 bp, Homo sapien
tcagtccccgagtgtggagtcctct

SEQ ID NO: 4870204 - DNA, 25 bp, Homo sapien
caaccttcttggctatgggcacgtc

SEQ ID NO: 4870205 - DNA, 25 bp, Homo sapien
cagtgcattgcacaggaggattctc

SEQ ID NO: 4870206 - DNA, 25 bp, Homo sapien
ggtaaacggtgctactactcatgct

SEQ ID NO: 4870207 - DNA, 25 bp, Homo sapien
tcactgtggtgtcgggaaaatggcc

SEQ ID NO: 4870208 - DNA, 25 bp, Homo sapien
cagatcaggttgttagcggagtaat

SEQ ID NO: 4870209 - DNA, 25 bp, Homo sapien
tcagatcaggttgttagcggagtaa

SEQ ID NO: 4870210 - DNA, 25 bp, Homo sapien
tcaggttgttagcggagtaatgatt

SEQ ID NO: 4870211 - DNA, 25 bp, Homo sapien
gatcaggttgttagcggagtaatga

SEQ ID NO: 4870212 - DNA, 25 bp, Homo sapien
gtgagctagagccacctgatcacta

SEQ ID NO: 4870213 - DNA, 25 bp, Homo sapien
tcttgaggagttgcaaaagtcccgt

SEQ ID NO: 4870214 - DNA, 25 bp, Homo sapien
gccagagacctaagccgacactggg

SEQ ID NO: 4870215 - DNA, 25 bp, Homo sapien
gcgggccccacactctcttgaggag

SEQ ID NO: 4870216 - DNA, 25 bp, Homo sapien
gtgagcaagctgtgctgccatataa

SEQ ID NO: 4870217 - DNA, 25 bp, Homo sapien
gaagtgagcaagctgtgctgccata

SEQ ID NO: 4870218 - DNA, 25 bp, Homo sapien
gcaagctgtgctgccatataaggcg

SEQ ID NO: 4870219 - DNA, 25 bp, Homo sapien
gctgtgctgccatataaggcgtcat

SEQ ID NO: 4870220 - DNA, 25 bp, Homo sapien
caccctgtgcttgtataatgcctct

SEQ ID NO: 4870221 - DNA, 25 bp, Homo sapien
gaattggcaccatggtaggtactga

SEQ ID NO: 4870222 - DNA, 25 bp, Homo sapien
aacattccaccacgcatatgatgag

SEQ ID NO: 4870223 - DNA, 25 bp, Homo sapien
taacctaaggcacacgatttcaccc

SEQ ID NO: 4870224 - DNA, 25 bp, Homo sapien
taaactgtgatctcggtattagacc

SEQ ID NO: 4870225 - DNA, 25 bp, Homo sapien
ggaggactgcgtctcaagaatcagc

SEQ ID NO: 4870226 - DNA, 25 bp, Homo sapien
gacaccgaagtctaggaagcctgtg

SEQ ID NO: 4870227 - DNA, 25 bp, Homo sapien
caatgaagctattatgacaccgaag

SEQ ID NO: 4870228 - DNA, 25 bp, Homo sapien
gttctgttccattagccagttggta

SEQ ID NO: 4870229 - DNA, 25 bp, Homo sapien
tctttgcaaagaccagtgtccagaa

SEQ ID NO: 4870230 - DNA, 25 bp, Homo sapien
tgttttattcttctactcgtggctg

SEQ ID NO: 4870231 - DNA, 25 bp, Homo sapien
tgttgaccgtgttgaagattacgtg

SEQ ID NO: 4870232 - DNA, 25 bp, Homo sapien
tcatcagcctgagctttatttccag

SEQ ID NO: 4870233 - DNA, 25 bp, Homo sapien
tatttctcaagccaataggctaatt

SEQ ID NO: 4870234 - DNA, 25 bp, Homo sapien
gccaataggctaatttgtggagctt

SEQ ID NO: 4870235 - DNA, 25 bp, Homo sapien
ttttcctgcctctctatgatggtag

SEQ ID NO: 4870236 - DNA, 25 bp, Homo sapien
cactgccacgtgcagtaacttgcca

SEQ ID NO: 4870237 - DNA, 25 bp, Homo sapien
tgcacacgtcggacactgccacgtg

SEQ ID NO: 4870238 - DNA, 25 bp, Homo sapien
aagcacgcgggttgcacacgtcgga

SEQ ID NO: 4870239 - DNA, 25 bp, Homo sapien
taacttgccatctgaggtacgccgc

SEQ ID NO: 4870240 - DNA, 25 bp, Homo sapien
tggccccagtcctgcttgtagacgc

SEQ ID NO: 4870241 - DNA, 25 bp, Homo sapien
tgtagacgccttttcccacgggctg

SEQ ID NO: 4870242 - DNA, 25 bp, Homo sapien
ggcacagcaccgccacgagtgtctt

SEQ ID NO: 4870243 - DNA, 25 bp, Homo sapien
agcatcctcaagtaccaggcgctct

SEQ ID NO: 4870244 - DNA, 25 bp, Homo sapien
catttgcagcgagttccgccaggct

SEQ ID NO: 4870245 - DNA, 25 bp, Homo sapien
agggcctggagaccgtgggcggctt

SEQ ID NO: 4870246 - DNA, 25 bp, Homo sapien
cttatgttccacgattttgaggcca

SEQ ID NO: 4870247 - DNA, 25 bp, Homo sapien
ccatttgcagcgagttccgccaggc

SEQ ID NO: 4870248 - DNA, 25 bp, Homo sapien
tgtctgcctgctcccgcttgtgttt

SEQ ID NO: 4870249 - DNA, 25 bp, Homo sapien
tgctcccgcttgtgtttgactgtca

SEQ ID NO: 4870250 - DNA, 25 bp, Homo sapien
acaacgctgcatgccagggacaccg

SEQ ID NO: 4870251 - DNA, 25 bp, Homo sapien
tgtcacaacgctgcatgccagggac

SEQ ID NO: 4870252 - DNA, 25 bp, Homo sapien
tacagatgatccatgacccatagct

SEQ ID NO: 4870253 - DNA, 25 bp, Homo sapien
tgatccatgacccatagctggtggg

SEQ ID NO: 4870254 - DNA, 25 bp, Homo sapien
tgagggtgccccatacagatgatcc

SEQ ID NO: 4870255 - DNA, 25 bp, Homo sapien
tctggcccctccttactcatgccaa

SEQ ID NO: 4870256 - DNA, 25 bp, Homo sapien
catgctagtcttgtctgggccttca

SEQ ID NO: 4870257 - DNA, 25 bp, Homo sapien
cactgtggacctgggtgttcgtggc

SEQ ID NO: 4870258 - DNA, 25 bp, Homo sapien
gacctgggtgttcgtggcccagaag

SEQ ID NO: 4870259 - DNA, 25 bp, Homo sapien
cactgctccaccatgctagtcttgt

SEQ ID NO: 4870260 - DNA, 25 bp, Homo sapien
cagcagcataggcagccaagactca

SEQ ID NO: 4870261 - DNA, 25 bp, Homo sapien
ccagcagcataggcagccaagactc

SEQ ID NO: 4870262 - DNA, 25 bp, Homo sapien
agcagcataggcagccaagactcag

SEQ ID NO: 4870263 - DNA, 25 bp, Homo sapien
gacaataattttccaggataaggac

SEQ ID NO: 4870264 - DNA, 25 bp, Homo sapien
tccagtttctcatggttatgatcaa

SEQ ID NO: 4870265 - DNA, 25 bp, Homo sapien
ggataaggacaagccagagcattct

SEQ ID NO: 4870266 - DNA, 25 bp, Homo sapien
tatgatcaaagctagacaatgactg

SEQ ID NO: 4870267 - DNA, 25 bp, Homo sapien
ccgccttgtacagggtgtcgcaaga

SEQ ID NO: 4870268 - DNA, 25 bp, Homo sapien
tggcgcttgcactggttcccatgca

SEQ ID NO: 4870269 - DNA, 25 bp, Homo sapien
cattttgtgtgagcagtgaagggaa

SEQ ID NO: 4870270 - DNA, 25 bp, Homo sapien
gtttttcagcgtcttgatgtccatg

SEQ ID NO: 4870271 - DNA, 25 bp, Homo sapien
cttgagcaatgaccccaagaagttg

SEQ ID NO: 4870272 - DNA, 25 bp, Homo sapien
ccaggtgagtgttatacacaagctc

SEQ ID NO: 4870273 - DNA, 25 bp, Homo sapien
atgaccccaagaagttgacagccag

SEQ ID NO: 4870274 - DNA, 25 bp, Homo sapien
ttgacagccaggtgagtgttataca

SEQ ID NO: 4870275 - DNA, 25 bp, Homo sapien
taatagaatttattcaaattgtgcc

SEQ ID NO: 4870276 - DNA, 25 bp, Homo sapien
ttaattggtaatagaatttattcaa

SEQ ID NO: 4870277 - DNA, 25 bp, Homo sapien
ttggtaatagaatttattcaaattg

SEQ ID NO: 4870278 - DNA, 25 bp, Homo sapien
gtaatagaatttattcaaattgtgc

SEQ ID NO: 4870279 - DNA, 25 bp, Homo sapien
tttaaaatctggattcccactgcac

SEQ ID NO: 4870280 - DNA, 25 bp, Homo sapien
gccgacgagtcgatgacctgaattt

SEQ ID NO: 4870281 - DNA, 25 bp, Homo sapien
taaaatctggattcccactgcacag

SEQ ID NO: 4870282 - DNA, 25 bp, Homo sapien
acaccgccatgacagtgccgacgag

SEQ ID NO: 4870283 - DNA, 25 bp, Homo sapien
ccaatcccacaaggccagtggtctt

SEQ ID NO: 4870284 - DNA, 25 bp, Homo sapien
agccaatcccacaaggccagtggtc

SEQ ID NO: 4870285 - DNA, 25 bp, Homo sapien
gccaatcccacaaggccagtggtct

SEQ ID NO: 4870286 - DNA, 25 bp, Homo sapien
tagcctctcgtgtggagtattgcat

SEQ ID NO: 4870287 - DNA, 25 bp, Homo sapien
tcttagcctctcgtgtggagtattg

SEQ ID NO: 4870288 - DNA, 25 bp, Homo sapien
tattcttagcctctcgtgtggagta

SEQ ID NO: 4870289 - DNA, 25 bp, Homo sapien
gcctctcgtgtggagtattgcatac

SEQ ID NO: 4870290 - DNA, 25 bp, Homo sapien
taattgactgccttgaagttggtct

SEQ ID NO: 4870291 - DNA, 25 bp, Homo sapien
acttctggttccgctttaaccatag

SEQ ID NO: 4870292 - DNA, 25 bp, Homo sapien
ttaaccatagccagcttctcatttc

SEQ ID NO: 4870293 - DNA, 25 bp, Homo sapien
ttcttctaattgactgccttgaagt

SEQ ID NO: 4870294 - DNA, 25 bp, Homo sapien
ggctcttccactgatgactcccatg

SEQ ID NO: 4870295 - DNA, 25 bp, Homo sapien
actgatgactcccatggtttccact

SEQ ID NO: 4870296 - DNA, 25 bp, Homo sapien
ggaggctcttccactgatgactccc

SEQ ID NO: 4870297 - DNA, 25 bp, Homo sapien
tcttccactgatgactcccatggtt

SEQ ID NO: 4870298 - DNA, 25 bp, Homo sapien
caacacaccaaagtcacttaataat

SEQ ID NO: 4870299 - DNA, 25 bp, Homo sapien
attacatcagtttcccatcaacaca

SEQ ID NO: 4870300 - DNA, 25 bp, Homo sapien
atttaattacatcagtttcccatca

SEQ ID NO: 4870301 - DNA, 25 bp, Homo sapien
cacaccaaagtcacttaataattac

SEQ ID NO: 4870302 - DNA, 25 bp, Homo sapien
tgattccactttgaacttatagtcg

SEQ ID NO: 4870303 - DNA, 25 bp, Homo sapien
gattccactttgaacttatagtcgt

SEQ ID NO: 4870304 - DNA, 25 bp, Homo sapien
cactttgaacttatagtcgtatgac

SEQ ID NO: 4870305 - DNA, 25 bp, Homo sapien
ttccactttgaacttatagtcgtat

SEQ ID NO: 4870306 - DNA, 25 bp, Homo sapien
cccttaatggtgcacatgggtgttc

SEQ ID NO: 4870307 - DNA, 25 bp, Homo sapien
gtcaccagttctaatttcacagcac

SEQ ID NO: 4870308 - DNA, 25 bp, Homo sapien
catgaggtggaaccatcctgcgttg

SEQ ID NO: 4870309 - DNA, 25 bp, Homo sapien
catcctgcgttgcacactgtgacca

SEQ ID NO: 4870310 - DNA, 25 bp, Homo sapien
gctggctgtggagacttggggagca

SEQ ID NO: 4870311 - DNA, 25 bp, Homo sapien
tcagtattttgtgccagggctccat

SEQ ID NO: 4870312 - DNA, 25 bp, Homo sapien
atggaggaatgaggagagggctggc

SEQ ID NO: 4870313 - DNA, 25 bp, Homo sapien
gctgtggagacttggggagcatcct

SEQ ID NO: 4870314 - DNA, 25 bp, Homo sapien
ttacctctgtggcccatccatggaa

SEQ ID NO: 4870315 - DNA, 25 bp, Homo sapien
attacctctgtggcccatccatgga

SEQ ID NO: 4870316 - DNA, 25 bp, Homo sapien
tacctctgtggcccatccatggaat

SEQ ID NO: 4870317 - DNA, 25 bp, Homo sapien
cattacctctgtggcccatccatgg

SEQ ID NO: 4870318 - DNA, 25 bp, Homo sapien
gagccagcaaatccctgcggtcccg

SEQ ID NO: 4870319 - DNA, 25 bp, Homo sapien
gcgagcctgtcctgcgcgttccctg

SEQ ID NO: 4870320 - DNA, 25 bp, Homo sapien
tgacagagggctagagtcgacaccc

SEQ ID NO: 4870321 - DNA, 25 bp, Homo sapien
tgcgcgggtcccaaggtctctgaca

SEQ ID NO: 4870322 - DNA, 25 bp, Homo sapien
ccaggacaggcggagggtgcacagt

SEQ ID NO: 4870323 - DNA, 25 bp, Homo sapien
gggttgacagatcagctgctgcggc

SEQ ID NO: 4870324 - DNA, 25 bp, Homo sapien
cacagtgacagtcacggaagcggat

SEQ ID NO: 4870325 - DNA, 25 bp, Homo sapien
gaagcggatgccatcacagtggtga

SEQ ID NO: 4870326 - DNA, 25 bp, Homo sapien
caggtgaggacccatgaacaacccg

SEQ ID NO: 4870327 - DNA, 25 bp, Homo sapien
ggtcagtccctgggtagccctcctg

SEQ ID NO: 4870328 - DNA, 25 bp, Homo sapien
tgaacaacccgtggtcagtccctgg

SEQ ID NO: 4870329 - DNA, 25 bp, Homo sapien
tgaggacccatgaacaacccgtggt

SEQ ID NO: 4870330 - DNA, 25 bp, Homo sapien
actcctcgcactccacatcctgcaa

SEQ ID NO: 4870331 - DNA, 25 bp, Homo sapien
cggggccactcctcgcactccacat

SEQ ID NO: 4870332 - DNA, 25 bp, Homo sapien
ttctaccttcaaattcgtcctctca

SEQ ID NO: 4870333 - DNA, 25 bp, Homo sapien
ggccactcctcgcactccacatcct

SEQ ID NO: 4870334 - DNA, 25 bp, Homo sapien
tgctgacattcaagacgaagtgaag

SEQ ID NO: 4870335 - DNA, 25 bp, Homo sapien
cattcaagacgaagtgaagcttggt

SEQ ID NO: 4870336 - DNA, 25 bp, Homo sapien
gcaacattcacatagaattatacaa

SEQ ID NO: 4870337 - DNA, 25 bp, Homo sapien
tattacataagcaacattcacatag

SEQ ID NO: 4870338 - DNA, 25 bp, Homo sapien
cccgttgaaaggattaggcagatgt

SEQ ID NO: 4870339 - DNA, 25 bp, Homo sapien
taggtcagagcctgctaagggttac

SEQ ID NO: 4870340 - DNA, 25 bp, Homo sapien
gcaataaaagatccttatgcttctt

SEQ ID NO: 4870341 - DNA, 25 bp, Homo sapien
cactgagaaatcacacgtgttcaca

SEQ ID NO: 4870342 - DNA, 25 bp, Homo sapien
ggatgacaaccaacgatattaagcg

SEQ ID NO: 4870343 - DNA, 25 bp, Homo sapien
cacaagttgaggtgtctggatgaca

SEQ ID NO: 4870344 - DNA, 25 bp, Homo sapien
ccatcatgatgatccgtgagaagga

SEQ ID NO: 4870345 - DNA, 25 bp, Homo sapien
catccacgatgatgaacaggtgtta

SEQ ID NO: 4870346 - DNA, 25 bp, Homo sapien
tctagctaagaggttgagggaaccc

SEQ ID NO: 4870347 - DNA, 25 bp, Homo sapien
ttccatgtcacactgaaagagcgct

SEQ ID NO: 4870348 - DNA, 25 bp, Homo sapien
gagaggcatcaagacagctacaggg

SEQ ID NO: 4870349 - DNA, 25 bp, Homo sapien
gagggaacccataccttagagcaaa

SEQ ID NO: 4870350 - DNA, 25 bp, Homo sapien
tgtgactattggagaaagttctaca

SEQ ID NO: 4870351 - DNA, 25 bp, Homo sapien
ttctgtggttataaactggtatgac

SEQ ID NO: 4870352 - DNA, 25 bp, Homo sapien
ctgtggttataaactggtatgacaa

SEQ ID NO: 4870353 - DNA, 25 bp, Homo sapien
tctgtggttataaactggtatgaca

SEQ ID NO: 4870354 - DNA, 25 bp, Homo sapien
gataggaggagaagcgcctgttcca

SEQ ID NO: 4870355 - DNA, 25 bp, Homo sapien
aggagaagcgcctgttccatggact

SEQ ID NO: 4870356 - DNA, 25 bp, Homo sapien
ctacggcataaatggataggaggag

SEQ ID NO: 4870357 - DNA, 25 bp, Homo sapien
cataaatggataggaggagaagcgc

SEQ ID NO: 4870358 - DNA, 25 bp, Homo sapien
ctcttggcctttgcggcatccagcc

SEQ ID NO: 4870359 - DNA, 25 bp, Homo sapien
tcttggcctttgcggcatccagcca

SEQ ID NO: 4870360 - DNA, 25 bp, Homo sapien
cctcttggcctttgcggcatccagc

SEQ ID NO: 4870361 - DNA, 25 bp, Homo sapien
ctactttcagcggaacagggaagag

SEQ ID NO: 4870362 - DNA, 25 bp, Homo sapien
ccagtcagtcacagggcatccagca

SEQ ID NO: 4870363 - DNA, 25 bp, Homo sapien
gagaagcaggccgttgagaaggtgt

SEQ ID NO: 4870364 - DNA, 25 bp, Homo sapien
gcaggccgttgagaaggtgtcagag

SEQ ID NO: 4870365 - DNA, 25 bp, Homo sapien
ccaaagtggcagttcaggctgaaat

SEQ ID NO: 4870366 - DNA, 25 bp, Homo sapien
taatcctattagtgatggaggagcc

SEQ ID NO: 4870367 - DNA, 25 bp, Homo sapien
caagaaagcaagctagctgaatgct

SEQ ID NO: 4870368 - DNA, 25 bp, Homo sapien
gctagctgaatgctgcgtgaagcct

SEQ ID NO: 4870369 - DNA, 25 bp, Homo sapien
ttggtgtctggtgtgggccttcctg

SEQ ID NO: 4870370 - DNA, 25 bp, Homo sapien
agggtctctgctgcaccttcagggc

SEQ ID NO: 4870371 - DNA, 25 bp, Homo sapien
tgcaccttcagggcagctctcttcc

SEQ ID NO: 4870372 - DNA, 25 bp, Homo sapien
aggagggtctctgctgcaccttcag

SEQ ID NO: 4870373 - DNA, 25 bp, Homo sapien
caccttcagggcagctctcttccat

SEQ ID NO: 4870374 - DNA, 25 bp, Homo sapien
atcacgttcgccgtggcgcacaggg

SEQ ID NO: 4870375 - DNA, 25 bp, Homo sapien
agacggtgcggcgtcgaccatagcc

SEQ ID NO: 4870376 - DNA, 25 bp, Homo sapien
gaaggccacaagtgtaactgggtcc

SEQ ID NO: 4870377 - DNA, 25 bp, Homo sapien
gggcggaagattgcattcctatcac

SEQ ID NO: 4870378 - DNA, 25 bp, Homo sapien
gggcatctccgggagcgccgcctga

SEQ ID NO: 4870379 - DNA, 25 bp, Homo sapien
gcatctccgggagcgccgcctgagc

SEQ ID NO: 4870380 - DNA, 25 bp, Homo sapien
agcgccgcctgagcgcaccgcctcc

SEQ ID NO: 4870381 - DNA, 25 bp, Homo sapien
cggctgccgcggggcatctccggga

SEQ ID NO: 4870382 - DNA, 25 bp, Homo sapien
gaaaaaacaaattggacctcatcaa

SEQ ID NO: 4870383 - DNA, 25 bp, Homo sapien
acatttgtacttcaataagaaaatg

SEQ ID NO: 4870384 - DNA, 25 bp, Homo sapien
tttaggcaatgatttattagacatg

SEQ ID NO: 4870385 - DNA, 25 bp, Homo sapien
catgacaccgaaaagcacaagaaac

SEQ ID NO: 4870386 - DNA, 25 bp, Homo sapien
gttcatgtgcttctattgaattcct

SEQ ID NO: 4870387 - DNA, 25 bp, Homo sapien
cctttataatgtccatgtcttgctc

SEQ ID NO: 4870388 - DNA, 25 bp, Homo sapien
ctttataatgtccatgtcttgctct

SEQ ID NO: 4870389 - DNA, 25 bp, Homo sapien
ttataatgtccatgtcttgctctat

SEQ ID NO: 4870390 - DNA, 25 bp, Homo sapien
ccagcagccttatagagttatccat

SEQ ID NO: 4870391 - DNA, 25 bp, Homo sapien
ttctccagcagccttatagagttat

SEQ ID NO: 4870392 - DNA, 25 bp, Homo sapien
tctccagcagccttatagagttatc

SEQ ID NO: 4870393 - DNA, 25 bp, Homo sapien
tccagcagccttatagagttatcca

SEQ ID NO: 4870394 - DNA, 25 bp, Homo sapien
gctgatcatgagacacagcaatcag

SEQ ID NO: 4870395 - DNA, 25 bp, Homo sapien
cagtggtttgaagctgtaaaaagga

SEQ ID NO: 4870396 - DNA, 25 bp, Homo sapien
cctccactttaaccagttctatcat

SEQ ID NO: 4870397 - DNA, 25 bp, Homo sapien
gtgctgatcatgagacacagcaatc

SEQ ID NO: 4870398 - DNA, 25 bp, Homo sapien
gctgaggaagaaactcataatgcct

SEQ ID NO: 4870399 - DNA, 25 bp, Homo sapien
aagaagatgtgaagagatgagagca

SEQ ID NO: 4870400 - DNA, 25 bp, Homo sapien
gactcccttctggacccgtcactga

SEQ ID NO: 4870401 - DNA, 25 bp, Homo sapien
tgggccacctgaaactggtcaccct

SEQ ID NO: 4870402 - DNA, 25 bp, Homo sapien
gagaaagtactggaagtggaatcca

SEQ ID NO: 4870403 - DNA, 25 bp, Homo sapien
ctggaaaggatgggcattctgtatt

SEQ ID NO: 4870404 - DNA, 25 bp, Homo sapien
gaaaggatgggcattctgtattcca

SEQ ID NO: 4870405 - DNA, 25 bp, Homo sapien
ttctgacctgcagtggtctttctcc

SEQ ID NO: 4870406 - DNA, 25 bp, Homo sapien
ggatgggcattctgtattccaactc

SEQ ID NO: 4870407 - DNA, 25 bp, Homo sapien
cagaagtgttctgaaacccttctcc

SEQ ID NO: 4870408 - DNA, 25 bp, Homo sapien
attcccagaagtgttctgaaaccct

SEQ ID NO: 4870409 - DNA, 25 bp, Homo sapien
cccagaagtgttctgaaacccttct

SEQ ID NO: 4870410 - DNA, 25 bp, Homo sapien
cggattcccagaagtgttctgaaac

SEQ ID NO: 4870411 - DNA, 25 bp, Homo sapien
tgggtctagggcataattcaaggtg

SEQ ID NO: 4870412 - DNA, 25 bp, Homo sapien
ggtctagggcataattcaaggtgct

SEQ ID NO: 4870413 - DNA, 25 bp, Homo sapien
cttgcttgggtctagggcataattc

SEQ ID NO: 4870414 - DNA, 25 bp, Homo sapien
tagggcataattcaaggtgcttttc

SEQ ID NO: 4870415 - DNA, 25 bp, Homo sapien
ttagtttagtgtgagtatctaagaa

SEQ ID NO: 4870416 - DNA, 25 bp, Homo sapien
cattagtttagtgtgagtatctaag

SEQ ID NO: 4870417 - DNA, 25 bp, Homo sapien
tagtttagtgtgagtatctaagaaa

SEQ ID NO: 4870418 - DNA, 25 bp, Homo sapien
ccattagtttagtgtgagtatctaa

SEQ ID NO: 4870419 - DNA, 25 bp, Homo sapien
aagaaacttaagtgttgcaggaagt

SEQ ID NO: 4870420 - DNA, 25 bp, Homo sapien
agaaacttaagtgttgcaggaagtc

SEQ ID NO: 4870421 - DNA, 25 bp, Homo sapien
gcaggaagtcagggaccccgaacag

SEQ ID NO: 4870422 - DNA, 25 bp, Homo sapien
tcagggaccccgaacagagggacga

SEQ ID NO: 4870423 - DNA, 25 bp, Homo sapien
ttcatccgacaaatcacttccactg

SEQ ID NO: 4870424 - DNA, 25 bp, Homo sapien
gaaagtgtcttatcttcatccgaca

SEQ ID NO: 4870425 - DNA, 25 bp, Homo sapien
catgttatgtctgtaagcccactgg

SEQ ID NO: 4870426 - DNA, 25 bp, Homo sapien
cactggtgcttttagatgtggtggt

SEQ ID NO: 4870427 - DNA, 25 bp, Homo sapien
tggacacaatatgttcctgttacaa

SEQ ID NO: 4870428 - DNA, 25 bp, Homo sapien
gacacaatatgttcctgttacaaaa

SEQ ID NO: 4870429 - DNA, 25 bp, Homo sapien
tctattctagagcaatgtccattac

SEQ ID NO: 4870430 - DNA, 25 bp, Homo sapien
gttacaaaatctgtctattctagag

SEQ ID NO: 4870431 - DNA, 25 bp, Homo sapien
tgtcactgtcaatctcccagtcgat

SEQ ID NO: 4870432 - DNA, 25 bp, Homo sapien
tcccagtcgataaactgtaattcat

SEQ ID NO: 4870433 - DNA, 25 bp, Homo sapien
ttgtcaaagactgattacttgcaca

SEQ ID NO: 4870434 - DNA, 25 bp, Homo sapien
gattacttgcacaagaagcacagtc

SEQ ID NO: 4870435 - DNA, 25 bp, Homo sapien
aagtggttgttctcgaggaaggaca

SEQ ID NO: 4870436 - DNA, 25 bp, Homo sapien
aaaaatgacaactatgattagcaaa

SEQ ID NO: 4870437 - DNA, 25 bp, Homo sapien
caaaagtggttgttctcgaggaagg

SEQ ID NO: 4870438 - DNA, 25 bp, Homo sapien
ggttgttctcgaggaaggacaggaa

SEQ ID NO: 4870439 - DNA, 25 bp, Homo sapien
ggaagaattaagcatatactgtgtg

SEQ ID NO: 4870440 - DNA, 25 bp, Homo sapien
ctggtacataacacttcacacatgt

SEQ ID NO: 4870441 - DNA, 25 bp, Homo sapien
cactgctgaaccttctagggagagg

SEQ ID NO: 4870442 - DNA, 25 bp, Homo sapien
tgtatcctcctagtccactgctgaa

SEQ ID NO: 4870443 - DNA, 25 bp, Homo sapien
cctttcagtgtaataaacgatggcc

SEQ ID NO: 4870444 - DNA, 25 bp, Homo sapien
gccacgagtacgactatatgctaag

SEQ ID NO: 4870445 - DNA, 25 bp, Homo sapien
caaaagatgtgccatggattgagag

SEQ ID NO: 4870446 - DNA, 25 bp, Homo sapien
tgtgcagaggacctaaacattgctc

SEQ ID NO: 4870447 - DNA, 25 bp, Homo sapien
cctaaaagcactgacaacaaaagca

SEQ ID NO: 4870448 - DNA, 25 bp, Homo sapien
catagggaaaatgctccataacact

SEQ ID NO: 4870449 - DNA, 25 bp, Homo sapien
ctggttatgttgtgtctttgctctc

SEQ ID NO: 4870450 - DNA, 25 bp, Homo sapien
tggttatgttgtgtctttgctctcg

SEQ ID NO: 4870451 - DNA, 25 bp, Homo sapien
ggttatgttgtgtctttgctctcgt

SEQ ID NO: 4870452 - DNA, 25 bp, Homo sapien
ttctggttatgttgtgtctttgctc

SEQ ID NO: 4870453 - DNA, 25 bp, Homo sapien
tctcaggtcctcagaatgtaatgtt

SEQ ID NO: 4870454 - DNA, 25 bp, Homo sapien
caactatctagtgtacattcccaat

SEQ ID NO: 4870455 - DNA, 25 bp, Homo sapien
tttccaaatcaagcaaccaaccttg

SEQ ID NO: 4870456 - DNA, 25 bp, Homo sapien
tgtaatgttcttagagataaggtct

SEQ ID NO: 4870457 - DNA, 25 bp, Homo sapien
tcaagaagttggttagatcagtaac

SEQ ID NO: 4870458 - DNA, 25 bp, Homo sapien
aaagggatagattgtctggagcacc

SEQ ID NO: 4870459 - DNA, 25 bp, Homo sapien
tgtctggagcaccataagatgtctc

SEQ ID NO: 4870460 - DNA, 25 bp, Homo sapien
tagatcagtaacttgttttaagtaa

SEQ ID NO: 4870461 - DNA, 25 bp, Homo sapien
tgcccagaagagtcctccactctca

SEQ ID NO: 4870462 - DNA, 25 bp, Homo sapien
gaaagagcacaaatctcacataact

SEQ ID NO: 4870463 - DNA, 25 bp, Homo sapien
actctgtctcgaatgttgaagctac

SEQ ID NO: 4870464 - DNA, 25 bp, Homo sapien
caaatctcacataactctgtctcga

SEQ ID NO: 4870465 - DNA, 25 bp, Homo sapien
tcttagatcccctaaaatagtgctt

SEQ ID NO: 4870466 - DNA, 25 bp, Homo sapien
tcaagttgccattatcttcctgtca

SEQ ID NO: 4870467 - DNA, 25 bp, Homo sapien
tcttcctcttagatcccctaaaata

SEQ ID NO: 4870468 - DNA, 25 bp, Homo sapien
gtcacctttaggtgtgctggaagac

SEQ ID NO: 4870469 - DNA, 25 bp, Homo sapien
ggtaatgtttctatgcgtgactggc

SEQ ID NO: 4870470 - DNA, 25 bp, Homo sapien
gaagggtcatctaacactataaacg

SEQ ID NO: 4870471 - DNA, 25 bp, Homo sapien
tgataagcactaaagcaacccatga

SEQ ID NO: 4870472 - DNA, 25 bp, Homo sapien
caccagatggtaacaggattccata

SEQ ID NO: 4870473 - DNA, 25 bp, Homo sapien
caatacaatccaatagttgctctgc

SEQ ID NO: 4870474 - DNA, 25 bp, Homo sapien
gagttgaaagtttatctccacacgg

SEQ ID NO: 4870475 - DNA, 25 bp, Homo sapien
tgctctgcttggtatctactcaaag

SEQ ID NO: 4870476 - DNA, 25 bp, Homo sapien
tatagcaccttcaatcataattgcc

SEQ ID NO: 4870477 - DNA, 25 bp, Homo sapien
aagatggtattaaggaggtgaaaat

SEQ ID NO: 4870478 - DNA, 25 bp, Homo sapien
gacttgtacaccgaatacatacgga

SEQ ID NO: 4870479 - DNA, 25 bp, Homo sapien
tatttacaaatcatacatctgggaa

SEQ ID NO: 4870480 - DNA, 25 bp, Homo sapien
tacatacggaactctgacaagtcaa

SEQ ID NO: 4870481 - DNA, 25 bp, Homo sapien
ggtttaaaatcgctaatcttagcaa

SEQ ID NO: 4870482 - DNA, 25 bp, Homo sapien
aagtgtcatctttcacgtgtcaagg

SEQ ID NO: 4870483 - DNA, 25 bp, Homo sapien
agaaaaacccgatcattccaagatg

SEQ ID NO: 4870484 - DNA, 25 bp, Homo sapien
cagcaaatttgttggattattaaga

SEQ ID NO: 4870485 - DNA, 25 bp, Homo sapien
gcagtctacgctggcagaatccacc

SEQ ID NO: 4870486 - DNA, 25 bp, Homo sapien
taaattttgcgtctcccagaatgcc

SEQ ID NO: 4870487 - DNA, 25 bp, Homo sapien
tacacaaggcctaaagcgttcagag

SEQ ID NO: 4870488 - DNA, 25 bp, Homo sapien
gttcacaaccacctcatactctggg

SEQ ID NO: 4870489 - DNA, 25 bp, Homo sapien
agttcagcactctcacgcgttgcag

SEQ ID NO: 4870490 - DNA, 25 bp, Homo sapien
gaaaaatctaggccacagttcagca

SEQ ID NO: 4870491 - DNA, 25 bp, Homo sapien
cacagttcagcactctcacgcgttg

SEQ ID NO: 4870492 - DNA, 25 bp, Homo sapien
aaaaatctaggccacagttcagcac

SEQ ID NO: 4870493 - DNA, 25 bp, Homo sapien
cacatatatgattgagaaaggcact

SEQ ID NO: 4870494 - DNA, 25 bp, Homo sapien
tacagcagagtcaatacgttatacg

SEQ ID NO: 4870495 - DNA, 25 bp, Homo sapien
ggcagcaatccagcaatcttcgtca

SEQ ID NO: 4870496 - DNA, 25 bp, Homo sapien
tgtgaatgaacttgacccgggctgg

SEQ ID NO: 4870497 - DNA, 25 bp, Homo sapien
cagcctgggcaacagagtgagaccc

SEQ ID NO: 4870498 - DNA, 25 bp, Homo sapien
agtgtgctatgactgcatcactgca

SEQ ID NO: 4870499 - DNA, 25 bp, Homo sapien
ttcagcctgggcaacagagtgagac

SEQ ID NO: 4870500 - DNA, 25 bp, Homo sapien
acttcagcctgggcaacagagtgag

SEQ ID NO: 4870501 - DNA, 25 bp, Homo sapien
ggagtttagtgaccagctggccaat

SEQ ID NO: 4870502 - DNA, 25 bp, Homo sapien
tctcagctcccacaggaatgcgtcg

SEQ ID NO: 4870503 - DNA, 25 bp, Homo sapien
tcaaggaacctgcagcctatttggg

SEQ ID NO: 4870504 - DNA, 25 bp, Homo sapien
tgaccaagccatgtgatcattagac

SEQ ID NO: 4870505 - DNA, 25 bp, Homo sapien
gcgtcgatattgatgagcactctga

SEQ ID NO: 4870506 - DNA, 25 bp, Homo sapien
ctggccaccagtacgctgtgctggg

SEQ ID NO: 4870507 - DNA, 25 bp, Homo sapien
gggctcactgtggatacttcgaggt

SEQ ID NO: 4870508 - DNA, 25 bp, Homo sapien
cagtacgctgtgctgggctcactgt

SEQ ID NO: 4870509 - DNA, 25 bp, Homo sapien
tggatacttcgaggtctacctctga

SEQ ID NO: 4870510 - DNA, 25 bp, Homo sapien
aggctgtggcaccataggccacgtc

SEQ ID NO: 4870511 - DNA, 25 bp, Homo sapien
cataggccacgtctaggacagcaca

SEQ ID NO: 4870512 - DNA, 25 bp, Homo sapien
caagcttcggcacctgtgatcacac

SEQ ID NO: 4870513 - DNA, 25 bp, Homo sapien
gagtgtaccacacttgcatgcaaat

SEQ ID NO: 4870514 - DNA, 25 bp, Homo sapien
gaagcacaagttgtaatggccacag

SEQ ID NO: 4870515 - DNA, 25 bp, Homo sapien
agactccttttgctacagatgctgt

SEQ ID NO: 4870516 - DNA, 25 bp, Homo sapien
gctgtgctgtacatgcacagagaag

SEQ ID NO: 4870517 - DNA, 25 bp, Homo sapien
tctccaaaatacttgcagactcctt

SEQ ID NO: 4870518 - DNA, 25 bp, Homo sapien
ttatctttaccttgctttggcttca

SEQ ID NO: 4870519 - DNA, 25 bp, Homo sapien
tgacctataccacctggttttatct

SEQ ID NO: 4870520 - DNA, 25 bp, Homo sapien
cctctgacctataccacctggtttt

SEQ ID NO: 4870521 - DNA, 25 bp, Homo sapien
tttatctttaccttgctttggcttc

SEQ ID NO: 4870522 - DNA, 25 bp, Homo sapien
caagaaagtccctaacactgtgctc

SEQ ID NO: 4870523 - DNA, 25 bp, Homo sapien
gaaacacacttcgtacctagagcag

SEQ ID NO: 4870524 - DNA, 25 bp, Homo sapien
acttaaggctaacagtgtcccctgg

SEQ ID NO: 4870525 - DNA, 25 bp, Homo sapien
gaacggtcagctccaaaaagacgtc

SEQ ID NO: 4870526 - DNA, 25 bp, Homo sapien
cttgggcgggttatggacacactcc

SEQ ID NO: 4870527 - DNA, 25 bp, Homo sapien
ccccagtggactaggataacaagca

SEQ ID NO: 4870528 - DNA, 25 bp, Homo sapien
tgtttatacgccactcgatctgtgg

SEQ ID NO: 4870529 - DNA, 25 bp, Homo sapien
tacaacactgagcaagacttgggcg

SEQ ID NO: 4870530 - DNA, 25 bp, Homo sapien
agctgcctctcttactccttgcaga

SEQ ID NO: 4870531 - DNA, 25 bp, Homo sapien
tgcctctcttactccttgcagaaac

SEQ ID NO: 4870532 - DNA, 25 bp, Homo sapien
cctctcttactccttgcagaaacct

SEQ ID NO: 4870533 - DNA, 25 bp, Homo sapien
gctgcctctcttactccttgcagaa

SEQ ID NO: 4870534 - DNA, 25 bp, Homo sapien
tgaaatggctagtgttgcaatgcac

SEQ ID NO: 4870535 - DNA, 25 bp, Homo sapien
tactaagtagtccacgctgtcatta

SEQ ID NO: 4870536 - DNA, 25 bp, Homo sapien
aagtggccaaagagggcagtaccca

SEQ ID NO: 4870537 - DNA, 25 bp, Homo sapien
gcagtacccagcaggaagttgttcc

SEQ ID NO: 4870538 - DNA, 25 bp, Homo sapien
tatcgttgtgcctacaagaccatct

SEQ ID NO: 4870539 - DNA, 25 bp, Homo sapien
gcctacaagaccatctttttcggag

SEQ ID NO: 4870540 - DNA, 25 bp, Homo sapien
ttactgctgacctatcgttgtgcct

SEQ ID NO: 4870541 - DNA, 25 bp, Homo sapien
catctttttcggagacaatcatgaa

SEQ ID NO: 4870542 - DNA, 25 bp, Homo sapien
gacattgatgtatgggatcctgcca

SEQ ID NO: 4870543 - DNA, 25 bp, Homo sapien
tattccagactggttaatgttgccc

SEQ ID NO: 4870544 - DNA, 25 bp, Homo sapien
ttatctgggtaaacagaaggctggg

SEQ ID NO: 4870545 - DNA, 25 bp, Homo sapien
catgaccgggttctatatacagggc

SEQ ID NO: 4870546 - DNA, 25 bp, Homo sapien
taaaaccagctacatttggttcctg

SEQ ID NO: 4870547 - DNA, 25 bp, Homo sapien
tcaacttcatcttaagttactcaag

SEQ ID NO: 4870548 - DNA, 25 bp, Homo sapien
gatttgcagtactgttctagtgaat

SEQ ID NO: 4870549 - DNA, 25 bp, Homo sapien
tcttaagttactcaagatttgcagt

SEQ ID NO: 4870550 - DNA, 25 bp, Homo sapien
tctagacgaaaagtccatgagctca

SEQ ID NO: 4870551 - DNA, 25 bp, Homo sapien
ctctagacgaaaagtccatgagctc

SEQ ID NO: 4870552 - DNA, 25 bp, Homo sapien
ctagacgaaaagtccatgagctcat

SEQ ID NO: 4870553 - DNA, 25 bp, Homo sapien
tcaaaaaaactgcttgggtagtcac

SEQ ID NO: 4870554 - DNA, 25 bp, Homo sapien
gcttgggtagtcaccttctatcagg

SEQ ID NO: 4870555 - DNA, 25 bp, Homo sapien
aaaactgcttgggtagtcaccttct

SEQ ID NO: 4870556 - DNA, 25 bp, Homo sapien
gggtagtcaccttctatcaggcaca

SEQ ID NO: 4870557 - DNA, 25 bp, Homo sapien
tgcatccgatgcaaactgcacgtgg

SEQ ID NO: 4870558 - DNA, 25 bp, Homo sapien
tgtccttggatctatcagtctctcc

SEQ ID NO: 4870559 - DNA, 25 bp, Homo sapien
gaggtgtatgcaaaatggtctctgt

SEQ ID NO: 4870560 - DNA, 25 bp, Homo sapien
tctccataatctgtcttgcatccga

SEQ ID NO: 4870561 - DNA, 25 bp, Homo sapien
ttggcattgtttggtcaaacaacaa

SEQ ID NO: 4870562 - DNA, 25 bp, Homo sapien
attgtttggtcaaacaacaaagagc

SEQ ID NO: 4870563 - DNA, 25 bp, Homo sapien
cttcattgagtctttgcttggcatt

SEQ ID NO: 4870564 - DNA, 25 bp, Homo sapien
ctttgcttggcattgtttggtcaaa

SEQ ID NO: 4870565 - DNA, 25 bp, Homo sapien
ctcttctccaggatgctgatgtagc

SEQ ID NO: 4870566 - DNA, 25 bp, Homo sapien
cttctccaggatgctgatgtagcca

SEQ ID NO: 4870567 - DNA, 25 bp, Homo sapien
ttctccaggatgctgatgtagccat

SEQ ID NO: 4870568 - DNA, 25 bp, Homo sapien
tcttctccaggatgctgatgtagcc

SEQ ID NO: 4870569 - DNA, 25 bp, Homo sapien
tatgtccgatatatacctaatttat

SEQ ID NO: 4870570 - DNA, 25 bp, Homo sapien
atgtccgatatatacctaatttatt

SEQ ID NO: 4870571 - DNA, 25 bp, Homo sapien
catttagtctttctgctagtccacc

SEQ ID NO: 4870572 - DNA, 25 bp, Homo sapien
tctctcgattctgcagtccatttag

SEQ ID NO: 4870573 - DNA, 25 bp, Homo sapien
aaagaaatagcagatctctctcgat

SEQ ID NO: 4870574 - DNA, 25 bp, Homo sapien
tagcagatctctctcgattctgcag

SEQ ID NO: 4870575 - DNA, 25 bp, Homo sapien
cagagactgcaatggtggctgccaa

SEQ ID NO: 4870576 - DNA, 25 bp, Homo sapien
taatagtgctctggctacagaagca

SEQ ID NO: 4870577 - DNA, 25 bp, Homo sapien
ggtcaagggtagatttatagcacag

SEQ ID NO: 4870578 - DNA, 25 bp, Homo sapien
tatataagctaaaccagtcctagag

SEQ ID NO: 4870579 - DNA, 25 bp, Homo sapien
caggttctggccttttaggccgcca

SEQ ID NO: 4870580 - DNA, 25 bp, Homo sapien
tctgatagttcaccatccaccacaa

SEQ ID NO: 4870581 - DNA, 25 bp, Homo sapien
tgtaactaagaactcaaagtggcct

SEQ ID NO: 4870582 - DNA, 25 bp, Homo sapien
tcaacgcagtatgcaaatgatatct

SEQ ID NO: 4870583 - DNA, 25 bp, Homo sapien
tcccagcatactcagaaggcacaaa

SEQ ID NO: 4870584 - DNA, 25 bp, Homo sapien
taagaataggcagttaaagtctggg

SEQ ID NO: 4870585 - DNA, 25 bp, Homo sapien
aagtctgggcaaggtggttaatgtc

SEQ ID NO: 4870586 - DNA, 25 bp, Homo sapien
acaaaaattgtctggacccaggagg

SEQ ID NO: 4870587 - DNA, 25 bp, Homo sapien
tattaacatgacaaaggtactccta

SEQ ID NO: 4870588 - DNA, 25 bp, Homo sapien
cccaaaactgtttaggcacctcaca

SEQ ID NO: 4870589 - DNA, 25 bp, Homo sapien
acgggtaccttctatataacacttg

SEQ ID NO: 4870590 - DNA, 25 bp, Homo sapien
taacacttgttaagctgtgtatctg

SEQ ID NO: 4870591 - DNA, 25 bp, Homo sapien
atccactgctcctgaggtagcctga

SEQ ID NO: 4870592 - DNA, 25 bp, Homo sapien
tgctcctgaggtagcctgacggtca

SEQ ID NO: 4870593 - DNA, 25 bp, Homo sapien
tctggctacacgcttgcgacaagac

SEQ ID NO: 4870594 - DNA, 25 bp, Homo sapien
agaccgaggaaaccccactctgtgg

SEQ ID NO: 4870595 - DNA, 25 bp, Homo sapien
gagttcctggaagcagtaagaaata

SEQ ID NO: 4870596 - DNA, 25 bp, Homo sapien
cccagcctcagaggagttcctggaa

SEQ ID NO: 4870597 - DNA, 25 bp, Homo sapien
cctggaagcagtaagaaataggtgg

SEQ ID NO: 4870598 - DNA, 25 bp, Homo sapien
agaggagttcctggaagcagtaaga

SEQ ID NO: 4870599 - DNA, 25 bp, Homo sapien
gtgggcactggcagtatcccttcaa

SEQ ID NO: 4870600 - DNA, 25 bp, Homo sapien
ccacgctgagtgggcactggcagta

SEQ ID NO: 4870601 - DNA, 25 bp, Homo sapien
tgagtgggcactggcagtatccctt

SEQ ID NO: 4870602 - DNA, 25 bp, Homo sapien
cgctgagtgggcactggcagtatcc

SEQ ID NO: 4870603 - DNA, 25 bp, Homo sapien
aaccatcctgtggaatgccaggagc

SEQ ID NO: 4870604 - DNA, 25 bp, Homo sapien
cacatggcaacttgcatggcacatt

SEQ ID NO: 4870605 - DNA, 25 bp, Homo sapien
tcctcatgcagctctaaaattttca

SEQ ID NO: 4870606 - DNA, 25 bp, Homo sapien
aaaattttcacagttaatacaccag

SEQ ID NO: 4870607 - DNA, 25 bp, Homo sapien
ggctggtgaccccaataactgctca

SEQ ID NO: 4870608 - DNA, 25 bp, Homo sapien
gctcaagcgattctttcacctttgc

SEQ ID NO: 4870609 - DNA, 25 bp, Homo sapien
aagcgattctttcacctttgcctcc

SEQ ID NO: 4870610 - DNA, 25 bp, Homo sapien
tcctaaactgctgggattataggcg

SEQ ID NO: 4870611 - DNA, 25 bp, Homo sapien
caggcacgcaccacccatacccagc

SEQ ID NO: 4870612 - DNA, 25 bp, Homo sapien
tatagcctataaggtgtgcaacagc

SEQ ID NO: 4870613 - DNA, 25 bp, Homo sapien
tcccaggaattctagtacaaggctt

SEQ ID NO: 4870614 - DNA, 25 bp, Homo sapien
tctaggcaacgggaatacagtagta

SEQ ID NO: 4870615 - DNA, 25 bp, Homo sapien
tcaattagggaggataaacaaggct

SEQ ID NO: 4870616 - DNA, 25 bp, Homo sapien
gcagctcacagagactcgcatcatg

SEQ ID NO: 4870617 - DNA, 25 bp, Homo sapien
gacccaagagacaccctaaatactg

SEQ ID NO: 4870618 - DNA, 25 bp, Homo sapien
ttcataatgctttcatgtcatcccg

SEQ ID NO: 4870619 - DNA, 25 bp, Homo sapien
ggactagattgcagccctcacccgg

SEQ ID NO: 4870620 - DNA, 25 bp, Homo sapien
tattaccgatttaatatccttacca

SEQ ID NO: 4870621 - DNA, 25 bp, Homo sapien
taatatccttaccagttataggtct

SEQ ID NO: 4870622 - DNA, 25 bp, Homo sapien
gatttaatatccttaccagttatag

SEQ ID NO: 4870623 - DNA, 25 bp, Homo sapien
ccgatttaatatccttaccagttat

SEQ ID NO: 4870624 - DNA, 25 bp, Homo sapien
ttactgactcgattttggagctcat

SEQ ID NO: 4870625 - DNA, 25 bp, Homo sapien
ttattactgactcgattttggagct

SEQ ID NO: 4870626 - DNA, 25 bp, Homo sapien
ttcaatcctgggagggtgcatgcat

SEQ ID NO: 4870627 - DNA, 25 bp, Homo sapien
cctagttcaatcctgggagggtgca

SEQ ID NO: 4870628 - DNA, 25 bp, Homo sapien
tgaaattcatgaacacgggatgtcc

SEQ ID NO: 4870629 - DNA, 25 bp, Homo sapien
taagagttcttatttgtgggccctc

SEQ ID NO: 4870630 - DNA, 25 bp, Homo sapien
tcaaaactcacttcatggtcaggcg

SEQ ID NO: 4870631 - DNA, 25 bp, Homo sapien
caggcgtggtagctcgtaactgacc

SEQ ID NO: 4870632 - DNA, 25 bp, Homo sapien
ctttgatgcaggaaacttccaaatt

SEQ ID NO: 4870633 - DNA, 25 bp, Homo sapien
gaaatcactgccaaacgcagtgtca

SEQ ID NO: 4870634 - DNA, 25 bp, Homo sapien
gatagtaatccattagcagatatac

SEQ ID NO: 4870635 - DNA, 25 bp, Homo sapien
gtcatcaagacattcccctatattt

SEQ ID NO: 4870636 - DNA, 25 bp, Homo sapien
catgatcagaccttgcagggtgaca

SEQ ID NO: 4870637 - DNA, 25 bp, Homo sapien
tctgtggccacctcatcagtggtct

SEQ ID NO: 4870638 - DNA, 25 bp, Homo sapien
tcctggaacgctggtcatcacttct

SEQ ID NO: 4870639 - DNA, 25 bp, Homo sapien
ggtgacagccatcatcccaatctct

SEQ ID NO: 4870640 - DNA, 25 bp, Homo sapien
atgttacaattctctgaagaatttc

SEQ ID NO: 4870641 - DNA, 25 bp, Homo sapien
tacacatgggtattcgacacagaat

SEQ ID NO: 4870642 - DNA, 25 bp, Homo sapien
gaactatactccacaatatgctgag

SEQ ID NO: 4870643 - DNA, 25 bp, Homo sapien
atgccagacggcagcctgaccagtt

SEQ ID NO: 4870644 - DNA, 25 bp, Homo sapien
aacccttaggattctagatgtcaga

SEQ ID NO: 4870645 - DNA, 25 bp, Homo sapien
gcattctgtgaatcctggtattttt

SEQ ID NO: 4870646 - DNA, 25 bp, Homo sapien
gcttctcttgcatacagatttgtgc

SEQ ID NO: 4870647 - DNA, 25 bp, Homo sapien
gatttgtgcattctgtgaatcctgg

SEQ ID NO: 4870648 - DNA, 25 bp, Homo sapien
gccttggtgttgaccgagtctccta

SEQ ID NO: 4870649 - DNA, 25 bp, Homo sapien
tctggtactccttgtgccttccata

SEQ ID NO: 4870650 - DNA, 25 bp, Homo sapien
ctgatgcgtgtcctctggtactcct

SEQ ID NO: 4870651 - DNA, 25 bp, Homo sapien
gatgcgtgtcctctggtactccttg

SEQ ID NO: 4870652 - DNA, 25 bp, Homo sapien
gtcctctggtactccttgtgccttc

SEQ ID NO: 4870653 - DNA, 25 bp, Homo sapien
gatgagatgaataccttcctaacca

SEQ ID NO: 4870654 - DNA, 25 bp, Homo sapien
aaatgctgccactttttggagaaga

SEQ ID NO: 4870655 - DNA, 25 bp, Homo sapien
catagccaatttaggaaggtccacc

SEQ ID NO: 4870656 - DNA, 25 bp, Homo sapien
ggcacatgctgatcttaggctcctc

SEQ ID NO: 4870657 - DNA, 25 bp, Homo sapien
tcttggaacttagagctgcattaca

SEQ ID NO: 4870658 - DNA, 25 bp, Homo sapien
cagaatgtaatgacgagaaaagacc

SEQ ID NO: 4870659 - DNA, 25 bp, Homo sapien
aaaacaggcagtgccctgatggagc

SEQ ID NO: 4870660 - DNA, 25 bp, Homo sapien
gcatctggccaaccatcaatcttgg

SEQ ID NO: 4870661 - DNA, 25 bp, Homo sapien
tctgctccatcagtatctgctggcc

SEQ ID NO: 4870662 - DNA, 25 bp, Homo sapien
catctgctccatcagtatctgctgg

SEQ ID NO: 4870663 - DNA, 25 bp, Homo sapien
ttgcctcgcttgtcatttctcccct

SEQ ID NO: 4870664 - DNA, 25 bp, Homo sapien
agttgcctcgcttgtcatttctccc

SEQ ID NO: 4870665 - DNA, 25 bp, Homo sapien
gcacggtctctatagctgggtcagc

SEQ ID NO: 4870666 - DNA, 25 bp, Homo sapien
tacagggtcaggattgagtaaggaa

SEQ ID NO: 4870667 - DNA, 25 bp, Homo sapien
ttttacagggtcaggattgagtaag

SEQ ID NO: 4870668 - DNA, 25 bp, Homo sapien
gaatgggaaagagcacggtctctat

SEQ ID NO: 4870669 - DNA, 25 bp, Homo sapien
tagaatccaatgacacataccacag

SEQ ID NO: 4870670 - DNA, 25 bp, Homo sapien
agagcatacattaaccttcacagaa

SEQ ID NO: 4870671 - DNA, 25 bp, Homo sapien
tcagatcacaaccataatgaacctg

SEQ ID NO: 4870672 - DNA, 25 bp, Homo sapien
gagagctttctctagtaaaactgga

SEQ ID NO: 4870673 - DNA, 25 bp, Homo sapien
ggtgttaggtgtcagtctcccccta

SEQ ID NO: 4870674 - DNA, 25 bp, Homo sapien
aggtgttaggtgtcagtctccccct

SEQ ID NO: 4870675 - DNA, 25 bp, Homo sapien
ttcagttgatcaaataggcttctga

SEQ ID NO: 4870676 - DNA, 25 bp, Homo sapien
tttcagttgatcaaataggcttctg

SEQ ID NO: 4870677 - DNA, 25 bp, Homo sapien
tcagttgatcaaataggcttctgaa

SEQ ID NO: 4870678 - DNA, 25 bp, Homo sapien
ctgcacccattcaccgtcatttaca

SEQ ID NO: 4870679 - DNA, 25 bp, Homo sapien
aataaactgcagatatcatggccgt

SEQ ID NO: 4870680 - DNA, 25 bp, Homo sapien
ggtagctgctctgcctcaacatttt

SEQ ID NO: 4870681 - DNA, 25 bp, Homo sapien
tgttcttctgatctctgcacgtagg

SEQ ID NO: 4870682 - DNA, 25 bp, Homo sapien
gcacgtaggtttggtggctacctca

SEQ ID NO: 4870683 - DNA, 25 bp, Homo sapien
gacaacagcagccatcagggtttgc

SEQ ID NO: 4870684 - DNA, 25 bp, Homo sapien
catctaagccctgctgctaccactc

SEQ ID NO: 4870685 - DNA, 25 bp, Homo sapien
acaacagcagccatcagggtttgca

SEQ ID NO: 4870686 - DNA, 25 bp, Homo sapien
tcatctaagccctgctgctaccact

SEQ ID NO: 4870687 - DNA, 25 bp, Homo sapien
ctgaggtgaaattcccaatgtgccc

SEQ ID NO: 4870688 - DNA, 25 bp, Homo sapien
taagaactagcagggcaagctgagt

SEQ ID NO: 4870689 - DNA, 25 bp, Homo sapien
tgcccacagtcccaagtgatctgga

SEQ ID NO: 4870690 - DNA, 25 bp, Homo sapien
ggccctgtcttatgaatggagaaca

SEQ ID NO: 4870691 - DNA, 25 bp, Homo sapien
gtaagggcacggcaattactcaata

SEQ ID NO: 4870692 - DNA, 25 bp, Homo sapien
caaaatgaaccagctaagtaagggc

SEQ ID NO: 4870693 - DNA, 25 bp, Homo sapien
catacactatggactggttgaacat

SEQ ID NO: 4870694 - DNA, 25 bp, Homo sapien
tgtggcaaatgtacaagtcttgacc

SEQ ID NO: 4870695 - DNA, 25 bp, Homo sapien
tctagtttcaggtggagagtcgcct

SEQ ID NO: 4870696 - DNA, 25 bp, Homo sapien
gacacacgcaaatgctgagagcctg

SEQ ID NO: 4870697 - DNA, 25 bp, Homo sapien
tatgagaaatgacgaagcacaggct

SEQ ID NO: 4870698 - DNA, 25 bp, Homo sapien
gacagtcgcatactttggcccaggc

SEQ ID NO: 4870699 - DNA, 25 bp, Homo sapien
ttgtgacgacaaggcagcaagcagc

SEQ ID NO: 4870700 - DNA, 25 bp, Homo sapien
gaatgcctcggatcagaactagcag

SEQ ID NO: 4870701 - DNA, 25 bp, Homo sapien
cacagaatcatagggagtaactagc

SEQ ID NO: 4870702 - DNA, 25 bp, Homo sapien
gaactgaattcaccctagtccggga

SEQ ID NO: 4870703 - DNA, 25 bp, Homo sapien
gtaatgccaaagctagaaccataga

SEQ ID NO: 4870704 - DNA, 25 bp, Homo sapien
attcagttagtaatgccaaagctag

SEQ ID NO: 4870705 - DNA, 25 bp, Homo sapien
tagttgagactaaaggcgtatgcca

SEQ ID NO: 4870706 - DNA, 25 bp, Homo sapien
gagtagttgagactaaaggcgtatg

SEQ ID NO: 4870707 - DNA, 25 bp, Homo sapien
gactagattttgctccctgtgacca

SEQ ID NO: 4870708 - DNA, 25 bp, Homo sapien
taacagtaaggtagcaggactctgc

SEQ ID NO: 4870709 - DNA, 25 bp, Homo sapien
taaggacacataggctggtgccact

SEQ ID NO: 4870710 - DNA, 25 bp, Homo sapien
taatctggctctaatccaatggacc

SEQ ID NO: 4870711 - DNA, 25 bp, Homo sapien
tcagaactcctgctttggactgctt

SEQ ID NO: 4870712 - DNA, 25 bp, Homo sapien
tctgagttctgctggatacgtcccc

SEQ ID NO: 4870713 - DNA, 25 bp, Homo sapien
caccgagcctctggcaatgtgtgaa

SEQ ID NO: 4870714 - DNA, 25 bp, Homo sapien
tatgccagactagaaaccagaagtc

SEQ ID NO: 4870715 - DNA, 25 bp, Homo sapien
tggtgaacccaaccaagactggtgc

SEQ ID NO: 4870716 - DNA, 25 bp, Homo sapien
tcagagctggatgagcaagccacta

SEQ ID NO: 4870717 - DNA, 25 bp, Homo sapien
gccactaacggagagagtctttcca

SEQ ID NO: 4870718 - DNA, 25 bp, Homo sapien
ggcgaaccatactgatcccaagctg

SEQ ID NO: 4870719 - DNA, 25 bp, Homo sapien
tgagacagactgcagtataaagatc

SEQ ID NO: 4870720 - DNA, 25 bp, Homo sapien
tgacttatttgtcttttagaacgcc

SEQ ID NO: 4870721 - DNA, 25 bp, Homo sapien
gttatggtgccttcggtttctagga

SEQ ID NO: 4870722 - DNA, 25 bp, Homo sapien
aattctaacacctctgcaaaaccag

SEQ ID NO: 4870723 - DNA, 25 bp, Homo sapien
cttattcttcttccgctataggtgg

SEQ ID NO: 4870724 - DNA, 25 bp, Homo sapien
tgcaaatgtcccagagttcttgaat

SEQ ID NO: 4870725 - DNA, 25 bp, Homo sapien
ggtggtatgtttctgccagcttccc

SEQ ID NO: 4870726 - DNA, 25 bp, Homo sapien
cctgttggtgtttaagcttcctgca

SEQ ID NO: 4870727 - DNA, 25 bp, Homo sapien
tttatacatgaactatgaccactga

SEQ ID NO: 4870728 - DNA, 25 bp, Homo sapien
taaagaaacttatgtgttagatcaa

SEQ ID NO: 4870729 - DNA, 25 bp, Homo sapien
catgggtggcacaagtactttacaa

SEQ ID NO: 4870730 - DNA, 25 bp, Homo sapien
taaataacactatgcaactccatgg

SEQ ID NO: 4870731 - DNA, 25 bp, Homo sapien
caccttattgagtaaagttcatagt

SEQ ID NO: 4870732 - DNA, 25 bp, Homo sapien
tagagtagctttaggtttatgaaga

SEQ ID NO: 4870733 - DNA, 25 bp, Homo sapien
gtgagccaatattgacaccttattg

SEQ ID NO: 4870734 - DNA, 25 bp, Homo sapien
ttacattgggttcactcttcgtgtt

SEQ ID NO: 4870735 - DNA, 25 bp, Homo sapien
tcaaagccagtatgagaccgccatc

SEQ ID NO: 4870736 - DNA, 25 bp, Homo sapien
tgtccaaaggtcacacatacggtct

SEQ ID NO: 4870737 - DNA, 25 bp, Homo sapien
ttcaagttagtgcactgtccaaagg

SEQ ID NO: 4870738 - DNA, 25 bp, Homo sapien
tgttaatggcaaagcactgatgata

SEQ ID NO: 4870739 - DNA, 25 bp, Homo sapien
acttgactgatttgacaaaggctcc

SEQ ID NO: 4870740 - DNA, 25 bp, Homo sapien
aggctcctaagcatctcatctgtgg

SEQ ID NO: 4870741 - DNA, 25 bp, Homo sapien
caggacagctataggattttaatgc

SEQ ID NO: 4870742 - DNA, 25 bp, Homo sapien
taacttaagtctctaggcccacagc

SEQ ID NO: 4870743 - DNA, 25 bp, Homo sapien
tatctgacatgtgcaagggtctcaa

SEQ ID NO: 4870744 - DNA, 25 bp, Homo sapien
ccttgtaacaactgagtcccgggtg

SEQ ID NO: 4870745 - DNA, 25 bp, Homo sapien
gcagagttccgagaagagcttccca

SEQ ID NO: 4870746 - DNA, 25 bp, Homo sapien
taatgcacagcacacgatgacatgg

SEQ ID NO: 4870747 - DNA, 25 bp, Homo sapien
catgcccagtcacagtatttattcc

SEQ ID NO: 4870748 - DNA, 25 bp, Homo sapien
tgctgcaatcttggcggctcaccgc

SEQ ID NO: 4870749 - DNA, 25 bp, Homo sapien
tgttttcgtctgtggagagtggcaa

SEQ ID NO: 4870750 - DNA, 25 bp, Homo sapien
catgcttgggataatgtcgtttaca

SEQ ID NO: 4870751 - DNA, 25 bp, Homo sapien
tgtgacaatggagagactacctggg

SEQ ID NO: 4870752 - DNA, 25 bp, Homo sapien
tgcaacgagtactcccctcattgtg

SEQ ID NO: 4870753 - DNA, 25 bp, Homo sapien
tcctgacagtagtaaccaagcaaca

SEQ ID NO: 4870754 - DNA, 25 bp, Homo sapien
cagtagtaaccaagcaacactccct

SEQ ID NO: 4870755 - DNA, 25 bp, Homo sapien
agaggcacagctgtccttcatgctc

SEQ ID NO: 4870756 - DNA, 25 bp, Homo sapien
cacagaggcacagctgtccttcatg

SEQ ID NO: 4870757 - DNA, 25 bp, Homo sapien
ccacagaggcacagctgtccttcat

SEQ ID NO: 4870758 - DNA, 25 bp, Homo sapien
ggcacagctgtccttcatgctccag

SEQ ID NO: 4870759 - DNA, 25 bp, Homo sapien
gtacacttcacaagttttttctgaa

SEQ ID NO: 4870760 - DNA, 25 bp, Homo sapien
caggtgaattatttgttagaccctt

SEQ ID NO: 4870761 - DNA, 25 bp, Homo sapien
tcagaataacagggcaacttccact

SEQ ID NO: 4870762 - DNA, 25 bp, Homo sapien
gggtatgtccggacagtacacttca

SEQ ID NO: 4870763 - DNA, 25 bp, Homo sapien
ttccaccacatccaggagagaatcc

SEQ ID NO: 4870764 - DNA, 25 bp, Homo sapien
ggttgggatgcgctgttttgcttct

SEQ ID NO: 4870765 - DNA, 25 bp, Homo sapien
gagaatacactctttgcaccaccac

SEQ ID NO: 4870766 - DNA, 25 bp, Homo sapien
gtctctgctgggaagagaatacact

SEQ ID NO: 4870767 - DNA, 25 bp, Homo sapien
gattcagttccccactgtctctgtt

SEQ ID NO: 4870768 - DNA, 25 bp, Homo sapien
cgttctttctcgtcagggtgattca

SEQ ID NO: 4870769 - DNA, 25 bp, Homo sapien
tctcgtcagggtgattcagttcccc

SEQ ID NO: 4870770 - DNA, 25 bp, Homo sapien
cagttttgtcgttctttctcgtcag

SEQ ID NO: 4870771 - DNA, 25 bp, Homo sapien
ttactggtatcagaaaagtgacact

SEQ ID NO: 4870772 - DNA, 25 bp, Homo sapien
gacacctacgatcaaggtgtgaagt

SEQ ID NO: 4870773 - DNA, 25 bp, Homo sapien
tgacactgaccgaggactgggaaca

SEQ ID NO: 4870774 - DNA, 25 bp, Homo sapien
gaacagactgagattgacacctacg

SEQ ID NO: 4870775 - DNA, 25 bp, Homo sapien
ataagttacctcgaaggccagtgct

SEQ ID NO: 4870776 - DNA, 25 bp, Homo sapien
cattataagttacctcgaaggccag

SEQ ID NO: 4870777 - DNA, 25 bp, Homo sapien
tcattataagttacctcgaaggcca

SEQ ID NO: 4870778 - DNA, 25 bp, Homo sapien
ttataagttacctcgaaggccagtg

SEQ ID NO: 4870779 - DNA, 25 bp, Homo sapien
gtaaatgggcatcaactccttgttg

SEQ ID NO: 4870780 - DNA, 25 bp, Homo sapien
tatgtttattccagaggaacttccg

SEQ ID NO: 4870781 - DNA, 25 bp, Homo sapien
gaatgaggtggccaaaagcatagaa

SEQ ID NO: 4870782 - DNA, 25 bp, Homo sapien
tagacagcagtggtcacacttcaca

SEQ ID NO: 4870783 - DNA, 25 bp, Homo sapien
ttctcagctgctcaatcagccattg

SEQ ID NO: 4870784 - DNA, 25 bp, Homo sapien
acttgctgggtgtctactgcattca

SEQ ID NO: 4870785 - DNA, 25 bp, Homo sapien
gtttcccatcaacccatacttgctg

SEQ ID NO: 4870786 - DNA, 25 bp, Homo sapien
gctgctcaatcagccattgctgttt

SEQ ID NO: 4870787 - DNA, 25 bp, Homo sapien
gtacgtgtggaaggcctcacacagt

SEQ ID NO: 4870788 - DNA, 25 bp, Homo sapien
caggtacgtgtggaaggcctcacac

SEQ ID NO: 4870789 - DNA, 25 bp, Homo sapien
gccaggtacgtgtggaaggcctcac

SEQ ID NO: 4870790 - DNA, 25 bp, Homo sapien
ggtggcaggccaggtacgtgtggaa

SEQ ID NO: 4870791 - DNA, 25 bp, Homo sapien
tgagattccacaccaaagaaaggaa

SEQ ID NO: 4870792 - DNA, 25 bp, Homo sapien
gtagacaacctgcactgagattcca

SEQ ID NO: 4870793 - DNA, 25 bp, Homo sapien
ggtacaaagctgaataagccacttc

SEQ ID NO: 4870794 - DNA, 25 bp, Homo sapien
tgtgcaaagactcgaggtacaaagc

SEQ ID NO: 4870795 - DNA, 25 bp, Homo sapien
ctctgatctgtatcctgctagtacg

SEQ ID NO: 4870796 - DNA, 25 bp, Homo sapien
cctgctagtacgctttctattaata

SEQ ID NO: 4870797 - DNA, 25 bp, Homo sapien
tgtatcctgctagtacgctttctat

SEQ ID NO: 4870798 - DNA, 25 bp, Homo sapien
gatctgtatcctgctagtacgcttt

SEQ ID NO: 4870799 - DNA, 25 bp, Homo sapien
gacatcctgtcattaactccacctt

SEQ ID NO: 4870800 - DNA, 25 bp, Homo sapien
atgacatcctgtcattaactccacc

SEQ ID NO: 4870801 - DNA, 25 bp, Homo sapien
caccttctgtgcaccccctagctgg

SEQ ID NO: 4870802 - DNA, 25 bp, Homo sapien
tcctgtcattaactccaccttctgt

SEQ ID NO: 4870803 - DNA, 25 bp, Homo sapien
catgatctgtcagtgcacaaagcca

SEQ ID NO: 4870804 - DNA, 25 bp, Homo sapien
gaatcacatgatctgtcagtgcaca

SEQ ID NO: 4870805 - DNA, 25 bp, Homo sapien
gggaggaatcacatgatctgtcagt

SEQ ID NO: 4870806 - DNA, 25 bp, Homo sapien
gatctgtcagtgcacaaagccaaat

SEQ ID NO: 4870807 - DNA, 25 bp, Homo sapien
tctcagtgaatgaaccggcgggtct

SEQ ID NO: 4870808 - DNA, 25 bp, Homo sapien
cggcgggtctggttctctaaacttg

SEQ ID NO: 4870809 - DNA, 25 bp, Homo sapien
actccggccagtacgtcaaggctgc

SEQ ID NO: 4870810 - DNA, 25 bp, Homo sapien
gctggtccgctgctataaaaagaac

SEQ ID NO: 4870811 - DNA, 25 bp, Homo sapien
ccgaggtaagggctgaattctcaat

SEQ ID NO: 4870812 - DNA, 25 bp, Homo sapien
ttggttttctcagaccatcccgagg

SEQ ID NO: 4870813 - DNA, 25 bp, Homo sapien
aaatgctcatagttatcatcaccta

SEQ ID NO: 4870814 - DNA, 25 bp, Homo sapien
cattataaattaaggagctgtattt

SEQ ID NO: 4870815 - DNA, 25 bp, Homo sapien
tggctacccacacagtcaacaaaag

SEQ ID NO: 4870816 - DNA, 25 bp, Homo sapien
cagacacttatcatgacagccaggt

SEQ ID NO: 4870817 - DNA, 25 bp, Homo sapien
tccttggttcatggtcctgttgctt

SEQ ID NO: 4870818 - DNA, 25 bp, Homo sapien
tcattagagtctcagatgactggct

SEQ ID NO: 4870819 - DNA, 25 bp, Homo sapien
actggtgaaatctggatggtgaaaa

SEQ ID NO: 4870820 - DNA, 25 bp, Homo sapien
agataaatgagatgcactggtgaaa

SEQ ID NO: 4870821 - DNA, 25 bp, Homo sapien
tacaaatgctttactggggccaggt

SEQ ID NO: 4870822 - DNA, 25 bp, Homo sapien
ggtgaaaaactttctccagctgttc

SEQ ID NO: 4870823 - DNA, 25 bp, Homo sapien
cgtccgttccagtatctattgtttc

SEQ ID NO: 4870824 - DNA, 25 bp, Homo sapien
accagtactgtataagcgttcccct

SEQ ID NO: 4870825 - DNA, 25 bp, Homo sapien
atgttgaatcaaatggcagatctac

SEQ ID NO: 4870826 - DNA, 25 bp, Homo sapien
gggtaaggtgctatctcactgcggt

SEQ ID NO: 4870827 - DNA, 25 bp, Homo sapien
cgaggaaggagggatctacactaag

SEQ ID NO: 4870828 - DNA, 25 bp, Homo sapien
gaaaagggacataagacatagttcc

SEQ ID NO: 4870829 - DNA, 25 bp, Homo sapien
caaccgactaccaaatgagaggcca

SEQ ID NO: 4870830 - DNA, 25 bp, Homo sapien
caatgtgaggtagttcacaaaccaa

SEQ ID NO: 4870831 - DNA, 25 bp, Homo sapien
ccagagaactttgggagtatcccaa

SEQ ID NO: 4870832 - DNA, 25 bp, Homo sapien
ggccagagaactttgggagtatccc

SEQ ID NO: 4870833 - DNA, 25 bp, Homo sapien
ctggccagagaactttgggagtatc

SEQ ID NO: 4870834 - DNA, 25 bp, Homo sapien
gccagagaactttgggagtatccca

SEQ ID NO: 4870835 - DNA, 25 bp, Homo sapien
ttatatgtggatacctagtcattcc

SEQ ID NO: 4870836 - DNA, 25 bp, Homo sapien
tccaaaaccattgattggaatgact

SEQ ID NO: 4870837 - DNA, 25 bp, Homo sapien
tcaatggaccaaaaatgtaaggcat

SEQ ID NO: 4870838 - DNA, 25 bp, Homo sapien
tatgaggcaggtgtccaccttaatt

SEQ ID NO: 4870839 - DNA, 25 bp, Homo sapien
aaggaaacctccatccatcaattac

SEQ ID NO: 4870840 - DNA, 25 bp, Homo sapien
aattcacatgccatagaatggacct

SEQ ID NO: 4870841 - DNA, 25 bp, Homo sapien
ggtaagtaaaacaagctattatgcc

SEQ ID NO: 4870842 - DNA, 25 bp, Homo sapien
gaatggacctgtttatattgtagca

SEQ ID NO: 4870843 - DNA, 25 bp, Homo sapien
gtgcatttctgagccatgagggtga

SEQ ID NO: 4870844 - DNA, 25 bp, Homo sapien
gccattccgcaggactttgattctg

SEQ ID NO: 4870845 - DNA, 25 bp, Homo sapien
ctgtgcatttctgagccatgagggt

SEQ ID NO: 4870846 - DNA, 25 bp, Homo sapien
ccgcaggactttgattctgtgcatt

SEQ ID NO: 4870847 - DNA, 25 bp, Homo sapien
ttcacacccagttaagtgcctgcat

SEQ ID NO: 4870848 - DNA, 25 bp, Homo sapien
cacccagttaagtgcctgcatctct

SEQ ID NO: 4870849 - DNA, 25 bp, Homo sapien
cacacccagttaagtgcctgcatct

SEQ ID NO: 4870850 - DNA, 25 bp, Homo sapien
tgtttcacacccagttaagtgcctg

SEQ ID NO: 4870851 - DNA, 25 bp, Homo sapien
aaggcaccagcaggtttggcatctg

SEQ ID NO: 4870852 - DNA, 25 bp, Homo sapien
caccagcaggtttggcatctggttg

SEQ ID NO: 4870853 - DNA, 25 bp, Homo sapien
ggcaccagcaggtttggcatctggt

SEQ ID NO: 4870854 - DNA, 25 bp, Homo sapien
caaggcaccagcaggtttggcatct

SEQ ID NO: 4870855 - DNA, 25 bp, Homo sapien
agctttccaattacagtatacgtgc

SEQ ID NO: 4870856 - DNA, 25 bp, Homo sapien
gtagctttccaattacagtatacgt

SEQ ID NO: 4870857 - DNA, 25 bp, Homo sapien
tgtagctttccaattacagtatacg

SEQ ID NO: 4870858 - DNA, 25 bp, Homo sapien
tagctttccaattacagtatacgtg

SEQ ID NO: 4870859 - DNA, 25 bp, Homo sapien
tctgcgacagtacacgtttagacac

SEQ ID NO: 4870860 - DNA, 25 bp, Homo sapien
caataagaggcattctctgcgacag

SEQ ID NO: 4870861 - DNA, 25 bp, Homo sapien
gtttagacacgcatatcccagcagg

SEQ ID NO: 4870862 - DNA, 25 bp, Homo sapien
taaaacctggtgtcccagcttgcag

SEQ ID NO: 4870863 - DNA, 25 bp, Homo sapien
tagaaacagagtgtccttttcccat

SEQ ID NO: 4870864 - DNA, 25 bp, Homo sapien
agaaacagagtgtccttttcccatt

SEQ ID NO: 4870865 - DNA, 25 bp, Homo sapien
ctagaaacagagtgtccttttccca

SEQ ID NO: 4870866 - DNA, 25 bp, Homo sapien
cacaggcatcttgtaccagaaggca

SEQ ID NO: 4870867 - DNA, 25 bp, Homo sapien
tagaaccttcattcccaccaggctg

SEQ ID NO: 4870868 - DNA, 25 bp, Homo sapien
ttgccttcgacatggtgaactccaa

SEQ ID NO: 4870869 - DNA, 25 bp, Homo sapien
tgcacttcaccgaacattccacagg

SEQ ID NO: 4870870 - DNA, 25 bp, Homo sapien
catacaactatcttccaattgggaa

SEQ ID NO: 4870871 - DNA, 25 bp, Homo sapien
tgttgtgtttactgggccatggatg

SEQ ID NO: 4870872 - DNA, 25 bp, Homo sapien
ctaagaggctctgtgacttagccca

SEQ ID NO: 4870873 - DNA, 25 bp, Homo sapien
tcatcaccagaactgtggatcagat

SEQ ID NO: 4870874 - DNA, 25 bp, Homo sapien
gcggtgctccctgcataggcatctg

SEQ ID NO: 4870875 - DNA, 25 bp, Homo sapien
tggctggagcggtgctccctgcata

SEQ ID NO: 4870876 - DNA, 25 bp, Homo sapien
gagcctctggaccaaagcaggtggc

SEQ ID NO: 4870877 - DNA, 25 bp, Homo sapien
tgtttttctgcgagcctctggacca

SEQ ID NO: 4870878 - DNA, 25 bp, Homo sapien
tcagactggcactgttgtgaaaact

SEQ ID NO: 4870879 - DNA, 25 bp, Homo sapien
tcattgaggaatagcaggtgtgccc

SEQ ID NO: 4870880 - DNA, 25 bp, Homo sapien
tgcggtgagcatacatcagactggc

SEQ ID NO: 4870881 - DNA, 25 bp, Homo sapien
taaagtgccgcacaggccacttggg

SEQ ID NO: 4870882 - DNA, 25 bp, Homo sapien
aaccttctgagatcagtcagctaag

SEQ ID NO: 4870883 - DNA, 25 bp, Homo sapien
tacactactgtaaaacggcccttca

SEQ ID NO: 4870884 - DNA, 25 bp, Homo sapien
gacagcaccctctgtagacactgag

SEQ ID NO: 4870885 - DNA, 25 bp, Homo sapien
caaggtcaaagaccatgtcagttgc

SEQ ID NO: 4870886 - DNA, 25 bp, Homo sapien
ggcccttaatgagggtgcagcatga

SEQ ID NO: 4870887 - DNA, 25 bp, Homo sapien
cagtgctgggcccttaatgagggtg

SEQ ID NO: 4870888 - DNA, 25 bp, Homo sapien
ctgggcccttaatgagggtgcagca

SEQ ID NO: 4870889 - DNA, 25 bp, Homo sapien
tgctgggcccttaatgagggtgcag

SEQ ID NO: 4870890 - DNA, 25 bp, Homo sapien
tgtgacttgggactaagaccttaga

SEQ ID NO: 4870891 - DNA, 25 bp, Homo sapien
tcgcaatccggatgcttagaatgca

SEQ ID NO: 4870892 - DNA, 25 bp, Homo sapien
gagcttactgtaccttctaaaatgc

SEQ ID NO: 4870893 - DNA, 25 bp, Homo sapien
taaagacactcagaaataaagcgat

SEQ ID NO: 4870894 - DNA, 25 bp, Homo sapien
actatgttgtttccgtcctcttttg

SEQ ID NO: 4870895 - DNA, 25 bp, Homo sapien
tatgttgtttccgtcctcttttgta

SEQ ID NO: 4870896 - DNA, 25 bp, Homo sapien
cacaccagggtccttttgtgtgcag

SEQ ID NO: 4870897 - DNA, 25 bp, Homo sapien
ccccacaccagggtccttttgtgtg

SEQ ID NO: 4870898 - DNA, 25 bp, Homo sapien
ttcaaccagtgaagagacctgcaaa

SEQ ID NO: 4870899 - DNA, 25 bp, Homo sapien
ggaggttccgagagcctttcaggca

SEQ ID NO: 4870900 - DNA, 25 bp, Homo sapien
tgtggacaacagaaaacgggaagat

SEQ ID NO: 4870901 - DNA, 25 bp, Homo sapien
ggcagcctacaaggccaaaactgtt

SEQ ID NO: 4870902 - DNA, 25 bp, Homo sapien
gatactgtctcatccaactaactct

SEQ ID NO: 4870903 - DNA, 25 bp, Homo sapien
gtgtggatagagtggaatttgctct

SEQ ID NO: 4870904 - DNA, 25 bp, Homo sapien
cagcttgcttgcctattctcttagt

SEQ ID NO: 4870905 - DNA, 25 bp, Homo sapien
aactaactctcaaatcttcacagga

SEQ ID NO: 4870906 - DNA, 25 bp, Homo sapien
ggattctgtgattctctaattccta

SEQ ID NO: 4870907 - DNA, 25 bp, Homo sapien
tgctgctatccctcgctgacatgtg

SEQ ID NO: 4870908 - DNA, 25 bp, Homo sapien
tgctatccctcgctgacatgtgcct

SEQ ID NO: 4870909 - DNA, 25 bp, Homo sapien
gctgctatccctcgctgacatgtgc

SEQ ID NO: 4870910 - DNA, 25 bp, Homo sapien
tgctcagaggaaagctggctgcaga

SEQ ID NO: 4870911 - DNA, 25 bp, Homo sapien
ttgctcagaggaaagctggctgcag

SEQ ID NO: 4870912 - DNA, 25 bp, Homo sapien
tggagatgagggccacgcggaagga

SEQ ID NO: 4870913 - DNA, 25 bp, Homo sapien
atgagggccacgcggaaggagtcct

SEQ ID NO: 4870914 - DNA, 25 bp, Homo sapien
aaggagtcctgccaactcacgtcct

SEQ ID NO: 4870915 - DNA, 25 bp, Homo sapien
ccagggctgagcctgcacactccaa

SEQ ID NO: 4870916 - DNA, 25 bp, Homo sapien
ctgcagcacaggctgcagaacacgc

SEQ ID NO: 4870917 - DNA, 25 bp, Homo sapien
tgcagcacaggctgcagaacacgca

SEQ ID NO: 4870918 - DNA, 25 bp, Homo sapien
tctgcagcagtcagcagctcaccca

SEQ ID NO: 4870919 - DNA, 25 bp, Homo sapien
ggtccctagtctggcaggctctgca

SEQ ID NO: 4870920 - DNA, 25 bp, Homo sapien
aggctctgcagcagtcagcagctca

SEQ ID NO: 4870921 - DNA, 25 bp, Homo sapien
caggtccctagtctggcaggctctg

SEQ ID NO: 4870922 - DNA, 25 bp, Homo sapien
gggccacagggtgtcaatcaaactg

SEQ ID NO: 4870923 - DNA, 25 bp, Homo sapien
aggtgttttcagaggtatcgctggg

SEQ ID NO: 4870924 - DNA, 25 bp, Homo sapien
tcttcacagggctggtcgcggccag

SEQ ID NO: 4870925 - DNA, 25 bp, Homo sapien
tttcagaggtatcgctgggggccac

SEQ ID NO: 4870926 - DNA, 25 bp, Homo sapien
ggtaactggaggctggtaaagctta

SEQ ID NO: 4870927 - DNA, 25 bp, Homo sapien
tgtgaggatgtaacacaaggctgga

SEQ ID NO: 4870928 - DNA, 25 bp, Homo sapien
ccagatttggatgagctgtgaggat

SEQ ID NO: 4870929 - DNA, 25 bp, Homo sapien
aatggggtcttcgtcaattatatca

SEQ ID NO: 4870930 - DNA, 25 bp, Homo sapien
ctgcaacgggtaccaagatcattca

SEQ ID NO: 4870931 - DNA, 25 bp, Homo sapien
tgcaacgggtaccaagatcattcat

SEQ ID NO: 4870932 - DNA, 25 bp, Homo sapien
tttttggtaaatcaccgtggcatag

SEQ ID NO: 4870933 - DNA, 25 bp, Homo sapien
tggtttttggtaaatcaccgtggca

SEQ ID NO: 4870934 - DNA, 25 bp, Homo sapien
tttggtaaatcaccgtggcatagaa

SEQ ID NO: 4870935 - DNA, 25 bp, Homo sapien
ctgtggtttttggtaaatcaccgtg

SEQ ID NO: 4870936 - DNA, 25 bp, Homo sapien
tccctcttgggtgattagatctaca

SEQ ID NO: 4870937 - DNA, 25 bp, Homo sapien
tgcccatgagtggacaagagtttaa

SEQ ID NO: 4870938 - DNA, 25 bp, Homo sapien
gatgcacccggtgcacattgcccat

SEQ ID NO: 4870939 - DNA, 25 bp, Homo sapien
tcctccataaggtaagggctggcag

SEQ ID NO: 4870940 - DNA, 25 bp, Homo sapien
aggaggcaatgtgtggggcactcac

SEQ ID NO: 4870941 - DNA, 25 bp, Homo sapien
tttctgcgtcagagttcctgtgtcc

SEQ ID NO: 4870942 - DNA, 25 bp, Homo sapien
tctgcgtcagagttcctgtgtcctc

SEQ ID NO: 4870943 - DNA, 25 bp, Homo sapien
tgcgtcagagttcctgtgtcctcca

SEQ ID NO: 4870944 - DNA, 25 bp, Homo sapien
ttctttctgcgtcagagttcctgtg

SEQ ID NO: 4870945 - DNA, 25 bp, Homo sapien
tcatgagaggcactgatcagctgtc

SEQ ID NO: 4870946 - DNA, 25 bp, Homo sapien
ccagggcaccaggtaactgagggac

SEQ ID NO: 4870947 - DNA, 25 bp, Homo sapien
gacaacgcggtgaagtacctgcaca

SEQ ID NO: 4870948 - DNA, 25 bp, Homo sapien
cagacaaggacatgagacaacgcgg

SEQ ID NO: 4870949 - DNA, 25 bp, Homo sapien
tttcaacctcggtctcagccagagg

SEQ ID NO: 4870950 - DNA, 25 bp, Homo sapien
aggagtgttagctgcaactgccacg

SEQ ID NO: 4870951 - DNA, 25 bp, Homo sapien
ttctttactttcaacctcggtctca

SEQ ID NO: 4870952 - DNA, 25 bp, Homo sapien
tggtgcaagcattttgacacctgct

SEQ ID NO: 4870953 - DNA, 25 bp, Homo sapien
gaccccttcacagggcaaggtggat

SEQ ID NO: 4870954 - DNA, 25 bp, Homo sapien
gagggaggaccccttcacagggcaa

SEQ ID NO: 4870955 - DNA, 25 bp, Homo sapien
ccctgagggaggaccccttcacagg

SEQ ID NO: 4870956 - DNA, 25 bp, Homo sapien
gaggaccccttcacagggcaaggtg

SEQ ID NO: 4870957 - DNA, 25 bp, Homo sapien
gccaccacgcctagtctgggtctgt

SEQ ID NO: 4870958 - DNA, 25 bp, Homo sapien
ccaccacgcctagtctgggtctgtt

SEQ ID NO: 4870959 - DNA, 25 bp, Homo sapien
tggaactttatatggtaatcctagt

SEQ ID NO: 4870960 - DNA, 25 bp, Homo sapien
tttaccacgtttgacaggctcatct

SEQ ID NO: 4870961 - DNA, 25 bp, Homo sapien
ctccggaagtgtgagagaatacatt

SEQ ID NO: 4870962 - DNA, 25 bp, Homo sapien
gcgactggccactgctaagatttca

SEQ ID NO: 4870963 - DNA, 25 bp, Homo sapien
gcttacgcctgtaatcccagcactt

SEQ ID NO: 4870964 - DNA, 25 bp, Homo sapien
aataccaaaattaggctgggcgccg

SEQ ID NO: 4870965 - DNA, 25 bp, Homo sapien
tgggaggcagaggcgggtgaatcac

SEQ ID NO: 4870966 - DNA, 25 bp, Homo sapien
ctgaggtcaggagttcgagaccagc

SEQ ID NO: 4870967 - DNA, 25 bp, Homo sapien
ttcgtttgcagagtgacatcggtca

SEQ ID NO: 4870968 - DNA, 25 bp, Homo sapien
ctccttcgtttgcagagtgacatcg

SEQ ID NO: 4870969 - DNA, 25 bp, Homo sapien
tgacatcggtcactagcagccagat

SEQ ID NO: 4870970 - DNA, 25 bp, Homo sapien
tggtcacggagagcgtccttgaaga

SEQ ID NO: 4870971 - DNA, 25 bp, Homo sapien
tattctatgggcacggatcagtcgc

SEQ ID NO: 4870972 - DNA, 25 bp, Homo sapien
caggcaattctggagtgagcacagc

SEQ ID NO: 4870973 - DNA, 25 bp, Homo sapien
tacccctcgagtcatgcaggtgaag

SEQ ID NO: 4870974 - DNA, 25 bp, Homo sapien
gagattcaagtcaatccacacaggg

SEQ ID NO: 4870975 - DNA, 25 bp, Homo sapien
acaggaacttgcaccagagaccaca

SEQ ID NO: 4870976 - DNA, 25 bp, Homo sapien
gcaagaggacagttcgttcagcaca

SEQ ID NO: 4870977 - DNA, 25 bp, Homo sapien
aggctgtcgagcatcaccgggccag

SEQ ID NO: 4870978 - DNA, 25 bp, Homo sapien
gttgacaggtgttgcagagtccagg

SEQ ID NO: 4870979 - DNA, 25 bp, Homo sapien
agaacgcatacaccctcaaggcggg

SEQ ID NO: 4870980 - DNA, 25 bp, Homo sapien
tctcccgacagaactgagcaggtcc

SEQ ID NO: 4870981 - DNA, 25 bp, Homo sapien
cctcctagagggaagcaagtggcag

SEQ ID NO: 4870982 - DNA, 25 bp, Homo sapien
ttgcaaaaacacgagagatcctgga

SEQ ID NO: 4870983 - DNA, 25 bp, Homo sapien
aatccaaatggcctcaacacagtga

SEQ ID NO: 4870984 - DNA, 25 bp, Homo sapien
ccatataatctccacatggccaggg

SEQ ID NO: 4870985 - DNA, 25 bp, Homo sapien
aatggaggccccatatgacccatca

SEQ ID NO: 4870986 - DNA, 25 bp, Homo sapien
ccctggaagcgagcgatgggtcact

SEQ ID NO: 4870987 - DNA, 25 bp, Homo sapien
tttcaacacccatttgaaggttcag

SEQ ID NO: 4870988 - DNA, 25 bp, Homo sapien
ttttcaacacccatttgaaggttca

SEQ ID NO: 4870989 - DNA, 25 bp, Homo sapien
taaggtggggcctaaggatgactga

SEQ ID NO: 4870990 - DNA, 25 bp, Homo sapien
ggggcctaaggatgactgagcctca

SEQ ID NO: 4870991 - DNA, 25 bp, Homo sapien
ggatgtggatcaagaggagctctta

SEQ ID NO: 4870992 - DNA, 25 bp, Homo sapien
tctgatcaaggactgttaacactta

SEQ ID NO: 4870993 - DNA, 25 bp, Homo sapien
cagccaactttggaagacggcttag

SEQ ID NO: 4870994 - DNA, 25 bp, Homo sapien
aacagacaaatcatcaaagaggttg

SEQ ID NO: 4870995 - DNA, 25 bp, Homo sapien
taagatggtgtactggtagcaaaag

SEQ ID NO: 4870996 - DNA, 25 bp, Homo sapien
agatcaagggaacacagaccctcat

SEQ ID NO: 4870997 - DNA, 25 bp, Homo sapien
aattaagatggtgtactggtagcaa

SEQ ID NO: 4870998 - DNA, 25 bp, Homo sapien
tggtgtactggtagcaaaagaacaa

SEQ ID NO: 4870999 - DNA, 25 bp, Homo sapien
tctgaggtccataagccattgtgga

SEQ ID NO: 4871000 - DNA, 25 bp, Homo sapien
tactgatgtttggtaaatgactgct

SEQ ID NO: 4871001 - DNA, 25 bp, Homo sapien
cctaggatatccatgggtgttaata

SEQ ID NO: 4871002 - DNA, 25 bp, Homo sapien
tatgggattaagcaatttccttcca

SEQ ID NO: 4871003 - DNA, 25 bp, Homo sapien
tataatttccacttattgtacaaag

SEQ ID NO: 4871004 - DNA, 25 bp, Homo sapien
tatatacatgttcctaagattttta

SEQ ID NO: 4871005 - DNA, 25 bp, Homo sapien
cttacttgggagtttatatacatgt

SEQ ID NO: 4871006 - DNA, 25 bp, Homo sapien
ggcctcgtgatttttgccttacttg

SEQ ID NO: 4871007 - DNA, 25 bp, Homo sapien
aaagcccacctcagaggcggctctg

SEQ ID NO: 4871008 - DNA, 25 bp, Homo sapien
tctgctcctccacgtgcagaggaca

SEQ ID NO: 4871009 - DNA, 25 bp, Homo sapien
ggaaagcccacctcagaggcggctc

SEQ ID NO: 4871010 - DNA, 25 bp, Homo sapien
ctcctccacgtgcagaggacaacat

SEQ ID NO: 4871011 - DNA, 25 bp, Homo sapien
gagaaagcagtgctctcgtccacgc

SEQ ID NO: 4871012 - DNA, 25 bp, Homo sapien
tgtcttccggcctctgttccaatct

SEQ ID NO: 4871013 - DNA, 25 bp, Homo sapien
ttccaatctcccgttgccacacatg

SEQ ID NO: 4871014 - DNA, 25 bp, Homo sapien
tcacacacaggccatgagaaagcag

SEQ ID NO: 4871015 - DNA, 25 bp, Homo sapien
ctttcaggacagctcctgtcccctt

SEQ ID NO: 4871016 - DNA, 25 bp, Homo sapien
gctttcaggacagctcctgtcccct

SEQ ID NO: 4871017 - DNA, 25 bp, Homo sapien
ttcaggacagctcctgtccccttac

SEQ ID NO: 4871018 - DNA, 25 bp, Homo sapien
tttcaggacagctcctgtcccctta

SEQ ID NO: 4871019 - DNA, 25 bp, Homo sapien
ctctgcactgcggtcttgagcggca

SEQ ID NO: 4871020 - DNA, 25 bp, Homo sapien
ccttcactctgcactgcggtcttga

SEQ ID NO: 4871021 - DNA, 25 bp, Homo sapien
actgcggtcttgagcggcagtccag

SEQ ID NO: 4871022 - DNA, 25 bp, Homo sapien
gagatgtgaccacccgggagcagtc

SEQ ID NO: 4871023 - DNA, 25 bp, Homo sapien
cttcgctatgttggagtgagctagg

SEQ ID NO: 4871024 - DNA, 25 bp, Homo sapien
tgagctaggagtgcgtgcgtgctct

SEQ ID NO: 4871025 - DNA, 25 bp, Homo sapien
ttcgctatgttggagtgagctagga

SEQ ID NO: 4871026 - DNA, 25 bp, Homo sapien
gtgcgtgcgtgctctggcctggctc

SEQ ID NO: 4871027 - DNA, 25 bp, Homo sapien
accggcggcaaacctcagcagggag

SEQ ID NO: 4871028 - DNA, 25 bp, Homo sapien
tcaccggcggcaaacctcagcaggg

SEQ ID NO: 4871029 - DNA, 25 bp, Homo sapien
ccatcttcaccggcggcaaacctca

SEQ ID NO: 4871030 - DNA, 25 bp, Homo sapien
cttcaccggcggcaaacctcagcag

SEQ ID NO: 4871031 - DNA, 25 bp, Homo sapien
tgtaatagaacacatttgggagtgg

SEQ ID NO: 4871032 - DNA, 25 bp, Homo sapien
catgcaggctactgagtgtgcggcc

SEQ ID NO: 4871033 - DNA, 25 bp, Homo sapien
cgagtgtctacaccacttcctagtg

SEQ ID NO: 4871034 - DNA, 25 bp, Homo sapien
ggaaaggaacctatcagtctgaatg

SEQ ID NO: 4871035 - DNA, 25 bp, Homo sapien
ttaatccaactctgacagacatggt

SEQ ID NO: 4871036 - DNA, 25 bp, Homo sapien
tagtgtatagtcacttgtgatcctc

SEQ ID NO: 4871037 - DNA, 25 bp, Homo sapien
tagacttatccatgttccaatttaa

SEQ ID NO: 4871038 - DNA, 25 bp, Homo sapien
tcaaagatcccgctcatagacttat

SEQ ID NO: 4871039 - DNA, 25 bp, Homo sapien
gattggaacgggtgtcaagcactgt

SEQ ID NO: 4871040 - DNA, 25 bp, Homo sapien
ttggaacgggtgtcaagcactgtcc

SEQ ID NO: 4871041 - DNA, 25 bp, Homo sapien
tccattgctggagacttcctggatg

SEQ ID NO: 4871042 - DNA, 25 bp, Homo sapien
gaacgggtgtcaagcactgtccatt

SEQ ID NO: 4871043 - DNA, 25 bp, Homo sapien
gaaggaggatttctgccagggttcc

SEQ ID NO: 4871044 - DNA, 25 bp, Homo sapien
gccagggttcctggtctctggatct

SEQ ID NO: 4871045 - DNA, 25 bp, Homo sapien
cagaaggaaaccaagtgaaggaagg

SEQ ID NO: 4871046 - DNA, 25 bp, Homo sapien
cttagccagaaggaaaccaagtgaa

SEQ ID NO: 4871047 - DNA, 25 bp, Homo sapien
gacaagttaaatgtgtaggaggaac

SEQ ID NO: 4871048 - DNA, 25 bp, Homo sapien
ttaaatgtgtaggaggaacaagcac

SEQ ID NO: 4871049 - DNA, 25 bp, Homo sapien
ctagttgacaagttaaatgtgtagg

SEQ ID NO: 4871050 - DNA, 25 bp, Homo sapien
gaatattctagttgacaagttaaat

SEQ ID NO: 4871051 - DNA, 25 bp, Homo sapien
tggtgcaccccattatagatcaagc

SEQ ID NO: 4871052 - DNA, 25 bp, Homo sapien
cagagtaatatcatgggcaccccac

SEQ ID NO: 4871053 - DNA, 25 bp, Homo sapien
tcaagctgcagaatgctgttgcggg

SEQ ID NO: 4871054 - DNA, 25 bp, Homo sapien
ccaaagcaggtagaatgtggctcct

SEQ ID NO: 4871055 - DNA, 25 bp, Homo sapien
gcacgctggttaaagcaaacagcct

SEQ ID NO: 4871056 - DNA, 25 bp, Homo sapien
aacagcctgggacgtactgttccca

SEQ ID NO: 4871057 - DNA, 25 bp, Homo sapien
ctgggacgtactgttcccaacaaca

SEQ ID NO: 4871058 - DNA, 25 bp, Homo sapien
ctgcagtgataaaaggcacgctggt

SEQ ID NO: 4871059 - DNA, 25 bp, Homo sapien
tgcactcagaagctcgatttcctcc

SEQ ID NO: 4871060 - DNA, 25 bp, Homo sapien
cacagtatgggacaaaggtttacac

SEQ ID NO: 4871061 - DNA, 25 bp, Homo sapien
gatttcctccaatccaatgcagctg

SEQ ID NO: 4871062 - DNA, 25 bp, Homo sapien
gcggcaaccgctagtgttctgcaga

SEQ ID NO: 4871063 - DNA, 25 bp, Homo sapien
tcacggctgctacgtgtatctgatg

SEQ ID NO: 4871064 - DNA, 25 bp, Homo sapien
gcagagacacgatcacaccagttca

SEQ ID NO: 4871065 - DNA, 25 bp, Homo sapien
cagagagctacactttatgggtaac

SEQ ID NO: 4871066 - DNA, 25 bp, Homo sapien
tgccagcaaagcaaatatccgactg

SEQ ID NO: 4871067 - DNA, 25 bp, Homo sapien
gagggtctgtcgcttttaaaacgca

SEQ ID NO: 4871068 - DNA, 25 bp, Homo sapien
cagtttcttgggacataggagcgca

SEQ ID NO: 4871069 - DNA, 25 bp, Homo sapien
ttcaaaagtgctccagaaaggccgg

SEQ ID NO: 4871070 - DNA, 25 bp, Homo sapien
taaactgcgagagaagctaaacgtg

SEQ ID NO: 4871071 - DNA, 25 bp, Homo sapien
gccctaggcgagccaggcgccgccg

SEQ ID NO: 4871072 - DNA, 25 bp, Homo sapien
cgccgcccccgccatgtacgacgac

SEQ ID NO: 4871073 - DNA, 25 bp, Homo sapien
gggccctaggcgagccaggcgccgc

SEQ ID NO: 4871074 - DNA, 25 bp, Homo sapien
gccgcccccgccatgtacgacgacg

SEQ ID NO: 4871075 - DNA, 25 bp, Homo sapien
gatggcactgcttccgtagacctgg

SEQ ID NO: 4871076 - DNA, 25 bp, Homo sapien
tgctctgcttttggcgacagcgtcc

SEQ ID NO: 4871077 - DNA, 25 bp, Homo sapien
aaacaggtctaacgcaagatgccgc

SEQ ID NO: 4871078 - DNA, 25 bp, Homo sapien
gcgcgctgcggccaagtcctggttt

SEQ ID NO: 4871079 - DNA, 25 bp, Homo sapien
ccaactactttaggttcaaggcact

SEQ ID NO: 4871080 - DNA, 25 bp, Homo sapien
caactactttaggttcaaggcactt

SEQ ID NO: 4871081 - DNA, 25 bp, Homo sapien
ctgtcatgtaaactcaacttagtgt

SEQ ID NO: 4871082 - DNA, 25 bp, Homo sapien
gcaagaactttctaaccgcttcctg

SEQ ID NO: 4871083 - DNA, 25 bp, Homo sapien
tcctgtaaagcacctcaatatgcat

SEQ ID NO: 4871084 - DNA, 25 bp, Homo sapien
caatatgcatcactgtcatgtaaac

SEQ ID NO: 4871085 - DNA, 25 bp, Homo sapien
gtcacagaaagcaccatcgaggcag

SEQ ID NO: 4871086 - DNA, 25 bp, Homo sapien
tcttgccagcagagtagtgcagagg

SEQ ID NO: 4871087 - DNA, 25 bp, Homo sapien
aaagagctctcggtggaaccatcag

SEQ ID NO: 4871088 - DNA, 25 bp, Homo sapien
tctaaggaacacagtgacgggacgg

SEQ ID NO: 4871089 - DNA, 25 bp, Homo sapien
taatgtaaagaatatatggtaaaga

SEQ ID NO: 4871090 - DNA, 25 bp, Homo sapien
cggtggttcaccccttagcactttg

SEQ ID NO: 4871091 - DNA, 25 bp, Homo sapien
ttaatgtaaagaatatatggtaaag

SEQ ID NO: 4871092 - DNA, 25 bp, Homo sapien
gggaatatcaccactgaccttccag

SEQ ID NO: 4871093 - DNA, 25 bp, Homo sapien
aagggaatatcaccactgaccttcc

SEQ ID NO: 4871094 - DNA, 25 bp, Homo sapien
taaagggaatatcaccactgacctt

SEQ ID NO: 4871095 - DNA, 25 bp, Homo sapien
gaatatcaccactgaccttccagaa

SEQ ID NO: 4871096 - DNA, 25 bp, Homo sapien
taacagcaaagtgatcaatgcaacc

SEQ ID NO: 4871097 - DNA, 25 bp, Homo sapien
tacataacagcaaagtgatcaatgc

SEQ ID NO: 4871098 - DNA, 25 bp, Homo sapien
agcaaagtgatcaatgcaaccagaa

SEQ ID NO: 4871099 - DNA, 25 bp, Homo sapien
acagcaaagtgatcaatgcaaccag

SEQ ID NO: 4871100 - DNA, 25 bp, Homo sapien
cggccatcagttatgacagatctgg

SEQ ID NO: 4871101 - DNA, 25 bp, Homo sapien
acttggcgccgctcggtcttcagaa

SEQ ID NO: 4871102 - DNA, 25 bp, Homo sapien
ttacgtacaaagtccctggagacca

SEQ ID NO: 4871103 - DNA, 25 bp, Homo sapien
tgagcttctgaaggaacggccatca

SEQ ID NO: 4871104 - DNA, 25 bp, Homo sapien
tctctctttcagttggtggattaaa

SEQ ID NO: 4871105 - DNA, 25 bp, Homo sapien
ggatttaagtcacctgtagatagca

SEQ ID NO: 4871106 - DNA, 25 bp, Homo sapien
ctgtaaatctcgttgtgcctttgga

SEQ ID NO: 4871107 - DNA, 25 bp, Homo sapien
tttgattaggaacaacttctgtcac

SEQ ID NO: 4871108 - DNA, 25 bp, Homo sapien
taacacttgtatttggaggctcttc

SEQ ID NO: 4871109 - DNA, 25 bp, Homo sapien
ttgctctctagaaggaaacgtcttt

SEQ ID NO: 4871110 - DNA, 25 bp, Homo sapien
ccatggttgttgttagggatagtac

SEQ ID NO: 4871111 - DNA, 25 bp, Homo sapien
gcatgcattctagcacaacaagatg

SEQ ID NO: 4871112 - DNA, 25 bp, Homo sapien
acaagtgctgcaagttagtgaaaca

SEQ ID NO: 4871113 - DNA, 25 bp, Homo sapien
tggcacattggaaagcacactcaga

SEQ ID NO: 4871114 - DNA, 25 bp, Homo sapien
tacagtttcgtagcatgagtttaaa

SEQ ID NO: 4871115 - DNA, 25 bp, Homo sapien
tgaaacagctgtctccgtaaatgga

SEQ ID NO: 4871116 - DNA, 25 bp, Homo sapien
tatatggtacttctagttgtagttt

SEQ ID NO: 4871117 - DNA, 25 bp, Homo sapien
ttgtttttgaggcggtgtattgctc

SEQ ID NO: 4871118 - DNA, 25 bp, Homo sapien
gagttgtttgagcttgttatgtatt

SEQ ID NO: 4871119 - DNA, 25 bp, Homo sapien
gtgcagatatcatactgatatcctt

SEQ ID NO: 4871120 - DNA, 25 bp, Homo sapien
tgaatctgtacctttttgtcaccag

SEQ ID NO: 4871121 - DNA, 25 bp, Homo sapien
tgcagttacacatacatcgtgcctt

SEQ ID NO: 4871122 - DNA, 25 bp, Homo sapien
tccataggtccctgactctgttcat

SEQ ID NO: 4871123 - DNA, 25 bp, Homo sapien
tgaatttatcccatctgaagttcac

SEQ ID NO: 4871124 - DNA, 25 bp, Homo sapien
taatttaacgagatcagagctcacc

SEQ ID NO: 4871125 - DNA, 25 bp, Homo sapien
gggcttctgcataatatattaccgt

SEQ ID NO: 4871126 - DNA, 25 bp, Homo sapien
agcattgaggagctttgtgccgtca

SEQ ID NO: 4871127 - DNA, 25 bp, Homo sapien
ttgtatggccctgacgcgcaagtgg

SEQ ID NO: 4871128 - DNA, 25 bp, Homo sapien
cttctgtcactcttgatgtagaatt

SEQ ID NO: 4871129 - DNA, 25 bp, Homo sapien
gaacacccagatcagtagggcttga

SEQ ID NO: 4871130 - DNA, 25 bp, Homo sapien
gtggtccaggcccagaaacagacag

SEQ ID NO: 4871131 - DNA, 25 bp, Homo sapien
gctcctggcggcttctgaatactga

SEQ ID NO: 4871132 - DNA, 25 bp, Homo sapien
cactgtgtagcagcagtcctgggta

SEQ ID NO: 4871133 - DNA, 25 bp, Homo sapien
caattgcgtgtaactataacagtac

SEQ ID NO: 4871134 - DNA, 25 bp, Homo sapien
tacattagtagcatctaaacagttc

SEQ ID NO: 4871135 - DNA, 25 bp, Homo sapien
tttctgaacctgatagagactaagc

SEQ ID NO: 4871136 - DNA, 25 bp, Homo sapien
tccatgtttgtatagattccattgc

SEQ ID NO: 4871137 - DNA, 25 bp, Homo sapien
gatctcaccagtttaacgtgcacac

SEQ ID NO: 4871138 - DNA, 25 bp, Homo sapien
tttgtcagatctcaccagtttaacg

SEQ ID NO: 4871139 - DNA, 25 bp, Homo sapien
cagtttaacgtgcacacatttgtgt

SEQ ID NO: 4871140 - DNA, 25 bp, Homo sapien
atgtgtatttagttctgtgcagttg

SEQ ID NO: 4871141 - DNA, 25 bp, Homo sapien
agcccggcgcttctctgtgtttaga

SEQ ID NO: 4871142 - DNA, 25 bp, Homo sapien
cctggcttcccgagtcgttctggag

SEQ ID NO: 4871143 - DNA, 25 bp, Homo sapien
tggccggtcatcaactgatccgcgg

SEQ ID NO: 4871144 - DNA, 25 bp, Homo sapien
aggagaccttgtccgctgcggaccg

SEQ ID NO: 4871145 - DNA, 25 bp, Homo sapien
caaacttggaactcttgacctaggc

SEQ ID NO: 4871146 - DNA, 25 bp, Homo sapien
ttagccaagtccaacaccaagtagc

SEQ ID NO: 4871147 - DNA, 25 bp, Homo sapien
gagcgtgtgcttctttatcccttag

SEQ ID NO: 4871148 - DNA, 25 bp, Homo sapien
tgacctaggcccctcgcttgtttta

SEQ ID NO: 4871149 - DNA, 25 bp, Homo sapien
cggcagcgttttcgcgggaaaactg

SEQ ID NO: 4871150 - DNA, 25 bp, Homo sapien
ttggtccagatggtctgaccccctg

SEQ ID NO: 4871151 - DNA, 25 bp, Homo sapien
ggacagtgccgcttctttcagcgcc

SEQ ID NO: 4871152 - DNA, 25 bp, Homo sapien
ccgtgcgtaaaccagaagtaggcct

SEQ ID NO: 4871153 - DNA, 25 bp, Homo sapien
aaggcggccgcttgccgacgacgct

SEQ ID NO: 4871154 - DNA, 25 bp, Homo sapien
ccgagtccacctggcgagtagcgct

SEQ ID NO: 4871155 - DNA, 25 bp, Homo sapien
tcaccaatcacagcggcgctcgtac

SEQ ID NO: 4871156 - DNA, 25 bp, Homo sapien
gagtagcgctcccaaaccgcgagac

SEQ ID NO: 4871157 - DNA, 25 bp, Homo sapien
ggacgttcccgtcggctccgcgcca

SEQ ID NO: 4871158 - DNA, 25 bp, Homo sapien
tgctccgcagcgcggacgttcccgt

SEQ ID NO: 4871159 - DNA, 25 bp, Homo sapien
agcgcggacgttcccgtcggctccg

SEQ ID NO: 4871160 - DNA, 25 bp, Homo sapien
cgcagcgcggacgttcccgtcggct

SEQ ID NO: 4871161 - DNA, 25 bp, Homo sapien
ccttccacgccggctgccgcggcgg

SEQ ID NO: 4871162 - DNA, 25 bp, Homo sapien
cccttccacgccggctgccgcggcg

SEQ ID NO: 4871163 - DNA, 25 bp, Homo sapien
tagtgggcccggctcgggggactca

SEQ ID NO: 4871164 - DNA, 25 bp, Homo sapien
gctgtagtgggcccggctcggggga

SEQ ID NO: 4871165 - DNA, 25 bp, Homo sapien
aatggcaatcgaattaagcagcacc

SEQ ID NO: 4871166 - DNA, 25 bp, Homo sapien
ctgtgggtgtctgtgcgcaccaagc

SEQ ID NO: 4871167 - DNA, 25 bp, Homo sapien
gaggcaaatggcaatcgaattaagc

SEQ ID NO: 4871168 - DNA, 25 bp, Homo sapien
caatcgaattaagcagcacccaggc

SEQ ID NO: 4871169 - DNA, 25 bp, Homo sapien
gagagggagatgacctggcatcctc

SEQ ID NO: 4871170 - DNA, 25 bp, Homo sapien
ctgagagggagatgacctggcatcc

SEQ ID NO: 4871171 - DNA, 25 bp, Homo sapien
gatgacctggcatcctcactccgag

SEQ ID NO: 4871172 - DNA, 25 bp, Homo sapien
gagggagatgacctggcatcctcac

SEQ ID NO: 4871173 - DNA, 25 bp, Homo sapien
gctggaaaacagcacgtcctgcgca

SEQ ID NO: 4871174 - DNA, 25 bp, Homo sapien
caggcgaggttggcatcggctgcaa

SEQ ID NO: 4871175 - DNA, 25 bp, Homo sapien
aggtggaatcctcgcctctacgtct

SEQ ID NO: 4871176 - DNA, 25 bp, Homo sapien
aaacagcacgtcctgcgcagcaggg

SEQ ID NO: 4871177 - DNA, 25 bp, Homo sapien
tctataccatctaatcgcaacagca

SEQ ID NO: 4871178 - DNA, 25 bp, Homo sapien
ttattgcaacctgcggtggctgaga

SEQ ID NO: 4871179 - DNA, 25 bp, Homo sapien
ttaggaaattctggtggcatatcaa

SEQ ID NO: 4871180 - DNA, 25 bp, Homo sapien
ggctgagattctgagcactcttaaa

SEQ ID NO: 4871181 - DNA, 25 bp, Homo sapien
ctaacatcaaagtcaagagggatag

SEQ ID NO: 4871182 - DNA, 25 bp, Homo sapien
ggttccctctacccgagagctggga

SEQ ID NO: 4871183 - DNA, 25 bp, Homo sapien
ccgtcagactgcagatccacttgca

SEQ ID NO: 4871184 - DNA, 25 bp, Homo sapien
tctgtctcacaggtgtgcccctaac

SEQ ID NO: 4871185 - DNA, 25 bp, Homo sapien
gggagtgccgtatgtcagtggtgaa

SEQ ID NO: 4871186 - DNA, 25 bp, Homo sapien
tctgttccccagatcacaagttttt

SEQ ID NO: 4871187 - DNA, 25 bp, Homo sapien
tccccagatcacaagtttttggcct

SEQ ID NO: 4871188 - DNA, 25 bp, Homo sapien
tttggcctagagactgctcacttgc

SEQ ID NO: 4871189 - DNA, 25 bp, Homo sapien
cttgccactatatcttctgctgctg

SEQ ID NO: 4871190 - DNA, 25 bp, Homo sapien
cagagggtcaataaaacgctgaaga

SEQ ID NO: 4871191 - DNA, 25 bp, Homo sapien
tagccagagggtcaataaaacgctg

SEQ ID NO: 4871192 - DNA, 25 bp, Homo sapien
gaggttcagtaatatctatgccaac

SEQ ID NO: 4871193 - DNA, 25 bp, Homo sapien
tccccaagtcgttgcatgtatagag

SEQ ID NO: 4871194 - DNA, 25 bp, Homo sapien
ttaaaaatggctcaccaataacatt

SEQ ID NO: 4871195 - DNA, 25 bp, Homo sapien
taagagatgagttgtctgtacaaat

SEQ ID NO: 4871196 - DNA, 25 bp, Homo sapien
gagatgagttgtctgtacaaatttt

SEQ ID NO: 4871197 - DNA, 25 bp, Homo sapien
ctgtgggtaagagatgagttgtctg

SEQ ID NO: 4871198 - DNA, 25 bp, Homo sapien
tcttcaatgcgttgaatggtcttac

SEQ ID NO: 4871199 - DNA, 25 bp, Homo sapien
gagtcagggtaacggtcaaagaaga

SEQ ID NO: 4871200 - DNA, 25 bp, Homo sapien
cttacttgaatctgatgttctaaga

SEQ ID NO: 4871201 - DNA, 25 bp, Homo sapien
attgagtcagggtaacggtcaaaga

SEQ ID NO: 4871202 - DNA, 25 bp, Homo sapien
ggagaagagaggtcagcacacctga

SEQ ID NO: 4871203 - DNA, 25 bp, Homo sapien
ggcctcctgtatgacaccctgctgt

SEQ ID NO: 4871204 - DNA, 25 bp, Homo sapien
tctgcaggctatgtcttcaggagac

SEQ ID NO: 4871205 - DNA, 25 bp, Homo sapien
agacaggagctaggtgcccaagact

SEQ ID NO: 4871206 - DNA, 25 bp, Homo sapien
cctcctgcatctcgggaatcagctg

SEQ ID NO: 4871207 - DNA, 25 bp, Homo sapien
ccatgccgctgatggtgatgagctg

SEQ ID NO: 4871208 - DNA, 25 bp, Homo sapien
ctgggatgtcctgatcaccatgccg

SEQ ID NO: 4871209 - DNA, 25 bp, Homo sapien
tgtcctgatcaccatgccgctgatg

SEQ ID NO: 4871210 - DNA, 25 bp, Homo sapien
atctccacccgggtcgtgtgggcac

SEQ ID NO: 4871211 - DNA, 25 bp, Homo sapien
tgggtggtgtggcagcgcccgcaca

SEQ ID NO: 4871212 - DNA, 25 bp, Homo sapien
gagcggttgtggatgagtgccatgc

SEQ ID NO: 4871213 - DNA, 25 bp, Homo sapien
tctgcaatgcggccgcggtccatct

SEQ ID NO: 4871214 - DNA, 25 bp, Homo sapien
tcattgtgagcaaacaggataactg

SEQ ID NO: 4871215 - DNA, 25 bp, Homo sapien
cgagatcattgtgagcaaacaggat

SEQ ID NO: 4871216 - DNA, 25 bp, Homo sapien
cttgtcaacgagatcattgtgagca

SEQ ID NO: 4871217 - DNA, 25 bp, Homo sapien
gagcaaacaggataactgtgtgtgg

SEQ ID NO: 4871218 - DNA, 25 bp, Homo sapien
taacattcactctgtccccaggctg

SEQ ID NO: 4871219 - DNA, 25 bp, Homo sapien
ctgtaacattcactctgtccccagg

SEQ ID NO: 4871220 - DNA, 25 bp, Homo sapien
cattcactctgtccccaggctggac

SEQ ID NO: 4871221 - DNA, 25 bp, Homo sapien
tgtaacattcactctgtccccaggc

SEQ ID NO: 4871222 - DNA, 25 bp, Homo sapien
gaagaaccgtgctgccatcaacact

SEQ ID NO: 4871223 - DNA, 25 bp, Homo sapien
tcaggagcagattcaggcactccgc

SEQ ID NO: 4871224 - DNA, 25 bp, Homo sapien
acaagagccgatgcgtggtgtgccc

SEQ ID NO: 4871225 - DNA, 25 bp, Homo sapien
gtcgccaccttgcccatcaatgaag

SEQ ID NO: 4871226 - DNA, 25 bp, Homo sapien
ttcaaaccagaaggctttaactcca

SEQ ID NO: 4871227 - DNA, 25 bp, Homo sapien
aaggctttaactccaggctgattcc

SEQ ID NO: 4871228 - DNA, 25 bp, Homo sapien
agaggtctgatctgatgttcgtctt

SEQ ID NO: 4871229 - DNA, 25 bp, Homo sapien
ctgatgttcgtcttttctggatttc

SEQ ID NO: 4871230 - DNA, 25 bp, Homo sapien
cctgggcccactagtcagcagtgct

SEQ ID NO: 4871231 - DNA, 25 bp, Homo sapien
aactgtagctacgtgagcatgccca

SEQ ID NO: 4871232 - DNA, 25 bp, Homo sapien
tgcaaatgatagacccgaggacgtg

SEQ ID NO: 4871233 - DNA, 25 bp, Homo sapien
tctagctcaatgctgggttcgtggt

SEQ ID NO: 4871234 - DNA, 25 bp, Homo sapien
ctggaaagggtgagctccaccgtct

SEQ ID NO: 4871235 - DNA, 25 bp, Homo sapien
ctcccaagcccaggactcaggccca

SEQ ID NO: 4871236 - DNA, 25 bp, Homo sapien
agggtgagctccaccgtctcttaaa

SEQ ID NO: 4871237 - DNA, 25 bp, Homo sapien
gactcaggcccacattgcaaagctc

SEQ ID NO: 4871238 - DNA, 25 bp, Homo sapien
agagcgaggcaccacgtcgggctgg

SEQ ID NO: 4871239 - DNA, 25 bp, Homo sapien
cttcagagcgaggcaccacgtcggg

SEQ ID NO: 4871240 - DNA, 25 bp, Homo sapien
tcagagcgaggcaccacgtcgggct

SEQ ID NO: 4871241 - DNA, 25 bp, Homo sapien
agcgaggcaccacgtcgggctggcc

SEQ ID NO: 4871242 - DNA, 25 bp, Homo sapien
ccaggagatgcacttttaccttccc

SEQ ID NO: 4871243 - DNA, 25 bp, Homo sapien
gtggctcagcaaccagcgtaggcaa

SEQ ID NO: 4871244 - DNA, 25 bp, Homo sapien
cccatatcttcctccgagtggctca

SEQ ID NO: 4871245 - DNA, 25 bp, Homo sapien
ttcccatatcttcctccgagtggct

SEQ ID NO: 4871246 - DNA, 25 bp, Homo sapien
gaagcaagcctctcataaatgtctg

SEQ ID NO: 4871247 - DNA, 25 bp, Homo sapien
cagacgttttgcatccgttttccga

SEQ ID NO: 4871248 - DNA, 25 bp, Homo sapien
cactcttggattgactcgaataggc

SEQ ID NO: 4871249 - DNA, 25 bp, Homo sapien
cgaataggcacagctcgatagatgc

SEQ ID NO: 4871250 - DNA, 25 bp, Homo sapien
tgtcactcaggacaagagcacctgt

SEQ ID NO: 4871251 - DNA, 25 bp, Homo sapien
tcattacgtacgcagtgaggccaac

SEQ ID NO: 4871252 - DNA, 25 bp, Homo sapien
gaactcatcgatacagcagatgccg

SEQ ID NO: 4871253 - DNA, 25 bp, Homo sapien
cgaggttgtacacgtactgcagcag

SEQ ID NO: 4871254 - DNA, 25 bp, Homo sapien
caaggctagtacagcaataaagaca

SEQ ID NO: 4871255 - DNA, 25 bp, Homo sapien
gcaccttgcaagagctttaggacaa

SEQ ID NO: 4871256 - DNA, 25 bp, Homo sapien
ttagatgaatgtgtgctataaccac

SEQ ID NO: 4871257 - DNA, 25 bp, Homo sapien
accacatctttctcaggaagcaggc

SEQ ID NO: 4871258 - DNA, 25 bp, Homo sapien
ttgataataaagtatgaggcagctg

SEQ ID NO: 4871259 - DNA, 25 bp, Homo sapien
taggattccactgagactcaatggg

SEQ ID NO: 4871260 - DNA, 25 bp, Homo sapien
ccaggacagaggtgcgcgcattgag

SEQ ID NO: 4871261 - DNA, 25 bp, Homo sapien
tgcgcgcattgagctgacagatgat

SEQ ID NO: 4871262 - DNA, 25 bp, Homo sapien
tgagggtccagcaagaggaagatca

SEQ ID NO: 4871263 - DNA, 25 bp, Homo sapien
tgctcctcgctctggtagtacagtg

SEQ ID NO: 4871264 - DNA, 25 bp, Homo sapien
tacagtgcgaccaggtggtgagcca

SEQ ID NO: 4871265 - DNA, 25 bp, Homo sapien
gccagacgcctgtcataggcttcgt

SEQ ID NO: 4871266 - DNA, 25 bp, Homo sapien
aggtggtgagccagacgcctgtcat

SEQ ID NO: 4871267 - DNA, 25 bp, Homo sapien
tggcttcctcacttagccgcggcat

SEQ ID NO: 4871268 - DNA, 25 bp, Homo sapien
agtcctttagcaccgccatgtccag

SEQ ID NO: 4871269 - DNA, 25 bp, Homo sapien
cttagccgcggcatgatggtgctgt

SEQ ID NO: 4871270 - DNA, 25 bp, Homo sapien
tgctgtgcgcgtaggcaatgtagtc

SEQ ID NO: 4871271 - DNA, 25 bp, Homo sapien
cagtaagccttttttcagcagggtt

SEQ ID NO: 4871272 - DNA, 25 bp, Homo sapien
ctacaggcacagtaagccttttttc

SEQ ID NO: 4871273 - DNA, 25 bp, Homo sapien
acaggcacagtaagccttttttcag

SEQ ID NO: 4871274 - DNA, 25 bp, Homo sapien
gcacagtaagccttttttcagcagg

SEQ ID NO: 4871275 - DNA, 25 bp, Homo sapien
tgagcactcatagggagaatcaggc

SEQ ID NO: 4871276 - DNA, 25 bp, Homo sapien
agtgttgcctctatttgaaaccagg

SEQ ID NO: 4871277 - DNA, 25 bp, Homo sapien
gctcatcaaagcaccaggaaccttc

SEQ ID NO: 4871278 - DNA, 25 bp, Homo sapien
tgcacttcagctcatgtaccaggat

SEQ ID NO: 4871279 - DNA, 25 bp, Homo sapien
taagtaaacggaactcagatatggt

SEQ ID NO: 4871280 - DNA, 25 bp, Homo sapien
agcaaacctccttggtgacaacttt

SEQ ID NO: 4871281 - DNA, 25 bp, Homo sapien
ccttggtgacaactttagttttgtg

SEQ ID NO: 4871282 - DNA, 25 bp, Homo sapien
tccattaagtaaacggaactcagat

SEQ ID NO: 4871283 - DNA, 25 bp, Homo sapien
gacaatcttactttagcatgggctt

SEQ ID NO: 4871284 - DNA, 25 bp, Homo sapien
gctgtcgagggtatgcagaaaccat

SEQ ID NO: 4871285 - DNA, 25 bp, Homo sapien
catgggcttctgctaagcggattaa

SEQ ID NO: 4871286 - DNA, 25 bp, Homo sapien
tcagagcttcccgatggaggcgttt

SEQ ID NO: 4871287 - DNA, 25 bp, Homo sapien
ccgtagtaagaatagatatgtccac

SEQ ID NO: 4871288 - DNA, 25 bp, Homo sapien
caaaaagttgctggtattttagagc

SEQ ID NO: 4871289 - DNA, 25 bp, Homo sapien
tgttttgcccttagataaaataagc

SEQ ID NO: 4871290 - DNA, 25 bp, Homo sapien
gattgtccccgaatatcttcaaaaa

SEQ ID NO: 4871291 - DNA, 25 bp, Homo sapien
ccgtttacgagaggtggcactcatc

SEQ ID NO: 4871292 - DNA, 25 bp, Homo sapien
ttttggtggctgtacacatgcctta

SEQ ID NO: 4871293 - DNA, 25 bp, Homo sapien
tctcagtcacaacacagcgatggaa

SEQ ID NO: 4871294 - DNA, 25 bp, Homo sapien
tattgtacacgtcaagtccctcctt

SEQ ID NO: 4871295 - DNA, 25 bp, Homo sapien
ggcatctgtatagtccacgttgtaa

SEQ ID NO: 4871296 - DNA, 25 bp, Homo sapien
cagggcacgcagtgcttcttcaaac

SEQ ID NO: 4871297 - DNA, 25 bp, Homo sapien
cttcaaacatatctttagtaattgc

SEQ ID NO: 4871298 - DNA, 25 bp, Homo sapien
tctgccagggcacgcagtgcttctt

SEQ ID NO: 4871299 - DNA, 25 bp, Homo sapien
atcatcatctgccagggcacgcagt

SEQ ID NO: 4871300 - DNA, 25 bp, Homo sapien
agcaagcgcacggtcttcccagtca

SEQ ID NO: 4871301 - DNA, 25 bp, Homo sapien
gcaagcgcacggtcttcccagtcac

SEQ ID NO: 4871302 - DNA, 25 bp, Homo sapien
tcagagcaagcgcacggtcttccca

SEQ ID NO: 4871303 - DNA, 25 bp, Homo sapien
agagcaagcgcacggtcttcccagt

SEQ ID NO: 4871304 - DNA, 25 bp, Homo sapien
ttatgcagccaaaccatgactttaa

SEQ ID NO: 4871305 - DNA, 25 bp, Homo sapien
ctgatggcggccaactgagatgcag

SEQ ID NO: 4871306 - DNA, 25 bp, Homo sapien
taagctctatttacactgatggcgg

SEQ ID NO: 4871307 - DNA, 25 bp, Homo sapien
cccatgtggcgtgcagcaagcagga

SEQ ID NO: 4871308 - DNA, 25 bp, Homo sapien
gaaaacagatacttcactacaaata

SEQ ID NO: 4871309 - DNA, 25 bp, Homo sapien
tgaaaacagatacttcactacaaat

SEQ ID NO: 4871310 - DNA, 25 bp, Homo sapien
aatgaaaacagatacttcactacaa

SEQ ID NO: 4871311 - DNA, 25 bp, Homo sapien
aaaatgaaaacagatacttcactac

SEQ ID NO: 4871312 - DNA, 25 bp, Homo sapien
tacaggcgcatgccatcaagcccag

SEQ ID NO: 4871313 - DNA, 25 bp, Homo sapien
agcccagctaattttttgttatctt

SEQ ID NO: 4871314 - DNA, 25 bp, Homo sapien
agacagtctcactctattgctgagg

SEQ ID NO: 4871315 - DNA, 25 bp, Homo sapien
cagctaattttttgttatctttact

SEQ ID NO: 4871316 - DNA, 25 bp, Homo sapien
cacagagtaaaagccctgctgctat

SEQ ID NO: 4871317 - DNA, 25 bp, Homo sapien
tccataagcatactgatgatggcca

SEQ ID NO: 4871318 - DNA, 25 bp, Homo sapien
ctgaaaataatctctacggtatgtt

SEQ ID NO: 4871319 - DNA, 25 bp, Homo sapien
aatgaggtgatatgcccaggctatg

SEQ ID NO: 4871320 - DNA, 25 bp, Homo sapien
agtagccgggcatagtgacatacac

SEQ ID NO: 4871321 - DNA, 25 bp, Homo sapien
gcctaggcatatcgcttgcagcctg

SEQ ID NO: 4871322 - DNA, 25 bp, Homo sapien
aaagtagccgggcatagtgacatac

SEQ ID NO: 4871323 - DNA, 25 bp, Homo sapien
tcgcttgagcctaggcatatcgctt

SEQ ID NO: 4871324 - DNA, 25 bp, Homo sapien
taatagtagccatgagaaaaaatct

SEQ ID NO: 4871325 - DNA, 25 bp, Homo sapien
tatgtattagggtaaagtggtagaa

SEQ ID NO: 4871326 - DNA, 25 bp, Homo sapien
ttcctgatctaatagtagccatgag

SEQ ID NO: 4871327 - DNA, 25 bp, Homo sapien
gaatctaataatctccaatcaccca

SEQ ID NO: 4871328 - DNA, 25 bp, Homo sapien
tattgtagtagtacttacacgtaag

SEQ ID NO: 4871329 - DNA, 25 bp, Homo sapien
cacgtaagattttagcctatggtca

SEQ ID NO: 4871330 - DNA, 25 bp, Homo sapien
aatgagattcgttatattatggtgt

SEQ ID NO: 4871331 - DNA, 25 bp, Homo sapien
aaagatgactgttaggatttaattc

SEQ ID NO: 4871332 - DNA, 25 bp, Homo sapien
ccggccagatctatcattttctatg

SEQ ID NO: 4871333 - DNA, 25 bp, Homo sapien
ggccagatctatcattttctatgga

SEQ ID NO: 4871334 - DNA, 25 bp, Homo sapien
gcccggccagatctatcattttcta

SEQ ID NO: 4871335 - DNA, 25 bp, Homo sapien
gccagatctatcattttctatggat

SEQ ID NO: 4871336 - DNA, 25 bp, Homo sapien
tggatttgtgtgtcaaactttgtgc

SEQ ID NO: 4871337 - DNA, 25 bp, Homo sapien
attactaaaacgaggccaggaacag

SEQ ID NO: 4871338 - DNA, 25 bp, Homo sapien
aaaaaaagcatccattaaaggctgg

SEQ ID NO: 4871339 - DNA, 25 bp, Homo sapien
aaaaaggaaatcgagggaacatatg

SEQ ID NO: 4871340 - DNA, 25 bp, Homo sapien
aatcgagggaacatatgaacaaaaa

SEQ ID NO: 4871341 - DNA, 25 bp, Homo sapien
tcggtattccagcacattcctcggg

SEQ ID NO: 4871342 - DNA, 25 bp, Homo sapien
caccaacttctaatcggtattccag

SEQ ID NO: 4871343 - DNA, 25 bp, Homo sapien
cattcctcgggccaaactgagtctg

SEQ ID NO: 4871344 - DNA, 25 bp, Homo sapien
caaactgagtctgcctcacatccat

SEQ ID NO: 4871345 - DNA, 25 bp, Homo sapien
catattgattgccagtaatgattat

SEQ ID NO: 4871346 - DNA, 25 bp, Homo sapien
gattgccagtaatgattatctgaag

SEQ ID NO: 4871347 - DNA, 25 bp, Homo sapien
tggtagtaagtttcatattgattgc

SEQ ID NO: 4871348 - DNA, 25 bp, Homo sapien
caccagattggtagtaagtttcata

SEQ ID NO: 4871349 - DNA, 25 bp, Homo sapien
acgcacgaaccgtcgcgcgtcactt

SEQ ID NO: 4871350 - DNA, 25 bp, Homo sapien
gcacgcacgcacgaaccgtcgcgcg

SEQ ID NO: 4871351 - DNA, 25 bp, Homo sapien
tgcagcccgacgcagccgcccgcac

SEQ ID NO: 4871352 - DNA, 25 bp, Homo sapien
aaccgtcgcgcgtcacttccgggag

SEQ ID NO: 4871353 - DNA, 25 bp, Homo sapien
ggttgcagtcaactgacatctcgcc

SEQ ID NO: 4871354 - DNA, 25 bp, Homo sapien
gcagtcaactgacatctcgccactg

SEQ ID NO: 4871355 - DNA, 25 bp, Homo sapien
gaggttgcagtcaactgacatctcg

SEQ ID NO: 4871356 - DNA, 25 bp, Homo sapien
gttgcagtcaactgacatctcgcca

SEQ ID NO: 4871357 - DNA, 25 bp, Homo sapien
tggtggcagccgcctgtaatcagct

SEQ ID NO: 4871358 - DNA, 25 bp, Homo sapien
tagtggggtgtggtggcagccgcct

SEQ ID NO: 4871359 - DNA, 25 bp, Homo sapien
gtggcagccgcctgtaatcagctac

SEQ ID NO: 4871360 - DNA, 25 bp, Homo sapien
agtaagccaagatcagatcattgca

SEQ ID NO: 4871361 - DNA, 25 bp, Homo sapien
tgagattaaacctcacctggcaaga

SEQ ID NO: 4871362 - DNA, 25 bp, Homo sapien
cctggcaagaagagctcagactcct

SEQ ID NO: 4871363 - DNA, 25 bp, Homo sapien
ggcatgaagagcagtacaccaagca

SEQ ID NO: 4871364 - DNA, 25 bp, Homo sapien
tatgcatggtatctggctatcgaac

SEQ ID NO: 4871365 - DNA, 25 bp, Homo sapien
atttttgctcttgccacagggagga

SEQ ID NO: 4871366 - DNA, 25 bp, Homo sapien
gcacagtggcttaatcaaaactcac

SEQ ID NO: 4871367 - DNA, 25 bp, Homo sapien
ttatagatatgagcccgcacccagc

SEQ ID NO: 4871368 - DNA, 25 bp, Homo sapien
ccagccatgaggacttttaataaga

SEQ ID NO: 4871369 - DNA, 25 bp, Homo sapien
tggaagccaaccatcatgtaagaat

SEQ ID NO: 4871370 - DNA, 25 bp, Homo sapien
aggaagtcctaactggccacctgga

SEQ ID NO: 4871371 - DNA, 25 bp, Homo sapien
cagctgatgcaaccacatgagtgac

SEQ ID NO: 4871372 - DNA, 25 bp, Homo sapien
caccaccgggatgtgaggaagtcct

SEQ ID NO: 4871373 - DNA, 25 bp, Homo sapien
aaggactctgcaccaatcaaacagg

SEQ ID NO: 4871374 - DNA, 25 bp, Homo sapien
tcttagaaagtgcaccagaaggtac

SEQ ID NO: 4871375 - DNA, 25 bp, Homo sapien
cttttagaatcctgaagcagtccca

SEQ ID NO: 4871376 - DNA, 25 bp, Homo sapien
ttaaaagagtggatacggctgggcc

SEQ ID NO: 4871377 - DNA, 25 bp, Homo sapien
ctgtaccgtcgcctactcctttttg

SEQ ID NO: 4871378 - DNA, 25 bp, Homo sapien
caacaagcgaaaattacgaggaact

SEQ ID NO: 4871379 - DNA, 25 bp, Homo sapien
taatcatgcctgtccaccttgtaag

SEQ ID NO: 4871380 - DNA, 25 bp, Homo sapien
tcaaggccccagctaactgtaccgt

SEQ ID NO: 4871381 - DNA, 25 bp, Homo sapien
gaaaaaatataatttataacactga

SEQ ID NO: 4871382 - DNA, 25 bp, Homo sapien
agaaaaaatataatttataacactg

SEQ ID NO: 4871383 - DNA, 25 bp, Homo sapien
atcctaccagtcagtcctttaggga

SEQ ID NO: 4871384 - DNA, 25 bp, Homo sapien
aatcctaccagtcagtcctttaggg

SEQ ID NO: 4871385 - DNA, 25 bp, Homo sapien
gaaatcctaccagtcagtcctttag

SEQ ID NO: 4871386 - DNA, 25 bp, Homo sapien
aaatcctaccagtcagtcctttagg

SEQ ID NO: 4871387 - DNA, 25 bp, Homo sapien
acaccaggaatggcaactagttggg

SEQ ID NO: 4871388 - DNA, 25 bp, Homo sapien
gtttcctgaggttcggtgacaccag

SEQ ID NO: 4871389 - DNA, 25 bp, Homo sapien
tagagtttcctgaggttcggtgaca

SEQ ID NO: 4871390 - DNA, 25 bp, Homo sapien
ctgaggttcggtgacaccaggaatg

SEQ ID NO: 4871391 - DNA, 25 bp, Homo sapien
ctatatattctgttttcataatttg

SEQ ID NO: 4871392 - DNA, 25 bp, Homo sapien
tatatattctgttttcataatttgt

SEQ ID NO: 4871393 - DNA, 25 bp, Homo sapien
tacaaatctaactgacggaggagct

SEQ ID NO: 4871394 - DNA, 25 bp, Homo sapien
gaattatttattccgttcatattaa

SEQ ID NO: 4871395 - DNA, 25 bp, Homo sapien
tgacggaggagcttctgggtattta

SEQ ID NO: 4871396 - DNA, 25 bp, Homo sapien
tctaactgacggaggagcttctggg

SEQ ID NO: 4871397 - DNA, 25 bp, Homo sapien
cgagccgggcggatcaactaaggtc

SEQ ID NO: 4871398 - DNA, 25 bp, Homo sapien
gccgagccgggcggatcaactaagg

SEQ ID NO: 4871399 - DNA, 25 bp, Homo sapien
gaggccgagccgggcggatcaacta

SEQ ID NO: 4871400 - DNA, 25 bp, Homo sapien
aggccgagccgggcggatcaactaa

SEQ ID NO: 4871401 - DNA, 25 bp, Homo sapien
gacaaaagctactaacctgatctct

SEQ ID NO: 4871402 - DNA, 25 bp, Homo sapien
tctttcttaatggagtaaggtcaaa

SEQ ID NO: 4871403 - DNA, 25 bp, Homo sapien
gggaattatctcacactgagattta

SEQ ID NO: 4871404 - DNA, 25 bp, Homo sapien
tttccaatgccaccgcccaaaatct

SEQ ID NO: 4871405 - DNA, 25 bp, Homo sapien
gacgtcttagctcttgaagtacaac

SEQ ID NO: 4871406 - DNA, 25 bp, Homo sapien
tgtatgtttgtccttctggtggctg

SEQ ID NO: 4871407 - DNA, 25 bp, Homo sapien
tttggacatcattagacgtcttagc

SEQ ID NO: 4871408 - DNA, 25 bp, Homo sapien
taacactggtatgctccgggcatcc

SEQ ID NO: 4871409 - DNA, 25 bp, Homo sapien
tactagtagtcagcacccacattgc

SEQ ID NO: 4871410 - DNA, 25 bp, Homo sapien
gaattctatttcgagtactccaggt

SEQ ID NO: 4871411 - DNA, 25 bp, Homo sapien
taagtaagatgggtaaagcatgcca

SEQ ID NO: 4871412 - DNA, 25 bp, Homo sapien
ttaaacaatttcaactgcagctctc

SEQ ID NO: 4871413 - DNA, 25 bp, Homo sapien
tgcttccctggcaaggtactgtaca

SEQ ID NO: 4871414 - DNA, 25 bp, Homo sapien
taaagcctcacgtcactttggtgaa

SEQ ID NO: 4871415 - DNA, 25 bp, Homo sapien
tcccagtgtgtcttagattgccaag

SEQ ID NO: 4871416 - DNA, 25 bp, Homo sapien
tatagggctgactctgacaacatgt

SEQ ID NO: 4871417 - DNA, 25 bp, Homo sapien
agcagtgcttttcgatccatcccag

SEQ ID NO: 4871418 - DNA, 25 bp, Homo sapien
gatacagttttgatggcaggctaca

SEQ ID NO: 4871419 - DNA, 25 bp, Homo sapien
gatgcatcagcagaaccattcaaag

SEQ ID NO: 4871420 - DNA, 25 bp, Homo sapien
tgcgaaaacctcaaatcactctgtg

SEQ ID NO: 4871421 - DNA, 25 bp, Homo sapien
ttttttcaatcatgtaactcactcc

SEQ ID NO: 4871422 - DNA, 25 bp, Homo sapien
tttttttcaatcatgtaactcactc

SEQ ID NO: 4871423 - DNA, 25 bp, Homo sapien
tacactctaccagataggaggtgcc

SEQ ID NO: 4871424 - DNA, 25 bp, Homo sapien
gagggaccggcagacttgatcatca

SEQ ID NO: 4871425 - DNA, 25 bp, Homo sapien
cagtcgcagggcaaagggcaaaata

SEQ ID NO: 4871426 - DNA, 25 bp, Homo sapien
tcagaggcaagcacaacctttacag

SEQ ID NO: 4871427 - DNA, 25 bp, Homo sapien
ggcctgtccttcttgctactgtcac

SEQ ID NO: 4871428 - DNA, 25 bp, Homo sapien
acacttgccagcagaagaggcccct

SEQ ID NO: 4871429 - DNA, 25 bp, Homo sapien
gggtcccacatccagccacagaaga

SEQ ID NO: 4871430 - DNA, 25 bp, Homo sapien
acagaagagcccctcctgcgttcca

SEQ ID NO: 4871431 - DNA, 25 bp, Homo sapien
gacttctgtcagtatagtgtgaaat

SEQ ID NO: 4871432 - DNA, 25 bp, Homo sapien
agagggcaatttggctgctcatacc

SEQ ID NO: 4871433 - DNA, 25 bp, Homo sapien
tacacctgggagtagttgatgcgca

SEQ ID NO: 4871434 - DNA, 25 bp, Homo sapien
gtttcagtggtgtccgtcagtcccc

SEQ ID NO: 4871435 - DNA, 25 bp, Homo sapien
cagatcccgagctcattttgtccaa

SEQ ID NO: 4871436 - DNA, 25 bp, Homo sapien
tggtaagaacgctgagaagcaggat

SEQ ID NO: 4871437 - DNA, 25 bp, Homo sapien
tgtgcatcaattttggtggtaagaa

SEQ ID NO: 4871438 - DNA, 25 bp, Homo sapien
gcactacacatgcactctcgggaca

SEQ ID NO: 4871439 - DNA, 25 bp, Homo sapien
atttcctaagtgtgggagcacggga

SEQ ID NO: 4871440 - DNA, 25 bp, Homo sapien
agcacgggagtaaaggagcacgact

SEQ ID NO: 4871441 - DNA, 25 bp, Homo sapien
actgggccgctcatcactgggagag

SEQ ID NO: 4871442 - DNA, 25 bp, Homo sapien
tagccagccaggtcctactgtgtgt

SEQ ID NO: 4871443 - DNA, 25 bp, Homo sapien
tcttgcttctcttgcgtgtatttgc

SEQ ID NO: 4871444 - DNA, 25 bp, Homo sapien
tctcttgcgtgtatttgctggcccc

SEQ ID NO: 4871445 - DNA, 25 bp, Homo sapien
gattcttgtgtcccagggcttggtt

SEQ ID NO: 4871446 - DNA, 25 bp, Homo sapien
gaggcagggtgtattaggctgctct

SEQ ID NO: 4871447 - DNA, 25 bp, Homo sapien
tacttgccagatggaatggccgggc

SEQ ID NO: 4871448 - DNA, 25 bp, Homo sapien
tggtcaggcataggcactcctcact

SEQ ID NO: 4871449 - DNA, 25 bp, Homo sapien
gatggttggcggccagtcagaggcg

SEQ ID NO: 4871450 - DNA, 25 bp, Homo sapien
ctccttacttgccagatggaatggc

SEQ ID NO: 4871451 - DNA, 25 bp, Homo sapien
tatggtagttagcacactgcccaca

SEQ ID NO: 4871452 - DNA, 25 bp, Homo sapien
taaacactccgcgtgtgaggagcag

SEQ ID NO: 4871453 - DNA, 25 bp, Homo sapien
cagacgggtgtgcttcggtcactac

SEQ ID NO: 4871454 - DNA, 25 bp, Homo sapien
catagtcagtgcctgcggaaggtta

SEQ ID NO: 4871455 - DNA, 25 bp, Homo sapien
gccgttcaccctcctcagaggaccc

SEQ ID NO: 4871456 - DNA, 25 bp, Homo sapien
tgttctcaggaaaactgccgttcac

SEQ ID NO: 4871457 - DNA, 25 bp, Homo sapien
tgatgtggaagaatgccatgttctc

SEQ ID NO: 4871458 - DNA, 25 bp, Homo sapien
aatgccatgttctcaggaaaactgc

SEQ ID NO: 4871459 - DNA, 25 bp, Homo sapien
tgcgatctcagtgcatggcagccct

SEQ ID NO: 4871460 - DNA, 25 bp, Homo sapien
ccaggcttggcttgacggttcttca

SEQ ID NO: 4871461 - DNA, 25 bp, Homo sapien
ccacagcatggattcctgcgatctc

SEQ ID NO: 4871462 - DNA, 25 bp, Homo sapien
tatggtgaagtcaacactgggcctg

SEQ ID NO: 4871463 - DNA, 25 bp, Homo sapien
cccccagacattcgctggcaggcag

SEQ ID NO: 4871464 - DNA, 25 bp, Homo sapien
ccagacattcgctggcaggcagcca

SEQ ID NO: 4871465 - DNA, 25 bp, Homo sapien
tgctcccaagtcagcgggaacacga

SEQ ID NO: 4871466 - DNA, 25 bp, Homo sapien
aaagctatgactgcgacaaccctgg

SEQ ID NO: 4871467 - DNA, 25 bp, Homo sapien
ctggcggcccttcgctgcagccgag

SEQ ID NO: 4871468 - DNA, 25 bp, Homo sapien
tttcccagggagcaaagctatgact

SEQ ID NO: 4871469 - DNA, 25 bp, Homo sapien
attcccaccgcgagaactctggctt

SEQ ID NO: 4871470 - DNA, 25 bp, Homo sapien
tgggtagcgggtaggcaaacattcc

SEQ ID NO: 4871471 - DNA, 25 bp, Homo sapien
ttacagggagcccaaataaaactca

SEQ ID NO: 4871472 - DNA, 25 bp, Homo sapien
caagacatcctgtgggtagcgggta

SEQ ID NO: 4871473 - DNA, 25 bp, Homo sapien
agagtacaagtcaaagcggaagggt

SEQ ID NO: 4871474 - DNA, 25 bp, Homo sapien
ggtttctttgggcacaccacaatgg

SEQ ID NO: 4871475 - DNA, 25 bp, Homo sapien
aagggccacagatgtagccgaatcc

SEQ ID NO: 4871476 - DNA, 25 bp, Homo sapien
tgtgcatgagagtacaagaagcttc

SEQ ID NO: 4871477 - DNA, 25 bp, Homo sapien
tcaatgtttacttgtctctcttgcc

SEQ ID NO: 4871478 - DNA, 25 bp, Homo sapien
gtagatcactgattatctttgagaa

SEQ ID NO: 4871479 - DNA, 25 bp, Homo sapien
ttatctttgagaatggagtgaaaga

SEQ ID NO: 4871480 - DNA, 25 bp, Homo sapien
ttctcatttgtagatcactgattat

SEQ ID NO: 4871481 - DNA, 25 bp, Homo sapien
tatgctggatgtctactttcccaac

SEQ ID NO: 4871482 - DNA, 25 bp, Homo sapien
tgttgtaactacatatgacacccaa

SEQ ID NO: 4871483 - DNA, 25 bp, Homo sapien
gacacactgcctcgataagaggcag

SEQ ID NO: 4871484 - DNA, 25 bp, Homo sapien
caactttgcagtagggcgtggtcca

SEQ ID NO: 4871485 - DNA, 25 bp, Homo sapien
ccttatccttactagcagtgcctac

SEQ ID NO: 4871486 - DNA, 25 bp, Homo sapien
ctatttaccgttggctgggctctgg

SEQ ID NO: 4871487 - DNA, 25 bp, Homo sapien
aggacgggctgaacacagcggtccc

SEQ ID NO: 4871488 - DNA, 25 bp, Homo sapien
gtctgattcccaggtcacagtccta

SEQ ID NO: 4871489 - DNA, 25 bp, Homo sapien
ggcgctcgggaacggtctgattccc

SEQ ID NO: 4871490 - DNA, 25 bp, Homo sapien
gctgccccttgggtgcagctcggac

SEQ ID NO: 4871491 - DNA, 25 bp, Homo sapien
tcctgttgcgctttttctgaagctc

SEQ ID NO: 4871492 - DNA, 25 bp, Homo sapien
tctgaagctcccagcgcaaggcgct

SEQ ID NO: 4871493 - DNA, 25 bp, Homo sapien
actgggccaggcctaccgtatgcct

SEQ ID NO: 4871494 - DNA, 25 bp, Homo sapien
gactgggtgcctcggtctggctccc

SEQ ID NO: 4871495 - DNA, 25 bp, Homo sapien
gaccacgagcttcctaaataagagg

SEQ ID NO: 4871496 - DNA, 25 bp, Homo sapien
ggagtccagacaacaggcgagtgac

SEQ ID NO: 4871497 - DNA, 25 bp, Homo sapien
tcctaaataagaggactgggtgcct

SEQ ID NO: 4871498 - DNA, 25 bp, Homo sapien
caagtccagtcccttagttccaagc

SEQ ID NO: 4871499 - DNA, 25 bp, Homo sapien
tgtttgtgggaacatgtacctagga

SEQ ID NO: 4871500 - DNA, 25 bp, Homo sapien
tccatatttcccctcacaaaagcag

SEQ ID NO: 4871501 - DNA, 25 bp, Homo sapien
gaagtttagtcataaggtgccctcg

SEQ ID NO: 4871502 - DNA, 25 bp, Homo sapien
gagagcagctcatgatgcacccatg

SEQ ID NO: 4871503 - DNA, 25 bp, Homo sapien
ctgcccgagagcagctcatgatgca

SEQ ID NO: 4871504 - DNA, 25 bp, Homo sapien
ccgagagcagctcatgatgcaccca

SEQ ID NO: 4871505 - DNA, 25 bp, Homo sapien
gcccgagagcagctcatgatgcacc

SEQ ID NO: 4871506 - DNA, 25 bp, Homo sapien
acgagggaagcggtgtgctttcttc

SEQ ID NO: 4871507 - DNA, 25 bp, Homo sapien
cagggactctgcaagcacgagggaa

SEQ ID NO: 4871508 - DNA, 25 bp, Homo sapien
cacgtcctcagcagggaagaattgc

SEQ ID NO: 4871509 - DNA, 25 bp, Homo sapien
tgctttcttcgcacaaggaccacgt

SEQ ID NO: 4871510 - DNA, 25 bp, Homo sapien
aaagattggaatgaatcctgaagga

SEQ ID NO: 4871511 - DNA, 25 bp, Homo sapien
aagattggaatgaatcctgaaggag

SEQ ID NO: 4871512 - DNA, 25 bp, Homo sapien
gatttagtgttctcatgcatcacca

SEQ ID NO: 4871513 - DNA, 25 bp, Homo sapien
tgtcccctccatcagtgagccctga

SEQ ID NO: 4871514 - DNA, 25 bp, Homo sapien
aaatgtttgtctcagcaatcgtgtc

SEQ ID NO: 4871515 - DNA, 25 bp, Homo sapien
caatcgtgtcgttactgttactggt

SEQ ID NO: 4871516 - DNA, 25 bp, Homo sapien
catattttctaaactctgatctctt

SEQ ID NO: 4871517 - DNA, 25 bp, Homo sapien
tgtcatattttctaaactctgatct

SEQ ID NO: 4871518 - DNA, 25 bp, Homo sapien
taagttttcaactctgtcatatttt

SEQ ID NO: 4871519 - DNA, 25 bp, Homo sapien
ttaagttttcaactctgtcatattt

SEQ ID NO: 4871520 - DNA, 25 bp, Homo sapien
tgaagacggttctcacggtccaccg

SEQ ID NO: 4871521 - DNA, 25 bp, Homo sapien
gagttcccgcctttttagctgcctg

SEQ ID NO: 4871522 - DNA, 25 bp, Homo sapien
tcccaaccgtgactgcgggagttcc

SEQ ID NO: 4871523 - DNA, 25 bp, Homo sapien
aaacacagaacagaagccggccgtg

SEQ ID NO: 4871524 - DNA, 25 bp, Homo sapien
gacttgcttgagaccttaacttggg

SEQ ID NO: 4871525 - DNA, 25 bp, Homo sapien
cagtgggtcccgcttgtacaggaac

SEQ ID NO: 4871526 - DNA, 25 bp, Homo sapien
tctgctaatggcgtcaaaaggtcct

SEQ ID NO: 4871527 - DNA, 25 bp, Homo sapien
catggtgccgttgtttccagagagg

SEQ ID NO: 4871528 - DNA, 25 bp, Homo sapien
tccttcataccagagagttcaaggg

SEQ ID NO: 4871529 - DNA, 25 bp, Homo sapien
tgtccacctatatcaccaactctgg

SEQ ID NO: 4871530 - DNA, 25 bp, Homo sapien
ttcaaggggtgtggagcattgtctc

SEQ ID NO: 4871531 - DNA, 25 bp, Homo sapien
tgcacacccctagtgccaagccagg

SEQ ID NO: 4871532 - DNA, 25 bp, Homo sapien
tcaatcaggctgtgcccatcaacac

SEQ ID NO: 4871533 - DNA, 25 bp, Homo sapien
tgatctgaatcttcagccagagctg

SEQ ID NO: 4871534 - DNA, 25 bp, Homo sapien
tgtatgagactggacctggaactgc

SEQ ID NO: 4871535 - DNA, 25 bp, Homo sapien
taatgagcgctactccagtgccatg

SEQ ID NO: 4871536 - DNA, 25 bp, Homo sapien
tgtaaatcagtgtggctgacacagc

SEQ ID NO: 4871537 - DNA, 25 bp, Homo sapien
caaacacattgttcgcgcaggaaat

SEQ ID NO: 4871538 - DNA, 25 bp, Homo sapien
tgagagtgtaacatcccaagattgg

SEQ ID NO: 4871539 - DNA, 25 bp, Homo sapien
ggtgctgataccacagatctgtgct

SEQ ID NO: 4871540 - DNA, 25 bp, Homo sapien
gcaccagtgcatgactgctgctctt

SEQ ID NO: 4871541 - DNA, 25 bp, Homo sapien
agcaccagtgcatgactgctgctct

SEQ ID NO: 4871542 - DNA, 25 bp, Homo sapien
aaagtcagccttggcattattgccc

SEQ ID NO: 4871543 - DNA, 25 bp, Homo sapien
aagtcagccttggcattattgccca

SEQ ID NO: 4871544 - DNA, 25 bp, Homo sapien
agtcagccttggcattattgcccat

SEQ ID NO: 4871545 - DNA, 25 bp, Homo sapien
gaaagtcagccttggcattattgcc

SEQ ID NO: 4871546 - DNA, 25 bp, Homo sapien
gctccctactggctctacatttgcc

SEQ ID NO: 4871547 - DNA, 25 bp, Homo sapien
ctactggctctacatttgcctgtct

SEQ ID NO: 4871548 - DNA, 25 bp, Homo sapien
gtctgctctccaggagatgcatttg

SEQ ID NO: 4871549 - DNA, 25 bp, Homo sapien
gaaatctcagcgtttttgtcatcga

SEQ ID NO: 4871550 - DNA, 25 bp, Homo sapien
tgttttcctcgttttgctttgcatt

SEQ ID NO: 4871551 - DNA, 25 bp, Homo sapien
tggcgagttcaaccaaggctcaggg

SEQ ID NO: 4871552 - DNA, 25 bp, Homo sapien
tttgcattggcgagttcaaccaagg

SEQ ID NO: 4871553 - DNA, 25 bp, Homo sapien
ttttgctttgcattggcgagttcaa

SEQ ID NO: 4871554 - DNA, 25 bp, Homo sapien
ggcctctggccgctgtatctgttgt

SEQ ID NO: 4871555 - DNA, 25 bp, Homo sapien
tccaaatgttgtagggttcctgaag

SEQ ID NO: 4871556 - DNA, 25 bp, Homo sapien
ggccgctgtatctgttgtccaaatg

SEQ ID NO: 4871557 - DNA, 25 bp, Homo sapien
cactgttcggtagagttctgccttc

SEQ ID NO: 4871558 - DNA, 25 bp, Homo sapien
caggcatgggcaggtcgaagataac

SEQ ID NO: 4871559 - DNA, 25 bp, Homo sapien
gagatttatgacttcggtgtgccag

SEQ ID NO: 4871560 - DNA, 25 bp, Homo sapien
tgattagcaatcagtcagcggactg

SEQ ID NO: 4871561 - DNA, 25 bp, Homo sapien
taacaagggagggtgtaccttcagc

SEQ ID NO: 4871562 - DNA, 25 bp, Homo sapien
caaagtggaaacaggcaggtcaacg

SEQ ID NO: 4871563 - DNA, 25 bp, Homo sapien
tcccacgtcaaaaaggagctcttgt

SEQ ID NO: 4871564 - DNA, 25 bp, Homo sapien
tccctgatcccacgtcaaaaaggag

SEQ ID NO: 4871565 - DNA, 25 bp, Homo sapien
caggtcaacgtcgtggtcatctgtg

SEQ ID NO: 4871566 - DNA, 25 bp, Homo sapien
gtagcattcgttatggattcaaagg

SEQ ID NO: 4871567 - DNA, 25 bp, Homo sapien
cccatttggaactagtgtggtgccc

SEQ ID NO: 4871568 - DNA, 25 bp, Homo sapien
tagctccagtcttgccctagtttcc

SEQ ID NO: 4871569 - DNA, 25 bp, Homo sapien
caatcacgcatcaacctaggaggtg

SEQ ID NO: 4871570 - DNA, 25 bp, Homo sapien
gagatctggcaagtgaccacatgcc

SEQ ID NO: 4871571 - DNA, 25 bp, Homo sapien
ccaggcagagtgagtcgtgtgccca

SEQ ID NO: 4871572 - DNA, 25 bp, Homo sapien
gaatgcaaacccaggttggtccaca

SEQ ID NO: 4871573 - DNA, 25 bp, Homo sapien
gaaatccatattaatcggcactggc

SEQ ID NO: 4871574 - DNA, 25 bp, Homo sapien
gctcggtagcaagttttctgcagcc

SEQ ID NO: 4871575 - DNA, 25 bp, Homo sapien
atctccccacggctcggtagcaagt

SEQ ID NO: 4871576 - DNA, 25 bp, Homo sapien
gggacagccacgttcggtgccagaa

SEQ ID NO: 4871577 - DNA, 25 bp, Homo sapien
tttctttgcgcattcccgctgtggc

SEQ ID NO: 4871578 - DNA, 25 bp, Homo sapien
tgtcccctgaaagtggccctccacc

SEQ ID NO: 4871579 - DNA, 25 bp, Homo sapien
gggcttccagagtattgttgtcgac

SEQ ID NO: 4871580 - DNA, 25 bp, Homo sapien
cttccagagtattgttgtcgacctc

SEQ ID NO: 4871581 - DNA, 25 bp, Homo sapien
aatccacaatggctggggcttccag

SEQ ID NO: 4871582 - DNA, 25 bp, Homo sapien
aaccatcaggggagccaccagccat

SEQ ID NO: 4871583 - DNA, 25 bp, Homo sapien
ttccctgtagcccaaatctccactc

SEQ ID NO: 4871584 - DNA, 25 bp, Homo sapien
ctgtagcccaaatctccactcggat

SEQ ID NO: 4871585 - DNA, 25 bp, Homo sapien
tagcccaaatctccactcggatgag

SEQ ID NO: 4871586 - DNA, 25 bp, Homo sapien
agccatgggcatcggcctgtgctct

SEQ ID NO: 4871587 - DNA, 25 bp, Homo sapien
gaacagtcaatgtcagtaataagga

SEQ ID NO: 4871588 - DNA, 25 bp, Homo sapien
ttactccagacctatttgctctgaa

SEQ ID NO: 4871589 - DNA, 25 bp, Homo sapien
gaagccatgggcatcggcctgtgct

SEQ ID NO: 4871590 - DNA, 25 bp, Homo sapien
ttttctgtcgtccagatcctcaagg

SEQ ID NO: 4871591 - DNA, 25 bp, Homo sapien
agggcaagctcaaatccaatgtgtg

SEQ ID NO: 4871592 - DNA, 25 bp, Homo sapien
ctgtcgtccagatcctcaagggcaa

SEQ ID NO: 4871593 - DNA, 25 bp, Homo sapien
gctcaaatccaatgtgtgctccatg

SEQ ID NO: 4871594 - DNA, 25 bp, Homo sapien
agtagtcctctagtgaagttattgc

SEQ ID NO: 4871595 - DNA, 25 bp, Homo sapien
gaagcaatgggatcagccaaccaga

SEQ ID NO: 4871596 - DNA, 25 bp, Homo sapien
tgccagctctgagcggcacttgact

SEQ ID NO: 4871597 - DNA, 25 bp, Homo sapien
catcctcctagtgaatgtgctctcc

SEQ ID NO: 4871598 - DNA, 25 bp, Homo sapien
ccagcaaagctagggtgacaccaga

SEQ ID NO: 4871599 - DNA, 25 bp, Homo sapien
gacaccagatctgagtgctagaaac

SEQ ID NO: 4871600 - DNA, 25 bp, Homo sapien
tgggccttttcataccgcatgtcca

SEQ ID NO: 4871601 - DNA, 25 bp, Homo sapien
gagccacacactgtaccagcaaagc

SEQ ID NO: 4871602 - DNA, 25 bp, Homo sapien
agcatcgaccttgggatgaggcctt

SEQ ID NO: 4871603 - DNA, 25 bp, Homo sapien
tgcccaggactctcccaaagatgga

SEQ ID NO: 4871604 - DNA, 25 bp, Homo sapien
cttgaaggctatctagatggtcggg

SEQ ID NO: 4871605 - DNA, 25 bp, Homo sapien
gagggtggcactaggtcaacagtcc

SEQ ID NO: 4871606 - DNA, 25 bp, Homo sapien
gccatcacaggacccaaagaacaga

SEQ ID NO: 4871607 - DNA, 25 bp, Homo sapien
ttaatgatgcgtgtcatctttttcc

SEQ ID NO: 4871608 - DNA, 25 bp, Homo sapien
ttcgcagtgatctcaggctggaggt

SEQ ID NO: 4871609 - DNA, 25 bp, Homo sapien
gaagaatcctttttcgcagtgatct

SEQ ID NO: 4871610 - DNA, 25 bp, Homo sapien
ctcaggccccacagggatgtggatg

SEQ ID NO: 4871611 - DNA, 25 bp, Homo sapien
acattcctagcaaatccaagggcag

SEQ ID NO: 4871612 - DNA, 25 bp, Homo sapien
tcccgggtgaccctggccagggtgc

SEQ ID NO: 4871613 - DNA, 25 bp, Homo sapien
ccccacagggatgtggatggcccag

SEQ ID NO: 4871614 - DNA, 25 bp, Homo sapien
gctcttgtcaacctttcccctctca

SEQ ID NO: 4871615 - DNA, 25 bp, Homo sapien
ccctctcagtcctcgaagctgggga

SEQ ID NO: 4871616 - DNA, 25 bp, Homo sapien
tggtgtttttgcgcccatgccggag

SEQ ID NO: 4871617 - DNA, 25 bp, Homo sapien
tgccggagcccagccccgctcttgt

SEQ ID NO: 4871618 - DNA, 25 bp, Homo sapien
agacgcgtggttccgggaggcgcgg

SEQ ID NO: 4871619 - DNA, 25 bp, Homo sapien
gactgtgttaaaggacaggagcctg

SEQ ID NO: 4871620 - DNA, 25 bp, Homo sapien
ctgtgttaaaggacaggagcctgcc

SEQ ID NO: 4871621 - DNA, 25 bp, Homo sapien
gcacagagacgcgtggttccgggag

SEQ ID NO: 4871622 - DNA, 25 bp, Homo sapien
ttttggcgcctgctccttttggaag

SEQ ID NO: 4871623 - DNA, 25 bp, Homo sapien
tgacttcacaccatgtcgtccatat

SEQ ID NO: 4871624 - DNA, 25 bp, Homo sapien
tgagccattccaggcggcttggcga

SEQ ID NO: 4871625 - DNA, 25 bp, Homo sapien
gaaaggaacatactcagctctcaga

SEQ ID NO: 4871626 - DNA, 25 bp, Homo sapien
aggcaggtgtgcctgagacagggtc

SEQ ID NO: 4871627 - DNA, 25 bp, Homo sapien
agaagaatcaggaggtgaggagact

SEQ ID NO: 4871628 - DNA, 25 bp, Homo sapien
tgtgcctgagacagggtcacagatc

SEQ ID NO: 4871629 - DNA, 25 bp, Homo sapien
ctggaatcaccggctgtggctcagg

SEQ ID NO: 4871630 - DNA, 25 bp, Homo sapien
gccctgaagacccgctgctgttctc

SEQ ID NO: 4871631 - DNA, 25 bp, Homo sapien
tgccctgaagacccgctgctgttct

SEQ ID NO: 4871632 - DNA, 25 bp, Homo sapien
tgttctcacggtagaccacggggtg

SEQ ID NO: 4871633 - DNA, 25 bp, Homo sapien
cgctgctgttctcacggtagaccac

SEQ ID NO: 4871634 - DNA, 25 bp, Homo sapien
gatgattcactcctccaagggctcg

SEQ ID NO: 4871635 - DNA, 25 bp, Homo sapien
caaatgacacttgggatcagcccgg

SEQ ID NO: 4871636 - DNA, 25 bp, Homo sapien
gacagtgatgaggtcgaggcccaca

SEQ ID NO: 4871637 - DNA, 25 bp, Homo sapien
gaggagcagtaagcccttgtcacca

SEQ ID NO: 4871638 - DNA, 25 bp, Homo sapien
gacaagtcctgagcatagaaccaca

SEQ ID NO: 4871639 - DNA, 25 bp, Homo sapien
gacaaagcacgagaaatttatggaa

SEQ ID NO: 4871640 - DNA, 25 bp, Homo sapien
ccatggggacaaagcacgagaaatt

SEQ ID NO: 4871641 - DNA, 25 bp, Homo sapien
tttaaatcaacttcaccatggggac

SEQ ID NO: 4871642 - DNA, 25 bp, Homo sapien
gtggcatgggtcttagacttggcca

SEQ ID NO: 4871643 - DNA, 25 bp, Homo sapien
agagatttgtatctttgtcatcggg

SEQ ID NO: 4871644 - DNA, 25 bp, Homo sapien
ctttgtcatcggggtttcttcatac

SEQ ID NO: 4871645 - DNA, 25 bp, Homo sapien
aagagatttgtatctttgtcatcgg

SEQ ID NO: 4871646 - DNA, 25 bp, Homo sapien
gtatctttgtcatcggggtttcttc

SEQ ID NO: 4871647 - DNA, 25 bp, Homo sapien
cttgtgcctcttggcaaagcgtatg

SEQ ID NO: 4871648 - DNA, 25 bp, Homo sapien
gccttggcacctatgctcatggcct

SEQ ID NO: 4871649 - DNA, 25 bp, Homo sapien
ttcttgtgcctcttggcaaagcgta

SEQ ID NO: 4871650 - DNA, 25 bp, Homo sapien
tgatagccttggcacctatgctcat

SEQ ID NO: 4871651 - DNA, 25 bp, Homo sapien
tcttggccatgcaggcatgaccatg

SEQ ID NO: 4871652 - DNA, 25 bp, Homo sapien
agcctcttggccatgcaggcatgac

SEQ ID NO: 4871653 - DNA, 25 bp, Homo sapien
tggccatgcaggcatgaccatgctt

SEQ ID NO: 4871654 - DNA, 25 bp, Homo sapien
ggccatgcaggcatgaccatgcttc

SEQ ID NO: 4871655 - DNA, 25 bp, Homo sapien
tttgcacaagtagcacaagaggacc

SEQ ID NO: 4871656 - DNA, 25 bp, Homo sapien
gtcccatgcagatggcagcccgggt

SEQ ID NO: 4871657 - DNA, 25 bp, Homo sapien
tgcctccggtttatttgcacaagta

SEQ ID NO: 4871658 - DNA, 25 bp, Homo sapien
acaagtagcacaagaggaccccagt

SEQ ID NO: 4871659 - DNA, 25 bp, Homo sapien
gtgacaacaagaaatgccagaccca

SEQ ID NO: 4871660 - DNA, 25 bp, Homo sapien
tgccagacccagtagtggaaacagc

SEQ ID NO: 4871661 - DNA, 25 bp, Homo sapien
gacaacaagaaatgccagacccagt

SEQ ID NO: 4871662 - DNA, 25 bp, Homo sapien
cagtagtggaaacagcaaagggcct

SEQ ID NO: 4871663 - DNA, 25 bp, Homo sapien
ccttgtgaatgcatagcctctggta

SEQ ID NO: 4871664 - DNA, 25 bp, Homo sapien
tcccagcccacaaggtagactctga

SEQ ID NO: 4871665 - DNA, 25 bp, Homo sapien
cctgctggcatggaacggccatgtg

SEQ ID NO: 4871666 - DNA, 25 bp, Homo sapien
tccagtgtgccggagcttttgtggc

SEQ ID NO: 4871667 - DNA, 25 bp, Homo sapien
gcatgcgatgggcacactgggtcct

SEQ ID NO: 4871668 - DNA, 25 bp, Homo sapien
cagtcgttgatgtgtgtcacccata

SEQ ID NO: 4871669 - DNA, 25 bp, Homo sapien
cgccctactcgtaagaggaagaagt

SEQ ID NO: 4871670 - DNA, 25 bp, Homo sapien
gacttttctatgttcgccctactcg

SEQ ID NO: 4871671 - DNA, 25 bp, Homo sapien
cattggtgctgccatgctgatgatg

SEQ ID NO: 4871672 - DNA, 25 bp, Homo sapien
actcattggtgctgccatgctgatg

SEQ ID NO: 4871673 - DNA, 25 bp, Homo sapien
cactcattggtgctgccatgctgat

SEQ ID NO: 4871674 - DNA, 25 bp, Homo sapien
ctcattggtgctgccatgctgatga

SEQ ID NO: 4871675 - DNA, 25 bp, Homo sapien
caggccacagtaaggagatcaggaa

SEQ ID NO: 4871676 - DNA, 25 bp, Homo sapien
ccgaagtactcatggcctgaggccc

SEQ ID NO: 4871677 - DNA, 25 bp, Homo sapien
ggcccaggccacagtaaggagatca

SEQ ID NO: 4871678 - DNA, 25 bp, Homo sapien
cccactgaaatcatccgaagtactc

SEQ ID NO: 4871679 - DNA, 25 bp, Homo sapien
atgtgcccccggactcaaggcaggg

SEQ ID NO: 4871680 - DNA, 25 bp, Homo sapien
gagccctgatgggaccgaaggcagg

SEQ ID NO: 4871681 - DNA, 25 bp, Homo sapien
cttccttctgcacaggtgtgcataa

SEQ ID NO: 4871682 - DNA, 25 bp, Homo sapien
cagtgagctaaggttcttccttctg

SEQ ID NO: 4871683 - DNA, 25 bp, Homo sapien
gctcggtaaatctccattagatcag

SEQ ID NO: 4871684 - DNA, 25 bp, Homo sapien
atctccattagatcaggctgagtgc

SEQ ID NO: 4871685 - DNA, 25 bp, Homo sapien
cctctgcgcgcaggagagtgccctg

SEQ ID NO: 4871686 - DNA, 25 bp, Homo sapien
gacagagttgccagaaatagctcct

SEQ ID NO: 4871687 - DNA, 25 bp, Homo sapien
catctgctaggaccccagactctga

SEQ ID NO: 4871688 - DNA, 25 bp, Homo sapien
gctaggaccccagactctgaaattt

SEQ ID NO: 4871689 - DNA, 25 bp, Homo sapien
ctgctaggaccccagactctgaaat

SEQ ID NO: 4871690 - DNA, 25 bp, Homo sapien
cagccatctgctaggaccccagact

SEQ ID NO: 4871691 - DNA, 25 bp, Homo sapien
caggtttcatagagccagatggctc

SEQ ID NO: 4871692 - DNA, 25 bp, Homo sapien
tacagctttactcagattgttcagg

SEQ ID NO: 4871693 - DNA, 25 bp, Homo sapien
gtagtttacagcaggtaggcaggca

SEQ ID NO: 4871694 - DNA, 25 bp, Homo sapien
ctttgcctgtattcataaatacagc

SEQ ID NO: 4871695 - DNA, 25 bp, Homo sapien
tatcattaagtactcactctttcct

SEQ ID NO: 4871696 - DNA, 25 bp, Homo sapien
ttttcttatcattaagtactcactc

SEQ ID NO: 4871697 - DNA, 25 bp, Homo sapien
tcttatcattaagtactcactcttt

SEQ ID NO: 4871698 - DNA, 25 bp, Homo sapien
tcattaagtactcactctttcctag

SEQ ID NO: 4871699 - DNA, 25 bp, Homo sapien
tttttctgtagcaaattcaacttcg

SEQ ID NO: 4871700 - DNA, 25 bp, Homo sapien
tcaacttcgaaaagcggtctgggct

SEQ ID NO: 4871701 - DNA, 25 bp, Homo sapien
tgtagcaaattcaacttcgaaaagc

SEQ ID NO: 4871702 - DNA, 25 bp, Homo sapien
gcaaattcaacttcgaaaagcggtc

SEQ ID NO: 4871703 - DNA, 25 bp, Homo sapien
aagccaaataagggcacttcacagg

SEQ ID NO: 4871704 - DNA, 25 bp, Homo sapien
caagccaaataagggcacttcacag

SEQ ID NO: 4871705 - DNA, 25 bp, Homo sapien
ctcaagccaaataagggcacttcac

SEQ ID NO: 4871706 - DNA, 25 bp, Homo sapien
gccaaataagggcacttcacaggcc

SEQ ID NO: 4871707 - DNA, 25 bp, Homo sapien
tgctggcgcatgtgagagctctcta

SEQ ID NO: 4871708 - DNA, 25 bp, Homo sapien
ggtgacatccttgcaagtagaccga

SEQ ID NO: 4871709 - DNA, 25 bp, Homo sapien
tggattctctcaccgagtcagtgca

SEQ ID NO: 4871710 - DNA, 25 bp, Homo sapien
gtagaccgaccagatccctcatgat

SEQ ID NO: 4871711 - DNA, 25 bp, Homo sapien
gctgtgatagttgaggttcgttgac

SEQ ID NO: 4871712 - DNA, 25 bp, Homo sapien
tctgctggctgtgatagttgaggtt

SEQ ID NO: 4871713 - DNA, 25 bp, Homo sapien
gatagttgaggttcgttgacaaccc

SEQ ID NO: 4871714 - DNA, 25 bp, Homo sapien
gttgaggttcgttgacaacccagtg

SEQ ID NO: 4871715 - DNA, 25 bp, Homo sapien
cacattttccatggtctgagcacac

SEQ ID NO: 4871716 - DNA, 25 bp, Homo sapien
ccaggtggtcttgcatttgatttgg

SEQ ID NO: 4871717 - DNA, 25 bp, Homo sapien
tccccaacagaacaccgtgatgaac

SEQ ID NO: 4871718 - DNA, 25 bp, Homo sapien
tgatttggttaatggaccaggtccc

SEQ ID NO: 4871719 - DNA, 25 bp, Homo sapien
gccatctgtgggtaccaatgggatg

SEQ ID NO: 4871720 - DNA, 25 bp, Homo sapien
gctgtgagagcggcctttctcccag

SEQ ID NO: 4871721 - DNA, 25 bp, Homo sapien
tggagcttggcccgggtttgaagga

SEQ ID NO: 4871722 - DNA, 25 bp, Homo sapien
acatggctggctgtgagagcggcct

SEQ ID NO: 4871723 - DNA, 25 bp, Homo sapien
ttggtgccgaacatctctcaaggca

SEQ ID NO: 4871724 - DNA, 25 bp, Homo sapien
acagaagcatcacaagaataatatt

SEQ ID NO: 4871725 - DNA, 25 bp, Homo sapien
ccaggatttggtgccgaacatctct

SEQ ID NO: 4871726 - DNA, 25 bp, Homo sapien
ggatttggtgccgaacatctctcaa

SEQ ID NO: 4871727 - DNA, 25 bp, Homo sapien
ccttacagggcatctggcctggtgt

SEQ ID NO: 4871728 - DNA, 25 bp, Homo sapien
tgtgaggggacagcggaactcgcag

SEQ ID NO: 4871729 - DNA, 25 bp, Homo sapien
ggatccaccttacagggcatctggc

SEQ ID NO: 4871730 - DNA, 25 bp, Homo sapien
ggccttcccctcatgtcgggatcca

SEQ ID NO: 4871731 - DNA, 25 bp, Homo sapien
ctggtcctgtcggtggatgcgcatt

SEQ ID NO: 4871732 - DNA, 25 bp, Homo sapien
ctgtcggtggatgcgcattctgctt

SEQ ID NO: 4871733 - DNA, 25 bp, Homo sapien
tcctgtcggtggatgcgcattctgc

SEQ ID NO: 4871734 - DNA, 25 bp, Homo sapien
tctgcttcccttaggcggggctggg

SEQ ID NO: 4871735 - DNA, 25 bp, Homo sapien
atctgctctgacacgggtttaaggg

SEQ ID NO: 4871736 - DNA, 25 bp, Homo sapien
cagcatctgctctgacacgggttta

SEQ ID NO: 4871737 - DNA, 25 bp, Homo sapien
gcatctgctctgacacgggtttaag

SEQ ID NO: 4871738 - DNA, 25 bp, Homo sapien
actcagcatctgctctgacacgggt

SEQ ID NO: 4871739 - DNA, 25 bp, Homo sapien
ctggaggcgagaggaggaggacatc

SEQ ID NO: 4871740 - DNA, 25 bp, Homo sapien
tcctcgcgcactggagctgtggcct

SEQ ID NO: 4871741 - DNA, 25 bp, Homo sapien
actgaggaccctcctcgcgcactgg

SEQ ID NO: 4871742 - DNA, 25 bp, Homo sapien
agctgtgggaatgcggacaggaagc

SEQ ID NO: 4871743 - DNA, 25 bp, Homo sapien
gcagacactgaggaccctcctcgcg

SEQ ID NO: 4871744 - DNA, 25 bp, Homo sapien
gatgctgcacatctgccacgtttct

SEQ ID NO: 4871745 - DNA, 25 bp, Homo sapien
agaatgtgctgcgtggtgggaacac

SEQ ID NO: 4871746 - DNA, 25 bp, Homo sapien
cactgagtgagcaacagatgaggga

SEQ ID NO: 4871747 - DNA, 25 bp, Homo sapien
ggaaattgctccacatcccgtggag

SEQ ID NO: 4871748 - DNA, 25 bp, Homo sapien
cagtagtgctgcatggaattcgtcc

SEQ ID NO: 4871749 - DNA, 25 bp, Homo sapien
ccagcacactatgaacagaaactgc

SEQ ID NO: 4871750 - DNA, 25 bp, Homo sapien
caaggcaatattgcagtagtgctgc

SEQ ID NO: 4871751 - DNA, 25 bp, Homo sapien
caccctctgtgccaaggcaatattg

SEQ ID NO: 4871752 - DNA, 25 bp, Homo sapien
agcagtttggctatgtcatgtcgac

SEQ ID NO: 4871753 - DNA, 25 bp, Homo sapien
tctccccatcattggcaaagtgctg

SEQ ID NO: 4871754 - DNA, 25 bp, Homo sapien
aggccatagcccctctgaatgtgcc

SEQ ID NO: 4871755 - DNA, 25 bp, Homo sapien
tcatccccagtgcaaagcagtttgg

SEQ ID NO: 4871756 - DNA, 25 bp, Homo sapien
taagtctacgcaagactgattagca

SEQ ID NO: 4871757 - DNA, 25 bp, Homo sapien
gtctacgcaagactgattagcatcc

SEQ ID NO: 4871758 - DNA, 25 bp, Homo sapien
cttaagtctacgcaagactgattag

SEQ ID NO: 4871759 - DNA, 25 bp, Homo sapien
tacgcaagactgattagcatccagt

SEQ ID NO: 4871760 - DNA, 25 bp, Homo sapien
aaaaggtacctaaggcgttcatgag

SEQ ID NO: 4871761 - DNA, 25 bp, Homo sapien
gatgctgacgtataatgcggctgcc

SEQ ID NO: 4871762 - DNA, 25 bp, Homo sapien
gcagctatggttttagcctcctcca

SEQ ID NO: 4871763 - DNA, 25 bp, Homo sapien
gctggcaagatgctgcgaagtttcc

SEQ ID NO: 4871764 - DNA, 25 bp, Homo sapien
taacgttgggcaacccacagtgatt

SEQ ID NO: 4871765 - DNA, 25 bp, Homo sapien
ccacagtgatttaacctcagagcct

SEQ ID NO: 4871766 - DNA, 25 bp, Homo sapien
agccctttcttcccacatgggtgcc

SEQ ID NO: 4871767 - DNA, 25 bp, Homo sapien
ctttctaacgttgggcaacccacag

SEQ ID NO: 4871768 - DNA, 25 bp, Homo sapien
tcagtatgtgagtagtatttccatg

SEQ ID NO: 4871769 - DNA, 25 bp, Homo sapien
tatgtgagtagtatttccatgtctg

SEQ ID NO: 4871770 - DNA, 25 bp, Homo sapien
agtatgtgagtagtatttccatgtc

SEQ ID NO: 4871771 - DNA, 25 bp, Homo sapien
tgtgagtagtatttccatgtctggg

SEQ ID NO: 4871772 - DNA, 25 bp, Homo sapien
gagcaggcaacgctcagcctgagaa

SEQ ID NO: 4871773 - DNA, 25 bp, Homo sapien
tccaagagcaggcaacgctcagcct

SEQ ID NO: 4871774 - DNA, 25 bp, Homo sapien
aagagcaggcaacgctcagcctgag

SEQ ID NO: 4871775 - DNA, 25 bp, Homo sapien
tcctccaagagcaggcaacgctcag

SEQ ID NO: 4871776 - DNA, 25 bp, Homo sapien
caaaaagcagttgtattgagaaatc

SEQ ID NO: 4871777 - DNA, 25 bp, Homo sapien
cacttgttagctgagagctgtcggg

SEQ ID NO: 4871778 - DNA, 25 bp, Homo sapien
tccatagaggctgtacaattttcat

SEQ ID NO: 4871779 - DNA, 25 bp, Homo sapien
aggagtagcctcagtgtttcagcag

SEQ ID NO: 4871780 - DNA, 25 bp, Homo sapien
tgtagaaacactttcagtcccgact

SEQ ID NO: 4871781 - DNA, 25 bp, Homo sapien
agacagtccacccatccaacaaaga

SEQ ID NO: 4871782 - DNA, 25 bp, Homo sapien
ctgccatcagccatggaaactttgg

SEQ ID NO: 4871783 - DNA, 25 bp, Homo sapien
tcagccaagggcagacctgcagaca

SEQ ID NO: 4871784 - DNA, 25 bp, Homo sapien
ttgaacatgggctctatccccggaa

SEQ ID NO: 4871785 - DNA, 25 bp, Homo sapien
tcgcagttgaacatgggctctatcc

SEQ ID NO: 4871786 - DNA, 25 bp, Homo sapien
cacattcctcgcagttgaacatggg

SEQ ID NO: 4871787 - DNA, 25 bp, Homo sapien
taaatttttctgcacattcctcgca

SEQ ID NO: 4871788 - DNA, 25 bp, Homo sapien
aggaacgcaggcctcacagcgatca

SEQ ID NO: 4871789 - DNA, 25 bp, Homo sapien
ctcacagcgatcacagcaaacagaa

SEQ ID NO: 4871790 - DNA, 25 bp, Homo sapien
agcggtgaaggaacgcaggcctcac

SEQ ID NO: 4871791 - DNA, 25 bp, Homo sapien
gagggcagcatgagcggtgaaggaa

SEQ ID NO: 4871792 - DNA, 25 bp, Homo sapien
gggctgctgtctggaacacagagcc

SEQ ID NO: 4871793 - DNA, 25 bp, Homo sapien
cctgaggaaccatccgggccatttc

SEQ ID NO: 4871794 - DNA, 25 bp, Homo sapien
gctgctgtctggaacacagagcctg

SEQ ID NO: 4871795 - DNA, 25 bp, Homo sapien
aacacagagcctgaggaaccatccg

SEQ ID NO: 4871796 - DNA, 25 bp, Homo sapien
agggaaaaagcacatgccgccagcc

SEQ ID NO: 4871797 - DNA, 25 bp, Homo sapien
taacatggccacaagtgtcctgcag

SEQ ID NO: 4871798 - DNA, 25 bp, Homo sapien
caactgaccactgccacataacatg

SEQ ID NO: 4871799 - DNA, 25 bp, Homo sapien
actctcatcctcatgaacaagccgg

SEQ ID NO: 4871800 - DNA, 25 bp, Homo sapien
agctcccgccctcaaagtcagagcg

SEQ ID NO: 4871801 - DNA, 25 bp, Homo sapien
gtcagagcgtcccaagctcctctgt

SEQ ID NO: 4871802 - DNA, 25 bp, Homo sapien
gccctcaaagtcagagcgtcccaag

SEQ ID NO: 4871803 - DNA, 25 bp, Homo sapien
caaagtcagagcgtcccaagctcct

SEQ ID NO: 4871804 - DNA, 25 bp, Homo sapien
tgtgtaaaagttgtgtagtatggaa

SEQ ID NO: 4871805 - DNA, 25 bp, Homo sapien
gaagagatgcaagcaattccactgg

SEQ ID NO: 4871806 - DNA, 25 bp, Homo sapien
tatgctaggaccacttaaaccaaac

SEQ ID NO: 4871807 - DNA, 25 bp, Homo sapien
gattgctttcggctatgctaggacc

SEQ ID NO: 4871808 - DNA, 25 bp, Homo sapien
tgggcatttgctgccagcctttttc

SEQ ID NO: 4871809 - DNA, 25 bp, Homo sapien
tgttttttgtccagttgggcatttg

SEQ ID NO: 4871810 - DNA, 25 bp, Homo sapien
tccagttgggcatttgctgccagcc

SEQ ID NO: 4871811 - DNA, 25 bp, Homo sapien
agggtgtctgccacccctgccgacc

SEQ ID NO: 4871812 - DNA, 25 bp, Homo sapien
tccacataaatgactgcagctggct

SEQ ID NO: 4871813 - DNA, 25 bp, Homo sapien
cattccacataaatgactgcagctg

SEQ ID NO: 4871814 - DNA, 25 bp, Homo sapien
ctgcattccacataaatgactgcag

SEQ ID NO: 4871815 - DNA, 25 bp, Homo sapien
ccacataaatgactgcagctggctc

SEQ ID NO: 4871816 - DNA, 25 bp, Homo sapien
gccaggtcttggtttcacaccttcc

SEQ ID NO: 4871817 - DNA, 25 bp, Homo sapien
ctcatccagacacagtcctctttcc

SEQ ID NO: 4871818 - DNA, 25 bp, Homo sapien
ttcctctcttcccttggaaagtctc

SEQ ID NO: 4871819 - DNA, 25 bp, Homo sapien
ccctaggctgccaggtcttggtttc

SEQ ID NO: 4871820 - DNA, 25 bp, Homo sapien
acagagatgtcagccaagtgtcaga

SEQ ID NO: 4871821 - DNA, 25 bp, Homo sapien
taggggcccatagctcaggcagccc

SEQ ID NO: 4871822 - DNA, 25 bp, Homo sapien
gaactgtgaccaggacacagattcc

SEQ ID NO: 4871823 - DNA, 25 bp, Homo sapien
aggcccataacaggctggctccagg

SEQ ID NO: 4871824 - DNA, 25 bp, Homo sapien
gagaaacactctaccaggacttttg

SEQ ID NO: 4871825 - DNA, 25 bp, Homo sapien
tgtgaatcggttcaaccacctgttg

SEQ ID NO: 4871826 - DNA, 25 bp, Homo sapien
cagagtgttaatacattgaaggcca

SEQ ID NO: 4871827 - DNA, 25 bp, Homo sapien
cattgaaggccagtcttattgaaag

SEQ ID NO: 4871828 - DNA, 25 bp, Homo sapien
tcctgactggtgctccggagaccca

SEQ ID NO: 4871829 - DNA, 25 bp, Homo sapien
ctgactggtgctccggagacccagg

SEQ ID NO: 4871830 - DNA, 25 bp, Homo sapien
cctgactggtgctccggagacccag

SEQ ID NO: 4871831 - DNA, 25 bp, Homo sapien
tgactggtgctccggagacccaggc

SEQ ID NO: 4871832 - DNA, 25 bp, Homo sapien
cgaggcttttggggcccttggtgct

SEQ ID NO: 4871833 - DNA, 25 bp, Homo sapien
tccccaatacggcagcccaaataaa

SEQ ID NO: 4871834 - DNA, 25 bp, Homo sapien
tcagttgatctgtgcattctttctt

SEQ ID NO: 4871835 - DNA, 25 bp, Homo sapien
ccaaataaagcagtctcagttgatc

SEQ ID NO: 4871836 - DNA, 25 bp, Homo sapien
tgccgtgacttggatagggccagac

SEQ ID NO: 4871837 - DNA, 25 bp, Homo sapien
ctgctcccagaaatcatccttctgt

SEQ ID NO: 4871838 - DNA, 25 bp, Homo sapien
ttctgctcccagaaatcatccttct

SEQ ID NO: 4871839 - DNA, 25 bp, Homo sapien
ttgttctgctcccagaaatcatcct

SEQ ID NO: 4871840 - DNA, 25 bp, Homo sapien
gctcccagaaatcatccttctgttt

SEQ ID NO: 4871841 - DNA, 25 bp, Homo sapien
gaagtgatggtttttgattccttac

SEQ ID NO: 4871842 - DNA, 25 bp, Homo sapien
cagcccttatggtcagcctttgaag

SEQ ID NO: 4871843 - DNA, 25 bp, Homo sapien
gggcagtccgtctgtctactgggct

SEQ ID NO: 4871844 - DNA, 25 bp, Homo sapien
tttgctgcacatcccccaagggggg

SEQ ID NO: 4871845 - DNA, 25 bp, Homo sapien
tggggattctgtcggcccacactgc

SEQ ID NO: 4871846 - DNA, 25 bp, Homo sapien
cgtgtgccaccgagcctctgtaatg

SEQ ID NO: 4871847 - DNA, 25 bp, Homo sapien
ttctccatggatggccgggacacct

SEQ ID NO: 4871848 - DNA, 25 bp, Homo sapien
tggccgggacacctgacctggcctg

SEQ ID NO: 4871849 - DNA, 25 bp, Homo sapien
tggaagatctgacccgacacagtag

SEQ ID NO: 4871850 - DNA, 25 bp, Homo sapien
tcttggggtccagtccggaagctct

SEQ ID NO: 4871851 - DNA, 25 bp, Homo sapien
tccctcctccggtctcctggaagat

SEQ ID NO: 4871852 - DNA, 25 bp, Homo sapien
cggtaccatctgtggatgggaacct

SEQ ID NO: 4871853 - DNA, 25 bp, Homo sapien
gactgtgatccgtagtatatcgagc

SEQ ID NO: 4871854 - DNA, 25 bp, Homo sapien
cagggcagaagtcattacctccatt

SEQ ID NO: 4871855 - DNA, 25 bp, Homo sapien
cgagctatattagtgatacatgatg

SEQ ID NO: 4871856 - DNA, 25 bp, Homo sapien
gaagatgccatgtagtcctccaggg

SEQ ID NO: 4871857 - DNA, 25 bp, Homo sapien
gcacgccttcccctacatactccat

SEQ ID NO: 4871858 - DNA, 25 bp, Homo sapien
gcagcacgccttcccctacatactc

SEQ ID NO: 4871859 - DNA, 25 bp, Homo sapien
agcacgccttcccctacatactcca

SEQ ID NO: 4871860 - DNA, 25 bp, Homo sapien
cagcagcacgccttcccctacatac

SEQ ID NO: 4871861 - DNA, 25 bp, Homo sapien
caccgggctgtagtgagtgtccgtc

SEQ ID NO: 4871862 - DNA, 25 bp, Homo sapien
caaagtatttgtatccacgaagagc

SEQ ID NO: 4871863 - DNA, 25 bp, Homo sapien
ggtttccttggatctcgcgttcgga

SEQ ID NO: 4871864 - DNA, 25 bp, Homo sapien
gttcggaatactccgcaggcaccgg

SEQ ID NO: 4871865 - DNA, 25 bp, Homo sapien
tcctgggttatagctgcagagtgtg

SEQ ID NO: 4871866 - DNA, 25 bp, Homo sapien
tgtgggccagagagtgctttcctgt

SEQ ID NO: 4871867 - DNA, 25 bp, Homo sapien
cagctgctgccgtgaaatatctgaa

SEQ ID NO: 4871868 - DNA, 25 bp, Homo sapien
ctgtggtcaatattgtggtctcccc

SEQ ID NO: 4871869 - DNA, 25 bp, Homo sapien
ccatatgcacagacgagctacctgt

SEQ ID NO: 4871870 - DNA, 25 bp, Homo sapien
cagcatggcagggttcccaaccaat

SEQ ID NO: 4871871 - DNA, 25 bp, Homo sapien
ttcagcatggcagggttcccaacca

SEQ ID NO: 4871872 - DNA, 25 bp, Homo sapien
tggcagggttcccaaccaattctgg

SEQ ID NO: 4871873 - DNA, 25 bp, Homo sapien
aacagtgtgtacttctgcaggcctt

SEQ ID NO: 4871874 - DNA, 25 bp, Homo sapien
cagtgtgtacttctgcaggccttac

SEQ ID NO: 4871875 - DNA, 25 bp, Homo sapien
agaaacagtgtgtacttctgcaggc

SEQ ID NO: 4871876 - DNA, 25 bp, Homo sapien
gaaacagtgtgtacttctgcaggcc

SEQ ID NO: 4871877 - DNA, 25 bp, Homo sapien
tcggttcaccagaactagaagtcag

SEQ ID NO: 4871878 - DNA, 25 bp, Homo sapien
tcaatacaactgtcccgcagtgttc

SEQ ID NO: 4871879 - DNA, 25 bp, Homo sapien
ctgacttcatagctaccaaggcagg

SEQ ID NO: 4871880 - DNA, 25 bp, Homo sapien
catggagctgccacaacagcttggc

SEQ ID NO: 4871881 - DNA, 25 bp, Homo sapien
cagggagattgagggtctcatcccc

SEQ ID NO: 4871882 - DNA, 25 bp, Homo sapien
acaaggcgaagagcccccgagtggc

SEQ ID NO: 4871883 - DNA, 25 bp, Homo sapien
aggcaaggcacaaggcgaagagccc

SEQ ID NO: 4871884 - DNA, 25 bp, Homo sapien
gcacaaggcgaagagcccccgagtg

SEQ ID NO: 4871885 - DNA, 25 bp, Homo sapien
tcactgagagcgaataggaaggctc

SEQ ID NO: 4871886 - DNA, 25 bp, Homo sapien
cattggcacacttattgagagagtt

SEQ ID NO: 4871887 - DNA, 25 bp, Homo sapien
tgagagagtttcaaatcagcgtgct

SEQ ID NO: 4871888 - DNA, 25 bp, Homo sapien
gaaggctcgtgcaccagagagacta

SEQ ID NO: 4871889 - DNA, 25 bp, Homo sapien
tccacaactggtgataacctcctct

SEQ ID NO: 4871890 - DNA, 25 bp, Homo sapien
tgaaaaagttcacgtgcattaacct

SEQ ID NO: 4871891 - DNA, 25 bp, Homo sapien
tgcattaaccttggaaacttccaca

SEQ ID NO: 4871892 - DNA, 25 bp, Homo sapien
ccttgtgtgaaaaagttcacgtgca

SEQ ID NO: 4871893 - DNA, 25 bp, Homo sapien
gatccttcttaagcccatcaactag

SEQ ID NO: 4871894 - DNA, 25 bp, Homo sapien
tctttacctgtaagctgccctcaga

SEQ ID NO: 4871895 - DNA, 25 bp, Homo sapien
gcatgtccaggtcacaagaccagag

SEQ ID NO: 4871896 - DNA, 25 bp, Homo sapien
tatagtgcccagtcaggtgacaggg

SEQ ID NO: 4871897 - DNA, 25 bp, Homo sapien
gaagccaccgcacagtcctccatca

SEQ ID NO: 4871898 - DNA, 25 bp, Homo sapien
aagccaccgcacagtcctccatcat

SEQ ID NO: 4871899 - DNA, 25 bp, Homo sapien
agccaccgcacagtcctccatcatg

SEQ ID NO: 4871900 - DNA, 25 bp, Homo sapien
tgcaaacattgtagctcccaccata

SEQ ID NO: 4871901 - DNA, 25 bp, Homo sapien
tgtcataacaaatgagtcctggcac

SEQ ID NO: 4871902 - DNA, 25 bp, Homo sapien
aatcactcacgcacttgggaacaag

SEQ ID NO: 4871903 - DNA, 25 bp, Homo sapien
gcatctgtggacaacgcgctggaaa

SEQ ID NO: 4871904 - DNA, 25 bp, Homo sapien
gtgaagtcagctcccctgagaggat

SEQ ID NO: 4871905 - DNA, 25 bp, Homo sapien
ctagtgaagtcagctcccctgagag

SEQ ID NO: 4871906 - DNA, 25 bp, Homo sapien
tcagctcccctgagaggatgtttac

SEQ ID NO: 4871907 - DNA, 25 bp, Homo sapien
gtcagctcccctgagaggatgttta

SEQ ID NO: 4871908 - DNA, 25 bp, Homo sapien
tgaatggggagcctgtgcagaggac

SEQ ID NO: 4871909 - DNA, 25 bp, Homo sapien
gagtgttccgcggaatcagctcagg

SEQ ID NO: 4871910 - DNA, 25 bp, Homo sapien
tccgcggaatcagctcaggttccag

SEQ ID NO: 4871911 - DNA, 25 bp, Homo sapien
tgttccgcggaatcagctcaggttc

SEQ ID NO: 4871912 - DNA, 25 bp, Homo sapien
acaaaaagacgggcagaagatagtg

SEQ ID NO: 4871913 - DNA, 25 bp, Homo sapien
caaaaagacgggcagaagatagtgc

SEQ ID NO: 4871914 - DNA, 25 bp, Homo sapien
ctacaaaaagacgggcagaagatag

SEQ ID NO: 4871915 - DNA, 25 bp, Homo sapien
tacaaaaagacgggcagaagatagt

SEQ ID NO: 4871916 - DNA, 25 bp, Homo sapien
ggatgaccatggcaccgtccttcaa

SEQ ID NO: 4871917 - DNA, 25 bp, Homo sapien
tgtgagatcatgcacagcccgggca

SEQ ID NO: 4871918 - DNA, 25 bp, Homo sapien
agagcccctggcagcgcgcctgtga

SEQ ID NO: 4871919 - DNA, 25 bp, Homo sapien
gtcctgtccggcgagctgtcccaag

SEQ ID NO: 4871920 - DNA, 25 bp, Homo sapien
caatgttcccggctgaaatcagcag

SEQ ID NO: 4871921 - DNA, 25 bp, Homo sapien
acgagtgtcggttgatggcaccgct

SEQ ID NO: 4871922 - DNA, 25 bp, Homo sapien
gatctaagcagatgcactcggggcc

SEQ ID NO: 4871923 - DNA, 25 bp, Homo sapien
gctttccacggattaattcttctta

SEQ ID NO: 4871924 - DNA, 25 bp, Homo sapien
tccatttgcaacaagactcaaaggg

SEQ ID NO: 4871925 - DNA, 25 bp, Homo sapien
caaaggagatccgtttgcagggtta

SEQ ID NO: 4871926 - DNA, 25 bp, Homo sapien
ggattttagtaaccagtctgtcaga

SEQ ID NO: 4871927 - DNA, 25 bp, Homo sapien
gcatattatacacttggccgtccta

SEQ ID NO: 4871928 - DNA, 25 bp, Homo sapien
tccagccctcgagttctccaggctc

SEQ ID NO: 4871929 - DNA, 25 bp, Homo sapien
gatgttgcccatgggccaaaggtat

SEQ ID NO: 4871930 - DNA, 25 bp, Homo sapien
cccatgggccaaaggtatgcacagg

SEQ ID NO: 4871931 - DNA, 25 bp, Homo sapien
tcctggtggctatgaatggggctcc

SEQ ID NO: 4871932 - DNA, 25 bp, Homo sapien
ttgtgttcaatagtgaacgtgggct

SEQ ID NO: 4871933 - DNA, 25 bp, Homo sapien
gagcacatgccagacaggctcagac

SEQ ID NO: 4871934 - DNA, 25 bp, Homo sapien
agaagcacaataattcccccttccg

SEQ ID NO: 4871935 - DNA, 25 bp, Homo sapien
cccttccgttgtgttcaatagtgaa

SEQ ID NO: 4871936 - DNA, 25 bp, Homo sapien
tagctgctctcgtcatggttagatc

SEQ ID NO: 4871937 - DNA, 25 bp, Homo sapien
gggctcactcaggtacagtccgatc

SEQ ID NO: 4871938 - DNA, 25 bp, Homo sapien
ggttagatctagcatcttgccatgg

SEQ ID NO: 4871939 - DNA, 25 bp, Homo sapien
aatagaaaccccgtgtggtgctggt

SEQ ID NO: 4871940 - DNA, 25 bp, Homo sapien
gggtctgacgctgaccctgaacagg

SEQ ID NO: 4871941 - DNA, 25 bp, Homo sapien
tgacgctgaccctgaacaggatgca

SEQ ID NO: 4871942 - DNA, 25 bp, Homo sapien
aattctgcagggtctgacgctgacc

SEQ ID NO: 4871943 - DNA, 25 bp, Homo sapien
gctgaccctgaacaggatgcatggg

SEQ ID NO: 4871944 - DNA, 25 bp, Homo sapien
gaaagcacctcccaactctgcagag

SEQ ID NO: 4871945 - DNA, 25 bp, Homo sapien
gccgatgcagacgggacccctcagg

SEQ ID NO: 4871946 - DNA, 25 bp, Homo sapien
gcagcagctcgcagcctcttctaaa

SEQ ID NO: 4871947 - DNA, 25 bp, Homo sapien
gcacagttctgcagttcttggccct

SEQ ID NO: 4871948 - DNA, 25 bp, Homo sapien
agagctctcagcgttgtcatcgtcc

SEQ ID NO: 4871949 - DNA, 25 bp, Homo sapien
cgttgtcatcgtcctggttatgcaa

SEQ ID NO: 4871950 - DNA, 25 bp, Homo sapien
tgcaacagagctctcagcgttgtca

SEQ ID NO: 4871951 - DNA, 25 bp, Homo sapien
cagcgttgtcatcgtcctggttatg

SEQ ID NO: 4871952 - DNA, 25 bp, Homo sapien
gaggtccattcaggcaagggtcagc

SEQ ID NO: 4871953 - DNA, 25 bp, Homo sapien
gtcaagagtgtccaactgcaggccg

SEQ ID NO: 4871954 - DNA, 25 bp, Homo sapien
aatgaactgagactggaggaacccc

SEQ ID NO: 4871955 - DNA, 25 bp, Homo sapien
taggatatactggtcagcacccgtg

SEQ ID NO: 4871956 - DNA, 25 bp, Homo sapien
tgtacccgggttgaggaccagtgca

SEQ ID NO: 4871957 - DNA, 25 bp, Homo sapien
agcactcacgctggtgtcagccaca

SEQ ID NO: 4871958 - DNA, 25 bp, Homo sapien
acagcactcacgctggtgtcagcca

SEQ ID NO: 4871959 - DNA, 25 bp, Homo sapien
cacatactccagctgtacccgggtt

SEQ ID NO: 4871960 - DNA, 25 bp, Homo sapien
aacagtttcagcgatagcagacaaa

SEQ ID NO: 4871961 - DNA, 25 bp, Homo sapien
tcagcgatagcagacaaatccacac

SEQ ID NO: 4871962 - DNA, 25 bp, Homo sapien
cagaacagtttcagcgatagcagac

SEQ ID NO: 4871963 - DNA, 25 bp, Homo sapien
gtttcagcgatagcagacaaatcca

SEQ ID NO: 4871964 - DNA, 25 bp, Homo sapien
ttcaagggaagacaatatatggcta

SEQ ID NO: 4871965 - DNA, 25 bp, Homo sapien
tatatggctatgcagtattcagagg

SEQ ID NO: 4871966 - DNA, 25 bp, Homo sapien
aaatacttggtgaatgaattcctaa

SEQ ID NO: 4871967 - DNA, 25 bp, Homo sapien
aaatctgtggcatgttgtaaatact

SEQ ID NO: 4871968 - DNA, 25 bp, Homo sapien
tccagtggaagtcagcagatcagga

SEQ ID NO: 4871969 - DNA, 25 bp, Homo sapien
gatgtgagctggcactgccgccttc

SEQ ID NO: 4871970 - DNA, 25 bp, Homo sapien
gtcctctaaccacccagagtgccag

SEQ ID NO: 4871971 - DNA, 25 bp, Homo sapien
actacagcagccaggaggtatgggc

SEQ ID NO: 4871972 - DNA, 25 bp, Homo sapien
aggctgttataagctccaggcttca

SEQ ID NO: 4871973 - DNA, 25 bp, Homo sapien
ggcttcaccgtatctgtcactttca

SEQ ID NO: 4871974 - DNA, 25 bp, Homo sapien
gctccaggcttcaccgtatctgtca

SEQ ID NO: 4871975 - DNA, 25 bp, Homo sapien
gtaagcaggctgttataagctccag

SEQ ID NO: 4871976 - DNA, 25 bp, Homo sapien
tgttgtccttgaatcctttatgacc

SEQ ID NO: 4871977 - DNA, 25 bp, Homo sapien
ttgttgtccttgaatcctttatgac

SEQ ID NO: 4871978 - DNA, 25 bp, Homo sapien
aaaagcttaaactctccagcagcaa

SEQ ID NO: 4871979 - DNA, 25 bp, Homo sapien
tagcatctgcccatgaaatcagttt

SEQ ID NO: 4871980 - DNA, 25 bp, Homo sapien
tctggaacagcctcaaaactgcatt

SEQ ID NO: 4871981 - DNA, 25 bp, Homo sapien
tgttttccacaattgccagccatct

SEQ ID NO: 4871982 - DNA, 25 bp, Homo sapien
ggccagggctttctcggccacggct

SEQ ID NO: 4871983 - DNA, 25 bp, Homo sapien
gaggatacgaagctgaggtctagca

SEQ ID NO: 4871984 - DNA, 25 bp, Homo sapien
tagcatccgggccagggctttctcg

SEQ ID NO: 4871985 - DNA, 25 bp, Homo sapien
aagctgaggtctagcatccgggcca

SEQ ID NO: 4871986 - DNA, 25 bp, Homo sapien
tccagggcggaactcaagataaatc

SEQ ID NO: 4871987 - DNA, 25 bp, Homo sapien
agtcctccagggcggaactcaagat

SEQ ID NO: 4871988 - DNA, 25 bp, Homo sapien
ggaactcaagataaatctattcacc

SEQ ID NO: 4871989 - DNA, 25 bp, Homo sapien
cagggcggaactcaagataaatcta

SEQ ID NO: 4871990 - DNA, 25 bp, Homo sapien
gtgaatgaaagttcaccccagagca

SEQ ID NO: 4871991 - DNA, 25 bp, Homo sapien
aatgaaagttcaccccagagcaggg

SEQ ID NO: 4871992 - DNA, 25 bp, Homo sapien
gttcaccccagagcagggttacacc

SEQ ID NO: 4871993 - DNA, 25 bp, Homo sapien
gaaagttcaccccagagcagggtta

SEQ ID NO: 4871994 - DNA, 25 bp, Homo sapien
gaagagcagcgtggtcaagagacca

SEQ ID NO: 4871995 - DNA, 25 bp, Homo sapien
gtcaagagaccacggctgcgtaacc

SEQ ID NO: 4871996 - DNA, 25 bp, Homo sapien
agagaccacggctgcgtaaccccgt

SEQ ID NO: 4871997 - DNA, 25 bp, Homo sapien
gcagcgtggtcaagagaccacggct

SEQ ID NO: 4871998 - DNA, 25 bp, Homo sapien
aaggtggccagccttcggcttttgc

SEQ ID NO: 4871999 - DNA, 25 bp, Homo sapien
tggagtcacaacatcggcatagaag

SEQ ID NO: 4872000 - DNA, 25 bp, Homo sapien
tgtgcctggattcccctttgcaagc

SEQ ID NO: 4872001 - DNA, 25 bp, Homo sapien
taatcgtttttggatgcacaacagc

SEQ ID NO: 4872002 - DNA, 25 bp, Homo sapien
tacgaaaggaacagtctgacaggcg

SEQ ID NO: 4872003 - DNA, 25 bp, Homo sapien
caaatactgtctgactgagagataa

SEQ ID NO: 4872004 - DNA, 25 bp, Homo sapien
tttagtactgtcagagccccacgga

SEQ ID NO: 4872005 - DNA, 25 bp, Homo sapien
tgcgccaggcaatgtggaagtcatt

SEQ ID NO: 4872006 - DNA, 25 bp, Homo sapien
ttaatgagcttaacacgcagcaggg

SEQ ID NO: 4872007 - DNA, 25 bp, Homo sapien
gatgctcttcaggatgcatctgagg

SEQ ID NO: 4872008 - DNA, 25 bp, Homo sapien
tcaccagttcttagcagagaagccc

SEQ ID NO: 4872009 - DNA, 25 bp, Homo sapien
aattgtcagcttccagcctgcgtga

SEQ ID NO: 4872010 - DNA, 25 bp, Homo sapien
aagggaaatgggatcccctgagcta

SEQ ID NO: 4872011 - DNA, 25 bp, Homo sapien
gctagttagctctttggcggccttg

SEQ ID NO: 4872012 - DNA, 25 bp, Homo sapien
ccttggggctccgagctgtgccggc

SEQ ID NO: 4872013 - DNA, 25 bp, Homo sapien
gatcccctgagctagttagctcttt

SEQ ID NO: 4872014 - DNA, 25 bp, Homo sapien
tagatccctgaaattagtcgcctga

SEQ ID NO: 4872015 - DNA, 25 bp, Homo sapien
gatgatggatcataaggccttttta

SEQ ID NO: 4872016 - DNA, 25 bp, Homo sapien
cataaggcctttttagatccctgaa

SEQ ID NO: 4872017 - DNA, 25 bp, Homo sapien
tcgcctgattcaacaatagcaataa

SEQ ID NO: 4872018 - DNA, 25 bp, Homo sapien
cagcctatccgttccaggttctctg

SEQ ID NO: 4872019 - DNA, 25 bp, Homo sapien
cactgattaagttccaaggtactca

SEQ ID NO: 4872020 - DNA, 25 bp, Homo sapien
caaggtactcagatgggagtttgcc

SEQ ID NO: 4872021 - DNA, 25 bp, Homo sapien
actgttcccggacagcctatccgtt

SEQ ID NO: 4872022 - DNA, 25 bp, Homo sapien
tttcgcccaggcagacttacagatc

SEQ ID NO: 4872023 - DNA, 25 bp, Homo sapien
tataagttgcgggaatttcgcccag

SEQ ID NO: 4872024 - DNA, 25 bp, Homo sapien
gagaattgagtataagttgcgggaa

SEQ ID NO: 4872025 - DNA, 25 bp, Homo sapien
ttaccgtttctgagaattgagtata

SEQ ID NO: 4872026 - DNA, 25 bp, Homo sapien
ctgcttatcaagtctgaatcggatg

SEQ ID NO: 4872027 - DNA, 25 bp, Homo sapien
gagaggagtctgttgttccgtcgtc

SEQ ID NO: 4872028 - DNA, 25 bp, Homo sapien
gagtctgttgttccgtcgtctcccc

SEQ ID NO: 4872029 - DNA, 25 bp, Homo sapien
gcttatcaagtctgaatcggatggg

SEQ ID NO: 4872030 - DNA, 25 bp, Homo sapien
tcgcctccggaaggagctactgaca

SEQ ID NO: 4872031 - DNA, 25 bp, Homo sapien
aggccaaaggcctcgcctccggaag

SEQ ID NO: 4872032 - DNA, 25 bp, Homo sapien
gcctcgcctccggaaggagctactg

SEQ ID NO: 4872033 - DNA, 25 bp, Homo sapien
caaaggcctcgcctccggaaggagc

SEQ ID NO: 4872034 - DNA, 25 bp, Homo sapien
atttcagagccccagtgacaccaag

SEQ ID NO: 4872035 - DNA, 25 bp, Homo sapien
accaccaagacctcctgagtggagt

SEQ ID NO: 4872036 - DNA, 25 bp, Homo sapien
agacctcctgagtggagtctgacct

SEQ ID NO: 4872037 - DNA, 25 bp, Homo sapien
tgacctctggatttcagagccccag

SEQ ID NO: 4872038 - DNA, 25 bp, Homo sapien
tcagtgaaaggccacttggagtgct

SEQ ID NO: 4872039 - DNA, 25 bp, Homo sapien
ttcgacgaaccccacagcaattgta

SEQ ID NO: 4872040 - DNA, 25 bp, Homo sapien
gagtgctgacagcttatctggtcca

SEQ ID NO: 4872041 - DNA, 25 bp, Homo sapien
tctgaactgatggtctgggaagcca

SEQ ID NO: 4872042 - DNA, 25 bp, Homo sapien
cattaagtatcctgcctatagcaag

SEQ ID NO: 4872043 - DNA, 25 bp, Homo sapien
gccaggactttgttgggtgagaaaa

SEQ ID NO: 4872044 - DNA, 25 bp, Homo sapien
gaatgaacctaggatcagtcttgag

SEQ ID NO: 4872045 - DNA, 25 bp, Homo sapien
tttttggcatcaaggatacctacag

SEQ ID NO: 4872046 - DNA, 25 bp, Homo sapien
tcaccaggtactgacaagcacacca

SEQ ID NO: 4872047 - DNA, 25 bp, Homo sapien
caccaggtactgacaagcacaccag

SEQ ID NO: 4872048 - DNA, 25 bp, Homo sapien
gacacctggagctccttatgactag

SEQ ID NO: 4872049 - DNA, 25 bp, Homo sapien
gatgcttccaaaggtgcatgctcca

SEQ ID NO: 4872050 - DNA, 25 bp, Homo sapien
caggtaagcctttgataaatcccag

SEQ ID NO: 4872051 - DNA, 25 bp, Homo sapien
cctacggaaatcacaggtggcttca

SEQ ID NO: 4872052 - DNA, 25 bp, Homo sapien
tcctgcacttgatccatctgcaaag

SEQ ID NO: 4872053 - DNA, 25 bp, Homo sapien
gacacatggcatccacttcctcagg

SEQ ID NO: 4872054 - DNA, 25 bp, Homo sapien
caaagtgacacatggcatccacttc

SEQ ID NO: 4872055 - DNA, 25 bp, Homo sapien
catggcatccacttcctcaggagaa

SEQ ID NO: 4872056 - DNA, 25 bp, Homo sapien
tgctatgcacacaggcgagtctggg

SEQ ID NO: 4872057 - DNA, 25 bp, Homo sapien
ttgcgagtcgcctccggtaatcaca

SEQ ID NO: 4872058 - DNA, 25 bp, Homo sapien
ggtaatcacagacccagacacatgg

SEQ ID NO: 4872059 - DNA, 25 bp, Homo sapien
cccagacacatggtgcggtggagaa

SEQ ID NO: 4872060 - DNA, 25 bp, Homo sapien
cagagctctgcgtctccaacaggca

SEQ ID NO: 4872061 - DNA, 25 bp, Homo sapien
agagctctgcgtctccaacaggcac

SEQ ID NO: 4872062 - DNA, 25 bp, Homo sapien
ctgagagccatgtgcactctgggcc

SEQ ID NO: 4872063 - DNA, 25 bp, Homo sapien
actctgggccctggcgctccgcagg

SEQ ID NO: 4872064 - DNA, 25 bp, Homo sapien
agcggcgtttagcaggttgcagcat

SEQ ID NO: 4872065 - DNA, 25 bp, Homo sapien
tgcaagcttttcacggagcctgaga

SEQ ID NO: 4872066 - DNA, 25 bp, Homo sapien
catcttcgtagtgacttttcagtgg

SEQ ID NO: 4872067 - DNA, 25 bp, Homo sapien
tccaaggactggctaagaagttaac

SEQ ID NO: 4872068 - DNA, 25 bp, Homo sapien
tcccagggtctcttggcgctggctg

SEQ ID NO: 4872069 - DNA, 25 bp, Homo sapien
gacagataaacatagggtaccgagg

SEQ ID NO: 4872070 - DNA, 25 bp, Homo sapien
ttgagaactcaagtgacctagattt

SEQ ID NO: 4872071 - DNA, 25 bp, Homo sapien
cataaactgtaaatggggagcagcc

SEQ ID NO: 4872072 - DNA, 25 bp, Homo sapien
gcagccacggtgagctctgtttctg

SEQ ID NO: 4872073 - DNA, 25 bp, Homo sapien
tcaagtgacctagattttggcataa

SEQ ID NO: 4872074 - DNA, 25 bp, Homo sapien
catgcagctctgtagccatggacga

SEQ ID NO: 4872075 - DNA, 25 bp, Homo sapien
tattcctgcaggctagagcactcag

SEQ ID NO: 4872076 - DNA, 25 bp, Homo sapien
tgcagccatctattcagacccaagg

SEQ ID NO: 4872077 - DNA, 25 bp, Homo sapien
ccatggacgagattgagccacagta

SEQ ID NO: 4872078 - DNA, 25 bp, Homo sapien
caggtgaagatggaagacggactaa

SEQ ID NO: 4872079 - DNA, 25 bp, Homo sapien
ggtgaagatggaagacggactaatt

SEQ ID NO: 4872080 - DNA, 25 bp, Homo sapien
gaagatggaagacggactaattgaa

SEQ ID NO: 4872081 - DNA, 25 bp, Homo sapien
tgaagatggaagacggactaattga

SEQ ID NO: 4872082 - DNA, 25 bp, Homo sapien
tgcacagaacagctccaggaagcgg

SEQ ID NO: 4872083 - DNA, 25 bp, Homo sapien
gcacagaacagctccaggaagcggt

SEQ ID NO: 4872084 - DNA, 25 bp, Homo sapien
ctgcacagaacagctccaggaagcg

SEQ ID NO: 4872085 - DNA, 25 bp, Homo sapien
acagaacagctccaggaagcggtgt

SEQ ID NO: 4872086 - DNA, 25 bp, Homo sapien
agtcagcacacaggcgttcagaccc

SEQ ID NO: 4872087 - DNA, 25 bp, Homo sapien
gggtacgagttgtgctagaatcctg

SEQ ID NO: 4872088 - DNA, 25 bp, Homo sapien
tgggccttgcggctcgctggtgggt

SEQ ID NO: 4872089 - DNA, 25 bp, Homo sapien
gggctcgctgcagtatcttcactca

SEQ ID NO: 4872090 - DNA, 25 bp, Homo sapien
tgagaaacagcagtgcgcacacagg

SEQ ID NO: 4872091 - DNA, 25 bp, Homo sapien
tggctagctttgtggctgaaacaga

SEQ ID NO: 4872092 - DNA, 25 bp, Homo sapien
tatgaagaatggaaagaattgcaca

SEQ ID NO: 4872093 - DNA, 25 bp, Homo sapien
tgcacaggtctggaaaagatctgga

SEQ ID NO: 4872094 - DNA, 25 bp, Homo sapien
aagataacatctcttggccctttgc

SEQ ID NO: 4872095 - DNA, 25 bp, Homo sapien
cagcagagatgacggcagatgttat

SEQ ID NO: 4872096 - DNA, 25 bp, Homo sapien
acagggacacttcagacgcgacagc

SEQ ID NO: 4872097 - DNA, 25 bp, Homo sapien
cagccattagttcccacacagcaga

SEQ ID NO: 4872098 - DNA, 25 bp, Homo sapien
agacatgttcctggcgttgtctttt

SEQ ID NO: 4872099 - DNA, 25 bp, Homo sapien
ggcaagctgtgttcccttagtaggg

SEQ ID NO: 4872100 - DNA, 25 bp, Homo sapien
tgttcctggcgttgtcttttcccag

SEQ ID NO: 4872101 - DNA, 25 bp, Homo sapien
tgttaccctattgtcgtacttggcc

SEQ ID NO: 4872102 - DNA, 25 bp, Homo sapien
gaacagcaagggctgattcaatgcc

SEQ ID NO: 4872103 - DNA, 25 bp, Homo sapien
gggttaactgcagacactcgtacac

SEQ ID NO: 4872104 - DNA, 25 bp, Homo sapien
tgattcctaagatgagcccctgcag

SEQ ID NO: 4872105 - DNA, 25 bp, Homo sapien
aataagcatgtctttgcctggagaa

SEQ ID NO: 4872106 - DNA, 25 bp, Homo sapien
cacagtcatgcaccccgatatcatg

SEQ ID NO: 4872107 - DNA, 25 bp, Homo sapien
cacagaggggactgcacatggctgg

SEQ ID NO: 4872108 - DNA, 25 bp, Homo sapien
tgcaccccgatatcatgccctgctg

SEQ ID NO: 4872109 - DNA, 25 bp, Homo sapien
ggccacagtcatgcaccccgatatc

SEQ ID NO: 4872110 - DNA, 25 bp, Homo sapien
tagcagtcctatgctcattgtctgg

SEQ ID NO: 4872111 - DNA, 25 bp, Homo sapien
gaaaacctgcaggtgccgtcaggac

SEQ ID NO: 4872112 - DNA, 25 bp, Homo sapien
caggacatgtcctgagcctccgaag

SEQ ID NO: 4872113 - DNA, 25 bp, Homo sapien
cagcgcccaggtatgcggctgacag

SEQ ID NO: 4872114 - DNA, 25 bp, Homo sapien
gcgaaaagggcggtgtttctctctc

SEQ ID NO: 4872115 - DNA, 25 bp, Homo sapien
ctggagagccgagtgggcttgccag

SEQ ID NO: 4872116 - DNA, 25 bp, Homo sapien
gaattgctctttgatggacagcatc

SEQ ID NO: 4872117 - DNA, 25 bp, Homo sapien
tggcagttagaaataatgtggccag

SEQ ID NO: 4872118 - DNA, 25 bp, Homo sapien
caagctggatgagcatgagcagtaa

SEQ ID NO: 4872119 - DNA, 25 bp, Homo sapien
tgtacaagtccatctagtagcacct

SEQ ID NO: 4872120 - DNA, 25 bp, Homo sapien
gcacaggtgagcaggccagctggct

SEQ ID NO: 4872121 - DNA, 25 bp, Homo sapien
aaagcagccctgttctcagctctga

SEQ ID NO: 4872122 - DNA, 25 bp, Homo sapien
gttctcagctctgacggcagcaggg

SEQ ID NO: 4872123 - DNA, 25 bp, Homo sapien
gcaggtgagcagacccaggtgggca

SEQ ID NO: 4872124 - DNA, 25 bp, Homo sapien
ccactgagcaagaactcagcgccat

SEQ ID NO: 4872125 - DNA, 25 bp, Homo sapien
tgagcaagaactcagcgccatgcca

SEQ ID NO: 4872126 - DNA, 25 bp, Homo sapien
agaactcagcgccatgccagggctc

SEQ ID NO: 4872127 - DNA, 25 bp, Homo sapien
agcaagaactcagcgccatgccagg

SEQ ID NO: 4872128 - DNA, 25 bp, Homo sapien
aagcaggagaaagtaatggagccac

SEQ ID NO: 4872129 - DNA, 25 bp, Homo sapien
ctaaaaataagcaattatcacgttc

SEQ ID NO: 4872130 - DNA, 25 bp, Homo sapien
ccagctctgaatacctgatcaaggg

SEQ ID NO: 4872131 - DNA, 25 bp, Homo sapien
tatcacgttcagctggaagcaggag

SEQ ID NO: 4872132 - DNA, 25 bp, Homo sapien
cggttacgccgtgggatgtgtgcgt

SEQ ID NO: 4872133 - DNA, 25 bp, Homo sapien
atgtgtgcgtgatgtgtgcagcccc

SEQ ID NO: 4872134 - DNA, 25 bp, Homo sapien
accctggcggttacgccgtgggatg

SEQ ID NO: 4872135 - DNA, 25 bp, Homo sapien
gtgcgtgatgtgtgcagcccctgca

SEQ ID NO: 4872136 - DNA, 25 bp, Homo sapien
atttggtgctaataagaatctggac

SEQ ID NO: 4872137 - DNA, 25 bp, Homo sapien
ggccttaacaagagttcagatgtgg

SEQ ID NO: 4872138 - DNA, 25 bp, Homo sapien
gaatctggacattaggctgggacct

SEQ ID NO: 4872139 - DNA, 25 bp, Homo sapien
agaacatggagtggtcactaggctg

SEQ ID NO: 4872140 - DNA, 25 bp, Homo sapien
tccaaagcctcgtgtggatgaaggg

SEQ ID NO: 4872141 - DNA, 25 bp, Homo sapien
tggatgaaggggacctaagcagcct

SEQ ID NO: 4872142 - DNA, 25 bp, Homo sapien
acctaagcagcctgctccctgaggg

SEQ ID NO: 4872143 - DNA, 25 bp, Homo sapien
aaggggacctaagcagcctgctccc

SEQ ID NO: 4872144 - DNA, 25 bp, Homo sapien
gctaggcttggcctgacttttctcc

SEQ ID NO: 4872145 - DNA, 25 bp, Homo sapien
ttttctccccgctaagtacagccaa

SEQ ID NO: 4872146 - DNA, 25 bp, Homo sapien
tacagccaacctgactgaccttggt

SEQ ID NO: 4872147 - DNA, 25 bp, Homo sapien
ccgactgctaggcttggcctgactt

SEQ ID NO: 4872148 - DNA, 25 bp, Homo sapien
atccttccagacttttacaatgcat

SEQ ID NO: 4872149 - DNA, 25 bp, Homo sapien
gattacaaaggaattgaggttctct

SEQ ID NO: 4872150 - DNA, 25 bp, Homo sapien
gagacaagagctgggatctcctagt

SEQ ID NO: 4872151 - DNA, 25 bp, Homo sapien
taatattctggtataaatccttcca

SEQ ID NO: 4872152 - DNA, 25 bp, Homo sapien
cattgcagatggttgccaaagcccc

SEQ ID NO: 4872153 - DNA, 25 bp, Homo sapien
ttatcagggcacgacctaactgtgc

SEQ ID NO: 4872154 - DNA, 25 bp, Homo sapien
gcctgagtgcaccatagtgtcccca

SEQ ID NO: 4872155 - DNA, 25 bp, Homo sapien
tagtcctctgcatacaatgggctgt

SEQ ID NO: 4872156 - DNA, 25 bp, Homo sapien
gaatggtgacggattcatttcaaag

SEQ ID NO: 4872157 - DNA, 25 bp, Homo sapien
aagtgtttgatttgaatggtgacgg

SEQ ID NO: 4872158 - DNA, 25 bp, Homo sapien
cttactgatagcatcaaattcatga

SEQ ID NO: 4872159 - DNA, 25 bp, Homo sapien
tgacggattcatttcaaaggaggaa

SEQ ID NO: 4872160 - DNA, 25 bp, Homo sapien
tgagaattgtatttgttcccacaaa

SEQ ID NO: 4872161 - DNA, 25 bp, Homo sapien
tgcaggacaggtgttccatttaacc

SEQ ID NO: 4872162 - DNA, 25 bp, Homo sapien
tactgagagttattatgcaggacag

SEQ ID NO: 4872163 - DNA, 25 bp, Homo sapien
gatgccaatgtagatactttactga

SEQ ID NO: 4872164 - DNA, 25 bp, Homo sapien
agccactctgttcactgccaccaag

SEQ ID NO: 4872165 - DNA, 25 bp, Homo sapien
ccacagaaagccactctgttcactg

SEQ ID NO: 4872166 - DNA, 25 bp, Homo sapien
actctgttcactgccaccaaggact

SEQ ID NO: 4872167 - DNA, 25 bp, Homo sapien
tgagacaggagtggcggctccacag

SEQ ID NO: 4872168 - DNA, 25 bp, Homo sapien
gcttcgtaaagcagcgtatactctg

SEQ ID NO: 4872169 - DNA, 25 bp, Homo sapien
tactctgtgacgctagcaaacagct

SEQ ID NO: 4872170 - DNA, 25 bp, Homo sapien
cactgattggccgtggagggttaaa

SEQ ID NO: 4872171 - DNA, 25 bp, Homo sapien
tgcccaaaggccactgcttcgtaaa

SEQ ID NO: 4872172 - DNA, 25 bp, Homo sapien
ggactaaccatttgctgagtgcatt

SEQ ID NO: 4872173 - DNA, 25 bp, Homo sapien
gcccggccccgctgtgctgagggaa

SEQ ID NO: 4872174 - DNA, 25 bp, Homo sapien
gagtgcatttgaatgtgcccggccc

SEQ ID NO: 4872175 - DNA, 25 bp, Homo sapien
aaatctcctagggactaaccatttg

SEQ ID NO: 4872176 - DNA, 25 bp, Homo sapien
catcaaggaactcttgtgtaggaat

SEQ ID NO: 4872177 - DNA, 25 bp, Homo sapien
gaactcttgtgtaggaatccacgga

SEQ ID NO: 4872178 - DNA, 25 bp, Homo sapien
ttgtgtaggaatccacggatggtca

SEQ ID NO: 4872179 - DNA, 25 bp, Homo sapien
caaggaactcttgtgtaggaatcca

SEQ ID NO: 4872180 - DNA, 25 bp, Homo sapien
tagcgatggagattgcaggaaacag

SEQ ID NO: 4872181 - DNA, 25 bp, Homo sapien
ctacggggttgagaaaatgcaaaga

SEQ ID NO: 4872182 - DNA, 25 bp, Homo sapien
caactgttctgtgggtagcgatgga

SEQ ID NO: 4872183 - DNA, 25 bp, Homo sapien
ttgcaggaaacagggcattccgact

SEQ ID NO: 4872184 - DNA, 25 bp, Homo sapien
tgagatgttcatgtcggatttcaga

SEQ ID NO: 4872185 - DNA, 25 bp, Homo sapien
gtggcagcaccagactgacggtgaa

SEQ ID NO: 4872186 - DNA, 25 bp, Homo sapien
ggtgaaccagtaactgtgatgacag

SEQ ID NO: 4872187 - DNA, 25 bp, Homo sapien
cagctgcttggtggagtgcagtcat

SEQ ID NO: 4872188 - DNA, 25 bp, Homo sapien
ggccagtgacatgccagagctcctg

SEQ ID NO: 4872189 - DNA, 25 bp, Homo sapien
gttcacaacaaactagccccatggg

SEQ ID NO: 4872190 - DNA, 25 bp, Homo sapien
gggtttgccatagagtctgccactg

SEQ ID NO: 4872191 - DNA, 25 bp, Homo sapien
cagaagctggcccatggtcatcact

SEQ ID NO: 4872192 - DNA, 25 bp, Homo sapien
gggctggccaccccgctcctggagg

SEQ ID NO: 4872193 - DNA, 25 bp, Homo sapien
ccaccttacaaggggaccaggcatt

SEQ ID NO: 4872194 - DNA, 25 bp, Homo sapien
caccttacaaggggaccaggcattc

SEQ ID NO: 4872195 - DNA, 25 bp, Homo sapien
accttacaaggggaccaggcattct

SEQ ID NO: 4872196 - DNA, 25 bp, Homo sapien
ctggaaggccgccgggcggaggcgc

SEQ ID NO: 4872197 - DNA, 25 bp, Homo sapien
aaggccgccgggcggaggcgcagag

SEQ ID NO: 4872198 - DNA, 25 bp, Homo sapien
tggaaggccgccgggcggaggcgca

SEQ ID NO: 4872199 - DNA, 25 bp, Homo sapien
ggccgccgggcggaggcgcagagcc

SEQ ID NO: 4872200 - DNA, 25 bp, Homo sapien
tcgctgctccgaataaggcgtcagg

SEQ ID NO: 4872201 - DNA, 25 bp, Homo sapien
gatcccctgatgagtcctgtctttt

SEQ ID NO: 4872202 - DNA, 25 bp, Homo sapien
aggcaccagcttttagatcccctga

SEQ ID NO: 4872203 - DNA, 25 bp, Homo sapien
cctggacctggcctgaaagcaaggc

SEQ ID NO: 4872204 - DNA, 25 bp, Homo sapien
tgtgtgacagtcagacctaaggtgt

SEQ ID NO: 4872205 - DNA, 25 bp, Homo sapien
cagactgatgagtttggacgctgtt

SEQ ID NO: 4872206 - DNA, 25 bp, Homo sapien
ggtgtgtgacagtcagacctaaggt

SEQ ID NO: 4872207 - DNA, 25 bp, Homo sapien
tttctccagcagcggatgatgactg

SEQ ID NO: 4872208 - DNA, 25 bp, Homo sapien
cagagtgtccaaagacgagcacatc

SEQ ID NO: 4872209 - DNA, 25 bp, Homo sapien
tagccactgcgttcagtgcaacaga

SEQ ID NO: 4872210 - DNA, 25 bp, Homo sapien
aaagacgagcacatcagggacctgg

SEQ ID NO: 4872211 - DNA, 25 bp, Homo sapien
tgcgttcagtgcaacagagtgtcca

SEQ ID NO: 4872212 - DNA, 25 bp, Homo sapien
ggatgaggtggcaaaataacagcag

SEQ ID NO: 4872213 - DNA, 25 bp, Homo sapien
caatggctcaaaggaaggactctgc

SEQ ID NO: 4872214 - DNA, 25 bp, Homo sapien
aagcagtcacagatgcgaagcatct

SEQ ID NO: 4872215 - DNA, 25 bp, Homo sapien
ctctgcaagcagtcacagatgcgaa

SEQ ID NO: 4872216 - DNA, 25 bp, Homo sapien
catgcttcagagtcaatcctggagg

SEQ ID NO: 4872217 - DNA, 25 bp, Homo sapien
tggaggcttcggaatcctgtgcaca

SEQ ID NO: 4872218 - DNA, 25 bp, Homo sapien
gagccttgtcctgagagttcttggc

SEQ ID NO: 4872219 - DNA, 25 bp, Homo sapien
tgagagtgtgctcagctctgatctt

SEQ ID NO: 4872220 - DNA, 25 bp, Homo sapien
caacatccgtacctccccatacaaa

SEQ ID NO: 4872221 - DNA, 25 bp, Homo sapien
tgctgctcagttcaacatccgtacc

SEQ ID NO: 4872222 - DNA, 25 bp, Homo sapien
agttcaacatccgtacctccccata

SEQ ID NO: 4872223 - DNA, 25 bp, Homo sapien
tccgtacctccccatacaaacacac

SEQ ID NO: 4872224 - DNA, 25 bp, Homo sapien
gtcctctgatggctccgggattcag

SEQ ID NO: 4872225 - DNA, 25 bp, Homo sapien
ggggtcctctgatggctccgggatt

SEQ ID NO: 4872226 - DNA, 25 bp, Homo sapien
cctctgatggctccgggattcaggc

SEQ ID NO: 4872227 - DNA, 25 bp, Homo sapien
gggtcctctgatggctccgggattc

SEQ ID NO: 4872228 - DNA, 25 bp, Homo sapien
gttaaaactcttgtgtgacacaagc

SEQ ID NO: 4872229 - DNA, 25 bp, Homo sapien
tcctgtgtcagtaggagaggtcagg

SEQ ID NO: 4872230 - DNA, 25 bp, Homo sapien
ggagtaaggagttcaccagccctgc

SEQ ID NO: 4872231 - DNA, 25 bp, Homo sapien
gcctaactgaggcagtctcccctta

SEQ ID NO: 4872232 - DNA, 25 bp, Homo sapien
gaagtagcgtgctgaattagcctga

SEQ ID NO: 4872233 - DNA, 25 bp, Homo sapien
aaacttagtatgctttgcccatggg

SEQ ID NO: 4872234 - DNA, 25 bp, Homo sapien
gcctgagttttctaatgacgcatga

SEQ ID NO: 4872235 - DNA, 25 bp, Homo sapien
cacaggtatggtgcgtttggatcac

SEQ ID NO: 4872236 - DNA, 25 bp, Homo sapien
tttccactctcacacgggacagccg

SEQ ID NO: 4872237 - DNA, 25 bp, Homo sapien
agagccggacggacgtcctcagaca

SEQ ID NO: 4872238 - DNA, 25 bp, Homo sapien
gacgtcctcagacacggagtccttt

SEQ ID NO: 4872239 - DNA, 25 bp, Homo sapien
tctcacacgggacagccgaaagcac

SEQ ID NO: 4872240 - DNA, 25 bp, Homo sapien
gatctctgaataaacctggacgtga

SEQ ID NO: 4872241 - DNA, 25 bp, Homo sapien
cacgtacaagcaggagaggccgctt

SEQ ID NO: 4872242 - DNA, 25 bp, Homo sapien
tccgatgtacatcacccttatcagg

SEQ ID NO: 4872243 - DNA, 25 bp, Homo sapien
aaacggacatattttccgatgtaca

SEQ ID NO: 4872244 - DNA, 25 bp, Homo sapien
cgacaacgtttccaccctcttcaga

SEQ ID NO: 4872245 - DNA, 25 bp, Homo sapien
tgccgacaacgtttccaccctcttc

SEQ ID NO: 4872246 - DNA, 25 bp, Homo sapien
ctcagttctgccgacaacgtttcca

SEQ ID NO: 4872247 - DNA, 25 bp, Homo sapien
tcagttctgccgacaacgtttccac

SEQ ID NO: 4872248 - DNA, 25 bp, Homo sapien
tcagctggcgcttcacaaagagaaa

SEQ ID NO: 4872249 - DNA, 25 bp, Homo sapien
cagctggcgcttcacaaagagaaag

SEQ ID NO: 4872250 - DNA, 25 bp, Homo sapien
cttcagctggcgcttcacaaagaga

SEQ ID NO: 4872251 - DNA, 25 bp, Homo sapien
ctggcgcttcacaaagagaaagcat

SEQ ID NO: 4872252 - DNA, 25 bp, Homo sapien
gcaaaatccagcgtgaggcactgaa

SEQ ID NO: 4872253 - DNA, 25 bp, Homo sapien
aaatccagcgtgaggcactgaagaa

SEQ ID NO: 4872254 - DNA, 25 bp, Homo sapien
caaaatccagcgtgaggcactgaag

SEQ ID NO: 4872255 - DNA, 25 bp, Homo sapien
tctgcaaaatccagcgtgaggcact

SEQ ID NO: 4872256 - DNA, 25 bp, Homo sapien
catttatagtctcatatagtgcttc

SEQ ID NO: 4872257 - DNA, 25 bp, Homo sapien
tagtctcatatagtgcttcgttcat

SEQ ID NO: 4872258 - DNA, 25 bp, Homo sapien
ttccatttatagtctcatatagtgc

SEQ ID NO: 4872259 - DNA, 25 bp, Homo sapien
agcagtaattaattcggggactcct

SEQ ID NO: 4872260 - DNA, 25 bp, Homo sapien
agcattggcttgtcagctccgcagg

SEQ ID NO: 4872261 - DNA, 25 bp, Homo sapien
gggtcactcccatagtctgggagct

SEQ ID NO: 4872262 - DNA, 25 bp, Homo sapien
tgcccgtgcacttctccagcattgg

SEQ ID NO: 4872263 - DNA, 25 bp, Homo sapien
tgaggttccctgtacacctcaggga

SEQ ID NO: 4872264 - DNA, 25 bp, Homo sapien
ctgcccccgacacagacaggcccat

SEQ ID NO: 4872265 - DNA, 25 bp, Homo sapien
tcattgaccagcacgtgccactgtg

SEQ ID NO: 4872266 - DNA, 25 bp, Homo sapien
tgaaattaccatcctgtgagcaggc

SEQ ID NO: 4872267 - DNA, 25 bp, Homo sapien
caatgcacacgttgttttctgggag

SEQ ID NO: 4872268 - DNA, 25 bp, Homo sapien
gagggaggcctgcttacaatgcaca

SEQ ID NO: 4872269 - DNA, 25 bp, Homo sapien
tttctgaagatcctgttgctatcat

SEQ ID NO: 4872270 - DNA, 25 bp, Homo sapien
aagaattcagattgttttctgaaga

SEQ ID NO: 4872271 - DNA, 25 bp, Homo sapien
ctttatcactttgaaagaattcaga

SEQ ID NO: 4872272 - DNA, 25 bp, Homo sapien
caacgtctttatcactttgaaagaa

SEQ ID NO: 4872273 - DNA, 25 bp, Homo sapien
aggctgacacctgcctgcggtctct

SEQ ID NO: 4872274 - DNA, 25 bp, Homo sapien
acctgcctgcggtctctgcgctcgg

SEQ ID NO: 4872275 - DNA, 25 bp, Homo sapien
accaccaaggacagggagtgaggct

SEQ ID NO: 4872276 - DNA, 25 bp, Homo sapien
ctgggaaaccaccaaggacagggag

SEQ ID NO: 4872277 - DNA, 25 bp, Homo sapien
tgctgaaattttccactcaacttgg

SEQ ID NO: 4872278 - DNA, 25 bp, Homo sapien
tctgtaacatgctgaaattttccac

SEQ ID NO: 4872279 - DNA, 25 bp, Homo sapien
tcagacatcagctgtcccatgttct

SEQ ID NO: 4872280 - DNA, 25 bp, Homo sapien
actcaacttgggtggctgatttctc

SEQ ID NO: 4872281 - DNA, 25 bp, Homo sapien
ccacctgacattggcatgatcagag

SEQ ID NO: 4872282 - DNA, 25 bp, Homo sapien
gcgtgtgtagatagtatgcatgtac

SEQ ID NO: 4872283 - DNA, 25 bp, Homo sapien
gcatgatcagagaatcagccatgtc

SEQ ID NO: 4872284 - DNA, 25 bp, Homo sapien
cattgtcatggatttgcgtgtgtag

SEQ ID NO: 4872285 - DNA, 25 bp, Homo sapien
aattttccacagaggtgtcctgatt

SEQ ID NO: 4872286 - DNA, 25 bp, Homo sapien
ttttccacagaggtgtcctgattga

SEQ ID NO: 4872287 - DNA, 25 bp, Homo sapien
ttccacagaggtgtcctgattgatt

SEQ ID NO: 4872288 - DNA, 25 bp, Homo sapien
tttccacagaggtgtcctgattgat

SEQ ID NO: 4872289 - DNA, 25 bp, Homo sapien
gaacatctgaggcaattccggctga

SEQ ID NO: 4872290 - DNA, 25 bp, Homo sapien
cctccgtagtgacgcaggccttggg

SEQ ID NO: 4872291 - DNA, 25 bp, Homo sapien
ccaggaacctctgacttgtgccttg

SEQ ID NO: 4872292 - DNA, 25 bp, Homo sapien
tgtgccttggacctcgacgttcctc

SEQ ID NO: 4872293 - DNA, 25 bp, Homo sapien
gtgcctggaaggtgcctgcgctcca

SEQ ID NO: 4872294 - DNA, 25 bp, Homo sapien
gcagaaaaggcgataatagaaggta

SEQ ID NO: 4872295 - DNA, 25 bp, Homo sapien
ttcagtcgcacacagcgggagagca

SEQ ID NO: 4872296 - DNA, 25 bp, Homo sapien
taaagctttcccgtattgtgtgata

SEQ ID NO: 4872297 - DNA, 25 bp, Homo sapien
gcaaggctgacgagggggcggctcc

SEQ ID NO: 4872298 - DNA, 25 bp, Homo sapien
agcaaggctgacgagggggcggctc

SEQ ID NO: 4872299 - DNA, 25 bp, Homo sapien
ggcatgtccccggtgatagcgacca

SEQ ID NO: 4872300 - DNA, 25 bp, Homo sapien
taaatctcagatcaaaatagccact

SEQ ID NO: 4872301 - DNA, 25 bp, Homo sapien
ccggtgatagcgaccagagagatga

SEQ ID NO: 4872302 - DNA, 25 bp, Homo sapien
taagatccaggtgatacataatctg

SEQ ID NO: 4872303 - DNA, 25 bp, Homo sapien
tattgagactattcttcttccattg

SEQ ID NO: 4872304 - DNA, 25 bp, Homo sapien
ccattgaattactttggtgatgcta

SEQ ID NO: 4872305 - DNA, 25 bp, Homo sapien
cattgaattactttggtgatgctac

SEQ ID NO: 4872306 - DNA, 25 bp, Homo sapien
tccattgaattactttggtgatgct

SEQ ID NO: 4872307 - DNA, 25 bp, Homo sapien
taagtggtcaggcataaaactgctg

SEQ ID NO: 4872308 - DNA, 25 bp, Homo sapien
tcctctgaagtgaaatgtctcgtca

SEQ ID NO: 4872309 - DNA, 25 bp, Homo sapien
cgcacttccttgatggctagtttaa

SEQ ID NO: 4872310 - DNA, 25 bp, Homo sapien
cattgaggtcttaattcgcacttcc

SEQ ID NO: 4872311 - DNA, 25 bp, Homo sapien
ccaagccagctagcatgtagaaaca

SEQ ID NO: 4872312 - DNA, 25 bp, Homo sapien
gtttccaagccagctagcatgtaga

SEQ ID NO: 4872313 - DNA, 25 bp, Homo sapien
tccaagccagctagcatgtagaaac

SEQ ID NO: 4872314 - DNA, 25 bp, Homo sapien
tttccaagccagctagcatgtagaa

SEQ ID NO: 4872315 - DNA, 25 bp, Homo sapien
gcaataatacaataccccttccaag

SEQ ID NO: 4872316 - DNA, 25 bp, Homo sapien
gaaactgagatgttgtctatagcta

SEQ ID NO: 4872317 - DNA, 25 bp, Homo sapien
caacctgaagacttgtgaaatcaat

SEQ ID NO: 4872318 - DNA, 25 bp, Homo sapien
tatagctatgtctataaacaacctg

SEQ ID NO: 4872319 - DNA, 25 bp, Homo sapien
cctcctagctcccagagagcgtgga

SEQ ID NO: 4872320 - DNA, 25 bp, Homo sapien
gcgaggttacctctcttgaaaatac

SEQ ID NO: 4872321 - DNA, 25 bp, Homo sapien
tagctcccagagagcgtggatcgcg

SEQ ID NO: 4872322 - DNA, 25 bp, Homo sapien
ggctcaccgagcgaggttacctctc

SEQ ID NO: 4872323 - DNA, 25 bp, Homo sapien
tataggctctcattaacaccagagg

SEQ ID NO: 4872324 - DNA, 25 bp, Homo sapien
agtacttaatttgcacgcggccgcg

SEQ ID NO: 4872325 - DNA, 25 bp, Homo sapien
gctaacacggtgacatgagtactta

SEQ ID NO: 4872326 - DNA, 25 bp, Homo sapien
ttcgcggaagccctgagtagcgcag

SEQ ID NO: 4872327 - DNA, 25 bp, Homo sapien
cttccgatcagcctgcctttagagg

SEQ ID NO: 4872328 - DNA, 25 bp, Homo sapien
tacaggaaactggtagatactgaga

SEQ ID NO: 4872329 - DNA, 25 bp, Homo sapien
gagaatgtccggtggttccaaatga

SEQ ID NO: 4872330 - DNA, 25 bp, Homo sapien
cctttagagggctacaaagcatttc

SEQ ID NO: 4872331 - DNA, 25 bp, Homo sapien
ccaccacccacgctgatgcccctgg

SEQ ID NO: 4872332 - DNA, 25 bp, Homo sapien
gggcactcagggactttactgtcat

SEQ ID NO: 4872333 - DNA, 25 bp, Homo sapien
ctgtcagacaccacgacacctgttg

SEQ ID NO: 4872334 - DNA, 25 bp, Homo sapien
gacaccacgacacctgttggcaagc

SEQ ID NO: 4872335 - DNA, 25 bp, Homo sapien
gcagcaatggtgactaccagaggcc

SEQ ID NO: 4872336 - DNA, 25 bp, Homo sapien
tggctttggcaacttgcacagcatg

SEQ ID NO: 4872337 - DNA, 25 bp, Homo sapien
ggcagcaatggtgactaccagaggc

SEQ ID NO: 4872338 - DNA, 25 bp, Homo sapien
aagctttgcaatggctttggcaact

SEQ ID NO: 4872339 - DNA, 25 bp, Homo sapien
ctcctgggtttcctttggccacact

SEQ ID NO: 4872340 - DNA, 25 bp, Homo sapien
gctgtgttgtggttactgcggaaac

SEQ ID NO: 4872341 - DNA, 25 bp, Homo sapien
tgatgaggtatgaagagcacacacc

SEQ ID NO: 4872342 - DNA, 25 bp, Homo sapien
gcacatgcactaaaggtccctcctg

SEQ ID NO: 4872343 - DNA, 25 bp, Homo sapien
aatactgagcttttctgtgaccgct

SEQ ID NO: 4872344 - DNA, 25 bp, Homo sapien
aaaaccagcgaagtgctatcagcgc

SEQ ID NO: 4872345 - DNA, 25 bp, Homo sapien
ccagcgaagtgctatcagcgcagaa

SEQ ID NO: 4872346 - DNA, 25 bp, Homo sapien
agcgaagtgctatcagcgcagaaag

SEQ ID NO: 4872347 - DNA, 25 bp, Homo sapien
cgaagtgctatcagcgcagaaaggg

SEQ ID NO: 4872348 - DNA, 25 bp, Homo sapien
cagatataagaggagaagaggttcg

SEQ ID NO: 4872349 - DNA, 25 bp, Homo sapien
ctgacaaagagcctagagcaaagat

SEQ ID NO: 4872350 - DNA, 25 bp, Homo sapien
gaggcagtagcagcaattgggtatc

SEQ ID NO: 4872351 - DNA, 25 bp, Homo sapien
tgcagaaggtagcaccatgatccta

SEQ ID NO: 4872352 - DNA, 25 bp, Homo sapien
ccaggaatttataaccagggaccat

SEQ ID NO: 4872353 - DNA, 25 bp, Homo sapien
ttcagcagggccctccacaaggagc

SEQ ID NO: 4872354 - DNA, 25 bp, Homo sapien
gagcccaggaatttataaccaggga

SEQ ID NO: 4872355 - DNA, 25 bp, Homo sapien
agtgcagtgggccctccataggggc

SEQ ID NO: 4872356 - DNA, 25 bp, Homo sapien
gcaaaagtgcatcaccaggacaaaa

SEQ ID NO: 4872357 - DNA, 25 bp, Homo sapien
ttcctcatccggaagcccaaagggc

SEQ ID NO: 4872358 - DNA, 25 bp, Homo sapien
aagggccagagaatcattttcccca

SEQ ID NO: 4872359 - DNA, 25 bp, Homo sapien
ggcataggcaaacggcctatttagc

SEQ ID NO: 4872360 - DNA, 25 bp, Homo sapien
cccatgtacagggtgagagaaccaa

SEQ ID NO: 4872361 - DNA, 25 bp, Homo sapien
gtaactgcagttctcccaaaggcag

SEQ ID NO: 4872362 - DNA, 25 bp, Homo sapien
tgtccatgaccaacaacacaggagc

SEQ ID NO: 4872363 - DNA, 25 bp, Homo sapien
catattgaccacctcttgcataggg

SEQ ID NO: 4872364 - DNA, 25 bp, Homo sapien
taccaacgagggatgcagccttctt

SEQ ID NO: 4872365 - DNA, 25 bp, Homo sapien
tacctataataccaacgagggatgc

SEQ ID NO: 4872366 - DNA, 25 bp, Homo sapien
tataataccaacgagggatgcagcc

SEQ ID NO: 4872367 - DNA, 25 bp, Homo sapien
tcggtatacctataataccaacgag

SEQ ID NO: 4872368 - DNA, 25 bp, Homo sapien
ctctgcagccctccgaaagagtctg

SEQ ID NO: 4872369 - DNA, 25 bp, Homo sapien
ttttccagttccagaggacatgctg

SEQ ID NO: 4872370 - DNA, 25 bp, Homo sapien
tgggcggttctctcagccaccggtt

SEQ ID NO: 4872371 - DNA, 25 bp, Homo sapien
cgaaagagtctgaaaagcttcgact

SEQ ID NO: 4872372 - DNA, 25 bp, Homo sapien
gccactcaaccatctttcctctggc

SEQ ID NO: 4872373 - DNA, 25 bp, Homo sapien
atctttcctctggctttcttcccca

SEQ ID NO: 4872374 - DNA, 25 bp, Homo sapien
ctttcctctggctttcttccccaat

SEQ ID NO: 4872375 - DNA, 25 bp, Homo sapien
ctgccactcaaccatctttcctctg

SEQ ID NO: 4872376 - DNA, 25 bp, Homo sapien
gtgctgggcccccaaaccagcccca

SEQ ID NO: 4872377 - DNA, 25 bp, Homo sapien
ctgggcccccaaaccagccccatgg

SEQ ID NO: 4872378 - DNA, 25 bp, Homo sapien
tgaggatacgggggtgctgggcccc

SEQ ID NO: 4872379 - DNA, 25 bp, Homo sapien
ctgtgaggatacgggggtgctgggc

SEQ ID NO: 4872380 - DNA, 25 bp, Homo sapien
gatcttatatattctaacttggtgc

SEQ ID NO: 4872381 - DNA, 25 bp, Homo sapien
ccatcaatgctgcacccatactggg

SEQ ID NO: 4872382 - DNA, 25 bp, Homo sapien
gctgatgatctgtaaatatcccctc

SEQ ID NO: 4872383 - DNA, 25 bp, Homo sapien
ttgccattcacatgccgacctgggt

SEQ ID NO: 4872384 - DNA, 25 bp, Homo sapien
attgattcagtttcccgcttggtat

SEQ ID NO: 4872385 - DNA, 25 bp, Homo sapien
tgtcttcatccctcacatattccag

SEQ ID NO: 4872386 - DNA, 25 bp, Homo sapien
cagtttcccgcttggtattctttca

SEQ ID NO: 4872387 - DNA, 25 bp, Homo sapien
ttccagcagagtgccctccagtaga

SEQ ID NO: 4872388 - DNA, 25 bp, Homo sapien
tctgatgattaagtgccactgcctg

SEQ ID NO: 4872389 - DNA, 25 bp, Homo sapien
tgcctgacccttcttgggggatctt

SEQ ID NO: 4872390 - DNA, 25 bp, Homo sapien
actcatgacaattgcactcaccagc

SEQ ID NO: 4872391 - DNA, 25 bp, Homo sapien
gacaattgcactcaccagcttctga

SEQ ID NO: 4872392 - DNA, 25 bp, Homo sapien
gacaaatttgcccacagttttatta

SEQ ID NO: 4872393 - DNA, 25 bp, Homo sapien
agacagacaaatttgcccacagttt

SEQ ID NO: 4872394 - DNA, 25 bp, Homo sapien
ctggaagacagacaaatttgcccac

SEQ ID NO: 4872395 - DNA, 25 bp, Homo sapien
gaagacagacaaatttgcccacagt

SEQ ID NO: 4872396 - DNA, 25 bp, Homo sapien
ctcaatatgaggaagctgcttattt

SEQ ID NO: 4872397 - DNA, 25 bp, Homo sapien
tcctcgtctatgaaatgcagagtgc

SEQ ID NO: 4872398 - DNA, 25 bp, Homo sapien
ttttgatatgcctcagatcctcgtc

SEQ ID NO: 4872399 - DNA, 25 bp, Homo sapien
tgcagagtgcatctgattatctgac

SEQ ID NO: 4872400 - DNA, 25 bp, Homo sapien
gagcagctgagtgatatctctggta

SEQ ID NO: 4872401 - DNA, 25 bp, Homo sapien
ccataggcatccttgacaccatcta

SEQ ID NO: 4872402 - DNA, 25 bp, Homo sapien
tgttctccgtttaggattctctgag

SEQ ID NO: 4872403 - DNA, 25 bp, Homo sapien
gcaaagacctttcctcagtatgttc

SEQ ID NO: 4872404 - DNA, 25 bp, Homo sapien
aaccagttcttagggattgaagaga

SEQ ID NO: 4872405 - DNA, 25 bp, Homo sapien
gagaggctgcaccacatacgcaggg

SEQ ID NO: 4872406 - DNA, 25 bp, Homo sapien
tgaaagaaccagttcttagggattg

SEQ ID NO: 4872407 - DNA, 25 bp, Homo sapien
agaggctgcaccacatacgcagggc

SEQ ID NO: 4872408 - DNA, 25 bp, Homo sapien
tacccgtgagaaagcacccaagaag

SEQ ID NO: 4872409 - DNA, 25 bp, Homo sapien
tgagaaagcacccaagaagctgtga

SEQ ID NO: 4872410 - DNA, 25 bp, Homo sapien
ggctttacccgtgagaaagcaccca

SEQ ID NO: 4872411 - DNA, 25 bp, Homo sapien
gcacccaagaagctgtgagcattaa

SEQ ID NO: 4872412 - DNA, 25 bp, Homo sapien
caaccaatggaaggtacggatgcca

SEQ ID NO: 4872413 - DNA, 25 bp, Homo sapien
ctggctagaaggcaaccaatggaag

SEQ ID NO: 4872414 - DNA, 25 bp, Homo sapien
tagaaggcaaccaatggaaggtacg

SEQ ID NO: 4872415 - DNA, 25 bp, Homo sapien
gaaggcaaccaatggaaggtacgga

SEQ ID NO: 4872416 - DNA, 25 bp, Homo sapien
cttgctgtggtttgtcgtcatctat

SEQ ID NO: 4872417 - DNA, 25 bp, Homo sapien
tctatgaagttaacagaatcagagc

SEQ ID NO: 4872418 - DNA, 25 bp, Homo sapien
cagaatcagagctagttaaagaact

SEQ ID NO: 4872419 - DNA, 25 bp, Homo sapien
tgtcgtcatctatgaagttaacaga

SEQ ID NO: 4872420 - DNA, 25 bp, Homo sapien
gatttaaaccaccaggtggattctg

SEQ ID NO: 4872421 - DNA, 25 bp, Homo sapien
atttaaaccaccaggtggattctgc

SEQ ID NO: 4872422 - DNA, 25 bp, Homo sapien
agcagacagatcttttattctcaca

SEQ ID NO: 4872423 - DNA, 25 bp, Homo sapien
cgatttaaaccaccaggtggattct

SEQ ID NO: 4872424 - DNA, 25 bp, Homo sapien
ttgaactggaaagggtgctatgatc

SEQ ID NO: 4872425 - DNA, 25 bp, Homo sapien
accactcttgagtgattgaactgga

SEQ ID NO: 4872426 - DNA, 25 bp, Homo sapien
caacctgtctagtaatttgcaccac

SEQ ID NO: 4872427 - DNA, 25 bp, Homo sapien
cagaagctaatcaaaatcagcagtg

SEQ ID NO: 4872428 - DNA, 25 bp, Homo sapien
caggcaaccgttaccaacatgttca

SEQ ID NO: 4872429 - DNA, 25 bp, Homo sapien
aagatgatcagctacaaagtgctca

SEQ ID NO: 4872430 - DNA, 25 bp, Homo sapien
acataaggcaggcaaccgttaccaa

SEQ ID NO: 4872431 - DNA, 25 bp, Homo sapien
aacatgttcatcaaatggcagtgca

SEQ ID NO: 4872432 - DNA, 25 bp, Homo sapien
gttcatgtatggaccactgcagcag

SEQ ID NO: 4872433 - DNA, 25 bp, Homo sapien
aagtgccacttccagcgatagtctt

SEQ ID NO: 4872434 - DNA, 25 bp, Homo sapien
gatgcaccaggtagcaagtgccact

SEQ ID NO: 4872435 - DNA, 25 bp, Homo sapien
ctgtgatcttgtctcataaatgaga

SEQ ID NO: 4872436 - DNA, 25 bp, Homo sapien
catctccagaaatagccctgtcagc

SEQ ID NO: 4872437 - DNA, 25 bp, Homo sapien
tgacaagtcagttttaaggcataat

SEQ ID NO: 4872438 - DNA, 25 bp, Homo sapien
gagaatgaaaaacgcccataatccc

SEQ ID NO: 4872439 - DNA, 25 bp, Homo sapien
caactacgattgtaccatatatggt

SEQ ID NO: 4872440 - DNA, 25 bp, Homo sapien
tgagagcacccatgcccactatggt

SEQ ID NO: 4872441 - DNA, 25 bp, Homo sapien
gacatgttggcgacttttcctttga

SEQ ID NO: 4872442 - DNA, 25 bp, Homo sapien
tctctaaaggtggaatggccatgaa

SEQ ID NO: 4872443 - DNA, 25 bp, Homo sapien
taaagatcatgtggaggagctctac

SEQ ID NO: 4872444 - DNA, 25 bp, Homo sapien
gcaaaagtggaggtattctgtcaat

SEQ ID NO: 4872445 - DNA, 25 bp, Homo sapien
gagagattatctcaggtgggcctga

SEQ ID NO: 4872446 - DNA, 25 bp, Homo sapien
tgggcctgacctaattaggataact

SEQ ID NO: 4872447 - DNA, 25 bp, Homo sapien
ttctgtcaatgtaataaaggtccct

SEQ ID NO: 4872448 - DNA, 25 bp, Homo sapien
tcaaactccccagtacctaggactg

SEQ ID NO: 4872449 - DNA, 25 bp, Homo sapien
gaagaaaggcacaaaagaccctata

SEQ ID NO: 4872450 - DNA, 25 bp, Homo sapien
ggactaaattattgatacacctgac

SEQ ID NO: 4872451 - DNA, 25 bp, Homo sapien
gaccctataatgtagaattcaacgc

SEQ ID NO: 4872452 - DNA, 25 bp, Homo sapien
aagggcagcgcctgtgctaaaagac

SEQ ID NO: 4872453 - DNA, 25 bp, Homo sapien
gataggacttgatccaggaataatg

SEQ ID NO: 4872454 - DNA, 25 bp, Homo sapien
atttgataggacttgatccaggaat

SEQ ID NO: 4872455 - DNA, 25 bp, Homo sapien
gttgctgatacactgggaactccaa

SEQ ID NO: 4872456 - DNA, 25 bp, Homo sapien
tgtggctgccttagtgcagcgatct

SEQ ID NO: 4872457 - DNA, 25 bp, Homo sapien
tactccttccgaaaacaagggctgc

SEQ ID NO: 4872458 - DNA, 25 bp, Homo sapien
tgggttcctctatactgctggcttc

SEQ ID NO: 4872459 - DNA, 25 bp, Homo sapien
cgatctaccctagagctgccatgtg

SEQ ID NO: 4872460 - DNA, 25 bp, Homo sapien
cggaagaatcggcacgtgataatca

SEQ ID NO: 4872461 - DNA, 25 bp, Homo sapien
cacgtgataatcaaatcaaaacaca

SEQ ID NO: 4872462 - DNA, 25 bp, Homo sapien
ccatttcacggaagaatcggcacgt

SEQ ID NO: 4872463 - DNA, 25 bp, Homo sapien
ccttatataccatttcacggaagaa

SEQ ID NO: 4872464 - DNA, 25 bp, Homo sapien
actgacactgtcttcacttgttttt

SEQ ID NO: 4872465 - DNA, 25 bp, Homo sapien
ctgtcttcacttgtttttattcctc

SEQ ID NO: 4872466 - DNA, 25 bp, Homo sapien
cactgtcttcacttgtttttattcc

SEQ ID NO: 4872467 - DNA, 25 bp, Homo sapien
ccactgacactgtcttcacttgttt

SEQ ID NO: 4872468 - DNA, 25 bp, Homo sapien
ctcagggctgtctctatgaccacag

SEQ ID NO: 4872469 - DNA, 25 bp, Homo sapien
cagggctgtctctatgaccacaggt

SEQ ID NO: 4872470 - DNA, 25 bp, Homo sapien
gggctgtctctatgaccacaggtcc

SEQ ID NO: 4872471 - DNA, 25 bp, Homo sapien
agcaggcagccgatcgtgcccccag

SEQ ID NO: 4872472 - DNA, 25 bp, Homo sapien
ggcctgagtgtgagaagattaagat

SEQ ID NO: 4872473 - DNA, 25 bp, Homo sapien
gagtgtgagaagattaagatggctt

SEQ ID NO: 4872474 - DNA, 25 bp, Homo sapien
ctgagtgtgagaagattaagatggc

SEQ ID NO: 4872475 - DNA, 25 bp, Homo sapien
tgaaagtcctcaggattcttgtagc

SEQ ID NO: 4872476 - DNA, 25 bp, Homo sapien
gctgtagacctctggaacttcctgt

SEQ ID NO: 4872477 - DNA, 25 bp, Homo sapien
tattttcagaaagagccgaattatc

SEQ ID NO: 4872478 - DNA, 25 bp, Homo sapien
tataaccttcatcatagtgaaatgc

SEQ ID NO: 4872479 - DNA, 25 bp, Homo sapien
agggatttgaggatagcaggctttt

SEQ ID NO: 4872480 - DNA, 25 bp, Homo sapien
cagtgtatcagacgttttaaccaga

SEQ ID NO: 4872481 - DNA, 25 bp, Homo sapien
gacatgaacatgtgcccttgcctct

SEQ ID NO: 4872482 - DNA, 25 bp, Homo sapien
ctttctcccaatatcaggaacaaga

SEQ ID NO: 4872483 - DNA, 25 bp, Homo sapien
tgaaaaacgggatgctttctcccaa

SEQ ID NO: 4872484 - DNA, 25 bp, Homo sapien
ttccacatacatcacattcatgcat

SEQ ID NO: 4872485 - DNA, 25 bp, Homo sapien
tttcttccacatacatcacattcat

SEQ ID NO: 4872486 - DNA, 25 bp, Homo sapien
tcttccacatacatcacattcatgc

SEQ ID NO: 4872487 - DNA, 25 bp, Homo sapien
ataatactgatttcttccacataca

SEQ ID NO: 4872488 - DNA, 25 bp, Homo sapien
gtcctcagtccccacggggtgccag

SEQ ID NO: 4872489 - DNA, 25 bp, Homo sapien
tcagtccccacggggtgccagcaat

SEQ ID NO: 4872490 - DNA, 25 bp, Homo sapien
cagtccccacggggtgccagcaatg

SEQ ID NO: 4872491 - DNA, 25 bp, Homo sapien
cctcagtccccacggggtgccagca

SEQ ID NO: 4872492 - DNA, 25 bp, Homo sapien
tgaaggtgacagggcacagttgtct

SEQ ID NO: 4872493 - DNA, 25 bp, Homo sapien
cacagttgtctctcttcacagagca

SEQ ID NO: 4872494 - DNA, 25 bp, Homo sapien
tcatagttcagtgaaggtgacaggg

SEQ ID NO: 4872495 - DNA, 25 bp, Homo sapien
tcattgctagtgcataaaggcagat

SEQ ID NO: 4872496 - DNA, 25 bp, Homo sapien
tgactgagtataccaaacccttgct

SEQ ID NO: 4872497 - DNA, 25 bp, Homo sapien
tatcaacccaaaataagatgccctt

SEQ ID NO: 4872498 - DNA, 25 bp, Homo sapien
acttaccagctcttcattctaatgg

SEQ ID NO: 4872499 - DNA, 25 bp, Homo sapien
ttgatatagacatgtactgaggtct

SEQ ID NO: 4872500 - DNA, 25 bp, Homo sapien
tcctctagctatcgctttgatatag

SEQ ID NO: 4872501 - DNA, 25 bp, Homo sapien
cgctttgatatagacatgtactgag

SEQ ID NO: 4872502 - DNA, 25 bp, Homo sapien
tagctatcgctttgatatagacatg

SEQ ID NO: 4872503 - DNA, 25 bp, Homo sapien
tgtgtggactgggcagaacccagag

SEQ ID NO: 4872504 - DNA, 25 bp, Homo sapien
catcttggttacttacaagctgtgt

SEQ ID NO: 4872505 - DNA, 25 bp, Homo sapien
tacaagctgtgtggactgggcagaa

SEQ ID NO: 4872506 - DNA, 25 bp, Homo sapien
ccatcttggttacttacaagctgtg

SEQ ID NO: 4872507 - DNA, 25 bp, Homo sapien
gactaagacaccagtacttttacaa

SEQ ID NO: 4872508 - DNA, 25 bp, Homo sapien
tttgattttgctggtttaaacacgc

SEQ ID NO: 4872509 - DNA, 25 bp, Homo sapien
tttgctggtttaaacacgctctcat

SEQ ID NO: 4872510 - DNA, 25 bp, Homo sapien
catctggctgcattgactaagacac

SEQ ID NO: 4872511 - DNA, 25 bp, Homo sapien
tgctgcatgcccacggtatggtgga

SEQ ID NO: 4872512 - DNA, 25 bp, Homo sapien
ctgcatgcccacggtatggtggaca

SEQ ID NO: 4872513 - DNA, 25 bp, Homo sapien
gctgcatgcccacggtatggtggac

SEQ ID NO: 4872514 - DNA, 25 bp, Homo sapien
gctgctgcatgcccacggtatggtg

SEQ ID NO: 4872515 - DNA, 25 bp, Homo sapien
tccagactcaagtttgagtggatca

SEQ ID NO: 4872516 - DNA, 25 bp, Homo sapien
gagtccagactcaagtttgagtgga

SEQ ID NO: 4872517 - DNA, 25 bp, Homo sapien
ctaagagagtccagactcaagtttg

SEQ ID NO: 4872518 - DNA, 25 bp, Homo sapien
agagagtccagactcaagtttgagt

SEQ ID NO: 4872519 - DNA, 25 bp, Homo sapien
tcccagaccactcgggttagagcag

SEQ ID NO: 4872520 - DNA, 25 bp, Homo sapien
ctgacacttcccactcccgcagctt

SEQ ID NO: 4872521 - DNA, 25 bp, Homo sapien
gcagcttcccagaccactcgggtta

SEQ ID NO: 4872522 - DNA, 25 bp, Homo sapien
agaccactcgggttagagcaggcat

SEQ ID NO: 4872523 - DNA, 25 bp, Homo sapien
ctctcctgcttgaatctttttctgg

SEQ ID NO: 4872524 - DNA, 25 bp, Homo sapien
tgtctcctgatcagctgcatgcact

SEQ ID NO: 4872525 - DNA, 25 bp, Homo sapien
tgcagagctttgtttttgtggatct

SEQ ID NO: 4872526 - DNA, 25 bp, Homo sapien
actctctggctttcactctccttgt

SEQ ID NO: 4872527 - DNA, 25 bp, Homo sapien
gcgaagccgccacactctgagaaga

SEQ ID NO: 4872528 - DNA, 25 bp, Homo sapien
acatcatgaccggtgctgcggatcc

SEQ ID NO: 4872529 - DNA, 25 bp, Homo sapien
ccttgggtccatgtttgccaataag

SEQ ID NO: 4872530 - DNA, 25 bp, Homo sapien
tctgagaagacatcatgaccggtgc

SEQ ID NO: 4872531 - DNA, 25 bp, Homo sapien
tagaccttgtcataggagaacacag

SEQ ID NO: 4872532 - DNA, 25 bp, Homo sapien
ggagaacacagagctggtattacat

SEQ ID NO: 4872533 - DNA, 25 bp, Homo sapien
tgaagcctgagaagaacatgagaac

SEQ ID NO: 4872534 - DNA, 25 bp, Homo sapien
cctggcaggcatagtagaccttgtc

SEQ ID NO: 4872535 - DNA, 25 bp, Homo sapien
agagcaggcaaggacacaggtcccc

SEQ ID NO: 4872536 - DNA, 25 bp, Homo sapien
tcatgttaagagcaggcaaggacac

SEQ ID NO: 4872537 - DNA, 25 bp, Homo sapien
taagagcaggcaaggacacaggtcc

SEQ ID NO: 4872538 - DNA, 25 bp, Homo sapien
atgttaagagcaggcaaggacacag

SEQ ID NO: 4872539 - DNA, 25 bp, Homo sapien
taactgttcacttaaatatattctc

SEQ ID NO: 4872540 - DNA, 25 bp, Homo sapien
gggagctcagtaacttgtatgccct

SEQ ID NO: 4872541 - DNA, 25 bp, Homo sapien
tgggagcttgtttggcgtttctatc

SEQ ID NO: 4872542 - DNA, 25 bp, Homo sapien
agtaacttgtatgccctggacagaa

SEQ ID NO: 4872543 - DNA, 25 bp, Homo sapien
gacatctgtccaaattagttaccag

SEQ ID NO: 4872544 - DNA, 25 bp, Homo sapien
tcacccaattatgtctcttagatcc

SEQ ID NO: 4872545 - DNA, 25 bp, Homo sapien
tgactttcacatctgcttattgcta

SEQ ID NO: 4872546 - DNA, 25 bp, Homo sapien
ccagaactgagatcttaaactccat

SEQ ID NO: 4872547 - DNA, 25 bp, Homo sapien
gctaataaaatcctgagaactacct

SEQ ID NO: 4872548 - DNA, 25 bp, Homo sapien
tcccattgttaatagctacgaaaaa

SEQ ID NO: 4872549 - DNA, 25 bp, Homo sapien
aatcctagtccttttggagatcaag

SEQ ID NO: 4872550 - DNA, 25 bp, Homo sapien
aatcctgagaactacctgggtgcag

SEQ ID NO: 4872551 - DNA, 25 bp, Homo sapien
gactgatagtcaagcgtgagggaca

SEQ ID NO: 4872552 - DNA, 25 bp, Homo sapien
tactccctctgactgaaaaccgtgt

SEQ ID NO: 4872553 - DNA, 25 bp, Homo sapien
gactggctgccacgctgaaagatga

SEQ ID NO: 4872554 - DNA, 25 bp, Homo sapien
aaaaccgtgtgaaaaggactggctg

SEQ ID NO: 4872555 - DNA, 25 bp, Homo sapien
ctttctggatacatccctgatggca

SEQ ID NO: 4872556 - DNA, 25 bp, Homo sapien
tcaggcatgcttgcgacatgcttct

SEQ ID NO: 4872557 - DNA, 25 bp, Homo sapien
cgtgttcatcctttgatgcaatcca

SEQ ID NO: 4872558 - DNA, 25 bp, Homo sapien
ggcccgtgttcatcctttgatgcaa

SEQ ID NO: 4872559 - DNA, 25 bp, Homo sapien
gaagtcaaagtccaagattccaggg

SEQ ID NO: 4872560 - DNA, 25 bp, Homo sapien
agattccagggaccggatgactcca

SEQ ID NO: 4872561 - DNA, 25 bp, Homo sapien
tcaaatgtagggaagtcaaagtcca

SEQ ID NO: 4872562 - DNA, 25 bp, Homo sapien
tgtttatggttgtatcaaatgtagg

SEQ ID NO: 4872563 - DNA, 25 bp, Homo sapien
tacatgccacgtctctgaagccttc

SEQ ID NO: 4872564 - DNA, 25 bp, Homo sapien
tctacccatggatcaatgcttatct

SEQ ID NO: 4872565 - DNA, 25 bp, Homo sapien
cactgctatatgcctctgttgtgac

SEQ ID NO: 4872566 - DNA, 25 bp, Homo sapien
gcttatcttacatgccacgtctctg

SEQ ID NO: 4872567 - DNA, 25 bp, Homo sapien
ggcggtgcgttacttcctgttcctc

SEQ ID NO: 4872568 - DNA, 25 bp, Homo sapien
cctgcctgcggttaccataactgtc

SEQ ID NO: 4872569 - DNA, 25 bp, Homo sapien
cctccatagtgctctggtgagctgg

SEQ ID NO: 4872570 - DNA, 25 bp, Homo sapien
cataactgtcttggcgtctgctcct

SEQ ID NO: 4872571 - DNA, 25 bp, Homo sapien
gaaatcctatgacagtgacaacagt

SEQ ID NO: 4872572 - DNA, 25 bp, Homo sapien
ttagcagttatgaaaaacgatatct

SEQ ID NO: 4872573 - DNA, 25 bp, Homo sapien
aaaaacgatatctttttgctgaatc

SEQ ID NO: 4872574 - DNA, 25 bp, Homo sapien
ttctgaaatcctatgacagtgacaa

SEQ ID NO: 4872575 - DNA, 25 bp, Homo sapien
gatgagaccataatgttggactagg

SEQ ID NO: 4872576 - DNA, 25 bp, Homo sapien
aagacatgtctacggcttctgtggg

SEQ ID NO: 4872577 - DNA, 25 bp, Homo sapien
tatatggagaggcacataacccagt

SEQ ID NO: 4872578 - DNA, 25 bp, Homo sapien
tgatgttcatcatacaacctagaga

SEQ ID NO: 4872579 - DNA, 25 bp, Homo sapien
ccaaaaatctgtaacacaccgttgc

SEQ ID NO: 4872580 - DNA, 25 bp, Homo sapien
ttcaagaccaggtactcactttccc

SEQ ID NO: 4872581 - DNA, 25 bp, Homo sapien
gtaacacaccgttgcaaatattttc

SEQ ID NO: 4872582 - DNA, 25 bp, Homo sapien
ttcttcaagaccaggtactcacttt

SEQ ID NO: 4872583 - DNA, 25 bp, Homo sapien
ctgtgtggctttggacaccttttcc

SEQ ID NO: 4872584 - DNA, 25 bp, Homo sapien
tggctttggacaccttttcccacat

SEQ ID NO: 4872585 - DNA, 25 bp, Homo sapien
gtggctttggacaccttttcccaca

SEQ ID NO: 4872586 - DNA, 25 bp, Homo sapien
gtgtggctttggacaccttttccca

SEQ ID NO: 4872587 - DNA, 25 bp, Homo sapien
agatgtagaacacattgtccagggt

SEQ ID NO: 4872588 - DNA, 25 bp, Homo sapien
ggcagatgtagaacacattgtccag

SEQ ID NO: 4872589 - DNA, 25 bp, Homo sapien
cagatgtagaacacattgtccaggg

SEQ ID NO: 4872590 - DNA, 25 bp, Homo sapien
gcagatgtagaacacattgtccagg

SEQ ID NO: 4872591 - DNA, 25 bp, Homo sapien
gatttgctgtcgttcctcctaggag

SEQ ID NO: 4872592 - DNA, 25 bp, Homo sapien
tggaaaagaagagctctagcgcaga

SEQ ID NO: 4872593 - DNA, 25 bp, Homo sapien
agcattccagtcataatacagcatc

SEQ ID NO: 4872594 - DNA, 25 bp, Homo sapien
atactttcctgagccaagtgcactg

SEQ ID NO: 4872595 - DNA, 25 bp, Homo sapien
ctgtgaagctgtgcaaacacaggcc

SEQ ID NO: 4872596 - DNA, 25 bp, Homo sapien
cttcaaacatgtaaaggtcattttt

SEQ ID NO: 4872597 - DNA, 25 bp, Homo sapien
gtgaagctgtgcaaacacaggccat

SEQ ID NO: 4872598 - DNA, 25 bp, Homo sapien
tttattctgtgaagctgtgcaaaca

SEQ ID NO: 4872599 - DNA, 25 bp, Homo sapien
cattgttcgcattttgatagagcat

SEQ ID NO: 4872600 - DNA, 25 bp, Homo sapien
agagcattctgatcaccttgtcaca

SEQ ID NO: 4872601 - DNA, 25 bp, Homo sapien
tagcaatctttcttcattgttcgca

SEQ ID NO: 4872602 - DNA, 25 bp, Homo sapien
ttaaggacctcatattgttcctgaa

SEQ ID NO: 4872603 - DNA, 25 bp, Homo sapien
tgcacttcagctgtggcctggctct

SEQ ID NO: 4872604 - DNA, 25 bp, Homo sapien
ttcagctgtggcctggctctcctgc

SEQ ID NO: 4872605 - DNA, 25 bp, Homo sapien
agtgcacttcagctgtggcctggct

SEQ ID NO: 4872606 - DNA, 25 bp, Homo sapien
cagctgtggcctggctctcctgcat

SEQ ID NO: 4872607 - DNA, 25 bp, Homo sapien
aacgcacacttagaaggtgctgggc

SEQ ID NO: 4872608 - DNA, 25 bp, Homo sapien
aatgggtggctaatatggtcaggac

SEQ ID NO: 4872609 - DNA, 25 bp, Homo sapien
gaggcatagccagtttctccaggac

SEQ ID NO: 4872610 - DNA, 25 bp, Homo sapien
caggacattcgtaggagtcagagca

SEQ ID NO: 4872611 - DNA, 25 bp, Homo sapien
aatctaaaccagctggaattggagg

SEQ ID NO: 4872612 - DNA, 25 bp, Homo sapien
gctggaattggaggctcaagcagtt

SEQ ID NO: 4872613 - DNA, 25 bp, Homo sapien
ttaaatctaaaccagctggaattgg

SEQ ID NO: 4872614 - DNA, 25 bp, Homo sapien
cttcttaaatctaaaccagctggaa

SEQ ID NO: 4872615 - DNA, 25 bp, Homo sapien
gacgaaaagtggtggtggagcctga

SEQ ID NO: 4872616 - DNA, 25 bp, Homo sapien
tttgagcagatgacgaaaagtggtg

SEQ ID NO: 4872617 - DNA, 25 bp, Homo sapien
gatgacgaaaagtggtggtggagcc

SEQ ID NO: 4872618 - DNA, 25 bp, Homo sapien
tttttgagcagatgacgaaaagtgg

SEQ ID NO: 4872619 - DNA, 25 bp, Homo sapien
attctccactaggatgttttcccag

SEQ ID NO: 4872620 - DNA, 25 bp, Homo sapien
tctctttcccacttagtagacacgg

SEQ ID NO: 4872621 - DNA, 25 bp, Homo sapien
caccaaattgttccagggaccatct

SEQ ID NO: 4872622 - DNA, 25 bp, Homo sapien
ggcaccgtcctctttgtctgctagg

SEQ ID NO: 4872623 - DNA, 25 bp, Homo sapien
cagttctagatgcatgcatacattg

SEQ ID NO: 4872624 - DNA, 25 bp, Homo sapien
cattgtaatacatggtcatgtgacc

SEQ ID NO: 4872625 - DNA, 25 bp, Homo sapien
aagcatgtaacgctggacggatgta

SEQ ID NO: 4872626 - DNA, 25 bp, Homo sapien
ttgacaggacccagctcaaaatgga

SEQ ID NO: 4872627 - DNA, 25 bp, Homo sapien
tgacccaagagcagcagccttagga

SEQ ID NO: 4872628 - DNA, 25 bp, Homo sapien
gaacttctgtggtcattttcctgcc

SEQ ID NO: 4872629 - DNA, 25 bp, Homo sapien
agcagcagccttaggaggggaactt

SEQ ID NO: 4872630 - DNA, 25 bp, Homo sapien
gcagccttaggaggggaacttctgt

SEQ ID NO: 4872631 - DNA, 25 bp, Homo sapien
ctgaaaatcgcagtccccacgtttt

SEQ ID NO: 4872632 - DNA, 25 bp, Homo sapien
ttaagcgacagtcaccagctcatct

SEQ ID NO: 4872633 - DNA, 25 bp, Homo sapien
ccatcaggactgaaaatcgcagtcc

SEQ ID NO: 4872634 - DNA, 25 bp, Homo sapien
gacagtcaccagctcatctgagcca

SEQ ID NO: 4872635 - DNA, 25 bp, Homo sapien
caaccgtagatctgctaatcctggc

SEQ ID NO: 4872636 - DNA, 25 bp, Homo sapien
tgtagtgtgaatttatttccctggc

SEQ ID NO: 4872637 - DNA, 25 bp, Homo sapien
tatgaagaggtatcaggctcaatac

SEQ ID NO: 4872638 - DNA, 25 bp, Homo sapien
taatcctggcatggtagttgtgctc

SEQ ID NO: 4872639 - DNA, 25 bp, Homo sapien
cttcaagtctccatagacggctgtc

SEQ ID NO: 4872640 - DNA, 25 bp, Homo sapien
gctcgctgacacagtgactttttcc

SEQ ID NO: 4872641 - DNA, 25 bp, Homo sapien
tagacggctgtcacaactcctttct

SEQ ID NO: 4872642 - DNA, 25 bp, Homo sapien
gagaagtcgtagagcagagctcgct

SEQ ID NO: 4872643 - DNA, 25 bp, Homo sapien
atatttggtggactgaaaacaaatt

SEQ ID NO: 4872644 - DNA, 25 bp, Homo sapien
cagcatcgcctggaggaagagcgtc

SEQ ID NO: 4872645 - DNA, 25 bp, Homo sapien
aggaccagcagcatcgcctggagga

SEQ ID NO: 4872646 - DNA, 25 bp, Homo sapien
tccactggtccccaaagtgtcaaaa

SEQ ID NO: 4872647 - DNA, 25 bp, Homo sapien
tcctttgaatccttaattattacat

SEQ ID NO: 4872648 - DNA, 25 bp, Homo sapien
aatccttaattattacattcttcat

SEQ ID NO: 4872649 - DNA, 25 bp, Homo sapien
tctgctatgaaatttatcctttgaa

SEQ ID NO: 4872650 - DNA, 25 bp, Homo sapien
tatcctttgaatccttaattattac

SEQ ID NO: 4872651 - DNA, 25 bp, Homo sapien
taattttctcccctactgtgtccat

SEQ ID NO: 4872652 - DNA, 25 bp, Homo sapien
aattcattaattttctcccctactg

SEQ ID NO: 4872653 - DNA, 25 bp, Homo sapien
tcttctaattcattaattttctccc

SEQ ID NO: 4872654 - DNA, 25 bp, Homo sapien
tcattaattttctcccctactgtgt

SEQ ID NO: 4872655 - DNA, 25 bp, Homo sapien
gcacaaatgacatggtcagtaaaac

SEQ ID NO: 4872656 - DNA, 25 bp, Homo sapien
acaaatgacatggtcagtaaaacat

SEQ ID NO: 4872657 - DNA, 25 bp, Homo sapien
cacaaatgacatggtcagtaaaaca

SEQ ID NO: 4872658 - DNA, 25 bp, Homo sapien
atgcacaaatgacatggtcagtaaa

SEQ ID NO: 4872659 - DNA, 25 bp, Homo sapien
taattgcaccgttttcactttgtcc

SEQ ID NO: 4872660 - DNA, 25 bp, Homo sapien
tggagcagtccaccaagttgatctc

SEQ ID NO: 4872661 - DNA, 25 bp, Homo sapien
ctactgattgcctcaggtgtgctag

SEQ ID NO: 4872662 - DNA, 25 bp, Homo sapien
ggtgtgctagttcctaatgttggag

SEQ ID NO: 4872663 - DNA, 25 bp, Homo sapien
tttccgttcctccacacaatccttc

SEQ ID NO: 4872664 - DNA, 25 bp, Homo sapien
cgctcttgaatcattagaataaaat

SEQ ID NO: 4872665 - DNA, 25 bp, Homo sapien
ccacacaatccttcaaagctggtct

SEQ ID NO: 4872666 - DNA, 25 bp, Homo sapien
cacaatccttcaaagctggtcttac

SEQ ID NO: 4872667 - DNA, 25 bp, Homo sapien
aaagcgctttgtgataggggccaca

SEQ ID NO: 4872668 - DNA, 25 bp, Homo sapien
ctaaataaagcgctttgtgataggg

SEQ ID NO: 4872669 - DNA, 25 bp, Homo sapien
cgctttgtgataggggccacatttc

SEQ ID NO: 4872670 - DNA, 25 bp, Homo sapien
aataaagcgctttgtgataggggcc

SEQ ID NO: 4872671 - DNA, 25 bp, Homo sapien
gaaacaggtatgtctcaggaccacc

SEQ ID NO: 4872672 - DNA, 25 bp, Homo sapien
ccatcgtgctcccatagcttggatc

SEQ ID NO: 4872673 - DNA, 25 bp, Homo sapien
aggtgccactttaatcatctcaagc

SEQ ID NO: 4872674 - DNA, 25 bp, Homo sapien
tctcaagcaccacatgtaaacagtg

SEQ ID NO: 4872675 - DNA, 25 bp, Homo sapien
gtggaggattaagcaccatattggg

SEQ ID NO: 4872676 - DNA, 25 bp, Homo sapien
gctctgattctgctctccactgata

SEQ ID NO: 4872677 - DNA, 25 bp, Homo sapien
ccactgataagcagtggaggattaa

SEQ ID NO: 4872678 - DNA, 25 bp, Homo sapien
ggaatgctctgattctgctctccac

SEQ ID NO: 4872679 - DNA, 25 bp, Homo sapien
catgggcaaggagtagcagatacac

SEQ ID NO: 4872680 - DNA, 25 bp, Homo sapien
gtctgctctgtagccagtactgagg

SEQ ID NO: 4872681 - DNA, 25 bp, Homo sapien
agtactgagggctggccttctgcac

SEQ ID NO: 4872682 - DNA, 25 bp, Homo sapien
gagagatctgaagcacccgatgatg

SEQ ID NO: 4872683 - DNA, 25 bp, Homo sapien
tgtgctccctttcgtttgcttccat

SEQ ID NO: 4872684 - DNA, 25 bp, Homo sapien
ctgtgctccctttcgtttgcttcca

SEQ ID NO: 4872685 - DNA, 25 bp, Homo sapien
cctgtgctccctttcgtttgcttcc

SEQ ID NO: 4872686 - DNA, 25 bp, Homo sapien
tgtgcatgtacaatggtggccactt

SEQ ID NO: 4872687 - DNA, 25 bp, Homo sapien
tgcatgtacaatggtggccacttct

SEQ ID NO: 4872688 - DNA, 25 bp, Homo sapien
ctgtgcatgtacaatggtggccact

SEQ ID NO: 4872689 - DNA, 25 bp, Homo sapien
catgtacaatggtggccacttcttc

SEQ ID NO: 4872690 - DNA, 25 bp, Homo sapien
tgcatggaaggaacattctcaggag

SEQ ID NO: 4872691 - DNA, 25 bp, Homo sapien
tggaaggaacattctcaggagatgc

SEQ ID NO: 4872692 - DNA, 25 bp, Homo sapien
atgcagaacagatgcttcctgggct

SEQ ID NO: 4872693 - DNA, 25 bp, Homo sapien
cagaacagatgcttcctgggcttgc

SEQ ID NO: 4872694 - DNA, 25 bp, Homo sapien
ttatcgcctttccacaaagaggtca

SEQ ID NO: 4872695 - DNA, 25 bp, Homo sapien
gcctttccacaaagaggtcagtgat

SEQ ID NO: 4872696 - DNA, 25 bp, Homo sapien
cctttccacaaagaggtcagtgatg

SEQ ID NO: 4872697 - DNA, 25 bp, Homo sapien
tcgcctttccacaaagaggtcagtg

SEQ ID NO: 4872698 - DNA, 25 bp, Homo sapien
aacaagatgtcacactgagggcgag

SEQ ID NO: 4872699 - DNA, 25 bp, Homo sapien
gagcattgagtggtgtccaggcaca

SEQ ID NO: 4872700 - DNA, 25 bp, Homo sapien
tccccagagctgaatgagagctgaa

SEQ ID NO: 4872701 - DNA, 25 bp, Homo sapien
gatctgaatactctggtgtggaaca

SEQ ID NO: 4872702 - DNA, 25 bp, Homo sapien
ctgggttttgccatgttggtcaggc

SEQ ID NO: 4872703 - DNA, 25 bp, Homo sapien
caggcgcctgccaccctaccccgct

SEQ ID NO: 4872704 - DNA, 25 bp, Homo sapien
actgggttttgccatgttggtcagg

SEQ ID NO: 4872705 - DNA, 25 bp, Homo sapien
aggcgcctgccaccctaccccgcta

SEQ ID NO: 4872706 - DNA, 25 bp, Homo sapien
cctgcttctcacaaattacagccat

SEQ ID NO: 4872707 - DNA, 25 bp, Homo sapien
cagagaagaggacaccaattgtttc

SEQ ID NO: 4872708 - DNA, 25 bp, Homo sapien
tggcttagttctgcatgcaacaggt

SEQ ID NO: 4872709 - DNA, 25 bp, Homo sapien
tgtaccccatggtgctctctttcat

SEQ ID NO: 4872710 - DNA, 25 bp, Homo sapien
tgcaacaggtctggctgtaccccat

SEQ ID NO: 4872711 - DNA, 25 bp, Homo sapien
cgccaccgcggctcgcgagctccgg

SEQ ID NO: 4872712 - DNA, 25 bp, Homo sapien
gcagcagcaacggctttatttccct

SEQ ID NO: 4872713 - DNA, 25 bp, Homo sapien
agcagcaacggctttatttccctgg

SEQ ID NO: 4872714 - DNA, 25 bp, Homo sapien
gctgcagcagcaacggctttatttc

SEQ ID NO: 4872715 - DNA, 25 bp, Homo sapien
ggacgcctgctcctggcctcccttc

SEQ ID NO: 4872716 - DNA, 25 bp, Homo sapien
acgcctgctcctggcctcccttccc

SEQ ID NO: 4872717 - DNA, 25 bp, Homo sapien
cggacgcctgctcctggcctccctt

SEQ ID NO: 4872718 - DNA, 25 bp, Homo sapien
gccggacgcctgctcctggcctccc

SEQ ID NO: 4872719 - DNA, 25 bp, Homo sapien
gggcgctggtgtgtgtggtggggac

SEQ ID NO: 4872720 - DNA, 25 bp, Homo sapien
cgctggtgtgtgtggtggggacggg

SEQ ID NO: 4872721 - DNA, 25 bp, Homo sapien
ggcgctggtgtgtgtggtggggacg

SEQ ID NO: 4872722 - DNA, 25 bp, Homo sapien
gcgctggtgtgtgtggtggggacgg

SEQ ID NO: 4872723 - DNA, 25 bp, Homo sapien
ctgacaacgagcataaagaagggta

SEQ ID NO: 4872724 - DNA, 25 bp, Homo sapien
cagactcctaacttgtgcagtgtag

SEQ ID NO: 4872725 - DNA, 25 bp, Homo sapien
gctcttggcaactggctgacaacga

SEQ ID NO: 4872726 - DNA, 25 bp, Homo sapien
ggccatgtggacctttgaaactatg

SEQ ID NO: 4872727 - DNA, 25 bp, Homo sapien
tcagagggctcgacaatctctgcct

SEQ ID NO: 4872728 - DNA, 25 bp, Homo sapien
ggcagaaaacggcttatttcacaaa

SEQ ID NO: 4872729 - DNA, 25 bp, Homo sapien
tctgcctttgtaaagccagagcaaa

SEQ ID NO: 4872730 - DNA, 25 bp, Homo sapien
cacaaaggacgggataaagaaggca

SEQ ID NO: 4872731 - DNA, 25 bp, Homo sapien
atcgggatcgttgcagagcctctca

SEQ ID NO: 4872732 - DNA, 25 bp, Homo sapien
gagcctctcagaggatccggcgaac

SEQ ID NO: 4872733 - DNA, 25 bp, Homo sapien
cccagggcagtgctagcgagtcgcc

SEQ ID NO: 4872734 - DNA, 25 bp, Homo sapien
tccggcgaacgcagctcctgtgagt

SEQ ID NO: 4872735 - DNA, 25 bp, Homo sapien
tccacgcggaaacgataggttattg

SEQ ID NO: 4872736 - DNA, 25 bp, Homo sapien
acatacacgcacgagagaggcagag

SEQ ID NO: 4872737 - DNA, 25 bp, Homo sapien
aatgaaagaaaacgcacgcacaggg

SEQ ID NO: 4872738 - DNA, 25 bp, Homo sapien
tgaagattcttagaccctccacgcg

SEQ ID NO: 4872739 - DNA, 25 bp, Homo sapien
ggaaataacatctgagcctcccctg

SEQ ID NO: 4872740 - DNA, 25 bp, Homo sapien
ggcagcgtagttccgtccctgtggc

SEQ ID NO: 4872741 - DNA, 25 bp, Homo sapien
ctgtggctgcagctcagtccggaga

SEQ ID NO: 4872742 - DNA, 25 bp, Homo sapien
taagcgcaggtccaggtcgcacttt

SEQ ID NO: 4872743 - DNA, 25 bp, Homo sapien
tgtggagcaagagtactcctcagag

SEQ ID NO: 4872744 - DNA, 25 bp, Homo sapien
tagagggaggggtacttttcatcca

SEQ ID NO: 4872745 - DNA, 25 bp, Homo sapien
caagagtactcctcagagtcctgtc

SEQ ID NO: 4872746 - DNA, 25 bp, Homo sapien
cctgtccttaggtacagcaggtgta

SEQ ID NO: 4872747 - DNA, 25 bp, Homo sapien
cccagacccctatagaaaaatgatt

SEQ ID NO: 4872748 - DNA, 25 bp, Homo sapien
gaacttcgactttactctcctccag

SEQ ID NO: 4872749 - DNA, 25 bp, Homo sapien
cgcacggcccatgatttctcagagc

SEQ ID NO: 4872750 - DNA, 25 bp, Homo sapien
gagcttctaagaacttcgactttac

SEQ ID NO: 4872751 - DNA, 25 bp, Homo sapien
tgtggacctttgagcatttcaaccc

SEQ ID NO: 4872752 - DNA, 25 bp, Homo sapien
tgccgagcaatgaaattagatgtct

SEQ ID NO: 4872753 - DNA, 25 bp, Homo sapien
tctctaacgtagaattttgagtagc

SEQ ID NO: 4872754 - DNA, 25 bp, Homo sapien
aacagttgcaatccactcaagacca

SEQ ID NO: 4872755 - DNA, 25 bp, Homo sapien
gatcactttatctttgctgacaaat

SEQ ID NO: 4872756 - DNA, 25 bp, Homo sapien
catatgatgaagtgataataagcaa

SEQ ID NO: 4872757 - DNA, 25 bp, Homo sapien
ttgaagaccaaattcaggagaccca

SEQ ID NO: 4872758 - DNA, 25 bp, Homo sapien
tgtgctgaagaaacttcacggtgaa

SEQ ID NO: 4872759 - DNA, 25 bp, Homo sapien
tgttccaagtggagaactcagtcaa

SEQ ID NO: 4872760 - DNA, 25 bp, Homo sapien
caaagtttagatgggtctgcagacc

SEQ ID NO: 4872761 - DNA, 25 bp, Homo sapien
ccaggtcattgagccgcagtgagat

SEQ ID NO: 4872762 - DNA, 25 bp, Homo sapien
aacagacagggccagtttatcttcc

SEQ ID NO: 4872763 - DNA, 25 bp, Homo sapien
catgaccatgggttgttaacttgcc

SEQ ID NO: 4872764 - DNA, 25 bp, Homo sapien
gcttttaagggtagggatcatctcc

SEQ ID NO: 4872765 - DNA, 25 bp, Homo sapien
gggttagcttcacaaaggctcagtg

SEQ ID NO: 4872766 - DNA, 25 bp, Homo sapien
cccatttcacaaacaggaccaggat

SEQ ID NO: 4872767 - DNA, 25 bp, Homo sapien
tatccattcgtaagcatgactagga

SEQ ID NO: 4872768 - DNA, 25 bp, Homo sapien
cccaacattgaattatacatagtag

SEQ ID NO: 4872769 - DNA, 25 bp, Homo sapien
aaaacaaggtgggatatctttgagt

SEQ ID NO: 4872770 - DNA, 25 bp, Homo sapien
ggccttaaacaattctttcagttga

SEQ ID NO: 4872771 - DNA, 25 bp, Homo sapien
tcacagcccagaaagttgcatcgtt

SEQ ID NO: 4872772 - DNA, 25 bp, Homo sapien
gctctacatagatgcgggcttgcct

SEQ ID NO: 4872773 - DNA, 25 bp, Homo sapien
caagtaccattgagtaagaggccag

SEQ ID NO: 4872774 - DNA, 25 bp, Homo sapien
agggatggcctgcacaagctctaca

SEQ ID NO: 4872775 - DNA, 25 bp, Homo sapien
cccagcgaatctgcaggaagactga

SEQ ID NO: 4872776 - DNA, 25 bp, Homo sapien
gtgcatgaacccagcgaatctgcag

SEQ ID NO: 4872777 - DNA, 25 bp, Homo sapien
catagatcagctgaacacgggtcat

SEQ ID NO: 4872778 - DNA, 25 bp, Homo sapien
ggaagactgagtcctgcatagatca

SEQ ID NO: 4872779 - DNA, 25 bp, Homo sapien
tatggccttgaaacataaaatggtt

SEQ ID NO: 4872780 - DNA, 25 bp, Homo sapien
aagttgtaaacggattgaggacaga

SEQ ID NO: 4872781 - DNA, 25 bp, Homo sapien
tggtcatgtttatcttatcactggg

SEQ ID NO: 4872782 - DNA, 25 bp, Homo sapien
attgaggacagaaattactcttttt

SEQ ID NO: 4872783 - DNA, 25 bp, Homo sapien
taaaatttactcagagaagagtctg

SEQ ID NO: 4872784 - DNA, 25 bp, Homo sapien
caaataagaactactagaggaatag

SEQ ID NO: 4872785 - DNA, 25 bp, Homo sapien
taatgacataagttgtcctttgaac

SEQ ID NO: 4872786 - DNA, 25 bp, Homo sapien
gattgatttttgaggcagcatctca

SEQ ID NO: 4872787 - DNA, 25 bp, Homo sapien
gccagggcaatgtgcgtgctgagct

SEQ ID NO: 4872788 - DNA, 25 bp, Homo sapien
tgccagggcaatgtgcgtgctgagc

SEQ ID NO: 4872789 - DNA, 25 bp, Homo sapien
ggtgccagggcaatgtgcgtgctga

SEQ ID NO: 4872790 - DNA, 25 bp, Homo sapien
gaggtgccagggcaatgtgcgtgct

SEQ ID NO: 4872791 - DNA, 25 bp, Homo sapien
attcactggaccctgccatagtgca

SEQ ID NO: 4872792 - DNA, 25 bp, Homo sapien
cctgtgcatgtgaatgggctaaaga

SEQ ID NO: 4872793 - DNA, 25 bp, Homo sapien
cctgccatagtgcaaggctctgcct

SEQ ID NO: 4872794 - DNA, 25 bp, Homo sapien
tgcctgtgcatgtgaatgggctaaa

SEQ ID NO: 4872795 - DNA, 25 bp, Homo sapien
aatgcgaatattgggaactcctccc

SEQ ID NO: 4872796 - DNA, 25 bp, Homo sapien
tagcctttgtcttttactgaggaga

SEQ ID NO: 4872797 - DNA, 25 bp, Homo sapien
tcttttactgaggagagtactgcca

SEQ ID NO: 4872798 - DNA, 25 bp, Homo sapien
gaggagagtactgccaatgcgaata

SEQ ID NO: 4872799 - DNA, 25 bp, Homo sapien
tgcccataaatcgacaagcctgaga

SEQ ID NO: 4872800 - DNA, 25 bp, Homo sapien
gatgacacagcgagggaatacagag

SEQ ID NO: 4872801 - DNA, 25 bp, Homo sapien
aagcctgagaaaagcttataaatga

SEQ ID NO: 4872802 - DNA, 25 bp, Homo sapien
gcttataaatgatattaatctccat

SEQ ID NO: 4872803 - DNA, 25 bp, Homo sapien
gtccaggatatgtctgtctgatcct

SEQ ID NO: 4872804 - DNA, 25 bp, Homo sapien
gatcagtgggtccaggatatgtctg

SEQ ID NO: 4872805 - DNA, 25 bp, Homo sapien
aggatgatcagtgggtccaggatat

SEQ ID NO: 4872806 - DNA, 25 bp, Homo sapien
cagtgggtccaggatatgtctgtct

SEQ ID NO: 4872807 - DNA, 25 bp, Homo sapien
cagcacatgctgtgggtagatgtct

SEQ ID NO: 4872808 - DNA, 25 bp, Homo sapien
tgtttgcagcaaaccgttcatacag

SEQ ID NO: 4872809 - DNA, 25 bp, Homo sapien
cgttcatacagcacatgctgtgggt

SEQ ID NO: 4872810 - DNA, 25 bp, Homo sapien
gaatcctggcagagtgtttgcagca

SEQ ID NO: 4872811 - DNA, 25 bp, Homo sapien
tgaaagggagtgctcccagtttttg

SEQ ID NO: 4872812 - DNA, 25 bp, Homo sapien
cagatatacaatcatttcatccgca

SEQ ID NO: 4872813 - DNA, 25 bp, Homo sapien
gtgagggagggcatctgtcttgtgc

SEQ ID NO: 4872814 - DNA, 25 bp, Homo sapien
gtgccagttttgaaagggagtgctc

SEQ ID NO: 4872815 - DNA, 25 bp, Homo sapien
tgaatgaaggccacccatgctattt

SEQ ID NO: 4872816 - DNA, 25 bp, Homo sapien
ccacttcagtgatcgtggccatgaa

SEQ ID NO: 4872817 - DNA, 25 bp, Homo sapien
tatagtcctatccaatgtgctctgc

SEQ ID NO: 4872818 - DNA, 25 bp, Homo sapien
tattttagattgaggaagcctgcac

SEQ ID NO: 4872819 - DNA, 25 bp, Homo sapien
gatttctttacaacgtcaagcaggc

SEQ ID NO: 4872820 - DNA, 25 bp, Homo sapien
aactcgtgcaggcagaaactaggga

SEQ ID NO: 4872821 - DNA, 25 bp, Homo sapien
gattttcagcgtgatggagcaagca

SEQ ID NO: 4872822 - DNA, 25 bp, Homo sapien
caagcgcatgtacaagtcaggagag

SEQ ID NO: 4872823 - DNA, 25 bp, Homo sapien
tgttggaccacattggttcacgtgc

SEQ ID NO: 4872824 - DNA, 25 bp, Homo sapien
ggctccagaaatctccgcatagaaa

SEQ ID NO: 4872825 - DNA, 25 bp, Homo sapien
caaatattgtcagtgggtggagtgc

SEQ ID NO: 4872826 - DNA, 25 bp, Homo sapien
ggtggagtgctactgaagcaatttt

SEQ ID NO: 4872827 - DNA, 25 bp, Homo sapien
ggctcagttttggagctgagatgac

SEQ ID NO: 4872828 - DNA, 25 bp, Homo sapien
tacagcaagctacatgggctcagtt

SEQ ID NO: 4872829 - DNA, 25 bp, Homo sapien
cggtgagctagatgacaggtccaca

SEQ ID NO: 4872830 - DNA, 25 bp, Homo sapien
agatgacagagacggtgagctagat

SEQ ID NO: 4872831 - DNA, 25 bp, Homo sapien
cacgaaaagaagatcatggtcactg

SEQ ID NO: 4872832 - DNA, 25 bp, Homo sapien
gtagtatgcccagcaaatcaatgtg

SEQ ID NO: 4872833 - DNA, 25 bp, Homo sapien
agaagcttcaaagcactccccaagg

SEQ ID NO: 4872834 - DNA, 25 bp, Homo sapien
ggtagtctgctgacggtctgatcca

SEQ ID NO: 4872835 - DNA, 25 bp, Homo sapien
aacagaaagatattgacctaaggac

SEQ ID NO: 4872836 - DNA, 25 bp, Homo sapien
ttacagatgaagtaggatttgcatc

SEQ ID NO: 4872837 - DNA, 25 bp, Homo sapien
aaagagatagaacaagaaatgagta

SEQ ID NO: 4872838 - DNA, 25 bp, Homo sapien
tgagaaaccatatactgtccttgca

SEQ ID NO: 4872839 - DNA, 25 bp, Homo sapien
aaacagactgtttaaccatccatac

SEQ ID NO: 4872840 - DNA, 25 bp, Homo sapien
gagtaaaacggtgcattcagtctga

SEQ ID NO: 4872841 - DNA, 25 bp, Homo sapien
ccaaaactgtatctcttaaacgttg

SEQ ID NO: 4872842 - DNA, 25 bp, Homo sapien
tttttaaagatacacctgcaacggc

SEQ ID NO: 4872843 - DNA, 25 bp, Homo sapien
tcttaatcatcaggcaaggcagaga

SEQ ID NO: 4872844 - DNA, 25 bp, Homo sapien
tttctacctgaagcaaaaagtgagg

SEQ ID NO: 4872845 - DNA, 25 bp, Homo sapien
caggtgggcttcaggtgcttagtca

SEQ ID NO: 4872846 - DNA, 25 bp, Homo sapien
agagacatcagtgccaacaaccagc

SEQ ID NO: 4872847 - DNA, 25 bp, Homo sapien
ctccaataagtttttaatggtgtag

SEQ ID NO: 4872848 - DNA, 25 bp, Homo sapien
tgcattggcttaatcatgtcactct

SEQ ID NO: 4872849 - DNA, 25 bp, Homo sapien
ccctgcattggcttaatcatgtcac

SEQ ID NO: 4872850 - DNA, 25 bp, Homo sapien
gcaatacttaataatccctgcattg

SEQ ID NO: 4872851 - DNA, 25 bp, Homo sapien
gagtatttgctacacacaccctgtg

SEQ ID NO: 4872852 - DNA, 25 bp, Homo sapien
aacccagatgggctgaatacactac

SEQ ID NO: 4872853 - DNA, 25 bp, Homo sapien
gaagttcttagagctttggtggcca

SEQ ID NO: 4872854 - DNA, 25 bp, Homo sapien
gactgcttcctcactaaaatcatgg

SEQ ID NO: 4872855 - DNA, 25 bp, Homo sapien
tggcaactgccattattcacatcaa

SEQ ID NO: 4872856 - DNA, 25 bp, Homo sapien
tgctaaactaatttcaggtcagagg

SEQ ID NO: 4872857 - DNA, 25 bp, Homo sapien
tcctattaggcaaaacttacttggc

SEQ ID NO: 4872858 - DNA, 25 bp, Homo sapien
aaatatgagcgacattctacaaaac

SEQ ID NO: 4872859 - DNA, 25 bp, Homo sapien
ttctacacaacatttgaataaggct

SEQ ID NO: 4872860 - DNA, 25 bp, Homo sapien
aaagaggctgtattaatacaaatcc

SEQ ID NO: 4872861 - DNA, 25 bp, Homo sapien
tatgttcagaagttcgacagaaaac

SEQ ID NO: 4872862 - DNA, 25 bp, Homo sapien
caataattttacacagcccctttca

SEQ ID NO: 4872863 - DNA, 25 bp, Homo sapien
tcagtactgtccagaatgactttct

SEQ ID NO: 4872864 - DNA, 25 bp, Homo sapien
cacctgacctcagtactgtccagaa

SEQ ID NO: 4872865 - DNA, 25 bp, Homo sapien
agtactgtccagaatgactttcttc

SEQ ID NO: 4872866 - DNA, 25 bp, Homo sapien
gacctcagtactgtccagaatgact

SEQ ID NO: 4872867 - DNA, 25 bp, Homo sapien
gtcttctttgctaggttatgaactc

SEQ ID NO: 4872868 - DNA, 25 bp, Homo sapien
taggttatgaactccaatgaaagtg

SEQ ID NO: 4872869 - DNA, 25 bp, Homo sapien
aagtgcacttatgttccacaaaatc

SEQ ID NO: 4872870 - DNA, 25 bp, Homo sapien
gaactccaatgaaagtgcacttatg

SEQ ID NO: 4872871 - DNA, 25 bp, Homo sapien
gagcagttggtgttggttcctaaag

SEQ ID NO: 4872872 - DNA, 25 bp, Homo sapien
tcttccaggctttgtgcatctgcag

SEQ ID NO: 4872873 - DNA, 25 bp, Homo sapien
catctgcaggagtgctaagagggtt

SEQ ID NO: 4872874 - DNA, 25 bp, Homo sapien
taagagggttcagggttatagagac

SEQ ID NO: 4872875 - DNA, 25 bp, Homo sapien
ttataaaacttcacgtaggcctgca

SEQ ID NO: 4872876 - DNA, 25 bp, Homo sapien
taggtacgcaatgactgaggatgga

SEQ ID NO: 4872877 - DNA, 25 bp, Homo sapien
taggcctgcatccaatgggcatgct

SEQ ID NO: 4872878 - DNA, 25 bp, Homo sapien
tgaacgaatacgaattaggtacgca

SEQ ID NO: 4872879 - DNA, 25 bp, Homo sapien
cacgggcttccgcttagtttctgaa

SEQ ID NO: 4872880 - DNA, 25 bp, Homo sapien
atgacctggtctgccacgggcttcc

SEQ ID NO: 4872881 - DNA, 25 bp, Homo sapien
gatgacctggtctgccacgggcttc

SEQ ID NO: 4872882 - DNA, 25 bp, Homo sapien
gtctgccacgggcttccgcttagtt

SEQ ID NO: 4872883 - DNA, 25 bp, Homo sapien
cagccagtatgaactgcatgtcctt

SEQ ID NO: 4872884 - DNA, 25 bp, Homo sapien
gccagtatgaactgcatgtccttca

SEQ ID NO: 4872885 - DNA, 25 bp, Homo sapien
cagtatgaactgcatgtccttcagt

SEQ ID NO: 4872886 - DNA, 25 bp, Homo sapien
tatgaactgcatgtccttcagtgct

SEQ ID NO: 4872887 - DNA, 25 bp, Homo sapien
atttctcccagtttaagtctaccag

SEQ ID NO: 4872888 - DNA, 25 bp, Homo sapien
tgcaggtggattctgaagaacttgg

SEQ ID NO: 4872889 - DNA, 25 bp, Homo sapien
ggtggtactccagaacaagataatt

SEQ ID NO: 4872890 - DNA, 25 bp, Homo sapien
atatttttcagtaggagagggagct

SEQ ID NO: 4872891 - DNA, 25 bp, Homo sapien
tctaggaatagctcaaatccctgta

SEQ ID NO: 4872892 - DNA, 25 bp, Homo sapien
gactgctatttacactcaaatcata

SEQ ID NO: 4872893 - DNA, 25 bp, Homo sapien
ctactttacccatgaggaagacaag

SEQ ID NO: 4872894 - DNA, 25 bp, Homo sapien
gaaatgtatctactttacccatgag

SEQ ID NO: 4872895 - DNA, 25 bp, Homo sapien
gtcacttctcgggcaatctcaacat

SEQ ID NO: 4872896 - DNA, 25 bp, Homo sapien
ttgaatttaggtacagcaatatttt

SEQ ID NO: 4872897 - DNA, 25 bp, Homo sapien
gaatttaggtacagcaatatttttc

SEQ ID NO: 4872898 - DNA, 25 bp, Homo sapien
cacttctcgggcaatctcaacattc

SEQ ID NO: 4872899 - DNA, 25 bp, Homo sapien
ttttccttacaactgcctttctcca

SEQ ID NO: 4872900 - DNA, 25 bp, Homo sapien
caactgcctttctccatttcttcat

SEQ ID NO: 4872901 - DNA, 25 bp, Homo sapien
tattttccttacaactgcctttctc

SEQ ID NO: 4872902 - DNA, 25 bp, Homo sapien
ttacaactgcctttctccatttctt

SEQ ID NO: 4872903 - DNA, 25 bp, Homo sapien
aggatgagaatagccgccctcaagt

SEQ ID NO: 4872904 - DNA, 25 bp, Homo sapien
ttttcaggattgtcagaagaaggtg

SEQ ID NO: 4872905 - DNA, 25 bp, Homo sapien
aatagccgccctcaagtgaatttcc

SEQ ID NO: 4872906 - DNA, 25 bp, Homo sapien
tcaggattgtcagaagaaggtggct

SEQ ID NO: 4872907 - DNA, 25 bp, Homo sapien
tctcttgactgaacagggggagatg

SEQ ID NO: 4872908 - DNA, 25 bp, Homo sapien
catgagggaaagcaataccaagaac

SEQ ID NO: 4872909 - DNA, 25 bp, Homo sapien
tcaccaagactgaagcagcctagat

SEQ ID NO: 4872910 - DNA, 25 bp, Homo sapien
gaagcagcctagattaatctgccca

SEQ ID NO: 4872911 - DNA, 25 bp, Homo sapien
tgttcgggaatgaggcactgactgc

SEQ ID NO: 4872912 - DNA, 25 bp, Homo sapien
gaagattggcttttgcatccaggac

SEQ ID NO: 4872913 - DNA, 25 bp, Homo sapien
tcccacgggttggagcagacactgt

SEQ ID NO: 4872914 - DNA, 25 bp, Homo sapien
tctctgagcaaaccagggtctctgt

SEQ ID NO: 4872915 - DNA, 25 bp, Homo sapien
tcatcatcatggaggaccggaggca

SEQ ID NO: 4872916 - DNA, 25 bp, Homo sapien
gcagcttgcgcaaactctcattgtg

SEQ ID NO: 4872917 - DNA, 25 bp, Homo sapien
tctgtttgcgggagacctttctgac

SEQ ID NO: 4872918 - DNA, 25 bp, Homo sapien
ccccagtggaaaagctgaaggtctg

SEQ ID NO: 4872919 - DNA, 25 bp, Homo sapien
tgtgcattgcagttttcacaaatca

SEQ ID NO: 4872920 - DNA, 25 bp, Homo sapien
tacttgttaattctgagacagttgc

SEQ ID NO: 4872921 - DNA, 25 bp, Homo sapien
gacagttgcatggattacgagatac

SEQ ID NO: 4872922 - DNA, 25 bp, Homo sapien
tgctgtaaaagtagacacggcttaa

SEQ ID NO: 4872923 - DNA, 25 bp, Homo sapien
caatctctggagaacaatactgaga

SEQ ID NO: 4872924 - DNA, 25 bp, Homo sapien
tgttatcctgtgatgacaaggccct

SEQ ID NO: 4872925 - DNA, 25 bp, Homo sapien
aaaggtgcacctattaacagagaca

SEQ ID NO: 4872926 - DNA, 25 bp, Homo sapien
cataaatgtataatcaggcgggcct

SEQ ID NO: 4872927 - DNA, 25 bp, Homo sapien
cattccttaacattcaaactaattt

SEQ ID NO: 4872928 - DNA, 25 bp, Homo sapien
atttcccacattacattaaaggcta

SEQ ID NO: 4872929 - DNA, 25 bp, Homo sapien
ttaaatgatagtagcccctccctca

SEQ ID NO: 4872930 - DNA, 25 bp, Homo sapien
taccttggcaatccctagcggcaaa

SEQ ID NO: 4872931 - DNA, 25 bp, Homo sapien
gcggcaaactaatgtccccacaatg

SEQ ID NO: 4872932 - DNA, 25 bp, Homo sapien
atccttactcttagccagtggctgg

SEQ ID NO: 4872933 - DNA, 25 bp, Homo sapien
tattaggagatcagttgtactagcc

SEQ ID NO: 4872934 - DNA, 25 bp, Homo sapien
cagaacagttctgttaccccagaaa

SEQ ID NO: 4872935 - DNA, 25 bp, Homo sapien
tactaagctattctgcttgtggaga

SEQ ID NO: 4872936 - DNA, 25 bp, Homo sapien
tgtactagccatataaaatgagcat

SEQ ID NO: 4872937 - DNA, 25 bp, Homo sapien
taatttggctaggaattgggcttta

SEQ ID NO: 4872938 - DNA, 25 bp, Homo sapien
ttttttggaggctggacgtattgca

SEQ ID NO: 4872939 - DNA, 25 bp, Homo sapien
aagtctacttattagaacagcaaag

SEQ ID NO: 4872940 - DNA, 25 bp, Homo sapien
tgcttataatggtgttggtgtttct

SEQ ID NO: 4872941 - DNA, 25 bp, Homo sapien
tcaggttggagcccatgagaatgtc

SEQ ID NO: 4872942 - DNA, 25 bp, Homo sapien
aggttggagcccatgagaatgtctg

SEQ ID NO: 4872943 - DNA, 25 bp, Homo sapien
tgtggatgcggtagatattcaggtt

SEQ ID NO: 4872944 - DNA, 25 bp, Homo sapien
tatttgtggatgcggtagatattca

SEQ ID NO: 4872945 - DNA, 25 bp, Homo sapien
gttcagtgctaagaataccaatcat

SEQ ID NO: 4872946 - DNA, 25 bp, Homo sapien
agttaaggaaaccagttcagtgcta

SEQ ID NO: 4872947 - DNA, 25 bp, Homo sapien
tagagttaaggaaaccagttcagtg

SEQ ID NO: 4872948 - DNA, 25 bp, Homo sapien
taaggaaaccagttcagtgctaaga

SEQ ID NO: 4872949 - DNA, 25 bp, Homo sapien
tgttacagactgcatggtgtctccc

SEQ ID NO: 4872950 - DNA, 25 bp, Homo sapien
tgttgaacttctagccctcagtgct

SEQ ID NO: 4872951 - DNA, 25 bp, Homo sapien
caacaaggcagtgtcagaaagcaga

SEQ ID NO: 4872952 - DNA, 25 bp, Homo sapien
taaggtgggccactaattcaatgca

SEQ ID NO: 4872953 - DNA, 25 bp, Homo sapien
tattgattctgcactccaagcttgc

SEQ ID NO: 4872954 - DNA, 25 bp, Homo sapien
tacagtattagcatcctcatcagtg

SEQ ID NO: 4872955 - DNA, 25 bp, Homo sapien
gatatactattgagccccatgagtg

SEQ ID NO: 4872956 - DNA, 25 bp, Homo sapien
tgaaactgctttcggatcatctagc

SEQ ID NO: 4872957 - DNA, 25 bp, Homo sapien
taaaagctggatgtgatgtactggg

SEQ ID NO: 4872958 - DNA, 25 bp, Homo sapien
gcttgtgcctctgtgttgtgactta

SEQ ID NO: 4872959 - DNA, 25 bp, Homo sapien
ccattagctcttaacacgatagtca

SEQ ID NO: 4872960 - DNA, 25 bp, Homo sapien
gaagtgtactatagtcccgtgctta

SEQ ID NO: 4872961 - DNA, 25 bp, Homo sapien
catttagtaccaagaagcaagaacc

SEQ ID NO: 4872962 - DNA, 25 bp, Homo sapien
caactagtaactcaaaaagggcaga

SEQ ID NO: 4872963 - DNA, 25 bp, Homo sapien
gatacaagcatctgtcccaactagt

SEQ ID NO: 4872964 - DNA, 25 bp, Homo sapien
taggtgtcgaccatggttttctgca

SEQ ID NO: 4872965 - DNA, 25 bp, Homo sapien
tcagactgaacgcttgtgtacctca

SEQ ID NO: 4872966 - DNA, 25 bp, Homo sapien
tgagactatgccttgggccatggtc

SEQ ID NO: 4872967 - DNA, 25 bp, Homo sapien
ctgttatctctaaaggtggccacct

SEQ ID NO: 4872968 - DNA, 25 bp, Homo sapien
tggattagcaagagtctagcacctg

SEQ ID NO: 4872969 - DNA, 25 bp, Homo sapien
ctatcccctgcaatactcagtagga

SEQ ID NO: 4872970 - DNA, 25 bp, Homo sapien
gttcttcaacagatgcccaatcaaa

SEQ ID NO: 4872971 - DNA, 25 bp, Homo sapien
tgtgtacattccgtgcattcccttg

SEQ ID NO: 4872972 - DNA, 25 bp, Homo sapien
tgcggaatccaaagcctactatgtg

SEQ ID NO: 4872973 - DNA, 25 bp, Homo sapien
ctgacctccttactaatttttcctg

SEQ ID NO: 4872974 - DNA, 25 bp, Homo sapien
ctccactgacctccttactaatttt

SEQ ID NO: 4872975 - DNA, 25 bp, Homo sapien
tgacctccttactaatttttcctgc

SEQ ID NO: 4872976 - DNA, 25 bp, Homo sapien
tcgttgtccggctctggtgagccat

SEQ ID NO: 4872977 - DNA, 25 bp, Homo sapien
tccggctctggtgagccattggcag

SEQ ID NO: 4872978 - DNA, 25 bp, Homo sapien
ttagtgctcgttgtccggctctggt

SEQ ID NO: 4872979 - DNA, 25 bp, Homo sapien
caggacagtggccatctgaaccact

SEQ ID NO: 4872980 - DNA, 25 bp, Homo sapien
catgagagctgagggaaatttttcc

SEQ ID NO: 4872981 - DNA, 25 bp, Homo sapien
tacaataaggagtagatctatggcc

SEQ ID NO: 4872982 - DNA, 25 bp, Homo sapien
cttacaaagggaataaggcagcttc

SEQ ID NO: 4872983 - DNA, 25 bp, Homo sapien
taactagctgtacattgcatgggca

SEQ ID NO: 4872984 - DNA, 25 bp, Homo sapien
atctgtgaattgtgcttgattgcag

SEQ ID NO: 4872985 - DNA, 25 bp, Homo sapien
tctgtgaattgtgcttgattgcagt

SEQ ID NO: 4872986 - DNA, 25 bp, Homo sapien
tctttaaggataggcatgtgcatta

SEQ ID NO: 4872987 - DNA, 25 bp, Homo sapien
taaagggctgatgtgtagaactctg

SEQ ID NO: 4872988 - DNA, 25 bp, Homo sapien
tctgctgtttactgttgctaaaggg

SEQ ID NO: 4872989 - DNA, 25 bp, Homo sapien
cattcctgactattcttcacattgc

SEQ ID NO: 4872990 - DNA, 25 bp, Homo sapien
agttattgtatcgaagtcacacagc

SEQ ID NO: 4872991 - DNA, 25 bp, Homo sapien
cggctaaggagattaattgctggca

SEQ ID NO: 4872992 - DNA, 25 bp, Homo sapien
tacttgagaagaaataagctgctcc

SEQ ID NO: 4872993 - DNA, 25 bp, Homo sapien
cactccaaggactggtgtataatct

SEQ ID NO: 4872994 - DNA, 25 bp, Homo sapien
gtcgtatctgttccatgtacaaact

SEQ ID NO: 4872995 - DNA, 25 bp, Homo sapien
gagttctggagcttgtcccccaggt

SEQ ID NO: 4872996 - DNA, 25 bp, Homo sapien
gctcctctgtaagtcgtatctgttc

SEQ ID NO: 4872997 - DNA, 25 bp, Homo sapien
tgtagagttctggagcttgtccccc

SEQ ID NO: 4872998 - DNA, 25 bp, Homo sapien
catctttgatccatgtagaatctcc

SEQ ID NO: 4872999 - DNA, 25 bp, Homo sapien
gatccatgtagaatctccatggaca

SEQ ID NO: 4873000 - DNA, 25 bp, Homo sapien
tttgatccatgtagaatctccatgg

SEQ ID NO: 4873001 - DNA, 25 bp, Homo sapien
ctcatctttgatccatgtagaatct

SEQ ID NO: 4873002 - DNA, 25 bp, Homo sapien
gatcctgggtgcatctgtgaggatt

SEQ ID NO: 4873003 - DNA, 25 bp, Homo sapien
tcagactggtttctttaatcctcag

SEQ ID NO: 4873004 - DNA, 25 bp, Homo sapien
tagtaacatagatatgatggttaat

SEQ ID NO: 4873005 - DNA, 25 bp, Homo sapien
aatgtgaaaagacgaggccggccta

SEQ ID NO: 4873006 - DNA, 25 bp, Homo sapien
gactgacaatggattaccacaagct

SEQ ID NO: 4873007 - DNA, 25 bp, Homo sapien
tacctggcatgcagctattgacctg

SEQ ID NO: 4873008 - DNA, 25 bp, Homo sapien
gatgtatcaatcttcagccctatgt

SEQ ID NO: 4873009 - DNA, 25 bp, Homo sapien
tccataaggcccatcagaagcagtt

SEQ ID NO: 4873010 - DNA, 25 bp, Homo sapien
tgctgtggcaccacaaaggatgtcg

SEQ ID NO: 4873011 - DNA, 25 bp, Homo sapien
gctgtggcaccacaaaggatgtcgt

SEQ ID NO: 4873012 - DNA, 25 bp, Homo sapien
gtgctgtggcaccacaaaggatgtc

SEQ ID NO: 4873013 - DNA, 25 bp, Homo sapien
cctcacaggcggttctgaaatccat

SEQ ID NO: 4873014 - DNA, 25 bp, Homo sapien
tcctcacaggcggttctgaaatcca

SEQ ID NO: 4873015 - DNA, 25 bp, Homo sapien
ggttaccatcctgcagcaaacaaat

SEQ ID NO: 4873016 - DNA, 25 bp, Homo sapien
tttggctaggtgcagccgcactttg

SEQ ID NO: 4873017 - DNA, 25 bp, Homo sapien
cagacacacatatcacatcctgttc

SEQ ID NO: 4873018 - DNA, 25 bp, Homo sapien
cgcactttgaaaggctcctggttac

SEQ ID NO: 4873019 - DNA, 25 bp, Homo sapien
tacagggccgctgattacttaatga

SEQ ID NO: 4873020 - DNA, 25 bp, Homo sapien
tcatagacaacaggctggagatggg

SEQ ID NO: 4873021 - DNA, 25 bp, Homo sapien
caggcaaggttctcgtacagggccg

SEQ ID NO: 4873022 - DNA, 25 bp, Homo sapien
gagatgggcccgaaatatgtgttca

SEQ ID NO: 4873023 - DNA, 25 bp, Homo sapien
tctgagatcacatacggcaacattg

SEQ ID NO: 4873024 - DNA, 25 bp, Homo sapien
gatttagggccttgtgtgactccca

SEQ ID NO: 4873025 - DNA, 25 bp, Homo sapien
gctgagttcagtgaccgctgcctaa

SEQ ID NO: 4873026 - DNA, 25 bp, Homo sapien
catagctatgctgcctcgacatgag

SEQ ID NO: 4873027 - DNA, 25 bp, Homo sapien
ttggcatgacgcctgggttttgacc

SEQ ID NO: 4873028 - DNA, 25 bp, Homo sapien
tgacccatctgccaatccttgattt

SEQ ID NO: 4873029 - DNA, 25 bp, Homo sapien
tgacgcctgggttttgacccatctg

SEQ ID NO: 4873030 - DNA, 25 bp, Homo sapien
ttttgacccatctgccaatccttga

SEQ ID NO: 4873031 - DNA, 25 bp, Homo sapien
caattcttgtttctgcaactgagct

SEQ ID NO: 4873032 - DNA, 25 bp, Homo sapien
cacgaattctcaattcttgtttctg

SEQ ID NO: 4873033 - DNA, 25 bp, Homo sapien
aattctcaattcttgtttctgcaac

SEQ ID NO: 4873034 - DNA, 25 bp, Homo sapien
aattcttgtttctgcaactgagcta

SEQ ID NO: 4873035 - DNA, 25 bp, Homo sapien
gctgccatatctggaaccgcataag

SEQ ID NO: 4873036 - DNA, 25 bp, Homo sapien
gactacaactgtgaccaactcgggc

SEQ ID NO: 4873037 - DNA, 25 bp, Homo sapien
ccggtgacaatgttttcactggagc

SEQ ID NO: 4873038 - DNA, 25 bp, Homo sapien
tcactggagccataatcttttcttc

SEQ ID NO: 4873039 - DNA, 25 bp, Homo sapien
caatctgtcaaagaaagagttatga

SEQ ID NO: 4873040 - DNA, 25 bp, Homo sapien
tcaatctgtcaaagaaagagttatg

SEQ ID NO: 4873041 - DNA, 25 bp, Homo sapien
aatctgtcaaagaaagagttatgaa

SEQ ID NO: 4873042 - DNA, 25 bp, Homo sapien
aatcctcctactgtttgtcttctga

SEQ ID NO: 4873043 - DNA, 25 bp, Homo sapien
gtttgtcttctgatggtcaccgttc

SEQ ID NO: 4873044 - DNA, 25 bp, Homo sapien
tgcttaatccaaatcctcctactgt

SEQ ID NO: 4873045 - DNA, 25 bp, Homo sapien
atgcttaatccaaatcctcctactg

SEQ ID NO: 4873046 - DNA, 25 bp, Homo sapien
cttggagatttttgaaacgacaact

SEQ ID NO: 4873047 - DNA, 25 bp, Homo sapien
gatttttgaaacgacaactggaatg

SEQ ID NO: 4873048 - DNA, 25 bp, Homo sapien
ctggaatgttatgttctgctcctcc

SEQ ID NO: 4873049 - DNA, 25 bp, Homo sapien
cgacaactggaatgttatgttctgc

SEQ ID NO: 4873050 - DNA, 25 bp, Homo sapien
ctgtagaattgcatctccaataaaa

SEQ ID NO: 4873051 - DNA, 25 bp, Homo sapien
acttcttcatgtctacattttctca

SEQ ID NO: 4873052 - DNA, 25 bp, Homo sapien
atgtctacattttctcacattaatg

SEQ ID NO: 4873053 - DNA, 25 bp, Homo sapien
cattttctcacattaatgccattta

SEQ ID NO: 4873054 - DNA, 25 bp, Homo sapien
tcttcatgtctacattttctcacat

SEQ ID NO: 4873055 - DNA, 25 bp, Homo sapien
gaaaatgctagcgactttaagaatt

SEQ ID NO: 4873056 - DNA, 25 bp, Homo sapien
gaaggtgactacaccaaagagcaat

SEQ ID NO: 4873057 - DNA, 25 bp, Homo sapien
gaaatctagtgaagataaatgatga

SEQ ID NO: 4873058 - DNA, 25 bp, Homo sapien
gcaggaagttattaagaaatctagt

SEQ ID NO: 4873059 - DNA, 25 bp, Homo sapien
cgccagctccgcgatagtcaggaag

SEQ ID NO: 4873060 - DNA, 25 bp, Homo sapien
tgaccgccagctccgcgatagtcag

SEQ ID NO: 4873061 - DNA, 25 bp, Homo sapien
tgctgaccgccagctccgcgatagt

SEQ ID NO: 4873062 - DNA, 25 bp, Homo sapien
cagctccgcgatagtcaggaaggac

SEQ ID NO: 4873063 - DNA, 25 bp, Homo sapien
ttctccagcattccgaagaacctga

SEQ ID NO: 4873064 - DNA, 25 bp, Homo sapien
atgcacaatcttcattcaatgggag

SEQ ID NO: 4873065 - DNA, 25 bp, Homo sapien
tgttagagtcacttcttctccagca

SEQ ID NO: 4873066 - DNA, 25 bp, Homo sapien
cattcaatgggagtttgaggaaagc

SEQ ID NO: 4873067 - DNA, 25 bp, Homo sapien
tgccactgctctggtcacttggagc

SEQ ID NO: 4873068 - DNA, 25 bp, Homo sapien
gggatggtagttgagatgtaagcca

SEQ ID NO: 4873069 - DNA, 25 bp, Homo sapien
cgactcaaatctgtgccgggcacat

SEQ ID NO: 4873070 - DNA, 25 bp, Homo sapien
tcggccacgacgagcatgataatgt

SEQ ID NO: 4873071 - DNA, 25 bp, Homo sapien
catactgagagaagcgcgaatgaag

SEQ ID NO: 4873072 - DNA, 25 bp, Homo sapien
gtctgaggtcgcaccatcgcttctc

SEQ ID NO: 4873073 - DNA, 25 bp, Homo sapien
agtcataactcctaaacacggactc

SEQ ID NO: 4873074 - DNA, 25 bp, Homo sapien
cataaacaaaacagtcataactcct

SEQ ID NO: 4873075 - DNA, 25 bp, Homo sapien
tcataactcctaaacacggactcac

SEQ ID NO: 4873076 - DNA, 25 bp, Homo sapien
tttcataaacaaaacagtcataact

SEQ ID NO: 4873077 - DNA, 25 bp, Homo sapien
cgaaggcatttgaagcagaaagcat

SEQ ID NO: 4873078 - DNA, 25 bp, Homo sapien
ctcgaaggcatttgaagcagaaagc

SEQ ID NO: 4873079 - DNA, 25 bp, Homo sapien
tcgaaggcatttgaagcagaaagca

SEQ ID NO: 4873080 - DNA, 25 bp, Homo sapien
cttcctggctaatcctagtcacata

SEQ ID NO: 4873081 - DNA, 25 bp, Homo sapien
tagtcacataacagctcttccataa

SEQ ID NO: 4873082 - DNA, 25 bp, Homo sapien
ggctaatcctagtcacataacagct

SEQ ID NO: 4873083 - DNA, 25 bp, Homo sapien
taatcctagtcacataacagctctt

SEQ ID NO: 4873084 - DNA, 25 bp, Homo sapien
ctctcatagcattagcacagtgctc

SEQ ID NO: 4873085 - DNA, 25 bp, Homo sapien
cattagcacagtgctcggaatcttt

SEQ ID NO: 4873086 - DNA, 25 bp, Homo sapien
tagcacagtgctcggaatctttaat

SEQ ID NO: 4873087 - DNA, 25 bp, Homo sapien
catagcattagcacagtgctcggaa

SEQ ID NO: 4873088 - DNA, 25 bp, Homo sapien
ttgtgctttgtgagatttgaaatgt

SEQ ID NO: 4873089 - DNA, 25 bp, Homo sapien
atgttagttgctattgcttgtagcc

SEQ ID NO: 4873090 - DNA, 25 bp, Homo sapien
gcttgtagccagtcaacgcagtctt

SEQ ID NO: 4873091 - DNA, 25 bp, Homo sapien
gaggcactgaataatcccagtgcag

SEQ ID NO: 4873092 - DNA, 25 bp, Homo sapien
cttctgaaatgcctcaacatcgcat

SEQ ID NO: 4873093 - DNA, 25 bp, Homo sapien
gcctcaacatcgcatggaacaattg

SEQ ID NO: 4873094 - DNA, 25 bp, Homo sapien
gaaatgcctcaacatcgcatggaac

SEQ ID NO: 4873095 - DNA, 25 bp, Homo sapien
caacatcgcatggaacaattgcgga

SEQ ID NO: 4873096 - DNA, 25 bp, Homo sapien
atgagcctgggtaaggcttggtgta

SEQ ID NO: 4873097 - DNA, 25 bp, Homo sapien
tgagcctgggtaaggcttggtgtat

SEQ ID NO: 4873098 - DNA, 25 bp, Homo sapien
agggatgagcctgggtaaggcttgg

SEQ ID NO: 4873099 - DNA, 25 bp, Homo sapien
aaggcttggtgtatttacacctatc

SEQ ID NO: 4873100 - DNA, 25 bp, Homo sapien
ctgttgattgataagggactcattc

SEQ ID NO: 4873101 - DNA, 25 bp, Homo sapien
tgtagctaaatgtgtttttctctct

SEQ ID NO: 4873102 - DNA, 25 bp, Homo sapien
tttacattctcagcaatgtttcctt

SEQ ID NO: 4873103 - DNA, 25 bp, Homo sapien
ttctttacattctcagcaatgtttc

SEQ ID NO: 4873104 - DNA, 25 bp, Homo sapien
ttctcagcaatgtttccttcaaaca

SEQ ID NO: 4873105 - DNA, 25 bp, Homo sapien
gacttgaaggccataagataaaagc

SEQ ID NO: 4873106 - DNA, 25 bp, Homo sapien
ggacttgaaggccataagataaaag

SEQ ID NO: 4873107 - DNA, 25 bp, Homo sapien
gtgtggctgattctactcatccctc

SEQ ID NO: 4873108 - DNA, 25 bp, Homo sapien
gtttgtagctgttgtcgccctccat

SEQ ID NO: 4873109 - DNA, 25 bp, Homo sapien
tgaagtgatgtttgtagctgttgtc

SEQ ID NO: 4873110 - DNA, 25 bp, Homo sapien
acaggtgtggctgattctactcatc

SEQ ID NO: 4873111 - DNA, 25 bp, Homo sapien
caggtcccagggagttagcttcggt

SEQ ID NO: 4873112 - DNA, 25 bp, Homo sapien
tagttccacggctgctgaaacgcta

SEQ ID NO: 4873113 - DNA, 25 bp, Homo sapien
tgaaacgctaatagctggagctgcc

SEQ ID NO: 4873114 - DNA, 25 bp, Homo sapien
tgatgaaggccatgctaactccagc

SEQ ID NO: 4873115 - DNA, 25 bp, Homo sapien
gtcactaggattataggcgccgcca

SEQ ID NO: 4873116 - DNA, 25 bp, Homo sapien
ccaagtcactaggattataggcgcc

SEQ ID NO: 4873117 - DNA, 25 bp, Homo sapien
aagtcactaggattataggcgccgc

SEQ ID NO: 4873118 - DNA, 25 bp, Homo sapien
tcactaggattataggcgccgccac

SEQ ID NO: 4873119 - DNA, 25 bp, Homo sapien
tgctggtttacaggaaagtttctgt

SEQ ID NO: 4873120 - DNA, 25 bp, Homo sapien
ctgctggtttacaggaaagtttctg

SEQ ID NO: 4873121 - DNA, 25 bp, Homo sapien
tggtttacaggaaagtttctgttga

SEQ ID NO: 4873122 - DNA, 25 bp, Homo sapien
ctggtttacaggaaagtttctgttg

SEQ ID NO: 4873123 - DNA, 25 bp, Homo sapien
cactgacaaatttaacaggttgacc

SEQ ID NO: 4873124 - DNA, 25 bp, Homo sapien
acactgacaaatttaacaggttgac

SEQ ID NO: 4873125 - DNA, 25 bp, Homo sapien
cagttgagctgtgatggactcattt

SEQ ID NO: 4873126 - DNA, 25 bp, Homo sapien
tctgtggagccctgcagttgagctg

SEQ ID NO: 4873127 - DNA, 25 bp, Homo sapien
catttactttcaaagatggaggcat

SEQ ID NO: 4873128 - DNA, 25 bp, Homo sapien
gctgtgatggactcatttactttca

SEQ ID NO: 4873129 - DNA, 25 bp, Homo sapien
ttataattccaacagccggtaaggc

SEQ ID NO: 4873130 - DNA, 25 bp, Homo sapien
gaaaatgtcctagcacttgaaagag

SEQ ID NO: 4873131 - DNA, 25 bp, Homo sapien
tgctgcctcaagcttagtggagaag

SEQ ID NO: 4873132 - DNA, 25 bp, Homo sapien
ggttggataatacgagcctcctgac

SEQ ID NO: 4873133 - DNA, 25 bp, Homo sapien
tacattggccagtctcacaggtttg

SEQ ID NO: 4873134 - DNA, 25 bp, Homo sapien
aactctgtgcgggaggatatacctc

SEQ ID NO: 4873135 - DNA, 25 bp, Homo sapien
ttatggcaataccactagggcggca

SEQ ID NO: 4873136 - DNA, 25 bp, Homo sapien
tccacatgtggaggccttagtaaac

SEQ ID NO: 4873137 - DNA, 25 bp, Homo sapien
gaaacttgtagagacatgagcccct

SEQ ID NO: 4873138 - DNA, 25 bp, Homo sapien
gtcggggagtacactctgtcctgga

SEQ ID NO: 4873139 - DNA, 25 bp, Homo sapien
gaaggtcggggagtacactctgtcc

SEQ ID NO: 4873140 - DNA, 25 bp, Homo sapien
tgtagagacatgagcccctcagggc

SEQ ID NO: 4873141 - DNA, 25 bp, Homo sapien
ctctcgtccagtcccaggtggtcac

SEQ ID NO: 4873142 - DNA, 25 bp, Homo sapien
taagttccattggtagctgtccctg

SEQ ID NO: 4873143 - DNA, 25 bp, Homo sapien
gctgtccctgggctaaaggccttgg

SEQ ID NO: 4873144 - DNA, 25 bp, Homo sapien
cactaggaagaacctgatcattgca

SEQ ID NO: 4873145 - DNA, 25 bp, Homo sapien
cctgaattcagctgtaggatgagat

SEQ ID NO: 4873146 - DNA, 25 bp, Homo sapien
tggatctggtctcacctttattctc

SEQ ID NO: 4873147 - DNA, 25 bp, Homo sapien
ggatctggtctcacctttattctca

SEQ ID NO: 4873148 - DNA, 25 bp, Homo sapien
ctggatctggtctcacctttattct

SEQ ID NO: 4873149 - DNA, 25 bp, Homo sapien
aggaagaggaacacgaagaagaaga

SEQ ID NO: 4873150 - DNA, 25 bp, Homo sapien
agaaaaagaggaagatgaagaggaa

SEQ ID NO: 4873151 - DNA, 25 bp, Homo sapien
agaagaggaagaggaacacgaagaa

SEQ ID NO: 4873152 - DNA, 25 bp, Homo sapien
ggaagaggaaggcaaagaagaagaa

SEQ ID NO: 4873153 - DNA, 25 bp, Homo sapien
acttctctgtctttacactgaagca

SEQ ID NO: 4873154 - DNA, 25 bp, Homo sapien
cttctctgtctttacactgaagcat

SEQ ID NO: 4873155 - DNA, 25 bp, Homo sapien
gacttctctgtctttacactgaagc

SEQ ID NO: 4873156 - DNA, 25 bp, Homo sapien
cattcctgactggaccaaggtgcag

SEQ ID NO: 4873157 - DNA, 25 bp, Homo sapien
aagtcttcattagacattataccag

SEQ ID NO: 4873158 - DNA, 25 bp, Homo sapien
aaagacaacactctgcgaattcacc

SEQ ID NO: 4873159 - DNA, 25 bp, Homo sapien
tataccagaactccgggcttcaaag

SEQ ID NO: 4873160 - DNA, 25 bp, Homo sapien
cactgagaagtacaggtcctcccca

SEQ ID NO: 4873161 - DNA, 25 bp, Homo sapien
ggctctttcccactgggcgaggtca

SEQ ID NO: 4873162 - DNA, 25 bp, Homo sapien
ggtgaagcactgtttccgtcggtcc

SEQ ID NO: 4873163 - DNA, 25 bp, Homo sapien
cagactcagactgcacggtgaagca

SEQ ID NO: 4873164 - DNA, 25 bp, Homo sapien
gcagataaatcctgtgctgaaatca

SEQ ID NO: 4873165 - DNA, 25 bp, Homo sapien
tcaattgtgagtcccattagatgac

SEQ ID NO: 4873166 - DNA, 25 bp, Homo sapien
gaaatcaattgtgagtcccattaga

SEQ ID NO: 4873167 - DNA, 25 bp, Homo sapien
gatgactttctagcacacatgcata

SEQ ID NO: 4873168 - DNA, 25 bp, Homo sapien
tccattaacaaaaacgaagatctta

SEQ ID NO: 4873169 - DNA, 25 bp, Homo sapien
cagatcgaagcataatttatcttcc

SEQ ID NO: 4873170 - DNA, 25 bp, Homo sapien
cttcaattagaatgtttgcagcata

SEQ ID NO: 4873171 - DNA, 25 bp, Homo sapien
gatcttaaatttgacacgattacaa

SEQ ID NO: 4873172 - DNA, 25 bp, Homo sapien
tcttgaggatggtagcacagtagca

SEQ ID NO: 4873173 - DNA, 25 bp, Homo sapien
tgctgactggttgatcaagacttac

SEQ ID NO: 4873174 - DNA, 25 bp, Homo sapien
gcaaagggtcgctggtactcatgta

SEQ ID NO: 4873175 - DNA, 25 bp, Homo sapien
aacacagtgccccttcgacatcttg

SEQ ID NO: 4873176 - DNA, 25 bp, Homo sapien
gcactgaagaaggataaaatgtgaa

SEQ ID NO: 4873177 - DNA, 25 bp, Homo sapien
ctgtacacaactaggcactgaagaa

SEQ ID NO: 4873178 - DNA, 25 bp, Homo sapien
cacaactaggcactgaagaaggata

SEQ ID NO: 4873179 - DNA, 25 bp, Homo sapien
tgtgaagatgtgtattattgtgtta

SEQ ID NO: 4873180 - DNA, 25 bp, Homo sapien
cagatgttatggtaatgacagggcc

SEQ ID NO: 4873181 - DNA, 25 bp, Homo sapien
acagtgtgagttagcccaggaggca

SEQ ID NO: 4873182 - DNA, 25 bp, Homo sapien
tggtcagtgggaataaatcagcatc

SEQ ID NO: 4873183 - DNA, 25 bp, Homo sapien
gacagggccaatcaagaatgaggag

SEQ ID NO: 4873184 - DNA, 25 bp, Homo sapien
gagcatcttgtgctgacaactctgt

SEQ ID NO: 4873185 - DNA, 25 bp, Homo sapien
caagtggaggccataagccacggtg

SEQ ID NO: 4873186 - DNA, 25 bp, Homo sapien
gacaactctgtactgtgcaagtgga

SEQ ID NO: 4873187 - DNA, 25 bp, Homo sapien
taagccacggtgctttctggtgctt

SEQ ID NO: 4873188 - DNA, 25 bp, Homo sapien
gaattccttggtcacagttgaagtc

SEQ ID NO: 4873189 - DNA, 25 bp, Homo sapien
atgaattccttggtcacagttgaag

SEQ ID NO: 4873190 - DNA, 25 bp, Homo sapien
aatgaattccttggtcacagttgaa

SEQ ID NO: 4873191 - DNA, 25 bp, Homo sapien
tgaattccttggtcacagttgaagt

SEQ ID NO: 4873192 - DNA, 25 bp, Homo sapien
gctgctgccgatttgcctttttacc

SEQ ID NO: 4873193 - DNA, 25 bp, Homo sapien
tgctgctgccgatttgcctttttac

SEQ ID NO: 4873194 - DNA, 25 bp, Homo sapien
tgctgccgatttgcctttttaccca

SEQ ID NO: 4873195 - DNA, 25 bp, Homo sapien
ctgctgccgatttgcctttttaccc

SEQ ID NO: 4873196 - DNA, 25 bp, Homo sapien
gaagaacctttaagctgagagaatt

SEQ ID NO: 4873197 - DNA, 25 bp, Homo sapien
tgattttgctcttgccatcatctga

SEQ ID NO: 4873198 - DNA, 25 bp, Homo sapien
tcatctgaagaacctttaagctgag

SEQ ID NO: 4873199 - DNA, 25 bp, Homo sapien
agaatttatacctccaaaggacagc

SEQ ID NO: 4873200 - DNA, 25 bp, Homo sapien
ggccatgacggatatttcaagatga

SEQ ID NO: 4873201 - DNA, 25 bp, Homo sapien
tctttgttccttaatggcattaatg

SEQ ID NO: 4873202 - DNA, 25 bp, Homo sapien
tagttagaggtgttatgtgatgaat

SEQ ID NO: 4873203 - DNA, 25 bp, Homo sapien
ttcttctggccatgacggatatttc

SEQ ID NO: 4873204 - DNA, 25 bp, Homo sapien
gtcaggctgttggattctcttacac

SEQ ID NO: 4873205 - DNA, 25 bp, Homo sapien
tggtctcttcgggtagaagacaggt

SEQ ID NO: 4873206 - DNA, 25 bp, Homo sapien
ctccatggtctcttcgggtagaaga

SEQ ID NO: 4873207 - DNA, 25 bp, Homo sapien
cttcgggtagaagacaggtcaggct

SEQ ID NO: 4873208 - DNA, 25 bp, Homo sapien
ccttgtaaaaaaagtcttatgatca

SEQ ID NO: 4873209 - DNA, 25 bp, Homo sapien
gtaaaaaaagtcttatgatcatcat

SEQ ID NO: 4873210 - DNA, 25 bp, Homo sapien
ttgtaaaaaaagtcttatgatcatc

SEQ ID NO: 4873211 - DNA, 25 bp, Homo sapien
tgtaaaaaaagtcttatgatcatca

SEQ ID NO: 4873212 - DNA, 25 bp, Homo sapien
tatactttgctttgctcgtggtagc

SEQ ID NO: 4873213 - DNA, 25 bp, Homo sapien
aagcagtagcttgattgcctaaaaa

SEQ ID NO: 4873214 - DNA, 25 bp, Homo sapien
tgcctaaaaatagagggtccaaaca

SEQ ID NO: 4873215 - DNA, 25 bp, Homo sapien
gggtccaaacaagctaccttggcag

SEQ ID NO: 4873216 - DNA, 25 bp, Homo sapien
tgatttgcctccactgtcgacttgg

SEQ ID NO: 4873217 - DNA, 25 bp, Homo sapien
ggaatgccagtgtcaaatcatggga

SEQ ID NO: 4873218 - DNA, 25 bp, Homo sapien
acacaagggcaaatttacatcagca

SEQ ID NO: 4873219 - DNA, 25 bp, Homo sapien
aatcatgggatgagaacacaagggc

SEQ ID NO: 4873220 - DNA, 25 bp, Homo sapien
acagggctcatggagtaccactgga

SEQ ID NO: 4873221 - DNA, 25 bp, Homo sapien
cccagatgcgctcagctgacctgta

SEQ ID NO: 4873222 - DNA, 25 bp, Homo sapien
taacttccgcaatgaatagtcccag

SEQ ID NO: 4873223 - DNA, 25 bp, Homo sapien
agcccattgtgtgcatccccagatg

SEQ ID NO: 4873224 - DNA, 25 bp, Homo sapien
actgtacttctgtgacggtgctgga

SEQ ID NO: 4873225 - DNA, 25 bp, Homo sapien
gactcctgagagagatatgcacata

SEQ ID NO: 4873226 - DNA, 25 bp, Homo sapien
gctctgttagggatgcgcagccact

SEQ ID NO: 4873227 - DNA, 25 bp, Homo sapien
cacactgcctactggaaaaccggag

SEQ ID NO: 4873228 - DNA, 25 bp, Homo sapien
ctataaacataggcatggctggcat

SEQ ID NO: 4873229 - DNA, 25 bp, Homo sapien
gctataaacataggcatggctggca

SEQ ID NO: 4873230 - DNA, 25 bp, Homo sapien
tcttcgtctctgttcttgatcatgg

SEQ ID NO: 4873231 - DNA, 25 bp, Homo sapien
tcatggaactgttaactgtcctcat

SEQ ID NO: 4873232 - DNA, 25 bp, Homo sapien
cttagtcccaaatcagcattgtctt

SEQ ID NO: 4873233 - DNA, 25 bp, Homo sapien
caaatcagcattgtcttcgtctctg

SEQ ID NO: 4873234 - DNA, 25 bp, Homo sapien
gctttgctgttgcaagatcttttct

SEQ ID NO: 4873235 - DNA, 25 bp, Homo sapien
tgctttgctgttgcaagatcttttc

SEQ ID NO: 4873236 - DNA, 25 bp, Homo sapien
ctttgctgttgcaagatcttttctt

SEQ ID NO: 4873237 - DNA, 25 bp, Homo sapien
agggatgacacctttctcagtatgg

SEQ ID NO: 4873238 - DNA, 25 bp, Homo sapien
caaatcttcactcccagggatgaca

SEQ ID NO: 4873239 - DNA, 25 bp, Homo sapien
tcagccagccttggtagcttcattg

SEQ ID NO: 4873240 - DNA, 25 bp, Homo sapien
ctcagtatggggttgctgcatgtat

SEQ ID NO: 4873241 - DNA, 25 bp, Homo sapien
tgccagatctggagcaagctgggaa

SEQ ID NO: 4873242 - DNA, 25 bp, Homo sapien
cagaatactgggcactcgccagaca

SEQ ID NO: 4873243 - DNA, 25 bp, Homo sapien
cttccaactgccagatctggagcaa

SEQ ID NO: 4873244 - DNA, 25 bp, Homo sapien
gctttcatgaaggtttgctttccct

SEQ ID NO: 4873245 - DNA, 25 bp, Homo sapien
tgagtgtctgagatccacacccctc

SEQ ID NO: 4873246 - DNA, 25 bp, Homo sapien
aaacataatgttaactctctagtga

SEQ ID NO: 4873247 - DNA, 25 bp, Homo sapien
tgttaactctctagtgagtgtctga

SEQ ID NO: 4873248 - DNA, 25 bp, Homo sapien
agtgtctgagatccacacccctcaa

SEQ ID NO: 4873249 - DNA, 25 bp, Homo sapien
ctggatgatgagatagaggatgggg

SEQ ID NO: 4873250 - DNA, 25 bp, Homo sapien
aggatggggcaagacctacagacat

SEQ ID NO: 4873251 - DNA, 25 bp, Homo sapien
agttctgcatcagcgtttgtaacat

SEQ ID NO: 4873252 - DNA, 25 bp, Homo sapien
gagttctgcatcagcgtttgtaaca

SEQ ID NO: 4873253 - DNA, 25 bp, Homo sapien
cgagttctgcatcagcgtttgtaac

SEQ ID NO: 4873254 - DNA, 25 bp, Homo sapien
ttctgcatcagcgtttgtaacatga

SEQ ID NO: 4873255 - DNA, 25 bp, Homo sapien
tgacatggaaatgggagcatttgca

SEQ ID NO: 4873256 - DNA, 25 bp, Homo sapien
actgttaaaatgacatgatgacctt

SEQ ID NO: 4873257 - DNA, 25 bp, Homo sapien
tctttcgtccatgtacttcccctgt

SEQ ID NO: 4873258 - DNA, 25 bp, Homo sapien
catttgcagttctttcgtccatgta

SEQ ID NO: 4873259 - DNA, 25 bp, Homo sapien
tcagtgcgtccgaggcggctctgca

SEQ ID NO: 4873260 - DNA, 25 bp, Homo sapien
ctgtcagctgggtgtcagtgcgtcc

SEQ ID NO: 4873261 - DNA, 25 bp, Homo sapien
gctgtttcaacaggcatgcacacat

SEQ ID NO: 4873262 - DNA, 25 bp, Homo sapien
gatacaggaagtagcggctgtcagc

SEQ ID NO: 4873263 - DNA, 25 bp, Homo sapien
agagcagaaatttaggcctggtgcg

SEQ ID NO: 4873264 - DNA, 25 bp, Homo sapien
ttagttaagtgtggtccaggtgcct

SEQ ID NO: 4873265 - DNA, 25 bp, Homo sapien
agaaagattagttaagtgtggtcca

SEQ ID NO: 4873266 - DNA, 25 bp, Homo sapien
tttgagagcagaaatttaggcctgg

SEQ ID NO: 4873267 - DNA, 25 bp, Homo sapien
gtcagaaatgaaccagtcctttgct

SEQ ID NO: 4873268 - DNA, 25 bp, Homo sapien
ggaattaaggcagtagcttttccag

SEQ ID NO: 4873269 - DNA, 25 bp, Homo sapien
gccctgttgttggtagcctttctca

SEQ ID NO: 4873270 - DNA, 25 bp, Homo sapien
ttgcttgactgctggaattaaggca

SEQ ID NO: 4873271 - DNA, 25 bp, Homo sapien
cttcacctctttttccgcctatatg

SEQ ID NO: 4873272 - DNA, 25 bp, Homo sapien
cctctttttccgcctatatgtttca

SEQ ID NO: 4873273 - DNA, 25 bp, Homo sapien
tcacctctttttccgcctatatgtt

SEQ ID NO: 4873274 - DNA, 25 bp, Homo sapien
ctctttttccgcctatatgtttcat

SEQ ID NO: 4873275 - DNA, 25 bp, Homo sapien
tggctcagtagactctttcaggtgc

SEQ ID NO: 4873276 - DNA, 25 bp, Homo sapien
cacacttccagattcgtacacttgg

SEQ ID NO: 4873277 - DNA, 25 bp, Homo sapien
aagaggtcctaacaccctcacactt

SEQ ID NO: 4873278 - DNA, 25 bp, Homo sapien
ctgctttgcactgcccaagaggtcc

SEQ ID NO: 4873279 - DNA, 25 bp, Homo sapien
cctctactgtggtcagtcgcctcct

SEQ ID NO: 4873280 - DNA, 25 bp, Homo sapien
ctactgtggtcagtcgcctcctctc

SEQ ID NO: 4873281 - DNA, 25 bp, Homo sapien
tctactgtggtcagtcgcctcctct

SEQ ID NO: 4873282 - DNA, 25 bp, Homo sapien
ttcctctactgtggtcagtcgcctc

SEQ ID NO: 4873283 - DNA, 25 bp, Homo sapien
tactgaccgttcagttagtctcact

SEQ ID NO: 4873284 - DNA, 25 bp, Homo sapien
tcattcccatggttaatggatattg

SEQ ID NO: 4873285 - DNA, 25 bp, Homo sapien
tattgttatattctcaggtactgac

SEQ ID NO: 4873286 - DNA, 25 bp, Homo sapien
tattctcaggtactgaccgttcagt

SEQ ID NO: 4873287 - DNA, 25 bp, Homo sapien
cttggatctctggtccatttttcct

SEQ ID NO: 4873288 - DNA, 25 bp, Homo sapien
cacttgtctgcttgaatgctagagt

SEQ ID NO: 4873289 - DNA, 25 bp, Homo sapien
ggacagctgcccacttgtctgcttg

SEQ ID NO: 4873290 - DNA, 25 bp, Homo sapien
aatgctagagtgtaagcgtaaggcc

SEQ ID NO: 4873291 - DNA, 25 bp, Homo sapien
taagcgtaaggcctgggccctgaca

SEQ ID NO: 4873292 - DNA, 25 bp, Homo sapien
ggtctttcgaccctgaagtccgcta

SEQ ID NO: 4873293 - DNA, 25 bp, Homo sapien
tgaagtccgctatccatcaccaagg

SEQ ID NO: 4873294 - DNA, 25 bp, Homo sapien
gccatacgcgacctgggtctttcga

SEQ ID NO: 4873295 - DNA, 25 bp, Homo sapien
tcatgtcgggaattgaccgaagcca

SEQ ID NO: 4873296 - DNA, 25 bp, Homo sapien
aatttctattcgctcaattgataca

SEQ ID NO: 4873297 - DNA, 25 bp, Homo sapien
ctccaatttctattcgctcaattga

SEQ ID NO: 4873298 - DNA, 25 bp, Homo sapien
ccaatttctattcgctcaattgata

SEQ ID NO: 4873299 - DNA, 25 bp, Homo sapien
tctattcgctcaattgatacaatga

SEQ ID NO: 4873300 - DNA, 25 bp, Homo sapien
tttatttgaagaggtagtcccatgc

SEQ ID NO: 4873301 - DNA, 25 bp, Homo sapien
ccccaatataatccaaagcatcaaa

SEQ ID NO: 4873302 - DNA, 25 bp, Homo sapien
aaacgctgtcccctctaagtcctgg

SEQ ID NO: 4873303 - DNA, 25 bp, Homo sapien
aagcatcaaacgctgtcccctctaa

SEQ ID NO: 4873304 - DNA, 25 bp, Homo sapien
gaatgatttgtggtaagttcttgtg

SEQ ID NO: 4873305 - DNA, 25 bp, Homo sapien
taagtccgattgttctcatctttcg

SEQ ID NO: 4873306 - DNA, 25 bp, Homo sapien
ccgattgttctcatctttcgaatga

SEQ ID NO: 4873307 - DNA, 25 bp, Homo sapien
catctttcgaatgatttgtggtaag

SEQ ID NO: 4873308 - DNA, 25 bp, Homo sapien
tccctgtagcttgtcatcacatctg

SEQ ID NO: 4873309 - DNA, 25 bp, Homo sapien
catctgacgattcttctaccagctc

SEQ ID NO: 4873310 - DNA, 25 bp, Homo sapien
aatatgctctatctttgcggcaggt

SEQ ID NO: 4873311 - DNA, 25 bp, Homo sapien
tatctttgcggcaggtgaacaaggc

SEQ ID NO: 4873312 - DNA, 25 bp, Homo sapien
tcctcatgaaggcccagaccttgtg

SEQ ID NO: 4873313 - DNA, 25 bp, Homo sapien
ttgcttccttcatagcggcaccacg

SEQ ID NO: 4873314 - DNA, 25 bp, Homo sapien
tcacaggtaatgcaccataacagat

SEQ ID NO: 4873315 - DNA, 25 bp, Homo sapien
atcacccttgctgagcttcctaagc

SEQ ID NO: 4873316 - DNA, 25 bp, Homo sapien
aacaaaccttgctggttcagacagg

SEQ ID NO: 4873317 - DNA, 25 bp, Homo sapien
gagcaggccaattacctggtagggc

SEQ ID NO: 4873318 - DNA, 25 bp, Homo sapien
aagtgacataaaagaaacgctgcag

SEQ ID NO: 4873319 - DNA, 25 bp, Homo sapien
ccgactccctcgaaagtcaattgat

SEQ ID NO: 4873320 - DNA, 25 bp, Homo sapien
gcatggaatgcagcagtgtgtgcac

SEQ ID NO: 4873321 - DNA, 25 bp, Homo sapien
atgcatggaatgcagcagtgtgtgc

SEQ ID NO: 4873322 - DNA, 25 bp, Homo sapien
tccagatgagctccaccagggacca

SEQ ID NO: 4873323 - DNA, 25 bp, Homo sapien
tcaggggagcaagtgcggcagtttc

SEQ ID NO: 4873324 - DNA, 25 bp, Homo sapien
cacttctagccagccagttgaagca

SEQ ID NO: 4873325 - DNA, 25 bp, Homo sapien
agataaacaagctggaggcacgcct

SEQ ID NO: 4873326 - DNA, 25 bp, Homo sapien
gcttacagaatagagcatttcatca

SEQ ID NO: 4873327 - DNA, 25 bp, Homo sapien
gaggtttgtgctgcgagttttccag

SEQ ID NO: 4873328 - DNA, 25 bp, Homo sapien
ggataccctgatataaagcttttag

SEQ ID NO: 4873329 - DNA, 25 bp, Homo sapien
gaaaaagggctcatatatggaaata

SEQ ID NO: 4873330 - DNA, 25 bp, Homo sapien
caagagattggataccctgatataa

SEQ ID NO: 4873331 - DNA, 25 bp, Homo sapien
aatagaatagaaagccacaagaaaa

SEQ ID NO: 4873332 - DNA, 25 bp, Homo sapien
tctgaattggttgagccccatccca

SEQ ID NO: 4873333 - DNA, 25 bp, Homo sapien
tgagcaggtgatagttctgaattgg

SEQ ID NO: 4873334 - DNA, 25 bp, Homo sapien
tgatagttctgaattggttgagccc

SEQ ID NO: 4873335 - DNA, 25 bp, Homo sapien
tgagtgagcaggtgatagttctgaa

SEQ ID NO: 4873336 - DNA, 25 bp, Homo sapien
gatttatttctcagccaagtgcagc

SEQ ID NO: 4873337 - DNA, 25 bp, Homo sapien
cataggtggactgctgaagctgcgt

SEQ ID NO: 4873338 - DNA, 25 bp, Homo sapien
gccagaggcctgcaaccaggtatct

SEQ ID NO: 4873339 - DNA, 25 bp, Homo sapien
cgctctgcactctggtcgggaaggc

SEQ ID NO: 4873340 - DNA, 25 bp, Homo sapien
tagctggctgctccgcctctttttc

SEQ ID NO: 4873341 - DNA, 25 bp, Homo sapien
tgctccgcctctttttcgcttcttt

SEQ ID NO: 4873342 - DNA, 25 bp, Homo sapien
agcttagctggctgctccgcctctt

SEQ ID NO: 4873343 - DNA, 25 bp, Homo sapien
gcctgggatccagtctctatcttct

SEQ ID NO: 4873344 - DNA, 25 bp, Homo sapien
catggcccacgaatggttggctttt

SEQ ID NO: 4873345 - DNA, 25 bp, Homo sapien
cagctaggctatgactattttgaac

SEQ ID NO: 4873346 - DNA, 25 bp, Homo sapien
tggtgaaagtcaacacatggcccac

SEQ ID NO: 4873347 - DNA, 25 bp, Homo sapien
aattcatcaaaagctgggtcaagac

SEQ ID NO: 4873348 - DNA, 25 bp, Homo sapien
cagctccggacatgtagaaatggct

SEQ ID NO: 4873349 - DNA, 25 bp, Homo sapien
ctccggacatgtagaaatggctggc

SEQ ID NO: 4873350 - DNA, 25 bp, Homo sapien
gatccagctccggacatgtagaaat

SEQ ID NO: 4873351 - DNA, 25 bp, Homo sapien
ctgtgatccagctccggacatgtag

SEQ ID NO: 4873352 - DNA, 25 bp, Homo sapien
tctgcagactgcacatagtcgagta

SEQ ID NO: 4873353 - DNA, 25 bp, Homo sapien
gtaatgtgcgttcagcaggagcagc

SEQ ID NO: 4873354 - DNA, 25 bp, Homo sapien
caaaagcgcctttgtgttacattca

SEQ ID NO: 4873355 - DNA, 25 bp, Homo sapien
tatgatttgacaaaagcgcctttgt

SEQ ID NO: 4873356 - DNA, 25 bp, Homo sapien
gaagatgggaaggggagagtcctgc

SEQ ID NO: 4873357 - DNA, 25 bp, Homo sapien
ctgtgaagatgggaaggggagagtc

SEQ ID NO: 4873358 - DNA, 25 bp, Homo sapien
tgaagatgggaaggggagagtcctg

SEQ ID NO: 4873359 - DNA, 25 bp, Homo sapien
gatgggaaggggagagtcctgctgc

SEQ ID NO: 4873360 - DNA, 25 bp, Homo sapien
aaccttgtgttcttgtggtgtagca

SEQ ID NO: 4873361 - DNA, 25 bp, Homo sapien
taaaccaccaagattcaaagtcctc

SEQ ID NO: 4873362 - DNA, 25 bp, Homo sapien
tggtgtagcaataaaccaccaagcc

SEQ ID NO: 4873363 - DNA, 25 bp, Homo sapien
ccttgtatttttgtcgtgtagccaa

SEQ ID NO: 4873364 - DNA, 25 bp, Homo sapien
tgggggaaatttctttgtcacattg

SEQ ID NO: 4873365 - DNA, 25 bp, Homo sapien
tttacagtaacatcttccaatagcc

SEQ ID NO: 4873366 - DNA, 25 bp, Homo sapien
tcttccaatagcccttttggtgcca

SEQ ID NO: 4873367 - DNA, 25 bp, Homo sapien
tcctgcctcctttttacagtaacat

SEQ ID NO: 4873368 - DNA, 25 bp, Homo sapien
tcctttattccagcctgtttcactg

SEQ ID NO: 4873369 - DNA, 25 bp, Homo sapien
gagacgattgtgagttagtgcccat

SEQ ID NO: 4873370 - DNA, 25 bp, Homo sapien
tcacagttgactttgccttttacct

SEQ ID NO: 4873371 - DNA, 25 bp, Homo sapien
aaattgagggcaaagctaatagacc

SEQ ID NO: 4873372 - DNA, 25 bp, Homo sapien
agacctctcactagctttccttgtg

SEQ ID NO: 4873373 - DNA, 25 bp, Homo sapien
acccatgagagggagcattgcactc

SEQ ID NO: 4873374 - DNA, 25 bp, Homo sapien
acatttcttctcaagcctactgtac

SEQ ID NO: 4873375 - DNA, 25 bp, Homo sapien
ttctcaagcctactgtacccatgag

SEQ ID NO: 4873376 - DNA, 25 bp, Homo sapien
ctgtacccatgagagggagcattgc

SEQ ID NO: 4873377 - DNA, 25 bp, Homo sapien
tcagtgctgacctcttgtacttccc

SEQ ID NO: 4873378 - DNA, 25 bp, Homo sapien
cagggcatgtcagtgctgacctctt

SEQ ID NO: 4873379 - DNA, 25 bp, Homo sapien
ttccatcctcagagtgtttatgccg

SEQ ID NO: 4873380 - DNA, 25 bp, Homo sapien
cagagtgtttatgccgaggccctgc

SEQ ID NO: 4873381 - DNA, 25 bp, Homo sapien
tcttcccctgctactaagatgtggg

SEQ ID NO: 4873382 - DNA, 25 bp, Homo sapien
tcatcttcccctgctactaagatgt

SEQ ID NO: 4873383 - DNA, 25 bp, Homo sapien
ttcccctgctactaagatgtgggcc

SEQ ID NO: 4873384 - DNA, 25 bp, Homo sapien
tcccctgctactaagatgtgggccc

SEQ ID NO: 4873385 - DNA, 25 bp, Homo sapien
acatttcctgggtgacgagctgtcc

SEQ ID NO: 4873386 - DNA, 25 bp, Homo sapien
gcttgccatcatcgcgaccgctgac

SEQ ID NO: 4873387 - DNA, 25 bp, Homo sapien
catcgcgaccgctgaccacggacat

SEQ ID NO: 4873388 - DNA, 25 bp, Homo sapien
cctgggtgacgagctgtcccctggt

SEQ ID NO: 4873389 - DNA, 25 bp, Homo sapien
ctctataactgtataaaaaggttgc

SEQ ID NO: 4873390 - DNA, 25 bp, Homo sapien
tcggctctagcctcctcgttttatc

SEQ ID NO: 4873391 - DNA, 25 bp, Homo sapien
tattctcaagctctataactgtata

SEQ ID NO: 4873392 - DNA, 25 bp, Homo sapien
aaaaggttgcttcggctctagcctc

SEQ ID NO: 4873393 - DNA, 25 bp, Homo sapien
gtactaaccaggctggatcttgctt

SEQ ID NO: 4873394 - DNA, 25 bp, Homo sapien
tcaaacaagatcaggcactttcagg

SEQ ID NO: 4873395 - DNA, 25 bp, Homo sapien
atcaaacaagatcaggcactttcag

SEQ ID NO: 4873396 - DNA, 25 bp, Homo sapien
caggctggatcttgcttagcttttg

SEQ ID NO: 4873397 - DNA, 25 bp, Homo sapien
tgttttcccctccagttagcaacac

SEQ ID NO: 4873398 - DNA, 25 bp, Homo sapien
tctgccagactcttcatactgcccc

SEQ ID NO: 4873399 - DNA, 25 bp, Homo sapien
gaacccacagcgtcatgttttcccc

SEQ ID NO: 4873400 - DNA, 25 bp, Homo sapien
catgttttcccctccagttagcaac

SEQ ID NO: 4873401 - DNA, 25 bp, Homo sapien
catctctccggatgggtgggcctct

SEQ ID NO: 4873402 - DNA, 25 bp, Homo sapien
cagctttaattcatccttagcttta

SEQ ID NO: 4873403 - DNA, 25 bp, Homo sapien
gcatctctccggatgggtgggcctc

SEQ ID NO: 4873404 - DNA, 25 bp, Homo sapien
ctctcccagctttaattcatcctta

SEQ ID NO: 4873405 - DNA, 25 bp, Homo sapien
ttgccctttagcttcagtcctgctg

SEQ ID NO: 4873406 - DNA, 25 bp, Homo sapien
ggcagcttgtgtggcgaggtagcgc

SEQ ID NO: 4873407 - DNA, 25 bp, Homo sapien
attctctgctctggtaatcgccagt

SEQ ID NO: 4873408 - DNA, 25 bp, Homo sapien
ttagcttcagtcctgctgttgccat

SEQ ID NO: 4873409 - DNA, 25 bp, Homo sapien
ttcttcctgctatccctccagacca

SEQ ID NO: 4873410 - DNA, 25 bp, Homo sapien
ttttcttcctgctatccctccagac

SEQ ID NO: 4873411 - DNA, 25 bp, Homo sapien
acttttcttcctgctatccctccag

SEQ ID NO: 4873412 - DNA, 25 bp, Homo sapien
tcttcctgctatccctccagaccat

SEQ ID NO: 4873413 - DNA, 25 bp, Homo sapien
tttcctttaagcaattccagtcatg

SEQ ID NO: 4873414 - DNA, 25 bp, Homo sapien
ccgagtgcagcaagcttgggtattt

SEQ ID NO: 4873415 - DNA, 25 bp, Homo sapien
gtgctgttaggtaaaaaccgagtgc

SEQ ID NO: 4873416 - DNA, 25 bp, Homo sapien
gaggctccaaacagggcacatatct

SEQ ID NO: 4873417 - DNA, 25 bp, Homo sapien
cttgggtatttgtttggaggctcca

SEQ ID NO: 4873418 - DNA, 25 bp, Homo sapien
tattttgatactggccagaaataga

SEQ ID NO: 4873419 - DNA, 25 bp, Homo sapien
cttgtcatgtgtcggtattttgata

SEQ ID NO: 4873420 - DNA, 25 bp, Homo sapien
ttcttgtcatgtgtcggtattttga

SEQ ID NO: 4873421 - DNA, 25 bp, Homo sapien
gtgtcggtattttgatactggccag

SEQ ID NO: 4873422 - DNA, 25 bp, Homo sapien
tggagtgactgacggcctggctaca

SEQ ID NO: 4873423 - DNA, 25 bp, Homo sapien
cctggctacagggagtagagtctgc

SEQ ID NO: 4873424 - DNA, 25 bp, Homo sapien
ctggagcagggctgattggagtgac

SEQ ID NO: 4873425 - DNA, 25 bp, Homo sapien
ggagtagagtctgccctcactctga

SEQ ID NO: 4873426 - DNA, 25 bp, Homo sapien
caacagcggaagatggcctcaagct

SEQ ID NO: 4873427 - DNA, 25 bp, Homo sapien
gagggtgtcctccagatgcttgtct

SEQ ID NO: 4873428 - DNA, 25 bp, Homo sapien
gcaccgtcctgaaatgctggatggg

SEQ ID NO: 4873429 - DNA, 25 bp, Homo sapien
aaattcaggagccttcctcagctgg

SEQ ID NO: 4873430 - DNA, 25 bp, Homo sapien
cacatttaagcgcaggcagggcaat

SEQ ID NO: 4873431 - DNA, 25 bp, Homo sapien
cgggtccactggctttgctttgagg

SEQ ID NO: 4873432 - DNA, 25 bp, Homo sapien
tgttctgggtcttaacttcttcagt

SEQ ID NO: 4873433 - DNA, 25 bp, Homo sapien
tgtcagcagatacacttgagggcca

SEQ ID NO: 4873434 - DNA, 25 bp, Homo sapien
taactcggtcaatgtcagttcatta

SEQ ID NO: 4873435 - DNA, 25 bp, Homo sapien
tgaactggttaacaccttccattaa

SEQ ID NO: 4873436 - DNA, 25 bp, Homo sapien
ggtcaatgtcagttcattagaggaa

SEQ ID NO: 4873437 - DNA, 25 bp, Homo sapien
acgctgacttgccttgaactggtta

SEQ ID NO: 4873438 - DNA, 25 bp, Homo sapien
cgcgggttcgctttcctggctgaag

SEQ ID NO: 4873439 - DNA, 25 bp, Homo sapien
tcagggaatgtctctctaaggaaag

SEQ ID NO: 4873440 - DNA, 25 bp, Homo sapien
caagaggcacccgagcagatggtgc

SEQ ID NO: 4873441 - DNA, 25 bp, Homo sapien
tggactcccaaccactgcgctaact

SEQ ID NO: 4873442 - DNA, 25 bp, Homo sapien
ctactgaagaacagttccacttagt

SEQ ID NO: 4873443 - DNA, 25 bp, Homo sapien
tactgaagaacagttccacttagtt

SEQ ID NO: 4873444 - DNA, 25 bp, Homo sapien
actcatgatataacccatttcagtg

SEQ ID NO: 4873445 - DNA, 25 bp, Homo sapien
caatagccacaccaatgccacttgg

SEQ ID NO: 4873446 - DNA, 25 bp, Homo sapien
tgccacttggaatttcggagtaaac

SEQ ID NO: 4873447 - DNA, 25 bp, Homo sapien
ctttcatccaggctaaactcatgat

SEQ ID NO: 4873448 - DNA, 25 bp, Homo sapien
gacttccgtagggtgactggtggcg

SEQ ID NO: 4873449 - DNA, 25 bp, Homo sapien
ttggtccattgaatgggtcagctcc

SEQ ID NO: 4873450 - DNA, 25 bp, Homo sapien
aattccgggattggtactgataggc

SEQ ID NO: 4873451 - DNA, 25 bp, Homo sapien
aaaacaacgatgaagagcagttctc

SEQ ID NO: 4873452 - DNA, 25 bp, Homo sapien
gttcctcagcactcgcaggaggaga

SEQ ID NO: 4873453 - DNA, 25 bp, Homo sapien
ttcctcagcactcgcaggaggagat

SEQ ID NO: 4873454 - DNA, 25 bp, Homo sapien
ttatattaccggaatcaaagttgct

SEQ ID NO: 4873455 - DNA, 25 bp, Homo sapien
tcgtaaatatactcatggtctgtct

SEQ ID NO: 4873456 - DNA, 25 bp, Homo sapien
agttgctaggacataactttccaga

SEQ ID NO: 4873457 - DNA, 25 bp, Homo sapien
ggttttctcgtaaatatactcatgg

SEQ ID NO: 4873458 - DNA, 25 bp, Homo sapien
gcccatgggtatgccccatggatgc

SEQ ID NO: 4873459 - DNA, 25 bp, Homo sapien
tgtgcccatgggtatgccccatgga

SEQ ID NO: 4873460 - DNA, 25 bp, Homo sapien
atgggtatgccccatggatgctcat

SEQ ID NO: 4873461 - DNA, 25 bp, Homo sapien
ttgtgcccatgggtatgccccatgg

SEQ ID NO: 4873462 - DNA, 25 bp, Homo sapien
ttggcagtcgccacgaagcctttcc

SEQ ID NO: 4873463 - DNA, 25 bp, Homo sapien
gccgcatgttggcagtcgccacgaa

SEQ ID NO: 4873464 - DNA, 25 bp, Homo sapien
catgttggcagtcgccacgaagcct

SEQ ID NO: 4873465 - DNA, 25 bp, Homo sapien
tggaggcagccgcatgttggcagtc

SEQ ID NO: 4873466 - DNA, 25 bp, Homo sapien
aaccacccgcaatgggatcaacagc

SEQ ID NO: 4873467 - DNA, 25 bp, Homo sapien
tcagaaccacccgcaatgggatcaa

SEQ ID NO: 4873468 - DNA, 25 bp, Homo sapien
ctctcagaaccacccgcaatgggat

SEQ ID NO: 4873469 - DNA, 25 bp, Homo sapien
gaaccacccgcaatgggatcaacag

SEQ ID NO: 4873470 - DNA, 25 bp, Homo sapien
cattgccttggccaattcatccttg

SEQ ID NO: 4873471 - DNA, 25 bp, Homo sapien
gagggcattgccttggccaattcat

SEQ ID NO: 4873472 - DNA, 25 bp, Homo sapien
gtgccccgagggcattgccttggcc

SEQ ID NO: 4873473 - DNA, 25 bp, Homo sapien
ctgaggactgttaggtgccccgagg

SEQ ID NO: 4873474 - DNA, 25 bp, Homo sapien
gcctggccaatgtgcattcttattc

SEQ ID NO: 4873475 - DNA, 25 bp, Homo sapien
gattcaacccagcttagagctcaca

SEQ ID NO: 4873476 - DNA, 25 bp, Homo sapien
tggttgttggacataccacacttct

SEQ ID NO: 4873477 - DNA, 25 bp, Homo sapien
ctgagaaagctgttctagccctgta

SEQ ID NO: 4873478 - DNA, 25 bp, Homo sapien
gcctcgccgtcagatcatgatatgt

SEQ ID NO: 4873479 - DNA, 25 bp, Homo sapien
agccttggcctagaggacacttgga

SEQ ID NO: 4873480 - DNA, 25 bp, Homo sapien
catgatatgtgtggccttcccttgc

SEQ ID NO: 4873481 - DNA, 25 bp, Homo sapien
gataccctggaaactcacataggtg

SEQ ID NO: 4873482 - DNA, 25 bp, Homo sapien
gaaccgtggcatgttttgcctgaaa

SEQ ID NO: 4873483 - DNA, 25 bp, Homo sapien
gacagggcctaagatagcttctagc

SEQ ID NO: 4873484 - DNA, 25 bp, Homo sapien
tgaccatggcaaagtgtacagtaga

SEQ ID NO: 4873485 - DNA, 25 bp, Homo sapien
tgagaaaacagacctagaaccgtgg

SEQ ID NO: 4873486 - DNA, 25 bp, Homo sapien
aaaaatcagtttcatactgttgtca

SEQ ID NO: 4873487 - DNA, 25 bp, Homo sapien
tgttgtcatctgtcagaaatgctca

SEQ ID NO: 4873488 - DNA, 25 bp, Homo sapien
agtacctagttaccttgaattcctg

SEQ ID NO: 4873489 - DNA, 25 bp, Homo sapien
gccccatatcatttttgtatctagg

SEQ ID NO: 4873490 - DNA, 25 bp, Homo sapien
ccatcggtccttggcatataatgac

SEQ ID NO: 4873491 - DNA, 25 bp, Homo sapien
gtatttacattcgacgcacacttag

SEQ ID NO: 4873492 - DNA, 25 bp, Homo sapien
gcttccagagaacttttatgcatgt

SEQ ID NO: 4873493 - DNA, 25 bp, Homo sapien
tctacaggacttggctcgtatttac

SEQ ID NO: 4873494 - DNA, 25 bp, Homo sapien
tcccaggctccaagagattagatgt

SEQ ID NO: 4873495 - DNA, 25 bp, Homo sapien
ggaggtcaatctagccaaacttggg

SEQ ID NO: 4873496 - DNA, 25 bp, Homo sapien
tgagacagtctgcaaaatctagagg

SEQ ID NO: 4873497 - DNA, 25 bp, Homo sapien
gaacatttcttaaccagctctggca

SEQ ID NO: 4873498 - DNA, 25 bp, Homo sapien
ttaacttgtcagtgcttaatcctcc

SEQ ID NO: 4873499 - DNA, 25 bp, Homo sapien
cttgtcagtgcttaatcctccagaa

SEQ ID NO: 4873500 - DNA, 25 bp, Homo sapien
ctcctttaacttgtcagtgcttaat

SEQ ID NO: 4873501 - DNA, 25 bp, Homo sapien
cctttaacttgtcagtgcttaatcc

SEQ ID NO: 4873502 - DNA, 25 bp, Homo sapien
tgtctgccattggtctgcttcctac

SEQ ID NO: 4873503 - DNA, 25 bp, Homo sapien
atctgtctgccattggtctgcttcc

SEQ ID NO: 4873504 - DNA, 25 bp, Homo sapien
caacatctgtctgccattggtctgc

SEQ ID NO: 4873505 - DNA, 25 bp, Homo sapien
cttgcaacatctgtctgccattggt

SEQ ID NO: 4873506 - DNA, 25 bp, Homo sapien
agcaaggagcagttgactgcttccc

SEQ ID NO: 4873507 - DNA, 25 bp, Homo sapien
ggagcagttgactgcttccctctgg

SEQ ID NO: 4873508 - DNA, 25 bp, Homo sapien
aaggagcagttgactgcttccctct

SEQ ID NO: 4873509 - DNA, 25 bp, Homo sapien
cagcaaggagcagttgactgcttcc

SEQ ID NO: 4873510 - DNA, 25 bp, Homo sapien
tttgatgggacaatcatgaacacga

SEQ ID NO: 4873511 - DNA, 25 bp, Homo sapien
tgaacacgaatatactgactttagt

SEQ ID NO: 4873512 - DNA, 25 bp, Homo sapien
gactgagctttaattgaggagaacc

SEQ ID NO: 4873513 - DNA, 25 bp, Homo sapien
tatgaattcctatagcccacctcag

SEQ ID NO: 4873514 - DNA, 25 bp, Homo sapien
tggttgttttcagtttgactttctg

SEQ ID NO: 4873515 - DNA, 25 bp, Homo sapien
cagtttgactttctgaacacgtttt

SEQ ID NO: 4873516 - DNA, 25 bp, Homo sapien
ttttcagtttgactttctgaacacg

SEQ ID NO: 4873517 - DNA, 25 bp, Homo sapien
ttcagtttgactttctgaacacgtt

SEQ ID NO: 4873518 - DNA, 25 bp, Homo sapien
gaggaaagagccttgtgctttaaga

SEQ ID NO: 4873519 - DNA, 25 bp, Homo sapien
aggaaagagccttgtgctttaagaa

SEQ ID NO: 4873520 - DNA, 25 bp, Homo sapien
tagctgttctgaagtctcttcggca

SEQ ID NO: 4873521 - DNA, 25 bp, Homo sapien
aagtctcttcggcaatatgttggag

SEQ ID NO: 4873522 - DNA, 25 bp, Homo sapien
gaaaggaaaaatagctgttctgaag

SEQ ID NO: 4873523 - DNA, 25 bp, Homo sapien
caatatgttggaggaagggacgaaa

SEQ ID NO: 4873524 - DNA, 25 bp, Homo sapien
tgataggggtattgacaaaagggct

SEQ ID NO: 4873525 - DNA, 25 bp, Homo sapien
ctagcaaaaattgataggggtattg

SEQ ID NO: 4873526 - DNA, 25 bp, Homo sapien
cattgaaattgggataactacaggt

SEQ ID NO: 4873527 - DNA, 25 bp, Homo sapien
tattgataaaagttgtatactgggc

SEQ ID NO: 4873528 - DNA, 25 bp, Homo sapien
tactgggcagatgaatcaaaatggc

SEQ ID NO: 4873529 - DNA, 25 bp, Homo sapien
aactacaggtatgatcatcttgaag

SEQ ID NO: 4873530 - DNA, 25 bp, Homo sapien
attccaagtctgtcaagtaataata

SEQ ID NO: 4873531 - DNA, 25 bp, Homo sapien
gtctgtcaagtaataataagcatat

SEQ ID NO: 4873532 - DNA, 25 bp, Homo sapien
taaattccaagtctgtcaagtaata

SEQ ID NO: 4873533 - DNA, 25 bp, Homo sapien
atgatgataccagactcagcaatca

SEQ ID NO: 4873534 - DNA, 25 bp, Homo sapien
taaaatgatgataccagactcagca

SEQ ID NO: 4873535 - DNA, 25 bp, Homo sapien
aatgatgataccagactcagcaatc

SEQ ID NO: 4873536 - DNA, 25 bp, Homo sapien
tcaacagtgttgagggacacagggt

SEQ ID NO: 4873537 - DNA, 25 bp, Homo sapien
caggaagctccagctgtacaatcag

SEQ ID NO: 4873538 - DNA, 25 bp, Homo sapien
gctgaaatgccctcacacagattat

SEQ ID NO: 4873539 - DNA, 25 bp, Homo sapien
taagcttgcatagatgtgaaagatg

SEQ ID NO: 4873540 - DNA, 25 bp, Homo sapien
tcagacaagttttctaatgagctgc

SEQ ID NO: 4873541 - DNA, 25 bp, Homo sapien
tataaagcggcacagtcttgagcct

SEQ ID NO: 4873542 - DNA, 25 bp, Homo sapien
taagaccgtgtccttcaatgcaaag

SEQ ID NO: 4873543 - DNA, 25 bp, Homo sapien
tggaggccatgctctcgcgtgatct

SEQ ID NO: 4873544 - DNA, 25 bp, Homo sapien
caagcccagggaaacttgcgtggcc

SEQ ID NO: 4873545 - DNA, 25 bp, Homo sapien
caggccaggtgccatctcagcactg

SEQ ID NO: 4873546 - DNA, 25 bp, Homo sapien
ggccaggtgccatctcagcactgca

SEQ ID NO: 4873547 - DNA, 25 bp, Homo sapien
tcttgccgcccaggccaggtgccat

SEQ ID NO: 4873548 - DNA, 25 bp, Homo sapien
tcgctcttgccgcccaggccaggtg

SEQ ID NO: 4873549 - DNA, 25 bp, Homo sapien
tatatgatcccacaacggttaggag

SEQ ID NO: 4873550 - DNA, 25 bp, Homo sapien
tgaacagttcggagctcaatgtcca

SEQ ID NO: 4873551 - DNA, 25 bp, Homo sapien
taacctataagggtagcttacgctc

SEQ ID NO: 4873552 - DNA, 25 bp, Homo sapien
gagtagtaaccctagcataaagacg

SEQ ID NO: 4873553 - DNA, 25 bp, Homo sapien
ccagtgctaactgccacgcatatga

SEQ ID NO: 4873554 - DNA, 25 bp, Homo sapien
tcaaggtagatctgggcaacacgca

SEQ ID NO: 4873555 - DNA, 25 bp, Homo sapien
tcaagtcccactatacaacctaggt

SEQ ID NO: 4873556 - DNA, 25 bp, Homo sapien
tgtgaactcctagcacggtgacagt

SEQ ID NO: 4873557 - DNA, 25 bp, Homo sapien
cagtggaaacagtgtgatccaacca

SEQ ID NO: 4873558 - DNA, 25 bp, Homo sapien
gaggatagctgcaatacatgctgct

SEQ ID NO: 4873559 - DNA, 25 bp, Homo sapien
catgctgctcatgttacacactggt

SEQ ID NO: 4873560 - DNA, 25 bp, Homo sapien
ccagggactttggtgtggatcacgc

SEQ ID NO: 4873561 - DNA, 25 bp, Homo sapien
cgtgcccagtcgtctggtgcttttt

SEQ ID NO: 4873562 - DNA, 25 bp, Homo sapien
gatattcctgaacttaaacagtagc

SEQ ID NO: 4873563 - DNA, 25 bp, Homo sapien
tctttgatattcctgaacttaaaca

SEQ ID NO: 4873564 - DNA, 25 bp, Homo sapien
taaacagtagctaggggcaggcacg

SEQ ID NO: 4873565 - DNA, 25 bp, Homo sapien
ggataacagaataccagtcacaaga

SEQ ID NO: 4873566 - DNA, 25 bp, Homo sapien
ggaacatttactcttgtggataaca

SEQ ID NO: 4873567 - DNA, 25 bp, Homo sapien
tcttctgtattacaaattctgccac

SEQ ID NO: 4873568 - DNA, 25 bp, Homo sapien
cccccaaaagaaagacatgtagctg

SEQ ID NO: 4873569 - DNA, 25 bp, Homo sapien
agaggtagaggatgatttgagtcca

SEQ ID NO: 4873570 - DNA, 25 bp, Homo sapien
gaggcagaggtagaggatgatttga

SEQ ID NO: 4873571 - DNA, 25 bp, Homo sapien
gttccagttactcatggaggcagag

SEQ ID NO: 4873572 - DNA, 25 bp, Homo sapien
agttccagttactcatggaggcaga

SEQ ID NO: 4873573 - DNA, 25 bp, Homo sapien
gaacttaagactggtaaagctgtgg

SEQ ID NO: 4873574 - DNA, 25 bp, Homo sapien
caaatggtacggctattctggaaaa

SEQ ID NO: 4873575 - DNA, 25 bp, Homo sapien
tataccaatggcaactaagcacatg

SEQ ID NO: 4873576 - DNA, 25 bp, Homo sapien
agatctcttagacgttgctggtgag

SEQ ID NO: 4873577 - DNA, 25 bp, Homo sapien
atgacaatagttatctctgtgctgc

SEQ ID NO: 4873578 - DNA, 25 bp, Homo sapien
aactggcaaacgatgatgacaatag

SEQ ID NO: 4873579 - DNA, 25 bp, Homo sapien
gatgatgacaatagttatctctgtg

SEQ ID NO: 4873580 - DNA, 25 bp, Homo sapien
tgatgacaatagttatctctgtgct

SEQ ID NO: 4873581 - DNA, 25 bp, Homo sapien
ttctgccacaaaccgccttatgatg

SEQ ID NO: 4873582 - DNA, 25 bp, Homo sapien
cggctgctccattacagacagagga

SEQ ID NO: 4873583 - DNA, 25 bp, Homo sapien
gtaattgggatttgctcatcgcagc

SEQ ID NO: 4873584 - DNA, 25 bp, Homo sapien
aaacctttattcaacctgccggctg

SEQ ID NO: 4873585 - DNA, 25 bp, Homo sapien
tcctacatgtagcaagaaagccttg

SEQ ID NO: 4873586 - DNA, 25 bp, Homo sapien
gaaagccttggccactcttggatcc

SEQ ID NO: 4873587 - DNA, 25 bp, Homo sapien
catttcctacatgtagcaagaaagc

SEQ ID NO: 4873588 - DNA, 25 bp, Homo sapien
tacatgtagcaagaaagccttggcc

SEQ ID NO: 4873589 - DNA, 25 bp, Homo sapien
catcaaacaaggttgcgagtgtcct

SEQ ID NO: 4873590 - DNA, 25 bp, Homo sapien
tggtatacccattaaccctgaggct

SEQ ID NO: 4873591 - DNA, 25 bp, Homo sapien
gaaactgaccttaggagagctaaac

SEQ ID NO: 4873592 - DNA, 25 bp, Homo sapien
cgtttctttgggagctagccagagg

SEQ ID NO: 4873593 - DNA, 25 bp, Homo sapien
tgtactgcctggtgttgtatcttta

SEQ ID NO: 4873594 - DNA, 25 bp, Homo sapien
gtcattttggatgtcagctgtactg

SEQ ID NO: 4873595 - DNA, 25 bp, Homo sapien
tggatgtcagctgtactgcctggtg

SEQ ID NO: 4873596 - DNA, 25 bp, Homo sapien
tactgcctggtgttgtatctttaaa

SEQ ID NO: 4873597 - DNA, 25 bp, Homo sapien
gctttggttggattggcatcacagt

SEQ ID NO: 4873598 - DNA, 25 bp, Homo sapien
catcacagtggtttgggtaaatccc

SEQ ID NO: 4873599 - DNA, 25 bp, Homo sapien
cttcacagggcaagtcgccaaactg

SEQ ID NO: 4873600 - DNA, 25 bp, Homo sapien
gaattcctgagattgaagcttttcc

SEQ ID NO: 4873601 - DNA, 25 bp, Homo sapien
atgtccaccaatggatgaacagaaa

SEQ ID NO: 4873602 - DNA, 25 bp, Homo sapien
tagatgaaccgtgaagacattacac

SEQ ID NO: 4873603 - DNA, 25 bp, Homo sapien
atagatgaaccgtgaagacattaca

SEQ ID NO: 4873604 - DNA, 25 bp, Homo sapien
ccaccaatggatgaacagaaaatgt

SEQ ID NO: 4873605 - DNA, 25 bp, Homo sapien
tgaggtatttttgcaagtgactttg

SEQ ID NO: 4873606 - DNA, 25 bp, Homo sapien
tttaattccgagaatctgtgttgac

SEQ ID NO: 4873607 - DNA, 25 bp, Homo sapien
gcttttgtctgggttggaaattaga

SEQ ID NO: 4873608 - DNA, 25 bp, Homo sapien
atggaagtgtttaattccgagaatc

SEQ ID NO: 4873609 - DNA, 25 bp, Homo sapien
agatgagttcttccgatcctagagc

SEQ ID NO: 4873610 - DNA, 25 bp, Homo sapien
cacagagggcccagtttgtagggac

SEQ ID NO: 4873611 - DNA, 25 bp, Homo sapien
tcagctggatcatatgtgatacaga

SEQ ID NO: 4873612 - DNA, 25 bp, Homo sapien
aacctgcagaacagccacatcttct

SEQ ID NO: 4873613 - DNA, 25 bp, Homo sapien
tcagtctctcgaccagaacaagatt

SEQ ID NO: 4873614 - DNA, 25 bp, Homo sapien
tctcgaccagaacaagattagcagc

SEQ ID NO: 4873615 - DNA, 25 bp, Homo sapien
acaagattagcagcacgctcagtcc

SEQ ID NO: 4873616 - DNA, 25 bp, Homo sapien
ccagaacaagattagcagcacgctc

SEQ ID NO: 4873617 - DNA, 25 bp, Homo sapien
aactcagcacatcaggactgttttc

SEQ ID NO: 4873618 - DNA, 25 bp, Homo sapien
tccagttttcccacgtggctggcct

SEQ ID NO: 4873619 - DNA, 25 bp, Homo sapien
ttactgcaacgctgtggtctctgtg

SEQ ID NO: 4873620 - DNA, 25 bp, Homo sapien
ccccacctggattcatgattcagct

SEQ ID NO: 4873621 - DNA, 25 bp, Homo sapien
ccagactccaattctagcagggtag

SEQ ID NO: 4873622 - DNA, 25 bp, Homo sapien
caaagtagtacagattgggtggcct

SEQ ID NO: 4873623 - DNA, 25 bp, Homo sapien
catttcagaggacacaagtggttcc

SEQ ID NO: 4873624 - DNA, 25 bp, Homo sapien
cattcctggacgtagaccaagccaa

SEQ ID NO: 4873625 - DNA, 25 bp, Homo sapien
aacaacgagtaagtgggcccaagtg

SEQ ID NO: 4873626 - DNA, 25 bp, Homo sapien
cagatgtacatggtcagcatccagg

SEQ ID NO: 4873627 - DNA, 25 bp, Homo sapien
gagacaccaggttgtagcaaggaaa

SEQ ID NO: 4873628 - DNA, 25 bp, Homo sapien
actgctgggttacatgagaattcta

SEQ ID NO: 4873629 - DNA, 25 bp, Homo sapien
gcagacaccttgtatctctatgaat

SEQ ID NO: 4873630 - DNA, 25 bp, Homo sapien
actatgttcatattgtggtgcaacc

SEQ ID NO: 4873631 - DNA, 25 bp, Homo sapien
gaaactctggactcatttcaacagc

SEQ ID NO: 4873632 - DNA, 25 bp, Homo sapien
caaggttcactcatgttatagtaca

SEQ ID NO: 4873633 - DNA, 25 bp, Homo sapien
tatgggatgtatttatttttcctca

SEQ ID NO: 4873634 - DNA, 25 bp, Homo sapien
ttatgggatgtatttatttttcctc

SEQ ID NO: 4873635 - DNA, 25 bp, Homo sapien
ctggacctcgaggcctggctctttg

SEQ ID NO: 4873636 - DNA, 25 bp, Homo sapien
ctggctctttgctgcctgctctcat

SEQ ID NO: 4873637 - DNA, 25 bp, Homo sapien
ggacctcgaggcctggctctttgct

SEQ ID NO: 4873638 - DNA, 25 bp, Homo sapien
acctcgaggcctggctctttgctgc

SEQ ID NO: 4873639 - DNA, 25 bp, Homo sapien
tagaaagtaagcagtcacgcagggc

SEQ ID NO: 4873640 - DNA, 25 bp, Homo sapien
tacatttctattgactccggcactg

SEQ ID NO: 4873641 - DNA, 25 bp, Homo sapien
caactgcaagcatgaccacaaggga

SEQ ID NO: 4873642 - DNA, 25 bp, Homo sapien
tcattggtgtgaagcgaaacagcac

SEQ ID NO: 4873643 - DNA, 25 bp, Homo sapien
agcgccttcttctgtctactctctc

SEQ ID NO: 4873644 - DNA, 25 bp, Homo sapien
gacagcgccttcttctgtctactct

SEQ ID NO: 4873645 - DNA, 25 bp, Homo sapien
ccagacagcgccttcttctgtctac

SEQ ID NO: 4873646 - DNA, 25 bp, Homo sapien
ttcttctgtctactctctcttgaat

SEQ ID NO: 4873647 - DNA, 25 bp, Homo sapien
gcttgttctcgctgaagccaggagt

SEQ ID NO: 4873648 - DNA, 25 bp, Homo sapien
tgtgggcacaagacacggtgttcca

SEQ ID NO: 4873649 - DNA, 25 bp, Homo sapien
agttgtgggcacaagacacggtgtt

SEQ ID NO: 4873650 - DNA, 25 bp, Homo sapien
tcacatgttggcttgttctcgctga

SEQ ID NO: 4873651 - DNA, 25 bp, Homo sapien
caggaagtcaaggttaaggcagagt

SEQ ID NO: 4873652 - DNA, 25 bp, Homo sapien
accttaaggccttatgcaaacagga

SEQ ID NO: 4873653 - DNA, 25 bp, Homo sapien
agagtggcaaacttccagagcattg

SEQ ID NO: 4873654 - DNA, 25 bp, Homo sapien
cattgcagatgtgccccactatgta

SEQ ID NO: 4873655 - DNA, 25 bp, Homo sapien
ttgccgagaaatcctcatcagcaat

SEQ ID NO: 4873656 - DNA, 25 bp, Homo sapien
ctgtgatgaattgccgagaaatcct

SEQ ID NO: 4873657 - DNA, 25 bp, Homo sapien
tgaattgccgagaaatcctcatcag

SEQ ID NO: 4873658 - DNA, 25 bp, Homo sapien
gatgaattgccgagaaatcctcatc

SEQ ID NO: 4873659 - DNA, 25 bp, Homo sapien
caggacatggctgcacacctggagt

SEQ ID NO: 4873660 - DNA, 25 bp, Homo sapien
ggcaggacatggctgcacacctgga

SEQ ID NO: 4873661 - DNA, 25 bp, Homo sapien
gagtcccaactgctccagaggctat

SEQ ID NO: 4873662 - DNA, 25 bp, Homo sapien
aggacatggctgcacacctggagtc

SEQ ID NO: 4873663 - DNA, 25 bp, Homo sapien
gcattttgcaggaatgaattctaca

SEQ ID NO: 4873664 - DNA, 25 bp, Homo sapien
ttgagagtaattaatgaccacagga

SEQ ID NO: 4873665 - DNA, 25 bp, Homo sapien
tgaccacaggatcaagtggctgctg

SEQ ID NO: 4873666 - DNA, 25 bp, Homo sapien
taattaatgaccacaggatcaagtg

SEQ ID NO: 4873667 - DNA, 25 bp, Homo sapien
gcatcctgattaggcataactagtt

SEQ ID NO: 4873668 - DNA, 25 bp, Homo sapien
tcccaggcccataggagcatcctga

SEQ ID NO: 4873669 - DNA, 25 bp, Homo sapien
gaggaggagctagtcctcccaggcc

SEQ ID NO: 4873670 - DNA, 25 bp, Homo sapien
cccataggagcatcctgattaggca

SEQ ID NO: 4873671 - DNA, 25 bp, Homo sapien
gttgggcagcaatcatctctaacac

SEQ ID NO: 4873672 - DNA, 25 bp, Homo sapien
taggcttttaactaggtacattgtc

SEQ ID NO: 4873673 - DNA, 25 bp, Homo sapien
gacctcacctagctaaataagagag

SEQ ID NO: 4873674 - DNA, 25 bp, Homo sapien
tgtgcagcacccagtttagtacctg

SEQ ID NO: 4873675 - DNA, 25 bp, Homo sapien
ctccagctacgagggactcacaatt

SEQ ID NO: 4873676 - DNA, 25 bp, Homo sapien
catttgtatccttagtccgaggagg

SEQ ID NO: 4873677 - DNA, 25 bp, Homo sapien
ggcccagcggtagcttttgagagtc

SEQ ID NO: 4873678 - DNA, 25 bp, Homo sapien
tcctgggcctatgccccagaggctg

SEQ ID NO: 4873679 - DNA, 25 bp, Homo sapien
tctctgctggaaagaagtgtctacc

SEQ ID NO: 4873680 - DNA, 25 bp, Homo sapien
aaatccctgtcgagcagtctctgct

SEQ ID NO: 4873681 - DNA, 25 bp, Homo sapien
tttcaaacctcgcaaggtcaactgt

SEQ ID NO: 4873682 - DNA, 25 bp, Homo sapien
gttcatgtctcaaaatactggtacc

SEQ ID NO: 4873683 - DNA, 25 bp, Homo sapien
tttgtattccttgcatgctagcttg

SEQ ID NO: 4873684 - DNA, 25 bp, Homo sapien
attccttgcatgctagcttggtttt

SEQ ID NO: 4873685 - DNA, 25 bp, Homo sapien
tgtattccttgcatgctagcttggt

SEQ ID NO: 4873686 - DNA, 25 bp, Homo sapien
tattccttgcatgctagcttggttt

SEQ ID NO: 4873687 - DNA, 25 bp, Homo sapien
ggcatagaccaggagagaagcagat

SEQ ID NO: 4873688 - DNA, 25 bp, Homo sapien
taagaaaagtgtgtcagtttcctcc

SEQ ID NO: 4873689 - DNA, 25 bp, Homo sapien
ggattttacttcaagtgagcacagg

SEQ ID NO: 4873690 - DNA, 25 bp, Homo sapien
ggtgcacctcgtccgaattcaaaag

SEQ ID NO: 4873691 - DNA, 25 bp, Homo sapien
taacgtagaagaaagcaggccttat

SEQ ID NO: 4873692 - DNA, 25 bp, Homo sapien
gattcctggaattcatcaagtctac

SEQ ID NO: 4873693 - DNA, 25 bp, Homo sapien
ctgtgttgtaacgtagaagaaagca

SEQ ID NO: 4873694 - DNA, 25 bp, Homo sapien
aacgtctaggggtttctctcctatg

SEQ ID NO: 4873695 - DNA, 25 bp, Homo sapien
cactcagtgcgacgcagacacgttt

SEQ ID NO: 4873696 - DNA, 25 bp, Homo sapien
cttgaggtatctctgcattgggcct

SEQ ID NO: 4873697 - DNA, 25 bp, Homo sapien
tgcctctccaaacacttgtgatctg

SEQ ID NO: 4873698 - DNA, 25 bp, Homo sapien
tccaaaggcgaggtgactcccatga

SEQ ID NO: 4873699 - DNA, 25 bp, Homo sapien
tgtaatgagtcaataaacccaattt

SEQ ID NO: 4873700 - DNA, 25 bp, Homo sapien
aagttggcattgtactcctttgagg

SEQ ID NO: 4873701 - DNA, 25 bp, Homo sapien
caacaaagttggcattgtactcctt

SEQ ID NO: 4873702 - DNA, 25 bp, Homo sapien
aaatgatcatattcacatccacctt

SEQ ID NO: 4873703 - DNA, 25 bp, Homo sapien
ccatggtcggcatttaggaagaaca

SEQ ID NO: 4873704 - DNA, 25 bp, Homo sapien
gctgaaagccattaacaggttctga

SEQ ID NO: 4873705 - DNA, 25 bp, Homo sapien
agagttcattcaagtctggctgctg

SEQ ID NO: 4873706 - DNA, 25 bp, Homo sapien
gagcacaagataccatggtcggcat

SEQ ID NO: 4873707 - DNA, 25 bp, Homo sapien
tcagcctttccttgaaccaattgct

SEQ ID NO: 4873708 - DNA, 25 bp, Homo sapien
gcctttccttgaaccaattgctcat

SEQ ID NO: 4873709 - DNA, 25 bp, Homo sapien
cttcagcctttccttgaaccaattg

SEQ ID NO: 4873710 - DNA, 25 bp, Homo sapien
ctcacccctcttcagcctttccttg

SEQ ID NO: 4873711 - DNA, 25 bp, Homo sapien
gcactcccttaggaacaaggattca

SEQ ID NO: 4873712 - DNA, 25 bp, Homo sapien
cttcttcctatggcactcccttagg

SEQ ID NO: 4873713 - DNA, 25 bp, Homo sapien
ccttcttcctatggcactcccttag

SEQ ID NO: 4873714 - DNA, 25 bp, Homo sapien
cagggcttcacagatgaggtccaat

SEQ ID NO: 4873715 - DNA, 25 bp, Homo sapien
gtgaagaaggcctccttactgggca

SEQ ID NO: 4873716 - DNA, 25 bp, Homo sapien
ccttggtccacagatggtgggtcag

SEQ ID NO: 4873717 - DNA, 25 bp, Homo sapien
ccctgtgaagaaggcctccttactg

SEQ ID NO: 4873718 - DNA, 25 bp, Homo sapien
agcattaacattggcagtggaggca

SEQ ID NO: 4873719 - DNA, 25 bp, Homo sapien
aaagcctctgaagatcattaggacc

SEQ ID NO: 4873720 - DNA, 25 bp, Homo sapien
caaagaggtccaataagataataac

SEQ ID NO: 4873721 - DNA, 25 bp, Homo sapien
ttaggaccttcctcgagcattaaca

SEQ ID NO: 4873722 - DNA, 25 bp, Homo sapien
tactctcacattcgcaagaatcttg

SEQ ID NO: 4873723 - DNA, 25 bp, Homo sapien
tcttgattgaggctgcctgtccgcg

SEQ ID NO: 4873724 - DNA, 25 bp, Homo sapien
taaccccttgagtccgttgtcttga

SEQ ID NO: 4873725 - DNA, 25 bp, Homo sapien
tccgggcgtggccaaacacttggcg

SEQ ID NO: 4873726 - DNA, 25 bp, Homo sapien
gctaataactatccacgctgtcaga

SEQ ID NO: 4873727 - DNA, 25 bp, Homo sapien
aaacaattgagcctcgtgtggacct

SEQ ID NO: 4873728 - DNA, 25 bp, Homo sapien
cgtaaaactaggaaacagtgcagcc

SEQ ID NO: 4873729 - DNA, 25 bp, Homo sapien
ttgattaaagcaaggcaagcccctt

SEQ ID NO: 4873730 - DNA, 25 bp, Homo sapien
tccattcatcaaaaagatgtttact

SEQ ID NO: 4873731 - DNA, 25 bp, Homo sapien
cggaaatggtgagtaagagtcatcc

SEQ ID NO: 4873732 - DNA, 25 bp, Homo sapien
gatgtttacttggaacacgattatg

SEQ ID NO: 4873733 - DNA, 25 bp, Homo sapien
gaacacgattatgccgggcccactt

SEQ ID NO: 4873734 - DNA, 25 bp, Homo sapien
gatacggagtatatctctagattca

SEQ ID NO: 4873735 - DNA, 25 bp, Homo sapien
ctaataagtggcaagatagagggcc

SEQ ID NO: 4873736 - DNA, 25 bp, Homo sapien
ttactttggatacggagtatatctc

SEQ ID NO: 4873737 - DNA, 25 bp, Homo sapien
gtggcaagatagagggcccaccctc

SEQ ID NO: 4873738 - DNA, 25 bp, Homo sapien
tgtccagaacgagccctggtgaggt

SEQ ID NO: 4873739 - DNA, 25 bp, Homo sapien
taaggaacacctttgctagcagtag

SEQ ID NO: 4873740 - DNA, 25 bp, Homo sapien
ggagactagtatccccttcccatgg

SEQ ID NO: 4873741 - DNA, 25 bp, Homo sapien
gacagccggtttgcttgccttaaag

SEQ ID NO: 4873742 - DNA, 25 bp, Homo sapien
aaatgagctaccatatgtgctgtct

SEQ ID NO: 4873743 - DNA, 25 bp, Homo sapien
gaactgtctgttcttaggtagaaac

SEQ ID NO: 4873744 - DNA, 25 bp, Homo sapien
tactataatttgctatgacttcagg

SEQ ID NO: 4873745 - DNA, 25 bp, Homo sapien
catttcatgtgcagacgtgcctctg

SEQ ID NO: 4873746 - DNA, 25 bp, Homo sapien
gatacacttgtggttggcagggcat

SEQ ID NO: 4873747 - DNA, 25 bp, Homo sapien
cacaagttatcaaaaagggcaaggt

SEQ ID NO: 4873748 - DNA, 25 bp, Homo sapien
tctggatgtcctctcaatgcacaag

SEQ ID NO: 4873749 - DNA, 25 bp, Homo sapien
tctgaagaactcatgaccatcaagc

SEQ ID NO: 4873750 - DNA, 25 bp, Homo sapien
tcttgtagaacatacgaggcacgtg

SEQ ID NO: 4873751 - DNA, 25 bp, Homo sapien
gagcagtttgctggagcttgaacca

SEQ ID NO: 4873752 - DNA, 25 bp, Homo sapien
gccatcccagtgtgcgaatcttgta

SEQ ID NO: 4873753 - DNA, 25 bp, Homo sapien
tgagaatgactgcacagtaatgttc

SEQ ID NO: 4873754 - DNA, 25 bp, Homo sapien
gcctgattctagaacttggttgtaa

SEQ ID NO: 4873755 - DNA, 25 bp, Homo sapien
atgaaccactgtactcggcctgatt

SEQ ID NO: 4873756 - DNA, 25 bp, Homo sapien
ctccaaagagctcccctttggtctt

SEQ ID NO: 4873757 - DNA, 25 bp, Homo sapien
caggcagatgcactcccgttttctt

SEQ ID NO: 4873758 - DNA, 25 bp, Homo sapien
ggaaatgtctgtcgcatcccgtgac

SEQ ID NO: 4873759 - DNA, 25 bp, Homo sapien
tcagcgcagaacgactcgaaggatc

SEQ ID NO: 4873760 - DNA, 25 bp, Homo sapien
tcacaatacagcaccccggaaatgt

SEQ ID NO: 4873761 - DNA, 25 bp, Homo sapien
gaggcacgtctgctctcacaataca

SEQ ID NO: 4873762 - DNA, 25 bp, Homo sapien
gaggaaggcagttctccagatgcaa

SEQ ID NO: 4873763 - DNA, 25 bp, Homo sapien
acctcatattatgcaccagagatat

SEQ ID NO: 4873764 - DNA, 25 bp, Homo sapien
ttgttgatggctctcccggaggaag

SEQ ID NO: 4873765 - DNA, 25 bp, Homo sapien
gaagttagtcccatcatctgcacag

SEQ ID NO: 4873766 - DNA, 25 bp, Homo sapien
tctttgactgtcttgcaaaaacaca

SEQ ID NO: 4873767 - DNA, 25 bp, Homo sapien
tttgactgtcttgcaaaaacacatc

SEQ ID NO: 4873768 - DNA, 25 bp, Homo sapien
acacatcctcagtggcggggagctg

SEQ ID NO: 4873769 - DNA, 25 bp, Homo sapien
aaacacatcctcagtggcggggagc

SEQ ID NO: 4873770 - DNA, 25 bp, Homo sapien
tgttttagccgatgattgaatagtt

SEQ ID NO: 4873771 - DNA, 25 bp, Homo sapien
gaccagttagggttacttggctcac

SEQ ID NO: 4873772 - DNA, 25 bp, Homo sapien
ggagtcattcagtcaatctttgtgt

SEQ ID NO: 4873773 - DNA, 25 bp, Homo sapien
gactttggaactgatcagttcatga

SEQ ID NO: 4873774 - DNA, 25 bp, Homo sapien
tgctcttccgggtacatccctatga

SEQ ID NO: 4873775 - DNA, 25 bp, Homo sapien
gctgaactgctctgtcaatctctgg

SEQ ID NO: 4873776 - DNA, 25 bp, Homo sapien
tatattgtatagctaatccatggct

SEQ ID NO: 4873777 - DNA, 25 bp, Homo sapien
caatctctgggcacttaaaaggagt

SEQ ID NO: 4873778 - DNA, 25 bp, Homo sapien
ttatattatatactcaaaagaaagt

SEQ ID NO: 4873779 - DNA, 25 bp, Homo sapien
tattatatactcaaaagaaagtatt

SEQ ID NO: 4873780 - DNA, 25 bp, Homo sapien
ctcaaaagaaagtattttgaagtat

SEQ ID NO: 4873781 - DNA, 25 bp, Homo sapien
gaaagtattttgaagtattactcaa

SEQ ID NO: 4873782 - DNA, 25 bp, Homo sapien
ccaggagcaaccttgtagacccagc

SEQ ID NO: 4873783 - DNA, 25 bp, Homo sapien
ggttggttcctccactgacccagga

SEQ ID NO: 4873784 - DNA, 25 bp, Homo sapien
tccactgacccaggagcaaccttgt

SEQ ID NO: 4873785 - DNA, 25 bp, Homo sapien
gagctggcatggttggttcctccac

SEQ ID NO: 4873786 - DNA, 25 bp, Homo sapien
acggatggctttggcattctccaga

SEQ ID NO: 4873787 - DNA, 25 bp, Homo sapien
ctttggcattctccagaaagagcag

SEQ ID NO: 4873788 - DNA, 25 bp, Homo sapien
atggctttggcattctccagaaaga

SEQ ID NO: 4873789 - DNA, 25 bp, Homo sapien
tcacggatggctttggcattctcca

SEQ ID NO: 4873790 - DNA, 25 bp, Homo sapien
tgcaggatagctcccagaagtccag

SEQ ID NO: 4873791 - DNA, 25 bp, Homo sapien
tggcaacacaatagaccaaggctgc

SEQ ID NO: 4873792 - DNA, 25 bp, Homo sapien
tgtgcagacccctttgaatgccttg

SEQ ID NO: 4873793 - DNA, 25 bp, Homo sapien
tgtgtaccacgggaacagccctata

SEQ ID NO: 4873794 - DNA, 25 bp, Homo sapien
ccctgcatagggaaatgttggaaca

SEQ ID NO: 4873795 - DNA, 25 bp, Homo sapien
tggggaatgttcttctagggactcc

SEQ ID NO: 4873796 - DNA, 25 bp, Homo sapien
ggctcagggtaaattctgttcttcc

SEQ ID NO: 4873797 - DNA, 25 bp, Homo sapien
ttgcctttgccccagtgtcgaggct

SEQ ID NO: 4873798 - DNA, 25 bp, Homo sapien
aaacaaaattatttgactgcctatc

SEQ ID NO: 4873799 - DNA, 25 bp, Homo sapien
caaacaaaattatttgactgcctat

SEQ ID NO: 4873800 - DNA, 25 bp, Homo sapien
tcaagcactgcacgggtcgttggct

SEQ ID NO: 4873801 - DNA, 25 bp, Homo sapien
aagcactgcacgggtcgttggctcc

SEQ ID NO: 4873802 - DNA, 25 bp, Homo sapien
agcactgcacgggtcgttggctccc

SEQ ID NO: 4873803 - DNA, 25 bp, Homo sapien
caagcactgcacgggtcgttggctc

SEQ ID NO: 4873804 - DNA, 25 bp, Homo sapien
tgccatattgtctgctgcaactgca

SEQ ID NO: 4873805 - DNA, 25 bp, Homo sapien
agccgtgccatattgtctgctgcaa

SEQ ID NO: 4873806 - DNA, 25 bp, Homo sapien
tctgctgcaactgcaggctgctgca

SEQ ID NO: 4873807 - DNA, 25 bp, Homo sapien
ctcctgcagccgtgccatattgtct

SEQ ID NO: 4873808 - DNA, 25 bp, Homo sapien
gcctgtgacagggaagcgactgaat

SEQ ID NO: 4873809 - DNA, 25 bp, Homo sapien
cagggaagcgactgaatcagagaca

SEQ ID NO: 4873810 - DNA, 25 bp, Homo sapien
acaggactcaggtcccgtctccagt

SEQ ID NO: 4873811 - DNA, 25 bp, Homo sapien
gacaggactcaggtcccgtctccag

SEQ ID NO: 4873812 - DNA, 25 bp, Homo sapien
tccaatctacgattatcaggcccca

SEQ ID NO: 4873813 - DNA, 25 bp, Homo sapien
aggtactaaacccacagccggtctg

SEQ ID NO: 4873814 - DNA, 25 bp, Homo sapien
gccggtctgttctgggccatatcca

SEQ ID NO: 4873815 - DNA, 25 bp, Homo sapien
ctggaaagtccaatctacgattatc

SEQ ID NO: 4873816 - DNA, 25 bp, Homo sapien
atctgccctcttgtcgctgttctct

SEQ ID NO: 4873817 - DNA, 25 bp, Homo sapien
acatctgccctcttgtcgctgttct

SEQ ID NO: 4873818 - DNA, 25 bp, Homo sapien
gcaactgtagatgtatttccaaagc

SEQ ID NO: 4873819 - DNA, 25 bp, Homo sapien
tggtttccagcaactgtagatgtat

SEQ ID NO: 4873820 - DNA, 25 bp, Homo sapien
gcagagataggaaacacttagcatg

SEQ ID NO: 4873821 - DNA, 25 bp, Homo sapien
ggacatttcccactcgttggctctt

SEQ ID NO: 4873822 - DNA, 25 bp, Homo sapien
cctggatagaaacacggacatttcc

SEQ ID NO: 4873823 - DNA, 25 bp, Homo sapien
tattatgcagagataggaaacactt

SEQ ID NO: 4873824 - DNA, 25 bp, Homo sapien
ccgtatgtaaatgggactgtcactc

SEQ ID NO: 4873825 - DNA, 25 bp, Homo sapien
gaaccagtgtagtgtgcaatgacag

SEQ ID NO: 4873826 - DNA, 25 bp, Homo sapien
cacagctagagttccagatgaacca

SEQ ID NO: 4873827 - DNA, 25 bp, Homo sapien
gaacagctgactcattagtagagag

SEQ ID NO: 4873828 - DNA, 25 bp, Homo sapien
gtgagaggatatcctttactcagag

SEQ ID NO: 4873829 - DNA, 25 bp, Homo sapien
gagaggatatcctttactcagaggc

SEQ ID NO: 4873830 - DNA, 25 bp, Homo sapien
gaggatatcctttactcagaggcat

SEQ ID NO: 4873831 - DNA, 25 bp, Homo sapien
cagtgagaggatatcctttactcag

SEQ ID NO: 4873832 - DNA, 25 bp, Homo sapien
tgagcttatatttgataatggcacc

SEQ ID NO: 4873833 - DNA, 25 bp, Homo sapien
tctttcttgacacgaatggcttcat

SEQ ID NO: 4873834 - DNA, 25 bp, Homo sapien
tggcaccttgaatgaagaagtacat

SEQ ID NO: 4873835 - DNA, 25 bp, Homo sapien
taaatattgtgcaaactcttagatt

SEQ ID NO: 4873836 - DNA, 25 bp, Homo sapien
acccttgcccttcctgtaggtgctt

SEQ ID NO: 4873837 - DNA, 25 bp, Homo sapien
gagcaccttgcttatgaaagagaag

SEQ ID NO: 4873838 - DNA, 25 bp, Homo sapien
atgccatgccctcaagagcaccttg

SEQ ID NO: 4873839 - DNA, 25 bp, Homo sapien
tcagctggttcccatgtgaagatgc

SEQ ID NO: 4873840 - DNA, 25 bp, Homo sapien
actctttctcgtattttcgcttcca

SEQ ID NO: 4873841 - DNA, 25 bp, Homo sapien
tgtaccagtacagaactctttctcg

SEQ ID NO: 4873842 - DNA, 25 bp, Homo sapien
cgcctgtgcattcgcttgtaccagt

SEQ ID NO: 4873843 - DNA, 25 bp, Homo sapien
cagagcccccaattttgtgagtgtc

SEQ ID NO: 4873844 - DNA, 25 bp, Homo sapien
gactgaagttcgtttagttgcatcg

SEQ ID NO: 4873845 - DNA, 25 bp, Homo sapien
caaagggtgtgcaaacttgactgaa

SEQ ID NO: 4873846 - DNA, 25 bp, Homo sapien
ggtgtgcaaacttgactgaagttcg

SEQ ID NO: 4873847 - DNA, 25 bp, Homo sapien
gggtacagcaaagggtgtgcaaact

SEQ ID NO: 4873848 - DNA, 25 bp, Homo sapien
tggaaataccgcttcagtgatcagt

SEQ ID NO: 4873849 - DNA, 25 bp, Homo sapien
tccgtttctccacaagtaggtcaga

SEQ ID NO: 4873850 - DNA, 25 bp, Homo sapien
tttgctatcacctctggaaataccg

SEQ ID NO: 4873851 - DNA, 25 bp, Homo sapien
taggtcagaatgaagggattttgct

SEQ ID NO: 4873852 - DNA, 25 bp, Homo sapien
acaaaggctaggaggcaccggtaag

SEQ ID NO: 4873853 - DNA, 25 bp, Homo sapien
aaggctaggaggcaccggtaagtca

SEQ ID NO: 4873854 - DNA, 25 bp, Homo sapien
caccggtaagtcagtctggcaatta

SEQ ID NO: 4873855 - DNA, 25 bp, Homo sapien
taggaggcaccggtaagtcagtctg

SEQ ID NO: 4873856 - DNA, 25 bp, Homo sapien
tgactgatagtaggaaaacggcctc

SEQ ID NO: 4873857 - DNA, 25 bp, Homo sapien
gctgccagtctgttcaagggagatg

SEQ ID NO: 4873858 - DNA, 25 bp, Homo sapien
ttagtgtgcgaaatctccagtgacc

SEQ ID NO: 4873859 - DNA, 25 bp, Homo sapien
aaacggcctcgtggtgtgaatgaaa

SEQ ID NO: 4873860 - DNA, 25 bp, Homo sapien
ttagtgtttccgttcagcccaccag

SEQ ID NO: 4873861 - DNA, 25 bp, Homo sapien
gctttagtgtttccgttcagcccac

SEQ ID NO: 4873862 - DNA, 25 bp, Homo sapien
tgtttccgttcagcccaccagggag

SEQ ID NO: 4873863 - DNA, 25 bp, Homo sapien
aacagctttagtgtttccgttcagc

SEQ ID NO: 4873864 - DNA, 25 bp, Homo sapien
ggtttggaaggacatatgccacagc

SEQ ID NO: 4873865 - DNA, 25 bp, Homo sapien
cgcatgaggctgttgatgtgcaaat

SEQ ID NO: 4873866 - DNA, 25 bp, Homo sapien
aaaaatctgtgtatgcgcatgaggc

SEQ ID NO: 4873867 - DNA, 25 bp, Homo sapien
gagtgatattccatctcatttgcat

SEQ ID NO: 4873868 - DNA, 25 bp, Homo sapien
cctctttagccgtcagtgtcagcag

SEQ ID NO: 4873869 - DNA, 25 bp, Homo sapien
gcatcagcacggcatatcatcctca

SEQ ID NO: 4873870 - DNA, 25 bp, Homo sapien
gacattcagagtgttggccaacagg

SEQ ID NO: 4873871 - DNA, 25 bp, Homo sapien
tccaatcccaggacattcagagtgt

SEQ ID NO: 4873872 - DNA, 25 bp, Homo sapien
aaggattcagggatttcggctctgc

SEQ ID NO: 4873873 - DNA, 25 bp, Homo sapien
gtctcttttatgtcccctagcttgg

SEQ ID NO: 4873874 - DNA, 25 bp, Homo sapien
ggtgcttgtcgagaagctttacagc

SEQ ID NO: 4873875 - DNA, 25 bp, Homo sapien
tattcttcagctgtatgcctggtct

SEQ ID NO: 4873876 - DNA, 25 bp, Homo sapien
tctgcagagtgagacaaacattcag

SEQ ID NO: 4873877 - DNA, 25 bp, Homo sapien
gaactgttcagtttggactccatgc

SEQ ID NO: 4873878 - DNA, 25 bp, Homo sapien
tgtgagctgtgtaacaggtgcccct

SEQ ID NO: 4873879 - DNA, 25 bp, Homo sapien
cattctatactgaggaacagcatca

SEQ ID NO: 4873880 - DNA, 25 bp, Homo sapien
gatgactcaccccagcggcactgca

SEQ ID NO: 4873881 - DNA, 25 bp, Homo sapien
cccgatgactcaccccagcggcact

SEQ ID NO: 4873882 - DNA, 25 bp, Homo sapien
cttcccgatgactcaccccagcggc

SEQ ID NO: 4873883 - DNA, 25 bp, Homo sapien
atgactcaccccagcggcactgcag

SEQ ID NO: 4873884 - DNA, 25 bp, Homo sapien
ttcttgttttaatggcattttctca

SEQ ID NO: 4873885 - DNA, 25 bp, Homo sapien
gttttaatggcattttctcattaca

SEQ ID NO: 4873886 - DNA, 25 bp, Homo sapien
atttcttcttgttttaatggcattt

SEQ ID NO: 4873887 - DNA, 25 bp, Homo sapien
tgaatttcttcttgttttaatggca

SEQ ID NO: 4873888 - DNA, 25 bp, Homo sapien
ggagagttcctgaactctgatggtc

SEQ ID NO: 4873889 - DNA, 25 bp, Homo sapien
tggagagttcctgaactctgatggt

SEQ ID NO: 4873890 - DNA, 25 bp, Homo sapien
ctttcattgcagtacaggtgcagat

SEQ ID NO: 4873891 - DNA, 25 bp, Homo sapien
atggagagttcctgaactctgatgg

SEQ ID NO: 4873892 - DNA, 25 bp, Homo sapien
cactgggatggacgtcaaagagaag

SEQ ID NO: 4873893 - DNA, 25 bp, Homo sapien
aacaatgcaatttgctccatgtggc

SEQ ID NO: 4873894 - DNA, 25 bp, Homo sapien
tcccaccactgggatggacgtcaaa

SEQ ID NO: 4873895 - DNA, 25 bp, Homo sapien
ctttccaacaatgcaatttgctcca

SEQ ID NO: 4873896 - DNA, 25 bp, Homo sapien
ggagatctgcaacacggtgttcacc

SEQ ID NO: 4873897 - DNA, 25 bp, Homo sapien
ccaggagatctgcaacacggtgttc

SEQ ID NO: 4873898 - DNA, 25 bp, Homo sapien
agatctgcaacacggtgttcaccgg

SEQ ID NO: 4873899 - DNA, 25 bp, Homo sapien
caccaggagatctgcaacacggtgt

SEQ ID NO: 4873900 - DNA, 25 bp, Homo sapien
ccagccactgtaggcatcgtgtggg

SEQ ID NO: 4873901 - DNA, 25 bp, Homo sapien
ccactgtaggcatcgtgtgggcgca

SEQ ID NO: 4873902 - DNA, 25 bp, Homo sapien
tcgtgtgggcgcagctcagaaacag

SEQ ID NO: 4873903 - DNA, 25 bp, Homo sapien
ctcagaaacagcctgtgtgacatgc

SEQ ID NO: 4873904 - DNA, 25 bp, Homo sapien
tgatgctccactgcatcgtttctgc

SEQ ID NO: 4873905 - DNA, 25 bp, Homo sapien
ctgatgctccactgcatcgtttctg

SEQ ID NO: 4873906 - DNA, 25 bp, Homo sapien
tctccagagtcttctccgaagcctt

SEQ ID NO: 4873907 - DNA, 25 bp, Homo sapien
gggccctgacttgctgggggtgtcc

SEQ ID NO: 4873908 - DNA, 25 bp, Homo sapien
cttctccagagtcttctccgaagcc

SEQ ID NO: 4873909 - DNA, 25 bp, Homo sapien
tcaggaggggccctgacttgctggg

SEQ ID NO: 4873910 - DNA, 25 bp, Homo sapien
gcttcctggtgtgcatgctcgacgt

SEQ ID NO: 4873911 - DNA, 25 bp, Homo sapien
gccggtaaaatacaggtaggctgta

SEQ ID NO: 4873912 - DNA, 25 bp, Homo sapien
ttaccaccagtaagtgacggtcaga

SEQ ID NO: 4873913 - DNA, 25 bp, Homo sapien
gacggtcagaactcgaacctgggct

SEQ ID NO: 4873914 - DNA, 25 bp, Homo sapien
gctctggctctgacatcgcatgcca

SEQ ID NO: 4873915 - DNA, 25 bp, Homo sapien
cagctcccttgactctgacatctag

SEQ ID NO: 4873916 - DNA, 25 bp, Homo sapien
cgtgtagccttgtcagggagtgccc

SEQ ID NO: 4873917 - DNA, 25 bp, Homo sapien
tggcctgcactcgtgtagccttgtc

SEQ ID NO: 4873918 - DNA, 25 bp, Homo sapien
cctgcacccatgtggatgccttcct

SEQ ID NO: 4873919 - DNA, 25 bp, Homo sapien
ctgcacccatgtggatgccttcctc

SEQ ID NO: 4873920 - DNA, 25 bp, Homo sapien
tcctgcacccatgtggatgccttcc

SEQ ID NO: 4873921 - DNA, 25 bp, Homo sapien
tgcacccatgtggatgccttcctcc

SEQ ID NO: 4873922 - DNA, 25 bp, Homo sapien
ggagaactctgtcaagctggcttcg

SEQ ID NO: 4873923 - DNA, 25 bp, Homo sapien
ggagaacagtacttagcaaccaaga

SEQ ID NO: 4873924 - DNA, 25 bp, Homo sapien
tccagttccctgctagtggagaaca

SEQ ID NO: 4873925 - DNA, 25 bp, Homo sapien
gaggtcctttgagactaggtaagaa

SEQ ID NO: 4873926 - DNA, 25 bp, Homo sapien
ggcactcattagacaactaccccag

SEQ ID NO: 4873927 - DNA, 25 bp, Homo sapien
cctggacagcaaatatggagggcac

SEQ ID NO: 4873928 - DNA, 25 bp, Homo sapien
tgcaacacttagttatagccttggc

SEQ ID NO: 4873929 - DNA, 25 bp, Homo sapien
cagtccagacagtgctggtggcctc

SEQ ID NO: 4873930 - DNA, 25 bp, Homo sapien
ctcataattgaccattgcaccttgg

SEQ ID NO: 4873931 - DNA, 25 bp, Homo sapien
gttcttcactgagcctagcagtacc

SEQ ID NO: 4873932 - DNA, 25 bp, Homo sapien
ggcctatgccgcttgatttctagca

SEQ ID NO: 4873933 - DNA, 25 bp, Homo sapien
agcctagcagtaccgacccttatat

SEQ ID NO: 4873934 - DNA, 25 bp, Homo sapien
caaccagcggcacacagtcctgtgt

SEQ ID NO: 4873935 - DNA, 25 bp, Homo sapien
catgaccactttctggagcaggttc

SEQ ID NO: 4873936 - DNA, 25 bp, Homo sapien
ctcaattaggagtgttggaggtttc

SEQ ID NO: 4873937 - DNA, 25 bp, Homo sapien
ggcaatgccactccatgaccacttt

SEQ ID NO: 4873938 - DNA, 25 bp, Homo sapien
ggcctgaagaatgatggaggccatg

SEQ ID NO: 4873939 - DNA, 25 bp, Homo sapien
ttggttgggttgttggatagcttaa

SEQ ID NO: 4873940 - DNA, 25 bp, Homo sapien
tgggttgttggatagcttaagtttg

SEQ ID NO: 4873941 - DNA, 25 bp, Homo sapien
ttgttggatagcttaagtttgcagg

SEQ ID NO: 4873942 - DNA, 25 bp, Homo sapien
gtaagagggaaggtgccagtgggca

SEQ ID NO: 4873943 - DNA, 25 bp, Homo sapien
gagggaaggtgccagtgggcacaga

SEQ ID NO: 4873944 - DNA, 25 bp, Homo sapien
tgggtgggtaagagggaaggtgcca

SEQ ID NO: 4873945 - DNA, 25 bp, Homo sapien
gaaggtgccagtgggcacagaggag

SEQ ID NO: 4873946 - DNA, 25 bp, Homo sapien
aggagtctctccatggagtgactaa

SEQ ID NO: 4873947 - DNA, 25 bp, Homo sapien
tctctccatggagtgactaatggct

SEQ ID NO: 4873948 - DNA, 25 bp, Homo sapien
ctccatggagtgactaatggctgtg

SEQ ID NO: 4873949 - DNA, 25 bp, Homo sapien
gagtctctccatggagtgactaatg

SEQ ID NO: 4873950 - DNA, 25 bp, Homo sapien
ttagaatcgaggctggctggctgtg

SEQ ID NO: 4873951 - DNA, 25 bp, Homo sapien
ggaacaagggttgagcttcaagctg

SEQ ID NO: 4873952 - DNA, 25 bp, Homo sapien
cattctctcgccatagccaaggaac

SEQ ID NO: 4873953 - DNA, 25 bp, Homo sapien
gctcagaagggacccaaacaccaac

SEQ ID NO: 4873954 - DNA, 25 bp, Homo sapien
tctggggaacattctctcgccatag

SEQ ID NO: 4873955 - DNA, 25 bp, Homo sapien
gggacccagttcaccaggaagtgct

SEQ ID NO: 4873956 - DNA, 25 bp, Homo sapien
tctctaggagcagccaatcacacag

SEQ ID NO: 4873957 - DNA, 25 bp, Homo sapien
cttccagtcgaaggtgtggctcctt

SEQ ID NO: 4873958 - DNA, 25 bp, Homo sapien
tacagtgtgctaattgaaactaccc

SEQ ID NO: 4873959 - DNA, 25 bp, Homo sapien
agcaggtgagctggttcgatccagt

SEQ ID NO: 4873960 - DNA, 25 bp, Homo sapien
ggttcgatccagtccttggaaccat

SEQ ID NO: 4873961 - DNA, 25 bp, Homo sapien
aaatgagcaacgtggagcaggtgag

SEQ ID NO: 4873962 - DNA, 25 bp, Homo sapien
ctgagagaaatgagcaacgtggagc

SEQ ID NO: 4873963 - DNA, 25 bp, Homo sapien
ttcatgatgacttttgagacaagaa

SEQ ID NO: 4873964 - DNA, 25 bp, Homo sapien
tcaacaaattgtggcaacatttgca

SEQ ID NO: 4873965 - DNA, 25 bp, Homo sapien
tctgcaggtcggcatgcgggaatgg

SEQ ID NO: 4873966 - DNA, 25 bp, Homo sapien
gagcaagcttggagttagctctgca

SEQ ID NO: 4873967 - DNA, 25 bp, Homo sapien
tctgtgtgaaaggtcatagctgctc

SEQ ID NO: 4873968 - DNA, 25 bp, Homo sapien
ctttgctcggaggactaatggaact

SEQ ID NO: 4873969 - DNA, 25 bp, Homo sapien
tccactgcgtgtgagggatttggtt

SEQ ID NO: 4873970 - DNA, 25 bp, Homo sapien
tctgtcctttatggtcagcgatggc

SEQ ID NO: 4873971 - DNA, 25 bp, Homo sapien
gccctctgcaattgttgatgtgaag

SEQ ID NO: 4873972 - DNA, 25 bp, Homo sapien
gcagcctcttaacagaaccttctgg

SEQ ID NO: 4873973 - DNA, 25 bp, Homo sapien
gaaatatggtgaagtcatcgttcat

SEQ ID NO: 4873974 - DNA, 25 bp, Homo sapien
gagtttgtcagatatactggtatca

SEQ ID NO: 4873975 - DNA, 25 bp, Homo sapien
ggctgcaggtttacttctgcttaca

SEQ ID NO: 4873976 - DNA, 25 bp, Homo sapien
aacttcacatcctctataggcgtgg

SEQ ID NO: 4873977 - DNA, 25 bp, Homo sapien
cctctataggcgtggttggaagagc

SEQ ID NO: 4873978 - DNA, 25 bp, Homo sapien
catgctttgcctgtgtagacattcc

SEQ ID NO: 4873979 - DNA, 25 bp, Homo sapien
tggattcggaagacgctgttcagca

SEQ ID NO: 4873980 - DNA, 25 bp, Homo sapien
tgaaggcctggattcggaagacgct

SEQ ID NO: 4873981 - DNA, 25 bp, Homo sapien
attcggaagacgctgttcagcaggt

SEQ ID NO: 4873982 - DNA, 25 bp, Homo sapien
ggcctggattcggaagacgctgttc

SEQ ID NO: 4873983 - DNA, 25 bp, Homo sapien
tggctactgtcacagaatgtccact

SEQ ID NO: 4873984 - DNA, 25 bp, Homo sapien
ctggaaagcgtgcaccttgtgttac

SEQ ID NO: 4873985 - DNA, 25 bp, Homo sapien
atgtccacttccctagggcgtgtcc

SEQ ID NO: 4873986 - DNA, 25 bp, Homo sapien
tgtgttaccagacaatcctcgtggc

SEQ ID NO: 4873987 - DNA, 25 bp, Homo sapien
aattcaaggtgtgctcggagcgcgc

SEQ ID NO: 4873988 - DNA, 25 bp, Homo sapien
gctcggagcgcgctggcgttttcct

SEQ ID NO: 4873989 - DNA, 25 bp, Homo sapien
agcgcgctggcgttttcctgggtcc

SEQ ID NO: 4873990 - DNA, 25 bp, Homo sapien
agctgagagcccgtaggaattcaag

SEQ ID NO: 4873991 - DNA, 25 bp, Homo sapien
ggcagcgcctgaagcgccaggctcg

SEQ ID NO: 4873992 - DNA, 25 bp, Homo sapien
cgactttcgcgctctgtgctgaggc

SEQ ID NO: 4873993 - DNA, 25 bp, Homo sapien
cgcgctcgcctccaaaggcgacttt

SEQ ID NO: 4873994 - DNA, 25 bp, Homo sapien
ttgctggagccctccgcgctcgcct

SEQ ID NO: 4873995 - DNA, 25 bp, Homo sapien
ccctgcttgattcccttttcctctc

SEQ ID NO: 4873996 - DNA, 25 bp, Homo sapien
tgattcccttttcctctccacacct

SEQ ID NO: 4873997 - DNA, 25 bp, Homo sapien
ctccctgcttgattcccttttcctc

SEQ ID NO: 4873998 - DNA, 25 bp, Homo sapien
cttgattcccttttcctctccacac

SEQ ID NO: 4873999 - DNA, 25 bp, Homo sapien
tttcctgcaaacctccactgctagc

SEQ ID NO: 4874000 - DNA, 25 bp, Homo sapien
agtctctggagcacaccatcccttg

SEQ ID NO: 4874001 - DNA, 25 bp, Homo sapien
aaagacgatggggtcgtgcattccg

SEQ ID NO: 4874002 - DNA, 25 bp, Homo sapien
tgcattccggcgtccctgggttttc

SEQ ID NO: 4874003 - DNA, 25 bp, Homo sapien
tgctcagaagaatgtgccttgaccc

SEQ ID NO: 4874004 - DNA, 25 bp, Homo sapien
cctttagggaggaccctggtgtgct

SEQ ID NO: 4874005 - DNA, 25 bp, Homo sapien
cagtgcttaagcctttagggaggac

SEQ ID NO: 4874006 - DNA, 25 bp, Homo sapien
ctagagcacacaaccagtgcttaag

SEQ ID NO: 4874007 - DNA, 25 bp, Homo sapien
tttccttctgtagtgctccatgcca

SEQ ID NO: 4874008 - DNA, 25 bp, Homo sapien
cacgtctgcagccattgttcagctg

SEQ ID NO: 4874009 - DNA, 25 bp, Homo sapien
gctgtcctcggagtctagccctgtg

SEQ ID NO: 4874010 - DNA, 25 bp, Homo sapien
atgccaccgtcgctgtggcacgggc

SEQ ID NO: 4874011 - DNA, 25 bp, Homo sapien
tctgggggtgggttcgcaccaggga

SEQ ID NO: 4874012 - DNA, 25 bp, Homo sapien
ccagggaaagggggtgaaagagcag

SEQ ID NO: 4874013 - DNA, 25 bp, Homo sapien
caggagaatgagagaaggctctggg

SEQ ID NO: 4874014 - DNA, 25 bp, Homo sapien
gggtgaaagagcagaggcgctgaca

SEQ ID NO: 4874015 - DNA, 25 bp, Homo sapien
agtgctttgcttgctactaggtagc

SEQ ID NO: 4874016 - DNA, 25 bp, Homo sapien
aagatacatttgtgaaatcaaacag

SEQ ID NO: 4874017 - DNA, 25 bp, Homo sapien
tagcaagcaaagatacatttgtgaa

SEQ ID NO: 4874018 - DNA, 25 bp, Homo sapien
ttgctactaggtagcaagcaaagat

SEQ ID NO: 4874019 - DNA, 25 bp, Homo sapien
aatcattctgtgcttcttgtttctc

SEQ ID NO: 4874020 - DNA, 25 bp, Homo sapien
cttgtttctcacataacccactggg

SEQ ID NO: 4874021 - DNA, 25 bp, Homo sapien
ttgtttctcacataacccactggga

SEQ ID NO: 4874022 - DNA, 25 bp, Homo sapien
ttcttgtttctcacataacccactg

SEQ ID NO: 4874023 - DNA, 25 bp, Homo sapien
tgaaagtagccgtttttggacagcg

SEQ ID NO: 4874024 - DNA, 25 bp, Homo sapien
ggagtttccaaacagatgtcttgaa

SEQ ID NO: 4874025 - DNA, 25 bp, Homo sapien
tgaaacttaaagtgaaaatctctgc

SEQ ID NO: 4874026 - DNA, 25 bp, Homo sapien
cagagcaatgaactctccgaggagt

SEQ ID NO: 4874027 - DNA, 25 bp, Homo sapien
cagtcgaagacatgttcaccaggtc

SEQ ID NO: 4874028 - DNA, 25 bp, Homo sapien
tgagtatgatactcggcagacagtt

SEQ ID NO: 4874029 - DNA, 25 bp, Homo sapien
accatcagcggccacctgagttgtt

SEQ ID NO: 4874030 - DNA, 25 bp, Homo sapien
cacctgagttgtttctaatgccggc

SEQ ID NO: 4874031 - DNA, 25 bp, Homo sapien
cacagagcaaagttagcaagttgca

SEQ ID NO: 4874032 - DNA, 25 bp, Homo sapien
tctttgtgcggttggtaaataacac

SEQ ID NO: 4874033 - DNA, 25 bp, Homo sapien
tgaaatgagttctgaatagacagca

SEQ ID NO: 4874034 - DNA, 25 bp, Homo sapien
ggctcgggacatgagcccgcttgtt

SEQ ID NO: 4874035 - DNA, 25 bp, Homo sapien
ggccactgtggaggccgtgccactc

SEQ ID NO: 4874036 - DNA, 25 bp, Homo sapien
gtccacgcggcgtggacaacagacc

SEQ ID NO: 4874037 - DNA, 25 bp, Homo sapien
acgcggcgtggacaacagacccttg

SEQ ID NO: 4874038 - DNA, 25 bp, Homo sapien
gcgtggacaacagacccttgtgggc

SEQ ID NO: 4874039 - DNA, 25 bp, Homo sapien
tatccgtccatactctctggctctg

SEQ ID NO: 4874040 - DNA, 25 bp, Homo sapien
gcatgtatccgtccatactctctgg

SEQ ID NO: 4874041 - DNA, 25 bp, Homo sapien
tctgccatcttaggcagattctggg

SEQ ID NO: 4874042 - DNA, 25 bp, Homo sapien
cagtctgtgctgcatgtatccgtcc

SEQ ID NO: 4874043 - DNA, 25 bp, Homo sapien
aatcaaaaactgaccttagcctagc

SEQ ID NO: 4874044 - DNA, 25 bp, Homo sapien
ataatcaaaaactgaccttagccta

SEQ ID NO: 4874045 - DNA, 25 bp, Homo sapien
caaaaactgaccttagcctagctac

SEQ ID NO: 4874046 - DNA, 25 bp, Homo sapien
aaactgaccttagcctagctacacc

SEQ ID NO: 4874047 - DNA, 25 bp, Homo sapien
tgtctgcagactccaaaaggcttct

SEQ ID NO: 4874048 - DNA, 25 bp, Homo sapien
tttgccgcgcggtggagatgggagt

SEQ ID NO: 4874049 - DNA, 25 bp, Homo sapien
tgtaagttgccagcaaaacgttttc

SEQ ID NO: 4874050 - DNA, 25 bp, Homo sapien
gctgtgcattttgccgcgcggtgga

SEQ ID NO: 4874051 - DNA, 25 bp, Homo sapien
gggccactacgctgctctctgatgc

SEQ ID NO: 4874052 - DNA, 25 bp, Homo sapien
ccaaagagcaaaaagcgcagattac

SEQ ID NO: 4874053 - DNA, 25 bp, Homo sapien
aaagcgcagattactgtcacgggcc

SEQ ID NO: 4874054 - DNA, 25 bp, Homo sapien
agattactgtcacgggccactacgc

SEQ ID NO: 4874055 - DNA, 25 bp, Homo sapien
ggctgaatgccaggtccatgcaggg

SEQ ID NO: 4874056 - DNA, 25 bp, Homo sapien
cagggggattagtgcaggctggtca

SEQ ID NO: 4874057 - DNA, 25 bp, Homo sapien
agtcccgggacttagcttccctgtg

SEQ ID NO: 4874058 - DNA, 25 bp, Homo sapien
gatgccattcccaagagtcccggga

SEQ ID NO: 4874059 - DNA, 25 bp, Homo sapien
ctggagaccttccagcactcttgtg

SEQ ID NO: 4874060 - DNA, 25 bp, Homo sapien
tggagaccttccagcactcttgtgc

SEQ ID NO: 4874061 - DNA, 25 bp, Homo sapien
ctggagcagtctcatagagcatgga

SEQ ID NO: 4874062 - DNA, 25 bp, Homo sapien
ggagcagtctcatagagcatggatc

SEQ ID NO: 4874063 - DNA, 25 bp, Homo sapien
gctggagcagtctcatagagcatgg

SEQ ID NO: 4874064 - DNA, 25 bp, Homo sapien
tggagcagtctcatagagcatggat

SEQ ID NO: 4874065 - DNA, 25 bp, Homo sapien
agaacaggaggcgaagggctttctt

SEQ ID NO: 4874066 - DNA, 25 bp, Homo sapien
ggaggcgaagggctttctttatgct

SEQ ID NO: 4874067 - DNA, 25 bp, Homo sapien
ggattctggttacaggattggatat

SEQ ID NO: 4874068 - DNA, 25 bp, Homo sapien
gcttgccagatctcgatgatgtaga

SEQ ID NO: 4874069 - DNA, 25 bp, Homo sapien
cttgcgtcttaagaagtagaacagt

SEQ ID NO: 4874070 - DNA, 25 bp, Homo sapien
tgatgtgatccgtcttgcgtcttaa

SEQ ID NO: 4874071 - DNA, 25 bp, Homo sapien
aggagttggcgttttaccctcagag

SEQ ID NO: 4874072 - DNA, 25 bp, Homo sapien
gcgttttaccctcagagcaaggcca

SEQ ID NO: 4874073 - DNA, 25 bp, Homo sapien
cagacgatgacacaagctgcgatgt

SEQ ID NO: 4874074 - DNA, 25 bp, Homo sapien
cacaagctgcgatgtgaatccagaa

SEQ ID NO: 4874075 - DNA, 25 bp, Homo sapien
gctgtcttcccagaacagacgatga

SEQ ID NO: 4874076 - DNA, 25 bp, Homo sapien
gtgaatccagaagcgccgcgagagc

SEQ ID NO: 4874077 - DNA, 25 bp, Homo sapien
tagttttaaaaacgcatcagaaata

SEQ ID NO: 4874078 - DNA, 25 bp, Homo sapien
cattttactgggatcgctttcaggt

SEQ ID NO: 4874079 - DNA, 25 bp, Homo sapien
tcaggtgtagttgaccttagtttta

SEQ ID NO: 4874080 - DNA, 25 bp, Homo sapien
atcgctttcaggtgtagttgacctt

SEQ ID NO: 4874081 - DNA, 25 bp, Homo sapien
cacagattctgatgcttgtcgtggg

SEQ ID NO: 4874082 - DNA, 25 bp, Homo sapien
tctgatctatcaacagacattctca

SEQ ID NO: 4874083 - DNA, 25 bp, Homo sapien
ttagtgttatctgatctatcaacag

SEQ ID NO: 4874084 - DNA, 25 bp, Homo sapien
tctcacagattctgatgcttgtcgt

SEQ ID NO: 4874085 - DNA, 25 bp, Homo sapien
ctttcttgacctcttgttgatgagg

SEQ ID NO: 4874086 - DNA, 25 bp, Homo sapien
tttcttgacctcttgttgatgaggt

SEQ ID NO: 4874087 - DNA, 25 bp, Homo sapien
ggttctctatgaatgcactcaattg

SEQ ID NO: 4874088 - DNA, 25 bp, Homo sapien
gcactcaattgtatgttcagattca

SEQ ID NO: 4874089 - DNA, 25 bp, Homo sapien
tttctggttctctatgaatgcactc

SEQ ID NO: 4874090 - DNA, 25 bp, Homo sapien
tatgaatgcactcaattgtatgttc

SEQ ID NO: 4874091 - DNA, 25 bp, Homo sapien
acatgagtataagacccttctgagt

SEQ ID NO: 4874092 - DNA, 25 bp, Homo sapien
tattttccctaacatgagtataaga

SEQ ID NO: 4874093 - DNA, 25 bp, Homo sapien
caggcaccagcaactgttgtcagtg

SEQ ID NO: 4874094 - DNA, 25 bp, Homo sapien
ggatctcttgctccaacgatttggg

SEQ ID NO: 4874095 - DNA, 25 bp, Homo sapien
gggcaaaatccaatatcctctgcca

SEQ ID NO: 4874096 - DNA, 25 bp, Homo sapien
ccagcttcacctgtgttccagccct

SEQ ID NO: 4874097 - DNA, 25 bp, Homo sapien
gccagcttcacctgtgttccagccc

SEQ ID NO: 4874098 - DNA, 25 bp, Homo sapien
agggcaaaatccaatatcctctgcc

SEQ ID NO: 4874099 - DNA, 25 bp, Homo sapien
gaacaatggcaaatcaacgtgctta

SEQ ID NO: 4874100 - DNA, 25 bp, Homo sapien
cttcctggtcataaatctgctgtgg

SEQ ID NO: 4874101 - DNA, 25 bp, Homo sapien
caacgtgcttaataagtagcatggg

SEQ ID NO: 4874102 - DNA, 25 bp, Homo sapien
gggttttgatgaggttatgctgaac

SEQ ID NO: 4874103 - DNA, 25 bp, Homo sapien
ggataaggagcccaagccgttgctt

SEQ ID NO: 4874104 - DNA, 25 bp, Homo sapien
ggcttgcgaacatgcggccccttaa

SEQ ID NO: 4874105 - DNA, 25 bp, Homo sapien
tgaggaccgagtcccagtgcagctc

SEQ ID NO: 4874106 - DNA, 25 bp, Homo sapien
cttaggcttcggcacactgaggacc

SEQ ID NO: 4874107 - DNA, 25 bp, Homo sapien
taagatcagccataagtaatcagca

SEQ ID NO: 4874108 - DNA, 25 bp, Homo sapien
cactttcagtggattggtcatctgg

SEQ ID NO: 4874109 - DNA, 25 bp, Homo sapien
tctagaaatgcggaccaaactactt

SEQ ID NO: 4874110 - DNA, 25 bp, Homo sapien
aagggcataccttgtgcattgtggc

SEQ ID NO: 4874111 - DNA, 25 bp, Homo sapien
gtattttctaagtcctagctgctaa

SEQ ID NO: 4874112 - DNA, 25 bp, Homo sapien
cagaggcaggatgattactccagga

SEQ ID NO: 4874113 - DNA, 25 bp, Homo sapien
gaaagtagaacctttgccacagtat

SEQ ID NO: 4874114 - DNA, 25 bp, Homo sapien
tcaagagacttaaattggaaccaag

SEQ ID NO: 4874115 - DNA, 25 bp, Homo sapien
gagactcgatcttgtgttgctcagg

SEQ ID NO: 4874116 - DNA, 25 bp, Homo sapien
catggcatgctataacctggaactc

SEQ ID NO: 4874117 - DNA, 25 bp, Homo sapien
taaatcagcattccagtgaccattg

SEQ ID NO: 4874118 - DNA, 25 bp, Homo sapien
catgagatccatgcaggcagttgga

SEQ ID NO: 4874119 - DNA, 25 bp, Homo sapien
aagagaaaatttgagatcaagcagc

SEQ ID NO: 4874120 - DNA, 25 bp, Homo sapien
taagtgacagaaaagtgatgatctg

SEQ ID NO: 4874121 - DNA, 25 bp, Homo sapien
gatctggccgagcatggtgagtcac

SEQ ID NO: 4874122 - DNA, 25 bp, Homo sapien
gaagactttagtggtataggagcta

SEQ ID NO: 4874123 - DNA, 25 bp, Homo sapien
tagcggtgccgaatgggcggttggt

SEQ ID NO: 4874124 - DNA, 25 bp, Homo sapien
ttggtaaccgctgccgaggactagg

SEQ ID NO: 4874125 - DNA, 25 bp, Homo sapien
tctggcacagcggtcgcgcggcggg

SEQ ID NO: 4874126 - DNA, 25 bp, Homo sapien
ttgccgggtaagtgtcgccgccgcc

SEQ ID NO: 4874127 - DNA, 25 bp, Homo sapien
gctgatgactatgctttactactaa

SEQ ID NO: 4874128 - DNA, 25 bp, Homo sapien
tgtttgggatatgtagcagcacaaa

SEQ ID NO: 4874129 - DNA, 25 bp, Homo sapien
gcttgccagtgatgataaagaccac

SEQ ID NO: 4874130 - DNA, 25 bp, Homo sapien
acttacagatactggtcagtgtgac

SEQ ID NO: 4874131 - DNA, 25 bp, Homo sapien
tttcagacagggcaacaatctgttg

SEQ ID NO: 4874132 - DNA, 25 bp, Homo sapien
aacttttcaagacctactaccatgg

SEQ ID NO: 4874133 - DNA, 25 bp, Homo sapien
gagaatagagggtgtccaataggca

SEQ ID NO: 4874134 - DNA, 25 bp, Homo sapien
cactggaggtgtataaggtatgaac

SEQ ID NO: 4874135 - DNA, 25 bp, Homo sapien
actgcaattgttttgaatggtcccc

SEQ ID NO: 4874136 - DNA, 25 bp, Homo sapien
caagcctatgagatatttgatggca

SEQ ID NO: 4874137 - DNA, 25 bp, Homo sapien
tcatgctaggttaagaagtttaccc

SEQ ID NO: 4874138 - DNA, 25 bp, Homo sapien
tgtattaattgctgactgccaagct

SEQ ID NO: 4874139 - DNA, 25 bp, Homo sapien
gcatagggctgctaagacaactaaa

SEQ ID NO: 4874140 - DNA, 25 bp, Homo sapien
tactggtgtaagctgggagccacct

SEQ ID NO: 4874141 - DNA, 25 bp, Homo sapien
agtgtttcatgagctccgttaggtc

SEQ ID NO: 4874142 - DNA, 25 bp, Homo sapien
tagcccgtacaattggattacctgg

SEQ ID NO: 4874143 - DNA, 25 bp, Homo sapien
tcctttgcagcactgaaagcactgg

SEQ ID NO: 4874144 - DNA, 25 bp, Homo sapien
tagcaggtagggttgattaaaacaa

SEQ ID NO: 4874145 - DNA, 25 bp, Homo sapien
tgaactattacttccgactcagaga

SEQ ID NO: 4874146 - DNA, 25 bp, Homo sapien
ctaggtacctagctgtctttgggaa

SEQ ID NO: 4874147 - DNA, 25 bp, Homo sapien
tgtacttagtaagtggttccacaga

SEQ ID NO: 4874148 - DNA, 25 bp, Homo sapien
gaatagtgcagacaatctgatggag

SEQ ID NO: 4874149 - DNA, 25 bp, Homo sapien
gagtgaactactagggaaacaacac

SEQ ID NO: 4874150 - DNA, 25 bp, Homo sapien
tgagatggagtcaaaaacccacgac

SEQ ID NO: 4874151 - DNA, 25 bp, Homo sapien
taatgcagccaacttatgatgtatg

SEQ ID NO: 4874152 - DNA, 25 bp, Homo sapien
gctaaagtagatattgccaacacag

SEQ ID NO: 4874153 - DNA, 25 bp, Homo sapien
tagggaccgtacaaatgtcagagct

SEQ ID NO: 4874154 - DNA, 25 bp, Homo sapien
gctcttgagagccttaaatatggta

SEQ ID NO: 4874155 - DNA, 25 bp, Homo sapien
tattttttgctagtccttgattcag

SEQ ID NO: 4874156 - DNA, 25 bp, Homo sapien
tttttgctagtccttgattcaggag

SEQ ID NO: 4874157 - DNA, 25 bp, Homo sapien
ttttgctagtccttgattcaggaga

SEQ ID NO: 4874158 - DNA, 25 bp, Homo sapien
tgctagtccttgattcaggagaaaa

SEQ ID NO: 4874159 - DNA, 25 bp, Homo sapien
caccattgcctaatacaaagctgaa

SEQ ID NO: 4874160 - DNA, 25 bp, Homo sapien
tgagctcaaactgatgcctccccaa

SEQ ID NO: 4874161 - DNA, 25 bp, Homo sapien
tgaagagatgtactcctgttttctt

SEQ ID NO: 4874162 - DNA, 25 bp, Homo sapien
tgtctatggtatgagtgccactgta

SEQ ID NO: 4874163 - DNA, 25 bp, Homo sapien
agtatattcatcaagttatgaaact

SEQ ID NO: 4874164 - DNA, 25 bp, Homo sapien
ttagtatattcatcaagttatgaaa

SEQ ID NO: 4874165 - DNA, 25 bp, Homo sapien
tagtatattcatcaagttatgaaac

SEQ ID NO: 4874166 - DNA, 25 bp, Homo sapien
ttttagtatattcatcaagttatga

SEQ ID NO: 4874167 - DNA, 25 bp, Homo sapien
cagtgaggcgtaaatgaaccagagc

SEQ ID NO: 4874168 - DNA, 25 bp, Homo sapien
ttcttcttctggagtaccacctcag

SEQ ID NO: 4874169 - DNA, 25 bp, Homo sapien
ccacctcagtgaggcgtaaatgaac

SEQ ID NO: 4874170 - DNA, 25 bp, Homo sapien
tcattgctccattagatttcttctt

SEQ ID NO: 4874171 - DNA, 25 bp, Homo sapien
ttttgacacctttacaatcacggcg

SEQ ID NO: 4874172 - DNA, 25 bp, Homo sapien
gatttctatagtgccaaaggttgga

SEQ ID NO: 4874173 - DNA, 25 bp, Homo sapien
agggaactctgcctatatgtctcag

SEQ ID NO: 4874174 - DNA, 25 bp, Homo sapien
taaagccgagtccttgtatgttggg

SEQ ID NO: 4874175 - DNA, 25 bp, Homo sapien
tagtaagaaactgatcgcaaggcac

SEQ ID NO: 4874176 - DNA, 25 bp, Homo sapien
gacgaagttgctaaatacccatgga

SEQ ID NO: 4874177 - DNA, 25 bp, Homo sapien
tacgcggaaatccaatcctagtcca

SEQ ID NO: 4874178 - DNA, 25 bp, Homo sapien
tcagagtgcctggtcaatgacagat

SEQ ID NO: 4874179 - DNA, 25 bp, Homo sapien
taacttcccacttattccacagagc

SEQ ID NO: 4874180 - DNA, 25 bp, Homo sapien
acttcccacttattccacagagcca

SEQ ID NO: 4874181 - DNA, 25 bp, Homo sapien
cttaacttcccacttattccacaga

SEQ ID NO: 4874182 - DNA, 25 bp, Homo sapien
cttcccacttattccacagagccat

SEQ ID NO: 4874183 - DNA, 25 bp, Homo sapien
agcaccataggtgccaatccacggg

SEQ ID NO: 4874184 - DNA, 25 bp, Homo sapien
cctgagcaccataggtgccaatcca

SEQ ID NO: 4874185 - DNA, 25 bp, Homo sapien
ccataggtgccaatccacgggccat

SEQ ID NO: 4874186 - DNA, 25 bp, Homo sapien
ggtcctgagcaccataggtgccaat

SEQ ID NO: 4874187 - DNA, 25 bp, Homo sapien
ttctgacgggcacagcggcacaggc

SEQ ID NO: 4874188 - DNA, 25 bp, Homo sapien
agcttctgacgggcacagcggcaca

SEQ ID NO: 4874189 - DNA, 25 bp, Homo sapien
cttctgacgggcacagcggcacagg

SEQ ID NO: 4874190 - DNA, 25 bp, Homo sapien
ctgacgggcacagcggcacaggcac

SEQ ID NO: 4874191 - DNA, 25 bp, Homo sapien
gaagaattattgttagtgcacagga

SEQ ID NO: 4874192 - DNA, 25 bp, Homo sapien
aacctttctcacatcgcctacactg

SEQ ID NO: 4874193 - DNA, 25 bp, Homo sapien
tgcactcagcaactcttcgaagaat

SEQ ID NO: 4874194 - DNA, 25 bp, Homo sapien
ttccattcgaactgacccattggcg

SEQ ID NO: 4874195 - DNA, 25 bp, Homo sapien
ttcatcttcccactgggcaactcca

SEQ ID NO: 4874196 - DNA, 25 bp, Homo sapien
aacttcatcttcccactgggcaact

SEQ ID NO: 4874197 - DNA, 25 bp, Homo sapien
tcatcttcccactgggcaactccat

SEQ ID NO: 4874198 - DNA, 25 bp, Homo sapien
cttcccgctgggcaacttcatcttc

SEQ ID NO: 4874199 - DNA, 25 bp, Homo sapien
ttcctgctgggtcataccatcttcc

SEQ ID NO: 4874200 - DNA, 25 bp, Homo sapien
cactgggccactccatcttccggct

SEQ ID NO: 4874201 - DNA, 25 bp, Homo sapien
gtcttcctgctgggcaacccgttct

SEQ ID NO: 4874202 - DNA, 25 bp, Homo sapien
ccgctgagccatgttcccactgggc

SEQ ID NO: 4874203 - DNA, 25 bp, Homo sapien
tagtcatgaaatgctactaagaaga

SEQ ID NO: 4874204 - DNA, 25 bp, Homo sapien
gacttgtgtgatataagctacctca

SEQ ID NO: 4874205 - DNA, 25 bp, Homo sapien
tatggtagttcataataggaggact

SEQ ID NO: 4874206 - DNA, 25 bp, Homo sapien
ctcatttataaccagaagcagaagg

SEQ ID NO: 4874207 - DNA, 25 bp, Homo sapien
gcagatcaccgcgtagacaactggt

SEQ ID NO: 4874208 - DNA, 25 bp, Homo sapien
gaagtaggagatagcgatgaccagc

SEQ ID NO: 4874209 - DNA, 25 bp, Homo sapien
gcaacacgtacagcacggcggagtt

SEQ ID NO: 4874210 - DNA, 25 bp, Homo sapien
tagccacgatgagcttgcacatgag

SEQ ID NO: 4874211 - DNA, 25 bp, Homo sapien
aattgagaaattgattgaagatgcc

SEQ ID NO: 4874212 - DNA, 25 bp, Homo sapien
tatattttctaaactgatggctatg

SEQ ID NO: 4874213 - DNA, 25 bp, Homo sapien
ggttcggccctcatgtctaaggcta

SEQ ID NO: 4874214 - DNA, 25 bp, Homo sapien
atcaattaccagactttgcttaggg

SEQ ID NO: 4874215 - DNA, 25 bp, Homo sapien
taaactgagctcctctacaatggac

SEQ ID NO: 4874216 - DNA, 25 bp, Homo sapien
cagtctacatgctcgtatgaagggc

SEQ ID NO: 4874217 - DNA, 25 bp, Homo sapien
tacaatggactacagagtttctgcg

SEQ ID NO: 4874218 - DNA, 25 bp, Homo sapien
ggaagcctgagatatacagtctaca

SEQ ID NO: 4874219 - DNA, 25 bp, Homo sapien
tcttattcttggtagggcggctcat

SEQ ID NO: 4874220 - DNA, 25 bp, Homo sapien
tcttggaagctttctgtaagtcctt

SEQ ID NO: 4874221 - DNA, 25 bp, Homo sapien
ttggccctgtttgggcatatctctt

SEQ ID NO: 4874222 - DNA, 25 bp, Homo sapien
ttcttattcttggtagggcggctca

SEQ ID NO: 4874223 - DNA, 25 bp, Homo sapien
ctctgtcaccccacatttagtgctg

SEQ ID NO: 4874224 - DNA, 25 bp, Homo sapien
tgctgaaggctatctggacctgctt

SEQ ID NO: 4874225 - DNA, 25 bp, Homo sapien
cccacatttagtgctgaaggctatc

SEQ ID NO: 4874226 - DNA, 25 bp, Homo sapien
tttagtgctgaaggctatctggacc

SEQ ID NO: 4874227 - DNA, 25 bp, Homo sapien
gtggctgtgcctgcaacaccttcaa

SEQ ID NO: 4874228 - DNA, 25 bp, Homo sapien
tgtgcctgcaacaccttcaagggtg

SEQ ID NO: 4874229 - DNA, 25 bp, Homo sapien
cgtcttcttggttccagccactggg

SEQ ID NO: 4874230 - DNA, 25 bp, Homo sapien
ggtgctcagtggctgtgcctgcaac

SEQ ID NO: 4874231 - DNA, 25 bp, Homo sapien
ctccccattacagggcctcctagac

SEQ ID NO: 4874232 - DNA, 25 bp, Homo sapien
tcctgctccccattacagggcctcc

SEQ ID NO: 4874233 - DNA, 25 bp, Homo sapien
gctccccattacagggcctcctaga

SEQ ID NO: 4874234 - DNA, 25 bp, Homo sapien
ctgctccccattacagggcctccta

SEQ ID NO: 4874235 - DNA, 25 bp, Homo sapien
tttccctacagccatctgagctact

SEQ ID NO: 4874236 - DNA, 25 bp, Homo sapien
cctacagccatctgagctactgtgt

SEQ ID NO: 4874237 - DNA, 25 bp, Homo sapien
ccatctgagctactgtgtttgacaa

SEQ ID NO: 4874238 - DNA, 25 bp, Homo sapien
ctgtgtttgacaacagctgcaccat

SEQ ID NO: 4874239 - DNA, 25 bp, Homo sapien
gaatgtaacctatagggtttgagcg

SEQ ID NO: 4874240 - DNA, 25 bp, Homo sapien
ggtcgagtctaccttatccatctca

SEQ ID NO: 4874241 - DNA, 25 bp, Homo sapien
tggaaactgtggttgtaaccccaga

SEQ ID NO: 4874242 - DNA, 25 bp, Homo sapien
ggtttgagcgatggcctttcagcca

SEQ ID NO: 4874243 - DNA, 25 bp, Homo sapien
aggatgttagcagaaaccagagtcc

SEQ ID NO: 4874244 - DNA, 25 bp, Homo sapien
tcatagctcagtgcccaggatgtta

SEQ ID NO: 4874245 - DNA, 25 bp, Homo sapien
gtgcccaggatgttagcagaaacca

SEQ ID NO: 4874246 - DNA, 25 bp, Homo sapien
cagtgcccaggatgttagcagaaac

SEQ ID NO: 4874247 - DNA, 25 bp, Homo sapien
tacaagcaagaagagagtagagacc

SEQ ID NO: 4874248 - DNA, 25 bp, Homo sapien
gcaagaagagagtagagaccaatat

SEQ ID NO: 4874249 - DNA, 25 bp, Homo sapien
atcctttagagacaagcaaaggttg

SEQ ID NO: 4874250 - DNA, 25 bp, Homo sapien
cctttagagacaagcaaaggttgag

SEQ ID NO: 4874251 - DNA, 25 bp, Homo sapien
gcttgattaatgtgacacttgattt

SEQ ID NO: 4874252 - DNA, 25 bp, Homo sapien
ttctgagccacaattaatacagcta

SEQ ID NO: 4874253 - DNA, 25 bp, Homo sapien
gagccacaattaatacagctatcat

SEQ ID NO: 4874254 - DNA, 25 bp, Homo sapien
agcttgattaatgtgacacttgatt

SEQ ID NO: 4874255 - DNA, 25 bp, Homo sapien
ctgctggatctgtctggtatctgga

SEQ ID NO: 4874256 - DNA, 25 bp, Homo sapien
tcactgctggatctgtctggtatct

SEQ ID NO: 4874257 - DNA, 25 bp, Homo sapien
taccctggagattccctcatccttc

SEQ ID NO: 4874258 - DNA, 25 bp, Homo sapien
tctctaccctggagattccctcatc

SEQ ID NO: 4874259 - DNA, 25 bp, Homo sapien
ctgttcatgttgcatgcttatttct

SEQ ID NO: 4874260 - DNA, 25 bp, Homo sapien
gctgttcatgttgcatgcttatttc

SEQ ID NO: 4874261 - DNA, 25 bp, Homo sapien
tgctgatgtaaccaaaggtcaccaa

SEQ ID NO: 4874262 - DNA, 25 bp, Homo sapien
cctgctgtggccgtcatctagatca

SEQ ID NO: 4874263 - DNA, 25 bp, Homo sapien
tcatctagatcatggctgctgctcc

SEQ ID NO: 4874264 - DNA, 25 bp, Homo sapien
gtcaccaaggaccaagtctgaagct

SEQ ID NO: 4874265 - DNA, 25 bp, Homo sapien
tgctacaaataaacccagccttggg

SEQ ID NO: 4874266 - DNA, 25 bp, Homo sapien
gcaggtgcagttctagtggctctct

SEQ ID NO: 4874267 - DNA, 25 bp, Homo sapien
tctccaagcaatgtttaagggtccc

SEQ ID NO: 4874268 - DNA, 25 bp, Homo sapien
gattggaagacacaagacgagccag

SEQ ID NO: 4874269 - DNA, 25 bp, Homo sapien
gctatctggacttgatgatacacat

SEQ ID NO: 4874270 - DNA, 25 bp, Homo sapien
tgcagtgattgagaaccataattaa

SEQ ID NO: 4874271 - DNA, 25 bp, Homo sapien
cacatctatgcagtgattgagaacc

SEQ ID NO: 4874272 - DNA, 25 bp, Homo sapien
ctctgtgatctatagctatctggac

SEQ ID NO: 4874273 - DNA, 25 bp, Homo sapien
tggcaaatgattcaacacaggaata

SEQ ID NO: 4874274 - DNA, 25 bp, Homo sapien
ttagacaggattcaaccacgaaaga

SEQ ID NO: 4874275 - DNA, 25 bp, Homo sapien
caatggccacgcttacaaaatattc

SEQ ID NO: 4874276 - DNA, 25 bp, Homo sapien
ccattaaagtgaggacatgcactgc

SEQ ID NO: 4874277 - DNA, 25 bp, Homo sapien
ggatgcgtcccactggtcaggcact

SEQ ID NO: 4874278 - DNA, 25 bp, Homo sapien
tcatttcacatttagtggatgcgtc

SEQ ID NO: 4874279 - DNA, 25 bp, Homo sapien
gaagggtacataggtatttcagtca

SEQ ID NO: 4874280 - DNA, 25 bp, Homo sapien
caccaaggaagggtacataggtatt

SEQ ID NO: 4874281 - DNA, 25 bp, Homo sapien
gctgggcacggtcattttgccaaca

SEQ ID NO: 4874282 - DNA, 25 bp, Homo sapien
cgcgtgggctcgagactggcccaca

SEQ ID NO: 4874283 - DNA, 25 bp, Homo sapien
cagctgaccaatgatgtggacgcgt

SEQ ID NO: 4874284 - DNA, 25 bp, Homo sapien
ccacagctaaaggtgggagaggctg

SEQ ID NO: 4874285 - DNA, 25 bp, Homo sapien
catggagactgttgtgtaaaagggt

SEQ ID NO: 4874286 - DNA, 25 bp, Homo sapien
agggtctgtggcttaagaccaccaa

SEQ ID NO: 4874287 - DNA, 25 bp, Homo sapien
ccagctggtacaatcccacccagcc

SEQ ID NO: 4874288 - DNA, 25 bp, Homo sapien
actgtgcactttgccagcatctttg

SEQ ID NO: 4874289 - DNA, 25 bp, Homo sapien
ttcttcctctcagatttactgtggc

SEQ ID NO: 4874290 - DNA, 25 bp, Homo sapien
ccttcttcctctcagatttactgtg

SEQ ID NO: 4874291 - DNA, 25 bp, Homo sapien
ttcctctcagatttactgtggccat

SEQ ID NO: 4874292 - DNA, 25 bp, Homo sapien
tcttcctctcagatttactgtggcc

SEQ ID NO: 4874293 - DNA, 25 bp, Homo sapien
atttcagaggtaatggctttttctg

SEQ ID NO: 4874294 - DNA, 25 bp, Homo sapien
attgttcctaaatgtgtgctgaatg

SEQ ID NO: 4874295 - DNA, 25 bp, Homo sapien
gatgagacatattacgtgcttagaa

SEQ ID NO: 4874296 - DNA, 25 bp, Homo sapien
gataagtcattctctgagttcagac

SEQ ID NO: 4874297 - DNA, 25 bp, Homo sapien
caagaggagcaagagctgttctgtt

SEQ ID NO: 4874298 - DNA, 25 bp, Homo sapien
taatcaacgtatggattttcccaac

SEQ ID NO: 4874299 - DNA, 25 bp, Homo sapien
gagctctcctcttactgagtttggt

SEQ ID NO: 4874300 - DNA, 25 bp, Homo sapien
caagggcagctctagtgttgtaaga

SEQ ID NO: 4874301 - DNA, 25 bp, Homo sapien
cttactgagtttggtgtcttgggcc

SEQ ID NO: 4874302 - DNA, 25 bp, Homo sapien
tgtgaagaaggactgcattttccct

SEQ ID NO: 4874303 - DNA, 25 bp, Homo sapien
tgccactctgcatgggtagcctgca

SEQ ID NO: 4874304 - DNA, 25 bp, Homo sapien
ggcctggctcctatgtgagtatgac

SEQ ID NO: 4874305 - DNA, 25 bp, Homo sapien
tcctgatcgcacgtgggtgcctgct

SEQ ID NO: 4874306 - DNA, 25 bp, Homo sapien
gcctttgcgctttgcaccaggagag

SEQ ID NO: 4874307 - DNA, 25 bp, Homo sapien
gagacttttgcttccctacagttca

SEQ ID NO: 4874308 - DNA, 25 bp, Homo sapien
aatctctcacgaaccttcctctggg

SEQ ID NO: 4874309 - DNA, 25 bp, Homo sapien
cagcagtattgaaacctccccaaag

SEQ ID NO: 4874310 - DNA, 25 bp, Homo sapien
tacagacctgtagggttcaatctct

SEQ ID NO: 4874311 - DNA, 25 bp, Homo sapien
cctggaatgctgcctcgtatcttct

SEQ ID NO: 4874312 - DNA, 25 bp, Homo sapien
ctggaatgctgcctcgtatcttctg

SEQ ID NO: 4874313 - DNA, 25 bp, Homo sapien
ggaatgctgcctcgtatcttctgat

SEQ ID NO: 4874314 - DNA, 25 bp, Homo sapien
gcttggtgggcaactcgctggtcat

SEQ ID NO: 4874315 - DNA, 25 bp, Homo sapien
ggcaaagtttgcctctccgcgtcca

SEQ ID NO: 4874316 - DNA, 25 bp, Homo sapien
tgttcgtgatcatccggtgagcgcg

SEQ ID NO: 4874317 - DNA, 25 bp, Homo sapien
ggaaaggcagcgagaagtccgttct

SEQ ID NO: 4874318 - DNA, 25 bp, Homo sapien
gagaaggagcgagcgctcttcgccc

SEQ ID NO: 4874319 - DNA, 25 bp, Homo sapien
ggagcgagcgctcttcgcccctctc

SEQ ID NO: 4874320 - DNA, 25 bp, Homo sapien
gcgagcgctcttcgcccctctctgg

SEQ ID NO: 4874321 - DNA, 25 bp, Homo sapien
ggagaaggagcgagcgctcttcgcc

SEQ ID NO: 4874322 - DNA, 25 bp, Homo sapien
ttctaggtagagctccgtgctggga

SEQ ID NO: 4874323 - DNA, 25 bp, Homo sapien
ccataggtaagctttgggctttcga

SEQ ID NO: 4874324 - DNA, 25 bp, Homo sapien
tcgcctgtctctgggaaccataggt

SEQ ID NO: 4874325 - DNA, 25 bp, Homo sapien
tttgggctttcgaggtgcagttcta

SEQ ID NO: 4874326 - DNA, 25 bp, Homo sapien
gggtgacatcaggatcatatttcat

SEQ ID NO: 4874327 - DNA, 25 bp, Homo sapien
ctacttgcaggaagttctcatggtg

SEQ ID NO: 4874328 - DNA, 25 bp, Homo sapien
gaagttctcatggtgtagggtgaca

SEQ ID NO: 4874329 - DNA, 25 bp, Homo sapien
gtgtagggtgacatcaggatcatat

SEQ ID NO: 4874330 - DNA, 25 bp, Homo sapien
caaaatagaatctgttgatgtttcc

SEQ ID NO: 4874331 - DNA, 25 bp, Homo sapien
ctggctgctgaatcagtaggactag

SEQ ID NO: 4874332 - DNA, 25 bp, Homo sapien
taggactaggtcttctatccaggga

SEQ ID NO: 4874333 - DNA, 25 bp, Homo sapien
gaatcagtaggactaggtcttctat

SEQ ID NO: 4874334 - DNA, 25 bp, Homo sapien
cagaattgtaataagaaaatacggc

SEQ ID NO: 4874335 - DNA, 25 bp, Homo sapien
aatacggcctttatcttcttcctgg

SEQ ID NO: 4874336 - DNA, 25 bp, Homo sapien
ctgcagaattgtaataagaaaatac

SEQ ID NO: 4874337 - DNA, 25 bp, Homo sapien
cctggggagatactggagatattct

SEQ ID NO: 4874338 - DNA, 25 bp, Homo sapien
tctgtgtccatcagaatctcttttc

SEQ ID NO: 4874339 - DNA, 25 bp, Homo sapien
ttctacttctggatcgcacatgagg

SEQ ID NO: 4874340 - DNA, 25 bp, Homo sapien
tctggatcgcacatgaggctggtcc

SEQ ID NO: 4874341 - DNA, 25 bp, Homo sapien
tatgatgtagcaggagttctgtgtc

SEQ ID NO: 4874342 - DNA, 25 bp, Homo sapien
tgtgaaactttgtccagtgttttgg

SEQ ID NO: 4874343 - DNA, 25 bp, Homo sapien
gatcatgtgaaactttgtccagtgt

SEQ ID NO: 4874344 - DNA, 25 bp, Homo sapien
aaagatcatgtgaaactttgtccag

SEQ ID NO: 4874345 - DNA, 25 bp, Homo sapien
tgaaactttgtccagtgttttggaa

SEQ ID NO: 4874346 - DNA, 25 bp, Homo sapien
agcttgcctttgtcatcttctacca

SEQ ID NO: 4874347 - DNA, 25 bp, Homo sapien
caatgctaaacttggcctgtgtggg

SEQ ID NO: 4874348 - DNA, 25 bp, Homo sapien
aagaatcccatgatgttaggataaa

SEQ ID NO: 4874349 - DNA, 25 bp, Homo sapien
aatttagcctcgcatagagcctgag

SEQ ID NO: 4874350 - DNA, 25 bp, Homo sapien
cttcagataaaggtgtccccagtga

SEQ ID NO: 4874351 - DNA, 25 bp, Homo sapien
aggacagatgaagcacgcaactgct

SEQ ID NO: 4874352 - DNA, 25 bp, Homo sapien
tgctgccagcgtccggagggtattt

SEQ ID NO: 4874353 - DNA, 25 bp, Homo sapien
gcctgcctcggtagaatctgaggct

SEQ ID NO: 4874354 - DNA, 25 bp, Homo sapien
tgaagcacgcaactgctgccagcgt

SEQ ID NO: 4874355 - DNA, 25 bp, Homo sapien
gctgtctcaaatccccaactgcaga

SEQ ID NO: 4874356 - DNA, 25 bp, Homo sapien
tccgtaaatgctgtctcaaatcccc

SEQ ID NO: 4874357 - DNA, 25 bp, Homo sapien
tttatttccgtaaatgctgtctcaa

SEQ ID NO: 4874358 - DNA, 25 bp, Homo sapien
aactgcagaatcctaattgcaccat

SEQ ID NO: 4874359 - DNA, 25 bp, Homo sapien
cagggcctgtgttacagaaggtgcc

SEQ ID NO: 4874360 - DNA, 25 bp, Homo sapien
tcacagtgcgaggttcatcagaagg

SEQ ID NO: 4874361 - DNA, 25 bp, Homo sapien
agtcagggcctgtgttacagaaggt

SEQ ID NO: 4874362 - DNA, 25 bp, Homo sapien
acagtgcgaggttcatcagaaggaa

SEQ ID NO: 4874363 - DNA, 25 bp, Homo sapien
cttgtcctctgggattctcccctgt

SEQ ID NO: 4874364 - DNA, 25 bp, Homo sapien
ctttattgtttgcagttaatggtgg

SEQ ID NO: 4874365 - DNA, 25 bp, Homo sapien
tttattgtttgcagttaatggtgga

SEQ ID NO: 4874366 - DNA, 25 bp, Homo sapien
ggatcttgtcctctgggattctccc

SEQ ID NO: 4874367 - DNA, 25 bp, Homo sapien
tgagatctcccagggttccgcagga

SEQ ID NO: 4874368 - DNA, 25 bp, Homo sapien
agtggcttccttagtccaactggca

SEQ ID NO: 4874369 - DNA, 25 bp, Homo sapien
tgagtgaccaataaccccagcattg

SEQ ID NO: 4874370 - DNA, 25 bp, Homo sapien
agacagtgacttgccctatcagaag

SEQ ID NO: 4874371 - DNA, 25 bp, Homo sapien
tgtgtttgggtccatgcctgctagc

SEQ ID NO: 4874372 - DNA, 25 bp, Homo sapien
tccttttggcttgtctcgaagttcc

SEQ ID NO: 4874373 - DNA, 25 bp, Homo sapien
ctagctggcacgaggagcacgttgt

SEQ ID NO: 4874374 - DNA, 25 bp, Homo sapien
tggggcacacgtatgcatggagcca

SEQ ID NO: 4874375 - DNA, 25 bp, Homo sapien
aatgcagcttaattcctcttatgtc

SEQ ID NO: 4874376 - DNA, 25 bp, Homo sapien
atgcagcttaattcctcttatgtcc

SEQ ID NO: 4874377 - DNA, 25 bp, Homo sapien
ctaatgcagcttaattcctcttatg

SEQ ID NO: 4874378 - DNA, 25 bp, Homo sapien
taatgcagcttaattcctcttatgt

SEQ ID NO: 4874379 - DNA, 25 bp, Homo sapien
tactggtgtggtacatttgtgggca

SEQ ID NO: 4874380 - DNA, 25 bp, Homo sapien
gacaaagactatctattcccagggt

SEQ ID NO: 4874381 - DNA, 25 bp, Homo sapien
ggtctcctggtaccctgaatcacca

SEQ ID NO: 4874382 - DNA, 25 bp, Homo sapien
tcaccacaatcagacaaagactatc

SEQ ID NO: 4874383 - DNA, 25 bp, Homo sapien
cttgcttgggcatttccagtccttc

SEQ ID NO: 4874384 - DNA, 25 bp, Homo sapien
ctgtcttgcttgggcatttccagtc

SEQ ID NO: 4874385 - DNA, 25 bp, Homo sapien
gtcttgcttgggcatttccagtcct

SEQ ID NO: 4874386 - DNA, 25 bp, Homo sapien
tcttgcttgggcatttccagtcctt

SEQ ID NO: 4874387 - DNA, 25 bp, Homo sapien
aaattagggttgatgtttctgtggt

SEQ ID NO: 4874388 - DNA, 25 bp, Homo sapien
ttagaaattagggttgatgtttctg

SEQ ID NO: 4874389 - DNA, 25 bp, Homo sapien
gttgaagaggaggctctcttcatgt

SEQ ID NO: 4874390 - DNA, 25 bp, Homo sapien
ttggaatggaaagtatgtttctgtc

SEQ ID NO: 4874391 - DNA, 25 bp, Homo sapien
tcagcaggccctgccaagagtctat

SEQ ID NO: 4874392 - DNA, 25 bp, Homo sapien
cagcaggccctgccaagagtctatt

SEQ ID NO: 4874393 - DNA, 25 bp, Homo sapien
gacaaatgaagtccggaaagcagcc

SEQ ID NO: 4874394 - DNA, 25 bp, Homo sapien
gggctgcaggcttgccaaaggaccc

SEQ ID NO: 4874395 - DNA, 25 bp, Homo sapien
tccaggtacaagaggcacatcatca

SEQ ID NO: 4874396 - DNA, 25 bp, Homo sapien
gaaagcagcccacggtcttgctgag

SEQ ID NO: 4874397 - DNA, 25 bp, Homo sapien
cacagaaccatgatgtgttaggaag

SEQ ID NO: 4874398 - DNA, 25 bp, Homo sapien
agaaccatgatgtgttaggaagatg

SEQ ID NO: 4874399 - DNA, 25 bp, Homo sapien
tggcagaagactgtggaagatgtgc

SEQ ID NO: 4874400 - DNA, 25 bp, Homo sapien
gatggcagaagactgtggaagatgt

SEQ ID NO: 4874401 - DNA, 25 bp, Homo sapien
gaagctatccggatgtctctggccc

SEQ ID NO: 4874402 - DNA, 25 bp, Homo sapien
gagcgaacttgtctgaaggcttgaa

SEQ ID NO: 4874403 - DNA, 25 bp, Homo sapien
tctgctgcagattctgtggcaatgc

SEQ ID NO: 4874404 - DNA, 25 bp, Homo sapien
catgaaatcgatgtagcttgctcta

SEQ ID NO: 4874405 - DNA, 25 bp, Homo sapien
cattattggcattaactgtactgtc

SEQ ID NO: 4874406 - DNA, 25 bp, Homo sapien
cttcattattggcattaactgtact

SEQ ID NO: 4874407 - DNA, 25 bp, Homo sapien
tattggcattaactgtactgtcacg

SEQ ID NO: 4874408 - DNA, 25 bp, Homo sapien
ttggcattaactgtactgtcacggg

SEQ ID NO: 4874409 - DNA, 25 bp, Homo sapien
tgccatctcgaaggtccttggcgtg

SEQ ID NO: 4874410 - DNA, 25 bp, Homo sapien
cctctattatgttgggcactgaaga

SEQ ID NO: 4874411 - DNA, 25 bp, Homo sapien
tggccctgtaggaacgggcgtccac

SEQ ID NO: 4874412 - DNA, 25 bp, Homo sapien
ggtgtgttcctgtacgcctcacact

SEQ ID NO: 4874413 - DNA, 25 bp, Homo sapien
cacacttgcctcagtggggtttcca

SEQ ID NO: 4874414 - DNA, 25 bp, Homo sapien
tttccaccagttgggtctttgcaca

SEQ ID NO: 4874415 - DNA, 25 bp, Homo sapien
ccctgaccgtatgggggtgctccac

SEQ ID NO: 4874416 - DNA, 25 bp, Homo sapien
tctttgcacacgtggctacttcagc

SEQ ID NO: 4874417 - DNA, 25 bp, Homo sapien
tcagagttctcggcattctctctgg

SEQ ID NO: 4874418 - DNA, 25 bp, Homo sapien
aaaggaaacggaccacgccctgctg

SEQ ID NO: 4874419 - DNA, 25 bp, Homo sapien
aaggaaacggaccacgccctgctga

SEQ ID NO: 4874420 - DNA, 25 bp, Homo sapien
cagagttctcggcattctctctgga

SEQ ID NO: 4874421 - DNA, 25 bp, Homo sapien
cctgtaaggacatggggatctgggc

SEQ ID NO: 4874422 - DNA, 25 bp, Homo sapien
tcctgtaaggacatggggatctggg

SEQ ID NO: 4874423 - DNA, 25 bp, Homo sapien
ttcctgtaaggacatggggatctgg

SEQ ID NO: 4874424 - DNA, 25 bp, Homo sapien
gttcctgtaaggacatggggatctg

SEQ ID NO: 4874425 - DNA, 25 bp, Homo sapien
gacaggccctcagcgaggcacgcat

SEQ ID NO: 4874426 - DNA, 25 bp, Homo sapien
ggagctcctggagctcagacaggcc

SEQ ID NO: 4874427 - DNA, 25 bp, Homo sapien
ggagctcagacaggccctcagcgag

SEQ ID NO: 4874428 - DNA, 25 bp, Homo sapien
tcagacaggccctcagcgaggcacg

SEQ ID NO: 4874429 - DNA, 25 bp, Homo sapien
tgtgagcattttgatagaccaagta

SEQ ID NO: 4874430 - DNA, 25 bp, Homo sapien
actttggagcacttcacaagccgag

SEQ ID NO: 4874431 - DNA, 25 bp, Homo sapien
tcagcaggattgatgactttggagc

SEQ ID NO: 4874432 - DNA, 25 bp, Homo sapien
tcacaagccgaggtgcaaacatttc

SEQ ID NO: 4874433 - DNA, 25 bp, Homo sapien
gatgaagtaccagccaatttgaaat

SEQ ID NO: 4874434 - DNA, 25 bp, Homo sapien
tcttgttcatccttagcaaattgcc

SEQ ID NO: 4874435 - DNA, 25 bp, Homo sapien
caggcttctttgagggcagtgctaa

SEQ ID NO: 4874436 - DNA, 25 bp, Homo sapien
cctagatgattcgaaattagttgct

SEQ ID NO: 4874437 - DNA, 25 bp, Homo sapien
catccttgagtcatgccaagaactg

SEQ ID NO: 4874438 - DNA, 25 bp, Homo sapien
tgacttatgtcaatacatccttgag

SEQ ID NO: 4874439 - DNA, 25 bp, Homo sapien
tgatcaaggaccacggaccagtgtc

SEQ ID NO: 4874440 - DNA, 25 bp, Homo sapien
gcttttagggtgaatgactggttct

SEQ ID NO: 4874441 - DNA, 25 bp, Homo sapien
catgtggtctacagcacaaggttgc

SEQ ID NO: 4874442 - DNA, 25 bp, Homo sapien
tggcctccagaaccgcaggaaagta

SEQ ID NO: 4874443 - DNA, 25 bp, Homo sapien
gagacactaggtatgtgagcacaca

SEQ ID NO: 4874444 - DNA, 25 bp, Homo sapien
taatgggaaaccttgctgggatcat

SEQ ID NO: 4874445 - DNA, 25 bp, Homo sapien
acaaggatggaaagcatcatttctg

SEQ ID NO: 4874446 - DNA, 25 bp, Homo sapien
gctgcatacactgaagggccacgaa

SEQ ID NO: 4874447 - DNA, 25 bp, Homo sapien
gccacgaagtacagtcatctggact

SEQ ID NO: 4874448 - DNA, 25 bp, Homo sapien
aagtacagtcatctggacttggcac

SEQ ID NO: 4874449 - DNA, 25 bp, Homo sapien
cactgaagggccacgaagtacagtc

SEQ ID NO: 4874450 - DNA, 25 bp, Homo sapien
cttccccaccctctcccgcaggcct

SEQ ID NO: 4874451 - DNA, 25 bp, Homo sapien
ccttgatatctataataccacctct

SEQ ID NO: 4874452 - DNA, 25 bp, Homo sapien
accccttcccttgatatctataata

SEQ ID NO: 4874453 - DNA, 25 bp, Homo sapien
ccttcccttgatatctataatacca

SEQ ID NO: 4874454 - DNA, 25 bp, Homo sapien
atctataataccacctctcttacag

SEQ ID NO: 4874455 - DNA, 25 bp, Homo sapien
caacactgcagactcttcgttttgc

SEQ ID NO: 4874456 - DNA, 25 bp, Homo sapien
tgggcaacactgcagactcttcgtt

SEQ ID NO: 4874457 - DNA, 25 bp, Homo sapien
cactgcagactcttcgttttgccat

SEQ ID NO: 4874458 - DNA, 25 bp, Homo sapien
ggcaacactgcagactcttcgtttt

SEQ ID NO: 4874459 - DNA, 25 bp, Homo sapien
ggatggcgcttcagttgaacccagg

SEQ ID NO: 4874460 - DNA, 25 bp, Homo sapien
tttctgatcatgttccttcaggcgt

SEQ ID NO: 4874461 - DNA, 25 bp, Homo sapien
ctgatcatgttccttcaggcgtttc

SEQ ID NO: 4874462 - DNA, 25 bp, Homo sapien
acagtgcgtgtctctgggtggagca

SEQ ID NO: 4874463 - DNA, 25 bp, Homo sapien
ccatagggaatagcttcctcagctc

SEQ ID NO: 4874464 - DNA, 25 bp, Homo sapien
tccatagggaatagcttcctcagct

SEQ ID NO: 4874465 - DNA, 25 bp, Homo sapien
catagggaatagcttcctcagctca

SEQ ID NO: 4874466 - DNA, 25 bp, Homo sapien
atccatagggaatagcttcctcagc

SEQ ID NO: 4874467 - DNA, 25 bp, Homo sapien
tggaagtagactctctgtatctgtg

SEQ ID NO: 4874468 - DNA, 25 bp, Homo sapien
gaagactttatgtttgtgctgcagg

SEQ ID NO: 4874469 - DNA, 25 bp, Homo sapien
cagctaaatttgatagtggaatggc

SEQ ID NO: 4874470 - DNA, 25 bp, Homo sapien
aatggcactgcttccataagggaaa

SEQ ID NO: 4874471 - DNA, 25 bp, Homo sapien
tcactttgccacagtcgctgccgta

SEQ ID NO: 4874472 - DNA, 25 bp, Homo sapien
gtataaccgcgacccaactctggtc

SEQ ID NO: 4874473 - DNA, 25 bp, Homo sapien
acagtcgctgccgtataaccgcgac

SEQ ID NO: 4874474 - DNA, 25 bp, Homo sapien
ctcctcgagagaatgcggggctggc

SEQ ID NO: 4874475 - DNA, 25 bp, Homo sapien
ttgttctaaggagccggtaggcacc

SEQ ID NO: 4874476 - DNA, 25 bp, Homo sapien
cggtaggcaccatttccgttttgct

SEQ ID NO: 4874477 - DNA, 25 bp, Homo sapien
gttctaaggagccggtaggcaccat

SEQ ID NO: 4874478 - DNA, 25 bp, Homo sapien
aggagccggtaggcaccatttccgt

SEQ ID NO: 4874479 - DNA, 25 bp, Homo sapien
ttcttttcaaaatgttgaacttgtg

SEQ ID NO: 4874480 - DNA, 25 bp, Homo sapien
cattttgaaacccttactattgcct

SEQ ID NO: 4874481 - DNA, 25 bp, Homo sapien
gaaactttgaaatttctctgccatt

SEQ ID NO: 4874482 - DNA, 25 bp, Homo sapien
tgccattttgaaacccttactattg

SEQ ID NO: 4874483 - DNA, 25 bp, Homo sapien
caagccattgcctctacaactcaat

SEQ ID NO: 4874484 - DNA, 25 bp, Homo sapien
agtaaggacaattttcttgatggcc

SEQ ID NO: 4874485 - DNA, 25 bp, Homo sapien
ccattgcctctacaactcaatggtt

SEQ ID NO: 4874486 - DNA, 25 bp, Homo sapien
aagccattgcctctacaactcaatg

SEQ ID NO: 4874487 - DNA, 25 bp, Homo sapien
tgatatcatgtagagcatgttgaca

SEQ ID NO: 4874488 - DNA, 25 bp, Homo sapien
ttgatatcatgtagagcatgttgac

SEQ ID NO: 4874489 - DNA, 25 bp, Homo sapien
gatatcatgtagagcatgttgacac

SEQ ID NO: 4874490 - DNA, 25 bp, Homo sapien
tgagcaatgtaaacactgttcagct

SEQ ID NO: 4874491 - DNA, 25 bp, Homo sapien
ctgagcaatgtaaacactgttcagc

SEQ ID NO: 4874492 - DNA, 25 bp, Homo sapien
agccccagtatcagctgatacatga

SEQ ID NO: 4874493 - DNA, 25 bp, Homo sapien
cacattagccaagtctgtctccatg

SEQ ID NO: 4874494 - DNA, 25 bp, Homo sapien
tggcacactcttccagtaaagggcc

SEQ ID NO: 4874495 - DNA, 25 bp, Homo sapien
agtgaatatacttgagccccagtat

SEQ ID NO: 4874496 - DNA, 25 bp, Homo sapien
taatgaaaagaatagctggtttggg

SEQ ID NO: 4874497 - DNA, 25 bp, Homo sapien
tcttcagcaccaagttttcagtatt

SEQ ID NO: 4874498 - DNA, 25 bp, Homo sapien
cagcaccaagttttcagtattaatg

SEQ ID NO: 4874499 - DNA, 25 bp, Homo sapien
gaaaagaatagctggtttgggatct

SEQ ID NO: 4874500 - DNA, 25 bp, Homo sapien
gtttggctcagtcttgtcttttcta

SEQ ID NO: 4874501 - DNA, 25 bp, Homo sapien
tagctcatccattggaaaagaacat

SEQ ID NO: 4874502 - DNA, 25 bp, Homo sapien
ctcatccattggaaaagaacatatg

SEQ ID NO: 4874503 - DNA, 25 bp, Homo sapien
tccattggaaaagaacatatgctca

SEQ ID NO: 4874504 - DNA, 25 bp, Homo sapien
cttgaaattagctcatccattggaa

SEQ ID NO: 4874505 - DNA, 25 bp, Homo sapien
atccataagtaaaacatcatcaact

SEQ ID NO: 4874506 - DNA, 25 bp, Homo sapien
tttatcttcaacatgaaagggatga

SEQ ID NO: 4874507 - DNA, 25 bp, Homo sapien
actttatcttcaacatgaaagggat

SEQ ID NO: 4874508 - DNA, 25 bp, Homo sapien
gtaaaacatcatcaactttatcttc

SEQ ID NO: 4874509 - DNA, 25 bp, Homo sapien
tgttctgaaaactgacaattacggt

SEQ ID NO: 4874510 - DNA, 25 bp, Homo sapien
catgttctgaaaactgacaattacg

SEQ ID NO: 4874511 - DNA, 25 bp, Homo sapien
ttctgaaaactgacaattacggtac

SEQ ID NO: 4874512 - DNA, 25 bp, Homo sapien
atcatgttctgaaaactgacaatta

SEQ ID NO: 4874513 - DNA, 25 bp, Homo sapien
tgacctcattttgtagttacaaaca

SEQ ID NO: 4874514 - DNA, 25 bp, Homo sapien
ttcatgatgatctggctcacaaggc

SEQ ID NO: 4874515 - DNA, 25 bp, Homo sapien
tgatgatctggctcacaaggctcag

SEQ ID NO: 4874516 - DNA, 25 bp, Homo sapien
cattttgtagttacaaacatggcta

SEQ ID NO: 4874517 - DNA, 25 bp, Homo sapien
tgtcccaagatgattggtacgaggc

SEQ ID NO: 4874518 - DNA, 25 bp, Homo sapien
tgattggtacgaggcttctaattga

SEQ ID NO: 4874519 - DNA, 25 bp, Homo sapien
caagatgattggtacgaggcttcta

SEQ ID NO: 4874520 - DNA, 25 bp, Homo sapien
tcccaagatgattggtacgaggctt

SEQ ID NO: 4874521 - DNA, 25 bp, Homo sapien
actcgagctgcttgttagagaggaa

SEQ ID NO: 4874522 - DNA, 25 bp, Homo sapien
tatggactcgagctgcttgttagag

SEQ ID NO: 4874523 - DNA, 25 bp, Homo sapien
ctgcgggatgcctatggactcgagc

SEQ ID NO: 4874524 - DNA, 25 bp, Homo sapien
gagaggaactccccactgttgttca

SEQ ID NO: 4874525 - DNA, 25 bp, Homo sapien
gaagatttcacagcggaaggtgttc

SEQ ID NO: 4874526 - DNA, 25 bp, Homo sapien
tagctcagatgtttcagaatgctgc

SEQ ID NO: 4874527 - DNA, 25 bp, Homo sapien
ttagctcagatgtttcagaatgctg

SEQ ID NO: 4874528 - DNA, 25 bp, Homo sapien
atttcacagcggaaggtgttcctgt

SEQ ID NO: 4874529 - DNA, 25 bp, Homo sapien
agctgacattatatactaagctagg

SEQ ID NO: 4874530 - DNA, 25 bp, Homo sapien
ctgatacgctaaaatcaataagatg

SEQ ID NO: 4874531 - DNA, 25 bp, Homo sapien
aatatactgatacgctaaaatcaat

SEQ ID NO: 4874532 - DNA, 25 bp, Homo sapien
ttatatactaagctaggtaggcaac

SEQ ID NO: 4874533 - DNA, 25 bp, Homo sapien
gatgaattagcccttgcatttctga

SEQ ID NO: 4874534 - DNA, 25 bp, Homo sapien
gacagggttataatgtgcattgatt

SEQ ID NO: 4874535 - DNA, 25 bp, Homo sapien
atgaattagcccttgcatttctgag

SEQ ID NO: 4874536 - DNA, 25 bp, Homo sapien
gtgcttttagacagggttataatgt

SEQ ID NO: 4874537 - DNA, 25 bp, Homo sapien
ctgaaattgtgcgagaaacggtgta

SEQ ID NO: 4874538 - DNA, 25 bp, Homo sapien
tgcgagaaacggtgtatatgaggat

SEQ ID NO: 4874539 - DNA, 25 bp, Homo sapien
aacggtgtatatgaggatttcgggt

SEQ ID NO: 4874540 - DNA, 25 bp, Homo sapien
atttcgggtgtgtgagagaatgttt

SEQ ID NO: 4874541 - DNA, 25 bp, Homo sapien
tgagggaatgggtttcagaaggtcc

SEQ ID NO: 4874542 - DNA, 25 bp, Homo sapien
tcaagatgagggaatgggtttcaga

SEQ ID NO: 4874543 - DNA, 25 bp, Homo sapien
caagatgagggaatgggtttcagaa

SEQ ID NO: 4874544 - DNA, 25 bp, Homo sapien
agatgagggaatgggtttcagaagg

SEQ ID NO: 4874545 - DNA, 25 bp, Homo sapien
tccacctctgagaattgtggagcca

SEQ ID NO: 4874546 - DNA, 25 bp, Homo sapien
gagaattgtggagccactgctactg

SEQ ID NO: 4874547 - DNA, 25 bp, Homo sapien
agtgactgtggtgtgctgtaagccc

SEQ ID NO: 4874548 - DNA, 25 bp, Homo sapien
gggctcctctccacatagtgactgt

SEQ ID NO: 4874549 - DNA, 25 bp, Homo sapien
tgcattcctgggttacacaccacag

SEQ ID NO: 4874550 - DNA, 25 bp, Homo sapien
tgtaatggtcagtaagtaggctctt

SEQ ID NO: 4874551 - DNA, 25 bp, Homo sapien
tactggctacagatctcagctttgc

SEQ ID NO: 4874552 - DNA, 25 bp, Homo sapien
tagaagaaaggaccctagcagtggt

SEQ ID NO: 4874553 - DNA, 25 bp, Homo sapien
ctctgccccgcttcttagccaccat

SEQ ID NO: 4874554 - DNA, 25 bp, Homo sapien
catgattaggaacatgtggttgcct

SEQ ID NO: 4874555 - DNA, 25 bp, Homo sapien
tgattaggaacatgtggttgcctct

SEQ ID NO: 4874556 - DNA, 25 bp, Homo sapien
atgattaggaacatgtggttgcctc

SEQ ID NO: 4874557 - DNA, 25 bp, Homo sapien
tcatgattaggaacatgtggttgcc

SEQ ID NO: 4874558 - DNA, 25 bp, Homo sapien
tcttcctggactctatttccatagg

SEQ ID NO: 4874559 - DNA, 25 bp, Homo sapien
gtcatccacagctaactggtgttgg

SEQ ID NO: 4874560 - DNA, 25 bp, Homo sapien
tccacagctaactggtgttggctct

SEQ ID NO: 4874561 - DNA, 25 bp, Homo sapien
cctggactctatttccataggacag

SEQ ID NO: 4874562 - DNA, 25 bp, Homo sapien
tgcccttttaggttatcataaatcc

SEQ ID NO: 4874563 - DNA, 25 bp, Homo sapien
ttttgacttgtattatctggttgga

SEQ ID NO: 4874564 - DNA, 25 bp, Homo sapien
tgtgtgcccttttaggttatcataa

SEQ ID NO: 4874565 - DNA, 25 bp, Homo sapien
ttttgtctcctgttttgacttgtat

SEQ ID NO: 4874566 - DNA, 25 bp, Homo sapien
cactcaccactttcacagagttttc

SEQ ID NO: 4874567 - DNA, 25 bp, Homo sapien
cagcccccgtaggcttccctccact

SEQ ID NO: 4874568 - DNA, 25 bp, Homo sapien
tcatctggctaaaaggaaagagtgt

SEQ ID NO: 4874569 - DNA, 25 bp, Homo sapien
aacaaaccagggtgttcatctggct

SEQ ID NO: 4874570 - DNA, 25 bp, Homo sapien
aatttctgcaaactagcttctgtgc

SEQ ID NO: 4874571 - DNA, 25 bp, Homo sapien
ggcttcatcccgagagttactgttt

SEQ ID NO: 4874572 - DNA, 25 bp, Homo sapien
tcagggagggaatcggaagatgatg

SEQ ID NO: 4874573 - DNA, 25 bp, Homo sapien
aagatgatggaagtctgtgatgaga

SEQ ID NO: 4874574 - DNA, 25 bp, Homo sapien
gaatcggaagatgatggaagtctgt

SEQ ID NO: 4874575 - DNA, 25 bp, Homo sapien
ggaagtctgtgatgagaagagagcc

SEQ ID NO: 4874576 - DNA, 25 bp, Homo sapien
catttgtagctttatcctgagtggg

SEQ ID NO: 4874577 - DNA, 25 bp, Homo sapien
gttaccattaagagtattacctata

SEQ ID NO: 4874578 - DNA, 25 bp, Homo sapien
ttctacttggattttgagagcagta

SEQ ID NO: 4874579 - DNA, 25 bp, Homo sapien
taagagcctattgggtggttgcttc

SEQ ID NO: 4874580 - DNA, 25 bp, Homo sapien
ttgaatacccctcggcaattaccat

SEQ ID NO: 4874581 - DNA, 25 bp, Homo sapien
gttacctgccaatatccgctttttg

SEQ ID NO: 4874582 - DNA, 25 bp, Homo sapien
ttgttttccaagttacctgccaata

SEQ ID NO: 4874583 - DNA, 25 bp, Homo sapien
gccaatatccgctttttgaataccc

SEQ ID NO: 4874584 - DNA, 25 bp, Homo sapien
ctgagctgagctctttcggtgcccc

SEQ ID NO: 4874585 - DNA, 25 bp, Homo sapien
cgtcgcttgcagaaccacagaaagg

SEQ ID NO: 4874586 - DNA, 25 bp, Homo sapien
ggtccgaatggaggtagtccttgca

SEQ ID NO: 4874587 - DNA, 25 bp, Homo sapien
tttcagtgaagggaggacggattcc

SEQ ID NO: 4874588 - DNA, 25 bp, Homo sapien
tctgggctccgtgcgggccactccc

SEQ ID NO: 4874589 - DNA, 25 bp, Homo sapien
tctcctgccgggtttctctcctgtt

SEQ ID NO: 4874590 - DNA, 25 bp, Homo sapien
cgctggccgggaaccttctgaatct

SEQ ID NO: 4874591 - DNA, 25 bp, Homo sapien
tgttcctcacgctggccgggaacct

SEQ ID NO: 4874592 - DNA, 25 bp, Homo sapien
gcctatggcgaggtcagttcttccc

SEQ ID NO: 4874593 - DNA, 25 bp, Homo sapien
gtggaaactttctgaagcctgtctc

SEQ ID NO: 4874594 - DNA, 25 bp, Homo sapien
tctcggatcctgcaagcctatggcg

SEQ ID NO: 4874595 - DNA, 25 bp, Homo sapien
tttctcccatgggtgcgcaggaggt

SEQ ID NO: 4874596 - DNA, 25 bp, Homo sapien
ttctgggtccgtgcagggatcccct

SEQ ID NO: 4874597 - DNA, 25 bp, Homo sapien
ggtccgtgcagggatcccctttctc

SEQ ID NO: 4874598 - DNA, 25 bp, Homo sapien
cagcagtggtcatctcctccccctg

SEQ ID NO: 4874599 - DNA, 25 bp, Homo sapien
ctgggtccgtgcagggatccccttt

SEQ ID NO: 4874600 - DNA, 25 bp, Homo sapien
aacttctttgcagtgtcatcagaca

SEQ ID NO: 4874601 - DNA, 25 bp, Homo sapien
ttgtactctctacagcgacgccctg

SEQ ID NO: 4874602 - DNA, 25 bp, Homo sapien
gacgccctggccattgtccatggat

SEQ ID NO: 4874603 - DNA, 25 bp, Homo sapien
ggcagtgggccgtcattgtactctc

SEQ ID NO: 4874604 - DNA, 25 bp, Homo sapien
tgagccttgcaaagggtcttgcatc

SEQ ID NO: 4874605 - DNA, 25 bp, Homo sapien
tcagtatccactgagactgccaatg

SEQ ID NO: 4874606 - DNA, 25 bp, Homo sapien
cactgagactgccaatggtgccctc

SEQ ID NO: 4874607 - DNA, 25 bp, Homo sapien
gaacaggtcccctgaccttcagtat

SEQ ID NO: 4874608 - DNA, 25 bp, Homo sapien
cacatttgtttaggcctacgtttgg

SEQ ID NO: 4874609 - DNA, 25 bp, Homo sapien
ctctgtgatgttgggtcttacaatt

SEQ ID NO: 4874610 - DNA, 25 bp, Homo sapien
tctcccactgatttacttttgtacc

SEQ ID NO: 4874611 - DNA, 25 bp, Homo sapien
caatcttgattatcagtgctataca

SEQ ID NO: 4874612 - DNA, 25 bp, Homo sapien
tcccctagcctgagttgttgggtcc

SEQ ID NO: 4874613 - DNA, 25 bp, Homo sapien
tcggaatcccctagcctgagttgtt

SEQ ID NO: 4874614 - DNA, 25 bp, Homo sapien
tccaccttcggaatcccctagcctg

SEQ ID NO: 4874615 - DNA, 25 bp, Homo sapien
cttcggaatcccctagcctgagttg

SEQ ID NO: 4874616 - DNA, 25 bp, Homo sapien
gcagggggatgatggctgaaagctg

SEQ ID NO: 4874617 - DNA, 25 bp, Homo sapien
gaaagctgtccactgcctctgtaca

SEQ ID NO: 4874618 - DNA, 25 bp, Homo sapien
ctgtccactgcctctgtacaggttc

SEQ ID NO: 4874619 - DNA, 25 bp, Homo sapien
ggatgatggctgaaagctgtccact

SEQ ID NO: 4874620 - DNA, 25 bp, Homo sapien
ttcctgagctgccaaggcccttcca

SEQ ID NO: 4874621 - DNA, 25 bp, Homo sapien
gctggtccttggccgcttctccggg

SEQ ID NO: 4874622 - DNA, 25 bp, Homo sapien
ccgggccccccctgcggtgctctct

SEQ ID NO: 4874623 - DNA, 25 bp, Homo sapien
gagcgctggtccttggccgcttctc

SEQ ID NO: 4874624 - DNA, 25 bp, Homo sapien
ctgttttcagtccagagagaccaac

SEQ ID NO: 4874625 - DNA, 25 bp, Homo sapien
tgttttcagtccagagagaccaaca

SEQ ID NO: 4874626 - DNA, 25 bp, Homo sapien
tttatccatttcgttgggagcaagg

SEQ ID NO: 4874627 - DNA, 25 bp, Homo sapien
agaacaaggcctgccctgtcaaaag

SEQ ID NO: 4874628 - DNA, 25 bp, Homo sapien
tatccatttcgttgggagcaaggac

SEQ ID NO: 4874629 - DNA, 25 bp, Homo sapien
ccatttcgttgggagcaaggacaaa

SEQ ID NO: 4874630 - DNA, 25 bp, Homo sapien
gcaagagacgatggtattgacagtg

SEQ ID NO: 4874631 - DNA, 25 bp, Homo sapien
tcacacagttgataggcgataggca

SEQ ID NO: 4874632 - DNA, 25 bp, Homo sapien
tattgacagtgtacctgatgcttgc

SEQ ID NO: 4874633 - DNA, 25 bp, Homo sapien
ctgtgtacatcggtggcccccaaag

SEQ ID NO: 4874634 - DNA, 25 bp, Homo sapien
tgagctcctggaggctttcccatac

SEQ ID NO: 4874635 - DNA, 25 bp, Homo sapien
gctttcccatacattcttattagtc

SEQ ID NO: 4874636 - DNA, 25 bp, Homo sapien
agctcctggaggctttcccatacat

SEQ ID NO: 4874637 - DNA, 25 bp, Homo sapien
cctgagctcctggaggctttcccat

SEQ ID NO: 4874638 - DNA, 25 bp, Homo sapien
ggccctcgatggcaggaccccctgt

SEQ ID NO: 4874639 - DNA, 25 bp, Homo sapien
gcttcaggccctcgatggcaggacc

SEQ ID NO: 4874640 - DNA, 25 bp, Homo sapien
ccctcgatggcaggaccccctgtgc

SEQ ID NO: 4874641 - DNA, 25 bp, Homo sapien
cagcttcaggccctcgatggcagga

SEQ ID NO: 4874642 - DNA, 25 bp, Homo sapien
ggtggctcggaacgcggtccagatg

SEQ ID NO: 4874643 - DNA, 25 bp, Homo sapien
gctcggaacgcggtccagatggcaa

SEQ ID NO: 4874644 - DNA, 25 bp, Homo sapien
atggtggctcggaacgcggtccaga

SEQ ID NO: 4874645 - DNA, 25 bp, Homo sapien
cggaacgcggtccagatggcaacag

SEQ ID NO: 4874646 - DNA, 25 bp, Homo sapien
gctgtgcatgcaaacacatccaggt

SEQ ID NO: 4874647 - DNA, 25 bp, Homo sapien
ccagcaggggaattaccagacagct

SEQ ID NO: 4874648 - DNA, 25 bp, Homo sapien
aggtagggagatcctcacccagcag

SEQ ID NO: 4874649 - DNA, 25 bp, Homo sapien
gcaggggaattaccagacagctgga

SEQ ID NO: 4874650 - DNA, 25 bp, Homo sapien
tagatggttcatcccacggtgaggc

SEQ ID NO: 4874651 - DNA, 25 bp, Homo sapien
cgtgaccacgtggagagcaggctta

SEQ ID NO: 4874652 - DNA, 25 bp, Homo sapien
catactgcgttgtgaccccatggga

SEQ ID NO: 4874653 - DNA, 25 bp, Homo sapien
atgggaaggactcaacggccacgtg

SEQ ID NO: 4874654 - DNA, 25 bp, Homo sapien
tgccctcgaatctccagctgtcggt

SEQ ID NO: 4874655 - DNA, 25 bp, Homo sapien
ctagtctcttatgtttgttgtgggg

SEQ ID NO: 4874656 - DNA, 25 bp, Homo sapien
tgtcggtcatcagccaagagcggaa

SEQ ID NO: 4874657 - DNA, 25 bp, Homo sapien
tcgaatctccagctgtcggtcatca

SEQ ID NO: 4874658 - DNA, 25 bp, Homo sapien
aaaaggaattcagcataaaggtgcc

SEQ ID NO: 4874659 - DNA, 25 bp, Homo sapien
tcccaccacacggtatcagatctgt

SEQ ID NO: 4874660 - DNA, 25 bp, Homo sapien
caaagtgttagtacagggccagagg

SEQ ID NO: 4874661 - DNA, 25 bp, Homo sapien
tcagatctgtactgcattctcctag

SEQ ID NO: 4874662 - DNA, 25 bp, Homo sapien
agtaacctgtccgttcccataggag

SEQ ID NO: 4874663 - DNA, 25 bp, Homo sapien
tacaaggagtgcatcaaagcctgtg

SEQ ID NO: 4874664 - DNA, 25 bp, Homo sapien
gatagggttgctctgatgcagttga

SEQ ID NO: 4874665 - DNA, 25 bp, Homo sapien
gcagttgaggttttgtagactacaa

SEQ ID NO: 4874666 - DNA, 25 bp, Homo sapien
ctccagagtagtagtagctggtatt

SEQ ID NO: 4874667 - DNA, 25 bp, Homo sapien
tccagagtagtagtagctggtatta

SEQ ID NO: 4874668 - DNA, 25 bp, Homo sapien
tttgttgcctcggctagagttcagt

SEQ ID NO: 4874669 - DNA, 25 bp, Homo sapien
aggattcgcgaggtaaggccgccct

SEQ ID NO: 4874670 - DNA, 25 bp, Homo sapien
cctgacaggagacgcctacttggct

SEQ ID NO: 4874671 - DNA, 25 bp, Homo sapien
ctcgcgttgtttggtctcaggctgc

SEQ ID NO: 4874672 - DNA, 25 bp, Homo sapien
caggtcaggcgactcttgcagtttc

SEQ ID NO: 4874673 - DNA, 25 bp, Homo sapien
cccaaatgagtcctgttgcctggtt

SEQ ID NO: 4874674 - DNA, 25 bp, Homo sapien
ccaatattagcacaggatccactct

SEQ ID NO: 4874675 - DNA, 25 bp, Homo sapien
caataaaggccccaaatgagtcctg

SEQ ID NO: 4874676 - DNA, 25 bp, Homo sapien
tttcccaatattagcacaggatcca

SEQ ID NO: 4874677 - DNA, 25 bp, Homo sapien
tatagacggcctggagaaatgtttc

SEQ ID NO: 4874678 - DNA, 25 bp, Homo sapien
tcttggttatcttgggaaagctggg

SEQ ID NO: 4874679 - DNA, 25 bp, Homo sapien
tgtattatatctctgagccctgaac

SEQ ID NO: 4874680 - DNA, 25 bp, Homo sapien
aactgtgtccatatagacggcctgg

SEQ ID NO: 4874681 - DNA, 25 bp, Homo sapien
gatatcaggaacagccctgaggtct

SEQ ID NO: 4874682 - DNA, 25 bp, Homo sapien
cttgatatcaggaacagccctgagg

SEQ ID NO: 4874683 - DNA, 25 bp, Homo sapien
tgatatcaggaacagccctgaggtc

SEQ ID NO: 4874684 - DNA, 25 bp, Homo sapien
tatcaggaacagccctgaggtctcc

SEQ ID NO: 4874685 - DNA, 25 bp, Homo sapien
aatgccacctctggctctttgcaat

SEQ ID NO: 4874686 - DNA, 25 bp, Homo sapien
tctttcttcagcaatgccacctctg

SEQ ID NO: 4874687 - DNA, 25 bp, Homo sapien
tgcaatattacattgacttttttca

SEQ ID NO: 4874688 - DNA, 25 bp, Homo sapien
tcatgtgccatcgcccttttcactc

SEQ ID NO: 4874689 - DNA, 25 bp, Homo sapien
cactctgcttatcttcagggtagca

SEQ ID NO: 4874690 - DNA, 25 bp, Homo sapien
gagatgtgtggcttctccaaaactg

SEQ ID NO: 4874691 - DNA, 25 bp, Homo sapien
ctccccacgggccaacaaatgatgg

SEQ ID NO: 4874692 - DNA, 25 bp, Homo sapien
ggtagcaaagaatccatgtggggca

SEQ ID NO: 4874693 - DNA, 25 bp, Homo sapien
ttcaaagacattgccctttatgtca

SEQ ID NO: 4874694 - DNA, 25 bp, Homo sapien
ggcatttcaaagacattgcccttta

SEQ ID NO: 4874695 - DNA, 25 bp, Homo sapien
agacattgccctttatgtcatcatc

SEQ ID NO: 4874696 - DNA, 25 bp, Homo sapien
tcttggcatttcaaagacattgccc

SEQ ID NO: 4874697 - DNA, 25 bp, Homo sapien
tggctgtcacgctccttgacaccat

SEQ ID NO: 4874698 - DNA, 25 bp, Homo sapien
ccttgacaccatatccaggagacat

SEQ ID NO: 4874699 - DNA, 25 bp, Homo sapien
ctccttgacaccatatccaggagac

SEQ ID NO: 4874700 - DNA, 25 bp, Homo sapien
gctgtcacgctccttgacaccatat

SEQ ID NO: 4874701 - DNA, 25 bp, Homo sapien
tcgagagaggaccagccgggttcct

SEQ ID NO: 4874702 - DNA, 25 bp, Homo sapien
ttcctggcgacctaaagcctgactg

SEQ ID NO: 4874703 - DNA, 25 bp, Homo sapien
taagaagtcgagagaggaccagccg

SEQ ID NO: 4874704 - DNA, 25 bp, Homo sapien
gaccagccgggttcctggcgaccta

SEQ ID NO: 4874705 - DNA, 25 bp, Homo sapien
gcgtctgcgccccactccggagcga

SEQ ID NO: 4874706 - DNA, 25 bp, Homo sapien
gcgagggcgggaacttcggcggcca

SEQ ID NO: 4874707 - DNA, 25 bp, Homo sapien
actccggagcgagggccctcggcga

SEQ ID NO: 4874708 - DNA, 25 bp, Homo sapien
ctcggcgagggcgggaacttcggcg

SEQ ID NO: 4874709 - DNA, 25 bp, Homo sapien
ctagaaaggaggccgaacagcttcg

SEQ ID NO: 4874710 - DNA, 25 bp, Homo sapien
agaaaggaggccgaacagcttcggg

SEQ ID NO: 4874711 - DNA, 25 bp, Homo sapien
gaggccgaacagcttcggggcggcg

SEQ ID NO: 4874712 - DNA, 25 bp, Homo sapien
gccgaacagcttcggggcggcgggc

SEQ ID NO: 4874713 - DNA, 25 bp, Homo sapien
aagaaccttgcgaggctggaaagcg

SEQ ID NO: 4874714 - DNA, 25 bp, Homo sapien
ggtcggccgggcagtgccagcgccg

SEQ ID NO: 4874715 - DNA, 25 bp, Homo sapien
tgagagaagaaccttgcgaggctgg

SEQ ID NO: 4874716 - DNA, 25 bp, Homo sapien
gagaagaaccttgcgaggctggaaa

SEQ ID NO: 4874717 - DNA, 25 bp, Homo sapien
gcgtgtccccgtagcccgcagcgtc

SEQ ID NO: 4874718 - DNA, 25 bp, Homo sapien
ggactcgcagcaccgcgtgtccccg

SEQ ID NO: 4874719 - DNA, 25 bp, Homo sapien
agcccgcagcgtcccttcgggagtg

SEQ ID NO: 4874720 - DNA, 25 bp, Homo sapien
ctgactccagatcccgctgagaccc

SEQ ID NO: 4874721 - DNA, 25 bp, Homo sapien
tccggctctcggtctttgctctagc

SEQ ID NO: 4874722 - DNA, 25 bp, Homo sapien
gtcggcgattgctcaccgcgccttt

SEQ ID NO: 4874723 - DNA, 25 bp, Homo sapien
ggctgccctctctacgtcggcgatt

SEQ ID NO: 4874724 - DNA, 25 bp, Homo sapien
tctcaatattgcagcgcggagggct

SEQ ID NO: 4874725 - DNA, 25 bp, Homo sapien
gagcccaccgtccaccctgccggcc

SEQ ID NO: 4874726 - DNA, 25 bp, Homo sapien
agcccaccgtccaccctgccggccg

SEQ ID NO: 4874727 - DNA, 25 bp, Homo sapien
ctagggtccacgcgtggggcgtcca

SEQ ID NO: 4874728 - DNA, 25 bp, Homo sapien
gtcggtcttctagggtccacgcgtg

SEQ ID NO: 4874729 - DNA, 25 bp, Homo sapien
ctagtcggtcttctagggtccacgc

SEQ ID NO: 4874730 - DNA, 25 bp, Homo sapien
tagggtccacgcgtggggcgtccac

SEQ ID NO: 4874731 - DNA, 25 bp, Homo sapien
tgcacgttaactgccctggcgcagg

SEQ ID NO: 4874732 - DNA, 25 bp, Homo sapien
cattcggttttcaagagcgtgaaca

SEQ ID NO: 4874733 - DNA, 25 bp, Homo sapien
gacttgtttcgacttcccagggcag

SEQ ID NO: 4874734 - DNA, 25 bp, Homo sapien
tgcggaagatcaagtgcccgggttt

SEQ ID NO: 4874735 - DNA, 25 bp, Homo sapien
ccccacaagcgtggagggagatggg

SEQ ID NO: 4874736 - DNA, 25 bp, Homo sapien
gatggggtaggtcgcggcgcctata

SEQ ID NO: 4874737 - DNA, 25 bp, Homo sapien
ctcccccacaagcgtggagggagat

SEQ ID NO: 4874738 - DNA, 25 bp, Homo sapien
gtaggtcgcggcgcctatagacccc

SEQ ID NO: 4874739 - DNA, 25 bp, Homo sapien
gaaatcctgtagaccacgttcactt

SEQ ID NO: 4874740 - DNA, 25 bp, Homo sapien
gacggacaggaatcgaggagattcc

SEQ ID NO: 4874741 - DNA, 25 bp, Homo sapien
tgtcaagtccgggaagctcacgatg

SEQ ID NO: 4874742 - DNA, 25 bp, Homo sapien
tccaccttccggacagaaatcctgt

SEQ ID NO: 4874743 - DNA, 25 bp, Homo sapien
ggcagtggcgcgagcttttgccaag

SEQ ID NO: 4874744 - DNA, 25 bp, Homo sapien
gggcagtggcgcgagcttttgccaa

SEQ ID NO: 4874745 - DNA, 25 bp, Homo sapien
agggcagtggcgcgagcttttgcca

SEQ ID NO: 4874746 - DNA, 25 bp, Homo sapien
tcagaccgttttgcgaatttgaaca

SEQ ID NO: 4874747 - DNA, 25 bp, Homo sapien
tagtcaattccacggtttggagcca

SEQ ID NO: 4874748 - DNA, 25 bp, Homo sapien
gaacatttgtttagtcaattccacg

SEQ ID NO: 4874749 - DNA, 25 bp, Homo sapien
agatagagtaatttcactagaaatg

SEQ ID NO: 4874750 - DNA, 25 bp, Homo sapien
tgtgggacaacagtagccacgacat

SEQ ID NO: 4874751 - DNA, 25 bp, Homo sapien
ctgtgggacaacagtagccacgaca

SEQ ID NO: 4874752 - DNA, 25 bp, Homo sapien
cttataatgtgagggaccaagataa

SEQ ID NO: 4874753 - DNA, 25 bp, Homo sapien
tgtcttataatgtgagggaccaaga

SEQ ID NO: 4874754 - DNA, 25 bp, Homo sapien
tataatgtgagggaccaagataaag

SEQ ID NO: 4874755 - DNA, 25 bp, Homo sapien
gtcttataatgtgagggaccaagat

SEQ ID NO: 4874756 - DNA, 25 bp, Homo sapien
ttctgttccataaagtcatgattct

SEQ ID NO: 4874757 - DNA, 25 bp, Homo sapien
cccactgtattgctactttctataa

SEQ ID NO: 4874758 - DNA, 25 bp, Homo sapien
tgttacttctctaccagaagcaaga

SEQ ID NO: 4874759 - DNA, 25 bp, Homo sapien
tcaagtaccaggactatgatatcat

SEQ ID NO: 4874760 - DNA, 25 bp, Homo sapien
tatgatatcattctgccataggaac

SEQ ID NO: 4874761 - DNA, 25 bp, Homo sapien
atagcctgaagcaagagcccctcaa

SEQ ID NO: 4874762 - DNA, 25 bp, Homo sapien
ttttaataggcgtaagtggcagctc

SEQ ID NO: 4874763 - DNA, 25 bp, Homo sapien
tattatctgctatgggtacctcttc

SEQ ID NO: 4874764 - DNA, 25 bp, Homo sapien
tgtctgtccaggcacctactgatgg

SEQ ID NO: 4874765 - DNA, 25 bp, Homo sapien
gcctgatgcctttcttagggacaaa

SEQ ID NO: 4874766 - DNA, 25 bp, Homo sapien
aaagtcttgatccagttatgcaccg

SEQ ID NO: 4874767 - DNA, 25 bp, Homo sapien
ggacaaatctcataacaccttttcg

SEQ ID NO: 4874768 - DNA, 25 bp, Homo sapien
cctaagattttcaaatacgttggca

SEQ ID NO: 4874769 - DNA, 25 bp, Homo sapien
tctgtcccgaactgtcaagtgcatt

SEQ ID NO: 4874770 - DNA, 25 bp, Homo sapien
caagtgcattagatgactggacatt

SEQ ID NO: 4874771 - DNA, 25 bp, Homo sapien
cattttaatctacagctgagttgac

SEQ ID NO: 4874772 - DNA, 25 bp, Homo sapien
tattcacaggtatcatggttagaac

SEQ ID NO: 4874773 - DNA, 25 bp, Homo sapien
atcttcacttgattagccagatgtg

SEQ ID NO: 4874774 - DNA, 25 bp, Homo sapien
cagcctcggtggcaacagaaaccca

SEQ ID NO: 4874775 - DNA, 25 bp, Homo sapien
ctatgactgcctgggtctttgaagc

SEQ ID NO: 4874776 - DNA, 25 bp, Homo sapien
gtcaccagtcgttggatttcaggcc

SEQ ID NO: 4874777 - DNA, 25 bp, Homo sapien
tgtaagaataaactttaacatctgg

SEQ ID NO: 4874778 - DNA, 25 bp, Homo sapien
cacgtccacacaccttttattagaa

SEQ ID NO: 4874779 - DNA, 25 bp, Homo sapien
taacatctggattagtttcctagag

SEQ ID NO: 4874780 - DNA, 25 bp, Homo sapien
tagaaacctcaatttctatgtaaga

SEQ ID NO: 4874781 - DNA, 25 bp, Homo sapien
cacactgttgggtcttgacctttag

SEQ ID NO: 4874782 - DNA, 25 bp, Homo sapien
gcacactgttgggtcttgaccttta

SEQ ID NO: 4874783 - DNA, 25 bp, Homo sapien
actgttgggtcttgacctttagcca

SEQ ID NO: 4874784 - DNA, 25 bp, Homo sapien
cactgttgggtcttgacctttagcc

SEQ ID NO: 4874785 - DNA, 25 bp, Homo sapien
tgggcggcgggcatctgccgcttcc

SEQ ID NO: 4874786 - DNA, 25 bp, Homo sapien
agcagcatgcgttggacccgcgact

SEQ ID NO: 4874787 - DNA, 25 bp, Homo sapien
ccagcagaagcagcatgcgttggac

SEQ ID NO: 4874788 - DNA, 25 bp, Homo sapien
cagaagcagcatgcgttggacccgc

SEQ ID NO: 4874789 - DNA, 25 bp, Homo sapien
agtctcaccttgacactgcctagct

SEQ ID NO: 4874790 - DNA, 25 bp, Homo sapien
cttcctgcagagctgtccagattcc

SEQ ID NO: 4874791 - DNA, 25 bp, Homo sapien
agagctgtccagattcctaccaggg

SEQ ID NO: 4874792 - DNA, 25 bp, Homo sapien
tgacactgcctagctcttgtcagcc

SEQ ID NO: 4874793 - DNA, 25 bp, Homo sapien
ttcgtgggaagctattgtgggcctc

SEQ ID NO: 4874794 - DNA, 25 bp, Homo sapien
tctgctctgagttcgtgggaagcta

SEQ ID NO: 4874795 - DNA, 25 bp, Homo sapien
ggaagctattgtgggcctctgatct

SEQ ID NO: 4874796 - DNA, 25 bp, Homo sapien
ccaggttggaagatctgctctgagt

SEQ ID NO: 4874797 - DNA, 25 bp, Homo sapien
aaaggcttgcaaaccaagttgctag

SEQ ID NO: 4874798 - DNA, 25 bp, Homo sapien
ttgctagaataaatgctaagaacat

SEQ ID NO: 4874799 - DNA, 25 bp, Homo sapien
aaggcttgcaaaccaagttgctaga

SEQ ID NO: 4874800 - DNA, 25 bp, Homo sapien
ggcttgcaaaccaagttgctagaat

SEQ ID NO: 4874801 - DNA, 25 bp, Homo sapien
aattcatcattaggaacatatcttt

SEQ ID NO: 4874802 - DNA, 25 bp, Homo sapien
tgttagtggtagttaattggaattc

SEQ ID NO: 4874803 - DNA, 25 bp, Homo sapien
ggaattcatcattaggaacatatct

SEQ ID NO: 4874804 - DNA, 25 bp, Homo sapien
ctgttagtggtagttaattggaatt

SEQ ID NO: 4874805 - DNA, 25 bp, Homo sapien
gtggagaccaaaagagagggggcaa

SEQ ID NO: 4874806 - DNA, 25 bp, Homo sapien
cgtggagaccaaaagagagggggca

SEQ ID NO: 4874807 - DNA, 25 bp, Homo sapien
tcgtggagaccaaaagagagggggc

SEQ ID NO: 4874808 - DNA, 25 bp, Homo sapien
tttgtcaaatgactgagcccaggcg

SEQ ID NO: 4874809 - DNA, 25 bp, Homo sapien
tcggaggaattcacggaatgcattc

SEQ ID NO: 4874810 - DNA, 25 bp, Homo sapien
caggccatccagaagagcatatttt

SEQ ID NO: 4874811 - DNA, 25 bp, Homo sapien
tcctgctggagtgaccattaatttg

SEQ ID NO: 4874812 - DNA, 25 bp, Homo sapien
cggtattcagatccctttgactgtg

SEQ ID NO: 4874813 - DNA, 25 bp, Homo sapien
gacctgcagagcggctccaaatgtc

SEQ ID NO: 4874814 - DNA, 25 bp, Homo sapien
ttcacggtattcagatccctttgac

SEQ ID NO: 4874815 - DNA, 25 bp, Homo sapien
ccgcattcacggtattcagatccct

SEQ ID NO: 4874816 - DNA, 25 bp, Homo sapien
gctgtttggtcatgttcagcttgac

SEQ ID NO: 4874817 - DNA, 25 bp, Homo sapien
cagtcaaagtgatctgaaaaccgtg

SEQ ID NO: 4874818 - DNA, 25 bp, Homo sapien
ccagaacatcaactgcaaaatgtag

SEQ ID NO: 4874819 - DNA, 25 bp, Homo sapien
agtgatctgaaaaccgtgaatgtgg

SEQ ID NO: 4874820 - DNA, 25 bp, Homo sapien
aggagctccatgacaggagaggccc

SEQ ID NO: 4874821 - DNA, 25 bp, Homo sapien
caggagctccatgacaggagaggcc

SEQ ID NO: 4874822 - DNA, 25 bp, Homo sapien
ggagctccatgacaggagaggccct

SEQ ID NO: 4874823 - DNA, 25 bp, Homo sapien
tctctcacccgggagtctaagctca

SEQ ID NO: 4874824 - DNA, 25 bp, Homo sapien
gacagcagagttcatgaatcgagga

SEQ ID NO: 4874825 - DNA, 25 bp, Homo sapien
gaagcaagtccttatagacagcaga

SEQ ID NO: 4874826 - DNA, 25 bp, Homo sapien
cgaatatgtgttgggatggctccac

SEQ ID NO: 4874827 - DNA, 25 bp, Homo sapien
gatgctacaacctctaaattccctg

SEQ ID NO: 4874828 - DNA, 25 bp, Homo sapien
aggtggctgcagtttacatggtgaa

SEQ ID NO: 4874829 - DNA, 25 bp, Homo sapien
tttcaaaagtatcactaaaggtggc

SEQ ID NO: 4874830 - DNA, 25 bp, Homo sapien
aattccctgtgctagttgtagccca

SEQ ID NO: 4874831 - DNA, 25 bp, Homo sapien
cagcagggagccttctgtgtagcct

SEQ ID NO: 4874832 - DNA, 25 bp, Homo sapien
cagggagccttctgtgtagccttgg

SEQ ID NO: 4874833 - DNA, 25 bp, Homo sapien
agggagccttctgtgtagccttggc

SEQ ID NO: 4874834 - DNA, 25 bp, Homo sapien
gcagggagccttctgtgtagccttg

SEQ ID NO: 4874835 - DNA, 25 bp, Homo sapien
aataaaagtggttccctttgctctg

SEQ ID NO: 4874836 - DNA, 25 bp, Homo sapien
ttaccaaactcatgcaaaataaaag

SEQ ID NO: 4874837 - DNA, 25 bp, Homo sapien
tttgaggggagagtaatcagttacc

SEQ ID NO: 4874838 - DNA, 25 bp, Homo sapien
gttccctttgctctggtggatgtac

SEQ ID NO: 4874839 - DNA, 25 bp, Homo sapien
tgaactgtgaatttgggtcctgcaa

SEQ ID NO: 4874840 - DNA, 25 bp, Homo sapien
ggtaagtgacgtattcaaaccgagc

SEQ ID NO: 4874841 - DNA, 25 bp, Homo sapien
gaagatgtcgttgagaaacacctga

SEQ ID NO: 4874842 - DNA, 25 bp, Homo sapien
caaaccgagcttgctggacagaaga

SEQ ID NO: 4874843 - DNA, 25 bp, Homo sapien
gacagttttgttgtgaacatgacca

SEQ ID NO: 4874844 - DNA, 25 bp, Homo sapien
catactgtaagatcaagtagaatgc

SEQ ID NO: 4874845 - DNA, 25 bp, Homo sapien
tgttaccagacacttgagactgatc

SEQ ID NO: 4874846 - DNA, 25 bp, Homo sapien
taggttggcaaattctgataataac

SEQ ID NO: 4874847 - DNA, 25 bp, Homo sapien
ggttccctagggtacacttgctcta

SEQ ID NO: 4874848 - DNA, 25 bp, Homo sapien
tcaggcacccgtagaaagacctcag

SEQ ID NO: 4874849 - DNA, 25 bp, Homo sapien
taaaggccactgttgcaaagtctac

SEQ ID NO: 4874850 - DNA, 25 bp, Homo sapien
taaatgtccgtgttaagaattggcc

SEQ ID NO: 4874851 - DNA, 25 bp, Homo sapien
tcctttagagcatctttgtcaaaca

SEQ ID NO: 4874852 - DNA, 25 bp, Homo sapien
actttctaaatcttcctttagagca

SEQ ID NO: 4874853 - DNA, 25 bp, Homo sapien
tttagattcctcatcacttcctgtt

SEQ ID NO: 4874854 - DNA, 25 bp, Homo sapien
catttttagattcctcatcacttcc

SEQ ID NO: 4874855 - DNA, 25 bp, Homo sapien
ttgaataacctgcaaaagttgccta

SEQ ID NO: 4874856 - DNA, 25 bp, Homo sapien
agtgatttgttcttcatcgtccttc

SEQ ID NO: 4874857 - DNA, 25 bp, Homo sapien
taaatacacctctgaggctacgtcc

SEQ ID NO: 4874858 - DNA, 25 bp, Homo sapien
ccattgcagcagatatgatatatat

SEQ ID NO: 4874859 - DNA, 25 bp, Homo sapien
tcttgttgtaattgaagtgtttctt

SEQ ID NO: 4874860 - DNA, 25 bp, Homo sapien
cttgttgtaattgaagtgtttctta

SEQ ID NO: 4874861 - DNA, 25 bp, Homo sapien
ttgttgtaattgaagtgtttcttac

SEQ ID NO: 4874862 - DNA, 25 bp, Homo sapien
tgttgtaattgaagtgtttcttact

SEQ ID NO: 4874863 - DNA, 25 bp, Homo sapien
agggatgcacattgaacaagtggga

SEQ ID NO: 4874864 - DNA, 25 bp, Homo sapien
gggatctgagggatgcacattgaac

SEQ ID NO: 4874865 - DNA, 25 bp, Homo sapien
gaaaccatgcattgctaacatttac

SEQ ID NO: 4874866 - DNA, 25 bp, Homo sapien
cttgaaaccatgcattgctaacatt

SEQ ID NO: 4874867 - DNA, 25 bp, Homo sapien
tattcttgaaaggtagctttgttcc

SEQ ID NO: 4874868 - DNA, 25 bp, Homo sapien
tatttctcctactatttctgtatat

SEQ ID NO: 4874869 - DNA, 25 bp, Homo sapien
taaacattgacaaggcaggatcagt

SEQ ID NO: 4874870 - DNA, 25 bp, Homo sapien
aataacatccagttatttgactttt

SEQ ID NO: 4874871 - DNA, 25 bp, Homo sapien
tctgtggttactttctctggtgaag

SEQ ID NO: 4874872 - DNA, 25 bp, Homo sapien
cctcttctcaatgaatcactaatgt

SEQ ID NO: 4874873 - DNA, 25 bp, Homo sapien
aatgttgacatattgacctcttctc

SEQ ID NO: 4874874 - DNA, 25 bp, Homo sapien
ctctgtggttactttctctggtgaa

SEQ ID NO: 4874875 - DNA, 25 bp, Homo sapien
ggcaccactgcacaactcttgctct

SEQ ID NO: 4874876 - DNA, 25 bp, Homo sapien
atggcaccactgcacaactcttgct

SEQ ID NO: 4874877 - DNA, 25 bp, Homo sapien
tggcaccactgcacaactcttgctc

SEQ ID NO: 4874878 - DNA, 25 bp, Homo sapien
ggctcaagcactttaggacgccgag

SEQ ID NO: 4874879 - DNA, 25 bp, Homo sapien
ggacgccgaggcggaattatcactt

SEQ ID NO: 4874880 - DNA, 25 bp, Homo sapien
acggtggctcaagcactttaggacg

SEQ ID NO: 4874881 - DNA, 25 bp, Homo sapien
ggtggctcaagcactttaggacgcc

SEQ ID NO: 4874882 - DNA, 25 bp, Homo sapien
cagcccgtgttgaggtatttaggac

SEQ ID NO: 4874883 - DNA, 25 bp, Homo sapien
ggtaggcttaaacagcagttgttaa

SEQ ID NO: 4874884 - DNA, 25 bp, Homo sapien
taagtcaaaggtaggcttaaacagc

SEQ ID NO: 4874885 - DNA, 25 bp, Homo sapien
ttaggacattaaggcaactaccgat

SEQ ID NO: 4874886 - DNA, 25 bp, Homo sapien
tattacataatacccccagcaggat

SEQ ID NO: 4874887 - DNA, 25 bp, Homo sapien
gcaggatttgggcacttcagcaacc

SEQ ID NO: 4874888 - DNA, 25 bp, Homo sapien
aacccttagggtctgatatatttgg

SEQ ID NO: 4874889 - DNA, 25 bp, Homo sapien
gacttctagagtttgttaatcaaaa

SEQ ID NO: 4874890 - DNA, 25 bp, Homo sapien
tagctattaggatcttcaacccagg

SEQ ID NO: 4874891 - DNA, 25 bp, Homo sapien
tagcaggccaagtattgcctctctg

SEQ ID NO: 4874892 - DNA, 25 bp, Homo sapien
taaaggctagtcagaaccctatacc

SEQ ID NO: 4874893 - DNA, 25 bp, Homo sapien
tcaacccaggtaacaggaataattc

SEQ ID NO: 4874894 - DNA, 25 bp, Homo sapien
ctgggcggcacaagttgggaagacc

SEQ ID NO: 4874895 - DNA, 25 bp, Homo sapien
tccctgggcggcacaagttgggaag

SEQ ID NO: 4874896 - DNA, 25 bp, Homo sapien
cctgggcggcacaagttgggaagac

SEQ ID NO: 4874897 - DNA, 25 bp, Homo sapien
ccctgggcggcacaagttgggaaga

SEQ ID NO: 4874898 - DNA, 25 bp, Homo sapien
ctcacagttccgtccatagaaggag

SEQ ID NO: 4874899 - DNA, 25 bp, Homo sapien
agaaggaccccagcatgcaggttcc

SEQ ID NO: 4874900 - DNA, 25 bp, Homo sapien
cagttccgtccatagaaggagaggg

SEQ ID NO: 4874901 - DNA, 25 bp, Homo sapien
atcatgctcacagttccgtccatag

SEQ ID NO: 4874902 - DNA, 25 bp, Homo sapien
cacagccaggtagataaatggctga

SEQ ID NO: 4874903 - DNA, 25 bp, Homo sapien
acagccaggtagataaatggctgag

SEQ ID NO: 4874904 - DNA, 25 bp, Homo sapien
tctcccctaattgtaataaggaata

SEQ ID NO: 4874905 - DNA, 25 bp, Homo sapien
acatactatggtgcgtatgtatgtg

SEQ ID NO: 4874906 - DNA, 25 bp, Homo sapien
tgcgttgtggggaaaacctgtcctc

SEQ ID NO: 4874907 - DNA, 25 bp, Homo sapien
tcttgatcgcaccagtccaaatgct

SEQ ID NO: 4874908 - DNA, 25 bp, Homo sapien
aagtaaaaggttcagtcaaggtcat

SEQ ID NO: 4874909 - DNA, 25 bp, Homo sapien
ttcgccaaacgagagcatgcactaa

SEQ ID NO: 4874910 - DNA, 25 bp, Homo sapien
tttcgccaaacgagagcatgcacta

SEQ ID NO: 4874911 - DNA, 25 bp, Homo sapien
ctttcgccaaacgagagcatgcact

SEQ ID NO: 4874912 - DNA, 25 bp, Homo sapien
gggctgctttgtggccgtggccccg

SEQ ID NO: 4874913 - DNA, 25 bp, Homo sapien
ttattttccgagatcctgctttgtc

SEQ ID NO: 4874914 - DNA, 25 bp, Homo sapien
gggagtctgcaaccttgtctcggtt

SEQ ID NO: 4874915 - DNA, 25 bp, Homo sapien
gccctgagctgctcggaggccacgt

SEQ ID NO: 4874916 - DNA, 25 bp, Homo sapien
ttggccaggctcacacgcggcaggc

SEQ ID NO: 4874917 - DNA, 25 bp, Homo sapien
cgggattcggctttaagttggccag

SEQ ID NO: 4874918 - DNA, 25 bp, Homo sapien
caccgccctgcaagggaccggccat

SEQ ID NO: 4874919 - DNA, 25 bp, Homo sapien
taagttggccaggctcacacgcggc

SEQ ID NO: 4874920 - DNA, 25 bp, Homo sapien
tattttgggattcggatgtaaaatg

SEQ ID NO: 4874921 - DNA, 25 bp, Homo sapien
tacctcttctccgacctcttggtct

SEQ ID NO: 4874922 - DNA, 25 bp, Homo sapien
ttctacctcttctccgacctcttgg

SEQ ID NO: 4874923 - DNA, 25 bp, Homo sapien
tttgggattcggatgtaaaatggag

SEQ ID NO: 4874924 - DNA, 25 bp, Homo sapien
caaaggcttatactggcgtctgaaa

SEQ ID NO: 4874925 - DNA, 25 bp, Homo sapien
tcccattgacaagctgggttaagtc

SEQ ID NO: 4874926 - DNA, 25 bp, Homo sapien
tcccttttaagtggctggatggtca

SEQ ID NO: 4874927 - DNA, 25 bp, Homo sapien
tgactaggatcaacacgacccaaat

SEQ ID NO: 4874928 - DNA, 25 bp, Homo sapien
aaatatgtcaaaacagtctgttggt

SEQ ID NO: 4874929 - DNA, 25 bp, Homo sapien
aacagtctgttggtaaacagcttgg

SEQ ID NO: 4874930 - DNA, 25 bp, Homo sapien
gtcaaaacagtctgttggtaaacag

SEQ ID NO: 4874931 - DNA, 25 bp, Homo sapien
caaaacagtctgttggtaaacagct

SEQ ID NO: 4874932 - DNA, 25 bp, Homo sapien
caatggcagcaatagctagttctga

SEQ ID NO: 4874933 - DNA, 25 bp, Homo sapien
gaaggctgtagtaacaacaccacca

SEQ ID NO: 4874934 - DNA, 25 bp, Homo sapien
tacttcaatattaacttttgccgta

SEQ ID NO: 4874935 - DNA, 25 bp, Homo sapien
gaagccaactgtacttcaatattaa

SEQ ID NO: 4874936 - DNA, 25 bp, Homo sapien
tcttgcactatcgtctctccatcag

SEQ ID NO: 4874937 - DNA, 25 bp, Homo sapien
actatcgtctctccatcagctggaa

SEQ ID NO: 4874938 - DNA, 25 bp, Homo sapien
tttgactcttgcactatcgtctctc

SEQ ID NO: 4874939 - DNA, 25 bp, Homo sapien
gaaaggacttttgactcttgcacta

SEQ ID NO: 4874940 - DNA, 25 bp, Homo sapien
actctaacatagagatgtaactctg

SEQ ID NO: 4874941 - DNA, 25 bp, Homo sapien
ccatagagatgttacagagtttctc

SEQ ID NO: 4874942 - DNA, 25 bp, Homo sapien
aatattagctcatagacatacctag

SEQ ID NO: 4874943 - DNA, 25 bp, Homo sapien
catacctagagatgtaactctaaca

SEQ ID NO: 4874944 - DNA, 25 bp, Homo sapien
acttcctggcgagttcaagtcgtgc

SEQ ID NO: 4874945 - DNA, 25 bp, Homo sapien
cccacggttctttgcatcagtgtaa

SEQ ID NO: 4874946 - DNA, 25 bp, Homo sapien
gaatgggttgtccacgaagaaagaa

SEQ ID NO: 4874947 - DNA, 25 bp, Homo sapien
tcctagtacagagcattttgaagag

SEQ ID NO: 4874948 - DNA, 25 bp, Homo sapien
gcaataagggaatatagatccttca

SEQ ID NO: 4874949 - DNA, 25 bp, Homo sapien
ggaatatagatccttcagcccctat

SEQ ID NO: 4874950 - DNA, 25 bp, Homo sapien
tacaccttaagcatacgtcctgatc

SEQ ID NO: 4874951 - DNA, 25 bp, Homo sapien
taccatcttggcattgggtagccgt

SEQ ID NO: 4874952 - DNA, 25 bp, Homo sapien
ttccctgaggctacagattaagagg

SEQ ID NO: 4874953 - DNA, 25 bp, Homo sapien
tcttcgagttgagggtttaccatct

SEQ ID NO: 4874954 - DNA, 25 bp, Homo sapien
aagaacaaaggcctgcctgtaacac

SEQ ID NO: 4874955 - DNA, 25 bp, Homo sapien
ctgttcactgctgtcccagacccac

SEQ ID NO: 4874956 - DNA, 25 bp, Homo sapien
gacttctactagagctataacactg

SEQ ID NO: 4874957 - DNA, 25 bp, Homo sapien
agagaggtgtccattgccgctccca

SEQ ID NO: 4874958 - DNA, 25 bp, Homo sapien
aaataactagccaggaatcatttta

SEQ ID NO: 4874959 - DNA, 25 bp, Homo sapien
cacattatcaattgtattgctcata

SEQ ID NO: 4874960 - DNA, 25 bp, Homo sapien
taaataatcatactaactgctccct

SEQ ID NO: 4874961 - DNA, 25 bp, Homo sapien
gccttcatatgatttggatataaag

SEQ ID NO: 4874962 - DNA, 25 bp, Homo sapien
tgctttgtcattgttacgggaaagg

SEQ ID NO: 4874963 - DNA, 25 bp, Homo sapien
gcaggcatagaacaaagtgaatgct

SEQ ID NO: 4874964 - DNA, 25 bp, Homo sapien
tgaatcttgggcaagaaagaatttg

SEQ ID NO: 4874965 - DNA, 25 bp, Homo sapien
tgtgctttgtcattgttacgggaaa

SEQ ID NO: 4874966 - DNA, 25 bp, Homo sapien
ggcattgagtacctgcatcttttcc

SEQ ID NO: 4874967 - DNA, 25 bp, Homo sapien
tggactctctgtcggggctccgatc

SEQ ID NO: 4874968 - DNA, 25 bp, Homo sapien
taggctgcacaaagcacggggatgc

SEQ ID NO: 4874969 - DNA, 25 bp, Homo sapien
cattagactccttgctacatatgca

SEQ ID NO: 4874970 - DNA, 25 bp, Homo sapien
caaaaggcacttcttgcgtggcaag

SEQ ID NO: 4874971 - DNA, 25 bp, Homo sapien
caagtggcaaataagttcatgaaag

SEQ ID NO: 4874972 - DNA, 25 bp, Homo sapien
taccgttaattactagggaaatgca

SEQ ID NO: 4874973 - DNA, 25 bp, Homo sapien
cacacccactagaaaggctacaatc

SEQ ID NO: 4874974 - DNA, 25 bp, Homo sapien
tgagagtgaagccacagcgaagctt

SEQ ID NO: 4874975 - DNA, 25 bp, Homo sapien
tgtgtcccaggctatcagcatgcag

SEQ ID NO: 4874976 - DNA, 25 bp, Homo sapien
tgatggcagatacacgccctgagag

SEQ ID NO: 4874977 - DNA, 25 bp, Homo sapien
taatggcagcttctctaactccgga

SEQ ID NO: 4874978 - DNA, 25 bp, Homo sapien
catgagatcaaacagtttttggagt

SEQ ID NO: 4874979 - DNA, 25 bp, Homo sapien
ttccatgagatcaaacagtttttgg

SEQ ID NO: 4874980 - DNA, 25 bp, Homo sapien
ccatgagatcaaacagtttttggag

SEQ ID NO: 4874981 - DNA, 25 bp, Homo sapien
gctctgtggggctttcaagaggttc

SEQ ID NO: 4874982 - DNA, 25 bp, Homo sapien
caaatcacgaggtcaagaaatagag

SEQ ID NO: 4874983 - DNA, 25 bp, Homo sapien
agaaatagagaccaccctggcgaac

SEQ ID NO: 4874984 - DNA, 25 bp, Homo sapien
tcaagaaatagagaccaccctggcg

SEQ ID NO: 4874985 - DNA, 25 bp, Homo sapien
cgaggtcaagaaatagagaccaccc

SEQ ID NO: 4874986 - DNA, 25 bp, Homo sapien
ttagatgaatcaccagcaaggagaa

SEQ ID NO: 4874987 - DNA, 25 bp, Homo sapien
caacatgcctgttgtagctggcaca

SEQ ID NO: 4874988 - DNA, 25 bp, Homo sapien
cacttgaagctgtttagtcccatct

SEQ ID NO: 4874989 - DNA, 25 bp, Homo sapien
caattgctgggaccaataaagagtc

SEQ ID NO: 4874990 - DNA, 25 bp, Homo sapien
gagcccaggagtgccagtccccaaa

SEQ ID NO: 4874991 - DNA, 25 bp, Homo sapien
caggcctaggggtcccatggtccgg

SEQ ID NO: 4874992 - DNA, 25 bp, Homo sapien
catggtccggtccacccaggtggag

SEQ ID NO: 4874993 - DNA, 25 bp, Homo sapien
aggcaggcagttgccacaggacctc

SEQ ID NO: 4874994 - DNA, 25 bp, Homo sapien
tgtgcacgggcacaaagttctggct

SEQ ID NO: 4874995 - DNA, 25 bp, Homo sapien
tcgtggcagacgtctttgaagcgct

SEQ ID NO: 4874996 - DNA, 25 bp, Homo sapien
ccacatccagtgacaagtctgtgca

SEQ ID NO: 4874997 - DNA, 25 bp, Homo sapien
aaagttctggctcccgagccctcgt

SEQ ID NO: 4874998 - DNA, 25 bp, Homo sapien
tttcagagagttgcctgctgttgga

SEQ ID NO: 4874999 - DNA, 25 bp, Homo sapien
cctttcagagagttgcctgctgttg

SEQ ID NO: 4875000 - DNA, 25 bp, Homo sapien
tgcctgctgttggagaaagccgcac

SEQ ID NO: 4875001 - DNA, 25 bp, Homo sapien
gttgcctgctgttggagaaagccgc

SEQ ID NO: 4875002 - DNA, 25 bp, Homo sapien
acttccctggctagtgggcccactt

SEQ ID NO: 4875003 - DNA, 25 bp, Homo sapien
cttggtcctctttgacttccctggc

SEQ ID NO: 4875004 - DNA, 25 bp, Homo sapien
tcctctttgacttccctggctagtg

SEQ ID NO: 4875005 - DNA, 25 bp, Homo sapien
ggtcctctttgacttccctggctag

SEQ ID NO: 4875006 - DNA, 25 bp, Homo sapien
tctccccgtcccactctgccacaag

SEQ ID NO: 4875007 - DNA, 25 bp, Homo sapien
tgtcagggaagaatctagcttccct

SEQ ID NO: 4875008 - DNA, 25 bp, Homo sapien
tctgccacaagcacaacccaaacac

SEQ ID NO: 4875009 - DNA, 25 bp, Homo sapien
ggagcctgggggaacccatactctg

SEQ ID NO: 4875010 - DNA, 25 bp, Homo sapien
ggagtagtcattcccagtgaacaag

SEQ ID NO: 4875011 - DNA, 25 bp, Homo sapien
tctgcgggagcccagtaaagctcac

SEQ ID NO: 4875012 - DNA, 25 bp, Homo sapien
tagtctgcaggctgagaccgtgcat

SEQ ID NO: 4875013 - DNA, 25 bp, Homo sapien
taagtgttcagtaccaggtgctggg

SEQ ID NO: 4875014 - DNA, 25 bp, Homo sapien
tatccatcaggtcttaaattcggcc

SEQ ID NO: 4875015 - DNA, 25 bp, Homo sapien
ttcatccctaggctaactgcgcatc

SEQ ID NO: 4875016 - DNA, 25 bp, Homo sapien
tgccagagcagtttggcccaggtct

SEQ ID NO: 4875017 - DNA, 25 bp, Homo sapien
taactgcgcatctggctaactggcc

SEQ ID NO: 4875018 - DNA, 25 bp, Homo sapien
gaattttattcgcaacgtccttgga

SEQ ID NO: 4875019 - DNA, 25 bp, Homo sapien
tcagcttaaatcctgcattagccag

SEQ ID NO: 4875020 - DNA, 25 bp, Homo sapien
catcctgccacttcggtagtatact

SEQ ID NO: 4875021 - DNA, 25 bp, Homo sapien
gccagagggcaagaacagctttcct

SEQ ID NO: 4875022 - DNA, 25 bp, Homo sapien
aggctccgacgacatcacagataca

SEQ ID NO: 4875023 - DNA, 25 bp, Homo sapien
gaggacataaccctcagaagaccgt

SEQ ID NO: 4875024 - DNA, 25 bp, Homo sapien
cagatacagaggacataaccctcag

SEQ ID NO: 4875025 - DNA, 25 bp, Homo sapien
ccagagttcaggctccgacgacatc

SEQ ID NO: 4875026 - DNA, 25 bp, Homo sapien
tcctcctctgacgtggggtcctcca

SEQ ID NO: 4875027 - DNA, 25 bp, Homo sapien
ggcaggaccagggtcctcctctgac

SEQ ID NO: 4875028 - DNA, 25 bp, Homo sapien
ggaccagggtcctcctctgacgtgg

SEQ ID NO: 4875029 - DNA, 25 bp, Homo sapien
ctcctctgacgtggggtcctcctct

SEQ ID NO: 4875030 - DNA, 25 bp, Homo sapien
ttgagctggaccccaacaaacatga

SEQ ID NO: 4875031 - DNA, 25 bp, Homo sapien
ggctgatactgaaaatggctggtct

SEQ ID NO: 4875032 - DNA, 25 bp, Homo sapien
agggctgatactgaaaatggctggt

SEQ ID NO: 4875033 - DNA, 25 bp, Homo sapien
gagctggaccccaacaaacatgaca

SEQ ID NO: 4875034 - DNA, 25 bp, Homo sapien
gctgggccaagtcatcgccgatgac

SEQ ID NO: 4875035 - DNA, 25 bp, Homo sapien
ttaactgtcagggagccaatgccaa

SEQ ID NO: 4875036 - DNA, 25 bp, Homo sapien
cgccgatgacatgtgagttgtgtgt

SEQ ID NO: 4875037 - DNA, 25 bp, Homo sapien
tcagggagccaatgccaagcgctgg

SEQ ID NO: 4875038 - DNA, 25 bp, Homo sapien
ctggagccagtgtgagccgaagcca

SEQ ID NO: 4875039 - DNA, 25 bp, Homo sapien
ccagtgtgagccgaagccagaggtc

SEQ ID NO: 4875040 - DNA, 25 bp, Homo sapien
ctgcagaacaggggacctgcaggct

SEQ ID NO: 4875041 - DNA, 25 bp, Homo sapien
agtgtgagccgaagccagaggtccc

SEQ ID NO: 4875042 - DNA, 25 bp, Homo sapien
cagccgtatagttcaagccagtgga

SEQ ID NO: 4875043 - DNA, 25 bp, Homo sapien
tggcaactcccaacactactgaagt

SEQ ID NO: 4875044 - DNA, 25 bp, Homo sapien
cacagggctacgcatggatctctgc

SEQ ID NO: 4875045 - DNA, 25 bp, Homo sapien
cagtggaaacttctacatggcaact

SEQ ID NO: 4875046 - DNA, 25 bp, Homo sapien
actgccagctgttggatcgtcgtaa

SEQ ID NO: 4875047 - DNA, 25 bp, Homo sapien
tgctagaggcatgaacaatgggaaa

SEQ ID NO: 4875048 - DNA, 25 bp, Homo sapien
gacttgtggagcacgccacaggatg

SEQ ID NO: 4875049 - DNA, 25 bp, Homo sapien
gaataggtctgatgtctggatggct

SEQ ID NO: 4875050 - DNA, 25 bp, Homo sapien
gagctggtgggaaacatctccctgg

SEQ ID NO: 4875051 - DNA, 25 bp, Homo sapien
tagaggctgtttgcaatcagatggc

SEQ ID NO: 4875052 - DNA, 25 bp, Homo sapien
tagagagtggccaaacgcaaggttt

SEQ ID NO: 4875053 - DNA, 25 bp, Homo sapien
tagctctgtggaccctgttgccgct

SEQ ID NO: 4875054 - DNA, 25 bp, Homo sapien
tatgaggctggcacaccatcactga

SEQ ID NO: 4875055 - DNA, 25 bp, Homo sapien
aatatatgaggctggcacaccatca

SEQ ID NO: 4875056 - DNA, 25 bp, Homo sapien
gaggctggcacaccatcactgaaga

SEQ ID NO: 4875057 - DNA, 25 bp, Homo sapien
atatatgaggctggcacaccatcac

SEQ ID NO: 4875058 - DNA, 25 bp, Homo sapien
tgcaagtgaaacagcgctcctaggg

SEQ ID NO: 4875059 - DNA, 25 bp, Homo sapien
ctgcaagtgaaacagcgctcctagg

SEQ ID NO: 4875060 - DNA, 25 bp, Homo sapien
aagtgaaacagcgctcctagggaac

SEQ ID NO: 4875061 - DNA, 25 bp, Homo sapien
gcaagtgaaacagcgctcctaggga

SEQ ID NO: 4875062 - DNA, 25 bp, Homo sapien
agcgtagccaaagaacagtggagcc

SEQ ID NO: 4875063 - DNA, 25 bp, Homo sapien
atgcaggcagagacaccacttcacc

SEQ ID NO: 4875064 - DNA, 25 bp, Homo sapien
gcctcaaccaagacaggcagcgtag

SEQ ID NO: 4875065 - DNA, 25 bp, Homo sapien
gcacgtggagtagaagctcttggca

SEQ ID NO: 4875066 - DNA, 25 bp, Homo sapien
tccatcgtgggagtggttctgcaag

SEQ ID NO: 4875067 - DNA, 25 bp, Homo sapien
ttcatccctgccttccatcgtggga

SEQ ID NO: 4875068 - DNA, 25 bp, Homo sapien
cctgccttccatcgtgggagtggtt

SEQ ID NO: 4875069 - DNA, 25 bp, Homo sapien
cctctgaaataaaattgggaatggc

SEQ ID NO: 4875070 - DNA, 25 bp, Homo sapien
gagtgacctcccagactatccatgt

SEQ ID NO: 4875071 - DNA, 25 bp, Homo sapien
gctgtactgtacgtcatggaccaaa

SEQ ID NO: 4875072 - DNA, 25 bp, Homo sapien
tgtctcaccagtcatcatccacagg

SEQ ID NO: 4875073 - DNA, 25 bp, Homo sapien
gtttcctgcacgatttgtctcacca

SEQ ID NO: 4875074 - DNA, 25 bp, Homo sapien
gccactggtccagtcgcagggccct

SEQ ID NO: 4875075 - DNA, 25 bp, Homo sapien
ccacctgatgattgcttggtgacct

SEQ ID NO: 4875076 - DNA, 25 bp, Homo sapien
acccatcatttacatcgcagacccc

SEQ ID NO: 4875077 - DNA, 25 bp, Homo sapien
tcatttacatcgcagaccccttcct

SEQ ID NO: 4875078 - DNA, 25 bp, Homo sapien
gcaaacactgttatcttattgatgc

SEQ ID NO: 4875079 - DNA, 25 bp, Homo sapien
ggatctctattaataaatgtgtacc

SEQ ID NO: 4875080 - DNA, 25 bp, Homo sapien
cagactccaaagagtaggatctcta

SEQ ID NO: 4875081 - DNA, 25 bp, Homo sapien
cactctctccttagatgggtaggtg

SEQ ID NO: 4875082 - DNA, 25 bp, Homo sapien
atgatgttggctcacgcaactctct

SEQ ID NO: 4875083 - DNA, 25 bp, Homo sapien
tgttggctcacgcaactctctgctg

SEQ ID NO: 4875084 - DNA, 25 bp, Homo sapien
ggacctggctgactgatctcacagt

SEQ ID NO: 4875085 - DNA, 25 bp, Homo sapien
ggctcacgcaactctctgctggctt

SEQ ID NO: 4875086 - DNA, 25 bp, Homo sapien
ctctctccaccttaaaagagctcca

SEQ ID NO: 4875087 - DNA, 25 bp, Homo sapien
gtgcacagaatatggtgctgctggt

SEQ ID NO: 4875088 - DNA, 25 bp, Homo sapien
gcacagaatatggtgctgctggtcc

SEQ ID NO: 4875089 - DNA, 25 bp, Homo sapien
caagggtgcacagaatatggtgctg

SEQ ID NO: 4875090 - DNA, 25 bp, Homo sapien
tacctccaggtctattccggggcat

SEQ ID NO: 4875091 - DNA, 25 bp, Homo sapien
ttacctccaggtctattccggggca

SEQ ID NO: 4875092 - DNA, 25 bp, Homo sapien
ctgaaggcttgacagtcaggccaca

SEQ ID NO: 4875093 - DNA, 25 bp, Homo sapien
tgaaggcttgacagtcaggccacat

SEQ ID NO: 4875094 - DNA, 25 bp, Homo sapien
aagattctggaaaatagctaaagcc

SEQ ID NO: 4875095 - DNA, 25 bp, Homo sapien
tgagtgaggtagtgtctagtgacac

SEQ ID NO: 4875096 - DNA, 25 bp, Homo sapien
gagcctaaattaatatcaccatctg

SEQ ID NO: 4875097 - DNA, 25 bp, Homo sapien
tggaaaatagctaaagccaggatga

SEQ ID NO: 4875098 - DNA, 25 bp, Homo sapien
ttgtttccacgtctggccaacacca

SEQ ID NO: 4875099 - DNA, 25 bp, Homo sapien
cctgtgaagtgggacattttcattc

SEQ ID NO: 4875100 - DNA, 25 bp, Homo sapien
tgctcccatgcagggtgttgtttcc

SEQ ID NO: 4875101 - DNA, 25 bp, Homo sapien
ttcttcatcaactcaaatctgctcc

SEQ ID NO: 4875102 - DNA, 25 bp, Homo sapien
tctggtggtaagtcacagtcagcca

SEQ ID NO: 4875103 - DNA, 25 bp, Homo sapien
ccaaggagactgtcctctggtgggc

SEQ ID NO: 4875104 - DNA, 25 bp, Homo sapien
tgttggacaccgtgctgggctttga

SEQ ID NO: 4875105 - DNA, 25 bp, Homo sapien
cagtcagccaacagtgtctccagat

SEQ ID NO: 4875106 - DNA, 25 bp, Homo sapien
gccagtggcagaatgttatctttat

SEQ ID NO: 4875107 - DNA, 25 bp, Homo sapien
gatcttctgacttcacctactgttg

SEQ ID NO: 4875108 - DNA, 25 bp, Homo sapien
tatcagatatcaggctaccgtcaaa

SEQ ID NO: 4875109 - DNA, 25 bp, Homo sapien
caaagaatggcccactgctagacat

SEQ ID NO: 4875110 - DNA, 25 bp, Homo sapien
tcttaactgcctgtcccctgctccc

SEQ ID NO: 4875111 - DNA, 25 bp, Homo sapien
gctcctcacactgaattgaactgtt

SEQ ID NO: 4875112 - DNA, 25 bp, Homo sapien
ctcttaactgcctgtcccctgctcc

SEQ ID NO: 4875113 - DNA, 25 bp, Homo sapien
cacgctgctgtgcattctctggaca

SEQ ID NO: 4875114 - DNA, 25 bp, Homo sapien
gatgtaaccttcttcgggaagtcac

SEQ ID NO: 4875115 - DNA, 25 bp, Homo sapien
tgcaagactcttccatcaaggacca

SEQ ID NO: 4875116 - DNA, 25 bp, Homo sapien
ggcccagtgcctccagagtatgcag

SEQ ID NO: 4875117 - DNA, 25 bp, Homo sapien
agccttttccaaccactccagcgaa

SEQ ID NO: 4875118 - DNA, 25 bp, Homo sapien
tttccaaccactccagcgaaggcgg

SEQ ID NO: 4875119 - DNA, 25 bp, Homo sapien
ccttttccaaccactccagcgaagg

SEQ ID NO: 4875120 - DNA, 25 bp, Homo sapien
gctgctgctgcgtgtggcacccacc

SEQ ID NO: 4875121 - DNA, 25 bp, Homo sapien
gcagggtgcttggaaactctttaaa

SEQ ID NO: 4875122 - DNA, 25 bp, Homo sapien
tatttacactgtcttggagcctggt

SEQ ID NO: 4875123 - DNA, 25 bp, Homo sapien
tgaaagctttgcaaccggtttctgt

SEQ ID NO: 4875124 - DNA, 25 bp, Homo sapien
cctggaacaggaaactctatttaca

SEQ ID NO: 4875125 - DNA, 25 bp, Homo sapien
gacacctgattagcacaatgcatta

SEQ ID NO: 4875126 - DNA, 25 bp, Homo sapien
tcacccctcttaggtaacttggtga

SEQ ID NO: 4875127 - DNA, 25 bp, Homo sapien
cacccctcttaggtaacttggtgat

SEQ ID NO: 4875128 - DNA, 25 bp, Homo sapien
tggacacctgattagcacaatgcat

SEQ ID NO: 4875129 - DNA, 25 bp, Homo sapien
gcaatcccactattgtttagcacag

SEQ ID NO: 4875130 - DNA, 25 bp, Homo sapien
caagtgcaatcccactattgtttag

SEQ ID NO: 4875131 - DNA, 25 bp, Homo sapien
agtgcaatcccactattgtttagca

SEQ ID NO: 4875132 - DNA, 25 bp, Homo sapien
ctactcacaagtgcaatcccactat

SEQ ID NO: 4875133 - DNA, 25 bp, Homo sapien
cttctgtagaaccagataattccta

SEQ ID NO: 4875134 - DNA, 25 bp, Homo sapien
ctctacttctgtagaaccagataat

SEQ ID NO: 4875135 - DNA, 25 bp, Homo sapien
tgtgcccactttaacctccttctga

SEQ ID NO: 4875136 - DNA, 25 bp, Homo sapien
cctgtgcccactttaacctccttct

SEQ ID NO: 4875137 - DNA, 25 bp, Homo sapien
tgatgataggacatcccagagccag

SEQ ID NO: 4875138 - DNA, 25 bp, Homo sapien
gacctagggcacgtaaacaggctct

SEQ ID NO: 4875139 - DNA, 25 bp, Homo sapien
gataccccaaaagttagctgcagtg

SEQ ID NO: 4875140 - DNA, 25 bp, Homo sapien
gaaaatctgacagggtcgtgtctac

SEQ ID NO: 4875141 - DNA, 25 bp, Homo sapien
ccgaaggagaatagacgcggtccct

SEQ ID NO: 4875142 - DNA, 25 bp, Homo sapien
ttatcagcagcgtgcccactgtgcg

SEQ ID NO: 4875143 - DNA, 25 bp, Homo sapien
cgcggtccctgcctcggaggaatgt

SEQ ID NO: 4875144 - DNA, 25 bp, Homo sapien
cggaggaatgtaccgtgccgtgtca

SEQ ID NO: 4875145 - DNA, 25 bp, Homo sapien
cattttacttggacgccttctccca

SEQ ID NO: 4875146 - DNA, 25 bp, Homo sapien
gcatgcattttacttggacgccttc

SEQ ID NO: 4875147 - DNA, 25 bp, Homo sapien
gaccggagcatgcattttacttgga

SEQ ID NO: 4875148 - DNA, 25 bp, Homo sapien
ccccgatgaccggagcatgcatttt

SEQ ID NO: 4875149 - DNA, 25 bp, Homo sapien
gcagatgctgcagtgcgggtccgat

SEQ ID NO: 4875150 - DNA, 25 bp, Homo sapien
atccagcccctgcggtgctccactg

SEQ ID NO: 4875151 - DNA, 25 bp, Homo sapien
gctgcagtgcgggtccgatccagcc

SEQ ID NO: 4875152 - DNA, 25 bp, Homo sapien
ccagcccctgcggtgctccactgct

SEQ ID NO: 4875153 - DNA, 25 bp, Homo sapien
ggagtggcccggaaaatcgcggcca

SEQ ID NO: 4875154 - DNA, 25 bp, Homo sapien
tggaggtcgaaggtcgcgggcggga

SEQ ID NO: 4875155 - DNA, 25 bp, Homo sapien
aaaatcgcggccaccggctgtgccg

SEQ ID NO: 4875156 - DNA, 25 bp, Homo sapien
tccaggatggaggtcgaaggtcgcg

SEQ ID NO: 4875157 - DNA, 25 bp, Homo sapien
acgcttatccgtgggcccctgagtg

SEQ ID NO: 4875158 - DNA, 25 bp, Homo sapien
cactcaagtcgatcgggaaggaccc

SEQ ID NO: 4875159 - DNA, 25 bp, Homo sapien
acctaggcagatccgggttggcgct

SEQ ID NO: 4875160 - DNA, 25 bp, Homo sapien
tggaggaatcagagccacgcttatc

SEQ ID NO: 4875161 - DNA, 25 bp, Homo sapien
tcagcgggcgcagaaattaactcgg

SEQ ID NO: 4875162 - DNA, 25 bp, Homo sapien
cagaaattaactcgggtaggtggcg

SEQ ID NO: 4875163 - DNA, 25 bp, Homo sapien
ctttggtcagcgggcgcagaaatta

SEQ ID NO: 4875164 - DNA, 25 bp, Homo sapien
cgggcgcagaaattaactcgggtag

SEQ ID NO: 4875165 - DNA, 25 bp, Homo sapien
ctgggcaaggaagcgactagcgcac

SEQ ID NO: 4875166 - DNA, 25 bp, Homo sapien
tccttgggccggacccgaggctcta

SEQ ID NO: 4875167 - DNA, 25 bp, Homo sapien
ccaagaagctgtgcccgttgccagt

SEQ ID NO: 4875168 - DNA, 25 bp, Homo sapien
gacccgaggctctaaaggctgggca

SEQ ID NO: 4875169 - DNA, 25 bp, Homo sapien
cgcccgtgttctggcctgtcgcggt

SEQ ID NO: 4875170 - DNA, 25 bp, Homo sapien
gagtgaggcactgagatgccccgag

SEQ ID NO: 4875171 - DNA, 25 bp, Homo sapien
ggtctggtctacagcgtacccaggg

SEQ ID NO: 4875172 - DNA, 25 bp, Homo sapien
tgtcgcggtctggtctacagcgtac

SEQ ID NO: 4875173 - DNA, 25 bp, Homo sapien
tccccgatggggctcagcgactcgg

SEQ ID NO: 4875174 - DNA, 25 bp, Homo sapien
tggctctggtcgtcactggcgtatc

SEQ ID NO: 4875175 - DNA, 25 bp, Homo sapien
tggcgtatcccgcatccgggctgct

SEQ ID NO: 4875176 - DNA, 25 bp, Homo sapien
ctctgggtctggctctggtcgtcac

SEQ ID NO: 4875177 - DNA, 25 bp, Homo sapien
ggtgctccgctgttcgccggcgcct

SEQ ID NO: 4875178 - DNA, 25 bp, Homo sapien
ggtctggattctgctgcgccagccg

SEQ ID NO: 4875179 - DNA, 25 bp, Homo sapien
ggatacgggactcgcccttggctcg

SEQ ID NO: 4875180 - DNA, 25 bp, Homo sapien
cgttcatcggccgccggatacggga

SEQ ID NO: 4875181 - DNA, 25 bp, Homo sapien
catcacccggtcgttcgaaaaacag

SEQ ID NO: 4875182 - DNA, 25 bp, Homo sapien
tcagactttgaattgcgcaaccggg

SEQ ID NO: 4875183 - DNA, 25 bp, Homo sapien
tggccgctacacacccctggttttg

SEQ ID NO: 4875184 - DNA, 25 bp, Homo sapien
gccttaagaaaggacgtggccgcta

SEQ ID NO: 4875185 - DNA, 25 bp, Homo sapien
agcgtcagcgccttccacgacttgc

SEQ ID NO: 4875186 - DNA, 25 bp, Homo sapien
tacttgtagttggggtggtcctgca

SEQ ID NO: 4875187 - DNA, 25 bp, Homo sapien
tggtcctgcatgtgctgcacgcgca

SEQ ID NO: 4875188 - DNA, 25 bp, Homo sapien
aagggccgcttctccgccagcgtca

SEQ ID NO: 4875189 - DNA, 25 bp, Homo sapien
gactctggcagtcgcggtagtggcc

SEQ ID NO: 4875190 - DNA, 25 bp, Homo sapien
tagtggccgcccatgtgcggaggca

SEQ ID NO: 4875191 - DNA, 25 bp, Homo sapien
caacgggtagccgtcgagcggaggc

SEQ ID NO: 4875192 - DNA, 25 bp, Homo sapien
ctgcgcgtagctgtaggtgccggcc

SEQ ID NO: 4875193 - DNA, 25 bp, Homo sapien
gggtgcatgggaccggcgggaggct

SEQ ID NO: 4875194 - DNA, 25 bp, Homo sapien
tccggggggccagcgtagtccgaga

SEQ ID NO: 4875195 - DNA, 25 bp, Homo sapien
cggaatcgagggacccgcgggctct

SEQ ID NO: 4875196 - DNA, 25 bp, Homo sapien
aagggcgctgggtggcgccaggagg

SEQ ID NO: 4875197 - DNA, 25 bp, Homo sapien
gggcgagcccatcgcgccgtagtac

SEQ ID NO: 4875198 - DNA, 25 bp, Homo sapien
cccgccccgggcgagcccatcgcgc

SEQ ID NO: 4875199 - DNA, 25 bp, Homo sapien
cccgggcgagcccatcgcgccgtag

SEQ ID NO: 4875200 - DNA, 25 bp, Homo sapien
cgccccgggcgagcccatcgcgccg

SEQ ID NO: 4875201 - DNA, 25 bp, Homo sapien
tggcgtcggacaccaccgaggaaat

SEQ ID NO: 4875202 - DNA, 25 bp, Homo sapien
tgcagtaatataccgcggagctggc

SEQ ID NO: 4875203 - DNA, 25 bp, Homo sapien
tcacacgtcaggatagttgcagtaa

SEQ ID NO: 4875204 - DNA, 25 bp, Homo sapien
gggagattcacaccggagtcatgcc

SEQ ID NO: 4875205 - DNA, 25 bp, Homo sapien
ccaaactgttcaagtggcagacaaa

SEQ ID NO: 4875206 - DNA, 25 bp, Homo sapien
caaagctagttaacttgaacttgga

SEQ ID NO: 4875207 - DNA, 25 bp, Homo sapien
tgtgtaacactgcttctggcctgca

SEQ ID NO: 4875208 - DNA, 25 bp, Homo sapien
gggttttgacaatccaactatggga

SEQ ID NO: 4875209 - DNA, 25 bp, Homo sapien
tatgttcacccttttcgaggatgag

SEQ ID NO: 4875210 - DNA, 25 bp, Homo sapien
agcgatgcttgccacttcccaaggt

SEQ ID NO: 4875211 - DNA, 25 bp, Homo sapien
gcaggtcaagcttatgattcaacag

SEQ ID NO: 4875212 - DNA, 25 bp, Homo sapien
tggacatccccttctacttaaagtg

SEQ ID NO: 4875213 - DNA, 25 bp, Homo sapien
cgtcaccgccggcagcgcgctccgg

SEQ ID NO: 4875214 - DNA, 25 bp, Homo sapien
ttcaccttcaagtccccgagggagc

SEQ ID NO: 4875215 - DNA, 25 bp, Homo sapien
aggacaggggcccagcctagccgtc

SEQ ID NO: 4875216 - DNA, 25 bp, Homo sapien
agctcggcaactcggcccaaggaca

SEQ ID NO: 4875217 - DNA, 25 bp, Homo sapien
cgccgtccagcagggcgcgtctttg

SEQ ID NO: 4875218 - DNA, 25 bp, Homo sapien
tgttcccaggagactccgctggctg

SEQ ID NO: 4875219 - DNA, 25 bp, Homo sapien
taatacatggtaagctggtaacgca

SEQ ID NO: 4875220 - DNA, 25 bp, Homo sapien
tggtaacgcaactcaagaggcctga

SEQ ID NO: 4875221 - DNA, 25 bp, Homo sapien
aacagagtgctaaaatagtgaagaa

SEQ ID NO: 4875222 - DNA, 25 bp, Homo sapien
ccaagacagaaaccaagaaagttgg

SEQ ID NO: 4875223 - DNA, 25 bp, Homo sapien
tctagtaagcgcaaactagttaaga

SEQ ID NO: 4875224 - DNA, 25 bp, Homo sapien
gttaagagggaaatagcaattctac

SEQ ID NO: 4875225 - DNA, 25 bp, Homo sapien
agcagaactttctatttgaagtccc

SEQ ID NO: 4875226 - DNA, 25 bp, Homo sapien
cagaactttctatttgaagtcccgg

SEQ ID NO: 4875227 - DNA, 25 bp, Homo sapien
gaggcagggcggccaagcttctggt

SEQ ID NO: 4875228 - DNA, 25 bp, Homo sapien
aggcagggcggccaagcttctggtc

SEQ ID NO: 4875229 - DNA, 25 bp, Homo sapien
ccatctgacggccacgtcttcagtg

SEQ ID NO: 4875230 - DNA, 25 bp, Homo sapien
ctgacggccacgtcttcagtgaaca

SEQ ID NO: 4875231 - DNA, 25 bp, Homo sapien
gtcttcagtgaacactgcccacttc

SEQ ID NO: 4875232 - DNA, 25 bp, Homo sapien
ttttcctcccatctgacggccacgt

SEQ ID NO: 4875233 - DNA, 25 bp, Homo sapien
attccagccgcaggcgttccttggg

SEQ ID NO: 4875234 - DNA, 25 bp, Homo sapien
ctctattgttacagctccctgtctc

SEQ ID NO: 4875235 - DNA, 25 bp, Homo sapien
ccggggaattccagccgcaggcgtt

SEQ ID NO: 4875236 - DNA, 25 bp, Homo sapien
tgtctcccggggaattccagccgca

SEQ ID NO: 4875237 - DNA, 25 bp, Homo sapien
taatatttgtctggagaagtatgtg

SEQ ID NO: 4875238 - DNA, 25 bp, Homo sapien
agttcaacaccatgaagtggaggtc

SEQ ID NO: 4875239 - DNA, 25 bp, Homo sapien
ctagcagattggttcagttcaacaa

SEQ ID NO: 4875240 - DNA, 25 bp, Homo sapien
gaagtggaggtcatgtccccataac

SEQ ID NO: 4875241 - DNA, 25 bp, Homo sapien
tgaggcatggaaacataggagcttt

SEQ ID NO: 4875242 - DNA, 25 bp, Homo sapien
gattttttgtggcatataatgaggc

SEQ ID NO: 4875243 - DNA, 25 bp, Homo sapien
gtggcatataatgaggcatggaaac

SEQ ID NO: 4875244 - DNA, 25 bp, Homo sapien
gaggcatggaaacataggagctttt

SEQ ID NO: 4875245 - DNA, 25 bp, Homo sapien
agtgaaccctcctctaattgtgctg

SEQ ID NO: 4875246 - DNA, 25 bp, Homo sapien
tagtagcgactgcaaacacttcaca

SEQ ID NO: 4875247 - DNA, 25 bp, Homo sapien
tcagatgctgcctacgagtgaaccc

SEQ ID NO: 4875248 - DNA, 25 bp, Homo sapien
tcttaatgaagagagctggagcgtg

SEQ ID NO: 4875249 - DNA, 25 bp, Homo sapien
gaggagctgggttcaaacgcagacc

SEQ ID NO: 4875250 - DNA, 25 bp, Homo sapien
gaggaattccgaggcacttggctgc

SEQ ID NO: 4875251 - DNA, 25 bp, Homo sapien
ggatggaggtcccaaccctcacatc

SEQ ID NO: 4875252 - DNA, 25 bp, Homo sapien
ctcacatcaagaggaattccgaggc

SEQ ID NO: 4875253 - DNA, 25 bp, Homo sapien
caactcgtaccttaactgaaatgaa

SEQ ID NO: 4875254 - DNA, 25 bp, Homo sapien
aaaggaggactcagcgggccccaat

SEQ ID NO: 4875255 - DNA, 25 bp, Homo sapien
cagctttctagcagcgggcgtgtga

SEQ ID NO: 4875256 - DNA, 25 bp, Homo sapien
gaatgtctgcacagcagtcagaaca

SEQ ID NO: 4875257 - DNA, 25 bp, Homo sapien
ctgcaccatcggcacctacactaag

SEQ ID NO: 4875258 - DNA, 25 bp, Homo sapien
ctacactaagacttagggcctgcct

SEQ ID NO: 4875259 - DNA, 25 bp, Homo sapien
cctacactaagacttagggcctgcc

SEQ ID NO: 4875260 - DNA, 25 bp, Homo sapien
cacctacactaagacttagggcctg

SEQ ID NO: 4875261 - DNA, 25 bp, Homo sapien
ttacacagccacagcattattccca

SEQ ID NO: 4875262 - DNA, 25 bp, Homo sapien
acacagccacagcattattcccaac

SEQ ID NO: 4875263 - DNA, 25 bp, Homo sapien
tacacagccacagcattattcccaa

SEQ ID NO: 4875264 - DNA, 25 bp, Homo sapien
gtatgcaggatatcacagtattaat

SEQ ID NO: 4875265 - DNA, 25 bp, Homo sapien
tattcaccaatcatgtatagaaagc

SEQ ID NO: 4875266 - DNA, 25 bp, Homo sapien
tgttccagcaataatgcttgttatt

SEQ ID NO: 4875267 - DNA, 25 bp, Homo sapien
agtctatccatagaatgttccagca

SEQ ID NO: 4875268 - DNA, 25 bp, Homo sapien
gtgggctattgatgaactttgtgga

SEQ ID NO: 4875269 - DNA, 25 bp, Homo sapien
aggcaatcctggtgtctgggtggat

SEQ ID NO: 4875270 - DNA, 25 bp, Homo sapien
atcatgcccctctatggcagggtga

SEQ ID NO: 4875271 - DNA, 25 bp, Homo sapien
accacatgtgggctattgatgaact

SEQ ID NO: 4875272 - DNA, 25 bp, Homo sapien
caggacgacactgattaagtttggg

SEQ ID NO: 4875273 - DNA, 25 bp, Homo sapien
tcttatcaggacgacactgattaag

SEQ ID NO: 4875274 - DNA, 25 bp, Homo sapien
tctagaatagcttggggtcagctca

SEQ ID NO: 4875275 - DNA, 25 bp, Homo sapien
tccctctcttatcaggacgacactg

SEQ ID NO: 4875276 - DNA, 25 bp, Homo sapien
gagagagccaccaggtagagattct

SEQ ID NO: 4875277 - DNA, 25 bp, Homo sapien
ccaccaggtagagattctaaaatct

SEQ ID NO: 4875278 - DNA, 25 bp, Homo sapien
ggcccattcctctagccactccttc

SEQ ID NO: 4875279 - DNA, 25 bp, Homo sapien
tgcctggcccattcctctagccact

SEQ ID NO: 4875280 - DNA, 25 bp, Homo sapien
cttgggcctcggtaccatccgacat

SEQ ID NO: 4875281 - DNA, 25 bp, Homo sapien
ctccatggtataggcctggcttaga

SEQ ID NO: 4875282 - DNA, 25 bp, Homo sapien
tgccatcagaattggtatcacaacc

SEQ ID NO: 4875283 - DNA, 25 bp, Homo sapien
gactgtcacgggcagcattgccagg

SEQ ID NO: 4875284 - DNA, 25 bp, Homo sapien
caatcctccttctaactccatggta

SEQ ID NO: 4875285 - DNA, 25 bp, Homo sapien
aatgattgacactttttacaccaaa

SEQ ID NO: 4875286 - DNA, 25 bp, Homo sapien
gacagcaacattttccctcttacat

SEQ ID NO: 4875287 - DNA, 25 bp, Homo sapien
ccaaaaataggcagttgtttcccat

SEQ ID NO: 4875288 - DNA, 25 bp, Homo sapien
tcccatctattcagatagctttcac

SEQ ID NO: 4875289 - DNA, 25 bp, Homo sapien
tgtgcttctaacaaaaggtagggca

SEQ ID NO: 4875290 - DNA, 25 bp, Homo sapien
tgaggtccaacacaaagtgctcttc

SEQ ID NO: 4875291 - DNA, 25 bp, Homo sapien
caaaatatcacttgtagcataccag

SEQ ID NO: 4875292 - DNA, 25 bp, Homo sapien
caaaaggtagggcactcataaaggt

SEQ ID NO: 4875293 - DNA, 25 bp, Homo sapien
aaataaatgtcactggatatgtaac

SEQ ID NO: 4875294 - DNA, 25 bp, Homo sapien
tcactggatatgtaacctcatttcg

SEQ ID NO: 4875295 - DNA, 25 bp, Homo sapien
tatgtaacctcatttcgtgcaaaga

SEQ ID NO: 4875296 - DNA, 25 bp, Homo sapien
catttcgtgcaaagaaactaatgtc

SEQ ID NO: 4875297 - DNA, 25 bp, Homo sapien
tttgtccaggtctacaggctgcacc

SEQ ID NO: 4875298 - DNA, 25 bp, Homo sapien
gaaactgattcgcttggccacaaca

SEQ ID NO: 4875299 - DNA, 25 bp, Homo sapien
ggacaagttatccagcagagcatca

SEQ ID NO: 4875300 - DNA, 25 bp, Homo sapien
gggaacataggtaggactcgccgtc

SEQ ID NO: 4875301 - DNA, 25 bp, Homo sapien
cctgaagaccactaggctccgtggg

SEQ ID NO: 4875302 - DNA, 25 bp, Homo sapien
tcagaagaaccgcacgcctcgtctt

SEQ ID NO: 4875303 - DNA, 25 bp, Homo sapien
gcatgacctctgtcaggtgctgtag

SEQ ID NO: 4875304 - DNA, 25 bp, Homo sapien
tgtagaaatgcctcgaagctctggg

SEQ ID NO: 4875305 - DNA, 25 bp, Homo sapien
tccgtagcgtacagcttgaccacag

SEQ ID NO: 4875306 - DNA, 25 bp, Homo sapien
gtagcgtacagcttgaccacagggc

SEQ ID NO: 4875307 - DNA, 25 bp, Homo sapien
tccgtccgtagcgtacagcttgacc

SEQ ID NO: 4875308 - DNA, 25 bp, Homo sapien
tccttccgtccgtagcgtacagctt

SEQ ID NO: 4875309 - DNA, 25 bp, Homo sapien
gctcgaggagcccccagaacgctca

SEQ ID NO: 4875310 - DNA, 25 bp, Homo sapien
aggctcgaggagcccccagaacgct

SEQ ID NO: 4875311 - DNA, 25 bp, Homo sapien
tcaggctcgaggagcccccagaacg

SEQ ID NO: 4875312 - DNA, 25 bp, Homo sapien
ctcgaggagcccccagaacgctcac

SEQ ID NO: 4875313 - DNA, 25 bp, Homo sapien
tttcccttggggtacacacgctgag

SEQ ID NO: 4875314 - DNA, 25 bp, Homo sapien
tccctggtaatctagcaggaagcaa

SEQ ID NO: 4875315 - DNA, 25 bp, Homo sapien
gggtacacacgctgagagatccctg

SEQ ID NO: 4875316 - DNA, 25 bp, Homo sapien
tatttttggatgtcataatttcctg

SEQ ID NO: 4875317 - DNA, 25 bp, Homo sapien
aaactggtcattgaagcatggattt

SEQ ID NO: 4875318 - DNA, 25 bp, Homo sapien
aagaaacagaataaatctgggacct

SEQ ID NO: 4875319 - DNA, 25 bp, Homo sapien
taaatctgggaccttgagcttgaag

SEQ ID NO: 4875320 - DNA, 25 bp, Homo sapien
tctgggaccttgagcttgaagacat

SEQ ID NO: 4875321 - DNA, 25 bp, Homo sapien
cagaataaatctgggaccttgagct

SEQ ID NO: 4875322 - DNA, 25 bp, Homo sapien
gatatattggtaaattctgagaatc

SEQ ID NO: 4875323 - DNA, 25 bp, Homo sapien
atatattggtaaattctgagaatca

SEQ ID NO: 4875324 - DNA, 25 bp, Homo sapien
ggatatattggtaaattctgagaat

SEQ ID NO: 4875325 - DNA, 25 bp, Homo sapien
tattctgaatcgaactttcatctca

SEQ ID NO: 4875326 - DNA, 25 bp, Homo sapien
ttattctgaatcgaactttcatctc

SEQ ID NO: 4875327 - DNA, 25 bp, Homo sapien
ttctgaatcgaactttcatctcaac

SEQ ID NO: 4875328 - DNA, 25 bp, Homo sapien
attctgaatcgaactttcatctcaa

SEQ ID NO: 4875329 - DNA, 25 bp, Homo sapien
tactgcttcgctccataggtgacac

SEQ ID NO: 4875330 - DNA, 25 bp, Homo sapien
cagtagcattctcccaactagcaga

SEQ ID NO: 4875331 - DNA, 25 bp, Homo sapien
taaggtcacactgccaatcacagat

SEQ ID NO: 4875332 - DNA, 25 bp, Homo sapien
caagctttaaaccagatgatcgact

SEQ ID NO: 4875333 - DNA, 25 bp, Homo sapien
taagaattcctttggttgcaagctg

SEQ ID NO: 4875334 - DNA, 25 bp, Homo sapien
tctcctgtcaaaccggcaattttag

SEQ ID NO: 4875335 - DNA, 25 bp, Homo sapien
gatgccacttctgcttgagattgcg

SEQ ID NO: 4875336 - DNA, 25 bp, Homo sapien
gaagctaaagaatttgccctggttg

SEQ ID NO: 4875337 - DNA, 25 bp, Homo sapien
taggtttagcaccaagagccaagct

SEQ ID NO: 4875338 - DNA, 25 bp, Homo sapien
aacgtaggtctcatcaattgggcaa

SEQ ID NO: 4875339 - DNA, 25 bp, Homo sapien
aacctgagatttgcgggtagaccca

SEQ ID NO: 4875340 - DNA, 25 bp, Homo sapien
tctaaagatggtggtgttgccagcc

SEQ ID NO: 4875341 - DNA, 25 bp, Homo sapien
gagttcatccatcgttgggcctggg

SEQ ID NO: 4875342 - DNA, 25 bp, Homo sapien
tctgagtcactaccatgaggcatgt

SEQ ID NO: 4875343 - DNA, 25 bp, Homo sapien
tgggcaatgttgaccacaaagagca

SEQ ID NO: 4875344 - DNA, 25 bp, Homo sapien
cactgatgtggtgtctgcattgcca

SEQ ID NO: 4875345 - DNA, 25 bp, Homo sapien
tgtctgaagtaaatatgggtgtatt

SEQ ID NO: 4875346 - DNA, 25 bp, Homo sapien
gtctgaagtaaatatgggtgtattt

SEQ ID NO: 4875347 - DNA, 25 bp, Homo sapien
ctgaagtaaatatgggtgtattttc

SEQ ID NO: 4875348 - DNA, 25 bp, Homo sapien
gaagtaaatatgggtgtattttcat

SEQ ID NO: 4875349 - DNA, 25 bp, Homo sapien
tcttttacccatcaagtcaaatgtg

SEQ ID NO: 4875350 - DNA, 25 bp, Homo sapien
cccatcaagtcaaatgtgttactga

SEQ ID NO: 4875351 - DNA, 25 bp, Homo sapien
caaatgtgttactgaaataaaactg

SEQ ID NO: 4875352 - DNA, 25 bp, Homo sapien
tttcttcttttacccatcaagtcaa

SEQ ID NO: 4875353 - DNA, 25 bp, Homo sapien
ttaaggaggtctcaacttggcaaat

SEQ ID NO: 4875354 - DNA, 25 bp, Homo sapien
ttgagatttgttcttgagccctgga

SEQ ID NO: 4875355 - DNA, 25 bp, Homo sapien
caactaacaatgatgtgtgcaagaa

SEQ ID NO: 4875356 - DNA, 25 bp, Homo sapien
accgctgaggtcttgtgtatttgaa

SEQ ID NO: 4875357 - DNA, 25 bp, Homo sapien
aatcttcttgttctctactgctttc

SEQ ID NO: 4875358 - DNA, 25 bp, Homo sapien
tcttcccaaatgaaaagattttcac

SEQ ID NO: 4875359 - DNA, 25 bp, Homo sapien
atttaatatgtcttcctcttcccaa

SEQ ID NO: 4875360 - DNA, 25 bp, Homo sapien
tactgctttcaagatcagttaaatt

SEQ ID NO: 4875361 - DNA, 25 bp, Homo sapien
tccaaaataagagaacctgagtctg

SEQ ID NO: 4875362 - DNA, 25 bp, Homo sapien
tcgtcacatgtgcttcatctcatgg

SEQ ID NO: 4875363 - DNA, 25 bp, Homo sapien
gaggttatctagtccgtattcgtca

SEQ ID NO: 4875364 - DNA, 25 bp, Homo sapien
tcaaactggttatccaagggtaagc

SEQ ID NO: 4875365 - DNA, 25 bp, Homo sapien
aaaagaataagtgaagtactttgag

SEQ ID NO: 4875366 - DNA, 25 bp, Homo sapien
agattgtcgtggatatcttataatc

SEQ ID NO: 4875367 - DNA, 25 bp, Homo sapien
aaactatgagattgtcgtggatatc

SEQ ID NO: 4875368 - DNA, 25 bp, Homo sapien
aaagaataagtgaagtactttgagg

SEQ ID NO: 4875369 - DNA, 25 bp, Homo sapien
taatgaattcctgtgatgtacaagt

SEQ ID NO: 4875370 - DNA, 25 bp, Homo sapien
atataatgaattcctgtgatgtaca

SEQ ID NO: 4875371 - DNA, 25 bp, Homo sapien
tataatgaattcctgtgatgtacaa

SEQ ID NO: 4875372 - DNA, 25 bp, Homo sapien
aatgaattcctgtgatgtacaagtc

SEQ ID NO: 4875373 - DNA, 25 bp, Homo sapien
acctgaaatcgagccccatctgttc

SEQ ID NO: 4875374 - DNA, 25 bp, Homo sapien
gtcttcatggccaacctgaaatcga

SEQ ID NO: 4875375 - DNA, 25 bp, Homo sapien
ggtccctgcatctggcaagtcactg

SEQ ID NO: 4875376 - DNA, 25 bp, Homo sapien
gggctgaacttctatgttgtccata

SEQ ID NO: 4875377 - DNA, 25 bp, Homo sapien
ccagagttggtatgaccaatacgaa

SEQ ID NO: 4875378 - DNA, 25 bp, Homo sapien
ggaggatccagagttggtatgacca

SEQ ID NO: 4875379 - DNA, 25 bp, Homo sapien
atcttaaagagtgctccaatgtctc

SEQ ID NO: 4875380 - DNA, 25 bp, Homo sapien
tatgaccaatacgaatcttaaagag

SEQ ID NO: 4875381 - DNA, 25 bp, Homo sapien
ttgatctcgtgccaaccatcgttga

SEQ ID NO: 4875382 - DNA, 25 bp, Homo sapien
aattctcgacagatttccccatcct

SEQ ID NO: 4875383 - DNA, 25 bp, Homo sapien
tccagaattcatattatgcagctgt

SEQ ID NO: 4875384 - DNA, 25 bp, Homo sapien
aaagaggaaattctcgacagatttc

SEQ ID NO: 4875385 - DNA, 25 bp, Homo sapien
ttttccccatggatagaaatgtaga

SEQ ID NO: 4875386 - DNA, 25 bp, Homo sapien
tagttgtctggatcctgtatctccc

SEQ ID NO: 4875387 - DNA, 25 bp, Homo sapien
aatgtagacgtttgctactgttcca

SEQ ID NO: 4875388 - DNA, 25 bp, Homo sapien
gaaggagctcttcgatctaaatagt

SEQ ID NO: 4875389 - DNA, 25 bp, Homo sapien
catcatggcctatcacaatcttaca

SEQ ID NO: 4875390 - DNA, 25 bp, Homo sapien
tcacaatcttacacaaatctccaag

SEQ ID NO: 4875391 - DNA, 25 bp, Homo sapien
aatcttacacaaatctccaaggtgc

SEQ ID NO: 4875392 - DNA, 25 bp, Homo sapien
caatcttacacaaatctccaaggtg

SEQ ID NO: 4875393 - DNA, 25 bp, Homo sapien
taacaacatcatcaagaaaccaacc

SEQ ID NO: 4875394 - DNA, 25 bp, Homo sapien
tattcgtaatttgttgtgggatcct

SEQ ID NO: 4875395 - DNA, 25 bp, Homo sapien
agaagaaggcatattcgtaatttgt

SEQ ID NO: 4875396 - DNA, 25 bp, Homo sapien
tgtgggatccttgataacaacatca

SEQ ID NO: 4875397 - DNA, 25 bp, Homo sapien
ctctgacaattttacaatcatcttc

SEQ ID NO: 4875398 - DNA, 25 bp, Homo sapien
catcataaaagagttttccaggaaa

SEQ ID NO: 4875399 - DNA, 25 bp, Homo sapien
atttcagaagtgtcatgctttctcc

SEQ ID NO: 4875400 - DNA, 25 bp, Homo sapien
gaagtgtcatgctttctccagtcat

SEQ ID NO: 4875401 - DNA, 25 bp, Homo sapien
taaagagagggcaattaatttcaga

SEQ ID NO: 4875402 - DNA, 25 bp, Homo sapien
ttttctcttaagttccaatttctgc

SEQ ID NO: 4875403 - DNA, 25 bp, Homo sapien
tttctcttaagttccaatttctgcc

SEQ ID NO: 4875404 - DNA, 25 bp, Homo sapien
cttttctcttaagttccaatttctg

SEQ ID NO: 4875405 - DNA, 25 bp, Homo sapien
tcagcttgttatagaactgaagagt

SEQ ID NO: 4875406 - DNA, 25 bp, Homo sapien
ggacaaaccctccagtcagcttgtt

SEQ ID NO: 4875407 - DNA, 25 bp, Homo sapien
ctctccaatggcgtcaactgtgcca

SEQ ID NO: 4875408 - DNA, 25 bp, Homo sapien
tgtgccatctggatgcaaacggaca

SEQ ID NO: 4875409 - DNA, 25 bp, Homo sapien
gtaaaatcacaccatcaatcctttt

SEQ ID NO: 4875410 - DNA, 25 bp, Homo sapien
tctgcaccagtaaaatcacaccatc

SEQ ID NO: 4875411 - DNA, 25 bp, Homo sapien
gcgaagtcttgaagtggttctctgc

SEQ ID NO: 4875412 - DNA, 25 bp, Homo sapien
tttctttaggcgaagtcttgaagtg

SEQ ID NO: 4875413 - DNA, 25 bp, Homo sapien
ttactggacagacttcagatttgga

SEQ ID NO: 4875414 - DNA, 25 bp, Homo sapien
aatccgcaggtcacataacgttcca

SEQ ID NO: 4875415 - DNA, 25 bp, Homo sapien
tccgcaggtcacataacgttccact

SEQ ID NO: 4875416 - DNA, 25 bp, Homo sapien
gaaatccgcaggtcacataacgttc

SEQ ID NO: 4875417 - DNA, 25 bp, Homo sapien
cagaagaacgatcttattcttgacc

SEQ ID NO: 4875418 - DNA, 25 bp, Homo sapien
tgtcagaagaacgatcttattcttg

SEQ ID NO: 4875419 - DNA, 25 bp, Homo sapien
tgtctgtcagaagaacgatcttatt

SEQ ID NO: 4875420 - DNA, 25 bp, Homo sapien
gttgtctgtcagaagaacgatctta

SEQ ID NO: 4875421 - DNA, 25 bp, Homo sapien
ctcatgactttggaaaatgcatata

SEQ ID NO: 4875422 - DNA, 25 bp, Homo sapien
ttcttttgttgaaaataacatcaaa

SEQ ID NO: 4875423 - DNA, 25 bp, Homo sapien
ggaaaatgcatatatttcttttgtt

SEQ ID NO: 4875424 - DNA, 25 bp, Homo sapien
tcttttgttgaaaataacatcaaag

SEQ ID NO: 4875425 - DNA, 25 bp, Homo sapien
agtgacaatgccattgtcaagagca

SEQ ID NO: 4875426 - DNA, 25 bp, Homo sapien
tgacaatgccattgtcaagagcaag

SEQ ID NO: 4875427 - DNA, 25 bp, Homo sapien
ttccagtgacaatgccattgtcaag

SEQ ID NO: 4875428 - DNA, 25 bp, Homo sapien
acaatgccattgtcaagagcaagag

SEQ ID NO: 4875429 - DNA, 25 bp, Homo sapien
ccgcagctcagtggtggcttcacca

SEQ ID NO: 4875430 - DNA, 25 bp, Homo sapien
ataaagcacccgcagctcagtggtg

SEQ ID NO: 4875431 - DNA, 25 bp, Homo sapien
ctgataaagcacccgcagctcagtg

SEQ ID NO: 4875432 - DNA, 25 bp, Homo sapien
cgcagctcagtggtggcttcaccac

SEQ ID NO: 4875433 - DNA, 25 bp, Homo sapien
tgatgatgcatcagctattttgcca

SEQ ID NO: 4875434 - DNA, 25 bp, Homo sapien
catcagctattttgccatgacgatc

SEQ ID NO: 4875435 - DNA, 25 bp, Homo sapien
tgccgactcaagaagtgcacagcgg

SEQ ID NO: 4875436 - DNA, 25 bp, Homo sapien
cttttgaaagatttgcatagcctgc

SEQ ID NO: 4875437 - DNA, 25 bp, Homo sapien
tgaagccatagtgaccaggaggctt

SEQ ID NO: 4875438 - DNA, 25 bp, Homo sapien
aagccatagtgaccaggaggcttgg

SEQ ID NO: 4875439 - DNA, 25 bp, Homo sapien
gaagccatagtgaccaggaggcttg

SEQ ID NO: 4875440 - DNA, 25 bp, Homo sapien
gccatagtgaccaggaggcttggtg

SEQ ID NO: 4875441 - DNA, 25 bp, Homo sapien
gttccatcgcatcggccatccttga

SEQ ID NO: 4875442 - DNA, 25 bp, Homo sapien
tcaaacatgcaaatcccagagctga

SEQ ID NO: 4875443 - DNA, 25 bp, Homo sapien
tgttccatcgcatcggccatccttg

SEQ ID NO: 4875444 - DNA, 25 bp, Homo sapien
acatgcaaatcccagagctgatttt

SEQ ID NO: 4875445 - DNA, 25 bp, Homo sapien
tgggaagaaaaagataaccagcaca

SEQ ID NO: 4875446 - DNA, 25 bp, Homo sapien
caatcccagtgaagagctaggacac

SEQ ID NO: 4875447 - DNA, 25 bp, Homo sapien
gagaaccctgatgttcagtgacagc

SEQ ID NO: 4875448 - DNA, 25 bp, Homo sapien
aactggtgacccacaggagaaccct

SEQ ID NO: 4875449 - DNA, 25 bp, Homo sapien
tggaccaggcctgatacttatgatg

SEQ ID NO: 4875450 - DNA, 25 bp, Homo sapien
gaatgcatcttaaatccctttggag

SEQ ID NO: 4875451 - DNA, 25 bp, Homo sapien
gcctctaaacatacgcaaactaggg

SEQ ID NO: 4875452 - DNA, 25 bp, Homo sapien
caaactagggtaattaagaggactg

SEQ ID NO: 4875453 - DNA, 25 bp, Homo sapien
cttgagtagctaccaggactgaggc

SEQ ID NO: 4875454 - DNA, 25 bp, Homo sapien
tttaaatgtaagtgtatttgcctat

SEQ ID NO: 4875455 - DNA, 25 bp, Homo sapien
ttccaaatttacaacagcagacatg

SEQ ID NO: 4875456 - DNA, 25 bp, Homo sapien
gtatttgcctataaaaatgtttcca

SEQ ID NO: 4875457 - DNA, 25 bp, Homo sapien
aatgtttccaaatttacaacagcag

SEQ ID NO: 4875458 - DNA, 25 bp, Homo sapien
ttttgcctgcccatctgactgaagt

SEQ ID NO: 4875459 - DNA, 25 bp, Homo sapien
gggctcttcgtagattccaggctta

SEQ ID NO: 4875460 - DNA, 25 bp, Homo sapien
ccaggcttatggatgcattcttcaa

SEQ ID NO: 4875461 - DNA, 25 bp, Homo sapien
gactgaagtccaacaaacaatcctg

SEQ ID NO: 4875462 - DNA, 25 bp, Homo sapien
attaattatctgaaaacttgaggca

SEQ ID NO: 4875463 - DNA, 25 bp, Homo sapien
ttatctgaaaacttgaggcaactgg

SEQ ID NO: 4875464 - DNA, 25 bp, Homo sapien
gaaaacttgaggcaactggtcttca

SEQ ID NO: 4875465 - DNA, 25 bp, Homo sapien
gaggcaactggtcttcattatgttt

SEQ ID NO: 4875466 - DNA, 25 bp, Homo sapien
tctgttttctccctgtgctcttcca

SEQ ID NO: 4875467 - DNA, 25 bp, Homo sapien
tctggtcatttctgttttctccctg

SEQ ID NO: 4875468 - DNA, 25 bp, Homo sapien
ttttctccctgtgctcttccagcat

SEQ ID NO: 4875469 - DNA, 25 bp, Homo sapien
ctgctttctggtcatttctgttttc

SEQ ID NO: 4875470 - DNA, 25 bp, Homo sapien
gaccaggcagcgtgtagacatttac

SEQ ID NO: 4875471 - DNA, 25 bp, Homo sapien
cacgtgatggtgtgccatgtcagac

SEQ ID NO: 4875472 - DNA, 25 bp, Homo sapien
gaacctgtcaatgagactgccctcg

SEQ ID NO: 4875473 - DNA, 25 bp, Homo sapien
tacttgaggtgcacactcattcaga

SEQ ID NO: 4875474 - DNA, 25 bp, Homo sapien
tgaaattaagattttaaaagatgcc

SEQ ID NO: 4875475 - DNA, 25 bp, Homo sapien
ctgaaattaagattttaaaagatgc

SEQ ID NO: 4875476 - DNA, 25 bp, Homo sapien
aaattaagattttaaaagatgccat

SEQ ID NO: 4875477 - DNA, 25 bp, Homo sapien
gaaattaagattttaaaagatgcca

SEQ ID NO: 4875478 - DNA, 25 bp, Homo sapien
cattcccattgggttttctctgcca

SEQ ID NO: 4875479 - DNA, 25 bp, Homo sapien
gtttttttgactcatggatcttttc

SEQ ID NO: 4875480 - DNA, 25 bp, Homo sapien
gcagacattcccattgggttttctc

SEQ ID NO: 4875481 - DNA, 25 bp, Homo sapien
ttcttggctgggtgttgcagacatt

SEQ ID NO: 4875482 - DNA, 25 bp, Homo sapien
taaagaatgccatgacatcccaagc

SEQ ID NO: 4875483 - DNA, 25 bp, Homo sapien
catcccaagctagaatggctgtctt

SEQ ID NO: 4875484 - DNA, 25 bp, Homo sapien
tgtgtttcacaatgcatcctctagc

SEQ ID NO: 4875485 - DNA, 25 bp, Homo sapien
gagcagttgtccatgacagcaggga

SEQ ID NO: 4875486 - DNA, 25 bp, Homo sapien
ctaaagagagaattttcacacatac

SEQ ID NO: 4875487 - DNA, 25 bp, Homo sapien
caatggaaaggatttggaactaaag

SEQ ID NO: 4875488 - DNA, 25 bp, Homo sapien
gaaaggatttggaactaaagagaga

SEQ ID NO: 4875489 - DNA, 25 bp, Homo sapien
ggcaatggaaaggatttggaactaa

SEQ ID NO: 4875490 - DNA, 25 bp, Homo sapien
tcagatataacatcaggctgacaga

SEQ ID NO: 4875491 - DNA, 25 bp, Homo sapien
caggctgacagaatcctttgtcaca

SEQ ID NO: 4875492 - DNA, 25 bp, Homo sapien
ggcagatcagatataacatcaggct

SEQ ID NO: 4875493 - DNA, 25 bp, Homo sapien
gggaaaaaagcattagtggcagatc

SEQ ID NO: 4875494 - DNA, 25 bp, Homo sapien
tctgacagaagagtctcactacttt

SEQ ID NO: 4875495 - DNA, 25 bp, Homo sapien
gacagaagagtctcactactttgga

SEQ ID NO: 4875496 - DNA, 25 bp, Homo sapien
agagtctcactactttggaaatgtc

SEQ ID NO: 4875497 - DNA, 25 bp, Homo sapien
tcatcttctgacagaagagtctcac

SEQ ID NO: 4875498 - DNA, 25 bp, Homo sapien
gagagtgacattggcttgagttcct

SEQ ID NO: 4875499 - DNA, 25 bp, Homo sapien
tctgagctgtccttgcgaagactta

SEQ ID NO: 4875500 - DNA, 25 bp, Homo sapien
tgcgaagacttattggcccagtgac

SEQ ID NO: 4875501 - DNA, 25 bp, Homo sapien
aactcatcctcgtgtcctggaagga

SEQ ID NO: 4875502 - DNA, 25 bp, Homo sapien
gctcactggttccatcatgtcctat

SEQ ID NO: 4875503 - DNA, 25 bp, Homo sapien
agttccactcgggttgctcactggt

SEQ ID NO: 4875504 - DNA, 25 bp, Homo sapien
cactggttccatcatgtcctatcct

SEQ ID NO: 4875505 - DNA, 25 bp, Homo sapien
cctctgcaagttccactcgggttgc

SEQ ID NO: 4875506 - DNA, 25 bp, Homo sapien
cactgctttacatagccagcttgct

SEQ ID NO: 4875507 - DNA, 25 bp, Homo sapien
ctgctttacatagccagcttgcttc

SEQ ID NO: 4875508 - DNA, 25 bp, Homo sapien
tcactgctttacatagccagcttgc

SEQ ID NO: 4875509 - DNA, 25 bp, Homo sapien
actgctttacatagccagcttgctt

SEQ ID NO: 4875510 - DNA, 25 bp, Homo sapien
ttgacccattggaagatattcaggg

SEQ ID NO: 4875511 - DNA, 25 bp, Homo sapien
acacattcgcctaggcctgcacaat

SEQ ID NO: 4875512 - DNA, 25 bp, Homo sapien
gcctgcacaatgtcaggttcaccca

SEQ ID NO: 4875513 - DNA, 25 bp, Homo sapien
ttctggaacacttcttgaaaggctg

SEQ ID NO: 4875514 - DNA, 25 bp, Homo sapien
gagacagccatacgtttgctgcaaa

SEQ ID NO: 4875515 - DNA, 25 bp, Homo sapien
catctgcctgaatccgagacagcca

SEQ ID NO: 4875516 - DNA, 25 bp, Homo sapien
cgtttgctgcaaaatctaggatctt

SEQ ID NO: 4875517 - DNA, 25 bp, Homo sapien
tgctgcaaaatctaggatcttcttg

SEQ ID NO: 4875518 - DNA, 25 bp, Homo sapien
aatagcttgtcctccttttactaca

SEQ ID NO: 4875519 - DNA, 25 bp, Homo sapien
agcttgtcctccttttactacagga

SEQ ID NO: 4875520 - DNA, 25 bp, Homo sapien
atagcttgtcctccttttactacag

SEQ ID NO: 4875521 - DNA, 25 bp, Homo sapien
tagcttgtcctccttttactacagg

SEQ ID NO: 4875522 - DNA, 25 bp, Homo sapien
aattttacttgcatgttagatttgt

SEQ ID NO: 4875523 - DNA, 25 bp, Homo sapien
ttttacttgcatgttagatttgtac

SEQ ID NO: 4875524 - DNA, 25 bp, Homo sapien
tacttgcatgttagatttgtacagc

SEQ ID NO: 4875525 - DNA, 25 bp, Homo sapien
ttgcatgttagatttgtacagctgt

SEQ ID NO: 4875526 - DNA, 25 bp, Homo sapien
caaaatctcagcaggtaacgtccca

SEQ ID NO: 4875527 - DNA, 25 bp, Homo sapien
taacgtcccatgatacagcactgct

SEQ ID NO: 4875528 - DNA, 25 bp, Homo sapien
tgctaaacacaatgatgaactgagg

SEQ ID NO: 4875529 - DNA, 25 bp, Homo sapien
gcaaaatgatacatgctggcagcca

SEQ ID NO: 4875530 - DNA, 25 bp, Homo sapien
tttgtcactggcctcacagcgcaac

SEQ ID NO: 4875531 - DNA, 25 bp, Homo sapien
tggactcggatgtggtgccgggctc

SEQ ID NO: 4875532 - DNA, 25 bp, Homo sapien
gttttccaagcgacactgctgctac

SEQ ID NO: 4875533 - DNA, 25 bp, Homo sapien
gctctctgactatgacttgttcaca

SEQ ID NO: 4875534 - DNA, 25 bp, Homo sapien
aagggctagcttggaagttgtgggc

SEQ ID NO: 4875535 - DNA, 25 bp, Homo sapien
tctattcctggtgccatactcttct

SEQ ID NO: 4875536 - DNA, 25 bp, Homo sapien
ctgggagacagaagtaactataagt

SEQ ID NO: 4875537 - DNA, 25 bp, Homo sapien
tctgctcctttaagaattaaggaag

SEQ ID NO: 4875538 - DNA, 25 bp, Homo sapien
gtgccccaagttctattcctggtgc

SEQ ID NO: 4875539 - DNA, 25 bp, Homo sapien
ctcctgcgtgcacccatggctctcc

SEQ ID NO: 4875540 - DNA, 25 bp, Homo sapien
agctcctgcgtgcacccatggctct

SEQ ID NO: 4875541 - DNA, 25 bp, Homo sapien
gaccttgacctcatatgcacagaaa

SEQ ID NO: 4875542 - DNA, 25 bp, Homo sapien
ggctccatggacactgaccttgacc

SEQ ID NO: 4875543 - DNA, 25 bp, Homo sapien
catgaaagcctacaggactccaggc

SEQ ID NO: 4875544 - DNA, 25 bp, Homo sapien
ggccatgagttaggtaaactcagat

SEQ ID NO: 4875545 - DNA, 25 bp, Homo sapien
aaagcctacaggactccaggcacca

SEQ ID NO: 4875546 - DNA, 25 bp, Homo sapien
ccaggcaccacggaatggccatgag

SEQ ID NO: 4875547 - DNA, 25 bp, Homo sapien
gccctgagacatgaaaggaagccat

SEQ ID NO: 4875548 - DNA, 25 bp, Homo sapien
atgaattatgccctgagacatgaaa

SEQ ID NO: 4875549 - DNA, 25 bp, Homo sapien
tatgccctgagacatgaaaggaagc

SEQ ID NO: 4875550 - DNA, 25 bp, Homo sapien
gaattatgccctgagacatgaaagg

SEQ ID NO: 4875551 - DNA, 25 bp, Homo sapien
tcttgtactttcttctactgatggt

SEQ ID NO: 4875552 - DNA, 25 bp, Homo sapien
ctggggaatagtgttccatgatgtc

SEQ ID NO: 4875553 - DNA, 25 bp, Homo sapien
tactgatggtttcagtaatcctcac

SEQ ID NO: 4875554 - DNA, 25 bp, Homo sapien
tcactgtgaggaatactataaatcc

SEQ ID NO: 4875555 - DNA, 25 bp, Homo sapien
gtattttaggttgatgatttatttg

SEQ ID NO: 4875556 - DNA, 25 bp, Homo sapien
ctcttgtattttaggttgatgattt

SEQ ID NO: 4875557 - DNA, 25 bp, Homo sapien
cttgtattttaggttgatgatttat

SEQ ID NO: 4875558 - DNA, 25 bp, Homo sapien
attttaggttgatgatttatttgca

SEQ ID NO: 4875559 - DNA, 25 bp, Homo sapien
tacattattgacaaaggacttctga

SEQ ID NO: 4875560 - DNA, 25 bp, Homo sapien
gcaacttcatgtttgacatcactga

SEQ ID NO: 4875561 - DNA, 25 bp, Homo sapien
tgatgaagtatatctaacaaagtcc

SEQ ID NO: 4875562 - DNA, 25 bp, Homo sapien
aggtcaacaccttccctgtacattg

SEQ ID NO: 4875563 - DNA, 25 bp, Homo sapien
caggaaattgtaccctgaatgatcg

SEQ ID NO: 4875564 - DNA, 25 bp, Homo sapien
ctatctatagttgactcagaatgca

SEQ ID NO: 4875565 - DNA, 25 bp, Homo sapien
gaatgatcggagtaaaaggcaatac

SEQ ID NO: 4875566 - DNA, 25 bp, Homo sapien
acaccaccacaggaaattgtaccct

SEQ ID NO: 4875567 - DNA, 25 bp, Homo sapien
agcactgctaaccagagcactcaac

SEQ ID NO: 4875568 - DNA, 25 bp, Homo sapien
gcagcactgctaaccagagcactca

SEQ ID NO: 4875569 - DNA, 25 bp, Homo sapien
cagcactgctaaccagagcactcaa

SEQ ID NO: 4875570 - DNA, 25 bp, Homo sapien
agcagcactgctaaccagagcactc

SEQ ID NO: 4875571 - DNA, 25 bp, Homo sapien
gacagtctgctttgcctcattggac

SEQ ID NO: 4875572 - DNA, 25 bp, Homo sapien
gccctaagtgactgcaattcaataa

SEQ ID NO: 4875573 - DNA, 25 bp, Homo sapien
caattgttagttgggcatactgagg

SEQ ID NO: 4875574 - DNA, 25 bp, Homo sapien
tggacagcaaacgtgttcccatgac

SEQ ID NO: 4875575 - DNA, 25 bp, Homo sapien
taacaccgagtttactaatgattca

SEQ ID NO: 4875576 - DNA, 25 bp, Homo sapien
ctaacaccgagtttactaatgattc

SEQ ID NO: 4875577 - DNA, 25 bp, Homo sapien
caatgagaagtatgtgctctgccat

SEQ ID NO: 4875578 - DNA, 25 bp, Homo sapien
atttacaatgagaagtatgtgctct

SEQ ID NO: 4875579 - DNA, 25 bp, Homo sapien
ttacaatgagaagtatgtgctctgc

SEQ ID NO: 4875580 - DNA, 25 bp, Homo sapien
tacaatgagaagtatgtgctctgcc

SEQ ID NO: 4875581 - DNA, 25 bp, Homo sapien
ggatatactctatgatctccaaata

SEQ ID NO: 4875582 - DNA, 25 bp, Homo sapien
aagtaaagtctaacaggatcttcca

SEQ ID NO: 4875583 - DNA, 25 bp, Homo sapien
aaattcggatttcttctcaacaatg

SEQ ID NO: 4875584 - DNA, 25 bp, Homo sapien
tagtttggatatactctatgatctc

SEQ ID NO: 4875585 - DNA, 25 bp, Homo sapien
gatgcataattcaagaagttgaagg

SEQ ID NO: 4875586 - DNA, 25 bp, Homo sapien
cataattcaagaagttgaaggatct

SEQ ID NO: 4875587 - DNA, 25 bp, Homo sapien
tgcataattcaagaagttgaaggat

SEQ ID NO: 4875588 - DNA, 25 bp, Homo sapien
ttgatgcataattcaagaagttgaa

SEQ ID NO: 4875589 - DNA, 25 bp, Homo sapien
gtggtgccggcattttcaagatccc

SEQ ID NO: 4875590 - DNA, 25 bp, Homo sapien
agtgttagggttaaacagctggtgt

SEQ ID NO: 4875591 - DNA, 25 bp, Homo sapien
aaggaacactgttgccgtggtgccg

SEQ ID NO: 4875592 - DNA, 25 bp, Homo sapien
ccagatcccaaaataataggacctg

SEQ ID NO: 4875593 - DNA, 25 bp, Homo sapien
tctgccgtaatggacattttgctct

SEQ ID NO: 4875594 - DNA, 25 bp, Homo sapien
tactctctccaactttctgccgtaa

SEQ ID NO: 4875595 - DNA, 25 bp, Homo sapien
ttttggctcttagtgacattctagg

SEQ ID NO: 4875596 - DNA, 25 bp, Homo sapien
tttgctcttaattttgccttgattg

SEQ ID NO: 4875597 - DNA, 25 bp, Homo sapien
gcatcctttggcttacagctcacca

SEQ ID NO: 4875598 - DNA, 25 bp, Homo sapien
gaaatcaagacgtcaatgaggccat

SEQ ID NO: 4875599 - DNA, 25 bp, Homo sapien
ggccatactccctctgagactctgg

SEQ ID NO: 4875600 - DNA, 25 bp, Homo sapien
tacagctcaccaatctaatctctgc

SEQ ID NO: 4875601 - DNA, 25 bp, Homo sapien
aattctgtctacgtgtctctctcca

SEQ ID NO: 4875602 - DNA, 25 bp, Homo sapien
ttatcacatggactccaaaagtagc

SEQ ID NO: 4875603 - DNA, 25 bp, Homo sapien
cacgagacagtgaggaacatgttca

SEQ ID NO: 4875604 - DNA, 25 bp, Homo sapien
agtgttcatcatttttcccgtgttc

SEQ ID NO: 4875605 - DNA, 25 bp, Homo sapien
gataggtcataatccccggtgttac

SEQ ID NO: 4875606 - DNA, 25 bp, Homo sapien
tcttcaggagataggtcataatccc

SEQ ID NO: 4875607 - DNA, 25 bp, Homo sapien
tgttcttcaggagataggtcataat

SEQ ID NO: 4875608 - DNA, 25 bp, Homo sapien
caggagataggtcataatccccggt

SEQ ID NO: 4875609 - DNA, 25 bp, Homo sapien
aatatgcggtaagtgagctttcagc

SEQ ID NO: 4875610 - DNA, 25 bp, Homo sapien
taattataactgagctacctccaca

SEQ ID NO: 4875611 - DNA, 25 bp, Homo sapien
caagactccaagtcagagctttggt

SEQ ID NO: 4875612 - DNA, 25 bp, Homo sapien
cgatatagtatggttgtgctcactc

SEQ ID NO: 4875613 - DNA, 25 bp, Homo sapien
tgcttcgcctaaggatattctctcc

SEQ ID NO: 4875614 - DNA, 25 bp, Homo sapien
ttgctgcttcgcctaaggatattct

SEQ ID NO: 4875615 - DNA, 25 bp, Homo sapien
tgtttctaagccatctccagcttca

SEQ ID NO: 4875616 - DNA, 25 bp, Homo sapien
ggatcctcctgcggattcctggagg

SEQ ID NO: 4875617 - DNA, 25 bp, Homo sapien
taaaactccctacatctccaatttc

SEQ ID NO: 4875618 - DNA, 25 bp, Homo sapien
ggaactaaaactccctacatctcca

SEQ ID NO: 4875619 - DNA, 25 bp, Homo sapien
tgcaacacaaaggataaaagggaac

SEQ ID NO: 4875620 - DNA, 25 bp, Homo sapien
aactaaaactccctacatctccaat

SEQ ID NO: 4875621 - DNA, 25 bp, Homo sapien
cagctatccaggaatcaacaggtaa

SEQ ID NO: 4875622 - DNA, 25 bp, Homo sapien
gataccacctgggattctttccagt

SEQ ID NO: 4875623 - DNA, 25 bp, Homo sapien
caaaatagctcatatgtggctatat

SEQ ID NO: 4875624 - DNA, 25 bp, Homo sapien
gtgttgtcatgtccaatacgtattt

SEQ ID NO: 4875625 - DNA, 25 bp, Homo sapien
ctttggtcccatgatgggtatttcc

SEQ ID NO: 4875626 - DNA, 25 bp, Homo sapien
ttggtcccatgatgggtatttcctt

SEQ ID NO: 4875627 - DNA, 25 bp, Homo sapien
ctttctttggtcccatgatgggtat

SEQ ID NO: 4875628 - DNA, 25 bp, Homo sapien
tttctttggtcccatgatgggtatt

SEQ ID NO: 4875629 - DNA, 25 bp, Homo sapien
gggcatccctggataccactgccac

SEQ ID NO: 4875630 - DNA, 25 bp, Homo sapien
gcatccctggataccactgccacct

SEQ ID NO: 4875631 - DNA, 25 bp, Homo sapien
ggcatccctggataccactgccacc

SEQ ID NO: 4875632 - DNA, 25 bp, Homo sapien
caccgcggatggtgaataaatcaga

SEQ ID NO: 4875633 - DNA, 25 bp, Homo sapien
caaagaatgatgacttatagactag

SEQ ID NO: 4875634 - DNA, 25 bp, Homo sapien
agcaatgtagctcagcccccaaaga

SEQ ID NO: 4875635 - DNA, 25 bp, Homo sapien
gagatcactataatcccaccagcaa

SEQ ID NO: 4875636 - DNA, 25 bp, Homo sapien
cactgccaggccgttaactaaagac

SEQ ID NO: 4875637 - DNA, 25 bp, Homo sapien
gactcttcaggacaacaagccaagg

SEQ ID NO: 4875638 - DNA, 25 bp, Homo sapien
caagccaagggcaatcggcatctcc

SEQ ID NO: 4875639 - DNA, 25 bp, Homo sapien
gagtcagcattcttatcagccctaa

SEQ ID NO: 4875640 - DNA, 25 bp, Homo sapien
acccatagatgtggcctcgaacctc

SEQ ID NO: 4875641 - DNA, 25 bp, Homo sapien
gtaaagcccttctgaccacttgcca

SEQ ID NO: 4875642 - DNA, 25 bp, Homo sapien
gctataggttgtcagcaggcatttc

SEQ ID NO: 4875643 - DNA, 25 bp, Homo sapien
ggcatttcggcttattttctcatga

SEQ ID NO: 4875644 - DNA, 25 bp, Homo sapien
ggactctctgtagcccgagctgcca

SEQ ID NO: 4875645 - DNA, 25 bp, Homo sapien
ctgcaggactctctgtagcccgagc

SEQ ID NO: 4875646 - DNA, 25 bp, Homo sapien
gcgtcttggtttccctgctcctaac

SEQ ID NO: 4875647 - DNA, 25 bp, Homo sapien
actcatccgtgcaccgggcgtcttg

SEQ ID NO: 4875648 - DNA, 25 bp, Homo sapien
ccctgaggaagcatcctgttgacca

SEQ ID NO: 4875649 - DNA, 25 bp, Homo sapien
aggcaacagagtgccctcatcagct

SEQ ID NO: 4875650 - DNA, 25 bp, Homo sapien
cagccctgaggaagcatcctgttga

SEQ ID NO: 4875651 - DNA, 25 bp, Homo sapien
ggaaaggcaacagagtgccctcatc

SEQ ID NO: 4875652 - DNA, 25 bp, Homo sapien
tgtgcctgtgtatatgcgaatctca

SEQ ID NO: 4875653 - DNA, 25 bp, Homo sapien
ctgtgtatatgcgaatctcataaag

SEQ ID NO: 4875654 - DNA, 25 bp, Homo sapien
gtgcctgtgtatatgcgaatctcat

SEQ ID NO: 4875655 - DNA, 25 bp, Homo sapien
gcctgtgtatatgcgaatctcataa

SEQ ID NO: 4875656 - DNA, 25 bp, Homo sapien
ctgtccacgctgaaacttgatttca

SEQ ID NO: 4875657 - DNA, 25 bp, Homo sapien
tgtttttggactgatgaagtcttcg

SEQ ID NO: 4875658 - DNA, 25 bp, Homo sapien
ttttcctgaatcacctctggtaccg

SEQ ID NO: 4875659 - DNA, 25 bp, Homo sapien
ctctggtaccgatgaggttgataaa

SEQ ID NO: 4875660 - DNA, 25 bp, Homo sapien
acctgttccatcatgactaatcaga

SEQ ID NO: 4875661 - DNA, 25 bp, Homo sapien
ttcttcaattttccgagagatacag

SEQ ID NO: 4875662 - DNA, 25 bp, Homo sapien
tgttccatcatgactaatcagaact

SEQ ID NO: 4875663 - DNA, 25 bp, Homo sapien
gagagatacagccttaatggaaaaa

SEQ ID NO: 4875664 - DNA, 25 bp, Homo sapien
ctgtgtcagttgacaaaggagattt

SEQ ID NO: 4875665 - DNA, 25 bp, Homo sapien
tgtcagttgacaaaggagatttatt

SEQ ID NO: 4875666 - DNA, 25 bp, Homo sapien
tgacaaaggagatttatttaactct

SEQ ID NO: 4875667 - DNA, 25 bp, Homo sapien
cagttgacaaaggagatttatttaa

SEQ ID NO: 4875668 - DNA, 25 bp, Homo sapien
acaatactcccaagaaaccatccat

SEQ ID NO: 4875669 - DNA, 25 bp, Homo sapien
catcttcagacttaacaacaatact

SEQ ID NO: 4875670 - DNA, 25 bp, Homo sapien
atcttcagacttaacaacaatactc

SEQ ID NO: 4875671 - DNA, 25 bp, Homo sapien
atactcccaagaaaccatccattac

SEQ ID NO: 4875672 - DNA, 25 bp, Homo sapien
cactgggactactttctgcgagcaa

SEQ ID NO: 4875673 - DNA, 25 bp, Homo sapien
catcatcttggtactcatctagcca

SEQ ID NO: 4875674 - DNA, 25 bp, Homo sapien
ggtcttgccatcatcttggtactca

SEQ ID NO: 4875675 - DNA, 25 bp, Homo sapien
gagcaattcccgctgggtcttgcca

SEQ ID NO: 4875676 - DNA, 25 bp, Homo sapien
gatttaggatgaggccaagctctct

SEQ ID NO: 4875677 - DNA, 25 bp, Homo sapien
gctcgaagctcaaactgcaagtgga

SEQ ID NO: 4875678 - DNA, 25 bp, Homo sapien
gccaggccagagttaagttctacac

SEQ ID NO: 4875679 - DNA, 25 bp, Homo sapien
tgtgagatatctgccctgcgctctg

SEQ ID NO: 4875680 - DNA, 25 bp, Homo sapien
tgagtggtcagtgtcgggcccctcc

SEQ ID NO: 4875681 - DNA, 25 bp, Homo sapien
agtggtcagtgtcgggcccctccag

SEQ ID NO: 4875682 - DNA, 25 bp, Homo sapien
cggcagtgacagtgcatttcttcac

SEQ ID NO: 4875683 - DNA, 25 bp, Homo sapien
caatccttttgaagatccagacaac

SEQ ID NO: 4875684 - DNA, 25 bp, Homo sapien
tatacaaccatataaatgaacctca

SEQ ID NO: 4875685 - DNA, 25 bp, Homo sapien
gccctaaaggctaactgataaatag

SEQ ID NO: 4875686 - DNA, 25 bp, Homo sapien
caaccatataaatgaacctcagaag

SEQ ID NO: 4875687 - DNA, 25 bp, Homo sapien
acaaaagcagccctaaaggctaact

SEQ ID NO: 4875688 - DNA, 25 bp, Homo sapien
tccaagtggatgatgcaaagtccct

SEQ ID NO: 4875689 - DNA, 25 bp, Homo sapien
cagtccactgaatgtgctacgaagt

SEQ ID NO: 4875690 - DNA, 25 bp, Homo sapien
cagggccggataagtgttacagcgc

SEQ ID NO: 4875691 - DNA, 25 bp, Homo sapien
ggccacaggagacgcacaaagtatc

SEQ ID NO: 4875692 - DNA, 25 bp, Homo sapien
gacctgaaccttgtacatgtctgcc

SEQ ID NO: 4875693 - DNA, 25 bp, Homo sapien
cacagctgacctgaaccttgtacat

SEQ ID NO: 4875694 - DNA, 25 bp, Homo sapien
accttgtacatgtctgccacatcca

SEQ ID NO: 4875695 - DNA, 25 bp, Homo sapien
aatgccagccctcaaagactgctgg

SEQ ID NO: 4875696 - DNA, 25 bp, Homo sapien
ctctcattatgggccaaacagagct

SEQ ID NO: 4875697 - DNA, 25 bp, Homo sapien
caaacctctgaaatcttaagtagta

SEQ ID NO: 4875698 - DNA, 25 bp, Homo sapien
actctgggcttggtcatcataaggg

SEQ ID NO: 4875699 - DNA, 25 bp, Homo sapien
tgccttcatgggcaaactctgggct

SEQ ID NO: 4875700 - DNA, 25 bp, Homo sapien
catcataagggatctcaaacctctg

SEQ ID NO: 4875701 - DNA, 25 bp, Homo sapien
agcagagctgctgtcaacgatatac

SEQ ID NO: 4875702 - DNA, 25 bp, Homo sapien
gctgtcaacgatatacagtgttttc

SEQ ID NO: 4875703 - DNA, 25 bp, Homo sapien
ttaaagttccactaagcatatcatt

SEQ ID NO: 4875704 - DNA, 25 bp, Homo sapien
gagctgctgtcaacgatatacagtg

SEQ ID NO: 4875705 - DNA, 25 bp, Homo sapien
gtgagagaataatcactctcctttc

SEQ ID NO: 4875706 - DNA, 25 bp, Homo sapien
ctgaggcctacactttgtgagagaa

SEQ ID NO: 4875707 - DNA, 25 bp, Homo sapien
ctattctgaacagttgcattggata

SEQ ID NO: 4875708 - DNA, 25 bp, Homo sapien
gcattggatatacggctgcatttac

SEQ ID NO: 4875709 - DNA, 25 bp, Homo sapien
tcacgcgtagataacaaaggtgttc

SEQ ID NO: 4875710 - DNA, 25 bp, Homo sapien
aaggtgttcatctcagcattgctga

SEQ ID NO: 4875711 - DNA, 25 bp, Homo sapien
agcattgctgattggaatgccaagg

SEQ ID NO: 4875712 - DNA, 25 bp, Homo sapien
cgcgtagataacaaaggtgttcatc

SEQ ID NO: 4875713 - DNA, 25 bp, Homo sapien
ttcttagataattctggttttgcta

SEQ ID NO: 4875714 - DNA, 25 bp, Homo sapien
ttttcttagataattctggttttgc

SEQ ID NO: 4875715 - DNA, 25 bp, Homo sapien
aaggagtctgccaagattctctggc

SEQ ID NO: 4875716 - DNA, 25 bp, Homo sapien
caaacccaaatgtctgagaagtcat

SEQ ID NO: 4875717 - DNA, 25 bp, Homo sapien
ggtgggatcacaggttagtttcaca

SEQ ID NO: 4875718 - DNA, 25 bp, Homo sapien
ttagtttcacaggtttttgagcttc

SEQ ID NO: 4875719 - DNA, 25 bp, Homo sapien
cgtggttatgggcattggccttcct

SEQ ID NO: 4875720 - DNA, 25 bp, Homo sapien
catctcgtggctggttcgtggttat

SEQ ID NO: 4875721 - DNA, 25 bp, Homo sapien
cttgaaaaggtctcttgcacttctg

SEQ ID NO: 4875722 - DNA, 25 bp, Homo sapien
tgaaggcttgcgtgcttctgcccat

SEQ ID NO: 4875723 - DNA, 25 bp, Homo sapien
cctggctgagtggtgttgggcaaaa

SEQ ID NO: 4875724 - DNA, 25 bp, Homo sapien
taagatatgcacttgggtgggaacc

SEQ ID NO: 4875725 - DNA, 25 bp, Homo sapien
tgggcaaaagtctgtgcatctccag

SEQ ID NO: 4875726 - DNA, 25 bp, Homo sapien
gaacctggaaatccagttgcaagcc

SEQ ID NO: 4875727 - DNA, 25 bp, Homo sapien
gtctatccaaagctacagcctaaag

SEQ ID NO: 4875728 - DNA, 25 bp, Homo sapien
cccgtgatagcccaaaacattttag

SEQ ID NO: 4875729 - DNA, 25 bp, Homo sapien
taacccaggagaaatacccgtgata

SEQ ID NO: 4875730 - DNA, 25 bp, Homo sapien
aactctcaagtaggtaactcatatg

SEQ ID NO: 4875731 - DNA, 25 bp, Homo sapien
cacaggtgaatgaaacagcggtact

SEQ ID NO: 4875732 - DNA, 25 bp, Homo sapien
tctgagcagcggctctgggacacag

SEQ ID NO: 4875733 - DNA, 25 bp, Homo sapien
ctgagtacaacagggaggaggatcc

SEQ ID NO: 4875734 - DNA, 25 bp, Homo sapien
tctcacttaggtctctcaagcagca

SEQ ID NO: 4875735 - DNA, 25 bp, Homo sapien
gacatctgcatcacgtcctggagct

SEQ ID NO: 4875736 - DNA, 25 bp, Homo sapien
tttagtgtcacttgcacgcaccttc

SEQ ID NO: 4875737 - DNA, 25 bp, Homo sapien
tcccagccagttatgcggacatctg

SEQ ID NO: 4875738 - DNA, 25 bp, Homo sapien
tcagatgcgctctttgtcccagcca

SEQ ID NO: 4875739 - DNA, 25 bp, Homo sapien
tctgcccggacagccaacactcccc

SEQ ID NO: 4875740 - DNA, 25 bp, Homo sapien
tctcggtagcaaagaaaatcttgaa

SEQ ID NO: 4875741 - DNA, 25 bp, Homo sapien
ctctcggtagcaaagaaaatcttga

SEQ ID NO: 4875742 - DNA, 25 bp, Homo sapien
tagcaaagaaaatcttgaaggattt

SEQ ID NO: 4875743 - DNA, 25 bp, Homo sapien
cggtagcaaagaaaatcttgaagga

SEQ ID NO: 4875744 - DNA, 25 bp, Homo sapien
gcagtgtaagaagccctttgctagc

SEQ ID NO: 4875745 - DNA, 25 bp, Homo sapien
tctagtagcttgtccattggcgatt

SEQ ID NO: 4875746 - DNA, 25 bp, Homo sapien
cctgaaaatgtggttgtcaaggtaa

SEQ ID NO: 4875747 - DNA, 25 bp, Homo sapien
gaagctcaggtcttcgggattcaga

SEQ ID NO: 4875748 - DNA, 25 bp, Homo sapien
gaaccatccctggtaaaagcgttca

SEQ ID NO: 4875749 - DNA, 25 bp, Homo sapien
tggtgacccaatgagaattctccag

SEQ ID NO: 4875750 - DNA, 25 bp, Homo sapien
ttctggaaccatccctggtaaaagc

SEQ ID NO: 4875751 - DNA, 25 bp, Homo sapien
cccaatgagaattctccaggtcttc

SEQ ID NO: 4875752 - DNA, 25 bp, Homo sapien
acaagacatgtttcaagtgcattcc

SEQ ID NO: 4875753 - DNA, 25 bp, Homo sapien
agacatgtttcaagtgcattccttc

SEQ ID NO: 4875754 - DNA, 25 bp, Homo sapien
ttcaagtgcattccttctccttcca

SEQ ID NO: 4875755 - DNA, 25 bp, Homo sapien
cttgacaagacatgtttcaagtgca

SEQ ID NO: 4875756 - DNA, 25 bp, Homo sapien
ctgcttcacataggaacaagtgcaa

SEQ ID NO: 4875757 - DNA, 25 bp, Homo sapien
gcctctagtgtgtgttacccataaa

SEQ ID NO: 4875758 - DNA, 25 bp, Homo sapien
taaaccacttgtcaggatggataaa

SEQ ID NO: 4875759 - DNA, 25 bp, Homo sapien
ggttaggtgtaactgtctgcttcac

SEQ ID NO: 4875760 - DNA, 25 bp, Homo sapien
tccctttgaagtctggagagaactg

SEQ ID NO: 4875761 - DNA, 25 bp, Homo sapien
gtctggagagaactgggccctgctc

SEQ ID NO: 4875762 - DNA, 25 bp, Homo sapien
tccagccgctgctgagctccttttt

SEQ ID NO: 4875763 - DNA, 25 bp, Homo sapien
ctgaatcaccttcccagcaggagct

SEQ ID NO: 4875764 - DNA, 25 bp, Homo sapien
ttcattcaaaggtagtggagagagc

SEQ ID NO: 4875765 - DNA, 25 bp, Homo sapien
tccttaatctgcttctagattggct

SEQ ID NO: 4875766 - DNA, 25 bp, Homo sapien
tgcttctagattggctcccagggct

SEQ ID NO: 4875767 - DNA, 25 bp, Homo sapien
tcccagggcttcgttcattcaaagg

SEQ ID NO: 4875768 - DNA, 25 bp, Homo sapien
tctgcactaaacttcctaatcttgg

SEQ ID NO: 4875769 - DNA, 25 bp, Homo sapien
agtcttctgagttccaaatcaattg

SEQ ID NO: 4875770 - DNA, 25 bp, Homo sapien
tctgagttccaaatcaattgagaac

SEQ ID NO: 4875771 - DNA, 25 bp, Homo sapien
ctaaacttcctaatcttggtccctg

SEQ ID NO: 4875772 - DNA, 25 bp, Homo sapien
cgcggcgctcctcggacctgcacat

SEQ ID NO: 4875773 - DNA, 25 bp, Homo sapien
cggcgctcctcggacctgcacattc

SEQ ID NO: 4875774 - DNA, 25 bp, Homo sapien
ctgactccgagggagaggatgacct

SEQ ID NO: 4875775 - DNA, 25 bp, Homo sapien
tccaccagctgactccgagggagag

SEQ ID NO: 4875776 - DNA, 25 bp, Homo sapien
gcctcccgtctgatttagcggccat

SEQ ID NO: 4875777 - DNA, 25 bp, Homo sapien
ccgagcccgagtggtccgagttctg

SEQ ID NO: 4875778 - DNA, 25 bp, Homo sapien
tgcaccgagcccgagtggtccgagt

SEQ ID NO: 4875779 - DNA, 25 bp, Homo sapien
gacggcaagcctggagccaatccct

SEQ ID NO: 4875780 - DNA, 25 bp, Homo sapien
ccgagttctgcagcggggtgaacgc

SEQ ID NO: 4875781 - DNA, 25 bp, Homo sapien
gaggcagtcccacagtgagtagcgc

SEQ ID NO: 4875782 - DNA, 25 bp, Homo sapien
tccacggcgagccagacgtctgtgc

SEQ ID NO: 4875783 - DNA, 25 bp, Homo sapien
acgtctgtgcccacgtccgcgaagt

SEQ ID NO: 4875784 - DNA, 25 bp, Homo sapien
ccgcgcaggtagtagtccacggcga

SEQ ID NO: 4875785 - DNA, 25 bp, Homo sapien
tggccgcggcgatgttgctcttgct

SEQ ID NO: 4875786 - DNA, 25 bp, Homo sapien
gaagctgaacacttgcaccgacaga

SEQ ID NO: 4875787 - DNA, 25 bp, Homo sapien
tagatgcttgcctttgcggcgtgga

SEQ ID NO: 4875788 - DNA, 25 bp, Homo sapien
tgaaatcgtgcacaaaccagcggaa

SEQ ID NO: 4875789 - DNA, 25 bp, Homo sapien
agatttgcccgagctgcaagatgtg

SEQ ID NO: 4875790 - DNA, 25 bp, Homo sapien
ctccagatttgcccgagctgcaaga

SEQ ID NO: 4875791 - DNA, 25 bp, Homo sapien
ccagatttgcccgagctgcaagatg

SEQ ID NO: 4875792 - DNA, 25 bp, Homo sapien
cagatttgcccgagctgcaagatgt

SEQ ID NO: 4875793 - DNA, 25 bp, Homo sapien
aaagatttccgtgcaaaagcaaagc

SEQ ID NO: 4875794 - DNA, 25 bp, Homo sapien
cagtggggatgtagtagcagcagca

SEQ ID NO: 4875795 - DNA, 25 bp, Homo sapien
ccctgaaagatttccgtgcaaaagc

SEQ ID NO: 4875796 - DNA, 25 bp, Homo sapien
tgaaagatttccgtgcaaaagcaaa

SEQ ID NO: 4875797 - DNA, 25 bp, Homo sapien
tcctagccagtcagtaatttcagta

SEQ ID NO: 4875798 - DNA, 25 bp, Homo sapien
gagcatcaagctataagtcttccca

SEQ ID NO: 4875799 - DNA, 25 bp, Homo sapien
gaaatgctaatcagatgcatcctag

SEQ ID NO: 4875800 - DNA, 25 bp, Homo sapien
cagttaacaggatagagaagtattt

SEQ ID NO: 4875801 - DNA, 25 bp, Homo sapien
aaggacttcctcggttcacagaatt

SEQ ID NO: 4875802 - DNA, 25 bp, Homo sapien
aaaggacttcctcggttcacagaat

SEQ ID NO: 4875803 - DNA, 25 bp, Homo sapien
taaaaggacttcctcggttcacaga

SEQ ID NO: 4875804 - DNA, 25 bp, Homo sapien
aactcagagatcttgatgccaaagc

SEQ ID NO: 4875805 - DNA, 25 bp, Homo sapien
gcactcaggggtggcatatggattt

SEQ ID NO: 4875806 - DNA, 25 bp, Homo sapien
gatttgtgatgctccagggaagata

SEQ ID NO: 4875807 - DNA, 25 bp, Homo sapien
agagatcttgatgccaaagccagca

SEQ ID NO: 4875808 - DNA, 25 bp, Homo sapien
gactaacttcatgagaacttgccat

SEQ ID NO: 4875809 - DNA, 25 bp, Homo sapien
cacaaccactagactaacttcatga

SEQ ID NO: 4875810 - DNA, 25 bp, Homo sapien
caaccactagactaacttcatgaga

SEQ ID NO: 4875811 - DNA, 25 bp, Homo sapien
tagactaacttcatgagaacttgcc

SEQ ID NO: 4875812 - DNA, 25 bp, Homo sapien
tcccagggttgggatgatgtgtttt

SEQ ID NO: 4875813 - DNA, 25 bp, Homo sapien
tgggatgatgtgttttggccccatt

SEQ ID NO: 4875814 - DNA, 25 bp, Homo sapien
tcaattagtaagcttatttctggcc

SEQ ID NO: 4875815 - DNA, 25 bp, Homo sapien
caattagtaagcttatttctggcct

SEQ ID NO: 4875816 - DNA, 25 bp, Homo sapien
tccttacagtaaacctgtgccttgt

SEQ ID NO: 4875817 - DNA, 25 bp, Homo sapien
cttacagtaaacctgtgccttgtgg

SEQ ID NO: 4875818 - DNA, 25 bp, Homo sapien
ttacagtaaacctgtgccttgtggg

SEQ ID NO: 4875819 - DNA, 25 bp, Homo sapien
tctccttacagtaaacctgtgcctt

SEQ ID NO: 4875820 - DNA, 25 bp, Homo sapien
gaacgtcctgggcatcatatgcctt

SEQ ID NO: 4875821 - DNA, 25 bp, Homo sapien
cagctgctaaactcaacaaggaggc

SEQ ID NO: 4875822 - DNA, 25 bp, Homo sapien
ggctcaaagggagtgctgactgcag

SEQ ID NO: 4875823 - DNA, 25 bp, Homo sapien
gggcatgcttcatgggaacgtcctg

SEQ ID NO: 4875824 - DNA, 25 bp, Homo sapien
gaaggcttgcctcaaagtcagactt

SEQ ID NO: 4875825 - DNA, 25 bp, Homo sapien
gacttgactaagtcactctgcatcc

SEQ ID NO: 4875826 - DNA, 25 bp, Homo sapien
gaagtgtggtgcttttacaagatga

SEQ ID NO: 4875827 - DNA, 25 bp, Homo sapien
gaatactgactttgaaggcttgcct

SEQ ID NO: 4875828 - DNA, 25 bp, Homo sapien
taattcaaagataatggaagtgacc

SEQ ID NO: 4875829 - DNA, 25 bp, Homo sapien
gatagccttgcctcctaattcaaag

SEQ ID NO: 4875830 - DNA, 25 bp, Homo sapien
tgaccagatggacagcaatccctga

SEQ ID NO: 4875831 - DNA, 25 bp, Homo sapien
gacagcaatccctgaatctgcacct

SEQ ID NO: 4875832 - DNA, 25 bp, Homo sapien
gacctaacagattggcatctaggaa

SEQ ID NO: 4875833 - DNA, 25 bp, Homo sapien
taatgggggcctagtcatctggtca

SEQ ID NO: 4875834 - DNA, 25 bp, Homo sapien
tagtcatctggtcaacctgacctaa

SEQ ID NO: 4875835 - DNA, 25 bp, Homo sapien
tggcatctaggaacactgtgaaggc

SEQ ID NO: 4875836 - DNA, 25 bp, Homo sapien
atcggagaatggccccccatcacat

SEQ ID NO: 4875837 - DNA, 25 bp, Homo sapien
gctgtcctcacaaatcggagaatgg

SEQ ID NO: 4875838 - DNA, 25 bp, Homo sapien
aaatcggagaatggccccccatcac

SEQ ID NO: 4875839 - DNA, 25 bp, Homo sapien
ttccagctgtcctcacaaatcggag

SEQ ID NO: 4875840 - DNA, 25 bp, Homo sapien
tttcttgtgtattccactatctgct

SEQ ID NO: 4875841 - DNA, 25 bp, Homo sapien
atttcttgtgtattccactatctgc

SEQ ID NO: 4875842 - DNA, 25 bp, Homo sapien
ttcttgtgtattccactatctgctt

SEQ ID NO: 4875843 - DNA, 25 bp, Homo sapien
acaaggtgtaatgggcataaactgg

SEQ ID NO: 4875844 - DNA, 25 bp, Homo sapien
catgcaggaagggtgtgagtgcacc

SEQ ID NO: 4875845 - DNA, 25 bp, Homo sapien
tcaacatgcaggaagggtgtgagtg

SEQ ID NO: 4875846 - DNA, 25 bp, Homo sapien
cccagaggaggtgtacaaggtgtaa

SEQ ID NO: 4875847 - DNA, 25 bp, Homo sapien
gcacccggcctaagccagcacttct

SEQ ID NO: 4875848 - DNA, 25 bp, Homo sapien
ttaccggggcctgccgccaccgcat

SEQ ID NO: 4875849 - DNA, 25 bp, Homo sapien
tggctcactaaaagtttcaagcaat

SEQ ID NO: 4875850 - DNA, 25 bp, Homo sapien
agtggctcactaaaagtttcaagca

SEQ ID NO: 4875851 - DNA, 25 bp, Homo sapien
gacatgaagttctgccgtttgacca

SEQ ID NO: 4875852 - DNA, 25 bp, Homo sapien
caggagaagacaaagcgctcaggag

SEQ ID NO: 4875853 - DNA, 25 bp, Homo sapien
cgtttgaccagcagatcagcaggag

SEQ ID NO: 4875854 - DNA, 25 bp, Homo sapien
gaatggcaacttctcctacgaggag

SEQ ID NO: 4875855 - DNA, 25 bp, Homo sapien
ccagaagggagctccagcgtgggca

SEQ ID NO: 4875856 - DNA, 25 bp, Homo sapien
gcaacatcggctgctatgtgcatct

SEQ ID NO: 4875857 - DNA, 25 bp, Homo sapien
atcggctgctatgtgcatctctcca

SEQ ID NO: 4875858 - DNA, 25 bp, Homo sapien
aactgcaacatcggctgctatgtgc

SEQ ID NO: 4875859 - DNA, 25 bp, Homo sapien
caatccccactgcaacattagaagt

SEQ ID NO: 4875860 - DNA, 25 bp, Homo sapien
ggtactactattcgtccacatctaa

SEQ ID NO: 4875861 - DNA, 25 bp, Homo sapien
gcaacattagaagttggtactacta

SEQ ID NO: 4875862 - DNA, 25 bp, Homo sapien
acttgtctaggaccggacagacagc

SEQ ID NO: 4875863 - DNA, 25 bp, Homo sapien
aggccagtggcgcttggagcaaact

SEQ ID NO: 4875864 - DNA, 25 bp, Homo sapien
gagcaaactcctgtagggctggtct

SEQ ID NO: 4875865 - DNA, 25 bp, Homo sapien
tggcgcttggagcaaactcctgtag

SEQ ID NO: 4875866 - DNA, 25 bp, Homo sapien
tgggccaggccagtggcgcttggag

SEQ ID NO: 4875867 - DNA, 25 bp, Homo sapien
ccactaggagaatggacgagggtca

SEQ ID NO: 4875868 - DNA, 25 bp, Homo sapien
tagcaatagctgacagcatcctgcc

SEQ ID NO: 4875869 - DNA, 25 bp, Homo sapien
aaggctgaacctctgaacttatagg

SEQ ID NO: 4875870 - DNA, 25 bp, Homo sapien
gatgggtctcaatgccgacagaatt

SEQ ID NO: 4875871 - DNA, 25 bp, Homo sapien
tctgtcctcaaggtgcttttatttt

SEQ ID NO: 4875872 - DNA, 25 bp, Homo sapien
tgtcctcaaggtgcttttattttcc

SEQ ID NO: 4875873 - DNA, 25 bp, Homo sapien
tgcttttattttcctttctgggaga

SEQ ID NO: 4875874 - DNA, 25 bp, Homo sapien
caaggtgcttttattttcctttctg

SEQ ID NO: 4875875 - DNA, 25 bp, Homo sapien
attttgcccataagcactaccctca

SEQ ID NO: 4875876 - DNA, 25 bp, Homo sapien
gaatacccaggtagactacttccag

SEQ ID NO: 4875877 - DNA, 25 bp, Homo sapien
catctcagggctaggcccatgggca

SEQ ID NO: 4875878 - DNA, 25 bp, Homo sapien
ttttctgagtaccagcaagctcagg

SEQ ID NO: 4875879 - DNA, 25 bp, Homo sapien
gagtgaattcaaaggatggatccgg

SEQ ID NO: 4875880 - DNA, 25 bp, Homo sapien
tggatccggaacacagggtctatag

SEQ ID NO: 4875881 - DNA, 25 bp, Homo sapien
gaaatgaccaccttgcctccgagtg

SEQ ID NO: 4875882 - DNA, 25 bp, Homo sapien
ttgagagactcaccaatcagcattc

SEQ ID NO: 4875883 - DNA, 25 bp, Homo sapien
catgaattttcagatgaagagatga

SEQ ID NO: 4875884 - DNA, 25 bp, Homo sapien
gaagagatgaagattttaagtcact

SEQ ID NO: 4875885 - DNA, 25 bp, Homo sapien
tcatgaattttcagatgaagagatg

SEQ ID NO: 4875886 - DNA, 25 bp, Homo sapien
gatgaagagatgaagattttaagtc

SEQ ID NO: 4875887 - DNA, 25 bp, Homo sapien
tatacagtgaggcataaccttccct

SEQ ID NO: 4875888 - DNA, 25 bp, Homo sapien
gcagtgtaggacagcatttgcattc

SEQ ID NO: 4875889 - DNA, 25 bp, Homo sapien
taattggtggtactgccgacaagcc

SEQ ID NO: 4875890 - DNA, 25 bp, Homo sapien
tgtattatctgcaccgaactctaga

SEQ ID NO: 4875891 - DNA, 25 bp, Homo sapien
cccagctgacagaggaaagcttgtc

SEQ ID NO: 4875892 - DNA, 25 bp, Homo sapien
ggctgtaagacagcgagcgagtcca

SEQ ID NO: 4875893 - DNA, 25 bp, Homo sapien
gtgggccagtgtccaaccattggtg

SEQ ID NO: 4875894 - DNA, 25 bp, Homo sapien
aaagcttgtccggtgagaccctctg

SEQ ID NO: 4875895 - DNA, 25 bp, Homo sapien
ccagacagaggcaagggtcctaaaa

SEQ ID NO: 4875896 - DNA, 25 bp, Homo sapien
cagaggcaagggtcctaaaactttg

SEQ ID NO: 4875897 - DNA, 25 bp, Homo sapien
tgggccagacagaggcaagggtcct

SEQ ID NO: 4875898 - DNA, 25 bp, Homo sapien
agacagaggcaagggtcctaaaact

SEQ ID NO: 4875899 - DNA, 25 bp, Homo sapien
cattcatgtggaccacagtcgctgt

SEQ ID NO: 4875900 - DNA, 25 bp, Homo sapien
cacagtcgctgtggatgcaaagtgg

SEQ ID NO: 4875901 - DNA, 25 bp, Homo sapien
gcaccctggtcagggacggtgttgt

SEQ ID NO: 4875902 - DNA, 25 bp, Homo sapien
tggatgcaaagtgggcaccctggtc

SEQ ID NO: 4875903 - DNA, 25 bp, Homo sapien
ctgctagagcaggtaggctgggttt

SEQ ID NO: 4875904 - DNA, 25 bp, Homo sapien
tgctagagcaggtaggctgggtttg

SEQ ID NO: 4875905 - DNA, 25 bp, Homo sapien
ctagagcaggtaggctgggtttggg

SEQ ID NO: 4875906 - DNA, 25 bp, Homo sapien
gagcaggtaggctgggtttgggaac

SEQ ID NO: 4875907 - DNA, 25 bp, Homo sapien
tctgaggtgccgtgtggaaatcgac

SEQ ID NO: 4875908 - DNA, 25 bp, Homo sapien
gaagcctgaaacgactgacggagac

SEQ ID NO: 4875909 - DNA, 25 bp, Homo sapien
gatggatttaagcagccccactaga

SEQ ID NO: 4875910 - DNA, 25 bp, Homo sapien
gagccctgcacggaatagtccagtg

SEQ ID NO: 4875911 - DNA, 25 bp, Homo sapien
caaaaggggcatgagttacacaggc

SEQ ID NO: 4875912 - DNA, 25 bp, Homo sapien
aaggacaccaggcaacggaggagca

SEQ ID NO: 4875913 - DNA, 25 bp, Homo sapien
cagagcaaagacgatgccaaggcct

SEQ ID NO: 4875914 - DNA, 25 bp, Homo sapien
caggaaggcccgcaacaaaggacac

SEQ ID NO: 4875915 - DNA, 25 bp, Homo sapien
tctttctaaacataatcattgccac

SEQ ID NO: 4875916 - DNA, 25 bp, Homo sapien
taatcattgccaccatagatggtaa

SEQ ID NO: 4875917 - DNA, 25 bp, Homo sapien
tttaaaacatgtctgtagtaggaga

SEQ ID NO: 4875918 - DNA, 25 bp, Homo sapien
taaaacatgtctgtagtaggagaaa

SEQ ID NO: 4875919 - DNA, 25 bp, Homo sapien
ccagaacaaggagataaaggtgacc

SEQ ID NO: 4875920 - DNA, 25 bp, Homo sapien
gggtgttccctgatgtcaagctaac

SEQ ID NO: 4875921 - DNA, 25 bp, Homo sapien
tacagactttagcaacggaagaaac

SEQ ID NO: 4875922 - DNA, 25 bp, Homo sapien
cccaaagagaccaggcaatgtgtca

SEQ ID NO: 4875923 - DNA, 25 bp, Homo sapien
tgtttccaaagcagccgcaagtgta

SEQ ID NO: 4875924 - DNA, 25 bp, Homo sapien
tctgcaggagggattgcccactcta

SEQ ID NO: 4875925 - DNA, 25 bp, Homo sapien
tggtcaagcatcactaatgtccggc

SEQ ID NO: 4875926 - DNA, 25 bp, Homo sapien
ggacttggatgtacaacccaacgga

SEQ ID NO: 4875927 - DNA, 25 bp, Homo sapien
tcccacctgaacctcattagttcca

SEQ ID NO: 4875928 - DNA, 25 bp, Homo sapien
tcactgtgtcctgcaagggccaccc

SEQ ID NO: 4875929 - DNA, 25 bp, Homo sapien
ctcattagttccacactggtgttta

SEQ ID NO: 4875930 - DNA, 25 bp, Homo sapien
ccaggatctgggcttctttggctcc

SEQ ID NO: 4875931 - DNA, 25 bp, Homo sapien
atggcagggagtccactaaggacag

SEQ ID NO: 4875932 - DNA, 25 bp, Homo sapien
caagcacaggtgattcccttcacac

SEQ ID NO: 4875933 - DNA, 25 bp, Homo sapien
agcaagcacaggtgattcccttcac

SEQ ID NO: 4875934 - DNA, 25 bp, Homo sapien
gagtccactaaggacagctctgtgg

SEQ ID NO: 4875935 - DNA, 25 bp, Homo sapien
actggaaataaggacggtctctcat

SEQ ID NO: 4875936 - DNA, 25 bp, Homo sapien
aaaccagagtataacactggaaata

SEQ ID NO: 4875937 - DNA, 25 bp, Homo sapien
tcctacaaaccagagtataacactg

SEQ ID NO: 4875938 - DNA, 25 bp, Homo sapien
acaaaccagagtataacactggaaa

SEQ ID NO: 4875939 - DNA, 25 bp, Homo sapien
cttcatctgacaattggaggtgcat

SEQ ID NO: 4875940 - DNA, 25 bp, Homo sapien
ggcttcatctgacaattggaggtgc

SEQ ID NO: 4875941 - DNA, 25 bp, Homo sapien
tgggcttcatctgacaattggaggt

SEQ ID NO: 4875942 - DNA, 25 bp, Homo sapien
accttgggcttcatctgacaattgg

SEQ ID NO: 4875943 - DNA, 25 bp, Homo sapien
atgtgggcgattttcatagttctgg

SEQ ID NO: 4875944 - DNA, 25 bp, Homo sapien
ccttaaatgaatgtgggcgattttc

SEQ ID NO: 4875945 - DNA, 25 bp, Homo sapien
gctgtctctgactccgttaatcttg

SEQ ID NO: 4875946 - DNA, 25 bp, Homo sapien
gagccaactgccacttatatgcaat

SEQ ID NO: 4875947 - DNA, 25 bp, Homo sapien
agcttttccaactccccggtggctg

SEQ ID NO: 4875948 - DNA, 25 bp, Homo sapien
gagaagatcctaaaaccaatcttgg

SEQ ID NO: 4875949 - DNA, 25 bp, Homo sapien
caatcttggttttgcccagcttttc

SEQ ID NO: 4875950 - DNA, 25 bp, Homo sapien
gaaggagtattcttaaatctgagaa

SEQ ID NO: 4875951 - DNA, 25 bp, Homo sapien
acacatccatacgttctccttagag

SEQ ID NO: 4875952 - DNA, 25 bp, Homo sapien
gggacactaatgctccccacatggg

SEQ ID NO: 4875953 - DNA, 25 bp, Homo sapien
tgtgatggcaacaacggccacggtg

SEQ ID NO: 4875954 - DNA, 25 bp, Homo sapien
gccacggtggtgtcacacatccata

SEQ ID NO: 4875955 - DNA, 25 bp, Homo sapien
ttggaatgggttcgttttcaggcca

SEQ ID NO: 4875956 - DNA, 25 bp, Homo sapien
cacatggggatcttaaccttctgga

SEQ ID NO: 4875957 - DNA, 25 bp, Homo sapien
aatgggttcgttttcaggccagcct

SEQ ID NO: 4875958 - DNA, 25 bp, Homo sapien
ggatcttaaccttctggaataattc

SEQ ID NO: 4875959 - DNA, 25 bp, Homo sapien
gctctattaccctcttcgcagatta

SEQ ID NO: 4875960 - DNA, 25 bp, Homo sapien
gcagattaaatctgtgtccattctg

SEQ ID NO: 4875961 - DNA, 25 bp, Homo sapien
tgtcattagcaaatgtcacgggcac

SEQ ID NO: 4875962 - DNA, 25 bp, Homo sapien
aaatgtcacgggcactctttctgct

SEQ ID NO: 4875963 - DNA, 25 bp, Homo sapien
gttcccaagccaggtacagccgatt

SEQ ID NO: 4875964 - DNA, 25 bp, Homo sapien
tctgtagaattcctgtgagcctgct

SEQ ID NO: 4875965 - DNA, 25 bp, Homo sapien
gcagctcggcagatagacttataca

SEQ ID NO: 4875966 - DNA, 25 bp, Homo sapien
tcagagccactcatttcacaattgt

SEQ ID NO: 4875967 - DNA, 25 bp, Homo sapien
gaagaacggaccctgcggtgtccaa

SEQ ID NO: 4875968 - DNA, 25 bp, Homo sapien
gctaagtgcattctctgggttgcct

SEQ ID NO: 4875969 - DNA, 25 bp, Homo sapien
agtactccagaccaaagaggctgcc

SEQ ID NO: 4875970 - DNA, 25 bp, Homo sapien
ccttcgaagggtgtctgttcttgac

SEQ ID NO: 4875971 - DNA, 25 bp, Homo sapien
atcccctaggaagccagacattgag

SEQ ID NO: 4875972 - DNA, 25 bp, Homo sapien
tcaaaaaacaatatgcatgcccccg

SEQ ID NO: 4875973 - DNA, 25 bp, Homo sapien
aaacaatatgcatgcccccgtatcc

SEQ ID NO: 4875974 - DNA, 25 bp, Homo sapien
taggaagccagacattgagccctcc

SEQ ID NO: 4875975 - DNA, 25 bp, Homo sapien
cctatcagctcttggtatccatgaa

SEQ ID NO: 4875976 - DNA, 25 bp, Homo sapien
aattcgtggttctccacctacagcg

SEQ ID NO: 4875977 - DNA, 25 bp, Homo sapien
gggggctttgacacctccagacagt

SEQ ID NO: 4875978 - DNA, 25 bp, Homo sapien
caataatgtgctgctggaagagttg

SEQ ID NO: 4875979 - DNA, 25 bp, Homo sapien
gcctcagtgcccatagactcacttt

SEQ ID NO: 4875980 - DNA, 25 bp, Homo sapien
ggctatttccgcatgcttgctcctc

SEQ ID NO: 4875981 - DNA, 25 bp, Homo sapien
gtgtaagccctctgtctaccctcat

SEQ ID NO: 4875982 - DNA, 25 bp, Homo sapien
tccctttagggctatttccgcatgc

SEQ ID NO: 4875983 - DNA, 25 bp, Homo sapien
tggacctctccaaccacagagcctt

SEQ ID NO: 4875984 - DNA, 25 bp, Homo sapien
gatacacattccatgtggacctctc

SEQ ID NO: 4875985 - DNA, 25 bp, Homo sapien
ggctccaacacagtccctctggata

SEQ ID NO: 4875986 - DNA, 25 bp, Homo sapien
ccctctggatacacattccatgtgg

SEQ ID NO: 4875987 - DNA, 25 bp, Homo sapien
ggaacggcaaatgcacagcgttttt

SEQ ID NO: 4875988 - DNA, 25 bp, Homo sapien
ctagtttaggaacggcaaatgcaca

SEQ ID NO: 4875989 - DNA, 25 bp, Homo sapien
gtttaggaacggcaaatgcacagcg

SEQ ID NO: 4875990 - DNA, 25 bp, Homo sapien
taggaacggcaaatgcacagcgttt

SEQ ID NO: 4875991 - DNA, 25 bp, Homo sapien
aatgaaaatgacaccgtgaaatcac

SEQ ID NO: 4875992 - DNA, 25 bp, Homo sapien
tcaggaaatgcatgtatagttttaa

SEQ ID NO: 4875993 - DNA, 25 bp, Homo sapien
ctggacctgctctctcacttgaaca

SEQ ID NO: 4875994 - DNA, 25 bp, Homo sapien
gtaatgaaaatgacaccgtgaaatc

SEQ ID NO: 4875995 - DNA, 25 bp, Homo sapien
agtcacatgtgagccaatactgcag

SEQ ID NO: 4875996 - DNA, 25 bp, Homo sapien
cctggtcagcaagattggtgagttt

SEQ ID NO: 4875997 - DNA, 25 bp, Homo sapien
gaagaagtacttcatgccatgaaca

SEQ ID NO: 4875998 - DNA, 25 bp, Homo sapien
cattgtagccagtcacatgtgagcc

SEQ ID NO: 4875999 - DNA, 25 bp, Homo sapien
tgtagtaggcactatggccagggcc

SEQ ID NO: 4876000 - DNA, 25 bp, Homo sapien
ggcaacttggtgagtccggctgaaa

SEQ ID NO: 4876001 - DNA, 25 bp, Homo sapien
gcctcatagcaactgtacctaacaa

SEQ ID NO: 4876002 - DNA, 25 bp, Homo sapien
gaaggaaggttctctatgcactcgc

SEQ ID NO: 4876003 - DNA, 25 bp, Homo sapien
gccaactgctggtgtttcctttctt

SEQ ID NO: 4876004 - DNA, 25 bp, Homo sapien
ctgcacggctgcagcttgtgatgag

SEQ ID NO: 4876005 - DNA, 25 bp, Homo sapien
cagtgccaactgctggtgtttcctt

SEQ ID NO: 4876006 - DNA, 25 bp, Homo sapien
cgctgcacggctgcagcttgtgatg

SEQ ID NO: 4876007 - DNA, 25 bp, Homo sapien
agaaaggtggctagcaaatgcagca

SEQ ID NO: 4876008 - DNA, 25 bp, Homo sapien
cactctgtcggcttcgaatacctaa

SEQ ID NO: 4876009 - DNA, 25 bp, Homo sapien
tgcagcatactcacatccgcatact

SEQ ID NO: 4876010 - DNA, 25 bp, Homo sapien
tctgtacgataatgcagagctgcag

SEQ ID NO: 4876011 - DNA, 25 bp, Homo sapien
tctttttctgtgcaaagactccact

SEQ ID NO: 4876012 - DNA, 25 bp, Homo sapien
ttttctgtgcaaagactccactttc

SEQ ID NO: 4876013 - DNA, 25 bp, Homo sapien
ctgccttctccgtgcttttctcttt

SEQ ID NO: 4876014 - DNA, 25 bp, Homo sapien
cacacggccttctgccttctccgtg

SEQ ID NO: 4876015 - DNA, 25 bp, Homo sapien
ccagaaggtgacttgcaaccctcca

SEQ ID NO: 4876016 - DNA, 25 bp, Homo sapien
tcagtgacctcaggccaccagaagg

SEQ ID NO: 4876017 - DNA, 25 bp, Homo sapien
ttttagaaaactagtagagatactc

SEQ ID NO: 4876018 - DNA, 25 bp, Homo sapien
ggtgacttgcaaccctccacgtgtg

SEQ ID NO: 4876019 - DNA, 25 bp, Homo sapien
atcccgtggagagtagctgctgccc

SEQ ID NO: 4876020 - DNA, 25 bp, Homo sapien
gggcctcctggtgtgtatcttatac

SEQ ID NO: 4876021 - DNA, 25 bp, Homo sapien
tgtgcaggtacagccgtgcatgcag

SEQ ID NO: 4876022 - DNA, 25 bp, Homo sapien
gctgctgccctgtaatatgtccaat

SEQ ID NO: 4876023 - DNA, 25 bp, Homo sapien
gctgtggacagttgtctgtacatga

SEQ ID NO: 4876024 - DNA, 25 bp, Homo sapien
gaaggctgtggacagttgtctgtac

SEQ ID NO: 4876025 - DNA, 25 bp, Homo sapien
gttgtctgtacatgaactggtattt

SEQ ID NO: 4876026 - DNA, 25 bp, Homo sapien
ggacagttgtctgtacatgaactgg

SEQ ID NO: 4876027 - DNA, 25 bp, Homo sapien
tatacaccctcattgagagcatccg

SEQ ID NO: 4876028 - DNA, 25 bp, Homo sapien
ccgtgattctacatggtgttctggg

SEQ ID NO: 4876029 - DNA, 25 bp, Homo sapien
gagagcatccgctatgtgccgtgat

SEQ ID NO: 4876030 - DNA, 25 bp, Homo sapien
gagcacaccctttgaccccagggag

SEQ ID NO: 4876031 - DNA, 25 bp, Homo sapien
ttcaggataaactgttggcaaaagg

SEQ ID NO: 4876032 - DNA, 25 bp, Homo sapien
tcacgaagtattcaggataaactgt

SEQ ID NO: 4876033 - DNA, 25 bp, Homo sapien
cgaagtattcaggataaactgttgg

SEQ ID NO: 4876034 - DNA, 25 bp, Homo sapien
agtattcaggataaactgttggcaa

SEQ ID NO: 4876035 - DNA, 25 bp, Homo sapien
ctgcggaagagtggagccggctgca

SEQ ID NO: 4876036 - DNA, 25 bp, Homo sapien
ccctagtgaacgtcgtgcgtgaagg

SEQ ID NO: 4876037 - DNA, 25 bp, Homo sapien
tgcgtgccaccctagtgaacgtcgt

SEQ ID NO: 4876038 - DNA, 25 bp, Homo sapien
ggaagactgtgcgtgccaccctagt

SEQ ID NO: 4876039 - DNA, 25 bp, Homo sapien
cagccggaatgttccaggtgcgccc

SEQ ID NO: 4876040 - DNA, 25 bp, Homo sapien
ggaatgttccaggtgcgccccactc

SEQ ID NO: 4876041 - DNA, 25 bp, Homo sapien
tgtgccctccgcagccggaatgttc

SEQ ID NO: 4876042 - DNA, 25 bp, Homo sapien
gccggaatgttccaggtgcgcccca

SEQ ID NO: 4876043 - DNA, 25 bp, Homo sapien
ttgtggagactgatcaccagcattg

SEQ ID NO: 4876044 - DNA, 25 bp, Homo sapien
attgctttgtggagactgatcacca

SEQ ID NO: 4876045 - DNA, 25 bp, Homo sapien
gtgctgccaataacatcagcaattc

SEQ ID NO: 4876046 - DNA, 25 bp, Homo sapien
atcagcaattccattgctttgtgga

SEQ ID NO: 4876047 - DNA, 25 bp, Homo sapien
ccgctcctctccctgtgcctgaaca

SEQ ID NO: 4876048 - DNA, 25 bp, Homo sapien
ccccgctcctctccctgtgcctgaa

SEQ ID NO: 4876049 - DNA, 25 bp, Homo sapien
cgctcctctccctgtgcctgaacat

SEQ ID NO: 4876050 - DNA, 25 bp, Homo sapien
gaccccgctcctctccctgtgcctg

SEQ ID NO: 4876051 - DNA, 25 bp, Homo sapien
tcttcccatagccatagcacgtgac

SEQ ID NO: 4876052 - DNA, 25 bp, Homo sapien
tgcagacagctccttattgatgctt

SEQ ID NO: 4876053 - DNA, 25 bp, Homo sapien
ttccaaacaggattgaactgactgc

SEQ ID NO: 4876054 - DNA, 25 bp, Homo sapien
gaaaggccaacaagcagccagtgtt

SEQ ID NO: 4876055 - DNA, 25 bp, Homo sapien
taggcactaggaacctgaggacacg

SEQ ID NO: 4876056 - DNA, 25 bp, Homo sapien
gggcaggaacattgacgtgagtctt

SEQ ID NO: 4876057 - DNA, 25 bp, Homo sapien
gacacggatgtgtttccaagtacct

SEQ ID NO: 4876058 - DNA, 25 bp, Homo sapien
tattagctgtgtgggctccagtagg

SEQ ID NO: 4876059 - DNA, 25 bp, Homo sapien
cagaaaggctgctacagcaaaagta

SEQ ID NO: 4876060 - DNA, 25 bp, Homo sapien
tatgccatctaagcataggagtgct

SEQ ID NO: 4876061 - DNA, 25 bp, Homo sapien
gctgggagcagtcaattaaagagat

SEQ ID NO: 4876062 - DNA, 25 bp, Homo sapien
cagtgtttatgccatgtatgccatc

SEQ ID NO: 4876063 - DNA, 25 bp, Homo sapien
tgttgcaatattcatctcacggacc

SEQ ID NO: 4876064 - DNA, 25 bp, Homo sapien
gctttagaacatccttcagtctcga

SEQ ID NO: 4876065 - DNA, 25 bp, Homo sapien
tccctgggattcgatgtagactact

SEQ ID NO: 4876066 - DNA, 25 bp, Homo sapien
gtctcgaatatacttccgcagccag

SEQ ID NO: 4876067 - DNA, 25 bp, Homo sapien
tactgacgtgtggttgaaacaaacc

SEQ ID NO: 4876068 - DNA, 25 bp, Homo sapien
caaacctcagtgttcgtggcagaag

SEQ ID NO: 4876069 - DNA, 25 bp, Homo sapien
cctcagtgttcgtggcagaagaacc

SEQ ID NO: 4876070 - DNA, 25 bp, Homo sapien
gttgaaacaaacctcagtgttcgtg

SEQ ID NO: 4876071 - DNA, 25 bp, Homo sapien
ccacagggtcttgattacgtagcta

SEQ ID NO: 4876072 - DNA, 25 bp, Homo sapien
gaattgacgactttgctatgttgag

SEQ ID NO: 4876073 - DNA, 25 bp, Homo sapien
ttttggcatagaagtcctgcacagg

SEQ ID NO: 4876074 - DNA, 25 bp, Homo sapien
ttgcattaaacccacatccatttgg

SEQ ID NO: 4876075 - DNA, 25 bp, Homo sapien
cagggtgaaccccacgtggcacagc

SEQ ID NO: 4876076 - DNA, 25 bp, Homo sapien
tgcagggtgaaccccacgtggcaca

SEQ ID NO: 4876077 - DNA, 25 bp, Homo sapien
agggtgaaccccacgtggcacagca

SEQ ID NO: 4876078 - DNA, 25 bp, Homo sapien
gggtgaaccccacgtggcacagcag

SEQ ID NO: 4876079 - DNA, 25 bp, Homo sapien
tgtgtgtgtagtgaactccacaccc

SEQ ID NO: 4876080 - DNA, 25 bp, Homo sapien
tgtgtagtgaactccacacccaagc

SEQ ID NO: 4876081 - DNA, 25 bp, Homo sapien
gatttttgtggagtaaggagttgca

SEQ ID NO: 4876082 - DNA, 25 bp, Homo sapien
gtgaactccacacccaagcattgct

SEQ ID NO: 4876083 - DNA, 25 bp, Homo sapien
catgcacaatctggtagacaagtgg

SEQ ID NO: 4876084 - DNA, 25 bp, Homo sapien
gggcatcttttgaccagccaagacc

SEQ ID NO: 4876085 - DNA, 25 bp, Homo sapien
ctttggaaagccctgagcagctgac

SEQ ID NO: 4876086 - DNA, 25 bp, Homo sapien
ttcttagactttcagaagtgactgc

SEQ ID NO: 4876087 - DNA, 25 bp, Homo sapien
ctaatccctatgtctcttgctctta

SEQ ID NO: 4876088 - DNA, 25 bp, Homo sapien
tattaacctgatactggcctttggc

SEQ ID NO: 4876089 - DNA, 25 bp, Homo sapien
cctttggctcttattgtacattgca

SEQ ID NO: 4876090 - DNA, 25 bp, Homo sapien
cattgaacaggacctttgctgtgga

SEQ ID NO: 4876091 - DNA, 25 bp, Homo sapien
tgcaaacgtccattgacctaagtgg

SEQ ID NO: 4876092 - DNA, 25 bp, Homo sapien
tgaaattggtcagttagccgggcac

SEQ ID NO: 4876093 - DNA, 25 bp, Homo sapien
actactgatcccctcttgaaattgg

SEQ ID NO: 4876094 - DNA, 25 bp, Homo sapien
tgggcaagctggtcgcaatggaact

SEQ ID NO: 4876095 - DNA, 25 bp, Homo sapien
caccagtgaccacctcaaggggctg

SEQ ID NO: 4876096 - DNA, 25 bp, Homo sapien
agtgaccacctcaaggggctgcatg

SEQ ID NO: 4876097 - DNA, 25 bp, Homo sapien
cgctttgtggacaaggtctgcacag

SEQ ID NO: 4876098 - DNA, 25 bp, Homo sapien
ttgtggacaaggtctgcacagagag

SEQ ID NO: 4876099 - DNA, 25 bp, Homo sapien
tggatgagaaccacccccaatgagt

SEQ ID NO: 4876100 - DNA, 25 bp, Homo sapien
ccacgatgtggcacagaggtgggtg

SEQ ID NO: 4876101 - DNA, 25 bp, Homo sapien
gtgggtggatgagaaccacccccaa

SEQ ID NO: 4876102 - DNA, 25 bp, Homo sapien
ggtggatgagaaccacccccaatga

SEQ ID NO: 4876103 - DNA, 25 bp, Homo sapien
ccacgcccttcataatcggggtcaa

SEQ ID NO: 4876104 - DNA, 25 bp, Homo sapien
cacgcccttcataatcggggtcaat

SEQ ID NO: 4876105 - DNA, 25 bp, Homo sapien
acacccacgcccttcataatcgggg

SEQ ID NO: 4876106 - DNA, 25 bp, Homo sapien
gcccttcataatcggggtcaatgcg

SEQ ID NO: 4876107 - DNA, 25 bp, Homo sapien
tggcgcggatcacagactacttcct

SEQ ID NO: 4876108 - DNA, 25 bp, Homo sapien
gcaggaaacgacacgcgctaaggat

SEQ ID NO: 4876109 - DNA, 25 bp, Homo sapien
gatgtgtcccgagaggaatccaccg

SEQ ID NO: 4876110 - DNA, 25 bp, Homo sapien
tgttttgccagtccagcgggtggca

SEQ ID NO: 4876111 - DNA, 25 bp, Homo sapien
ccgaggtttcgtcttacaaatctct

SEQ ID NO: 4876112 - DNA, 25 bp, Homo sapien
tcagaatagcgaaatccgaggtttc

SEQ ID NO: 4876113 - DNA, 25 bp, Homo sapien
tctctggaatatgacagtgcgcatc

SEQ ID NO: 4876114 - DNA, 25 bp, Homo sapien
tgtctacgaagtgctcctctctgga

SEQ ID NO: 4876115 - DNA, 25 bp, Homo sapien
actttgaataaagttcagtggtgac

SEQ ID NO: 4876116 - DNA, 25 bp, Homo sapien
cagccaatttatccctaataataga

SEQ ID NO: 4876117 - DNA, 25 bp, Homo sapien
cttcttgaggtgatcagccaattta

SEQ ID NO: 4876118 - DNA, 25 bp, Homo sapien
attcttcagaatactccaatcttct

SEQ ID NO: 4876119 - DNA, 25 bp, Homo sapien
tgccgaaagaacagatgatcagacc

SEQ ID NO: 4876120 - DNA, 25 bp, Homo sapien
tcaggagtaccaaagccagtccagc

SEQ ID NO: 4876121 - DNA, 25 bp, Homo sapien
gagagatgcctttcttgccgaaaga

SEQ ID NO: 4876122 - DNA, 25 bp, Homo sapien
tcacagtcttggttaaccaggagca

SEQ ID NO: 4876123 - DNA, 25 bp, Homo sapien
acgtggcaaggtgcgtgtacgatcc

SEQ ID NO: 4876124 - DNA, 25 bp, Homo sapien
cagccacgtggcaaggtgcgtgtac

SEQ ID NO: 4876125 - DNA, 25 bp, Homo sapien
ggcagccacgtggcaaggtgcgtgt

SEQ ID NO: 4876126 - DNA, 25 bp, Homo sapien
ccacgtggcaaggtgcgtgtacgat

SEQ ID NO: 4876127 - DNA, 25 bp, Homo sapien
taaggagcacaagatatgctttggc

SEQ ID NO: 4876128 - DNA, 25 bp, Homo sapien
gagctgggagtctgcttaaacgagt

SEQ ID NO: 4876129 - DNA, 25 bp, Homo sapien
ggtgtgggatgttcatgatcacaca

SEQ ID NO: 4876130 - DNA, 25 bp, Homo sapien
gtggcaccaatatttgcatttgtga

SEQ ID NO: 4876131 - DNA, 25 bp, Homo sapien
ttcatgcttcgtggacttggaaggg

SEQ ID NO: 4876132 - DNA, 25 bp, Homo sapien
ttattcatgcttcgtggacttggaa

SEQ ID NO: 4876133 - DNA, 25 bp, Homo sapien
atgcttcgtggacttggaagggggc

SEQ ID NO: 4876134 - DNA, 25 bp, Homo sapien
tgcttcgtggacttggaagggggcc

SEQ ID NO: 4876135 - DNA, 25 bp, Homo sapien
tataagagcgccttccccagatctt

SEQ ID NO: 4876136 - DNA, 25 bp, Homo sapien
ctcctcctctataagagcgccttcc

SEQ ID NO: 4876137 - DNA, 25 bp, Homo sapien
atttcagacgtgtctcctgttttcc

SEQ ID NO: 4876138 - DNA, 25 bp, Homo sapien
ttcagacgtgtctcctgttttccct

SEQ ID NO: 4876139 - DNA, 25 bp, Homo sapien
tcaggaagataactgcaccgccggt

SEQ ID NO: 4876140 - DNA, 25 bp, Homo sapien
aagataactgcaccgccggtcaggc

SEQ ID NO: 4876141 - DNA, 25 bp, Homo sapien
tcaggctcgcgccaaccaaagcggg

SEQ ID NO: 4876142 - DNA, 25 bp, Homo sapien
aggaagataactgcaccgccggtca

SEQ ID NO: 4876143 - DNA, 25 bp, Homo sapien
tactccaaccgctcctgaataaggg

SEQ ID NO: 4876144 - DNA, 25 bp, Homo sapien
gatgaagatcccaaagtacagctgg

SEQ ID NO: 4876145 - DNA, 25 bp, Homo sapien
tcttgtcatctcgagagtcccggag

SEQ ID NO: 4876146 - DNA, 25 bp, Homo sapien
aatgaatagcctgcagcgtgtcctg

SEQ ID NO: 4876147 - DNA, 25 bp, Homo sapien
gagccactcattctgcgtctggaaa

SEQ ID NO: 4876148 - DNA, 25 bp, Homo sapien
aatgggcgctgcacatgcctgggaa

SEQ ID NO: 4876149 - DNA, 25 bp, Homo sapien
tggtgatgacggtcccactaggaac

SEQ ID NO: 4876150 - DNA, 25 bp, Homo sapien
ggagagtcctattaagccagcgtca

SEQ ID NO: 4876151 - DNA, 25 bp, Homo sapien
aaagaagtcctaggttgagccctct

SEQ ID NO: 4876152 - DNA, 25 bp, Homo sapien
tcaccatgtgctgacaagaagagcc

SEQ ID NO: 4876153 - DNA, 25 bp, Homo sapien
tctggatgacacacccattacaggt

SEQ ID NO: 4876154 - DNA, 25 bp, Homo sapien
ttcctgggcctttactggtgactag

SEQ ID NO: 4876155 - DNA, 25 bp, Homo sapien
tgttgggttaacagcgtttatcaca

SEQ ID NO: 4876156 - DNA, 25 bp, Homo sapien
cagtgctattgaactagacagtatg

SEQ ID NO: 4876157 - DNA, 25 bp, Homo sapien
gagactaaactttgacttacatgga

SEQ ID NO: 4876158 - DNA, 25 bp, Homo sapien
tgtcactatggttaagatacacaca

SEQ ID NO: 4876159 - DNA, 25 bp, Homo sapien
catagcgtgagccataagaagcagg

SEQ ID NO: 4876160 - DNA, 25 bp, Homo sapien
caggtagcaggaattcactagcgct

SEQ ID NO: 4876161 - DNA, 25 bp, Homo sapien
caggcctgtgcacgtcatggtacta

SEQ ID NO: 4876162 - DNA, 25 bp, Homo sapien
tactacggctgaacggaagtgctcc

SEQ ID NO: 4876163 - DNA, 25 bp, Homo sapien
gatgctagtgctgataactgggaag

SEQ ID NO: 4876164 - DNA, 25 bp, Homo sapien
tacaagaacatatgaaggcccgact

SEQ ID NO: 4876165 - DNA, 25 bp, Homo sapien
cattttatttcagggcttgcgccaa

SEQ ID NO: 4876166 - DNA, 25 bp, Homo sapien
tctgaaaactgactcgccgtgatgc

SEQ ID NO: 4876167 - DNA, 25 bp, Homo sapien
tggtttagtgacgatggttccgcaa

SEQ ID NO: 4876168 - DNA, 25 bp, Homo sapien
gcttgagggctatcaatggtccagt

SEQ ID NO: 4876169 - DNA, 25 bp, Homo sapien
caggatatttgcagtcatgtggaca

SEQ ID NO: 4876170 - DNA, 25 bp, Homo sapien
tacacagactaggtgactggcagaa

SEQ ID NO: 4876171 - DNA, 25 bp, Homo sapien
gaatagaaagtttcttgcctggcag

SEQ ID NO: 4876172 - DNA, 25 bp, Homo sapien
caaagagacttttagcagcagaata

SEQ ID NO: 4876173 - DNA, 25 bp, Homo sapien
gaatatgaccagcaattgcttacgg

SEQ ID NO: 4876174 - DNA, 25 bp, Homo sapien
aggacagcctacctgacctctttca

SEQ ID NO: 4876175 - DNA, 25 bp, Homo sapien
caggaacgcaaatgtcaggatgaac

SEQ ID NO: 4876176 - DNA, 25 bp, Homo sapien
cccaggaattttaacgatgactaca

SEQ ID NO: 4876177 - DNA, 25 bp, Homo sapien
cagactttccttgtgggaggtgaat

SEQ ID NO: 4876178 - DNA, 25 bp, Homo sapien
catgtttgtggtaaccagttggtgc

SEQ ID NO: 4876179 - DNA, 25 bp, Homo sapien
gttgtattcctcagactccacttcc

SEQ ID NO: 4876180 - DNA, 25 bp, Homo sapien
catagacctttgaaggaaaagtgtt

SEQ ID NO: 4876181 - DNA, 25 bp, Homo sapien
gaaaggagttgtctcattaaaaagc

SEQ ID NO: 4876182 - DNA, 25 bp, Homo sapien
ccattgtattctctgcttggtgagt

SEQ ID NO: 4876183 - DNA, 25 bp, Homo sapien
caggcatcaggaggagacaagtttt

SEQ ID NO: 4876184 - DNA, 25 bp, Homo sapien
gggcatcatgcacgcattctgaaaa

SEQ ID NO: 4876185 - DNA, 25 bp, Homo sapien
tggtgatcatgagtacagaactggg

SEQ ID NO: 4876186 - DNA, 25 bp, Homo sapien
tggatttcagaacgccacctggtga

SEQ ID NO: 4876187 - DNA, 25 bp, Homo sapien
ttcccacctaagcacatgtaagcat

SEQ ID NO: 4876188 - DNA, 25 bp, Homo sapien
ggaagttgtacaggatattctctga

SEQ ID NO: 4876189 - DNA, 25 bp, Homo sapien
tacaacaactttgcctcatgaagcc

SEQ ID NO: 4876190 - DNA, 25 bp, Homo sapien
tatcagtatatagctgaagccctgt

SEQ ID NO: 4876191 - DNA, 25 bp, Homo sapien
ggcccctacatctagtccaaatagg

SEQ ID NO: 4876192 - DNA, 25 bp, Homo sapien
tccaggcccctacatctagtccaaa

SEQ ID NO: 4876193 - DNA, 25 bp, Homo sapien
tcttccaggcccctacatctagtcc

SEQ ID NO: 4876194 - DNA, 25 bp, Homo sapien
tccttcttccaggcccctacatcta

SEQ ID NO: 4876195 - DNA, 25 bp, Homo sapien
catgtggtctggaaagccttgaaaa

SEQ ID NO: 4876196 - DNA, 25 bp, Homo sapien
tcttccagtgatgagatgtatagct

SEQ ID NO: 4876197 - DNA, 25 bp, Homo sapien
tgtttggtgaagaatctagactctg

SEQ ID NO: 4876198 - DNA, 25 bp, Homo sapien
tacagaatgactggtcctcagcagc

SEQ ID NO: 4876199 - DNA, 25 bp, Homo sapien
cacgtaaactaattgggagacactc

SEQ ID NO: 4876200 - DNA, 25 bp, Homo sapien
gaatagctatggtctctttctgcgc

SEQ ID NO: 4876201 - DNA, 25 bp, Homo sapien
tgcaatggtttcatgctaagcacga

SEQ ID NO: 4876202 - DNA, 25 bp, Homo sapien
tgtcatagccctaaattcagcgtgc

SEQ ID NO: 4876203 - DNA, 25 bp, Homo sapien
tacgcacactcgtggggtctctcgg

SEQ ID NO: 4876204 - DNA, 25 bp, Homo sapien
gaaatgtctacaccgttccctacgc

SEQ ID NO: 4876205 - DNA, 25 bp, Homo sapien
ctcgtggggtctctcggaccttatt

SEQ ID NO: 4876206 - DNA, 25 bp, Homo sapien
ttccctacgcacactcgtggggtct

SEQ ID NO: 4876207 - DNA, 25 bp, Homo sapien
ttacaatctgaacgctaaagggatg

SEQ ID NO: 4876208 - DNA, 25 bp, Homo sapien
aaaagcacaagaactgccaagatga

SEQ ID NO: 4876209 - DNA, 25 bp, Homo sapien
cacacactgtgcttcaaactagggc

SEQ ID NO: 4876210 - DNA, 25 bp, Homo sapien
ggcctcccgcgaataaagacacact

SEQ ID NO: 4876211 - DNA, 25 bp, Homo sapien
tctgctctggcctgtaacttgcttc

SEQ ID NO: 4876212 - DNA, 25 bp, Homo sapien
tgctctggcctgtaacttgcttccc

SEQ ID NO: 4876213 - DNA, 25 bp, Homo sapien
cagggattgctgtgaacctctcagg

SEQ ID NO: 4876214 - DNA, 25 bp, Homo sapien
gcacacagtgctgtatagctgtggg

SEQ ID NO: 4876215 - DNA, 25 bp, Homo sapien
atccctggaccatcacggcagtgtg

SEQ ID NO: 4876216 - DNA, 25 bp, Homo sapien
gaggtaatgcgattgcatagccaag

SEQ ID NO: 4876217 - DNA, 25 bp, Homo sapien
atggccaaggagaaagtgccagttt

SEQ ID NO: 4876218 - DNA, 25 bp, Homo sapien
ccagtttgaatgaggctgggatgca

SEQ ID NO: 4876219 - DNA, 25 bp, Homo sapien
ttccagagctatcccttcatcaagc

SEQ ID NO: 4876220 - DNA, 25 bp, Homo sapien
tctgattccagagctatcccttcat

SEQ ID NO: 4876221 - DNA, 25 bp, Homo sapien
gattccagagctatcccttcatcaa

SEQ ID NO: 4876222 - DNA, 25 bp, Homo sapien
tgattccagagctatcccttcatca

SEQ ID NO: 4876223 - DNA, 25 bp, Homo sapien
tcagtgtcatctctacgtcatgcag

SEQ ID NO: 4876224 - DNA, 25 bp, Homo sapien
tgaaactcctgatttgtttataagg

SEQ ID NO: 4876225 - DNA, 25 bp, Homo sapien
ccttaaggatgtcaagtgaaactcc

SEQ ID NO: 4876226 - DNA, 25 bp, Homo sapien
gctgtgtgctggttctaacacccca

SEQ ID NO: 4876227 - DNA, 25 bp, Homo sapien
cccgctgggcgtgacttctgttttt

SEQ ID NO: 4876228 - DNA, 25 bp, Homo sapien
gcatttctcattgcgctgtactgaa

SEQ ID NO: 4876229 - DNA, 25 bp, Homo sapien
aattgagaggtagagcaaagaccac

SEQ ID NO: 4876230 - DNA, 25 bp, Homo sapien
gcaggaactgaactcctagtagtta

SEQ ID NO: 4876231 - DNA, 25 bp, Homo sapien
ggacttgggcttgcctatgtcgtgt

SEQ ID NO: 4876232 - DNA, 25 bp, Homo sapien
tatgtcgtgtggtttcattctctga

SEQ ID NO: 4876233 - DNA, 25 bp, Homo sapien
cacctgtttggagatgtgatgtgct

SEQ ID NO: 4876234 - DNA, 25 bp, Homo sapien
cattctctgattgttggtcctatgc

SEQ ID NO: 4876235 - DNA, 25 bp, Homo sapien
aattgggggactgtcttgagtgcta

SEQ ID NO: 4876236 - DNA, 25 bp, Homo sapien
tgaattgggggactgtcttgagtgc

SEQ ID NO: 4876237 - DNA, 25 bp, Homo sapien
ggtgaattgggggactgtcttgagt

SEQ ID NO: 4876238 - DNA, 25 bp, Homo sapien
gggtgaattgggggactgtcttgag

SEQ ID NO: 4876239 - DNA, 25 bp, Homo sapien
tagccacggacagagctgtgatgag

SEQ ID NO: 4876240 - DNA, 25 bp, Homo sapien
tgaaagatggtatcggctgagactc

SEQ ID NO: 4876241 - DNA, 25 bp, Homo sapien
agaaagagctgttagccacggacag

SEQ ID NO: 4876242 - DNA, 25 bp, Homo sapien
gatggtatcggctgagactcagaaa

SEQ ID NO: 4876243 - DNA, 25 bp, Homo sapien
aaacaccagtttgaacaatgtcttg

SEQ ID NO: 4876244 - DNA, 25 bp, Homo sapien
aaaacaccagtttgaacaatgtctt

SEQ ID NO: 4876245 - DNA, 25 bp, Homo sapien
aacaccagtttgaacaatgtcttgc

SEQ ID NO: 4876246 - DNA, 25 bp, Homo sapien
caccagtttgaacaatgtcttgcat

SEQ ID NO: 4876247 - DNA, 25 bp, Homo sapien
tgaactgctactggggtaactggct

SEQ ID NO: 4876248 - DNA, 25 bp, Homo sapien
tactggggtaactggctgatacatc

SEQ ID NO: 4876249 - DNA, 25 bp, Homo sapien
gcttctgaactgctactggggtaac

SEQ ID NO: 4876250 - DNA, 25 bp, Homo sapien
ctggctgatacatctgtttggtatg

SEQ ID NO: 4876251 - DNA, 25 bp, Homo sapien
ttcacacgtgcagggtttttgccca

SEQ ID NO: 4876252 - DNA, 25 bp, Homo sapien
cccgttgcaggaccatttggagtct

SEQ ID NO: 4876253 - DNA, 25 bp, Homo sapien
aaataggtcgatattcccgttgcag

SEQ ID NO: 4876254 - DNA, 25 bp, Homo sapien
tgtgaggatctacaaaaggccttga

SEQ ID NO: 4876255 - DNA, 25 bp, Homo sapien
cagcccctgtaatgacatgacctag

SEQ ID NO: 4876256 - DNA, 25 bp, Homo sapien
cagactggagctacacaacaggtaa

SEQ ID NO: 4876257 - DNA, 25 bp, Homo sapien
cgatggtggactgtggaacttccca

SEQ ID NO: 4876258 - DNA, 25 bp, Homo sapien
tcaattctgccggttctcaggcctc

SEQ ID NO: 4876259 - DNA, 25 bp, Homo sapien
gatgttaggtcaaacgttattctag

SEQ ID NO: 4876260 - DNA, 25 bp, Homo sapien
aaaaaggctcttttattgtctgtga

SEQ ID NO: 4876261 - DNA, 25 bp, Homo sapien
gactgagccattaggtgcccagatg

SEQ ID NO: 4876262 - DNA, 25 bp, Homo sapien
aggcagttgtccctccccagagtgg

SEQ ID NO: 4876263 - DNA, 25 bp, Homo sapien
ctgtggatcgactgcccgcccacca

SEQ ID NO: 4876264 - DNA, 25 bp, Homo sapien
tgtggatcgactgcccgcccaccag

SEQ ID NO: 4876265 - DNA, 25 bp, Homo sapien
cttggagaagtttgtcccaggacct

SEQ ID NO: 4876266 - DNA, 25 bp, Homo sapien
caggacctttacttgcagccgttgc

SEQ ID NO: 4876267 - DNA, 25 bp, Homo sapien
tctgcaatgcagaactctgccccgc

SEQ ID NO: 4876268 - DNA, 25 bp, Homo sapien
gctgctccctgagtggtgctggcct

SEQ ID NO: 4876269 - DNA, 25 bp, Homo sapien
ggaatattatgggtccctggagacc

SEQ ID NO: 4876270 - DNA, 25 bp, Homo sapien
gagatacacttaatacacatcacgg

SEQ ID NO: 4876271 - DNA, 25 bp, Homo sapien
cccagtgggctctcaggtctgaact

SEQ ID NO: 4876272 - DNA, 25 bp, Homo sapien
tcacggaacacaacctctgtggcag

SEQ ID NO: 4876273 - DNA, 25 bp, Homo sapien
ccatgccaatactaacgagacccga

SEQ ID NO: 4876274 - DNA, 25 bp, Homo sapien
tcccatgccaatactaacgagaccc

SEQ ID NO: 4876275 - DNA, 25 bp, Homo sapien
tctcccatgccaatactaacgagac

SEQ ID NO: 4876276 - DNA, 25 bp, Homo sapien
atgccaatactaacgagacccgacc

SEQ ID NO: 4876277 - DNA, 25 bp, Homo sapien
taccactggagggtagtgtttccaa

SEQ ID NO: 4876278 - DNA, 25 bp, Homo sapien
tagttgatagactaatcgtgtgctt

SEQ ID NO: 4876279 - DNA, 25 bp, Homo sapien
cagtgagcgtactattcagtagccc

SEQ ID NO: 4876280 - DNA, 25 bp, Homo sapien
caaacaggccctcaaaagtttgcat

SEQ ID NO: 4876281 - DNA, 25 bp, Homo sapien
caattccacgacagcatcttgccaa

SEQ ID NO: 4876282 - DNA, 25 bp, Homo sapien
ctgtgtggttgagtcttatagttac

SEQ ID NO: 4876283 - DNA, 25 bp, Homo sapien
ttttgtctgtgtggttgagtcttat

SEQ ID NO: 4876284 - DNA, 25 bp, Homo sapien
ttttaccaattccacgacagcatct

SEQ ID NO: 4876285 - DNA, 25 bp, Homo sapien
tggtgtgatcttggttcactgcaac

SEQ ID NO: 4876286 - DNA, 25 bp, Homo sapien
ctctattgcccttactggagtgcag

SEQ ID NO: 4876287 - DNA, 25 bp, Homo sapien
ctgcctcctggtcttaaacaatcct

SEQ ID NO: 4876288 - DNA, 25 bp, Homo sapien
cctctgcctcctggtcttaaacaat

SEQ ID NO: 4876289 - DNA, 25 bp, Homo sapien
gagaaaagactgagctaccaaccat

SEQ ID NO: 4876290 - DNA, 25 bp, Homo sapien
gaagactagtgtacttttgtgagaa

SEQ ID NO: 4876291 - DNA, 25 bp, Homo sapien
aacttgccgagtagtagctgatcac

SEQ ID NO: 4876292 - DNA, 25 bp, Homo sapien
gaagatggaccagcacttataattt

SEQ ID NO: 4876293 - DNA, 25 bp, Homo sapien
tgaagttcagttcgcctggttgcct

SEQ ID NO: 4876294 - DNA, 25 bp, Homo sapien
cattcaatactagcctaccgtggga

SEQ ID NO: 4876295 - DNA, 25 bp, Homo sapien
gagtgatgttcccttgtggctacag

SEQ ID NO: 4876296 - DNA, 25 bp, Homo sapien
tctatgagataaacttccaggaagt

SEQ ID NO: 4876297 - DNA, 25 bp, Homo sapien
cacgacatacttcatgagcagacag

SEQ ID NO: 4876298 - DNA, 25 bp, Homo sapien
caacatgatccaattaagatgtgag

SEQ ID NO: 4876299 - DNA, 25 bp, Homo sapien
caatgtgacctggtttaagatctaa

SEQ ID NO: 4876300 - DNA, 25 bp, Homo sapien
taaatctgcaacaaagttaaccatt

SEQ ID NO: 4876301 - DNA, 25 bp, Homo sapien
tgggatcattggtacatgtcaccat

SEQ ID NO: 4876302 - DNA, 25 bp, Homo sapien
agtggctgggatcattggtacatgt

SEQ ID NO: 4876303 - DNA, 25 bp, Homo sapien
ctgggatcattggtacatgtcacca

SEQ ID NO: 4876304 - DNA, 25 bp, Homo sapien
tggctgggatcattggtacatgtca

SEQ ID NO: 4876305 - DNA, 25 bp, Homo sapien
ggaatccgccgtgcaaatctgtccg

SEQ ID NO: 4876306 - DNA, 25 bp, Homo sapien
ggtctcccaggagccgcctcggaat

SEQ ID NO: 4876307 - DNA, 25 bp, Homo sapien
tcacacgggttgcttcggaggaatc

SEQ ID NO: 4876308 - DNA, 25 bp, Homo sapien
tgtcgccgctctagggtaaaggaga

SEQ ID NO: 4876309 - DNA, 25 bp, Homo sapien
ctggatgaggagatagaaactggcc

SEQ ID NO: 4876310 - DNA, 25 bp, Homo sapien
gagatagaaactggcccgcggccgc

SEQ ID NO: 4876311 - DNA, 25 bp, Homo sapien
cgctcgcgccgggaactagcccgga

SEQ ID NO: 4876312 - DNA, 25 bp, Homo sapien
gctcgcgccgggaactagcccggac

SEQ ID NO: 4876313 - DNA, 25 bp, Homo sapien
tcggaggcagctctgacgtacgcag

SEQ ID NO: 4876314 - DNA, 25 bp, Homo sapien
gccgggcctccgctcggttactgga

SEQ ID NO: 4876315 - DNA, 25 bp, Homo sapien
tggagacttaaaacaggcctcgccc

SEQ ID NO: 4876316 - DNA, 25 bp, Homo sapien
tctgacgtacgcagcccgggtcgcg

SEQ ID NO: 4876317 - DNA, 25 bp, Homo sapien
gaagagaaacatttccgccacgcgg

SEQ ID NO: 4876318 - DNA, 25 bp, Homo sapien
gagaaacatttccgccacgcggctc

SEQ ID NO: 4876319 - DNA, 25 bp, Homo sapien
aagagaaacatttccgccacgcggc

SEQ ID NO: 4876320 - DNA, 25 bp, Homo sapien
gaaacatttccgccacgcggctcca

SEQ ID NO: 4876321 - DNA, 25 bp, Homo sapien
ctggagcaaaggcacagtatcttac

SEQ ID NO: 4876322 - DNA, 25 bp, Homo sapien
ccacaaatgccctggagcaaaggca

SEQ ID NO: 4876323 - DNA, 25 bp, Homo sapien
tccacaaatgccctggagcaaaggc

SEQ ID NO: 4876324 - DNA, 25 bp, Homo sapien
gccctggagcaaaggcacagtatct

SEQ ID NO: 4876325 - DNA, 25 bp, Homo sapien
tgagttcagcctgcagagaacgctt

SEQ ID NO: 4876326 - DNA, 25 bp, Homo sapien
taaacatcaccgtgcccaagggtca

SEQ ID NO: 4876327 - DNA, 25 bp, Homo sapien
aaaaataatggcagtgggcgaccac

SEQ ID NO: 4876328 - DNA, 25 bp, Homo sapien
agaaacctctgtgacccttggaaag

SEQ ID NO: 4876329 - DNA, 25 bp, Homo sapien
actgtctctgatgtaatagcctttt

SEQ ID NO: 4876330 - DNA, 25 bp, Homo sapien
ctgtctctgatgtaatagcctttta

SEQ ID NO: 4876331 - DNA, 25 bp, Homo sapien
ggaaagttaaccaagatgacagtct

SEQ ID NO: 4876332 - DNA, 25 bp, Homo sapien
tctgtgtctaggaacacaaaaggtc

SEQ ID NO: 4876333 - DNA, 25 bp, Homo sapien
caaaagactatagatgttcacctgg

SEQ ID NO: 4876334 - DNA, 25 bp, Homo sapien
caaaaggtctatgtggaaggacaaa

SEQ ID NO: 4876335 - DNA, 25 bp, Homo sapien
ccatcgccatgagagttaaagggtt

SEQ ID NO: 4876336 - DNA, 25 bp, Homo sapien
ttccatcgccatgagagttaaaggg

SEQ ID NO: 4876337 - DNA, 25 bp, Homo sapien
ttgttccatcgccatgagagttaaa

SEQ ID NO: 4876338 - DNA, 25 bp, Homo sapien
gttccatcgccatgagagttaaagg

SEQ ID NO: 4876339 - DNA, 25 bp, Homo sapien
tgcagtaccacaggaataaccacct

SEQ ID NO: 4876340 - DNA, 25 bp, Homo sapien
ctgcagtaccacaggaataaccacc

SEQ ID NO: 4876341 - DNA, 25 bp, Homo sapien
ccaggcctatgcctttgctgtcatg

SEQ ID NO: 4876342 - DNA, 25 bp, Homo sapien
gtggcaatcccatacttctcatgag

SEQ ID NO: 4876343 - DNA, 25 bp, Homo sapien
gttcagcctcagaatcaagttcact

SEQ ID NO: 4876344 - DNA, 25 bp, Homo sapien
cactttcatccaggcctatgccttt

SEQ ID NO: 4876345 - DNA, 25 bp, Homo sapien
tcaaaatccttatgtgcagttatcc

SEQ ID NO: 4876346 - DNA, 25 bp, Homo sapien
aaatccttatgtgcagttatcctac

SEQ ID NO: 4876347 - DNA, 25 bp, Homo sapien
caaaatccttatgtgcagttatcct

SEQ ID NO: 4876348 - DNA, 25 bp, Homo sapien
ctcaaaatccttatgtgcagttatc

SEQ ID NO: 4876349 - DNA, 25 bp, Homo sapien
tcagaagatagtgcttgacccggat

SEQ ID NO: 4876350 - DNA, 25 bp, Homo sapien
aagttcatatgttctggtgttctca

SEQ ID NO: 4876351 - DNA, 25 bp, Homo sapien
ttgtatcaggaaagttccaaggttc

SEQ ID NO: 4876352 - DNA, 25 bp, Homo sapien
tgcgaggcatcaaaagtccaaccct

SEQ ID NO: 4876353 - DNA, 25 bp, Homo sapien
gatgaccatcatgacttgtacagga

SEQ ID NO: 4876354 - DNA, 25 bp, Homo sapien
tgtattccccgatgagttgctttcc

SEQ ID NO: 4876355 - DNA, 25 bp, Homo sapien
tacgtggttcactttggccggaagc

SEQ ID NO: 4876356 - DNA, 25 bp, Homo sapien
taacttcacttagctgttgatgacc

SEQ ID NO: 4876357 - DNA, 25 bp, Homo sapien
gcagaaatattgcagtagcttttcc

SEQ ID NO: 4876358 - DNA, 25 bp, Homo sapien
gcttggcttatgctcaggtgggtct

SEQ ID NO: 4876359 - DNA, 25 bp, Homo sapien
tttgcttggcttatgctcaggtggg

SEQ ID NO: 4876360 - DNA, 25 bp, Homo sapien
cagtttgcttggcttatgctcaggt

SEQ ID NO: 4876361 - DNA, 25 bp, Homo sapien
tcagtaccactggcatgtggtctgt

SEQ ID NO: 4876362 - DNA, 25 bp, Homo sapien
agggaaccactgtcatcaaagtctg

SEQ ID NO: 4876363 - DNA, 25 bp, Homo sapien
aatcctagaagggaaccactgtcat

SEQ ID NO: 4876364 - DNA, 25 bp, Homo sapien
cctgagccatacttgaatcctagaa

SEQ ID NO: 4876365 - DNA, 25 bp, Homo sapien
gagccatacttgaatcctagaaggg

SEQ ID NO: 4876366 - DNA, 25 bp, Homo sapien
cctctccgacaaactgttagggact

SEQ ID NO: 4876367 - DNA, 25 bp, Homo sapien
gtgcatagtaatacatcctgccagg

SEQ ID NO: 4876368 - DNA, 25 bp, Homo sapien
ttgccttgaaacacctaagggagaa

SEQ ID NO: 4876369 - DNA, 25 bp, Homo sapien
tagggacttaagagtgtcacgtaca

SEQ ID NO: 4876370 - DNA, 25 bp, Homo sapien
tgccgatgactgaaatttgggattc

SEQ ID NO: 4876371 - DNA, 25 bp, Homo sapien
tcatctttatttgtctgcgcatgtc

SEQ ID NO: 4876372 - DNA, 25 bp, Homo sapien
gcgcatgtctaggtacttagactta

SEQ ID NO: 4876373 - DNA, 25 bp, Homo sapien
tcttctctaaatacctgacctgccg

SEQ ID NO: 4876374 - DNA, 25 bp, Homo sapien
tgaatcactacttgtggaagcgtcg

SEQ ID NO: 4876375 - DNA, 25 bp, Homo sapien
gagtaacacaatcctgctcatctgg

SEQ ID NO: 4876376 - DNA, 25 bp, Homo sapien
gggagtctggcacttcttgagtaac

SEQ ID NO: 4876377 - DNA, 25 bp, Homo sapien
ggaagcgtcgtgcacattgtcatga

SEQ ID NO: 4876378 - DNA, 25 bp, Homo sapien
ctatttcaggaggcagaccattcac

SEQ ID NO: 4876379 - DNA, 25 bp, Homo sapien
tcaaaacgggagaagagcctgtacc

SEQ ID NO: 4876380 - DNA, 25 bp, Homo sapien
aacttaatcccatcatcaaaacggg

SEQ ID NO: 4876381 - DNA, 25 bp, Homo sapien
tctgtccaacttaatcccatcatca

SEQ ID NO: 4876382 - DNA, 25 bp, Homo sapien
cctctgggcccagtattttgccagc

SEQ ID NO: 4876383 - DNA, 25 bp, Homo sapien
tctcgggtgtaactgaaaaccagcc

SEQ ID NO: 4876384 - DNA, 25 bp, Homo sapien
tgaaggactgactaacacggccagc

SEQ ID NO: 4876385 - DNA, 25 bp, Homo sapien
cacggccagcaatgtgttcagcaat

SEQ ID NO: 4876386 - DNA, 25 bp, Homo sapien
cagaatgcgtctactacaacgtcac

SEQ ID NO: 4876387 - DNA, 25 bp, Homo sapien
cagcagcaagaaatctccacagatg

SEQ ID NO: 4876388 - DNA, 25 bp, Homo sapien
tctggccctccccaaggtgggctga

SEQ ID NO: 4876389 - DNA, 25 bp, Homo sapien
taacaggatcgatatcaatggcaat

SEQ ID NO: 4876390 - DNA, 25 bp, Homo sapien
cgagcaagggcaatcttaacaggat

SEQ ID NO: 4876391 - DNA, 25 bp, Homo sapien
agtacaggcgtgacccagcatatcc

SEQ ID NO: 4876392 - DNA, 25 bp, Homo sapien
aaacagatgattacggtggagaggc

SEQ ID NO: 4876393 - DNA, 25 bp, Homo sapien
caggtggcgaaagtgacaaataaca

SEQ ID NO: 4876394 - DNA, 25 bp, Homo sapien
tggttaccgacaaactccagggata

SEQ ID NO: 4876395 - DNA, 25 bp, Homo sapien
tattattagtgatcttcttagaaag

SEQ ID NO: 4876396 - DNA, 25 bp, Homo sapien
taaacaatattattagtgatcttct

SEQ ID NO: 4876397 - DNA, 25 bp, Homo sapien
caatattattagtgatcttcttaga

SEQ ID NO: 4876398 - DNA, 25 bp, Homo sapien
aaaataaacaatattattagtgatc

SEQ ID NO: 4876399 - DNA, 25 bp, Homo sapien
tatgtctagtcaaagcctagagtgc

SEQ ID NO: 4876400 - DNA, 25 bp, Homo sapien
taacagttaagacagacactcatgg

SEQ ID NO: 4876401 - DNA, 25 bp, Homo sapien
tcataaacacattctctggtaagga

SEQ ID NO: 4876402 - DNA, 25 bp, Homo sapien
tgtgtctatgtatgccaggagctat

SEQ ID NO: 4876403 - DNA, 25 bp, Homo sapien
tccatgctgtttaggatgatataaa

SEQ ID NO: 4876404 - DNA, 25 bp, Homo sapien
ttatctaagagtacaatctccctgg

SEQ ID NO: 4876405 - DNA, 25 bp, Homo sapien
ccctggatgggaaattaactgtcct

SEQ ID NO: 4876406 - DNA, 25 bp, Homo sapien
ggaaaacatttcactagatacagga

SEQ ID NO: 4876407 - DNA, 25 bp, Homo sapien
caaaatatgcagtgattgtcttcaa

SEQ ID NO: 4876408 - DNA, 25 bp, Homo sapien
tgtcttcaatttgttgttaaggaag

SEQ ID NO: 4876409 - DNA, 25 bp, Homo sapien
aaggaagttctgttctatttccact

SEQ ID NO: 4876410 - DNA, 25 bp, Homo sapien
taaggaagttctgttctatttccac

SEQ ID NO: 4876411 - DNA, 25 bp, Homo sapien
agaggctggtcttcgaattaggtca

SEQ ID NO: 4876412 - DNA, 25 bp, Homo sapien
gaggctggtcttcgaattaggtcac

SEQ ID NO: 4876413 - DNA, 25 bp, Homo sapien
cagaggctggtcttcgaattaggtc

SEQ ID NO: 4876414 - DNA, 25 bp, Homo sapien
tcatacggtgatataagaccatggg

SEQ ID NO: 4876415 - DNA, 25 bp, Homo sapien
gatcttttgtcctcgcactgctgca

SEQ ID NO: 4876416 - DNA, 25 bp, Homo sapien
aaattagtacggtgtggcagtgccc

SEQ ID NO: 4876417 - DNA, 25 bp, Homo sapien
ctcagaaggctgaacctgcagtgag

SEQ ID NO: 4876418 - DNA, 25 bp, Homo sapien
ggtgttaagccaattccagatgaag

SEQ ID NO: 4876419 - DNA, 25 bp, Homo sapien
ttacaaaatatattgcgtattgatg

SEQ ID NO: 4876420 - DNA, 25 bp, Homo sapien
ttgatgtcacaatggaaattttaca

SEQ ID NO: 4876421 - DNA, 25 bp, Homo sapien
tatattgcgtattgatgtcacaatg

SEQ ID NO: 4876422 - DNA, 25 bp, Homo sapien
gactgaacaaactttttagatgaat

SEQ ID NO: 4876423 - DNA, 25 bp, Homo sapien
aatgactgaacaaactttttagatg

SEQ ID NO: 4876424 - DNA, 25 bp, Homo sapien
gaataattaagcaacacatatccct

SEQ ID NO: 4876425 - DNA, 25 bp, Homo sapien
ctgaacaaactttttagatgaataa

SEQ ID NO: 4876426 - DNA, 25 bp, Homo sapien
gataaattgtaaactttcaagacac

SEQ ID NO: 4876427 - DNA, 25 bp, Homo sapien
cacctttattgatcagctcagttgc

SEQ ID NO: 4876428 - DNA, 25 bp, Homo sapien
aattctctaatcttatcccagccag

SEQ ID NO: 4876429 - DNA, 25 bp, Homo sapien
tactgtactgcagagcaatcagata

SEQ ID NO: 4876430 - DNA, 25 bp, Homo sapien
tttatccctgtgtgattagtgggca

SEQ ID NO: 4876431 - DNA, 25 bp, Homo sapien
gaacctgattcacacaatagactag

SEQ ID NO: 4876432 - DNA, 25 bp, Homo sapien
gaatgctacataaagccaggcgcgg

SEQ ID NO: 4876433 - DNA, 25 bp, Homo sapien
tagttttagctaaccaagcctaagc

SEQ ID NO: 4876434 - DNA, 25 bp, Homo sapien
tacagtcggatttaaaggaacacaa

SEQ ID NO: 4876435 - DNA, 25 bp, Homo sapien
gaaaaactcatgtgtagatgtcatg

SEQ ID NO: 4876436 - DNA, 25 bp, Homo sapien
gatgtcatgactgcttatttagaaa

SEQ ID NO: 4876437 - DNA, 25 bp, Homo sapien
taagaaagtagaacccgattgagga

SEQ ID NO: 4876438 - DNA, 25 bp, Homo sapien
tctcgccctgttgctccggctagag

SEQ ID NO: 4876439 - DNA, 25 bp, Homo sapien
cgccctgttgctccggctagagtgc

SEQ ID NO: 4876440 - DNA, 25 bp, Homo sapien
gagtctcgccctgttgctccggcta

SEQ ID NO: 4876441 - DNA, 25 bp, Homo sapien
tcgccctgttgctccggctagagtg

SEQ ID NO: 4876442 - DNA, 25 bp, Homo sapien
gaaaatgttgtgtccagagactcac

SEQ ID NO: 4876443 - DNA, 25 bp, Homo sapien
aataaatggcccgaagcgtagagct

SEQ ID NO: 4876444 - DNA, 25 bp, Homo sapien
taagaagcagtgactcggtattcgc

SEQ ID NO: 4876445 - DNA, 25 bp, Homo sapien
taatgggacgcagcatacaagagca

SEQ ID NO: 4876446 - DNA, 25 bp, Homo sapien
ctctagagaaaggatgcgatatgcc

SEQ ID NO: 4876447 - DNA, 25 bp, Homo sapien
agtgaccgtttggtccctgcccaag

SEQ ID NO: 4876448 - DNA, 25 bp, Homo sapien
gcacagaaacctggcgactcagtct

SEQ ID NO: 4876449 - DNA, 25 bp, Homo sapien
gatttgcatattgagcccggagggc

SEQ ID NO: 4876450 - DNA, 25 bp, Homo sapien
agtttcggggcggcggagctccacg

SEQ ID NO: 4876451 - DNA, 25 bp, Homo sapien
cgctcgcggtgaaagtttcggggcg

SEQ ID NO: 4876452 - DNA, 25 bp, Homo sapien
tgaaagtttcggggcggcggagctc

SEQ ID NO: 4876453 - DNA, 25 bp, Homo sapien
tgagcacacactacaagtccaaagg

SEQ ID NO: 4876454 - DNA, 25 bp, Homo sapien
tcactaggaagagccagtaaaggtc

SEQ ID NO: 4876455 - DNA, 25 bp, Homo sapien
taatggtaccgcttaaccaagcctg

SEQ ID NO: 4876456 - DNA, 25 bp, Homo sapien
gaggctatctctgctatcaatgtga

SEQ ID NO: 4876457 - DNA, 25 bp, Homo sapien
ttctaaattacaagacagggccagg

SEQ ID NO: 4876458 - DNA, 25 bp, Homo sapien
tgctgccagctaattcagtaatgag

SEQ ID NO: 4876459 - DNA, 25 bp, Homo sapien
tagctctgtggcaaataaggaatgc

SEQ ID NO: 4876460 - DNA, 25 bp, Homo sapien
caacaaaggctactacaggccctgc

SEQ ID NO: 4876461 - DNA, 25 bp, Homo sapien
tcttgctatgggttgtggtcaaata

SEQ ID NO: 4876462 - DNA, 25 bp, Homo sapien
ttcttgctatgggttgtggtcaaat

SEQ ID NO: 4876463 - DNA, 25 bp, Homo sapien
gaagggacagacctgggatttcagc

SEQ ID NO: 4876464 - DNA, 25 bp, Homo sapien
aaaatcaactgctatggtgccgcat

SEQ ID NO: 4876465 - DNA, 25 bp, Homo sapien
gcaaagtctttgatcggcattctgg

SEQ ID NO: 4876466 - DNA, 25 bp, Homo sapien
cgtggtggccaaatccctggtgagt

SEQ ID NO: 4876467 - DNA, 25 bp, Homo sapien
acagaaagatgaacccacagatggg

SEQ ID NO: 4876468 - DNA, 25 bp, Homo sapien
ccaggatctcaggaccatagtgtgt

SEQ ID NO: 4876469 - DNA, 25 bp, Homo sapien
tttcacagaaagatgggtcccttag

SEQ ID NO: 4876470 - DNA, 25 bp, Homo sapien
gataatcgtgcctgtgaatggccag

SEQ ID NO: 4876471 - DNA, 25 bp, Homo sapien
aaggagcttcatctaatgtcccaag

SEQ ID NO: 4876472 - DNA, 25 bp, Homo sapien
gatgaaggagcttcatctaatgtcc

SEQ ID NO: 4876473 - DNA, 25 bp, Homo sapien
ggtatttgacaaagcattgactaga

SEQ ID NO: 4876474 - DNA, 25 bp, Homo sapien
tgacaaagcattgactagaagccaa

SEQ ID NO: 4876475 - DNA, 25 bp, Homo sapien
gaatgaaagtgcacctggtatgtac

SEQ ID NO: 4876476 - DNA, 25 bp, Homo sapien
cgagatgcttaaggatgagctaatg

SEQ ID NO: 4876477 - DNA, 25 bp, Homo sapien
ggactcaagggacccactcacttca

SEQ ID NO: 4876478 - DNA, 25 bp, Homo sapien
attgctttacccctaacgagatgct

SEQ ID NO: 4876479 - DNA, 25 bp, Homo sapien
tgaagtgtatgcccaatgctctttc

SEQ ID NO: 4876480 - DNA, 25 bp, Homo sapien
ccaggtagggtttcctgaagtgtat

SEQ ID NO: 4876481 - DNA, 25 bp, Homo sapien
ctccgcgttggaaatatctgaagtg

SEQ ID NO: 4876482 - DNA, 25 bp, Homo sapien
agccggttcctagccacatccagct

SEQ ID NO: 4876483 - DNA, 25 bp, Homo sapien
taggttcttccctgcttatctttgg

SEQ ID NO: 4876484 - DNA, 25 bp, Homo sapien
tgccctgaggtggtatactaaccca

SEQ ID NO: 4876485 - DNA, 25 bp, Homo sapien
tatctttggttgagccaggaaatgc

SEQ ID NO: 4876486 - DNA, 25 bp, Homo sapien
gatcctttcccgtgtctgtgcagtc

SEQ ID NO: 4876487 - DNA, 25 bp, Homo sapien
tgagctccaccctagaattgaaatc

SEQ ID NO: 4876488 - DNA, 25 bp, Homo sapien
tgtagggaaccttgccaaaccctga

SEQ ID NO: 4876489 - DNA, 25 bp, Homo sapien
cattggttagggaacagcttgggca

SEQ ID NO: 4876490 - DNA, 25 bp, Homo sapien
tagccgaaagattcccacatagctg

SEQ ID NO: 4876491 - DNA, 25 bp, Homo sapien
gatgaatgggcaacctctgggactg

SEQ ID NO: 4876492 - DNA, 25 bp, Homo sapien
gggtagctagcaattctggacacat

SEQ ID NO: 4876493 - DNA, 25 bp, Homo sapien
ggctctttgcatgggagacactcca

SEQ ID NO: 4876494 - DNA, 25 bp, Homo sapien
taactgggccaccttaattcactga

SEQ ID NO: 4876495 - DNA, 25 bp, Homo sapien
cagaataacccatcccataagcagc

SEQ ID NO: 4876496 - DNA, 25 bp, Homo sapien
agtagagcacttgtctcacgtccta

SEQ ID NO: 4876497 - DNA, 25 bp, Homo sapien
cataaaaactgtgccgaatccccag

SEQ ID NO: 4876498 - DNA, 25 bp, Homo sapien
cattacgggcgtttacactttgctg

SEQ ID NO: 4876499 - DNA, 25 bp, Homo sapien
cataagaaagcccagtactccaagg

SEQ ID NO: 4876500 - DNA, 25 bp, Homo sapien
agccataagaaagcccagtactcca

SEQ ID NO: 4876501 - DNA, 25 bp, Homo sapien
taagaaagcccagtactccaaggcc

SEQ ID NO: 4876502 - DNA, 25 bp, Homo sapien
agaaagcccagtactccaaggccct

SEQ ID NO: 4876503 - DNA, 25 bp, Homo sapien
tccatgctgcatgctagtccactta

SEQ ID NO: 4876504 - DNA, 25 bp, Homo sapien
actgctcattgctcatctgatagag

SEQ ID NO: 4876505 - DNA, 25 bp, Homo sapien
ttagattagtgcctgagtcctcaat

SEQ ID NO: 4876506 - DNA, 25 bp, Homo sapien
gatagagcttagcaagtcactcctc

SEQ ID NO: 4876507 - DNA, 25 bp, Homo sapien
gacaaaatgctgttagtgtatccag

SEQ ID NO: 4876508 - DNA, 25 bp, Homo sapien
caggaggatcagtttagtccaaaag

SEQ ID NO: 4876509 - DNA, 25 bp, Homo sapien
tagtgtatccaggatataaacactt

SEQ ID NO: 4876510 - DNA, 25 bp, Homo sapien
gcaggaggatcagtttagtccaaaa

SEQ ID NO: 4876511 - DNA, 25 bp, Homo sapien
gctagcaagaggaggtttccacaga

SEQ ID NO: 4876512 - DNA, 25 bp, Homo sapien
agtttggtgcaatatctcagcttcc

SEQ ID NO: 4876513 - DNA, 25 bp, Homo sapien
catcagcgctgggagatctgcaagc

SEQ ID NO: 4876514 - DNA, 25 bp, Homo sapien
gagacctgtctgagtcgagccagca

SEQ ID NO: 4876515 - DNA, 25 bp, Homo sapien
cacttttgcacagcccatcatgggc

SEQ ID NO: 4876516 - DNA, 25 bp, Homo sapien
aatccccgtgtagttggctggccca

SEQ ID NO: 4876517 - DNA, 25 bp, Homo sapien
ccccgcaaggccatagtaaggatta

SEQ ID NO: 4876518 - DNA, 25 bp, Homo sapien
gaactgtgggcatacactgagcctg

SEQ ID NO: 4876519 - DNA, 25 bp, Homo sapien
cctctagatggtgtttccgttccat

SEQ ID NO: 4876520 - DNA, 25 bp, Homo sapien
tcctcaggaacctggccataactgt

SEQ ID NO: 4876521 - DNA, 25 bp, Homo sapien
agcacctctagatggtgtttccgtt

SEQ ID NO: 4876522 - DNA, 25 bp, Homo sapien
cctcaggaacctggccataactgtg

SEQ ID NO: 4876523 - DNA, 25 bp, Homo sapien
tgtctcaaacaaaacgaacaaacca

SEQ ID NO: 4876524 - DNA, 25 bp, Homo sapien
tctgtctcaaacaaaacgaacaaac

SEQ ID NO: 4876525 - DNA, 25 bp, Homo sapien
agattctgtctcaaacaaaacgaac

SEQ ID NO: 4876526 - DNA, 25 bp, Homo sapien
gattctgtctcaaacaaaacgaaca

SEQ ID NO: 4876527 - DNA, 25 bp, Homo sapien
ggcaacagatctgaatagacacctc

SEQ ID NO: 4876528 - DNA, 25 bp, Homo sapien
taaagcaacaatgggccctgcgtgg

SEQ ID NO: 4876529 - DNA, 25 bp, Homo sapien
taaataatctagacccggatcttac

SEQ ID NO: 4876530 - DNA, 25 bp, Homo sapien
catatcatatgtcacctgggaattg

SEQ ID NO: 4876531 - DNA, 25 bp, Homo sapien
aaatcagagtttcgaggcccttagg

SEQ ID NO: 4876532 - DNA, 25 bp, Homo sapien
gaaataggctaaactaccgcaatgt

SEQ ID NO: 4876533 - DNA, 25 bp, Homo sapien
tgctcagttccccttagtctaaaat

SEQ ID NO: 4876534 - DNA, 25 bp, Homo sapien
ggcccttaggttttgtgctcagttc

SEQ ID NO: 4876535 - DNA, 25 bp, Homo sapien
tatgtattcaatgcctagctcccat

SEQ ID NO: 4876536 - DNA, 25 bp, Homo sapien
tttagtagtctcccgtgtctattgc

SEQ ID NO: 4876537 - DNA, 25 bp, Homo sapien
ttttggtgaatgtctccccttctcc

SEQ ID NO: 4876538 - DNA, 25 bp, Homo sapien
ccgtgtctattgctcctatctttac

SEQ ID NO: 4876539 - DNA, 25 bp, Homo sapien
agagtaaagactgggatagaacctg

SEQ ID NO: 4876540 - DNA, 25 bp, Homo sapien
gaacctgtgtccaaggtgcctgcca

SEQ ID NO: 4876541 - DNA, 25 bp, Homo sapien
ggatatgatttaggagaagtgagaa

SEQ ID NO: 4876542 - DNA, 25 bp, Homo sapien
gactattgagggtcaattgggaaag

SEQ ID NO: 4876543 - DNA, 25 bp, Homo sapien
gatggttaggtgtcagctcctgtct

SEQ ID NO: 4876544 - DNA, 25 bp, Homo sapien
tccgtccatggtgtgggcatcacct

SEQ ID NO: 4876545 - DNA, 25 bp, Homo sapien
tcctgtctgtgactaaggtgagcca

SEQ ID NO: 4876546 - DNA, 25 bp, Homo sapien
gagctgcttcgatggttaggtgtca

SEQ ID NO: 4876547 - DNA, 25 bp, Homo sapien
ttgcattggaattccacttcttgaa

SEQ ID NO: 4876548 - DNA, 25 bp, Homo sapien
agatgcaatcttgcattggaattcc

SEQ ID NO: 4876549 - DNA, 25 bp, Homo sapien
attggaattccacttcttgaaattt

SEQ ID NO: 4876550 - DNA, 25 bp, Homo sapien
tgcaatcttgcattggaattccact

SEQ ID NO: 4876551 - DNA, 25 bp, Homo sapien
tgccacgcgtccaggcctgcgtttt

SEQ ID NO: 4876552 - DNA, 25 bp, Homo sapien
aacctcaagagctcttctgggaact

SEQ ID NO: 4876553 - DNA, 25 bp, Homo sapien
gggaactcggccctctccggcatcg

SEQ ID NO: 4876554 - DNA, 25 bp, Homo sapien
caattggtctaggaacttcaacttg

SEQ ID NO: 4876555 - DNA, 25 bp, Homo sapien
cccatgtgatgtgtaattctgaagc

SEQ ID NO: 4876556 - DNA, 25 bp, Homo sapien
gaacagattctctggacactgtccg

SEQ ID NO: 4876557 - DNA, 25 bp, Homo sapien
ggagcatgctgctccccatgtgatg

SEQ ID NO: 4876558 - DNA, 25 bp, Homo sapien
gacactgtccgggaaactcttctgg

SEQ ID NO: 4876559 - DNA, 25 bp, Homo sapien
acataaaagtaatgacattgtttta

SEQ ID NO: 4876560 - DNA, 25 bp, Homo sapien
ctgttgaaacataaaagtaatgaca

SEQ ID NO: 4876561 - DNA, 25 bp, Homo sapien
aaaagtaatgacattgttttaccat

SEQ ID NO: 4876562 - DNA, 25 bp, Homo sapien
tgttgaaacataaaagtaatgacat

SEQ ID NO: 4876563 - DNA, 25 bp, Homo sapien
aatctactccatcgtcactcaagct

SEQ ID NO: 4876564 - DNA, 25 bp, Homo sapien
tcactcaagctgtctttcccttttg

SEQ ID NO: 4876565 - DNA, 25 bp, Homo sapien
tggttgagtcttcaaatctactcca

SEQ ID NO: 4876566 - DNA, 25 bp, Homo sapien
tcttcaaatctactccatcgtcact

SEQ ID NO: 4876567 - DNA, 25 bp, Homo sapien
gtttattggacgttggatctctcac

SEQ ID NO: 4876568 - DNA, 25 bp, Homo sapien
tgctgtttattggacgttggatctc

SEQ ID NO: 4876569 - DNA, 25 bp, Homo sapien
ttggacgttggatctctcacataaa

SEQ ID NO: 4876570 - DNA, 25 bp, Homo sapien
tggcctttgctgtttattggacgtt

SEQ ID NO: 4876571 - DNA, 25 bp, Homo sapien
tctgtccaggtaaaagctgagattc

SEQ ID NO: 4876572 - DNA, 25 bp, Homo sapien
ctgtccaggtaaaagctgagattct

SEQ ID NO: 4876573 - DNA, 25 bp, Homo sapien
acctctgtccaggtaaaagctgaga

SEQ ID NO: 4876574 - DNA, 25 bp, Homo sapien
cctctgtccaggtaaaagctgagat

SEQ ID NO: 4876575 - DNA, 25 bp, Homo sapien
ggggtacaaggctaccacaatgtct

SEQ ID NO: 4876576 - DNA, 25 bp, Homo sapien
tcgtccgggtggatgccatcatagg

SEQ ID NO: 4876577 - DNA, 25 bp, Homo sapien
aaagacaagtcgtccgggtggatgc

SEQ ID NO: 4876578 - DNA, 25 bp, Homo sapien
ccatcataggggtacaaggctacca

SEQ ID NO: 4876579 - DNA, 25 bp, Homo sapien
tctaaggtgttgagtttggccacat

SEQ ID NO: 4876580 - DNA, 25 bp, Homo sapien
taaggtgttgagtttggccacatag

SEQ ID NO: 4876581 - DNA, 25 bp, Homo sapien
ggtgttgagtttggccacatagttg

SEQ ID NO: 4876582 - DNA, 25 bp, Homo sapien
gtttctaaggtgttgagtttggcca

SEQ ID NO: 4876583 - DNA, 25 bp, Homo sapien
tcactttctctaataaggaaagctc

SEQ ID NO: 4876584 - DNA, 25 bp, Homo sapien
tctaataaggaaagctccagcgcta

SEQ ID NO: 4876585 - DNA, 25 bp, Homo sapien
aaagctccagcgctatttcctggtg

SEQ ID NO: 4876586 - DNA, 25 bp, Homo sapien
caaaagctgcctttctgcgtccttc

SEQ ID NO: 4876587 - DNA, 25 bp, Homo sapien
taagaactggccacaatcatgtgtg

SEQ ID NO: 4876588 - DNA, 25 bp, Homo sapien
ggctcagcaaacaaagcctggtaag

SEQ ID NO: 4876589 - DNA, 25 bp, Homo sapien
tagtagcacaactaatcactgaggt

SEQ ID NO: 4876590 - DNA, 25 bp, Homo sapien
tactaccagagcatactatatgccc

SEQ ID NO: 4876591 - DNA, 25 bp, Homo sapien
ttgggctcaaacgatctttctaccc

SEQ ID NO: 4876592 - DNA, 25 bp, Homo sapien
cctcttgggctcaaacgatctttct

SEQ ID NO: 4876593 - DNA, 25 bp, Homo sapien
ctcttgggctcaaacgatctttcta

SEQ ID NO: 4876594 - DNA, 25 bp, Homo sapien
cacctcttgggctcaaacgatcttt

SEQ ID NO: 4876595 - DNA, 25 bp, Homo sapien
gattcgtggagagatgtaatagccc

SEQ ID NO: 4876596 - DNA, 25 bp, Homo sapien
gtaatagcccccattatccagactt

SEQ ID NO: 4876597 - DNA, 25 bp, Homo sapien
aatcatgtcgctgatacagggaaaa

SEQ ID NO: 4876598 - DNA, 25 bp, Homo sapien
gcttaataacatcaccatgcacagg

SEQ ID NO: 4876599 - DNA, 25 bp, Homo sapien
gggactaatacaagccttctccaat

SEQ ID NO: 4876600 - DNA, 25 bp, Homo sapien
tggcttgggactaatacaagccttc

SEQ ID NO: 4876601 - DNA, 25 bp, Homo sapien
ctgtggcttgggactaatacaagcc

SEQ ID NO: 4876602 - DNA, 25 bp, Homo sapien
ttgggactaatacaagccttctcca

SEQ ID NO: 4876603 - DNA, 25 bp, Homo sapien
ttttcaccaacttgatggactcccg

SEQ ID NO: 4876604 - DNA, 25 bp, Homo sapien
ttcaccaacttgatggactcccggg

SEQ ID NO: 4876605 - DNA, 25 bp, Homo sapien
ccagcgccaagccttttcaccaact

SEQ ID NO: 4876606 - DNA, 25 bp, Homo sapien
aacttgatggactcccgggggatct

SEQ ID NO: 4876607 - DNA, 25 bp, Homo sapien
tgataggctggctcagtatgtgccg

SEQ ID NO: 4876608 - DNA, 25 bp, Homo sapien
gatgcagaggtgacgtgtccacgtg

SEQ ID NO: 4876609 - DNA, 25 bp, Homo sapien
agtgagcaaggctatgatcccaggg

SEQ ID NO: 4876610 - DNA, 25 bp, Homo sapien
gccaagactgtagagggaaaacctg

SEQ ID NO: 4876611 - DNA, 25 bp, Homo sapien
ttttattgacccattcatcatctga

SEQ ID NO: 4876612 - DNA, 25 bp, Homo sapien
caggtttttgcgtggacatatgtta

SEQ ID NO: 4876613 - DNA, 25 bp, Homo sapien
tctcacaatggcatgtaaatccaca

SEQ ID NO: 4876614 - DNA, 25 bp, Homo sapien
atttctcacaatggcatgtaaatcc

SEQ ID NO: 4876615 - DNA, 25 bp, Homo sapien
ccacagcgtagagcctcacgagctt

SEQ ID NO: 4876616 - DNA, 25 bp, Homo sapien
ccatgtactcggtgatgatgtaaat

SEQ ID NO: 4876617 - DNA, 25 bp, Homo sapien
aggcttgcacagacatagttcctgg

SEQ ID NO: 4876618 - DNA, 25 bp, Homo sapien
tagagcctcacgagcttgtcatgct

SEQ ID NO: 4876619 - DNA, 25 bp, Homo sapien
actttgccaccttcatcgctcttca

SEQ ID NO: 4876620 - DNA, 25 bp, Homo sapien
tttgccaccttcatcgctcttcagg

SEQ ID NO: 4876621 - DNA, 25 bp, Homo sapien
tgccaccttcatcgctcttcaggaa

SEQ ID NO: 4876622 - DNA, 25 bp, Homo sapien
agcactttgccaccttcatcgctct

SEQ ID NO: 4876623 - DNA, 25 bp, Homo sapien
gacgcagggaagtctttgcaaatgc

SEQ ID NO: 4876624 - DNA, 25 bp, Homo sapien
ctttgcaaatgcacgtgcacacggg

SEQ ID NO: 4876625 - DNA, 25 bp, Homo sapien
tcatgaatttgacgcagggaagtct

SEQ ID NO: 4876626 - DNA, 25 bp, Homo sapien
gtctttgcaaatgcacgtgcacacg

SEQ ID NO: 4876627 - DNA, 25 bp, Homo sapien
tattcccaagaaggccgtagcaatt

SEQ ID NO: 4876628 - DNA, 25 bp, Homo sapien
ctcatgcattccttggatctcgtat

SEQ ID NO: 4876629 - DNA, 25 bp, Homo sapien
tggatctcgtattcccaagaaggcc

SEQ ID NO: 4876630 - DNA, 25 bp, Homo sapien
caagaaggccgtagcaatttcctaa

SEQ ID NO: 4876631 - DNA, 25 bp, Homo sapien
gagaccactggtgccgaccttgatt

SEQ ID NO: 4876632 - DNA, 25 bp, Homo sapien
gagttcacctggcacgggctggatt

SEQ ID NO: 4876633 - DNA, 25 bp, Homo sapien
tggcacgggctggatttggtaaact

SEQ ID NO: 4876634 - DNA, 25 bp, Homo sapien
accactggtgccgaccttgattgcc

SEQ ID NO: 4876635 - DNA, 25 bp, Homo sapien
ggccactgctaggaaagagaccctg

SEQ ID NO: 4876636 - DNA, 25 bp, Homo sapien
tgcacttgagccagatgaactatgg

SEQ ID NO: 4876637 - DNA, 25 bp, Homo sapien
cagtgacactgagcagttcatgcac

SEQ ID NO: 4876638 - DNA, 25 bp, Homo sapien
cagatgaactatgggttccaccaag

SEQ ID NO: 4876639 - DNA, 25 bp, Homo sapien
tagcagggctaatcctggctctcag

SEQ ID NO: 4876640 - DNA, 25 bp, Homo sapien
tactctgaaagtagcatgcggtgcc

SEQ ID NO: 4876641 - DNA, 25 bp, Homo sapien
caaaggtcagctggaatttactctc

SEQ ID NO: 4876642 - DNA, 25 bp, Homo sapien
tgcacgaggttcctacaactgaaga

SEQ ID NO: 4876643 - DNA, 25 bp, Homo sapien
ctgggctagaacacaaactctccca

SEQ ID NO: 4876644 - DNA, 25 bp, Homo sapien
tgaaccaatgtacaccttctgtgta

SEQ ID NO: 4876645 - DNA, 25 bp, Homo sapien
tgtgtaagatcaagctgtatcccag

SEQ ID NO: 4876646 - DNA, 25 bp, Homo sapien
tgtgtcatgagccatggtcctcaac

SEQ ID NO: 4876647 - DNA, 25 bp, Homo sapien
tggacacatgttcccaggatctctg

SEQ ID NO: 4876648 - DNA, 25 bp, Homo sapien
ctgaaaacgcctgtgcctgaagctg

SEQ ID NO: 4876649 - DNA, 25 bp, Homo sapien
ttgtttcctgaaaacgcctgtgcct

SEQ ID NO: 4876650 - DNA, 25 bp, Homo sapien
taaaaagcggtttactgagcacagg

SEQ ID NO: 4876651 - DNA, 25 bp, Homo sapien
ttaaaaagcggtttactgagcacag

SEQ ID NO: 4876652 - DNA, 25 bp, Homo sapien
cacccctaagggatcaatttttgct

SEQ ID NO: 4876653 - DNA, 25 bp, Homo sapien
taggtatgaactttggagggccaca

SEQ ID NO: 4876654 - DNA, 25 bp, Homo sapien
taaggcatccttaacaggagaaatt

SEQ ID NO: 4876655 - DNA, 25 bp, Homo sapien
cccactgcaaatgcatgatgctatg

SEQ ID NO: 4876656 - DNA, 25 bp, Homo sapien
gaaagagctgtcacataaatacata

SEQ ID NO: 4876657 - DNA, 25 bp, Homo sapien
cgttcagcactacagaaagagctgt

SEQ ID NO: 4876658 - DNA, 25 bp, Homo sapien
tccagggccatgtagcgttcagcac

SEQ ID NO: 4876659 - DNA, 25 bp, Homo sapien
catgtagcgttcagcactacagaaa

SEQ ID NO: 4876660 - DNA, 25 bp, Homo sapien
tcttgttagcccactactacaggga

SEQ ID NO: 4876661 - DNA, 25 bp, Homo sapien
ggtaatcaagcacttcaggccgcca

SEQ ID NO: 4876662 - DNA, 25 bp, Homo sapien
gccagttccagaccacgttgcttag

SEQ ID NO: 4876663 - DNA, 25 bp, Homo sapien
catagggaggcaaaactactactcg

SEQ ID NO: 4876664 - DNA, 25 bp, Homo sapien
tgtcaggttaatcaacagcccatgg

SEQ ID NO: 4876665 - DNA, 25 bp, Homo sapien
aaggtatcaagaacaggatgtcgtt

SEQ ID NO: 4876666 - DNA, 25 bp, Homo sapien
caggatgtcgtttctgtcaggttaa

SEQ ID NO: 4876667 - DNA, 25 bp, Homo sapien
cgtttctgtcaggttaatcaacagc

SEQ ID NO: 4876668 - DNA, 25 bp, Homo sapien
tttgcacatgagtgactcggagacc

SEQ ID NO: 4876669 - DNA, 25 bp, Homo sapien
tcttcaattactctagcaaggccaa

SEQ ID NO: 4876670 - DNA, 25 bp, Homo sapien
gaccagaacattagctgctcgcagg

SEQ ID NO: 4876671 - DNA, 25 bp, Homo sapien
caggtcccggtgaatgtagttcttc

SEQ ID NO: 4876672 - DNA, 25 bp, Homo sapien
tgggcaatcctagcccaagaaaggc

SEQ ID NO: 4876673 - DNA, 25 bp, Homo sapien
tccacagccccgtatattatattca

SEQ ID NO: 4876674 - DNA, 25 bp, Homo sapien
tcgtgggtgagagcataagaatcct

SEQ ID NO: 4876675 - DNA, 25 bp, Homo sapien
gaatcctcagtcataaccacgtggg

SEQ ID NO: 4876676 - DNA, 25 bp, Homo sapien
tataggaggattccaaaggaccaca

SEQ ID NO: 4876677 - DNA, 25 bp, Homo sapien
tggagccgtccacttaatagggaac

SEQ ID NO: 4876678 - DNA, 25 bp, Homo sapien
ttttcccataggtgacaatttcgta

SEQ ID NO: 4876679 - DNA, 25 bp, Homo sapien
ccacacatcagacttaatagtgaaa

SEQ ID NO: 4876680 - DNA, 25 bp, Homo sapien
cgtttagaaacctggcagagggtca

SEQ ID NO: 4876681 - DNA, 25 bp, Homo sapien
gaacagaaacccatgccgtttagaa

SEQ ID NO: 4876682 - DNA, 25 bp, Homo sapien
gcagccatctacaagtccaggagag

SEQ ID NO: 4876683 - DNA, 25 bp, Homo sapien
ggagaaatcaacctggctagcacct

SEQ ID NO: 4876684 - DNA, 25 bp, Homo sapien
tgctgctggtattgcccttccgtgg

SEQ ID NO: 4876685 - DNA, 25 bp, Homo sapien
cgctctgtaagtagtcaaacgttgg

SEQ ID NO: 4876686 - DNA, 25 bp, Homo sapien
tgtgtagaaatcatccaggacgctc

SEQ ID NO: 4876687 - DNA, 25 bp, Homo sapien
taatgtcatagagctcatctgggca

SEQ ID NO: 4876688 - DNA, 25 bp, Homo sapien
tttcaggatccaggcacggcagatg

SEQ ID NO: 4876689 - DNA, 25 bp, Homo sapien
cctatggcatgtctagcaggtctga

SEQ ID NO: 4876690 - DNA, 25 bp, Homo sapien
taccactgaatcaagggaccagctg

SEQ ID NO: 4876691 - DNA, 25 bp, Homo sapien
tttagtgaacagaaccgcttgaacc

SEQ ID NO: 4876692 - DNA, 25 bp, Homo sapien
cacatggaggtaaggatcacaggct

SEQ ID NO: 4876693 - DNA, 25 bp, Homo sapien
caagtggaaaatggcaagaagagga

SEQ ID NO: 4876694 - DNA, 25 bp, Homo sapien
atcacaggcttgattgggagggaaa

SEQ ID NO: 4876695 - DNA, 25 bp, Homo sapien
gaacgtgtgacttccacacatgctg

SEQ ID NO: 4876696 - DNA, 25 bp, Homo sapien
gagatgtccgacaactggctgtgga

SEQ ID NO: 4876697 - DNA, 25 bp, Homo sapien
tttgccaaagcacaagagggccctg

SEQ ID NO: 4876698 - DNA, 25 bp, Homo sapien
ccgcccctggatgtagtttgtgaga

SEQ ID NO: 4876699 - DNA, 25 bp, Homo sapien
gaaagctgggcggtttgatctcatc

SEQ ID NO: 4876700 - DNA, 25 bp, Homo sapien
gttttctgcagattcctagtgcatg

SEQ ID NO: 4876701 - DNA, 25 bp, Homo sapien
tttgcactgtttagagccttgcagt

SEQ ID NO: 4876702 - DNA, 25 bp, Homo sapien
ttctgcagattcctagtgcatgtca

SEQ ID NO: 4876703 - DNA, 25 bp, Homo sapien
gcagtaagagacttgtcaattgctt

SEQ ID NO: 4876704 - DNA, 25 bp, Homo sapien
cgtgatcgagcattgatagttgttc

SEQ ID NO: 4876705 - DNA, 25 bp, Homo sapien
cgagcattgatagttgttctgatgt

SEQ ID NO: 4876706 - DNA, 25 bp, Homo sapien
gagagcagcgtgatcgagcattgat

SEQ ID NO: 4876707 - DNA, 25 bp, Homo sapien
gcagcgtgatcgagcattgatagtt

SEQ ID NO: 4876708 - DNA, 25 bp, Homo sapien
tctgaagaacatgcaagacccctgt

SEQ ID NO: 4876709 - DNA, 25 bp, Homo sapien
gaagtcttctagaggctcccttctg

SEQ ID NO: 4876710 - DNA, 25 bp, Homo sapien
gctgagagagtcctagaagtcttct

SEQ ID NO: 4876711 - DNA, 25 bp, Homo sapien
gaagagttgtccaagttatgctgag

SEQ ID NO: 4876712 - DNA, 25 bp, Homo sapien
catgaggaccctgagaatgtttctt

SEQ ID NO: 4876713 - DNA, 25 bp, Homo sapien
gattggagggctatcagaacagatc

SEQ ID NO: 4876714 - DNA, 25 bp, Homo sapien
tcatgagatatttgccaagagaggt

SEQ ID NO: 4876715 - DNA, 25 bp, Homo sapien
caagagaggtggatccactgattta

SEQ ID NO: 4876716 - DNA, 25 bp, Homo sapien
ggtgcttgagcacaaggagatcgat

SEQ ID NO: 4876717 - DNA, 25 bp, Homo sapien
gtgcttgagcacaaggagatcgatg

SEQ ID NO: 4876718 - DNA, 25 bp, Homo sapien
gcagtgagccgagatcatgccattg

SEQ ID NO: 4876719 - DNA, 25 bp, Homo sapien
tgcttgaaccctaaaggcagagatt

SEQ ID NO: 4876720 - DNA, 25 bp, Homo sapien
tgaaccctaaaggcagagattgcag

SEQ ID NO: 4876721 - DNA, 25 bp, Homo sapien
gtgagccgagatcatgccattgcac

SEQ ID NO: 4876722 - DNA, 25 bp, Homo sapien
gactgcaacctctgcctcccgagtt

SEQ ID NO: 4876723 - DNA, 25 bp, Homo sapien
tgcctcccgagttcaagcaattctc

SEQ ID NO: 4876724 - DNA, 25 bp, Homo sapien
atgcagtggcacgatgttggctgac

SEQ ID NO: 4876725 - DNA, 25 bp, Homo sapien
ttgcattcccatcaggggatccagt

SEQ ID NO: 4876726 - DNA, 25 bp, Homo sapien
taaggaatctcgatactgttgcacc

SEQ ID NO: 4876727 - DNA, 25 bp, Homo sapien
ccatcaggggatccagtttctccaa

SEQ ID NO: 4876728 - DNA, 25 bp, Homo sapien
gtctttgagattttgccttgaatta

SEQ ID NO: 4876729 - DNA, 25 bp, Homo sapien
gccaggagttgaggtggaagtcacc

SEQ ID NO: 4876730 - DNA, 25 bp, Homo sapien
caggagttgaggtggaagtcaccat

SEQ ID NO: 4876731 - DNA, 25 bp, Homo sapien
agccaggagttgaggtggaagtcac

SEQ ID NO: 4876732 - DNA, 25 bp, Homo sapien
ccaggagttgaggtggaagtcacca

SEQ ID NO: 4876733 - DNA, 25 bp, Homo sapien
aggaccagttcgaatgcctaccaag

SEQ ID NO: 4876734 - DNA, 25 bp, Homo sapien
aagaatctcaaagtgaaaggaccag

SEQ ID NO: 4876735 - DNA, 25 bp, Homo sapien
tgaaaggaccagttcgaatgcctac

SEQ ID NO: 4876736 - DNA, 25 bp, Homo sapien
aaaggaccagttcgaatgcctacca

SEQ ID NO: 4876737 - DNA, 25 bp, Homo sapien
cggaaaggcgctcctgaaatggtgg

SEQ ID NO: 4876738 - DNA, 25 bp, Homo sapien
aaacgcgggaagcttccggaagctg

SEQ ID NO: 4876739 - DNA, 25 bp, Homo sapien
ttcgagttcgtgctcctgagggcag

SEQ ID NO: 4876740 - DNA, 25 bp, Homo sapien
ttttcatgtatctaataataggctt

SEQ ID NO: 4876741 - DNA, 25 bp, Homo sapien
gtcggtcaggaagcccgcgcgcaac

SEQ ID NO: 4876742 - DNA, 25 bp, Homo sapien
tgcaacggaaaaaccagagttcgtg

SEQ ID NO: 4876743 - DNA, 25 bp, Homo sapien
ttaggtgcaccagacagaggagttt

SEQ ID NO: 4876744 - DNA, 25 bp, Homo sapien
tcctcagagagcaacgaatggtatg

SEQ ID NO: 4876745 - DNA, 25 bp, Homo sapien
tgtcgcctgttctctcgaccaggtg

SEQ ID NO: 4876746 - DNA, 25 bp, Homo sapien
tggcattttcgcctcactttccaga

SEQ ID NO: 4876747 - DNA, 25 bp, Homo sapien
tcacttatgtgattatgaacagatg

SEQ ID NO: 4876748 - DNA, 25 bp, Homo sapien
gacgagaagccaagttcaggtcctt

SEQ ID NO: 4876749 - DNA, 25 bp, Homo sapien
gcctcaggatagctgcgcagcctgg

SEQ ID NO: 4876750 - DNA, 25 bp, Homo sapien
ggcactactggtaaattaagcccaa

SEQ ID NO: 4876751 - DNA, 25 bp, Homo sapien
cctgggcactactggtaaattaagc

SEQ ID NO: 4876752 - DNA, 25 bp, Homo sapien
aaagtgcattgaacagtcctgggca

SEQ ID NO: 4876753 - DNA, 25 bp, Homo sapien
aacagtcctgggcactactggtaaa

SEQ ID NO: 4876754 - DNA, 25 bp, Homo sapien
cataaccagtggtcttacagttgaa

SEQ ID NO: 4876755 - DNA, 25 bp, Homo sapien
taacataaccagtggtcttacagtt

SEQ ID NO: 4876756 - DNA, 25 bp, Homo sapien
gaaataacataaccagtggtcttac

SEQ ID NO: 4876757 - DNA, 25 bp, Homo sapien
tgggggatttgaaataacataacca

SEQ ID NO: 4876758 - DNA, 25 bp, Homo sapien
ggccccgcggctgccgcgccggctg

SEQ ID NO: 4876759 - DNA, 25 bp, Homo sapien
ccccgcggctgccgcgccggctggc

SEQ ID NO: 4876760 - DNA, 25 bp, Homo sapien
ttcctcgggccccgcggctgccgcg

SEQ ID NO: 4876761 - DNA, 25 bp, Homo sapien
tcttcctcgggccccgcggctgccg

SEQ ID NO: 4876762 - DNA, 25 bp, Homo sapien
ttttccccatcggtggacgcgcggc

SEQ ID NO: 4876763 - DNA, 25 bp, Homo sapien
agttttccccatcggtggacgcgcg

SEQ ID NO: 4876764 - DNA, 25 bp, Homo sapien
tttccccatcggtggacgcgcggcc

SEQ ID NO: 4876765 - DNA, 25 bp, Homo sapien
tgccacaggatttgcatgctgagag

SEQ ID NO: 4876766 - DNA, 25 bp, Homo sapien
gctgccacaggatttgcatgctgag

SEQ ID NO: 4876767 - DNA, 25 bp, Homo sapien
ctgccacaggatttgcatgctgaga

SEQ ID NO: 4876768 - DNA, 25 bp, Homo sapien
catagggagctcctttgggatcata

SEQ ID NO: 4876769 - DNA, 25 bp, Homo sapien
tttgtgctaaaaacccatagggagc

SEQ ID NO: 4876770 - DNA, 25 bp, Homo sapien
tagcctactgagatccatgtgacat

SEQ ID NO: 4876771 - DNA, 25 bp, Homo sapien
tattcgtcattagcaatggctggct

SEQ ID NO: 4876772 - DNA, 25 bp, Homo sapien
tagtgaactgagacattggccttag

SEQ ID NO: 4876773 - DNA, 25 bp, Homo sapien
gccttagtaggctgtattcactgct

SEQ ID NO: 4876774 - DNA, 25 bp, Homo sapien
gaaattcaaatacatggaggcacat

SEQ ID NO: 4876775 - DNA, 25 bp, Homo sapien
aaagtaggcttttcgctctgcttca

SEQ ID NO: 4876776 - DNA, 25 bp, Homo sapien
tcttccacgaagagtcaatgggact

SEQ ID NO: 4876777 - DNA, 25 bp, Homo sapien
aattaatgcatgactcgtaagcaga

SEQ ID NO: 4876778 - DNA, 25 bp, Homo sapien
caaaatgggaaggattggattccac

SEQ ID NO: 4876779 - DNA, 25 bp, Homo sapien
ttacataccggttccatttagagga

SEQ ID NO: 4876780 - DNA, 25 bp, Homo sapien
tttgttcctgttccccagatagccc

SEQ ID NO: 4876781 - DNA, 25 bp, Homo sapien
gcccacagatgtactcttaagctct

SEQ ID NO: 4876782 - DNA, 25 bp, Homo sapien
ccagatagcccacagatgtactctt

SEQ ID NO: 4876783 - DNA, 25 bp, Homo sapien
acatagctgctgtaaaaacttaatt

SEQ ID NO: 4876784 - DNA, 25 bp, Homo sapien
cagcatggaagcattctctagtctc

SEQ ID NO: 4876785 - DNA, 25 bp, Homo sapien
catggaagcattctctagtctctcc

SEQ ID NO: 4876786 - DNA, 25 bp, Homo sapien
ctcagcatggaagcattctctagtc

SEQ ID NO: 4876787 - DNA, 25 bp, Homo sapien
tctcttctctttaggtgcgaagctc

SEQ ID NO: 4876788 - DNA, 25 bp, Homo sapien
cctaagtctagtttgataaagaagc

SEQ ID NO: 4876789 - DNA, 25 bp, Homo sapien
ttatccagggcaaaagcctctccat

SEQ ID NO: 4876790 - DNA, 25 bp, Homo sapien
tcttatccagggcaaaagcctctcc

SEQ ID NO: 4876791 - DNA, 25 bp, Homo sapien
ctccctcctaagtctagtttgataa

SEQ ID NO: 4876792 - DNA, 25 bp, Homo sapien
gatagggggtctatactggtctgtt

SEQ ID NO: 4876793 - DNA, 25 bp, Homo sapien
agctctgtgcagatagggggtctat

SEQ ID NO: 4876794 - DNA, 25 bp, Homo sapien
gatggcaacagtgactgcagcgtcc

SEQ ID NO: 4876795 - DNA, 25 bp, Homo sapien
gaagacgaactttctggacatgacc

SEQ ID NO: 4876796 - DNA, 25 bp, Homo sapien
gctacagtttatgcttctgggcctc

SEQ ID NO: 4876797 - DNA, 25 bp, Homo sapien
cgctggctcctgctagtgctctaga

SEQ ID NO: 4876798 - DNA, 25 bp, Homo sapien
tgtgaatttgaaccctaaaatggcc

SEQ ID NO: 4876799 - DNA, 25 bp, Homo sapien
taaagtcgcatcattgtctggaaca

SEQ ID NO: 4876800 - DNA, 25 bp, Homo sapien
ctgctggcccaagaaggctggttag

SEQ ID NO: 4876801 - DNA, 25 bp, Homo sapien
ccctgctggcccaagaaggctggtt

SEQ ID NO: 4876802 - DNA, 25 bp, Homo sapien
gttctcccctgctggcccaagaagg

SEQ ID NO: 4876803 - DNA, 25 bp, Homo sapien
tcccctgctggcccaagaaggctgg

SEQ ID NO: 4876804 - DNA, 25 bp, Homo sapien
gcgccttgagcttcaggacctcctg

SEQ ID NO: 4876805 - DNA, 25 bp, Homo sapien
tggctttctgggtcgtggctccacc

SEQ ID NO: 4876806 - DNA, 25 bp, Homo sapien
gctatgaactttgggcctcctcaca

SEQ ID NO: 4876807 - DNA, 25 bp, Homo sapien
caagggaacctgctcggtgatctct

SEQ ID NO: 4876808 - DNA, 25 bp, Homo sapien
ccatgttatagcagtgagcacgcag

SEQ ID NO: 4876809 - DNA, 25 bp, Homo sapien
cacacccgcgagactaggtctgtca

SEQ ID NO: 4876810 - DNA, 25 bp, Homo sapien
ctgtcatcttgatatcactgctcac

SEQ ID NO: 4876811 - DNA, 25 bp, Homo sapien
tttctggccaactctggttccatgg

SEQ ID NO: 4876812 - DNA, 25 bp, Homo sapien
tcagaaccggcacagggtaaattcc

SEQ ID NO: 4876813 - DNA, 25 bp, Homo sapien
gagcactgctccataccatgcgtgg

SEQ ID NO: 4876814 - DNA, 25 bp, Homo sapien
ccatgcgtgggtatgcagcttcctc

SEQ ID NO: 4876815 - DNA, 25 bp, Homo sapien
tgtgatgcgggccatccattccaga

SEQ ID NO: 4876816 - DNA, 25 bp, Homo sapien
ctgtgcctgcacagccacgtccttc

SEQ ID NO: 4876817 - DNA, 25 bp, Homo sapien
tgtgcctgcacagccacgtccttct

SEQ ID NO: 4876818 - DNA, 25 bp, Homo sapien
tggattcctctgtaatgatgcccag

SEQ ID NO: 4876819 - DNA, 25 bp, Homo sapien
gattcctctgtaatgatgcccagcc

SEQ ID NO: 4876820 - DNA, 25 bp, Homo sapien
tctggattcctctgtaatgatgccc

SEQ ID NO: 4876821 - DNA, 25 bp, Homo sapien
tcctctgtaatgatgcccagccctc

SEQ ID NO: 4876822 - DNA, 25 bp, Homo sapien
gcacgtgccccattcttctgcagtt

SEQ ID NO: 4876823 - DNA, 25 bp, Homo sapien
aggtagctgtagagccaagaatggc

SEQ ID NO: 4876824 - DNA, 25 bp, Homo sapien
agaggaggtagctgtagagccaaga

SEQ ID NO: 4876825 - DNA, 25 bp, Homo sapien
ccggggaatccagggaaggatgctt

SEQ ID NO: 4876826 - DNA, 25 bp, Homo sapien
tgtgtgattggaagaatgaaccttt

SEQ ID NO: 4876827 - DNA, 25 bp, Homo sapien
tattggtaatgtggactgatctcag

SEQ ID NO: 4876828 - DNA, 25 bp, Homo sapien
tgatctcagataagataaacactat

SEQ ID NO: 4876829 - DNA, 25 bp, Homo sapien
gaacctttccggctttagattgcat

SEQ ID NO: 4876830 - DNA, 25 bp, Homo sapien
aaacacgtcaatggctcacgcagca

SEQ ID NO: 4876831 - DNA, 25 bp, Homo sapien
tccgcttcgccagcacccaggccgt

SEQ ID NO: 4876832 - DNA, 25 bp, Homo sapien
gctccaaacacgtcaatggctcacg

SEQ ID NO: 4876833 - DNA, 25 bp, Homo sapien
tccagctccaaacacgtcaatggct

SEQ ID NO: 4876834 - DNA, 25 bp, Homo sapien
cggtaactgcgcttcagaggctaca

SEQ ID NO: 4876835 - DNA, 25 bp, Homo sapien
cgcgccgcagaagtgcattcgggcc

SEQ ID NO: 4876836 - DNA, 25 bp, Homo sapien
cccggagcgaacagacccgtgtggc

SEQ ID NO: 4876837 - DNA, 25 bp, Homo sapien
gttgcccggactaggcagaggtcat

SEQ ID NO: 4876838 - DNA, 25 bp, Homo sapien
cggtgtagcccgtcagcatctgatc

SEQ ID NO: 4876839 - DNA, 25 bp, Homo sapien
cttccgcggtgtagcccgtcagcat

SEQ ID NO: 4876840 - DNA, 25 bp, Homo sapien
tcagcatctgatcctggacggcgcg

SEQ ID NO: 4876841 - DNA, 25 bp, Homo sapien
tggacggcgcgcacaggtgaacaca

SEQ ID NO: 4876842 - DNA, 25 bp, Homo sapien
gaattacaacatcgagtgctccgct

SEQ ID NO: 4876843 - DNA, 25 bp, Homo sapien
aatgtcaatttacagtgaggagcgg

SEQ ID NO: 4876844 - DNA, 25 bp, Homo sapien
ctctctaagtagctttgaaagggca

SEQ ID NO: 4876845 - DNA, 25 bp, Homo sapien
gcggctctgctaaacccggaagctg

SEQ ID NO: 4876846 - DNA, 25 bp, Homo sapien
ttccgaaagtcccctcctttgcatg

SEQ ID NO: 4876847 - DNA, 25 bp, Homo sapien
tccgaaagtcccctcctttgcatga

SEQ ID NO: 4876848 - DNA, 25 bp, Homo sapien
tgggaaagatcaggacgtccaggcc

SEQ ID NO: 4876849 - DNA, 25 bp, Homo sapien
gaatgaaattcggtacagtccaact

SEQ ID NO: 4876850 - DNA, 25 bp, Homo sapien
gcgacagcagtggaagacgccgtct

SEQ ID NO: 4876851 - DNA, 25 bp, Homo sapien
gtattgccatgcctcaacacaaagg

SEQ ID NO: 4876852 - DNA, 25 bp, Homo sapien
taattatacagtagttgacagaaaa

SEQ ID NO: 4876853 - DNA, 25 bp, Homo sapien
tacatctcaatagcactaaaagtac

SEQ ID NO: 4876854 - DNA, 25 bp, Homo sapien
taaatcaatacatctcaatagcact

SEQ ID NO: 4876855 - DNA, 25 bp, Homo sapien
aataattatacagtagttgacagaa

SEQ ID NO: 4876856 - DNA, 25 bp, Homo sapien
tcagcctctgtgttaccgagggcat

SEQ ID NO: 4876857 - DNA, 25 bp, Homo sapien
ctcagcctctgtgttaccgagggca

SEQ ID NO: 4876858 - DNA, 25 bp, Homo sapien
aaacaaggatttatgtcaggatctc

SEQ ID NO: 4876859 - DNA, 25 bp, Homo sapien
tttatgtcaggatctctcagcctct

SEQ ID NO: 4876860 - DNA, 25 bp, Homo sapien
cattattcaaacgtagcaaagccac

SEQ ID NO: 4876861 - DNA, 25 bp, Homo sapien
tactctcagccaggttgtcaaggac

SEQ ID NO: 4876862 - DNA, 25 bp, Homo sapien
tgtgggatctaatatcacgaaccct

SEQ ID NO: 4876863 - DNA, 25 bp, Homo sapien
gggtagacagtttgcaacacatatc

SEQ ID NO: 4876864 - DNA, 25 bp, Homo sapien
cacaaaacaaccataaatcgagagg

SEQ ID NO: 4876865 - DNA, 25 bp, Homo sapien
cctctcgatttatggttgttttgtg

SEQ ID NO: 4876866 - DNA, 25 bp, Homo sapien
ggcatcatttaaaaggtagaacagg

SEQ ID NO: 4876867 - DNA, 25 bp, Homo sapien
cttacagatataagagaggcatcat

SEQ ID NO: 4876868 - DNA, 25 bp, Homo sapien
agagaggcatcatttaaaaggtaga

SEQ ID NO: 4876869 - DNA, 25 bp, Homo sapien
cagatataagagaggcatcatttaa

SEQ ID NO: 4876870 - DNA, 25 bp, Homo sapien
aacacctttccctgtcatagttatt

SEQ ID NO: 4876871 - DNA, 25 bp, Homo sapien
tcaagaagtaagtggaacacctttc

SEQ ID NO: 4876872 - DNA, 25 bp, Homo sapien
gacatctggtggaagcatcagattc

SEQ ID NO: 4876873 - DNA, 25 bp, Homo sapien
agttattttcatccagacatctggt

SEQ ID NO: 4876874 - DNA, 25 bp, Homo sapien
ccagaatctccggcagtttttgtac

SEQ ID NO: 4876875 - DNA, 25 bp, Homo sapien
atggcttcactccgttctttcttct

SEQ ID NO: 4876876 - DNA, 25 bp, Homo sapien
aaatggcttcactccgttctttctt

SEQ ID NO: 4876877 - DNA, 25 bp, Homo sapien
ctgctgccgtaggcataaatggctt

SEQ ID NO: 4876878 - DNA, 25 bp, Homo sapien
ttcttctctgcatcacgatagaatt

SEQ ID NO: 4876879 - DNA, 25 bp, Homo sapien
atataaacacttttaatgcaaacat

SEQ ID NO: 4876880 - DNA, 25 bp, Homo sapien
tatataaacacttttaatgcaaaca

SEQ ID NO: 4876881 - DNA, 25 bp, Homo sapien
aagttatataaacacttttaatgca

SEQ ID NO: 4876882 - DNA, 25 bp, Homo sapien
gttatataaacacttttaatgcaaa

SEQ ID NO: 4876883 - DNA, 25 bp, Homo sapien
tacagcaatcatttattagaaatat

SEQ ID NO: 4876884 - DNA, 25 bp, Homo sapien
aaatattacagcaatcatttattag

SEQ ID NO: 4876885 - DNA, 25 bp, Homo sapien
tattacagcaatcatttattagaaa

SEQ ID NO: 4876886 - DNA, 25 bp, Homo sapien
ttacagcaatcatttattagaaata

SEQ ID NO: 4876887 - DNA, 25 bp, Homo sapien
taccatcggcatggcactgagagca

SEQ ID NO: 4876888 - DNA, 25 bp, Homo sapien
gattctaggtggagcaatctacagg

SEQ ID NO: 4876889 - DNA, 25 bp, Homo sapien
gacagacagttcattgtcggcagcc

SEQ ID NO: 4876890 - DNA, 25 bp, Homo sapien
gaagttctagtctcatcccagtgtt

SEQ ID NO: 4876891 - DNA, 25 bp, Homo sapien
attccaagccctttaacaagtgtgc

SEQ ID NO: 4876892 - DNA, 25 bp, Homo sapien
tctggtcctattttaatccatcatt

SEQ ID NO: 4876893 - DNA, 25 bp, Homo sapien
aaaatacttcttacacaggtaggca

SEQ ID NO: 4876894 - DNA, 25 bp, Homo sapien
ggtatgtaccttcaaaggagtgaca

SEQ ID NO: 4876895 - DNA, 25 bp, Homo sapien
aaaacattaggctgtcaaagaggcc

SEQ ID NO: 4876896 - DNA, 25 bp, Homo sapien
tggtgatcactcgaaccctgcagct

SEQ ID NO: 4876897 - DNA, 25 bp, Homo sapien
tcatgacgccaatgcactgaagcct

SEQ ID NO: 4876898 - DNA, 25 bp, Homo sapien
tccaggtttggactgagctatccct

SEQ ID NO: 4876899 - DNA, 25 bp, Homo sapien
tcttgaaaacttgacaccggctgct

SEQ ID NO: 4876900 - DNA, 25 bp, Homo sapien
gaatgatattatgtcctccaggagc

SEQ ID NO: 4876901 - DNA, 25 bp, Homo sapien
tgatatcaaaggcttgccgacgcca

SEQ ID NO: 4876902 - DNA, 25 bp, Homo sapien
aaaagatgcttttccgtgctacaga

SEQ ID NO: 4876903 - DNA, 25 bp, Homo sapien
gtcaggtaagaaacactcacaggct

SEQ ID NO: 4876904 - DNA, 25 bp, Homo sapien
taagcgtataaattggtgtggtcct

SEQ ID NO: 4876905 - DNA, 25 bp, Homo sapien
gataaaaacacgcacaaagacccaa

SEQ ID NO: 4876906 - DNA, 25 bp, Homo sapien
ttctttgatagaccaagggtcccca

SEQ ID NO: 4876907 - DNA, 25 bp, Homo sapien
gagaacttggcacaaaggcccttgc

SEQ ID NO: 4876908 - DNA, 25 bp, Homo sapien
ggtctgagaacttggcacaaaggcc

SEQ ID NO: 4876909 - DNA, 25 bp, Homo sapien
gaacttggcacaaaggcccttgctc

SEQ ID NO: 4876910 - DNA, 25 bp, Homo sapien
ctgagaacttggcacaaaggccctt

SEQ ID NO: 4876911 - DNA, 25 bp, Homo sapien
gaggtgtctgcgatgtagatccacg

SEQ ID NO: 4876912 - DNA, 25 bp, Homo sapien
ggtgtctgcgatgtagatccacgct

SEQ ID NO: 4876913 - DNA, 25 bp, Homo sapien
aggtgtctgcgatgtagatccacgc

SEQ ID NO: 4876914 - DNA, 25 bp, Homo sapien
tgtctgcgatgtagatccacgctct

SEQ ID NO: 4876915 - DNA, 25 bp, Homo sapien
ccactggggcctgaattcagctccc

SEQ ID NO: 4876916 - DNA, 25 bp, Homo sapien
gttgacacatttacgccactggggc

SEQ ID NO: 4876917 - DNA, 25 bp, Homo sapien
ttgacacatttacgccactggggcc

SEQ ID NO: 4876918 - DNA, 25 bp, Homo sapien
gggccaagatggatatcccctgcct

SEQ ID NO: 4876919 - DNA, 25 bp, Homo sapien
actgcctggtgaatacaatctcaga

SEQ ID NO: 4876920 - DNA, 25 bp, Homo sapien
tcagacaactcttcaggcacaagca

SEQ ID NO: 4876921 - DNA, 25 bp, Homo sapien
tccctgatgtgcgtccttctctaaa

SEQ ID NO: 4876922 - DNA, 25 bp, Homo sapien
gcttaggtaggtcttgtacaatgag

SEQ ID NO: 4876923 - DNA, 25 bp, Homo sapien
gcagtcctggagtcattgcaccacg

SEQ ID NO: 4876924 - DNA, 25 bp, Homo sapien
ctgggactgcctgtaagcttaggta

SEQ ID NO: 4876925 - DNA, 25 bp, Homo sapien
tggtgctgttattgaagtcatgggc

SEQ ID NO: 4876926 - DNA, 25 bp, Homo sapien
caccagatagcagcatggagccact

SEQ ID NO: 4876927 - DNA, 25 bp, Homo sapien
ggaggcaatgcagcagtataccacc

SEQ ID NO: 4876928 - DNA, 25 bp, Homo sapien
gcagcagtataccaccagatagcag

SEQ ID NO: 4876929 - DNA, 25 bp, Homo sapien
tataccaccagatagcagcatggag

SEQ ID NO: 4876930 - DNA, 25 bp, Homo sapien
tgcgtctatagagtgcatgcagctt

SEQ ID NO: 4876931 - DNA, 25 bp, Homo sapien
gacatggctgcgtctatagagtgca

SEQ ID NO: 4876932 - DNA, 25 bp, Homo sapien
atggctgcgtctatagagtgcatgc

SEQ ID NO: 4876933 - DNA, 25 bp, Homo sapien
tatagagtgcatgcagcttgggatc

SEQ ID NO: 4876934 - DNA, 25 bp, Homo sapien
tgtcaacaaactcgtctcccatgcc

SEQ ID NO: 4876935 - DNA, 25 bp, Homo sapien
tttcatagttgaggcacaacgctaa

SEQ ID NO: 4876936 - DNA, 25 bp, Homo sapien
catgccctcctcagcaatttcatag

SEQ ID NO: 4876937 - DNA, 25 bp, Homo sapien
gctaaacagtagagaaaagcttccc

SEQ ID NO: 4876938 - DNA, 25 bp, Homo sapien
aggaggcaacctcatctgggtttgg

SEQ ID NO: 4876939 - DNA, 25 bp, Homo sapien
atattctctggaactaaaagctttg

SEQ ID NO: 4876940 - DNA, 25 bp, Homo sapien
ggctcctctttggacaggaggcaac

SEQ ID NO: 4876941 - DNA, 25 bp, Homo sapien
gggtctgggtcaaaagctctatatt

SEQ ID NO: 4876942 - DNA, 25 bp, Homo sapien
agtgtgcccctgttggctggtgcct

SEQ ID NO: 4876943 - DNA, 25 bp, Homo sapien
gtcagtgtgcccctgttggctggtg

SEQ ID NO: 4876944 - DNA, 25 bp, Homo sapien
caggggtcaggggtcaggcatccac

SEQ ID NO: 4876945 - DNA, 25 bp, Homo sapien
aggggtcaggggtcaggcatccact

SEQ ID NO: 4876946 - DNA, 25 bp, Homo sapien
aacaagtggcaaggtgtaagagaca

SEQ ID NO: 4876947 - DNA, 25 bp, Homo sapien
gagacagctccactgccaatgacct

SEQ ID NO: 4876948 - DNA, 25 bp, Homo sapien
ctaagttagagctgaatggtgggct

SEQ ID NO: 4876949 - DNA, 25 bp, Homo sapien
gctcccgggctctgaggcttgtgcc

SEQ ID NO: 4876950 - DNA, 25 bp, Homo sapien
tggtttactctattattaatgactt

SEQ ID NO: 4876951 - DNA, 25 bp, Homo sapien
ttactctattattaatgacttccag

SEQ ID NO: 4876952 - DNA, 25 bp, Homo sapien
cttccagaggtccacctccgcactc

SEQ ID NO: 4876953 - DNA, 25 bp, Homo sapien
tccagaggtccacctccgcactcct

SEQ ID NO: 4876954 - DNA, 25 bp, Homo sapien
aggcacaccctttgctggccacctt

SEQ ID NO: 4876955 - DNA, 25 bp, Homo sapien
ctttgctggccaccttgcttgctct

SEQ ID NO: 4876956 - DNA, 25 bp, Homo sapien
gtttcttgttgctctcttccctgga

SEQ ID NO: 4876957 - DNA, 25 bp, Homo sapien
tggagaactctggaggacctcaggc

SEQ ID NO: 4876958 - DNA, 25 bp, Homo sapien
ggctccttgggattaggagaactgg

SEQ ID NO: 4876959 - DNA, 25 bp, Homo sapien
gactgagacatttcaaggagccact

SEQ ID NO: 4876960 - DNA, 25 bp, Homo sapien
ccacttctgagggattcacaggttt

SEQ ID NO: 4876961 - DNA, 25 bp, Homo sapien
gagacatttcaaggagccactccat

SEQ ID NO: 4876962 - DNA, 25 bp, Homo sapien
tcacttgttcggttttctattacaa

SEQ ID NO: 4876963 - DNA, 25 bp, Homo sapien
tcctgacagttatatcccacgaggc

SEQ ID NO: 4876964 - DNA, 25 bp, Homo sapien
tcatcttcacttgttcggttttcta

SEQ ID NO: 4876965 - DNA, 25 bp, Homo sapien
catactcatcttcacttgttcggtt

SEQ ID NO: 4876966 - DNA, 25 bp, Homo sapien
tcggtgcgtactcagcgcatatgtc

SEQ ID NO: 4876967 - DNA, 25 bp, Homo sapien
tagccggactttgttgtggcactcg

SEQ ID NO: 4876968 - DNA, 25 bp, Homo sapien
tgtggcactcggtgcgtactcagcg

SEQ ID NO: 4876969 - DNA, 25 bp, Homo sapien
cgtactcagcgcatatgtctgagtt

SEQ ID NO: 4876970 - DNA, 25 bp, Homo sapien
tgtagaatcgggaacctagaggatg

SEQ ID NO: 4876971 - DNA, 25 bp, Homo sapien
tctggtgtagaatcgggaacctaga

SEQ ID NO: 4876972 - DNA, 25 bp, Homo sapien
tcatgtctggtgtagaatcgggaac

SEQ ID NO: 4876973 - DNA, 25 bp, Homo sapien
tagaatcgggaacctagaggatgct

SEQ ID NO: 4876974 - DNA, 25 bp, Homo sapien
tccatccgaacagcgtcaacgtgag

SEQ ID NO: 4876975 - DNA, 25 bp, Homo sapien
tctacctaaaagctgtcggccggga

SEQ ID NO: 4876976 - DNA, 25 bp, Homo sapien
cattcctgcgggcttttgctcgacg

SEQ ID NO: 4876977 - DNA, 25 bp, Homo sapien
catggcgcggttcctgacactttgc

SEQ ID NO: 4876978 - DNA, 25 bp, Homo sapien
tccagcagccgttaagccccgggac

SEQ ID NO: 4876979 - DNA, 25 bp, Homo sapien
gaggcaggcgctcagagccccgcag

SEQ ID NO: 4876980 - DNA, 25 bp, Homo sapien
cagcagccgttaagccccgggacgg

SEQ ID NO: 4876981 - DNA, 25 bp, Homo sapien
ggcgaggcaggcgctcagagccccg

SEQ ID NO: 4876982 - DNA, 25 bp, Homo sapien
tcagctgcagcccgccggcgattgg

SEQ ID NO: 4876983 - DNA, 25 bp, Homo sapien
gcgcgcctccttcggtttggggcta

SEQ ID NO: 4876984 - DNA, 25 bp, Homo sapien
agcccgccggcgattggggcgcgcg

SEQ ID NO: 4876985 - DNA, 25 bp, Homo sapien
gcgcgcgcgcctccttcggtttggg

SEQ ID NO: 4876986 - DNA, 25 bp, Homo sapien
gggccgggctgatacagccgcttca

SEQ ID NO: 4876987 - DNA, 25 bp, Homo sapien
ggccgggctgatacagccgcttcac

SEQ ID NO: 4876988 - DNA, 25 bp, Homo sapien
gccgggctgatacagccgcttcacc

SEQ ID NO: 4876989 - DNA, 25 bp, Homo sapien
cgggctgatacagccgcttcaccgt

SEQ ID NO: 4876990 - DNA, 25 bp, Homo sapien
tatagagatatgagtagtggtgaca

SEQ ID NO: 4876991 - DNA, 25 bp, Homo sapien
ggcagactgtggaacttccattggc

SEQ ID NO: 4876992 - DNA, 25 bp, Homo sapien
gggaagcacgctgatctcttgttct

SEQ ID NO: 4876993 - DNA, 25 bp, Homo sapien
tgttctgcagcgcatgcttgggatg

SEQ ID NO: 4876994 - DNA, 25 bp, Homo sapien
gtttgccagcaatttgttcttgccc

SEQ ID NO: 4876995 - DNA, 25 bp, Homo sapien
tgcccttggatgatcagacccttac

SEQ ID NO: 4876996 - DNA, 25 bp, Homo sapien
acaaacatgtgtgtgactgtttgcc

SEQ ID NO: 4876997 - DNA, 25 bp, Homo sapien
tgttcttgcccttggatgatcagac

SEQ ID NO: 4876998 - DNA, 25 bp, Homo sapien
tttcttaaatccaacaggtggcttc

SEQ ID NO: 4876999 - DNA, 25 bp, Homo sapien
gccagccaagtatggaactcaatcc

SEQ ID NO: 4877000 - DNA, 25 bp, Homo sapien
gagatcaacctctgggccagccaag

SEQ ID NO: 4877001 - DNA, 25 bp, Homo sapien
ttcttcttggatatctgaatggtgg

SEQ ID NO: 4877002 - DNA, 25 bp, Homo sapien
ccatacaattgctgtatgactgaca

SEQ ID NO: 4877003 - DNA, 25 bp, Homo sapien
gactgacatagttcctcatatttga

SEQ ID NO: 4877004 - DNA, 25 bp, Homo sapien
gctgtatgactgacatagttcctca

SEQ ID NO: 4877005 - DNA, 25 bp, Homo sapien
tacaattgctgtatgactgacatag

SEQ ID NO: 4877006 - DNA, 25 bp, Homo sapien
agcaagaaagatacactaaaaaaga

SEQ ID NO: 4877007 - DNA, 25 bp, Homo sapien
tcaaccccggctagtgagatggtgg

SEQ ID NO: 4877008 - DNA, 25 bp, Homo sapien
gaaaatatgataggagagatgctca

SEQ ID NO: 4877009 - DNA, 25 bp, Homo sapien
ccagtggcagatgtgtggtctagat

SEQ ID NO: 4877010 - DNA, 25 bp, Homo sapien
gagatatcttgtgcatagagctgag

SEQ ID NO: 4877011 - DNA, 25 bp, Homo sapien
tcctgtatgggtagcaataaagaac

SEQ ID NO: 4877012 - DNA, 25 bp, Homo sapien
gaagacttactatccagcttgggat

SEQ ID NO: 4877013 - DNA, 25 bp, Homo sapien
gcttgggatctaacacaactattcc

SEQ ID NO: 4877014 - DNA, 25 bp, Homo sapien
gcccagatggcagtaccccaaaaat

SEQ ID NO: 4877015 - DNA, 25 bp, Homo sapien
gggatggaacagatgtgcctcactt

SEQ ID NO: 4877016 - DNA, 25 bp, Homo sapien
cagaatataaggaccaatagctaca

SEQ ID NO: 4877017 - DNA, 25 bp, Homo sapien
tgattaatggttcagtgttcttcca

SEQ ID NO: 4877018 - DNA, 25 bp, Homo sapien
tcccaaaaagatgggtagagaacaa

SEQ ID NO: 4877019 - DNA, 25 bp, Homo sapien
gtttattcagtacctacacctggga

SEQ ID NO: 4877020 - DNA, 25 bp, Homo sapien
gagagaactacccacaagagaagga

SEQ ID NO: 4877021 - DNA, 25 bp, Homo sapien
tggacagaaactggccaatcatgag

SEQ ID NO: 4877022 - DNA, 25 bp, Homo sapien
tgcctgctctcacttaaccagaagg

SEQ ID NO: 4877023 - DNA, 25 bp, Homo sapien
tggtgagcaagctgaaatcccttca

SEQ ID NO: 4877024 - DNA, 25 bp, Homo sapien
tattgctcttgggatgactatgtcc

SEQ ID NO: 4877025 - DNA, 25 bp, Homo sapien
gacttcacatggaaaataacgcgac

SEQ ID NO: 4877026 - DNA, 25 bp, Homo sapien
ttaccaggagtgttaccagctagct

SEQ ID NO: 4877027 - DNA, 25 bp, Homo sapien
tatgctctaatcaacctggtgctca

SEQ ID NO: 4877028 - DNA, 25 bp, Homo sapien
caagtcgggtaactgggtaagctag

SEQ ID NO: 4877029 - DNA, 25 bp, Homo sapien
gctagttgacgctaaaaccctggca

SEQ ID NO: 4877030 - DNA, 25 bp, Homo sapien
cccagggtacccaggctcataaact

SEQ ID NO: 4877031 - DNA, 25 bp, Homo sapien
tagaaactgaacacactctgacagg

SEQ ID NO: 4877032 - DNA, 25 bp, Homo sapien
gactctagcagaggcgcttatccag

SEQ ID NO: 4877033 - DNA, 25 bp, Homo sapien
tacacctgtggtagcaaacgggtct

SEQ ID NO: 4877034 - DNA, 25 bp, Homo sapien
aacacatgtgctgcggctgaggatc

SEQ ID NO: 4877035 - DNA, 25 bp, Homo sapien
taaaagtagcttgtctccacgaaat

SEQ ID NO: 4877036 - DNA, 25 bp, Homo sapien
gactaaaagtagcttgtctccacga

SEQ ID NO: 4877037 - DNA, 25 bp, Homo sapien
aagtagcttgtctccacgaaatgga

SEQ ID NO: 4877038 - DNA, 25 bp, Homo sapien
aaagtagcttgtctccacgaaatgg

SEQ ID NO: 4877039 - DNA, 25 bp, Homo sapien
tagactggagctgttgtgtatcggc

SEQ ID NO: 4877040 - DNA, 25 bp, Homo sapien
ttgtgtatcggccatcttgacaaac

SEQ ID NO: 4877041 - DNA, 25 bp, Homo sapien
ccagttcaagtttcctagccgcttt

SEQ ID NO: 4877042 - DNA, 25 bp, Homo sapien
tcaagtttcctagccgctttgttta

SEQ ID NO: 4877043 - DNA, 25 bp, Homo sapien
tctaccctaggaagtacatttacat

SEQ ID NO: 4877044 - DNA, 25 bp, Homo sapien
cattcaatcatatagtccctgtgca

SEQ ID NO: 4877045 - DNA, 25 bp, Homo sapien
cgttacaggtaacattagttcaatg

SEQ ID NO: 4877046 - DNA, 25 bp, Homo sapien
taattctgaggaagtaatccaggca

SEQ ID NO: 4877047 - DNA, 25 bp, Homo sapien
tgctgccttcatactgagccatccc

SEQ ID NO: 4877048 - DNA, 25 bp, Homo sapien
tgcaccagcgtgtccacagcacaat

SEQ ID NO: 4877049 - DNA, 25 bp, Homo sapien
tgagggtaaccagaacccagagaac

SEQ ID NO: 4877050 - DNA, 25 bp, Homo sapien
cctctattacttatgaaggaagcat

SEQ ID NO: 4877051 - DNA, 25 bp, Homo sapien
ggcataacgtgtacgtcttattgca

SEQ ID NO: 4877052 - DNA, 25 bp, Homo sapien
ccacagtggtggcataacgtgtacg

SEQ ID NO: 4877053 - DNA, 25 bp, Homo sapien
taacgtgtacgtcttattgcaatgc

SEQ ID NO: 4877054 - DNA, 25 bp, Homo sapien
tacgtcttattgcaatgctttccaa

SEQ ID NO: 4877055 - DNA, 25 bp, Homo sapien
agaacatttattgcatgactaatcg

SEQ ID NO: 4877056 - DNA, 25 bp, Homo sapien
aacatttattgcatgactaatcgtt

SEQ ID NO: 4877057 - DNA, 25 bp, Homo sapien
tttattgcatgactaatcgttgaca

SEQ ID NO: 4877058 - DNA, 25 bp, Homo sapien
catttattgcatgactaatcgttga

SEQ ID NO: 4877059 - DNA, 25 bp, Homo sapien
tctcagtgtgctccggtaatgacag

SEQ ID NO: 4877060 - DNA, 25 bp, Homo sapien
gattcatcccagcatttctcagtgt

SEQ ID NO: 4877061 - DNA, 25 bp, Homo sapien
gccacttggatgtgtgctgggtaca

SEQ ID NO: 4877062 - DNA, 25 bp, Homo sapien
gaagtatcaacaaccaagtctggag

SEQ ID NO: 4877063 - DNA, 25 bp, Homo sapien
tccacgtgaaaggagctattttgcc

SEQ ID NO: 4877064 - DNA, 25 bp, Homo sapien
ctccatgccttgtggtttagcaatt

SEQ ID NO: 4877065 - DNA, 25 bp, Homo sapien
tgctgtctgtatactactgcctcca

SEQ ID NO: 4877066 - DNA, 25 bp, Homo sapien
tcaaatccagaaagacagtccacgt

SEQ ID NO: 4877067 - DNA, 25 bp, Homo sapien
ttacaggccactaggaagcttcatc

SEQ ID NO: 4877068 - DNA, 25 bp, Homo sapien
tgcaaagtttacaggccactaggaa

SEQ ID NO: 4877069 - DNA, 25 bp, Homo sapien
gtataaaaccagttataacacaaga

SEQ ID NO: 4877070 - DNA, 25 bp, Homo sapien
catacatatgcaaagtttacaggcc

SEQ ID NO: 4877071 - DNA, 25 bp, Homo sapien
tttgggttgtagctgtatgatgtga

SEQ ID NO: 4877072 - DNA, 25 bp, Homo sapien
ggttgtagctgtatgatgtgaaaga

SEQ ID NO: 4877073 - DNA, 25 bp, Homo sapien
tgtagctgtatgatgtgaaagaatc

SEQ ID NO: 4877074 - DNA, 25 bp, Homo sapien
tagctgtatgatgtgaaagaatcag

SEQ ID NO: 4877075 - DNA, 25 bp, Homo sapien
gaaggcctgaggaaatctgaggacc

SEQ ID NO: 4877076 - DNA, 25 bp, Homo sapien
ctgaggaccctatcaactatttgtc

SEQ ID NO: 4877077 - DNA, 25 bp, Homo sapien
aatctgaggaccctatcaactattt

SEQ ID NO: 4877078 - DNA, 25 bp, Homo sapien
gggaaggcctgaggaaatctgagga

SEQ ID NO: 4877079 - DNA, 25 bp, Homo sapien
gacagattcctatgtttctctgatg

SEQ ID NO: 4877080 - DNA, 25 bp, Homo sapien
acagattcctatgtttctctgatgt

SEQ ID NO: 4877081 - DNA, 25 bp, Homo sapien
taggacagattcctatgtttctctg

SEQ ID NO: 4877082 - DNA, 25 bp, Homo sapien
ggacagattcctatgtttctctgat

SEQ ID NO: 4877083 - DNA, 25 bp, Homo sapien
ctgaacttctttcccacgcgagtct

SEQ ID NO: 4877084 - DNA, 25 bp, Homo sapien
cttttctattccaacgtctagaatc

SEQ ID NO: 4877085 - DNA, 25 bp, Homo sapien
tcccacgcgagtcttttctattcca

SEQ ID NO: 4877086 - DNA, 25 bp, Homo sapien
tctttcccacgcgagtcttttctat

SEQ ID NO: 4877087 - DNA, 25 bp, Homo sapien
tctgtaaattcatgttcataagctt

SEQ ID NO: 4877088 - DNA, 25 bp, Homo sapien
ttctgtaaattcatgttcataagct

SEQ ID NO: 4877089 - DNA, 25 bp, Homo sapien
agctttaataaaagtacacacagtg

SEQ ID NO: 4877090 - DNA, 25 bp, Homo sapien
tcataagctttaataaaagtacaca

SEQ ID NO: 4877091 - DNA, 25 bp, Homo sapien
ctgcaggcatcctgagcaaggctgg

SEQ ID NO: 4877092 - DNA, 25 bp, Homo sapien
agcaaggctggaagttgagcaactt

SEQ ID NO: 4877093 - DNA, 25 bp, Homo sapien
agcaacttgagagcttttcactcac

SEQ ID NO: 4877094 - DNA, 25 bp, Homo sapien
caaggcctctgcaggcatcctgagc

SEQ ID NO: 4877095 - DNA, 25 bp, Homo sapien
gtggaggaccagctgacatccggta

SEQ ID NO: 4877096 - DNA, 25 bp, Homo sapien
acatccggtagagctggggcctcga

SEQ ID NO: 4877097 - DNA, 25 bp, Homo sapien
agggcagcctgcgtggaggaccagc

SEQ ID NO: 4877098 - DNA, 25 bp, Homo sapien
ggaccagctgacatccggtagagct

SEQ ID NO: 4877099 - DNA, 25 bp, Homo sapien
gctctgagcttcgatccgtggatgg

SEQ ID NO: 4877100 - DNA, 25 bp, Homo sapien
gcagctctgagcttcgatccgtgga

SEQ ID NO: 4877101 - DNA, 25 bp, Homo sapien
ctgagcttcgatccgtggatgggcc

SEQ ID NO: 4877102 - DNA, 25 bp, Homo sapien
cagctctgagcttcgatccgtggat

SEQ ID NO: 4877103 - DNA, 25 bp, Homo sapien
tcgtcgcagagacgccagccacgta

SEQ ID NO: 4877104 - DNA, 25 bp, Homo sapien
gacgccagccacgtagaagagtgcc

SEQ ID NO: 4877105 - DNA, 25 bp, Homo sapien
ggcacctcgtcgcagagacgccagc

SEQ ID NO: 4877106 - DNA, 25 bp, Homo sapien
gcagagacgccagccacgtagaaga

SEQ ID NO: 4877107 - DNA, 25 bp, Homo sapien
gggatgtgagcagggcgtctacact

SEQ ID NO: 4877108 - DNA, 25 bp, Homo sapien
tgtgagcagggcgtctacactgcca

SEQ ID NO: 4877109 - DNA, 25 bp, Homo sapien
gagcagggcgtctacactgccagcc

SEQ ID NO: 4877110 - DNA, 25 bp, Homo sapien
tcccacgcggctgcggggatgtgag

SEQ ID NO: 4877111 - DNA, 25 bp, Homo sapien
cagcgccgggcatggaaaactcgcc

SEQ ID NO: 4877112 - DNA, 25 bp, Homo sapien
agcgccgggcatggaaaactcgcca

SEQ ID NO: 4877113 - DNA, 25 bp, Homo sapien
ttcaccaccacctgccgaaggaagc

SEQ ID NO: 4877114 - DNA, 25 bp, Homo sapien
ccaccacctgccgaaggaagccctc

SEQ ID NO: 4877115 - DNA, 25 bp, Homo sapien
acctgccgaaggaagccctcagaca

SEQ ID NO: 4877116 - DNA, 25 bp, Homo sapien
gaagccctcagacagagaacacaca

SEQ ID NO: 4877117 - DNA, 25 bp, Homo sapien
gctgacaagtcatcacaccaagtgt

SEQ ID NO: 4877118 - DNA, 25 bp, Homo sapien
caagtcatcacaccaagtgtgcgca

SEQ ID NO: 4877119 - DNA, 25 bp, Homo sapien
acacagctgacaagtcatcacacca

SEQ ID NO: 4877120 - DNA, 25 bp, Homo sapien
tgacaagtcatcacaccaagtgtgc

SEQ ID NO: 4877121 - DNA, 25 bp, Homo sapien
agggtacaggtgtgccagagagaac

SEQ ID NO: 4877122 - DNA, 25 bp, Homo sapien
gtacaggtgtgccagagagaactgc

SEQ ID NO: 4877123 - DNA, 25 bp, Homo sapien
aatgcaagggtacaggtgtgccaga

SEQ ID NO: 4877124 - DNA, 25 bp, Homo sapien
acaggtgtgccagagagaactgccc

SEQ ID NO: 4877125 - DNA, 25 bp, Homo sapien
tctggggcccggtctggcctgcatt

SEQ ID NO: 4877126 - DNA, 25 bp, Homo sapien
tgctaatatcaaaaccacacttcag

SEQ ID NO: 4877127 - DNA, 25 bp, Homo sapien
caagatgaagcggaaaagtgaaagt

SEQ ID NO: 4877128 - DNA, 25 bp, Homo sapien
tctctcaagatgaagcggaaaagtg

SEQ ID NO: 4877129 - DNA, 25 bp, Homo sapien
ctggaatgagaacatgactattgct

SEQ ID NO: 4877130 - DNA, 25 bp, Homo sapien
aatgagaacatgactattgctcaac

SEQ ID NO: 4877131 - DNA, 25 bp, Homo sapien
ggaatgagaacatgactattgctca

SEQ ID NO: 4877132 - DNA, 25 bp, Homo sapien
tgagaacatgactattgctcaacag

SEQ ID NO: 4877133 - DNA, 25 bp, Homo sapien
tattagcaccaactggctctttaca

SEQ ID NO: 4877134 - DNA, 25 bp, Homo sapien
attagcaccaactggctctttacag

SEQ ID NO: 4877135 - DNA, 25 bp, Homo sapien
cttttctgagttattagcaccaact

SEQ ID NO: 4877136 - DNA, 25 bp, Homo sapien
gagacccccggaaatgatgggagca

SEQ ID NO: 4877137 - DNA, 25 bp, Homo sapien
caggaggtaaggctcgaagtgctgc

SEQ ID NO: 4877138 - DNA, 25 bp, Homo sapien
gagacccctggaaatgacgggagac

SEQ ID NO: 4877139 - DNA, 25 bp, Homo sapien
gtaaggctcgaagtgctgcaactat

SEQ ID NO: 4877140 - DNA, 25 bp, Homo sapien
catgtcttgactttcgcgtttagcg

SEQ ID NO: 4877141 - DNA, 25 bp, Homo sapien
ggtttccctcatatagcatgtcttg

SEQ ID NO: 4877142 - DNA, 25 bp, Homo sapien
agctctgggaccgtcaggagccagc

SEQ ID NO: 4877143 - DNA, 25 bp, Homo sapien
tcgcgtttagcgtcctgcagctctg

SEQ ID NO: 4877144 - DNA, 25 bp, Homo sapien
tggatcttcctccacatgaaagaaa

SEQ ID NO: 4877145 - DNA, 25 bp, Homo sapien
ttaatggatcttcctccacatgaaa

SEQ ID NO: 4877146 - DNA, 25 bp, Homo sapien
aatggatcttcctccacatgaaaga

SEQ ID NO: 4877147 - DNA, 25 bp, Homo sapien
gatcttcctccacatgaaagaaaac

SEQ ID NO: 4877148 - DNA, 25 bp, Homo sapien
gagagttgaaccgaaattccacagg

SEQ ID NO: 4877149 - DNA, 25 bp, Homo sapien
ttccacaggtatagagaagtactat

SEQ ID NO: 4877150 - DNA, 25 bp, Homo sapien
gtcagtgtcatatccgataggtctt

SEQ ID NO: 4877151 - DNA, 25 bp, Homo sapien
cgataggtcttttgagagttgaacc

SEQ ID NO: 4877152 - DNA, 25 bp, Homo sapien
tagaaacggagtcaccagacaagtg

SEQ ID NO: 4877153 - DNA, 25 bp, Homo sapien
cttagaaacggagtcaccagacaag

SEQ ID NO: 4877154 - DNA, 25 bp, Homo sapien
aaacggagtcaccagacaagtgact

SEQ ID NO: 4877155 - DNA, 25 bp, Homo sapien
gaaacggagtcaccagacaagtgac

SEQ ID NO: 4877156 - DNA, 25 bp, Homo sapien
cgatcccaaagacctaacaggctgg

SEQ ID NO: 4877157 - DNA, 25 bp, Homo sapien
aaatgaaaagcttccgcacgatgtg

SEQ ID NO: 4877158 - DNA, 25 bp, Homo sapien
ataccactgcaccacctctacacga

SEQ ID NO: 4877159 - DNA, 25 bp, Homo sapien
taacaggctggcaaagcgcacagaa

SEQ ID NO: 4877160 - DNA, 25 bp, Homo sapien
attgtggctcctctgaactattctc

SEQ ID NO: 4877161 - DNA, 25 bp, Homo sapien
tcatttggcggtctttaggtattgc

SEQ ID NO: 4877162 - DNA, 25 bp, Homo sapien
tttaggtattgctgccttgtcattg

SEQ ID NO: 4877163 - DNA, 25 bp, Homo sapien
tggctcctctgaactattctctctg

SEQ ID NO: 4877164 - DNA, 25 bp, Homo sapien
ccttccctgtccatagactgataga

SEQ ID NO: 4877165 - DNA, 25 bp, Homo sapien
cttccctgtccatagactgatagag

SEQ ID NO: 4877166 - DNA, 25 bp, Homo sapien
tttgatatgattctcttcagtttct

SEQ ID NO: 4877167 - DNA, 25 bp, Homo sapien
atttgatatgattctcttcagtttc

SEQ ID NO: 4877168 - DNA, 25 bp, Homo sapien
agtatacgaactcccttgctcagaa

SEQ ID NO: 4877169 - DNA, 25 bp, Homo sapien
ggctccattaccctctttgggctta

SEQ ID NO: 4877170 - DNA, 25 bp, Homo sapien
taatagtcaaactcttcctttagtc

SEQ ID NO: 4877171 - DNA, 25 bp, Homo sapien
cttctgccctctcagtatacgaact

SEQ ID NO: 4877172 - DNA, 25 bp, Homo sapien
gctcctctggtcaactcatcatgtc

SEQ ID NO: 4877173 - DNA, 25 bp, Homo sapien
ctgctcctctggtcaactcatcatg

SEQ ID NO: 4877174 - DNA, 25 bp, Homo sapien
tggctgctcctctggtcaactcatc

SEQ ID NO: 4877175 - DNA, 25 bp, Homo sapien
tcctctggtcaactcatcatgtcct

SEQ ID NO: 4877176 - DNA, 25 bp, Homo sapien
ccaggaaatgcaatgaaggatcagt

SEQ ID NO: 4877177 - DNA, 25 bp, Homo sapien
gaaggctcagtatgacagctgcatc

SEQ ID NO: 4877178 - DNA, 25 bp, Homo sapien
ttagaacagattgttcatgaaggct

SEQ ID NO: 4877179 - DNA, 25 bp, Homo sapien
tgtattctactgctttgagggaccc

SEQ ID NO: 4877180 - DNA, 25 bp, Homo sapien
cacagtaattcaagccattcaatcc

SEQ ID NO: 4877181 - DNA, 25 bp, Homo sapien
caattactttccacagtaattcaag

SEQ ID NO: 4877182 - DNA, 25 bp, Homo sapien
taattcaagccattcaatccaggat

SEQ ID NO: 4877183 - DNA, 25 bp, Homo sapien
cttggtcaattactttccacagtaa

SEQ ID NO: 4877184 - DNA, 25 bp, Homo sapien
gtgggactgtgactgttcccgtact

SEQ ID NO: 4877185 - DNA, 25 bp, Homo sapien
gactgttcccgtactgacaaatgag

SEQ ID NO: 4877186 - DNA, 25 bp, Homo sapien
cccgtactgacaaatgaggataaca

SEQ ID NO: 4877187 - DNA, 25 bp, Homo sapien
cctaaaaaggaagagcaaggtagca

SEQ ID NO: 4877188 - DNA, 25 bp, Homo sapien
tcagatcactaactttgttgcctcc

SEQ ID NO: 4877189 - DNA, 25 bp, Homo sapien
cagatcactaactttgttgcctcca

SEQ ID NO: 4877190 - DNA, 25 bp, Homo sapien
agcctaatgggcaatgcattggctg

SEQ ID NO: 4877191 - DNA, 25 bp, Homo sapien
gccacacagtatctattaatttaac

SEQ ID NO: 4877192 - DNA, 25 bp, Homo sapien
gaagataactctcctcatgagcaag

SEQ ID NO: 4877193 - DNA, 25 bp, Homo sapien
gataactctcctcatgagcaagaga

SEQ ID NO: 4877194 - DNA, 25 bp, Homo sapien
gacagcatcagcctgagggagtttg

SEQ ID NO: 4877195 - DNA, 25 bp, Homo sapien
gagacagcatcagcctgagggagtt

SEQ ID NO: 4877196 - DNA, 25 bp, Homo sapien
cagcatcagcctgagggagtttgcc

SEQ ID NO: 4877197 - DNA, 25 bp, Homo sapien
ctgagacagcatcagcctgagggag

SEQ ID NO: 4877198 - DNA, 25 bp, Homo sapien
cctagcttactgttcggagagtctt

SEQ ID NO: 4877199 - DNA, 25 bp, Homo sapien
cttggctgtgtttcctatgatttgc

SEQ ID NO: 4877200 - DNA, 25 bp, Homo sapien
tataaaccaggttgaaggcttgaga

SEQ ID NO: 4877201 - DNA, 25 bp, Homo sapien
ttcaccctgggaaataatattgtag

SEQ ID NO: 4877202 - DNA, 25 bp, Homo sapien
gcacagtggtgagctaaacttccac

SEQ ID NO: 4877203 - DNA, 25 bp, Homo sapien
agcaggttcctgtaccccatctctg

SEQ ID NO: 4877204 - DNA, 25 bp, Homo sapien
gtgttaggactagtaagcaggttcc

SEQ ID NO: 4877205 - DNA, 25 bp, Homo sapien
tacttagcatcaactagactgacgg

SEQ ID NO: 4877206 - DNA, 25 bp, Homo sapien
ctctccctgggcacccgatttgtcc

SEQ ID NO: 4877207 - DNA, 25 bp, Homo sapien
ccgatttgtcccttttagtggcttg

SEQ ID NO: 4877208 - DNA, 25 bp, Homo sapien
ctccctgggcacccgatttgtccct

SEQ ID NO: 4877209 - DNA, 25 bp, Homo sapien
atttgtcccttttagtggcttgttg

SEQ ID NO: 4877210 - DNA, 25 bp, Homo sapien
tacttggctgcaggctatggtgaca

SEQ ID NO: 4877211 - DNA, 25 bp, Homo sapien
tggaagcgcttctcactggcttgac

SEQ ID NO: 4877212 - DNA, 25 bp, Homo sapien
tgacaccagtgccttccttggaggg

SEQ ID NO: 4877213 - DNA, 25 bp, Homo sapien
tgggaactgaaaccaaagcggacac

SEQ ID NO: 4877214 - DNA, 25 bp, Homo sapien
tgtctccactactgagatggctttc

SEQ ID NO: 4877215 - DNA, 25 bp, Homo sapien
tttatgtctccactactgagatggc

SEQ ID NO: 4877216 - DNA, 25 bp, Homo sapien
gtctccactactgagatggctttct

SEQ ID NO: 4877217 - DNA, 25 bp, Homo sapien
tatgtctccactactgagatggctt

SEQ ID NO: 4877218 - DNA, 25 bp, Homo sapien
tattcgtagacaaagatccaggtgt

SEQ ID NO: 4877219 - DNA, 25 bp, Homo sapien
caatgggaaacaatgctgagcatct

SEQ ID NO: 4877220 - DNA, 25 bp, Homo sapien
tcaccatcagggactacgtggaacg

SEQ ID NO: 4877221 - DNA, 25 bp, Homo sapien
cgtggaacgtcatggccaagggact

SEQ ID NO: 4877222 - DNA, 25 bp, Homo sapien
gctgtggcccttgcctcttatctgg

SEQ ID NO: 4877223 - DNA, 25 bp, Homo sapien
ctagctgtggcccttgcctcttatc

SEQ ID NO: 4877224 - DNA, 25 bp, Homo sapien
cacacaagtttttggtctcctacag

SEQ ID NO: 4877225 - DNA, 25 bp, Homo sapien
cctttgggcattctgtgtcctgcta

SEQ ID NO: 4877226 - DNA, 25 bp, Homo sapien
ctgtaggcacaaagaaccgaagcca

SEQ ID NO: 4877227 - DNA, 25 bp, Homo sapien
aagaaccgaagccattgggcgccat

SEQ ID NO: 4877228 - DNA, 25 bp, Homo sapien
acaaagaaccgaagccattgggcgc

SEQ ID NO: 4877229 - DNA, 25 bp, Homo sapien
taggcacaaagaaccgaagccattg

SEQ ID NO: 4877230 - DNA, 25 bp, Homo sapien
gagttgtaacatgccgccgtttgct

SEQ ID NO: 4877231 - DNA, 25 bp, Homo sapien
ttgtaacatgccgccgtttgctcat

SEQ ID NO: 4877232 - DNA, 25 bp, Homo sapien
agagttgtaacatgccgccgtttgc

SEQ ID NO: 4877233 - DNA, 25 bp, Homo sapien
gttgtaacatgccgccgtttgctca

SEQ ID NO: 4877234 - DNA, 25 bp, Homo sapien
atgctcagggtctttggtatggcag

SEQ ID NO: 4877235 - DNA, 25 bp, Homo sapien
ccactgaaccttgatccagccatag

SEQ ID NO: 4877236 - DNA, 25 bp, Homo sapien
tgatccagccatagagcctgacacg

SEQ ID NO: 4877237 - DNA, 25 bp, Homo sapien
ctttggtatggcagtctgaagggca

SEQ ID NO: 4877238 - DNA, 25 bp, Homo sapien
tcagggatatccagggctgcctact

SEQ ID NO: 4877239 - DNA, 25 bp, Homo sapien
cctgacacacggtaggtaaagagag

SEQ ID NO: 4877240 - DNA, 25 bp, Homo sapien
taatgaagctgctaatcccagagcc

SEQ ID NO: 4877241 - DNA, 25 bp, Homo sapien
tatgaggattgaggcgatgcacagc

SEQ ID NO: 4877242 - DNA, 25 bp, Homo sapien
ataaaggaagaaagacgaagtagat

SEQ ID NO: 4877243 - DNA, 25 bp, Homo sapien
gaaagacgaagtagatggggtaaca

SEQ ID NO: 4877244 - DNA, 25 bp, Homo sapien
aaaggaagaaagacgaagtagatgg

SEQ ID NO: 4877245 - DNA, 25 bp, Homo sapien
gataaaggaagaaagacgaagtaga

SEQ ID NO: 4877246 - DNA, 25 bp, Homo sapien
ttggcttggacgtcagtgttctagc

SEQ ID NO: 4877247 - DNA, 25 bp, Homo sapien
ttagaccaatagttccgtgaactga

SEQ ID NO: 4877248 - DNA, 25 bp, Homo sapien
ttctttggcttggacgtcagtgttc

SEQ ID NO: 4877249 - DNA, 25 bp, Homo sapien
ttccgtgaactgaaatggtgatttc

SEQ ID NO: 4877250 - DNA, 25 bp, Homo sapien
ggcagtagatgcagtgcctttgact

SEQ ID NO: 4877251 - DNA, 25 bp, Homo sapien
tagatgcagtgcctttgactggcat

SEQ ID NO: 4877252 - DNA, 25 bp, Homo sapien
tagggcagtagatgcagtgcctttg

SEQ ID NO: 4877253 - DNA, 25 bp, Homo sapien
agtagatgcagtgcctttgactggc

SEQ ID NO: 4877254 - DNA, 25 bp, Homo sapien
ccctcctgtggacttctagaatcaa

SEQ ID NO: 4877255 - DNA, 25 bp, Homo sapien
gtggacttctagaatcaaggtaaaa

SEQ ID NO: 4877256 - DNA, 25 bp, Homo sapien
tgaccctcctgtggacttctagaat

SEQ ID NO: 4877257 - DNA, 25 bp, Homo sapien
tcctgtggacttctagaatcaaggt

SEQ ID NO: 4877258 - DNA, 25 bp, Homo sapien
ttgtgctcagaacttgcatccctac

SEQ ID NO: 4877259 - DNA, 25 bp, Homo sapien
tttgtgctcagaacttgcatcccta

SEQ ID NO: 4877260 - DNA, 25 bp, Homo sapien
ttctgtgggatgctaggctggggac

SEQ ID NO: 4877261 - DNA, 25 bp, Homo sapien
ttgctcttctgtgggatgctaggct

SEQ ID NO: 4877262 - DNA, 25 bp, Homo sapien
tctgtgggatgctaggctggggacg

SEQ ID NO: 4877263 - DNA, 25 bp, Homo sapien
ctcttctgtgggatgctaggctggg

SEQ ID NO: 4877264 - DNA, 25 bp, Homo sapien
gtgaactgagggaccgccatcacca

SEQ ID NO: 4877265 - DNA, 25 bp, Homo sapien
gagagtgaactgagggaccgccatc

SEQ ID NO: 4877266 - DNA, 25 bp, Homo sapien
gtcagcacccgcctgtgagagtgaa

SEQ ID NO: 4877267 - DNA, 25 bp, Homo sapien
gatgaggtgcgaggagtctcccatc

SEQ ID NO: 4877268 - DNA, 25 bp, Homo sapien
gatttccagtagcaatagggcaccc

SEQ ID NO: 4877269 - DNA, 25 bp, Homo sapien
taacagtaagggctagatttccagt

SEQ ID NO: 4877270 - DNA, 25 bp, Homo sapien
caaaatgatcctgcctctaacagta

SEQ ID NO: 4877271 - DNA, 25 bp, Homo sapien
cggtgggttacatagctcaggaaaa

SEQ ID NO: 4877272 - DNA, 25 bp, Homo sapien
tcagcactgtttcagtcgggaggca

SEQ ID NO: 4877273 - DNA, 25 bp, Homo sapien
ttgacttggctgactctcgctgctc

SEQ ID NO: 4877274 - DNA, 25 bp, Homo sapien
cagtcgggaggcaggatggttttta

SEQ ID NO: 4877275 - DNA, 25 bp, Homo sapien
catttgacttggctgactctcgctg

SEQ ID NO: 4877276 - DNA, 25 bp, Homo sapien
tttctgaccgtccatttttaagatc

SEQ ID NO: 4877277 - DNA, 25 bp, Homo sapien
tgagggttctttttctgaccgtcca

SEQ ID NO: 4877278 - DNA, 25 bp, Homo sapien
gactttgcaggttagtacttcccca

SEQ ID NO: 4877279 - DNA, 25 bp, Homo sapien
taggtggccggtgttctggaattca

SEQ ID NO: 4877280 - DNA, 25 bp, Homo sapien
tgaacgctggcgaattctgccccag

SEQ ID NO: 4877281 - DNA, 25 bp, Homo sapien
ttccccattgacaaagctgcatgta

SEQ ID NO: 4877282 - DNA, 25 bp, Homo sapien
gcatttaaagccatggaggaactag

SEQ ID NO: 4877283 - DNA, 25 bp, Homo sapien
gaccattagctgttgccgtcacatg

SEQ ID NO: 4877284 - DNA, 25 bp, Homo sapien
tacttagcgtgttatgaccttcctc

SEQ ID NO: 4877285 - DNA, 25 bp, Homo sapien
gcacaagggattgagtttacactaa

SEQ ID NO: 4877286 - DNA, 25 bp, Homo sapien
tcatcaaagcctggcaagtatatgc

SEQ ID NO: 4877287 - DNA, 25 bp, Homo sapien
ggaaataaggcatagtgagtcatca

SEQ ID NO: 4877288 - DNA, 25 bp, Homo sapien
tcttattctcgtgttaggagggcac

SEQ ID NO: 4877289 - DNA, 25 bp, Homo sapien
taccaggtactgcttatgtaaatcg

SEQ ID NO: 4877290 - DNA, 25 bp, Homo sapien
tggtcaccccaggatcaggatatct

SEQ ID NO: 4877291 - DNA, 25 bp, Homo sapien
taaagaaaggtggagtgccgatgca

SEQ ID NO: 4877292 - DNA, 25 bp, Homo sapien
tcagagatcaatcctggaggaggcc

SEQ ID NO: 4877293 - DNA, 25 bp, Homo sapien
gacattgtgccatagcatcctagta

SEQ ID NO: 4877294 - DNA, 25 bp, Homo sapien
tgtacccatgagttcagcatttctg

SEQ ID NO: 4877295 - DNA, 25 bp, Homo sapien
aattttaataacaggttcaccagct

SEQ ID NO: 4877296 - DNA, 25 bp, Homo sapien
aaggtttcagggttagcactatagt

SEQ ID NO: 4877297 - DNA, 25 bp, Homo sapien
tacctctaatttggatggaaagcac

SEQ ID NO: 4877298 - DNA, 25 bp, Homo sapien
tacactggttcagacggcattgaag

SEQ ID NO: 4877299 - DNA, 25 bp, Homo sapien
tcacagctgaaatggttagcctgag

SEQ ID NO: 4877300 - DNA, 25 bp, Homo sapien
gctagcatcagaatgaaccaccagg

SEQ ID NO: 4877301 - DNA, 25 bp, Homo sapien
tatgcatggttaaggccatcccgaa

SEQ ID NO: 4877302 - DNA, 25 bp, Homo sapien
gaactctttaacctgcatacctggg

SEQ ID NO: 4877303 - DNA, 25 bp, Homo sapien
gaagcagtctcacaacagtggtttc

SEQ ID NO: 4877304 - DNA, 25 bp, Homo sapien
gcttcatatggcagaaagacgccag

SEQ ID NO: 4877305 - DNA, 25 bp, Homo sapien
gacgccaggagtcatcataagtatt

SEQ ID NO: 4877306 - DNA, 25 bp, Homo sapien
taacgtgcacaaggtcagacagaca

SEQ ID NO: 4877307 - DNA, 25 bp, Homo sapien
gagagcaacgtcctccacgagaagt

SEQ ID NO: 4877308 - DNA, 25 bp, Homo sapien
tgcacgtagtctgactcagggcccg

SEQ ID NO: 4877309 - DNA, 25 bp, Homo sapien
gatgttctacctgctcaagaccgcc

SEQ ID NO: 4877310 - DNA, 25 bp, Homo sapien
ggccggccgcttcagcctcttcggc

SEQ ID NO: 4877311 - DNA, 25 bp, Homo sapien
cttggccggccgcttcagcctcttc

SEQ ID NO: 4877312 - DNA, 25 bp, Homo sapien
tcgggcttcttggccggccgcttca

SEQ ID NO: 4877313 - DNA, 25 bp, Homo sapien
gggcttcttggccggccgcttcagc

SEQ ID NO: 4877314 - DNA, 25 bp, Homo sapien
cgcggagaagcgacttaaaggtaca

SEQ ID NO: 4877315 - DNA, 25 bp, Homo sapien
ccccgctggctaaaaaagcttgcaa

SEQ ID NO: 4877316 - DNA, 25 bp, Homo sapien
catttagggcacgacaaagatgtca

SEQ ID NO: 4877317 - DNA, 25 bp, Homo sapien
tacagccagccatagtcgtacaatg

SEQ ID NO: 4877318 - DNA, 25 bp, Homo sapien
acggccctggcagcaaacatctctc

SEQ ID NO: 4877319 - DNA, 25 bp, Homo sapien
tgggctaattctgtgcctgcacggc

SEQ ID NO: 4877320 - DNA, 25 bp, Homo sapien
gactttccctcatatggccctgttc

SEQ ID NO: 4877321 - DNA, 25 bp, Homo sapien
tggcagcaaacatctctctaaattt

SEQ ID NO: 4877322 - DNA, 25 bp, Homo sapien
aatgcatccaatataaagaaaaagt

SEQ ID NO: 4877323 - DNA, 25 bp, Homo sapien
ggacatcaatgcatccaatataaag

SEQ ID NO: 4877324 - DNA, 25 bp, Homo sapien
ttatgctgaggacatcaatgcatcc

SEQ ID NO: 4877325 - DNA, 25 bp, Homo sapien
gtctttatgctgaggacatcaatgc

SEQ ID NO: 4877326 - DNA, 25 bp, Homo sapien
ctaacggtggtaaggaggacatcat

SEQ ID NO: 4877327 - DNA, 25 bp, Homo sapien
tttgcagagataggtccgagagcct

SEQ ID NO: 4877328 - DNA, 25 bp, Homo sapien
aacttctaggagaatagggatcacg

SEQ ID NO: 4877329 - DNA, 25 bp, Homo sapien
tcattgttacatggctgaacagcaa

SEQ ID NO: 4877330 - DNA, 25 bp, Homo sapien
cttgggccaaatcagccacatccat

SEQ ID NO: 4877331 - DNA, 25 bp, Homo sapien
ggtagaagagccaagttctgtgcct

SEQ ID NO: 4877332 - DNA, 25 bp, Homo sapien
cttcagatgattctggtagaagagc

SEQ ID NO: 4877333 - DNA, 25 bp, Homo sapien
tctgtgcctgtcttccggaggagcc

SEQ ID NO: 4877334 - DNA, 25 bp, Homo sapien
ccctggagcagagcactcagctctc

SEQ ID NO: 4877335 - DNA, 25 bp, Homo sapien
gcatgcagttgggataaaaatgtag

SEQ ID NO: 4877336 - DNA, 25 bp, Homo sapien
gaagaagaggctcccttccctgact

SEQ ID NO: 4877337 - DNA, 25 bp, Homo sapien
tgtagccacttcatcctcaaagggc

SEQ ID NO: 4877338 - DNA, 25 bp, Homo sapien
gataaaaatgtagccacttcatcct

SEQ ID NO: 4877339 - DNA, 25 bp, Homo sapien
gagattagattagttgcccaaaagc

SEQ ID NO: 4877340 - DNA, 25 bp, Homo sapien
ctgttttatatgagagattagatta

SEQ ID NO: 4877341 - DNA, 25 bp, Homo sapien
tatgagagattagattagttgccca

SEQ ID NO: 4877342 - DNA, 25 bp, Homo sapien
tatatgagagattagattagttgcc

SEQ ID NO: 4877343 - DNA, 25 bp, Homo sapien
gaaggatatttggtgtagcttccaa

SEQ ID NO: 4877344 - DNA, 25 bp, Homo sapien
atcttcacaatcattcgaaggatat

SEQ ID NO: 4877345 - DNA, 25 bp, Homo sapien
cattcgaaggatatttggtgtagct

SEQ ID NO: 4877346 - DNA, 25 bp, Homo sapien
ggatatttggtgtagcttccaataa

SEQ ID NO: 4877347 - DNA, 25 bp, Homo sapien
cttgcatacttgtagggagcatagg

SEQ ID NO: 4877348 - DNA, 25 bp, Homo sapien
catacttgtagggagcatagggcat

SEQ ID NO: 4877349 - DNA, 25 bp, Homo sapien
tgcatacttgtagggagcatagggc

SEQ ID NO: 4877350 - DNA, 25 bp, Homo sapien
ttgcatacttgtagggagcataggg

SEQ ID NO: 4877351 - DNA, 25 bp, Homo sapien
tggacgagagcacccgctgaggata

SEQ ID NO: 4877352 - DNA, 25 bp, Homo sapien
gagagcacccgctgaggatacagca

SEQ ID NO: 4877353 - DNA, 25 bp, Homo sapien
catcaagttctggacgagagcaccc

SEQ ID NO: 4877354 - DNA, 25 bp, Homo sapien
aagttctggacgagagcacccgctg

SEQ ID NO: 4877355 - DNA, 25 bp, Homo sapien
caggagagtaatagtacaggtctta

SEQ ID NO: 4877356 - DNA, 25 bp, Homo sapien
accacaggagagtaatagtacaggt

SEQ ID NO: 4877357 - DNA, 25 bp, Homo sapien
cacaggagagtaatagtacaggtct

SEQ ID NO: 4877358 - DNA, 25 bp, Homo sapien
ggagagtaatagtacaggtcttatt

SEQ ID NO: 4877359 - DNA, 25 bp, Homo sapien
ggcaggtgcactgggttgctgaggg

SEQ ID NO: 4877360 - DNA, 25 bp, Homo sapien
ccgcagcaaggtggagcccgtggta

SEQ ID NO: 4877361 - DNA, 25 bp, Homo sapien
tggtcgagtggcaggtgcactgggt

SEQ ID NO: 4877362 - DNA, 25 bp, Homo sapien
ctgaggggccgcagcaaggtggagc

SEQ ID NO: 4877363 - DNA, 25 bp, Homo sapien
gggtcttaccttcattctggtcagc

SEQ ID NO: 4877364 - DNA, 25 bp, Homo sapien
gtctctgctgtcacgtatttcaaag

SEQ ID NO: 4877365 - DNA, 25 bp, Homo sapien
gatttccctgtttgcccgaaagtca

SEQ ID NO: 4877366 - DNA, 25 bp, Homo sapien
ctgtttttgctgtacctcagagatt

SEQ ID NO: 4877367 - DNA, 25 bp, Homo sapien
ctccgacaggcgcactccaacctct

SEQ ID NO: 4877368 - DNA, 25 bp, Homo sapien
tccgacaggcgcactccaacctctc

SEQ ID NO: 4877369 - DNA, 25 bp, Homo sapien
ccgacaggcgcactccaacctctct

SEQ ID NO: 4877370 - DNA, 25 bp, Homo sapien
cagagagcaaggtgggctggccccg

SEQ ID NO: 4877371 - DNA, 25 bp, Homo sapien
gagagcaaggtgggctggccccgac

SEQ ID NO: 4877372 - DNA, 25 bp, Homo sapien
agagagcaaggtgggctggccccga

SEQ ID NO: 4877373 - DNA, 25 bp, Homo sapien
tttcagaccggtcctttactcttga

SEQ ID NO: 4877374 - DNA, 25 bp, Homo sapien
ccggtcctttactcttgagcaggag

SEQ ID NO: 4877375 - DNA, 25 bp, Homo sapien
agcttccacacgttcgttcccctgg

SEQ ID NO: 4877376 - DNA, 25 bp, Homo sapien
tcccctggacgcagctttgtggatc

SEQ ID NO: 4877377 - DNA, 25 bp, Homo sapien
tagagtacagtatacacaacaggac

SEQ ID NO: 4877378 - DNA, 25 bp, Homo sapien
aagtcgctaaggaaatgggctctaa

SEQ ID NO: 4877379 - DNA, 25 bp, Homo sapien
caatagcagtcctagtcatatggct

SEQ ID NO: 4877380 - DNA, 25 bp, Homo sapien
taatgataatcctaagaccccaatg

SEQ ID NO: 4877381 - DNA, 25 bp, Homo sapien
gtggatatttcggtgagataaattc

SEQ ID NO: 4877382 - DNA, 25 bp, Homo sapien
aaaaattggccactatgtaccttca

SEQ ID NO: 4877383 - DNA, 25 bp, Homo sapien
aaaattggccactatgtaccttcat

SEQ ID NO: 4877384 - DNA, 25 bp, Homo sapien
gatatttcggtgagataaattcatt

SEQ ID NO: 4877385 - DNA, 25 bp, Homo sapien
cagacatctacaacatttggatcag

SEQ ID NO: 4877386 - DNA, 25 bp, Homo sapien
cttactatagacagcgtcgtggaga

SEQ ID NO: 4877387 - DNA, 25 bp, Homo sapien
tcaatgtctgggttgtgtgaaagca

SEQ ID NO: 4877388 - DNA, 25 bp, Homo sapien
gtgttgcaacagacatctacaacat

SEQ ID NO: 4877389 - DNA, 25 bp, Homo sapien
cggagaccatgatacctatgagtgt

SEQ ID NO: 4877390 - DNA, 25 bp, Homo sapien
ctgctacggcgtgaacggagaccat

SEQ ID NO: 4877391 - DNA, 25 bp, Homo sapien
gccctttacaggaagagctagccaa

SEQ ID NO: 4877392 - DNA, 25 bp, Homo sapien
tctgactgctttcacgctgctacgg

SEQ ID NO: 4877393 - DNA, 25 bp, Homo sapien
aacatggccctctcgagtgcgaggg

SEQ ID NO: 4877394 - DNA, 25 bp, Homo sapien
tccagatgctttcagaccttctagg

SEQ ID NO: 4877395 - DNA, 25 bp, Homo sapien
agggagaaatttccagctcccttgc

SEQ ID NO: 4877396 - DNA, 25 bp, Homo sapien
ggcagctcttttggcgagcgcaaca

SEQ ID NO: 4877397 - DNA, 25 bp, Homo sapien
ggcgctccttctgctgtccgtccaa

SEQ ID NO: 4877398 - DNA, 25 bp, Homo sapien
tgggccttctgccacacgttcacat

SEQ ID NO: 4877399 - DNA, 25 bp, Homo sapien
gtccaacgttctcaggtcttccttc

SEQ ID NO: 4877400 - DNA, 25 bp, Homo sapien
ttctgctgtccgtccaacgttctca

SEQ ID NO: 4877401 - DNA, 25 bp, Homo sapien
aatcctctcagatgctaccaccacc

SEQ ID NO: 4877402 - DNA, 25 bp, Homo sapien
gcaatcctctcagatgctaccacca

SEQ ID NO: 4877403 - DNA, 25 bp, Homo sapien
cccgcaatcctctcagatgctacca

SEQ ID NO: 4877404 - DNA, 25 bp, Homo sapien
atcctctcagatgctaccaccaccc

SEQ ID NO: 4877405 - DNA, 25 bp, Homo sapien
catgggttcccttgccccaccatac

SEQ ID NO: 4877406 - DNA, 25 bp, Homo sapien
ccaactgccgatccctcagtcttct

SEQ ID NO: 4877407 - DNA, 25 bp, Homo sapien
ctagggtgtccaactgccgatccct

SEQ ID NO: 4877408 - DNA, 25 bp, Homo sapien
gggtgtccaactgccgatccctcag

SEQ ID NO: 4877409 - DNA, 25 bp, Homo sapien
aagtgctcagtattatccggcgcac

SEQ ID NO: 4877410 - DNA, 25 bp, Homo sapien
tgccaaacagccaactgcgtccatt

SEQ ID NO: 4877411 - DNA, 25 bp, Homo sapien
tgtctctcgggcaggccttgcaatc

SEQ ID NO: 4877412 - DNA, 25 bp, Homo sapien
ttatccggcgcaccgtgggcccaat

SEQ ID NO: 4877413 - DNA, 25 bp, Homo sapien
gccacgataccatttcaggaacttt

SEQ ID NO: 4877414 - DNA, 25 bp, Homo sapien
tcactctaccgtgtgccactcgatg

SEQ ID NO: 4877415 - DNA, 25 bp, Homo sapien
tgctctaatgcgtgcctcggtctct

SEQ ID NO: 4877416 - DNA, 25 bp, Homo sapien
ttgccacaggcccatacgcgtctgt

SEQ ID NO: 4877417 - DNA, 25 bp, Homo sapien
cacgctcagggctgtcagatgttcc

SEQ ID NO: 4877418 - DNA, 25 bp, Homo sapien
gccacacgctcagggctgtcagatg

SEQ ID NO: 4877419 - DNA, 25 bp, Homo sapien
gaaatcgctgcagtctgcttagatg

SEQ ID NO: 4877420 - DNA, 25 bp, Homo sapien
catgcgatgttcttagccgttcctt

SEQ ID NO: 4877421 - DNA, 25 bp, Homo sapien
tctgctgtctaccatgtcatcttca

SEQ ID NO: 4877422 - DNA, 25 bp, Homo sapien
gccaaacgtgcaatctacctgaggg

SEQ ID NO: 4877423 - DNA, 25 bp, Homo sapien
ccaccgtgcgacctgctaaagggtt

SEQ ID NO: 4877424 - DNA, 25 bp, Homo sapien
gtcatcttcacacttgggccttctg

SEQ ID NO: 4877425 - DNA, 25 bp, Homo sapien
gaaggtggcgattagcagctccctg

SEQ ID NO: 4877426 - DNA, 25 bp, Homo sapien
atgtgagcgcccctatgactccagg

SEQ ID NO: 4877427 - DNA, 25 bp, Homo sapien
taataaatgattgccgggagccggt

SEQ ID NO: 4877428 - DNA, 25 bp, Homo sapien
tgtttctgtgttaccgtgggcggct

SEQ ID NO: 4877429 - DNA, 25 bp, Homo sapien
tcgaacccgacagagttcacgcgag

SEQ ID NO: 4877430 - DNA, 25 bp, Homo sapien
aatcttttcccgatgctcctgcgaa

SEQ ID NO: 4877431 - DNA, 25 bp, Homo sapien
gatctcgtcagatgtgtcttccgcc

SEQ ID NO: 4877432 - DNA, 25 bp, Homo sapien
aaaacgttccgtcttctcgcatgtc

SEQ ID NO: 4877433 - DNA, 25 bp, Homo sapien
gacattcaaaccacacccaaccatt

SEQ ID NO: 4877434 - DNA, 25 bp, Homo sapien
cagctcgccttttctagacattcaa

SEQ ID NO: 4877435 - DNA, 25 bp, Homo sapien
cgccttttctagacattcaaaccac

SEQ ID NO: 4877436 - DNA, 25 bp, Homo sapien
cttttctagacattcaaaccacacc

SEQ ID NO: 4877437 - DNA, 25 bp, Homo sapien
cacgctcagggctgtcagatgttcc

SEQ ID NO: 4877438 - DNA, 25 bp, Homo sapien
gccacacgctcagggctgtcagatg

SEQ ID NO: 4877439 - DNA, 25 bp, Homo sapien
catgcgatgttcttagccgttcctt

SEQ ID NO: 4877440 - DNA, 25 bp, Homo sapien
gaaatcgctgcagtctgcttagatg

SEQ ID NO: 4877441 - DNA, 25 bp, Homo sapien
tctgctgtctaccatgtcatcttca

SEQ ID NO: 4877442 - DNA, 25 bp, Homo sapien
ccaccgtgcgacctgctaaagggtt

SEQ ID NO: 4877443 - DNA, 25 bp, Homo sapien
gccaaacgtgcaatctacctgaggg

SEQ ID NO: 4877444 - DNA, 25 bp, Homo sapien
gtcatcttcacacttgggccttctg

SEQ ID NO: 4877445 - DNA, 25 bp, Homo sapien
tcgaacccgacagagttcacgcgag

SEQ ID NO: 4877446 - DNA, 25 bp, Homo sapien
aatcttttcccgatgctcctgcgaa

SEQ ID NO: 4877447 - DNA, 25 bp, Homo sapien
aaaacgttccgtcttctcgcatgtc

SEQ ID NO: 4877448 - DNA, 25 bp, Homo sapien
gatctcgtcagatgtgtcttccgcc

SEQ ID NO: 4877449 - DNA, 25 bp, Homo sapien
gctcgccttttctagacattcaaac

SEQ ID NO: 4877450 - DNA, 25 bp, Homo sapien
cgccttttctagacattcaaaccac

SEQ ID NO: 4877451 - DNA, 25 bp, Homo sapien
tcgccttttctagacattcaaacca

SEQ ID NO: 4877452 - DNA, 25 bp, Homo sapien
cagctcgccttttctagacattcaa

SEQ ID NO: 4877453 - DNA, 25 bp, Homo sapien
tcttgagtccgagggcagttctttt

SEQ ID NO: 4877454 - DNA, 25 bp, Homo sapien
ttcttttggcaagcgcagcaaggct

SEQ ID NO: 4877455 - DNA, 25 bp, Homo sapien
tgtcaggttggcattgaacgtggcc

SEQ ID NO: 4877456 - DNA, 25 bp, Homo sapien
ggcagctggctgaaaaacaggatcc

SEQ ID NO: 4877457 - DNA, 25 bp, Homo sapien
cgcacaccccgcaatcctcccagat

SEQ ID NO: 4877458 - DNA, 25 bp, Homo sapien
ttcacatgttgcctcccaaggcctt

SEQ ID NO: 4877459 - DNA, 25 bp, Homo sapien
ctcatcctcccgcacaccccgcaat

SEQ ID NO: 4877460 - DNA, 25 bp, Homo sapien
aaggccttgaatccttcccagctca

SEQ ID NO: 4877461 - DNA, 25 bp, Homo sapien
gaatcttgcccaatgtgcctgtcct

SEQ ID NO: 4877462 - DNA, 25 bp, Homo sapien
agatgcttctttcgcaggccacgca

SEQ ID NO: 4877463 - DNA, 25 bp, Homo sapien
gccccactgccaaacgtggaatctt

SEQ ID NO: 4877464 - DNA, 25 bp, Homo sapien
gacatgccatcccttcagatgcttc

SEQ ID NO: 4877465 - DNA, 25 bp, Homo sapien
ttcgatctcgtcagatgtgtcttcc

SEQ ID NO: 4877466 - DNA, 25 bp, Homo sapien
gatctcgtcagatgtgtcttccgcc

SEQ ID NO: 4877467 - DNA, 25 bp, Homo sapien
tcagatgtgtcttccgccaaccact

SEQ ID NO: 4877468 - DNA, 25 bp, Homo sapien
ctgcaaaacattcgatctcgtcaga

SEQ ID NO: 4877469 - DNA, 25 bp, Homo sapien
gaaaacaggcaatctactcccagtg

SEQ ID NO: 4877470 - DNA, 25 bp, Homo sapien
cagatgtctcctcggccaaaacgtt

SEQ ID NO: 4877471 - DNA, 25 bp, Homo sapien
ttccttcgggaaaacaggcaatcta

SEQ ID NO: 4877472 - DNA, 25 bp, Homo sapien
ttctgggaatcctgcgagcttctca

SEQ ID NO: 4877473 - DNA, 25 bp, Homo sapien
ggtcatctactatttacagccacga

SEQ ID NO: 4877474 - DNA, 25 bp, Homo sapien
aattctggtgcctatggcttcagcc

SEQ ID NO: 4877475 - DNA, 25 bp, Homo sapien
gcttcagccgctcttacttgggtca

SEQ ID NO: 4877476 - DNA, 25 bp, Homo sapien
tgaacccgacagagttcacatgagc

SEQ ID NO: 4877477 - DNA, 25 bp, Homo sapien
gagaacacgccgactgcagctgttg

SEQ ID NO: 4877478 - DNA, 25 bp, Homo sapien
cttcagagaacacgccgactgcagc

SEQ ID NO: 4877479 - DNA, 25 bp, Homo sapien
agctgttgctacttggcccgccagc

SEQ ID NO: 4877480 - DNA, 25 bp, Homo sapien
cgccagcaaagcagacatgaagtaa

SEQ ID NO: 4877481 - DNA, 25 bp, Homo sapien
ggatctttatcgttccctcaaccca

SEQ ID NO: 4877482 - DNA, 25 bp, Homo sapien
tagcagtcggcatgtgctgtaaccc

SEQ ID NO: 4877483 - DNA, 25 bp, Homo sapien
tccccagtgactggcttagcagtcg

SEQ ID NO: 4877484 - DNA, 25 bp, Homo sapien
gaaatgcaaggttatcaggatcttt

SEQ ID NO: 4877485 - DNA, 25 bp, Homo sapien
gctccctatccacggaatttcttct

SEQ ID NO: 4877486 - DNA, 25 bp, Homo sapien
ctggctccctatccacggaatttct

SEQ ID NO: 4877487 - DNA, 25 bp, Homo sapien
gctcaaaagcttcccgtgaatctct

SEQ ID NO: 4877488 - DNA, 25 bp, Homo sapien
gcttcccgtgaatctctgcaggaaa

SEQ ID NO: 4877489 - DNA, 25 bp, Homo sapien
gttaaatgcttctggaatcgacgct

SEQ ID NO: 4877490 - DNA, 25 bp, Homo sapien
tcacgccgtgactggaaagtcctaa

SEQ ID NO: 4877491 - DNA, 25 bp, Homo sapien
ttcagcagacatgacagagaccacc

SEQ ID NO: 4877492 - DNA, 25 bp, Homo sapien
aatcgacgctttaccagaggccagt

SEQ ID NO: 4877493 - DNA, 25 bp, Homo sapien
gccctattcaggatcctgggaaaga

SEQ ID NO: 4877494 - DNA, 25 bp, Homo sapien
ggatgaacgggggatgccctattca

SEQ ID NO: 4877495 - DNA, 25 bp, Homo sapien
gcccaagcatgatggacacagtcct

SEQ ID NO: 4877496 - DNA, 25 bp, Homo sapien
gataagagagcccaagcatgatgga

SEQ ID NO: 4877497 - DNA, 25 bp, Homo sapien
tcatgacgagatggcaccgggtttg

SEQ ID NO: 4877498 - DNA, 25 bp, Homo sapien
tccagtgggtgatcatgacgagatg

SEQ ID NO: 4877499 - DNA, 25 bp, Homo sapien
tggcaccgggtttggcagggaaaca

SEQ ID NO: 4877500 - DNA, 25 bp, Homo sapien
tgggtgatcatgacgagatggcacc

SEQ ID NO: 4877501 - DNA, 25 bp, Homo sapien
gccacaggtgcaacagaacgatagc

SEQ ID NO: 4877502 - DNA, 25 bp, Homo sapien
agaccaaggctgatcccaggctaac

SEQ ID NO: 4877503 - DNA, 25 bp, Homo sapien
cacacgtccattagagcagggagga

SEQ ID NO: 4877504 - DNA, 25 bp, Homo sapien
gggcacatggtaacaacggttcatt

SEQ ID NO: 4877505 - DNA, 25 bp, Homo sapien
tttctctactcacagccatgccctt

SEQ ID NO: 4877506 - DNA, 25 bp, Homo sapien
cacagccatgcccttctccagatgc

SEQ ID NO: 4877507 - DNA, 25 bp, Homo sapien
gcaaggctttccgtgagtcctctcg

SEQ ID NO: 4877508 - DNA, 25 bp, Homo sapien
aaggctttccgtgagtcctctcgct

SEQ ID NO: 4877509 - DNA, 25 bp, Homo sapien
gacaaccattagatgacggccaggc

SEQ ID NO: 4877510 - DNA, 25 bp, Homo sapien
gaaatgtcagacaaccattagatga

SEQ ID NO: 4877511 - DNA, 25 bp, Homo sapien
accattagatgacggccaggcagtt

SEQ ID NO: 4877512 - DNA, 25 bp, Homo sapien
tgtcagacaaccattagatgacggc

SEQ ID NO: 4877513 - DNA, 25 bp, Homo sapien
tctgccaaacactgaatcttctcgg

SEQ ID NO: 4877514 - DNA, 25 bp, Homo sapien
atggcccttctgtcacacgttcacg

SEQ ID NO: 4877515 - DNA, 25 bp, Homo sapien
gctgtccatgcaatgttcttaagtc

SEQ ID NO: 4877516 - DNA, 25 bp, Homo sapien
cacacgttcacgtctgacagaggtt

SEQ ID NO: 4877517 - DNA, 25 bp, Homo sapien
atcatctcaggtgttcctggcgccc

SEQ ID NO: 4877518 - DNA, 25 bp, Homo sapien
catctcaggtgttcctggcgcccac

SEQ ID NO: 4877519 - DNA, 25 bp, Homo sapien
gccatgacatcatctcaggtgttcc

SEQ ID NO: 4877520 - DNA, 25 bp, Homo sapien
cactgtttgccatgacatcatctca

SEQ ID NO: 4877521 - DNA, 25 bp, Homo sapien
ggtgaacagccccactcaagggaag

SEQ ID NO: 4877522 - DNA, 25 bp, Homo sapien
tattgacaaccctgattggaacccc

SEQ ID NO: 4877523 - DNA, 25 bp, Homo sapien
ttctttgagaacactcgaccggtgg

SEQ ID NO: 4877524 - DNA, 25 bp, Homo sapien
cgaccggtggagtaagaatgcctca

SEQ ID NO: 4877525 - DNA, 25 bp, Homo sapien
gcttctcctcagacaaaccctaact

SEQ ID NO: 4877526 - DNA, 25 bp, Homo sapien
ctggagggatgttatgcttctcctc

SEQ ID NO: 4877527 - DNA, 25 bp, Homo sapien
tcagacaaaccctaactgcagctga

SEQ ID NO: 4877528 - DNA, 25 bp, Homo sapien
tcctcagacaaaccctaactgcagc

SEQ ID NO: 4877529 - DNA, 25 bp, Homo sapien
aatgaattggaaaatccctgcccaa

SEQ ID NO: 4877530 - DNA, 25 bp, Homo sapien
cacttcaagtgcctgccgggtgcat

SEQ ID NO: 4877531 - DNA, 25 bp, Homo sapien
caatgattatttacgttggaatggc

SEQ ID NO: 4877532 - DNA, 25 bp, Homo sapien
aagaaaccttccttagcattgaggg

SEQ ID NO: 4877533 - DNA, 25 bp, Homo sapien
aacacatttatttgtggagcatttg

SEQ ID NO: 4877534 - DNA, 25 bp, Homo sapien
acacatttatttgtggagcatttgg

SEQ ID NO: 4877535 - DNA, 25 bp, Homo sapien
cacatttatttgtggagcatttggc

SEQ ID NO: 4877536 - DNA, 25 bp, Homo sapien
caaggtcagagtctgattatgatat

SEQ ID NO: 4877537 - DNA, 25 bp, Homo sapien
tatgcagtttgatgttccattcact

SEQ ID NO: 4877538 - DNA, 25 bp, Homo sapien
tctttcctcttcgttgtcaaactca

SEQ ID NO: 4877539 - DNA, 25 bp, Homo sapien
ttatgatatgttggcaatcatcacc

SEQ ID NO: 4877540 - DNA, 25 bp, Homo sapien
gggaaccagggaatgacatctatca

SEQ ID NO: 4877541 - DNA, 25 bp, Homo sapien
tgacatctatcatccatcccataag

SEQ ID NO: 4877542 - DNA, 25 bp, Homo sapien
ggaaccagggaatgacatctatcat

SEQ ID NO: 4877543 - DNA, 25 bp, Homo sapien
atgacatctatcatccatcccataa

SEQ ID NO: 4877544 - DNA, 25 bp, Homo sapien
gaggttacagacacaatcaagcttg

SEQ ID NO: 4877545 - DNA, 25 bp, Homo sapien
gaaaagcacacttctgaggtctgac

SEQ ID NO: 4877546 - DNA, 25 bp, Homo sapien
ggtcaacacgtgtaaggctcagtcc

SEQ ID NO: 4877547 - DNA, 25 bp, Homo sapien
tacaggtgtttgaaatctaggctcc

SEQ ID NO: 4877548 - DNA, 25 bp, Homo sapien
taagatgtcaagagacttttcctga

SEQ ID NO: 4877549 - DNA, 25 bp, Homo sapien
ttttgatacttatactgctatggcc

SEQ ID NO: 4877550 - DNA, 25 bp, Homo sapien
gaattcgtattagaaatctcaactc

SEQ ID NO: 4877551 - DNA, 25 bp, Homo sapien
ctcaactccaagttgggaatagatg

SEQ ID NO: 4877552 - DNA, 25 bp, Homo sapien
caaggtactaacagtaacaatgtct

SEQ ID NO: 4877553 - DNA, 25 bp, Homo sapien
caattggctcaaataaacgtatcag

SEQ ID NO: 4877554 - DNA, 25 bp, Homo sapien
gactacaacattccccaaggtacta

SEQ ID NO: 4877555 - DNA, 25 bp, Homo sapien
gggcattagatctatcctaccctta

SEQ ID NO: 4877556 - DNA, 25 bp, Homo sapien
atagcaaggttatgactagagagct

SEQ ID NO: 4877557 - DNA, 25 bp, Homo sapien
tggaaatcatttttgctggcgcaaa

SEQ ID NO: 4877558 - DNA, 25 bp, Homo sapien
taccaaagtttgctctaataactat

SEQ ID NO: 4877559 - DNA, 25 bp, Homo sapien
gactagagagctcaatttatacatt

SEQ ID NO: 4877560 - DNA, 25 bp, Homo sapien
catatgtgcagtgctctaatggagg

SEQ ID NO: 4877561 - DNA, 25 bp, Homo sapien
tgtcattcagactaagccaacgttc

SEQ ID NO: 4877562 - DNA, 25 bp, Homo sapien
tgggctagacatgctcctgatcagg

SEQ ID NO: 4877563 - DNA, 25 bp, Homo sapien
caaccaggtttaccagtgcaccact

SEQ ID NO: 4877564 - DNA, 25 bp, Homo sapien
cagcaagtacctggttcagaaggcc

SEQ ID NO: 4877565 - DNA, 25 bp, Homo sapien
gaaggccgccaagcttgttgaactc

SEQ ID NO: 4877566 - DNA, 25 bp, Homo sapien
gttcatgacttaatgtgtcttgtag

SEQ ID NO: 4877567 - DNA, 25 bp, Homo sapien
caagaatagttcatgacttaatgtg

SEQ ID NO: 4877568 - DNA, 25 bp, Homo sapien
tcattttctatgtcgcactgctcac

SEQ ID NO: 4877569 - DNA, 25 bp, Homo sapien
gaagtcttgcatcacaataaatagc

SEQ ID NO: 4877570 - DNA, 25 bp, Homo sapien
gattatgggcaactacgcagagttc

SEQ ID NO: 4877571 - DNA, 25 bp, Homo sapien
cacaataaatagctgcctttaagga

SEQ ID NO: 4877572 - DNA, 25 bp, Homo sapien
cataaatgcatggttagtagttgtg

SEQ ID NO: 4877573 - DNA, 25 bp, Homo sapien
tattaatcagagtcacatgggtata

SEQ ID NO: 4877574 - DNA, 25 bp, Homo sapien
ggttagtagttgtgtgcatccagtg

SEQ ID NO: 4877575 - DNA, 25 bp, Homo sapien
gcatggttagtagttgtgtgcatcc

SEQ ID NO: 4877576 - DNA, 25 bp, Homo sapien
gcctgattacttcatagagccccat

SEQ ID NO: 4877577 - DNA, 25 bp, Homo sapien
cagacgacttgtgccccaagctttc

SEQ ID NO: 4877578 - DNA, 25 bp, Homo sapien
ttccacttaggcctgattacttcat

SEQ ID NO: 4877579 - DNA, 25 bp, Homo sapien
catcaacagacgacttgtgccccaa

SEQ ID NO: 4877580 - DNA, 25 bp, Homo sapien
aagttaccgcttctggatagccatt

SEQ ID NO: 4877581 - DNA, 25 bp, Homo sapien
gcaaagttaccgcttctggatagcc

SEQ ID NO: 4877582 - DNA, 25 bp, Homo sapien
ccagcaaagttaccgcttctggata

SEQ ID NO: 4877583 - DNA, 25 bp, Homo sapien
caccagcaaagttaccgcttctgga

SEQ ID NO: 4877584 - DNA, 25 bp, Homo sapien
tccataggttcacaaattagttaca

SEQ ID NO: 4877585 - DNA, 25 bp, Homo sapien
ctgtcagtattagaccaagaaacac

SEQ ID NO: 4877586 - DNA, 25 bp, Homo sapien
ctggctactatatatcttcatcaga

SEQ ID NO: 4877587 - DNA, 25 bp, Homo sapien
ggtgtcgtgttttcaccgtcacaca

SEQ ID NO: 4877588 - DNA, 25 bp, Homo sapien
cattcacagaagagcatgcttgagc

SEQ ID NO: 4877589 - DNA, 25 bp, Homo sapien
tatctggataggcaccaaagtccag

SEQ ID NO: 4877590 - DNA, 25 bp, Homo sapien
gaccctaacgcatgtcagtgttaaa

SEQ ID NO: 4877591 - DNA, 25 bp, Homo sapien
tattctcactatagacagcacagtg

SEQ ID NO: 4877592 - DNA, 25 bp, Homo sapien
tcagcagactgggtactggcatgac

SEQ ID NO: 4877593 - DNA, 25 bp, Homo sapien
aggcttcctgtgctgaaatgtctat

SEQ ID NO: 4877594 - DNA, 25 bp, Homo sapien
aaggttgtccagtaaagtttcatgc

SEQ ID NO: 4877595 - DNA, 25 bp, Homo sapien
tattgagcattggtctcagcagact

SEQ ID NO: 4877596 - DNA, 25 bp, Homo sapien
gaaatcttaaacttccatacctgag

SEQ ID NO: 4877597 - DNA, 25 bp, Homo sapien
agaaatcttaaacttccatacctga

SEQ ID NO: 4877598 - DNA, 25 bp, Homo sapien
tagaaatcttaaacttccatacctg

SEQ ID NO: 4877599 - DNA, 25 bp, Homo sapien
atagaaatcttaaacttccatacct

SEQ ID NO: 4877600 - DNA, 25 bp, Homo sapien
gtggagaaggtgggaagtgacagag

SEQ ID NO: 4877601 - DNA, 25 bp, Homo sapien
gagaggtggagaaggtgggaagtga

SEQ ID NO: 4877602 - DNA, 25 bp, Homo sapien
gaggtggagaaggtgggaagtgaca

SEQ ID NO: 4877603 - DNA, 25 bp, Homo sapien
ggtggagaaggtgggaagtgacaga

SEQ ID NO: 4877604 - DNA, 25 bp, Homo sapien
gactgcctgccacactttggctgga

SEQ ID NO: 4877605 - DNA, 25 bp, Homo sapien
tctggtaaccaacggccagagagca

SEQ ID NO: 4877606 - DNA, 25 bp, Homo sapien
agcatctggtaaccaacggccagag

SEQ ID NO: 4877607 - DNA, 25 bp, Homo sapien
gtgggactgcctgccacactttggc

SEQ ID NO: 4877608 - DNA, 25 bp, Homo sapien
ccacagacagggctgttcaggaggg

SEQ ID NO: 4877609 - DNA, 25 bp, Homo sapien
agacagggctgttcaggagggccct

SEQ ID NO: 4877610 - DNA, 25 bp, Homo sapien
acagacagggctgttcaggagggcc

SEQ ID NO: 4877611 - DNA, 25 bp, Homo sapien
ctgccacagacagggctgttcagga

SEQ ID NO: 4877612 - DNA, 25 bp, Homo sapien
tgttaaacagtcaagatcagcatgg

SEQ ID NO: 4877613 - DNA, 25 bp, Homo sapien
cagctccttggttttgatctttcag

SEQ ID NO: 4877614 - DNA, 25 bp, Homo sapien
gacgagagcatttgactgcaagaga

SEQ ID NO: 4877615 - DNA, 25 bp, Homo sapien
ggttgagggcccaattttctctcca

SEQ ID NO: 4877616 - DNA, 25 bp, Homo sapien
ctataagggggattagatatgaggt

SEQ ID NO: 4877617 - DNA, 25 bp, Homo sapien
aagcatgtagattccaattgaagag

SEQ ID NO: 4877618 - DNA, 25 bp, Homo sapien
tagatatggcatggaggggctttaa

SEQ ID NO: 4877619 - DNA, 25 bp, Homo sapien
caggctatagtctgggtgtaggtat

SEQ ID NO: 4877620 - DNA, 25 bp, Homo sapien
gagaggctgtagtaagcatgtagat

SEQ ID NO: 4877621 - DNA, 25 bp, Homo sapien
gattctgttgggatgagccatagct

SEQ ID NO: 4877622 - DNA, 25 bp, Homo sapien
tccatatgtgctgtttctagcagag

SEQ ID NO: 4877623 - DNA, 25 bp, Homo sapien
ctagggagctagtaagattctgttg

SEQ ID NO: 4877624 - DNA, 25 bp, Homo sapien
gagccatagcttgtggcttcgtcca

SEQ ID NO: 4877625 - DNA, 25 bp, Homo sapien
caagaggaaggccaagacgtggctt

SEQ ID NO: 4877626 - DNA, 25 bp, Homo sapien
gagctgattataggagaattctttt

SEQ ID NO: 4877627 - DNA, 25 bp, Homo sapien
acaacaagaggaaggccaagacgtg

SEQ ID NO: 4877628 - DNA, 25 bp, Homo sapien
aggccaagacgtggcttttaggaag

SEQ ID NO: 4877629 - DNA, 25 bp, Homo sapien
ctcacctgattttccaggtcagtgt

SEQ ID NO: 4877630 - DNA, 25 bp, Homo sapien
cctgattttccaggtcagtgtcagt

SEQ ID NO: 4877631 - DNA, 25 bp, Homo sapien
attttccaggtcagtgtcagtgtgg

SEQ ID NO: 4877632 - DNA, 25 bp, Homo sapien
tgattttccaggtcagtgtcagtgt

SEQ ID NO: 4877633 - DNA, 25 bp, Homo sapien
agccccgacgggaagagaggcattt

SEQ ID NO: 4877634 - DNA, 25 bp, Homo sapien
ctgtgagcggtgaagcagctgggat

SEQ ID NO: 4877635 - DNA, 25 bp, Homo sapien
tggtaataagcaacagtttcctgcc

SEQ ID NO: 4877636 - DNA, 25 bp, Homo sapien
tagactgtgcagctgcgtctggccc

SEQ ID NO: 4877637 - DNA, 25 bp, Homo sapien
cacaaagggttgagggttgccactg

SEQ ID NO: 4877638 - DNA, 25 bp, Homo sapien
caggtgttagctacagttgaggcca

SEQ ID NO: 4877639 - DNA, 25 bp, Homo sapien
gatttaggctcagcggcctcctctg

SEQ ID NO: 4877640 - DNA, 25 bp, Homo sapien
tgaaggtcgcagagtgcagcgcctt

SEQ ID NO: 4877641 - DNA, 25 bp, Homo sapien
aagggtcgccgagcgtactgccctc

SEQ ID NO: 4877642 - DNA, 25 bp, Homo sapien
ctagggtccactctgccttggcctg

SEQ ID NO: 4877643 - DNA, 25 bp, Homo sapien
gggcttgtccccgagtacagtcaag

SEQ ID NO: 4877644 - DNA, 25 bp, Homo sapien
cttacagagctaggtagtgggcgct

SEQ ID NO: 4877645 - DNA, 25 bp, Homo sapien
tgggttgccactgcggctggagcgc

SEQ ID NO: 4877646 - DNA, 25 bp, Homo sapien
gctggagcgcaccatgtgcaggtgg

SEQ ID NO: 4877647 - DNA, 25 bp, Homo sapien
aaactgggcgtcttcacagagtctg

SEQ ID NO: 4877648 - DNA, 25 bp, Homo sapien
cggcagggccgtgggttgccactgc

SEQ ID NO: 4877649 - DNA, 25 bp, Homo sapien
ggcagttgcctccactactacagcg

SEQ ID NO: 4877650 - DNA, 25 bp, Homo sapien
cagcagggtcggcagttgcctccac

SEQ ID NO: 4877651 - DNA, 25 bp, Homo sapien
tgcgggcttcggcgcgtggctgcct

SEQ ID NO: 4877652 - DNA, 25 bp, Homo sapien
gggtcggcagttgcctccactacta

SEQ ID NO: 4877653 - DNA, 25 bp, Homo sapien
cagacctcctgagagtcgccaagtg

SEQ ID NO: 4877654 - DNA, 25 bp, Homo sapien
aatagctgagcccacggtggaagct

SEQ ID NO: 4877655 - DNA, 25 bp, Homo sapien
aaggtcgggatttgccacaggtgct

SEQ ID NO: 4877656 - DNA, 25 bp, Homo sapien
tagggctcgctcttccatagctcgc

SEQ ID NO: 4877657 - DNA, 25 bp, Homo sapien
ggcccagggcgctggactctttgca

SEQ ID NO: 4877658 - DNA, 25 bp, Homo sapien
gccatcgcgatggggatgagggccg

SEQ ID NO: 4877659 - DNA, 25 bp, Homo sapien
ggactctttgcagccatcgcgatgg

SEQ ID NO: 4877660 - DNA, 25 bp, Homo sapien
catcgcgatggggatgagggccggt

SEQ ID NO: 4877661 - DNA, 25 bp, Homo sapien
tgcagaagcgcggactcgcaggccg

SEQ ID NO: 4877662 - DNA, 25 bp, Homo sapien
ctgctcttctttggccggtgcagaa

SEQ ID NO: 4877663 - DNA, 25 bp, Homo sapien
gggtttggctgagcgccgattcccg

SEQ ID NO: 4877664 - DNA, 25 bp, Homo sapien
tcgcaggccgtgggcattgtgcagc

SEQ ID NO: 4877665 - DNA, 25 bp, Homo sapien
tgcaactgcgtgacttaggcgccac

SEQ ID NO: 4877666 - DNA, 25 bp, Homo sapien
tggcacctcggaaggtaatggcccc

SEQ ID NO: 4877667 - DNA, 25 bp, Homo sapien
tgctgaccccgccatattcaggtgg

SEQ ID NO: 4877668 - DNA, 25 bp, Homo sapien
tggccctgtggaccgcgatagtagt

SEQ ID NO: 4877669 - DNA, 25 bp, Homo sapien
ggcccggctatcggcttcagagacg

SEQ ID NO: 4877670 - DNA, 25 bp, Homo sapien
ggcttcagagacgccacaactagcc

SEQ ID NO: 4877671 - DNA, 25 bp, Homo sapien
gctatcggcttcagagacgccacaa

SEQ ID NO: 4877672 - DNA, 25 bp, Homo sapien
caactagccctcgcccttcccgccg

SEQ ID NO: 4877673 - DNA, 25 bp, Homo sapien
gaaaagatgcggttattccaggagc

SEQ ID NO: 4877674 - DNA, 25 bp, Homo sapien
gtcagaaaagatgcggttattccag

SEQ ID NO: 4877675 - DNA, 25 bp, Homo sapien
atgcggttattccaggagctcaggg

SEQ ID NO: 4877676 - DNA, 25 bp, Homo sapien
aagatgcggttattccaggagctca

SEQ ID NO: 4877677 - DNA, 25 bp, Homo sapien
tcttcttgtaggtttcagactggcc

SEQ ID NO: 4877678 - DNA, 25 bp, Homo sapien
cagttcccgacacatgttcttcttg

SEQ ID NO: 4877679 - DNA, 25 bp, Homo sapien
acagcccgcagttcccgacacatgt

SEQ ID NO: 4877680 - DNA, 25 bp, Homo sapien
cttcttgtaggtttcagactggcct

SEQ ID NO: 4877681 - DNA, 25 bp, Homo sapien
accaggacggcccgccccacacact

SEQ ID NO: 4877682 - DNA, 25 bp, Homo sapien
ggaccaggacggcccgccccacaca

SEQ ID NO: 4877683 - DNA, 25 bp, Homo sapien
gaccaggacggcccgccccacacac

SEQ ID NO: 4877684 - DNA, 25 bp, Homo sapien
tccaaggcgtccacatctcaggcgc

SEQ ID NO: 4877685 - DNA, 25 bp, Homo sapien
taaagatgacttgggccctccgcct

SEQ ID NO: 4877686 - DNA, 25 bp, Homo sapien
tcataaagatgacttgggccctccg

SEQ ID NO: 4877687 - DNA, 25 bp, Homo sapien
cgcctccaaggcgtccacatctcag

SEQ ID NO: 4877688 - DNA, 25 bp, Homo sapien
tctaagctccctcagtaaagaacat

SEQ ID NO: 4877689 - DNA, 25 bp, Homo sapien
cataggtcacttgcagatctgaaag

SEQ ID NO: 4877690 - DNA, 25 bp, Homo sapien
cagctgttagcaaactatttgtgga

SEQ ID NO: 4877691 - DNA, 25 bp, Homo sapien
gatcaaccttcagaaggcttgcttg

SEQ ID NO: 4877692 - DNA, 25 bp, Homo sapien
taagcagcagtataatatcactgtt

SEQ ID NO: 4877693 - DNA, 25 bp, Homo sapien
catttgaaaggccatcagcaacttt

SEQ ID NO: 4877694 - DNA, 25 bp, Homo sapien
tccatttgaaaggccatcagcaact

SEQ ID NO: 4877695 - DNA, 25 bp, Homo sapien
ttgaaaggccatcagcaactttaag

SEQ ID NO: 4877696 - DNA, 25 bp, Homo sapien
tactaactagcccaaaaaagcatga

SEQ ID NO: 4877697 - DNA, 25 bp, Homo sapien
cataaaaggtgcagatagtagccaa

SEQ ID NO: 4877698 - DNA, 25 bp, Homo sapien
cagcactaccctgagactctgtaga

SEQ ID NO: 4877699 - DNA, 25 bp, Homo sapien
gaaaagatcctcaccagataagccc

SEQ ID NO: 4877700 - DNA, 25 bp, Homo sapien
agaagctcaggatagtgagtttcat

SEQ ID NO: 4877701 - DNA, 25 bp, Homo sapien
gagtctggagacattgaggtcctcc

SEQ ID NO: 4877702 - DNA, 25 bp, Homo sapien
gtctggagacattgaggtcctcctc

SEQ ID NO: 4877703 - DNA, 25 bp, Homo sapien
caggatagtgagtttcatctcagag

SEQ ID NO: 4877704 - DNA, 25 bp, Homo sapien
tataaagcagttaggagatctccag

SEQ ID NO: 4877705 - DNA, 25 bp, Homo sapien
tcttactaatgggtcagagtctcac

SEQ ID NO: 4877706 - DNA, 25 bp, Homo sapien
caaggtccacctctgtactgagaag

SEQ ID NO: 4877707 - DNA, 25 bp, Homo sapien
ttaaactggttatgaagtcagccca

SEQ ID NO: 4877708 - DNA, 25 bp, Homo sapien
agctacctgacttagcagcctccat

SEQ ID NO: 4877709 - DNA, 25 bp, Homo sapien
agccagctacctgacttagcagcct

SEQ ID NO: 4877710 - DNA, 25 bp, Homo sapien
gcccagccagctacctgacttagca

SEQ ID NO: 4877711 - DNA, 25 bp, Homo sapien
cagctacctgacttagcagcctcca
